United States Patent Application Publication US 2008/0113351 A1 - sequence listing, part 29

SEQ ID NO: 709969 - DNA, 19 bp, Mus musculus
  siRNA target sequence for Gfra4 (NM_020014.1,678-696).
cttggatggtgccatacaa

SEQ ID NO: 709970 - DNA, 19 bp, Mus musculus
  siRNA target sequence for Gfra4 (NM_020014.1,865-883).
ggccctgctctgattagga

SEQ ID NO: 709971 - DNA, 19 bp, Mus musculus
  siRNA target sequence for Gfra4 (NM_020014.1,866-884).
gccctgctctgattaggaa

SEQ ID NO: 709972 - DNA, 19 bp, Mus musculus
  siRNA target sequence for Gfra4 (NM_020014.1,871-889).
gctctgattaggaacatga

SEQ ID NO: 709973 - DNA, 19 bp, Mus musculus
  siRNA target sequence for Bat2 (NM_020027.1,211-229).
ggcaatgaccccaatgtct

SEQ ID NO: 709974 - DNA, 19 bp, Mus musculus
  siRNA target sequence for Bat2 (NM_020027.1,274-292).
cagtccgaccccaagagtt

SEQ ID NO: 709975 - DNA, 19 bp, Mus musculus
  siRNA target sequence for Bat2 (NM_020027.1,403-421).
gttccaagcggggtaaagt

SEQ ID NO: 709976 - DNA, 19 bp, Mus musculus
  siRNA target sequence for Bat2 (NM_020027.1,480-498).
cctactgtcgcgattctct

SEQ ID NO: 709977 - DNA, 19 bp, Mus musculus
  siRNA target sequence for Bat2 (NM_020027.1,662-680).
cggactccaaacttcatca

SEQ ID NO: 709978 - DNA, 19 bp, Mus musculus
  siRNA target sequence for Bat2 (NM_020027.1,878-896).
caccaatgcgccttgtaga

SEQ ID NO: 709979 - DNA, 19 bp, Mus musculus
  siRNA target sequence for Bat2 (NM_020027.1,899-917).
ctgtgggtcggccttctat

SEQ ID NO: 709980 - DNA, 19 bp, Mus musculus
  siRNA target sequence for Bat2 (NM_020027.1,903-921).
gggtcggccttctattctt

SEQ ID NO: 709981 - DNA, 19 bp, Mus musculus
  siRNA target sequence for Bat2 (NM_020027.1,904-922).
ggtcggccttctattctta

SEQ ID NO: 709982 - DNA, 19 bp, Mus musculus
  siRNA target sequence for Bat2 (NM_020027.1,905-923).
gtcggccttctattcttaa

SEQ ID NO: 709983 - DNA, 19 bp, Mus musculus
  siRNA target sequence for Bat2 (NM_020027.1,908-926).
ggccttctattcttaaaga

SEQ ID NO: 709984 - DNA, 19 bp, Mus musculus
  siRNA target sequence for Bat2 (NM_020027.1,919-937).
cttaaagaggataatctta

SEQ ID NO: 709985 - DNA, 19 bp, Mus musculus
  siRNA target sequence for Bat2 (NM_020027.1,954-972).
ggaccaggaaaatgatgat

SEQ ID NO: 709986 - DNA, 19 bp, Mus musculus
  siRNA target sequence for Bat2 (NM_020027.1,986-1004).
cccatgaagaggttgacta

SEQ ID NO: 709987 - DNA, 19 bp, Mus musculus
  siRNA target sequence for Bat2 (NM_020027.1,994-1012).
gaggttgactatactgaaa

SEQ ID NO: 709988 - DNA, 19 bp, Mus musculus
  siRNA target sequence for Bat2 (NM_020027.1,1458-1476).
gaaacttaagcgtcttgat

SEQ ID NO: 709989 - DNA, 19 bp, Mus musculus
  siRNA target sequence for Bat2 (NM_020027.1,1462-1480).
cttaagcgtcttgatgaaa

SEQ ID NO: 709990 - DNA, 19 bp, Mus musculus
  siRNA target sequence for Bat2 (NM_020027.1,1467-1485).
gcgtcttgatgaaaagttt

SEQ ID NO: 709991 - DNA, 19 bp, Mus musculus
  siRNA target sequence for Bat2 (NM_020027.1,1559-1577).
ctgtagtccccaaagaaat

SEQ ID NO: 709992 - DNA, 19 bp, Mus musculus
  siRNA target sequence for Bat2 (NM_020027.1,2138-2156).
caatgcctccaatgaactt

SEQ ID NO: 709993 - DNA, 19 bp, Mus musculus
  siRNA target sequence for Bat2 (NM_020027.1,2369-2387).
cctgggttggagatgtctt

SEQ ID NO: 709994 - DNA, 19 bp, Mus musculus
  siRNA target sequence for Bat2 (NM_020027.1,2374-2392).
gttggagatgtctttacca

SEQ ID NO: 709995 - DNA, 19 bp, Mus musculus
  siRNA target sequence for Bat2 (NM_020027.1,2494-2512).
ccaccttatctggctaatt

SEQ ID NO: 709996 - DNA, 19 bp, Mus musculus
  siRNA target sequence for Bat2 (NM_020027.1,2495-2513).
caccttatctggctaatta

SEQ ID NO: 709997 - DNA, 19 bp, Mus musculus
  siRNA target sequence for Bat2 (NM_020027.1,2505-2523).
ggctaattatccaggtttt

SEQ ID NO: 709998 - DNA, 19 bp, Mus musculus
  siRNA target sequence for Bat2 (NM_020027.1,2604-2622).
ctggcctccaggcaatgat

SEQ ID NO: 709999 - DNA, 19 bp, Mus musculus
  siRNA target sequence for Bat2 (NM_020027.1,2743-2761).
ccacggagagagaatcgta

SEQ ID NO: 710000 - DNA, 19 bp, Mus musculus
  siRNA target sequence for Bat2 (NM_020027.1,2837-2855).
gaagagctgggcctataaa

SEQ ID NO: 710001 - DNA, 19 bp, Mus musculus
  siRNA target sequence for Bat2 (NM_020027.1,2891-2909).
ctcctaagtccctagaaca

SEQ ID NO: 710002 - DNA, 19 bp, Mus musculus
  siRNA target sequence for Bat2 (NM_020027.1,3025-3043).
cgggactattcctatgaaa

SEQ ID NO: 710003 - DNA, 19 bp, Mus musculus
  siRNA target sequence for Bat2 (NM_020027.1,3027-3045).
ggactattcctatgaaaga

SEQ ID NO: 710004 - DNA, 19 bp, Mus musculus
  siRNA target sequence for Bat2 (NM_020027.1,3030-3048).
ctattcctatgaaagagta

SEQ ID NO: 710005 - DNA, 19 bp, Mus musculus
  siRNA target sequence for Bat2 (NM_020027.1,3137-3155).
gagcccggagccgtgaatt

SEQ ID NO: 710006 - DNA, 19 bp, Mus musculus
  siRNA target sequence for Bat2 (NM_020027.1,3146-3164).
gccgtgaattccgaagtta

SEQ ID NO: 710007 - DNA, 19 bp, Mus musculus
  siRNA target sequence for Bat2 (NM_020027.1,3197-3215).
gtggttcaggcggaacaaa

SEQ ID NO: 710008 - DNA, 19 bp, Mus musculus
  siRNA target sequence for Bat2 (NM_020027.1,3257-3275).
gaagtgagggttcagaata

SEQ ID NO: 710009 - DNA, 19 bp, Mus musculus
  siRNA target sequence for Bat2 (NM_020027.1,3593-3611).
gtcctttgcctccaagtaa

SEQ ID NO: 710010 - DNA, 19 bp, Mus musculus
  siRNA target sequence for Bat2 (NM_020027.1,3602-3620).
ctccaagtaaagaaccttt

SEQ ID NO: 710011 - DNA, 19 bp, Mus musculus
  siRNA target sequence for Bat2 (NM_020027.1,3756-3774).
ccgaaggctgaaacaagaa

SEQ ID NO: 710012 - DNA, 19 bp, Mus musculus
  siRNA target sequence for Bat2 (NM_020027.1,4109-4127).
gccaacgagccaaggattt

SEQ ID NO: 710013 - DNA, 19 bp, Mus musculus
  siRNA target sequence for Bat2 (NM_020027.1,4111-4129).
caacgagccaaggatttga

SEQ ID NO: 710014 - DNA, 19 bp, Mus musculus
  siRNA target sequence for Bat2 (NM_020027.1,4401-4419).
caaccctgctggaatccaa

SEQ ID NO: 710015 - DNA, 19 bp, Mus musculus
  siRNA target sequence for Bat2 (NM_020027.1,4440-4458).
cagccgccaaggaaatgta

SEQ ID NO: 710016 - DNA, 19 bp, Mus musculus
  siRNA target sequence for Bat2 (NM_020027.1,4554-4572).
ggccagcagcgctatcagt

SEQ ID NO: 710017 - DNA, 19 bp, Mus musculus
  siRNA target sequence for Bat2 (NM_020027.1,4810-4828).
ccccacatctggaatcgtt

SEQ ID NO: 710018 - DNA, 19 bp, Mus musculus
  siRNA target sequence for Bat2 (NM_020027.1,4811-4829).
cccacatctggaatcgttt

SEQ ID NO: 710019 - DNA, 19 bp, Mus musculus
  siRNA target sequence for Bat2 (NM_020027.1,4812-4830).
ccacatctggaatcgttta

SEQ ID NO: 710020 - DNA, 19 bp, Mus musculus
  siRNA target sequence for Bat2 (NM_020027.1,4838-4856).
ccacaagccgaaagagtta

SEQ ID NO: 710021 - DNA, 19 bp, Mus musculus
  siRNA target sequence for Bat2 (NM_020027.1,5000-5018).
cccctgatggaggacttaa

SEQ ID NO: 710022 - DNA, 19 bp, Mus musculus
  siRNA target sequence for Bat2 (NM_020027.1,5259-5277).
ccgaccgggctctcaagtt

SEQ ID NO: 710023 - DNA, 19 bp, Mus musculus
  siRNA target sequence for Bat2 (NM_020027.1,5261-5279).
gaccgggctctcaagttga

SEQ ID NO: 710024 - DNA, 19 bp, Mus musculus
  siRNA target sequence for Bat2 (NM_020027.1,5264-5282).
cgggctctcaagttgagtt

SEQ ID NO: 710025 - DNA, 19 bp, Mus musculus
  siRNA target sequence for Bat2 (NM_020027.1,5319-5337).
ggtcggagacactttaaaa

SEQ ID NO: 710026 - DNA, 19 bp, Mus musculus
  siRNA target sequence for Bat2 (NM_020027.1,5403-5421).
ccctagtgcttctacttca

SEQ ID NO: 710027 - DNA, 19 bp, Mus musculus
  siRNA target sequence for Bat2 (NM_020027.1,5492-5510).
cgtaccctgaggtcttcta

SEQ ID NO: 710028 - DNA, 19 bp, Mus musculus
  siRNA target sequence for Bat2 (NM_020027.1,5493-5511).
gtaccctgaggtcttctat

SEQ ID NO: 710029 - DNA, 19 bp, Mus musculus
  siRNA target sequence for Bat2 (NM_020027.1,5556-5574).
catcgactctcagttacat

SEQ ID NO: 710030 - DNA, 19 bp, Mus musculus
  siRNA target sequence for Bat2 (NM_020027.1,5622-5640).
caggtcacagcctctgtat

SEQ ID NO: 710031 - DNA, 19 bp, Mus musculus
  siRNA target sequence for Bat2 (NM_020027.1,6088-6106).
gctgctcgggtcttacctt

SEQ ID NO: 710032 - DNA, 19 bp, Mus musculus
  siRNA target sequence for Bat2 (NM_020027.1,6147-6165).
gctgcacccagtagaacta

SEQ ID NO: 710033 - DNA, 19 bp, Mus musculus
  siRNA target sequence for Bat2 (NM_020027.1,6148-6166).
ctgcacccagtagaactaa

SEQ ID NO: 710034 - DNA, 19 bp, Mus musculus
  siRNA target sequence for Nope (NM_020043.1,337-355).
gtcactgagggcagctatt

SEQ ID NO: 710035 - DNA, 19 bp, Mus musculus
  siRNA target sequence for Nope (NM_020043.1,469-487).
gggacagcacgctttgaat

SEQ ID NO: 710036 - DNA, 19 bp, Mus musculus
  siRNA target sequence for Nope (NM_020043.1,630-648).
ctgcgtggccaccaattca

SEQ ID NO: 710037 - DNA, 19 bp, Mus musculus
  siRNA target sequence for Nope (NM_020043.1,719-737).
ggcaggatgtggtcattgt

SEQ ID NO: 710038 - DNA, 19 bp, Mus musculus
  siRNA target sequence for Nope (NM_020043.1,848-866).
ctatctccacggatgtcat

SEQ ID NO: 710039 - DNA, 19 bp, Mus musculus
  siRNA target sequence for Nope (NM_020043.1,1359-1377).
gcacagcgagcaaatcatt

SEQ ID NO: 710040 - DNA, 19 bp, Mus musculus
  siRNA target sequence for Nope (NM_020043.1,1476-1494).
ggaacccaacacggattat

SEQ ID NO: 710041 - DNA, 19 bp, Mus musculus
  siRNA target sequence for Nope (NM_020043.1,1744-1762).
gagacacaacttacgttaa

SEQ ID NO: 710042 - DNA, 19 bp, Mus musculus
  siRNA target sequence for Nope (NM_020043.1,1886-1904).
cctttgcccctgcagaatt

SEQ ID NO: 710043 - DNA, 19 bp, Mus musculus
  siRNA target sequence for Nope (NM_020043.1,2741-2759).
gtgacactcggtatttctt

SEQ ID NO: 710044 - DNA, 19 bp, Mus musculus
  siRNA target sequence for Nope (NM_020043.1,2743-2761).
gacactcggtatttcttca

SEQ ID NO: 710045 - DNA, 19 bp, Mus musculus
  siRNA target sequence for Nope (NM_020043.1,2801-2819).
cccgcttgcaggatgtgat

SEQ ID NO: 710046 - DNA, 19 bp, Mus musculus
  siRNA target sequence for Nope (NM_020043.1,2802-2820).
ccgcttgcaggatgtgatt

SEQ ID NO: 710047 - DNA, 19 bp, Mus musculus
  siRNA target sequence for Nope (NM_020043.1,2803-2821).
cgcttgcaggatgtgatta

SEQ ID NO: 710048 - DNA, 19 bp, Mus musculus
  siRNA target sequence for Nope (NM_020043.1,3135-3153).
gggtggcagtgtttcagat

SEQ ID NO: 710049 - DNA, 19 bp, Mus musculus
  siRNA target sequence for Nope (NM_020043.1,3161-3179).
gccactccaagagaaagat

SEQ ID NO: 710050 - DNA, 19 bp, Mus musculus
  siRNA target sequence for Nope (NM_020043.1,3411-3429).
cgacttcggtgcatccaaa

SEQ ID NO: 710051 - DNA, 19 bp, Mus musculus
  siRNA target sequence for Tacstd2 (NM_020047.2,196-214).
gacggtctgcgacacaaat

SEQ ID NO: 710052 - DNA, 19 bp, Mus musculus
  siRNA target sequence for Tacstd2 (NM_020047.2,243-261).
caatgggctcacaggtatt

SEQ ID NO: 710053 - DNA, 19 bp, Mus musculus
  siRNA target sequence for Tacstd2 (NM_020047.2,266-284).
gactgctccacgctaactt

SEQ ID NO: 710054 - DNA, 19 bp, Mus musculus
  siRNA target sequence for Tacstd2 (NM_020047.2,443-461).
gtgtgctggtgcgtaaact

SEQ ID NO: 710055 - DNA, 19 bp, Mus musculus
  siRNA target sequence for Tacstd2 (NM_020047.2,643-661).
cctatccgcggtacactat

SEQ ID NO: 710056 - DNA, 19 bp, Mus musculus
  siRNA target sequence for Tacstd2 (NM_020047.2,731-749).
gctgatgccgcctactact

SEQ ID NO: 710057 - DNA, 19 bp, Mus musculus
  siRNA target sequence for Tacstd2 (NM_020047.2,732-750).
ctgatgccgcctactactt

SEQ ID NO: 710058 - DNA, 19 bp, Mus musculus
  siRNA target sequence for Tacstd2 (NM_020047.2,737-755).
gccgcctactacttcgaaa

SEQ ID NO: 710059 - DNA, 19 bp, Mus musculus
  siRNA target sequence for Tacstd2 (NM_020047.2,748-766).
cttcgaaagggacattaaa

SEQ ID NO: 710060 - DNA, 19 bp, Mus musculus
  siRNA target sequence for Tacstd2 (NM_020047.2,833-851).
gagcggacgctcatctact

SEQ ID NO: 710061 - DNA, 19 bp, Mus musculus
  siRNA target sequence for Tacstd2 (NM_020047.2,972-990).
ggaggaagtcgggcaaata

SEQ ID NO: 710062 - DNA, 19 bp, Mus musculus
  siRNA target sequence for Tacstd2 (NM_020047.2,976-994).
gaagtcgggcaaatacaaa

SEQ ID NO: 710063 - DNA, 19 bp, Mus musculus
  siRNA target sequence for Tacstd2 (NM_020047.2,981-999).
cgggcaaatacaaaaaggt

SEQ ID NO: 710064 - DNA, 19 bp, Mus musculus
  siRNA target sequence for Cegf1 (NM_020052.1,353-371).
ctgtgtccacgactgttta

SEQ ID NO: 710065 - DNA, 19 bp, Mus musculus
  siRNA target sequence for Cegf1 (NM_020052.1,357-375).
gtccacgactgtttaaata

SEQ ID NO: 710066 - DNA, 19 bp, Mus musculus
  siRNA target sequence for Cegf1 (NM_020052.1,362-380).
cgactgtttaaatattcca

SEQ ID NO: 710067 - DNA, 19 bp, Mus musculus
  siRNA target sequence for Cegf1 (NM_020052.1,429-447).
ggtcataattgtcttgata

SEQ ID NO: 710068 - DNA, 19 bp, Mus musculus
  siRNA target sequence for Cegf1 (NM_020052.1,430-448).
gtcataattgtcttgatat

SEQ ID NO: 710069 - DNA, 19 bp, Mus musculus
  siRNA target sequence for Cegf1 (NM_020052.1,452-470).
cgaatgcttggagaacaat

SEQ ID NO: 710070 - DNA, 19 bp, Mus musculus
  siRNA target sequence for Cegf1 (NM_020052.1,497-515).
cgttattgggagctatgaa

SEQ ID NO: 710071 - DNA, 19 bp, Mus musculus
  siRNA target sequence for Cegf1 (NM_020052.1,517-535).
gtcgctgcaaagaaggttt

SEQ ID NO: 710072 - DNA, 19 bp, Mus musculus
  siRNA target sequence for Cegf1 (NM_020052.1,582-600).
ggcctgagctgtatgaaca

SEQ ID NO: 710073 - DNA, 19 bp, Mus musculus
  siRNA target sequence for Cegf1 (NM_020052.1,696-714).
gactgcatcttgacttgta

SEQ ID NO: 710074 - DNA, 19 bp, Mus musculus
  siRNA target sequence for Cegf1 (NM_020052.1,701-719).
catcttgacttgtaaccat

SEQ ID NO: 710075 - DNA, 19 bp, Mus musculus
  siRNA target sequence for Cegf1 (NM_020052.1,735-753).
cagcactcctgtgaagata

SEQ ID NO: 710076 - DNA, 19 bp, Mus musculus
  siRNA target sequence for Cegf1 (NM_020052.1,759-777).
gaaggccctgagtgtagtt

SEQ ID NO: 710077 - DNA, 19 bp, Mus musculus
  siRNA target sequence for Cegf1 (NM_020052.1,778-796).
gccatccacggtataggtt

SEQ ID NO: 710078 - DNA, 19 bp, Mus musculus
  siRNA target sequence for Cegf1 (NM_020052.1,897-915).
cgtcggctgctcatggaaa

SEQ ID NO: 710079 - DNA, 19 bp, Mus musculus
  siRNA target sequence for Cegf1 (NM_020052.1,1008-1026).
gtggatgggaagacatgta

SEQ ID NO: 710080 - DNA, 19 bp, Mus musculus
  siRNA target sequence for Cegf1 (NM_020052.1,1010-1028).
ggatgggaagacatgtaaa

SEQ ID NO: 710081 - DNA, 19 bp, Mus musculus
  siRNA target sequence for Cegf1 (NM_020052.1,1056-1074).
ggaggttgtaaccatttct

SEQ ID NO: 710082 - DNA, 19 bp, Mus musculus
  siRNA target sequence for Cegf1 (NM_020052.1,1128-1146).
ctaacagacgagaagtctt

SEQ ID NO: 710083 - DNA, 19 bp, Mus musculus
  siRNA target sequence for Cegf1 (NM_020052.1,1158-1176).
gatgaatgttcgttggaaa

SEQ ID NO: 710084 - DNA, 19 bp, Mus musculus
  siRNA target sequence for Cegf1 (NM_020052.1,1199-1217).
caaccaccctggcacattt

SEQ ID NO: 710085 - DNA, 19 bp, Mus musculus
  siRNA target sequence for Cegf1 (NM_020052.1,1233-1251).
ccagggtacactctctata

SEQ ID NO: 710086 - DNA, 19 bp, Mus musculus
  siRNA target sequence for Cegf1 (NM_020052.1,1277-1295).
cgagtgcagtgtcaacaat

SEQ ID NO: 710087 - DNA, 19 bp, Mus musculus
  siRNA target sequence for Cegf1 (NM_020052.1,1346-1364).
gtgtcacccagggttcaaa

SEQ ID NO: 710088 - DNA, 19 bp, Mus musculus
  siRNA target sequence for Cegf1 (NM_020052.1,1517-1535).
caccgtcaggacaagtgta

SEQ ID NO: 710089 - DNA, 19 bp, Mus musculus
  siRNA target sequence for Cegf1 (NM_020052.1,1525-1543).
ggacaagtgtaacctttaa

SEQ ID NO: 710090 - DNA, 19 bp, Mus musculus
  siRNA target sequence for Cegf1 (NM_020052.1,1528-1546).
caagtgtaacctttaagct

SEQ ID NO: 710091 - DNA, 19 bp, Mus musculus
  siRNA target sequence for Cegf1 (NM_020052.1,1531-1549).
gtgtaacctttaagctaaa

SEQ ID NO: 710092 - DNA, 19 bp, Mus musculus
  siRNA target sequence for Cegf1 (NM_020052.1,1545-1563).
ctaaatgaaggcaagtgta

SEQ ID NO: 710093 - DNA, 19 bp, Mus musculus
  siRNA target sequence for Cegf1 (NM_020052.1,1554-1572).
ggcaagtgtagtttgcaaa

SEQ ID NO: 710094 - DNA, 19 bp, Mus musculus
  siRNA target sequence for Cegf1 (NM_020052.1,1555-1573).
gcaagtgtagtttgcaaaa

SEQ ID NO: 710095 - DNA, 19 bp, Mus musculus
  siRNA target sequence for Cegf1 (NM_020052.1,1616-1634).
gaggcacagctcagtaaaa

SEQ ID NO: 710096 - DNA, 19 bp, Mus musculus
  siRNA target sequence for Cegf1 (NM_020052.1,1640-1658).
cttccagtacgcaaacctt

SEQ ID NO: 710097 - DNA, 19 bp, Mus musculus
  siRNA target sequence for Cegf1 (NM_020052.1,1644-1662).
cagtacgcaaaccttacat

SEQ ID NO: 710098 - DNA, 19 bp, Mus musculus
  siRNA target sequence for Cegf1 (NM_020052.1,1701-1719).
ctgaacgcccctaaggaaa

SEQ ID NO: 710099 - DNA, 19 bp, Mus musculus
  siRNA target sequence for Cegf1 (NM_020052.1,1721-1739).
gtttatcacggttgagttt

SEQ ID NO: 710100 - DNA, 19 bp, Mus musculus
  siRNA target sequence for Cegf1 (NM_020052.1,1734-1752).
gagtttgaacgggaaactt

SEQ ID NO: 710101 - DNA, 19 bp, Mus musculus
  siRNA target sequence for Cegf1 (NM_020052.1,1740-1758).
gaacgggaaacttacgaaa

SEQ ID NO: 710102 - DNA, 19 bp, Mus musculus
  siRNA target sequence for Cegf1 (NM_020052.1,1744-1762).
gggaaacttacgaaaagga

SEQ ID NO: 710103 - DNA, 19 bp, Mus musculus
  siRNA target sequence for Cegf1 (NM_020052.1,1850-1868).
ccacagggagcagtttcat

SEQ ID NO: 710104 - DNA, 19 bp, Mus musculus
  siRNA target sequence for Cegf1 (NM_020052.1,1879-1897).
caggcatggacctcgatat

SEQ ID NO: 710105 - DNA, 19 bp, Mus musculus
  siRNA target sequence for Cegf1 (NM_020052.1,1887-1905).
gacctcgatatggctaaaa

SEQ ID NO: 710106 - DNA, 19 bp, Mus musculus
  siRNA target sequence for Cegf1 (NM_020052.1,1949-1967).
gggacagggtcatgaagaa

SEQ ID NO: 710107 - DNA, 19 bp, Mus musculus
  siRNA target sequence for Cegf1 (NM_020052.1,1950-1968).
ggacagggtcatgaagaaa

SEQ ID NO: 710108 - DNA, 19 bp, Mus musculus
  siRNA target sequence for Cegf1 (NM_020052.1,1984-2002).
gcagggctgggacgtatta

SEQ ID NO: 710109 - DNA, 19 bp, Mus musculus
  siRNA target sequence for Cegf1 (NM_020052.1,1987-2005).
gggctgggacgtattatga

SEQ ID NO: 710110 - DNA, 19 bp, Mus musculus
  siRNA target sequence for Cegf1 (NM_020052.1,1988-2006).
ggctgggacgtattatgat

SEQ ID NO: 710111 - DNA, 19 bp, Mus musculus
  siRNA target sequence for Cegf1 (NM_020052.1,1997-2015).
gtattatgatggatcacaa

SEQ ID NO: 710112 - DNA, 19 bp, Mus musculus
  siRNA target sequence for Cegf1 (NM_020052.1,2011-2029).
cacaagagcgctgcatttt

SEQ ID NO: 710113 - DNA, 19 bp, Mus musculus
  siRNA target sequence for Cegf1 (NM_020052.1,2035-2053).
caaacggaaccttccaaaa

SEQ ID NO: 710114 - DNA, 19 bp, Mus musculus
  siRNA target sequence for Cegf1 (NM_020052.1,2226-2244).
gatgtgggccgtacatctt

SEQ ID NO: 710115 - DNA, 19 bp, Mus musculus
  siRNA target sequence for Cegf1 (NM_020052.1,2448-2466).
gatggctccaccaacataa

SEQ ID NO: 710116 - DNA, 19 bp, Mus musculus
  siRNA target sequence for Cegf1 (NM_020052.1,2493-2511).
ggggagctgggggatttca

SEQ ID NO: 710117 - DNA, 19 bp, Mus musculus
  siRNA target sequence for Cegf1 (NM_020052.1,2503-2521).
gggatttcacagggtatat

SEQ ID NO: 710118 - DNA, 19 bp, Mus musculus
  siRNA target sequence for Cegf1 (NM_020052.1,2658-2676).
ctggtgatgcggaaaacct

SEQ ID NO: 710119 - DNA, 19 bp, Mus musculus
  siRNA target sequence for Cegf1 (NM_020052.1,2666-2684).
gcggaaaacctcttcatca

SEQ ID NO: 710120 - DNA, 19 bp, Mus musculus
  siRNA target sequence for Cegf1 (NM_020052.1,2667-2685).
cggaaaacctcttcatcaa

SEQ ID NO: 710121 - DNA, 19 bp, Mus musculus
  siRNA target sequence for Cegf1 (NM_020052.1,2843-2861).
gctcattgaagacatagtt

SEQ ID NO: 710122 - DNA, 19 bp, Mus musculus
  siRNA target sequence for Cegf1 (NM_020052.1,2952-2970).
ccccagaactatttcaagt

SEQ ID NO: 710123 - DNA, 19 bp, Mus musculus
  siRNA target sequence for Cegf1 (NM_020052.1,2981-2999).
ggagtcccgagagatgttt

SEQ ID NO: 710124 - DNA, 19 bp, Mus musculus
  siRNA target sequence for Cegf1 (NM_020052.1,3014-3032).
ccgattgctacgttccaaa

SEQ ID NO: 710125 - DNA, 19 bp, Mus musculus
  siRNA target sequence for Slc37a2 (NM_020258.2,229-247).
gtcagacctgttaatgaca

SEQ ID NO: 710126 - DNA, 19 bp, Mus musculus
  siRNA target sequence for Slc37a2 (NM_020258.2,246-264).
cacccacgatctcaatgat

SEQ ID NO: 710127 - DNA, 19 bp, Mus musculus
  siRNA target sequence for Slc37a2 (NM_020258.2,281-299).
ggagtccattcgacaaaga

SEQ ID NO: 710128 - DNA, 19 bp, Mus musculus
  siRNA target sequence for Slc37a2 (NM_020258.2,282-300).
gagtccattcgacaaagat

SEQ ID NO: 710129 - DNA, 19 bp, Mus musculus
  siRNA target sequence for Slc37a2 (NM_020258.2,284-302).
gtccattcgacaaagatga

SEQ ID NO: 710130 - DNA, 19 bp, Mus musculus
  siRNA target sequence for Slc37a2 (NM_020258.2,287-305).
cattcgacaaagatgacta

SEQ ID NO: 710131 - DNA, 19 bp, Mus musculus
  siRNA target sequence for Slc37a2 (NM_020258.2,363-381).
gtttattagtggaatcttt

SEQ ID NO: 710132 - DNA, 19 bp, Mus musculus
  siRNA target sequence for Slc37a2 (NM_020258.2,424-442).
gtgctaagtggcctattca

SEQ ID NO: 710133 - DNA, 19 bp, Mus musculus
  siRNA target sequence for Slc37a2 (NM_020258.2,461-479).
ggtacttctggaatatcca

SEQ ID NO: 710134 - DNA, 19 bp, Mus musculus
  siRNA target sequence for Slc37a2 (NM_020258.2,581-599).
gaaagcggggattcatcat

SEQ ID NO: 710135 - DNA, 19 bp, Mus musculus
  siRNA target sequence for Slc37a2 (NM_020258.2,673-691).
cactggggcctgtcattca

SEQ ID NO: 710136 - DNA, 19 bp, Mus musculus
  siRNA target sequence for Slc37a2 (NM_020258.2,701-719).
gcattatcactgctatcat

SEQ ID NO: 710137 - DNA, 19 bp, Mus musculus
  siRNA target sequence for Slc37a2 (NM_020258.2,921-939).
cctgggggcactcagaatt

SEQ ID NO: 710138 - DNA, 19 bp, Mus musculus
  siRNA target sequence for Slc37a2 (NM_020258.2,943-961).
ggagtgatcgagttctctt

SEQ ID NO: 710139 - DNA, 19 bp, Mus musculus
  siRNA target sequence for Slc37a2 (NM_020258.2,944-962).
gagtgatcgagttctcttt

SEQ ID NO: 710140 - DNA, 19 bp, Mus musculus
  siRNA target sequence for Slc37a2 (NM_020258.2,946-964).
gtgatcgagttctctttat

SEQ ID NO: 710141 - DNA, 19 bp, Mus musculus
  siRNA target sequence for Slc37a2 (NM_020258.2,948-966).
gatcgagttctctttatgt

SEQ ID NO: 710142 - DNA, 19 bp, Mus musculus
  siRNA target sequence for Slc37a2 (NM_020258.2,1204-1222).
ggccagaatgggataacca

SEQ ID NO: 710143 - DNA, 19 bp, Mus musculus
  siRNA target sequence for Slc37a2 (NM_020258.2,1221-1239).
cagttccatagtgatgtta

SEQ ID NO: 710144 - DNA, 19 bp, Mus musculus
  siRNA target sequence for Slc37a2 (NM_020258.2,1223-1241).
gttccatagtgatgttaat

SEQ ID NO: 710145 - DNA, 19 bp, Mus musculus
  siRNA target sequence for Slc37a2 (NM_020258.2,1226-1244).
ccatagtgatgttaattat

SEQ ID NO: 710146 - DNA, 19 bp, Mus musculus
  siRNA target sequence for Slc37a2 (NM_020258.2,1346-1364).
ccactgtcacggccattat

SEQ ID NO: 710147 - DNA, 19 bp, Mus musculus
  siRNA target sequence for Slc37a2 (NM_020258.2,1349-1367).
ctgtcacggccattatcga

SEQ ID NO: 710148 - DNA, 19 bp, Mus musculus
  siRNA target sequence for Slc37a2 (NM_020258.2,1422-1440).
cccgacaggctggaacaat

SEQ ID NO: 710149 - DNA, 19 bp, Mus musculus
  siRNA target sequence for Slc37a2 (NM_020258.2,1424-1442).
cgacaggctggaacaatgt

SEQ ID NO: 710150 - DNA, 19 bp, Mus musculus
  siRNA target sequence for Slc37a2 (NM_020258.2,1490-1508).
gcaggttggtgtacaaaga

SEQ ID NO: 710151 - DNA, 19 bp, Mus musculus
  siRNA target sequence for Psg23 (NM_020261.2,1354-1372).
gtctcggaaactacagtta

SEQ ID NO: 710152 - DNA, 19 bp, Mus musculus
  siRNA target sequence for Psg23 (NM_020261.2,1356-1374).
ctcggaaactacagttaga

SEQ ID NO: 710153 - DNA, 19 bp, Mus musculus
  siRNA target sequence for Zfp109 (NM_020262.1,666-684).
ggccaagttccaaacaaga

SEQ ID NO: 710154 - DNA, 19 bp, Mus musculus
  siRNA target sequence for Zfp109 (NM_020262.1,686-704).
ggagaaccttcatacaaca

SEQ ID NO: 710155 - DNA, 19 bp, Mus musculus
  siRNA target sequence for Zfp109 (NM_020262.1,696-714).
catacaacaggagtaagat

SEQ ID NO: 710156 - DNA, 19 bp, Mus musculus
  siRNA target sequence for Zfp109 (NM_020262.1,781-799).
ctccagaaggggtaatcaa

SEQ ID NO: 710157 - DNA, 19 bp, Mus musculus
  siRNA target sequence for Zfp109 (NM_020262.1,783-801).
ccagaaggggtaatcaaca

SEQ ID NO: 710158 - DNA, 19 bp, Mus musculus
  siRNA target sequence for Zfp109 (NM_020262.1,797-815).
caacactcaaggaatggta

SEQ ID NO: 710159 - DNA, 19 bp, Mus musculus
  siRNA target sequence for Zfp109 (NM_020262.1,802-820).
ctcaaggaatggtatccta

SEQ ID NO: 710160 - DNA, 19 bp, Mus musculus
  siRNA target sequence for Zfp109 (NM_020262.1,825-843).
ccagagcaatgccatttct

SEQ ID NO: 710161 - DNA, 19 bp, Mus musculus
  siRNA target sequence for Zfp109 (NM_020262.1,906-924).
ctcacaaatgatcattcta

SEQ ID NO: 710162 - DNA, 19 bp, Mus musculus
  siRNA target sequence for Zfp109 (NM_020262.1,1060-1078).
ctccaggtattgacagaat

SEQ ID NO: 710163 - DNA, 19 bp, Mus musculus
  siRNA target sequence for Zfp109 (NM_020262.1,1133-1151).
gagcaacagtgactttgat

SEQ ID NO: 710164 - DNA, 19 bp, Mus musculus
  siRNA target sequence for Zfp109 (NM_020262.1,1145-1163).
ctttgataaacttaccttt

SEQ ID NO: 710165 - DNA, 19 bp, Mus musculus
  siRNA target sequence for Zfp109 (NM_020262.1,1176-1194).
gtcaccccgcatcatgttt

SEQ ID NO: 710166 - DNA, 19 bp, Mus musculus
  siRNA target sequence for Zfp109 (NM_020262.1,1554-1572).
ggcagacgcttcaggttta

SEQ ID NO: 710167 - DNA, 19 bp, Mus musculus
  siRNA target sequence for Zfp109 (NM_020262.1,1732-1750).
cagcctcaaacgtcaaagt

SEQ ID NO: 710168 - DNA, 19 bp, Mus musculus
  siRNA target sequence for Zfp109 (NM_020262.1,1811-1829).
cagtcggagctttcatctt

SEQ ID NO: 710169 - DNA, 19 bp, Mus musculus
  siRNA target sequence for Zfp109 (NM_020262.1,1813-1831).
gtcggagctttcatcttca

SEQ ID NO: 710170 - DNA, 19 bp, Mus musculus
  siRNA target sequence for Zfp109 (NM_020262.1,1913-1931).
ccaagtccatcggctaatt

SEQ ID NO: 710171 - DNA, 19 bp, Mus musculus
  siRNA target sequence for Zfp109 (NM_020262.1,1917-1935).
gtccatcggctaattcaca

SEQ ID NO: 710172 - DNA, 19 bp, Mus musculus
  siRNA target sequence for Zfp109 (NM_020262.1,2065-2083).
gccggagctcatatcttca

SEQ ID NO: 710173 - DNA, 19 bp, Mus musculus
  siRNA target sequence for Zfp109 (NM_020262.1,2323-2341).
cctcactcttcgaaagaca

SEQ ID NO: 710174 - DNA, 19 bp, Mus musculus
  siRNA target sequence for Zfp109 (NM_020262.1,2407-2425).
gatcgcatctcgtcaaaca

SEQ ID NO: 710175 - DNA, 19 bp, Mus musculus
  siRNA target sequence for Mc7 (NM_020267.1,651-669).
cgaatttgaccccgaaata

SEQ ID NO: 710176 - DNA, 19 bp, Mus musculus
  siRNA target sequence for Mc7 (NM_020267.1,880-898).
gtggaaaggttaaagttca

SEQ ID NO: 710177 - DNA, 19 bp, Mus musculus
  siRNA target sequence for Mc7 (NM_020267.1,920-938).
ctcgagaccagatgaagat

SEQ ID NO: 710178 - DNA, 19 bp, Mus musculus
  siRNA target sequence for Mc7 (NM_020267.1,990-1008).
gcagaaggcccttcattta

SEQ ID NO: 710179 - DNA, 19 bp, Mus musculus
  siRNA target sequence for Mc7 (NM_020267.1,998-1016).
cccttcatttagtggatat

SEQ ID NO: 710180 - DNA, 19 bp, Mus musculus
  siRNA target sequence for Mc7 (NM_020267.1,1035-1053).
ggctcatgtgactgagata

SEQ ID NO: 710181 - DNA, 19 bp, Mus musculus
  siRNA target sequence for Mc7 (NM_020267.1,1037-1055).
ctcatgtgactgagatatt

SEQ ID NO: 710182 - DNA, 19 bp, Mus musculus
  siRNA target sequence for Mc7 (NM_020267.1,1104-1122).
ggccaaggaacaacttgat

SEQ ID NO: 710183 - DNA, 19 bp, Mus musculus
  siRNA target sequence for Mc7 (NM_020267.1,1117-1135).
cttgatacctctaatgaat

SEQ ID NO: 710184 - DNA, 19 bp, Mus musculus
  siRNA target sequence for Scamp5 (NM_020270.2,144-162).
gcggagaaagtgaacaact

SEQ ID NO: 710185 - DNA, 19 bp, Mus musculus
  siRNA target sequence for AB041662 (NM_020271.1,1052-1070).
ccaggtggccttatttcct

SEQ ID NO: 710186 - DNA, 19 bp, Mus musculus
  siRNA target sequence for AB041662 (NM_020271.1,1096-1114).
cccgaagccaaatgaagat

SEQ ID NO: 710187 - DNA, 19 bp, Mus musculus
  siRNA target sequence for AB041662 (NM_020271.1,1098-1116).
cgaagccaaatgaagattt

SEQ ID NO: 710188 - DNA, 19 bp, Mus musculus
  siRNA target sequence for AB041662 (NM_020271.1,1167-1185).
ctctgtccctagagattgt

SEQ ID NO: 710189 - DNA, 19 bp, Mus musculus
  siRNA target sequence for Nelf (NM_020276.2,239-257).
ctcggtagcggccaaagta

SEQ ID NO: 710190 - DNA, 19 bp, Mus musculus
  siRNA target sequence for Nelf (NM_020276.2,242-260).
ggtagcggccaaagtaaga

SEQ ID NO: 710191 - DNA, 19 bp, Mus musculus
  siRNA target sequence for Nelf (NM_020276.2,873-891).
cagacggcaaccacaacta

SEQ ID NO: 710192 - DNA, 19 bp, Mus musculus
  siRNA target sequence for Nelf (NM_020276.2,878-896).
ggcaaccacaactatgcaa

SEQ ID NO: 710193 - DNA, 19 bp, Mus musculus
  siRNA target sequence for Nelf (NM_020276.2,1000-1018).
gcgaccccacccctatgaa

SEQ ID NO: 710194 - DNA, 19 bp, Mus musculus
  siRNA target sequence for Nelf (NM_020276.2,1198-1216).
ccgagtatatccctactat

SEQ ID NO: 710195 - DNA, 19 bp, Mus musculus
  siRNA target sequence for Nelf (NM_020276.2,1200-1218).
gagtatatccctactatca

SEQ ID NO: 710196 - DNA, 19 bp, Mus musculus
  siRNA target sequence for Nelf (NM_020276.2,1489-1507).
cgaatgtcatccacatcat

SEQ ID NO: 710197 - DNA, 19 bp, Mus musculus
  siRNA target sequence for Nelf (NM_020276.2,1531-1549).
ctaacggggagaagctatt

SEQ ID NO: 710198 - DNA, 19 bp, Mus musculus
  siRNA target sequence for Nelf (NM_020276.2,1573-1591).
ccccttacaaggttacctt

SEQ ID NO: 710199 - DNA, 19 bp, Mus musculus
  siRNA target sequence for Nelf (NM_020276.2,1574-1592).
cccttacaaggttaccttt

SEQ ID NO: 710200 - DNA, 19 bp, Mus musculus
  siRNA target sequence for Lgi1 (NM_020278.1,150-168).
gcattcccctgaaaagaat

SEQ ID NO: 710201 - DNA, 19 bp, Mus musculus
  siRNA target sequence for Lgi1 (NM_020278.1,238-256).
ccctgccgtgtgtacttgt

SEQ ID NO: 710202 - DNA, 19 bp, Mus musculus
  siRNA target sequence for Lgi1 (NM_020278.1,259-277).
caaagataacgctttatgt

SEQ ID NO: 710203 - DNA, 19 bp, Mus musculus
  siRNA target sequence for Lgi1 (NM_020278.1,358-376).
ctcagaagggagtttctta

SEQ ID NO: 710204 - DNA, 19 bp, Mus musculus
  siRNA target sequence for Lgi1 (NM_020278.1,387-405).
cgctgcagctcttgttatt

SEQ ID NO: 710205 - DNA, 19 bp, Mus musculus
  siRNA target sequence for Lgi1 (NM_020278.1,408-426).
cgtcgaactcctttgatgt

SEQ ID NO: 710206 - DNA, 19 bp, Mus musculus
  siRNA target sequence for Lgi1 (NM_020278.1,427-445).
gatcagtgatgatgctttt

SEQ ID NO: 710207 - DNA, 19 bp, Mus musculus
  siRNA target sequence for Lgi1 (NM_020278.1,449-467).
ggtcttccacatctagaat

SEQ ID NO: 710208 - DNA, 19 bp, Mus musculus
  siRNA target sequence for Lgi1 (NM_020278.1,450-468).
gtcttccacatctagaata

SEQ ID NO: 710209 - DNA, 19 bp, Mus musculus
  siRNA target sequence for Lgi1 (NM_020278.1,487-505).
caatatcaagtccatttca

SEQ ID NO: 710210 - DNA, 19 bp, Mus musculus
  siRNA target sequence for Lgi1 (NM_020278.1,493-511).
caagtccatttcaagacat

SEQ ID NO: 710211 - DNA, 19 bp, Mus musculus
  siRNA target sequence for Lgi1 (NM_020278.1,496-514).
gtccatttcaagacatact

SEQ ID NO: 710212 - DNA, 19 bp, Mus musculus
  siRNA target sequence for Lgi1 (NM_020278.1,498-516).
ccatttcaagacatacttt

SEQ ID NO: 710213 - DNA, 19 bp, Mus musculus
  siRNA target sequence for Lgi1 (NM_020278.1,544-562).
gagtcttgcaaacaacaat

SEQ ID NO: 710214 - DNA, 19 bp, Mus musculus
  siRNA target sequence for Lgi1 (NM_020278.1,546-564).
gtcttgcaaacaacaatct

SEQ ID NO: 710215 - DNA, 19 bp, Mus musculus
  siRNA target sequence for Lgi1 (NM_020278.1,589-607).
caaaggcctggattcctta

SEQ ID NO: 710216 - DNA, 19 bp, Mus musculus
  siRNA target sequence for Lgi1 (NM_020278.1,620-638).
ctaagagggaacgcattta

SEQ ID NO: 710217 - DNA, 19 bp, Mus musculus
  siRNA target sequence for Lgi1 (NM_020278.1,674-692).
ctcggccataccaatgcaa

SEQ ID NO: 710218 - DNA, 19 bp, Mus musculus
  siRNA target sequence for Lgi1 (NM_020278.1,713-731).
gaaggcccaccggaatata

SEQ ID NO: 710219 - DNA, 19 bp, Mus musculus
  siRNA target sequence for Lgi1 (NM_020278.1,716-734).
ggcccaccggaatataaga

SEQ ID NO: 710220 - DNA, 19 bp, Mus musculus
  siRNA target sequence for Lgi1 (NM_020278.1,717-735).
gcccaccggaatataagaa

SEQ ID NO: 710221 - DNA, 19 bp, Mus musculus
  siRNA target sequence for Lgi1 (NM_020278.1,718-736).
cccaccggaatataagaaa

SEQ ID NO: 710222 - DNA, 19 bp, Mus musculus
  siRNA target sequence for Lgi1 (NM_020278.1,750-768).
gcctctcccccaaggattt

SEQ ID NO: 710223 - DNA, 19 bp, Mus musculus
  siRNA target sequence for Lgi1 (NM_020278.1,763-781).
ggattttgactgtatcatt

SEQ ID NO: 710224 - DNA, 19 bp, Mus musculus
  siRNA target sequence for Lgi1 (NM_020278.1,764-782).
gattttgactgtatcatta

SEQ ID NO: 710225 - DNA, 19 bp, Mus musculus
  siRNA target sequence for Lgi1 (NM_020278.1,770-788).
gactgtatcattacagaat

SEQ ID NO: 710226 - DNA, 19 bp, Mus musculus
  siRNA target sequence for Lgi1 (NM_020278.1,772-790).
ctgtatcattacagaattt

SEQ ID NO: 710227 - DNA, 19 bp, Mus musculus
  siRNA target sequence for Lgi1 (NM_020278.1,796-814).
gtcccaagacctaccttat

SEQ ID NO: 710228 - DNA, 19 bp, Mus musculus
  siRNA target sequence for Lgi1 (NM_020278.1,798-816).
cccaagacctaccttatca

SEQ ID NO: 710229 - DNA, 19 bp, Mus musculus
  siRNA target sequence for Lgi1 (NM_020278.1,819-837).
cgctgtccatagacacttt

SEQ ID NO: 710230 - DNA, 19 bp, Mus musculus
  siRNA target sequence for Lgi1 (NM_020278.1,820-838).
gctgtccatagacactttt

SEQ ID NO: 710231 - DNA, 19 bp, Mus musculus
  siRNA target sequence for Lgi1 (NM_020278.1,821-839).
ctgtccatagacacttttt

SEQ ID NO: 710232 - DNA, 19 bp, Mus musculus
  siRNA target sequence for Lgi1 (NM_020278.1,825-843).
ccatagacactttttctta

SEQ ID NO: 710233 - DNA, 19 bp, Mus musculus
  siRNA target sequence for Lgi1 (NM_020278.1,826-844).
catagacactttttcttat

SEQ ID NO: 710234 - DNA, 19 bp, Mus musculus
  siRNA target sequence for Lgi1 (NM_020278.1,863-881).
gtcattgctcagcctttta

SEQ ID NO: 710235 - DNA, 19 bp, Mus musculus
  siRNA target sequence for Lgi1 (NM_020278.1,919-937).
gaagaccttccggaattat

SEQ ID NO: 710236 - DNA, 19 bp, Mus musculus
  siRNA target sequence for Lgi1 (NM_020278.1,928-946).
ccggaattatgacaacatt

SEQ ID NO: 710237 - DNA, 19 bp, Mus musculus
  siRNA target sequence for Lgi1 (NM_020278.1,929-947).
cggaattatgacaacatta

SEQ ID NO: 710238 - DNA, 19 bp, Mus musculus
  siRNA target sequence for Lgi1 (NM_020278.1,931-949).
gaattatgacaacattaca

SEQ ID NO: 710239 - DNA, 19 bp, Mus musculus
  siRNA target sequence for Lgi1 (NM_020278.1,964-982).
ggtgtgcaagcccatagtt

SEQ ID NO: 710240 - DNA, 19 bp, Mus musculus
  siRNA target sequence for Lgi1 (NM_020278.1,965-983).
gtgtgcaagcccatagtta

SEQ ID NO: 710241 - DNA, 19 bp, Mus musculus
  siRNA target sequence for Lgi1 (NM_020278.1,967-985).
gtgcaagcccatagttatt

SEQ ID NO: 710242 - DNA, 19 bp, Mus musculus
  siRNA target sequence for Lgi1 (NM_020278.1,969-987).
gcaagcccatagttattga

SEQ ID NO: 710243 - DNA, 19 bp, Mus musculus
  siRNA target sequence for Lgi1 (NM_020278.1,1236-1254).
cctggtacagggatactga

SEQ ID NO: 710244 - DNA, 19 bp, Mus musculus
  siRNA target sequence for Lgi1 (NM_020278.1,1290-1308).
ccctcagaacacctcattt

SEQ ID NO: 710245 - DNA, 19 bp, Mus musculus
  siRNA target sequence for Lgi1 (NM_020278.1,1326-1344).
ctcagcgccctgttattta

SEQ ID NO: 710246 - DNA, 19 bp, Mus musculus
  siRNA target sequence for Lgi1 (NM_020278.1,1359-1377).
caacacagctattcactaa

SEQ ID NO: 710247 - DNA, 19 bp, Mus musculus
  siRNA target sequence for Lgi1 (NM_020278.1,1364-1382).
cagctattcactaaccaaa

SEQ ID NO: 710248 - DNA, 19 bp, Mus musculus
  siRNA target sequence for Lgi1 (NM_020278.1,1392-1410).
ctaacatggaggacgtata

SEQ ID NO: 710249 - DNA, 19 bp, Mus musculus
  siRNA target sequence for Lgi1 (NM_020278.1,1461-1479).
gattcattggcgactctaa

SEQ ID NO: 710250 - DNA, 19 bp, Mus musculus
  siRNA target sequence for Lgi1 (NM_020278.1,1470-1488).
gcgactctaaagtcatgaa

SEQ ID NO: 710251 - DNA, 19 bp, Mus musculus
  siRNA target sequence for Lgi1 (NM_020278.1,1472-1490).
gactctaaagtcatgaagt

SEQ ID NO: 710252 - DNA, 19 bp, Mus musculus
  siRNA target sequence for Lgi1 (NM_020278.1,1549-1567).
ccaacctcttcagataaat

SEQ ID NO: 710253 - DNA, 19 bp, Mus musculus
  siRNA target sequence for Lgi1 (NM_020278.1,1550-1568).
caacctcttcagataaata

SEQ ID NO: 710254 - DNA, 19 bp, Mus musculus
  siRNA target sequence for Lgi1 (NM_020278.1,1559-1577).
cagataaataattaccaat

SEQ ID NO: 710255 - DNA, 19 bp, Mus musculus
  siRNA target sequence for Lgi1 (NM_020278.1,1561-1579).
gataaataattaccaatat

SEQ ID NO: 710256 - DNA, 19 bp, Mus musculus
  siRNA target sequence for Lgi1 (NM_020278.1,1589-1607).
ggaagcgattactccttta

SEQ ID NO: 710257 - DNA, 19 bp, Mus musculus
  siRNA target sequence for Lgi1 (NM_020278.1,1593-1611).
gcgattactcctttactca

SEQ ID NO: 710258 - DNA, 19 bp, Mus musculus
  siRNA target sequence for Lgi1 (NM_020278.1,1651-1669).
gtttcaggagttaaacgtt

SEQ ID NO: 710259 - DNA, 19 bp, Mus musculus
  siRNA target sequence for Lgi1 (NM_020278.1,1670-1688).
caggcacccagatcattca

SEQ ID NO: 710260 - DNA, 19 bp, Mus musculus
  siRNA target sequence for Lgi1 (NM_020278.1,1687-1705).
cacacacgtatccattaat

SEQ ID NO: 710261 - DNA, 19 bp, Mus musculus
  siRNA target sequence for Lgi1 (NM_020278.1,1689-1707).
cacacgtatccattaataa

SEQ ID NO: 710262 - DNA, 19 bp, Mus musculus
  siRNA target sequence for Lgi1 (NM_020278.1,1698-1716).
ccattaataagcgtaattt

SEQ ID NO: 710263 - DNA, 19 bp, Mus musculus
  siRNA target sequence for Lgi1 (NM_020278.1,1760-1778).
catgtcatagttgacttaa

SEQ ID NO: 710264 - DNA, 19 bp, Mus musculus
  siRNA target sequence for Magea4 (NM_020280.1,10-28).
cccgataacacccattact

SEQ ID NO: 710265 - DNA, 19 bp, Mus musculus
  siRNA target sequence for Magea4 (NM_020280.1,50-68).
ggagccaaagggagttaga

SEQ ID NO: 710266 - DNA, 19 bp, Mus musculus
  siRNA target sequence for Magea4 (NM_020280.1,53-71).
gccaaagggagttagacaa

SEQ ID NO: 710267 - DNA, 19 bp, Mus musculus
  siRNA target sequence for Magea4 (NM_020280.1,59-77).
gggagttagacaatgttca

SEQ ID NO: 710268 - DNA, 19 bp, Mus musculus
  siRNA target sequence for Magea4 (NM_020280.1,69-87).
caatgttcaggctacaata

SEQ ID NO: 710269 - DNA, 19 bp, Mus musculus
  siRNA target sequence for Magea4 (NM_020280.1,83-101).
caatagctgtggtagatga

SEQ ID NO: 710270 - DNA, 19 bp, Mus musculus
  siRNA target sequence for Magea4 (NM_020280.1,177-195).
ctcctctccccttgtgata

SEQ ID NO: 710271 - DNA, 19 bp, Mus musculus
  siRNA target sequence for Magea4 (NM_020280.1,179-197).
cctctccccttgtgatact

SEQ ID NO: 710272 - DNA, 19 bp, Mus musculus
  siRNA target sequence for Magea4 (NM_020280.1,263-281).
cactgtgcatgttgtacaa

SEQ ID NO: 710273 - DNA, 19 bp, Mus musculus
  siRNA target sequence for Magea4 (NM_020280.1,283-301).
gcacagaacataaagttat

SEQ ID NO: 710274 - DNA, 19 bp, Mus musculus
  siRNA target sequence for Magea4 (NM_020280.1,284-302).
cacagaacataaagttata

SEQ ID NO: 710275 - DNA, 19 bp, Mus musculus
  siRNA target sequence for Magea4 (NM_020280.1,449-467).
gcattggcatgatagaagt

SEQ ID NO: 710276 - DNA, 19 bp, Mus musculus
  siRNA target sequence for Magea4 (NM_020280.1,560-578).
gtatcctaatagttgttct

SEQ ID NO: 710277 - DNA, 19 bp, Mus musculus
  siRNA target sequence for Magea4 (NM_020280.1,849-867).
cgatcccagagcttacact

SEQ ID NO: 710278 - DNA, 19 bp, Mus musculus
  siRNA target sequence for Tssc4 (NM_020285.1,376-394).
gtgtggaggtccaagtgtt

SEQ ID NO: 710279 - DNA, 19 bp, Mus musculus
  siRNA target sequence for Tssc4 (NM_020285.1,495-513).
cacctccgaggcatgagtt

SEQ ID NO: 710280 - DNA, 19 bp, Mus musculus
  siRNA target sequence for Tssc4 (NM_020285.1,498-516).
ctccgaggcatgagttcta

SEQ ID NO: 710281 - DNA, 19 bp, Mus musculus
  siRNA target sequence for Tssc4 (NM_020285.1,527-545).
gcgcagccacagcatcttt

SEQ ID NO: 710282 - DNA, 19 bp, Mus musculus
  siRNA target sequence for Insm2 (NM_020287.1,369-387).
ccctgtatccgttccaatt

SEQ ID NO: 710283 - DNA, 19 bp, Mus musculus
  siRNA target sequence for Insm2 (NM_020287.1,460-478).
gcagccgtcaggaaaccta

SEQ ID NO: 710284 - DNA, 19 bp, Mus musculus
  siRNA target sequence for Insm2 (NM_020287.1,461-479).
cagccgtcaggaaacctaa

SEQ ID NO: 710285 - DNA, 19 bp, Mus musculus
  siRNA target sequence for Insm2 (NM_020287.1,524-542).
cggtgctgggtctgaagat

SEQ ID NO: 710286 - DNA, 19 bp, Mus musculus
  siRNA target sequence for Insm2 (NM_020287.1,987-1005).
ctaccccgaggtgattcta

SEQ ID NO: 710287 - DNA, 19 bp, Mus musculus
  siRNA target sequence for Insm2 (NM_020287.1,1059-1077).
cttcgtgtgcccgtattgt

SEQ ID NO: 710288 - DNA, 19 bp, Mus musculus
  siRNA target sequence for Insm2 (NM_020287.1,1065-1083).
gtgcccgtattgtcacaaa

SEQ ID NO: 710289 - DNA, 19 bp, Mus musculus
  siRNA target sequence for Insm2 (NM_020287.1,1067-1085).
gcccgtattgtcacaaaaa

SEQ ID NO: 710290 - DNA, 19 bp, Mus musculus
  siRNA target sequence for Insm2 (NM_020287.1,1069-1087).
ccgtattgtcacaaaaagt

SEQ ID NO: 710291 - DNA, 19 bp, Mus musculus
  siRNA target sequence for Insm2 (NM_020287.1,1070-1088).
cgtattgtcacaaaaagtt

SEQ ID NO: 710292 - DNA, 19 bp, Mus musculus
  siRNA target sequence for Insm2 (NM_020287.1,1336-1354).
ggtagcgctcagcagattt

SEQ ID NO: 710293 - DNA, 19 bp, Mus musculus
  siRNA target sequence for Insm2 (NM_020287.1,1337-1355).
gtagcgctcagcagatttt

SEQ ID NO: 710294 - DNA, 19 bp, Mus musculus
  siRNA target sequence for Insm2 (NM_020287.1,1365-1383).
gtactgcccgtccactttt

SEQ ID NO: 710295 - DNA, 19 bp, Mus musculus
  siRNA target sequence for Insm2 (NM_020287.1,1372-1390).
ccgtccactttttttagct

SEQ ID NO: 710296 - DNA, 19 bp, Mus musculus
  siRNA target sequence for Insm2 (NM_020287.1,1398-1416).
cttgacccggcacatcaat

SEQ ID NO: 710297 - DNA, 19 bp, Mus musculus
  siRNA target sequence for Ors18 (NM_020290.1,17-35).
gcatgcttggaactaactt

SEQ ID NO: 710298 - DNA, 19 bp, Mus musculus
  siRNA target sequence for Ors18 (NM_020290.1,22-40).
cttggaactaacttcacta

SEQ ID NO: 710299 - DNA, 19 bp, Mus musculus
  siRNA target sequence for Ors18 (NM_020290.1,26-44).
gaactaacttcactatcat

SEQ ID NO: 710300 - DNA, 19 bp, Mus musculus
  siRNA target sequence for Ors18 (NM_020290.1,219-237).
gctggctggcactgatatt

SEQ ID NO: 710301 - DNA, 19 bp, Mus musculus
  siRNA target sequence for Ors18 (NM_020290.1,260-278).
ctaagaccttggctatctt

SEQ ID NO: 710302 - DNA, 19 bp, Mus musculus
  siRNA target sequence for Ors18 (NM_020290.1,351-369).
ggctgagtcgggaatcctt

SEQ ID NO: 710303 - DNA, 19 bp, Mus musculus
  siRNA target sequence for Ors18 (NM_020290.1,434-452).
cacctatggcaattggaaa

SEQ ID NO: 710304 - DNA, 19 bp, Mus musculus
  siRNA target sequence for Ors18 (NM_020290.1,475-493).
cggagcattgggacaattt

SEQ ID NO: 710305 - DNA, 19 bp, Mus musculus
  siRNA target sequence for Ors18 (NM_020290.1,543-561).
catcccacactcatattgt

SEQ ID NO: 710306 - DNA, 19 bp, Mus musculus
  siRNA target sequence for Ors18 (NM_020290.1,652-670).
gatgttgcactcattggta

SEQ ID NO: 710307 - DNA, 19 bp, Mus musculus
  siRNA target sequence for Ors18 (NM_020290.1,655-673).
gttgcactcattggtattt

SEQ ID NO: 710308 - DNA, 19 bp, Mus musculus
  siRNA target sequence for Ors18 (NM_020290.1,760-778).
ggggtcattctcctctttt

SEQ ID NO: 710309 - DNA, 19 bp, Mus musculus
  siRNA target sequence for Ors18 (NM_020290.1,763-781).
gtcattctcctctttttca

SEQ ID NO: 710310 - DNA, 19 bp, Mus musculus
  siRNA target sequence for Ors18 (NM_020290.1,904-922).
gctaagaccaagcaaatta

SEQ ID NO: 710311 - DNA, 19 bp, Mus musculus
  siRNA target sequence for Ors25 (NM_020291.1,48-66).
ggattccattctaatacct

SEQ ID NO: 710312 - DNA, 19 bp, Mus musculus
  siRNA target sequence for Ors25 (NM_020291.1,54-72).
cattctaataccttcttat

SEQ ID NO: 710313 - DNA, 19 bp, Mus musculus
  siRNA target sequence for Ors25 (NM_020291.1,184-202).
ctaatcgtctattctgtta

SEQ ID NO: 710314 - DNA, 19 bp, Mus musculus
  siRNA target sequence for Ors25 (NM_020291.1,189-207).
cgtctattctgttacttta

SEQ ID NO: 710315 - DNA, 19 bp, Mus musculus
  siRNA target sequence for Ors25 (NM_020291.1,210-228).
gggtaacttgaacataatt

SEQ ID NO: 710316 - DNA, 19 bp, Mus musculus
  siRNA target sequence for Ors25 (NM_020291.1,405-423).
ggcatttgggacatctgaa

SEQ ID NO: 710317 - DNA, 19 bp, Mus musculus
  siRNA target sequence for Ors25 (NM_020291.1,413-431).
ggacatctgaatctttctt

SEQ ID NO: 710318 - DNA, 19 bp, Mus musculus
  siRNA target sequence for Ors25 (NM_020291.1,569-587).
ctggttgctccttaaatct

SEQ ID NO: 710319 - DNA, 19 bp, Mus musculus
  siRNA target sequence for MOR32-4 (NM_020292.1,12-30).
caacagctcatggattcat

SEQ ID NO: 710320 - DNA, 19 bp, Mus musculus
  siRNA target sequence for MOR32-4 (NM_020292.1,95-113).
catttggaacagtctatct

SEQ ID NO: 710321 - DNA, 19 bp, Mus musculus
  siRNA target sequence for MOR32-4 (NM_020292.1,128-146).
ggaatgtcatcattctctt

SEQ ID NO: 710322 - DNA, 19 bp, Mus musculus
  siRNA target sequence for MOR32-4 (NM_020292.1,195-213).
ggccatactggctgttact

SEQ ID NO: 710323 - DNA, 19 bp, Mus musculus
  siRNA target sequence for MOR32-4 (NM_020292.1,197-215).
ccatactggctgttactga

SEQ ID NO: 710324 - DNA, 19 bp, Mus musculus
  siRNA target sequence for MOR32-4 (NM_020292.1,241-259).
cccagagcactcggtatat

SEQ ID NO: 710325 - DNA, 19 bp, Mus musculus
  siRNA target sequence for MOR32-4 (NM_020292.1,263-281).
ggtttggcttccataagat

SEQ ID NO: 710326 - DNA, 19 bp, Mus musculus
  siRNA target sequence for MOR32-4 (NM_020292.1,264-282).
gtttggcttccataagatt

SEQ ID NO: 710327 - DNA, 19 bp, Mus musculus
  siRNA target sequence for MOR32-4 (NM_020292.1,290-308).
gggactgtgtagctcaaat

SEQ ID NO: 710328 - DNA, 19 bp, Mus musculus
  siRNA target sequence for MOR32-4 (NM_020292.1,329-347).
caggcatcgaaacattcat

SEQ ID NO: 710329 - DNA, 19 bp, Mus musculus
  siRNA target sequence for MOR32-4 (NM_020292.1,341-359).
cattcatgcttgtagctat

SEQ ID NO: 710330 - DNA, 19 bp, Mus musculus
  siRNA target sequence for MOR32-4 (NM_020292.1,390-408).
ccctctccgatataacact

SEQ ID NO: 710331 - DNA, 19 bp, Mus musculus
  siRNA target sequence for MOR32-4 (NM_020292.1,391-409).
cctctccgatataacacta

SEQ ID NO: 710332 - DNA, 19 bp, Mus musculus
  siRNA target sequence for MOR32-4 (NM_020292.1,392-410).
ctctccgatataacactat

SEQ ID NO: 710333 - DNA, 19 bp, Mus musculus
  siRNA target sequence for MOR32-4 (NM_020292.1,422-440).
gaacaatctgcattattgt

SEQ ID NO: 710334 - DNA, 19 bp, Mus musculus
  siRNA target sequence for MOR32-4 (NM_020292.1,471-489).
ggtttttccacttatattt

SEQ ID NO: 710335 - DNA, 19 bp, Mus musculus
  siRNA target sequence for MOR32-4 (NM_020292.1,576-594).
cagcatcaaggttaatgta

SEQ ID NO: 710336 - DNA, 19 bp, Mus musculus
  siRNA target sequence for MOR32-4 (NM_020292.1,578-596).
gcatcaaggttaatgtatt

SEQ ID NO: 710337 - DNA, 19 bp, Mus musculus
  siRNA target sequence for MOR32-4 (NM_020292.1,582-600).
caaggttaatgtattattt

SEQ ID NO: 710338 - DNA, 19 bp, Mus musculus
  siRNA target sequence for MOR32-4 (NM_020292.1,602-620).
gattaatactcatatctat

SEQ ID NO: 710339 - DNA, 19 bp, Mus musculus
  siRNA target sequence for MOR32-4 (NM_020292.1,647-665).
ctctgtcctatgcgaaaat

SEQ ID NO: 710340 - DNA, 19 bp, Mus musculus
  siRNA target sequence for MOR32-4 (NM_020292.1,799-817).
cacaatattccacgatata

SEQ ID NO: 710341 - DNA, 19 bp, Mus musculus
  siRNA target sequence for 0610011H20Rik (NM_020329.1,73-91).
ccctcacccacgtcgaata

SEQ ID NO: 710342 - DNA, 19 bp, Mus musculus
  siRNA target sequence for 0610011H20Rik (NM_020329.1,152-170).
cgttgttggttttttgact

SEQ ID NO: 710343 - DNA, 19 bp, Mus musculus
  siRNA target sequence for 0610011H20Rik (NM_020329.1,186-204).
cgggagctacacacgattt

SEQ ID NO: 710344 - DNA, 19 bp, Mus musculus
  siRNA target sequence for 0610011H20Rik (NM_020329.1,235-253).
gcgtcaactggctgatcaa

SEQ ID NO: 710345 - DNA, 19 bp, Mus musculus
  siRNA target sequence for 0610011H20Rik (NM_020329.1,236-254).
cgtcaactggctgatcaaa

SEQ ID NO: 710346 - DNA, 19 bp, Mus musculus
  siRNA target sequence for 0610011H20Rik (NM_020329.1,295-313).
cagcagtgggcactaagta

SEQ ID NO: 710347 - DNA, 19 bp, Mus musculus
  siRNA target sequence for 0610011H20Rik (NM_020329.1,462-480).
gcctttctcgtctcctata

SEQ ID NO: 710348 - DNA, 19 bp, Mus musculus
  siRNA target sequence for 0610011H20Rik (NM_020329.1,549-567).
gccgtcgcctggttcatca

SEQ ID NO: 710349 - DNA, 19 bp, Mus musculus
  siRNA target sequence for 0610011H20Rik (NM_020329.1,550-568).
ccgtcgcctggttcatcat

SEQ ID NO: 710350 - DNA, 19 bp, Mus musculus
  siRNA target sequence for 0610011H20Rik (NM_020329.1,613-631).
ggcccatctccgagttttt

SEQ ID NO: 710351 - DNA, 19 bp, Mus musculus
  siRNA target sequence for 0610011H20Rik (NM_020329.1,704-722).
gaacagacagcgcaaactt

SEQ ID NO: 710352 - DNA, 19 bp, Mus musculus
  siRNA target sequence for 2700016D05Rik (NM_020483.2,51-69).
gcaatttatgcggaatatt

SEQ ID NO: 710353 - DNA, 19 bp, Mus musculus
  siRNA target sequence for 2700016D05Rik (NM_020483.2,181-199).
ggggtgatgaggatggtta

SEQ ID NO: 710354 - DNA, 19 bp, Mus musculus
  siRNA target sequence for 2700016D05Rik (NM_020483.2,223-241).
gtaagcagtcggaagatga

SEQ ID NO: 710355 - DNA, 19 bp, Mus musculus
  siRNA target sequence for 2700016D05Rik (NM_020483.2,268-286).
ctgatgacccaaaggataa

SEQ ID NO: 710356 - DNA, 19 bp, Mus musculus
  siRNA target sequence for 2700016D05Rik (NM_020483.2,270-288).
gatgacccaaaggataaca

SEQ ID NO: 710357 - DNA, 19 bp, Mus musculus
  siRNA target sequence for 2700016D05Rik (NM_020483.2,302-320).
gcgggatccccaggaatta

SEQ ID NO: 710358 - DNA, 19 bp, Mus musculus
  siRNA target sequence for 2700016D05Rik (NM_020483.2,315-333).
gaattagtggcctcctttt

SEQ ID NO: 710359 - DNA, 19 bp, Mus musculus
  siRNA target sequence for 2700016D05Rik (NM_020483.2,336-354).
gaaagggttcgcaacatgt

SEQ ID NO: 710360 - DNA, 19 bp, Mus musculus
  siRNA target sequence for 2700016D05Rik (NM_020483.2,355-373).
cacccgatgaaatcaagat

SEQ ID NO: 710361 - DNA, 19 bp, Mus musculus
  siRNA target sequence for 2700016D05Rik (NM_020483.2,381-399).
gaaccgcctggcagatgtt

SEQ ID NO: 710362 - DNA, 19 bp, Mus musculus
  siRNA target sequence for 2700016D05Rik (NM_020483.2,384-402).
ccgcctggcagatgttcaa

SEQ ID NO: 710363 - DNA, 19 bp, Mus musculus
  siRNA target sequence for 2700016D05Rik (NM_020483.2,385-403).
cgcctggcagatgttcaaa

SEQ ID NO: 710364 - DNA, 19 bp, Mus musculus
  siRNA target sequence for 2700016D05Rik (NM_020483.2,428-446).
gctctacgagcggaagata

SEQ ID NO: 710365 - DNA, 19 bp, Mus musculus
  siRNA target sequence for 2700016D05Rik (NM_020483.2,429-447).
ctctacgagcggaagataa

SEQ ID NO: 710366 - DNA, 19 bp, Mus musculus
  siRNA target sequence for 2700016D05Rik (NM_020483.2,454-472).
ggatggatatgaactacat

SEQ ID NO: 710367 - DNA, 19 bp, Mus musculus
  siRNA target sequence for 2700016D05Rik (NM_020483.2,502-520).
ccagcatctacgagaaact

SEQ ID NO: 710368 - DNA, 19 bp, Mus musculus
  siRNA target sequence for 2700016D05Rik (NM_020483.2,551-569).
caccaactacccaaaggat

SEQ ID NO: 710369 - DNA, 19 bp, Mus musculus
  siRNA target sequence for 2700016D05Rik (NM_020483.2,553-571).
ccaactacccaaaggatat

SEQ ID NO: 710370 - DNA, 19 bp, Mus musculus
  siRNA target sequence for 2700016D05Rik (NM_020483.2,592-610).
ctgaagactcctactatga

SEQ ID NO: 710371 - DNA, 19 bp, Mus musculus
  siRNA target sequence for 2700016D05Rik (NM_020483.2,666-684).
gagcgaaccaaaattgagt

SEQ ID NO: 710372 - DNA, 19 bp, Mus musculus
  siRNA target sequence for T2r5 (NM_020501.1,154-172).
gcaacttccaggattttta

SEQ ID NO: 710373 - DNA, 19 bp, Mus musculus
  siRNA target sequence for T2r5 (NM_020501.1,177-195).
gtggctattaactttagat

SEQ ID NO: 710374 - DNA, 19 bp, Mus musculus
  siRNA target sequence for T2r5 (NM_020501.1,202-220).
gcaaagctattctatccaa

SEQ ID NO: 710375 - DNA, 19 bp, Mus musculus
  siRNA target sequence for T2r5 (NM_020501.1,208-226).
ctattctatccaagtaagt

SEQ ID NO: 710376 - DNA, 19 bp, Mus musculus
  siRNA target sequence for T2r5 (NM_020501.1,402-420).
ggggtgtttgctaacttca

SEQ ID NO: 710377 - DNA, 19 bp, Mus musculus
  siRNA target sequence for T2r5 (NM_020501.1,403-421).
gggtgtttgctaacttcat

SEQ ID NO: 710378 - DNA, 19 bp, Mus musculus
  siRNA target sequence for T2r5 (NM_020501.1,412-430).
ctaacttcatgggtaatct

SEQ ID NO: 710379 - DNA, 19 bp, Mus musculus
  siRNA target sequence for T2r5 (NM_020501.1,423-441).
ggtaatctccttctcattt

SEQ ID NO: 710380 - DNA, 19 bp, Mus musculus
  siRNA target sequence for T2r5 (NM_020501.1,431-449).
ccttctcatttgttgtgaa

SEQ ID NO: 710381 - DNA, 19 bp, Mus musculus
  siRNA target sequence for T2r5 (NM_020501.1,459-477).
ggacggtaaagtgaatcat

SEQ ID NO: 710382 - DNA, 19 bp, Mus musculus
  siRNA target sequence for T2r5 (NM_020501.1,460-478).
gacggtaaagtgaatcata

SEQ ID NO: 710383 - DNA, 19 bp, Mus musculus
  siRNA target sequence for T2r5 (NM_020501.1,462-480).
cggtaaagtgaatcataga

SEQ ID NO: 710384 - DNA, 19 bp, Mus musculus
  siRNA target sequence for T2r5 (NM_020501.1,463-481).
ggtaaagtgaatcatagaa

SEQ ID NO: 710385 - DNA, 19 bp, Mus musculus
  siRNA target sequence for T2r5 (NM_020501.1,521-539).
ctattaactacgttttcct

SEQ ID NO: 710386 - DNA, 19 bp, Mus musculus
  siRNA target sequence for T2r5 (NM_020501.1,531-549).
cgttttcctcaatattgga

SEQ ID NO: 710387 - DNA, 19 bp, Mus musculus
  siRNA target sequence for T2r5 (NM_020501.1,730-748).
ggtgtttcaatagaaatta

SEQ ID NO: 710388 - DNA, 19 bp, Mus musculus
  siRNA target sequence for T2r5 (NM_020501.1,731-749).
gtgtttcaatagaaattat

SEQ ID NO: 710389 - DNA, 19 bp, Mus musculus
  siRNA target sequence for T2r5 (NM_020501.1,795-813).
cacaactgcatccatatat

SEQ ID NO: 710390 - DNA, 19 bp, Mus musculus
  siRNA target sequence for T2r5 (NM_020501.1,814-832).
ccttgctgtcactcattta

SEQ ID NO: 710391 - DNA, 19 bp, Mus musculus
  siRNA target sequence for T2r5 (NM_020501.1,821-839).
gtcactcatttattctaat

SEQ ID NO: 710392 - DNA, 19 bp, Mus musculus
  siRNA target sequence for T2r5 (NM_020501.1,825-843).
ctcatttattctaattcta

SEQ ID NO: 710393 - DNA, 19 bp, Mus musculus
  siRNA target sequence for T2r5 (NM_020501.1,855-873).
gctaaagcaagcctttgta

SEQ ID NO: 710394 - DNA, 19 bp, Mus musculus
  siRNA target sequence for T2r5 (NM_020501.1,877-895).
gtactgcaaggattaaagt

SEQ ID NO: 710395 - DNA, 19 bp, Mus musculus
  siRNA target sequence for T2r5 (NM_020501.1,880-898).
ctgcaaggattaaagttct

SEQ ID NO: 710396 - DNA, 19 bp, Mus musculus
  siRNA target sequence for T2r5 (NM_020501.1,882-900).
gcaaggattaaagttcttt

SEQ ID NO: 710397 - DNA, 19 bp, Mus musculus
  siRNA target sequence for T2r5 (NM_020501.1,883-901).
caaggattaaagttctttt

SEQ ID NO: 710398 - DNA, 19 bp, Mus musculus
  siRNA target sequence for T2r8 (NM_020502.1,58-76).
ggaatcattgcaaatctat

SEQ ID NO: 710399 - DNA, 19 bp, Mus musculus
  siRNA target sequence for T2r8 (NM_020502.1,105-123).
ggtcaacagtcgcagaatt

SEQ ID NO: 710400 - DNA, 19 bp, Mus musculus
  siRNA target sequence for T2r8 (NM_020502.1,149-167).
gcttggccatcactagatt

SEQ ID NO: 710401 - DNA, 19 bp, Mus musculus
  siRNA target sequence for T2r8 (NM_020502.1,201-219).
ctacattgctacaaatact

SEQ ID NO: 710402 - DNA, 19 bp, Mus musculus
  siRNA target sequence for T2r8 (NM_020502.1,218-236).
ctggaaggtcagtctactt

SEQ ID NO: 710403 - DNA, 19 bp, Mus musculus
  siRNA target sequence for T2r8 (NM_020502.1,220-238).
ggaaggtcagtctactttt

SEQ ID NO: 710404 - DNA, 19 bp, Mus musculus
  siRNA target sequence for T2r8 (NM_020502.1,229-247).
gtctacttttccacatttt

SEQ ID NO: 710405 - DNA, 19 bp, Mus musculus
  siRNA target sequence for T2r8 (NM_020502.1,264-282).
gtttctggatgcaaacagt

SEQ ID NO: 710406 - DNA, 19 bp, Mus musculus
  siRNA target sequence for T2r8 (NM_020502.1,287-305).
ggttagtgaccattctgaa

SEQ ID NO: 710407 - DNA, 19 bp, Mus musculus
  siRNA target sequence for T2r8 (NM_020502.1,312-330).
gtattgtgtgaagattact

SEQ ID NO: 710408 - DNA, 19 bp, Mus musculus
  siRNA target sequence for T2r8 (NM_020502.1,355-373).
ctgttgaaacggactatct

SEQ ID NO: 710409 - DNA, 19 bp, Mus musculus
  siRNA target sequence for T2r8 (NM_020502.1,357-375).
gttgaaacggactatctct

SEQ ID NO: 710410 - DNA, 19 bp, Mus musculus
  siRNA target sequence for T2r8 (NM_020502.1,364-382).
cggactatctctatgaaga

SEQ ID NO: 710411 - DNA, 19 bp, Mus musculus
  siRNA target sequence for T2r8 (NM_020502.1,423-441).
caccactctcctatattat

SEQ ID NO: 710412 - DNA, 19 bp, Mus musculus
  siRNA target sequence for T2r8 (NM_020502.1,460-478).
cgttttcctgaacacataa

SEQ ID NO: 710413 - DNA, 19 bp, Mus musculus
  siRNA target sequence for T2r8 (NM_020502.1,483-501).
gagaaatgacacgtcattt

SEQ ID NO: 710414 - DNA, 19 bp, Mus musculus
  siRNA target sequence for T2r8 (NM_020502.1,485-503).
gaaatgacacgtcatttga

SEQ ID NO: 710415 - DNA, 19 bp, Mus musculus
  siRNA target sequence for T2r8 (NM_020502.1,540-558).
ggtcctgaactcacttcta

SEQ ID NO: 710416 - DNA, 19 bp, Mus musculus
  siRNA target sequence for T2r8 (NM_020502.1,567-585).
gctcaatgtgacttttgct

SEQ ID NO: 710417 - DNA, 19 bp, Mus musculus
  siRNA target sequence for T2r8 (NM_020502.1,583-601).
gcttccttgttaatacatt

SEQ ID NO: 710418 - DNA, 19 bp, Mus musculus
  siRNA target sequence for T2r8 (NM_020502.1,698-716).
gtttcctcgtgctctacat

SEQ ID NO: 710419 - DNA, 19 bp, Mus musculus
  siRNA target sequence for T2r8 (NM_020502.1,703-721).
ctcgtgctctacattccat

SEQ ID NO: 710420 - DNA, 19 bp, Mus musculus
  siRNA target sequence for T2r8 (NM_020502.1,705-723).
cgtgctctacattccatat

SEQ ID NO: 710421 - DNA, 19 bp, Mus musculus
  siRNA target sequence for T2r8 (NM_020502.1,714-732).
cattccatattcaattgct

SEQ ID NO: 710422 - DNA, 19 bp, Mus musculus
  siRNA target sequence for T2r8 (NM_020502.1,739-757).
ctctatcttccttcctata

SEQ ID NO: 710423 - DNA, 19 bp, Mus musculus
  siRNA target sequence for T2r8 (NM_020502.1,752-770).
cctatatgaggaagaatct

SEQ ID NO: 710424 - DNA, 19 bp, Mus musculus
  siRNA target sequence for T2r8 (NM_020502.1,840-858).
cacacatcataaactgaaa

SEQ ID NO: 710425 - DNA, 19 bp, Mus musculus
  siRNA target sequence for T2r8 (NM_020502.1,844-862).
catcataaactgaaagcta

SEQ ID NO: 710426 - DNA, 19 bp, Mus musculus
  siRNA target sequence for T2r19 (NM_020503.1,39-57).
ggtagtgcagtttttaact

SEQ ID NO: 710427 - DNA, 19 bp, Mus musculus
  siRNA target sequence for T2r19 (NM_020503.1,94-112).
gccatcgacttgatcatgt

SEQ ID NO: 710428 - DNA, 19 bp, Mus musculus
  siRNA target sequence for T2r19 (NM_020503.1,127-145).
ccactggatctgcttcttt

SEQ ID NO: 710429 - DNA, 19 bp, Mus musculus
  siRNA target sequence for T2r19 (NM_020503.1,128-146).
cactggatctgcttctttt

SEQ ID NO: 710430 - DNA, 19 bp, Mus musculus
  siRNA target sequence for T2r19 (NM_020503.1,216-234).
ggtgagacacacgttattt

SEQ ID NO: 710431 - DNA, 19 bp, Mus musculus
  siRNA target sequence for T2r19 (NM_020503.1,219-237).
gagacacacgttatttgct

SEQ ID NO: 710432 - DNA, 19 bp, Mus musculus
  siRNA target sequence for T2r19 (NM_020503.1,225-243).
cacgttatttgctgacaat

SEQ ID NO: 710433 - DNA, 19 bp, Mus musculus
  siRNA target sequence for T2r19 (NM_020503.1,244-262).
gttacctttgtctacatta

SEQ ID NO: 710434 - DNA, 19 bp, Mus musculus
  siRNA target sequence for T2r19 (NM_020503.1,287-305).
ccacatggcttggtgtttt

SEQ ID NO: 710435 - DNA, 19 bp, Mus musculus
  siRNA target sequence for T2r19 (NM_020503.1,393-411).
ggcatctgtggtctatgta

SEQ ID NO: 710436 - DNA, 19 bp, Mus musculus
  siRNA target sequence for T2r19 (NM_020503.1,394-412).
gcatctgtggtctatgtaa

SEQ ID NO: 710437 - DNA, 19 bp, Mus musculus
  siRNA target sequence for T2r19 (NM_020503.1,398-416).
ctgtggtctatgtaactgt

SEQ ID NO: 710438 - DNA, 19 bp, Mus musculus
  siRNA target sequence for T2r19 (NM_020503.1,403-421).
gtctatgtaactgttacta

SEQ ID NO: 710439 - DNA, 19 bp, Mus musculus
  siRNA target sequence for T2r19 (NM_020503.1,405-423).
ctatgtaactgttactact

SEQ ID NO: 710440 - DNA, 19 bp, Mus musculus
  siRNA target sequence for T2r19 (NM_020503.1,409-427).
gtaactgttactactttca

SEQ ID NO: 710441 - DNA, 19 bp, Mus musculus
  siRNA target sequence for T2r19 (NM_020503.1,435-453).
cagagagacttcagaactt

SEQ ID NO: 710442 - DNA, 19 bp, Mus musculus
  siRNA target sequence for T2r19 (NM_020503.1,451-469).
cttcctaagcaaatcttta

SEQ ID NO: 710443 - DNA, 19 bp, Mus musculus
  siRNA target sequence for T2r19 (NM_020503.1,516-534).
cacactactctcagtcttt

SEQ ID NO: 710444 - DNA, 19 bp, Mus musculus
  siRNA target sequence for T2r19 (NM_020503.1,544-562).
ctcacactaccatttctca

SEQ ID NO: 710445 - DNA, 19 bp, Mus musculus
  siRNA target sequence for T2r19 (NM_020503.1,548-566).
cactaccatttctcatctt

SEQ ID NO: 710446 - DNA, 19 bp, Mus musculus
  siRNA target sequence for T2r19 (NM_020503.1,670-688).
gcgatgctctccattctgt

SEQ ID NO: 710447 - DNA, 19 bp, Mus musculus
  siRNA target sequence for T2r19 (NM_020503.1,777-795).
ctgcttattggttattggt

SEQ ID NO: 710448 - DNA, 19 bp, Mus musculus
  siRNA target sequence for T2r19 (NM_020503.1,779-797).
gcttattggttattggtat

SEQ ID NO: 710449 - DNA, 19 bp, Mus musculus
  siRNA target sequence for T2r19 (NM_020503.1,806-824).
ccttacactcgattgtctt

SEQ ID NO: 710450 - DNA, 19 bp, Mus musculus
  siRNA target sequence for T2r19 (NM_020503.1,807-825).
cttacactcgattgtctta

SEQ ID NO: 710451 - DNA, 19 bp, Mus musculus
  siRNA target sequence for T2r19 (NM_020503.1,811-829).
cactcgattgtcttaattt

SEQ ID NO: 710452 - DNA, 19 bp, Mus musculus
  siRNA target sequence for T2r19 (NM_020503.1,843-861).
gctgaaacgaaatgcaaaa

SEQ ID NO: 710453 - DNA, 19 bp, Mus musculus
  siRNA target sequence for Tob2 (NM_020507.2,938-956).
ggttccactaagatgaaga

SEQ ID NO: 710454 - DNA, 19 bp, Mus musculus
  siRNA target sequence for Tob2 (NM_020507.2,939-957).
gttccactaagatgaagaa

SEQ ID NO: 710455 - DNA, 19 bp, Mus musculus
  siRNA target sequence for Brd4 (NM_020508.2,302-320).
ctagaaacctcccaaatgt

SEQ ID NO: 710456 - DNA, 19 bp, Mus musculus
  siRNA target sequence for Brd4 (NM_020508.2,305-323).
gaaacctcccaaatgtcta

SEQ ID NO: 710457 - DNA, 19 bp, Mus musculus
  siRNA target sequence for Brd4 (NM_020508.2,340-358).
ccaaccccagccagcaaat

SEQ ID NO: 710458 - DNA, 19 bp, Mus musculus
  siRNA target sequence for Brd4 (NM_020508.2,418-436).
gacaaaccaactgcaatat

SEQ ID NO: 710459 - DNA, 19 bp, Mus musculus
  siRNA target sequence for Brd4 (NM_020508.2,451-469).
gctcaagacactatggaaa

SEQ ID NO: 710460 - DNA, 19 bp, Mus musculus
  siRNA target sequence for Brd4 (NM_020508.2,521-539).
ctccctgattactataaga

SEQ ID NO: 710461 - DNA, 19 bp, Mus musculus
  siRNA target sequence for Brd4 (NM_020508.2,523-541).
ccctgattactataagatt

SEQ ID NO: 710462 - DNA, 19 bp, Mus musculus
  siRNA target sequence for Brd4 (NM_020508.2,577-595).
gcgcttggaaaacaactat

SEQ ID NO: 710463 - DNA, 19 bp, Mus musculus
  siRNA target sequence for Brd4 (NM_020508.2,578-596).
cgcttggaaaacaactatt

SEQ ID NO: 710464 - DNA, 19 bp, Mus musculus
  siRNA target sequence for Brd4 (NM_020508.2,600-618).
ggaatgctcaggaatgtat

SEQ ID NO: 710465 - DNA, 19 bp, Mus musculus
  siRNA target sequence for Brd4 (NM_020508.2,669-687).
gagatgacatcgtcttaat

SEQ ID NO: 710466 - DNA, 19 bp, Mus musculus
  siRNA target sequence for Brd4 (NM_020508.2,709-727).
cttcttgcaaaaaatcaat

SEQ ID NO: 710467 - DNA, 19 bp, Mus musculus
  siRNA target sequence for Brd4 (NM_020508.2,712-730).
cttgcaaaaaatcaatgaa

SEQ ID NO: 710468 - DNA, 19 bp, Mus musculus
  siRNA target sequence for Brd4 (NM_020508.2,757-775).
gatagtccaggcaaaagga

SEQ ID NO: 710469 - DNA, 19 bp, Mus musculus
  siRNA target sequence for Brd4 (NM_020508.2,816-834).
gtgtatccacggtaccaaa

SEQ ID NO: 710470 - DNA, 19 bp, Mus musculus
  siRNA target sequence for Brd4 (NM_020508.2,826-844).
ggtaccaaacacaactcaa

SEQ ID NO: 710471 - DNA, 19 bp, Mus musculus
  siRNA target sequence for Brd4 (NM_020508.2,835-853).
cacaactcaagcatcaact

SEQ ID NO: 710472 - DNA, 19 bp, Mus musculus
  siRNA target sequence for Brd4 (NM_020508.2,1411-1429).
ctactgtgacatcatcaaa

SEQ ID NO: 710473 - DNA, 19 bp, Mus musculus
  siRNA target sequence for Brd4 (NM_020508.2,1414-1432).
ctgtgacatcatcaaacat

SEQ ID NO: 710474 - DNA, 19 bp, Mus musculus
  siRNA target sequence for Brd4 (NM_020508.2,1447-1465).
cacaatcaagtctaaacta

SEQ ID NO: 710475 - DNA, 19 bp, Mus musculus
  siRNA target sequence for Brd4 (NM_020508.2,1500-1518).
gtgctgatgtccgattgat

SEQ ID NO: 710476 - DNA, 19 bp, Mus musculus
  siRNA target sequence for Brd4 (NM_020508.2,1505-1523).
gatgtccgattgatgttct

SEQ ID NO: 710477 - DNA, 19 bp, Mus musculus
  siRNA target sequence for Brd4 (NM_020508.2,1561-1579).
ggtagccatggctcgaaaa

SEQ ID NO: 710478 - DNA, 19 bp, Mus musculus
  siRNA target sequence for Brd4 (NM_020508.2,1659-1677).
cagtgccaccccctacaaa

SEQ ID NO: 710479 - DNA, 19 bp, Mus musculus
  siRNA target sequence for Brd4 (NM_020508.2,1682-1700).
gtagccccaccctcatcta

SEQ ID NO: 710480 - DNA, 19 bp, Mus musculus
  siRNA target sequence for Brd4 (NM_020508.2,2023-2041).
caagccgcctcccacatat

SEQ ID NO: 710481 - DNA, 19 bp, Mus musculus
  siRNA target sequence for Brd4 (NM_020508.2,2027-2045).
ccgcctcccacatatgaat

SEQ ID NO: 710482 - DNA, 19 bp, Mus musculus
  siRNA target sequence for Brd4 (NM_020508.2,2029-2047).
gcctcccacatatgaatca

SEQ ID NO: 710483 - DNA, 19 bp, Mus musculus
  siRNA target sequence for Brd4 (NM_020508.2,2062-2080).
gtgtaagcccatgtcttat

SEQ ID NO: 710484 - DNA, 19 bp, Mus musculus
  siRNA target sequence for Brd4 (NM_020508.2,2064-2082).
gtaagcccatgtcttatga

SEQ ID NO: 710485 - DNA, 19 bp, Mus musculus
  siRNA target sequence for Brd4 (NM_020508.2,2086-2104).
gaagcggcagctaagtcta

SEQ ID NO: 710486 - DNA, 19 bp, Mus musculus
  siRNA target sequence for Brd4 (NM_020508.2,2089-2107).
gcggcagctaagtctagat

SEQ ID NO: 710487 - DNA, 19 bp, Mus musculus
  siRNA target sequence for Brd4 (NM_020508.2,2090-2108).
cggcagctaagtctagata

SEQ ID NO: 710488 - DNA, 19 bp, Mus musculus
  siRNA target sequence for Brd4 (NM_020508.2,2091-2109).
ggcagctaagtctagatat

SEQ ID NO: 710489 - DNA, 19 bp, Mus musculus
  siRNA target sequence for Brd4 (NM_020508.2,2096-2114).
ctaagtctagatatcaaca

SEQ ID NO: 710490 - DNA, 19 bp, Mus musculus
  siRNA target sequence for Brd4 (NM_020508.2,2128-2146).
gaagctaggccgtgtagta

SEQ ID NO: 710491 - DNA, 19 bp, Mus musculus
  siRNA target sequence for Brd4 (NM_020508.2,2135-2153).
ggccgtgtagtacacataa

SEQ ID NO: 710492 - DNA, 19 bp, Mus musculus
  siRNA target sequence for Brd4 (NM_020508.2,2136-2154).
gccgtgtagtacacataat

SEQ ID NO: 710493 - DNA, 19 bp, Mus musculus
  siRNA target sequence for Brd4 (NM_020508.2,2137-2155).
ccgtgtagtacacataatt

SEQ ID NO: 710494 - DNA, 19 bp, Mus musculus
  siRNA target sequence for Brd4 (NM_020508.2,2141-2159).
gtagtacacataattcagt

SEQ ID NO: 710495 - DNA, 19 bp, Mus musculus
  siRNA target sequence for Brd4 (NM_020508.2,2182-2200).
ctccaaccccgatgagatt

SEQ ID NO: 710496 - DNA, 19 bp, Mus musculus
  siRNA target sequence for Brd4 (NM_020508.2,2218-2236).
cctgaagccatctacacta

SEQ ID NO: 710497 - DNA, 19 bp, Mus musculus
  siRNA target sequence for Brd4 (NM_020508.2,2240-2258).
gagttggagcgatatgtca

SEQ ID NO: 710498 - DNA, 19 bp, Mus musculus
  siRNA target sequence for Brd4 (NM_020508.2,2260-2278).
ctcctgtttgcggaagaaa

SEQ ID NO: 710499 - DNA, 19 bp, Mus musculus
  siRNA target sequence for Brd4 (NM_020508.2,2440-2458).
gagggaccagaaaaagcat

SEQ ID NO: 710500 - DNA, 19 bp, Mus musculus
  siRNA target sequence for Brd4 (NM_020508.2,3247-3265).
gccatccatgcccttttct

SEQ ID NO: 710501 - DNA, 19 bp, Mus musculus
  siRNA target sequence for Brd4 (NM_020508.2,3256-3274).
gcccttttctgctcatatt

SEQ ID NO: 710502 - DNA, 19 bp, Mus musculus
  siRNA target sequence for Brd4 (NM_020508.2,3258-3276).
ccttttctgctcatattca

SEQ ID NO: 710503 - DNA, 19 bp, Mus musculus
  siRNA target sequence for Brd4 (NM_020508.2,3439-3457).
ctctccgcttatgatacat

SEQ ID NO: 710504 - DNA, 19 bp, Mus musculus
  siRNA target sequence for Brd4 (NM_020508.2,3691-3709).
gattcactcaccaatcatt

SEQ ID NO: 710505 - DNA, 19 bp, Mus musculus
  siRNA target sequence for Brd4 (NM_020508.2,3750-3768).
ccaagcacccagagaacat

SEQ ID NO: 710506 - DNA, 19 bp, Mus musculus
  siRNA target sequence for Brd4 (NM_020508.2,4011-4029).
gtgacagctttgagcattt

SEQ ID NO: 710507 - DNA, 19 bp, Mus musculus
  siRNA target sequence for Brd4 (NM_020508.2,4132-4150).
gagccgagaggatgaagat

SEQ ID NO: 710508 - DNA, 19 bp, Mus musculus
  siRNA target sequence for Lenep (NM_020517.2,229-247).
ccaggtgcctgtcattaaa

SEQ ID NO: 710509 - DNA, 19 bp, Mus musculus
  siRNA target sequence for Lenep (NM_020517.2,290-308).
gtcgcctacatccttcttt

SEQ ID NO: 710510 - DNA, 19 bp, Mus musculus
  siRNA target sequence for 2210413P10Rik (NM_020518.1,127-145).
gagctgagctgcagttaca

SEQ ID NO: 710511 - DNA, 19 bp, Mus musculus
  siRNA target sequence for 2210413P10Rik (NM_020518.1,149-167).
catcggtgggcgacaactt

SEQ ID NO: 710512 - DNA, 19 bp, Mus musculus
  siRNA target sequence for 2210413P10Rik (NM_020518.1,212-230).
cgtccgtgcccgttctgta

SEQ ID NO: 710513 - DNA, 19 bp, Mus musculus
  siRNA target sequence for 2210413P10Rik (NM_020518.1,215-233).
ccgtgcccgttctgtactt

SEQ ID NO: 710514 - DNA, 19 bp, Mus musculus
  siRNA target sequence for 2210413P10Rik (NM_020518.1,249-267).
gtatcccactggctctaaa

SEQ ID NO: 710515 - DNA, 19 bp, Mus musculus
  siRNA target sequence for 2210413P10Rik (NM_020518.1,395-413).
ccaacgggttggggttaat

SEQ ID NO: 710516 - DNA, 19 bp, Mus musculus
  siRNA target sequence for 2210413P10Rik (NM_020518.1,407-425).
ggttaatcaaccttactgt

SEQ ID NO: 710517 - DNA, 19 bp, Mus musculus
  siRNA target sequence for 2210413P10Rik (NM_020518.1,572-590).
ctggtagcatggttcaaga

SEQ ID NO: 710518 - DNA, 19 bp, Mus musculus
  siRNA target sequence for 2210413P10Rik (NM_020518.1,602-620).
gccagctcattcttaccaa

SEQ ID NO: 710519 - DNA, 19 bp, Mus musculus
  siRNA target sequence for 2210413P10Rik (NM_020518.1,724-742).
cgagtagctgggactctta

SEQ ID NO: 710520 - DNA, 19 bp, Mus musculus
  siRNA target sequence for 2210413P10Rik (NM_020518.1,866-884).
ccgctcctggggtttttga

SEQ ID NO: 710521 - DNA, 19 bp, Mus musculus
  siRNA target sequence for V1rb6 (NM_020522.1,460-478).
gctacccccaatttaactt

SEQ ID NO: 710522 - DNA, 19 bp, Mus musculus
  siRNA target sequence for V1rb6 (NM_020522.1,871-889).
gaaaagcatatgactaaga

SEQ ID NO: 710523 - DNA, 19 bp, Mus musculus
  siRNA target sequence for V1rb6 (NM_020522.1,877-895).
catatgactaagattttga

SEQ ID NO: 710524 - DNA, 19 bp, Mus musculus
  siRNA target sequence for 1110036E10Rik (NM_020558.2,54-72).
ggcaggtgaagaaatgaat

SEQ ID NO: 710525 - DNA, 19 bp, Mus musculus
  siRNA target sequence for 1110036E10Rik (NM_020558.2,88-106).
gaaattcacgagtctttaa

SEQ ID NO: 710526 - DNA, 19 bp, Mus musculus
  siRNA target sequence for 1110036E10Rik (NM_020558.2,186-204).
gaagttggacccattggaa

SEQ ID NO: 710527 - DNA, 19 bp, Mus musculus
  siRNA target sequence for 1110036E10Rik (NM_020558.2,208-226).
gcaaaggtggatttagttt

SEQ ID NO: 710528 - DNA, 19 bp, Mus musculus
  siRNA target sequence for 1110036E10Rik (NM_020558.2,223-241).
gtttctgcatacaccttaa

SEQ ID NO: 710529 - DNA, 19 bp, Mus musculus
  siRNA target sequence for 1110036E10Rik (NM_020558.2,255-273).
ggtttatttggcaactcaa

SEQ ID NO: 710530 - DNA, 19 bp, Mus musculus
  siRNA target sequence for 1110036E10Rik (NM_020558.2,386-404).
gtgctgcttcgagatttgt

SEQ ID NO: 710531 - DNA, 19 bp, Mus musculus
  siRNA target sequence for 1110036E10Rik (NM_020558.2,388-406).
gctgcttcgagatttgtca

SEQ ID NO: 710532 - DNA, 19 bp, Mus musculus
  siRNA target sequence for 1110036E10Rik (NM_020558.2,392-410).
cttcgagatttgtcaagaa

SEQ ID NO: 710533 - DNA, 19 bp, Mus musculus
  siRNA target sequence for 1110036E10Rik (NM_020558.2,415-433).
ctctgggaacccaaagcaa

SEQ ID NO: 710534 - DNA, 19 bp, Mus musculus
  siRNA target sequence for U90926 (NM_020562.1,181-199).
ctgtgtaccagtatcaaga

SEQ ID NO: 710535 - DNA, 19 bp, Mus musculus
  siRNA target sequence for U90926 (NM_020562.1,183-201).
gtgtaccagtatcaagatt

SEQ ID NO: 710536 - DNA, 19 bp, Mus musculus
  siRNA target sequence for U90926 (NM_020562.1,383-401).
ggggagattcaagatagta

SEQ ID NO: 710537 - DNA, 19 bp, Mus musculus
  siRNA target sequence for Mja1l (NM_020563.1,137-155).
cccagaagagtatgttaat

SEQ ID NO: 710538 - DNA, 19 bp, Mus musculus
  siRNA target sequence for Mja1l (NM_020563.1,226-244).
ggacgttgacgaaggaaaa

SEQ ID NO: 710539 - DNA, 19 bp, Mus musculus
  siRNA target sequence for Mja1l (NM_020563.1,248-266).
ggaacatgcggctgctttt

SEQ ID NO: 710540 - DNA, 19 bp, Mus musculus
  siRNA target sequence for Mja1l (NM_020563.1,249-267).
gaacatgcggctgctttta

SEQ ID NO: 710541 - DNA, 19 bp, Mus musculus
  siRNA target sequence for Mja1l (NM_020563.1,255-273).
gcggctgcttttatcgaaa

SEQ ID NO: 710542 - DNA, 19 bp, Mus musculus
  siRNA target sequence for Mja1l (NM_020563.1,256-274).
cggctgcttttatcgaaaa

SEQ ID NO: 710543 - DNA, 19 bp, Mus musculus
  siRNA target sequence for Mja1l (NM_020563.1,257-275).
ggctgcttttatcgaaaaa

SEQ ID NO: 710544 - DNA, 19 bp, Mus musculus
  siRNA target sequence for Mja1l (NM_020563.1,279-297).
gaatccagtccgttatgtt

SEQ ID NO: 710545 - DNA, 19 bp, Mus musculus
  siRNA target sequence for Park7 (NM_020569.1,180-198).
gcggcgagccgggatcaaa

SEQ ID NO: 710546 - DNA, 19 bp, Mus musculus
  siRNA target sequence for Park7 (NM_020569.1,182-200).
ggcgagccgggatcaaagt

SEQ ID NO: 710547 - DNA, 19 bp, Mus musculus
  siRNA target sequence for Park7 (NM_020569.1,184-202).
cgagccgggatcaaagtca

SEQ ID NO: 710548 - DNA, 19 bp, Mus musculus
  siRNA target sequence for Park7 (NM_020569.1,243-261).
ccgtgatgtaatgatttgt

SEQ ID NO: 710549 - DNA, 19 bp, Mus musculus
  siRNA target sequence for Park7 (NM_020569.1,270-288).
cagtctggaagatgcaaaa

SEQ ID NO: 710550 - DNA, 19 bp, Mus musculus
  siRNA target sequence for Park7 (NM_020569.1,312-330).
ggttcttccaggaggaaat

SEQ ID NO: 710551 - DNA, 19 bp, Mus musculus
  siRNA target sequence for Park7 (NM_020569.1,331-349).
ctgggtgcacagaatttat

SEQ ID NO: 710552 - DNA, 19 bp, Mus musculus
  siRNA target sequence for Park7 (NM_020569.1,333-351).
gggtgcacagaatttatct

SEQ ID NO: 710553 - DNA, 19 bp, Mus musculus
  siRNA target sequence for Park7 (NM_020569.1,335-353).
gtgcacagaatttatctga

SEQ ID NO: 710554 - DNA, 19 bp, Mus musculus
  siRNA target sequence for Park7 (NM_020569.1,441-459).
ggctcacgaagtaggtttt

SEQ ID NO: 710555 - DNA, 19 bp, Mus musculus
  siRNA target sequence for Park7 (NM_020569.1,445-463).
cacgaagtaggttttggat

SEQ ID NO: 710556 - DNA, 19 bp, Mus musculus
  siRNA target sequence for Park7 (NM_020569.1,482-500).
cactggctaaggacaaaat

SEQ ID NO: 710557 - DNA, 19 bp, Mus musculus
  siRNA target sequence for Park7 (NM_020569.1,576-594).
ggggaccagctttgagttt

SEQ ID NO: 710558 - DNA, 19 bp, Mus musculus
  siRNA target sequence for Park7 (NM_020569.1,613-631).
gcactcgtggggaaagaca

SEQ ID NO: 710559 - DNA, 19 bp, Mus musculus
  siRNA target sequence for Park7 (NM_020569.1,652-670).
ccgcttgttctcaaagact

SEQ ID NO: 710560 - DNA, 19 bp, Mus musculus
  siRNA target sequence for U55872 (NM_020571.1,287-305).
gtacttatctcaattgaaa

SEQ ID NO: 710561 - DNA, 19 bp, Mus musculus
  siRNA target sequence for U55872 (NM_020571.1,383-401).
gaaaaacagtcagtaacaa

SEQ ID NO: 710562 - DNA, 19 bp, Mus musculus
  siRNA target sequence for U55872 (NM_020571.1,391-409).
gtcagtaacaattaatcgt

SEQ ID NO: 710563 - DNA, 19 bp, Mus musculus
  siRNA target sequence for U55872 (NM_020571.1,434-452).
ggtcaacacgatttagaaa

SEQ ID NO: 710564 - DNA, 19 bp, Mus musculus
  siRNA target sequence for U55872 (NM_020571.1,437-455).
caacacgatttagaaacaa

SEQ ID NO: 710565 - DNA, 19 bp, Mus musculus
  siRNA target sequence for U55872 (NM_020571.1,459-477).
cacgtaaagcgcgtgaatt

SEQ ID NO: 710566 - DNA, 19 bp, Mus musculus
  siRNA target sequence for U55872 (NM_020571.1,461-479).
cgtaaagcgcgtgaattta

SEQ ID NO: 710567 - DNA, 19 bp, Mus musculus
  siRNA target sequence for U55872 (NM_020571.1,462-480).
gtaaagcgcgtgaatttat

SEQ ID NO: 710568 - DNA, 19 bp, Mus musculus
  siRNA target sequence for U55872 (NM_020571.1,468-486).
cgcgtgaatttattttaga

SEQ ID NO: 710569 - DNA, 19 bp, Mus musculus
  siRNA target sequence for U55872 (NM_020571.1,488-506).
ggtaaccgtgttaaagtat

SEQ ID NO: 710570 - DNA, 19 bp, Mus musculus
  siRNA target sequence for U55872 (NM_020571.1,494-512).
cgtgttaaagtatctgtta

SEQ ID NO: 710571 - DNA, 19 bp, Mus musculus
  siRNA target sequence for U55872 (NM_020571.1,554-572).
gacatattaaacaaatttt

SEQ ID NO: 710572 - DNA, 19 bp, Mus musculus
  siRNA target sequence for U55872 (NM_020571.1,603-621).
caaaagaagcaactttagt

SEQ ID NO: 710573 - DNA, 19 bp, Mus musculus
  siRNA target sequence for U55872 (NM_020571.1,626-644).
gatcgttttctagatatgt

SEQ ID NO: 710574 - DNA, 19 bp, Mus musculus
  siRNA target sequence for U55872 (NM_020571.1,630-648).
gttttctagatatgtatgt

SEQ ID NO: 710575 - DNA, 19 bp, Mus musculus
  siRNA target sequence for Axot (NM_020575.1,204-222).
caaccctctggctctttaa

SEQ ID NO: 710576 - DNA, 19 bp, Mus musculus
  siRNA target sequence for Axot (NM_020575.1,230-248).
gatggtgtctggaaacaga

SEQ ID NO: 710577 - DNA, 19 bp, Mus musculus
  siRNA target sequence for Axot (NM_020575.1,247-265).
gaggaaccagtttaaatga

SEQ ID NO: 710578 - DNA, 19 bp, Mus musculus
  siRNA target sequence for Axot (NM_020575.1,253-271).
ccagtttaaatgattcata

SEQ ID NO: 710579 - DNA, 19 bp, Mus musculus
  siRNA target sequence for Axot (NM_020575.1,289-307).
cctttagactggattctga

SEQ ID NO: 710580 - DNA, 19 bp, Mus musculus
  siRNA target sequence for Axot (NM_020575.1,297-315).
ctggattctgaatatcagt

SEQ ID NO: 710581 - DNA, 19 bp, Mus musculus
  siRNA target sequence for Axot (NM_020575.1,406-424).
cccagcagcgggatcatga

SEQ ID NO: 710582 - DNA, 19 bp, Mus musculus
  siRNA target sequence for Axot (NM_020575.1,414-432).
cgggatcatgactcaaaga

SEQ ID NO: 710583 - DNA, 19 bp, Mus musculus
  siRNA target sequence for Axot (NM_020575.1,416-434).
ggatcatgactcaaagaga

SEQ ID NO: 710584 - DNA, 19 bp, Mus musculus
  siRNA target sequence for Axot (NM_020575.1,482-500).
cggtgggagtgggttaaat

SEQ ID NO: 710585 - DNA, 19 bp, Mus musculus
  siRNA target sequence for Axot (NM_020575.1,483-501).
ggtgggagtgggttaaata

SEQ ID NO: 710586 - DNA, 19 bp, Mus musculus
  siRNA target sequence for Axot (NM_020575.1,487-505).
ggagtgggttaaatacagt

SEQ ID NO: 710587 - DNA, 19 bp, Mus musculus
  siRNA target sequence for Axot (NM_020575.1,554-572).
ggtacttggttcatttgga

SEQ ID NO: 710588 - DNA, 19 bp, Mus musculus
  siRNA target sequence for Axot (NM_020575.1,617-635).
gtcctccatcagcaatctt

SEQ ID NO: 710589 - DNA, 19 bp, Mus musculus
  siRNA target sequence for Axot (NM_020575.1,622-640).
ccatcagcaatcttatgga

SEQ ID NO: 710590 - DNA, 19 bp, Mus musculus
  siRNA target sequence for Axot (NM_020575.1,623-641).
catcagcaatcttatggat

SEQ ID NO: 710591 - DNA, 19 bp, Mus musculus
  siRNA target sequence for Axot (NM_020575.1,628-646).
gcaatcttatggattataa

SEQ ID NO: 710592 - DNA, 19 bp, Mus musculus
  siRNA target sequence for Axot (NM_020575.1,629-647).
caatcttatggattataat

SEQ ID NO: 710593 - DNA, 19 bp, Mus musculus
  siRNA target sequence for Axot (NM_020575.1,648-666).
caccgaagtggtgatttca

SEQ ID NO: 710594 - DNA, 19 bp, Mus musculus
  siRNA target sequence for Axot (NM_020575.1,657-675).
ggtgatttcacaacttcat

SEQ ID NO: 710595 - DNA, 19 bp, Mus musculus
  siRNA target sequence for Axot (NM_020575.1,660-678).
gatttcacaacttcatcat

SEQ ID NO: 710596 - DNA, 19 bp, Mus musculus
  siRNA target sequence for Axot (NM_020575.1,665-683).
cacaacttcatcatatgtt

SEQ ID NO: 710597 - DNA, 19 bp, Mus musculus
  siRNA target sequence for Axot (NM_020575.1,667-685).
caacttcatcatatgttca

SEQ ID NO: 710598 - DNA, 19 bp, Mus musculus
  siRNA target sequence for Axot (NM_020575.1,735-753).
gcagtgagcactttacagt

SEQ ID NO: 710599 - DNA, 19 bp, Mus musculus
  siRNA target sequence for Axot (NM_020575.1,740-758).
gagcactttacagttgaat

SEQ ID NO: 710600 - DNA, 19 bp, Mus musculus
  siRNA target sequence for Axot (NM_020575.1,763-781).
catccaccaatcaccaatt

SEQ ID NO: 710601 - DNA, 19 bp, Mus musculus
  siRNA target sequence for Axot (NM_020575.1,864-882).
gaatcttttcgcaacagtt

SEQ ID NO: 710602 - DNA, 19 bp, Mus musculus
  siRNA target sequence for Axot (NM_020575.1,878-896).
cagttcacatcctgcattt

SEQ ID NO: 710603 - DNA, 19 bp, Mus musculus
  siRNA target sequence for Axot (NM_020575.1,913-931).
gaaatgaaactccaactat

SEQ ID NO: 710604 - DNA, 19 bp, Mus musculus
  siRNA target sequence for Axot (NM_020575.1,959-977).
gagaccatatcgagaatct

SEQ ID NO: 710605 - DNA, 19 bp, Mus musculus
  siRNA target sequence for Axot (NM_020575.1,987-1005).
gaaggtaggcgtacaacta

SEQ ID NO: 710606 - DNA, 19 bp, Mus musculus
  siRNA target sequence for Axot (NM_020575.1,1037-1055).
gtcatctacttttttctca

SEQ ID NO: 710607 - DNA, 19 bp, Mus musculus
  siRNA target sequence for Axot (NM_020575.1,1052-1070).
ctcacgaagatctagtcaa

SEQ ID NO: 710608 - DNA, 19 bp, Mus musculus
  siRNA target sequence for Axot (NM_020575.1,1056-1074).
cgaagatctagtcaagatt

SEQ ID NO: 710609 - DNA, 19 bp, Mus musculus
  siRNA target sequence for Axot (NM_020575.1,1071-1089).
gattccttgaatacaagat

SEQ ID NO: 710610 - DNA, 19 bp, Mus musculus
  siRNA target sequence for Axot (NM_020575.1,1079-1097).
gaatacaagatctttgagt

SEQ ID NO: 710611 - DNA, 19 bp, Mus musculus
  siRNA target sequence for Axot (NM_020575.1,1129-1147).
cttcacagtctcggaataa

SEQ ID NO: 710612 - DNA, 19 bp, Mus musculus
  siRNA target sequence for Axot (NM_020575.1,1134-1152).
cagtctcggaataatggaa

SEQ ID NO: 710613 - DNA, 19 bp, Mus musculus
  siRNA target sequence for Axot (NM_020575.1,1191-1209).
gaagcatctcagggattta

SEQ ID NO: 710614 - DNA, 19 bp, Mus musculus
  siRNA target sequence for Axot (NM_020575.1,1194-1212).
gcatctcagggatttagat

SEQ ID NO: 710615 - DNA, 19 bp, Mus musculus
  siRNA target sequence for Axot (NM_020575.1,1195-1213).
catctcagggatttagatt

SEQ ID NO: 710616 - DNA, 19 bp, Mus musculus
  siRNA target sequence for Axot (NM_020575.1,1200-1218).
cagggatttagatttctta

SEQ ID NO: 710617 - DNA, 19 bp, Mus musculus
  siRNA target sequence for Axot (NM_020575.1,1237-1255).
cgtcgctcagccaaaatca

SEQ ID NO: 710618 - DNA, 19 bp, Mus musculus
  siRNA target sequence for Axot (NM_020575.1,1238-1256).
gtcgctcagccaaaatcat

SEQ ID NO: 710619 - DNA, 19 bp, Mus musculus
  siRNA target sequence for Axot (NM_020575.1,1319-1337).
gttgtcttcttcacttaga

SEQ ID NO: 710620 - DNA, 19 bp, Mus musculus
  siRNA target sequence for Axot (NM_020575.1,1381-1399).
gggatgagtcttcaagaat

SEQ ID NO: 710621 - DNA, 19 bp, Mus musculus
  siRNA target sequence for Axot (NM_020575.1,1383-1401).
gatgagtcttcaagaatgt

SEQ ID NO: 710622 - DNA, 19 bp, Mus musculus
  siRNA target sequence for Axot (NM_020575.1,1413-1431).
gtaccacctagatctcata

SEQ ID NO: 710623 - DNA, 19 bp, Mus musculus
  siRNA target sequence for Axot (NM_020575.1,1416-1434).
ccacctagatctcatattt

SEQ ID NO: 710624 - DNA, 19 bp, Mus musculus
  siRNA target sequence for Axot (NM_020575.1,1419-1437).
cctagatctcatattttca

SEQ ID NO: 710625 - DNA, 19 bp, Mus musculus
  siRNA target sequence for Axot (NM_020575.1,1447-1465).
caaatgaagtagttcatct

SEQ ID NO: 710626 - DNA, 19 bp, Mus musculus
  siRNA target sequence for Axot (NM_020575.1,1633-1651).
cagcactcggcagtaatct

SEQ ID NO: 710627 - DNA, 19 bp, Mus musculus
  siRNA target sequence for Axot (NM_020575.1,1653-1671).
gctgacaatgtcatgatta

SEQ ID NO: 710628 - DNA, 19 bp, Mus musculus
  siRNA target sequence for Axot (NM_020575.1,1686-1704).
ccttctggttggaattcaa

SEQ ID NO: 710629 - DNA, 19 bp, Mus musculus
  siRNA target sequence for Axot (NM_020575.1,1806-1824).
gaagaaggggacttatgta

SEQ ID NO: 710630 - DNA, 19 bp, Mus musculus
  siRNA target sequence for Axot (NM_020575.1,1812-1830).
ggggacttatgtagaattt

SEQ ID NO: 710631 - DNA, 19 bp, Mus musculus
  siRNA target sequence for Axot (NM_020575.1,1839-1857).
gcagcagcgtcatcatcta

SEQ ID NO: 710632 - DNA, 19 bp, Mus musculus
  siRNA target sequence for Axot (NM_020575.1,1842-1860).
gcagcgtcatcatctaatt

SEQ ID NO: 710633 - DNA, 19 bp, Mus musculus
  siRNA target sequence for Axot (NM_020575.1,1843-1861).
cagcgtcatcatctaattt

SEQ ID NO: 710634 - DNA, 19 bp, Mus musculus
  siRNA target sequence for Axot (NM_020575.1,1845-1863).
gcgtcatcatctaatttat

SEQ ID NO: 710635 - DNA, 19 bp, Mus musculus
  siRNA target sequence for Axot (NM_020575.1,1846-1864).
cgtcatcatctaatttatt

SEQ ID NO: 710636 - DNA, 19 bp, Mus musculus
  siRNA target sequence for Axot (NM_020575.1,1852-1870).
catctaatttattgataga

SEQ ID NO: 710637 - DNA, 19 bp, Mus musculus
  siRNA target sequence for Axot (NM_020575.1,1902-1920).
gtccatcaagagtgtatga

SEQ ID NO: 710638 - DNA, 19 bp, Mus musculus
  siRNA target sequence for Axot (NM_020575.1,2058-2076).
caagctgagtatgagttta

SEQ ID NO: 710639 - DNA, 19 bp, Mus musculus
  siRNA target sequence for Axot (NM_020575.1,2086-2104).
gtctctacctagttgtctt

SEQ ID NO: 710640 - DNA, 19 bp, Mus musculus
  siRNA target sequence for Axot (NM_020575.1,2161-2179).
gcactcgtgtccgatttat

SEQ ID NO: 710641 - DNA, 19 bp, Mus musculus
  siRNA target sequence for Axot (NM_020575.1,2162-2180).
cactcgtgtccgatttatt

SEQ ID NO: 710642 - DNA, 19 bp, Mus musculus
  siRNA target sequence for Axot (NM_020575.1,2164-2182).
ctcgtgtccgatttattaa

SEQ ID NO: 710643 - DNA, 19 bp, Mus musculus
  siRNA target sequence for Axot (NM_020575.1,2167-2185).
gtgtccgatttattaacct

SEQ ID NO: 710644 - DNA, 19 bp, Mus musculus
  siRNA target sequence for Psors1c2 (NM_020576.1,138-156).
cgcctcctttgtttgatga

SEQ ID NO: 710645 - DNA, 19 bp, Mus musculus
  siRNA target sequence for Psors1c2 (NM_020576.1,279-297).
gaacccagcccccagaaaa

SEQ ID NO: 710646 - DNA, 19 bp, Mus musculus
  siRNA target sequence for Psors1c2 (NM_020576.1,314-332).
cctgagatggaccatgaat

SEQ ID NO: 710647 - DNA, 19 bp, Mus musculus
  siRNA target sequence for Psors1c2 (NM_020576.1,356-374).
ccaccccaggaagagtata

SEQ ID NO: 710648 - DNA, 19 bp, Mus musculus
  siRNA target sequence for Th1l (NM_020580.1,202-220).
caggaatgcctgcataagt

SEQ ID NO: 710649 - DNA, 19 bp, Mus musculus
  siRNA target sequence for Th1l (NM_020580.1,361-379).
gctgagtggctcattcaga

SEQ ID NO: 710650 - DNA, 19 bp, Mus musculus
  siRNA target sequence for Th1l (NM_020580.1,453-471).
ccctcggaaagcagattct

SEQ ID NO: 710651 - DNA, 19 bp, Mus musculus
  siRNA target sequence for Th1l (NM_020580.1,454-472).
cctcggaaagcagattcta

SEQ ID NO: 710652 - DNA, 19 bp, Mus musculus
  siRNA target sequence for Th1l (NM_020580.1,455-473).
ctcggaaagcagattctat

SEQ ID NO: 710653 - DNA, 19 bp, Mus musculus
  siRNA target sequence for Th1l (NM_020580.1,593-611).
ctgtgaagctcatttctga

SEQ ID NO: 710654 - DNA, 19 bp, Mus musculus
  siRNA target sequence for Th1l (NM_020580.1,732-750).
gaaaaatctccctgagttt

SEQ ID NO: 710655 - DNA, 19 bp, Mus musculus
  siRNA target sequence for Th1l (NM_020580.1,745-763).
gagtttgcaaagatggtat

SEQ ID NO: 710656 - DNA, 19 bp, Mus musculus
  siRNA target sequence for Th1l (NM_020580.1,992-1010).
cagacatcacggtcttgtt

SEQ ID NO: 710657 - DNA, 19 bp, Mus musculus
  siRNA target sequence for Th1l (NM_020580.1,994-1012).
gacatcacggtcttgttca

SEQ ID NO: 710658 - DNA, 19 bp, Mus musculus
  siRNA target sequence for Th1l (NM_020580.1,1001-1019).
cggtcttgttcaagatgtt

SEQ ID NO: 710659 - DNA, 19 bp, Mus musculus
  siRNA target sequence for Th1l (NM_020580.1,1294-1312).
gctgagctgagcacacttt

SEQ ID NO: 710660 - DNA, 19 bp, Mus musculus
  siRNA target sequence for Th1l (NM_020580.1,1479-1497).
gcagctgcttgttaagctt

SEQ ID NO: 710661 - DNA, 19 bp, Mus musculus
  siRNA target sequence for Th1l (NM_020580.1,1531-1549).
gagcagctcgagttgaaaa

SEQ ID NO: 710662 - DNA, 19 bp, Mus musculus
  siRNA target sequence for Th1l (NM_020580.1,1596-1614).
cctgccggtggtcagttat

SEQ ID NO: 710663 - DNA, 19 bp, Mus musculus
  siRNA target sequence for Th1l (NM_020580.1,1597-1615).
ctgccggtggtcagttata

SEQ ID NO: 710664 - DNA, 19 bp, Mus musculus
  siRNA target sequence for Th1l (NM_020580.1,1608-1626).
cagttatatccgcaaatgt

SEQ ID NO: 710665 - DNA, 19 bp, Mus musculus
  siRNA target sequence for Th1l (NM_020580.1,1610-1628).
gttatatccgcaaatgtct

SEQ ID NO: 710666 - DNA, 19 bp, Mus musculus
  siRNA target sequence for Th1l (NM_020580.1,1700-1718).
cgtacacctcagactttgt

SEQ ID NO: 710667 - DNA, 19 bp, Mus musculus
  siRNA target sequence for 5031400M07Rik (NM_020586.1,640-658).
gactctcatcattaaagca

SEQ ID NO: 710668 - DNA, 19 bp, Mus musculus
  siRNA target sequence for 5031400M07Rik (NM_020586.1,684-702).
ctattagctgcttcttgaa

SEQ ID NO: 710669 - DNA, 19 bp, Mus musculus
  siRNA target sequence for 5031400M07Rik (NM_020586.1,719-737).
ctaaaaacgcatctatcta

SEQ ID NO: 710670 - DNA, 19 bp, Mus musculus
  siRNA target sequence for 5031400M07Rik (NM_020586.1,747-765).
ctagcaaaccattgacaaa

SEQ ID NO: 710671 - DNA, 19 bp, Mus musculus
  siRNA target sequence for 5031400M07Rik (NM_020586.1,767-785).
gaccagaggttggtgtatt

SEQ ID NO: 710672 - DNA, 19 bp, Mus musculus
  siRNA target sequence for 5031400M07Rik (NM_020586.1,831-849).
gaaaacaagatgagtatca

SEQ ID NO: 710673 - DNA, 19 bp, Mus musculus
  siRNA target sequence for 5031400M07Rik (NM_020586.1,844-862).
gtatcatatggttcatcta

SEQ ID NO: 710674 - DNA, 19 bp, Mus musculus
  siRNA target sequence for 5031400M07Rik (NM_020586.1,937-955).
cagcaccagctctaattca

SEQ ID NO: 710675 - DNA, 19 bp, Mus musculus
  siRNA target sequence for 5031400M07Rik (NM_020586.1,939-957).
gcaccagctctaattcaga

SEQ ID NO: 710676 - DNA, 19 bp, Mus musculus
  siRNA target sequence for 5031400M07Rik (NM_020586.1,958-976).
ccattcggattcaacaact

SEQ ID NO: 710677 - DNA, 19 bp, Mus musculus
  siRNA target sequence for 5031400M07Rik (NM_020586.1,981-999).
cacccagtcaggagagttt

SEQ ID NO: 710678 - DNA, 19 bp, Mus musculus
  siRNA target sequence for 5031400M07Rik (NM_020586.1,992-1010).
gagagtttgtcattagtta

SEQ ID NO: 710679 - DNA, 19 bp, Mus musculus
  siRNA target sequence for 5031400M07Rik (NM_020586.1,994-1012).
gagtttgtcattagttact

SEQ ID NO: 710680 - DNA, 19 bp, Mus musculus
  siRNA target sequence for 5031400M07Rik (NM_020586.1,1032-1050).
gacaacgtaccctttcaca

SEQ ID NO: 710681 - DNA, 19 bp, Mus musculus
  siRNA target sequence for 5031400M07Rik (NM_020586.1,1065-1083).
cagcccagagtcatcagtt

SEQ ID NO: 710682 - DNA, 19 bp, Mus musculus
  siRNA target sequence for 5031400M07Rik (NM_020586.1,1072-1090).
gagtcatcagtttccatat

SEQ ID NO: 710683 - DNA, 19 bp, Mus musculus
  siRNA target sequence for 5031400M07Rik (NM_020586.1,1076-1094).
catcagtttccatatgtaa

SEQ ID NO: 710684 - DNA, 19 bp, Mus musculus
  siRNA target sequence for 5031400M07Rik (NM_020586.1,1195-1213).
gatgtacgctcatcagtat

SEQ ID NO: 710685 - DNA, 19 bp, Mus musculus
  siRNA target sequence for 5031400M07Rik (NM_020586.1,1198-1216).
gtacgctcatcagtattat

SEQ ID NO: 710686 - DNA, 19 bp, Mus musculus
  siRNA target sequence for 5031400M07Rik (NM_020586.1,1203-1221).
ctcatcagtattatatgca

SEQ ID NO: 710687 - DNA, 19 bp, Mus musculus
  siRNA target sequence for 5031400M07Rik (NM_020586.1,1359-1377).
ggcccatgaatgagaatgt

SEQ ID NO: 710688 - DNA, 19 bp, Mus musculus
  siRNA target sequence for 5031400M07Rik (NM_020586.1,1469-1487).
gtcctcctcagcatcgtat

SEQ ID NO: 710689 - DNA, 19 bp, Mus musculus
  siRNA target sequence for 5031400M07Rik (NM_020586.1,1477-1495).
cagcatcgtatacttctat

SEQ ID NO: 710690 - DNA, 19 bp, Mus musculus
  siRNA target sequence for 5031400M07Rik (NM_020586.1,1480-1498).
catcgtatacttctattct

SEQ ID NO: 710691 - DNA, 19 bp, Mus musculus
  siRNA target sequence for 5031400M07Rik (NM_020586.1,1483-1501).
cgtatacttctattcttct

SEQ ID NO: 710692 - DNA, 19 bp, Mus musculus
  siRNA target sequence for 5031400M07Rik (NM_020586.1,1500-1518).
ctttcagtcggtttatcat

SEQ ID NO: 710693 - DNA, 19 bp, Mus musculus
  siRNA target sequence for 5031400M07Rik (NM_020586.1,1506-1524).
gtcggtttatcatggtaat

SEQ ID NO: 710694 - DNA, 19 bp, Mus musculus
  siRNA target sequence for 5031400M07Rik (NM_020586.1,1529-1547).
gccatgctgctggtttatt

SEQ ID NO: 710695 - DNA, 19 bp, Mus musculus
  siRNA target sequence for 5031400M07Rik (NM_020586.1,1591-1609).
gcaacaagctcccaacaat

SEQ ID NO: 710696 - DNA, 19 bp, Mus musculus
  siRNA target sequence for 5031400M07Rik (NM_020586.1,1606-1624).
caatgtggacgctaacaat

SEQ ID NO: 710697 - DNA, 19 bp, Mus musculus
  siRNA target sequence for 5031400M07Rik (NM_020586.1,1621-1639).
caatgacgggcataatgca

SEQ ID NO: 710698 - DNA, 19 bp, Mus musculus
  siRNA target sequence for 5031400M07Rik (NM_020586.1,1638-1656).
caaacaatctagaacttga

SEQ ID NO: 710699 - DNA, 19 bp, Mus musculus
  siRNA target sequence for 5031400M07Rik (NM_020586.1,1642-1660).
caatctagaacttgaagaa

SEQ ID NO: 710700 - DNA, 19 bp, Mus musculus
  siRNA target sequence for 5031400M07Rik (NM_020586.1,1731-1749).
ctcaaaggcctgggttaat

SEQ ID NO: 710701 - DNA, 19 bp, Mus musculus
  siRNA target sequence for 5031400M07Rik (NM_020586.1,1774-1792).
caccttttttacttcacta

SEQ ID NO: 710702 - DNA, 19 bp, Mus musculus
  siRNA target sequence for 1300007B12Rik (NM_020588.1,237-255).
ggtctggacgggtcaagaa

SEQ ID NO: 710703 - DNA, 19 bp, Mus musculus
  siRNA target sequence for 1300007B12Rik (NM_020588.1,238-256).
gtctggacgggtcaagaaa

SEQ ID NO: 710704 - DNA, 19 bp, Mus musculus
  siRNA target sequence for 1300007B12Rik (NM_020588.1,258-276).
ccgtggccaacgctattca

SEQ ID NO: 710705 - DNA, 19 bp, Mus musculus
  siRNA target sequence for 1300007B12Rik (NM_020588.1,518-536).
cgtcctgaggacattgtga

SEQ ID NO: 710706 - DNA, 19 bp, Mus musculus
  siRNA target sequence for 1300007B12Rik (NM_020588.1,519-537).
gtcctgaggacattgtgaa

SEQ ID NO: 710707 - DNA, 19 bp, Mus musculus
  siRNA target sequence for 1300007B12Rik (NM_020588.1,695-713).
cgatctctgtatcatatgt

SEQ ID NO: 710708 - DNA, 19 bp, Mus musculus
  siRNA target sequence for 1300007B12Rik (NM_020588.1,696-714).
gatctctgtatcatatgta

SEQ ID NO: 710709 - DNA, 19 bp, Mus musculus
  siRNA target sequence for 1300007B12Rik (NM_020588.1,781-799).
gaattccaaatgcttactt

SEQ ID NO: 710710 - DNA, 19 bp, Mus musculus
  siRNA target sequence for 1300007B12Rik (NM_020588.1,836-854).
ccaatgtgggagttcaact

SEQ ID NO: 710711 - DNA, 19 bp, Mus musculus
  siRNA target sequence for 1300007B12Rik (NM_020588.1,869-887).
cagtcccctagattaaaga

SEQ ID NO: 710712 - DNA, 19 bp, Mus musculus
  siRNA target sequence for 1300007B12Rik (NM_020588.1,879-897).
gattaaagagcaagtgtat

SEQ ID NO: 710713 - DNA, 19 bp, Mus musculus
  siRNA target sequence for 1300007B12Rik (NM_020588.1,904-922).
gttgcaaccgcccattcaa

SEQ ID NO: 710714 - DNA, 19 bp, Mus musculus
  siRNA target sequence for 1300007B12Rik (NM_020588.1,907-925).
gcaaccgcccattcaatat

SEQ ID NO: 710715 - DNA, 19 bp, Mus musculus
  siRNA target sequence for 1300007B12Rik (NM_020588.1,913-931).
gcccattcaatatcaagat

SEQ ID NO: 710716 - DNA, 19 bp, Mus musculus
  siRNA target sequence for 1300007B12Rik (NM_020588.1,1004-1022).
gtcatggggatgatattta

SEQ ID NO: 710717 - DNA, 19 bp, Mus musculus
  siRNA target sequence for 1300007B12Rik (NM_020588.1,1056-1074).
ggcatcatcgagtgagatt

SEQ ID NO: 710718 - DNA, 19 bp, Mus musculus
  siRNA target sequence for 1300007B12Rik (NM_020588.1,1179-1197).
ggcatccgcagtatccatt

SEQ ID NO: 710719 - DNA, 19 bp, Mus musculus
  siRNA target sequence for A030009H04Rik (NM_020591.1,174-192).
cgcttcgccgaattttgga

SEQ ID NO: 710720 - DNA, 19 bp, Mus musculus
  siRNA target sequence for A030009H04Rik (NM_020591.1,223-241).
gcgtccgttgcctagcaat

SEQ ID NO: 710721 - DNA, 19 bp, Mus musculus
  siRNA target sequence for Fbxo3 (NM_020593.1,88-106).
gactacagggacctaatca

SEQ ID NO: 710722 - DNA, 19 bp, Mus musculus
  siRNA target sequence for Fbxo3 (NM_020593.1,93-111).
cagggacctaatcaattgt

SEQ ID NO: 710723 - DNA, 19 bp, Mus musculus
  siRNA target sequence for Fbxo3 (NM_020593.1,114-132).
ctatgttagtcgaagactt

SEQ ID NO: 710724 - DNA, 19 bp, Mus musculus
  siRNA target sequence for Fbxo3 (NM_020593.1,159-177).
gtggagaagacattgcaaa

SEQ ID NO: 710725 - DNA, 19 bp, Mus musculus
  siRNA target sequence for Fbxo3 (NM_020593.1,164-182).
gaagacattgcaaaaaata

SEQ ID NO: 710726 - DNA, 19 bp, Mus musculus
  siRNA target sequence for Fbxo3 (NM_020593.1,224-242).
gctggagatccctcttcat

SEQ ID NO: 710727 - DNA, 19 bp, Mus musculus
  siRNA target sequence for Fbxo3 (NM_020593.1,263-281).
ggaggtacatcgaccatta

SEQ ID NO: 710728 - DNA, 19 bp, Mus musculus
  siRNA target sequence for Fbxo3 (NM_020593.1,302-320).
ggcgtgacctcaagaagta

SEQ ID NO: 710729 - DNA, 19 bp, Mus musculus
  siRNA target sequence for Fbxo3 (NM_020593.1,304-322).
cgtgacctcaagaagtact

SEQ ID NO: 710730 - DNA, 19 bp, Mus musculus
  siRNA target sequence for Fbxo3 (NM_020593.1,332-350).
ggtgtcctcggatggtttt

SEQ ID NO: 710731 - DNA, 19 bp, Mus musculus
  siRNA target sequence for Fbxo3 (NM_020593.1,333-351).
gtgtcctcggatggtttta

SEQ ID NO: 710732 - DNA, 19 bp, Mus musculus
  siRNA target sequence for Fbxo3 (NM_020593.1,338-356).
ctcggatggttttatctct

SEQ ID NO: 710733 - DNA, 19 bp, Mus musculus
  siRNA target sequence for Fbxo3 (NM_020593.1,410-428).
gcaagctcccggatgatta

SEQ ID NO: 710734 - DNA, 19 bp, Mus musculus
  siRNA target sequence for Fbxo3 (NM_020593.1,411-429).
caagctcccggatgattat

SEQ ID NO: 710735 - DNA, 19 bp, Mus musculus
  siRNA target sequence for Fbxo3 (NM_020593.1,421-439).
gatgattatcgctgttcat

SEQ ID NO: 710736 - DNA, 19 bp, Mus musculus
  siRNA target sequence for Fbxo3 (NM_020593.1,447-465).
ccacaacgggcaaaagtta

SEQ ID NO: 710737 - DNA, 19 bp, Mus musculus
  siRNA target sequence for Fbxo3 (NM_020593.1,510-528).
ccgctctgaagatctacta

SEQ ID NO: 710738 - DNA, 19 bp, Mus musculus
  siRNA target sequence for Fbxo3 (NM_020593.1,515-533).
ctgaagatctactagatgt

SEQ ID NO: 710739 - DNA, 19 bp, Mus musculus
  siRNA target sequence for Fbxo3 (NM_020593.1,520-538).
gatctactagatgttgata

SEQ ID NO: 710740 - DNA, 19 bp, Mus musculus
  siRNA target sequence for Fbxo3 (NM_020593.1,608-626).
ccggcttgagtcagtacat

SEQ ID NO: 710741 - DNA, 19 bp, Mus musculus
  siRNA target sequence for Fbxo3 (NM_020593.1,609-627).
cggcttgagtcagtacata

SEQ ID NO: 710742 - DNA, 19 bp, Mus musculus
  siRNA target sequence for Fbxo3 (NM_020593.1,695-713).
ggaatcctgctgctattga

SEQ ID NO: 710743 - DNA, 19 bp, Mus musculus
  siRNA target sequence for Fbxo3 (NM_020593.1,706-724).
gctattgacatgtttatca

SEQ ID NO: 710744 - DNA, 19 bp, Mus musculus
  siRNA target sequence for Fbxo3 (NM_020593.1,746-764).
ggtttacatcctatgtcaa

SEQ ID NO: 710745 - DNA, 19 bp, Mus musculus
  siRNA target sequence for Fbxo3 (NM_020593.1,842-860).
caactggagatattacagt

SEQ ID NO: 710746 - DNA, 19 bp, Mus musculus
  siRNA target sequence for Fbxo3 (NM_020593.1,848-866).
gagatattacagtttcagt

SEQ ID NO: 710747 - DNA, 19 bp, Mus musculus
  siRNA target sequence for Fbxo3 (NM_020593.1,898-916).
gtgcatccgccacactatt

SEQ ID NO: 710748 - DNA, 19 bp, Mus musculus
  siRNA target sequence for Fbxo3 (NM_020593.1,901-919).
catccgccacactatttct

SEQ ID NO: 710749 - DNA, 19 bp, Mus musculus
  siRNA target sequence for Fbxo3 (NM_020593.1,904-922).
ccgccacactatttcttca

SEQ ID NO: 710750 - DNA, 19 bp, Mus musculus
  siRNA target sequence for Fbxo3 (NM_020593.1,928-946).
cgaatcaggattgaaatgt

SEQ ID NO: 710751 - DNA, 19 bp, Mus musculus
  siRNA target sequence for Fbxo3 (NM_020593.1,988-1006).
cgctactggaggataacaa

SEQ ID NO: 710752 - DNA, 19 bp, Mus musculus
  siRNA target sequence for Fbxo3 (NM_020593.1,1040-1058).
ctggagtagtcggtgaatt

SEQ ID NO: 710753 - DNA, 19 bp, Mus musculus
  siRNA target sequence for Fbxo3 (NM_020593.1,1045-1063).
gtagtcggtgaatttccaa

SEQ ID NO: 710754 - DNA, 19 bp, Mus musculus
  siRNA target sequence for Fbxo3 (NM_020593.1,1048-1066).
gtcggtgaatttccaatta

SEQ ID NO: 710755 - DNA, 19 bp, Mus musculus
  siRNA target sequence for Fbxo3 (NM_020593.1,1050-1068).
cggtgaatttccaattatt

SEQ ID NO: 710756 - DNA, 19 bp, Mus musculus
  siRNA target sequence for Fbxo3 (NM_020593.1,1070-1088).
gcccaggtcggatatatga

SEQ ID NO: 710757 - DNA, 19 bp, Mus musculus
  siRNA target sequence for Fbxo3 (NM_020593.1,1075-1093).
ggtcggatatatgaataca

SEQ ID NO: 710758 - DNA, 19 bp, Mus musculus
  siRNA target sequence for Fbxo3 (NM_020593.1,1092-1110).
cacaagctgtaccacattt

SEQ ID NO: 710759 - DNA, 19 bp, Mus musculus
  siRNA target sequence for Fbxo3 (NM_020593.1,1135-1153).
gggtattacaccttccatt

SEQ ID NO: 710760 - DNA, 19 bp, Mus musculus
  siRNA target sequence for Fbxo3 (NM_020593.1,1227-1245).
gtctatagctcgattggta

SEQ ID NO: 710761 - DNA, 19 bp, Mus musculus
  siRNA target sequence for E130108N08Rik (NM_020594.1,307-325).
caaagagtttgctacgtaa

SEQ ID NO: 710762 - DNA, 19 bp, Mus musculus
  siRNA target sequence for E130108N08Rik (NM_020594.1,311-329).
gagtttgctacgtaaaaaa

SEQ ID NO: 710763 - DNA, 19 bp, Mus musculus
  siRNA target sequence for E130108N08Rik (NM_020594.1,317-335).
gctacgtaaaaaatcaaga

SEQ ID NO: 710764 - DNA, 19 bp, Mus musculus
  siRNA target sequence for E130108N08Rik (NM_020594.1,535-553).
ctaaagctggtcacaagaa

SEQ ID NO: 710765 - DNA, 19 bp, Mus musculus
  siRNA target sequence for E130108N08Rik (NM_020594.1,679-697).
ggatgagtcaaggctttat

SEQ ID NO: 710766 - DNA, 19 bp, Mus musculus
  siRNA target sequence for E130108N08Rik (NM_020594.1,717-735).
cgcaaagggaagcaagttt

SEQ ID NO: 710767 - DNA, 19 bp, Mus musculus
  siRNA target sequence for E130108N08Rik (NM_020594.1,723-741).
gggaagcaagtttgcaaat

SEQ ID NO: 710768 - DNA, 19 bp, Mus musculus
  siRNA target sequence for E130108N08Rik (NM_020594.1,769-787).
gagaccagtgtaagtttga

SEQ ID NO: 710769 - DNA, 19 bp, Mus musculus
  siRNA target sequence for E130108N08Rik (NM_020594.1,773-791).
ccagtgtaagtttgatcat

SEQ ID NO: 710770 - DNA, 19 bp, Mus musculus
  siRNA target sequence for E130108N08Rik (NM_020594.1,776-794).
gtgtaagtttgatcatgat

SEQ ID NO: 710771 - DNA, 19 bp, Mus musculus
  siRNA target sequence for E130108N08Rik (NM_020594.1,882-900).
gaatacccttgcaagtttt

SEQ ID NO: 710772 - DNA, 19 bp, Mus musculus
  siRNA target sequence for E130108N08Rik (NM_020594.1,905-923).
cacaggaaccaaatgttat

SEQ ID NO: 710773 - DNA, 19 bp, Mus musculus
  siRNA target sequence for E130108N08Rik (NM_020594.1,927-945).
ggcgatcactgtaattttt

SEQ ID NO: 710774 - DNA, 19 bp, Mus musculus
  siRNA target sequence for E130108N08Rik (NM_020594.1,955-973).
cgctgactgcggaaacaca

SEQ ID NO: 710775 - DNA, 19 bp, Mus musculus
  siRNA target sequence for Otor (NM_020595.1,70-88).
ggcatggtgtatttatgga

SEQ ID NO: 710776 - DNA, 19 bp, Mus musculus
  siRNA target sequence for Otor (NM_020595.1,78-96).
gtatttatggataaacttt

SEQ ID NO: 710777 - DNA, 19 bp, Mus musculus
  siRNA target sequence for Otor (NM_020595.1,120-138).
gaggagtgtgtctatacta

SEQ ID NO: 710778 - DNA, 19 bp, Mus musculus
  siRNA target sequence for Otor (NM_020595.1,122-140).
ggagtgtgtctatactatt

SEQ ID NO: 710779 - DNA, 19 bp, Mus musculus
  siRNA target sequence for Otor (NM_020595.1,181-199).
gtaggttcatcgatgtcaa

SEQ ID NO: 710780 - DNA, 19 bp, Mus musculus
  siRNA target sequence for Otor (NM_020595.1,200-218).
gaaagggcagcagatctat

SEQ ID NO: 710781 - DNA, 19 bp, Mus musculus
  siRNA target sequence for Otor (NM_020595.1,204-222).
gggcagcagatctatgttt

SEQ ID NO: 710782 - DNA, 19 bp, Mus musculus
  siRNA target sequence for Otor (NM_020595.1,263-281).
ggctggcagtgtttatggt

SEQ ID NO: 710783 - DNA, 19 bp, Mus musculus
  siRNA target sequence for Otor (NM_020595.1,296-314).
gatgggaattgtaggttat

SEQ ID NO: 710784 - DNA, 19 bp, Mus musculus
  siRNA target sequence for Otor (NM_020595.1,368-386).
gatcccaaccacggatatt

SEQ ID NO: 710785 - DNA, 19 bp, Mus musculus
  siRNA target sequence for Otor (NM_020595.1,372-390).
ccaaccacggatattgact

SEQ ID NO: 710786 - DNA, 19 bp, Mus musculus
  siRNA target sequence for Otor (NM_020595.1,373-391).
caaccacggatattgactt

SEQ ID NO: 710787 - DNA, 19 bp, Mus musculus
  siRNA target sequence for Msmb (NM_020597.1,32-50).
gggcagtctcttattcctt

SEQ ID NO: 710788 - DNA, 19 bp, Mus musculus
  siRNA target sequence for Msmb (NM_020597.1,66-84).
gcatccaaagcagtatgtt

SEQ ID NO: 710789 - DNA, 19 bp, Mus musculus
  siRNA target sequence for Msmb (NM_020597.1,182-200).
ctgcacgtggtgttcatgt

SEQ ID NO: 710790 - DNA, 19 bp, Mus musculus
  siRNA target sequence for Msmb (NM_020597.1,188-206).
gtggtgttcatgtgacaaa

SEQ ID NO: 710791 - DNA, 19 bp, Mus musculus
  siRNA target sequence for Msmb (NM_020597.1,238-256).
ggcctttgagctatgacaa

SEQ ID NO: 710792 - DNA, 19 bp, Mus musculus
  siRNA target sequence for Msmb (NM_020597.1,239-257).
gcctttgagctatgacaaa

SEQ ID NO: 710793 - DNA, 19 bp, Mus musculus
  siRNA target sequence for Tbl1x (NM_020601.1,275-293).
cgtttgggatcgaaagtca

SEQ ID NO: 710794 - DNA, 19 bp, Mus musculus
  siRNA target sequence for Tbl1x (NM_020601.1,280-298).
gggatcgaaagtcacatta

SEQ ID NO: 710795 - DNA, 19 bp, Mus musculus
  siRNA target sequence for Tbl1x (NM_020601.1,306-324).
caacatcaatggtacacta

SEQ ID NO: 710796 - DNA, 19 bp, Mus musculus
  siRNA target sequence for Tbl1x (NM_020601.1,415-433).
gatgggcgtcccattgagt

SEQ ID NO: 710797 - DNA, 19 bp, Mus musculus
  siRNA target sequence for Tbl1x (NM_020601.1,432-450).
gtccctatcgttaattgat

SEQ ID NO: 710798 - DNA, 19 bp, Mus musculus
  siRNA target sequence for Tbl1x (NM_020601.1,646-664).
ggagcccatgcaataaata

SEQ ID NO: 710799 - DNA, 19 bp, Mus musculus
  siRNA target sequence for Tbl1x (NM_020601.1,650-668).
cccatgcaataaataatca

SEQ ID NO: 710800 - DNA, 19 bp, Mus musculus
  siRNA target sequence for Tbl1x (NM_020601.1,667-685).
cactcaaagccaatggaaa

SEQ ID NO: 710801 - DNA, 19 bp, Mus musculus
  siRNA target sequence for Tbl1x (NM_020601.1,806-824).
ccactgcgaggatatggaa

SEQ ID NO: 710802 - DNA, 19 bp, Mus musculus
  siRNA target sequence for Tbl1x (NM_020601.1,815-833).
ggatatggaaccttaatga

SEQ ID NO: 710803 - DNA, 19 bp, Mus musculus
  siRNA target sequence for Tbl1x (NM_020601.1,864-882).
gctgaggcactgtatacgt

SEQ ID NO: 710804 - DNA, 19 bp, Mus musculus
  siRNA target sequence for Tbl1x (NM_020601.1,990-1008).
gacagaagatggtaaccta

SEQ ID NO: 710805 - DNA, 19 bp, Mus musculus
  siRNA target sequence for Tbl1x (NM_020601.1,1011-1029).
cagcaccttaggtcaacat

SEQ ID NO: 710806 - DNA, 19 bp, Mus musculus
  siRNA target sequence for Tbl1x (NM_020601.1,1014-1032).
caccttaggtcaacataaa

SEQ ID NO: 710807 - DNA, 19 bp, Mus musculus
  siRNA target sequence for Tbl1x (NM_020601.1,1017-1035).
cttaggtcaacataaaggt

SEQ ID NO: 710808 - DNA, 19 bp, Mus musculus
  siRNA target sequence for Tbl1x (NM_020601.1,1034-1052).
gtcccatctttgctttgaa

SEQ ID NO: 710809 - DNA, 19 bp, Mus musculus
  siRNA target sequence for Tbl1x (NM_020601.1,1036-1054).
cccatctttgctttgaagt

SEQ ID NO: 710810 - DNA, 19 bp, Mus musculus
  siRNA target sequence for Tbl1x (NM_020601.1,1090-1108).
gtagacaagacaacaataa

SEQ ID NO: 710811 - DNA, 19 bp, Mus musculus
  siRNA target sequence for Tbl1x (NM_020601.1,1245-1263).
ctgtgatcgcccagtcaaa

SEQ ID NO: 710812 - DNA, 19 bp, Mus musculus
  siRNA target sequence for Tbl1x (NM_020601.1,1249-1267).
gatcgcccagtcaaaacct

SEQ ID NO: 710813 - DNA, 19 bp, Mus musculus
  siRNA target sequence for Tbl1x (NM_020601.1,1266-1284).
cttccaaggacatactaat

SEQ ID NO: 710814 - DNA, 19 bp, Mus musculus
  siRNA target sequence for Tbl1x (NM_020601.1,1411-1429).
gagatatataccatcaagt

SEQ ID NO: 710815 - DNA, 19 bp, Mus musculus
  siRNA target sequence for Tbl1x (NM_020601.1,1459-1477).
ccgaactccaacatcatgt

SEQ ID NO: 710816 - DNA, 19 bp, Mus musculus
  siRNA target sequence for Tbl1x (NM_020601.1,1460-1478).
cgaactccaacatcatgtt

SEQ ID NO: 710817 - DNA, 19 bp, Mus musculus
  siRNA target sequence for Tbl1x (NM_020601.1,1461-1479).
gaactccaacatcatgtta

SEQ ID NO: 710818 - DNA, 19 bp, Mus musculus
  siRNA target sequence for Tbl1x (NM_020601.1,1586-1604).
gccccgacgggaagtattt

SEQ ID NO: 710819 - DNA, 19 bp, Mus musculus
  siRNA target sequence for Tbl1x (NM_020601.1,1679-1697).
gaacaggcggcatatttga

SEQ ID NO: 710820 - DNA, 19 bp, Mus musculus
  siRNA target sequence for Tbl1x (NM_020601.1,1728-1746).
gggtgccagcgcatctgat

SEQ ID NO: 710821 - DNA, 19 bp, Mus musculus
  siRNA target sequence for Tbl1x (NM_020601.1,1749-1767).
ctccgtctgtgttttagat

SEQ ID NO: 710822 - DNA, 19 bp, Mus musculus
  siRNA target sequence for Tbl1x (NM_020601.1,1751-1769).
ccgtctgtgttttagatct

SEQ ID NO: 710823 - DNA, 19 bp, Mus musculus
  siRNA target sequence for Bing4 (NM_020603.2,339-357).
ccggaagttttgtcgaatt

SEQ ID NO: 710824 - DNA, 19 bp, Mus musculus
  siRNA target sequence for Bing4 (NM_020603.2,341-359).
ggaagttttgtcgaattga

SEQ ID NO: 710825 - DNA, 19 bp, Mus musculus
  siRNA target sequence for Bing4 (NM_020603.2,352-370).
cgaattgacaagtccaaaa

SEQ ID NO: 710826 - DNA, 19 bp, Mus musculus
  siRNA target sequence for Bing4 (NM_020603.2,376-394).
ccacattcgaagcctaaaa

SEQ ID NO: 710827 - DNA, 19 bp, Mus musculus
  siRNA target sequence for Bing4 (NM_020603.2,506-524).
gggaagacacggcaaaaat

SEQ ID NO: 710828 - DNA, 19 bp, Mus musculus
  siRNA target sequence for Bing4 (NM_020603.2,563-581).
gtgctgccaagcactttga

SEQ ID NO: 710829 - DNA, 19 bp, Mus musculus
  siRNA target sequence for Bing4 (NM_020603.2,573-591).
gcactttgacctgaatcta

SEQ ID NO: 710830 - DNA, 19 bp, Mus musculus
  siRNA target sequence for Bing4 (NM_020603.2,600-618).
cggaccctacagactgaat

SEQ ID NO: 710831 - DNA, 19 bp, Mus musculus
  siRNA target sequence for Bing4 (NM_020603.2,602-620).
gaccctacagactgaatta

SEQ ID NO: 710832 - DNA, 19 bp, Mus musculus
  siRNA target sequence for Bing4 (NM_020603.2,604-622).
ccctacagactgaattact

SEQ ID NO: 710833 - DNA, 19 bp, Mus musculus
  siRNA target sequence for Bing4 (NM_020603.2,606-624).
ctacagactgaattactct

SEQ ID NO: 710834 - DNA, 19 bp, Mus musculus
  siRNA target sequence for Bing4 (NM_020603.2,775-793).
cagaaccgctggctttata

SEQ ID NO: 710835 - DNA, 19 bp, Mus musculus
  siRNA target sequence for Bing4 (NM_020603.2,1008-1026).
ccacctgggacacagtaat

SEQ ID NO: 710836 - DNA, 19 bp, Mus musculus
  siRNA target sequence for Bing4 (NM_020603.2,1022-1040).
gtaatggcacagtgtcttt

SEQ ID NO: 710837 - DNA, 19 bp, Mus musculus
  siRNA target sequence for Bing4 (NM_020603.2,1027-1045).
ggcacagtgtctttatgga

SEQ ID NO: 710838 - DNA, 19 bp, Mus musculus
  siRNA target sequence for Bing4 (NM_020603.2,1059-1077).
ggagccactggcgaagatt

SEQ ID NO: 710839 - DNA, 19 bp, Mus musculus
  siRNA target sequence for Bing4 (NM_020603.2,1150-1168).
gaccaccagctgaagatct

SEQ ID NO: 710840 - DNA, 19 bp, Mus musculus
  siRNA target sequence for Bing4 (NM_020603.2,1241-1259).
cccagcggggactgttagt

SEQ ID NO: 710841 - DNA, 19 bp, Mus musculus
  siRNA target sequence for Bing4 (NM_020603.2,1242-1260).
ccagcggggactgttagtt

SEQ ID NO: 710842 - DNA, 19 bp, Mus musculus
  siRNA target sequence for Bing4 (NM_020603.2,1269-1287).
gggtgatgtggtcaacata

SEQ ID NO: 710843 - DNA, 19 bp, Mus musculus
  siRNA target sequence for Bing4 (NM_020603.2,1270-1288).
ggtgatgtggtcaacatat

SEQ ID NO: 710844 - DNA, 19 bp, Mus musculus
  siRNA target sequence for Bing4 (NM_020603.2,1442-1460).
gggctgcggagcctaactt

SEQ ID NO: 710845 - DNA, 19 bp, Mus musculus
  siRNA target sequence for Bing4 (NM_020603.2,1537-1555).
gtacctgcagagctcattt

SEQ ID NO: 710846 - DNA, 19 bp, Mus musculus
  siRNA target sequence for Bing4 (NM_020603.2,1540-1558).
cctgcagagctcatttgtt

SEQ ID NO: 710847 - DNA, 19 bp, Mus musculus
  siRNA target sequence for Bing4 (NM_020603.2,1543-1561).
gcagagctcatttgtttga

SEQ ID NO: 710848 - DNA, 19 bp, Mus musculus
  siRNA target sequence for Bing4 (NM_020603.2,1694-1712).
ctacggcgagcctagtgaa

SEQ ID NO: 710849 - DNA, 19 bp, Mus musculus
  siRNA target sequence for Bing4 (NM_020603.2,1823-1841).
cctctgcactggatagatt

SEQ ID NO: 710850 - DNA, 19 bp, Mus musculus
  siRNA target sequence for ICRFP703B1614Q5.5 (NM_020609.2,246-264).
gccacgcactgcacattca

SEQ ID NO: 710851 - DNA, 19 bp, Mus musculus
  siRNA target sequence for ICRFP703B1614Q5.5 (NM_020609.2,377-395).
ggaaccggatggcttttat

SEQ ID NO: 710852 - DNA, 19 bp, Mus musculus
  siRNA target sequence for ICRFP703B1614Q5.5 (NM_020609.2,378-396).
gaaccggatggcttttatt

SEQ ID NO: 710853 - DNA, 19 bp, Mus musculus
  siRNA target sequence for ICRFP703B1614Q5.5 (NM_020609.2,382-400).
cggatggcttttattatct

SEQ ID NO: 710854 - DNA, 19 bp, Mus musculus
  siRNA target sequence for ICRFP703B1614Q5.5 (NM_020609.2,510-528).
gtatttccagaggatgtta

SEQ ID NO: 710855 - DNA, 19 bp, Mus musculus
  siRNA target sequence for ICRFP703B1614Q5.5 (NM_020609.2,624-642).
gttctagtgggcttgaaga

SEQ ID NO: 710856 - DNA, 19 bp, Mus musculus
  siRNA target sequence for ICRFP703B1614Q5.5 (NM_020609.2,694-712).
ggaatggcaagacaactaa

SEQ ID NO: 710857 - DNA, 19 bp, Mus musculus
  siRNA target sequence for ICRFP703B1614Q5.5 (NM_020609.2,794-812).
ggactgccacagttcttgt

SEQ ID NO: 710858 - DNA, 19 bp, Mus musculus
  siRNA target sequence for ICRFP703B1614Q5.5 (NM_020609.2,1080-1098).
gagctcagctacaatatgt

SEQ ID NO: 710859 - DNA, 19 bp, Mus musculus
  siRNA target sequence for ICRFP703B1614Q5.5 (NM_020609.2,1083-1101).
ctcagctacaatatgttct

SEQ ID NO: 710860 - DNA, 19 bp, Mus musculus
  siRNA target sequence for ICRFP703B1614Q5.5 (NM_020609.2,1302-1320).
ggaataagatgtcacaata

SEQ ID NO: 710861 - DNA, 19 bp, Mus musculus
  siRNA target sequence for ICRFP703B1614Q5.5 (NM_020609.2,1303-1321).
gaataagatgtcacaataa

SEQ ID NO: 710862 - DNA, 19 bp, Mus musculus
  siRNA target sequence for Srd5a2l (NM_020611.3,504-522).
cagccttcggagactcttt

SEQ ID NO: 710863 - DNA, 19 bp, Mus musculus
  siRNA target sequence for Srd5a2l (NM_020611.3,506-524).
gccttcggagactctttga

SEQ ID NO: 710864 - DNA, 19 bp, Mus musculus
  siRNA target sequence for Srd5a2l (NM_020611.3,508-526).
cttcggagactctttgagt

SEQ ID NO: 710865 - DNA, 19 bp, Mus musculus
  siRNA target sequence for Srd5a2l (NM_020611.3,562-580).
cacgttgtgcagtactgtt

SEQ ID NO: 710866 - DNA, 19 bp, Mus musculus
  siRNA target sequence for Srd5a2l (NM_020611.3,578-596).
gtttcgggcttgtctacta

SEQ ID NO: 710867 - DNA, 19 bp, Mus musculus
  siRNA target sequence for Srd5a2l (NM_020611.3,625-643).
caagtgcccatggatgata

SEQ ID NO: 710868 - DNA, 19 bp, Mus musculus
  siRNA target sequence for Srd5a2l (NM_020611.3,651-669).
gtatgttctggggaagaat

SEQ ID NO: 710869 - DNA, 19 bp, Mus musculus
  siRNA target sequence for Srd5a2l (NM_020611.3,660-678).
ggggaagaatctactgata

SEQ ID NO: 710870 - DNA, 19 bp, Mus musculus
  siRNA target sequence for Srd5a2l (NM_020611.3,662-680).
ggaagaatctactgataca

SEQ ID NO: 710871 - DNA, 19 bp, Mus musculus
  siRNA target sequence for Srd5a2l (NM_020611.3,663-681).
gaagaatctactgatacaa

SEQ ID NO: 710872 - DNA, 19 bp, Mus musculus
  siRNA target sequence for Srd5a2l (NM_020611.3,722-740).
ggtcatccgcccatcagta

SEQ ID NO: 710873 - DNA, 19 bp, Mus musculus
  siRNA target sequence for Srd5a2l (NM_020611.3,893-911).
cctttgggctccacaactt

SEQ ID NO: 710874 - DNA, 19 bp, Mus musculus
  siRNA target sequence for Srd5a2l (NM_020611.3,898-916).
gggctccacaacttaacct

SEQ ID NO: 710875 - DNA, 19 bp, Mus musculus
  siRNA target sequence for Srd5a2l (NM_020611.3,922-940).
ctggtggtgacgtatgtct

SEQ ID NO: 710876 - DNA, 19 bp, Mus musculus
  siRNA target sequence for Srd5a2l (NM_020611.3,1021-1039).
gcgttcctcccatttttgt

SEQ ID NO: 710877 - DNA, 19 bp, Mus musculus
  siRNA target sequence for Srd5a2l (NM_020611.3,1022-1040).
cgttcctcccatttttgtt

SEQ ID NO: 710878 - DNA, 19 bp, Mus musculus
  siRNA target sequence for Cmar (NM_020612.1,65-83).
catccagctcactcatcaa

SEQ ID NO: 710879 - DNA, 19 bp, Mus musculus
  siRNA target sequence for X99300 (NM_020613.1,89-107).
gcctcctagctctgattga

SEQ ID NO: 710880 - DNA, 19 bp, Mus musculus
  siRNA target sequence for X99300 (NM_020613.1,98-116).
ctctgattgagctttatgt

SEQ ID NO: 710881 - DNA, 19 bp, Mus musculus
  siRNA target sequence for X99300 (NM_020613.1,177-195).
cctcgacagcgatttgcaa

SEQ ID NO: 710882 - DNA, 19 bp, Mus musculus
  siRNA target sequence for X99300 (NM_020613.1,178-196).
ctcgacagcgatttgcaaa

SEQ ID NO: 710883 - DNA, 19 bp, Mus musculus
  siRNA target sequence for X99300 (NM_020613.1,262-280).
gtcgtttccatcaaagatt

SEQ ID NO: 710884 - DNA, 19 bp, Mus musculus
  siRNA target sequence for X99300 (NM_020613.1,331-349).
cgtctgtggacaggttttt

SEQ ID NO: 710885 - DNA, 19 bp, Mus musculus
  siRNA target sequence for X99300 (NM_020613.1,375-393).
ctcgatcattgcaaacatt

SEQ ID NO: 710886 - DNA, 19 bp, Mus musculus
  siRNA target sequence for X99300 (NM_020613.1,377-395).
cgatcattgcaaacattct

SEQ ID NO: 710887 - DNA, 19 bp, Mus musculus
  siRNA target sequence for ICRFP703B1614Q5.6 (NM_020616.1,113-131).
cggctggggagggaagtat

SEQ ID NO: 710888 - DNA, 19 bp, Mus musculus
  siRNA target sequence for ICRFP703B1614Q5.6 (NM_020616.1,311-329).
gctgaattcatggactata

SEQ ID NO: 710889 - DNA, 19 bp, Mus musculus
  siRNA target sequence for ICRFP703B1614Q5.6 (NM_020616.1,344-362).
gggaaatactacttgtcta

SEQ ID NO: 710890 - DNA, 19 bp, Mus musculus
  siRNA target sequence for ICRFP703B1614Q5.6 (NM_020616.1,345-363).
ggaaatactacttgtctat

SEQ ID NO: 710891 - DNA, 19 bp, Mus musculus
  siRNA target sequence for ICRFP703B1614Q5.6 (NM_020616.1,375-393).
gaggagcaacccatgtcta

SEQ ID NO: 710892 - DNA, 19 bp, Mus musculus
  siRNA target sequence for ICRFP703B1614Q5.6 (NM_020616.1,384-402).
cccatgtctaccgttatca

SEQ ID NO: 710893 - DNA, 19 bp, Mus musculus
  siRNA target sequence for ICRFP703B1614Q5.6 (NM_020616.1,386-404).
catgtctaccgttatcaca

SEQ ID NO: 710894 - DNA, 19 bp, Mus musculus
  siRNA target sequence for ICRFP703B1614Q5.6 (NM_020616.1,394-412).
ccgttatcacagaaggaaa

SEQ ID NO: 710895 - DNA, 19 bp, Mus musculus
  siRNA target sequence for ICRFP703B1614Q5.6 (NM_020616.1,424-442).
gcacatgtactcagatact

SEQ ID NO: 710896 - DNA, 19 bp, Mus musculus
  siRNA target sequence for ICRFP703B1614Q5.6 (NM_020616.1,469-487).
cagaggcgagacatctgtt

SEQ ID NO: 710897 - DNA, 19 bp, Mus musculus
  siRNA target sequence for ICRFP703B1614Q5.6 (NM_020616.1,478-496).
gacatctgttggacaagaa

SEQ ID NO: 710898 - DNA, 19 bp, Mus musculus
  siRNA target sequence for ICRFP703B1614Q5.6 (NM_020616.1,606-624).
gctccagtgccttatccaa

SEQ ID NO: 710899 - DNA, 19 bp, Mus musculus
  siRNA target sequence for AF078112 (NM_020624.1,24-42).
caggtccattttattctct

SEQ ID NO: 710900 - DNA, 19 bp, Mus musculus
  siRNA target sequence for AF078112 (NM_020624.1,95-113).
cgtctctgctccttggata

SEQ ID NO: 710901 - DNA, 19 bp, Mus musculus
  siRNA target sequence for AF078112 (NM_020624.1,102-120).
gctccttggatacgtaatt

SEQ ID NO: 710902 - DNA, 19 bp, Mus musculus
  siRNA target sequence for AF078112 (NM_020624.1,238-256).
caggccgtccacttctcta

SEQ ID NO: 710903 - DNA, 19 bp, Mus musculus
  siRNA target sequence for AF078112 (NM_020624.1,377-395).
ggcctgggctcggttgtat

SEQ ID NO: 710904 - DNA, 19 bp, Mus musculus
  siRNA target sequence for AF078112 (NM_020624.1,378-396).
gcctgggctcggttgtata

SEQ ID NO: 710905 - DNA, 19 bp, Mus musculus
  siRNA target sequence for 0610008J07Rik (NM_020626.1,156-174).
gcctttaaagtaagactta

SEQ ID NO: 710906 - DNA, 19 bp, Mus musculus
  siRNA target sequence for 0610008J07Rik (NM_020626.1,209-227).
ctgggacacggatcaagaa

SEQ ID NO: 710907 - DNA, 19 bp, Mus musculus
  siRNA target sequence for 0610008J07Rik (NM_020626.1,211-229).
gggacacggatcaagaata

SEQ ID NO: 710908 - DNA, 19 bp, Mus musculus
  siRNA target sequence for 0610008J07Rik (NM_020626.1,300-318).
gtcctgctttgcaacataa

SEQ ID NO: 710909 - DNA, 19 bp, Mus musculus
  siRNA target sequence for 0610008J07Rik (NM_020626.1,347-365).
cacggacccttccaacaat

SEQ ID NO: 710910 - DNA, 19 bp, Mus musculus
  siRNA target sequence for 0610008J07Rik (NM_020626.1,349-367).
cggacccttccaacaatta

SEQ ID NO: 710911 - DNA, 19 bp, Mus musculus
  siRNA target sequence for 0610008J07Rik (NM_020626.1,350-368).
ggacccttccaacaattat

SEQ ID NO: 710912 - DNA, 19 bp, Mus musculus
  siRNA target sequence for 0610008J07Rik (NM_020626.1,351-369).
gacccttccaacaattata

SEQ ID NO: 710913 - DNA, 19 bp, Mus musculus
  siRNA target sequence for 0610008J07Rik (NM_020626.1,353-371).
cccttccaacaattatact

SEQ ID NO: 710914 - DNA, 19 bp, Mus musculus
  siRNA target sequence for 0610008J07Rik (NM_020626.1,355-373).
cttccaacaattatactct

SEQ ID NO: 710915 - DNA, 19 bp, Mus musculus
  siRNA target sequence for 0610008J07Rik (NM_020626.1,387-405).
gtacagtcggccataagaa

SEQ ID NO: 710916 - DNA, 19 bp, Mus musculus
  siRNA target sequence for 0610008J07Rik (NM_020626.1,390-408).
cagtcggccataagaaaga

SEQ ID NO: 710917 - DNA, 19 bp, Mus musculus
  siRNA target sequence for 0610008J07Rik (NM_020626.1,392-410).
gtcggccataagaaagaat

SEQ ID NO: 710918 - DNA, 19 bp, Mus musculus
  siRNA target sequence for 0610008J07Rik (NM_020626.1,502-520).
ctgtgcccgtctggattat

SEQ ID NO: 710919 - DNA, 19 bp, Mus musculus
  siRNA target sequence for 0610008J07Rik (NM_020626.1,506-524).
gcccgtctggattattgta

SEQ ID NO: 710920 - DNA, 19 bp, Mus musculus
  siRNA target sequence for 0610008J07Rik (NM_020626.1,507-525).
cccgtctggattattgtat

SEQ ID NO: 710921 - DNA, 19 bp, Mus musculus
  siRNA target sequence for 0610008J07Rik (NM_020626.1,541-559).
gcattgttacagttgcaat

SEQ ID NO: 710922 - DNA, 19 bp, Mus musculus
  siRNA target sequence for 0610008J07Rik (NM_020626.1,650-668).
catcatcacaatagaaaat

SEQ ID NO: 710923 - DNA, 19 bp, Mus musculus
  siRNA target sequence for 0610008J07Rik (NM_020626.1,698-716).
gggagggcacattaatgat

SEQ ID NO: 710924 - DNA, 19 bp, Mus musculus
  siRNA target sequence for Cded (NM_021280.1,129-147).
ggcaccgtcatgactttgt

SEQ ID NO: 710925 - DNA, 19 bp, Mus musculus
  siRNA target sequence for Cded (NM_021280.1,201-219).
gagacgcgccagatcacat

SEQ ID NO: 710926 - DNA, 19 bp, Mus musculus
  siRNA target sequence for Cded (NM_021280.1,297-315).
caaacacttgggcaaactt

SEQ ID NO: 710927 - DNA, 19 bp, Mus musculus
  siRNA target sequence for Sez6 (NM_021286.2,403-421).
gactcacctacacacttta

SEQ ID NO: 710928 - DNA, 19 bp, Mus musculus
  siRNA target sequence for Sez6 (NM_021286.2,405-423).
ctcacctacacactttact

SEQ ID NO: 710929 - DNA, 19 bp, Mus musculus
  siRNA target sequence for Sez6 (NM_021286.2,530-548).
cttggaacctagaatccaa

SEQ ID NO: 710930 - DNA, 19 bp, Mus musculus
  siRNA target sequence for Sez6 (NM_021286.2,550-568).
ccccctgagctttctatca

SEQ ID NO: 710931 - DNA, 19 bp, Mus musculus
  siRNA target sequence for Sez6 (NM_021286.2,552-570).
ccctgagctttctatcaca

SEQ ID NO: 710932 - DNA, 19 bp, Mus musculus
  siRNA target sequence for Sez6 (NM_021286.2,619-637).
gaggacagacccagtacta

SEQ ID NO: 710933 - DNA, 19 bp, Mus musculus
  siRNA target sequence for Sez6 (NM_021286.2,700-718).
gttccagaggtcatgtcta

SEQ ID NO: 710934 - DNA, 19 bp, Mus musculus
  siRNA target sequence for Sez6 (NM_021286.2,833-851).
gcccctgtagctggaattt

SEQ ID NO: 710935 - DNA, 19 bp, Mus musculus
  siRNA target sequence for Sez6 (NM_021286.2,947-965).
gatatggagtagagatcaa

SEQ ID NO: 710936 - DNA, 19 bp, Mus musculus
  siRNA target sequence for Sez6 (NM_021286.2,1521-1539).
catcatccgcaatggaaat

SEQ ID NO: 710937 - DNA, 19 bp, Mus musculus
  siRNA target sequence for Sez6 (NM_021286.2,1717-1735).
gtcaaatacggcaacttca

SEQ ID NO: 710938 - DNA, 19 bp, Mus musculus
  siRNA target sequence for Sez6 (NM_021286.2,1752-1770).
ctaccctgtgggtacaact

SEQ ID NO: 710939 - DNA, 19 bp, Mus musculus
  siRNA target sequence for Sez6 (NM_021286.2,1843-1861).
gacccccagtggaatgaga

SEQ ID NO: 710940 - DNA, 19 bp, Mus musculus
  siRNA target sequence for Sez6 (NM_021286.2,2110-2128).
cacttcaagctctttacct

SEQ ID NO: 710941 - DNA, 19 bp, Mus musculus
  siRNA target sequence for Sez6 (NM_021286.2,2183-2201).
gttaccagcaaggatttgt

SEQ ID NO: 710942 - DNA, 19 bp, Mus musculus
  siRNA target sequence for Sez6 (NM_021286.2,2195-2213).
gatttgtcatccacttctt

SEQ ID NO: 710943 - DNA, 19 bp, Mus musculus
  siRNA target sequence for Sez6 (NM_021286.2,2337-2355).
ggtggtgggatccagtatt

SEQ ID NO: 710944 - DNA, 19 bp, Mus musculus
  siRNA target sequence for Sez6 (NM_021286.2,2443-2461).
cacagccgacgcctcatat

SEQ ID NO: 710945 - DNA, 19 bp, Mus musculus
  siRNA target sequence for Sez6 (NM_021286.2,2483-2501).
gagcaactgtgcaatatgt

SEQ ID NO: 710946 - DNA, 19 bp, Mus musculus
  siRNA target sequence for Sez6 (NM_021286.2,2702-2720).
cctgtgcccctggttatgt

SEQ ID NO: 710947 - DNA, 19 bp, Mus musculus
  siRNA target sequence for Sez6 (NM_021286.2,2776-2794).
gacccaccacccatctgta

SEQ ID NO: 710948 - DNA, 19 bp, Mus musculus
  siRNA target sequence for Sez6 (NM_021286.2,2979-2997).
gcaacttccccgaactcat

SEQ ID NO: 710949 - DNA, 19 bp, Mus musculus
  siRNA target sequence for Sez6 (NM_021286.2,2993-3011).
ctcatcctcgcccctataa

SEQ ID NO: 710950 - DNA, 19 bp, Mus musculus
  siRNA target sequence for Sez6 (NM_021286.2,3032-3050).
catttgacaatccaactta

SEQ ID NO: 710951 - DNA, 19 bp, Mus musculus
  siRNA target sequence for Sez6 (NM_021286.2,3037-3055).
gacaatccaacttatgaga

SEQ ID NO: 710952 - DNA, 19 bp, Mus musculus
  siRNA target sequence for Sez6 (NM_021286.2,3073-3091).
gcaggagacgagagaatat

SEQ ID NO: 710953 - DNA, 19 bp, Mus musculus
  siRNA target sequence for Smr2 (NM_021289.1,130-148).
ggatgtttcctgagatgta

SEQ ID NO: 710954 - DNA, 19 bp, Mus musculus
  siRNA target sequence for Ucn (NM_021290.1,443-461).
gagcagaaccgcatcatat

SEQ ID NO: 710955 - DNA, 19 bp, Mus musculus
  siRNA target sequence for Ucn (NM_021290.1,448-466).
gaaccgcatcatattcgat

SEQ ID NO: 710956 - DNA, 19 bp, Mus musculus
  siRNA target sequence for AF233884 (NM_021315.1,130-148).
ccaagctttcgcaagttga

SEQ ID NO: 710957 - DNA, 19 bp, Mus musculus
  siRNA target sequence for AF233884 (NM_021315.1,131-149).
caagctttcgcaagttgat

SEQ ID NO: 710958 - DNA, 19 bp, Mus musculus
  siRNA target sequence for AF233884 (NM_021315.1,155-173).
ctagtaaagtgaaacttga

SEQ ID NO: 710959 - DNA, 19 bp, Mus musculus
  siRNA target sequence for AF233884 (NM_021315.1,303-321).
gagcaaacggccagttaaa

SEQ ID NO: 710960 - DNA, 19 bp, Mus musculus
  siRNA target sequence for AF233884 (NM_021315.1,356-374).
ccctgcctttggatatgat

SEQ ID NO: 710961 - DNA, 19 bp, Mus musculus
  siRNA target sequence for AF233884 (NM_021315.1,446-464).
ctagtgaaccagtccatat

SEQ ID NO: 710962 - DNA, 19 bp, Mus musculus
  siRNA target sequence for AF233884 (NM_021315.1,449-467).
gtgaaccagtccatatcaa

SEQ ID NO: 710963 - DNA, 19 bp, Mus musculus
  siRNA target sequence for AF233884 (NM_021315.1,451-469).
gaaccagtccatatcaaga

SEQ ID NO: 710964 - DNA, 19 bp, Mus musculus
  siRNA target sequence for AF233884 (NM_021315.1,457-475).
gtccatatcaagaaacgaa

SEQ ID NO: 710965 - DNA, 19 bp, Mus musculus
  siRNA target sequence for AF233884 (NM_021315.1,774-792).
gtcagatccagaaagtcat

SEQ ID NO: 710966 - DNA, 19 bp, Mus musculus
  siRNA target sequence for AF233884 (NM_021315.1,856-874).
gtccggaagttggttatca

SEQ ID NO: 710967 - DNA, 19 bp, Mus musculus
  siRNA target sequence for AF233884 (NM_021315.1,898-916).
gacatcactccctcgtata

SEQ ID NO: 710968 - DNA, 19 bp, Mus musculus
  siRNA target sequence for AF233884 (NM_021315.1,900-918).
catcactccctcgtataaa

SEQ ID NO: 710969 - DNA, 19 bp, Mus musculus
  siRNA target sequence for AF233884 (NM_021315.1,926-944).
ctctaaccgaagcagaaaa

SEQ ID NO: 710970 - DNA, 19 bp, Mus musculus
  siRNA target sequence for AF233884 (NM_021315.1,928-946).
ctaaccgaagcagaaaaat

SEQ ID NO: 710971 - DNA, 19 bp, Mus musculus
  siRNA target sequence for AF233884 (NM_021315.1,947-965).
ctaccaagattcgtaaaga

SEQ ID NO: 710972 - DNA, 19 bp, Mus musculus
  siRNA target sequence for AF233884 (NM_021315.1,994-1012).
ggcctggttagccaataca

SEQ ID NO: 710973 - DNA, 19 bp, Mus musculus
  siRNA target sequence for AF233884 (NM_021315.1,995-1013).
gcctggttagccaatacaa

SEQ ID NO: 710974 - DNA, 19 bp, Mus musculus
  siRNA target sequence for AF233884 (NM_021315.1,996-1014).
cctggttagccaatacaaa

SEQ ID NO: 710975 - DNA, 19 bp, Mus musculus
  siRNA target sequence for AF233884 (NM_021315.1,997-1015).
ctggttagccaatacaaat

SEQ ID NO: 710976 - DNA, 19 bp, Mus musculus
  siRNA target sequence for AF233884 (NM_021315.1,999-1017).
ggttagccaatacaaattt

SEQ ID NO: 710977 - DNA, 19 bp, Mus musculus
  siRNA target sequence for AF233884 (NM_021315.1,1000-1018).
gttagccaatacaaatttt

SEQ ID NO: 710978 - DNA, 19 bp, Mus musculus
  siRNA target sequence for AF233884 (NM_021315.1,1086-1104).
gtccttaaaggcctacaaa

SEQ ID NO: 710979 - DNA, 19 bp, Mus musculus
  siRNA target sequence for AF233884 (NM_021315.1,1147-1165).
gtggccctgccccatttta

SEQ ID NO: 710980 - DNA, 19 bp, Mus musculus
  siRNA target sequence for AF233884 (NM_021315.1,1176-1194).
caacatcattgtactgatt

SEQ ID NO: 710981 - DNA, 19 bp, Mus musculus
  siRNA target sequence for AF233884 (NM_021315.1,1214-1232).
ggtcaaaaccggtatctga

SEQ ID NO: 710982 - DNA, 19 bp, Mus musculus
  siRNA target sequence for AF233884 (NM_021315.1,1215-1233).
gtcaaaaccggtatctgaa

SEQ ID NO: 710983 - DNA, 19 bp, Mus musculus
  siRNA target sequence for AF233884 (NM_021315.1,1217-1235).
caaaaccggtatctgaaat

SEQ ID NO: 710984 - DNA, 19 bp, Mus musculus
  siRNA target sequence for AF233884 (NM_021315.1,1222-1240).
ccggtatctgaaatgtgtt

SEQ ID NO: 710985 - DNA, 19 bp, Mus musculus
  siRNA target sequence for AF233884 (NM_021315.1,1241-1259).
gcgaagcagtaaagaaact

SEQ ID NO: 710986 - DNA, 19 bp, Mus musculus
  siRNA target sequence for AF233884 (NM_021315.1,1306-1324).
gtcatctctggttttgtaa

SEQ ID NO: 710987 - DNA, 19 bp, Mus musculus
  siRNA target sequence for AF233884 (NM_021315.1,1379-1397).
ggatcaaggaggtagaagt

SEQ ID NO: 710988 - DNA, 19 bp, Mus musculus
  siRNA target sequence for AF233884 (NM_021315.1,1427-1445).
ccaaaaggttcatgacttt

SEQ ID NO: 710989 - DNA, 19 bp, Mus musculus
  siRNA target sequence for AF233884 (NM_021315.1,1457-1475).
gaaaaactctatcaagaat

SEQ ID NO: 710990 - DNA, 19 bp, Mus musculus
  siRNA target sequence for AF233884 (NM_021315.1,1566-1584).
gcacaccgagactctgaat

SEQ ID NO: 710991 - DNA, 19 bp, Mus musculus
  siRNA target sequence for AF233884 (NM_021315.1,1567-1585).
cacaccgagactctgaata

SEQ ID NO: 710992 - DNA, 19 bp, Mus musculus
  siRNA target sequence for AF233884 (NM_021315.1,1588-1606).
gtgtttgtgacctacttca

SEQ ID NO: 710993 - DNA, 19 bp, Mus musculus
  siRNA target sequence for AF233884 (NM_021315.1,1598-1616).
cctacttcagaatactgaa

SEQ ID NO: 710994 - DNA, 19 bp, Mus musculus
  siRNA target sequence for AF233884 (NM_021315.1,1663-1681).
gccaagtttgcacatctta

SEQ ID NO: 710995 - DNA, 19 bp, Mus musculus
  siRNA target sequence for AF233884 (NM_021315.1,1664-1682).
ccaagtttgcacatcttat

SEQ ID NO: 710996 - DNA, 19 bp, Mus musculus
  siRNA target sequence for AF233884 (NM_021315.1,1734-1752).
gtctggggagctaagttat

SEQ ID NO: 710997 - DNA, 19 bp, Mus musculus
  siRNA target sequence for AF233884 (NM_021315.1,1736-1754).
ctggggagctaagttatca

SEQ ID NO: 710998 - DNA, 19 bp, Mus musculus
  siRNA target sequence for AF233884 (NM_021315.1,1739-1757).
gggagctaagttatcaaga

SEQ ID NO: 710999 - DNA, 19 bp, Mus musculus
  siRNA target sequence for AF233884 (NM_021315.1,1740-1758).
ggagctaagttatcaagaa

SEQ ID NO: 711000 - DNA, 19 bp, Mus musculus
  siRNA target sequence for AF233884 (NM_021315.1,1741-1759).
gagctaagttatcaagaaa

SEQ ID NO: 711001 - DNA, 19 bp, Mus musculus
  siRNA target sequence for AF233884 (NM_021315.1,1743-1761).
gctaagttatcaagaaagt

SEQ ID NO: 711002 - DNA, 19 bp, Mus musculus
  siRNA target sequence for AF233884 (NM_021315.1,1799-1817).
gacaaggtgatgttttaaa

SEQ ID NO: 711003 - DNA, 19 bp, Mus musculus
  siRNA target sequence for AF233884 (NM_021315.1,1822-1840).
gacccgatgaaattctata

SEQ ID NO: 711004 - DNA, 19 bp, Mus musculus
  siRNA target sequence for AF233884 (NM_021315.1,1824-1842).
cccgatgaaattctataca

SEQ ID NO: 711005 - DNA, 19 bp, Mus musculus
  siRNA target sequence for AF233884 (NM_021315.1,1826-1844).
cgatgaaattctatacaca

SEQ ID NO: 711006 - DNA, 19 bp, Mus musculus
  siRNA target sequence for AF233884 (NM_021315.1,1827-1845).
gatgaaattctatacacat

SEQ ID NO: 711007 - DNA, 19 bp, Mus musculus
  siRNA target sequence for AF233884 (NM_021315.1,1883-1901).
ccaacgacggcattgagat

SEQ ID NO: 711008 - DNA, 19 bp, Mus musculus
  siRNA target sequence for AF233884 (NM_021315.1,1884-1902).
caacgacggcattgagatt

SEQ ID NO: 711009 - DNA, 19 bp, Mus musculus
  siRNA target sequence for AF233884 (NM_021315.1,1960-1978).
cgagctcttgccttcatca

SEQ ID NO: 711010 - DNA, 19 bp, Mus musculus
  siRNA target sequence for AF233884 (NM_021315.1,1977-1995).
caaacgcctttgtacactt

SEQ ID NO: 711011 - DNA, 19 bp, Mus musculus
  siRNA target sequence for AF233884 (NM_021315.1,1999-2017).
ctgcaggttcttccaaatt

SEQ ID NO: 711012 - DNA, 19 bp, Mus musculus
  siRNA target sequence for AF233884 (NM_021315.1,2035-2053).
gcaactaccaggatattga

SEQ ID NO: 711013 - DNA, 19 bp, Mus musculus
  siRNA target sequence for AF233884 (NM_021315.1,2036-2054).
caactaccaggatattgat

SEQ ID NO: 711014 - DNA, 19 bp, Mus musculus
  siRNA target sequence for AF233884 (NM_021315.1,2100-2118).
gggcagcggggtgtttcta

SEQ ID NO: 711015 - DNA, 19 bp, Mus musculus
  siRNA target sequence for AF233884 (NM_021315.1,2133-2151).
gccagagtactgtaatgca

SEQ ID NO: 711016 - DNA, 19 bp, Mus musculus
  siRNA target sequence for AF233884 (NM_021315.1,2180-2198).
cgcttcggagacattacca

SEQ ID NO: 711017 - DNA, 19 bp, Mus musculus
  siRNA target sequence for AF233884 (NM_021315.1,2181-2199).
gcttcggagacattaccat

SEQ ID NO: 711018 - DNA, 19 bp, Mus musculus
  siRNA target sequence for AF233884 (NM_021315.1,2271-2289).
cgagctgagccgaagatct

SEQ ID NO: 711019 - DNA, 19 bp, Mus musculus
  siRNA target sequence for AF233884 (NM_021315.1,2334-2352).
caatccgcctgttgaatct

SEQ ID NO: 711020 - DNA, 19 bp, Mus musculus
  siRNA target sequence for AF233884 (NM_021315.1,2367-2385).
gaaggataaatttttacca

SEQ ID NO: 711021 - DNA, 19 bp, Mus musculus
  siRNA target sequence for AF233884 (NM_021315.1,2387-2405).
gagactcatttttgaatga

SEQ ID NO: 711022 - DNA, 19 bp, Mus musculus
  siRNA target sequence for AF233884 (NM_021315.1,2404-2422).
gaagatttaaatcaactaa

SEQ ID NO: 711023 - DNA, 19 bp, Mus musculus
  siRNA target sequence for AF233884 (NM_021315.1,2407-2425).
gatttaaatcaactaatca

SEQ ID NO: 711024 - DNA, 19 bp, Mus musculus
  siRNA target sequence for AF233884 (NM_021315.1,2416-2434).
caactaatcaaaagatact

SEQ ID NO: 711025 - DNA, 19 bp, Mus musculus
  siRNA target sequence for AF233884 (NM_021315.1,2493-2511).
ccggcagtacagagtgaat

SEQ ID NO: 711026 - DNA, 19 bp, Mus musculus
  siRNA target sequence for Ttyh1 (NM_021324.3,377-395).
gccggcattggcattggtt

SEQ ID NO: 711027 - DNA, 19 bp, Mus musculus
  siRNA target sequence for Ttyh1 (NM_021324.3,378-396).
ccggcattggcattggttt

SEQ ID NO: 711028 - DNA, 19 bp, Mus musculus
  siRNA target sequence for Ttyh1 (NM_021324.3,667-685).
cgtacaggtggctgaagat

SEQ ID NO: 711029 - DNA, 19 bp, Mus musculus
  siRNA target sequence for Ttyh1 (NM_021324.3,773-791).
ctggcaaagcagagcaaat

SEQ ID NO: 711030 - DNA, 19 bp, Mus musculus
  siRNA target sequence for Ttyh1 (NM_021324.3,953-971).
gacatcctcagctattatt

SEQ ID NO: 711031 - DNA, 19 bp, Mus musculus
  siRNA target sequence for Ttyh1 (NM_021324.3,1071-1089).
gggaagctatccctcaatt

SEQ ID NO: 711032 - DNA, 19 bp, Mus musculus
  siRNA target sequence for Ttyh1 (NM_021324.3,1072-1090).
ggaagctatccctcaattt

SEQ ID NO: 711033 - DNA, 19 bp, Mus musculus
  siRNA target sequence for Ttyh1 (NM_021324.3,1375-1393).
caaccctcaggaatccaaa

SEQ ID NO: 711034 - DNA, 19 bp, Mus musculus
  siRNA target sequence for G6pc-rs (NM_021331.1,79-97).
ggagtggagtgcttattat

SEQ ID NO: 711035 - DNA, 19 bp, Mus musculus
  siRNA target sequence for G6pc-rs (NM_021331.1,80-98).
gagtggagtgcttattatt

SEQ ID NO: 711036 - DNA, 19 bp, Mus musculus
  siRNA target sequence for G6pc-rs (NM_021331.1,111-129).
gaggactaccggacttact

SEQ ID NO: 711037 - DNA, 19 bp, Mus musculus
  siRNA target sequence for G6pc-rs (NM_021331.1,113-131).
ggactaccggacttactat

SEQ ID NO: 711038 - DNA, 19 bp, Mus musculus
  siRNA target sequence for G6pc-rs (NM_021331.1,119-137).
ccggacttactatggtttt

SEQ ID NO: 711039 - DNA, 19 bp, Mus musculus
  siRNA target sequence for G6pc-rs (NM_021331.1,122-140).
gacttactatggttttcta

SEQ ID NO: 711040 - DNA, 19 bp, Mus musculus
  siRNA target sequence for G6pc-rs (NM_021331.1,156-174).
gttggagacccccgaaata

SEQ ID NO: 711041 - DNA, 19 bp, Mus musculus
  siRNA target sequence for G6pc-rs (NM_021331.1,159-177).
ggagacccccgaaatatct

SEQ ID NO: 711042 - DNA, 19 bp, Mus musculus
  siRNA target sequence for G6pc-rs (NM_021331.1,160-178).
gagacccccgaaatatctt

SEQ ID NO: 711043 - DNA, 19 bp, Mus musculus
  siRNA target sequence for G6pc-rs (NM_021331.1,162-180).
gacccccgaaatatctttt

SEQ ID NO: 711044 - DNA, 19 bp, Mus musculus
  siRNA target sequence for G6pc-rs (NM_021331.1,166-184).
cccgaaatatcttttctat

SEQ ID NO: 711045 - DNA, 19 bp, Mus musculus
  siRNA target sequence for G6pc-rs (NM_021331.1,255-273).
gactggttcaatctcatat

SEQ ID NO: 711046 - DNA, 19 bp, Mus musculus
  siRNA target sequence for G6pc-rs (NM_021331.1,301-319).
cttactggtggatacaaga

SEQ ID NO: 711047 - DNA, 19 bp, Mus musculus
  siRNA target sequence for G6pc-rs (NM_021331.1,307-325).
ggtggatacaagaaactga

SEQ ID NO: 711048 - DNA, 19 bp, Mus musculus
  siRNA target sequence for G6pc-rs (NM_021331.1,322-340).
ctgagatttatccaaatca

SEQ ID NO: 711049 - DNA, 19 bp, Mus musculus
  siRNA target sequence for G6pc-rs (NM_021331.1,324-342).
gagatttatccaaatcatt

SEQ ID NO: 711050 - DNA, 19 bp, Mus musculus
  siRNA target sequence for G6pc-rs (NM_021331.1,326-344).
gatttatccaaatcattca

SEQ ID NO: 711051 - DNA, 19 bp, Mus musculus
  siRNA target sequence for G6pc-rs (NM_021331.1,426-444).
gtctggtatgtcatggtaa

SEQ ID NO: 711052 - DNA, 19 bp, Mus musculus
  siRNA target sequence for G6pc-rs (NM_021331.1,596-614).
ggtcattcttggagtgatt

SEQ ID NO: 711053 - DNA, 19 bp, Mus musculus
  siRNA target sequence for G6pc-rs (NM_021331.1,978-996).
ctttatcgcttcatcaaga

SEQ ID NO: 711054 - DNA, 19 bp, Mus musculus
  siRNA target sequence for G6pc-rs (NM_021331.1,1001-1019).
gactcacgcggaaccttta

SEQ ID NO: 711055 - DNA, 19 bp, Mus musculus
  siRNA target sequence for G6pc-rs (NM_021331.1,1003-1021).
ctcacgcggaacctttatt

SEQ ID NO: 711056 - DNA, 19 bp, Mus musculus
  siRNA target sequence for G6pc-rs (NM_021331.1,1005-1023).
cacgcggaacctttatttt

SEQ ID NO: 711057 - DNA, 19 bp, Mus musculus
  siRNA target sequence for G6pc-rs (NM_021331.1,1009-1027).
cggaacctttattttacct

SEQ ID NO: 711058 - DNA, 19 bp, Mus musculus
  siRNA target sequence for G6pc-rs (NM_021331.1,1110-1128).
ggtgacaagaagactaaat

SEQ ID NO: 711059 - DNA, 19 bp, Mus musculus
  siRNA target sequence for Cdon (NM_021339.1,98-116).
ctcagacttggcaccttat

SEQ ID NO: 711060 - DNA, 19 bp, Mus musculus
  siRNA target sequence for Cdon (NM_021339.1,100-118).
cagacttggcaccttattt

SEQ ID NO: 711061 - DNA, 19 bp, Mus musculus
  siRNA target sequence for Cdon (NM_021339.1,102-120).
gacttggcaccttatttta

SEQ ID NO: 711062 - DNA, 19 bp, Mus musculus
  siRNA target sequence for Cdon (NM_021339.1,104-122).
cttggcaccttattttatt

SEQ ID NO: 711063 - DNA, 19 bp, Mus musculus
  siRNA target sequence for Cdon (NM_021339.1,159-177).
cccgtggtcctacattgtt

SEQ ID NO: 711064 - DNA, 19 bp, Mus musculus
  siRNA target sequence for Cdon (NM_021339.1,161-179).
cgtggtcctacattgttct

SEQ ID NO: 711065 - DNA, 19 bp, Mus musculus
  siRNA target sequence for Cdon (NM_021339.1,189-207).
gttactgcccgaatctcat

SEQ ID NO: 711066 - DNA, 19 bp, Mus musculus
  siRNA target sequence for Cdon (NM_021339.1,198-216).
cgaatctcatggttgcata

SEQ ID NO: 711067 - DNA, 19 bp, Mus musculus
  siRNA target sequence for Cdon (NM_021339.1,203-221).
ctcatggttgcataatgga

SEQ ID NO: 711068 - DNA, 19 bp, Mus musculus
  siRNA target sequence for Cdon (NM_021339.1,205-223).
catggttgcataatggaaa

SEQ ID NO: 711069 - DNA, 19 bp, Mus musculus
  siRNA target sequence for Cdon (NM_021339.1,220-238).
gaaaacggttggacagaaa

SEQ ID NO: 711070 - DNA, 19 bp, Mus musculus
  siRNA target sequence for Cdon (NM_021339.1,241-259).
cagaacagataaagattca

SEQ ID NO: 711071 - DNA, 19 bp, Mus musculus
  siRNA target sequence for Cdon (NM_021339.1,312-330).
cagtgcgttgccaacaaca

SEQ ID NO: 711072 - DNA, 19 bp, Mus musculus
  siRNA target sequence for Cdon (NM_021339.1,380-398).
gggtgatttcgattcatca

SEQ ID NO: 711073 - DNA, 19 bp, Mus musculus
  siRNA target sequence for Cdon (NM_021339.1,381-399).
ggtgatttcgattcatcaa

SEQ ID NO: 711074 - DNA, 19 bp, Mus musculus
  siRNA target sequence for Cdon (NM_021339.1,448-466).
gcagggtaccagagagtaa

SEQ ID NO: 711075 - DNA, 19 bp, Mus musculus
  siRNA target sequence for Cdon (NM_021339.1,474-492).
gctgaggtgcgctataaga

SEQ ID NO: 711076 - DNA, 19 bp, Mus musculus
  siRNA target sequence for Cdon (NM_021339.1,475-493).
ctgaggtgcgctataagat

SEQ ID NO: 711077 - DNA, 19 bp, Mus musculus
  siRNA target sequence for Cdon (NM_021339.1,520-538).
cagggaactacataatcct

SEQ ID NO: 711078 - DNA, 19 bp, Mus musculus
  siRNA target sequence for Cdon (NM_021339.1,730-748).
ctcacagccccgttacctt

SEQ ID NO: 711079 - DNA, 19 bp, Mus musculus
  siRNA target sequence for Cdon (NM_021339.1,771-789).
ccggcctcacaagtgtatt

SEQ ID NO: 711080 - DNA, 19 bp, Mus musculus
  siRNA target sequence for Cdon (NM_021339.1,873-891).
gcggattcggggaactatt

SEQ ID NO: 711081 - DNA, 19 bp, Mus musculus
  siRNA target sequence for Cdon (NM_021339.1,876-894).
gattcggggaactattcct

SEQ ID NO: 711082 - DNA, 19 bp, Mus musculus
  siRNA target sequence for Cdon (NM_021339.1,908-926).
caagtccggagatgtgaaa

SEQ ID NO: 711083 - DNA, 19 bp, Mus musculus
  siRNA target sequence for Cdon (NM_021339.1,932-950).
cacttacatggtcaatgta

SEQ ID NO: 711084 - DNA, 19 bp, Mus musculus
  siRNA target sequence for Cdon (NM_021339.1,934-952).
cttacatggtcaatgtact

SEQ ID NO: 711085 - DNA, 19 bp, Mus musculus
  siRNA target sequence for Cdon (NM_021339.1,951-969).
ctggagcatgcgtcaattt

SEQ ID NO: 711086 - DNA, 19 bp, Mus musculus
  siRNA target sequence for Cdon (NM_021339.1,956-974).
gcatgcgtcaatttctaaa

SEQ ID NO: 711087 - DNA, 19 bp, Mus musculus
  siRNA target sequence for Cdon (NM_021339.1,1005-1023).
gccaccgtacattttacct

SEQ ID NO: 711088 - DNA, 19 bp, Mus musculus
  siRNA target sequence for Cdon (NM_021339.1,1049-1067).
caaccgcacctggtttcat

SEQ ID NO: 711089 - DNA, 19 bp, Mus musculus
  siRNA target sequence for Cdon (NM_021339.1,1146-1164).
gattctgggctatatcagt

SEQ ID NO: 711090 - DNA, 19 bp, Mus musculus
  siRNA target sequence for Cdon (NM_021339.1,1196-1214).
gtctactgggagacttcaa

SEQ ID NO: 711091 - DNA, 19 bp, Mus musculus
  siRNA target sequence for Cdon (NM_021339.1,1198-1216).
ctactgggagacttcaaat

SEQ ID NO: 711092 - DNA, 19 bp, Mus musculus
  siRNA target sequence for Cdon (NM_021339.1,1205-1223).
gagacttcaaattgaacaa

SEQ ID NO: 711093 - DNA, 19 bp, Mus musculus
  siRNA target sequence for Cdon (NM_021339.1,1207-1225).
gacttcaaattgaacaaga

SEQ ID NO: 711094 - DNA, 19 bp, Mus musculus
  siRNA target sequence for Cdon (NM_021339.1,1250-1268).
caccgcaccagcaaacata

SEQ ID NO: 711095 - DNA, 19 bp, Mus musculus
  siRNA target sequence for Cdon (NM_021339.1,1347-1365).
cgccatggattgataacca

SEQ ID NO: 711096 - DNA, 19 bp, Mus musculus
  siRNA target sequence for Cdon (NM_021339.1,1469-1487).
ctcgagctctctgtctatt

SEQ ID NO: 711097 - DNA, 19 bp, Mus musculus
  siRNA target sequence for Cdon (NM_021339.1,1471-1489).
cgagctctctgtctattca

SEQ ID NO: 711098 - DNA, 19 bp, Mus musculus
  siRNA target sequence for Cdon (NM_021339.1,1578-1596).
gttcctttcgagacaaaca

SEQ ID NO: 711099 - DNA, 19 bp, Mus musculus
  siRNA target sequence for Cdon (NM_021339.1,1581-1599).
cctttcgagacaaacacaa

SEQ ID NO: 711100 - DNA, 19 bp, Mus musculus
  siRNA target sequence for Cdon (NM_021339.1,1745-1763).
ccccgatgctcctaacata

SEQ ID NO: 711101 - DNA, 19 bp, Mus musculus
  siRNA target sequence for Cdon (NM_021339.1,1749-1767).
gatgctcctaacatactga

SEQ ID NO: 711102 - DNA, 19 bp, Mus musculus
  siRNA target sequence for Cdon (NM_021339.1,1837-1855).
ccatcaacgcctatttcgt

SEQ ID NO: 711103 - DNA, 19 bp, Mus musculus
  siRNA target sequence for Cdon (NM_021339.1,1960-1978).
caagtctctatgaagtttt

SEQ ID NO: 711104 - DNA, 19 bp, Mus musculus
  siRNA target sequence for Cdon (NM_021339.1,2027-2045).
cttccggaccagcaaagaa

SEQ ID NO: 711105 - DNA, 19 bp, Mus musculus
  siRNA target sequence for Cdon (NM_021339.1,2043-2061).
gaaaaaatggcgtcatcaa

SEQ ID NO: 711106 - DNA, 19 bp, Mus musculus
  siRNA target sequence for Cdon (NM_021339.1,2096-2114).
ccccaagcggcctgttact

SEQ ID NO: 711107 - DNA, 19 bp, Mus musculus
  siRNA target sequence for Cdon (NM_021339.1,2118-2136).
gaggcttccaacagcaatt

SEQ ID NO: 711108 - DNA, 19 bp, Mus musculus
  siRNA target sequence for Cdon (NM_021339.1,2120-2138).
ggcttccaacagcaatttt

SEQ ID NO: 711109 - DNA, 19 bp, Mus musculus
  siRNA target sequence for Cdon (NM_021339.1,2185-2203).
caccagatcgacctactat

SEQ ID NO: 711110 - DNA, 19 bp, Mus musculus
  siRNA target sequence for Cdon (NM_021339.1,2187-2205).
ccagatcgacctactatct

SEQ ID NO: 711111 - DNA, 19 bp, Mus musculus
  siRNA target sequence for Cdon (NM_021339.1,2190-2208).
gatcgacctactatctcta

SEQ ID NO: 711112 - DNA, 19 bp, Mus musculus
  siRNA target sequence for Cdon (NM_021339.1,2213-2231).
gtcggagacctcagtctat

SEQ ID NO: 711113 - DNA, 19 bp, Mus musculus
  siRNA target sequence for Cdon (NM_021339.1,2215-2233).
cggagacctcagtctatgt

SEQ ID NO: 711114 - DNA, 19 bp, Mus musculus
  siRNA target sequence for Cdon (NM_021339.1,2237-2255).
ctggattccccgagcaaat

SEQ ID NO: 711115 - DNA, 19 bp, Mus musculus
  siRNA target sequence for Cdon (NM_021339.1,2240-2258).
gattccccgagcaaatggt

SEQ ID NO: 711116 - DNA, 19 bp, Mus musculus
  siRNA target sequence for Cdon (NM_021339.1,2273-2291).
cgccttcaaggtggaatat

SEQ ID NO: 711117 - DNA, 19 bp, Mus musculus
  siRNA target sequence for Cdon (NM_021339.1,2274-2292).
gccttcaaggtggaatata

SEQ ID NO: 711118 - DNA, 19 bp, Mus musculus
  siRNA target sequence for Cdon (NM_021339.1,2295-2313).
cggatgagaactagtgatt

SEQ ID NO: 711119 - DNA, 19 bp, Mus musculus
  siRNA target sequence for Cdon (NM_021339.1,2379-2397).
ggttcaatatacaaattta

SEQ ID NO: 711120 - DNA, 19 bp, Mus musculus
  siRNA target sequence for Cdon (NM_021339.1,2414-2432).
ccattacggtgagagtttt

SEQ ID NO: 711121 - DNA, 19 bp, Mus musculus
  siRNA target sequence for Cdon (NM_021339.1,2465-2483).
cggcttcccaaatcgtttt

SEQ ID NO: 711122 - DNA, 19 bp, Mus musculus
  siRNA target sequence for Cdon (NM_021339.1,2549-2567).
gctgaaatggacgtatgtt

SEQ ID NO: 711123 - DNA, 19 bp, Mus musculus
  siRNA target sequence for Cdon (NM_021339.1,2558-2576).
gacgtatgttccatcaagt

SEQ ID NO: 711124 - DNA, 19 bp, Mus musculus
  siRNA target sequence for Cdon (NM_021339.1,2560-2578).
cgtatgttccatcaagtaa

SEQ ID NO: 711125 - DNA, 19 bp, Mus musculus
  siRNA target sequence for Cdon (NM_021339.1,2565-2583).
gttccatcaagtaacaata

SEQ ID NO: 711126 - DNA, 19 bp, Mus musculus
  siRNA target sequence for Cdon (NM_021339.1,2589-2607).
cccattcaaggattctata

SEQ ID NO: 711127 - DNA, 19 bp, Mus musculus
  siRNA target sequence for Cdon (NM_021339.1,2590-2608).
ccattcaaggattctatat

SEQ ID NO: 711128 - DNA, 19 bp, Mus musculus
  siRNA target sequence for Cdon (NM_021339.1,2812-2830).
ccgactatcccgtgaaaga

SEQ ID NO: 711129 - DNA, 19 bp, Mus musculus
  siRNA target sequence for Cdon (NM_021339.1,2814-2832).
gactatcccgtgaaagagt

SEQ ID NO: 711130 - DNA, 19 bp, Mus musculus
  siRNA target sequence for Cdon (NM_021339.1,2820-2838).
cccgtgaaagagttgagta

SEQ ID NO: 711131 - DNA, 19 bp, Mus musculus
  siRNA target sequence for Cdon (NM_021339.1,2893-2911).
ccaggagcagcgatatgtt

SEQ ID NO: 711132 - DNA, 19 bp, Mus musculus
  siRNA target sequence for Cdon (NM_021339.1,2896-2914).
ggagcagcgatatgttgta

SEQ ID NO: 711133 - DNA, 19 bp, Mus musculus
  siRNA target sequence for Cdon (NM_021339.1,2938-2956).
gggttatggtcctcattct

SEQ ID NO: 711134 - DNA, 19 bp, Mus musculus
  siRNA target sequence for Cdon (NM_021339.1,2939-2957).
ggttatggtcctcattctt

SEQ ID NO: 711135 - DNA, 19 bp, Mus musculus
  siRNA target sequence for Cdon (NM_021339.1,2946-2964).
gtcctcattcttatggttt

SEQ ID NO: 711136 - DNA, 19 bp, Mus musculus
  siRNA target sequence for Cdon (NM_021339.1,2949-2967).
ctcattcttatggttttca

SEQ ID NO: 711137 - DNA, 19 bp, Mus musculus
  siRNA target sequence for Cdon (NM_021339.1,2994-3012).
caacagagcaccatacaga

SEQ ID NO: 711138 - DNA, 19 bp, Mus musculus
  siRNA target sequence for Cdon (NM_021339.1,3035-3053).
ctaccaggggtcagagatt

SEQ ID NO: 711139 - DNA, 19 bp, Mus musculus
  siRNA target sequence for Cdon (NM_021339.1,3178-3196).
ggaccctgagtggaaacat

SEQ ID NO: 711140 - DNA, 19 bp, Mus musculus
  siRNA target sequence for Cdon (NM_021339.1,3261-3279).
cctcaccatctagtgaata

SEQ ID NO: 711141 - DNA, 19 bp, Mus musculus
  siRNA target sequence for Cdon (NM_021339.1,3336-3354).
cggaattgccggaacaaca

SEQ ID NO: 711142 - DNA, 19 bp, Mus musculus
  siRNA target sequence for Cdon (NM_021339.1,3337-3355).
ggaattgccggaacaacaa

SEQ ID NO: 711143 - DNA, 19 bp, Mus musculus
  siRNA target sequence for Cdon (NM_021339.1,3338-3356).
gaattgccggaacaacaat

SEQ ID NO: 711144 - DNA, 19 bp, Mus musculus
  siRNA target sequence for Cdon (NM_021339.1,3395-3413).
cccagtggtagcctcttat

SEQ ID NO: 711145 - DNA, 19 bp, Mus musculus
  siRNA target sequence for Cdon (NM_021339.1,3550-3568).
cttgctgccaggacaacat

SEQ ID NO: 711146 - DNA, 19 bp, Mus musculus
  siRNA target sequence for Cdon (NM_021339.1,3554-3572).
ctgccaggacaacataagt

SEQ ID NO: 711147 - DNA, 19 bp, Mus musculus
  siRNA target sequence for Cdon (NM_021339.1,3642-3660).
gcagaggacaaagttttca

SEQ ID NO: 711148 - DNA, 19 bp, Mus musculus
  siRNA target sequence for Cdon (NM_021339.1,3645-3663).
gaggacaaagttttcagtt

SEQ ID NO: 711149 - DNA, 19 bp, Mus musculus
  siRNA target sequence for Chml (NM_021350.1,20-38).
cagagtttgatgtggtaat

SEQ ID NO: 711150 - DNA, 19 bp, Mus musculus
  siRNA target sequence for Chml (NM_021350.1,109-127).
gttgactcaaggagttact

SEQ ID NO: 711151 - DNA, 19 bp, Mus musculus
  siRNA target sequence for Chml (NM_021350.1,171-189).
ctggctgaaggactatcaa

SEQ ID NO: 711152 - DNA, 19 bp, Mus musculus
  siRNA target sequence for Chml (NM_021350.1,265-283).
cttcgcaagaaggatgaaa

SEQ ID NO: 711153 - DNA, 19 bp, Mus musculus
  siRNA target sequence for Chml (NM_021350.1,268-286).
cgcaagaaggatgaaacta

SEQ ID NO: 711154 - DNA, 19 bp, Mus musculus
  siRNA target sequence for Chml (NM_021350.1,298-316).
gaagtcttctgttatgcta

SEQ ID NO: 711155 - DNA, 19 bp, Mus musculus
  siRNA target sequence for Chml (NM_021350.1,303-321).
cttctgttatgctagtcaa

SEQ ID NO: 711156 - DNA, 19 bp, Mus musculus
  siRNA target sequence for Chml (NM_021350.1,308-326).
gttatgctagtcaagatgt

SEQ ID NO: 711157 - DNA, 19 bp, Mus musculus
  siRNA target sequence for Chml (NM_021350.1,412-430).
gcaagcttgcccaaagaaa

SEQ ID NO: 711158 - DNA, 19 bp, Mus musculus
  siRNA target sequence for Chml (NM_021350.1,457-475).
gaagtgccttctagacata

SEQ ID NO: 711159 - DNA, 19 bp, Mus musculus
  siRNA target sequence for Chml (NM_021350.1,551-569).
gcgataagacggatatgca

SEQ ID NO: 711160 - DNA, 19 bp, Mus musculus
  siRNA target sequence for Chml (NM_021350.1,561-579).
ggatatgcacacagtttca

SEQ ID NO: 711161 - DNA, 19 bp, Mus musculus
  siRNA target sequence for Chml (NM_021350.1,572-590).
cagtttcaggtgaagataa

SEQ ID NO: 711162 - DNA, 19 bp, Mus musculus
  siRNA target sequence for Chml (NM_021350.1,631-649).
ccaaagagaaataggatta

SEQ ID NO: 711163 - DNA, 19 bp, Mus musculus
  siRNA target sequence for Chml (NM_021350.1,669-687).
ggagagccggagatttaat

SEQ ID NO: 711164 - DNA, 19 bp, Mus musculus
  siRNA target sequence for Chml (NM_021350.1,670-688).
gagagccggagatttaata

SEQ ID NO: 711165 - DNA, 19 bp, Mus musculus
  siRNA target sequence for Chml (NM_021350.1,672-690).
gagccggagatttaatatt

SEQ ID NO: 711166 - DNA, 19 bp, Mus musculus
  siRNA target sequence for Chml (NM_021350.1,676-694).
cggagatttaatattgact

SEQ ID NO: 711167 - DNA, 19 bp, Mus musculus
  siRNA target sequence for Chml (NM_021350.1,697-715).
gtatcaaagccgctgtatt

SEQ ID NO: 711168 - DNA, 19 bp, Mus musculus
  siRNA target sequence for Chml (NM_021350.1,716-734).
ctcaagggtcactgattga

SEQ ID NO: 711169 - DNA, 19 bp, Mus musculus
  siRNA target sequence for Chml (NM_021350.1,722-740).
ggtcactgattgatcttct

SEQ ID NO: 711170 - DNA, 19 bp, Mus musculus
  siRNA target sequence for Chml (NM_021350.1,783-801).
cactaggatccttgcattt

SEQ ID NO: 711171 - DNA, 19 bp, Mus musculus
  siRNA target sequence for Chml (NM_021350.1,859-877).
gagctcagtatggttgaaa

SEQ ID NO: 711172 - DNA, 19 bp, Mus musculus
  siRNA target sequence for Chml (NM_021350.1,898-916).
cttacattctgtttagact

SEQ ID NO: 711173 - DNA, 19 bp, Mus musculus
  siRNA target sequence for Chml (NM_021350.1,906-924).
ctgtttagactatgaacaa

SEQ ID NO: 711174 - DNA, 19 bp, Mus musculus
  siRNA target sequence for Chml (NM_021350.1,908-926).
gtttagactatgaacaaca

SEQ ID NO: 711175 - DNA, 19 bp, Mus musculus
  siRNA target sequence for Chml (NM_021350.1,931-949).
gatgaataccaagatttca

SEQ ID NO: 711176 - DNA, 19 bp, Mus musculus
  siRNA target sequence for Chml (NM_021350.1,956-974).
gttcattttctgactactt

SEQ ID NO: 711177 - DNA, 19 bp, Mus musculus
  siRNA target sequence for Chml (NM_021350.1,995-1013).
ctaatctccagcacttcat

SEQ ID NO: 711178 - DNA, 19 bp, Mus musculus
  siRNA target sequence for Chml (NM_021350.1,1008-1026).
cttcatactacactcaatt

SEQ ID NO: 711179 - DNA, 19 bp, Mus musculus
  siRNA target sequence for Chml (NM_021350.1,1011-1029).
catactacactcaattgca

SEQ ID NO: 711180 - DNA, 19 bp, Mus musculus
  siRNA target sequence for Chml (NM_021350.1,1027-1045).
gcaatgacatcagaatcat

SEQ ID NO: 711181 - DNA, 19 bp, Mus musculus
  siRNA target sequence for Chml (NM_021350.1,1108-1126).
ggcaatactccctttatat

SEQ ID NO: 711182 - DNA, 19 bp, Mus musculus
  siRNA target sequence for Chml (NM_021350.1,1109-1127).
gcaatactccctttatatt

SEQ ID NO: 711183 - DNA, 19 bp, Mus musculus
  siRNA target sequence for Chml (NM_021350.1,1110-1128).
caatactccctttatattt

SEQ ID NO: 711184 - DNA, 19 bp, Mus musculus
  siRNA target sequence for Chml (NM_021350.1,1166-1184).
gcaggatgtgtgcagtttt

SEQ ID NO: 711185 - DNA, 19 bp, Mus musculus
  siRNA target sequence for Chml (NM_021350.1,1170-1188).
gatgtgtgcagtttttggt

SEQ ID NO: 711186 - DNA, 19 bp, Mus musculus
  siRNA target sequence for Chml (NM_021350.1,1244-1262).
gaagatgtaaaggaatcat

SEQ ID NO: 711187 - DNA, 19 bp, Mus musculus
  siRNA target sequence for Chml (NM_021350.1,1269-1287).
ctttggtcagagaataagt

SEQ ID NO: 711188 - DNA, 19 bp, Mus musculus
  siRNA target sequence for Chml (NM_021350.1,1311-1329).
cagttatcttcctaaggaa

SEQ ID NO: 711189 - DNA, 19 bp, Mus musculus
  siRNA target sequence for Chml (NM_021350.1,1322-1340).
ctaaggaaacatgttcaaa

SEQ ID NO: 711190 - DNA, 19 bp, Mus musculus
  siRNA target sequence for Chml (NM_021350.1,1331-1349).
catgttcaaacgtgcaata

SEQ ID NO: 711191 - DNA, 19 bp, Mus musculus
  siRNA target sequence for Chml (NM_021350.1,1334-1352).
gttcaaacgtgcaatataa

SEQ ID NO: 711192 - DNA, 19 bp, Mus musculus
  siRNA target sequence for Chml (NM_021350.1,1337-1355).
caaacgtgcaatataagca

SEQ ID NO: 711193 - DNA, 19 bp, Mus musculus
  siRNA target sequence for Chml (NM_021350.1,1345-1363).
caatataagcagatctcaa

SEQ ID NO: 711194 - DNA, 19 bp, Mus musculus
  siRNA target sequence for Chml (NM_021350.1,1406-1424).
cggaccagcagatttccat

SEQ ID NO: 711195 - DNA, 19 bp, Mus musculus
  siRNA target sequence for Chml (NM_021350.1,1407-1425).
ggaccagcagatttccatt

SEQ ID NO: 711196 - DNA, 19 bp, Mus musculus
  siRNA target sequence for Chml (NM_021350.1,1460-1478).
ctgttcgggtcatggaatt

SEQ ID NO: 711197 - DNA, 19 bp, Mus musculus
  siRNA target sequence for Chml (NM_021350.1,1462-1480).
gttcgggtcatggaattat

SEQ ID NO: 711198 - DNA, 19 bp, Mus musculus
  siRNA target sequence for Chml (NM_021350.1,1465-1483).
cgggtcatggaattatgtt

SEQ ID NO: 711199 - DNA, 19 bp, Mus musculus
  siRNA target sequence for Chml (NM_021350.1,1567-1585).
cctgtggtgaagcagttat

SEQ ID NO: 711200 - DNA, 19 bp, Mus musculus
  siRNA target sequence for Chml (NM_021350.1,1572-1590).
ggtgaagcagttattcatt

SEQ ID NO: 711201 - DNA, 19 bp, Mus musculus
  siRNA target sequence for Chml (NM_021350.1,1637-1655).
gactcttgtgggctcttta

SEQ ID NO: 711202 - DNA, 19 bp, Mus musculus
  siRNA target sequence for Chml (NM_021350.1,1681-1699).
gtgagccgaagctcatact

SEQ ID NO: 711203 - DNA, 19 bp, Mus musculus
  siRNA target sequence for Chml (NM_021350.1,1683-1701).
gagccgaagctcatactgt

SEQ ID NO: 711204 - DNA, 19 bp, Mus musculus
  siRNA target sequence for Ors16 (NM_021368.1,3-21).
ggaaataccacacaatatt

SEQ ID NO: 711205 - DNA, 19 bp, Mus musculus
  siRNA target sequence for Ors16 (NM_021368.1,4-22).
gaaataccacacaatatta

SEQ ID NO: 711206 - DNA, 19 bp, Mus musculus
  siRNA target sequence for Ors16 (NM_021368.1,218-236).
cttctttggcgcctaaact

SEQ ID NO: 711207 - DNA, 19 bp, Mus musculus
  siRNA target sequence for Ors16 (NM_021368.1,221-239).
ctttggcgcctaaacttat

SEQ ID NO: 711208 - DNA, 19 bp, Mus musculus
  siRNA target sequence for Ors16 (NM_021368.1,225-243).
ggcgcctaaacttattgct

SEQ ID NO: 711209 - DNA, 19 bp, Mus musculus
  siRNA target sequence for Ors16 (NM_021368.1,256-274).
gaagggacgactctttctt

SEQ ID NO: 711210 - DNA, 19 bp, Mus musculus
  siRNA target sequence for Ors16 (NM_021368.1,260-278).
ggacgactctttcttatga

SEQ ID NO: 711211 - DNA, 19 bp, Mus musculus
  siRNA target sequence for Ors16 (NM_021368.1,771-789).
gcgtccatcgactacttta

SEQ ID NO: 711212 - DNA, 19 bp, Mus musculus
  siRNA target sequence for Ors16 (NM_021368.1,775-793).
ccatcgactactttaccta

SEQ ID NO: 711213 - DNA, 19 bp, Mus musculus
  siRNA target sequence for Ors16 (NM_021368.1,779-797).
cgactactttacctataga

SEQ ID NO: 711214 - DNA, 19 bp, Mus musculus
  siRNA target sequence for Ors16 (NM_021368.1,804-822).
catggcagtgttttatggt

SEQ ID NO: 711215 - DNA, 19 bp, Mus musculus
  siRNA target sequence for Klrc3 (NM_021378.1,316-334).
ccaaaggaatggatcttat

SEQ ID NO: 711216 - DNA, 19 bp, Mus musculus
  siRNA target sequence for 2510004L01Rik (NM_021384.2,111-129).
gctggctgagaatagcatt

SEQ ID NO: 711217 - DNA, 19 bp, Mus musculus
  siRNA target sequence for 2510004L01Rik (NM_021384.2,112-130).
ctggctgagaatagcatta

SEQ ID NO: 711218 - DNA, 19 bp, Mus musculus
  siRNA target sequence for 2510004L01Rik (NM_021384.2,228-246).
cccccgtgagtgtcaacta

SEQ ID NO: 711219 - DNA, 19 bp, Mus musculus
  siRNA target sequence for 2510004L01Rik (NM_021384.2,255-273).
ctcgtcagtgcaactacaa

SEQ ID NO: 711220 - DNA, 19 bp, Mus musculus
  siRNA target sequence for 2510004L01Rik (NM_021384.2,257-275).
cgtcagtgcaactacaaat

SEQ ID NO: 711221 - DNA, 19 bp, Mus musculus
  siRNA target sequence for 2510004L01Rik (NM_021384.2,367-385).
ggagaagatcaacttttct

SEQ ID NO: 711222 - DNA, 19 bp, Mus musculus
  siRNA target sequence for 2510004L01Rik (NM_021384.2,464-482).
ccctctgtgagcatagtga

SEQ ID NO: 711223 - DNA, 19 bp, Mus musculus
  siRNA target sequence for 2510004L01Rik (NM_021384.2,525-543).
gggagtatttggacattct

SEQ ID NO: 711224 - DNA, 19 bp, Mus musculus
  siRNA target sequence for 2510004L01Rik (NM_021384.2,526-544).
ggagtatttggacattctt

SEQ ID NO: 711225 - DNA, 19 bp, Mus musculus
  siRNA target sequence for 2510004L01Rik (NM_021384.2,562-580).
cttcgatgagcaggttaat

SEQ ID NO: 711226 - DNA, 19 bp, Mus musculus
  siRNA target sequence for 2510004L01Rik (NM_021384.2,565-583).
cgatgagcaggttaatgct

SEQ ID NO: 711227 - DNA, 19 bp, Mus musculus
  siRNA target sequence for 2510004L01Rik (NM_021384.2,571-589).
gcaggttaatgctctgatt

SEQ ID NO: 711228 - DNA, 19 bp, Mus musculus
  siRNA target sequence for 2510004L01Rik (NM_021384.2,590-608).
ggccgtggtcaaggaaaaa

SEQ ID NO: 711229 - DNA, 19 bp, Mus musculus
  siRNA target sequence for 2510004L01Rik (NM_021384.2,591-609).
gccgtggtcaaggaaaaaa

SEQ ID NO: 711230 - DNA, 19 bp, Mus musculus
  siRNA target sequence for 2510004L01Rik (NM_021384.2,614-632).
catgtggaaaaccttcaaa

SEQ ID NO: 711231 - DNA, 19 bp, Mus musculus
  siRNA target sequence for 2510004L01Rik (NM_021384.2,700-718).
cgtggacgaagacatgaat

SEQ ID NO: 711232 - DNA, 19 bp, Mus musculus
  siRNA target sequence for 2510004L01Rik (NM_021384.2,812-830).
gcagaaagatttcttataa

SEQ ID NO: 711233 - DNA, 19 bp, Mus musculus
  siRNA target sequence for 2510004L01Rik (NM_021384.2,879-897).
gtttggtgcctgaatctaa

SEQ ID NO: 711234 - DNA, 19 bp, Mus musculus
  siRNA target sequence for 2510004L01Rik (NM_021384.2,915-933).
cctaccttatcctagatga

SEQ ID NO: 711235 - DNA, 19 bp, Mus musculus
  siRNA target sequence for 2510004L01Rik (NM_021384.2,916-934).
ctaccttatcctagatgaa

SEQ ID NO: 711236 - DNA, 19 bp, Mus musculus
  siRNA target sequence for 2510004L01Rik (NM_021384.2,919-937).
ccttatcctagatgaatat

SEQ ID NO: 711237 - DNA, 19 bp, Mus musculus
  siRNA target sequence for 2510004L01Rik (NM_021384.2,998-1016).
ggcgtggaagaagcaataa

SEQ ID NO: 711238 - DNA, 19 bp, Mus musculus
  siRNA target sequence for 2510004L01Rik (NM_021384.2,999-1017).
gcgtggaagaagcaataaa

SEQ ID NO: 711239 - DNA, 19 bp, Mus musculus
  siRNA target sequence for 2510004L01Rik (NM_021384.2,1023-1041).
gtggatttgatgagaagat

SEQ ID NO: 711240 - DNA, 19 bp, Mus musculus
  siRNA target sequence for 2510004L01Rik (NM_021384.2,1026-1044).
gatttgatgagaagatgtt

SEQ ID NO: 711241 - DNA, 19 bp, Mus musculus
  siRNA target sequence for 2510004L01Rik (NM_021384.2,1048-1066).
gaagcgtggcggaaagtat

SEQ ID NO: 711242 - DNA, 19 bp, Mus musculus
  siRNA target sequence for 2510004L01Rik (NM_021384.2,1052-1070).
cgtggcggaaagtatgtgt

SEQ ID NO: 711243 - DNA, 19 bp, Mus musculus
  siRNA target sequence for 2510004L01Rik (NM_021384.2,1063-1081).
gtatgtgtggagtaaagct

SEQ ID NO: 711244 - DNA, 19 bp, Mus musculus
  siRNA target sequence for 2900093B09Rik (NM_021387.1,349-367).
ccggagcaaggtaacaaat

SEQ ID NO: 711245 - DNA, 19 bp, Mus musculus
  siRNA target sequence for 2900093B09Rik (NM_021387.1,350-368).
cggagcaaggtaacaaata

SEQ ID NO: 711246 - DNA, 19 bp, Mus musculus
  siRNA target sequence for 2900093B09Rik (NM_021387.1,429-447).
ggctgtccgccgtacgatt

SEQ ID NO: 711247 - DNA, 19 bp, Mus musculus
  siRNA target sequence for 2900093B09Rik (NM_021387.1,448-466).
gcaggacgaaggtgtttat

SEQ ID NO: 711248 - DNA, 19 bp, Mus musculus
  siRNA target sequence for 2900093B09Rik (NM_021387.1,575-593).
gcagtgtcccacattcaga

SEQ ID NO: 711249 - DNA, 19 bp, Mus musculus
  siRNA target sequence for 2900093B09Rik (NM_021387.1,902-920).
ctcttgttagcactacata

SEQ ID NO: 711250 - DNA, 19 bp, Mus musculus
  siRNA target sequence for Sh3kbp1 (NM_021389.3,219-237).
ggaaacgctctgctttctt

SEQ ID NO: 711251 - DNA, 19 bp, Mus musculus
  siRNA target sequence for Sh3kbp1 (NM_021389.3,304-322).
gctacctgccccagaatga

SEQ ID NO: 711252 - DNA, 19 bp, Mus musculus
  siRNA target sequence for Sh3kbp1 (NM_021389.3,338-356).
gaaagtcggggacatcata

SEQ ID NO: 711253 - DNA, 19 bp, Mus musculus
  siRNA target sequence for Sh3kbp1 (NM_021389.3,483-501).
gagcagctttccaagtcaa

SEQ ID NO: 711254 - DNA, 19 bp, Mus musculus
  siRNA target sequence for Sh3kbp1 (NM_021389.3,596-614).
ccagcccaagaaagttaaa

SEQ ID NO: 711255 - DNA, 19 bp, Mus musculus
  siRNA target sequence for Sh3kbp1 (NM_021389.3,599-617).
gcccaagaaagttaaagga

SEQ ID NO: 711256 - DNA, 19 bp, Mus musculus
  siRNA target sequence for Sh3kbp1 (NM_021389.3,661-679).
gaccaaggtcgattgaagt

SEQ ID NO: 711257 - DNA, 19 bp, Mus musculus
  siRNA target sequence for Sh3kbp1 (NM_021389.3,668-686).
gtcgattgaagtggaaaat

SEQ ID NO: 711258 - DNA, 19 bp, Mus musculus
  siRNA target sequence for Sh3kbp1 (NM_021389.3,692-710).
cctgcccgtcgaaaagaca

SEQ ID NO: 711259 - DNA, 19 bp, Mus musculus
  siRNA target sequence for Sh3kbp1 (NM_021389.3,693-711).
ctgcccgtcgaaaagacaa

SEQ ID NO: 711260 - DNA, 19 bp, Mus musculus
  siRNA target sequence for Sh3kbp1 (NM_021389.3,722-740).
gttacctccagctacatca

SEQ ID NO: 711261 - DNA, 19 bp, Mus musculus
  siRNA target sequence for Sh3kbp1 (NM_021389.3,785-803).
caaggattactgcaaagta

SEQ ID NO: 711262 - DNA, 19 bp, Mus musculus
  siRNA target sequence for Sh3kbp1 (NM_021389.3,789-807).
gattactgcaaagtaatat

SEQ ID NO: 711263 - DNA, 19 bp, Mus musculus
  siRNA target sequence for Sh3kbp1 (NM_021389.3,797-815).
caaagtaatatttccatat

SEQ ID NO: 711264 - DNA, 19 bp, Mus musculus
  siRNA target sequence for Sh3kbp1 (NM_021389.3,818-836).
ggcacagaatgatgatgaa

SEQ ID NO: 711265 - DNA, 19 bp, Mus musculus
  siRNA target sequence for Sh3kbp1 (NM_021389.3,957-975).
cttccatcggactttgaca

SEQ ID NO: 711266 - DNA, 19 bp, Mus musculus
  siRNA target sequence for Sh3kbp1 (NM_021389.3,1193-1211).
gccacctaagaccaattct

SEQ ID NO: 711267 - DNA, 19 bp, Mus musculus
  siRNA target sequence for Sh3kbp1 (NM_021389.3,1280-1298).
gggtgacagtccaaagatt

SEQ ID NO: 711268 - DNA, 19 bp, Mus musculus
  siRNA target sequence for Sh3kbp1 (NM_021389.3,1343-1361).
ctcagaccgcagcaatgat

SEQ ID NO: 711269 - DNA, 19 bp, Mus musculus
  siRNA target sequence for Sh3kbp1 (NM_021389.3,1345-1363).
cagaccgcagcaatgatat

SEQ ID NO: 711270 - DNA, 19 bp, Mus musculus
  siRNA target sequence for Sh3kbp1 (NM_021389.3,1350-1368).
cgcagcaatgatattgact

SEQ ID NO: 711271 - DNA, 19 bp, Mus musculus
  siRNA target sequence for Sh3kbp1 (NM_021389.3,1351-1369).
gcagcaatgatattgactt

SEQ ID NO: 711272 - DNA, 19 bp, Mus musculus
  siRNA target sequence for Sh3kbp1 (NM_021389.3,1352-1370).
cagcaatgatattgactta

SEQ ID NO: 711273 - DNA, 19 bp, Mus musculus
  siRNA target sequence for Sh3kbp1 (NM_021389.3,1355-1373).
caatgatattgacttagaa

SEQ ID NO: 711274 - DNA, 19 bp, Mus musculus
  siRNA target sequence for Sh3kbp1 (NM_021389.3,1374-1392).
ggttttgactctgtgatat

SEQ ID NO: 711275 - DNA, 19 bp, Mus musculus
  siRNA target sequence for Sh3kbp1 (NM_021389.3,1380-1398).
gactctgtgatatcatcta

SEQ ID NO: 711276 - DNA, 19 bp, Mus musculus
  siRNA target sequence for Sh3kbp1 (NM_021389.3,1482-1500).
ctttcaagccccgatatct

SEQ ID NO: 711277 - DNA, 19 bp, Mus musculus
  siRNA target sequence for Sh3kbp1 (NM_021389.3,1507-1525).
ccccaagtcccgaagaaga

SEQ ID NO: 711278 - DNA, 19 bp, Mus musculus
  siRNA target sequence for Sh3kbp1 (NM_021389.3,1508-1526).
cccaagtcccgaagaagat

SEQ ID NO: 711279 - DNA, 19 bp, Mus musculus
  siRNA target sequence for Sh3kbp1 (NM_021389.3,1509-1527).
ccaagtcccgaagaagata

SEQ ID NO: 711280 - DNA, 19 bp, Mus musculus
  siRNA target sequence for Sh3kbp1 (NM_021389.3,1544-1562).
gcttgcgcacagaggaata

SEQ ID NO: 711281 - DNA, 19 bp, Mus musculus
  siRNA target sequence for Sh3kbp1 (NM_021389.3,1555-1573).
gaggaatagacgtgtcaaa

SEQ ID NO: 711282 - DNA, 19 bp, Mus musculus
  siRNA target sequence for Sh3kbp1 (NM_021389.3,1563-1581).
gacgtgtcaaagaagactt

SEQ ID NO: 711283 - DNA, 19 bp, Mus musculus
  siRNA target sequence for Sh3kbp1 (NM_021389.3,1801-1819).
ctgctatcgaggagcttaa

SEQ ID NO: 711284 - DNA, 19 bp, Mus musculus
  siRNA target sequence for Sh3kbp1 (NM_021389.3,1803-1821).
gctatcgaggagcttaaga

SEQ ID NO: 711285 - DNA, 19 bp, Mus musculus
  siRNA target sequence for Sh3kbp1 (NM_021389.3,1804-1822).
ctatcgaggagcttaagat

SEQ ID NO: 711286 - DNA, 19 bp, Mus musculus
  siRNA target sequence for Sh3kbp1 (NM_021389.3,1878-1896).
gagattaagcagttactgt

SEQ ID NO: 711287 - DNA, 19 bp, Mus musculus
  siRNA target sequence for A730008L03Rik (NM_021393.1,738-756).
ccagtggtgatgtgtgtta

SEQ ID NO: 711288 - DNA, 19 bp, Mus musculus
  siRNA target sequence for A730008L03Rik (NM_021393.1,739-757).
cagtggtgatgtgtgttat

SEQ ID NO: 711289 - DNA, 19 bp, Mus musculus
  siRNA target sequence for A730008L03Rik (NM_021393.1,741-759).
gtggtgatgtgtgttatga

SEQ ID NO: 711290 - DNA, 19 bp, Mus musculus
  siRNA target sequence for A730008L03Rik (NM_021393.1,743-761).
ggtgatgtgtgttatgaaa

SEQ ID NO: 711291 - DNA, 19 bp, Mus musculus
  siRNA target sequence for A730008L03Rik (NM_021393.1,847-865).
ggcagatttggcaagacaa

SEQ ID NO: 711292 - DNA, 19 bp, Mus musculus
  siRNA target sequence for A730008L03Rik (NM_021393.1,1173-1191).
gtggatccctgccataagt

SEQ ID NO: 711293 - DNA, 19 bp, Mus musculus
  siRNA target sequence for A730008L03Rik (NM_021393.1,1176-1194).
gatccctgccataagttca

SEQ ID NO: 711294 - DNA, 19 bp, Mus musculus
  siRNA target sequence for A730008L03Rik (NM_021393.1,1224-1242).
cggtttgtggacagcaaaa

SEQ ID NO: 711295 - DNA, 19 bp, Mus musculus
  siRNA target sequence for A730008L03Rik (NM_021393.1,1416-1434).
gacctcctcctactactta

SEQ ID NO: 711296 - DNA, 19 bp, Mus musculus
  siRNA target sequence for A730008L03Rik (NM_021393.1,1452-1470).
caaggtgcatgggacttaa

SEQ ID NO: 711297 - DNA, 19 bp, Mus musculus
  siRNA target sequence for A730008L03Rik (NM_021393.1,1458-1476).
gcatgggacttaatagata

SEQ ID NO: 711298 - DNA, 19 bp, Mus musculus
  siRNA target sequence for A730008L03Rik (NM_021393.1,1543-1561).
ccctcgtggtggatgactt

SEQ ID NO: 711299 - DNA, 19 bp, Mus musculus
  siRNA target sequence for A730008L03Rik (NM_021393.1,1551-1569).
gtggatgacttcactttca

SEQ ID NO: 711300 - DNA, 19 bp, Mus musculus
  siRNA target sequence for A730008L03Rik (NM_021393.1,1564-1582).
ctttcaacgtagatcagaa

SEQ ID NO: 711301 - DNA, 19 bp, Mus musculus
  siRNA target sequence for A730008L03Rik (NM_021393.1,1669-1687).
cttgtgaggtgggactata

SEQ ID NO: 711302 - DNA, 19 bp, Mus musculus
  siRNA target sequence for A730008L03Rik (NM_021393.1,1744-1762).
ctggacttgtggaaacgtt

SEQ ID NO: 711303 - DNA, 19 bp, Mus musculus
  siRNA target sequence for Pdcd1lg2 (NM_021396.1,275-293).
cgtgacagcccctaaagaa

SEQ ID NO: 711304 - DNA, 19 bp, Mus musculus
  siRNA target sequence for Pdcd1lg2 (NM_021396.1,325-343).
gcctggagtgcgattttga

SEQ ID NO: 711305 - DNA, 19 bp, Mus musculus
  siRNA target sequence for Pdcd1lg2 (NM_021396.1,336-354).
gattttgaccgcagagaat

SEQ ID NO: 711306 - DNA, 19 bp, Mus musculus
  siRNA target sequence for Pdcd1lg2 (NM_021396.1,666-684).
gtgtcctggcaaaatgtca

SEQ ID NO: 711307 - DNA, 19 bp, Mus musculus
  siRNA target sequence for Pdcd1lg2 (NM_021396.1,759-777).
cctcagcctagcagaaact

SEQ ID NO: 711308 - DNA, 19 bp, Mus musculus
  siRNA target sequence for Pdcd1lg2 (NM_021396.1,760-778).
ctcagcctagcagaaactt

SEQ ID NO: 711309 - DNA, 19 bp, Mus musculus
  siRNA target sequence for Pdcd1lg2 (NM_021396.1,812-830).
gctgacttcagccatcatt

SEQ ID NO: 711310 - DNA, 19 bp, Mus musculus
  siRNA target sequence for Pdcd1lg2 (NM_021396.1,868-886).
cgtggccacttcatgtttt

SEQ ID NO: 711311 - DNA, 19 bp, Mus musculus
  siRNA target sequence for Pdcd1lg2 (NM_021396.1,895-913).
cctgcaccatcgctttgat

SEQ ID NO: 711312 - DNA, 19 bp, Mus musculus
  siRNA target sequence for Eeg1 (NM_021398.1,405-423).
ctggactcttggaatgcat

SEQ ID NO: 711313 - DNA, 19 bp, Mus musculus
  siRNA target sequence for Eeg1 (NM_021398.1,415-433).
ggaatgcatcggttttgct

SEQ ID NO: 711314 - DNA, 19 bp, Mus musculus
  siRNA target sequence for Eeg1 (NM_021398.1,554-572).
gcgcaggatgagaagttct

SEQ ID NO: 711315 - DNA, 19 bp, Mus musculus
  siRNA target sequence for Eeg1 (NM_021398.1,565-583).
gaagttctcactcatcttt

SEQ ID NO: 711316 - DNA, 19 bp, Mus musculus
  siRNA target sequence for Eeg1 (NM_021398.1,586-604).
cctggcatccttcatgaat

SEQ ID NO: 711317 - DNA, 19 bp, Mus musculus
  siRNA target sequence for Eeg1 (NM_021398.1,590-608).
gcatccttcatgaataact

SEQ ID NO: 711318 - DNA, 19 bp, Mus musculus
  siRNA target sequence for Eeg1 (NM_021398.1,662-680).
cgcctgatagccatatttt

SEQ ID NO: 711319 - DNA, 19 bp, Mus musculus
  siRNA target sequence for Eeg1 (NM_021398.1,663-681).
gcctgatagccatattttt

SEQ ID NO: 711320 - DNA, 19 bp, Mus musculus
  siRNA target sequence for Eeg1 (NM_021398.1,687-705).
cctgcgccacgatcatcat

SEQ ID NO: 711321 - DNA, 19 bp, Mus musculus
  siRNA target sequence for Eeg1 (NM_021398.1,688-706).
ctgcgccacgatcatcatt

SEQ ID NO: 711322 - DNA, 19 bp, Mus musculus
  siRNA target sequence for Eeg1 (NM_021398.1,841-859).
cctctacaatggagcattt

SEQ ID NO: 711323 - DNA, 19 bp, Mus musculus
  siRNA target sequence for Eeg1 (NM_021398.1,872-890).
gcagtgttcctcgtcatta

SEQ ID NO: 711324 - DNA, 19 bp, Mus musculus
  siRNA target sequence for Eeg1 (NM_021398.1,873-891).
cagtgttcctcgtcattaa

SEQ ID NO: 711325 - DNA, 19 bp, Mus musculus
  siRNA target sequence for Eeg1 (NM_021398.1,957-975).
ggcacattgcgcgtacttt

SEQ ID NO: 711326 - DNA, 19 bp, Mus musculus
  siRNA target sequence for Eeg1 (NM_021398.1,961-979).
cattgcgcgtactttcctt

SEQ ID NO: 711327 - DNA, 19 bp, Mus musculus
  siRNA target sequence for Eeg1 (NM_021398.1,966-984).
cgcgtactttccttctgat

SEQ ID NO: 711328 - DNA, 19 bp, Mus musculus
  siRNA target sequence for Eeg1 (NM_021398.1,1052-1070).
gctagcaagaaagagaata

SEQ ID NO: 711329 - DNA, 19 bp, Mus musculus
  siRNA target sequence for Eeg1 (NM_021398.1,1093-1111).
ggagctgcggtcaaaggaa

SEQ ID NO: 711330 - DNA, 19 bp, Mus musculus
  siRNA target sequence for Eeg1 (NM_021398.1,1227-1245).
cgctctctcgtcgattcat

SEQ ID NO: 711331 - DNA, 19 bp, Mus musculus
  siRNA target sequence for Eeg1 (NM_021398.1,1229-1247).
ctctctcgtcgattcatct

SEQ ID NO: 711332 - DNA, 19 bp, Mus musculus
  siRNA target sequence for Eeg1 (NM_021398.1,1255-1273).
ggtgtggctgtctatcata

SEQ ID NO: 711333 - DNA, 19 bp, Mus musculus
  siRNA target sequence for Eeg1 (NM_021398.1,1283-1301).
cattacctcttcattggta

SEQ ID NO: 711334 - DNA, 19 bp, Mus musculus
  siRNA target sequence for Eeg1 (NM_021398.1,1346-1364).
gaagtcagtgcctacacaa

SEQ ID NO: 711335 - DNA, 19 bp, Mus musculus
  siRNA target sequence for Eeg1 (NM_021398.1,1406-1424).
ccctggaatggcttactca

SEQ ID NO: 711336 - DNA, 19 bp, Mus musculus
  siRNA target sequence for Eeg1 (NM_021398.1,1567-1585).
ctgtcatgcagctacagta

SEQ ID NO: 711337 - DNA, 19 bp, Mus musculus
  siRNA target sequence for Eeg1 (NM_021398.1,1614-1632).
cgctccttcctgtatggat

SEQ ID NO: 711338 - DNA, 19 bp, Mus musculus
  siRNA target sequence for Eeg1 (NM_021398.1,1619-1637).
cttcctgtatggatgcaat

SEQ ID NO: 711339 - DNA, 19 bp, Mus musculus
  siRNA target sequence for Eeg1 (NM_021398.1,1662-1680).
ccctcagagcattttggaa

SEQ ID NO: 711340 - DNA, 19 bp, Mus musculus
  siRNA target sequence for Prg4 (NM_021400.1,84-102).
ctgttgtcttgattcaaca

SEQ ID NO: 711341 - DNA, 19 bp, Mus musculus
  siRNA target sequence for Prg4 (NM_021400.1,94-112).
gattcaacaggtttcatct

SEQ ID NO: 711342 - DNA, 19 bp, Mus musculus
  siRNA target sequence for Prg4 (NM_021400.1,103-121).
ggtttcatctcaagattta

SEQ ID NO: 711343 - DNA, 19 bp, Mus musculus
  siRNA target sequence for Prg4 (NM_021400.1,145-163).
ggaagggtactctagagat

SEQ ID NO: 711344 - DNA, 19 bp, Mus musculus
  siRNA target sequence for Prg4 (NM_021400.1,166-184).
cacctgcaactgtgattat

SEQ ID NO: 711345 - DNA, 19 bp, Mus musculus
  siRNA target sequence for Prg4 (NM_021400.1,299-317).
gactcccagtgtaaacagt

SEQ ID NO: 711346 - DNA, 19 bp, Mus musculus
  siRNA target sequence for Prg4 (NM_021400.1,301-319).
ctcccagtgtaaacagtat

SEQ ID NO: 711347 - DNA, 19 bp, Mus musculus
  siRNA target sequence for Prg4 (NM_021400.1,322-340).
caagtgctgtgcagattat

SEQ ID NO: 711348 - DNA, 19 bp, Mus musculus
  siRNA target sequence for Prg4 (NM_021400.1,436-454).
caaacgctcacccaaatca

SEQ ID NO: 711349 - DNA, 19 bp, Mus musculus
  siRNA target sequence for Prg4 (NM_021400.1,558-576).
caactattcggaaaatcaa

SEQ ID NO: 711350 - DNA, 19 bp, Mus musculus
  siRNA target sequence for Prg4 (NM_021400.1,583-601).
caaaaattcagctaataga

SEQ ID NO: 711351 - DNA, 19 bp, Mus musculus
  siRNA target sequence for Prg4 (NM_021400.1,819-837).
gtcttgcacctaattctga

SEQ ID NO: 711352 - DNA, 19 bp, Mus musculus
  siRNA target sequence for Prg4 (NM_021400.1,850-868).
ggcatctttagcatccaat

SEQ ID NO: 711353 - DNA, 19 bp, Mus musculus
  siRNA target sequence for Prg4 (NM_021400.1,893-911).
gagactactgcaacaaata

SEQ ID NO: 711354 - DNA, 19 bp, Mus musculus
  siRNA target sequence for Prg4 (NM_021400.1,955-973).
gacacggagtgcagagaaa

SEQ ID NO: 711355 - DNA, 19 bp, Mus musculus
  siRNA target sequence for Prg4 (NM_021400.1,986-1004).
gatgttgagcccacatcta

SEQ ID NO: 711356 - DNA, 19 bp, Mus musculus
  siRNA target sequence for Prg4 (NM_021400.1,1036-1054).
caagaagcctgttactaca

SEQ ID NO: 711357 - DNA, 19 bp, Mus musculus
  siRNA target sequence for Prg4 (NM_021400.1,2009-2027).
gattctaaaacaactctaa

SEQ ID NO: 711358 - DNA, 19 bp, Mus musculus
  siRNA target sequence for Prg4 (NM_021400.1,2048-2066).
gcacccaagcctaccaaaa

SEQ ID NO: 711359 - DNA, 19 bp, Mus musculus
  siRNA target sequence for Prg4 (NM_021400.1,2168-2186).
gcaacacctgaactgaata

SEQ ID NO: 711360 - DNA, 19 bp, Mus musculus
  siRNA target sequence for Prg4 (NM_021400.1,2187-2205).
ccacccctctagaagtcat

SEQ ID NO: 711361 - DNA, 19 bp, Mus musculus
  siRNA target sequence for Prg4 (NM_021400.1,2218-2236).
caccatccctaaacaaact

SEQ ID NO: 711362 - DNA, 19 bp, Mus musculus
  siRNA target sequence for Prg4 (NM_021400.1,2326-2344).
gctattccccacagctatt

SEQ ID NO: 711363 - DNA, 19 bp, Mus musculus
  siRNA target sequence for Prg4 (NM_021400.1,2415-2433).
ccaatttatgcaatggtaa

SEQ ID NO: 711364 - DNA, 19 bp, Mus musculus
  siRNA target sequence for Prg4 (NM_021400.1,2458-2476).
gcgcaatgggacattagtt

SEQ ID NO: 711365 - DNA, 19 bp, Mus musculus
  siRNA target sequence for Prg4 (NM_021400.1,2467-2485).
gacattagttgcatttcga

SEQ ID NO: 711366 - DNA, 19 bp, Mus musculus
  siRNA target sequence for Prg4 (NM_021400.1,2500-2518).
gatgctgaatccattcaga

SEQ ID NO: 711367 - DNA, 19 bp, Mus musculus
  siRNA target sequence for Prg4 (NM_021400.1,2554-2572).
gggtattccctctcctatt

SEQ ID NO: 711368 - DNA, 19 bp, Mus musculus
  siRNA target sequence for Prg4 (NM_021400.1,2556-2574).
gtattccctctcctattga

SEQ ID NO: 711369 - DNA, 19 bp, Mus musculus
  siRNA target sequence for Prg4 (NM_021400.1,2565-2583).
ctcctattgacacagtttt

SEQ ID NO: 711370 - DNA, 19 bp, Mus musculus
  siRNA target sequence for Prg4 (NM_021400.1,2573-2591).
gacacagtttttactagat

SEQ ID NO: 711371 - DNA, 19 bp, Mus musculus
  siRNA target sequence for Prg4 (NM_021400.1,2579-2597).
gtttttactagatgtaact

SEQ ID NO: 711372 - DNA, 19 bp, Mus musculus
  siRNA target sequence for Prg4 (NM_021400.1,2635-2653).
ctggcgcttcaccaatgat

SEQ ID NO: 711373 - DNA, 19 bp, Mus musculus
  siRNA target sequence for Prg4 (NM_021400.1,2667-2685).
ggtatcctaaacaaattgt

SEQ ID NO: 711374 - DNA, 19 bp, Mus musculus
  siRNA target sequence for Prg4 (NM_021400.1,2751-2769).
ggcctgaatctgtgtactt

SEQ ID NO: 711375 - DNA, 19 bp, Mus musculus
  siRNA target sequence for Prg4 (NM_021400.1,2753-2771).
cctgaatctgtgtacttct

SEQ ID NO: 711376 - DNA, 19 bp, Mus musculus
  siRNA target sequence for Prg4 (NM_021400.1,2754-2772).
ctgaatctgtgtacttctt

SEQ ID NO: 711377 - DNA, 19 bp, Mus musculus
  siRNA target sequence for Prg4 (NM_021400.1,2950-2968).
ggtgcccatgagagtttct

SEQ ID NO: 711378 - DNA, 19 bp, Mus musculus
  siRNA target sequence for Prg4 (NM_021400.1,2953-2971).
gcccatgagagtttcttat

SEQ ID NO: 711379 - DNA, 19 bp, Mus musculus
  siRNA target sequence for Prg4 (NM_021400.1,2961-2979).
gagtttcttatcaagacaa

SEQ ID NO: 711380 - DNA, 19 bp, Mus musculus
  siRNA target sequence for Prg4 (NM_021400.1,2967-2985).
cttatcaagacaaaggttt

SEQ ID NO: 711381 - DNA, 19 bp, Mus musculus
  siRNA target sequence for Prg4 (NM_021400.1,3016-3034).
gtggagagggtttccaaat

SEQ ID NO: 711382 - DNA, 19 bp, Mus musculus
  siRNA target sequence for Prg4 (NM_021400.1,3054-3072).
cactgcctaacattaggaa

SEQ ID NO: 711383 - DNA, 19 bp, Mus musculus
  siRNA target sequence for Prg4 (NM_021400.1,3086-3104).
gattactacgccttttcca

SEQ ID NO: 711384 - DNA, 19 bp, Mus musculus
  siRNA target sequence for Prg4 (NM_021400.1,3091-3109).
ctacgccttttccaaagat

SEQ ID NO: 711385 - DNA, 19 bp, Mus musculus
  siRNA target sequence for Prg4 (NM_021400.1,3094-3112).
cgccttttccaaagatcaa

SEQ ID NO: 711386 - DNA, 19 bp, Mus musculus
  siRNA target sequence for Prg4 (NM_021400.1,3102-3120).
ccaaagatcaatactataa

SEQ ID NO: 711387 - DNA, 19 bp, Mus musculus
  siRNA target sequence for Prg4 (NM_021400.1,3121-3139).
cattgatgtgcctacaaga

SEQ ID NO: 711388 - DNA, 19 bp, Mus musculus
  siRNA target sequence for Prg4 (NM_021400.1,3168-3186).
ggcagaccctctccaaaat

SEQ ID NO: 711389 - DNA, 19 bp, Mus musculus
  siRNA target sequence for Prg4 (NM_021400.1,3170-3188).
cagaccctctccaaaatct

SEQ ID NO: 711390 - DNA, 19 bp, Mus musculus
  siRNA target sequence for Trem1 (NM_021406.2,121-139).
ggagggccagactttgaca

SEQ ID NO: 711391 - DNA, 19 bp, Mus musculus
  siRNA target sequence for Trem1 (NM_021406.2,140-158).
gtgaagtgtcccttcaaca

SEQ ID NO: 711392 - DNA, 19 bp, Mus musculus
  siRNA target sequence for Trem1 (NM_021406.2,273-291).
ggaagttcaccctgaaaca

SEQ ID NO: 711393 - DNA, 19 bp, Mus musculus
  siRNA target sequence for Trem1 (NM_021406.2,300-318).
gtgaggccatgctacaagt

SEQ ID NO: 711394 - DNA, 19 bp, Mus musculus
  siRNA target sequence for Trem1 (NM_021406.2,305-323).
gccatgctacaagttcaaa

SEQ ID NO: 711395 - DNA, 19 bp, Mus musculus
  siRNA target sequence for Trem1 (NM_021406.2,310-328).
gctacaagttcaaatgact

SEQ ID NO: 711396 - DNA, 19 bp, Mus musculus
  siRNA target sequence for Trem1 (NM_021406.2,421-439).
ggtgaccaagggttcttca

SEQ ID NO: 711397 - DNA, 19 bp, Mus musculus
  siRNA target sequence for Trem1 (NM_021406.2,482-500).
gagcgtcccatccttatta

SEQ ID NO: 711398 - DNA, 19 bp, Mus musculus
  siRNA target sequence for Trem1 (NM_021406.2,485-503).
cgtcccatccttattacca

SEQ ID NO: 711399 - DNA, 19 bp, Mus musculus
  siRNA target sequence for Trem1 (NM_021406.2,575-593).
ggtcttggagtcactatca

SEQ ID NO: 711400 - DNA, 19 bp, Mus musculus
  siRNA target sequence for Trem1 (NM_021406.2,576-594).
gtcttggagtcactatcat

SEQ ID NO: 711401 - DNA, 19 bp, Mus musculus
  siRNA target sequence for Trem1 (NM_021406.2,578-596).
cttggagtcactatcataa

SEQ ID NO: 711402 - DNA, 19 bp, Mus musculus
  siRNA target sequence for Trem1 (NM_021406.2,617-635).
gtctccacatccagtgtta

SEQ ID NO: 711403 - DNA, 19 bp, Mus musculus
  siRNA target sequence for Trem1 (NM_021406.2,663-681).
gcaagagcctggttttcat

SEQ ID NO: 711404 - DNA, 19 bp, Mus musculus
  siRNA target sequence for Trem3 (NM_021407.1,178-196).
ctgacttgtccttacaaca

SEQ ID NO: 711405 - DNA, 19 bp, Mus musculus
  siRNA target sequence for Trem3 (NM_021407.1,187-205).
ccttacaacatcatgctat

SEQ ID NO: 711406 - DNA, 19 bp, Mus musculus
  siRNA target sequence for Trem3 (NM_021407.1,188-206).
cttacaacatcatgctata

SEQ ID NO: 711407 - DNA, 19 bp, Mus musculus
  siRNA target sequence for Trem3 (NM_021407.1,192-210).
caacatcatgctatactca

SEQ ID NO: 711408 - DNA, 19 bp, Mus musculus
  siRNA target sequence for Trem3 (NM_021407.1,315-333).
gtacttgctggaggattat

SEQ ID NO: 711409 - DNA, 19 bp, Mus musculus
  siRNA target sequence for Trem3 (NM_021407.1,495-513).
gacgtgtggcttcatacta

SEQ ID NO: 711410 - DNA, 19 bp, Mus musculus
  siRNA target sequence for Trem3 (NM_021407.1,497-515).
cgtgtggcttcatactaaa

SEQ ID NO: 711411 - DNA, 19 bp, Mus musculus
  siRNA target sequence for Trem3 (NM_021407.1,500-518).
gtggcttcatactaaacaa

SEQ ID NO: 711412 - DNA, 19 bp, Mus musculus
  siRNA target sequence for Trem3 (NM_021407.1,560-578).
ctgggcctaaggtgttaca

SEQ ID NO: 711413 - DNA, 19 bp, Mus musculus
  siRNA target sequence for Trem3 (NM_021407.1,579-597).
gccttccaagacatccaaa

SEQ ID NO: 711414 - DNA, 19 bp, Mus musculus
  siRNA target sequence for Trem3 (NM_021407.1,584-602).
ccaagacatccaaagtaca

SEQ ID NO: 711415 - DNA, 19 bp, Mus musculus
  siRNA target sequence for 1110006O24Rik (NM_021417.1,311-329).
ggagccagccccacgtttt

SEQ ID NO: 711416 - DNA, 19 bp, Mus musculus
  siRNA target sequence for 1110006O24Rik (NM_021417.1,312-330).
gagccagccccacgttttt

SEQ ID NO: 711417 - DNA, 19 bp, Mus musculus
  siRNA target sequence for AB041550 (NM_021418.1,146-164).
ctaccggtctggatcagta

SEQ ID NO: 711418 - DNA, 19 bp, Mus musculus
  siRNA target sequence for AB041550 (NM_021418.1,149-167).
ccggtctggatcagtatct

SEQ ID NO: 711419 - DNA, 19 bp, Mus musculus
  siRNA target sequence for AB041550 (NM_021418.1,421-439).
cgcctctgcggctatttca

SEQ ID NO: 711420 - DNA, 19 bp, Mus musculus
  siRNA target sequence for AB041550 (NM_021418.1,423-441).
cctctgcggctatttcagt

SEQ ID NO: 711421 - DNA, 19 bp, Mus musculus
  siRNA target sequence for AB041550 (NM_021418.1,424-442).
ctctgcggctatttcagta

SEQ ID NO: 711422 - DNA, 19 bp, Mus musculus
  siRNA target sequence for AB041550 (NM_021418.1,583-601).
ctagaggaggaaaacagta

SEQ ID NO: 711423 - DNA, 19 bp, Mus musculus
  siRNA target sequence for Rnf8 (NM_021419.1,254-272).
cataggacggggacttagt

SEQ ID NO: 711424 - DNA, 19 bp, Mus musculus
  siRNA target sequence for Rnf8 (NM_021419.1,262-280).
ggggacttagtgtcacata

SEQ ID NO: 711425 - DNA, 19 bp, Mus musculus
  siRNA target sequence for Rnf8 (NM_021419.1,277-295).
cataccagctgatatcaaa

SEQ ID NO: 711426 - DNA, 19 bp, Mus musculus
  siRNA target sequence for Rnf8 (NM_021419.1,281-299).
ccagctgatatcaaaggtt

SEQ ID NO: 711427 - DNA, 19 bp, Mus musculus
  siRNA target sequence for Rnf8 (NM_021419.1,348-366).
gagggacagtggaccatta

SEQ ID NO: 711428 - DNA, 19 bp, Mus musculus
  siRNA target sequence for Rnf8 (NM_021419.1,358-376).
ggaccattatggacaataa

SEQ ID NO: 711429 - DNA, 19 bp, Mus musculus
  siRNA target sequence for Rnf8 (NM_021419.1,362-380).
cattatggacaataagagt

SEQ ID NO: 711430 - DNA, 19 bp, Mus musculus
  siRNA target sequence for Rnf8 (NM_021419.1,368-386).
ggacaataagagtctgaat

SEQ ID NO: 711431 - DNA, 19 bp, Mus musculus
  siRNA target sequence for Rnf8 (NM_021419.1,418-436).
cattacagggttattgcat

SEQ ID NO: 711432 - DNA, 19 bp, Mus musculus
  siRNA target sequence for Rnf8 (NM_021419.1,439-457).
gtaagggagaccatatcca

SEQ ID NO: 711433 - DNA, 19 bp, Mus musculus
  siRNA target sequence for Rnf8 (NM_021419.1,481-499).
gggagacggcggagtatga

SEQ ID NO: 711434 - DNA, 19 bp, Mus musculus
  siRNA target sequence for Rnf8 (NM_021419.1,482-500).
ggagacggcggagtatgaa

SEQ ID NO: 711435 - DNA, 19 bp, Mus musculus
  siRNA target sequence for Rnf8 (NM_021419.1,483-501).
gagacggcggagtatgaat

SEQ ID NO: 711436 - DNA, 19 bp, Mus musculus
  siRNA target sequence for Rnf8 (NM_021419.1,487-505).
cggcggagtatgaatacga

SEQ ID NO: 711437 - DNA, 19 bp, Mus musculus
  siRNA target sequence for Rnf8 (NM_021419.1,488-506).
ggcggagtatgaatacgaa

SEQ ID NO: 711438 - DNA, 19 bp, Mus musculus
  siRNA target sequence for Rnf8 (NM_021419.1,494-512).
gtatgaatacgaagtcatt

SEQ ID NO: 711439 - DNA, 19 bp, Mus musculus
  siRNA target sequence for Rnf8 (NM_021419.1,554-572).
gaatgaccagagaatggaa

SEQ ID NO: 711440 - DNA, 19 bp, Mus musculus
  siRNA target sequence for Rnf8 (NM_021419.1,576-594).
cataaaggctcgagaacta

SEQ ID NO: 711441 - DNA, 19 bp, Mus musculus
  siRNA target sequence for Rnf8 (NM_021419.1,607-625).
gttcgcctgggttagagaa

SEQ ID NO: 711442 - DNA, 19 bp, Mus musculus
  siRNA target sequence for Rnf8 (NM_021419.1,655-673).
gatgcccactggctaatgt

SEQ ID NO: 711443 - DNA, 19 bp, Mus musculus
  siRNA target sequence for Rnf8 (NM_021419.1,665-683).
ggctaatgtcgccagtaaa

SEQ ID NO: 711444 - DNA, 19 bp, Mus musculus
  siRNA target sequence for Rnf8 (NM_021419.1,880-898).
gcttagaactgtttaaggt

SEQ ID NO: 711445 - DNA, 19 bp, Mus musculus
  siRNA target sequence for Rnf8 (NM_021419.1,978-996).
cggaaggggagctcaaaga

SEQ ID NO: 711446 - DNA, 19 bp, Mus musculus
  siRNA target sequence for Rnf8 (NM_021419.1,1013-1031).
gaaggagctgcgaaactta

SEQ ID NO: 711447 - DNA, 19 bp, Mus musculus
  siRNA target sequence for Rnf8 (NM_021419.1,1017-1035).
gagctgcgaaacttacagt

SEQ ID NO: 711448 - DNA, 19 bp, Mus musculus
  siRNA target sequence for Rnf8 (NM_021419.1,1238-1256).
cattcaagccaagaacaaa

SEQ ID NO: 711449 - DNA, 19 bp, Mus musculus
  siRNA target sequence for Rnf8 (NM_021419.1,1361-1379).
ctgctcggagtactttatt

SEQ ID NO: 711450 - DNA, 19 bp, Mus musculus
  siRNA target sequence for Rnf8 (NM_021419.1,1363-1381).
gctcggagtactttattga

SEQ ID NO: 711451 - DNA, 19 bp, Mus musculus
  siRNA target sequence for Rnf8 (NM_021419.1,1414-1432).
gctccttctgtatcaatga

SEQ ID NO: 711452 - DNA, 19 bp, Mus musculus
  siRNA target sequence for Rnf8 (NM_021419.1,1545-1563).
gacgtgaaggaaagaagaa

SEQ ID NO: 711453 - DNA, 19 bp, Mus musculus
  siRNA target sequence for D1Ertd396e (NM_021421.2,184-202).
catcctctcgcaggattta

SEQ ID NO: 711454 - DNA, 19 bp, Mus musculus
  siRNA target sequence for D1Ertd396e (NM_021421.2,234-252).
gccgacgtccagtgttaca

SEQ ID NO: 711455 - DNA, 19 bp, Mus musculus
  siRNA target sequence for D1Ertd396e (NM_021421.2,236-254).
cgacgtccagtgttacact

SEQ ID NO: 711456 - DNA, 19 bp, Mus musculus
  siRNA target sequence for D1Ertd396e (NM_021421.2,263-281).
cggttccccaatatcttga

SEQ ID NO: 711457 - DNA, 19 bp, Mus musculus
  siRNA target sequence for D1Ertd396e (NM_021421.2,264-282).
ggttccccaatatcttgaa

SEQ ID NO: 711458 - DNA, 19 bp, Mus musculus
  siRNA target sequence for D1Ertd396e (NM_021421.2,265-283).
gttccccaatatcttgaaa

SEQ ID NO: 711459 - DNA, 19 bp, Mus musculus
  siRNA target sequence for D1Ertd396e (NM_021421.2,268-286).
ccccaatatcttgaaagaa

SEQ ID NO: 711460 - DNA, 19 bp, Mus musculus
  siRNA target sequence for D1Ertd396e (NM_021421.2,335-353).
gatcattatgggacagaaa

SEQ ID NO: 711461 - DNA, 19 bp, Mus musculus
  siRNA target sequence for D1Ertd396e (NM_021421.2,357-375).
ggccaagtctggaatcact

SEQ ID NO: 711462 - DNA, 19 bp, Mus musculus
  siRNA target sequence for D1Ertd396e (NM_021421.2,367-385).
ggaatcactgggttatcat

SEQ ID NO: 711463 - DNA, 19 bp, Mus musculus
  siRNA target sequence for D1Ertd396e (NM_021421.2,368-386).
gaatcactgggttatcatt

SEQ ID NO: 711464 - DNA, 19 bp, Mus musculus
  siRNA target sequence for D1Ertd396e (NM_021421.2,377-395).
ggttatcattgtgaatata

SEQ ID NO: 711465 - DNA, 19 bp, Mus musculus
  siRNA target sequence for D1Ertd396e (NM_021421.2,378-396).
gttatcattgtgaatataa

SEQ ID NO: 711466 - DNA, 19 bp, Mus musculus
  siRNA target sequence for D1Ertd396e (NM_021421.2,426-444).
gtgccatctgcttcaaaca

SEQ ID NO: 711467 - DNA, 19 bp, Mus musculus
  siRNA target sequence for D1Ertd396e (NM_021421.2,448-466).
caggttctcgctcttatct

SEQ ID NO: 711468 - DNA, 19 bp, Mus musculus
  siRNA target sequence for D1Ertd396e (NM_021421.2,574-592).
catctgcatagctaacaca

SEQ ID NO: 711469 - DNA, 19 bp, Mus musculus
  siRNA target sequence for C030019F02Rik (NM_021426.3,635-653).
ctgtaccatgtcaatgaaa

SEQ ID NO: 711470 - DNA, 19 bp, Mus musculus
  siRNA target sequence for A830059I20Rik (NM_021427.1,373-391).
gtgaaccaccgcaagtact

SEQ ID NO: 711471 - DNA, 19 bp, Mus musculus
  siRNA target sequence for A830059I20Rik (NM_021427.1,506-524).
cgaccccagcgcactgtaa

SEQ ID NO: 711472 - DNA, 19 bp, Mus musculus
  siRNA target sequence for Dexi (NM_021428.3,419-437).
cgctgctgccctctatgtt

SEQ ID NO: 711473 - DNA, 19 bp, Mus musculus
  siRNA target sequence for Dexi (NM_021428.3,457-475).
gtcaatgtgctgatccttt

SEQ ID NO: 711474 - DNA, 19 bp, Mus musculus
  siRNA target sequence for Dexi (NM_021428.3,472-490).
ctttactacgccttcctta

SEQ ID NO: 711475 - DNA, 19 bp, Mus musculus
  siRNA target sequence for Dexi (NM_021428.3,477-495).
ctacgccttccttatggaa

SEQ ID NO: 711476 - DNA, 19 bp, Mus musculus
  siRNA target sequence for Dexi (NM_021428.3,481-499).
gccttccttatggaataca

SEQ ID NO: 711477 - DNA, 19 bp, Mus musculus
  siRNA target sequence for Dexi (NM_021428.3,492-510).
ggaatacatcgttctcaat

SEQ ID NO: 711478 - DNA, 19 bp, Mus musculus
  siRNA target sequence for Dexi (NM_021428.3,553-571).
gtggacctcggcgtacttt

SEQ ID NO: 711479 - DNA, 19 bp, Mus musculus
  siRNA target sequence for Dexi (NM_021428.3,613-631).
gacgtcttcgatggatatt

SEQ ID NO: 711480 - DNA, 19 bp, Mus musculus
  siRNA target sequence for 2900002H16Rik (NM_021430.2,678-696).
gaggatggaccgcattgaa

SEQ ID NO: 711481 - DNA, 19 bp, Mus musculus
  siRNA target sequence for 2900002H16Rik (NM_021430.2,881-899).
gtgagcggcaggtgatgaa

SEQ ID NO: 711482 - DNA, 19 bp, Mus musculus
  siRNA target sequence for 2900002H16Rik (NM_021430.2,1004-1022).
cgaggctaatgaagatcaa

SEQ ID NO: 711483 - DNA, 19 bp, Mus musculus
  siRNA target sequence for 2900002H16Rik (NM_021430.2,1226-1244).
cagatggagaggaatcgat

SEQ ID NO: 711484 - DNA, 19 bp, Mus musculus
  siRNA target sequence for 2900002H16Rik (NM_021430.2,1228-1246).
gatggagaggaatcgattt

SEQ ID NO: 711485 - DNA, 19 bp, Mus musculus
  siRNA target sequence for 2900002H16Rik (NM_021430.2,1232-1250).
gagaggaatcgatttcaga

SEQ ID NO: 711486 - DNA, 19 bp, Mus musculus
  siRNA target sequence for 2900002H16Rik (NM_021430.2,1369-1387).
gaggaactggcctactata

SEQ ID NO: 711487 - DNA, 19 bp, Mus musculus
  siRNA target sequence for 2900002H16Rik (NM_021430.2,1470-1488).
ggggatcaagcgactgttt

SEQ ID NO: 711488 - DNA, 19 bp, Mus musculus
  siRNA target sequence for 2900002H16Rik (NM_021430.2,1471-1489).
gggatcaagcgactgttta

SEQ ID NO: 711489 - DNA, 19 bp, Mus musculus
  siRNA target sequence for 2900002H16Rik (NM_021430.2,1476-1494).
caagcgactgtttagcttt

SEQ ID NO: 711490 - DNA, 19 bp, Mus musculus
  siRNA target sequence for E130016I23Rik (NM_021434.2,399-417).
gacatggcgagtgttctat

SEQ ID NO: 711491 - DNA, 19 bp, Mus musculus
  siRNA target sequence for E130016I23Rik (NM_021434.2,509-527).
gaaacccactggatcattt

SEQ ID NO: 711492 - DNA, 19 bp, Mus musculus
  siRNA target sequence for E130016I23Rik (NM_021434.2,542-560).
ccgggctccacgagttctt

SEQ ID NO: 711493 - DNA, 19 bp, Mus musculus
  siRNA target sequence for E130016I23Rik (NM_021434.2,543-561).
cgggctccacgagttcttt

SEQ ID NO: 711494 - DNA, 19 bp, Mus musculus
  siRNA target sequence for E130016I23Rik (NM_021434.2,544-562).
gggctccacgagttctttt

SEQ ID NO: 711495 - DNA, 19 bp, Mus musculus
  siRNA target sequence for E130016I23Rik (NM_021434.2,545-563).
ggctccacgagttcttttt

SEQ ID NO: 711496 - DNA, 19 bp, Mus musculus
  siRNA target sequence for E130016I23Rik (NM_021434.2,640-658).
cccatgcacaccatcttaa

SEQ ID NO: 711497 - DNA, 19 bp, Mus musculus
  siRNA target sequence for E130016I23Rik (NM_021434.2,641-659).
ccatgcacaccatcttaaa

SEQ ID NO: 711498 - DNA, 19 bp, Mus musculus
  siRNA target sequence for E130016I23Rik (NM_021434.2,692-710).
cttcagccttagctaatta

SEQ ID NO: 711499 - DNA, 19 bp, Mus musculus
  siRNA target sequence for E130016I23Rik (NM_021434.2,745-763).
ggagtgcctctcataggaa

SEQ ID NO: 711500 - DNA, 19 bp, Mus musculus
  siRNA target sequence for E130016I23Rik (NM_021434.2,768-786).
ggcagaagtttttgacatt

SEQ ID NO: 711501 - DNA, 19 bp, Mus musculus
  siRNA target sequence for E130016I23Rik (NM_021434.2,825-843).
gtgtatgggctggacaata

SEQ ID NO: 711502 - DNA, 19 bp, Mus musculus
  siRNA target sequence for E130016I23Rik (NM_021434.2,1093-1111).
ctcaagagagagttctaca

SEQ ID NO: 711503 - DNA, 19 bp, Mus musculus
  siRNA target sequence for E130016I23Rik (NM_021434.2,1152-1170).
gccagcgctcgcatgcatt

SEQ ID NO: 711504 - DNA, 19 bp, Mus musculus
  siRNA target sequence for E130016I23Rik (NM_021434.2,1166-1184).
gcattgctgtcgcttttaa

SEQ ID NO: 711505 - DNA, 19 bp, Mus musculus
  siRNA target sequence for E130016I23Rik (NM_021434.2,1167-1185).
cattgctgtcgcttttaat

SEQ ID NO: 711506 - DNA, 19 bp, Mus musculus
  siRNA target sequence for E130016I23Rik (NM_021434.2,1171-1189).
gctgtcgcttttaatgact

SEQ ID NO: 711507 - DNA, 19 bp, Mus musculus
  siRNA target sequence for AB041549 (NM_021435.1,234-252).
cgcaggctgctgcagtaat

SEQ ID NO: 711508 - DNA, 19 bp, Mus musculus
  siRNA target sequence for AB041549 (NM_021435.1,306-324).
cacgtttgcgcagttctta

SEQ ID NO: 711509 - DNA, 19 bp, Mus musculus
  siRNA target sequence for AB041549 (NM_021435.1,376-394).
ccagctatcccaataaggt

SEQ ID NO: 711510 - DNA, 19 bp, Mus musculus
  siRNA target sequence for AB041549 (NM_021435.1,377-395).
cagctatcccaataaggta

SEQ ID NO: 711511 - DNA, 19 bp, Mus musculus
  siRNA target sequence for AB041549 (NM_021435.1,425-443).
ctgtcagcgtggtgaacaa

SEQ ID NO: 711512 - DNA, 19 bp, Mus musculus
  siRNA target sequence for AB041549 (NM_021435.1,429-447).
cagcgtggtgaacaactat

SEQ ID NO: 711513 - DNA, 19 bp, Mus musculus
  siRNA target sequence for AB041549 (NM_021435.1,466-484).
gccatgccgctgcatatga

SEQ ID NO: 711514 - DNA, 19 bp, Mus musculus
  siRNA target sequence for AB041549 (NM_021435.1,467-485).
ccatgccgctgcatatgat

SEQ ID NO: 711515 - DNA, 19 bp, Mus musculus
  siRNA target sequence for AB041549 (NM_021435.1,468-486).
catgccgctgcatatgata

SEQ ID NO: 711516 - DNA, 19 bp, Mus musculus
  siRNA target sequence for AB041549 (NM_021435.1,472-490).
ccgctgcatatgatattca

SEQ ID NO: 711517 - DNA, 19 bp, Mus musculus
  siRNA target sequence for AB041549 (NM_021435.1,475-493).
ctgcatatgatattcagat

SEQ ID NO: 711518 - DNA, 19 bp, Mus musculus
  siRNA target sequence for AB041549 (NM_021435.1,504-522).
gattgccaacatgattcta

SEQ ID NO: 711519 - DNA, 19 bp, Mus musculus
  siRNA target sequence for AB041549 (NM_021435.1,509-527).
ccaacatgattctaggaat

SEQ ID NO: 711520 - DNA, 19 bp, Mus musculus
  siRNA target sequence for AB041549 (NM_021435.1,545-563).
gatacagtatgttcaagta

SEQ ID NO: 711521 - DNA, 19 bp, Mus musculus
  siRNA target sequence for AB041549 (NM_021435.1,774-792).
ctccaaggaggcgttattt

SEQ ID NO: 711522 - DNA, 19 bp, Mus musculus
  siRNA target sequence for AB041549 (NM_021435.1,776-794).
ccaaggaggcgttatttta

SEQ ID NO: 711523 - DNA, 19 bp, Mus musculus
  siRNA target sequence for AB041549 (NM_021435.1,777-795).
caaggaggcgttattttat

SEQ ID NO: 711524 - DNA, 19 bp, Mus musculus
  siRNA target sequence for AB041549 (NM_021435.1,849-867).
ccacgttgtcctgttcaat

SEQ ID NO: 711525 - DNA, 19 bp, Mus musculus
  siRNA target sequence for AB041549 (NM_021435.1,853-871).
gttgtcctgttcaataagt

SEQ ID NO: 711526 - DNA, 19 bp, Mus musculus
  siRNA target sequence for AB041549 (NM_021435.1,920-938).
ggttctacctcctcatgaa

SEQ ID NO: 711527 - DNA, 19 bp, Mus musculus
  siRNA target sequence for AB041549 (NM_021435.1,921-939).
gttctacctcctcatgaat

SEQ ID NO: 711528 - DNA, 19 bp, Mus musculus
  siRNA target sequence for AB041549 (NM_021435.1,936-954).
gaatgtcgtgactcaatat

SEQ ID NO: 711529 - DNA, 19 bp, Mus musculus
  siRNA target sequence for AB041549 (NM_021435.1,940-958).
gtcgtgactcaatatgtgt

SEQ ID NO: 711530 - DNA, 19 bp, Mus musculus
  siRNA target sequence for AB041549 (NM_021435.1,964-982).
cggggtgtgttcatcctta

SEQ ID NO: 711531 - DNA, 19 bp, Mus musculus
  siRNA target sequence for AB041549 (NM_021435.1,1093-1111).
ctgggcacctcgtttgtct

SEQ ID NO: 711532 - DNA, 19 bp, Mus musculus
  siRNA target sequence for AB041549 (NM_021435.1,1097-1115).
gcacctcgtttgtcttcat

SEQ ID NO: 711533 - DNA, 19 bp, Mus musculus
  siRNA target sequence for AB041549 (NM_021435.1,1149-1167).
cctcgggaccacaaaaagt

SEQ ID NO: 711534 - DNA, 19 bp, Mus musculus
  siRNA target sequence for AB041549 (NM_021435.1,1160-1178).
caaaaagtgagctgcaaaa

SEQ ID NO: 711535 - DNA, 19 bp, Mus musculus
  siRNA target sequence for Tmeff1 (NM_021436.1,557-575).
cagtgccatacaaattaca

SEQ ID NO: 711536 - DNA, 19 bp, Mus musculus
  siRNA target sequence for Tmeff1 (NM_021436.1,674-692).
ggaccttgctactctgata

SEQ ID NO: 711537 - DNA, 19 bp, Mus musculus
  siRNA target sequence for Tmeff1 (NM_021436.1,675-693).
gaccttgctactctgataa

SEQ ID NO: 711538 - DNA, 19 bp, Mus musculus
  siRNA target sequence for Tmeff1 (NM_021436.1,762-780).
gtggaccgtgcaagtacaa

SEQ ID NO: 711539 - DNA, 19 bp, Mus musculus
  siRNA target sequence for Tmeff1 (NM_021436.1,803-821).
gagaacgttgggtgtgtat

SEQ ID NO: 711540 - DNA, 19 bp, Mus musculus
  siRNA target sequence for Tmeff1 (NM_021436.1,808-826).
cgttgggtgtgtatgtaat

SEQ ID NO: 711541 - DNA, 19 bp, Mus musculus
  siRNA target sequence for Tmeff1 (NM_021436.1,809-827).
gttgggtgtgtatgtaata

SEQ ID NO: 711542 - DNA, 19 bp, Mus musculus
  siRNA target sequence for Tmeff1 (NM_021436.1,867-885).
ccgacgggagttcctataa

SEQ ID NO: 711543 - DNA, 19 bp, Mus musculus
  siRNA target sequence for Tmeff1 (NM_021436.1,869-887).
gacgggagttcctataaca

SEQ ID NO: 711544 - DNA, 19 bp, Mus musculus
  siRNA target sequence for Tmeff1 (NM_021436.1,871-889).
cgggagttcctataacaat

SEQ ID NO: 711545 - DNA, 19 bp, Mus musculus
  siRNA target sequence for Tmeff1 (NM_021436.1,901-919).
ccgagaagcgtcgtgtata

SEQ ID NO: 711546 - DNA, 19 bp, Mus musculus
  siRNA target sequence for Tmeff1 (NM_021436.1,902-920).
cgagaagcgtcgtgtataa

SEQ ID NO: 711547 - DNA, 19 bp, Mus musculus
  siRNA target sequence for Tmeff1 (NM_021436.1,903-921).
gagaagcgtcgtgtataaa

SEQ ID NO: 711548 - DNA, 19 bp, Mus musculus
  siRNA target sequence for Tmeff1 (NM_021436.1,923-941).
caagaacagatcgacataa

SEQ ID NO: 711549 - DNA, 19 bp, Mus musculus
  siRNA target sequence for Tmeff1 (NM_021436.1,1101-1119).
gcatccatgggaaatgtga

SEQ ID NO: 711550 - DNA, 19 bp, Mus musculus
  siRNA target sequence for Tmeff1 (NM_021436.1,1106-1124).
catgggaaatgtgaattca

SEQ ID NO: 711551 - DNA, 19 bp, Mus musculus
  siRNA target sequence for Tmeff1 (NM_021436.1,1109-1127).
gggaaatgtgaattcatct

SEQ ID NO: 711552 - DNA, 19 bp, Mus musculus
  siRNA target sequence for Tmeff1 (NM_021436.1,1136-1154).
cagaaggcctcttgtagat

SEQ ID NO: 711553 - DNA, 19 bp, Mus musculus
  siRNA target sequence for Tmeff1 (NM_021436.1,1138-1156).
gaaggcctcttgtagatgt

SEQ ID NO: 711554 - DNA, 19 bp, Mus musculus
  siRNA target sequence for Tmeff1 (NM_021436.1,1142-1160).
gcctcttgtagatgtgaat

SEQ ID NO: 711555 - DNA, 19 bp, Mus musculus
  siRNA target sequence for Tmeff1 (NM_021436.1,1184-1202).
gagaagacggactttagta

SEQ ID NO: 711556 - DNA, 19 bp, Mus musculus
  siRNA target sequence for Tmeff1 (NM_021436.1,1186-1204).
gaagacggactttagtatt

SEQ ID NO: 711557 - DNA, 19 bp, Mus musculus
  siRNA target sequence for Tmeff1 (NM_021436.1,1192-1210).
ggactttagtattctctat

SEQ ID NO: 711558 - DNA, 19 bp, Mus musculus
  siRNA target sequence for Tmeff1 (NM_021436.1,1195-1213).
ctttagtattctctatgta

SEQ ID NO: 711559 - DNA, 19 bp, Mus musculus
  siRNA target sequence for Tmeff1 (NM_021436.1,1228-1246).
gaagctcacccatgttctt

SEQ ID NO: 711560 - DNA, 19 bp, Mus musculus
  siRNA target sequence for Tmeff1 (NM_021436.1,1266-1284).
cagtacagatcgccattat

SEQ ID NO: 711561 - DNA, 19 bp, Mus musculus
  siRNA target sequence for Tmeff1 (NM_021436.1,1289-1307).
gcaatcgtcatgtgcataa

SEQ ID NO: 711562 - DNA, 19 bp, Mus musculus
  siRNA target sequence for Tmeff1 (NM_021436.1,1311-1329).
ggaaatgccccaagaacaa

SEQ ID NO: 711563 - DNA, 19 bp, Mus musculus
  siRNA target sequence for Tmeff1 (NM_021436.1,1348-1366).
gcagaacctgggtcatttt

SEQ ID NO: 711564 - DNA, 19 bp, Mus musculus
  siRNA target sequence for Tmeff1 (NM_021436.1,1349-1367).
cagaacctgggtcatttta

SEQ ID NO: 711565 - DNA, 19 bp, Mus musculus
  siRNA target sequence for Tmeff1 (NM_021436.1,1351-1369).
gaacctgggtcattttact

SEQ ID NO: 711566 - DNA, 19 bp, Mus musculus
  siRNA target sequence for 1700123O20Rik (NM_021437.1,962-980).
cttcagtgcctgatgacat

SEQ ID NO: 711567 - DNA, 19 bp, Mus musculus
  siRNA target sequence for 1700123O20Rik (NM_021437.1,1064-1082).
gtccccagcgggaacgttt

SEQ ID NO: 711568 - DNA, 19 bp, Mus musculus
  siRNA target sequence for 1700123O20Rik (NM_021437.1,1068-1086).
ccagcgggaacgttttcta

SEQ ID NO: 711569 - DNA, 19 bp, Mus musculus
  siRNA target sequence for 1700123O20Rik (NM_021437.1,1152-1170).
cagtatgtctgcagcaaat

SEQ ID NO: 711570 - DNA, 19 bp, Mus musculus
  siRNA target sequence for 1700123O20Rik (NM_021437.1,1166-1184).
caaatcgaccaccatgtat

SEQ ID NO: 711571 - DNA, 19 bp, Mus musculus
  siRNA target sequence for 1700123O20Rik (NM_021437.1,1236-1254).
gcaggagcgcaatgaattt

SEQ ID NO: 711572 - DNA, 19 bp, Mus musculus
  siRNA target sequence for 1700123O20Rik (NM_021437.1,1240-1258).
gagcgcaatgaatttgtca

SEQ ID NO: 711573 - DNA, 19 bp, Mus musculus
  siRNA target sequence for 1700123O20Rik (NM_021437.1,1282-1300).
gatttcgtggcgaagtttt

SEQ ID NO: 711574 - DNA, 19 bp, Mus musculus
  siRNA target sequence for 1700123O20Rik (NM_021437.1,1287-1305).
cgtggcgaagttttaccaa

SEQ ID NO: 711575 - DNA, 19 bp, Mus musculus
  siRNA target sequence for Ddc8 (NM_021440.1,491-509).
ggctgaacgcctctactta

SEQ ID NO: 711576 - DNA, 19 bp, Mus musculus
  siRNA target sequence for Ddc8 (NM_021440.1,492-510).
gctgaacgcctctacttat

SEQ ID NO: 711577 - DNA, 19 bp, Mus musculus
  siRNA target sequence for Ddc8 (NM_021440.1,760-778).
gacgggtgtcttcaagtaa

SEQ ID NO: 711578 - DNA, 19 bp, Mus musculus
  siRNA target sequence for Ddc8 (NM_021440.1,944-962).
gagtctacagggcaaaaca

SEQ ID NO: 711579 - DNA, 19 bp, Mus musculus
  siRNA target sequence for Ddc8 (NM_021440.1,1056-1074).
cacaaagaaatcgaatcta

SEQ ID NO: 711580 - DNA, 19 bp, Mus musculus
  siRNA target sequence for Ddc8 (NM_021440.1,1067-1085).
cgaatctacctttgaagaa

SEQ ID NO: 711581 - DNA, 19 bp, Mus musculus
  siRNA target sequence for Ddc8 (NM_021440.1,1286-1304).
gatgtggtccaaagtcaat

SEQ ID NO: 711582 - DNA, 19 bp, Mus musculus
  siRNA target sequence for Ddc8 (NM_021440.1,1291-1309).
ggtccaaagtcaatctgaa

SEQ ID NO: 711583 - DNA, 19 bp, Mus musculus
  siRNA target sequence for Ddc8 (NM_021440.1,1294-1312).
ccaaagtcaatctgaaaca

SEQ ID NO: 711584 - DNA, 19 bp, Mus musculus
  siRNA target sequence for Ddc8 (NM_021440.1,1353-1371).
gcaaagtacccgttaaaga

SEQ ID NO: 711585 - DNA, 19 bp, Mus musculus
  siRNA target sequence for Ddc8 (NM_021440.1,1408-1426).
gagaacaagatgacttact

SEQ ID NO: 711586 - DNA, 19 bp, Mus musculus
  siRNA target sequence for Ddc8 (NM_021440.1,1416-1434).
gatgacttactctcactaa

SEQ ID NO: 711587 - DNA, 19 bp, Mus musculus
  siRNA target sequence for Ddc8 (NM_021440.1,1618-1636).
gcttggagatccactacaa

SEQ ID NO: 711588 - DNA, 19 bp, Mus musculus
  siRNA target sequence for Ddc8 (NM_021440.1,1677-1695).
cgcttggctctcctcaaat

SEQ ID NO: 711589 - DNA, 19 bp, Mus musculus
  siRNA target sequence for Ddc8 (NM_021440.1,1682-1700).
ggctctcctcaaatctaat

SEQ ID NO: 711590 - DNA, 19 bp, Mus musculus
  siRNA target sequence for Ddc8 (NM_021440.1,1683-1701).
gctctcctcaaatctaatt

SEQ ID NO: 711591 - DNA, 19 bp, Mus musculus
  siRNA target sequence for Ddc8 (NM_021440.1,1686-1704).
ctcctcaaatctaattcca

SEQ ID NO: 711592 - DNA, 19 bp, Mus musculus
  siRNA target sequence for Ddc8 (NM_021440.1,1860-1878).
cgcttgcaagagtttcaaa

SEQ ID NO: 711593 - DNA, 19 bp, Mus musculus
  siRNA target sequence for Mds1 (NM_021442.1,49-67).
ctggccacaagtaatgagt

SEQ ID NO: 711594 - DNA, 19 bp, Mus musculus
  siRNA target sequence for Mds1 (NM_021442.1,66-84).
gtgtgcctatggcaactat

SEQ ID NO: 711595 - DNA, 19 bp, Mus musculus
  siRNA target sequence for Mds1 (NM_021442.1,118-136).
gatgcagatgggataacca

SEQ ID NO: 711596 - DNA, 19 bp, Mus musculus
  siRNA target sequence for Mds1 (NM_021442.1,176-194).
cgacgtccagtgagtcatt

SEQ ID NO: 711597 - DNA, 19 bp, Mus musculus
  siRNA target sequence for Mds1 (NM_021442.1,268-286).
gagcttcgagagtcaacta

SEQ ID NO: 711598 - DNA, 19 bp, Mus musculus
  siRNA target sequence for Mds1 (NM_021442.1,292-310).
ggagcaggacttggaatat

SEQ ID NO: 711599 - DNA, 19 bp, Mus musculus
  siRNA target sequence for Mds1 (NM_021442.1,314-332).
ccaaaaggaagattgaaat

SEQ ID NO: 711600 - DNA, 19 bp, Mus musculus
  siRNA target sequence for Statip1 (NM_021448.1,19-37).
gaggtgtctcatgtgtttt

SEQ ID NO: 711601 - DNA, 19 bp, Mus musculus
  siRNA target sequence for Statip1 (NM_021448.1,52-70).
gttcgaggagctttgagtt

SEQ ID NO: 711602 - DNA, 19 bp, Mus musculus
  siRNA target sequence for Statip1 (NM_021448.1,58-76).
ggagctttgagttggaata

SEQ ID NO: 711603 - DNA, 19 bp, Mus musculus
  siRNA target sequence for Statip1 (NM_021448.1,113-131).
gctccgttgtgctctatga

SEQ ID NO: 711604 - DNA, 19 bp, Mus musculus
  siRNA target sequence for Statip1 (NM_021448.1,147-165).
ggttattaccaatctgaat

SEQ ID NO: 711605 - DNA, 19 bp, Mus musculus
  siRNA target sequence for Statip1 (NM_021448.1,332-350).
gtgctgtgcacgctattta

SEQ ID NO: 711606 - DNA, 19 bp, Mus musculus
  siRNA target sequence for Statip1 (NM_021448.1,335-353).
ctgtgcacgctatttacca

SEQ ID NO: 711607 - DNA, 19 bp, Mus musculus
  siRNA target sequence for Statip1 (NM_021448.1,437-455).
ggtctgaagtcaaatacct

SEQ ID NO: 711608 - DNA, 19 bp, Mus musculus
  siRNA target sequence for Statip1 (NM_021448.1,468-486).
cttcagggatggattcgtt

SEQ ID NO: 711609 - DNA, 19 bp, Mus musculus
  siRNA target sequence for Statip1 (NM_021448.1,474-492).
ggatggattcgttctttct

SEQ ID NO: 711610 - DNA, 19 bp, Mus musculus
  siRNA target sequence for Statip1 (NM_021448.1,550-568).
gactgcagaattcacttat

SEQ ID NO: 711611 - DNA, 19 bp, Mus musculus
  siRNA target sequence for Statip1 (NM_021448.1,613-631).
ggacacgaggactggataa

SEQ ID NO: 711612 - DNA, 19 bp, Mus musculus
  siRNA target sequence for Statip1 (NM_021448.1,636-654).
cgtggaatgggcaaccttt

SEQ ID NO: 711613 - DNA, 19 bp, Mus musculus
  siRNA target sequence for Statip1 (NM_021448.1,685-703).
caggactgcctaataagaa

SEQ ID NO: 711614 - DNA, 19 bp, Mus musculus
  siRNA target sequence for Statip1 (NM_021448.1,687-705).
ggactgcctaataagaata

SEQ ID NO: 711615 - DNA, 19 bp, Mus musculus
  siRNA target sequence for Statip1 (NM_021448.1,688-706).
gactgcctaataagaatat

SEQ ID NO: 711616 - DNA, 19 bp, Mus musculus
  siRNA target sequence for Statip1 (NM_021448.1,720-738).
gaaaccagcatctttcgaa

SEQ ID NO: 711617 - DNA, 19 bp, Mus musculus
  siRNA target sequence for Statip1 (NM_021448.1,786-804).
ggatggcggtgttagaaca

SEQ ID NO: 711618 - DNA, 19 bp, Mus musculus
  siRNA target sequence for Statip1 (NM_021448.1,787-805).
gatggcggtgttagaacaa

SEQ ID NO: 711619 - DNA, 19 bp, Mus musculus
  siRNA target sequence for Statip1 (NM_021448.1,930-948).
catggacaaaaccatgatt

SEQ ID NO: 711620 - DNA, 19 bp, Mus musculus
  siRNA target sequence for Statip1 (NM_021448.1,990-1008).
ggtccgagtaggtgaagta

SEQ ID NO: 711621 - DNA, 19 bp, Mus musculus
  siRNA target sequence for Statip1 (NM_021448.1,1013-1031).
gaaataccctggggtttta

SEQ ID NO: 711622 - DNA, 19 bp, Mus musculus
  siRNA target sequence for Statip1 (NM_021448.1,1130-1148).
gggctccagagattgtcat

SEQ ID NO: 711623 - DNA, 19 bp, Mus musculus
  siRNA target sequence for Statip1 (NM_021448.1,1131-1149).
ggctccagagattgtcatt

SEQ ID NO: 711624 - DNA, 19 bp, Mus musculus
  siRNA target sequence for Statip1 (NM_021448.1,1132-1150).
gctccagagattgtcattt

SEQ ID NO: 711625 - DNA, 19 bp, Mus musculus
  siRNA target sequence for Statip1 (NM_021448.1,1195-1213).
ggagagttcatcatcacta

SEQ ID NO: 711626 - DNA, 19 bp, Mus musculus
  siRNA target sequence for Statip1 (NM_021448.1,1296-1314).
gatcgcaaggcctcagata

SEQ ID NO: 711627 - DNA, 19 bp, Mus musculus
  siRNA target sequence for Statip1 (NM_021448.1,1329-1347).
caagtgtttggcgatgatt

SEQ ID NO: 711628 - DNA, 19 bp, Mus musculus
  siRNA target sequence for Statip1 (NM_021448.1,1332-1350).
gtgtttggcgatgattgat

SEQ ID NO: 711629 - DNA, 19 bp, Mus musculus
  siRNA target sequence for Statip1 (NM_021448.1,1439-1457).
ccagacagtcactaagtca

SEQ ID NO: 711630 - DNA, 19 bp, Mus musculus
  siRNA target sequence for Statip1 (NM_021448.1,1504-1522).
gcattagggctgtcaaata

SEQ ID NO: 711631 - DNA, 19 bp, Mus musculus
  siRNA target sequence for Statip1 (NM_021448.1,1505-1523).
cattagggctgtcaaataa

SEQ ID NO: 711632 - DNA, 19 bp, Mus musculus
  siRNA target sequence for Statip1 (NM_021448.1,1692-1710).
cggacatggctatgagata

SEQ ID NO: 711633 - DNA, 19 bp, Mus musculus
  siRNA target sequence for Statip1 (NM_021448.1,1700-1718).
gctatgagatagtttgtgt

SEQ ID NO: 711634 - DNA, 19 bp, Mus musculus
  siRNA target sequence for Statip1 (NM_021448.1,1776-1794).
gcacgcagctatcattctt

SEQ ID NO: 711635 - DNA, 19 bp, Mus musculus
  siRNA target sequence for Statip1 (NM_021448.1,1800-1818).
cacggcatcttggaaacaa

SEQ ID NO: 711636 - DNA, 19 bp, Mus musculus
  siRNA target sequence for Statip1 (NM_021448.1,1903-1921).
gatcgaacctggtctttgt

SEQ ID NO: 711637 - DNA, 19 bp, Mus musculus
  siRNA target sequence for Statip1 (NM_021448.1,1937-1955).
cgacttcctcggagtttga

SEQ ID NO: 711638 - DNA, 19 bp, Mus musculus
  siRNA target sequence for Statip1 (NM_021448.1,1943-1961).
cctcggagtttgatccatt

SEQ ID NO: 711639 - DNA, 19 bp, Mus musculus
  siRNA target sequence for Statip1 (NM_021448.1,1944-1962).
ctcggagtttgatccattt

SEQ ID NO: 711640 - DNA, 19 bp, Mus musculus
  siRNA target sequence for Statip1 (NM_021448.1,1994-2012).
cttctgtgcatagtagaat

SEQ ID NO: 711641 - DNA, 19 bp, Mus musculus
  siRNA target sequence for Statip1 (NM_021448.1,1997-2015).
ctgtgcatagtagaatcat

SEQ ID NO: 711642 - DNA, 19 bp, Mus musculus
  siRNA target sequence for Statip1 (NM_021448.1,1999-2017).
gtgcatagtagaatcattt

SEQ ID NO: 711643 - DNA, 19 bp, Mus musculus
  siRNA target sequence for Statip1 (NM_021448.1,2030-2048).
ggagtcctgataacaagta

SEQ ID NO: 711644 - DNA, 19 bp, Mus musculus
  siRNA target sequence for Statip1 (NM_021448.1,2055-2073).
cactggaagtcgagacaaa

SEQ ID NO: 711645 - DNA, 19 bp, Mus musculus
  siRNA target sequence for Statip1 (NM_021448.1,2057-2075).
ctggaagtcgagacaaaaa

SEQ ID NO: 711646 - DNA, 19 bp, Mus musculus
  siRNA target sequence for Statip1 (NM_021448.1,2180-2198).
gtgtctgccctgtgcttaa

SEQ ID NO: 711647 - DNA, 19 bp, Mus musculus
  siRNA target sequence for Statip1 (NM_021448.1,2233-2251).
gagagtgggaagatttgta

SEQ ID NO: 711648 - DNA, 19 bp, Mus musculus
  siRNA target sequence for Statip1 (NM_021448.1,2235-2253).
gagtgggaagatttgtata

SEQ ID NO: 711649 - DNA, 19 bp, Mus musculus
  siRNA target sequence for Statip1 (NM_021448.1,2237-2255).
gtgggaagatttgtatata

SEQ ID NO: 711650 - DNA, 19 bp, Mus musculus
  siRNA target sequence for Statip1 (NM_021448.1,2326-2344).
cacagcctgggtatcagaa

SEQ ID NO: 711651 - DNA, 19 bp, Mus musculus
  siRNA target sequence for Statip1 (NM_021448.1,2331-2349).
cctgggtatcagaaggtta

SEQ ID NO: 711652 - DNA, 19 bp, Mus musculus
  siRNA target sequence for Statip1 (NM_021448.1,2455-2473).
cataccgtgaagatttaca

SEQ ID NO: 711653 - DNA, 19 bp, Mus musculus
  siRNA target sequence for Statip1 (NM_021448.1,2466-2484).
gatttacagggttaacaga

SEQ ID NO: 711654 - DNA, 19 bp, Mus musculus
  siRNA target sequence for Mknk1 (NM_021461.2,365-383).
gaaggagtatgctgtcaaa

SEQ ID NO: 711655 - DNA, 19 bp, Mus musculus
  siRNA target sequence for Mknk1 (NM_021461.2,473-491).
ggagctgattgaattcttt

SEQ ID NO: 711656 - DNA, 19 bp, Mus musculus
  siRNA target sequence for Mknk1 (NM_021461.2,495-513).
gatgacacacggttttact

SEQ ID NO: 711657 - DNA, 19 bp, Mus musculus
  siRNA target sequence for Mknk1 (NM_021461.2,515-533).
ggtctttgagaaattgcaa

SEQ ID NO: 711658 - DNA, 19 bp, Mus musculus
  siRNA target sequence for Mknk1 (NM_021461.2,560-578).
gaagcggaagcacttcaat

SEQ ID NO: 711659 - DNA, 19 bp, Mus musculus
  siRNA target sequence for Mknk1 (NM_021461.2,698-716).
ggtgtctccggtgaaaatt

SEQ ID NO: 711660 - DNA, 19 bp, Mus musculus
  siRNA target sequence for Mknk1 (NM_021461.2,699-717).
gtgtctccggtgaaaattt

SEQ ID NO: 711661 - DNA, 19 bp, Mus musculus
  siRNA target sequence for Mknk1 (NM_021461.2,701-719).
gtctccggtgaaaatttgt

SEQ ID NO: 711662 - DNA, 19 bp, Mus musculus
  siRNA target sequence for Mknk1 (NM_021461.2,736-754).
gtggggtaaagttgaacaa

SEQ ID NO: 711663 - DNA, 19 bp, Mus musculus
  siRNA target sequence for Mknk1 (NM_021461.2,842-860).
ggacgaggctactttctat

SEQ ID NO: 711664 - DNA, 19 bp, Mus musculus
  siRNA target sequence for Mknk1 (NM_021461.2,1096-1114).
gagatgcgaagcaaagact

SEQ ID NO: 711665 - DNA, 19 bp, Mus musculus
  siRNA target sequence for Mknk1 (NM_021461.2,1183-1201).
cgcaagtccttcagagaaa

SEQ ID NO: 711666 - DNA, 19 bp, Mus musculus
  siRNA target sequence for Mknk1 (NM_021461.2,1334-1352).
gtcccctccatccaaatct

SEQ ID NO: 711667 - DNA, 19 bp, Mus musculus
  siRNA target sequence for Mknk1 (NM_021461.2,1387-1405).
gccgaagccgagatgcaaa

SEQ ID NO: 711668 - DNA, 19 bp, Mus musculus
  siRNA target sequence for Mknk1 (NM_021461.2,1398-1416).
gatgcaaacccatgtttga

SEQ ID NO: 711669 - DNA, 19 bp, Mus musculus
  siRNA target sequence for Rnf32 (NM_021470.3,197-215).
ggatcgttcatctaacaaa

SEQ ID NO: 711670 - DNA, 19 bp, Mus musculus
  siRNA target sequence for Rnf32 (NM_021470.3,201-219).
cgttcatctaacaaaggta

SEQ ID NO: 711671 - DNA, 19 bp, Mus musculus
  siRNA target sequence for Rnf32 (NM_021470.3,202-220).
gttcatctaacaaaggtaa

SEQ ID NO: 711672 - DNA, 19 bp, Mus musculus
  siRNA target sequence for Rnf32 (NM_021470.3,241-259).
ccttacaggaccacctatt

SEQ ID NO: 711673 - DNA, 19 bp, Mus musculus
  siRNA target sequence for Rnf32 (NM_021470.3,242-260).
cttacaggaccacctatta

SEQ ID NO: 711674 - DNA, 19 bp, Mus musculus
  siRNA target sequence for Rnf32 (NM_021470.3,251-269).
ccacctattacatgatctt

SEQ ID NO: 711675 - DNA, 19 bp, Mus musculus
  siRNA target sequence for Rnf32 (NM_021470.3,254-272).
cctattacatgatcttcaa

SEQ ID NO: 711676 - DNA, 19 bp, Mus musculus
  siRNA target sequence for Rnf32 (NM_021470.3,286-304).
cggtagcagatccttgtaa

SEQ ID NO: 711677 - DNA, 19 bp, Mus musculus
  siRNA target sequence for Rnf32 (NM_021470.3,288-306).
gtagcagatccttgtaaga

SEQ ID NO: 711678 - DNA, 19 bp, Mus musculus
  siRNA target sequence for Rnf32 (NM_021470.3,291-309).
gcagatccttgtaagataa

SEQ ID NO: 711679 - DNA, 19 bp, Mus musculus
  siRNA target sequence for Rnf32 (NM_021470.3,292-310).
cagatccttgtaagataaa

SEQ ID NO: 711680 - DNA, 19 bp, Mus musculus
  siRNA target sequence for Rnf32 (NM_021470.3,329-347).
gaagtcaaaatctctcaaa

SEQ ID NO: 711681 - DNA, 19 bp, Mus musculus
  siRNA target sequence for Rnf32 (NM_021470.3,354-372).
gcaacagccatcatagata

SEQ ID NO: 711682 - DNA, 19 bp, Mus musculus
  siRNA target sequence for Rnf32 (NM_021470.3,565-583).
catgcccaatatgtaaaga

SEQ ID NO: 711683 - DNA, 19 bp, Mus musculus
  siRNA target sequence for Rnf32 (NM_021470.3,571-589).
caatatgtaaagaagaatt

SEQ ID NO: 711684 - DNA, 19 bp, Mus musculus
  siRNA target sequence for Rnf32 (NM_021470.3,643-661).
gccttcaggcttttgaaaa

SEQ ID NO: 711685 - DNA, 19 bp, Mus musculus
  siRNA target sequence for Rnf32 (NM_021470.3,645-663).
cttcaggcttttgaaaagt

SEQ ID NO: 711686 - DNA, 19 bp, Mus musculus
  siRNA target sequence for Rnf32 (NM_021470.3,682-700).
gtcccctctgtagaaagaa

SEQ ID NO: 711687 - DNA, 19 bp, Mus musculus
  siRNA target sequence for Rnf32 (NM_021470.3,689-707).
ctgtagaaagaaccaatat

SEQ ID NO: 711688 - DNA, 19 bp, Mus musculus
  siRNA target sequence for Rnf32 (NM_021470.3,691-709).
gtagaaagaaccaatatca

SEQ ID NO: 711689 - DNA, 19 bp, Mus musculus
  siRNA target sequence for Rnf32 (NM_021470.3,698-716).
gaaccaatatcaaacaaga

SEQ ID NO: 711690 - DNA, 19 bp, Mus musculus
  siRNA target sequence for Rnf32 (NM_021470.3,780-798).
cgagggtacatcgttagaa

SEQ ID NO: 711691 - DNA, 19 bp, Mus musculus
  siRNA target sequence for Rnf32 (NM_021470.3,781-799).
gagggtacatcgttagaaa

SEQ ID NO: 711692 - DNA, 19 bp, Mus musculus
  siRNA target sequence for Rnf32 (NM_021470.3,783-801).
gggtacatcgttagaaagt

SEQ ID NO: 711693 - DNA, 19 bp, Mus musculus
  siRNA target sequence for Rnf32 (NM_021470.3,792-810).
gttagaaagtggtacagaa

SEQ ID NO: 711694 - DNA, 19 bp, Mus musculus
  siRNA target sequence for Rnf32 (NM_021470.3,829-847).
cgccttcggatgccaaatt

SEQ ID NO: 711695 - DNA, 19 bp, Mus musculus
  siRNA target sequence for Rnf32 (NM_021470.3,830-848).
gccttcggatgccaaatta

SEQ ID NO: 711696 - DNA, 19 bp, Mus musculus
  siRNA target sequence for Rnf32 (NM_021470.3,831-849).
ccttcggatgccaaattaa

SEQ ID NO: 711697 - DNA, 19 bp, Mus musculus
  siRNA target sequence for Rnf32 (NM_021470.3,891-909).
cgaatcctgtgctcataca

SEQ ID NO: 711698 - DNA, 19 bp, Mus musculus
  siRNA target sequence for Rnf32 (NM_021470.3,953-971).
ggcggtaaaccgtagcatt

SEQ ID NO: 711699 - DNA, 19 bp, Mus musculus
  siRNA target sequence for Rnf32 (NM_021470.3,956-974).
ggtaaaccgtagcattctt

SEQ ID NO: 711700 - DNA, 19 bp, Mus musculus
  siRNA target sequence for Rnf32 (NM_021470.3,987-1005).
gaaaggtgtggccagataa

SEQ ID NO: 711701 - DNA, 19 bp, Mus musculus
  siRNA target sequence for Rnf32 (NM_021470.3,1042-1060).
ctgctcaccatgagatcta

SEQ ID NO: 711702 - DNA, 19 bp, Mus musculus
  siRNA target sequence for Rnf32 (NM_021470.3,1047-1065).
caccatgagatctatgaat

SEQ ID NO: 711703 - DNA, 19 bp, Mus musculus
  siRNA target sequence for Rnf32 (NM_021470.3,1255-1273).
gctcctgctaccaaaagaa

SEQ ID NO: 711704 - DNA, 19 bp, Mus musculus
  siRNA target sequence for Rnf32 (NM_021470.3,1256-1274).
ctcctgctaccaaaagaaa

SEQ ID NO: 711705 - DNA, 19 bp, Mus musculus
  siRNA target sequence for Rnf32 (NM_021470.3,1261-1279).
gctaccaaaagaaaattgt

SEQ ID NO: 711706 - DNA, 19 bp, Mus musculus
  siRNA target sequence for Rnase4 (NM_021472.1,177-195).
cctatggccaggatcgaat

SEQ ID NO: 711707 - DNA, 19 bp, Mus musculus
  siRNA target sequence for Rnase4 (NM_021472.1,325-343).
cgaagacatctggaacatt

SEQ ID NO: 711708 - DNA, 19 bp, Mus musculus
  siRNA target sequence for Rnase4 (NM_021472.1,375-393).
gcaagaacggccagatgaa

SEQ ID NO: 711709 - DNA, 19 bp, Mus musculus
  siRNA target sequence for Rnase4 (NM_021472.1,396-414).
gtcacgaaggtgtagtgaa

SEQ ID NO: 711710 - DNA, 19 bp, Mus musculus
  siRNA target sequence for Rnase4 (NM_021472.1,481-499).
cactaggcgagttgtcatt

SEQ ID NO: 711711 - DNA, 19 bp, Mus musculus
  siRNA target sequence for Stk22c (NM_021479.1,178-196).
ggggaagggacctactcaa

SEQ ID NO: 711712 - DNA, 19 bp, Mus musculus
  siRNA target sequence for Stk22c (NM_021479.1,184-202).
gggacctactcaaaagtca

SEQ ID NO: 711713 - DNA, 19 bp, Mus musculus
  siRNA target sequence for Stk22c (NM_021479.1,185-203).
ggacctactcaaaagtcaa

SEQ ID NO: 711714 - DNA, 19 bp, Mus musculus
  siRNA target sequence for Stk22c (NM_021479.1,186-204).
gacctactcaaaagtcaaa

SEQ ID NO: 711715 - DNA, 19 bp, Mus musculus
  siRNA target sequence for Stk22c (NM_021479.1,188-206).
cctactcaaaagtcaaaga

SEQ ID NO: 711716 - DNA, 19 bp, Mus musculus
  siRNA target sequence for Stk22c (NM_021479.1,230-248).
gaaaagtggcaattaaaat

SEQ ID NO: 711717 - DNA, 19 bp, Mus musculus
  siRNA target sequence for Stk22c (NM_021479.1,261-279).
gggagggccagaagagttt

SEQ ID NO: 711718 - DNA, 19 bp, Mus musculus
  siRNA target sequence for Stk22c (NM_021479.1,263-281).
gagggccagaagagtttat

SEQ ID NO: 711719 - DNA, 19 bp, Mus musculus
  siRNA target sequence for Stk22c (NM_021479.1,266-284).
ggccagaagagtttatcca

SEQ ID NO: 711720 - DNA, 19 bp, Mus musculus
  siRNA target sequence for Stk22c (NM_021479.1,296-314).
ctcgtgagctccagattgt

SEQ ID NO: 711721 - DNA, 19 bp, Mus musculus
  siRNA target sequence for Stk22c (NM_021479.1,317-335).
gtaccctggaccacaaaaa

SEQ ID NO: 711722 - DNA, 19 bp, Mus musculus
  siRNA target sequence for Stk22c (NM_021479.1,667-685).
cagggcataccccatgata

SEQ ID NO: 711723 - DNA, 19 bp, Mus musculus
  siRNA target sequence for Stk22c (NM_021479.1,671-689).
gcataccccatgatagcaa

SEQ ID NO: 711724 - DNA, 19 bp, Mus musculus
  siRNA target sequence for Stk22c (NM_021479.1,740-758).
caagtctaccttttgatga

SEQ ID NO: 711725 - DNA, 19 bp, Mus musculus
  siRNA target sequence for Stk22c (NM_021479.1,749-767).
cttttgatgacacagatat

SEQ ID NO: 711726 - DNA, 19 bp, Mus musculus
  siRNA target sequence for Stk22c (NM_021479.1,881-899).
ggccttcaatcgaagaagt

SEQ ID NO: 711727 - DNA, 19 bp, Mus musculus
  siRNA target sequence for Stk22c (NM_021479.1,882-900).
gccttcaatcgaagaagtt

SEQ ID NO: 711728 - DNA, 19 bp, Mus musculus
  siRNA target sequence for Pex2 (NM_021483.1,286-304).
gtctgacagtgaaatggat

SEQ ID NO: 711729 - DNA, 19 bp, Mus musculus
  siRNA target sequence for Pex2 (NM_021483.1,301-319).
ggatggaaggactcacatt

SEQ ID NO: 711730 - DNA, 19 bp, Mus musculus
  siRNA target sequence for Pex2 (NM_021483.1,310-328).
gactcacattccatctcta

SEQ ID NO: 711731 - DNA, 19 bp, Mus musculus
  siRNA target sequence for Pex2 (NM_021483.1,326-344).
ctacttaatgcccttttgt

SEQ ID NO: 711732 - DNA, 19 bp, Mus musculus
  siRNA target sequence for Pex2 (NM_021483.1,413-431).
gacgaggacctggaaataa

SEQ ID NO: 711733 - DNA, 19 bp, Mus musculus
  siRNA target sequence for Pex2 (NM_021483.1,734-752).
gagacatcatccttagatt

SEQ ID NO: 711734 - DNA, 19 bp, Mus musculus
  siRNA target sequence for Pex2 (NM_021483.1,738-756).
catcatccttagatttaga

SEQ ID NO: 711735 - DNA, 19 bp, Mus musculus
  siRNA target sequence for Pex2 (NM_021483.1,744-762).
ccttagatttagacattca

SEQ ID NO: 711736 - DNA, 19 bp, Mus musculus
  siRNA target sequence for Pex2 (NM_021483.1,745-763).
cttagatttagacattcaa

SEQ ID NO: 711737 - DNA, 19 bp, Mus musculus
  siRNA target sequence for Pex2 (NM_021483.1,1061-1079).
gcggcagtagagtcagata

SEQ ID NO: 711738 - DNA, 19 bp, Mus musculus
  siRNA target sequence for Pex2 (NM_021483.1,1294-1312).
catggaagctgcaattctt

SEQ ID NO: 711739 - DNA, 19 bp, Mus musculus
  siRNA target sequence for Pex2 (NM_021483.1,1568-1586).
ctcacacggcggatgtcta

SEQ ID NO: 711740 - DNA, 19 bp, Mus musculus
  siRNA target sequence for Pex2 (NM_021483.1,1570-1588).
cacacggcggatgtctaaa

SEQ ID NO: 711741 - DNA, 19 bp, Mus musculus
  siRNA target sequence for Pex2 (NM_021483.1,1705-1723).
cctgagtggagagttcaat

SEQ ID NO: 711742 - DNA, 19 bp, Mus musculus
  siRNA target sequence for Pex2 (NM_021483.1,1706-1724).
ctgagtggagagttcaata

SEQ ID NO: 711743 - DNA, 19 bp, Mus musculus
  siRNA target sequence for Pex2 (NM_021483.1,1708-1726).
gagtggagagttcaataga

SEQ ID NO: 711744 - DNA, 19 bp, Mus musculus
  siRNA target sequence for Pex2 (NM_021483.1,1717-1735).
gttcaatagagcaatcgat

SEQ ID NO: 711745 - DNA, 19 bp, Mus musculus
  siRNA target sequence for Pex2 (NM_021483.1,1725-1743).
gagcaatcgatgcatttaa

SEQ ID NO: 711746 - DNA, 19 bp, Mus musculus
  siRNA target sequence for Pex2 (NM_021483.1,1755-1773).
cagttcggccagaggatta

SEQ ID NO: 711747 - DNA, 19 bp, Mus musculus
  siRNA target sequence for Pex2 (NM_021483.1,1757-1775).
gttcggccagaggattact

SEQ ID NO: 711748 - DNA, 19 bp, Mus musculus
  siRNA target sequence for Pex2 (NM_021483.1,1795-1813).
ggcaaccttggcaaatgga

SEQ ID NO: 711749 - DNA, 19 bp, Mus musculus
  siRNA target sequence for Pex2 (NM_021483.1,2003-2021).
gccatctccgggaacatct

SEQ ID NO: 711750 - DNA, 19 bp, Mus musculus
  siRNA target sequence for Ttid (NM_021484.2,300-318).
cttcatccagccgcaaaat

SEQ ID NO: 711751 - DNA, 19 bp, Mus musculus
  siRNA target sequence for Ttid (NM_021484.2,367-385).
ccgagccagaccaaacagt

SEQ ID NO: 711752 - DNA, 19 bp, Mus musculus
  siRNA target sequence for Ttid (NM_021484.2,555-573).
cttcctcagttctatatta

SEQ ID NO: 711753 - DNA, 19 bp, Mus musculus
  siRNA target sequence for Ttid (NM_021484.2,574-592).
ccgtctcaacccgattact

SEQ ID NO: 711754 - DNA, 19 bp, Mus musculus
  siRNA target sequence for Ttid (NM_021484.2,576-594).
gtctcaacccgattactgt

SEQ ID NO: 711755 - DNA, 19 bp, Mus musculus
  siRNA target sequence for Ttid (NM_021484.2,578-596).
ctcaacccgattactgtaa

SEQ ID NO: 711756 - DNA, 19 bp, Mus musculus
  siRNA target sequence for Ttid (NM_021484.2,580-598).
caacccgattactgtaaca

SEQ ID NO: 711757 - DNA, 19 bp, Mus musculus
  siRNA target sequence for Ttid (NM_021484.2,583-601).
cccgattactgtaacagta

SEQ ID NO: 711758 - DNA, 19 bp, Mus musculus
  siRNA target sequence for Ttid (NM_021484.2,614-632).
ctgtggactccaactatca

SEQ ID NO: 711759 - DNA, 19 bp, Mus musculus
  siRNA target sequence for Ttid (NM_021484.2,618-636).
ggactccaactatcaacaa

SEQ ID NO: 711760 - DNA, 19 bp, Mus musculus
  siRNA target sequence for Ttid (NM_021484.2,619-637).
gactccaactatcaacaat

SEQ ID NO: 711761 - DNA, 19 bp, Mus musculus
  siRNA target sequence for Ttid (NM_021484.2,717-735).
gatccaaggatcgaaagaa

SEQ ID NO: 711762 - DNA, 19 bp, Mus musculus
  siRNA target sequence for Ttid (NM_021484.2,728-746).
cgaaagaagcgttgattca

SEQ ID NO: 711763 - DNA, 19 bp, Mus musculus
  siRNA target sequence for Ttid (NM_021484.2,729-747).
gaaagaagcgttgattcaa

SEQ ID NO: 711764 - DNA, 19 bp, Mus musculus
  siRNA target sequence for Ttid (NM_021484.2,733-751).
gaagcgttgattcaagatt

SEQ ID NO: 711765 - DNA, 19 bp, Mus musculus
  siRNA target sequence for Ttid (NM_021484.2,737-755).
cgttgattcaagatttgga

SEQ ID NO: 711766 - DNA, 19 bp, Mus musculus
  siRNA target sequence for Ttid (NM_021484.2,770-788).
gcaaagacacccttcttca

SEQ ID NO: 711767 - DNA, 19 bp, Mus musculus
  siRNA target sequence for Ttid (NM_021484.2,779-797).
cccttcttcataatggaaa

SEQ ID NO: 711768 - DNA, 19 bp, Mus musculus
  siRNA target sequence for Ttid (NM_021484.2,864-882).
gtttcaggcgcaaaacagt

SEQ ID NO: 711769 - DNA, 19 bp, Mus musculus
  siRNA target sequence for Ttid (NM_021484.2,930-948).
cgttcccacatcacaagta

SEQ ID NO: 711770 - DNA, 19 bp, Mus musculus
  siRNA target sequence for Ttid (NM_021484.2,931-949).
gttcccacatcacaagtaa

SEQ ID NO: 711771 - DNA, 19 bp, Mus musculus
  siRNA target sequence for Ttid (NM_021484.2,968-986).
gagcagaggccaatgatca

SEQ ID NO: 711772 - DNA, 19 bp, Mus musculus
  siRNA target sequence for Ttid (NM_021484.2,1013-1031).
caccacgcttcattcaagt

SEQ ID NO: 711773 - DNA, 19 bp, Mus musculus
  siRNA target sequence for Ttid (NM_021484.2,1065-1083).
ctgccgaatggactttaaa

SEQ ID NO: 711774 - DNA, 19 bp, Mus musculus
  siRNA target sequence for Ttid (NM_021484.2,1067-1085).
gccgaatggactttaaagt

SEQ ID NO: 711775 - DNA, 19 bp, Mus musculus
  siRNA target sequence for Ttid (NM_021484.2,1068-1086).
ccgaatggactttaaagta

SEQ ID NO: 711776 - DNA, 19 bp, Mus musculus
  siRNA target sequence for Ttid (NM_021484.2,1069-1087).
cgaatggactttaaagtaa

SEQ ID NO: 711777 - DNA, 19 bp, Mus musculus
  siRNA target sequence for Ttid (NM_021484.2,1101-1119).
ccctgatgtgtcatggtat

SEQ ID NO: 711778 - DNA, 19 bp, Mus musculus
  siRNA target sequence for Ttid (NM_021484.2,1105-1123).
gatgtgtcatggtatctaa

SEQ ID NO: 711779 - DNA, 19 bp, Mus musculus
  siRNA target sequence for Ttid (NM_021484.2,1127-1145).
ggagaccagtgcaatcaga

SEQ ID NO: 711780 - DNA, 19 bp, Mus musculus
  siRNA target sequence for Ttid (NM_021484.2,1307-1325).
gagcaccgatgtttatctt

SEQ ID NO: 711781 - DNA, 19 bp, Mus musculus
  siRNA target sequence for Ttid (NM_021484.2,1443-1461).
cactgatcggataagctta

SEQ ID NO: 711782 - DNA, 19 bp, Mus musculus
  siRNA target sequence for Ttid (NM_021484.2,1445-1463).
ctgatcggataagcttata

SEQ ID NO: 711783 - DNA, 19 bp, Mus musculus
  siRNA target sequence for Ttid (NM_021484.2,1451-1469).
ggataagcttatatcatga

SEQ ID NO: 711784 - DNA, 19 bp, Mus musculus
  siRNA target sequence for Ttid (NM_021484.2,1468-1486).
gacaacgccggaagagtaa

SEQ ID NO: 711785 - DNA, 19 bp, Mus musculus
  siRNA target sequence for Ttid (NM_021484.2,1470-1488).
caacgccggaagagtaact

SEQ ID NO: 711786 - DNA, 19 bp, Mus musculus
  siRNA target sequence for Ttid (NM_021484.2,1473-1491).
cgccggaagagtaacttta

SEQ ID NO: 711787 - DNA, 19 bp, Mus musculus
  siRNA target sequence for Ttid (NM_021484.2,1475-1493).
ccggaagagtaactttact

SEQ ID NO: 711788 - DNA, 19 bp, Mus musculus
  siRNA target sequence for Ttid (NM_021484.2,1481-1499).
gagtaactttactgataaa

SEQ ID NO: 711789 - DNA, 19 bp, Mus musculus
  siRNA target sequence for Ttid (NM_021484.2,1532-1550).
cagtgtcagcagtcaatga

SEQ ID NO: 711790 - DNA, 19 bp, Mus musculus
  siRNA target sequence for Ttid (NM_021484.2,1563-1581).
cacgtgtaacacacgatta

SEQ ID NO: 711791 - DNA, 19 bp, Mus musculus
  siRNA target sequence for Ttid (NM_021484.2,1565-1583).
cgtgtaacacacgattaga

SEQ ID NO: 711792 - DNA, 19 bp, Mus musculus
  siRNA target sequence for Ttid (NM_021484.2,1566-1584).
gtgtaacacacgattagat

SEQ ID NO: 711793 - DNA, 19 bp, Mus musculus
  siRNA target sequence for Ttid (NM_021484.2,1568-1586).
gtaacacacgattagatgt

SEQ ID NO: 711794 - DNA, 19 bp, Mus musculus
  siRNA target sequence for Ttid (NM_021484.2,1592-1610).
cccgtccaatccaaactct

SEQ ID NO: 711795 - DNA, 19 bp, Mus musculus
  siRNA target sequence for Ttid (NM_021484.2,1636-1654).
cgaccaacattcagcaaat

SEQ ID NO: 711796 - DNA, 19 bp, Mus musculus
  siRNA target sequence for Ttid (NM_021484.2,1665-1683).
caatgggagaggtttggat

SEQ ID NO: 711797 - DNA, 19 bp, Mus musculus
  siRNA target sequence for Ttid (NM_021484.2,1732-1750).
caatccggactctacgaaa

SEQ ID NO: 711798 - DNA, 19 bp, Mus musculus
  siRNA target sequence for Ttid (NM_021484.2,1736-1754).
ccggactctacgaaagtga

SEQ ID NO: 711799 - DNA, 19 bp, Mus musculus
  siRNA target sequence for Ttid (NM_021484.2,1737-1755).
cggactctacgaaagtgaa

SEQ ID NO: 711800 - DNA, 19 bp, Mus musculus
  siRNA target sequence for Bcdo1 (NM_021486.2,312-330).
gcaagtacaaccattggtt

SEQ ID NO: 711801 - DNA, 19 bp, Mus musculus
  siRNA target sequence for Bcdo1 (NM_021486.2,313-331).
caagtacaaccattggttt

SEQ ID NO: 711802 - DNA, 19 bp, Mus musculus
  siRNA target sequence for Bcdo1 (NM_021486.2,368-386).
gatggggaggtcttctaca

SEQ ID NO: 711803 - DNA, 19 bp, Mus musculus
  siRNA target sequence for Bcdo1 (NM_021486.2,411-429).
cctacatcgccaacattga

SEQ ID NO: 711804 - DNA, 19 bp, Mus musculus
  siRNA target sequence for Bcdo1 (NM_021486.2,474-492).
cggacccctgcaaaaacat

SEQ ID NO: 711805 - DNA, 19 bp, Mus musculus
  siRNA target sequence for Bcdo1 (NM_021486.2,553-571).
gatcaacatcatgaaatgt

SEQ ID NO: 711806 - DNA, 19 bp, Mus musculus
  siRNA target sequence for Bcdo1 (NM_021486.2,600-618).
ccaactacatcaggaaaat

SEQ ID NO: 711807 - DNA, 19 bp, Mus musculus
  siRNA target sequence for Bcdo1 (NM_021486.2,684-702).
ctacctcgcaccctcatta

SEQ ID NO: 711808 - DNA, 19 bp, Mus musculus
  siRNA target sequence for Bcdo1 (NM_021486.2,687-705).
cctcgcaccctcattatga

SEQ ID NO: 711809 - DNA, 19 bp, Mus musculus
  siRNA target sequence for Bcdo1 (NM_021486.2,756-774).
ggacaaaatacgtgatatt

SEQ ID NO: 711810 - DNA, 19 bp, Mus musculus
  siRNA target sequence for Bcdo1 (NM_021486.2,824-842).
gtgaagcacgcggaagttt

SEQ ID NO: 711811 - DNA, 19 bp, Mus musculus
  siRNA target sequence for Bcdo1 (NM_021486.2,923-941).
ctggagcagccttttaagt

SEQ ID NO: 711812 - DNA, 19 bp, Mus musculus
  siRNA target sequence for Bcdo1 (NM_021486.2,929-947).
cagccttttaagttggata

SEQ ID NO: 711813 - DNA, 19 bp, Mus musculus
  siRNA target sequence for Bcdo1 (NM_021486.2,987-1005).
gggcttcctgtatgtcatt

SEQ ID NO: 711814 - DNA, 19 bp, Mus musculus
  siRNA target sequence for Bcdo1 (NM_021486.2,1126-1144).
cggctgtgtgctgtttgat

SEQ ID NO: 711815 - DNA, 19 bp, Mus musculus
  siRNA target sequence for Bcdo1 (NM_021486.2,1167-1185).
gcctctatcagctcttcta

SEQ ID NO: 711816 - DNA, 19 bp, Mus musculus
  siRNA target sequence for Bcdo1 (NM_021486.2,1283-1301).
gcagaagtgggctcaaatt

SEQ ID NO: 711817 - DNA, 19 bp, Mus musculus
  siRNA target sequence for Bcdo1 (NM_021486.2,1289-1307).
gtgggctcaaatttagtca

SEQ ID NO: 711818 - DNA, 19 bp, Mus musculus
  siRNA target sequence for Bcdo1 (NM_021486.2,1304-1322).
gtcaaggtgtcatctacaa

SEQ ID NO: 711819 - DNA, 19 bp, Mus musculus
  siRNA target sequence for Bcdo1 (NM_021486.2,1342-1360).
gaaagacggccatgtctat

SEQ ID NO: 711820 - DNA, 19 bp, Mus musculus
  siRNA target sequence for Bcdo1 (NM_021486.2,1391-1409).
gagctccctcggataaatt

SEQ ID NO: 711821 - DNA, 19 bp, Mus musculus
  siRNA target sequence for Bcdo1 (NM_021486.2,1393-1411).
gctccctcggataaattat

SEQ ID NO: 711822 - DNA, 19 bp, Mus musculus
  siRNA target sequence for Bcdo1 (NM_021486.2,1396-1414).
ccctcggataaattatgct

SEQ ID NO: 711823 - DNA, 19 bp, Mus musculus
  siRNA target sequence for Bcdo1 (NM_021486.2,1397-1415).
cctcggataaattatgctt

SEQ ID NO: 711824 - DNA, 19 bp, Mus musculus
  siRNA target sequence for Bcdo1 (NM_021486.2,1398-1416).
ctcggataaattatgctta

SEQ ID NO: 711825 - DNA, 19 bp, Mus musculus
  siRNA target sequence for Bcdo1 (NM_021486.2,1401-1419).
ggataaattatgcttacaa

SEQ ID NO: 711826 - DNA, 19 bp, Mus musculus
  siRNA target sequence for Bcdo1 (NM_021486.2,1467-1485).
cagtcccaaccaagatact

SEQ ID NO: 711827 - DNA, 19 bp, Mus musculus
  siRNA target sequence for Bcdo1 (NM_021486.2,1469-1487).
gtcccaaccaagatactga

SEQ ID NO: 711828 - DNA, 19 bp, Mus musculus
  siRNA target sequence for Bcdo1 (NM_021486.2,1471-1489).
cccaaccaagatactgaaa

SEQ ID NO: 711829 - DNA, 19 bp, Mus musculus
  siRNA target sequence for Bcdo1 (NM_021486.2,1472-1490).
ccaaccaagatactgaaat

SEQ ID NO: 711830 - DNA, 19 bp, Mus musculus
  siRNA target sequence for Bcdo1 (NM_021486.2,1476-1494).
ccaagatactgaaatatga

SEQ ID NO: 711831 - DNA, 19 bp, Mus musculus
  siRNA target sequence for Bcdo1 (NM_021486.2,1540-1558).
gccagcagagcctctgttt

SEQ ID NO: 711832 - DNA, 19 bp, Mus musculus
  siRNA target sequence for Bcdo1 (NM_021486.2,1652-1670).
ctggatgccaaaagtttta

SEQ ID NO: 711833 - DNA, 19 bp, Mus musculus
  siRNA target sequence for Bcdo1 (NM_021486.2,1678-1696).
ggctcgcgcctctgttgat

SEQ ID NO: 711834 - DNA, 19 bp, Mus musculus
  siRNA target sequence for Bcdo1 (NM_021486.2,1711-1729).
ggaccttcatggtttattt

SEQ ID NO: 711835 - DNA, 19 bp, Mus musculus
  siRNA target sequence for Bcdo1 (NM_021486.2,1712-1730).
gaccttcatggtttattta

SEQ ID NO: 711836 - DNA, 19 bp, Mus musculus
  siRNA target sequence for Bcdo1 (NM_021486.2,1777-1795).
gcaagaggttgaaaactca

SEQ ID NO: 711837 - DNA, 19 bp, Mus musculus
  siRNA target sequence for 2210006E23Rik (NM_021488.3,339-357).
ggaagtttcttcaggatat

SEQ ID NO: 711838 - DNA, 19 bp, Mus musculus
  siRNA target sequence for 4933428G20Rik (NM_021493.1,981-999).
cgctgaccgacctcaactt

SEQ ID NO: 711839 - DNA, 19 bp, Mus musculus
  siRNA target sequence for 4933428G20Rik (NM_021493.1,983-1001).
ctgaccgacctcaacttca

SEQ ID NO: 711840 - DNA, 19 bp, Mus musculus
  siRNA target sequence for 4933428G20Rik (NM_021493.1,1052-1070).
cgaccgcacagcgacaata

SEQ ID NO: 711841 - DNA, 19 bp, Mus musculus
  siRNA target sequence for 4933428G20Rik (NM_021493.1,1056-1074).
cgcacagcgacaataagga

SEQ ID NO: 711842 - DNA, 19 bp, Mus musculus
  siRNA target sequence for Wdr8 (NM_021499.1,132-150).
gtccagtaccgattagtga

SEQ ID NO: 711843 - DNA, 19 bp, Mus musculus
  siRNA target sequence for Wdr8 (NM_021499.1,171-189).
cagatccttcagttgtaca

SEQ ID NO: 711844 - DNA, 19 bp, Mus musculus
  siRNA target sequence for Wdr8 (NM_021499.1,201-219).
cagatccagcacatagagt

SEQ ID NO: 711845 - DNA, 19 bp, Mus musculus
  siRNA target sequence for Wdr8 (NM_021499.1,363-381).
cgccacatcctgaacacaa

SEQ ID NO: 711846 - DNA, 19 bp, Mus musculus
  siRNA target sequence for Wdr8 (NM_021499.1,371-389).
cctgaacacaaccgaattt

SEQ ID NO: 711847 - DNA, 19 bp, Mus musculus
  siRNA target sequence for Wdr8 (NM_021499.1,410-428).
gtccctgtgcaccaaatct

SEQ ID NO: 711848 - DNA, 19 bp, Mus musculus
  siRNA target sequence for Wdr8 (NM_021499.1,412-430).
ccctgtgcaccaaatctgt

SEQ ID NO: 711849 - DNA, 19 bp, Mus musculus
  siRNA target sequence for Wdr8 (NM_021499.1,418-436).
gcaccaaatctgtatctta

SEQ ID NO: 711850 - DNA, 19 bp, Mus musculus
  siRNA target sequence for Wdr8 (NM_021499.1,421-439).
ccaaatctgtatcttacat

SEQ ID NO: 711851 - DNA, 19 bp, Mus musculus
  siRNA target sequence for Wdr8 (NM_021499.1,427-445).
ctgtatcttacatcaagta

SEQ ID NO: 711852 - DNA, 19 bp, Mus musculus
  siRNA target sequence for Wdr8 (NM_021499.1,457-475).
gccagcagggactaacttt

SEQ ID NO: 711853 - DNA, 19 bp, Mus musculus
  siRNA target sequence for Wdr8 (NM_021499.1,459-477).
cagcagggactaactttca

SEQ ID NO: 711854 - DNA, 19 bp, Mus musculus
  siRNA target sequence for Wdr8 (NM_021499.1,516-534).
gactgcagggactatgtca

SEQ ID NO: 711855 - DNA, 19 bp, Mus musculus
  siRNA target sequence for Wdr8 (NM_021499.1,699-717).
gcatactgtgcctatgaat

SEQ ID NO: 711856 - DNA, 19 bp, Mus musculus
  siRNA target sequence for Wdr8 (NM_021499.1,787-805).
gaaaggtgcgcctcctaaa

SEQ ID NO: 711857 - DNA, 19 bp, Mus musculus
  siRNA target sequence for Wdr8 (NM_021499.1,860-878).
ccccaagacagttgtgtat

SEQ ID NO: 711858 - DNA, 19 bp, Mus musculus
  siRNA target sequence for Wdr8 (NM_021499.1,1123-1141).
ggatctgggacattcaaaa

SEQ ID NO: 711859 - DNA, 19 bp, Mus musculus
  siRNA target sequence for Wdr8 (NM_021499.1,1155-1173).
gtggtactagagcatatgt

SEQ ID NO: 711860 - DNA, 19 bp, Mus musculus
  siRNA target sequence for Wdr8 (NM_021499.1,1172-1190).
gtctccagtgcgctcattt

SEQ ID NO: 711861 - DNA, 19 bp, Mus musculus
  siRNA target sequence for Wdr8 (NM_021499.1,1176-1194).
ccagtgcgctcatttcagt

SEQ ID NO: 711862 - DNA, 19 bp, Mus musculus
  siRNA target sequence for Wdr8 (NM_021499.1,1311-1329).
ggactgtgctggcacttaa

SEQ ID NO: 711863 - DNA, 19 bp, Mus musculus
  siRNA target sequence for Maea (NM_021500.1,67-85).
cgagctgctcagaaaaaca

SEQ ID NO: 711864 - DNA, 19 bp, Mus musculus
  siRNA target sequence for Maea (NM_021500.1,505-523).
gcctggtgccatgataaca

SEQ ID NO: 711865 - DNA, 19 bp, Mus musculus
  siRNA target sequence for Maea (NM_021500.1,506-524).
cctggtgccatgataacaa

SEQ ID NO: 711866 - DNA, 19 bp, Mus musculus
  siRNA target sequence for Maea (NM_021500.1,527-545).
cccgactccggaagatgaa

SEQ ID NO: 711867 - DNA, 19 bp, Mus musculus
  siRNA target sequence for Maea (NM_021500.1,529-547).
cgactccggaagatgaaga

SEQ ID NO: 711868 - DNA, 19 bp, Mus musculus
  siRNA target sequence for Maea (NM_021500.1,713-731).
cacatatctccccatacaa

SEQ ID NO: 711869 - DNA, 19 bp, Mus musculus
  siRNA target sequence for Maea (NM_021500.1,763-781).
ctgatccagcagtttcgat

SEQ ID NO: 711870 - DNA, 19 bp, Mus musculus
  siRNA target sequence for Maea (NM_021500.1,765-783).
gatccagcagtttcgatat

SEQ ID NO: 711871 - DNA, 19 bp, Mus musculus
  siRNA target sequence for Maea (NM_021500.1,769-787).
cagcagtttcgatatgata

SEQ ID NO: 711872 - DNA, 19 bp, Mus musculus
  siRNA target sequence for Maea (NM_021500.1,918-936).
cagccgctctctgaacaaa

SEQ ID NO: 711873 - DNA, 19 bp, Mus musculus
  siRNA target sequence for Maea (NM_021500.1,993-1011).
ctctggtgacgtgatgaat

SEQ ID NO: 711874 - DNA, 19 bp, Mus musculus
  siRNA target sequence for Maea (NM_021500.1,995-1013).
ctggtgacgtgatgaatga

SEQ ID NO: 711875 - DNA, 19 bp, Mus musculus
  siRNA target sequence for Maea (NM_021500.1,997-1015).
ggtgacgtgatgaatgaga

SEQ ID NO: 711876 - DNA, 19 bp, Mus musculus
  siRNA target sequence for Maea (NM_021500.1,1033-1051).
ctgcctaatggctatgtct

SEQ ID NO: 711877 - DNA, 19 bp, Mus musculus
  siRNA target sequence for Maea (NM_021500.1,1035-1053).
gcctaatggctatgtctat

SEQ ID NO: 711878 - DNA, 19 bp, Mus musculus
  siRNA target sequence for Maea (NM_021500.1,1068-1086).
gctttctattcgtcaagat

SEQ ID NO: 711879 - DNA, 19 bp, Mus musculus
  siRNA target sequence for Maea (NM_021500.1,1079-1097).
gtcaagatgataaagttgt

SEQ ID NO: 711880 - DNA, 19 bp, Mus musculus
  siRNA target sequence for Maea (NM_021500.1,1128-1146).
ctcccaagctgagaaagta

SEQ ID NO: 711881 - DNA, 19 bp, Mus musculus
  siRNA target sequence for Maea (NM_021500.1,1130-1148).
cccaagctgagaaagtata

SEQ ID NO: 711882 - DNA, 19 bp, Mus musculus
  siRNA target sequence for Maea (NM_021500.1,1136-1154).
ctgagaaagtatacatcat

SEQ ID NO: 711883 - DNA, 19 bp, Mus musculus
  siRNA target sequence for Maea (NM_021500.1,1248-1266).
gcctgcatcgacatttgtt

SEQ ID NO: 711884 - DNA, 19 bp, Mus musculus
  siRNA target sequence for Maea (NM_021500.1,1252-1270).
gcatcgacatttgtttctt

SEQ ID NO: 711885 - DNA, 19 bp, Mus musculus
  siRNA target sequence for Maea (NM_021500.1,1264-1282).
gtttcttgcgaccaaagat

SEQ ID NO: 711886 - DNA, 19 bp, Mus musculus
  siRNA target sequence for Maea (NM_021500.1,1285-1303).
gtgagcaacgacaaatact

SEQ ID NO: 711887 - DNA, 19 bp, Mus musculus
  siRNA target sequence for 1810017G16Rik (NM_021502.1,47-65).
gtgatcgccaaggagaatt

SEQ ID NO: 711888 - DNA, 19 bp, Mus musculus
  siRNA target sequence for 1810017G16Rik (NM_021502.1,219-237).
ccgaggactacaaggtata

SEQ ID NO: 711889 - DNA, 19 bp, Mus musculus
  siRNA target sequence for 1810017G16Rik (NM_021502.1,220-238).
cgaggactacaaggtatat

SEQ ID NO: 711890 - DNA, 19 bp, Mus musculus
  siRNA target sequence for 1810017G16Rik (NM_021502.1,240-258).
ggtatgtgaccaattccaa

SEQ ID NO: 711891 - DNA, 19 bp, Mus musculus
  siRNA target sequence for 1810017G16Rik (NM_021502.1,277-295).
cgtggattcctccaataca

SEQ ID NO: 711892 - DNA, 19 bp, Mus musculus
  siRNA target sequence for 1810017G16Rik (NM_021502.1,328-346).
ccggaagctgcataactct

SEQ ID NO: 711893 - DNA, 19 bp, Mus musculus
  siRNA target sequence for 1810017G16Rik (NM_021502.1,329-347).
cggaagctgcataactctt

SEQ ID NO: 711894 - DNA, 19 bp, Mus musculus
  siRNA target sequence for 1810017G16Rik (NM_021502.1,334-352).
gctgcataactcttacaca

SEQ ID NO: 711895 - DNA, 19 bp, Mus musculus
  siRNA target sequence for Anapc5 (NM_021505.1,151-169).
gtagtgcacgccaacttgt

SEQ ID NO: 711896 - DNA, 19 bp, Mus musculus
  siRNA target sequence for Anapc5 (NM_021505.1,185-203).
gggtgacgccctataagat

SEQ ID NO: 711897 - DNA, 19 bp, Mus musculus
  siRNA target sequence for Anapc5 (NM_021505.1,301-319).
ctgcagggcccagatatta

SEQ ID NO: 711898 - DNA, 19 bp, Mus musculus
  siRNA target sequence for Anapc5 (NM_021505.1,303-321).
gcagggcccagatattaca

SEQ ID NO: 711899 - DNA, 19 bp, Mus musculus
  siRNA target sequence for Anapc5 (NM_021505.1,359-377).
ctcagctggcaaattcagt

SEQ ID NO: 711900 - DNA, 19 bp, Mus musculus
  siRNA target sequence for Anapc5 (NM_021505.1,374-392).
cagtgcagatcagaatcaa

SEQ ID NO: 711901 - DNA, 19 bp, Mus musculus
  siRNA target sequence for Anapc5 (NM_021505.1,403-421).
gaaggcgaactgaaggata

SEQ ID NO: 711902 - DNA, 19 bp, Mus musculus
  siRNA target sequence for Anapc5 (NM_021505.1,407-425).
gcgaactgaaggatatgga

SEQ ID NO: 711903 - DNA, 19 bp, Mus musculus
  siRNA target sequence for Anapc5 (NM_021505.1,408-426).
cgaactgaaggatatggaa

SEQ ID NO: 711904 - DNA, 19 bp, Mus musculus
  siRNA target sequence for Anapc5 (NM_021505.1,412-430).
ctgaaggatatggaacaat

SEQ ID NO: 711905 - DNA, 19 bp, Mus musculus
  siRNA target sequence for Anapc5 (NM_021505.1,417-435).
ggatatggaacaatttttt

SEQ ID NO: 711906 - DNA, 19 bp, Mus musculus
  siRNA target sequence for Anapc5 (NM_021505.1,436-454).
gatgacctttcagattctt

SEQ ID NO: 711907 - DNA, 19 bp, Mus musculus
  siRNA target sequence for Anapc5 (NM_021505.1,469-487).
ccagaggttcacaaaacga

SEQ ID NO: 711908 - DNA, 19 bp, Mus musculus
  siRNA target sequence for Anapc5 (NM_021505.1,528-546).
cagtaagctttctttcagt

SEQ ID NO: 711909 - DNA, 19 bp, Mus musculus
  siRNA target sequence for Anapc5 (NM_021505.1,539-557).
ctttcagtcaagtgtttaa

SEQ ID NO: 711910 - DNA, 19 bp, Mus musculus
  siRNA target sequence for Anapc5 (NM_021505.1,605-623).
cggtggaagatgctgatat

SEQ ID NO: 711911 - DNA, 19 bp, Mus musculus
  siRNA target sequence for Anapc5 (NM_021505.1,704-722).
gtcctctgtcccaaaaaca

SEQ ID NO: 711912 - DNA, 19 bp, Mus musculus
  siRNA target sequence for Anapc5 (NM_021505.1,745-763).
caggccgctttgttgaaga

SEQ ID NO: 711913 - DNA, 19 bp, Mus musculus
  siRNA target sequence for Anapc5 (NM_021505.1,747-765).
ggccgctttgttgaagaat

SEQ ID NO: 711914 - DNA, 19 bp, Mus musculus
  siRNA target sequence for Anapc5 (NM_021505.1,749-767).
ccgctttgttgaagaatga

SEQ ID NO: 711915 - DNA, 19 bp, Mus musculus
  siRNA target sequence for Anapc5 (NM_021505.1,790-808).
gcttccttgcagaaggaat

SEQ ID NO: 711916 - DNA, 19 bp, Mus musculus
  siRNA target sequence for Anapc5 (NM_021505.1,813-831).
caacctgttgaaatttaat

SEQ ID NO: 711917 - DNA, 19 bp, Mus musculus
  siRNA target sequence for Anapc5 (NM_021505.1,943-961).
ggagcggagggcaaaagta

SEQ ID NO: 711918 - DNA, 19 bp, Mus musculus
  siRNA target sequence for Anapc5 (NM_021505.1,944-962).
gagcggagggcaaaagtaa

SEQ ID NO: 711919 - DNA, 19 bp, Mus musculus
  siRNA target sequence for Anapc5 (NM_021505.1,1024-1042).
ctgccgcttcggtcactat

SEQ ID NO: 711920 - DNA, 19 bp, Mus musculus
  siRNA target sequence for Anapc5 (NM_021505.1,1027-1045).
ccgcttcggtcactatcaa

SEQ ID NO: 711921 - DNA, 19 bp, Mus musculus
  siRNA target sequence for Sh3md2 (NM_021506.1,319-337).
cgaatgccggactcttgtt

SEQ ID NO: 711922 - DNA, 19 bp, Mus musculus
  siRNA target sequence for Sh3md2 (NM_021506.1,350-368).
gacgagctccccagtaaca

SEQ ID NO: 711923 - DNA, 19 bp, Mus musculus
  siRNA target sequence for Sh3md2 (NM_021506.1,469-487).
gggcagcactgtggttaat

SEQ ID NO: 711924 - DNA, 19 bp, Mus musculus
  siRNA target sequence for Sh3md2 (NM_021506.1,470-488).
ggcagcactgtggttaatt

SEQ ID NO: 711925 - DNA, 19 bp, Mus musculus
  siRNA target sequence for Sh3md2 (NM_021506.1,472-490).
cagcactgtggttaattgt

SEQ ID NO: 711926 - DNA, 19 bp, Mus musculus
  siRNA target sequence for Sh3md2 (NM_021506.1,578-596).
ccgtgtgccaaagcattat

SEQ ID NO: 711927 - DNA, 19 bp, Mus musculus
  siRNA target sequence for Sh3md2 (NM_021506.1,579-597).
cgtgtgccaaagcattata

SEQ ID NO: 711928 - DNA, 19 bp, Mus musculus
  siRNA target sequence for Sh3md2 (NM_021506.1,582-600).
gtgccaaagcattatataa

SEQ ID NO: 711929 - DNA, 19 bp, Mus musculus
  siRNA target sequence for Sh3md2 (NM_021506.1,585-603).
ccaaagcattatataacta

SEQ ID NO: 711930 - DNA, 19 bp, Mus musculus
  siRNA target sequence for Sh3md2 (NM_021506.1,699-717).
gcggggtccacggcttttt

SEQ ID NO: 711931 - DNA, 19 bp, Mus musculus
  siRNA target sequence for Sh3md2 (NM_021506.1,727-745).
cttcgtgcagatcatcaaa

SEQ ID NO: 711932 - DNA, 19 bp, Mus musculus
  siRNA target sequence for Sh3md2 (NM_021506.1,777-795).
cactttacgactttgaagt

SEQ ID NO: 711933 - DNA, 19 bp, Mus musculus
  siRNA target sequence for Sh3md2 (NM_021506.1,860-878).
cgcagagtggatgaaaact

SEQ ID NO: 711934 - DNA, 19 bp, Mus musculus
  siRNA target sequence for Sh3md2 (NM_021506.1,1228-1246).
cccgtctcaggtccatata

SEQ ID NO: 711935 - DNA, 19 bp, Mus musculus
  siRNA target sequence for Sh3md2 (NM_021506.1,1229-1247).
ccgtctcaggtccatataa

SEQ ID NO: 711936 - DNA, 19 bp, Mus musculus
  siRNA target sequence for Sh3md2 (NM_021506.1,1248-1266).
gcaccactgggttaattgt

SEQ ID NO: 711937 - DNA, 19 bp, Mus musculus
  siRNA target sequence for Sh3md2 (NM_021506.1,1306-1324).
gttcacgttcccttcagat

SEQ ID NO: 711938 - DNA, 19 bp, Mus musculus
  siRNA target sequence for Sh3md2 (NM_021506.1,1486-1504).
ggggtcctctgaacagatt

SEQ ID NO: 711939 - DNA, 19 bp, Mus musculus
  siRNA target sequence for Sh3md2 (NM_021506.1,1520-1538).
cagactcgtcccagtgtat

SEQ ID NO: 711940 - DNA, 19 bp, Mus musculus
  siRNA target sequence for Sh3md2 (NM_021506.1,1522-1540).
gactcgtcccagtgtatat

SEQ ID NO: 711941 - DNA, 19 bp, Mus musculus
  siRNA target sequence for Sh3md2 (NM_021506.1,1524-1542).
ctcgtcccagtgtatatgt

SEQ ID NO: 711942 - DNA, 19 bp, Mus musculus
  siRNA target sequence for Sh3md2 (NM_021506.1,1530-1548).
ccagtgtatatgttgctat

SEQ ID NO: 711943 - DNA, 19 bp, Mus musculus
  siRNA target sequence for Sh3md2 (NM_021506.1,1590-1608).
ggaaaggggagatgttttt

SEQ ID NO: 711944 - DNA, 19 bp, Mus musculus
  siRNA target sequence for Sh3md2 (NM_021506.1,1672-1690).
cgttttccctggcaactat

SEQ ID NO: 711945 - DNA, 19 bp, Mus musculus
  siRNA target sequence for Sh3md2 (NM_021506.1,1716-1734).
cgaatgcctcccaagctaa

SEQ ID NO: 711946 - DNA, 19 bp, Mus musculus
  siRNA target sequence for Sh3md2 (NM_021506.1,1725-1743).
cccaagctaaagtctctat

SEQ ID NO: 711947 - DNA, 19 bp, Mus musculus
  siRNA target sequence for Sh3md2 (NM_021506.1,1727-1745).
caagctaaagtctctatgt

SEQ ID NO: 711948 - DNA, 19 bp, Mus musculus
  siRNA target sequence for Sh3md2 (NM_021506.1,1730-1748).
gctaaagtctctatgtcta

SEQ ID NO: 711949 - DNA, 19 bp, Mus musculus
  siRNA target sequence for Sh3md2 (NM_021506.1,2055-2073).
gcctgccccatcattctct

SEQ ID NO: 711950 - DNA, 19 bp, Mus musculus
  siRNA target sequence for Sh3md2 (NM_021506.1,2712-2730).
gtgaggccgaacttgaact

SEQ ID NO: 711951 - DNA, 19 bp, Mus musculus
  siRNA target sequence for Sh3md2 (NM_021506.1,2734-2752).
ggaaggagatattgtgttt

SEQ ID NO: 711952 - DNA, 19 bp, Mus musculus
  siRNA target sequence for Sh3md2 (NM_021506.1,2739-2757).
gagatattgtgtttgttca

SEQ ID NO: 711953 - DNA, 19 bp, Mus musculus
  siRNA target sequence for 2610203K23Rik (NM_021535.2,93-111).
ccgatgtgatccgactaat

SEQ ID NO: 711954 - DNA, 19 bp, Mus musculus
  siRNA target sequence for 2610203K23Rik (NM_021535.2,95-113).
gatgtgatccgactaatca

SEQ ID NO: 711955 - DNA, 19 bp, Mus musculus
  siRNA target sequence for 2610203K23Rik (NM_021535.2,105-123).
gactaatcatgcagtactt

SEQ ID NO: 711956 - DNA, 19 bp, Mus musculus
  siRNA target sequence for 2610203K23Rik (NM_021535.2,121-139).
cttgaaggagaacagttta

SEQ ID NO: 711957 - DNA, 19 bp, Mus musculus
  siRNA target sequence for 2610203K23Rik (NM_021535.2,157-175).
cttacaggaggaaactact

SEQ ID NO: 711958 - DNA, 19 bp, Mus musculus
  siRNA target sequence for 2610203K23Rik (NM_021535.2,207-225).
gtttcgtggctgatattaa

SEQ ID NO: 711959 - DNA, 19 bp, Mus musculus
  siRNA target sequence for 2610203K23Rik (NM_021535.2,230-248).
ggccattgggatactgttt

SEQ ID NO: 711960 - DNA, 19 bp, Mus musculus
  siRNA target sequence for 2610203K23Rik (NM_021535.2,232-250).
ccattgggatactgtttta

SEQ ID NO: 711961 - DNA, 19 bp, Mus musculus
  siRNA target sequence for 2610203K23Rik (NM_021535.2,243-261).
ctgttttacaggctataca

SEQ ID NO: 711962 - DNA, 19 bp, Mus musculus
  siRNA target sequence for 2610203K23Rik (NM_021535.2,302-320).
gaacaggttgttttggaat

SEQ ID NO: 711963 - DNA, 19 bp, Mus musculus
  siRNA target sequence for 2610203K23Rik (NM_021535.2,365-383).
cagactgaccccatgatta

SEQ ID NO: 711964 - DNA, 19 bp, Mus musculus
  siRNA target sequence for 2610203K23Rik (NM_021535.2,369-387).
ctgaccccatgattatgtt

SEQ ID NO: 711965 - DNA, 19 bp, Mus musculus
  siRNA target sequence for 2610203K23Rik (NM_021535.2,396-414).
cacaaccagagcgctatat

SEQ ID NO: 711966 - DNA, 19 bp, Mus musculus
  siRNA target sequence for 2610203K23Rik (NM_021535.2,402-420).
cagagcgctatattcatct

SEQ ID NO: 711967 - DNA, 19 bp, Mus musculus
  siRNA target sequence for 2610203K23Rik (NM_021535.2,408-426).
gctatattcatctggaaaa

SEQ ID NO: 711968 - DNA, 19 bp, Mus musculus
  siRNA target sequence for 2610203K23Rik (NM_021535.2,419-437).
ctggaaaacctcttagcta

SEQ ID NO: 711969 - DNA, 19 bp, Mus musculus
  siRNA target sequence for 2610203K23Rik (NM_021535.2,470-488).
gatggaagtagcaaagaga

SEQ ID NO: 711970 - DNA, 19 bp, Mus musculus
  siRNA target sequence for 2610203K23Rik (NM_021535.2,502-520).
gattgcccaggctttagct

SEQ ID NO: 711971 - DNA, 19 bp, Mus musculus
  siRNA target sequence for 2610203K23Rik (NM_021535.2,608-626).
cctggtatgaccatcgatt

SEQ ID NO: 711972 - DNA, 19 bp, Mus musculus
  siRNA target sequence for 2610203K23Rik (NM_021535.2,609-627).
ctggtatgaccatcgattt

SEQ ID NO: 711973 - DNA, 19 bp, Mus musculus
  siRNA target sequence for 2610203K23Rik (NM_021535.2,611-629).
ggtatgaccatcgatttgt

SEQ ID NO: 711974 - DNA, 19 bp, Mus musculus
  siRNA target sequence for 2610203K23Rik (NM_021535.2,612-630).
gtatgaccatcgatttgtt

SEQ ID NO: 711975 - DNA, 19 bp, Mus musculus
  siRNA target sequence for 2610203K23Rik (NM_021535.2,636-654).
gcaaggcagctgtcaaaga

SEQ ID NO: 711976 - DNA, 19 bp, Mus musculus
  siRNA target sequence for 2610203K23Rik (NM_021535.2,685-703).
gagcaggcatattaagttt

SEQ ID NO: 711977 - DNA, 19 bp, Mus musculus
  siRNA target sequence for 2610203K23Rik (NM_021535.2,738-756).
ctccagatggtcagtatct

SEQ ID NO: 711978 - DNA, 19 bp, Mus musculus
  siRNA target sequence for 2610203K23Rik (NM_021535.2,764-782).
ggctctgttgatggattta

SEQ ID NO: 711979 - DNA, 19 bp, Mus musculus
  siRNA target sequence for 2610203K23Rik (NM_021535.2,765-783).
gctctgttgatggatttat

SEQ ID NO: 711980 - DNA, 19 bp, Mus musculus
  siRNA target sequence for 2610203K23Rik (NM_021535.2,785-803).
gaggtgtggaacttcacta

SEQ ID NO: 711981 - DNA, 19 bp, Mus musculus
  siRNA target sequence for 2610203K23Rik (NM_021535.2,833-851).
caggcccaggataacttca

SEQ ID NO: 711982 - DNA, 19 bp, Mus musculus
  siRNA target sequence for 2610203K23Rik (NM_021535.2,839-857).
caggataacttcatgatga

SEQ ID NO: 711983 - DNA, 19 bp, Mus musculus
  siRNA target sequence for 2610203K23Rik (NM_021535.2,950-968).
cagagtggacagtgtttga

SEQ ID NO: 711984 - DNA, 19 bp, Mus musculus
  siRNA target sequence for 2610203K23Rik (NM_021535.2,956-974).
ggacagtgtttgagaagat

SEQ ID NO: 711985 - DNA, 19 bp, Mus musculus
  siRNA target sequence for 2610203K23Rik (NM_021535.2,957-975).
gacagtgtttgagaagatt

SEQ ID NO: 711986 - DNA, 19 bp, Mus musculus
  siRNA target sequence for 2610203K23Rik (NM_021535.2,998-1016).
gtcacctgtctaagctttt

SEQ ID NO: 711987 - DNA, 19 bp, Mus musculus
  siRNA target sequence for 2610203K23Rik (NM_021535.2,1059-1077).
caatacgaattcatggttt

SEQ ID NO: 711988 - DNA, 19 bp, Mus musculus
  siRNA target sequence for 2610203K23Rik (NM_021535.2,1064-1082).
cgaattcatggtttaaaat

SEQ ID NO: 711989 - DNA, 19 bp, Mus musculus
  siRNA target sequence for 2610203K23Rik (NM_021535.2,1110-1128).
gccattcctcctttgttaa

SEQ ID NO: 711990 - DNA, 19 bp, Mus musculus
  siRNA target sequence for 2610203K23Rik (NM_021535.2,1124-1142).
gttaatgaagcaacgttta

SEQ ID NO: 711991 - DNA, 19 bp, Mus musculus
  siRNA target sequence for 2610203K23Rik (NM_021535.2,1145-1163).
caggatggacattacatta

SEQ ID NO: 711992 - DNA, 19 bp, Mus musculus
  siRNA target sequence for 2610203K23Rik (NM_021535.2,1277-1295).
gtgattctgcttcctaaaa

SEQ ID NO: 711993 - DNA, 19 bp, Mus musculus
  siRNA target sequence for 2610203K23Rik (NM_021535.2,1427-1445).
cgtggcgagtggatctact

SEQ ID NO: 711994 - DNA, 19 bp, Mus musculus
  siRNA target sequence for 2610203K23Rik (NM_021535.2,1503-1521).
gaacgctgacggttcatga

SEQ ID NO: 711995 - DNA, 19 bp, Mus musculus
  siRNA target sequence for 2610203K23Rik (NM_021535.2,1544-1562).
caccacccgcaccagaatt

SEQ ID NO: 711996 - DNA, 19 bp, Mus musculus
  siRNA target sequence for 2610203K23Rik (NM_021535.2,1547-1565).
cacccgcaccagaatttga

SEQ ID NO: 711997 - DNA, 19 bp, Mus musculus
  siRNA target sequence for 2610203K23Rik (NM_021535.2,1549-1567).
cccgcaccagaatttgatt

SEQ ID NO: 711998 - DNA, 19 bp, Mus musculus
  siRNA target sequence for 0610012D09Rik (NM_021554.2,460-478).
ctgtacgtgaacatgacta

SEQ ID NO: 711999 - DNA, 19 bp, Mus musculus
  siRNA target sequence for 0610012D09Rik (NM_021554.2,538-556).
gtgtgcaacagagagaaat

SEQ ID NO: 712000 - DNA, 19 bp, Mus musculus
  siRNA target sequence for 0610012D09Rik (NM_021554.2,552-570).
gaaattatgcgaatcactt

SEQ ID NO: 712001 - DNA, 19 bp, Mus musculus
  siRNA target sequence for 0610012D09Rik (NM_021554.2,604-622).
ggaacacagatcttcttaa

SEQ ID NO: 712002 - DNA, 19 bp, Mus musculus
  siRNA target sequence for 0610012D09Rik (NM_021554.2,610-628).
cagatcttcttaaacaaca

SEQ ID NO: 712003 - DNA, 19 bp, Mus musculus
  siRNA target sequence for 0610012D09Rik (NM_021554.2,641-659).
ctggctggctatttatcca

SEQ ID NO: 712004 - DNA, 19 bp, Mus musculus
  siRNA target sequence for 0610012D09Rik (NM_021554.2,647-665).
ggctatttatccaactcta

SEQ ID NO: 712005 - DNA, 19 bp, Mus musculus
  siRNA target sequence for 0610012D09Rik (NM_021554.2,661-679).
ctctatcattcttttgtat

SEQ ID NO: 712006 - DNA, 19 bp, Mus musculus
  siRNA target sequence for 0610012D09Rik (NM_021554.2,685-703).
gtttttagcctgtttatgt

SEQ ID NO: 712007 - DNA, 19 bp, Mus musculus
  siRNA target sequence for 0610012D09Rik (NM_021554.2,795-813).
ctggaaaacccatagactt

SEQ ID NO: 712008 - DNA, 19 bp, Mus musculus
  siRNA target sequence for 0610012D09Rik (NM_021554.2,798-816).
gaaaacccatagacttctt

SEQ ID NO: 712009 - DNA, 19 bp, Mus musculus
  siRNA target sequence for 0610012D09Rik (NM_021554.2,858-876).
ccctcattttgaagaaatt

SEQ ID NO: 712010 - DNA, 19 bp, Mus musculus
  siRNA target sequence for 0610012D09Rik (NM_021554.2,965-983).
ggttccagtatgatgtcat

SEQ ID NO: 712011 - DNA, 19 bp, Mus musculus
  siRNA target sequence for 0610012D09Rik (NM_021554.2,976-994).
gatgtcatcagctgcttaa

SEQ ID NO: 712012 - DNA, 19 bp, Mus musculus
  siRNA target sequence for 0610012D09Rik (NM_021554.2,1010-1028).
gtgatcagcccctgacatt

SEQ ID NO: 712013 - DNA, 19 bp, Mus musculus
  siRNA target sequence for 0610012D09Rik (NM_021554.2,1015-1033).
cagcccctgacattgttaa

SEQ ID NO: 712014 - DNA, 19 bp, Mus musculus
  siRNA target sequence for 0610012D09Rik (NM_021554.2,1094-1112).
cctttcatccctatgtaga

SEQ ID NO: 712015 - DNA, 19 bp, Mus musculus
  siRNA target sequence for 0610012D09Rik (NM_021554.2,1095-1113).
ctttcatccctatgtagaa

SEQ ID NO: 712016 - DNA, 19 bp, Mus musculus
  siRNA target sequence for 0610012D09Rik (NM_021554.2,1222-1240).
gtcgtcgaagctttcacta

SEQ ID NO: 712017 - DNA, 19 bp, Mus musculus
  siRNA target sequence for 0610012D09Rik (NM_021554.2,1256-1274).
gtgaaggcgacatgtacaa

SEQ ID NO: 712018 - DNA, 19 bp, Mus musculus
  siRNA target sequence for 0610012D09Rik (NM_021554.2,1261-1279).
ggcgacatgtacaatgact

SEQ ID NO: 712019 - DNA, 19 bp, Mus musculus
  siRNA target sequence for 0610012D09Rik (NM_021554.2,1266-1284).
catgtacaatgactactat

SEQ ID NO: 712020 - DNA, 19 bp, Mus musculus
  siRNA target sequence for 0610012D09Rik (NM_021554.2,1269-1287).
gtacaatgactactatgtt

SEQ ID NO: 712021 - DNA, 19 bp, Mus musculus
  siRNA target sequence for 0610012D09Rik (NM_021554.2,1290-1308).
ggacgatgctgtctttgtt

SEQ ID NO: 712022 - DNA, 19 bp, Mus musculus
  siRNA target sequence for Brp16 (NM_021555.1,486-504).
ctccgtgtgctgcgttaat

SEQ ID NO: 712023 - DNA, 19 bp, Mus musculus
  siRNA target sequence for Brp16 (NM_021555.1,489-507).
cgtgtgctgcgttaatgga

SEQ ID NO: 712024 - DNA, 19 bp, Mus musculus
  siRNA target sequence for Brp16 (NM_021555.1,637-655).
ggcggaggtgcgtgctttt

SEQ ID NO: 712025 - DNA, 19 bp, Mus musculus
  siRNA target sequence for Brp16 (NM_021555.1,639-657).
cggaggtgcgtgcttttct

SEQ ID NO: 712026 - DNA, 19 bp, Mus musculus
  siRNA target sequence for Brp16 (NM_021555.1,1001-1019).
gaccagggtgcctacttga

SEQ ID NO: 712027 - DNA, 19 bp, Mus musculus
  siRNA target sequence for Brp16 (NM_021555.1,1060-1078).
gcggatggcttgcgaaaaa

SEQ ID NO: 712028 - DNA, 19 bp, Mus musculus
  siRNA target sequence for Brp16 (NM_021555.1,1062-1080).
ggatggcttgcgaaaaact

SEQ ID NO: 712029 - DNA, 19 bp, Mus musculus
  siRNA target sequence for Brp16 (NM_021555.1,1063-1081).
gatggcttgcgaaaaactt

SEQ ID NO: 712030 - DNA, 19 bp, Mus musculus
  siRNA target sequence for Brp16 (NM_021555.1,1068-1086).
cttgcgaaaaacttatcca

SEQ ID NO: 712031 - DNA, 19 bp, Mus musculus
  siRNA target sequence for Dctn5 (NM_021608.2,72-90).
ggcgaactgctgtacaaca

SEQ ID NO: 712032 - DNA, 19 bp, Mus musculus
  siRNA target sequence for Dctn5 (NM_021608.2,107-125).
gacggcatctgggaacaaa

SEQ ID NO: 712033 - DNA, 19 bp, Mus musculus
  siRNA target sequence for Dctn5 (NM_021608.2,109-127).
cggcatctgggaacaaagt

SEQ ID NO: 712034 - DNA, 19 bp, Mus musculus
  siRNA target sequence for Dctn5 (NM_021608.2,110-128).
ggcatctgggaacaaagtt

SEQ ID NO: 712035 - DNA, 19 bp, Mus musculus
  siRNA target sequence for Dctn5 (NM_021608.2,111-129).
gcatctgggaacaaagtta

SEQ ID NO: 712036 - DNA, 19 bp, Mus musculus
  siRNA target sequence for Dctn5 (NM_021608.2,126-144).
gttagtcgccagtctgttt

SEQ ID NO: 712037 - DNA, 19 bp, Mus musculus
  siRNA target sequence for Dctn5 (NM_021608.2,210-228).
ggagacctggcaaatgtaa

SEQ ID NO: 712038 - DNA, 19 bp, Mus musculus
  siRNA target sequence for Dctn5 (NM_021608.2,215-233).
cctggcaaatgtaagagtt

SEQ ID NO: 712039 - DNA, 19 bp, Mus musculus
  siRNA target sequence for Dctn5 (NM_021608.2,237-255).
cgtcactgtgtcgtgaaaa

SEQ ID NO: 712040 - DNA, 19 bp, Mus musculus
  siRNA target sequence for Dctn5 (NM_021608.2,251-269).
gaaaagccgtagtgtcata

SEQ ID NO: 712041 - DNA, 19 bp, Mus musculus
  siRNA target sequence for Dctn5 (NM_021608.2,266-284).
cataaggccaccgttcaaa

SEQ ID NO: 712042 - DNA, 19 bp, Mus musculus
  siRNA target sequence for Dctn5 (NM_021608.2,271-289).
ggccaccgttcaaaaaatt

SEQ ID NO: 712043 - DNA, 19 bp, Mus musculus
  siRNA target sequence for Dctn5 (NM_021608.2,273-291).
ccaccgttcaaaaaattca

SEQ ID NO: 712044 - DNA, 19 bp, Mus musculus
  siRNA target sequence for Dctn5 (NM_021608.2,440-458).
caaaattctcgacaataca

SEQ ID NO: 712045 - DNA, 19 bp, Mus musculus
  siRNA target sequence for Dctn5 (NM_021608.2,544-562).
cacaggagctgatgattga

SEQ ID NO: 712046 - DNA, 19 bp, Mus musculus
  siRNA target sequence for Dctn5 (NM_021608.2,574-592).
gctactaccagaagtttct

SEQ ID NO: 712047 - DNA, 19 bp, Mus musculus
  siRNA target sequence for Dctn5 (NM_021608.2,575-593).
ctactaccagaagtttcta

SEQ ID NO: 712048 - DNA, 19 bp, Mus musculus
  siRNA target sequence for 0610023A07Rik (NM_021713.1,586-604).
gtacgcgaacgcagagatt

SEQ ID NO: 712049 - DNA, 19 bp, Mus musculus
  siRNA target sequence for Wbp11 (NM_021714.3,218-236).
cgaaaggaagcccgaaaaa

SEQ ID NO: 712050 - DNA, 19 bp, Mus musculus
  siRNA target sequence for Wbp11 (NM_021714.3,229-247).
ccgaaaaagagaactgaaa

SEQ ID NO: 712051 - DNA, 19 bp, Mus musculus
  siRNA target sequence for Wbp11 (NM_021714.3,272-290).
gtccgggctgcagttttga

SEQ ID NO: 712052 - DNA, 19 bp, Mus musculus
  siRNA target sequence for Wbp11 (NM_021714.3,292-310).
gatgaaagaccccaaacaa

SEQ ID NO: 712053 - DNA, 19 bp, Mus musculus
  siRNA target sequence for Wbp11 (NM_021714.3,358-376).
gcagcagccacagttgaat

SEQ ID NO: 712054 - DNA, 19 bp, Mus musculus
  siRNA target sequence for Wbp11 (NM_021714.3,364-382).
gccacagttgaatgagaaa

SEQ ID NO: 712055 - DNA, 19 bp, Mus musculus
  siRNA target sequence for Wbp11 (NM_021714.3,366-384).
cacagttgaatgagaaagt

SEQ ID NO: 712056 - DNA, 19 bp, Mus musculus
  siRNA target sequence for Wbp11 (NM_021714.3,546-564).
ctcagcatgtggaagtaga

SEQ ID NO: 712057 - DNA, 19 bp, Mus musculus
  siRNA target sequence for Wbp11 (NM_021714.3,811-829).
gggcttcgctctagatctt

SEQ ID NO: 712058 - DNA, 19 bp, Mus musculus
  siRNA target sequence for Wbp11 (NM_021714.3,882-900).
ggggtcatgacgatgacat

SEQ ID NO: 712059 - DNA, 19 bp, Mus musculus
  siRNA target sequence for Wbp11 (NM_021714.3,1065-1083).
caggtctaagcgtcagatt

SEQ ID NO: 712060 - DNA, 19 bp, Mus musculus
  siRNA target sequence for Wbp11 (NM_021714.3,1074-1092).
gcgtcagatttgctgatat

SEQ ID NO: 712061 - DNA, 19 bp, Mus musculus
  siRNA target sequence for Wbp11 (NM_021714.3,1161-1179).
gaatggcaggtcaggaaat

SEQ ID NO: 712062 - DNA, 19 bp, Mus musculus
  siRNA target sequence for Wbp11 (NM_021714.3,1226-1244).
gccgacgactcggatgatt

SEQ ID NO: 712063 - DNA, 19 bp, Mus musculus
  siRNA target sequence for Wbp11 (NM_021714.3,1228-1246).
cgacgactcggatgattct

SEQ ID NO: 712064 - DNA, 19 bp, Mus musculus
  siRNA target sequence for Wbp11 (NM_021714.3,1261-1279).
gtcgcagaagcagcataaa

SEQ ID NO: 712065 - DNA, 19 bp, Mus musculus
  siRNA target sequence for Wbp11 (NM_021714.3,1509-1527).
ggcctttaccacgactttt

SEQ ID NO: 712066 - DNA, 19 bp, Mus musculus
  siRNA target sequence for Wbp11 (NM_021714.3,1510-1528).
gcctttaccacgactttta

SEQ ID NO: 712067 - DNA, 19 bp, Mus musculus
  siRNA target sequence for Wbp11 (NM_021714.3,1807-1825).
cgccaccatcgagaagaaa

SEQ ID NO: 712068 - DNA, 19 bp, Mus musculus
  siRNA target sequence for Wbp11 (NM_021714.3,2012-2030).
gctgtctcagtacaaacta

SEQ ID NO: 712069 - DNA, 19 bp, Mus musculus
  siRNA target sequence for Wbp11 (NM_021714.3,2024-2042).
caaactaaggacgatgttt

SEQ ID NO: 712070 - DNA, 19 bp, Mus musculus
  siRNA target sequence for Donson (NM_021720.1,321-339).
cgcttctagattctaatga

SEQ ID NO: 712071 - DNA, 19 bp, Mus musculus
  siRNA target sequence for Donson (NM_021720.1,353-371).
ctgtgggaggacacatcat

SEQ ID NO: 712072 - DNA, 19 bp, Mus musculus
  siRNA target sequence for Donson (NM_021720.1,410-428).
cgtgtatcgttgtctgaat

SEQ ID NO: 712073 - DNA, 19 bp, Mus musculus
  siRNA target sequence for Donson (NM_021720.1,461-479).
cctgtggactggagtatta

SEQ ID NO: 712074 - DNA, 19 bp, Mus musculus
  siRNA target sequence for Donson (NM_021720.1,462-480).
ctgtggactggagtattaa

SEQ ID NO: 712075 - DNA, 19 bp, Mus musculus
  siRNA target sequence for Donson (NM_021720.1,464-482).
gtggactggagtattaaaa

SEQ ID NO: 712076 - DNA, 19 bp, Mus musculus
  siRNA target sequence for Donson (NM_021720.1,565-583).
gcattgtagggcaacagaa

SEQ ID NO: 712077 - DNA, 19 bp, Mus musculus
  siRNA target sequence for Donson (NM_021720.1,588-606).
ctttaccccagagtataca

SEQ ID NO: 712078 - DNA, 19 bp, Mus musculus
  siRNA target sequence for Donson (NM_021720.1,665-683).
cttcaccctgccttttcgt

SEQ ID NO: 712079 - DNA, 19 bp, Mus musculus
  siRNA target sequence for Donson (NM_021720.1,782-800).
gactggtctgtgagtttca

SEQ ID NO: 712080 - DNA, 19 bp, Mus musculus
  siRNA target sequence for Donson (NM_021720.1,795-813).
gtttcacatctctgtataa

SEQ ID NO: 712081 - DNA, 19 bp, Mus musculus
  siRNA target sequence for Donson (NM_021720.1,825-843).
caaagctttgtccctattt

SEQ ID NO: 712082 - DNA, 19 bp, Mus musculus
  siRNA target sequence for Donson (NM_021720.1,829-847).
gctttgtccctatttctat

SEQ ID NO: 712083 - DNA, 19 bp, Mus musculus
  siRNA target sequence for Donson (NM_021720.1,930-948).
cgacaagaggcttaagaga

SEQ ID NO: 712084 - DNA, 19 bp, Mus musculus
  siRNA target sequence for Donson (NM_021720.1,936-954).
gaggcttaagagaagctat

SEQ ID NO: 712085 - DNA, 19 bp, Mus musculus
  siRNA target sequence for Donson (NM_021720.1,955-973).
gagaaacgaaggtattgaa

SEQ ID NO: 712086 - DNA, 19 bp, Mus musculus
  siRNA target sequence for Donson (NM_021720.1,961-979).
cgaaggtattgaattttct

SEQ ID NO: 712087 - DNA, 19 bp, Mus musculus
  siRNA target sequence for Donson (NM_021720.1,1099-1117).
gataggcgtgcaagatcaa

SEQ ID NO: 712088 - DNA, 19 bp, Mus musculus
  siRNA target sequence for Donson (NM_021720.1,1103-1121).
ggcgtgcaagatcaaatta

SEQ ID NO: 712089 - DNA, 19 bp, Mus musculus
  siRNA target sequence for Donson (NM_021720.1,1104-1122).
gcgtgcaagatcaaattaa

SEQ ID NO: 712090 - DNA, 19 bp, Mus musculus
  siRNA target sequence for Donson (NM_021720.1,1127-1145).
ccagacgtgatctctatca

SEQ ID NO: 712091 - DNA, 19 bp, Mus musculus
  siRNA target sequence for Donson (NM_021720.1,1140-1158).
ctatcaagctacgtaaaga

SEQ ID NO: 712092 - DNA, 19 bp, Mus musculus
  siRNA target sequence for Donson (NM_021720.1,1144-1162).
caagctacgtaaagaaaaa

SEQ ID NO: 712093 - DNA, 19 bp, Mus musculus
  siRNA target sequence for Donson (NM_021720.1,1212-1230).
gactcaacaccttcaaact

SEQ ID NO: 712094 - DNA, 19 bp, Mus musculus
  siRNA target sequence for Donson (NM_021720.1,1232-1250).
ctcaattttttgatcaact

SEQ ID NO: 712095 - DNA, 19 bp, Mus musculus
  siRNA target sequence for Donson (NM_021720.1,1243-1261).
gatcaactgcaagagttta

SEQ ID NO: 712096 - DNA, 19 bp, Mus musculus
  siRNA target sequence for Donson (NM_021720.1,1246-1264).
caactgcaagagtttagtt

SEQ ID NO: 712097 - DNA, 19 bp, Mus musculus
  siRNA target sequence for Donson (NM_021720.1,1321-1339).
ccgaggtgcctcaatgcaa

SEQ ID NO: 712098 - DNA, 19 bp, Mus musculus
  siRNA target sequence for Donson (NM_021720.1,1322-1340).
cgaggtgcctcaatgcaaa

SEQ ID NO: 712099 - DNA, 19 bp, Mus musculus
  siRNA target sequence for Donson (NM_021720.1,1323-1341).
gaggtgcctcaatgcaaat

SEQ ID NO: 712100 - DNA, 19 bp, Mus musculus
  siRNA target sequence for Donson (NM_021720.1,1326-1344).
gtgcctcaatgcaaatgct

SEQ ID NO: 712101 - DNA, 19 bp, Mus musculus
  siRNA target sequence for Donson (NM_021720.1,1328-1346).
gcctcaatgcaaatgctta

SEQ ID NO: 712102 - DNA, 19 bp, Mus musculus
  siRNA target sequence for Donson (NM_021720.1,1329-1347).
cctcaatgcaaatgcttaa

SEQ ID NO: 712103 - DNA, 19 bp, Mus musculus
  siRNA target sequence for Donson (NM_021720.1,1348-1366).
ggcacggagcagtaatgta

SEQ ID NO: 712104 - DNA, 19 bp, Mus musculus
  siRNA target sequence for Donson (NM_021720.1,1349-1367).
gcacggagcagtaatgtaa

SEQ ID NO: 712105 - DNA, 19 bp, Mus musculus
  siRNA target sequence for Donson (NM_021720.1,1350-1368).
cacggagcagtaatgtaaa

SEQ ID NO: 712106 - DNA, 19 bp, Mus musculus
  siRNA target sequence for Donson (NM_021720.1,1422-1440).
ctgtcatgcctcatgcatt

SEQ ID NO: 712107 - DNA, 19 bp, Mus musculus
  siRNA target sequence for Donson (NM_021720.1,1430-1448).
cctcatgcattgcattcta

SEQ ID NO: 712108 - DNA, 19 bp, Mus musculus
  siRNA target sequence for Donson (NM_021720.1,1431-1449).
ctcatgcattgcattctat

SEQ ID NO: 712109 - DNA, 19 bp, Mus musculus
  siRNA target sequence for Donson (NM_021720.1,1433-1451).
catgcattgcattctatga

SEQ ID NO: 712110 - DNA, 19 bp, Mus musculus
  siRNA target sequence for Donson (NM_021720.1,1453-1471).
catgctactccgatcttca

SEQ ID NO: 712111 - DNA, 19 bp, Mus musculus
  siRNA target sequence for Donson (NM_021720.1,1571-1589).
cgtgaggaccttgctaatt

SEQ ID NO: 712112 - DNA, 19 bp, Mus musculus
  siRNA target sequence for Donson (NM_021720.1,1650-1668).
ccctgcggagtgtggaaat

SEQ ID NO: 712113 - DNA, 19 bp, Mus musculus
  siRNA target sequence for Donson (NM_021720.1,1654-1672).
gcggagtgtggaaatgagt

SEQ ID NO: 712114 - DNA, 19 bp, Mus musculus
  siRNA target sequence for Donson (NM_021720.1,1664-1682).
gaaatgagtgactacattt

SEQ ID NO: 712115 - DNA, 19 bp, Mus musculus
  siRNA target sequence for Donson (NM_021720.1,1669-1687).
gagtgactacattttaagt

SEQ ID NO: 712116 - DNA, 19 bp, Mus musculus
  siRNA target sequence for Il21 (NM_021782.1,95-113).
gacagtggcccataaatca

SEQ ID NO: 712117 - DNA, 19 bp, Mus musculus
  siRNA target sequence for Il21 (NM_021782.1,126-144).
ccagatcgcctcctgatta

SEQ ID NO: 712118 - DNA, 19 bp, Mus musculus
  siRNA target sequence for Il21 (NM_021782.1,145-163).
gacttcgtcaccttattga

SEQ ID NO: 712119 - DNA, 19 bp, Mus musculus
  siRNA target sequence for Il21 (NM_021782.1,151-169).
gtcaccttattgacattgt

SEQ ID NO: 712120 - DNA, 19 bp, Mus musculus
  siRNA target sequence for Il21 (NM_021782.1,200-218).
ggatcctgaacttctatca

SEQ ID NO: 712121 - DNA, 19 bp, Mus musculus
  siRNA target sequence for Il21 (NM_021782.1,297-315).
cctggaaacaataagacat

SEQ ID NO: 712122 - DNA, 19 bp, Mus musculus
  siRNA target sequence for Il21 (NM_021782.1,398-416).
cccttcctgtgattcgtat

SEQ ID NO: 712123 - DNA, 19 bp, Mus musculus
  siRNA target sequence for Il21 (NM_021782.1,403-421).
cctgtgattcgtatgagaa

SEQ ID NO: 712124 - DNA, 19 bp, Mus musculus
  siRNA target sequence for Il21 (NM_021782.1,404-422).
ctgtgattcgtatgagaaa

SEQ ID NO: 712125 - DNA, 19 bp, Mus musculus
  siRNA target sequence for Il21 (NM_021782.1,424-442).
ggacacccaaagaattcct

SEQ ID NO: 712126 - DNA, 19 bp, Mus musculus
  siRNA target sequence for Il21 (NM_021782.1,425-443).
gacacccaaagaattccta

SEQ ID NO: 712127 - DNA, 19 bp, Mus musculus
  siRNA target sequence for Il21 (NM_021782.1,458-476).
gctccttcaaaagatgatt

SEQ ID NO: 712128 - DNA, 19 bp, Mus musculus
  siRNA target sequence for Sap30 (NM_021788.1,602-620).
gatcgagctggataagagt

SEQ ID NO: 712129 - DNA, 19 bp, Mus musculus
  siRNA target sequence for Sap30 (NM_021788.1,642-660).
gactatcataagaacttaa

SEQ ID NO: 712130 - DNA, 19 bp, Mus musculus
  siRNA target sequence for Sap30 (NM_021788.1,644-662).
ctatcataagaacttaatt

SEQ ID NO: 712131 - DNA, 19 bp, Mus musculus
  siRNA target sequence for Sap30 (NM_021788.1,663-681).
cagagcgttcggaacagaa

SEQ ID NO: 712132 - DNA, 19 bp, Mus musculus
  siRNA target sequence for Sap30 (NM_021788.1,739-757).
ctccagaggttgatttgta

SEQ ID NO: 712133 - DNA, 19 bp, Mus musculus
  siRNA target sequence for Sap30 (NM_021788.1,744-762).
gaggttgatttgtaccaat

SEQ ID NO: 712134 - DNA, 19 bp, Mus musculus
  siRNA target sequence for Sap30 (NM_021788.1,746-764).
ggttgatttgtaccaatta

SEQ ID NO: 712135 - DNA, 19 bp, Mus musculus
  siRNA target sequence for Sap30 (NM_021788.1,755-773).
gtaccaattacaagtaaat

SEQ ID NO: 712136 - DNA, 19 bp, Mus musculus
  siRNA target sequence for Sap30 (NM_021788.1,808-826).
caaccagaccaggtctaaa

SEQ ID NO: 712137 - DNA, 19 bp, Mus musculus
  siRNA target sequence for Sap30 (NM_021788.1,811-829).
ccagaccaggtctaaataa

SEQ ID NO: 712138 - DNA, 19 bp, Mus musculus
  siRNA target sequence for Sap30 (NM_021788.1,832-850).
cacaacttgttgagatagt

SEQ ID NO: 712139 - DNA, 19 bp, Mus musculus
  siRNA target sequence for Sap30 (NM_021788.1,852-870).
ggttgccactttaagtcta

SEQ ID NO: 712140 - DNA, 19 bp, Mus musculus
  siRNA target sequence for Sap30 (NM_021788.1,857-875).
ccactttaagtctattcca

SEQ ID NO: 712141 - DNA, 19 bp, Mus musculus
  siRNA target sequence for Sap30 (NM_021788.1,873-891).
ccagtgaacgaaaaagaca

SEQ ID NO: 712142 - DNA, 19 bp, Mus musculus
  siRNA target sequence for Sap30 (NM_021788.1,888-906).
gacaccttaacatgtttca

SEQ ID NO: 712143 - DNA, 19 bp, Mus musculus
  siRNA target sequence for Sap30 (NM_021788.1,915-933).
gtgaggaacgacaagaaca

SEQ ID NO: 712144 - DNA, 19 bp, Mus musculus
  siRNA target sequence for AW111922 (NM_021792.1,162-180).
gggaatattcagttgacaa

SEQ ID NO: 712145 - DNA, 19 bp, Mus musculus
  siRNA target sequence for AW111922 (NM_021792.1,163-181).
ggaatattcagttgacaaa

SEQ ID NO: 712146 - DNA, 19 bp, Mus musculus
  siRNA target sequence for AW111922 (NM_021792.1,403-421).
ggattggaagcacaaattt

SEQ ID NO: 712147 - DNA, 19 bp, Mus musculus
  siRNA target sequence for AW111922 (NM_021792.1,880-898).
ctgctgacctagtgaatat

SEQ ID NO: 712148 - DNA, 19 bp, Mus musculus
  siRNA target sequence for AW111922 (NM_021792.1,882-900).
gctgacctagtgaatatca

SEQ ID NO: 712149 - DNA, 19 bp, Mus musculus
  siRNA target sequence for AW111922 (NM_021792.1,883-901).
ctgacctagtgaatatcat

SEQ ID NO: 712150 - DNA, 19 bp, Mus musculus
  siRNA target sequence for Jmj (NM_021878.2,205-223).
gacccaagaggaatatcat

SEQ ID NO: 712151 - DNA, 19 bp, Mus musculus
  siRNA target sequence for Jmj (NM_021878.2,279-297).
cgaaaagtcctgtatttgt

SEQ ID NO: 712152 - DNA, 19 bp, Mus musculus
  siRNA target sequence for Jmj (NM_021878.2,467-485).
caacgatgttagttcttca

SEQ ID NO: 712153 - DNA, 19 bp, Mus musculus
  siRNA target sequence for Jmj (NM_021878.2,470-488).
cgatgttagttcttcagat

SEQ ID NO: 712154 - DNA, 19 bp, Mus musculus
  siRNA target sequence for Jmj (NM_021878.2,471-489).
gatgttagttcttcagatt

SEQ ID NO: 712155 - DNA, 19 bp, Mus musculus
  siRNA target sequence for Jmj (NM_021878.2,495-513).
gaagggccgtcgaggaaaa

SEQ ID NO: 712156 - DNA, 19 bp, Mus musculus
  siRNA target sequence for Jmj (NM_021878.2,535-553).
ggaagtttgctcaatctca

SEQ ID NO: 712157 - DNA, 19 bp, Mus musculus
  siRNA target sequence for Jmj (NM_021878.2,608-626).
gccagctactcaaatttct

SEQ ID NO: 712158 - DNA, 19 bp, Mus musculus
  siRNA target sequence for Jmj (NM_021878.2,610-628).
cagctactcaaatttctga

SEQ ID NO: 712159 - DNA, 19 bp, Mus musculus
  siRNA target sequence for Jmj (NM_021878.2,690-708).
cctgcgctgcccaacagta

SEQ ID NO: 712160 - DNA, 19 bp, Mus musculus
  siRNA target sequence for Jmj (NM_021878.2,691-709).
ctgcgctgcccaacagtat

SEQ ID NO: 712161 - DNA, 19 bp, Mus musculus
  siRNA target sequence for Jmj (NM_021878.2,695-713).
gctgcccaacagtatggta

SEQ ID NO: 712162 - DNA, 19 bp, Mus musculus
  siRNA target sequence for Jmj (NM_021878.2,699-717).
cccaacagtatggtatatt

SEQ ID NO: 712163 - DNA, 19 bp, Mus musculus
  siRNA target sequence for Jmj (NM_021878.2,835-853).
cccataagcatgtacacaa

SEQ ID NO: 712164 - DNA, 19 bp, Mus musculus
  siRNA target sequence for Jmj (NM_021878.2,849-867).
cacaacgggcacgttttca

SEQ ID NO: 712165 - DNA, 19 bp, Mus musculus
  siRNA target sequence for Jmj (NM_021878.2,851-869).
caacgggcacgttttcaat

SEQ ID NO: 712166 - DNA, 19 bp, Mus musculus
  siRNA target sequence for Jmj (NM_021878.2,1136-1154).
gggtgcaggtacaaacagt

SEQ ID NO: 712167 - DNA, 19 bp, Mus musculus
  siRNA target sequence for Jmj (NM_021878.2,1180-1198).
cttcaccatccaaaactgt

SEQ ID NO: 712168 - DNA, 19 bp, Mus musculus
  siRNA target sequence for Jmj (NM_021878.2,1424-1442).
caggttgaacccaaagtca

SEQ ID NO: 712169 - DNA, 19 bp, Mus musculus
  siRNA target sequence for Jmj (NM_021878.2,1649-1667).
gcccgagcgaagtttggaa

SEQ ID NO: 712170 - DNA, 19 bp, Mus musculus
  siRNA target sequence for Jmj (NM_021878.2,1650-1668).
cccgagcgaagtttggaaa

SEQ ID NO: 712171 - DNA, 19 bp, Mus musculus
  siRNA target sequence for Jmj (NM_021878.2,1739-1757).
caccccctgtgaaaatcgt

SEQ ID NO: 712172 - DNA, 19 bp, Mus musculus
  siRNA target sequence for Jmj (NM_021878.2,1918-1936).
gtgctcaggtggagaagta

SEQ ID NO: 712173 - DNA, 19 bp, Mus musculus
  siRNA target sequence for Jmj (NM_021878.2,2061-2079).
cagcggctagcctgcataa

SEQ ID NO: 712174 - DNA, 19 bp, Mus musculus
  siRNA target sequence for Jmj (NM_021878.2,2064-2082).
cggctagcctgcataaaga

SEQ ID NO: 712175 - DNA, 19 bp, Mus musculus
  siRNA target sequence for Jmj (NM_021878.2,2065-2083).
ggctagcctgcataaagaa

SEQ ID NO: 712176 - DNA, 19 bp, Mus musculus
  siRNA target sequence for Jmj (NM_021878.2,2142-2160).
ctcgacctggcctgctttt

SEQ ID NO: 712177 - DNA, 19 bp, Mus musculus
  siRNA target sequence for Jmj (NM_021878.2,2155-2173).
gctttttccggctgattaa

SEQ ID NO: 712178 - DNA, 19 bp, Mus musculus
  siRNA target sequence for Jmj (NM_021878.2,2193-2211).
caagtgactgacctcaaaa

SEQ ID NO: 712179 - DNA, 19 bp, Mus musculus
  siRNA target sequence for Jmj (NM_021878.2,2196-2214).
gtgactgacctcaaaaaat

SEQ ID NO: 712180 - DNA, 19 bp, Mus musculus
  siRNA target sequence for Jmj (NM_021878.2,2234-2252).
gctgcgcattcccaaaact

SEQ ID NO: 712181 - DNA, 19 bp, Mus musculus
  siRNA target sequence for Jmj (NM_021878.2,2471-2489).
cggtgtcacacctaggaat

SEQ ID NO: 712182 - DNA, 19 bp, Mus musculus
  siRNA target sequence for Jmj (NM_021878.2,2475-2493).
gtcacacctaggaatggat

SEQ ID NO: 712183 - DNA, 19 bp, Mus musculus
  siRNA target sequence for Jmj (NM_021878.2,2548-2566).
ggctgttcgctcaggaaaa

SEQ ID NO: 712184 - DNA, 19 bp, Mus musculus
  siRNA target sequence for Jmj (NM_021878.2,2549-2567).
gctgttcgctcaggaaaaa

SEQ ID NO: 712185 - DNA, 19 bp, Mus musculus
  siRNA target sequence for Jmj (NM_021878.2,2649-2667).
ctaacaactttttatcgaa

SEQ ID NO: 712186 - DNA, 19 bp, Mus musculus
  siRNA target sequence for Jmj (NM_021878.2,2705-2723).
gcccgcaccagcagagatt

SEQ ID NO: 712187 - DNA, 19 bp, Mus musculus
  siRNA target sequence for Jmj (NM_021878.2,2707-2725).
ccgcaccagcagagattga

SEQ ID NO: 712188 - DNA, 19 bp, Mus musculus
  siRNA target sequence for Jmj (NM_021878.2,2779-2797).
gcggaaaggtggacactaa

SEQ ID NO: 712189 - DNA, 19 bp, Mus musculus
  siRNA target sequence for Jmj (NM_021878.2,2780-2798).
cggaaaggtggacactaat

SEQ ID NO: 712190 - DNA, 19 bp, Mus musculus
  siRNA target sequence for Jmj (NM_021878.2,2813-2831).
gttcccggtgggaaaatca

SEQ ID NO: 712191 - DNA, 19 bp, Mus musculus
  siRNA target sequence for Jmj (NM_021878.2,2816-2834).
cccggtgggaaaatcagaa

SEQ ID NO: 712192 - DNA, 19 bp, Mus musculus
  siRNA target sequence for Jmj (NM_021878.2,2921-2939).
gactattccctggctaaat

SEQ ID NO: 712193 - DNA, 19 bp, Mus musculus
  siRNA target sequence for Jmj (NM_021878.2,2923-2941).
ctattccctggctaaatat

SEQ ID NO: 712194 - DNA, 19 bp, Mus musculus
  siRNA target sequence for Jmj (NM_021878.2,2965-2983).
gctggtctcgagaccaaaa

SEQ ID NO: 712195 - DNA, 19 bp, Mus musculus
  siRNA target sequence for Jmj (NM_021878.2,2966-2984).
ctggtctcgagaccaaaat

SEQ ID NO: 712196 - DNA, 19 bp, Mus musculus
  siRNA target sequence for Jmj (NM_021878.2,2968-2986).
ggtctcgagaccaaaatca

SEQ ID NO: 712197 - DNA, 19 bp, Mus musculus
  siRNA target sequence for Jmj (NM_021878.2,2978-2996).
ccaaaatcaccttccatat

SEQ ID NO: 712198 - DNA, 19 bp, Mus musculus
  siRNA target sequence for Jmj (NM_021878.2,3016-3034).
gtgctgactgcatttggta

SEQ ID NO: 712199 - DNA, 19 bp, Mus musculus
  siRNA target sequence for Jmj (NM_021878.2,3084-3102).
ctgctgcagggcaatggta

SEQ ID NO: 712200 - DNA, 19 bp, Mus musculus
  siRNA target sequence for Jmj (NM_021878.2,3120-3138).
ctggagagcaatgtaatga

SEQ ID NO: 712201 - DNA, 19 bp, Mus musculus
  siRNA target sequence for Jmj (NM_021878.2,3212-3230).
ctgcttcccgggatccttt

SEQ ID NO: 712202 - DNA, 19 bp, Mus musculus
  siRNA target sequence for Jmj (NM_021878.2,3264-3282).
gagacagtgcactttgcta

SEQ ID NO: 712203 - DNA, 19 bp, Mus musculus
  siRNA target sequence for Jmj (NM_021878.2,3712-3730).
gtgggctgaagctgatgta

SEQ ID NO: 712204 - DNA, 19 bp, Mus musculus
  siRNA target sequence for Jmj (NM_021878.2,3741-3759).
gaggagcagatcatcagtt

SEQ ID NO: 712205 - DNA, 19 bp, Mus musculus
  siRNA target sequence for Tmod1 (NM_021883.1,219-237).
cacccacaggcccctttaa

SEQ ID NO: 712206 - DNA, 19 bp, Mus musculus
  siRNA target sequence for Tmod1 (NM_021883.1,221-239).
cccacaggcccctttaaaa

SEQ ID NO: 712207 - DNA, 19 bp, Mus musculus
  siRNA target sequence for Tmod1 (NM_021883.1,223-241).
cacaggcccctttaaaaga

SEQ ID NO: 712208 - DNA, 19 bp, Mus musculus
  siRNA target sequence for Tmod1 (NM_021883.1,225-243).
caggcccctttaaaagaga

SEQ ID NO: 712209 - DNA, 19 bp, Mus musculus
  siRNA target sequence for Tmod1 (NM_021883.1,504-522).
gcagctccatcgtgaacaa

SEQ ID NO: 712210 - DNA, 19 bp, Mus musculus
  siRNA target sequence for Tmod1 (NM_021883.1,602-620).
gaaacgctggagcgaataa

SEQ ID NO: 712211 - DNA, 19 bp, Mus musculus
  siRNA target sequence for Tmod1 (NM_021883.1,606-624).
cgctggagcgaataaagaa

SEQ ID NO: 712212 - DNA, 19 bp, Mus musculus
  siRNA target sequence for Tmod1 (NM_021883.1,610-628).
ggagcgaataaagaacaat

SEQ ID NO: 712213 - DNA, 19 bp, Mus musculus
  siRNA target sequence for Tmod1 (NM_021883.1,633-651).
cagaactagaagaggttaa

SEQ ID NO: 712214 - DNA, 19 bp, Mus musculus
  siRNA target sequence for Tmod1 (NM_021883.1,641-659).
gaagaggttaatcttaaca

SEQ ID NO: 712215 - DNA, 19 bp, Mus musculus
  siRNA target sequence for Tmod1 (NM_021883.1,644-662).
gaggttaatcttaacaaca

SEQ ID NO: 712216 - DNA, 19 bp, Mus musculus
  siRNA target sequence for Tmod1 (NM_021883.1,771-789).
cgtttgcccttgctgaaat

SEQ ID NO: 712217 - DNA, 19 bp, Mus musculus
  siRNA target sequence for Tmod1 (NM_021883.1,895-913).
ggtcgagctgaaaatcgat

SEQ ID NO: 712218 - DNA, 19 bp, Mus musculus
  siRNA target sequence for Tmod1 (NM_021883.1,896-914).
gtcgagctgaaaatcgata

SEQ ID NO: 712219 - DNA, 19 bp, Mus musculus
  siRNA target sequence for Tmod1 (NM_021883.1,922-940).
ccaacctttgggcaacaaa

SEQ ID NO: 712220 - DNA, 19 bp, Mus musculus
  siRNA target sequence for Tmod1 (NM_021883.1,1031-1049).
gcatccaacgccatgatga

SEQ ID NO: 712221 - DNA, 19 bp, Mus musculus
  siRNA target sequence for Pdcd1lg1 (NM_021893.1,62-80).
ctacgggcgtttactatca

SEQ ID NO: 712222 - DNA, 19 bp, Mus musculus
  siRNA target sequence for Pdcd1lg1 (NM_021893.1,81-99).
cggctccaaaggacttgta

SEQ ID NO: 712223 - DNA, 19 bp, Mus musculus
  siRNA target sequence for Pdcd1lg1 (NM_021893.1,335-353).
caggacgcaggcgtttact

SEQ ID NO: 712224 - DNA, 19 bp, Mus musculus
  siRNA target sequence for Pdcd1lg1 (NM_021893.1,344-362).
ggcgtttactgctgcataa

SEQ ID NO: 712225 - DNA, 19 bp, Mus musculus
  siRNA target sequence for Pdcd1lg1 (NM_021893.1,345-363).
gcgtttactgctgcataat

SEQ ID NO: 712226 - DNA, 19 bp, Mus musculus
  siRNA target sequence for Pdcd1lg1 (NM_021893.1,347-365).
gtttactgctgcataatca

SEQ ID NO: 712227 - DNA, 19 bp, Mus musculus
  siRNA target sequence for Pdcd1lg1 (NM_021893.1,389-407).
cgaatcacgctgaaagtca

SEQ ID NO: 712228 - DNA, 19 bp, Mus musculus
  siRNA target sequence for Pdcd1lg1 (NM_021893.1,390-408).
gaatcacgctgaaagtcaa

SEQ ID NO: 712229 - DNA, 19 bp, Mus musculus
  siRNA target sequence for Pdcd1lg1 (NM_021893.1,410-428).
gccccataccgcaaaatca

SEQ ID NO: 712230 - DNA, 19 bp, Mus musculus
  siRNA target sequence for Pdcd1lg1 (NM_021893.1,411-429).
ccccataccgcaaaatcaa

SEQ ID NO: 712231 - DNA, 19 bp, Mus musculus
  siRNA target sequence for Pdcd1lg1 (NM_021893.1,453-471).
ccacttctgagcatgaact

SEQ ID NO: 712232 - DNA, 19 bp, Mus musculus
  siRNA target sequence for Pdcd1lg1 (NM_021893.1,454-472).
cacttctgagcatgaacta

SEQ ID NO: 712233 - DNA, 19 bp, Mus musculus
  siRNA target sequence for Pdcd1lg1 (NM_021893.1,456-474).
cttctgagcatgaactaat

SEQ ID NO: 712234 - DNA, 19 bp, Mus musculus
  siRNA target sequence for Pdcd1lg1 (NM_021893.1,494-512).
ccagaagctgaggtaatct

SEQ ID NO: 712235 - DNA, 19 bp, Mus musculus
  siRNA target sequence for Pdcd1lg1 (NM_021893.1,505-523).
ggtaatctggacaaacagt

SEQ ID NO: 712236 - DNA, 19 bp, Mus musculus
  siRNA target sequence for Pdcd1lg1 (NM_021893.1,610-628).
caacgccacagcgaatgat

SEQ ID NO: 712237 - DNA, 19 bp, Mus musculus
  siRNA target sequence for Pdcd1lg1 (NM_021893.1,613-631).
cgccacagcgaatgatgtt

SEQ ID NO: 712238 - DNA, 19 bp, Mus musculus
  siRNA target sequence for Pdcd1lg1 (NM_021893.1,620-638).
gcgaatgatgttttctact

SEQ ID NO: 712239 - DNA, 19 bp, Mus musculus
  siRNA target sequence for Pdcd1lg1 (NM_021893.1,629-647).
gttttctactgtacgtttt

SEQ ID NO: 712240 - DNA, 19 bp, Mus musculus
  siRNA target sequence for Pdcd1lg1 (NM_021893.1,754-772).
cctgttgttcctcattgta

SEQ ID NO: 712241 - DNA, 19 bp, Mus musculus
  siRNA target sequence for Pdcd1lg1 (NM_021893.1,814-832).
gctagatgtggagaaatgt

SEQ ID NO: 712242 - DNA, 19 bp, Mus musculus
  siRNA target sequence for Pdcd1lg1 (NM_021893.1,826-844).
gaaatgtggcgttgaagat

SEQ ID NO: 712243 - DNA, 19 bp, Mus musculus
  siRNA target sequence for Pdcd1lg1 (NM_021893.1,861-879).
gaaatgatacacaattcga

SEQ ID NO: 712244 - DNA, 19 bp, Mus musculus
  siRNA target sequence for Capn12 (NM_021894.1,710-728).
ggtgaggtcctctacttga

SEQ ID NO: 712245 - DNA, 19 bp, Mus musculus
  siRNA target sequence for Capn12 (NM_021894.1,721-739).
ctacttgagacaaaacact

SEQ ID NO: 712246 - DNA, 19 bp, Mus musculus
  siRNA target sequence for Capn12 (NM_021894.1,1041-1059).
ggatggagcttcaagactt

SEQ ID NO: 712247 - DNA, 19 bp, Mus musculus
  siRNA target sequence for Capn12 (NM_021894.1,1042-1060).
gatggagcttcaagacttt

SEQ ID NO: 712248 - DNA, 19 bp, Mus musculus
  siRNA target sequence for Capn12 (NM_021894.1,1075-1093).
cacagtgcagatttgttca

SEQ ID NO: 712249 - DNA, 19 bp, Mus musculus
  siRNA target sequence for Capn12 (NM_021894.1,1160-1178).
ggctaccttctcataggtt

SEQ ID NO: 712250 - DNA, 19 bp, Mus musculus
  siRNA target sequence for Capn12 (NM_021894.1,1161-1179).
gctaccttctcataggttt

SEQ ID NO: 712251 - DNA, 19 bp, Mus musculus
  siRNA target sequence for Capn12 (NM_021894.1,1205-1223).
cccgactcactgtcacaaa

SEQ ID NO: 712252 - DNA, 19 bp, Mus musculus
  siRNA target sequence for Capn12 (NM_021894.1,1276-1294).
ggagccatcccaaacagaa

SEQ ID NO: 712253 - DNA, 19 bp, Mus musculus
  siRNA target sequence for Capn12 (NM_021894.1,1306-1324).
ccttttgaagcctcttcat

SEQ ID NO: 712254 - DNA, 19 bp, Mus musculus
  siRNA target sequence for Tbn (NM_022015.2,54-72).
gaacgagaccgggaagtaa

SEQ ID NO: 712255 - DNA, 19 bp, Mus musculus
  siRNA target sequence for Tbn (NM_022015.2,58-76).
gagaccgggaagtaagcaa

SEQ ID NO: 712256 - DNA, 19 bp, Mus musculus
  siRNA target sequence for Tbn (NM_022015.2,78-96).
ccactaaccctgctgataa

SEQ ID NO: 712257 - DNA, 19 bp, Mus musculus
  siRNA target sequence for Tbn (NM_022015.2,229-247).
cgggagaagtgctaagtca

SEQ ID NO: 712258 - DNA, 19 bp, Mus musculus
  siRNA target sequence for Tbn (NM_022015.2,231-249).
ggagaagtgctaagtcata

SEQ ID NO: 712259 - DNA, 19 bp, Mus musculus
  siRNA target sequence for Tbn (NM_022015.2,293-311).
gtggtcacattggttgaaa

SEQ ID NO: 712260 - DNA, 19 bp, Mus musculus
  siRNA target sequence for Tbn (NM_022015.2,605-623).
ggcgagacccagagtcttt

SEQ ID NO: 712261 - DNA, 19 bp, Mus musculus
  siRNA target sequence for Tbn (NM_022015.2,606-624).
gcgagacccagagtctttt

SEQ ID NO: 712262 - DNA, 19 bp, Mus musculus
  siRNA target sequence for Tbn (NM_022015.2,811-829).
gaaggagagcgcttctgtt

SEQ ID NO: 712263 - DNA, 19 bp, Mus musculus
  siRNA target sequence for Tbn (NM_022015.2,869-887).
gaggagagcgtcatcgata

SEQ ID NO: 712264 - DNA, 19 bp, Mus musculus
  siRNA target sequence for Niban (NM_022018.1,758-776).
ctgacctgctgcctaaact

SEQ ID NO: 712265 - DNA, 19 bp, Mus musculus
  siRNA target sequence for Niban (NM_022018.1,924-942).
ctcagacatggatcagatt

SEQ ID NO: 712266 - DNA, 19 bp, Mus musculus
  siRNA target sequence for Niban (NM_022018.1,1087-1105).
gtccgtgcacttttcgaaa

SEQ ID NO: 712267 - DNA, 19 bp, Mus musculus
  siRNA target sequence for Niban (NM_022018.1,1089-1107).
ccgtgcacttttcgaaaaa

SEQ ID NO: 712268 - DNA, 19 bp, Mus musculus
  siRNA target sequence for Niban (NM_022018.1,1168-1186).
ggcctacagcagctaatga

SEQ ID NO: 712269 - DNA, 19 bp, Mus musculus
  siRNA target sequence for Niban (NM_022018.1,1169-1187).
gcctacagcagctaatgaa

SEQ ID NO: 712270 - DNA, 19 bp, Mus musculus
  siRNA target sequence for Niban (NM_022018.1,1209-1227).
gatggagccttgctatact

SEQ ID NO: 712271 - DNA, 19 bp, Mus musculus
  siRNA target sequence for Niban (NM_022018.1,1212-1230).
ggagccttgctatactaaa

SEQ ID NO: 712272 - DNA, 19 bp, Mus musculus
  siRNA target sequence for Niban (NM_022018.1,1216-1234).
ccttgctatactaaagtca

SEQ ID NO: 712273 - DNA, 19 bp, Mus musculus
  siRNA target sequence for Niban (NM_022018.1,1419-1437).
ggttaagctccgtgtctta

SEQ ID NO: 712274 - DNA, 19 bp, Mus musculus
  siRNA target sequence for Niban (NM_022018.1,1425-1443).
gctccgtgtcttaaagcaa

SEQ ID NO: 712275 - DNA, 19 bp, Mus musculus
  siRNA target sequence for Niban (NM_022018.1,1428-1446).
ccgtgtcttaaagcaatat

SEQ ID NO: 712276 - DNA, 19 bp, Mus musculus
  siRNA target sequence for Niban (NM_022018.1,1479-1497).
cttccaggaggcattgatt

SEQ ID NO: 712277 - DNA, 19 bp, Mus musculus
  siRNA target sequence for Niban (NM_022018.1,1482-1500).
ccaggaggcattgattcaa

SEQ ID NO: 712278 - DNA, 19 bp, Mus musculus
  siRNA target sequence for Niban (NM_022018.1,1483-1501).
caggaggcattgattcaaa

SEQ ID NO: 712279 - DNA, 19 bp, Mus musculus
  siRNA target sequence for Niban (NM_022018.1,1488-1506).
ggcattgattcaaatcaca

SEQ ID NO: 712280 - DNA, 19 bp, Mus musculus
  siRNA target sequence for Niban (NM_022018.1,1579-1597).
gcagatcataccaacatga

SEQ ID NO: 712281 - DNA, 19 bp, Mus musculus
  siRNA target sequence for Niban (NM_022018.1,1602-1620).
cgttgagaacgtctatgaa

SEQ ID NO: 712282 - DNA, 19 bp, Mus musculus
  siRNA target sequence for Niban (NM_022018.1,1614-1632).
ctatgaagagattttgtat

SEQ ID NO: 712283 - DNA, 19 bp, Mus musculus
  siRNA target sequence for Niban (NM_022018.1,1667-1685).
cggaggcagccatcttgaa

SEQ ID NO: 712284 - DNA, 19 bp, Mus musculus
  siRNA target sequence for Niban (NM_022018.1,1680-1698).
cttgaagaaacacaactta

SEQ ID NO: 712285 - DNA, 19 bp, Mus musculus
  siRNA target sequence for Niban (NM_022018.1,1969-1987).
cctctcactgtagagaata

SEQ ID NO: 712286 - DNA, 19 bp, Mus musculus
  siRNA target sequence for Niban (NM_022018.1,2027-2045).
ctggggggacccttaaaga

SEQ ID NO: 712287 - DNA, 19 bp, Mus musculus
  siRNA target sequence for Niban (NM_022018.1,2101-2119).
gaactgaaaaagttgttga

SEQ ID NO: 712288 - DNA, 19 bp, Mus musculus
  siRNA target sequence for Niban (NM_022018.1,2146-2164).
ccggtggttgaaaatgata

SEQ ID NO: 712289 - DNA, 19 bp, Mus musculus
  siRNA target sequence for Niban (NM_022018.1,2179-2197).
cctgttccccaagagaata

SEQ ID NO: 712290 - DNA, 19 bp, Mus musculus
  siRNA target sequence for Niban (NM_022018.1,2180-2198).
ctgttccccaagagaatat

SEQ ID NO: 712291 - DNA, 19 bp, Mus musculus
  siRNA target sequence for Niban (NM_022018.1,2182-2200).
gttccccaagagaatataa

SEQ ID NO: 712292 - DNA, 19 bp, Mus musculus
  siRNA target sequence for Niban (NM_022018.1,2533-2551).
gaagatgccacgttaagct

SEQ ID NO: 712293 - DNA, 19 bp, Mus musculus
  siRNA target sequence for Niban (NM_022018.1,2636-2654).
cccttggtatggatacaga

SEQ ID NO: 712294 - DNA, 19 bp, Mus musculus
  siRNA target sequence for Niban (NM_022018.1,2646-2664).
ggatacagagcaagtcaat

SEQ ID NO: 712295 - DNA, 19 bp, Mus musculus
  siRNA target sequence for Niban (NM_022018.1,2655-2673).
gcaagtcaatgatactcat

SEQ ID NO: 712296 - DNA, 19 bp, Mus musculus
  siRNA target sequence for Niban (NM_022018.1,2718-2736).
catcctagccgtacatgat

SEQ ID NO: 712297 - DNA, 19 bp, Mus musculus
  siRNA target sequence for Niban (NM_022018.1,2721-2739).
cctagccgtacatgatttt

SEQ ID NO: 712298 - DNA, 19 bp, Mus musculus
  siRNA target sequence for Niban (NM_022018.1,2726-2744).
ccgtacatgattttgatgt

SEQ ID NO: 712299 - DNA, 19 bp, Mus musculus
  siRNA target sequence for Ube4b (NM_022022.1,914-932).
ccgaccaccccgcttacat

SEQ ID NO: 712300 - DNA, 19 bp, Mus musculus
  siRNA target sequence for Ube4b (NM_022022.1,916-934).
gaccaccccgcttacatct

SEQ ID NO: 712301 - DNA, 19 bp, Mus musculus
  siRNA target sequence for Ube4b (NM_022022.1,1002-1020).
gtctcaatgtccacaacat

SEQ ID NO: 712302 - DNA, 19 bp, Mus musculus
  siRNA target sequence for Ube4b (NM_022022.1,1004-1022).
ctcaatgtccacaacatga

SEQ ID NO: 712303 - DNA, 19 bp, Mus musculus
  siRNA target sequence for Ube4b (NM_022022.1,1145-1163).
cgttcccagagcatggata

SEQ ID NO: 712304 - DNA, 19 bp, Mus musculus
  siRNA target sequence for Ube4b (NM_022022.1,1146-1164).
gttcccagagcatggatat

SEQ ID NO: 712305 - DNA, 19 bp, Mus musculus
  siRNA target sequence for Ube4b (NM_022022.1,1149-1167).
cccagagcatggatattga

SEQ ID NO: 712306 - DNA, 19 bp, Mus musculus
  siRNA target sequence for Ube4b (NM_022022.1,1208-1226).
gattcgggaattgagaata

SEQ ID NO: 712307 - DNA, 19 bp, Mus musculus
  siRNA target sequence for Ube4b (NM_022022.1,1212-1230).
cgggaattgagaatatgga

SEQ ID NO: 712308 - DNA, 19 bp, Mus musculus
  siRNA target sequence for Ube4b (NM_022022.1,1237-1255).
cgagaacgaccgaagagaa

SEQ ID NO: 712309 - DNA, 19 bp, Mus musculus
  siRNA target sequence for Ube4b (NM_022022.1,1238-1256).
gagaacgaccgaagagaaa

SEQ ID NO: 712310 - DNA, 19 bp, Mus musculus
  siRNA target sequence for Ube4b (NM_022022.1,1314-1332).
ccttacagctggtctgtaa

SEQ ID NO: 712311 - DNA, 19 bp, Mus musculus
  siRNA target sequence for Ube4b (NM_022022.1,1359-1377).
gcgacagagatgtcatctt

SEQ ID NO: 712312 - DNA, 19 bp, Mus musculus
  siRNA target sequence for Ube4b (NM_022022.1,1439-1457).
gatctgattggccagattt

SEQ ID NO: 712313 - DNA, 19 bp, Mus musculus
  siRNA target sequence for Ube4b (NM_022022.1,1442-1460).
ctgattggccagattttaa

SEQ ID NO: 712314 - DNA, 19 bp, Mus musculus
  siRNA target sequence for Ube4b (NM_022022.1,1463-1481).
gaagtactgatgatgtcaa

SEQ ID NO: 712315 - DNA, 19 bp, Mus musculus
  siRNA target sequence for Ube4b (NM_022022.1,1482-1500).
ctcagacacgagatgaaaa

SEQ ID NO: 712316 - DNA, 19 bp, Mus musculus
  siRNA target sequence for Ube4b (NM_022022.1,1488-1506).
cacgagatgaaaatccatt

SEQ ID NO: 712317 - DNA, 19 bp, Mus musculus
  siRNA target sequence for Ube4b (NM_022022.1,1595-1613).
ggaacaagccccatgttct

SEQ ID NO: 712318 - DNA, 19 bp, Mus musculus
  siRNA target sequence for Ube4b (NM_022022.1,1659-1677).
cctctggtggagcaagtaa

SEQ ID NO: 712319 - DNA, 19 bp, Mus musculus
  siRNA target sequence for Ube4b (NM_022022.1,1671-1689).
caagtaactgggattcgta

SEQ ID NO: 712320 - DNA, 19 bp, Mus musculus
  siRNA target sequence for Ube4b (NM_022022.1,1738-1756).
ctacctcatcgagtgtttt

SEQ ID NO: 712321 - DNA, 19 bp, Mus musculus
  siRNA target sequence for Ube4b (NM_022022.1,1752-1770).
gttttgaccgagttggaat

SEQ ID NO: 712322 - DNA, 19 bp, Mus musculus
  siRNA target sequence for Ube4b (NM_022022.1,1942-1960).
cctcccgtacggcttcatt

SEQ ID NO: 712323 - DNA, 19 bp, Mus musculus
  siRNA target sequence for Ube4b (NM_022022.1,1945-1963).
cccgtacggcttcattcaa

SEQ ID NO: 712324 - DNA, 19 bp, Mus musculus
  siRNA target sequence for Ube4b (NM_022022.1,1947-1965).
cgtacggcttcattcaaga

SEQ ID NO: 712325 - DNA, 19 bp, Mus musculus
  siRNA target sequence for Ube4b (NM_022022.1,1996-2014).
ggtgttcaagcagatcttt

SEQ ID NO: 712326 - DNA, 19 bp, Mus musculus
  siRNA target sequence for Ube4b (NM_022022.1,1997-2015).
gtgttcaagcagatcttta

SEQ ID NO: 712327 - DNA, 19 bp, Mus musculus
  siRNA target sequence for Ube4b (NM_022022.1,2209-2227).
gcagagactctcctactta

SEQ ID NO: 712328 - DNA, 19 bp, Mus musculus
  siRNA target sequence for Ube4b (NM_022022.1,2331-2349).
gccagtcactacagcatta

SEQ ID NO: 712329 - DNA, 19 bp, Mus musculus
  siRNA target sequence for Ube4b (NM_022022.1,2356-2374).
gctgggacggcaagaactt

SEQ ID NO: 712330 - DNA, 19 bp, Mus musculus
  siRNA target sequence for Ube4b (NM_022022.1,2361-2379).
gacggcaagaacttttcaa

SEQ ID NO: 712331 - DNA, 19 bp, Mus musculus
  siRNA target sequence for Ube4b (NM_022022.1,2363-2381).
cggcaagaacttttcaaga

SEQ ID NO: 712332 - DNA, 19 bp, Mus musculus
  siRNA target sequence for Ube4b (NM_022022.1,2364-2382).
ggcaagaacttttcaagat

SEQ ID NO: 712333 - DNA, 19 bp, Mus musculus
  siRNA target sequence for Ube4b (NM_022022.1,2365-2383).
gcaagaacttttcaagatt

SEQ ID NO: 712334 - DNA, 19 bp, Mus musculus
  siRNA target sequence for Ube4b (NM_022022.1,2377-2395).
caagattctacatagtatt

SEQ ID NO: 712335 - DNA, 19 bp, Mus musculus
  siRNA target sequence for Ube4b (NM_022022.1,2499-2517).
ctacagacgggtttatgct

SEQ ID NO: 712336 - DNA, 19 bp, Mus musculus
  siRNA target sequence for Ube4b (NM_022022.1,2533-2551).
cctgcagcagctaagtaca

SEQ ID NO: 712337 - DNA, 19 bp, Mus musculus
  siRNA target sequence for Ube4b (NM_022022.1,2534-2552).
ctgcagcagctaagtacaa

SEQ ID NO: 712338 - DNA, 19 bp, Mus musculus
  siRNA target sequence for Ube4b (NM_022022.1,2547-2565).
gtacaaaaatcaagttaga

SEQ ID NO: 712339 - DNA, 19 bp, Mus musculus
  siRNA target sequence for Ube4b (NM_022022.1,2570-2588).
gttgaccccacttacatat

SEQ ID NO: 712340 - DNA, 19 bp, Mus musculus
  siRNA target sequence for Ube4b (NM_022022.1,2584-2602).
catattccacccaagatgt

SEQ ID NO: 712341 - DNA, 19 bp, Mus musculus
  siRNA target sequence for Ube4b (NM_022022.1,2605-2623).
gatcactctcccgaatgat

SEQ ID NO: 712342 - DNA, 19 bp, Mus musculus
  siRNA target sequence for Ube4b (NM_022022.1,2624-2642).
gagacacggataaatgcaa

SEQ ID NO: 712343 - DNA, 19 bp, Mus musculus
  siRNA target sequence for Ube4b (NM_022022.1,2640-2658).
caacgatggaggatgtgaa

SEQ ID NO: 712344 - DNA, 19 bp, Mus musculus
  siRNA target sequence for Ube4b (NM_022022.1,2681-2699).
ggtgatcagcctccatttt

SEQ ID NO: 712345 - DNA, 19 bp, Mus musculus
  siRNA target sequence for Ube4b (NM_022022.1,2713-2731).
ccctacggaatgtttcttt

SEQ ID NO: 712346 - DNA, 19 bp, Mus musculus
  siRNA target sequence for Ube4b (NM_022022.1,2798-2816).
gccatccgcgagctcaata

SEQ ID NO: 712347 - DNA, 19 bp, Mus musculus
  siRNA target sequence for Ube4b (NM_022022.1,2800-2818).
catccgcgagctcaataga

SEQ ID NO: 712348 - DNA, 19 bp, Mus musculus
  siRNA target sequence for Ube4b (NM_022022.1,2874-2892).
ccagacaccgtgaaatgct

SEQ ID NO: 712349 - DNA, 19 bp, Mus musculus
  siRNA target sequence for Ube4b (NM_022022.1,2898-2916).
gctgtaaaactcagcttaa

SEQ ID NO: 712350 - DNA, 19 bp, Mus musculus
  siRNA target sequence for Ube4b (NM_022022.1,2960-2978).
gacgagagcttcctaagaa

SEQ ID NO: 712351 - DNA, 19 bp, Mus musculus
  siRNA target sequence for Ube4b (NM_022022.1,2963-2981).
gagagcttcctaagaagat

SEQ ID NO: 712352 - DNA, 19 bp, Mus musculus
  siRNA target sequence for Ube4b (NM_022022.1,3036-3054).
catatcctgacgtaacact

SEQ ID NO: 712353 - DNA, 19 bp, Mus musculus
  siRNA target sequence for Ube4b (NM_022022.1,3150-3168).
ctcctcaggtgctttatga

SEQ ID NO: 712354 - DNA, 19 bp, Mus musculus
  siRNA target sequence for Ube4b (NM_022022.1,3293-3311).
ccgagaactcagaagttct

SEQ ID NO: 712355 - DNA, 19 bp, Mus musculus
  siRNA target sequence for Ube4b (NM_022022.1,3294-3312).
cgagaactcagaagttctt

SEQ ID NO: 712356 - DNA, 19 bp, Mus musculus
  siRNA target sequence for Ube4b (NM_022022.1,3300-3318).
ctcagaagttctttgagat

SEQ ID NO: 712357 - DNA, 19 bp, Mus musculus
  siRNA target sequence for Ube4b (NM_022022.1,3304-3322).
gaagttctttgagatgatt

SEQ ID NO: 712358 - DNA, 19 bp, Mus musculus
  siRNA target sequence for Ube4b (NM_022022.1,3356-3374).
ccgtccctcatgaagttct

SEQ ID NO: 712359 - DNA, 19 bp, Mus musculus
  siRNA target sequence for Ube4b (NM_022022.1,3357-3375).
cgtccctcatgaagttcta

SEQ ID NO: 712360 - DNA, 19 bp, Mus musculus
  siRNA target sequence for Ube4b (NM_022022.1,3396-3414).
gagccaccagcgagttcta

SEQ ID NO: 712361 - DNA, 19 bp, Mus musculus
  siRNA target sequence for Ube4b (NM_022022.1,3424-3442).
cacaattcgctatcacatt

SEQ ID NO: 712362 - DNA, 19 bp, Mus musculus
  siRNA target sequence for Ube4b (NM_022022.1,3493-3511).
catggaggagttcaattct

SEQ ID NO: 712363 - DNA, 19 bp, Mus musculus
  siRNA target sequence for Ube4b (NM_022022.1,3518-3536).
cagttcgttcggtatatca

SEQ ID NO: 712364 - DNA, 19 bp, Mus musculus
  siRNA target sequence for Ube4b (NM_022022.1,3520-3538).
gttcgttcggtatatcaat

SEQ ID NO: 712365 - DNA, 19 bp, Mus musculus
  siRNA target sequence for Ube4b (NM_022022.1,3527-3545).
cggtatatcaatatgctaa

SEQ ID NO: 712366 - DNA, 19 bp, Mus musculus
  siRNA target sequence for Ube4b (NM_022022.1,3850-3868).
gtgccgggacctgaaagtt

SEQ ID NO: 712367 - DNA, 19 bp, Mus musculus
  siRNA target sequence for Ube4b (NM_022022.1,3852-3870).
gccgggacctgaaagttga

SEQ ID NO: 712368 - DNA, 19 bp, Mus musculus
  siRNA target sequence for Ube4b (NM_022022.1,3853-3871).
ccgggacctgaaagttgaa

SEQ ID NO: 712369 - DNA, 19 bp, Mus musculus
  siRNA target sequence for Ube4b (NM_022022.1,3910-3928).
ggaccaactgacagatatt

SEQ ID NO: 712370 - DNA, 19 bp, Mus musculus
  siRNA target sequence for Ube4b (NM_022022.1,3941-3959).
gactgtgctcgctttgcta

SEQ ID NO: 712371 - DNA, 19 bp, Mus musculus
  siRNA target sequence for Ube4b (NM_022022.1,3943-3961).
ctgtgctcgctttgctaaa

SEQ ID NO: 712372 - DNA, 19 bp, Mus musculus
  siRNA target sequence for Ube4b (NM_022022.1,4024-4042).
gcggaaggcgggaatcaaa

SEQ ID NO: 712373 - DNA, 19 bp, Mus musculus
  siRNA target sequence for Ube4b (NM_022022.1,4025-4043).
cggaaggcgggaatcaaat

SEQ ID NO: 712374 - DNA, 19 bp, Mus musculus
  siRNA target sequence for Ube4b (NM_022022.1,4048-4066).
catcgcaatagagaagttt

SEQ ID NO: 712375 - DNA, 19 bp, Mus musculus
  siRNA target sequence for Ube4b (NM_022022.1,4051-4069).
cgcaatagagaagtttaaa

SEQ ID NO: 712376 - DNA, 19 bp, Mus musculus
  siRNA target sequence for Ube4b (NM_022022.1,4206-4224).
ccgtcatggaccgttctat

SEQ ID NO: 712377 - DNA, 19 bp, Mus musculus
  siRNA target sequence for Ube4b (NM_022022.1,4208-4226).
gtcatggaccgttctatca

SEQ ID NO: 712378 - DNA, 19 bp, Mus musculus
  siRNA target sequence for Ube4b (NM_022022.1,4329-4347).
cctggatgagagagaaaca

SEQ ID NO: 712379 - DNA, 19 bp, Mus musculus
  siRNA target sequence for Nrgn (NM_022029.1,289-307).
ccaagccagacgacgatat

SEQ ID NO: 712380 - DNA, 19 bp, Mus musculus
  siRNA target sequence for Nrgn (NM_022029.1,290-308).
caagccagacgacgatatt

SEQ ID NO: 712381 - DNA, 19 bp, Mus musculus
  siRNA target sequence for Nrgn (NM_022029.1,293-311).
gccagacgacgatattctt

SEQ ID NO: 712382 - DNA, 19 bp, Mus musculus
  siRNA target sequence for Nrgn (NM_022029.1,378-396).
cacatggcgaggaagaaga

SEQ ID NO: 712383 - DNA, 19 bp, Mus musculus
  siRNA target sequence for 4930401E20Rik (NM_022031.1,411-429).
cgctaatcctcattaccaa

SEQ ID NO: 712384 - DNA, 19 bp, Mus musculus
  siRNA target sequence for 4930401E20Rik (NM_022031.1,638-656).
ggccgctaccagttcaatt

SEQ ID NO: 712385 - DNA, 19 bp, Mus musculus
  siRNA target sequence for 4930401E20Rik (NM_022031.1,639-657).
gccgctaccagttcaatta

SEQ ID NO: 712386 - DNA, 19 bp, Mus musculus
  siRNA target sequence for 4930401E20Rik (NM_022031.1,641-659).
cgctaccagttcaattact

SEQ ID NO: 712387 - DNA, 19 bp, Mus musculus
  siRNA target sequence for 4930401E20Rik (NM_022031.1,642-660).
gctaccagttcaattactt

SEQ ID NO: 712388 - DNA, 19 bp, Mus musculus
  siRNA target sequence for 4930401E20Rik (NM_022031.1,702-720).
ccacttacggccaactcta

SEQ ID NO: 712389 - DNA, 19 bp, Mus musculus
  siRNA target sequence for Tcte2 (NM_022311.1,187-205).
cacgttcaagtgataccat

SEQ ID NO: 712390 - DNA, 19 bp, Mus musculus
  siRNA target sequence for Tcte2 (NM_022311.1,240-258).
cacttggcacggagtaact

SEQ ID NO: 712391 - DNA, 19 bp, Mus musculus
  siRNA target sequence for Tcte2 (NM_022311.1,246-264).
gcacggagtaactcaacta

SEQ ID NO: 712392 - DNA, 19 bp, Mus musculus
  siRNA target sequence for Tcte2 (NM_022311.1,247-265).
cacggagtaactcaactaa

SEQ ID NO: 712393 - DNA, 19 bp, Mus musculus
  siRNA target sequence for Tcte2 (NM_022311.1,249-267).
cggagtaactcaactaaca

SEQ ID NO: 712394 - DNA, 19 bp, Mus musculus
  siRNA target sequence for Tcte2 (NM_022311.1,250-268).
ggagtaactcaactaacat

SEQ ID NO: 712395 - DNA, 19 bp, Mus musculus
  siRNA target sequence for Tcte2 (NM_022311.1,271-289).
gttggagggatgaataatt

SEQ ID NO: 712396 - DNA, 19 bp, Mus musculus
  siRNA target sequence for Tcte2 (NM_022311.1,418-436).
gtaagcggaaggtcttctt

SEQ ID NO: 712397 - DNA, 19 bp, Mus musculus
  siRNA target sequence for Moap1 (NM_022323.3,1289-1307).
ctcggaaagcactattggt

SEQ ID NO: 712398 - DNA, 19 bp, Mus musculus
  siRNA target sequence for Moap1 (NM_022323.3,1326-1344).
ctgcggagtggcagacata

SEQ ID NO: 712399 - DNA, 19 bp, Mus musculus
  siRNA target sequence for Moap1 (NM_022323.3,1328-1346).
gcggagtggcagacataga

SEQ ID NO: 712400 - DNA, 19 bp, Mus musculus
  siRNA target sequence for Moap1 (NM_022323.3,1410-1428).
gagggatgagaacaagaat

SEQ ID NO: 712401 - DNA, 19 bp, Mus musculus
  siRNA target sequence for Moap1 (NM_022323.3,1515-1533).
ctttaagcctcctgatact

SEQ ID NO: 712402 - DNA, 19 bp, Mus musculus
  siRNA target sequence for Moap1 (NM_022323.3,1548-1566).
gtgcagattaaatgagttt

SEQ ID NO: 712403 - DNA, 19 bp, Mus musculus
  siRNA target sequence for Moap1 (NM_022323.3,1580-1598).
gcatgacgatgggtgaatt

SEQ ID NO: 712404 - DNA, 19 bp, Mus musculus
  siRNA target sequence for Moap1 (NM_022323.3,1646-1664).
gcataatgatccctgaaat

SEQ ID NO: 712405 - DNA, 19 bp, Mus musculus
  siRNA target sequence for Moap1 (NM_022323.3,1677-1695).
gttagcacaggcattaaat

SEQ ID NO: 712406 - DNA, 19 bp, Mus musculus
  siRNA target sequence for Moap1 (NM_022323.3,1716-1734).
gcagtatctgaggtacaaa

SEQ ID NO: 712407 - DNA, 19 bp, Mus musculus
  siRNA target sequence for Moap1 (NM_022323.3,1717-1735).
cagtatctgaggtacaaaa

SEQ ID NO: 712408 - DNA, 19 bp, Mus musculus
  siRNA target sequence for Moap1 (NM_022323.3,1879-1897).
ggtccagcatttgaaatta

SEQ ID NO: 712409 - DNA, 19 bp, Mus musculus
  siRNA target sequence for Moap1 (NM_022323.3,1900-1918).
cgagtcctcaagataaaca

SEQ ID NO: 712410 - DNA, 19 bp, Mus musculus
  siRNA target sequence for Moap1 (NM_022323.3,1901-1919).
gagtcctcaagataaacaa

SEQ ID NO: 712411 - DNA, 19 bp, Mus musculus
  siRNA target sequence for Moap1 (NM_022323.3,1917-1935).
caaccccttcattacagtt

SEQ ID NO: 712412 - DNA, 19 bp, Mus musculus
  siRNA target sequence for Moap1 (NM_022323.3,1996-2014).
caggtcaaataccttacta

SEQ ID NO: 712413 - DNA, 19 bp, Mus musculus
  siRNA target sequence for Moap1 (NM_022323.3,1999-2017).
gtcaaataccttactactt

SEQ ID NO: 712414 - DNA, 19 bp, Mus musculus
  siRNA target sequence for Moap1 (NM_022323.3,2001-2019).
caaataccttactacttat

SEQ ID NO: 712415 - DNA, 19 bp, Mus musculus
  siRNA target sequence for Moap1 (NM_022323.3,2038-2056).
ctgtctgcctatgttctaa

SEQ ID NO: 712416 - DNA, 19 bp, Mus musculus
  siRNA target sequence for Moap1 (NM_022323.3,2042-2060).
ctgcctatgttctaaggtt

SEQ ID NO: 712417 - DNA, 19 bp, Mus musculus
  siRNA target sequence for Moap1 (NM_022323.3,2124-2142).
ccgtctagaccaagtcatt

SEQ ID NO: 712418 - DNA, 19 bp, Mus musculus
  siRNA target sequence for Moap1 (NM_022323.3,2143-2161).
gctggggcagtccacaaat

SEQ ID NO: 712419 - DNA, 19 bp, Mus musculus
  siRNA target sequence for Moap1 (NM_022323.3,2265-2283).
ccttcaggccgaattagaa

SEQ ID NO: 712420 - DNA, 19 bp, Mus musculus
  siRNA target sequence for 1110020D10Rik (NM_022329.2,712-730).
gtggttccctagtttagaa

SEQ ID NO: 712421 - DNA, 19 bp, Mus musculus
  siRNA target sequence for 1110020D10Rik (NM_022329.2,714-732).
ggttccctagtttagaact

SEQ ID NO: 712422 - DNA, 19 bp, Mus musculus
  siRNA target sequence for 1110020D10Rik (NM_022329.2,739-757).
ctggttgtaccaaactgaa

SEQ ID NO: 712423 - DNA, 19 bp, Mus musculus
  siRNA target sequence for 1110020D10Rik (NM_022329.2,830-848).
cctgacaatcctgctaata

SEQ ID NO: 712424 - DNA, 19 bp, Mus musculus
  siRNA target sequence for 1110020D10Rik (NM_022329.2,843-861).
ctaatagaagccttgttct

SEQ ID NO: 712425 - DNA, 19 bp, Mus musculus
  siRNA target sequence for 1110020D10Rik (NM_022329.2,883-901).
gtgggcacctcaaaatctt

SEQ ID NO: 712426 - DNA, 19 bp, Mus musculus
  siRNA target sequence for 1110020D10Rik (NM_022329.2,944-962).
ggtcctccactggttagaa

SEQ ID NO: 712427 - DNA, 19 bp, Mus musculus
  siRNA target sequence for 1110020D10Rik (NM_022329.2,951-969).
cactggttagaaaaaagat

SEQ ID NO: 712428 - DNA, 19 bp, Mus musculus
  siRNA target sequence for 1110020D10Rik (NM_022329.2,955-973).
ggttagaaaaaagatacat

SEQ ID NO: 712429 - DNA, 19 bp, Mus musculus
  siRNA target sequence for 1110020D10Rik (NM_022329.2,979-997).
cagggtagctggctttaat

SEQ ID NO: 712430 - DNA, 19 bp, Mus musculus
  siRNA target sequence for St7 (NM_022332.1,447-465).
ggcacttcctcgctaatat

SEQ ID NO: 712431 - DNA, 19 bp, Mus musculus
  siRNA target sequence for St7 (NM_022332.1,457-475).
cgctaatatcgggacttat

SEQ ID NO: 712432 - DNA, 19 bp, Mus musculus
  siRNA target sequence for St7 (NM_022332.1,458-476).
gctaatatcgggacttatt

SEQ ID NO: 712433 - DNA, 19 bp, Mus musculus
  siRNA target sequence for St7 (NM_022332.1,459-477).
ctaatatcgggacttattt

SEQ ID NO: 712434 - DNA, 19 bp, Mus musculus
  siRNA target sequence for St7 (NM_022332.1,466-484).
cgggacttattttgatatt

SEQ ID NO: 712435 - DNA, 19 bp, Mus musculus
  siRNA target sequence for St7 (NM_022332.1,467-485).
gggacttattttgatattt

SEQ ID NO: 712436 - DNA, 19 bp, Mus musculus
  siRNA target sequence for St7 (NM_022332.1,491-509).
gtggtattttcgcaagtat

SEQ ID NO: 712437 - DNA, 19 bp, Mus musculus
  siRNA target sequence for St7 (NM_022332.1,501-519).
cgcaagtatggaacatctt

SEQ ID NO: 712438 - DNA, 19 bp, Mus musculus
  siRNA target sequence for St7 (NM_022332.1,564-582).
ggggttgacaacaactctt

SEQ ID NO: 712439 - DNA, 19 bp, Mus musculus
  siRNA target sequence for St7 (NM_022332.1,570-588).
gacaacaactcttccaata

SEQ ID NO: 712440 - DNA, 19 bp, Mus musculus
  siRNA target sequence for St7 (NM_022332.1,572-590).
caacaactcttccaataat

SEQ ID NO: 712441 - DNA, 19 bp, Mus musculus
  siRNA target sequence for St7 (NM_022332.1,633-651).
gtctcagaatgcaaagtat

SEQ ID NO: 712442 - DNA, 19 bp, Mus musculus
  siRNA target sequence for St7 (NM_022332.1,652-670).
ggcgaaatccactgaatct

SEQ ID NO: 712443 - DNA, 19 bp, Mus musculus
  siRNA target sequence for St7 (NM_022332.1,654-672).
cgaaatccactgaatctgt

SEQ ID NO: 712444 - DNA, 19 bp, Mus musculus
  siRNA target sequence for St7 (NM_022332.1,671-689).
gtttaggggtgcggaatat

SEQ ID NO: 712445 - DNA, 19 bp, Mus musculus
  siRNA target sequence for St7 (NM_022332.1,684-702).
gaatataatcggtacactt

SEQ ID NO: 712446 - DNA, 19 bp, Mus musculus
  siRNA target sequence for St7 (NM_022332.1,720-738).
cctctgacctactatgaca

SEQ ID NO: 712447 - DNA, 19 bp, Mus musculus
  siRNA target sequence for St7 (NM_022332.1,758-776).
ccaccagacattctttact

SEQ ID NO: 712448 - DNA, 19 bp, Mus musculus
  siRNA target sequence for St7 (NM_022332.1,764-782).
gacattctttacttgtgat

SEQ ID NO: 712449 - DNA, 19 bp, Mus musculus
  siRNA target sequence for St7 (NM_022332.1,795-813).
cgccctgcagatgcaataa

SEQ ID NO: 712450 - DNA, 19 bp, Mus musculus
  siRNA target sequence for St7 (NM_022332.1,796-814).
gccctgcagatgcaataat

SEQ ID NO: 712451 - DNA, 19 bp, Mus musculus
  siRNA target sequence for St7 (NM_022332.1,801-819).
gcagatgcaataatgcaaa

SEQ ID NO: 712452 - DNA, 19 bp, Mus musculus
  siRNA target sequence for St7 (NM_022332.1,807-825).
gcaataatgcaaaaagctt

SEQ ID NO: 712453 - DNA, 19 bp, Mus musculus
  siRNA target sequence for St7 (NM_022332.1,870-888).
gccttggagataaacgaaa

SEQ ID NO: 712454 - DNA, 19 bp, Mus musculus
  siRNA target sequence for St7 (NM_022332.1,872-890).
cttggagataaacgaaatt

SEQ ID NO: 712455 - DNA, 19 bp, Mus musculus
  siRNA target sequence for St7 (NM_022332.1,876-894).
gagataaacgaaattaggt

SEQ ID NO: 712456 - DNA, 19 bp, Mus musculus
  siRNA target sequence for St7 (NM_022332.1,925-943).
ctaccatctgggagataaa

SEQ ID NO: 712457 - DNA, 19 bp, Mus musculus
  siRNA target sequence for St7 (NM_022332.1,928-946).
ccatctgggagataaaatt

SEQ ID NO: 712458 - DNA, 19 bp, Mus musculus
  siRNA target sequence for St7 (NM_022332.1,936-954).
gagataaaattgttaccaa

SEQ ID NO: 712459 - DNA, 19 bp, Mus musculus
  siRNA target sequence for St7 (NM_022332.1,958-976).
gtgcaactgcgtacattct

SEQ ID NO: 712460 - DNA, 19 bp, Mus musculus
  siRNA target sequence for St7 (NM_022332.1,960-978).
gcaactgcgtacattctct

SEQ ID NO: 712461 - DNA, 19 bp, Mus musculus
  siRNA target sequence for St7 (NM_022332.1,1012-1030).
cagaaaaactctttaagca

SEQ ID NO: 712462 - DNA, 19 bp, Mus musculus
  siRNA target sequence for St7 (NM_022332.1,1064-1082).
ctctcagcagctacaacat

SEQ ID NO: 712463 - DNA, 19 bp, Mus musculus
  siRNA target sequence for St7 (NM_022332.1,1111-1129).
gacgagacaccaatgtctt

SEQ ID NO: 712464 - DNA, 19 bp, Mus musculus
  siRNA target sequence for St7 (NM_022332.1,1118-1136).
caccaatgtcttagtctat

SEQ ID NO: 712465 - DNA, 19 bp, Mus musculus
  siRNA target sequence for St7 (NM_022332.1,1120-1138).
ccaatgtcttagtctatat

SEQ ID NO: 712466 - DNA, 19 bp, Mus musculus
  siRNA target sequence for St7 (NM_022332.1,1127-1145).
cttagtctatatcaaaaga

SEQ ID NO: 712467 - DNA, 19 bp, Mus musculus
  siRNA target sequence for St7 (NM_022332.1,1301-1319).
ggcagtcttagcaaagtat

SEQ ID NO: 712468 - DNA, 19 bp, Mus musculus
  siRNA target sequence for St7 (NM_022332.1,1303-1321).
cagtcttagcaaagtatga

SEQ ID NO: 712469 - DNA, 19 bp, Mus musculus
  siRNA target sequence for St7 (NM_022332.1,1316-1334).
gtatgatgatataagctta

SEQ ID NO: 712470 - DNA, 19 bp, Mus musculus
  siRNA target sequence for St7 (NM_022332.1,1335-1353).
ccaaagtcggcgacaatat

SEQ ID NO: 712471 - DNA, 19 bp, Mus musculus
  siRNA target sequence for St7 (NM_022332.1,1679-1697).
gaagggacacctattttat

SEQ ID NO: 712472 - DNA, 19 bp, Mus musculus
  siRNA target sequence for St7 (NM_022332.1,1682-1700).
gggacacctattttatcca

SEQ ID NO: 712473 - DNA, 19 bp, Mus musculus
  siRNA target sequence for St7 (NM_022332.1,1683-1701).
ggacacctattttatccat

SEQ ID NO: 712474 - DNA, 19 bp, Mus musculus
  siRNA target sequence for St7 (NM_022332.1,1684-1702).
gacacctattttatccata

SEQ ID NO: 712475 - DNA, 19 bp, Mus musculus
  siRNA target sequence for St7 (NM_022332.1,1703-1721).
cccaatctgtacagaaaca

SEQ ID NO: 712476 - DNA, 19 bp, Mus musculus
  siRNA target sequence for St7 (NM_022332.1,1845-1863).
catcagtttccggaactta

SEQ ID NO: 712477 - DNA, 19 bp, Mus musculus
  siRNA target sequence for St7 (NM_022332.1,1865-1883).
gggagtcttcgcaaaagct

SEQ ID NO: 712478 - DNA, 19 bp, Mus musculus
  siRNA target sequence for St7 (NM_022332.1,1866-1884).
ggagtcttcgcaaaagctt

SEQ ID NO: 712479 - DNA, 19 bp, Mus musculus
  siRNA target sequence for St7 (NM_022332.1,1867-1885).
gagtcttcgcaaaagcttt

SEQ ID NO: 712480 - DNA, 19 bp, Mus musculus
  siRNA target sequence for St7 (NM_022332.1,1898-1916).
gtttgcccccttgaacttt

SEQ ID NO: 712481 - DNA, 19 bp, Mus musculus
  siRNA target sequence for St7 (NM_022332.1,1902-1920).
gcccccttgaactttgtta

SEQ ID NO: 712482 - DNA, 19 bp, Mus musculus
  siRNA target sequence for Zfp296 (NM_022409.1,230-248).
gggaccatgggctatgcat

SEQ ID NO: 712483 - DNA, 19 bp, Mus musculus
  siRNA target sequence for Zfp296 (NM_022409.1,331-349).
gtggtggcgccagttgaaa

SEQ ID NO: 712484 - DNA, 19 bp, Mus musculus
  siRNA target sequence for 2010004O20Rik (NM_022418.1,163-181).
cgcctgggtctcaacacat

SEQ ID NO: 712485 - DNA, 19 bp, Mus musculus
  siRNA target sequence for 2010004O20Rik (NM_022418.1,379-397).
gcaggaacccctacttcta

SEQ ID NO: 712486 - DNA, 19 bp, Mus musculus
  siRNA target sequence for 2010004O20Rik (NM_022418.1,388-406).
cctacttctacggttgaaa

SEQ ID NO: 712487 - DNA, 19 bp, Mus musculus
  siRNA target sequence for 2010004O20Rik (NM_022418.1,389-407).
ctacttctacggttgaaat

SEQ ID NO: 712488 - DNA, 19 bp, Mus musculus
  siRNA target sequence for 2010004O20Rik (NM_022418.1,395-413).
ctacggttgaaatttctca

SEQ ID NO: 712489 - DNA, 19 bp, Mus musculus
  siRNA target sequence for AB030190 (NM_022423.1,580-598).
gcatggtcaggcagaatca

SEQ ID NO: 712490 - DNA, 19 bp, Mus musculus
  siRNA target sequence for 2810430J06Rik (NM_022424.2,201-219).
caacaccattgatgtttga

SEQ ID NO: 712491 - DNA, 19 bp, Mus musculus
  siRNA target sequence for 2810430J06Rik (NM_022424.2,259-277).
gaggatgcactgtatgagt

SEQ ID NO: 712492 - DNA, 19 bp, Mus musculus
  siRNA target sequence for 2810430J06Rik (NM_022424.2,261-279).
ggatgcactgtatgagtaa

SEQ ID NO: 712493 - DNA, 19 bp, Mus musculus
  siRNA target sequence for Ms4a8a (NM_022430.1,706-724).
cctgttgtcactacaacaa

SEQ ID NO: 712494 - DNA, 19 bp, Mus musculus
  siRNA target sequence for Ms4a8a (NM_022430.1,727-745).
caggtgtggtcattccaaa

SEQ ID NO: 712495 - DNA, 19 bp, Mus musculus
  siRNA target sequence for Ms4a8a (NM_022430.1,730-748).
gtgtggtcattccaaatgt

SEQ ID NO: 712496 - DNA, 19 bp, Mus musculus
  siRNA target sequence for Ms4a8a (NM_022430.1,732-750).
gtggtcattccaaatgtct

SEQ ID NO: 712497 - DNA, 19 bp, Mus musculus
  siRNA target sequence for Ms4a8a (NM_022430.1,734-752).
ggtcattccaaatgtctat

SEQ ID NO: 712498 - DNA, 19 bp, Mus musculus
  siRNA target sequence for Ms4a8a (NM_022430.1,796-814).
caagttattccgaagtagt

SEQ ID NO: 712499 - DNA, 19 bp, Mus musculus
  siRNA target sequence for Ms4a8a (NM_022430.1,799-817).
gttattccgaagtagttca

SEQ ID NO: 712500 - DNA, 19 bp, Mus musculus
  siRNA target sequence for Scamp2 (NM_022813.2,116-134).
cggacccagtggacgtaaa

SEQ ID NO: 712501 - DNA, 19 bp, Mus musculus
  siRNA target sequence for Scamp2 (NM_022813.2,427-445).
catgtgcgagacaacaact

SEQ ID NO: 712502 - DNA, 19 bp, Mus musculus
  siRNA target sequence for Scamp2 (NM_022813.2,517-535).
gactaccagcggatttgca

SEQ ID NO: 712503 - DNA, 19 bp, Mus musculus
  siRNA target sequence for Scamp2 (NM_022813.2,692-710).
ggtaccgacccatctacaa

SEQ ID NO: 712504 - DNA, 19 bp, Mus musculus
  siRNA target sequence for Scamp2 (NM_022813.2,767-785).
gtcaaatagggatctactt

SEQ ID NO: 712505 - DNA, 19 bp, Mus musculus
  siRNA target sequence for Scamp2 (NM_022813.2,836-854).
ccctatctacgatgaaaaa

SEQ ID NO: 712506 - DNA, 19 bp, Mus musculus
  siRNA target sequence for Scamp2 (NM_022813.2,837-855).
cctatctacgatgaaaaat

SEQ ID NO: 712507 - DNA, 19 bp, Mus musculus
  siRNA target sequence for Scamp2 (NM_022813.2,885-903).
ggtagtggctggcttcttt

SEQ ID NO: 712508 - DNA, 19 bp, Mus musculus
  siRNA target sequence for Scamp2 (NM_022813.2,886-904).
gtagtggctggcttcttta

SEQ ID NO: 712509 - DNA, 19 bp, Mus musculus
  siRNA target sequence for Tsc1 (NM_022887.1,225-243).
ggcccagttagccaacatt

SEQ ID NO: 712510 - DNA, 19 bp, Mus musculus
  siRNA target sequence for Tsc1 (NM_022887.1,346-364).
gtcaacacgttggttgatt

SEQ ID NO: 712511 - DNA, 19 bp, Mus musculus
  siRNA target sequence for Tsc1 (NM_022887.1,348-366).
caacacgttggttgattat

SEQ ID NO: 712512 - DNA, 19 bp, Mus musculus
  siRNA target sequence for Tsc1 (NM_022887.1,353-371).
cgttggttgattattacct

SEQ ID NO: 712513 - DNA, 19 bp, Mus musculus
  siRNA target sequence for Tsc1 (NM_022887.1,470-488).
ctgctacccgtttatccat

SEQ ID NO: 712514 - DNA, 19 bp, Mus musculus
  siRNA target sequence for Tsc1 (NM_022887.1,494-512).
cgctgctggggcatgttgt

SEQ ID NO: 712515 - DNA, 19 bp, Mus musculus
  siRNA target sequence for Tsc1 (NM_022887.1,561-579).
gccttctttattgaaatgt

SEQ ID NO: 712516 - DNA, 19 bp, Mus musculus
  siRNA target sequence for Tsc1 (NM_022887.1,614-632).
ctggtgtcttggtgttgat

SEQ ID NO: 712517 - DNA, 19 bp, Mus musculus
  siRNA target sequence for Tsc1 (NM_022887.1,669-687).
gcaccttctcgacttcttt

SEQ ID NO: 712518 - DNA, 19 bp, Mus musculus
  siRNA target sequence for Tsc1 (NM_022887.1,673-691).
cttctcgacttctttgaca

SEQ ID NO: 712519 - DNA, 19 bp, Mus musculus
  siRNA target sequence for Tsc1 (NM_022887.1,678-696).
cgacttctttgacatcttt

SEQ ID NO: 712520 - DNA, 19 bp, Mus musculus
  siRNA target sequence for Tsc1 (NM_022887.1,707-725).
cgtcatggtgcctgaagaa

SEQ ID NO: 712521 - DNA, 19 bp, Mus musculus
  siRNA target sequence for Tsc1 (NM_022887.1,731-749).
gccatgtgacagaagtgta

SEQ ID NO: 712522 - DNA, 19 bp, Mus musculus
  siRNA target sequence for Tsc1 (NM_022887.1,770-788).
gtgtttatgccctctttca

SEQ ID NO: 712523 - DNA, 19 bp, Mus musculus
  siRNA target sequence for Tsc1 (NM_022887.1,780-798).
cctctttcaccgcctttat

SEQ ID NO: 712524 - DNA, 19 bp, Mus musculus
  siRNA target sequence for Tsc1 (NM_022887.1,799-817).
gggatgtacccatgtaact

SEQ ID NO: 712525 - DNA, 19 bp, Mus musculus
  siRNA target sequence for Tsc1 (NM_022887.1,829-847).
ctgcgctctcactacagta

SEQ ID NO: 712526 - DNA, 19 bp, Mus musculus
  siRNA target sequence for Tsc1 (NM_022887.1,852-870).
ggaaaacgtggagactttt

SEQ ID NO: 712527 - DNA, 19 bp, Mus musculus
  siRNA target sequence for Tsc1 (NM_022887.1,903-921).
gcgaattcacccggaatta

SEQ ID NO: 712528 - DNA, 19 bp, Mus musculus
  siRNA target sequence for Tsc1 (NM_022887.1,905-923).
gaattcacccggaattagt

SEQ ID NO: 712529 - DNA, 19 bp, Mus musculus
  siRNA target sequence for Tsc1 (NM_022887.1,966-984).
gacattagaaactcatgat

SEQ ID NO: 712530 - DNA, 19 bp, Mus musculus
  siRNA target sequence for Tsc1 (NM_022887.1,977-995).
ctcatgatgttgtaataga

SEQ ID NO: 712531 - DNA, 19 bp, Mus musculus
  siRNA target sequence for Tsc1 (NM_022887.1,979-997).
catgatgttgtaatagagt

SEQ ID NO: 712532 - DNA, 19 bp, Mus musculus
  siRNA target sequence for Tsc1 (NM_022887.1,1032-1050).
gtatgaagatggctattct

SEQ ID NO: 712533 - DNA, 19 bp, Mus musculus
  siRNA target sequence for Tsc1 (NM_022887.1,1163-1181).
gctctcggctgatgttgtt

SEQ ID NO: 712534 - DNA, 19 bp, Mus musculus
  siRNA target sequence for Tsc1 (NM_022887.1,1197-1215).
gctacctcagagtttgagt

SEQ ID NO: 712535 - DNA, 19 bp, Mus musculus
  siRNA target sequence for Tsc1 (NM_022887.1,1198-1216).
ctacctcagagtttgagtt

SEQ ID NO: 712536 - DNA, 19 bp, Mus musculus
  siRNA target sequence for Tsc1 (NM_022887.1,1329-1347).
gtcacatccgtatagtaaa

SEQ ID NO: 712537 - DNA, 19 bp, Mus musculus
  siRNA target sequence for Tsc1 (NM_022887.1,1527-1545).
gtcaaacgaccgaggatta

SEQ ID NO: 712538 - DNA, 19 bp, Mus musculus
  siRNA target sequence for Tsc1 (NM_022887.1,1529-1547).
caaacgaccgaggattaga

SEQ ID NO: 712539 - DNA, 19 bp, Mus musculus
  siRNA target sequence for Tsc1 (NM_022887.1,1562-1580).
gcaaaggttccgttactct

SEQ ID NO: 712540 - DNA, 19 bp, Mus musculus
  siRNA target sequence for Tsc1 (NM_022887.1,1572-1590).
cgttactctgaggaatcta

SEQ ID NO: 712541 - DNA, 19 bp, Mus musculus
  siRNA target sequence for Tsc1 (NM_022887.1,1584-1602).
gaatctacctgatttccta

SEQ ID NO: 712542 - DNA, 19 bp, Mus musculus
  siRNA target sequence for Tsc1 (NM_022887.1,1624-1642).
gacagtatcgagaaagata

SEQ ID NO: 712543 - DNA, 19 bp, Mus musculus
  siRNA target sequence for Tsc1 (NM_022887.1,1628-1646).
gtatcgagaaagataagga

SEQ ID NO: 712544 - DNA, 19 bp, Mus musculus
  siRNA target sequence for Tsc1 (NM_022887.1,1644-1662).
ggaagaagctgcaatatct

SEQ ID NO: 712545 - DNA, 19 bp, Mus musculus
  siRNA target sequence for Tsc1 (NM_022887.1,1645-1663).
gaagaagctgcaatatcta

SEQ ID NO: 712546 - DNA, 19 bp, Mus musculus
  siRNA target sequence for Tsc1 (NM_022887.1,1708-1726).
cctcgagggggctttgact

SEQ ID NO: 712547 - DNA, 19 bp, Mus musculus
  siRNA target sequence for Tsc1 (NM_022887.1,1824-1842).
ctcctccctggacaaacat

SEQ ID NO: 712548 - DNA, 19 bp, Mus musculus
  siRNA target sequence for Tsc1 (NM_022887.1,2009-2027).
ggcagcttcccccatatga

SEQ ID NO: 712549 - DNA, 19 bp, Mus musculus
  siRNA target sequence for Tsc1 (NM_022887.1,2010-2028).
gcagcttcccccatatgat

SEQ ID NO: 712550 - DNA, 19 bp, Mus musculus
  siRNA target sequence for Tsc1 (NM_022887.1,2013-2031).
gcttcccccatatgatcat

SEQ ID NO: 712551 - DNA, 19 bp, Mus musculus
  siRNA target sequence for Tsc1 (NM_022887.1,2018-2036).
ccccatatgatcatctctt

SEQ ID NO: 712552 - DNA, 19 bp, Mus musculus
  siRNA target sequence for Tsc1 (NM_022887.1,2136-2154).
ctctacctccccaatggaa

SEQ ID NO: 712553 - DNA, 19 bp, Mus musculus
  siRNA target sequence for Tsc1 (NM_022887.1,2141-2159).
cctccccaatggaagtact

SEQ ID NO: 712554 - DNA, 19 bp, Mus musculus
  siRNA target sequence for Tsc1 (NM_022887.1,2286-2304).
ccgagaccagttgctttta

SEQ ID NO: 712555 - DNA, 19 bp, Mus musculus
  siRNA target sequence for Tsc1 (NM_022887.1,2421-2439).
gaaagatcagttgaagtta

SEQ ID NO: 712556 - DNA, 19 bp, Mus musculus
  siRNA target sequence for Tsc1 (NM_022887.1,2560-2578).
cagcatgaccgagaagaat

SEQ ID NO: 712557 - DNA, 19 bp, Mus musculus
  siRNA target sequence for Tsc1 (NM_022887.1,2614-2632).
gaggactgcagaaacatga

SEQ ID NO: 712558 - DNA, 19 bp, Mus musculus
  siRNA target sequence for Tsc1 (NM_022887.1,2924-2942).
cctcacagaggcgagtttt

SEQ ID NO: 712559 - DNA, 19 bp, Mus musculus
  siRNA target sequence for Tsc1 (NM_022887.1,2927-2945).
cacagaggcgagttttgga

SEQ ID NO: 712560 - DNA, 19 bp, Mus musculus
  siRNA target sequence for Tsc1 (NM_022887.1,3053-3071).
ggtatgaggctcagagaaa

SEQ ID NO: 712561 - DNA, 19 bp, Mus musculus
  siRNA target sequence for Tsc1 (NM_022887.1,3093-3111).
ggagatcctagacttgtat

SEQ ID NO: 712562 - DNA, 19 bp, Mus musculus
  siRNA target sequence for Tsc1 (NM_022887.1,3108-3126).
gtatggcaggttggaaaaa

SEQ ID NO: 712563 - DNA, 19 bp, Mus musculus
  siRNA target sequence for Tsc1 (NM_022887.1,3184-3202).
gagaggcttgactgttgta

SEQ ID NO: 712564 - DNA, 19 bp, Mus musculus
  siRNA target sequence for Tsc1 (NM_022887.1,3186-3204).
gaggcttgactgttgtagt

SEQ ID NO: 712565 - DNA, 19 bp, Mus musculus
  siRNA target sequence for Tsc1 (NM_022887.1,3189-3207).
gcttgactgttgtagtgat

SEQ ID NO: 712566 - DNA, 19 bp, Mus musculus
  siRNA target sequence for Tsc1 (NM_022887.1,3481-3499).
cgggagctgttccgtaata

SEQ ID NO: 712567 - DNA, 19 bp, Mus musculus
  siRNA target sequence for Tsc1 (NM_022887.1,3482-3500).
gggagctgttccgtaataa

SEQ ID NO: 712568 - DNA, 19 bp, Mus musculus
  siRNA target sequence for Tsc1 (NM_022887.1,3484-3502).
gagctgttccgtaataaga

SEQ ID NO: 712569 - DNA, 19 bp, Mus musculus
  siRNA target sequence for Tsc1 (NM_022887.1,3603-3621).
gacttccctgagtctagat

SEQ ID NO: 712570 - DNA, 19 bp, Mus musculus
  siRNA target sequence for Tsc1 (NM_022887.1,3638-3656).
ccccaaactcagacaatgt

SEQ ID NO: 712571 - DNA, 19 bp, Mus musculus
  siRNA target sequence for Tsc1 (NM_022887.1,3666-3684).
ccacatcatggactacaat

SEQ ID NO: 712572 - DNA, 19 bp, Mus musculus
  siRNA target sequence for Wbscr5 (NM_022964.1,170-188).
ggccggtgtcgggattatt

SEQ ID NO: 712573 - DNA, 19 bp, Mus musculus
  siRNA target sequence for Wbscr5 (NM_022964.1,173-191).
cggtgtcgggattattgct

SEQ ID NO: 712574 - DNA, 19 bp, Mus musculus
  siRNA target sequence for Wbscr5 (NM_022964.1,235-253).
cgtccaggagtgaagagaa

SEQ ID NO: 712575 - DNA, 19 bp, Mus musculus
  siRNA target sequence for Wbscr5 (NM_022964.1,302-320).
cagctgcggctcagacata

SEQ ID NO: 712576 - DNA, 19 bp, Mus musculus
  siRNA target sequence for Wbscr5 (NM_022964.1,304-322).
gctgcggctcagacatact

SEQ ID NO: 712577 - DNA, 19 bp, Mus musculus
  siRNA target sequence for Wbscr5 (NM_022964.1,365-383).
ctccaaacaagtcatttga

SEQ ID NO: 712578 - DNA, 19 bp, Mus musculus
  siRNA target sequence for Wbscr5 (NM_022964.1,490-508).
cccatccctacaaactact

SEQ ID NO: 712579 - DNA, 19 bp, Mus musculus
  siRNA target sequence for Wbscr5 (NM_022964.1,491-509).
ccatccctacaaactacta

SEQ ID NO: 712580 - DNA, 19 bp, Mus musculus
  siRNA target sequence for Wbscr5 (NM_022964.1,496-514).
cctacaaactactacaact

SEQ ID NO: 712581 - DNA, 19 bp, Mus musculus
  siRNA target sequence for Wbscr5 (NM_022964.1,536-554).
cagaagacgacgattccaa

SEQ ID NO: 712582 - DNA, 19 bp, Mus musculus
  siRNA target sequence for Wbscr5 (NM_022964.1,551-569).
ccaactcctacgagaatgt

SEQ ID NO: 712583 - DNA, 19 bp, Mus musculus
  siRNA target sequence for Nup98 (NM_022979.1,224-242).
gactagtggaggagcattt

SEQ ID NO: 712584 - DNA, 19 bp, Mus musculus
  siRNA target sequence for Nup98 (NM_022979.1,269-287).
caatactggaggcttattt

SEQ ID NO: 712585 - DNA, 19 bp, Mus musculus
  siRNA target sequence for Nup98 (NM_022979.1,274-292).
ctggaggcttatttggaaa

SEQ ID NO: 712586 - DNA, 19 bp, Mus musculus
  siRNA target sequence for Nup98 (NM_022979.1,302-320).
caaaccaggaggattattt

SEQ ID NO: 712587 - DNA, 19 bp, Mus musculus
  siRNA target sequence for Nup98 (NM_022979.1,306-324).
ccaggaggattatttggta

SEQ ID NO: 712588 - DNA, 19 bp, Mus musculus
  siRNA target sequence for Nup98 (NM_022979.1,388-406).
gaacatcaaatagcttatt

SEQ ID NO: 712589 - DNA, 19 bp, Mus musculus
  siRNA target sequence for Nup98 (NM_022979.1,418-436).
gtaccgggaccagtctttt

SEQ ID NO: 712590 - DNA, 19 bp, Mus musculus
  siRNA target sequence for Nup98 (NM_022979.1,422-440).
cgggaccagtcttttctca

SEQ ID NO: 712591 - DNA, 19 bp, Mus musculus
  siRNA target sequence for Nup98 (NM_022979.1,423-441).
gggaccagtcttttctcat

SEQ ID NO: 712592 - DNA, 19 bp, Mus musculus
  siRNA target sequence for Nup98 (NM_022979.1,569-587).
cctttttgggccaagtagt

SEQ ID NO: 712593 - DNA, 19 bp, Mus musculus
  siRNA target sequence for Nup98 (NM_022979.1,627-645).
cctcccactggtacagata

SEQ ID NO: 712594 - DNA, 19 bp, Mus musculus
  siRNA target sequence for Nup98 (NM_022979.1,630-648).
cccactggtacagatacta

SEQ ID NO: 712595 - DNA, 19 bp, Mus musculus
  siRNA target sequence for Nup98 (NM_022979.1,631-649).
ccactggtacagatactat

SEQ ID NO: 712596 - DNA, 19 bp, Mus musculus
  siRNA target sequence for Nup98 (NM_022979.1,657-675).
gctggagttagcactaaca

SEQ ID NO: 712597 - DNA, 19 bp, Mus musculus
  siRNA target sequence for Nup98 (NM_022979.1,727-745).
cattagaggaactacgttt

SEQ ID NO: 712598 - DNA, 19 bp, Mus musculus
  siRNA target sequence for Nup98 (NM_022979.1,857-875).
ctcctccaccactaattca

SEQ ID NO: 712599 - DNA, 19 bp, Mus musculus
  siRNA target sequence for Nup98 (NM_022979.1,866-884).
cactaattcagccttttca

SEQ ID NO: 712600 - DNA, 19 bp, Mus musculus
  siRNA target sequence for Nup98 (NM_022979.1,868-886).
ctaattcagccttttcata

SEQ ID NO: 712601 - DNA, 19 bp, Mus musculus
  siRNA target sequence for Nup98 (NM_022979.1,946-964).
gtctctttggccaacagaa

SEQ ID NO: 712602 - DNA, 19 bp, Mus musculus
  siRNA target sequence for Nup98 (NM_022979.1,979-997).
gtctcttcagcaaaccatt

SEQ ID NO: 712603 - DNA, 19 bp, Mus musculus
  siRNA target sequence for Nup98 (NM_022979.1,1019-1037).
gaatactggcttttccttt

SEQ ID NO: 712604 - DNA, 19 bp, Mus musculus
  siRNA target sequence for Nup98 (NM_022979.1,1056-1074).
ggacagccaagcaccaata

SEQ ID NO: 712605 - DNA, 19 bp, Mus musculus
  siRNA target sequence for Nup98 (NM_022979.1,1070-1088).
caatactatgggcctattt

SEQ ID NO: 712606 - DNA, 19 bp, Mus musculus
  siRNA target sequence for Nup98 (NM_022979.1,1142-1160).
cagcactgggacagcattt

SEQ ID NO: 712607 - DNA, 19 bp, Mus musculus
  siRNA target sequence for Nup98 (NM_022979.1,1163-1181).
gacaggaacaggtctcttt

SEQ ID NO: 712608 - DNA, 19 bp, Mus musculus
  siRNA target sequence for Nup98 (NM_022979.1,1184-1202).
gcagcccaatactggattt

SEQ ID NO: 712609 - DNA, 19 bp, Mus musculus
  siRNA target sequence for Nup98 (NM_022979.1,1187-1205).
gcccaatactggatttggt

SEQ ID NO: 712610 - DNA, 19 bp, Mus musculus
  siRNA target sequence for Nup98 (NM_022979.1,1229-1247).
caataacaagcttacaact

SEQ ID NO: 712611 - DNA, 19 bp, Mus musculus
  siRNA target sequence for Nup98 (NM_022979.1,1299-1317).
ctcttcggtaacaaaccaa

SEQ ID NO: 712612 - DNA, 19 bp, Mus musculus
  siRNA target sequence for Nup98 (NM_022979.1,1319-1337).
cctgactttaggaaccaat

SEQ ID NO: 712613 - DNA, 19 bp, Mus musculus
  siRNA target sequence for Nup98 (NM_022979.1,1322-1340).
gactttaggaaccaataca

SEQ ID NO: 712614 - DNA, 19 bp, Mus musculus
  siRNA target sequence for Nup98 (NM_022979.1,1356-1374).
gggtttggcacaaataaca

SEQ ID NO: 712615 - DNA, 19 bp, Mus musculus
  siRNA target sequence for Nup98 (NM_022979.1,1358-1376).
gtttggcacaaataacagt

SEQ ID NO: 712616 - DNA, 19 bp, Mus musculus
  siRNA target sequence for Nup98 (NM_022979.1,1381-1399).
gcagtatttttggaagtaa

SEQ ID NO: 712617 - DNA, 19 bp, Mus musculus
  siRNA target sequence for Nup98 (NM_022979.1,1580-1598).
ggccccagtagctttgaca

SEQ ID NO: 712618 - DNA, 19 bp, Mus musculus
  siRNA target sequence for Nup98 (NM_022979.1,1644-1662).
ctcaatagcctaacatact

SEQ ID NO: 712619 - DNA, 19 bp, Mus musculus
  siRNA target sequence for Nup98 (NM_022979.1,1646-1664).
caatagcctaacatactca

SEQ ID NO: 712620 - DNA, 19 bp, Mus musculus
  siRNA target sequence for Nup98 (NM_022979.1,1680-1698).
cccctcttccggaatccta

SEQ ID NO: 712621 - DNA, 19 bp, Mus musculus
  siRNA target sequence for Nup98 (NM_022979.1,1761-1779).
cttacaacacctactcatt

SEQ ID NO: 712622 - DNA, 19 bp, Mus musculus
  siRNA target sequence for Nup98 (NM_022979.1,1765-1783).
caacacctactcattataa

SEQ ID NO: 712623 - DNA, 19 bp, Mus musculus
  siRNA target sequence for Nup98 (NM_022979.1,1768-1786).
cacctactcattataaact

SEQ ID NO: 712624 - DNA, 19 bp, Mus musculus
  siRNA target sequence for Nup98 (NM_022979.1,1815-1833).
ccaaaggctttgcaaacaa

SEQ ID NO: 712625 - DNA, 19 bp, Mus musculus
  siRNA target sequence for Nup98 (NM_022979.1,1899-1917).
gcattcatgcctaaaaaga

SEQ ID NO: 712626 - DNA, 19 bp, Mus musculus
  siRNA target sequence for Nup98 (NM_022979.1,1944-1962).
ctcaacaatagcaatctct

SEQ ID NO: 712627 - DNA, 19 bp, Mus musculus
  siRNA target sequence for Nup98 (NM_022979.1,2089-2107).
ctcttgtatcacgatttta

SEQ ID NO: 712628 - DNA, 19 bp, Mus musculus
  siRNA target sequence for Nup98 (NM_022979.1,2091-2109).
cttgtatcacgattttaca

SEQ ID NO: 712629 - DNA, 19 bp, Mus musculus
  siRNA target sequence for Nup98 (NM_022979.1,2094-2112).
gtatcacgattttacacta

SEQ ID NO: 712630 - DNA, 19 bp, Mus musculus
  siRNA target sequence for Nup98 (NM_022979.1,2100-2118).
cgattttacactaatccta

SEQ ID NO: 712631 - DNA, 19 bp, Mus musculus
  siRNA target sequence for Nup98 (NM_022979.1,2101-2119).
gattttacactaatcctat

SEQ ID NO: 712632 - DNA, 19 bp, Mus musculus
  siRNA target sequence for Nup98 (NM_022979.1,2147-2165).
gagtgttggaaacaaaaat

SEQ ID NO: 712633 - DNA, 19 bp, Mus musculus
  siRNA target sequence for Nup98 (NM_022979.1,2214-2232).
gctgctttgcgcaatggat

SEQ ID NO: 712634 - DNA, 19 bp, Mus musculus
  siRNA target sequence for Nup98 (NM_022979.1,2257-2275).
cattccatgatgagtcatt

SEQ ID NO: 712635 - DNA, 19 bp, Mus musculus
  siRNA target sequence for Nup98 (NM_022979.1,2330-2348).
cattgttctcacaaaagtt

SEQ ID NO: 712636 - DNA, 19 bp, Mus musculus
  siRNA target sequence for Nup98 (NM_022979.1,2368-2386).
ctatggatgaccttgctaa

SEQ ID NO: 712637 - DNA, 19 bp, Mus musculus
  siRNA target sequence for Nup98 (NM_022979.1,2372-2390).
ggatgaccttgctaaaatt

SEQ ID NO: 712638 - DNA, 19 bp, Mus musculus
  siRNA target sequence for Nup98 (NM_022979.1,2373-2391).
gatgaccttgctaaaatta

SEQ ID NO: 712639 - DNA, 19 bp, Mus musculus
  siRNA target sequence for Nup98 (NM_022979.1,2423-2441).
cttcaccattggtcgtaaa

SEQ ID NO: 712640 - DNA, 19 bp, Mus musculus
  siRNA target sequence for Nup98 (NM_022979.1,2426-2444).
caccattggtcgtaaagga

SEQ ID NO: 712641 - DNA, 19 bp, Mus musculus
  siRNA target sequence for Nup98 (NM_022979.1,2429-2447).
cattggtcgtaaaggatat

SEQ ID NO: 712642 - DNA, 19 bp, Mus musculus
  siRNA target sequence for Nup98 (NM_022979.1,2518-2536).
ggaaagaagttattgtcta

SEQ ID NO: 712643 - DNA, 19 bp, Mus musculus
  siRNA target sequence for Nup98 (NM_022979.1,2565-2583).
ggtgaagggctaaatagga

SEQ ID NO: 712644 - DNA, 19 bp, Mus musculus
  siRNA target sequence for Nup98 (NM_022979.1,2566-2584).
gtgaagggctaaataggaa

SEQ ID NO: 712645 - DNA, 19 bp, Mus musculus
  siRNA target sequence for Nup98 (NM_022979.1,2581-2599).
ggaaggctgaagttacttt

SEQ ID NO: 712646 - DNA, 19 bp, Mus musculus
  siRNA target sequence for Nup98 (NM_022979.1,2585-2603).
ggctgaagttactttggat

SEQ ID NO: 712647 - DNA, 19 bp, Mus musculus
  siRNA target sequence for Nup98 (NM_022979.1,2604-2622).
ggagtttggccaacagata

SEQ ID NO: 712648 - DNA, 19 bp, Mus musculus
  siRNA target sequence for Nup98 (NM_022979.1,2607-2625).
gtttggccaacagataaaa

SEQ ID NO: 712649 - DNA, 19 bp, Mus musculus
  siRNA target sequence for Nup98 (NM_022979.1,2626-2644).
catcccggtgtttaataaa

SEQ ID NO: 712650 - DNA, 19 bp, Mus musculus
  siRNA target sequence for Nup98 (NM_022979.1,2650-2668).
cagatcgacttgctgatat

SEQ ID NO: 712651 - DNA, 19 bp, Mus musculus
  siRNA target sequence for Nup98 (NM_022979.1,2652-2670).
gatcgacttgctgatatca

SEQ ID NO: 712652 - DNA, 19 bp, Mus musculus
  siRNA target sequence for Nup98 (NM_022979.1,2655-2673).
cgacttgctgatatcaact

SEQ ID NO: 712653 - DNA, 19 bp, Mus musculus
  siRNA target sequence for Nup98 (NM_022979.1,2656-2674).
gacttgctgatatcaacta

SEQ ID NO: 712654 - DNA, 19 bp, Mus musculus
  siRNA target sequence for Nup98 (NM_022979.1,2669-2687).
caactatgaggggagatta

SEQ ID NO: 712655 - DNA, 19 bp, Mus musculus
  siRNA target sequence for Nup98 (NM_022979.1,2723-2741).
ggagtatcggcctgaaact

SEQ ID NO: 712656 - DNA, 19 bp, Mus musculus
  siRNA target sequence for Nup98 (NM_022979.1,2743-2761).
gttcttgggtatttaaggt

SEQ ID NO: 712657 - DNA, 19 bp, Mus musculus
  siRNA target sequence for Nup98 (NM_022979.1,2811-2829).
gaacacccacccaaaacga

SEQ ID NO: 712658 - DNA, 19 bp, Mus musculus
  siRNA target sequence for Nup98 (NM_022979.1,2970-2988).
gacagcgacatggtagata

SEQ ID NO: 712659 - DNA, 19 bp, Mus musculus
  siRNA target sequence for Nup98 (NM_022979.1,3053-3071).
gtctgcttcaacgcatatt

SEQ ID NO: 712660 - DNA, 19 bp, Mus musculus
  siRNA target sequence for Nup98 (NM_022979.1,3057-3075).
gcttcaacgcatattgcat

SEQ ID NO: 712661 - DNA, 19 bp, Mus musculus
  siRNA target sequence for Nup98 (NM_022979.1,3085-3103).
gaattaatccacatgtttt

SEQ ID NO: 712662 - DNA, 19 bp, Mus musculus
  siRNA target sequence for Nup98 (NM_022979.1,3110-3128).
catgaaagcatcattgctt

SEQ ID NO: 712663 - DNA, 19 bp, Mus musculus
  siRNA target sequence for Nup98 (NM_022979.1,3267-3285).
gggttgctgcaatcaaaat

SEQ ID NO: 712664 - DNA, 19 bp, Mus musculus
  siRNA target sequence for Nup98 (NM_022979.1,3288-3306).
gcaagtggaacttttcttt

SEQ ID NO: 712665 - DNA, 19 bp, Mus musculus
  siRNA target sequence for Nup98 (NM_022979.1,3346-3364).
catcatctcgcatgaacat

SEQ ID NO: 712666 - DNA, 19 bp, Mus musculus
  siRNA target sequence for Nup98 (NM_022979.1,3430-3448).
cccctgaggttcagctaaa

SEQ ID NO: 712667 - DNA, 19 bp, Mus musculus
  siRNA target sequence for Nup98 (NM_022979.1,3474-3492).
ggcctagtccctcttgaaa

SEQ ID NO: 712668 - DNA, 19 bp, Mus musculus
  siRNA target sequence for Nup98 (NM_022979.1,3475-3493).
gcctagtccctcttgaaaa

SEQ ID NO: 712669 - DNA, 19 bp, Mus musculus
  siRNA target sequence for Nup98 (NM_022979.1,3486-3504).
cttgaaaaatccattacat

SEQ ID NO: 712670 - DNA, 19 bp, Mus musculus
  siRNA target sequence for Nup98 (NM_022979.1,3508-3526).
gcaaggggaagctcttgat

SEQ ID NO: 712671 - DNA, 19 bp, Mus musculus
  siRNA target sequence for Nup98 (NM_022979.1,3574-3592).
ccaactggactcttgctaa

SEQ ID NO: 712672 - DNA, 19 bp, Mus musculus
  siRNA target sequence for Nup98 (NM_022979.1,3575-3593).
caactggactcttgctaat

SEQ ID NO: 712673 - DNA, 19 bp, Mus musculus
  siRNA target sequence for Nup98 (NM_022979.1,3589-3607).
ctaatagtggagaacaact

SEQ ID NO: 712674 - DNA, 19 bp, Mus musculus
  siRNA target sequence for Nup98 (NM_022979.1,3613-3631).
gctcccatgaactggaaaa

SEQ ID NO: 712675 - DNA, 19 bp, Mus musculus
  siRNA target sequence for Nup98 (NM_022979.1,3617-3635).
ccatgaactggaaaatcat

SEQ ID NO: 712676 - DNA, 19 bp, Mus musculus
  siRNA target sequence for Nup98 (NM_022979.1,3633-3651).
catcaggttgccgattcta

SEQ ID NO: 712677 - DNA, 19 bp, Mus musculus
  siRNA target sequence for Nup98 (NM_022979.1,3638-3656).
ggttgccgattctatggaa

SEQ ID NO: 712678 - DNA, 19 bp, Mus musculus
  siRNA target sequence for Nup98 (NM_022979.1,3639-3657).
gttgccgattctatggaat

SEQ ID NO: 712679 - DNA, 19 bp, Mus musculus
  siRNA target sequence for Nup98 (NM_022979.1,3670-3688).
ccaatccagtagctgttaa

SEQ ID NO: 712680 - DNA, 19 bp, Mus musculus
  siRNA target sequence for Nup98 (NM_022979.1,3675-3693).
ccagtagctgttaaatcgt

SEQ ID NO: 712681 - DNA, 19 bp, Mus musculus
  siRNA target sequence for Zic5 (NM_022987.1,393-411).
cccgccagcgctgagatta

SEQ ID NO: 712682 - DNA, 19 bp, Mus musculus
  siRNA target sequence for Zic5 (NM_022987.1,1259-1277).
gctacggagccgtgaactt

SEQ ID NO: 712683 - DNA, 19 bp, Mus musculus
  siRNA target sequence for Zic5 (NM_022987.1,1260-1278).
ctacggagccgtgaactta

SEQ ID NO: 712684 - DNA, 19 bp, Mus musculus
  siRNA target sequence for 2210418I02Rik (NM_022995.2,708-726).
ccagcggagccgattccaa

SEQ ID NO: 712685 - DNA, 19 bp, Mus musculus
  siRNA target sequence for 2210418I02Rik (NM_022995.2,737-755).
cctacctgcagcacgaaat

SEQ ID NO: 712686 - DNA, 19 bp, Mus musculus
  siRNA target sequence for Gfer (NM_023040.1,101-119).
cagaagcgggacatcaagt

SEQ ID NO: 712687 - DNA, 19 bp, Mus musculus
  siRNA target sequence for Gfer (NM_023040.1,103-121).
gaagcgggacatcaagttt

SEQ ID NO: 712688 - DNA, 19 bp, Mus musculus
  siRNA target sequence for Gfer (NM_023040.1,205-223).
caggcccacgccagaacaa

SEQ ID NO: 712689 - DNA, 19 bp, Mus musculus
  siRNA target sequence for Gfer (NM_023040.1,235-253).
ggcccagttcatacatata

SEQ ID NO: 712690 - DNA, 19 bp, Mus musculus
  siRNA target sequence for Gfer (NM_023040.1,236-254).
gcccagttcatacatatat

SEQ ID NO: 712691 - DNA, 19 bp, Mus musculus
  siRNA target sequence for Gfer (NM_023040.1,237-255).
cccagttcatacatatatt

SEQ ID NO: 712692 - DNA, 19 bp, Mus musculus
  siRNA target sequence for Gfer (NM_023040.1,327-345).
caagcactcgagtatcctt

SEQ ID NO: 712693 - DNA, 19 bp, Mus musculus
  siRNA target sequence for Gfer (NM_023040.1,392-410).
ggcaagcctgattttgact

SEQ ID NO: 712694 - DNA, 19 bp, Mus musculus
  siRNA target sequence for 1810009M01Rik (NM_023056.2,669-687).
gactgtgaatggagtcaaa

SEQ ID NO: 712695 - DNA, 19 bp, Mus musculus
  siRNA target sequence for 1810009M01Rik (NM_023056.2,671-689).
ctgtgaatggagtcaaagt

SEQ ID NO: 712696 - DNA, 19 bp, Mus musculus
  siRNA target sequence for 1810009M01Rik (NM_023056.2,832-850).
ctaggggtgacccagatat

SEQ ID NO: 712697 - DNA, 19 bp, Mus musculus
  siRNA target sequence for 1810009M01Rik (NM_023056.2,836-854).
gggtgacccagatattgct

SEQ ID NO: 712698 - DNA, 19 bp, Mus musculus
  siRNA target sequence for 1810009M01Rik (NM_023056.2,938-956).
cggggtctgtggcaattct

SEQ ID NO: 712699 - DNA, 19 bp, Mus musculus
  siRNA target sequence for 1810009M01Rik (NM_023056.2,939-957).
ggggtctgtggcaattcta

SEQ ID NO: 712700 - DNA, 19 bp, Mus musculus
  siRNA target sequence for 1810009M01Rik (NM_023056.2,968-986).
gtactattgtccatgagaa

SEQ ID NO: 712701 - DNA, 19 bp, Mus musculus
  siRNA target sequence for 1810009M01Rik (NM_023056.2,1000-1018).
ctgtccggccaggtatcat

SEQ ID NO: 712702 - DNA, 19 bp, Mus musculus
  siRNA target sequence for 1810009M01Rik (NM_023056.2,1002-1020).
gtccggccaggtatcatgt

SEQ ID NO: 712703 - DNA, 19 bp, Mus musculus
  siRNA target sequence for 1810009M01Rik (NM_023056.2,1066-1084).
ctgggtgtgaacagcttaa

SEQ ID NO: 712704 - DNA, 19 bp, Mus musculus
  siRNA target sequence for 1810009M01Rik (NM_023056.2,1069-1087).
ggtgtgaacagcttaatca

SEQ ID NO: 712705 - DNA, 19 bp, Mus musculus
  siRNA target sequence for 1810009M01Rik (NM_023056.2,1103-1121).
cctactacgtcgagatctt

SEQ ID NO: 712706 - DNA, 19 bp, Mus musculus
  siRNA target sequence for 1810009M01Rik (NM_023056.2,1104-1122).
ctactacgtcgagatcttt

SEQ ID NO: 712707 - DNA, 19 bp, Mus musculus
  siRNA target sequence for 1810009M01Rik (NM_023056.2,1171-1189).
gtgcgatacagtgatgatt

SEQ ID NO: 712708 - DNA, 19 bp, Mus musculus
  siRNA target sequence for 1810009M01Rik (NM_023056.2,1211-1229).
gcagagagtacctgaacat

SEQ ID NO: 712709 - DNA, 19 bp, Mus musculus
  siRNA target sequence for 1810009M01Rik (NM_023056.2,1214-1232).
gagagtacctgaacatgat

SEQ ID NO: 712710 - DNA, 19 bp, Mus musculus
  siRNA target sequence for 1810009M01Rik (NM_023056.2,1277-1295).
gtatcctggagattgttgt

SEQ ID NO: 712711 - DNA, 19 bp, Mus musculus
  siRNA target sequence for 1810009M01Rik (NM_023056.2,1313-1331).
gactaagtctccgaagtat

SEQ ID NO: 712712 - DNA, 19 bp, Mus musculus
  siRNA target sequence for 1810009M01Rik (NM_023056.2,1315-1333).
ctaagtctccgaagtatgt

SEQ ID NO: 712713 - DNA, 19 bp, Mus musculus
  siRNA target sequence for Mcam (NM_023061.1,147-165).
gcagcacagcccttctcaa

SEQ ID NO: 712714 - DNA, 19 bp, Mus musculus
  siRNA target sequence for Mcam (NM_023061.1,179-197).
cgggcctcaggcaacttca

SEQ ID NO: 712715 - DNA, 19 bp, Mus musculus
  siRNA target sequence for Mcam (NM_023061.1,198-216).
gccaagtggactggttttt

SEQ ID NO: 712716 - DNA, 19 bp, Mus musculus
  siRNA target sequence for Mcam (NM_023061.1,200-218).
caagtggactggtttttga

SEQ ID NO: 712717 - DNA, 19 bp, Mus musculus
  siRNA target sequence for Mcam (NM_023061.1,348-366).
cccatgatgagcgaatgtt

SEQ ID NO: 712718 - DNA, 19 bp, Mus musculus
  siRNA target sequence for Mcam (NM_023061.1,359-377).
cgaatgttcctgtgtaaga

SEQ ID NO: 712719 - DNA, 19 bp, Mus musculus
  siRNA target sequence for Mcam (NM_023061.1,429-447).
ccccagaggaaccaactat

SEQ ID NO: 712720 - DNA, 19 bp, Mus musculus
  siRNA target sequence for Mcam (NM_023061.1,647-665).
ctgagtgcacgcctagtta

SEQ ID NO: 712721 - DNA, 19 bp, Mus musculus
  siRNA target sequence for Mcam (NM_023061.1,651-669).
gtgcacgcctagttaagga

SEQ ID NO: 712722 - DNA, 19 bp, Mus musculus
  siRNA target sequence for Mcam (NM_023061.1,671-689).
gacaaagatgcccagtttt

SEQ ID NO: 712723 - DNA, 19 bp, Mus musculus
  siRNA target sequence for Mcam (NM_023061.1,818-836).
ggggatcatgtgacaatca

SEQ ID NO: 712724 - DNA, 19 bp, Mus musculus
  siRNA target sequence for Mcam (NM_023061.1,860-878).
caaccccacttcactatca

SEQ ID NO: 712725 - DNA, 19 bp, Mus musculus
  siRNA target sequence for Mcam (NM_023061.1,1058-1076).
gatgttcaagtgaatccaa

SEQ ID NO: 712726 - DNA, 19 bp, Mus musculus
  siRNA target sequence for Mcam (NM_023061.1,1114-1132).
gacctgcgaggcagaaagt

SEQ ID NO: 712727 - DNA, 19 bp, Mus musculus
  siRNA target sequence for Mcam (NM_023061.1,1116-1134).
cctgcgaggcagaaagtaa

SEQ ID NO: 712728 - DNA, 19 bp, Mus musculus
  siRNA target sequence for Mcam (NM_023061.1,1191-1209).
gtcccgtcctccagctaaa

SEQ ID NO: 712729 - DNA, 19 bp, Mus musculus
  siRNA target sequence for Mcam (NM_023061.1,1193-1211).
cccgtcctccagctaaaca

SEQ ID NO: 712730 - DNA, 19 bp, Mus musculus
  siRNA target sequence for Mcam (NM_023061.1,1194-1212).
ccgtcctccagctaaacaa

SEQ ID NO: 712731 - DNA, 19 bp, Mus musculus
  siRNA target sequence for Mcam (NM_023061.1,1226-1244).
gcagggggacggtatctct

SEQ ID NO: 712732 - DNA, 19 bp, Mus musculus
  siRNA target sequence for Mcam (NM_023061.1,1265-1283).
gttcctggcttgaatcgta

SEQ ID NO: 712733 - DNA, 19 bp, Mus musculus
  siRNA target sequence for Mcam (NM_023061.1,1407-1425).
ccatctcctggaatgtcaa

SEQ ID NO: 712734 - DNA, 19 bp, Mus musculus
  siRNA target sequence for Mcam (NM_023061.1,1423-1441).
caatggttcggcaactgaa

SEQ ID NO: 712735 - DNA, 19 bp, Mus musculus
  siRNA target sequence for Mcam (NM_023061.1,1747-1765).
gctgggtgctgctctctat

SEQ ID NO: 712736 - DNA, 19 bp, Mus musculus
  siRNA target sequence for Mcam (NM_023061.1,1748-1766).
ctgggtgctgctctctatt

SEQ ID NO: 712737 - DNA, 19 bp, Mus musculus
  siRNA target sequence for Mcam (NM_023061.1,1794-1812).
gtggacgctcgggaaaaca

SEQ ID NO: 712738 - DNA, 19 bp, Mus musculus
  siRNA target sequence for Mcam (NM_023061.1,1829-1847).
ccgactcgtaagagtgaat

SEQ ID NO: 712739 - DNA, 19 bp, Mus musculus
  siRNA target sequence for Mcam (NM_023061.1,1830-1848).
cgactcgtaagagtgaatt

SEQ ID NO: 712740 - DNA, 19 bp, Mus musculus
  siRNA target sequence for Mcam (NM_023061.1,1833-1851).
ctcgtaagagtgaatttgt

SEQ ID NO: 712741 - DNA, 19 bp, Mus musculus
  siRNA target sequence for 1700021K02Rik (NM_023064.1,371-389).
gcgagtgactcatatccaa

SEQ ID NO: 712742 - DNA, 19 bp, Mus musculus
  siRNA target sequence for 1700021K02Rik (NM_023064.1,377-395).
gactcatatccaagttaca

SEQ ID NO: 712743 - DNA, 19 bp, Mus musculus
  siRNA target sequence for 1700021K02Rik (NM_023064.1,627-645).
cggaacccccagctttcta

SEQ ID NO: 712744 - DNA, 19 bp, Mus musculus
  siRNA target sequence for 1700021K02Rik (NM_023064.1,687-705).
cgagtgactgtcttcacta

SEQ ID NO: 712745 - DNA, 19 bp, Mus musculus
  siRNA target sequence for 1700021K02Rik (NM_023064.1,731-749).
ggttggtgttgcacaaaga

SEQ ID NO: 712746 - DNA, 19 bp, Mus musculus
  siRNA target sequence for Asph (NM_023066.1,312-330).
gcacggaggacacaagaat

SEQ ID NO: 712747 - DNA, 19 bp, Mus musculus
  siRNA target sequence for Asph (NM_023066.1,422-440).
ggtttgacttggtcgatta

SEQ ID NO: 712748 - DNA, 19 bp, Mus musculus
  siRNA target sequence for Asph (NM_023066.1,423-441).
gtttgacttggtcgattat

SEQ ID NO: 712749 - DNA, 19 bp, Mus musculus
  siRNA target sequence for Asph (NM_023066.1,455-473).
gaaaactaggagtctatga

SEQ ID NO: 712750 - DNA, 19 bp, Mus musculus
  siRNA target sequence for Asph (NM_023066.1,499-517).
gtggatgatgccaaagttt

SEQ ID NO: 712751 - DNA, 19 bp, Mus musculus
  siRNA target sequence for Asph (NM_023066.1,657-675).
ccttcttcaggaatcagta

SEQ ID NO: 712752 - DNA, 19 bp, Mus musculus
  siRNA target sequence for Asph (NM_023066.1,752-770).
ccgacagtgatgacagatt

SEQ ID NO: 712753 - DNA, 19 bp, Mus musculus
  siRNA target sequence for Asph (NM_023066.1,753-771).
cgacagtgatgacagattt

SEQ ID NO: 712754 - DNA, 19 bp, Mus musculus
  siRNA target sequence for Asph (NM_023066.1,786-804).
cgggacagttcatgaagaa

SEQ ID NO: 712755 - DNA, 19 bp, Mus musculus
  siRNA target sequence for Asph (NM_023066.1,839-857).
cgcagaaccatccaaatga

SEQ ID NO: 712756 - DNA, 19 bp, Mus musculus
  siRNA target sequence for Asph (NM_023066.1,870-888).
gacgaatgagcaggaaaat

SEQ ID NO: 712757 - DNA, 19 bp, Mus musculus
  siRNA target sequence for Asph (NM_023066.1,993-1011).
cgaaggggtcgagatttca

SEQ ID NO: 712758 - DNA, 19 bp, Mus musculus
  siRNA target sequence for Asph (NM_023066.1,998-1016).
gggtcgagatttcagataa

SEQ ID NO: 712759 - DNA, 19 bp, Mus musculus
  siRNA target sequence for Asph (NM_023066.1,1000-1018).
gtcgagatttcagataaca

SEQ ID NO: 712760 - DNA, 19 bp, Mus musculus
  siRNA target sequence for Asph (NM_023066.1,1107-1125).
gcctaaacttctgaacaaa

SEQ ID NO: 712761 - DNA, 19 bp, Mus musculus
  siRNA target sequence for Asph (NM_023066.1,1117-1135).
ctgaacaaatttgataaga

SEQ ID NO: 712762 - DNA, 19 bp, Mus musculus
  siRNA target sequence for Asph (NM_023066.1,1168-1186).
ctccggaaaaggggtaaaa

SEQ ID NO: 712763 - DNA, 19 bp, Mus musculus
  siRNA target sequence for Asph (NM_023066.1,1398-1416).
ggaacggcagcagtttcta

SEQ ID NO: 712764 - DNA, 19 bp, Mus musculus
  siRNA target sequence for Asph (NM_023066.1,1467-1485).
ccctagtgatactacctta

SEQ ID NO: 712765 - DNA, 19 bp, Mus musculus
  siRNA target sequence for Asph (NM_023066.1,1499-1517).
gcgtaggatacctcttgtt

SEQ ID NO: 712766 - DNA, 19 bp, Mus musculus
  siRNA target sequence for Asph (NM_023066.1,1532-1550).
gtgccaagaaggtttacga

SEQ ID NO: 712767 - DNA, 19 bp, Mus musculus
  siRNA target sequence for Asph (NM_023066.1,1557-1575).
gctaaatgtgacaccaaat

SEQ ID NO: 712768 - DNA, 19 bp, Mus musculus
  siRNA target sequence for Asph (NM_023066.1,1580-1598).
gcttcgctaaagtgcatta

SEQ ID NO: 712769 - DNA, 19 bp, Mus musculus
  siRNA target sequence for Asph (NM_023066.1,1633-1651).
gagagcattccctacttaa

SEQ ID NO: 712770 - DNA, 19 bp, Mus musculus
  siRNA target sequence for Asph (NM_023066.1,1637-1655).
gcattccctacttaaagga

SEQ ID NO: 712771 - DNA, 19 bp, Mus musculus
  siRNA target sequence for Asph (NM_023066.1,1638-1656).
cattccctacttaaaggaa

SEQ ID NO: 712772 - DNA, 19 bp, Mus musculus
  siRNA target sequence for Asph (NM_023066.1,1682-1700).
cggatgatggccggtttta

SEQ ID NO: 712773 - DNA, 19 bp, Mus musculus
  siRNA target sequence for Asph (NM_023066.1,1801-1819).
cgttccctctacaatgtga

SEQ ID NO: 712774 - DNA, 19 bp, Mus musculus
  siRNA target sequence for Asph (NM_023066.1,1802-1820).
gttccctctacaatgtgaa

SEQ ID NO: 712775 - DNA, 19 bp, Mus musculus
  siRNA target sequence for Asph (NM_023066.1,1862-1880).
gctacacagagctagtgaa

SEQ ID NO: 712776 - DNA, 19 bp, Mus musculus
  siRNA target sequence for Asph (NM_023066.1,1873-1891).
ctagtgaagtctttagaga

SEQ ID NO: 712777 - DNA, 19 bp, Mus musculus
  siRNA target sequence for Asph (NM_023066.1,1899-1917).
gaagttaatccgtgatgaa

SEQ ID NO: 712778 - DNA, 19 bp, Mus musculus
  siRNA target sequence for Asph (NM_023066.1,1920-1938).
cctcatggtgatggataaa

SEQ ID NO: 712779 - DNA, 19 bp, Mus musculus
  siRNA target sequence for Asph (NM_023066.1,1956-1974).
gcctgaggacgaaaacctt

SEQ ID NO: 712780 - DNA, 19 bp, Mus musculus
  siRNA target sequence for Asph (NM_023066.1,2025-2043).
gaatgagaatgcctgtaaa

SEQ ID NO: 712781 - DNA, 19 bp, Mus musculus
  siRNA target sequence for Asph (NM_023066.1,2049-2067).
gcctaagacctgtgcttta

SEQ ID NO: 712782 - DNA, 19 bp, Mus musculus
  siRNA target sequence for Asph (NM_023066.1,2051-2069).
ctaagacctgtgctttact

SEQ ID NO: 712783 - DNA, 19 bp, Mus musculus
  siRNA target sequence for Asph (NM_023066.1,2055-2073).
gacctgtgctttactagaa

SEQ ID NO: 712784 - DNA, 19 bp, Mus musculus
  siRNA target sequence for Asph (NM_023066.1,2057-2075).
cctgtgctttactagaaaa

SEQ ID NO: 712785 - DNA, 19 bp, Mus musculus
  siRNA target sequence for Asph (NM_023066.1,2259-2277).
caaggtgctcatctttgat

SEQ ID NO: 712786 - DNA, 19 bp, Mus musculus
  siRNA target sequence for Asph (NM_023066.1,2312-2330).
cgtctttccggctgatatt

SEQ ID NO: 712787 - DNA, 19 bp, Mus musculus
  siRNA target sequence for Asph (NM_023066.1,2315-2333).
ctttccggctgatattcat

SEQ ID NO: 712788 - DNA, 19 bp, Mus musculus
  siRNA target sequence for Aspa (NM_023113.3,151-169).
gacctcttgtgttgctaaa

SEQ ID NO: 712789 - DNA, 19 bp, Mus musculus
  siRNA target sequence for Aspa (NM_023113.3,159-177).
gtgttgctaaagaacctat

SEQ ID NO: 712790 - DNA, 19 bp, Mus musculus
  siRNA target sequence for Aspa (NM_023113.3,164-182).
gctaaagaacctattaaga

SEQ ID NO: 712791 - DNA, 19 bp, Mus musculus
  siRNA target sequence for Aspa (NM_023113.3,201-219).
ggactcatggaaatgaact

SEQ ID NO: 712792 - DNA, 19 bp, Mus musculus
  siRNA target sequence for Aspa (NM_023113.3,220-238).
gaccggagtgtttctagtt

SEQ ID NO: 712793 - DNA, 19 bp, Mus musculus
  siRNA target sequence for Aspa (NM_023113.3,283-301).
ggacgtgaagccattcatt

SEQ ID NO: 712794 - DNA, 19 bp, Mus musculus
  siRNA target sequence for Aspa (NM_023113.3,284-302).
gacgtgaagccattcatta

SEQ ID NO: 712795 - DNA, 19 bp, Mus musculus
  siRNA target sequence for Aspa (NM_023113.3,287-305).
gtgaagccattcattacca

SEQ ID NO: 712796 - DNA, 19 bp, Mus musculus
  siRNA target sequence for Aspa (NM_023113.3,289-307).
gaagccattcattaccaat

SEQ ID NO: 712797 - DNA, 19 bp, Mus musculus
  siRNA target sequence for Aspa (NM_023113.3,322-340).
gaagtgcaccagatacatt

SEQ ID NO: 712798 - DNA, 19 bp, Mus musculus
  siRNA target sequence for Aspa (NM_023113.3,417-435).
gaagggctcaagaaataaa

SEQ ID NO: 712799 - DNA, 19 bp, Mus musculus
  siRNA target sequence for Aspa (NM_023113.3,464-482).
gatgcctatgaccttgttt

SEQ ID NO: 712800 - DNA, 19 bp, Mus musculus
  siRNA target sequence for Aspa (NM_023113.3,488-506).
cttcacaacaccacttcta

SEQ ID NO: 712801 - DNA, 19 bp, Mus musculus
  siRNA target sequence for Aspa (NM_023113.3,511-529).
gggttgcactcttattctt

SEQ ID NO: 712802 - DNA, 19 bp, Mus musculus
  siRNA target sequence for Aspa (NM_023113.3,557-575).
cagatgtttcactatatta

SEQ ID NO: 712803 - DNA, 19 bp, Mus musculus
  siRNA target sequence for Aspa (NM_023113.3,562-580).
gtttcactatattaagact

SEQ ID NO: 712804 - DNA, 19 bp, Mus musculus
  siRNA target sequence for Aspa (NM_023113.3,591-609).
cattaccctgctctgttta

SEQ ID NO: 712805 - DNA, 19 bp, Mus musculus
  siRNA target sequence for Aspa (NM_023113.3,657-675).
ccaagtatcctgttggtat

SEQ ID NO: 712806 - DNA, 19 bp, Mus musculus
  siRNA target sequence for Aspa (NM_023113.3,658-676).
caagtatcctgttggtata

SEQ ID NO: 712807 - DNA, 19 bp, Mus musculus
  siRNA target sequence for Aspa (NM_023113.3,699-717).
gtgtccttagagctgatat

SEQ ID NO: 712808 - DNA, 19 bp, Mus musculus
  siRNA target sequence for Aspa (NM_023113.3,701-719).
gtccttagagctgatattt

SEQ ID NO: 712809 - DNA, 19 bp, Mus musculus
  siRNA target sequence for Aspa (NM_023113.3,722-740).
gaccaaatgagaaaaatga

SEQ ID NO: 712810 - DNA, 19 bp, Mus musculus
  siRNA target sequence for Aspa (NM_023113.3,739-757).
gataaaacatgctcttgat

SEQ ID NO: 712811 - DNA, 19 bp, Mus musculus
  siRNA target sequence for Aspa (NM_023113.3,785-803).
gaatttcctccctgttcta

SEQ ID NO: 712812 - DNA, 19 bp, Mus musculus
  siRNA target sequence for Aspa (NM_023113.3,798-816).
gttctattgacgtctataa

SEQ ID NO: 712813 - DNA, 19 bp, Mus musculus
  siRNA target sequence for Aspa (NM_023113.3,864-882).
ctgctgttattcatcctaa

SEQ ID NO: 712814 - DNA, 19 bp, Mus musculus
  siRNA target sequence for Aspa (NM_023113.3,867-885).
ctgttattcatcctaatct

SEQ ID NO: 712815 - DNA, 19 bp, Mus musculus
  siRNA target sequence for Aspa (NM_023113.3,879-897).
ctaatctgcaggatcaaga

SEQ ID NO: 712816 - DNA, 19 bp, Mus musculus
  siRNA target sequence for Aspa (NM_023113.3,975-993).
ccgtgtacccagtgtttgt

SEQ ID NO: 712817 - DNA, 19 bp, Mus musculus
  siRNA target sequence for Aspa (NM_023113.3,977-995).
gtgtacccagtgtttgtga

SEQ ID NO: 712818 - DNA, 19 bp, Mus musculus
  siRNA target sequence for Aspa (NM_023113.3,992-1010).
gtgaatgaagctgcatatt

SEQ ID NO: 712819 - DNA, 19 bp, Mus musculus
  siRNA target sequence for Aspa (NM_023113.3,1046-1064).
ctaacactcagcgcaaaaa

SEQ ID NO: 712820 - DNA, 19 bp, Mus musculus
  siRNA target sequence for Aspa (NM_023113.3,1050-1068).
cactcagcgcaaaaagcat

SEQ ID NO: 712821 - DNA, 19 bp, Mus musculus
  siRNA target sequence for H19 (NM_023123.1,1040-1058).
gaagccgtctgttctttca

SEQ ID NO: 712822 - DNA, 19 bp, Mus musculus
  siRNA target sequence for H19 (NM_023123.1,1114-1132).
cttgaaccctcaagatgaa

SEQ ID NO: 712823 - DNA, 19 bp, Mus musculus
  siRNA target sequence for H19 (NM_023123.1,1168-1186).
gaatccggggacttcttta

SEQ ID NO: 712824 - DNA, 19 bp, Mus musculus
  siRNA target sequence for H19 (NM_023123.1,1190-1208).
ccgtctcgttctgaatcaa

SEQ ID NO: 712825 - DNA, 19 bp, Mus musculus
  siRNA target sequence for H19 (NM_023123.1,1321-1339).
cccacccctgagaatccat

SEQ ID NO: 712826 - DNA, 19 bp, Mus musculus
  siRNA target sequence for H19 (NM_023123.1,1422-1440).
catctccctcctgtctttt

SEQ ID NO: 712827 - DNA, 19 bp, Mus musculus
  siRNA target sequence for Kng (NM_023125.2,225-243).
gtttaaccctggggtaaaa

SEQ ID NO: 712828 - DNA, 19 bp, Mus musculus
  siRNA target sequence for Kng (NM_023125.2,271-289).
gtgatcgagggcactaaaa

SEQ ID NO: 712829 - DNA, 19 bp, Mus musculus
  siRNA target sequence for Kng (NM_023125.2,494-512).
ccatactgaaagcctattt

SEQ ID NO: 712830 - DNA, 19 bp, Mus musculus
  siRNA target sequence for Kng (NM_023125.2,507-525).
ctatttcccctgtattggt

SEQ ID NO: 712831 - DNA, 19 bp, Mus musculus
  siRNA target sequence for Kng (NM_023125.2,773-791).
gtgaatgtagaggaaatct

SEQ ID NO: 712832 - DNA, 19 bp, Mus musculus
  siRNA target sequence for Kng (NM_023125.2,779-797).
gtagaggaaatctcttcat

SEQ ID NO: 712833 - DNA, 19 bp, Mus musculus
  siRNA target sequence for Kng (NM_023125.2,784-802).
ggaaatctcttcatggata

SEQ ID NO: 712834 - DNA, 19 bp, Mus musculus
  siRNA target sequence for Kng (NM_023125.2,785-803).
gaaatctcttcatggatat

SEQ ID NO: 712835 - DNA, 19 bp, Mus musculus
  siRNA target sequence for Kng (NM_023125.2,1208-1226).
cattagatatgactgaaat

SEQ ID NO: 712836 - DNA, 19 bp, Mus musculus
  siRNA target sequence for Kng (NM_023125.2,1257-1275).
ccggagtgtcacagtacaa

SEQ ID NO: 712837 - DNA, 19 bp, Mus musculus
  siRNA target sequence for Kng (NM_023125.2,1260-1278).
gagtgtcacagtacaagaa

SEQ ID NO: 712838 - DNA, 19 bp, Mus musculus
  siRNA target sequence for Kng (NM_023125.2,1360-1378).
gagcgtcaggcagaatctt

SEQ ID NO: 712839 - DNA, 19 bp, Mus musculus
  siRNA target sequence for Mel (NM_023126.2,264-282).
cacattcatctctaccata

SEQ ID NO: 712840 - DNA, 19 bp, Mus musculus
  siRNA target sequence for Mel (NM_023126.2,313-331).
ctcgatggcaagaggatta

SEQ ID NO: 712841 - DNA, 19 bp, Mus musculus
  siRNA target sequence for Mel (NM_023126.2,361-379).
gagcggtttcgaacaatca

SEQ ID NO: 712842 - DNA, 19 bp, Mus musculus
  siRNA target sequence for Mel (NM_023126.2,450-468).
caacatccggaattggatt

SEQ ID NO: 712843 - DNA, 19 bp, Mus musculus
  siRNA target sequence for Mel (NM_023126.2,510-528).
gatactggggaataagtgt

SEQ ID NO: 712844 - DNA, 19 bp, Mus musculus
  siRNA target sequence for Mel (NM_023126.2,633-651).
ggagaatgcatttttcact

SEQ ID NO: 712845 - DNA, 19 bp, Mus musculus
  siRNA target sequence for Mel (NM_023126.2,713-731).
gcagccatggagtcaagat

SEQ ID NO: 712846 - DNA, 19 bp, Mus musculus
  siRNA target sequence for Ste (NM_023135.1,125-143).
ctatgcctgagtattatga

SEQ ID NO: 712847 - DNA, 19 bp, Mus musculus
  siRNA target sequence for Ste (NM_023135.1,154-172).
gagttccgtggagttctaa

SEQ ID NO: 712848 - DNA, 19 bp, Mus musculus
  siRNA target sequence for Ste (NM_023135.1,175-193).
gacaaacggttcaccaaat

SEQ ID NO: 712849 - DNA, 19 bp, Mus musculus
  siRNA target sequence for Ste (NM_023135.1,177-195).
caaacggttcaccaaatat

SEQ ID NO: 712850 - DNA, 19 bp, Mus musculus
  siRNA target sequence for Ste (NM_023135.1,197-215).
gggaagatgttgaaatgtt

SEQ ID NO: 712851 - DNA, 19 bp, Mus musculus
  siRNA target sequence for Ste (NM_023135.1,225-243).
gccagatgaccttgtcatt

SEQ ID NO: 712852 - DNA, 19 bp, Mus musculus
  siRNA target sequence for Ste (NM_023135.1,234-252).
ccttgtcattgctacatat

SEQ ID NO: 712853 - DNA, 19 bp, Mus musculus
  siRNA target sequence for Ste (NM_023135.1,267-285).
cacctggattagtgaagtt

SEQ ID NO: 712854 - DNA, 19 bp, Mus musculus
  siRNA target sequence for Ste (NM_023135.1,269-287).
cctggattagtgaagttgt

SEQ ID NO: 712855 - DNA, 19 bp, Mus musculus
  siRNA target sequence for Ste (NM_023135.1,272-290).
ggattagtgaagttgtgta

SEQ ID NO: 712856 - DNA, 19 bp, Mus musculus
  siRNA target sequence for Ste (NM_023135.1,323-341).
gcaaggaggatgcaatttt

SEQ ID NO: 712857 - DNA, 19 bp, Mus musculus
  siRNA target sequence for Ste (NM_023135.1,365-383).
gcagaaacgaagacctaat

SEQ ID NO: 712858 - DNA, 19 bp, Mus musculus
  siRNA target sequence for Ste (NM_023135.1,366-384).
cagaaacgaagacctaata

SEQ ID NO: 712859 - DNA, 19 bp, Mus musculus
  siRNA target sequence for Ste (NM_023135.1,368-386).
gaaacgaagacctaataaa

SEQ ID NO: 712860 - DNA, 19 bp, Mus musculus
  siRNA target sequence for Ste (NM_023135.1,372-390).
cgaagacctaataaatgga

SEQ ID NO: 712861 - DNA, 19 bp, Mus musculus
  siRNA target sequence for Ste (NM_023135.1,373-391).
gaagacctaataaatggaa

SEQ ID NO: 712862 - DNA, 19 bp, Mus musculus
  siRNA target sequence for Ste (NM_023135.1,500-518).
gccggaacgccaaagatgt

SEQ ID NO: 712863 - DNA, 19 bp, Mus musculus
  siRNA target sequence for Ste (NM_023135.1,514-532).
gatgtcgccgtttcttatt

SEQ ID NO: 712864 - DNA, 19 bp, Mus musculus
  siRNA target sequence for Ste (NM_023135.1,517-535).
gtcgccgtttcttattact

SEQ ID NO: 712865 - DNA, 19 bp, Mus musculus
  siRNA target sequence for Ste (NM_023135.1,520-538).
gccgtttcttattactact

SEQ ID NO: 712866 - DNA, 19 bp, Mus musculus
  siRNA target sequence for Ste (NM_023135.1,521-539).
ccgtttcttattactactt

SEQ ID NO: 712867 - DNA, 19 bp, Mus musculus
  siRNA target sequence for Ste (NM_023135.1,527-545).
cttattactactttttgct

SEQ ID NO: 712868 - DNA, 19 bp, Mus musculus
  siRNA target sequence for Ste (NM_023135.1,543-561).
gctaatgataactagttat

SEQ ID NO: 712869 - DNA, 19 bp, Mus musculus
  siRNA target sequence for Ste (NM_023135.1,549-567).
gataactagttatccaaat

SEQ ID NO: 712870 - DNA, 19 bp, Mus musculus
  siRNA target sequence for Ste (NM_023135.1,607-625).
gggcaagttccgtatggtt

SEQ ID NO: 712871 - DNA, 19 bp, Mus musculus
  siRNA target sequence for Ste (NM_023135.1,699-717).
catgaaagaggatatcaga

SEQ ID NO: 712872 - DNA, 19 bp, Mus musculus
  siRNA target sequence for Ste (NM_023135.1,716-734).
gaagagaagttgtaaagct

SEQ ID NO: 712873 - DNA, 19 bp, Mus musculus
  siRNA target sequence for Ste (NM_023135.1,724-742).
gttgtaaagctaatagagt

SEQ ID NO: 712874 - DNA, 19 bp, Mus musculus
  siRNA target sequence for Ste (NM_023135.1,816-834).
caatccatccaccaattat

SEQ ID NO: 712875 - DNA, 19 bp, Mus musculus
  siRNA target sequence for Ste (NM_023135.1,820-838).
ccatccaccaattatacaa

SEQ ID NO: 712876 - DNA, 19 bp, Mus musculus
  siRNA target sequence for Ste (NM_023135.1,855-873).
gatgaatcaaaaagtatca

SEQ ID NO: 712877 - DNA, 19 bp, Mus musculus
  siRNA target sequence for Ste (NM_023135.1,879-897).
catgcgaaagggaattata

SEQ ID NO: 712878 - DNA, 19 bp, Mus musculus
  siRNA target sequence for Ste (NM_023135.1,882-900).
gcgaaagggaattatagga

SEQ ID NO: 712879 - DNA, 19 bp, Mus musculus
  siRNA target sequence for Ste (NM_023135.1,938-956).
gatttgatgagcactacaa

SEQ ID NO: 712880 - DNA, 19 bp, Mus musculus
  siRNA target sequence for Ste (NM_023135.1,974-992).
gcactgtgaagtttagaat

SEQ ID NO: 712881 - DNA, 19 bp, Mus musculus
  siRNA target sequence for Ubd (NM_023137.2,421-439).
cagaccaatggcggttaat

SEQ ID NO: 712882 - DNA, 19 bp, Mus musculus
  siRNA target sequence for Ubd (NM_023137.2,423-441).
gaccaatggcggttaatga

SEQ ID NO: 712883 - DNA, 19 bp, Mus musculus
  siRNA target sequence for Ubd (NM_023137.2,443-461).
ctttgagaccactgagaat

SEQ ID NO: 712884 - DNA, 19 bp, Mus musculus
  siRNA target sequence for Ubd (NM_023137.2,554-572).
gccccatcgaaaattgtca

SEQ ID NO: 712885 - DNA, 19 bp, Mus musculus
  siRNA target sequence for Ubd (NM_023137.2,555-573).
ccccatcgaaaattgtcat

SEQ ID NO: 712886 - DNA, 19 bp, Mus musculus
  siRNA target sequence for Ubd (NM_023137.2,571-589).
catcctatgggattgacaa

SEQ ID NO: 712887 - DNA, 19 bp, Mus musculus
  siRNA target sequence for Ubd (NM_023137.2,748-766).
cctctgtgatccctaagaa

SEQ ID NO: 712888 - DNA, 19 bp, Mus musculus
  siRNA target sequence for Tor3a (NM_023141.1,535-553).
ggagtgactgtgtcaagat

SEQ ID NO: 712889 - DNA, 19 bp, Mus musculus
  siRNA target sequence for Tor3a (NM_023141.1,542-560).
ctgtgtcaagatgtttatt

SEQ ID NO: 712890 - DNA, 19 bp, Mus musculus
  siRNA target sequence for Tor3a (NM_023141.1,791-809).
cggaggcagtgtcatcaat

SEQ ID NO: 712891 - DNA, 19 bp, Mus musculus
  siRNA target sequence for Tor3a (NM_023141.1,838-856).
gatggtccagggaggaaat

SEQ ID NO: 712892 - DNA, 19 bp, Mus musculus
  siRNA target sequence for Tor3a (NM_023141.1,935-953).
cctgaagaaacaccttatt

SEQ ID NO: 712893 - DNA, 19 bp, Mus musculus
  siRNA target sequence for Tor3a (NM_023141.1,945-963).
caccttattgaccacttta

SEQ ID NO: 712894 - DNA, 19 bp, Mus musculus
  siRNA target sequence for Tor3a (NM_023141.1,1064-1082).
cgccaagatgatgacatat

SEQ ID NO: 712895 - DNA, 19 bp, Mus musculus
  siRNA target sequence for Tor3a (NM_023141.1,1113-1131).
cagggctgcaaatccattt

SEQ ID NO: 712896 - DNA, 19 bp, Mus musculus
  siRNA target sequence for 0610010E05Rik (NM_023149.2,78-96).
ctgtcttccagtatatcga

SEQ ID NO: 712897 - DNA, 19 bp, Mus musculus
  siRNA target sequence for 0610010E05Rik (NM_023149.2,106-124).
ggaccgctacgtcaagaaa

SEQ ID NO: 712898 - DNA, 19 bp, Mus musculus
  siRNA target sequence for 0610010E05Rik (NM_023149.2,109-127).
ccgctacgtcaagaaactt

SEQ ID NO: 712899 - DNA, 19 bp, Mus musculus
  siRNA target sequence for 0610010E05Rik (NM_023149.2,444-462).
gaggctccacggacgataa

SEQ ID NO: 712900 - DNA, 19 bp, Mus musculus
  siRNA target sequence for 0610010E05Rik (NM_023149.2,632-650).
gtgtgcatttcagacaatt

SEQ ID NO: 712901 - DNA, 19 bp, Mus musculus
  siRNA target sequence for 0610010E05Rik (NM_023149.2,696-714).
gcatctgttacttcttcat

SEQ ID NO: 712902 - DNA, 19 bp, Mus musculus
  siRNA target sequence for 0610010E05Rik (NM_023149.2,718-736).
ggtggaatgcagtgacaaa

SEQ ID NO: 712903 - DNA, 19 bp, Mus musculus
  siRNA target sequence for 0610010E05Rik (NM_023149.2,775-793).
ggccatgacggatctcatt

SEQ ID NO: 712904 - DNA, 19 bp, Mus musculus
  siRNA target sequence for 0610010E05Rik (NM_023149.2,776-794).
gccatgacggatctcattt

SEQ ID NO: 712905 - DNA, 19 bp, Mus musculus
  siRNA target sequence for 0610010E05Rik (NM_023149.2,778-796).
catgacggatctcatttca

SEQ ID NO: 712906 - DNA, 19 bp, Mus musculus
  siRNA target sequence for 0610010E05Rik (NM_023149.2,887-905).
ctctacgaccacattgact

SEQ ID NO: 712907 - DNA, 19 bp, Mus musculus
  siRNA target sequence for 0610010E05Rik (NM_023149.2,893-911).
gaccacattgacttcgata

SEQ ID NO: 712908 - DNA, 19 bp, Mus musculus
  siRNA target sequence for 0610010E05Rik (NM_023149.2,898-916).
cattgacttcgatatggaa

SEQ ID NO: 712909 - DNA, 19 bp, Mus musculus
  siRNA target sequence for 0610010E05Rik (NM_023149.2,1089-1107).
ggctcgtgccagacatgat

SEQ ID NO: 712910 - DNA, 19 bp, Mus musculus
  siRNA target sequence for 0610010E05Rik (NM_023149.2,1102-1120).
catgataccggaagttgtt

SEQ ID NO: 712911 - DNA, 19 bp, Mus musculus
  siRNA target sequence for 0610010E05Rik (NM_023149.2,1115-1133).
gttgttagcgagcaagttt

SEQ ID NO: 712912 - DNA, 19 bp, Mus musculus
  siRNA target sequence for 0610010E05Rik (NM_023149.2,1118-1136).
gttagcgagcaagtttcaa

SEQ ID NO: 712913 - DNA, 19 bp, Mus musculus
  siRNA target sequence for 0610010E05Rik (NM_023149.2,1127-1145).
caagtttcaagctacttgt

SEQ ID NO: 712914 - DNA, 19 bp, Mus musculus
  siRNA target sequence for 0610010E05Rik (NM_023149.2,1346-1364).
ggcaaaaatgtcatgctat

SEQ ID NO: 712915 - DNA, 19 bp, Mus musculus
  siRNA target sequence for 0610010E05Rik (NM_023149.2,1391-1409).
gcccactcgcagaatgaga

SEQ ID NO: 712916 - DNA, 19 bp, Mus musculus
  siRNA target sequence for 0610010E05Rik (NM_023149.2,1392-1410).
cccactcgcagaatgagaa

SEQ ID NO: 712917 - DNA, 19 bp, Mus musculus
  siRNA target sequence for 0610040D20Rik (NM_023153.2,207-225).
gatcttccctctcatacaa

SEQ ID NO: 712918 - DNA, 19 bp, Mus musculus
  siRNA target sequence for 0610040D20Rik (NM_023153.2,210-228).
cttccctctcatacaaaga

SEQ ID NO: 712919 - DNA, 19 bp, Mus musculus
  siRNA target sequence for 0610040D20Rik (NM_023153.2,256-274).
cccctgaagaggttcgaaa

SEQ ID NO: 712920 - DNA, 19 bp, Mus musculus
  siRNA target sequence for 0610040D20Rik (NM_023153.2,342-360).
ccaactcgagagcatacaa

SEQ ID NO: 712921 - DNA, 19 bp, Mus musculus
  siRNA target sequence for 0610040D20Rik (NM_023153.2,573-591).
gagagaattcgcatggaaa

SEQ ID NO: 712922 - DNA, 19 bp, Mus musculus
  siRNA target sequence for Ethe1 (NM_023154.2,344-362).
gcggagcccaggctgattt

SEQ ID NO: 712923 - DNA, 19 bp, Mus musculus
  siRNA target sequence for Ethe1 (NM_023154.2,349-367).
gcccaggctgatttgcata

SEQ ID NO: 712924 - DNA, 19 bp, Mus musculus
  siRNA target sequence for 1110025J15Rik (NM_023168.1,124-142).
ggtgtctggggacagttat

SEQ ID NO: 712925 - DNA, 19 bp, Mus musculus
  siRNA target sequence for 1110025J15Rik (NM_023168.1,172-190).
ccctatgcctccctatgtt

SEQ ID NO: 712926 - DNA, 19 bp, Mus musculus
  siRNA target sequence for 1110025J15Rik (NM_023168.1,174-192).
ctatgcctccctatgttca

SEQ ID NO: 712927 - DNA, 19 bp, Mus musculus
  siRNA target sequence for 1110025J15Rik (NM_023168.1,244-262).
ctatggtcagccaggatat

SEQ ID NO: 712928 - DNA, 19 bp, Mus musculus
  siRNA target sequence for 1110025J15Rik (NM_023168.1,494-512).
cgccaggcctttatcagaa

SEQ ID NO: 712929 - DNA, 19 bp, Mus musculus
  siRNA target sequence for 1110025J15Rik (NM_023168.1,556-574).
cactgtggccattttcact

SEQ ID NO: 712930 - DNA, 19 bp, Mus musculus
  siRNA target sequence for 1110025J15Rik (NM_023168.1,594-612).
gctttgtccgggagaatgt

SEQ ID NO: 712931 - DNA, 19 bp, Mus musculus
  siRNA target sequence for 1110025J15Rik (NM_023168.1,607-625).
gaatgtctggacctactat

SEQ ID NO: 712932 - DNA, 19 bp, Mus musculus
  siRNA target sequence for 1110025J15Rik (NM_023168.1,611-629).
gtctggacctactatgtct

SEQ ID NO: 712933 - DNA, 19 bp, Mus musculus
  siRNA target sequence for 1110025J15Rik (NM_023168.1,676-694).
ggacttccggcgaaagcat

SEQ ID NO: 712934 - DNA, 19 bp, Mus musculus
  siRNA target sequence for 1110025J15Rik (NM_023168.1,749-767).
ggcatgatagccagctttt

SEQ ID NO: 712935 - DNA, 19 bp, Mus musculus
  siRNA target sequence for 1110025J15Rik (NM_023168.1,750-768).
gcatgatagccagctttta

SEQ ID NO: 712936 - DNA, 19 bp, Mus musculus
  siRNA target sequence for 1110025J15Rik (NM_023168.1,939-957).
gcatcctggagattgtata

SEQ ID NO: 712937 - DNA, 19 bp, Mus musculus
  siRNA target sequence for Ndufb9 (NM_023172.2,158-176).
gatgagagcccggtttgaa

SEQ ID NO: 712938 - DNA, 19 bp, Mus musculus
  siRNA target sequence for Ndufb9 (NM_023172.2,161-179).
gagagcccggtttgaagaa

SEQ ID NO: 712939 - DNA, 19 bp, Mus musculus
  siRNA target sequence for Ndufb9 (NM_023172.2,163-181).
gagcccggtttgaagaaca

SEQ ID NO: 712940 - DNA, 19 bp, Mus musculus
  siRNA target sequence for Ndufb9 (NM_023172.2,255-273).
catcctcagccgtatatct

SEQ ID NO: 712941 - DNA, 19 bp, Mus musculus
  siRNA target sequence for Ndufb9 (NM_023172.2,292-310).
gcacttccttcgagagata

SEQ ID NO: 712942 - DNA, 19 bp, Mus musculus
  siRNA target sequence for Ndufb9 (NM_023172.2,330-348).
gaatggtgcttagattact

SEQ ID NO: 712943 - DNA, 19 bp, Mus musculus
  siRNA target sequence for Ndufb9 (NM_023172.2,424-442).
gctgggatcgggaggttaa

SEQ ID NO: 712944 - DNA, 19 bp, Mus musculus
  siRNA target sequence for Ndufb9 (NM_023172.2,427-445).
gggatcgggaggttaagca

SEQ ID NO: 712945 - DNA, 19 bp, Mus musculus
  siRNA target sequence for Ndufb9 (NM_023172.2,460-478).
catcacctgatggtattat

SEQ ID NO: 712946 - DNA, 19 bp, Mus musculus
  siRNA target sequence for Ndufb9 (NM_023172.2,472-490).
gtattatgactgaagcttt

SEQ ID NO: 712947 - DNA, 19 bp, Mus musculus
  siRNA target sequence for Ndufb9 (NM_023172.2,523-541).
cactgtggtggcatattgt

SEQ ID NO: 712948 - DNA, 19 bp, Mus musculus
  siRNA target sequence for 2700038L12Rik (NM_023191.1,75-93).
gaccaaccagtacagtatt

SEQ ID NO: 712949 - DNA, 19 bp, Mus musculus
  siRNA target sequence for 2700038L12Rik (NM_023191.1,136-154).
gttgcctgggagacaaaca

SEQ ID NO: 712950 - DNA, 19 bp, Mus musculus
  siRNA target sequence for 2700038L12Rik (NM_023191.1,199-217).
ctggtgaaggtctggaaat

SEQ ID NO: 712951 - DNA, 19 bp, Mus musculus
  siRNA target sequence for 2700038L12Rik (NM_023191.1,317-335).
gctctctagacgctcatat

SEQ ID NO: 712952 - DNA, 19 bp, Mus musculus
  siRNA target sequence for 2700038L12Rik (NM_023191.1,318-336).
ctctctagacgctcatatt

SEQ ID NO: 712953 - DNA, 19 bp, Mus musculus
  siRNA target sequence for 2700038L12Rik (NM_023191.1,337-355).
cgcctctgggacttggaaa

SEQ ID NO: 712954 - DNA, 19 bp, Mus musculus
  siRNA target sequence for 2700038L12Rik (NM_023191.1,359-377).
gcaaacagatgaagtctat

SEQ ID NO: 712955 - DNA, 19 bp, Mus musculus
  siRNA target sequence for 2700038L12Rik (NM_023191.1,360-378).
caaacagatgaagtctata

SEQ ID NO: 712956 - DNA, 19 bp, Mus musculus
  siRNA target sequence for 2700038L12Rik (NM_023191.1,505-523).
gacactagaggaaaattca

SEQ ID NO: 712957 - DNA, 19 bp, Mus musculus
  siRNA target sequence for 2700038L12Rik (NM_023191.1,515-533).
gaaaattcatccttagtat

SEQ ID NO: 712958 - DNA, 19 bp, Mus musculus
  siRNA target sequence for 2700038L12Rik (NM_023191.1,522-540).
catccttagtattgcatat

SEQ ID NO: 712959 - DNA, 19 bp, Mus musculus
  siRNA target sequence for 2700038L12Rik (NM_023191.1,525-543).
ccttagtattgcatatagt

SEQ ID NO: 712960 - DNA, 19 bp, Mus musculus
  siRNA target sequence for 2700038L12Rik (NM_023191.1,684-702).
ccttgtcacggcttcagat

SEQ ID NO: 712961 - DNA, 19 bp, Mus musculus
  siRNA target sequence for 2700038L12Rik (NM_023191.1,717-735).
gatctatgatgtacaacat

SEQ ID NO: 712962 - DNA, 19 bp, Mus musculus
  siRNA target sequence for 2700038L12Rik (NM_023191.1,767-785).
cgtcctgggtgttgaatgt

SEQ ID NO: 712963 - DNA, 19 bp, Mus musculus
  siRNA target sequence for 2700038L12Rik (NM_023191.1,768-786).
gtcctgggtgttgaatgtt

SEQ ID NO: 712964 - DNA, 19 bp, Mus musculus
  siRNA target sequence for 2700038L12Rik (NM_023191.1,799-817).
gatgacactcactttgtct

SEQ ID NO: 712965 - DNA, 19 bp, Mus musculus
  siRNA target sequence for 2700038L12Rik (NM_023191.1,819-837).
cagttcatctgacaaaagt

SEQ ID NO: 712966 - DNA, 19 bp, Mus musculus
  siRNA target sequence for 2700038L12Rik (NM_023191.1,869-887).
gtattcacaccttctttga

SEQ ID NO: 712967 - DNA, 19 bp, Mus musculus
  siRNA target sequence for 2700038L12Rik (NM_023191.1,900-918).
ggtttggggagtaaaatat

SEQ ID NO: 712968 - DNA, 19 bp, Mus musculus
  siRNA target sequence for 2700038L12Rik (NM_023191.1,901-919).
gtttggggagtaaaatata

SEQ ID NO: 712969 - DNA, 19 bp, Mus musculus
  siRNA target sequence for 2700038L12Rik (NM_023191.1,970-988).
gtctatgactgcccaattt

SEQ ID NO: 712970 - DNA, 19 bp, Mus musculus
  siRNA target sequence for Pla2g12 (NM_023196.2,211-229).
gcaacggcatccacaagat

SEQ ID NO: 712971 - DNA, 19 bp, Mus musculus
  siRNA target sequence for Pla2g12 (NM_023196.2,212-230).
caacggcatccacaagata

SEQ ID NO: 712972 - DNA, 19 bp, Mus musculus
  siRNA target sequence for Pla2g12 (NM_023196.2,315-333).
gttccacgctatggatata

SEQ ID NO: 712973 - DNA, 19 bp, Mus musculus
  siRNA target sequence for Pla2g12 (NM_023196.2,321-339).
cgctatggatataaaccat

SEQ ID NO: 712974 - DNA, 19 bp, Mus musculus
  siRNA target sequence for Pla2g12 (NM_023196.2,375-393).
gttcatctgaacataggta

SEQ ID NO: 712975 - DNA, 19 bp, Mus musculus
  siRNA target sequence for Pla2g12 (NM_023196.2,515-533).
gaagacgctcggactatct

SEQ ID NO: 712976 - DNA, 19 bp, Mus musculus
  siRNA target sequence for Pla2g12 (NM_023196.2,628-646).
catgctggtgtcgttatga

SEQ ID NO: 712977 - DNA, 19 bp, Mus musculus
  siRNA target sequence for Pla2g12 (NM_023196.2,634-652).
ggtgtcgttatgaagaaaa

SEQ ID NO: 712978 - DNA, 19 bp, Mus musculus
  siRNA target sequence for Pla2g12 (NM_023196.2,635-653).
gtgtcgttatgaagaaaaa

SEQ ID NO: 712979 - DNA, 19 bp, Mus musculus
  siRNA target sequence for 2310008H09Rik (NM_023197.1,529-547).
ctgctagcgaaccagtaat

SEQ ID NO: 712980 - DNA, 19 bp, Mus musculus
  siRNA target sequence for 2310008H09Rik (NM_023197.1,532-550).
ctagcgaaccagtaatggt

SEQ ID NO: 712981 - DNA, 19 bp, Mus musculus
  siRNA target sequence for 2310008H09Rik (NM_023197.1,642-660).
gaaccagagactcaatact

SEQ ID NO: 712982 - DNA, 19 bp, Mus musculus
  siRNA target sequence for 2310008H09Rik (NM_023197.1,650-668).
gactcaatactcagtctta

SEQ ID NO: 712983 - DNA, 19 bp, Mus musculus
  siRNA target sequence for 2310008H09Rik (NM_023197.1,654-672).
caatactcagtcttaaaca

SEQ ID NO: 712984 - DNA, 19 bp, Mus musculus
  siRNA target sequence for 2310008H09Rik (NM_023197.1,659-677).
ctcagtcttaaacagtaat

SEQ ID NO: 712985 - DNA, 19 bp, Mus musculus
  siRNA target sequence for 2310008H09Rik (NM_023197.1,661-679).
cagtcttaaacagtaatga

SEQ ID NO: 712986 - DNA, 19 bp, Mus musculus
  siRNA target sequence for 2310008H09Rik (NM_023197.1,665-683).
cttaaacagtaatgattat

SEQ ID NO: 712987 - DNA, 19 bp, Mus musculus
  siRNA target sequence for 2310008H09Rik (NM_023197.1,706-724).
gggccacgtccccttctaa

SEQ ID NO: 712988 - DNA, 19 bp, Mus musculus
  siRNA target sequence for 2310008H09Rik (NM_023197.1,708-726).
gccacgtccccttctaaca

SEQ ID NO: 712989 - DNA, 19 bp, Mus musculus
  siRNA target sequence for 2310008H09Rik (NM_023197.1,710-728).
cacgtccccttctaacaat

SEQ ID NO: 712990 - DNA, 19 bp, Mus musculus
  siRNA target sequence for 2310008H09Rik (NM_023197.1,712-730).
cgtccccttctaacaatgt

SEQ ID NO: 712991 - DNA, 19 bp, Mus musculus
  siRNA target sequence for 2310008H09Rik (NM_023197.1,917-935).
gaggcggaagtccttatca

SEQ ID NO: 712992 - DNA, 19 bp, Mus musculus
  siRNA target sequence for 2310008H09Rik (NM_023197.1,919-937).
ggcggaagtccttatcaaa

SEQ ID NO: 712993 - DNA, 19 bp, Mus musculus
  siRNA target sequence for 2310008H09Rik (NM_023197.1,1303-1321).
ctttggagttcgttccaat

SEQ ID NO: 712994 - DNA, 19 bp, Mus musculus
  siRNA target sequence for 2310008H09Rik (NM_023197.1,1308-1326).
gagttcgttccaatagaca

SEQ ID NO: 712995 - DNA, 19 bp, Mus musculus
  siRNA target sequence for 2310008H09Rik (NM_023197.1,1389-1407).
gaagggctggctgtgaaaa

SEQ ID NO: 712996 - DNA, 19 bp, Mus musculus
  siRNA target sequence for 2310008H09Rik (NM_023197.1,1494-1512).
gaggtggtactggagaaaa

SEQ ID NO: 712997 - DNA, 19 bp, Mus musculus
  siRNA target sequence for 2310008H09Rik (NM_023197.1,1811-1829).
ggccctggacaaaaagtct

SEQ ID NO: 712998 - DNA, 19 bp, Mus musculus
  siRNA target sequence for 2310008H09Rik (NM_023197.1,1817-1835).
ggacaaaaagtcttcagaa

SEQ ID NO: 712999 - DNA, 19 bp, Mus musculus
  siRNA target sequence for 2310008H09Rik (NM_023197.1,1923-1941).
gcccgaaaggtcttctaca

SEQ ID NO: 713000 - DNA, 19 bp, Mus musculus
  siRNA target sequence for 2310008H09Rik (NM_023197.1,1925-1943).
ccgaaaggtcttctacatt

SEQ ID NO: 713001 - DNA, 19 bp, Mus musculus
  siRNA target sequence for 2310008H09Rik (NM_023197.1,1947-1965).
cggaatgcctccaagtcta

SEQ ID NO: 713002 - DNA, 19 bp, Mus musculus
  siRNA target sequence for 2310008H09Rik (NM_023197.1,1948-1966).
ggaatgcctccaagtctat

SEQ ID NO: 713003 - DNA, 19 bp, Mus musculus
  siRNA target sequence for 2310008H09Rik (NM_023197.1,1954-1972).
cctccaagtctatcaagtt

SEQ ID NO: 713004 - DNA, 19 bp, Mus musculus
  siRNA target sequence for Ppp1r7 (NM_023200.1,205-223).
catgagctggcagtagata

SEQ ID NO: 713005 - DNA, 19 bp, Mus musculus
  siRNA target sequence for Ppp1r7 (NM_023200.1,211-229).
ctggcagtagatatggaaa

SEQ ID NO: 713006 - DNA, 19 bp, Mus musculus
  siRNA target sequence for Ppp1r7 (NM_023200.1,262-280).
gatctgactcactatcgaa

SEQ ID NO: 713007 - DNA, 19 bp, Mus musculus
  siRNA target sequence for Ppp1r7 (NM_023200.1,269-287).
ctcactatcgaattggaaa

SEQ ID NO: 713008 - DNA, 19 bp, Mus musculus
  siRNA target sequence for Ppp1r7 (NM_023200.1,273-291).
ctatcgaattggaaagatt

SEQ ID NO: 713009 - DNA, 19 bp, Mus musculus
  siRNA target sequence for Ppp1r7 (NM_023200.1,323-341).
cactctgccttcgtcaaaa

SEQ ID NO: 713010 - DNA, 19 bp, Mus musculus
  siRNA target sequence for Ppp1r7 (NM_023200.1,327-345).
ctgccttcgtcaaaaccta

SEQ ID NO: 713011 - DNA, 19 bp, Mus musculus
  siRNA target sequence for Ppp1r7 (NM_023200.1,329-347).
gccttcgtcaaaacctaat

SEQ ID NO: 713012 - DNA, 19 bp, Mus musculus
  siRNA target sequence for Ppp1r7 (NM_023200.1,330-348).
ccttcgtcaaaacctaatt

SEQ ID NO: 713013 - DNA, 19 bp, Mus musculus
  siRNA target sequence for Ppp1r7 (NM_023200.1,331-349).
cttcgtcaaaacctaatta

SEQ ID NO: 713014 - DNA, 19 bp, Mus musculus
  siRNA target sequence for Ppp1r7 (NM_023200.1,445-463).
gaattggaggttctagata

SEQ ID NO: 713015 - DNA, 19 bp, Mus musculus
  siRNA target sequence for Ppp1r7 (NM_023200.1,450-468).
ggaggttctagatatttct

SEQ ID NO: 713016 - DNA, 19 bp, Mus musculus
  siRNA target sequence for Ppp1r7 (NM_023200.1,490-508).
gaagggattgacaaactga

SEQ ID NO: 713017 - DNA, 19 bp, Mus musculus
  siRNA target sequence for Ppp1r7 (NM_023200.1,561-579).
cataagcaatttacatcaa

SEQ ID NO: 713018 - DNA, 19 bp, Mus musculus
  siRNA target sequence for Ppp1r7 (NM_023200.1,606-624).
ccggattcgggcaattgaa

SEQ ID NO: 713019 - DNA, 19 bp, Mus musculus
  siRNA target sequence for Ppp1r7 (NM_023200.1,607-625).
cggattcgggcaattgaaa

SEQ ID NO: 713020 - DNA, 19 bp, Mus musculus
  siRNA target sequence for Ppp1r7 (NM_023200.1,608-626).
ggattcgggcaattgaaaa

SEQ ID NO: 713021 - DNA, 19 bp, Mus musculus
  siRNA target sequence for Ppp1r7 (NM_023200.1,609-627).
gattcgggcaattgaaaat

SEQ ID NO: 713022 - DNA, 19 bp, Mus musculus
  siRNA target sequence for Ppp1r7 (NM_023200.1,614-632).
gggcaattgaaaatatcga

SEQ ID NO: 713023 - DNA, 19 bp, Mus musculus
  siRNA target sequence for Ppp1r7 (NM_023200.1,846-864).
caccatgttggatattgca

SEQ ID NO: 713024 - DNA, 19 bp, Mus musculus
  siRNA target sequence for Ppp1r7 (NM_023200.1,855-873).
ggatattgcatcaaataga

SEQ ID NO: 713025 - DNA, 19 bp, Mus musculus
  siRNA target sequence for Ppp1r7 (NM_023200.1,921-939).
ctggatgaatgacaatcta

SEQ ID NO: 713026 - DNA, 19 bp, Mus musculus
  siRNA target sequence for 2410015N17Rik (NM_023203.1,238-256).
gcgagctggcagaactctt

SEQ ID NO: 713027 - DNA, 19 bp, Mus musculus
  siRNA target sequence for 2410015N17Rik (NM_023203.1,257-275).
ccagtggaagtctgataca

SEQ ID NO: 713028 - DNA, 19 bp, Mus musculus
  siRNA target sequence for 2410015N17Rik (NM_023203.1,394-412).
cagtaatctccaaaatgga

SEQ ID NO: 713029 - DNA, 19 bp, Mus musculus
  siRNA target sequence for Anp32e (NM_023210.2,368-386).
gagttagtcctcgataatt

SEQ ID NO: 713030 - DNA, 19 bp, Mus musculus
  siRNA target sequence for Anp32e (NM_023210.2,482-500).
cggcttcccagcttgaata

SEQ ID NO: 713031 - DNA, 19 bp, Mus musculus
  siRNA target sequence for Anp32e (NM_023210.2,483-501).
ggcttcccagcttgaataa

SEQ ID NO: 713032 - DNA, 19 bp, Mus musculus
  siRNA target sequence for Anp32e (NM_023210.2,503-521).
ctccggaagttggaactta

SEQ ID NO: 713033 - DNA, 19 bp, Mus musculus
  siRNA target sequence for Anp32e (NM_023210.2,511-529).
gttggaacttagtgacaat

SEQ ID NO: 713034 - DNA, 19 bp, Mus musculus
  siRNA target sequence for Anp32e (NM_023210.2,514-532).
ggaacttagtgacaatata

SEQ ID NO: 713035 - DNA, 19 bp, Mus musculus
  siRNA target sequence for Anp32e (NM_023210.2,626-644).
gaagcgctgcaaaatctta

SEQ ID NO: 713036 - DNA, 19 bp, Mus musculus
  siRNA target sequence for Anp32e (NM_023210.2,629-647).
gcgctgcaaaatcttaaaa

SEQ ID NO: 713037 - DNA, 19 bp, Mus musculus
  siRNA target sequence for Anp32e (NM_023210.2,630-648).
cgctgcaaaatcttaaaaa

SEQ ID NO: 713038 - DNA, 19 bp, Mus musculus
  siRNA target sequence for Anp32e (NM_023210.2,631-649).
gctgcaaaatcttaaaaat

SEQ ID NO: 713039 - DNA, 19 bp, Mus musculus
  siRNA target sequence for Anp32e (NM_023210.2,928-946).
ggtgggcctctcatactta

SEQ ID NO: 713040 - DNA, 19 bp, Mus musculus
  siRNA target sequence for Anp32e (NM_023210.2,929-947).
gtgggcctctcatacttaa

SEQ ID NO: 713041 - DNA, 19 bp, Mus musculus
  siRNA target sequence for Anp32e (NM_023210.2,932-950).
ggcctctcatacttaatga

SEQ ID NO: 713042 - DNA, 19 bp, Mus musculus
  siRNA target sequence for Anp32e (NM_023210.2,933-951).
gcctctcatacttaatgaa

SEQ ID NO: 713043 - DNA, 19 bp, Mus musculus
  siRNA target sequence for 2500003M10Rik (NM_023215.3,1952-1970).
cgctccgaggtcaaaacct

SEQ ID NO: 713044 - DNA, 19 bp, Mus musculus
  siRNA target sequence for 2500003M10Rik (NM_023215.3,1996-2014).
ccccgaatgggcttaagaa

SEQ ID NO: 713045 - DNA, 19 bp, Mus musculus
  siRNA target sequence for 2500003M10Rik (NM_023215.3,1998-2016).
ccgaatgggcttaagaaga

SEQ ID NO: 713046 - DNA, 19 bp, Mus musculus
  siRNA target sequence for 2500003M10Rik (NM_023215.3,2093-2111).
gtagaggtcggggtatgat

SEQ ID NO: 713047 - DNA, 19 bp, Mus musculus
  siRNA target sequence for Cdc20 (NM_023223.1,205-223).
cgctggcagcgcaaagcaa

SEQ ID NO: 713048 - DNA, 19 bp, Mus musculus
  siRNA target sequence for Cdc20 (NM_023223.1,297-315).
ccgaactcctggcaaatct

SEQ ID NO: 713049 - DNA, 19 bp, Mus musculus
  siRNA target sequence for Cdc20 (NM_023223.1,298-316).
cgaactcctggcaaatcta

SEQ ID NO: 713050 - DNA, 19 bp, Mus musculus
  siRNA target sequence for Cdc20 (NM_023223.1,397-415).
gccagcttcctcttaagca

SEQ ID NO: 713051 - DNA, 19 bp, Mus musculus
  siRNA target sequence for Cdc20 (NM_023223.1,398-416).
ccagcttcctcttaagcaa

SEQ ID NO: 713052 - DNA, 19 bp, Mus musculus
  siRNA target sequence for Cdc20 (NM_023223.1,440-458).
ggacgcccaccaaaaagga

SEQ ID NO: 713053 - DNA, 19 bp, Mus musculus
  siRNA target sequence for Cdc20 (NM_023223.1,555-573).
ctaccagaacagactgaaa

SEQ ID NO: 713054 - DNA, 19 bp, Mus musculus
  siRNA target sequence for Cdc20 (NM_023223.1,661-679).
cccgaaatccggaatgact

SEQ ID NO: 713055 - DNA, 19 bp, Mus musculus
  siRNA target sequence for Cdc20 (NM_023223.1,662-680).
ccgaaatccggaatgacta

SEQ ID NO: 713056 - DNA, 19 bp, Mus musculus
  siRNA target sequence for Cdc20 (NM_023223.1,678-696).
ctactacctgaatcttgta

SEQ ID NO: 713057 - DNA, 19 bp, Mus musculus
  siRNA target sequence for Cdc20 (NM_023223.1,732-750).
ggacaacagtgtgtactta

SEQ ID NO: 713058 - DNA, 19 bp, Mus musculus
  siRNA target sequence for Cdc20 (NM_023223.1,799-817).
cctggagactacatatcct

SEQ ID NO: 713059 - DNA, 19 bp, Mus musculus
  siRNA target sequence for Cdc20 (NM_023223.1,946-964).
ctcagttggaacagctata

SEQ ID NO: 713060 - DNA, 19 bp, Mus musculus
  siRNA target sequence for Cdc20 (NM_023223.1,1045-1063).
ggccatagccaggaagtat

SEQ ID NO: 713061 - DNA, 19 bp, Mus musculus
  siRNA target sequence for Cdc20 (NM_023223.1,1098-1116).
ggcaagtggtggcaatgat

SEQ ID NO: 713062 - DNA, 19 bp, Mus musculus
  siRNA target sequence for Cdc20 (NM_023223.1,1099-1117).
gcaagtggtggcaatgata

SEQ ID NO: 713063 - DNA, 19 bp, Mus musculus
  siRNA target sequence for Cdc20 (NM_023223.1,1108-1126).
ggcaatgataacattgtca

SEQ ID NO: 713064 - DNA, 19 bp, Mus musculus
  siRNA target sequence for Cdc20 (NM_023223.1,1220-1238).
cctggcagtccaatatcct

SEQ ID NO: 713065 - DNA, 19 bp, Mus musculus
  siRNA target sequence for Cdc20 (NM_023223.1,1264-1282).
cggcacattcgcatttgga

SEQ ID NO: 713066 - DNA, 19 bp, Mus musculus
  siRNA target sequence for Cdc20 (NM_023223.1,1265-1283).
ggcacattcgcatttggaa

SEQ ID NO: 713067 - DNA, 19 bp, Mus musculus
  siRNA target sequence for Cdc20 (NM_023223.1,1346-1364).
ggtctccccactataagga

SEQ ID NO: 713068 - DNA, 19 bp, Mus musculus
  siRNA target sequence for Cdc20 (NM_023223.1,1390-1408).
cagaaccagctggttattt

SEQ ID NO: 713069 - DNA, 19 bp, Mus musculus
  siRNA target sequence for Cdc20 (NM_023223.1,1398-1416).
gctggttatttggaagtat

SEQ ID NO: 713070 - DNA, 19 bp, Mus musculus
  siRNA target sequence for Cdc20 (NM_023223.1,1459-1477).
cgggtcctgggtcttacaa

SEQ ID NO: 713071 - DNA, 19 bp, Mus musculus
  siRNA target sequence for Cdc20 (NM_023223.1,1460-1478).
gggtcctgggtcttacaat

SEQ ID NO: 713072 - DNA, 19 bp, Mus musculus
  siRNA target sequence for 5730494G16Rik (NM_023239.3,438-456).
ccgagcgcctgcaatacgt

SEQ ID NO: 713073 - DNA, 19 bp, Mus musculus
  siRNA target sequence for 5730494G16Rik (NM_023239.3,567-585).
ccatctcgggcctgcttat

SEQ ID NO: 713074 - DNA, 19 bp, Mus musculus
  siRNA target sequence for 5730494G16Rik (NM_023239.3,571-589).
ctcgggcctgcttatgata

SEQ ID NO: 713075 - DNA, 19 bp, Mus musculus
  siRNA target sequence for 5730494G16Rik (NM_023239.3,573-591).
cgggcctgcttatgatagt

SEQ ID NO: 713076 - DNA, 19 bp, Mus musculus
  siRNA target sequence for 5730494G16Rik (NM_023239.3,662-680).
ggagtgtaccccactaaga

SEQ ID NO: 713077 - DNA, 19 bp, Mus musculus
  siRNA target sequence for 5730494G16Rik (NM_023239.3,663-681).
gagtgtaccccactaagaa

SEQ ID NO: 713078 - DNA, 19 bp, Mus musculus
  siRNA target sequence for 5730494G16Rik (NM_023239.3,670-688).
ccccactaagaaacactta

SEQ ID NO: 713079 - DNA, 19 bp, Mus musculus
  siRNA target sequence for 5730494G16Rik (NM_023239.3,695-713).
ggcgacccaaagaaactca

SEQ ID NO: 713080 - DNA, 19 bp, Mus musculus
  siRNA target sequence for 5730494G16Rik (NM_023239.3,696-714).
gcgacccaaagaaactcat

SEQ ID NO: 713081 - DNA, 19 bp, Mus musculus
  siRNA target sequence for 5730494G16Rik (NM_023239.3,770-788).
gatcctgtggactatgaat

SEQ ID NO: 713082 - DNA, 19 bp, Mus musculus
  siRNA target sequence for 5730494G16Rik (NM_023239.3,774-792).
ctgtggactatgaattaca

SEQ ID NO: 713083 - DNA, 19 bp, Mus musculus
  siRNA target sequence for 5730494G16Rik (NM_023239.3,776-794).
gtggactatgaattacagt

SEQ ID NO: 713084 - DNA, 19 bp, Mus musculus
  siRNA target sequence for Palmd (NM_023245.2,245-263).
gccatcactgacaaaagaa

SEQ ID NO: 713085 - DNA, 19 bp, Mus musculus
  siRNA target sequence for Palmd (NM_023245.2,265-283).
gatacaggaagaaatctca

SEQ ID NO: 713086 - DNA, 19 bp, Mus musculus
  siRNA target sequence for Palmd (NM_023245.2,282-300).
cacagaagcgtctgaaaat

SEQ ID NO: 713087 - DNA, 19 bp, Mus musculus
  siRNA target sequence for Palmd (NM_023245.2,490-508).
ggctgaactgcaaatctca

SEQ ID NO: 713088 - DNA, 19 bp, Mus musculus
  siRNA target sequence for Palmd (NM_023245.2,510-528).
ccaacgaagaggcaattct

SEQ ID NO: 713089 - DNA, 19 bp, Mus musculus
  siRNA target sequence for Palmd (NM_023245.2,576-594).
ccgtgaaggtggaaaagga

SEQ ID NO: 713090 - DNA, 19 bp, Mus musculus
  siRNA target sequence for Palmd (NM_023245.2,610-628).
gtcaatcgaggacatctat

SEQ ID NO: 713091 - DNA, 19 bp, Mus musculus
  siRNA target sequence for Palmd (NM_023245.2,616-634).
cgaggacatctatgctaat

SEQ ID NO: 713092 - DNA, 19 bp, Mus musculus
  siRNA target sequence for Palmd (NM_023245.2,617-635).
gaggacatctatgctaata

SEQ ID NO: 713093 - DNA, 19 bp, Mus musculus
  siRNA target sequence for Palmd (NM_023245.2,622-640).
catctatgctaatatccat

SEQ ID NO: 713094 - DNA, 19 bp, Mus musculus
  siRNA target sequence for Palmd (NM_023245.2,647-665).
ccaagttcctacatacctt

SEQ ID NO: 713095 - DNA, 19 bp, Mus musculus
  siRNA target sequence for Palmd (NM_023245.2,771-789).
gcgtagttctgtcttcaat

SEQ ID NO: 713096 - DNA, 19 bp, Mus musculus
  siRNA target sequence for Palmd (NM_023245.2,772-790).
cgtagttctgtcttcaata

SEQ ID NO: 713097 - DNA, 19 bp, Mus musculus
  siRNA target sequence for Palmd (NM_023245.2,792-810).
cgctgccatctgatgactt

SEQ ID NO: 713098 - DNA, 19 bp, Mus musculus
  siRNA target sequence for Palmd (NM_023245.2,816-834).
gcacagggataaaagtgta

SEQ ID NO: 713099 - DNA, 19 bp, Mus musculus
  siRNA target sequence for Palmd (NM_023245.2,860-878).
gctgttagctccaatcaga

SEQ ID NO: 713100 - DNA, 19 bp, Mus musculus
  siRNA target sequence for Palmd (NM_023245.2,1036-1054).
cataagccctggaccaaat

SEQ ID NO: 713101 - DNA, 19 bp, Mus musculus
  siRNA target sequence for Palmd (NM_023245.2,1042-1060).
ccctggaccaaattttcaa

SEQ ID NO: 713102 - DNA, 19 bp, Mus musculus
  siRNA target sequence for Palmd (NM_023245.2,1046-1064).
ggaccaaattttcaagaaa

SEQ ID NO: 713103 - DNA, 19 bp, Mus musculus
  siRNA target sequence for Palmd (NM_023245.2,1086-1104).
gactgggcaaccatgcaaa

SEQ ID NO: 713104 - DNA, 19 bp, Mus musculus
  siRNA target sequence for Palmd (NM_023245.2,1090-1108).
gggcaaccatgcaaatgaa

SEQ ID NO: 713105 - DNA, 19 bp, Mus musculus
  siRNA target sequence for Palmd (NM_023245.2,1106-1124).
gaatctgcgcacaatatga

SEQ ID NO: 713106 - DNA, 19 bp, Mus musculus
  siRNA target sequence for Palmd (NM_023245.2,1185-1203).
cacctcagccccgatcaat

SEQ ID NO: 713107 - DNA, 19 bp, Mus musculus
  siRNA target sequence for Palmd (NM_023245.2,1280-1298).
caaaacgaacacgaagttt

SEQ ID NO: 713108 - DNA, 19 bp, Mus musculus
  siRNA target sequence for Palmd (NM_023245.2,1437-1455).
cagaacctgtaacaatgat

SEQ ID NO: 713109 - DNA, 19 bp, Mus musculus
  siRNA target sequence for Palmd (NM_023245.2,1531-1549).
cgctgagctcgttgtgatt

SEQ ID NO: 713110 - DNA, 19 bp, Mus musculus
  siRNA target sequence for Palmd (NM_023245.2,1555-1573).
cgaggcggaggataatgaa

SEQ ID NO: 713111 - DNA, 19 bp, Mus musculus
  siRNA target sequence for Palmd (NM_023245.2,1611-1629).
cctacagtcaggtttacca

SEQ ID NO: 713112 - DNA, 19 bp, Mus musculus
  siRNA target sequence for Palmd (NM_023245.2,1641-1659).
caaccccacttcctagaaa

SEQ ID NO: 713113 - DNA, 19 bp, Mus musculus
  siRNA target sequence for Palmd (NM_023245.2,1666-1684).
ggaagttaggccgtatgaa

SEQ ID NO: 713114 - DNA, 19 bp, Mus musculus
  siRNA target sequence for Palmd (NM_023245.2,1667-1685).
gaagttaggccgtatgaaa

SEQ ID NO: 713115 - DNA, 19 bp, Mus musculus
  siRNA target sequence for Palmd (NM_023245.2,1670-1688).
gttaggccgtatgaaaaca

SEQ ID NO: 713116 - DNA, 19 bp, Mus musculus
  siRNA target sequence for 4733401H18Rik (NM_023247.1,535-553).
cggacgatgagttatacca

SEQ ID NO: 713117 - DNA, 19 bp, Mus musculus
  siRNA target sequence for 4733401H18Rik (NM_023247.1,616-634).
gtagcagaggcttcactat

SEQ ID NO: 713118 - DNA, 19 bp, Mus musculus
  siRNA target sequence for 4733401H18Rik (NM_023247.1,689-707).
gtggaacgtgggatctcat

SEQ ID NO: 713119 - DNA, 19 bp, Mus musculus
  siRNA target sequence for 4733401H18Rik (NM_023247.1,699-717).
ggatctcatcaggatatca

SEQ ID NO: 713120 - DNA, 19 bp, Mus musculus
  siRNA target sequence for 4733401H18Rik (NM_023247.1,743-761).
gatgctggaacctaggata

SEQ ID NO: 713121 - DNA, 19 bp, Mus musculus
  siRNA target sequence for 4733401H18Rik (NM_023247.1,754-772).
ctaggatagagattgttgt

SEQ ID NO: 713122 - DNA, 19 bp, Mus musculus
  siRNA target sequence for 4733401H18Rik (NM_023247.1,827-845).
gaggcagcggggaattgct

SEQ ID NO: 713123 - DNA, 19 bp, Mus musculus
  siRNA target sequence for 4733401H18Rik (NM_023247.1,870-888).
gcctgtgccactttcaact

SEQ ID NO: 713124 - DNA, 19 bp, Mus musculus
  siRNA target sequence for Ypel1 (NM_023249.2,260-278).
cactgtcaccgaacttaca

SEQ ID NO: 713125 - DNA, 19 bp, Mus musculus
  siRNA target sequence for Ypel1 (NM_023249.2,536-554).
gaacttgcccacatgatca

SEQ ID NO: 713126 - DNA, 19 bp, Mus musculus
  siRNA target sequence for 9130417A21Rik (NM_023258.3,119-137).
ctggacgctcttgaaaact

SEQ ID NO: 713127 - DNA, 19 bp, Mus musculus
  siRNA target sequence for 9130417A21Rik (NM_023258.3,229-247).
gcagatggacgccatagat

SEQ ID NO: 713128 - DNA, 19 bp, Mus musculus
  siRNA target sequence for 9130417A21Rik (NM_023258.3,241-259).
catagatctcactgacaaa

SEQ ID NO: 713129 - DNA, 19 bp, Mus musculus
  siRNA target sequence for 9130417A21Rik (NM_023258.3,300-318).
caatgactgtgcttagaga

SEQ ID NO: 713130 - DNA, 19 bp, Mus musculus
  siRNA target sequence for 9130417A21Rik (NM_023258.3,346-364).
gctgcaaacgactaaagaa

SEQ ID NO: 713131 - DNA, 19 bp, Mus musculus
  siRNA target sequence for 9130417A21Rik (NM_023258.3,625-643).
ggccttgaaggaaatacat

SEQ ID NO: 713132 - DNA, 19 bp, Mus musculus
  siRNA target sequence for Jam3 (NM_023277.1,103-121).
gaggcagtgaatctcaaat

SEQ ID NO: 713133 - DNA, 19 bp, Mus musculus
  siRNA target sequence for Jam3 (NM_023277.1,135-153).
cccagtggtacatgaattt

SEQ ID NO: 713134 - DNA, 19 bp, Mus musculus
  siRNA target sequence for Jam3 (NM_023277.1,141-159).
ggtacatgaatttgaaagt

SEQ ID NO: 713135 - DNA, 19 bp, Mus musculus
  siRNA target sequence for Jam3 (NM_023277.1,154-172).
gaaagtgtggaattgtctt

SEQ ID NO: 713136 - DNA, 19 bp, Mus musculus
  siRNA target sequence for Jam3 (NM_023277.1,162-180).
ggaattgtcttgcatcatt

SEQ ID NO: 713137 - DNA, 19 bp, Mus musculus
  siRNA target sequence for Jam3 (NM_023277.1,163-181).
gaattgtcttgcatcatta

SEQ ID NO: 713138 - DNA, 19 bp, Mus musculus
  siRNA target sequence for Jam3 (NM_023277.1,234-252).
ccaaaccacatatgtgtat

SEQ ID NO: 713139 - DNA, 19 bp, Mus musculus
  siRNA target sequence for Jam3 (NM_023277.1,281-299).
caggtcgcacagatgtgtt

SEQ ID NO: 713140 - DNA, 19 bp, Mus musculus
  siRNA target sequence for Jam3 (NM_023277.1,286-304).
cgcacagatgtgtttggaa

SEQ ID NO: 713141 - DNA, 19 bp, Mus musculus
  siRNA target sequence for Jam3 (NM_023277.1,359-377).
gtgaggtcgttgctctaaa

SEQ ID NO: 713142 - DNA, 19 bp, Mus musculus
  siRNA target sequence for Jam3 (NM_023277.1,371-389).
ctctaaatgaccgaaaaga

SEQ ID NO: 713143 - DNA, 19 bp, Mus musculus
  siRNA target sequence for Jam3 (NM_023277.1,530-548).
gctggtaccgcaatgatgt

SEQ ID NO: 713144 - DNA, 19 bp, Mus musculus
  siRNA target sequence for Jam3 (NM_023277.1,652-670).
gactctgggcagtactact

SEQ ID NO: 713145 - DNA, 19 bp, Mus musculus
  siRNA target sequence for Jam3 (NM_023277.1,666-684).
ctactgcattgcttccaat

SEQ ID NO: 713146 - DNA, 19 bp, Mus musculus
  siRNA target sequence for Jam3 (NM_023277.1,714-732).
ggacatggaagtctatgat

SEQ ID NO: 713147 - DNA, 19 bp, Mus musculus
  siRNA target sequence for Jam3 (NM_023277.1,715-733).
gacatggaagtctatgatt

SEQ ID NO: 713148 - DNA, 19 bp, Mus musculus
  siRNA target sequence for Jam3 (NM_023277.1,827-845).
gcttcatcagcagtaaaca

SEQ ID NO: 713149 - DNA, 19 bp, Mus musculus
  siRNA target sequence for Jam3 (NM_023277.1,872-890).
ggaagcatgacggtgttaa

SEQ ID NO: 713150 - DNA, 19 bp, Mus musculus
  siRNA target sequence for Jam3 (NM_023277.1,916-934).
gacttcagacacaaatcgt

SEQ ID NO: 713151 - DNA, 19 bp, Mus musculus
  siRNA target sequence for Jam3 (NM_023277.1,925-943).
cacaaatcgtcctttgtta

SEQ ID NO: 713152 - DNA, 19 bp, Mus musculus
  siRNA target sequence for Cdca1 (NM_023284.1,213-231).
cattccccagatacaatgt

SEQ ID NO: 713153 - DNA, 19 bp, Mus musculus
  siRNA target sequence for Cdca1 (NM_023284.1,244-262).
ggttcatattcgcaataaa

SEQ ID NO: 713154 - DNA, 19 bp, Mus musculus
  siRNA target sequence for Cdca1 (NM_023284.1,245-263).
gttcatattcgcaataaat

SEQ ID NO: 713155 - DNA, 19 bp, Mus musculus
  siRNA target sequence for Cdca1 (NM_023284.1,289-307).
cctctcgaagagcgatttt

SEQ ID NO: 713156 - DNA, 19 bp, Mus musculus
  siRNA target sequence for Cdca1 (NM_023284.1,298-316).
gagcgattttcttccaaat

SEQ ID NO: 713157 - DNA, 19 bp, Mus musculus
  siRNA target sequence for Cdca1 (NM_023284.1,318-336).
cgaagtctgatgtcttgta

SEQ ID NO: 713158 - DNA, 19 bp, Mus musculus
  siRNA target sequence for Cdca1 (NM_023284.1,377-395).
cggctggagcacttctaca

SEQ ID NO: 713159 - DNA, 19 bp, Mus musculus
  siRNA target sequence for Cdca1 (NM_023284.1,378-396).
ggctggagcacttctacat

SEQ ID NO: 713160 - DNA, 19 bp, Mus musculus
  siRNA target sequence for Cdca1 (NM_023284.1,394-412).
catgatgccgatgaacata

SEQ ID NO: 713161 - DNA, 19 bp, Mus musculus
  siRNA target sequence for Cdca1 (NM_023284.1,406-424).
gaacatagaagtcacatat

SEQ ID NO: 713162 - DNA, 19 bp, Mus musculus
  siRNA target sequence for Cdca1 (NM_023284.1,420-438).
catatccacatttaatgga

SEQ ID NO: 713163 - DNA, 19 bp, Mus musculus
  siRNA target sequence for Cdca1 (NM_023284.1,489-507).
ccatttgccgggtgaatga

SEQ ID NO: 713164 - DNA, 19 bp, Mus musculus
  siRNA target sequence for Cdca1 (NM_023284.1,497-515).
cgggtgaatgactttgaga

SEQ ID NO: 713165 - DNA, 19 bp, Mus musculus
  siRNA target sequence for Cdca1 (NM_023284.1,499-517).
ggtgaatgactttgagatt

SEQ ID NO: 713166 - DNA, 19 bp, Mus musculus
  siRNA target sequence for Cdca1 (NM_023284.1,512-530).
gagattgtcgacattctta

SEQ ID NO: 713167 - DNA, 19 bp, Mus musculus
  siRNA target sequence for Cdca1 (NM_023284.1,518-536).
gtcgacattcttaatccaa

SEQ ID NO: 713168 - DNA, 19 bp, Mus musculus
  siRNA target sequence for Cdca1 (NM_023284.1,523-541).
cattcttaatccaagaaca

SEQ ID NO: 713169 - DNA, 19 bp, Mus musculus
  siRNA target sequence for Cdca1 (NM_023284.1,544-562).
ccggacaagtcgtttttta

SEQ ID NO: 713170 - DNA, 19 bp, Mus musculus
  siRNA target sequence for Cdca1 (NM_023284.1,547-565).
gacaagtcgttttttaagt

SEQ ID NO: 713171 - DNA, 19 bp, Mus musculus
  siRNA target sequence for Cdca1 (NM_023284.1,807-825).
cactgctgcaggaggaata

SEQ ID NO: 713172 - DNA, 19 bp, Mus musculus
  siRNA target sequence for Cdca1 (NM_023284.1,829-847).
caaaatgaaatccgatatt

SEQ ID NO: 713173 - DNA, 19 bp, Mus musculus
  siRNA target sequence for Cdca1 (NM_023284.1,863-881).
catttaaatgaacaaaagt

SEQ ID NO: 713174 - DNA, 19 bp, Mus musculus
  siRNA target sequence for Cdca1 (NM_023284.1,1013-1031).
gtgatggagcagtatgata

SEQ ID NO: 713175 - DNA, 19 bp, Mus musculus
  siRNA target sequence for Cdca1 (NM_023284.1,1019-1037).
gagcagtatgatatctata

SEQ ID NO: 713176 - DNA, 19 bp, Mus musculus
  siRNA target sequence for Cdca1 (NM_023284.1,1024-1042).
gtatgatatctatagagat

SEQ ID NO: 713177 - DNA, 19 bp, Mus musculus
  siRNA target sequence for Cdca1 (NM_023284.1,1073-1091).
gaggtgcagttgtatcaaa

SEQ ID NO: 713178 - DNA, 19 bp, Mus musculus
  siRNA target sequence for Cdca1 (NM_023284.1,1076-1094).
gtgcagttgtatcaaaaga

SEQ ID NO: 713179 - DNA, 19 bp, Mus musculus
  siRNA target sequence for Cdca1 (NM_023284.1,1110-1128).
cagataatagggagaaact

SEQ ID NO: 713180 - DNA, 19 bp, Mus musculus
  siRNA target sequence for Cdca1 (NM_023284.1,1162-1180).
ggaccagattgaaagtgat

SEQ ID NO: 713181 - DNA, 19 bp, Mus musculus
  siRNA target sequence for Cdca1 (NM_023284.1,1165-1183).
ccagattgaaagtgattca

SEQ ID NO: 713182 - DNA, 19 bp, Mus musculus
  siRNA target sequence for Cdca1 (NM_023284.1,1166-1184).
cagattgaaagtgattcat

SEQ ID NO: 713183 - DNA, 19 bp, Mus musculus
  siRNA target sequence for Cdca1 (NM_023284.1,1178-1196).
gattcatcggaactaaaga

SEQ ID NO: 713184 - DNA, 19 bp, Mus musculus
  siRNA target sequence for Cdca1 (NM_023284.1,1263-1281).
cgcgattcaaaatcaacaa

SEQ ID NO: 713185 - DNA, 19 bp, Mus musculus
  siRNA target sequence for Cdca1 (NM_023284.1,1265-1283).
cgattcaaaatcaacaaga

SEQ ID NO: 713186 - DNA, 19 bp, Mus musculus
  siRNA target sequence for Cdca1 (NM_023284.1,1285-1303).
gcaggaggatgtgaaacat

SEQ ID NO: 713187 - DNA, 19 bp, Mus musculus
  siRNA target sequence for Cdca1 (NM_023284.1,1318-1336).
gattgaagactgcaataaa

SEQ ID NO: 713188 - DNA, 19 bp, Mus musculus
  siRNA target sequence for Cdca1 (NM_023284.1,1355-1373).
gctgtctgtgagcaagtaa

SEQ ID NO: 713189 - DNA, 19 bp, Mus musculus
  siRNA target sequence for Cdca1 (NM_023284.1,1364-1382).
gagcaagtaaccactgtta

SEQ ID NO: 713190 - DNA, 19 bp, Mus musculus
  siRNA target sequence for Cdca1 (NM_023284.1,1366-1384).
gcaagtaaccactgttaat

SEQ ID NO: 713191 - DNA, 19 bp, Mus musculus
  siRNA target sequence for Ceacam11 (NM_023289.1,224-242).
cacccagatcaccattgaa

SEQ ID NO: 713192 - DNA, 19 bp, Mus musculus
  siRNA target sequence for Ceacam11 (NM_023289.1,336-354).
gttaaaccactcaagaatt

SEQ ID NO: 713193 - DNA, 19 bp, Mus musculus
  siRNA target sequence for Ceacam11 (NM_023289.1,755-773).
gctggggagtgcatatcaa

SEQ ID NO: 713194 - DNA, 19 bp, Mus musculus
  siRNA target sequence for Ceacam11 (NM_023289.1,771-789).
caagacagagtgataatat

SEQ ID NO: 713195 - DNA, 19 bp, Mus musculus
  siRNA target sequence for Ceacam11 (NM_023289.1,776-794).
cagagtgataatatgtaat

SEQ ID NO: 713196 - DNA, 19 bp, Mus musculus
  siRNA target sequence for Ceacam11 (NM_023289.1,992-1010).
catgtgcgattcttccatt

SEQ ID NO: 713197 - DNA, 19 bp, Mus musculus
  siRNA target sequence for Ceacam11 (NM_023289.1,995-1013).
gtgcgattcttccattact

SEQ ID NO: 713198 - DNA, 19 bp, Mus musculus
  siRNA target sequence for Ceacam11 (NM_023289.1,1006-1024).
ccattacttccgttactat

SEQ ID NO: 713199 - DNA, 19 bp, Mus musculus
  siRNA target sequence for Ceacam11 (NM_023289.1,1007-1025).
cattacttccgttactatt

SEQ ID NO: 713200 - DNA, 19 bp, Mus musculus
  siRNA target sequence for Ceacam11 (NM_023289.1,1015-1033).
ccgttactattcaaaataa

SEQ ID NO: 713201 - DNA, 19 bp, Mus musculus
  siRNA target sequence for 2610020J05Rik (NM_023292.2,240-258).
gctaagcgtgcttttgatt

SEQ ID NO: 713202 - DNA, 19 bp, Mus musculus
  siRNA target sequence for 2610020J05Rik (NM_023292.2,277-295).
gacatgtagctctaaaaat

SEQ ID NO: 713203 - DNA, 19 bp, Mus musculus
  siRNA target sequence for 2610020J05Rik (NM_023292.2,382-400).
ctaagacccgactagtaga

SEQ ID NO: 713204 - DNA, 19 bp, Mus musculus
  siRNA target sequence for 2610020J05Rik (NM_023292.2,406-424).
gacagacatccaactatca

SEQ ID NO: 713205 - DNA, 19 bp, Mus musculus
  siRNA target sequence for 2610020J05Rik (NM_023292.2,408-426).
cagacatccaactatcata

SEQ ID NO: 713206 - DNA, 19 bp, Mus musculus
  siRNA target sequence for 2610020J05Rik (NM_023292.2,456-474).
gcctttggacaggtgattt

SEQ ID NO: 713207 - DNA, 19 bp, Mus musculus
  siRNA target sequence for 2610020J05Rik (NM_023292.2,483-501).
ctacgttctcagtttccaa

SEQ ID NO: 713208 - DNA, 19 bp, Mus musculus
  siRNA target sequence for 2610020J05Rik (NM_023292.2,499-517).
caacgagcagggattcaga

SEQ ID NO: 713209 - DNA, 19 bp, Mus musculus
  siRNA target sequence for 2610020J05Rik (NM_023292.2,552-570).
gctaaagagatccgttata

SEQ ID NO: 713210 - DNA, 19 bp, Mus musculus
  siRNA target sequence for 2610020J05Rik (NM_023292.2,560-578).
gatccgttatactcacatt

SEQ ID NO: 713211 - DNA, 19 bp, Mus musculus
  siRNA target sequence for 2610020J05Rik (NM_023292.2,564-582).
cgttatactcacattctca

SEQ ID NO: 713212 - DNA, 19 bp, Mus musculus
  siRNA target sequence for 2610020J05Rik (NM_023292.2,595-613).
ctgcagacatccgagtatt

SEQ ID NO: 713213 - DNA, 19 bp, Mus musculus
  siRNA target sequence for 2610020J05Rik (NM_023292.2,656-674).
ctgtcttgagcggacttat

SEQ ID NO: 713214 - DNA, 19 bp, Mus musculus
  siRNA target sequence for 2610020J05Rik (NM_023292.2,665-683).
gcggacttatcgctatttt

SEQ ID NO: 713215 - DNA, 19 bp, Mus musculus
  siRNA target sequence for 2610020J05Rik (NM_023292.2,666-684).
cggacttatcgctattttt

SEQ ID NO: 713216 - DNA, 19 bp, Mus musculus
  siRNA target sequence for 2610020J05Rik (NM_023292.2,667-685).
ggacttatcgctatttttt

SEQ ID NO: 713217 - DNA, 19 bp, Mus musculus
  siRNA target sequence for 2610020J05Rik (NM_023292.2,686-704).
ccctcgtgcggatttagat

SEQ ID NO: 713218 - DNA, 19 bp, Mus musculus
  siRNA target sequence for 2610020J05Rik (NM_023292.2,687-705).
cctcgtgcggatttagata

SEQ ID NO: 713219 - DNA, 19 bp, Mus musculus
  siRNA target sequence for 2610020J05Rik (NM_023292.2,693-711).
gcggatttagatattgcaa

SEQ ID NO: 713220 - DNA, 19 bp, Mus musculus
  siRNA target sequence for 2610020J05Rik (NM_023292.2,741-759).
ggcactcatgatttcagaa

SEQ ID NO: 713221 - DNA, 19 bp, Mus musculus
  siRNA target sequence for 2610020J05Rik (NM_023292.2,742-760).
gcactcatgatttcagaaa

SEQ ID NO: 713222 - DNA, 19 bp, Mus musculus
  siRNA target sequence for 2610020J05Rik (NM_023292.2,777-795).
gtagccaatggagtgatta

SEQ ID NO: 713223 - DNA, 19 bp, Mus musculus
  siRNA target sequence for 2610020J05Rik (NM_023292.2,817-835).
gtgcacaagtacaactagt

SEQ ID NO: 713224 - DNA, 19 bp, Mus musculus
  siRNA target sequence for 2610020J05Rik (NM_023292.2,870-888).
ccattccagttatgtcaat

SEQ ID NO: 713225 - DNA, 19 bp, Mus musculus
  siRNA target sequence for 2610020J05Rik (NM_023292.2,918-936).
catcaagttcggtgtatga

SEQ ID NO: 713226 - DNA, 19 bp, Mus musculus
  siRNA target sequence for 2610020J05Rik (NM_023292.2,968-986).
ggagaagccagagattatt

SEQ ID NO: 713227 - DNA, 19 bp, Mus musculus
  siRNA target sequence for 2610020J05Rik (NM_023292.2,971-989).
gaagccagagattattgat

SEQ ID NO: 713228 - DNA, 19 bp, Mus musculus
  siRNA target sequence for 2610020J05Rik (NM_023292.2,975-993).
ccagagattattgatgaat

SEQ ID NO: 713229 - DNA, 19 bp, Mus musculus
  siRNA target sequence for 2610020J05Rik (NM_023292.2,990-1008).
gaattgctgaacatacaga

SEQ ID NO: 713230 - DNA, 19 bp, Mus musculus
  siRNA target sequence for 2610020J05Rik (NM_023292.2,1044-1062).
gaatttcctctagtcttat

SEQ ID NO: 713231 - DNA, 19 bp, Mus musculus
  siRNA target sequence for 2610020J05Rik (NM_023292.2,1085-1103).
caagtggatttatgatcat

SEQ ID NO: 713232 - DNA, 19 bp, Mus musculus
  siRNA target sequence for 2610020J05Rik (NM_023292.2,1144-1162).
gggctaatcatgctgttaa

SEQ ID NO: 713233 - DNA, 19 bp, Mus musculus
  siRNA target sequence for 2610020J05Rik (NM_023292.2,1158-1176).
gttaaaactcacatgctat

SEQ ID NO: 713234 - DNA, 19 bp, Mus musculus
  siRNA target sequence for 2610020J05Rik (NM_023292.2,1192-1210).
gtctagactctgttatggt

SEQ ID NO: 713235 - DNA, 19 bp, Mus musculus
  siRNA target sequence for 2610020J05Rik (NM_023292.2,1194-1212).
ctagactctgttatggtaa

SEQ ID NO: 713236 - DNA, 19 bp, Mus musculus
  siRNA target sequence for 2610020J05Rik (NM_023292.2,1197-1215).
gactctgttatggtaacat

SEQ ID NO: 713237 - DNA, 19 bp, Mus musculus
  siRNA target sequence for 2610020J05Rik (NM_023292.2,1199-1217).
ctctgttatggtaacatgt

SEQ ID NO: 713238 - DNA, 19 bp, Mus musculus
  siRNA target sequence for 2610020J05Rik (NM_023292.2,1259-1277).
cattcaaccccctgtcata

SEQ ID NO: 713239 - DNA, 19 bp, Mus musculus
  siRNA target sequence for 2610020J05Rik (NM_023292.2,1280-1298).
gcacacgagtgcctttgta

SEQ ID NO: 713240 - DNA, 19 bp, Mus musculus
  siRNA target sequence for 2610020J05Rik (NM_023292.2,1292-1310).
ctttgtagaaggagtgaaa

SEQ ID NO: 713241 - DNA, 19 bp, Mus musculus
  siRNA target sequence for 2610020J05Rik (NM_023292.2,1305-1323).
gtgaaaatgcgcacatata

SEQ ID NO: 713242 - DNA, 19 bp, Mus musculus
  siRNA target sequence for 2610020J05Rik (NM_023292.2,1363-1381).
cccggatccggcattttgt

SEQ ID NO: 713243 - DNA, 19 bp, Mus musculus
  siRNA target sequence for 2610020J05Rik (NM_023292.2,1393-1411).
gaattgagcacccacattt

SEQ ID NO: 713244 - DNA, 19 bp, Mus musculus
  siRNA target sequence for 2610020J05Rik (NM_023292.2,1405-1423).
cacatttactccataagga

SEQ ID NO: 713245 - DNA, 19 bp, Mus musculus
  siRNA target sequence for 2610020J05Rik (NM_023292.2,1441-1459).
gggactgtgctgacaaaga

SEQ ID NO: 713246 - DNA, 19 bp, Mus musculus
  siRNA target sequence for 2610020J05Rik (NM_023292.2,1482-1500).
ccaagtaagagggtttgta

SEQ ID NO: 713247 - DNA, 19 bp, Mus musculus
  siRNA target sequence for 2610020J05Rik (NM_023292.2,1486-1504).
gtaagagggtttgtataat

SEQ ID NO: 713248 - DNA, 19 bp, Mus musculus
  siRNA target sequence for 2610020J05Rik (NM_023292.2,1490-1508).
gagggtttgtataatagat

SEQ ID NO: 713249 - DNA, 19 bp, Mus musculus
  siRNA target sequence for 2610020J05Rik (NM_023292.2,1498-1516).
gtataatagatgcagaaat

SEQ ID NO: 713250 - DNA, 19 bp, Mus musculus
  siRNA target sequence for 2610020J05Rik (NM_023292.2,1512-1530).
gaaattaacagcattgcat

SEQ ID NO: 713251 - DNA, 19 bp, Mus musculus
  siRNA target sequence for 2610020P18Rik (NM_023294.1,241-259).
caataagccaggcctttat

SEQ ID NO: 713252 - DNA, 19 bp, Mus musculus
  siRNA target sequence for 2610020P18Rik (NM_023294.1,312-330).
cgacatcggaaagaaaagt

SEQ ID NO: 713253 - DNA, 19 bp, Mus musculus
  siRNA target sequence for 2610020P18Rik (NM_023294.1,524-542).
gctccatccactaaagagt

SEQ ID NO: 713254 - DNA, 19 bp, Mus musculus
  siRNA target sequence for 2610020P18Rik (NM_023294.1,720-738).
ccttggtgtggctcataga

SEQ ID NO: 713255 - DNA, 19 bp, Mus musculus
  siRNA target sequence for 2610020P18Rik (NM_023294.1,739-757).
ctgcatcaagattgatact

SEQ ID NO: 713256 - DNA, 19 bp, Mus musculus
  siRNA target sequence for 2610020P18Rik (NM_023294.1,1072-1090).
gtccttacaagcagatgtt

SEQ ID NO: 713257 - DNA, 19 bp, Mus musculus
  siRNA target sequence for 2610020P18Rik (NM_023294.1,1113-1131).
gcaacttggagtctcattt

SEQ ID NO: 713258 - DNA, 19 bp, Mus musculus
  siRNA target sequence for 2610020P18Rik (NM_023294.1,1114-1132).
caacttggagtctcattta

SEQ ID NO: 713259 - DNA, 19 bp, Mus musculus
  siRNA target sequence for 2610020P18Rik (NM_023294.1,1139-1157).
ctgaaacagaaatcgaata

SEQ ID NO: 713260 - DNA, 19 bp, Mus musculus
  siRNA target sequence for 2610020P18Rik (NM_023294.1,1187-1205).
caagaatgtgaaactgtta

SEQ ID NO: 713261 - DNA, 19 bp, Mus musculus
  siRNA target sequence for 2610020P18Rik (NM_023294.1,1234-1252).
cgttgataaccagaagtat

SEQ ID NO: 713262 - DNA, 19 bp, Mus musculus
  siRNA target sequence for 2610020P18Rik (NM_023294.1,1235-1253).
gttgataaccagaagtatt

SEQ ID NO: 713263 - DNA, 19 bp, Mus musculus
  siRNA target sequence for 2610020P18Rik (NM_023294.1,1258-1276).
cgctgacattgagagaata

SEQ ID NO: 713264 - DNA, 19 bp, Mus musculus
  siRNA target sequence for 2610020P18Rik (NM_023294.1,1259-1277).
gctgacattgagagaataa

SEQ ID NO: 713265 - DNA, 19 bp, Mus musculus
  siRNA target sequence for 2610020P18Rik (NM_023294.1,1292-1310).
gaattgcagcagactatta

SEQ ID NO: 713266 - DNA, 19 bp, Mus musculus
  siRNA target sequence for 2610020P18Rik (NM_023294.1,1548-1566).
cgctcaaagagctcttgaa

SEQ ID NO: 713267 - DNA, 19 bp, Mus musculus
  siRNA target sequence for 2610020P18Rik (NM_023294.1,1572-1590).
gcgaagaagaaattaacaa

SEQ ID NO: 713268 - DNA, 19 bp, Mus musculus
  siRNA target sequence for 2610020P18Rik (NM_023294.1,1608-1626).
ggcatctggaggatacttt

SEQ ID NO: 713269 - DNA, 19 bp, Mus musculus
  siRNA target sequence for Ubap1 (NM_023305.2,251-269).
cttgacgatgtcccattta

SEQ ID NO: 713270 - DNA, 19 bp, Mus musculus
  siRNA target sequence for Ubap1 (NM_023305.2,254-272).
gacgatgtcccatttaaga

SEQ ID NO: 713271 - DNA, 19 bp, Mus musculus
  siRNA target sequence for Ubap1 (NM_023305.2,271-289).
gataggagacaaattcaaa

SEQ ID NO: 713272 - DNA, 19 bp, Mus musculus
  siRNA target sequence for Ubap1 (NM_023305.2,392-410).
gagtgggctgaagatatta

SEQ ID NO: 713273 - DNA, 19 bp, Mus musculus
  siRNA target sequence for Ubap1 (NM_023305.2,461-479).
gaagctaaagtgaattcca

SEQ ID NO: 713274 - DNA, 19 bp, Mus musculus
  siRNA target sequence for Ubap1 (NM_023305.2,535-553).
cacaatgccacctcctatt

SEQ ID NO: 713275 - DNA, 19 bp, Mus musculus
  siRNA target sequence for Ubap1 (NM_023305.2,537-555).
caatgccacctcctattaa

SEQ ID NO: 713276 - DNA, 19 bp, Mus musculus
  siRNA target sequence for Ubap1 (NM_023305.2,709-727).
ggagttaaaaaccattgat

SEQ ID NO: 713277 - DNA, 19 bp, Mus musculus
  siRNA target sequence for Ubap1 (NM_023305.2,771-789).
ccataatggctcagttact

SEQ ID NO: 713278 - DNA, 19 bp, Mus musculus
  siRNA target sequence for Ubap1 (NM_023305.2,780-798).
ctcagttactggacagtaa

SEQ ID NO: 713279 - DNA, 19 bp, Mus musculus
  siRNA target sequence for Ubap1 (NM_023305.2,782-800).
cagttactggacagtaaca

SEQ ID NO: 713280 - DNA, 19 bp, Mus musculus
  siRNA target sequence for Ubap1 (NM_023305.2,853-871).
cttggagcaggcaacctta

SEQ ID NO: 713281 - DNA, 19 bp, Mus musculus
  siRNA target sequence for Ubap1 (NM_023305.2,893-911).
cccaatggctttataacct

SEQ ID NO: 713282 - DNA, 19 bp, Mus musculus
  siRNA target sequence for Ubap1 (NM_023305.2,894-912).
ccaatggctttataacctt

SEQ ID NO: 713283 - DNA, 19 bp, Mus musculus
  siRNA target sequence for Ubap1 (NM_023305.2,895-913).
caatggctttataacctta

SEQ ID NO: 713284 - DNA, 19 bp, Mus musculus
  siRNA target sequence for Ubap1 (NM_023305.2,958-976).
gtccctcccccctattcct

SEQ ID NO: 713285 - DNA, 19 bp, Mus musculus
  siRNA target sequence for Ubap1 (NM_023305.2,965-983).
ccccctattcctacagtaa

SEQ ID NO: 713286 - DNA, 19 bp, Mus musculus
  siRNA target sequence for Ubap1 (NM_023305.2,975-993).
ctacagtaagcaatatcaa

SEQ ID NO: 713287 - DNA, 19 bp, Mus musculus
  siRNA target sequence for Ubap1 (NM_023305.2,1049-1067).
cttgcgagcactttccata

SEQ ID NO: 713288 - DNA, 19 bp, Mus musculus
  siRNA target sequence for Ubap1 (NM_023305.2,1244-1262).
gtgtgtacagaagaatcat

SEQ ID NO: 713289 - DNA, 19 bp, Mus musculus
  siRNA target sequence for Ubap1 (NM_023305.2,1246-1264).
gtgtacagaagaatcatca

SEQ ID NO: 713290 - DNA, 19 bp, Mus musculus
  siRNA target sequence for Ubap1 (NM_023305.2,1271-1289).
gatccatgtcccacagtaa

SEQ ID NO: 713291 - DNA, 19 bp, Mus musculus
  siRNA target sequence for Ubap1 (NM_023305.2,1281-1299).
ccacagtaacccctctaaa

SEQ ID NO: 713292 - DNA, 19 bp, Mus musculus
  siRNA target sequence for Ubap1 (NM_023305.2,1282-1300).
cacagtaacccctctaaat

SEQ ID NO: 713293 - DNA, 19 bp, Mus musculus
  siRNA target sequence for Ubap1 (NM_023305.2,1286-1304).
gtaacccctctaaatttct

SEQ ID NO: 713294 - DNA, 19 bp, Mus musculus
  siRNA target sequence for Ubap1 (NM_023305.2,1371-1389).
cgagtgagcggcaatgtgt

SEQ ID NO: 713295 - DNA, 19 bp, Mus musculus
  siRNA target sequence for Ubap1 (NM_023305.2,1400-1418).
gtcaacatgggctactcat

SEQ ID NO: 713296 - DNA, 19 bp, Mus musculus
  siRNA target sequence for Ubap1 (NM_023305.2,1405-1423).
catgggctactcatatgat

SEQ ID NO: 713297 - DNA, 19 bp, Mus musculus
  siRNA target sequence for Ubap1 (NM_023305.2,1408-1426).
gggctactcatatgattgt

SEQ ID NO: 713298 - DNA, 19 bp, Mus musculus
  siRNA target sequence for Ubap1 (NM_023305.2,1466-1484).
cagattctcgactatctct

SEQ ID NO: 713299 - DNA, 19 bp, Mus musculus
  siRNA target sequence for Ubap1 (NM_023305.2,1468-1486).
gattctcgactatctcttt

SEQ ID NO: 713300 - DNA, 19 bp, Mus musculus
  siRNA target sequence for Ubap1 (NM_023305.2,1488-1506).
cacacggacagctttgtga

SEQ ID NO: 713301 - DNA, 19 bp, Mus musculus
  siRNA target sequence for 2610311I19Rik (NM_023311.2,145-163).
gtcaggctttgataactta

SEQ ID NO: 713302 - DNA, 19 bp, Mus musculus
  siRNA target sequence for 2610311I19Rik (NM_023311.2,192-210).
gcatcgacgagcaatctca

SEQ ID NO: 713303 - DNA, 19 bp, Mus musculus
  siRNA target sequence for 2610311I19Rik (NM_023311.2,276-294).
cgcagcaaggccgatttgt

SEQ ID NO: 713304 - DNA, 19 bp, Mus musculus
  siRNA target sequence for 2610311I19Rik (NM_023311.2,324-342).
catacactgggcagattta

SEQ ID NO: 713305 - DNA, 19 bp, Mus musculus
  siRNA target sequence for 2610311I19Rik (NM_023311.2,355-373).
ggcctatcctccaacaaca

SEQ ID NO: 713306 - DNA, 19 bp, Mus musculus
  siRNA target sequence for 2610311I19Rik (NM_023311.2,369-387).
caacacctcagccattcta

SEQ ID NO: 713307 - DNA, 19 bp, Mus musculus
  siRNA target sequence for 2610311I19Rik (NM_023311.2,602-620).
gggatcagtgcgattggat

SEQ ID NO: 713308 - DNA, 19 bp, Mus musculus
  siRNA target sequence for 2610311I19Rik (NM_023311.2,607-625).
cagtgcgattggatgttta

SEQ ID NO: 713309 - DNA, 19 bp, Mus musculus
  siRNA target sequence for 2610311I19Rik (NM_023311.2,611-629).
gcgattggatgtttaggaa

SEQ ID NO: 713310 - DNA, 19 bp, Mus musculus
  siRNA target sequence for 2610311I19Rik (NM_023311.2,612-630).
cgattggatgtttaggaat

SEQ ID NO: 713311 - DNA, 19 bp, Mus musculus
  siRNA target sequence for 2610311I19Rik (NM_023311.2,727-745).
cagctttgcagtggtattt

SEQ ID NO: 713312 - DNA, 19 bp, Mus musculus
  siRNA target sequence for 2610311I19Rik (NM_023311.2,756-774).
gaatggtaggaattcttct

SEQ ID NO: 713313 - DNA, 19 bp, Mus musculus
  siRNA target sequence for 2610311I19Rik (NM_023311.2,775-793).
cactgccacaattattgga

SEQ ID NO: 713314 - DNA, 19 bp, Mus musculus
  siRNA target sequence for 2610311I19Rik (NM_023311.2,837-855).
ctatggatggacaacaact

SEQ ID NO: 713315 - DNA, 19 bp, Mus musculus
  siRNA target sequence for 2700054G14Rik (NM_023312.1,100-118).
gtcggggtacagcatgttt

SEQ ID NO: 713316 - DNA, 19 bp, Mus musculus
  siRNA target sequence for 2700054G14Rik (NM_023312.1,146-164).
ggctactggagaatgatga

SEQ ID NO: 713317 - DNA, 19 bp, Mus musculus
  siRNA target sequence for 2700054G14Rik (NM_023312.1,366-384).
ccctcattggcgagatgta

SEQ ID NO: 713318 - DNA, 19 bp, Mus musculus
  siRNA target sequence for 2700054G14Rik (NM_023312.1,367-385).
cctcattggcgagatgtat

SEQ ID NO: 713319 - DNA, 19 bp, Mus musculus
  siRNA target sequence for 2700054G14Rik (NM_023312.1,425-443).
ggcttcacctggtacactt

SEQ ID NO: 713320 - DNA, 19 bp, Mus musculus
  siRNA target sequence for 2810052M02Rik (NM_023320.1,72-90).
gcctccggatggaaaccat

SEQ ID NO: 713321 - DNA, 19 bp, Mus musculus
  siRNA target sequence for 2810052M02Rik (NM_023320.1,246-264).
gtttgacctgagtgactat

SEQ ID NO: 713322 - DNA, 19 bp, Mus musculus
  siRNA target sequence for 2810052M02Rik (NM_023320.1,356-374).
cggcacccaacctcatctt

SEQ ID NO: 713323 - DNA, 19 bp, Mus musculus
  siRNA target sequence for 2810052M02Rik (NM_023320.1,427-445).
gccattaccagagctaaaa

SEQ ID NO: 713324 - DNA, 19 bp, Mus musculus
  siRNA target sequence for 2810052M02Rik (NM_023320.1,437-455).
gagctaaaaaccgtatctt

SEQ ID NO: 713325 - DNA, 19 bp, Mus musculus
  siRNA target sequence for 2810052M02Rik (NM_023320.1,500-518).
ctcgagacagagcaaaaat

SEQ ID NO: 713326 - DNA, 19 bp, Mus musculus
  siRNA target sequence for 2810052M02Rik (NM_023320.1,581-599).
cagatgggatgctaacatt

SEQ ID NO: 713327 - DNA, 19 bp, Mus musculus
  siRNA target sequence for 2810052M02Rik (NM_023320.1,966-984).
ggacctggtagcaaggaaa

SEQ ID NO: 713328 - DNA, 19 bp, Mus musculus
  siRNA target sequence for Peli1 (NM_023324.1,710-728).
gtcttaggatataatggat

SEQ ID NO: 713329 - DNA, 19 bp, Mus musculus
  siRNA target sequence for Peli1 (NM_023324.1,836-854).
caggctgccaaggcaataa

SEQ ID NO: 713330 - DNA, 19 bp, Mus musculus
  siRNA target sequence for Peli1 (NM_023324.1,862-880).
ggaccagcatagcatatca

SEQ ID NO: 713331 - DNA, 19 bp, Mus musculus
  siRNA target sequence for Peli1 (NM_023324.1,863-881).
gaccagcatagcatatcat

SEQ ID NO: 713332 - DNA, 19 bp, Mus musculus
  siRNA target sequence for Peli1 (NM_023324.1,866-884).
cagcatagcatatcatata

SEQ ID NO: 713333 - DNA, 19 bp, Mus musculus
  siRNA target sequence for Peli1 (NM_023324.1,868-886).
gcatagcatatcatatact

SEQ ID NO: 713334 - DNA, 19 bp, Mus musculus
  siRNA target sequence for Peli1 (NM_023324.1,899-917).
cagacggtggtggttgaat

SEQ ID NO: 713335 - DNA, 19 bp, Mus musculus
  siRNA target sequence for Peli1 (NM_023324.1,907-925).
ggtggttgaatatactcat

SEQ ID NO: 713336 - DNA, 19 bp, Mus musculus
  siRNA target sequence for Peli1 (NM_023324.1,923-941).
catgacagcaacactgata

SEQ ID NO: 713337 - DNA, 19 bp, Mus musculus
  siRNA target sequence for Peli1 (NM_023324.1,930-948).
gcaacactgatatgtttca

SEQ ID NO: 713338 - DNA, 19 bp, Mus musculus
  siRNA target sequence for Peli1 (NM_023324.1,934-952).
cactgatatgtttcagatt

SEQ ID NO: 713339 - DNA, 19 bp, Mus musculus
  siRNA target sequence for Peli1 (NM_023324.1,949-967).
gattggtcggtcaactgaa

SEQ ID NO: 713340 - DNA, 19 bp, Mus musculus
  siRNA target sequence for Peli1 (NM_023324.1,958-976).
gtcaactgaaagtcctatt

SEQ ID NO: 713341 - DNA, 19 bp, Mus musculus
  siRNA target sequence for Peli1 (NM_023324.1,969-987).
gtcctattgattttgtagt

SEQ ID NO: 713342 - DNA, 19 bp, Mus musculus
  siRNA target sequence for Peli1 (NM_023324.1,1078-1096).
gcgcagtcccccctttaca

SEQ ID NO: 713343 - DNA, 19 bp, Mus musculus
  siRNA target sequence for Peli1 (NM_023324.1,1089-1107).
cctttacagctcggattta

SEQ ID NO: 713344 - DNA, 19 bp, Mus musculus
  siRNA target sequence for Peli1 (NM_023324.1,1090-1108).
ctttacagctcggatttat

SEQ ID NO: 713345 - DNA, 19 bp, Mus musculus
  siRNA target sequence for Peli1 (NM_023324.1,1109-1127).
gctgcagggtttgattcat

SEQ ID NO: 713346 - DNA, 19 bp, Mus musculus
  siRNA target sequence for Peli1 (NM_023324.1,1121-1139).
gattcatcaaaaaacatct

SEQ ID NO: 713347 - DNA, 19 bp, Mus musculus
  siRNA target sequence for Peli1 (NM_023324.1,1186-1204).
ggatggcttgaccactaat

SEQ ID NO: 713348 - DNA, 19 bp, Mus musculus
  siRNA target sequence for Peli1 (NM_023324.1,1195-1213).
gaccactaatggagttctt

SEQ ID NO: 713349 - DNA, 19 bp, Mus musculus
  siRNA target sequence for Peli1 (NM_023324.1,1197-1215).
ccactaatggagttcttgt

SEQ ID NO: 713350 - DNA, 19 bp, Mus musculus
  siRNA target sequence for Peli1 (NM_023324.1,1200-1218).
ctaatggagttcttgtgat

SEQ ID NO: 713351 - DNA, 19 bp, Mus musculus
  siRNA target sequence for Peli1 (NM_023324.1,1358-1376).
ctacaagatggctccttaa

SEQ ID NO: 713352 - DNA, 19 bp, Mus musculus
  siRNA target sequence for Peli1 (NM_023324.1,1555-1573).
gcaaccatgggtatatcta

SEQ ID NO: 713353 - DNA, 19 bp, Mus musculus
  siRNA target sequence for Peli1 (NM_023324.1,1556-1574).
caaccatgggtatatctaa

SEQ ID NO: 713354 - DNA, 19 bp, Mus musculus
  siRNA target sequence for Peli1 (NM_023324.1,1578-1596).
gcggccatgtccatggtta

SEQ ID NO: 713355 - DNA, 19 bp, Mus musculus
  siRNA target sequence for Peli1 (NM_023324.1,1579-1597).
cggccatgtccatggttat

SEQ ID NO: 713356 - DNA, 19 bp, Mus musculus
  siRNA target sequence for Peli1 (NM_023324.1,1582-1600).
ccatgtccatggttatcat

SEQ ID NO: 713357 - DNA, 19 bp, Mus musculus
  siRNA target sequence for Peli1 (NM_023324.1,1583-1601).
catgtccatggttatcata

SEQ ID NO: 713358 - DNA, 19 bp, Mus musculus
  siRNA target sequence for Peli1 (NM_023324.1,1586-1604).
gtccatggttatcataact

SEQ ID NO: 713359 - DNA, 19 bp, Mus musculus
  siRNA target sequence for Peli1 (NM_023324.1,1627-1645).
cggcaaagatcgtgaatgt

SEQ ID NO: 713360 - DNA, 19 bp, Mus musculus
  siRNA target sequence for Peli1 (NM_023324.1,1637-1655).
cgtgaatgtcctatgtgta

SEQ ID NO: 713361 - DNA, 19 bp, Mus musculus
  siRNA target sequence for Peli1 (NM_023324.1,1854-1872).
ctggtgaacaaggctatat

SEQ ID NO: 713362 - DNA, 19 bp, Mus musculus
  siRNA target sequence for Peli1 (NM_023324.1,1856-1874).
ggtgaacaaggctatatca

SEQ ID NO: 713363 - DNA, 19 bp, Mus musculus
  siRNA target sequence for Mrpl46 (NM_023331.1,38-56).
cccgtagggcgtactcttt

SEQ ID NO: 713364 - DNA, 19 bp, Mus musculus
  siRNA target sequence for Mrpl46 (NM_023331.1,39-57).
ccgtagggcgtactctttt

SEQ ID NO: 713365 - DNA, 19 bp, Mus musculus
  siRNA target sequence for Mrpl46 (NM_023331.1,40-58).
cgtagggcgtactctttta

SEQ ID NO: 713366 - DNA, 19 bp, Mus musculus
  siRNA target sequence for Mrpl46 (NM_023331.1,306-324).
ctcagcgactggcaaagaa

SEQ ID NO: 713367 - DNA, 19 bp, Mus musculus
  siRNA target sequence for Mrpl46 (NM_023331.1,366-384).
cgctcgcacaagacttaga

SEQ ID NO: 713368 - DNA, 19 bp, Mus musculus
  siRNA target sequence for Mrpl46 (NM_023331.1,367-385).
gctcgcacaagacttagaa

SEQ ID NO: 713369 - DNA, 19 bp, Mus musculus
  siRNA target sequence for Mrpl46 (NM_023331.1,370-388).
cgcacaagacttagaagat

SEQ ID NO: 713370 - DNA, 19 bp, Mus musculus
  siRNA target sequence for Mrpl46 (NM_023331.1,371-389).
gcacaagacttagaagata

SEQ ID NO: 713371 - DNA, 19 bp, Mus musculus
  siRNA target sequence for Mrpl46 (NM_023331.1,372-390).
cacaagacttagaagatat

SEQ ID NO: 713372 - DNA, 19 bp, Mus musculus
  siRNA target sequence for Mrpl46 (NM_023331.1,374-392).
caagacttagaagatatgt

SEQ ID NO: 713373 - DNA, 19 bp, Mus musculus
  siRNA target sequence for Mrpl46 (NM_023331.1,459-477).
ggacctcgttgcatcgaaa

SEQ ID NO: 713374 - DNA, 19 bp, Mus musculus
  siRNA target sequence for Mrpl46 (NM_023331.1,463-481).
ctcgttgcatcgaaagcta

SEQ ID NO: 713375 - DNA, 19 bp, Mus musculus
  siRNA target sequence for Mrpl46 (NM_023331.1,486-504).
gaaaccttgtcctcttagt

SEQ ID NO: 713376 - DNA, 19 bp, Mus musculus
  siRNA target sequence for Mrpl46 (NM_023331.1,647-665).
ccctgtggccactacaagt

SEQ ID NO: 713377 - DNA, 19 bp, Mus musculus
  siRNA target sequence for Mrpl46 (NM_023331.1,651-669).
gtggccactacaagttcaa

SEQ ID NO: 713378 - DNA, 19 bp, Mus musculus
  siRNA target sequence for Mrpl46 (NM_023331.1,831-849).
ctcaggtcaggcgatttct

SEQ ID NO: 713379 - DNA, 19 bp, Mus musculus
  siRNA target sequence for Brd3 (NM_023336.2,370-388).
cctgcctgattatcataaa

SEQ ID NO: 713380 - DNA, 19 bp, Mus musculus
  siRNA target sequence for Brd3 (NM_023336.2,450-468).
ggagtgccagtgagtgtat

SEQ ID NO: 713381 - DNA, 19 bp, Mus musculus
  siRNA target sequence for Brd3 (NM_023336.2,519-537).
cagatgatatagtgctaat

SEQ ID NO: 713382 - DNA, 19 bp, Mus musculus
  siRNA target sequence for Brd3 (NM_023336.2,863-881).
ccgcctgtagtcaagaaaa

SEQ ID NO: 713383 - DNA, 19 bp, Mus musculus
  siRNA target sequence for Brd3 (NM_023336.2,1058-1076).
ccacagcacgcgggtaaaa

SEQ ID NO: 713384 - DNA, 19 bp, Mus musculus
  siRNA target sequence for Brd3 (NM_023336.2,1059-1077).
cacagcacgcgggtaaaaa

SEQ ID NO: 713385 - DNA, 19 bp, Mus musculus
  siRNA target sequence for Brd3 (NM_023336.2,1149-1167).
cctatgcgtggccctttta

SEQ ID NO: 713386 - DNA, 19 bp, Mus musculus
  siRNA target sequence for Brd3 (NM_023336.2,1235-1253).
ctcagcacggtcaaaagga

SEQ ID NO: 713387 - DNA, 19 bp, Mus musculus
  siRNA target sequence for Brd3 (NM_023336.2,1244-1262).
gtcaaaaggaagatggata

SEQ ID NO: 713388 - DNA, 19 bp, Mus musculus
  siRNA target sequence for Brd3 (NM_023336.2,1293-1311).
ctgctgatatccggttaat

SEQ ID NO: 713389 - DNA, 19 bp, Mus musculus
  siRNA target sequence for Brd3 (NM_023336.2,1295-1313).
gctgatatccggttaatgt

SEQ ID NO: 713390 - DNA, 19 bp, Mus musculus
  siRNA target sequence for Brd3 (NM_023336.2,1296-1314).
ctgatatccggttaatgtt

SEQ ID NO: 713391 - DNA, 19 bp, Mus musculus
  siRNA target sequence for Brd3 (NM_023336.2,1298-1316).
gatatccggttaatgttct

SEQ ID NO: 713392 - DNA, 19 bp, Mus musculus
  siRNA target sequence for Brd3 (NM_023336.2,1304-1322).
cggttaatgttctcgaatt

SEQ ID NO: 713393 - DNA, 19 bp, Mus musculus
  siRNA target sequence for Brd3 (NM_023336.2,1306-1324).
gttaatgttctcgaattgt

SEQ ID NO: 713394 - DNA, 19 bp, Mus musculus
  siRNA target sequence for Brd3 (NM_023336.2,1317-1335).
cgaattgttataagtacaa

SEQ ID NO: 713395 - DNA, 19 bp, Mus musculus
  siRNA target sequence for Brd3 (NM_023336.2,1838-1856).
gcatctgcgtcctatgact

SEQ ID NO: 713396 - DNA, 19 bp, Mus musculus
  siRNA target sequence for Brd3 (NM_023336.2,1892-1910).
gatgaaaagcgacaactta

SEQ ID NO: 713397 - DNA, 19 bp, Mus musculus
  siRNA target sequence for Brd3 (NM_023336.2,1902-1920).
gacaacttagccttgacat

SEQ ID NO: 713398 - DNA, 19 bp, Mus musculus
  siRNA target sequence for Brd3 (NM_023336.2,1950-1968).
gtgtggtgcacatcattca

SEQ ID NO: 713399 - DNA, 19 bp, Mus musculus
  siRNA target sequence for Brd3 (NM_023336.2,1980-1998).
cctcgcttcgggactcaaa

SEQ ID NO: 713400 - DNA, 19 bp, Mus musculus
  siRNA target sequence for Brd3 (NM_023336.2,1995-2013).
caaacccagacgagattga

SEQ ID NO: 713401 - DNA, 19 bp, Mus musculus
  siRNA target sequence for Brd3 (NM_023336.2,2049-2067).
gggaactggagagatatgt

SEQ ID NO: 713402 - DNA, 19 bp, Mus musculus
  siRNA target sequence for Brd3 (NM_023336.2,2122-2140).
gcaggcagccaaatcgaaa

SEQ ID NO: 713403 - DNA, 19 bp, Mus musculus
  siRNA target sequence for Brd3 (NM_023336.2,2212-2230).
caaaaaacccactaagaaa

SEQ ID NO: 713404 - DNA, 19 bp, Mus musculus
  siRNA target sequence for Snap29 (NM_023348.3,86-104).
cctaaaagctataatcctt

SEQ ID NO: 713405 - DNA, 19 bp, Mus musculus
  siRNA target sequence for Snap29 (NM_023348.3,87-105).
ctaaaagctataatccttt

SEQ ID NO: 713406 - DNA, 19 bp, Mus musculus
  siRNA target sequence for Snap29 (NM_023348.3,258-276).
ggtccttgtctctcatgta

SEQ ID NO: 713407 - DNA, 19 bp, Mus musculus
  siRNA target sequence for Snap29 (NM_023348.3,259-277).
gtccttgtctctcatgtat

SEQ ID NO: 713408 - DNA, 19 bp, Mus musculus
  siRNA target sequence for Snap29 (NM_023348.3,395-413).
catatcaacagcattaaga

SEQ ID NO: 713409 - DNA, 19 bp, Mus musculus
  siRNA target sequence for Snap29 (NM_023348.3,422-440).
ggaggatttatcaactact

SEQ ID NO: 713410 - DNA, 19 bp, Mus musculus
  siRNA target sequence for Snap29 (NM_023348.3,423-441).
gaggatttatcaactactt

SEQ ID NO: 713411 - DNA, 19 bp, Mus musculus
  siRNA target sequence for Snap29 (NM_023348.3,426-444).
gatttatcaactacttcaa

SEQ ID NO: 713412 - DNA, 19 bp, Mus musculus
  siRNA target sequence for Snap29 (NM_023348.3,519-537).
ccataaatacaagtaaaga

SEQ ID NO: 713413 - DNA, 19 bp, Mus musculus
  siRNA target sequence for Snap29 (NM_023348.3,580-598).
gctacaggatgcagaacta

SEQ ID NO: 713414 - DNA, 19 bp, Mus musculus
  siRNA target sequence for Snap29 (NM_023348.3,655-673).
ctcgacccttcgaacttat

SEQ ID NO: 713415 - DNA, 19 bp, Mus musculus
  siRNA target sequence for Snap29 (NM_023348.3,657-675).
cgacccttcgaacttatca

SEQ ID NO: 713416 - DNA, 19 bp, Mus musculus
  siRNA target sequence for Snap29 (NM_023348.3,802-820).
ggacaagctagatgtcaat

SEQ ID NO: 713417 - DNA, 19 bp, Mus musculus
  siRNA target sequence for Snap29 (NM_023348.3,803-821).
gacaagctagatgtcaata

SEQ ID NO: 713418 - DNA, 19 bp, Mus musculus
  siRNA target sequence for Snap29 (NM_023348.3,805-823).
caagctagatgtcaatata

SEQ ID NO: 713419 - DNA, 19 bp, Mus musculus
  siRNA target sequence for Snap29 (NM_023348.3,809-827).
ctagatgtcaatataaaaa

SEQ ID NO: 713420 - DNA, 19 bp, Mus musculus
  siRNA target sequence for Snap29 (NM_023348.3,812-830).
gatgtcaatataaaaagca

SEQ ID NO: 713421 - DNA, 19 bp, Mus musculus
  siRNA target sequence for 2810426N06Rik (NM_023363.1,486-504).
gtcaaagaatatgtaagtt

SEQ ID NO: 713422 - DNA, 19 bp, Mus musculus
  siRNA target sequence for 2810426N06Rik (NM_023363.1,536-554).
caatctggagaaatcttca

SEQ ID NO: 713423 - DNA, 19 bp, Mus musculus
  siRNA target sequence for 2810426N06Rik (NM_023363.1,608-626).
gaaagtggcgggatgcaat

SEQ ID NO: 713424 - DNA, 19 bp, Mus musculus
  siRNA target sequence for 2810426N06Rik (NM_023363.1,612-630).
gtggcgggatgcaatataa

SEQ ID NO: 713425 - DNA, 19 bp, Mus musculus
  siRNA target sequence for 2810426N06Rik (NM_023363.1,614-632).
ggcgggatgcaatataaat

SEQ ID NO: 713426 - DNA, 19 bp, Mus musculus
  siRNA target sequence for 2810426N06Rik (NM_023363.1,616-634).
cgggatgcaatataaatgt

SEQ ID NO: 713427 - DNA, 19 bp, Mus musculus
  siRNA target sequence for 2810426N06Rik (NM_023363.1,618-636).
ggatgcaatataaatgtga

SEQ ID NO: 713428 - DNA, 19 bp, Mus musculus
  siRNA target sequence for 2810426N06Rik (NM_023363.1,653-671).
gacctgaattctgttacaa

SEQ ID NO: 713429 - DNA, 19 bp, Mus musculus
  siRNA target sequence for 2810426N06Rik (NM_023363.1,697-715).
cagtatgagtaggtcttat

SEQ ID NO: 713430 - DNA, 19 bp, Mus musculus
  siRNA target sequence for 2810426N06Rik (NM_023363.1,699-717).
gtatgagtaggtcttataa

SEQ ID NO: 713431 - DNA, 19 bp, Mus musculus
  siRNA target sequence for 2810426N06Rik (NM_023363.1,703-721).
gagtaggtcttataacgtt

SEQ ID NO: 713432 - DNA, 19 bp, Mus musculus
  siRNA target sequence for 2810426N06Rik (NM_023363.1,718-736).
cgtttgtgccacatccttt

SEQ ID NO: 713433 - DNA, 19 bp, Mus musculus
  siRNA target sequence for 2810426N06Rik (NM_023363.1,747-765).
gctcatttggaagatatca

SEQ ID NO: 713434 - DNA, 19 bp, Mus musculus
  siRNA target sequence for 2810426N06Rik (NM_023363.1,750-768).
catttggaagatatcaaga

SEQ ID NO: 713435 - DNA, 19 bp, Mus musculus
  siRNA target sequence for 2810426N06Rik (NM_023363.1,811-829).
ctgtccttcagctaaatca

SEQ ID NO: 713436 - DNA, 19 bp, Mus musculus
  siRNA target sequence for 2810426N06Rik (NM_023363.1,853-871).
caatgcagacatcgataat

SEQ ID NO: 713437 - DNA, 19 bp, Mus musculus
  siRNA target sequence for 2810426N06Rik (NM_023363.1,858-876).
cagacatcgataatgaaca

SEQ ID NO: 713438 - DNA, 19 bp, Mus musculus
  siRNA target sequence for 2810426N06Rik (NM_023363.1,862-880).
catcgataatgaacacaaa

SEQ ID NO: 713439 - DNA, 19 bp, Mus musculus
  siRNA target sequence for 2810426N06Rik (NM_023363.1,872-890).
gaacacaaaccatttggta

SEQ ID NO: 713440 - DNA, 19 bp, Mus musculus
  siRNA target sequence for 2810426N06Rik (NM_023363.1,915-933).
gtgaaagtcgtggaagaat

SEQ ID NO: 713441 - DNA, 19 bp, Mus musculus
  siRNA target sequence for 2810426N06Rik (NM_023363.1,923-941).
cgtggaagaattaatacaa

SEQ ID NO: 713442 - DNA, 19 bp, Mus musculus
  siRNA target sequence for 2810426N06Rik (NM_023363.1,956-974).
gaatgtaggctgtgtagta

SEQ ID NO: 713443 - DNA, 19 bp, Mus musculus
  siRNA target sequence for 2810426N06Rik (NM_023363.1,969-987).
gtagtaaatctttcatgta

SEQ ID NO: 713444 - DNA, 19 bp, Mus musculus
  siRNA target sequence for 2810426N06Rik (NM_023363.1,978-996).
ctttcatgtatccttcttt

SEQ ID NO: 713445 - DNA, 19 bp, Mus musculus
  siRNA target sequence for 2810426N06Rik (NM_023363.1,1118-1136).
ccttataaatgtcattatt

SEQ ID NO: 713446 - DNA, 19 bp, Mus musculus
  siRNA target sequence for 2810426N06Rik (NM_023363.1,1130-1148).
cattattgtaataaagtgt

SEQ ID NO: 713447 - DNA, 19 bp, Mus musculus
  siRNA target sequence for 2810426N06Rik (NM_023363.1,1150-1168).
catctgtcagggatcactt

SEQ ID NO: 713448 - DNA, 19 bp, Mus musculus
  siRNA target sequence for 2810426N06Rik (NM_023363.1,1160-1178).
ggatcacttcagtcacata

SEQ ID NO: 713449 - DNA, 19 bp, Mus musculus
  siRNA target sequence for 2810426N06Rik (NM_023363.1,1161-1179).
gatcacttcagtcacatat

SEQ ID NO: 713450 - DNA, 19 bp, Mus musculus
  siRNA target sequence for 2810426N06Rik (NM_023363.1,1254-1272).
ggcgccataaaaaagttca

SEQ ID NO: 713451 - DNA, 19 bp, Mus musculus
  siRNA target sequence for 2810426N06Rik (NM_023363.1,1255-1273).
gcgccataaaaaagttcat

SEQ ID NO: 713452 - DNA, 19 bp, Mus musculus
  siRNA target sequence for 2810426N06Rik (NM_023363.1,1256-1274).
cgccataaaaaagttcata

SEQ ID NO: 713453 - DNA, 19 bp, Mus musculus
  siRNA target sequence for 2810426N06Rik (NM_023363.1,1494-1512).
cctgcttactccagattca

SEQ ID NO: 713454 - DNA, 19 bp, Mus musculus
  siRNA target sequence for 2810426N06Rik (NM_023363.1,1636-1654).
gcagtgcgctaaatctttt

SEQ ID NO: 713455 - DNA, 19 bp, Mus musculus
  siRNA target sequence for 2810426N06Rik (NM_023363.1,1642-1660).
cgctaaatcttttattaat

SEQ ID NO: 713456 - DNA, 19 bp, Mus musculus
  siRNA target sequence for 2810426N06Rik (NM_023363.1,1938-1956).
gaattcatactgacgtaaa

SEQ ID NO: 713457 - DNA, 19 bp, Mus musculus
  siRNA target sequence for 2810426N06Rik (NM_023363.1,1949-1967).
gacgtaaaggcttatgtat

SEQ ID NO: 713458 - DNA, 19 bp, Mus musculus
  siRNA target sequence for 2810426N06Rik (NM_023363.1,1951-1969).
cgtaaaggcttatgtatgt

SEQ ID NO: 713459 - DNA, 19 bp, Mus musculus
  siRNA target sequence for 2810426N06Rik (NM_023363.1,1996-2014).
ccagaggtcccttcagtta

SEQ ID NO: 713460 - DNA, 19 bp, Mus musculus
  siRNA target sequence for 2810426N06Rik (NM_023363.1,2061-2079).
gtggtaactccttcagata

SEQ ID NO: 713461 - DNA, 19 bp, Mus musculus
  siRNA target sequence for 2810426N06Rik (NM_023363.1,2064-2082).
gtaactccttcagatatca

SEQ ID NO: 713462 - DNA, 19 bp, Mus musculus
  siRNA target sequence for 2810426N06Rik (NM_023363.1,2143-2161).
gtgtgacaggtccttcatt

SEQ ID NO: 713463 - DNA, 19 bp, Mus musculus
  siRNA target sequence for 2810426N06Rik (NM_023363.1,2151-2169).
ggtccttcatttatccata

SEQ ID NO: 713464 - DNA, 19 bp, Mus musculus
  siRNA target sequence for 2810426N06Rik (NM_023363.1,2508-2526).
cctttcgggtccataaaaa

SEQ ID NO: 713465 - DNA, 19 bp, Mus musculus
  siRNA target sequence for 2810426N06Rik (NM_023363.1,2509-2527).
ctttcgggtccataaaaaa

SEQ ID NO: 713466 - DNA, 19 bp, Mus musculus
  siRNA target sequence for 2810426N06Rik (NM_023363.1,2699-2717).
catattgaggaaaaatcct

SEQ ID NO: 713467 - DNA, 19 bp, Mus musculus
  siRNA target sequence for 2810426N06Rik (NM_023363.1,2743-2761).
cttcagacgttatagttca

SEQ ID NO: 713468 - DNA, 19 bp, Mus musculus
  siRNA target sequence for 2810426N06Rik (NM_023363.1,2746-2764).
cagacgttatagttcattt

SEQ ID NO: 713469 - DNA, 19 bp, Mus musculus
  siRNA target sequence for 2810426N06Rik (NM_023363.1,2748-2766).
gacgttatagttcatttca

SEQ ID NO: 713470 - DNA, 19 bp, Mus musculus
  siRNA target sequence for 2810426N06Rik (NM_023363.1,2750-2768).
cgttatagttcatttcaaa

SEQ ID NO: 713471 - DNA, 19 bp, Mus musculus
  siRNA target sequence for 2810426N06Rik (NM_023363.1,2777-2795).
caaatccatgctatacaaa

SEQ ID NO: 713472 - DNA, 19 bp, Mus musculus
  siRNA target sequence for 2810426N06Rik (NM_023363.1,2787-2805).
ctatacaaaaactcaatga

SEQ ID NO: 713473 - DNA, 19 bp, Mus musculus
  siRNA target sequence for 2810426N06Rik (NM_023363.1,2874-2892).
gtgaaagaaccctatgtat

SEQ ID NO: 713474 - DNA, 19 bp, Mus musculus
  siRNA target sequence for 2410012A13Rik (NM_023396.3,528-546).
ggaccggaggccgtctaaa

SEQ ID NO: 713475 - DNA, 19 bp, Mus musculus
  siRNA target sequence for 1810034K20Rik (NM_023397.3,60-78).
gacgcggctgccaaagctt

SEQ ID NO: 713476 - DNA, 19 bp, Mus musculus
  siRNA target sequence for 1810034K20Rik (NM_023397.3,69-87).
gccaaagcttgcggttttt

SEQ ID NO: 713477 - DNA, 19 bp, Mus musculus
  siRNA target sequence for 1810034K20Rik (NM_023397.3,71-89).
caaagcttgcggtttttga

SEQ ID NO: 713478 - DNA, 19 bp, Mus musculus
  siRNA target sequence for 1810034K20Rik (NM_023397.3,110-128).
ctttctgggtagatacaca

SEQ ID NO: 713479 - DNA, 19 bp, Mus musculus
  siRNA target sequence for 1810034K20Rik (NM_023397.3,181-199).
ggccagaacatccaattgt

SEQ ID NO: 713480 - DNA, 19 bp, Mus musculus
  siRNA target sequence for 1810034K20Rik (NM_023397.3,182-200).
gccagaacatccaattgta

SEQ ID NO: 713481 - DNA, 19 bp, Mus musculus
  siRNA target sequence for 1810034K20Rik (NM_023397.3,387-405).
gaccggagttcctttctct

SEQ ID NO: 713482 - DNA, 19 bp, Mus musculus
  siRNA target sequence for 1810034K20Rik (NM_023397.3,460-478).
ggcgttacctgcattcaca

SEQ ID NO: 713483 - DNA, 19 bp, Mus musculus
  siRNA target sequence for 1810034K20Rik (NM_023397.3,461-479).
gcgttacctgcattcacat

SEQ ID NO: 713484 - DNA, 19 bp, Mus musculus
  siRNA target sequence for 1810034K20Rik (NM_023397.3,488-506).
ggatgagtcttcaaacgtt

SEQ ID NO: 713485 - DNA, 19 bp, Mus musculus
  siRNA target sequence for 1810034K20Rik (NM_023397.3,489-507).
gatgagtcttcaaacgtta

SEQ ID NO: 713486 - DNA, 19 bp, Mus musculus
  siRNA target sequence for 1810034K20Rik (NM_023397.3,492-510).
gagtcttcaaacgttaact

SEQ ID NO: 713487 - DNA, 19 bp, Mus musculus
  siRNA target sequence for 1810034K20Rik (NM_023397.3,503-521).
cgttaactcaaggattaga

SEQ ID NO: 713488 - DNA, 19 bp, Mus musculus
  siRNA target sequence for 1810034K20Rik (NM_023397.3,509-527).
ctcaaggattagagacatt

SEQ ID NO: 713489 - DNA, 19 bp, Mus musculus
  siRNA target sequence for Npc2 (NM_023409.3,130-148).
gctctaaggtgggagttat

SEQ ID NO: 713490 - DNA, 19 bp, Mus musculus
  siRNA target sequence for Npc2 (NM_023409.3,133-151).
ctaaggtgggagttataaa

SEQ ID NO: 713491 - DNA, 19 bp, Mus musculus
  siRNA target sequence for Npc2 (NM_023409.3,293-311).
ggtccccttccctattcct

SEQ ID NO: 713492 - DNA, 19 bp, Mus musculus
  siRNA target sequence for Npc2 (NM_023409.3,310-328).
ctgagcctgacggttgtaa

SEQ ID NO: 713493 - DNA, 19 bp, Mus musculus
  siRNA target sequence for Npc2 (NM_023409.3,312-330).
gagcctgacggttgtaaga

SEQ ID NO: 713494 - DNA, 19 bp, Mus musculus
  siRNA target sequence for Npc2 (NM_023409.3,314-332).
gcctgacggttgtaagagt

SEQ ID NO: 713495 - DNA, 19 bp, Mus musculus
  siRNA target sequence for Npc2 (NM_023409.3,322-340).
gttgtaagagtggaatcaa

SEQ ID NO: 713496 - DNA, 19 bp, Mus musculus
  siRNA target sequence for Npc2 (NM_023409.3,363-381).
gtctacagctacctgaata

SEQ ID NO: 713497 - DNA, 19 bp, Mus musculus
  siRNA target sequence for Npc2 (NM_023409.3,368-386).
cagctacctgaataagctt

SEQ ID NO: 713498 - DNA, 19 bp, Mus musculus
  siRNA target sequence for Npc2 (NM_023409.3,383-401).
gcttccggtgaagaatgaa

SEQ ID NO: 713499 - DNA, 19 bp, Mus musculus
  siRNA target sequence for Npc2 (NM_023409.3,384-402).
cttccggtgaagaatgaat

SEQ ID NO: 713500 - DNA, 19 bp, Mus musculus
  siRNA target sequence for Npc2 (NM_023409.3,395-413).
gaatgaatacccctctata

SEQ ID NO: 713501 - DNA, 19 bp, Mus musculus
  siRNA target sequence for Npc2 (NM_023409.3,469-487).
gggagatcccagttcagat

SEQ ID NO: 713502 - DNA, 19 bp, Mus musculus
  siRNA target sequence for Hist1h2bc (NM_023422.1,490-508).
gggtgatactagcagatta

SEQ ID NO: 713503 - DNA, 19 bp, Mus musculus
  siRNA target sequence for Hist1h2bc (NM_023422.1,491-509).
ggtgatactagcagattaa

SEQ ID NO: 713504 - DNA, 19 bp, Mus musculus
  siRNA target sequence for Hist1h2bc (NM_023422.1,494-512).
gatactagcagattaacca

SEQ ID NO: 713505 - DNA, 19 bp, Mus musculus
  siRNA target sequence for Hist1h2bc (NM_023422.1,578-596).
gtagaaatttgtgataaga

SEQ ID NO: 713506 - DNA, 19 bp, Mus musculus
  siRNA target sequence for 6330407G11Rik (NM_023423.2,473-491).
caaagcgaagcctgtactt

SEQ ID NO: 713507 - DNA, 19 bp, Mus musculus
  siRNA target sequence for 6030432N09Rik (NM_023429.2,161-179).
gaatgggagggctgatttt

SEQ ID NO: 713508 - DNA, 19 bp, Mus musculus
  siRNA target sequence for 6030432N09Rik (NM_023429.2,216-234).
gacataggaggcggttata

SEQ ID NO: 713509 - DNA, 19 bp, Mus musculus
  siRNA target sequence for 6030432N09Rik (NM_023429.2,245-263).
ggaggagtggagactcttt

SEQ ID NO: 713510 - DNA, 19 bp, Mus musculus
  siRNA target sequence for 6030432N09Rik (NM_023429.2,304-322).
cgttggctgccacaagtat

SEQ ID NO: 713511 - DNA, 19 bp, Mus musculus
  siRNA target sequence for 6030432N09Rik (NM_023429.2,312-330).
gccacaagtatgctgatta

SEQ ID NO: 713512 - DNA, 19 bp, Mus musculus
  siRNA target sequence for 6030432N09Rik (NM_023429.2,323-341).
gctgattactcaaggatta

SEQ ID NO: 713513 - DNA, 19 bp, Mus musculus
  siRNA target sequence for 6030432N09Rik (NM_023429.2,326-344).
gattactcaaggattaatt

SEQ ID NO: 713514 - DNA, 19 bp, Mus musculus
  siRNA target sequence for 6030432N09Rik (NM_023429.2,337-355).
gattaattagtaaaggaat

SEQ ID NO: 713515 - DNA, 19 bp, Mus musculus
  siRNA target sequence for 6030432N09Rik (NM_023429.2,356-374).
cctgtcaagtcatccaaaa

SEQ ID NO: 713516 - DNA, 19 bp, Mus musculus
  siRNA target sequence for 6030432N09Rik (NM_023429.2,359-377).
gtcaagtcatccaaaatat

SEQ ID NO: 713517 - DNA, 19 bp, Mus musculus
  siRNA target sequence for 6030432N09Rik (NM_023429.2,416-434).
gtacttcgctggaaagctt

SEQ ID NO: 713518 - DNA, 19 bp, Mus musculus
  siRNA target sequence for 6030432N09Rik (NM_023429.2,432-450).
ctttcttacgtgaaaacgt

SEQ ID NO: 713519 - DNA, 19 bp, Mus musculus
  siRNA target sequence for 6030432N09Rik (NM_023429.2,448-466).
cgtgccaagagaagttcaa

SEQ ID NO: 713520 - DNA, 19 bp, Mus musculus
  siRNA target sequence for 6030432N09Rik (NM_023429.2,496-514).
cactgcggtcgggagaatt

SEQ ID NO: 713521 - DNA, 19 bp, Mus musculus
  siRNA target sequence for 6030432N09Rik (NM_023429.2,529-547).
caccagggcactatactca

SEQ ID NO: 713522 - DNA, 19 bp, Mus musculus
  siRNA target sequence for 6030432N09Rik (NM_023429.2,531-549).
ccagggcactatactcaaa

SEQ ID NO: 713523 - DNA, 19 bp, Mus musculus
  siRNA target sequence for 6030432N09Rik (NM_023429.2,544-562).
ctcaaaagcctaaatttga

SEQ ID NO: 713524 - DNA, 19 bp, Mus musculus
  siRNA target sequence for 6030432N09Rik (NM_023429.2,546-564).
caaaagcctaaatttgact

SEQ ID NO: 713525 - DNA, 19 bp, Mus musculus
  siRNA target sequence for 6030432N09Rik (NM_023429.2,651-669).
ccatttagtgcttctatga

SEQ ID NO: 713526 - DNA, 19 bp, Mus musculus
  siRNA target sequence for 6030432N09Rik (NM_023429.2,677-695).
cactcccactggtattact

SEQ ID NO: 713527 - DNA, 19 bp, Mus musculus
  siRNA target sequence for 6030432N09Rik (NM_023429.2,740-758).
caaaagaaaaggtgttaca

SEQ ID NO: 713528 - DNA, 19 bp, Mus musculus
  siRNA target sequence for 6030432N09Rik (NM_023429.2,753-771).
gttacatatgaggaattaa

SEQ ID NO: 713529 - DNA, 19 bp, Mus musculus
  siRNA target sequence for 6030432N09Rik (NM_023429.2,786-804).
gagtcctatggagtaactt

SEQ ID NO: 713530 - DNA, 19 bp, Mus musculus
  siRNA target sequence for 6030432N09Rik (NM_023429.2,847-865).
gagtgcccaaaaaagaagt

SEQ ID NO: 713531 - DNA, 19 bp, Mus musculus
  siRNA target sequence for 9430059D04Rik (NM_023431.3,52-70).
cagaagtcgcacattgaga

SEQ ID NO: 713532 - DNA, 19 bp, Mus musculus
  siRNA target sequence for 9430059D04Rik (NM_023431.3,57-75).
gtcgcacattgagaacatt

SEQ ID NO: 713533 - DNA, 19 bp, Mus musculus
  siRNA target sequence for 9430059D04Rik (NM_023431.3,366-384).
gttgccgtcgtctgcatta

SEQ ID NO: 713534 - DNA, 19 bp, Mus musculus
  siRNA target sequence for 9430059D04Rik (NM_023431.3,369-387).
gccgtcgtctgcattagaa

SEQ ID NO: 713535 - DNA, 19 bp, Mus musculus
  siRNA target sequence for 9430059D04Rik (NM_023431.3,371-389).
cgtcgtctgcattagaaga

SEQ ID NO: 713536 - DNA, 19 bp, Mus musculus
  siRNA target sequence for 9430059D04Rik (NM_023431.3,372-390).
gtcgtctgcattagaagat

SEQ ID NO: 713537 - DNA, 19 bp, Mus musculus
  siRNA target sequence for 9430059D04Rik (NM_023431.3,374-392).
cgtctgcattagaagatca

SEQ ID NO: 713538 - DNA, 19 bp, Mus musculus
  siRNA target sequence for 9430059D04Rik (NM_023431.3,375-393).
gtctgcattagaagatcat

SEQ ID NO: 713539 - DNA, 19 bp, Mus musculus
  siRNA target sequence for 9430059D04Rik (NM_023431.3,916-934).
gaatccacagggttcaagt

SEQ ID NO: 713540 - DNA, 19 bp, Mus musculus
  siRNA target sequence for 9430059D04Rik (NM_023431.3,980-998).
cacctcggatccttctgta

SEQ ID NO: 713541 - DNA, 19 bp, Mus musculus
  siRNA target sequence for 9430059D04Rik (NM_023431.3,1104-1122).
ggccagtgtgctcttcatt

SEQ ID NO: 713542 - DNA, 19 bp, Mus musculus
  siRNA target sequence for 9430059D04Rik (NM_023431.3,1171-1189).
cggctcaagcactttgact

SEQ ID NO: 713543 - DNA, 19 bp, Mus musculus
  siRNA target sequence for 9430059D04Rik (NM_023431.3,1306-1324).
gggtctttcttggaatact

SEQ ID NO: 713544 - DNA, 19 bp, Mus musculus
  siRNA target sequence for 9430059D04Rik (NM_023431.3,1550-1568).
gccacctgcgggctatctt

SEQ ID NO: 713545 - DNA, 19 bp, Mus musculus
  siRNA target sequence for 9430059D04Rik (NM_023431.3,1738-1756).
gaccgcattcgcttcatct

SEQ ID NO: 713546 - DNA, 19 bp, Mus musculus
  siRNA target sequence for 9430059D04Rik (NM_023431.3,1768-1786).
ctgcccgaggcaatcatct

SEQ ID NO: 713547 - DNA, 19 bp, Mus musculus
  siRNA target sequence for 9430059D04Rik (NM_023431.3,1799-1817).
cggtggaggcggtggatta

SEQ ID NO: 713548 - DNA, 19 bp, Mus musculus
  siRNA target sequence for 9430059D04Rik (NM_023431.3,1801-1819).
gtggaggcggtggattaca

SEQ ID NO: 713549 - DNA, 19 bp, Mus musculus
  siRNA target sequence for 9430059D04Rik (NM_023431.3,1804-1822).
gaggcggtggattacaaga

SEQ ID NO: 713550 - DNA, 19 bp, Mus musculus
  siRNA target sequence for 2410039E07Rik (NM_023438.2,269-287).
ctatactaccggttagcta

SEQ ID NO: 713551 - DNA, 19 bp, Mus musculus
  siRNA target sequence for 2410039E07Rik (NM_023438.2,304-322).
cggctagccttcttcctaa

SEQ ID NO: 713552 - DNA, 19 bp, Mus musculus
  siRNA target sequence for 2410039E07Rik (NM_023438.2,305-323).
ggctagccttcttcctaaa

SEQ ID NO: 713553 - DNA, 19 bp, Mus musculus
  siRNA target sequence for 2410039E07Rik (NM_023438.2,499-517).
gagcgcttgacggttaact

SEQ ID NO: 713554 - DNA, 19 bp, Mus musculus
  siRNA target sequence for 2410039E07Rik (NM_023438.2,856-874).
gtggagcacttcacactta

SEQ ID NO: 713555 - DNA, 19 bp, Mus musculus
  siRNA target sequence for 2410039E07Rik (NM_023438.2,1268-1286).
ccgtcaaggtcattgctat

SEQ ID NO: 713556 - DNA, 19 bp, Mus musculus
  siRNA target sequence for 2410039E07Rik (NM_023438.2,2095-2113).
ccgctctctctgtacagtt

SEQ ID NO: 713557 - DNA, 19 bp, Mus musculus
  siRNA target sequence for 2410039E07Rik (NM_023438.2,2117-2135).
gggactacgggcttttggt

SEQ ID NO: 713558 - DNA, 19 bp, Mus musculus
  siRNA target sequence for 2410039E07Rik (NM_023438.2,2522-2540).
ggctgacggacctagagat

SEQ ID NO: 713559 - DNA, 19 bp, Mus musculus
  siRNA target sequence for 2410039E07Rik (NM_023438.2,2528-2546).
cggacctagagattggtat

SEQ ID NO: 713560 - DNA, 19 bp, Mus musculus
  siRNA target sequence for 2410039E07Rik (NM_023438.2,2738-2756).
ggagcgcgctggaaactgt

SEQ ID NO: 713561 - DNA, 19 bp, Mus musculus
  siRNA target sequence for 2410039E07Rik (NM_023438.2,2881-2899).
gctagctcgcccacttcta

SEQ ID NO: 713562 - DNA, 19 bp, Mus musculus
  siRNA target sequence for 2410039E07Rik (NM_023438.2,2882-2900).
ctagctcgcccacttctaa

SEQ ID NO: 713563 - DNA, 19 bp, Mus musculus
  siRNA target sequence for 2410039E07Rik (NM_023438.2,2911-2929).
gtcaagttcacgaccttta

SEQ ID NO: 713564 - DNA, 19 bp, Mus musculus
  siRNA target sequence for 2410039E07Rik (NM_023438.2,3049-3067).
cctccggacctgcacaatt

SEQ ID NO: 713565 - DNA, 19 bp, Mus musculus
  siRNA target sequence for 2410039E07Rik (NM_023438.2,3050-3068).
ctccggacctgcacaatta

SEQ ID NO: 713566 - DNA, 19 bp, Mus musculus
  siRNA target sequence for 2410039E07Rik (NM_023438.2,3052-3070).
ccggacctgcacaattata

SEQ ID NO: 713567 - DNA, 19 bp, Mus musculus
  siRNA target sequence for 2410039E07Rik (NM_023438.2,3053-3071).
cggacctgcacaattatat

SEQ ID NO: 713568 - DNA, 19 bp, Mus musculus
  siRNA target sequence for 2410039E07Rik (NM_023438.2,3072-3090).
gcgcagaatcaaagacatt

SEQ ID NO: 713569 - DNA, 19 bp, Mus musculus
  siRNA target sequence for 2010204K13Rik (NM_023450.2,329-347).
gctgcttgttgctgattgt

SEQ ID NO: 713570 - DNA, 19 bp, Mus musculus
  siRNA target sequence for 2010204K13Rik (NM_023450.2,330-348).
ctgcttgttgctgattgtt

SEQ ID NO: 713571 - DNA, 19 bp, Mus musculus
  siRNA target sequence for 2010204K13Rik (NM_023450.2,437-455).
caacttgccccaagaaaca

SEQ ID NO: 713572 - DNA, 19 bp, Mus musculus
  siRNA target sequence for 2010204K13Rik (NM_023450.2,454-472).
caagacgaccctaagaagt

SEQ ID NO: 713573 - DNA, 19 bp, Mus musculus
  siRNA target sequence for Ly6g6c (NM_023463.2,111-129).
ctgggtctcagctgatact

SEQ ID NO: 713574 - DNA, 19 bp, Mus musculus
  siRNA target sequence for Ly6g6c (NM_023463.2,232-250).
gggaagatgtgggttttct

SEQ ID NO: 713575 - DNA, 19 bp, Mus musculus
  siRNA target sequence for Ly6g6c (NM_023463.2,281-299).
cttgtcgggaggtcttcaa

SEQ ID NO: 713576 - DNA, 19 bp, Mus musculus
  siRNA target sequence for Ly6g6c (NM_023463.2,338-356).
cctgctgtgacaaggataa

SEQ ID NO: 713577 - DNA, 19 bp, Mus musculus
  siRNA target sequence for Ly6g6c (NM_023463.2,346-364).
gacaaggataactgtaaca

SEQ ID NO: 713578 - DNA, 19 bp, Mus musculus
  siRNA target sequence for Ly6g6c (NM_023463.2,421-439).
ggcctcggcctctggttat

SEQ ID NO: 713579 - DNA, 19 bp, Mus musculus
  siRNA target sequence for Ly6g6c (NM_023463.2,426-444).
cggcctctggttattgcat

SEQ ID NO: 713580 - DNA, 19 bp, Mus musculus
  siRNA target sequence for Ly6g6c (NM_023463.2,427-445).
ggcctctggttattgcatt

SEQ ID NO: 713581 - DNA, 19 bp, Mus musculus
  siRNA target sequence for 1110003H09Rik (NM_023464.1,83-101).
cgctgcagaactacaacaa

SEQ ID NO: 713582 - DNA, 19 bp, Mus musculus
  siRNA target sequence for 1110003H09Rik (NM_023464.1,206-224).
ggcagctcacggagaagtt

SEQ ID NO: 713583 - DNA, 19 bp, Mus musculus
  siRNA target sequence for 1110003H09Rik (NM_023464.1,260-278).
cctctcgcaacgagtttga

SEQ ID NO: 713584 - DNA, 19 bp, Mus musculus
  siRNA target sequence for 1110003H09Rik (NM_023464.1,335-353).
ctctgcttagtgtactcaa

SEQ ID NO: 713585 - DNA, 19 bp, Mus musculus
  siRNA target sequence for 1110003H09Rik (NM_023464.1,339-357).
gcttagtgtactcaaaaga

SEQ ID NO: 713586 - DNA, 19 bp, Mus musculus
  siRNA target sequence for Elac2 (NM_023479.1,216-234).
gtcttctcggaatacaaca

SEQ ID NO: 713587 - DNA, 19 bp, Mus musculus
  siRNA target sequence for Elac2 (NM_023479.1,259-277).
gcgtccaacgacttatgca

SEQ ID NO: 713588 - DNA, 19 bp, Mus musculus
  siRNA target sequence for Elac2 (NM_023479.1,347-365).
ggggttgtgtggaatgatt

SEQ ID NO: 713589 - DNA, 19 bp, Mus musculus
  siRNA target sequence for Elac2 (NM_023479.1,349-367).
ggttgtgtggaatgatttt

SEQ ID NO: 713590 - DNA, 19 bp, Mus musculus
  siRNA target sequence for Elac2 (NM_023479.1,415-433).
cacagctggagaaatatct

SEQ ID NO: 713591 - DNA, 19 bp, Mus musculus
  siRNA target sequence for Elac2 (NM_023479.1,432-450).
ctagaagcaatcaaaatat

SEQ ID NO: 713592 - DNA, 19 bp, Mus musculus
  siRNA target sequence for Elac2 (NM_023479.1,492-510).
cactctgcaccagaataca

SEQ ID NO: 713593 - DNA, 19 bp, Mus musculus
  siRNA target sequence for Elac2 (NM_023479.1,681-699).
ggtgccaacaggaaagcat

SEQ ID NO: 713594 - DNA, 19 bp, Mus musculus
  siRNA target sequence for Elac2 (NM_023479.1,757-775).
gaaacttcttggtgcttaa

SEQ ID NO: 713595 - DNA, 19 bp, Mus musculus
  siRNA target sequence for Elac2 (NM_023479.1,839-857).
ggacgggaagagtatcact

SEQ ID NO: 713596 - DNA, 19 bp, Mus musculus
  siRNA target sequence for Elac2 (NM_023479.1,845-863).
gaagagtatcacttacgaa

SEQ ID NO: 713597 - DNA, 19 bp, Mus musculus
  siRNA target sequence for Elac2 (NM_023479.1,876-894).
gctgctgaagagctttgta

SEQ ID NO: 713598 - DNA, 19 bp, Mus musculus
  siRNA target sequence for Elac2 (NM_023479.1,903-921).
gatcctggtcttgtattca

SEQ ID NO: 713599 - DNA, 19 bp, Mus musculus
  siRNA target sequence for Elac2 (NM_023479.1,934-952).
gtcctgatgaaggattcat

SEQ ID NO: 713600 - DNA, 19 bp, Mus musculus
  siRNA target sequence for Elac2 (NM_023479.1,1025-1043).
ccacatagccccagaatct

SEQ ID NO: 713601 - DNA, 19 bp, Mus musculus
  siRNA target sequence for Elac2 (NM_023479.1,1033-1051).
ccccagaatctgtactcat

SEQ ID NO: 713602 - DNA, 19 bp, Mus musculus
  siRNA target sequence for Elac2 (NM_023479.1,1139-1157).
cctgcgcagccacaagatt

SEQ ID NO: 713603 - DNA, 19 bp, Mus musculus
  siRNA target sequence for Elac2 (NM_023479.1,1199-1217).
gcttaccagcttctatagt

SEQ ID NO: 713604 - DNA, 19 bp, Mus musculus
  siRNA target sequence for Elac2 (NM_023479.1,1200-1218).
cttaccagcttctatagta

SEQ ID NO: 713605 - DNA, 19 bp, Mus musculus
  siRNA target sequence for Elac2 (NM_023479.1,1235-1253).
cctcagcgtgccaacagtt

SEQ ID NO: 713606 - DNA, 19 bp, Mus musculus
  siRNA target sequence for Elac2 (NM_023479.1,1258-1276).
gtgaatgcctcctcaagta

SEQ ID NO: 713607 - DNA, 19 bp, Mus musculus
  siRNA target sequence for Elac2 (NM_023479.1,1319-1337).
cgactgcaatactgatgaa

SEQ ID NO: 713608 - DNA, 19 bp, Mus musculus
  siRNA target sequence for Elac2 (NM_023479.1,1324-1342).
gcaatactgatgaattcat

SEQ ID NO: 713609 - DNA, 19 bp, Mus musculus
  siRNA target sequence for Elac2 (NM_023479.1,1325-1343).
caatactgatgaattcata

SEQ ID NO: 713610 - DNA, 19 bp, Mus musculus
  siRNA target sequence for Elac2 (NM_023479.1,1432-1450).
gaagccagtatcctgaaat

SEQ ID NO: 713611 - DNA, 19 bp, Mus musculus
  siRNA target sequence for Elac2 (NM_023479.1,1480-1498).
caatgaagatccgaaatgt

SEQ ID NO: 713612 - DNA, 19 bp, Mus musculus
  siRNA target sequence for Elac2 (NM_023479.1,1567-1585).
ggcagttgtgccgtcatta

SEQ ID NO: 713613 - DNA, 19 bp, Mus musculus
  siRNA target sequence for Elac2 (NM_023479.1,1592-1610).
gcaaatagaccgagtctta

SEQ ID NO: 713614 - DNA, 19 bp, Mus musculus
  siRNA target sequence for Elac2 (NM_023479.1,1593-1611).
caaatagaccgagtcttat

SEQ ID NO: 713615 - DNA, 19 bp, Mus musculus
  siRNA target sequence for Elac2 (NM_023479.1,1613-1631).
cagcctcacggctgtgttt

SEQ ID NO: 713616 - DNA, 19 bp, Mus musculus
  siRNA target sequence for Elac2 (NM_023479.1,1797-1815).
ctgcaccacgtcagtatga

SEQ ID NO: 713617 - DNA, 19 bp, Mus musculus
  siRNA target sequence for Elac2 (NM_023479.1,1799-1817).
gcaccacgtcagtatgatt

SEQ ID NO: 713618 - DNA, 19 bp, Mus musculus
  siRNA target sequence for Elac2 (NM_023479.1,1841-1859).
ggcagaggtctccaatact

SEQ ID NO: 713619 - DNA, 19 bp, Mus musculus
  siRNA target sequence for Elac2 (NM_023479.1,1842-1860).
gcagaggtctccaatacta

SEQ ID NO: 713620 - DNA, 19 bp, Mus musculus
  siRNA target sequence for Elac2 (NM_023479.1,1845-1863).
gaggtctccaatactacat

SEQ ID NO: 713621 - DNA, 19 bp, Mus musculus
  siRNA target sequence for Elac2 (NM_023479.1,1850-1868).
ctccaatactacattggaa

SEQ ID NO: 713622 - DNA, 19 bp, Mus musculus
  siRNA target sequence for Elac2 (NM_023479.1,1889-1907).
ggaaacatgtgacttagaa

SEQ ID NO: 713623 - DNA, 19 bp, Mus musculus
  siRNA target sequence for Elac2 (NM_023479.1,1930-1948).
ggcactgcaagcatgcttt

SEQ ID NO: 713624 - DNA, 19 bp, Mus musculus
  siRNA target sequence for Elac2 (NM_023479.1,1952-1970).
ctgtgcactggtacattca

SEQ ID NO: 713625 - DNA, 19 bp, Mus musculus
  siRNA target sequence for Elac2 (NM_023479.1,2190-2208).
gccaagatcccccttttca

SEQ ID NO: 713626 - DNA, 19 bp, Mus musculus
  siRNA target sequence for Elac2 (NM_023479.1,2317-2335).
caggtgacattgaagagat

SEQ ID NO: 713627 - DNA, 19 bp, Mus musculus
  siRNA target sequence for Elac2 (NM_023479.1,2475-2493).
gagagcgtggcaaacactt

SEQ ID NO: 713628 - DNA, 19 bp, Mus musculus
  siRNA target sequence for Elac2 (NM_023479.1,2480-2498).
cgtggcaaacactttagga

SEQ ID NO: 713629 - DNA, 19 bp, Mus musculus
  siRNA target sequence for 1110032A03Rik (NM_023483.2,298-316).
gacaaaaccttgtctgtta

SEQ ID NO: 713630 - DNA, 19 bp, Mus musculus
  siRNA target sequence for 1110032A03Rik (NM_023483.2,330-348).
cactatggcagccttattt

SEQ ID NO: 713631 - DNA, 19 bp, Mus musculus
  siRNA target sequence for 1110032A03Rik (NM_023483.2,418-436).
gatgcaccactaatgagaa

SEQ ID NO: 713632 - DNA, 19 bp, Mus musculus
  siRNA target sequence for 1110032A03Rik (NM_023483.2,485-503).
cgacctaaaaaatattgta

SEQ ID NO: 713633 - DNA, 19 bp, Mus musculus
  siRNA target sequence for 1110032A03Rik (NM_023483.2,531-549).
ggacatgccttcgaaacaa

SEQ ID NO: 713634 - DNA, 19 bp, Mus musculus
  siRNA target sequence for 1110032A03Rik (NM_023483.2,534-552).
catgccttcgaaacaacat

SEQ ID NO: 713635 - DNA, 19 bp, Mus musculus
  siRNA target sequence for 1110032A03Rik (NM_023483.2,575-593).
gaagccacaatcaacacat

SEQ ID NO: 713636 - DNA, 19 bp, Mus musculus
  siRNA target sequence for 1110032A03Rik (NM_023483.2,579-597).
ccacaatcaacacatagat

SEQ ID NO: 713637 - DNA, 19 bp, Mus musculus
  siRNA target sequence for 1110032A03Rik (NM_023483.2,661-679).
gcacagcgaagtcaactta

SEQ ID NO: 713638 - DNA, 19 bp, Mus musculus
  siRNA target sequence for 1110032A03Rik (NM_023483.2,664-682).
cagcgaagtcaacttatat

SEQ ID NO: 713639 - DNA, 19 bp, Mus musculus
  siRNA target sequence for 1110032A03Rik (NM_023483.2,666-684).
gcgaagtcaacttatatga

SEQ ID NO: 713640 - DNA, 19 bp, Mus musculus
  siRNA target sequence for 1110032A03Rik (NM_023483.2,696-714).
gaacctcagcccactcatt

SEQ ID NO: 713641 - DNA, 19 bp, Mus musculus
  siRNA target sequence for Xkh (NM_023500.1,392-410).
gtgaagtcttttgtatcta

SEQ ID NO: 713642 - DNA, 19 bp, Mus musculus
  siRNA target sequence for Xkh (NM_023500.1,417-435).
gtccgaccagaatgaagaa

SEQ ID NO: 713643 - DNA, 19 bp, Mus musculus
  siRNA target sequence for Xkh (NM_023500.1,436-454).
ccttatgtgagcatcacta

SEQ ID NO: 713644 - DNA, 19 bp, Mus musculus
  siRNA target sequence for Xkh (NM_023500.1,437-455).
cttatgtgagcatcactaa

SEQ ID NO: 713645 - DNA, 19 bp, Mus musculus
  siRNA target sequence for Xkh (NM_023500.1,590-608).
cacaactgaccctacaact

SEQ ID NO: 713646 - DNA, 19 bp, Mus musculus
  siRNA target sequence for Xkh (NM_023500.1,595-613).
ctgaccctacaactgtata

SEQ ID NO: 713647 - DNA, 19 bp, Mus musculus
  siRNA target sequence for Xkh (NM_023500.1,597-615).
gaccctacaactgtatata

SEQ ID NO: 713648 - DNA, 19 bp, Mus musculus
  siRNA target sequence for Xkh (NM_023500.1,643-661).
ggaagatgcttcatcatga

SEQ ID NO: 713649 - DNA, 19 bp, Mus musculus
  siRNA target sequence for Xkh (NM_023500.1,669-687).
cctgctgtctattgtctat

SEQ ID NO: 713650 - DNA, 19 bp, Mus musculus
  siRNA target sequence for Xkh (NM_023500.1,682-700).
gtctatggcgccttacgtt

SEQ ID NO: 713651 - DNA, 19 bp, Mus musculus
  siRNA target sequence for Xkh (NM_023500.1,691-709).
gccttacgttgcaacatct

SEQ ID NO: 713652 - DNA, 19 bp, Mus musculus
  siRNA target sequence for Xkh (NM_023500.1,692-710).
ccttacgttgcaacatctt

SEQ ID NO: 713653 - DNA, 19 bp, Mus musculus
  siRNA target sequence for Xkh (NM_023500.1,714-732).
catcaaaatcaagtatgat

SEQ ID NO: 713654 - DNA, 19 bp, Mus musculus
  siRNA target sequence for Xkh (NM_023500.1,848-866).
gggtggtggcagtcatact

SEQ ID NO: 713655 - DNA, 19 bp, Mus musculus
  siRNA target sequence for Xkh (NM_023500.1,857-875).
cagtcatactcgtcaactt

SEQ ID NO: 713656 - DNA, 19 bp, Mus musculus
  siRNA target sequence for Xkh (NM_023500.1,859-877).
gtcatactcgtcaacttct

SEQ ID NO: 713657 - DNA, 19 bp, Mus musculus
  siRNA target sequence for Xkh (NM_023500.1,923-941).
ccccattccctgagaacat

SEQ ID NO: 713658 - DNA, 19 bp, Mus musculus
  siRNA target sequence for Xkh (NM_023500.1,924-942).
cccattccctgagaacata

SEQ ID NO: 713659 - DNA, 19 bp, Mus musculus
  siRNA target sequence for Xkh (NM_023500.1,983-1001).
gcttcctcactttactcta

SEQ ID NO: 713660 - DNA, 19 bp, Mus musculus
  siRNA target sequence for Xkh (NM_023500.1,1003-1021).
gccggcatcaacatgttct

SEQ ID NO: 713661 - DNA, 19 bp, Mus musculus
  siRNA target sequence for Xkh (NM_023500.1,1031-1049).
ctgttcagctgaaaatcga

SEQ ID NO: 713662 - DNA, 19 bp, Mus musculus
  siRNA target sequence for Xkh (NM_023500.1,1082-1100).
ggtaccgcctgctcattta

SEQ ID NO: 713663 - DNA, 19 bp, Mus musculus
  siRNA target sequence for Xkh (NM_023500.1,1090-1108).
ctgctcatttactacatga

SEQ ID NO: 713664 - DNA, 19 bp, Mus musculus
  siRNA target sequence for Xkh (NM_023500.1,1135-1153).
ctgctcctgtggtattttt

SEQ ID NO: 713665 - DNA, 19 bp, Mus musculus
  siRNA target sequence for Xkh (NM_023500.1,1181-1199).
gtgcgcctctgttgatctt

SEQ ID NO: 713666 - DNA, 19 bp, Mus musculus
  siRNA target sequence for Xkh (NM_023500.1,1239-1257).
gcttgtgttctatcagttt

SEQ ID NO: 713667 - DNA, 19 bp, Mus musculus
  siRNA target sequence for Xkh (NM_023500.1,1286-1304).
ccagtgtttcggaaagctt

SEQ ID NO: 713668 - DNA, 19 bp, Mus musculus
  siRNA target sequence for Xkh (NM_023500.1,1287-1305).
cagtgtttcggaaagcttt

SEQ ID NO: 713669 - DNA, 19 bp, Mus musculus
  siRNA target sequence for Xkh (NM_023500.1,1356-1374).
cgagccagtaggaaggata

SEQ ID NO: 713670 - DNA, 19 bp, Mus musculus
  siRNA target sequence for Xkh (NM_023500.1,1360-1378).
ccagtaggaaggatagaca

SEQ ID NO: 713671 - DNA, 19 bp, Mus musculus
  siRNA target sequence for Xkh (NM_023500.1,1391-1409).
cgtgcacagagcaagatgt

SEQ ID NO: 713672 - DNA, 19 bp, Mus musculus
  siRNA target sequence for Xkh (NM_023500.1,1414-1432).
cctactaccagtaaagtga

SEQ ID NO: 713673 - DNA, 19 bp, Mus musculus
  siRNA target sequence for Xkh (NM_023500.1,1415-1433).
ctactaccagtaaagtgat

SEQ ID NO: 713674 - DNA, 19 bp, Mus musculus
  siRNA target sequence for 2310016C08Rik (NM_023516.3,245-263).
gctttccatctttgttaga

SEQ ID NO: 713675 - DNA, 19 bp, Mus musculus
  siRNA target sequence for Tfpt (NM_023524.1,345-363).
ccgtgggctttgaagagtt

SEQ ID NO: 713676 - DNA, 19 bp, Mus musculus
  siRNA target sequence for Tfpt (NM_023524.1,457-475).
cggtggtctgggtgattca

SEQ ID NO: 713677 - DNA, 19 bp, Mus musculus
  siRNA target sequence for Tfpt (NM_023524.1,529-547).
ccagcgggaactaaatcgt

SEQ ID NO: 713678 - DNA, 19 bp, Mus musculus
  siRNA target sequence for Tfpt (NM_023524.1,530-548).
cagcgggaactaaatcgta

SEQ ID NO: 713679 - DNA, 19 bp, Mus musculus
  siRNA target sequence for Tfpt (NM_023524.1,534-552).
gggaactaaatcgtagaaa

SEQ ID NO: 713680 - DNA, 19 bp, Mus musculus
  siRNA target sequence for Tfpt (NM_023524.1,711-729).
gccagttcaccattgtgtt

SEQ ID NO: 713681 - DNA, 19 bp, Mus musculus
  siRNA target sequence for Tfpt (NM_023524.1,899-917).
cgggtgggggcttcattga

SEQ ID NO: 713682 - DNA, 19 bp, Mus musculus
  siRNA target sequence for Tfpt (NM_023524.1,930-948).
ccccagtgcagattaaggt

SEQ ID NO: 713683 - DNA, 19 bp, Mus musculus
  siRNA target sequence for Tfpt (NM_023524.1,931-949).
cccagtgcagattaaggtt

SEQ ID NO: 713684 - DNA, 19 bp, Mus musculus
  siRNA target sequence for Tfpt (NM_023524.1,1002-1020).
cccgagagccagacaaatt

SEQ ID NO: 713685 - DNA, 19 bp, Mus musculus
  siRNA target sequence for Ms4a10 (NM_023529.1,105-123).
gcggttcccggcagtgtta

SEQ ID NO: 713686 - DNA, 19 bp, Mus musculus
  siRNA target sequence for Ms4a10 (NM_023529.1,292-310).
cctttggtggctacttgat

SEQ ID NO: 713687 - DNA, 19 bp, Mus musculus
  siRNA target sequence for Ms4a10 (NM_023529.1,447-465).
gtgatagccaacgttatca

SEQ ID NO: 713688 - DNA, 19 bp, Mus musculus
  siRNA target sequence for Ms4a10 (NM_023529.1,561-579).
cccacaacctacatccaaa

SEQ ID NO: 713689 - DNA, 19 bp, Mus musculus
  siRNA target sequence for Ms4a10 (NM_023529.1,644-662).
cacagcctataggatgaaa

SEQ ID NO: 713690 - DNA, 19 bp, Mus musculus
  siRNA target sequence for Ms4a10 (NM_023529.1,745-763).
ccaccatccttataaagat

SEQ ID NO: 713691 - DNA, 19 bp, Mus musculus
  siRNA target sequence for Pla2g13 (NM_023530.2,281-299).
gtaccggtgtcgatatgga

SEQ ID NO: 713692 - DNA, 19 bp, Mus musculus
  siRNA target sequence for Pla2g13 (NM_023530.2,311-329).
gcccagacctggttacaaa

SEQ ID NO: 713693 - DNA, 19 bp, Mus musculus
  siRNA target sequence for Pla2g13 (NM_023530.2,341-359).
caatggttgcagttcctat

SEQ ID NO: 713694 - DNA, 19 bp, Mus musculus
  siRNA target sequence for Pla2g13 (NM_023530.2,346-364).
gttgcagttcctatttcct

SEQ ID NO: 713695 - DNA, 19 bp, Mus musculus
  siRNA target sequence for Pla2g13 (NM_023530.2,355-373).
cctatttcctgggtatcaa

SEQ ID NO: 713696 - DNA, 19 bp, Mus musculus
  siRNA target sequence for Pla2g13 (NM_023530.2,446-464).
cacctgcggtgccaacaaa

SEQ ID NO: 713697 - DNA, 19 bp, Mus musculus
  siRNA target sequence for Pla2g13 (NM_023530.2,448-466).
cctgcggtgccaacaaata

SEQ ID NO: 713698 - DNA, 19 bp, Mus musculus
  siRNA target sequence for Pla2g13 (NM_023530.2,546-564).
gtggaagcagcctgtgatt

SEQ ID NO: 713699 - DNA, 19 bp, Mus musculus
  siRNA target sequence for Pla2g13 (NM_023530.2,570-588).
gctgataccgtgttcaaca

SEQ ID NO: 713700 - DNA, 19 bp, Mus musculus
  siRNA target sequence for Pla2g13 (NM_023530.2,603-621).
ggctgccgaccctttatga

SEQ ID NO: 713701 - DNA, 19 bp, Mus musculus
  siRNA target sequence for Pla2g13 (NM_023530.2,604-622).
gctgccgaccctttatgaa

SEQ ID NO: 713702 - DNA, 19 bp, Mus musculus
  siRNA target sequence for 1700027M01Rik (NM_023544.2,1606-1624).
cggtgaccccaatagcatt

SEQ ID NO: 713703 - DNA, 19 bp, Mus musculus
  siRNA target sequence for 1700027M01Rik (NM_023544.2,1610-1628).
gaccccaatagcattgaat

SEQ ID NO: 713704 - DNA, 19 bp, Mus musculus
  siRNA target sequence for 1700027M01Rik (NM_023544.2,1612-1630).
ccccaatagcattgaatct

SEQ ID NO: 713705 - DNA, 19 bp, Mus musculus
  siRNA target sequence for 1700027M01Rik (NM_023544.2,1614-1632).
ccaatagcattgaatctct

SEQ ID NO: 713706 - DNA, 19 bp, Mus musculus
  siRNA target sequence for 1700027M01Rik (NM_023544.2,1615-1633).
caatagcattgaatctcta

SEQ ID NO: 713707 - DNA, 19 bp, Mus musculus
  siRNA target sequence for 1700027M01Rik (NM_023544.2,1620-1638).
gcattgaatctctagctat

SEQ ID NO: 713708 - DNA, 19 bp, Mus musculus
  siRNA target sequence for 1700027M01Rik (NM_023544.2,1647-1665).
cgaaggcttcagctgaatt

SEQ ID NO: 713709 - DNA, 19 bp, Mus musculus
  siRNA target sequence for 1700027M01Rik (NM_023544.2,1658-1676).
gctgaattccagacaaact

SEQ ID NO: 713710 - DNA, 19 bp, Mus musculus
  siRNA target sequence for 1700027M01Rik (NM_023544.2,1751-1769).
cctttccataagtcatcaa

SEQ ID NO: 713711 - DNA, 19 bp, Mus musculus
  siRNA target sequence for 1700027M01Rik (NM_023544.2,1776-1794).
ccgttgttgcaggtaatct

SEQ ID NO: 713712 - DNA, 19 bp, Mus musculus
  siRNA target sequence for 1700027M01Rik (NM_023544.2,1788-1806).
gtaatctggagaaatctgt

SEQ ID NO: 713713 - DNA, 19 bp, Mus musculus
  siRNA target sequence for 1700027M01Rik (NM_023544.2,1819-1837).
ccagggcctcagagtgtat

SEQ ID NO: 713714 - DNA, 19 bp, Mus musculus
  siRNA target sequence for 1700027M01Rik (NM_023544.2,1885-1903).
gcgggagccacagatattt

SEQ ID NO: 713715 - DNA, 19 bp, Mus musculus
  siRNA target sequence for 1700027M01Rik (NM_023544.2,1917-1935).
gttggcatccagaaaatca

SEQ ID NO: 713716 - DNA, 19 bp, Mus musculus
  siRNA target sequence for 1700027M01Rik (NM_023544.2,2092-2110).
gaaaggtgagctacaaaga

SEQ ID NO: 713717 - DNA, 19 bp, Mus musculus
  siRNA target sequence for 1700027M01Rik (NM_023544.2,2180-2198).
gccctgatggaagtagata

SEQ ID NO: 713718 - DNA, 19 bp, Mus musculus
  siRNA target sequence for 1700027M01Rik (NM_023544.2,2254-2272).
catcaagagccctagtgta

SEQ ID NO: 713719 - DNA, 19 bp, Mus musculus
  siRNA target sequence for 1700027M01Rik (NM_023544.2,2273-2291).
gcacatctcgcttcagata

SEQ ID NO: 713720 - DNA, 19 bp, Mus musculus
  siRNA target sequence for 1700027M01Rik (NM_023544.2,2274-2292).
cacatctcgcttcagataa

SEQ ID NO: 713721 - DNA, 19 bp, Mus musculus
  siRNA target sequence for 1700027M01Rik (NM_023544.2,2303-2321).
gaagtggagacattacagt

SEQ ID NO: 713722 - DNA, 19 bp, Mus musculus
  siRNA target sequence for 1700027M01Rik (NM_023544.2,2371-2389).
gcagctcccagaagataat

SEQ ID NO: 713723 - DNA, 19 bp, Mus musculus
  siRNA target sequence for 1700027M01Rik (NM_023544.2,2384-2402).
gataatgttgacatgtcta

SEQ ID NO: 713724 - DNA, 19 bp, Mus musculus
  siRNA target sequence for 1700027M01Rik (NM_023544.2,2393-2411).
gacatgtctacaatggata

SEQ ID NO: 713725 - DNA, 19 bp, Mus musculus
  siRNA target sequence for 1700027M01Rik (NM_023544.2,2408-2426).
gataacaaagatgacaatt

SEQ ID NO: 713726 - DNA, 19 bp, Mus musculus
  siRNA target sequence for 1700027M01Rik (NM_023544.2,2471-2489).
gcagaagaattttgttcat

SEQ ID NO: 713727 - DNA, 19 bp, Mus musculus
  siRNA target sequence for 1700027M01Rik (NM_023544.2,2519-2537).
gagcttttggtcattagct

SEQ ID NO: 713728 - DNA, 19 bp, Mus musculus
  siRNA target sequence for 1700027M01Rik (NM_023544.2,2698-2716).
ctctgaatcaggaaagaca

SEQ ID NO: 713729 - DNA, 19 bp, Mus musculus
  siRNA target sequence for 1700027M01Rik (NM_023544.2,2706-2724).
caggaaagacagaaatcgt

SEQ ID NO: 713730 - DNA, 19 bp, Mus musculus
  siRNA target sequence for 1700027M01Rik (NM_023544.2,2736-2754).
cttgtgctgcggtagaaga

SEQ ID NO: 713731 - DNA, 19 bp, Mus musculus
  siRNA target sequence for 1700027M01Rik (NM_023544.2,2739-2757).
gtgctgcggtagaagatga

SEQ ID NO: 713732 - DNA, 19 bp, Mus musculus
  siRNA target sequence for 1700027M01Rik (NM_023544.2,2794-2812).
gtcacctgaccgagaagat

SEQ ID NO: 713733 - DNA, 19 bp, Mus musculus
  siRNA target sequence for 1700027M01Rik (NM_023544.2,2807-2825).
gaagatgtccgcagatcaa

SEQ ID NO: 713734 - DNA, 19 bp, Mus musculus
  siRNA target sequence for 1700027M01Rik (NM_023544.2,2854-2872).
cgccataacctcagctaaa

SEQ ID NO: 713735 - DNA, 19 bp, Mus musculus
  siRNA target sequence for 1700027M01Rik (NM_023544.2,2892-2910).
gcacctcaggggtagaaat

SEQ ID NO: 713736 - DNA, 19 bp, Mus musculus
  siRNA target sequence for 1700027M01Rik (NM_023544.2,3074-3092).
gttcttccaccgttcatct

SEQ ID NO: 713737 - DNA, 19 bp, Mus musculus
  siRNA target sequence for 1700027M01Rik (NM_023544.2,3191-3209).
cttcttgttttgttagcaa

SEQ ID NO: 713738 - DNA, 19 bp, Mus musculus
  siRNA target sequence for 1700027M01Rik (NM_023544.2,3202-3220).
gttagcaaagaacattgta

SEQ ID NO: 713739 - DNA, 19 bp, Mus musculus
  siRNA target sequence for Hmga1l4 (NM_023547.1,56-74).
gccacggagtacacaagaa

SEQ ID NO: 713740 - DNA, 19 bp, Mus musculus
  siRNA target sequence for Hmga1l4 (NM_023547.1,57-75).
ccacggagtacacaagaaa

SEQ ID NO: 713741 - DNA, 19 bp, Mus musculus
  siRNA target sequence for Hmga1l4 (NM_023547.1,58-76).
cacggagtacacaagaaaa

SEQ ID NO: 713742 - DNA, 19 bp, Mus musculus
  siRNA target sequence for Hmga1l4 (NM_023547.1,151-169).
cctgccaagccccaactta

SEQ ID NO: 713743 - DNA, 19 bp, Mus musculus
  siRNA target sequence for Hmga1l4 (NM_023547.1,152-170).
ctgccaagccccaacttaa

SEQ ID NO: 713744 - DNA, 19 bp, Mus musculus
  siRNA target sequence for Hmga1l4 (NM_023547.1,156-174).
caagccccaacttaaactt

SEQ ID NO: 713745 - DNA, 19 bp, Mus musculus
  siRNA target sequence for Hmga1l4 (NM_023547.1,160-178).
ccccaacttaaacttaaaa

SEQ ID NO: 713746 - DNA, 19 bp, Mus musculus
  siRNA target sequence for Hmga1l4 (NM_023547.1,578-596).
ctgccctcaccgaagagat

SEQ ID NO: 713747 - DNA, 19 bp, Mus musculus
  siRNA target sequence for Hmga1l4 (NM_023547.1,653-671).
ccgaggagcacaaaaatca

SEQ ID NO: 713748 - DNA, 19 bp, Mus musculus
  siRNA target sequence for Hmga1l4 (NM_023547.1,655-673).
gaggagcacaaaaatcaga

SEQ ID NO: 713749 - DNA, 19 bp, Mus musculus
  siRNA target sequence for Hmga1l4 (NM_023547.1,909-927).
cccccacccgcgtcgttat

SEQ ID NO: 713750 - DNA, 19 bp, Mus musculus
  siRNA target sequence for 2210008F15Rik (NM_023554.1,258-276).
gagtgctcgcagggataaa

SEQ ID NO: 713751 - DNA, 19 bp, Mus musculus
  siRNA target sequence for 2210008F15Rik (NM_023554.1,269-287).
gggataaaacgctgttgaa

SEQ ID NO: 713752 - DNA, 19 bp, Mus musculus
  siRNA target sequence for 2210008F15Rik (NM_023554.1,353-371).
gtattagagcagctaacta

SEQ ID NO: 713753 - DNA, 19 bp, Mus musculus
  siRNA target sequence for 2210008F15Rik (NM_023554.1,374-392).
gcttcagaggccgacataa

SEQ ID NO: 713754 - DNA, 19 bp, Mus musculus
  siRNA target sequence for 2210008F15Rik (NM_023554.1,375-393).
cttcagaggccgacataaa

SEQ ID NO: 713755 - DNA, 19 bp, Mus musculus
  siRNA target sequence for 2210008F15Rik (NM_023554.1,399-417).
caccagaaaacgtaaaagt

SEQ ID NO: 713756 - DNA, 19 bp, Mus musculus
  siRNA target sequence for 2210409B01Rik (NM_023557.2,52-70).
cgggaattcggccaaatat

SEQ ID NO: 713757 - DNA, 19 bp, Mus musculus
  siRNA target sequence for 2210409B01Rik (NM_023557.2,54-72).
ggaattcggccaaatatga

SEQ ID NO: 713758 - DNA, 19 bp, Mus musculus
  siRNA target sequence for 2210409B01Rik (NM_023557.2,79-97).
ctttcgaggccccatcaaa

SEQ ID NO: 713759 - DNA, 19 bp, Mus musculus
  siRNA target sequence for 2210409B01Rik (NM_023557.2,83-101).
cgaggccccatcaaaaaca

SEQ ID NO: 713760 - DNA, 19 bp, Mus musculus
  siRNA target sequence for 2210409B01Rik (NM_023557.2,145-163).
cattttgggttacatcata

SEQ ID NO: 713761 - DNA, 19 bp, Mus musculus
  siRNA target sequence for 2210409B01Rik (NM_023557.2,237-255).
gcggcgtgggcgacaacaa

SEQ ID NO: 713762 - DNA, 19 bp, Mus musculus
  siRNA target sequence for 2210409B01Rik (NM_023557.2,244-262).
gggcgacaacaaggataaa

SEQ ID NO: 713763 - DNA, 19 bp, Mus musculus
  siRNA target sequence for 2210409B01Rik (NM_023557.2,257-275).
gataaaccctacgttctat

SEQ ID NO: 713764 - DNA, 19 bp, Mus musculus
  siRNA target sequence for 2210409B01Rik (NM_023557.2,291-309).
gctgtgcggcagctatcaa

SEQ ID NO: 713765 - DNA, 19 bp, Mus musculus
  siRNA target sequence for 2210409B01Rik (NM_023557.2,294-312).
gtgcggcagctatcaacat

SEQ ID NO: 713766 - DNA, 19 bp, Mus musculus
  siRNA target sequence for 2210409B01Rik (NM_023557.2,296-314).
gcggcagctatcaacatca

SEQ ID NO: 713767 - DNA, 19 bp, Mus musculus
  siRNA target sequence for 2210409B01Rik (NM_023557.2,297-315).
cggcagctatcaacatcat

SEQ ID NO: 713768 - DNA, 19 bp, Mus musculus
  siRNA target sequence for 2210409B01Rik (NM_023557.2,415-433).
gacagtcggtgaagtttat

SEQ ID NO: 713769 - DNA, 19 bp, Mus musculus
  siRNA target sequence for 2210409B01Rik (NM_023557.2,459-477).
cagcggtgtccccagatat

SEQ ID NO: 713770 - DNA, 19 bp, Mus musculus
  siRNA target sequence for 2210409B01Rik (NM_023557.2,557-575).
ccactccccaacatcaact

SEQ ID NO: 713771 - DNA, 19 bp, Mus musculus
  siRNA target sequence for 2210409B01Rik (NM_023557.2,558-576).
cactccccaacatcaactt

SEQ ID NO: 713772 - DNA, 19 bp, Mus musculus
  siRNA target sequence for 2210409B01Rik (NM_023557.2,587-605).
gaagacttacggatcaata

SEQ ID NO: 713773 - DNA, 19 bp, Mus musculus
  siRNA target sequence for 2210409B01Rik (NM_023557.2,590-608).
gacttacggatcaataaca

SEQ ID NO: 713774 - DNA, 19 bp, Mus musculus
  siRNA target sequence for 2210409B01Rik (NM_023557.2,843-861).
ggcaacagtaccaagtgtt

SEQ ID NO: 713775 - DNA, 19 bp, Mus musculus
  siRNA target sequence for 2210409B01Rik (NM_023557.2,844-862).
gcaacagtaccaagtgttt

SEQ ID NO: 713776 - DNA, 19 bp, Mus musculus
  siRNA target sequence for 2210409B01Rik (NM_023557.2,971-989).
gagggcatcttgttgctta

SEQ ID NO: 713777 - DNA, 19 bp, Mus musculus
  siRNA target sequence for 2210409B01Rik (NM_023557.2,975-993).
gcatcttgttgcttatgct

SEQ ID NO: 713778 - DNA, 19 bp, Mus musculus
  siRNA target sequence for 2210409B01Rik (NM_023557.2,1102-1120).
cctcctggtcatttgcatt

SEQ ID NO: 713779 - DNA, 19 bp, Mus musculus
  siRNA target sequence for 2210409B01Rik (NM_023557.2,1128-1146).
gggccgtgacagctctata

SEQ ID NO: 713780 - DNA, 19 bp, Mus musculus
  siRNA target sequence for 2210409B01Rik (NM_023557.2,1131-1149).
ccgtgacagctctatacct

SEQ ID NO: 713781 - DNA, 19 bp, Mus musculus
  siRNA target sequence for 2210409B01Rik (NM_023557.2,1158-1176).
ccgggcaaccccagtacat

SEQ ID NO: 713782 - DNA, 19 bp, Mus musculus
  siRNA target sequence for 2210409B01Rik (NM_023557.2,1355-1373).
gggctcttctggactgtta

SEQ ID NO: 713783 - DNA, 19 bp, Mus musculus
  siRNA target sequence for 2210409B01Rik (NM_023557.2,1358-1376).
ctcttctggactgttaact

SEQ ID NO: 713784 - DNA, 19 bp, Mus musculus
  siRNA target sequence for 2210409B01Rik (NM_023557.2,1556-1574).
cgggttatcctggagtata

SEQ ID NO: 713785 - DNA, 19 bp, Mus musculus
  siRNA target sequence for 2210409B01Rik (NM_023557.2,1650-1668).
gtctggagaagtttattaa

SEQ ID NO: 713786 - DNA, 19 bp, Mus musculus
  siRNA target sequence for 2210409B01Rik (NM_023557.2,1699-1717).
cgccatctatggaaagaat

SEQ ID NO: 713787 - DNA, 19 bp, Mus musculus
  siRNA target sequence for 2210409B01Rik (NM_023557.2,1770-1788).
gggtcgtcgtcctggataa

SEQ ID NO: 713788 - DNA, 19 bp, Mus musculus
  siRNA target sequence for 2210409B01Rik (NM_023557.2,1771-1789).
ggtcgtcgtcctggataaa

SEQ ID NO: 713789 - DNA, 19 bp, Mus musculus
  siRNA target sequence for 2210409B01Rik (NM_023557.2,2074-2092).
caaggcactcctgaagatt

SEQ ID NO: 713790 - DNA, 19 bp, Mus musculus
  siRNA target sequence for Desrt (NM_023598.1,281-299).
ggcttgcacggaccttata

SEQ ID NO: 713791 - DNA, 19 bp, Mus musculus
  siRNA target sequence for Desrt (NM_023598.1,282-300).
gcttgcacggaccttatat

SEQ ID NO: 713792 - DNA, 19 bp, Mus musculus
  siRNA target sequence for Desrt (NM_023598.1,283-301).
cttgcacggaccttatatt

SEQ ID NO: 713793 - DNA, 19 bp, Mus musculus
  siRNA target sequence for Desrt (NM_023598.1,286-304).
gcacggaccttatattttt

SEQ ID NO: 713794 - DNA, 19 bp, Mus musculus
  siRNA target sequence for Desrt (NM_023598.1,287-305).
cacggaccttatatttttt

SEQ ID NO: 713795 - DNA, 19 bp, Mus musculus
  siRNA target sequence for Desrt (NM_023598.1,289-307).
cggaccttatattttttat

SEQ ID NO: 713796 - DNA, 19 bp, Mus musculus
  siRNA target sequence for Desrt (NM_023598.1,356-374).
ggcgactttttctttgtaa

SEQ ID NO: 713797 - DNA, 19 bp, Mus musculus
  siRNA target sequence for Desrt (NM_023598.1,383-401).
ccaaaggatccgatttgca

SEQ ID NO: 713798 - DNA, 19 bp, Mus musculus
  siRNA target sequence for Desrt (NM_023598.1,384-402).
caaaggatccgatttgcat

SEQ ID NO: 713799 - DNA, 19 bp, Mus musculus
  siRNA target sequence for Desrt (NM_023598.1,432-450).
ggaccagccggcaactttt

SEQ ID NO: 713800 - DNA, 19 bp, Mus musculus
  siRNA target sequence for Desrt (NM_023598.1,433-451).
gaccagccggcaactttta

SEQ ID NO: 713801 - DNA, 19 bp, Mus musculus
  siRNA target sequence for Desrt (NM_023598.1,453-471).
ccagctcgaaactttattt

SEQ ID NO: 713802 - DNA, 19 bp, Mus musculus
  siRNA target sequence for Desrt (NM_023598.1,613-631).
ccgagccactccagtgaaa

SEQ ID NO: 713803 - DNA, 19 bp, Mus musculus
  siRNA target sequence for Desrt (NM_023598.1,614-632).
cgagccactccagtgaaaa

SEQ ID NO: 713804 - DNA, 19 bp, Mus musculus
  siRNA target sequence for Desrt (NM_023598.1,618-636).
ccactccagtgaaaactga

SEQ ID NO: 713805 - DNA, 19 bp, Mus musculus
  siRNA target sequence for Desrt (NM_023598.1,718-736).
cgttctcaaggaaaaagct

SEQ ID NO: 713806 - DNA, 19 bp, Mus musculus
  siRNA target sequence for Desrt (NM_023598.1,797-815).
cggtaccggtccatgctta

SEQ ID NO: 713807 - DNA, 19 bp, Mus musculus
  siRNA target sequence for Desrt (NM_023598.1,798-816).
ggtaccggtccatgcttaa

SEQ ID NO: 713808 - DNA, 19 bp, Mus musculus
  siRNA target sequence for Desrt (NM_023598.1,799-817).
gtaccggtccatgcttaaa

SEQ ID NO: 713809 - DNA, 19 bp, Mus musculus
  siRNA target sequence for Desrt (NM_023598.1,910-928).
gtactgccgggataccttt

SEQ ID NO: 713810 - DNA, 19 bp, Mus musculus
  siRNA target sequence for Desrt (NM_023598.1,913-931).
ctgccgggatacctttgat

SEQ ID NO: 713811 - DNA, 19 bp, Mus musculus
  siRNA target sequence for Desrt (NM_023598.1,915-933).
gccgggatacctttgatca

SEQ ID NO: 713812 - DNA, 19 bp, Mus musculus
  siRNA target sequence for Desrt (NM_023598.1,936-954).
ccactctgatagaaaacga

SEQ ID NO: 713813 - DNA, 19 bp, Mus musculus
  siRNA target sequence for Desrt (NM_023598.1,1122-1140).
ccaagccgaagaataacca

SEQ ID NO: 713814 - DNA, 19 bp, Mus musculus
  siRNA target sequence for Desrt (NM_023598.1,1127-1145).
ccgaagaataaccacaata

SEQ ID NO: 713815 - DNA, 19 bp, Mus musculus
  siRNA target sequence for Desrt (NM_023598.1,1132-1150).
gaataaccacaataactgt

SEQ ID NO: 713816 - DNA, 19 bp, Mus musculus
  siRNA target sequence for Desrt (NM_023598.1,1147-1165).
ctgtaaaaaaacctcaaat

SEQ ID NO: 713817 - DNA, 19 bp, Mus musculus
  siRNA target sequence for Desrt (NM_023598.1,1181-1199).
ctgtctattggcgaagaat

SEQ ID NO: 713818 - DNA, 19 bp, Mus musculus
  siRNA target sequence for Desrt (NM_023598.1,1222-1240).
cttagtggccctgtataaa

SEQ ID NO: 713819 - DNA, 19 bp, Mus musculus
  siRNA target sequence for Desrt (NM_023598.1,1278-1296).
cctacttgggtttcaaaca

SEQ ID NO: 713820 - DNA, 19 bp, Mus musculus
  siRNA target sequence for Desrt (NM_023598.1,1287-1305).
gtttcaaacagattaacct

SEQ ID NO: 713821 - DNA, 19 bp, Mus musculus
  siRNA target sequence for Desrt (NM_023598.1,1362-1380).
gccgtcagtggaaacatat

SEQ ID NO: 713822 - DNA, 19 bp, Mus musculus
  siRNA target sequence for Desrt (NM_023598.1,1387-1405).
cgagttaggtggtaatcct

SEQ ID NO: 713823 - DNA, 19 bp, Mus musculus
  siRNA target sequence for Desrt (NM_023598.1,1434-1452).
gcagacactacgaaaggtt

SEQ ID NO: 713824 - DNA, 19 bp, Mus musculus
  siRNA target sequence for Desrt (NM_023598.1,1435-1453).
cagacactacgaaaggtta

SEQ ID NO: 713825 - DNA, 19 bp, Mus musculus
  siRNA target sequence for Desrt (NM_023598.1,1437-1455).
gacactacgaaaggttaat

SEQ ID NO: 713826 - DNA, 19 bp, Mus musculus
  siRNA target sequence for Desrt (NM_023598.1,1450-1468).
gttaatcctgccatacgaa

SEQ ID NO: 713827 - DNA, 19 bp, Mus musculus
  siRNA target sequence for Desrt (NM_023598.1,1459-1477).
gccatacgaaagatttatt

SEQ ID NO: 713828 - DNA, 19 bp, Mus musculus
  siRNA target sequence for Desrt (NM_023598.1,1460-1478).
ccatacgaaagatttatta

SEQ ID NO: 713829 - DNA, 19 bp, Mus musculus
  siRNA target sequence for Desrt (NM_023598.1,1495-1513).
gcctctgccgccaatcaaa

SEQ ID NO: 713830 - DNA, 19 bp, Mus musculus
  siRNA target sequence for Desrt (NM_023598.1,1517-1535).
cggaaacaggaaaacaata

SEQ ID NO: 713831 - DNA, 19 bp, Mus musculus
  siRNA target sequence for Desrt (NM_023598.1,1562-1580).
gtctcgggaaacaaacgta

SEQ ID NO: 713832 - DNA, 19 bp, Mus musculus
  siRNA target sequence for Desrt (NM_023598.1,1566-1584).
cgggaaacaaacgtatcaa

SEQ ID NO: 713833 - DNA, 19 bp, Mus musculus
  siRNA target sequence for Desrt (NM_023598.1,1627-1645).
caaaccccaagatacatct

SEQ ID NO: 713834 - DNA, 19 bp, Mus musculus
  siRNA target sequence for Desrt (NM_023598.1,1637-1655).
gatacatctgaggtttcat

SEQ ID NO: 713835 - DNA, 19 bp, Mus musculus
  siRNA target sequence for Desrt (NM_023598.1,1836-1854).
ccgaggagatgggagataa

SEQ ID NO: 713836 - DNA, 19 bp, Mus musculus
  siRNA target sequence for Desrt (NM_023598.1,1888-1906).
gcctcctgaaaaagattca

SEQ ID NO: 713837 - DNA, 19 bp, Mus musculus
  siRNA target sequence for Desrt (NM_023598.1,1950-1968).
gcacccagatggactcaaa

SEQ ID NO: 713838 - DNA, 19 bp, Mus musculus
  siRNA target sequence for Fbxo9 (NM_023605.1,442-460).
ctcagtggatgtttgaact

SEQ ID NO: 713839 - DNA, 19 bp, Mus musculus
  siRNA target sequence for Fbxo9 (NM_023605.1,681-699).
gagttcaagatcacttaca

SEQ ID NO: 713840 - DNA, 19 bp, Mus musculus
  siRNA target sequence for Fbxo9 (NM_023605.1,730-748).
gcggctacatcgaagagaa

SEQ ID NO: 713841 - DNA, 19 bp, Mus musculus
  siRNA target sequence for Fbxo9 (NM_023605.1,848-866).
cagtcagactcacatatca

SEQ ID NO: 713842 - DNA, 19 bp, Mus musculus
  siRNA target sequence for Fbxo9 (NM_023605.1,850-868).
gtcagactcacatatcagt

SEQ ID NO: 713843 - DNA, 19 bp, Mus musculus
  siRNA target sequence for Fbxo9 (NM_023605.1,874-892).
ctatggaggtgctgatgta

SEQ ID NO: 713844 - DNA, 19 bp, Mus musculus
  siRNA target sequence for Fbxo9 (NM_023605.1,899-917).
ccgatgggtggtatcaagt

SEQ ID NO: 713845 - DNA, 19 bp, Mus musculus
  siRNA target sequence for Fbxo9 (NM_023605.1,920-938).
cttggacctcagatcgtta

SEQ ID NO: 713846 - DNA, 19 bp, Mus musculus
  siRNA target sequence for Fbxo9 (NM_023605.1,954-972).
gtgtgcagaggattctata

SEQ ID NO: 713847 - DNA, 19 bp, Mus musculus
  siRNA target sequence for Fbxo9 (NM_023605.1,1034-1052).
gcatgaagctcgttccata

SEQ ID NO: 713848 - DNA, 19 bp, Mus musculus
  siRNA target sequence for 1300012G16Rik (NM_023625.2,184-202).
cggctggcagcgccaaaat

SEQ ID NO: 713849 - DNA, 19 bp, Mus musculus
  siRNA target sequence for 1300012G16Rik (NM_023625.2,355-373).
cacaaatggcaggtacaat

SEQ ID NO: 713850 - DNA, 19 bp, Mus musculus
  siRNA target sequence for 1300012G16Rik (NM_023625.2,921-939).
ctggcaacaacttggtttt

SEQ ID NO: 713851 - DNA, 19 bp, Mus musculus
  siRNA target sequence for 1300012G16Rik (NM_023625.2,1150-1168).
caacagcggcacgtacaat

SEQ ID NO: 713852 - DNA, 19 bp, Mus musculus
  siRNA target sequence for 1300012G16Rik (NM_023625.2,1155-1173).
gcggcacgtacaataacca

SEQ ID NO: 713853 - DNA, 19 bp, Mus musculus
  siRNA target sequence for 1300012G16Rik (NM_023625.2,1224-1242).
gaagccgggtgctcactat

SEQ ID NO: 713854 - DNA, 19 bp, Mus musculus
  siRNA target sequence for 1300012G16Rik (NM_023625.2,1228-1246).
ccgggtgctcactatccta

SEQ ID NO: 713855 - DNA, 19 bp, Mus musculus
  siRNA target sequence for 1300012G16Rik (NM_023625.2,1286-1304).
gcagagctctacaaaacga

SEQ ID NO: 713856 - DNA, 19 bp, Mus musculus
  siRNA target sequence for 1300012G16Rik (NM_023625.2,1318-1336).
ctacaacatcccgtacttt

SEQ ID NO: 713857 - DNA, 19 bp, Mus musculus
  siRNA target sequence for 1300012G16Rik (NM_023625.2,1392-1410).
ggttctcttacactaagaa

SEQ ID NO: 713858 - DNA, 19 bp, Mus musculus
  siRNA target sequence for 1300012G16Rik (NM_023625.2,1474-1492).
gctcatgaggtacaatgat

SEQ ID NO: 713859 - DNA, 19 bp, Mus musculus
  siRNA target sequence for 1300012G16Rik (NM_023625.2,1475-1493).
ctcatgaggtacaatgatt

SEQ ID NO: 713860 - DNA, 19 bp, Mus musculus
  siRNA target sequence for 1300017C10Rik (NM_023627.1,242-260).
cccgactcggggtcatgtt

SEQ ID NO: 713861 - DNA, 19 bp, Mus musculus
  siRNA target sequence for 1300017C10Rik (NM_023627.1,347-365).
gtcgcaaggaggcaaacta

SEQ ID NO: 713862 - DNA, 19 bp, Mus musculus
  siRNA target sequence for 1300017C10Rik (NM_023627.1,349-367).
cgcaaggaggcaaactatt

SEQ ID NO: 713863 - DNA, 19 bp, Mus musculus
  siRNA target sequence for 1300017C10Rik (NM_023627.1,351-369).
caaggaggcaaactattat

SEQ ID NO: 713864 - DNA, 19 bp, Mus musculus
  siRNA target sequence for 1300017C10Rik (NM_023627.1,354-372).
ggaggcaaactattatgga

SEQ ID NO: 713865 - DNA, 19 bp, Mus musculus
  siRNA target sequence for 1300017C10Rik (NM_023627.1,355-373).
gaggcaaactattatggat

SEQ ID NO: 713866 - DNA, 19 bp, Mus musculus
  siRNA target sequence for 1300017C10Rik (NM_023627.1,665-683).
gcacacgtgcccaacagtt

SEQ ID NO: 713867 - DNA, 19 bp, Mus musculus
  siRNA target sequence for 1300017C10Rik (NM_023627.1,688-706).
caaatccgaaaggacatta

SEQ ID NO: 713868 - DNA, 19 bp, Mus musculus
  siRNA target sequence for 1300017C10Rik (NM_023627.1,693-711).
ccgaaaggacattagagat

SEQ ID NO: 713869 - DNA, 19 bp, Mus musculus
  siRNA target sequence for 1300017C10Rik (NM_023627.1,694-712).
cgaaaggacattagagatt

SEQ ID NO: 713870 - DNA, 19 bp, Mus musculus
  siRNA target sequence for 1300017C10Rik (NM_023627.1,719-737).
ccagtgcgggattggataa

SEQ ID NO: 713871 - DNA, 19 bp, Mus musculus
  siRNA target sequence for 1300017C10Rik (NM_023627.1,722-740).
gtgcgggattggataaggt

SEQ ID NO: 713872 - DNA, 19 bp, Mus musculus
  siRNA target sequence for 1300017C10Rik (NM_023627.1,784-802).
gtcccaggtcgcaatgaca

SEQ ID NO: 713873 - DNA, 19 bp, Mus musculus
  siRNA target sequence for 1300017C10Rik (NM_023627.1,808-826).
gaaaacttgctacatacta

SEQ ID NO: 713874 - DNA, 19 bp, Mus musculus
  siRNA target sequence for 1300017C10Rik (NM_023627.1,846-864).
gtcaccgtccacacttttt

SEQ ID NO: 713875 - DNA, 19 bp, Mus musculus
  siRNA target sequence for 1300017C10Rik (NM_023627.1,950-968).
cgcagcgccatgtgtttgt

SEQ ID NO: 713876 - DNA, 19 bp, Mus musculus
  siRNA target sequence for 1300017C10Rik (NM_023627.1,951-969).
gcagcgccatgtgtttgta

SEQ ID NO: 713877 - DNA, 19 bp, Mus musculus
  siRNA target sequence for 1300017C10Rik (NM_023627.1,1206-1224).
ccactgtgtggtgatcaaa

SEQ ID NO: 713878 - DNA, 19 bp, Mus musculus
  siRNA target sequence for 1300017C10Rik (NM_023627.1,1564-1582).
ccccagaaccacatgctat

SEQ ID NO: 713879 - DNA, 19 bp, Mus musculus
  siRNA target sequence for 1300017C10Rik (NM_023627.1,1565-1583).
cccagaaccacatgctatt

SEQ ID NO: 713880 - DNA, 19 bp, Mus musculus
  siRNA target sequence for 2410016O06Rik (NM_023633.1,152-170).
ccgaaggcaccggaaaagt

SEQ ID NO: 713881 - DNA, 19 bp, Mus musculus
  siRNA target sequence for 2410016O06Rik (NM_023633.1,664-682).
gctacgaggacgtgcaatt

SEQ ID NO: 713882 - DNA, 19 bp, Mus musculus
  siRNA target sequence for 2410016O06Rik (NM_023633.1,826-844).
ccaccgtgtggcagtttct

SEQ ID NO: 713883 - DNA, 19 bp, Mus musculus
  siRNA target sequence for 2410016O06Rik (NM_023633.1,922-940).
ctcctcactacgatgacat

SEQ ID NO: 713884 - DNA, 19 bp, Mus musculus
  siRNA target sequence for 2410016O06Rik (NM_023633.1,960-978).
ctggaaggtcggaaactct

SEQ ID NO: 713885 - DNA, 19 bp, Mus musculus
  siRNA target sequence for 2410016O06Rik (NM_023633.1,1013-1031).
gttggccctgacatctagt

SEQ ID NO: 713886 - DNA, 19 bp, Mus musculus
  siRNA target sequence for 2410016O06Rik (NM_023633.1,1087-1105).
ctggagacctgctctattt

SEQ ID NO: 713887 - DNA, 19 bp, Mus musculus
  siRNA target sequence for 2410016O06Rik (NM_023633.1,1172-1190).
cacctaccagcgcaataca

SEQ ID NO: 713888 - DNA, 19 bp, Mus musculus
  siRNA target sequence for 2410016O06Rik (NM_023633.1,1273-1291).
cccgagacttcatggatta

SEQ ID NO: 713889 - DNA, 19 bp, Mus musculus
  siRNA target sequence for 2410016O06Rik (NM_023633.1,1276-1294).
gagacttcatggattacat

SEQ ID NO: 713890 - DNA, 19 bp, Mus musculus
  siRNA target sequence for 2410016O06Rik (NM_023633.1,1304-1322).
gcattccgactctaaggat

SEQ ID NO: 713891 - DNA, 19 bp, Mus musculus
  siRNA target sequence for 2410016O06Rik (NM_023633.1,1400-1418).
ggctgaccagagagcaaaa

SEQ ID NO: 713892 - DNA, 19 bp, Mus musculus
  siRNA target sequence for 2410016O06Rik (NM_023633.1,1459-1477).
gggaacgggctctaagtgt

SEQ ID NO: 713893 - DNA, 19 bp, Mus musculus
  siRNA target sequence for 2410016O06Rik (NM_023633.1,1504-1522).
ctggagaacccgtcaatgt

SEQ ID NO: 713894 - DNA, 19 bp, Mus musculus
  siRNA target sequence for 2410016O06Rik (NM_023633.1,1599-1617).
cgattgttcctgtatcaca

SEQ ID NO: 713895 - DNA, 19 bp, Mus musculus
  siRNA target sequence for 2410016O06Rik (NM_023633.1,1622-1640).
ggaaaactctcgagtttat

SEQ ID NO: 713896 - DNA, 19 bp, Mus musculus
  siRNA target sequence for 2410016O06Rik (NM_023633.1,1708-1726).
gctcctacccggagtttgt

SEQ ID NO: 713897 - DNA, 19 bp, Mus musculus
  siRNA target sequence for 2410016O06Rik (NM_023633.1,1769-1787).
ctccttggcaaccatgtta

SEQ ID NO: 713898 - DNA, 19 bp, Mus musculus
  siRNA target sequence for 2410016O06Rik (NM_023633.1,1771-1789).
ccttggcaaccatgttata

SEQ ID NO: 713899 - DNA, 19 bp, Mus musculus
  siRNA target sequence for 2410016O06Rik (NM_023633.1,1772-1790).
cttggcaaccatgttatat

SEQ ID NO: 713900 - DNA, 19 bp, Mus musculus
  siRNA target sequence for 2410016O06Rik (NM_023633.1,1776-1794).
gcaaccatgttatatgata

SEQ ID NO: 713901 - DNA, 19 bp, Mus musculus
  siRNA target sequence for 2410016O06Rik (NM_023633.1,1808-1826).
caccaagacacctctagtt

SEQ ID NO: 713902 - DNA, 19 bp, Mus musculus
  siRNA target sequence for Kdel1 (NM_023645.2,359-377).
cccagagaagagcgaaata

SEQ ID NO: 713903 - DNA, 19 bp, Mus musculus
  siRNA target sequence for Kdel1 (NM_023645.2,360-378).
ccagagaagagcgaaatat

SEQ ID NO: 713904 - DNA, 19 bp, Mus musculus
  siRNA target sequence for Kdel1 (NM_023645.2,408-426).
cttcctgcccgctatttct

SEQ ID NO: 713905 - DNA, 19 bp, Mus musculus
  siRNA target sequence for Kdel1 (NM_023645.2,411-429).
cctgcccgctatttctaca

SEQ ID NO: 713906 - DNA, 19 bp, Mus musculus
  siRNA target sequence for Kdel1 (NM_023645.2,412-430).
ctgcccgctatttctacat

SEQ ID NO: 713907 - DNA, 19 bp, Mus musculus
  siRNA target sequence for Kdel1 (NM_023645.2,483-501).
gtgttccaggttaaaatct

SEQ ID NO: 713908 - DNA, 19 bp, Mus musculus
  siRNA target sequence for Kdel1 (NM_023645.2,664-682).
gaccagtttaccatgagaa

SEQ ID NO: 713909 - DNA, 19 bp, Mus musculus
  siRNA target sequence for Kdel1 (NM_023645.2,683-701).
ctgtgactgtcctttggaa

SEQ ID NO: 713910 - DNA, 19 bp, Mus musculus
  siRNA target sequence for Kdel1 (NM_023645.2,717-735).
ctacgggagatgaactgtt

SEQ ID NO: 713911 - DNA, 19 bp, Mus musculus
  siRNA target sequence for Kdel1 (NM_023645.2,731-749).
ctgttcggaaacaatctct

SEQ ID NO: 713912 - DNA, 19 bp, Mus musculus
  siRNA target sequence for Kdel1 (NM_023645.2,737-755).
ggaaacaatctctcagatt

SEQ ID NO: 713913 - DNA, 19 bp, Mus musculus
  siRNA target sequence for Kdel1 (NM_023645.2,778-796).
ctactgttgatcctgaaaa

SEQ ID NO: 713914 - DNA, 19 bp, Mus musculus
  siRNA target sequence for Kdel1 (NM_023645.2,781-799).
ctgttgatcctgaaaagat

SEQ ID NO: 713915 - DNA, 19 bp, Mus musculus
  siRNA target sequence for Kdel1 (NM_023645.2,804-822).
gcagaaatcccaaaacgat

SEQ ID NO: 713916 - DNA, 19 bp, Mus musculus
  siRNA target sequence for Kdel1 (NM_023645.2,805-823).
cagaaatcccaaaacgatt

SEQ ID NO: 713917 - DNA, 19 bp, Mus musculus
  siRNA target sequence for Kdel1 (NM_023645.2,833-851).
gcaaagcctgtgtcactat

SEQ ID NO: 713918 - DNA, 19 bp, Mus musculus
  siRNA target sequence for Kdel1 (NM_023645.2,834-852).
caaagcctgtgtcactata

SEQ ID NO: 713919 - DNA, 19 bp, Mus musculus
  siRNA target sequence for Kdel1 (NM_023645.2,853-871).
ccttaaaggacaataaggt

SEQ ID NO: 713920 - DNA, 19 bp, Mus musculus
  siRNA target sequence for Kdel1 (NM_023645.2,891-909).
gagcacgttggctttagga

SEQ ID NO: 713921 - DNA, 19 bp, Mus musculus
  siRNA target sequence for Kdel1 (NM_023645.2,893-911).
gcacgttggctttaggatt

SEQ ID NO: 713922 - DNA, 19 bp, Mus musculus
  siRNA target sequence for Kdel1 (NM_023645.2,907-925).
ggattttcatggatgcaat

SEQ ID NO: 713923 - DNA, 19 bp, Mus musculus
  siRNA target sequence for Kdel1 (NM_023645.2,914-932).
catggatgcaatactactt

SEQ ID NO: 713924 - DNA, 19 bp, Mus musculus
  siRNA target sequence for Kdel1 (NM_023645.2,952-970).
ggatgccagatgtggaatt

SEQ ID NO: 713925 - DNA, 19 bp, Mus musculus
  siRNA target sequence for Kdel1 (NM_023645.2,983-1001).
gggagactggcctttggaa

SEQ ID NO: 713926 - DNA, 19 bp, Mus musculus
  siRNA target sequence for Kdel1 (NM_023645.2,1088-1106).
cctgactgactctgttcta

SEQ ID NO: 713927 - DNA, 19 bp, Mus musculus
  siRNA target sequence for Kdel1 (NM_023645.2,1111-1129).
ccatgggccgagtaagtct

SEQ ID NO: 713928 - DNA, 19 bp, Mus musculus
  siRNA target sequence for Kdel1 (NM_023645.2,1117-1135).
gccgagtaagtctggatat

SEQ ID NO: 713929 - DNA, 19 bp, Mus musculus
  siRNA target sequence for Kdel1 (NM_023645.2,1120-1138).
gagtaagtctggatatgat

SEQ ID NO: 713930 - DNA, 19 bp, Mus musculus
  siRNA target sequence for Kdel1 (NM_023645.2,1122-1140).
gtaagtctggatatgatgt

SEQ ID NO: 713931 - DNA, 19 bp, Mus musculus
  siRNA target sequence for Kdel1 (NM_023645.2,1139-1157).
gtcggtgcaagctaacaca

SEQ ID NO: 713932 - DNA, 19 bp, Mus musculus
  siRNA target sequence for Kdel1 (NM_023645.2,1162-1180).
ctccctgggaaagtaagaa

SEQ ID NO: 713933 - DNA, 19 bp, Mus musculus
  siRNA target sequence for Kdel1 (NM_023645.2,1272-1290).
gctttcacaaattttttct

SEQ ID NO: 713934 - DNA, 19 bp, Mus musculus
  siRNA target sequence for Kdel1 (NM_023645.2,1320-1338).
cccatcgtgaaacacattt

SEQ ID NO: 713935 - DNA, 19 bp, Mus musculus
  siRNA target sequence for Kdel1 (NM_023645.2,1355-1373).
caagcacaagtatcagata

SEQ ID NO: 713936 - DNA, 19 bp, Mus musculus
  siRNA target sequence for Kdel1 (NM_023645.2,1358-1376).
gcacaagtatcagataaat

SEQ ID NO: 713937 - DNA, 19 bp, Mus musculus
  siRNA target sequence for Kdel1 (NM_023645.2,1364-1382).
gtatcagataaatattgat

SEQ ID NO: 713938 - DNA, 19 bp, Mus musculus
  siRNA target sequence for Kdel1 (NM_023645.2,1423-1441).
gtgacagtgtcgttctgaa

SEQ ID NO: 713939 - DNA, 19 bp, Mus musculus
  siRNA target sequence for Kdel1 (NM_023645.2,1442-1460).
gcaggactccatctactat

SEQ ID NO: 713940 - DNA, 19 bp, Mus musculus
  siRNA target sequence for Kdel1 (NM_023645.2,1484-1502).
gccctggaaacattacatt

SEQ ID NO: 713941 - DNA, 19 bp, Mus musculus
  siRNA target sequence for Kdel1 (NM_023645.2,1494-1512).
cattacattccagtcaaaa

SEQ ID NO: 713942 - DNA, 19 bp, Mus musculus
  siRNA target sequence for Kdel1 (NM_023645.2,1503-1521).
ccagtcaaaagtaacctaa

SEQ ID NO: 713943 - DNA, 19 bp, Mus musculus
  siRNA target sequence for Kdel1 (NM_023645.2,1518-1536).
ctaagcgatctgctagaaa

SEQ ID NO: 713944 - DNA, 19 bp, Mus musculus
  siRNA target sequence for Kdel1 (NM_023645.2,1650-1668).
ctgttccagggctatgcaa

SEQ ID NO: 713945 - DNA, 19 bp, Mus musculus
  siRNA target sequence for Kdel1 (NM_023645.2,1658-1676).
gggctatgcaaatttacaa

SEQ ID NO: 713946 - DNA, 19 bp, Mus musculus
  siRNA target sequence for Kdel1 (NM_023645.2,1679-1697).
gagcgagccccaaattcga

SEQ ID NO: 713947 - DNA, 19 bp, Mus musculus
  siRNA target sequence for 3830408P04Rik (NM_023647.2,1222-1240).
gcctggggcgtggaaaata

SEQ ID NO: 713948 - DNA, 19 bp, Mus musculus
  siRNA target sequence for 3830408P04Rik (NM_023647.2,1226-1244).
ggggcgtggaaaatatgat

SEQ ID NO: 713949 - DNA, 19 bp, Mus musculus
  siRNA target sequence for 3830408P04Rik (NM_023647.2,1228-1246).
ggcgtggaaaatatgattt

SEQ ID NO: 713950 - DNA, 19 bp, Mus musculus
  siRNA target sequence for 3830408P04Rik (NM_023647.2,1229-1247).
gcgtggaaaatatgatttt

SEQ ID NO: 713951 - DNA, 19 bp, Mus musculus
  siRNA target sequence for 3830408P04Rik (NM_023647.2,1230-1248).
cgtggaaaatatgattttt

SEQ ID NO: 713952 - DNA, 19 bp, Mus musculus
  siRNA target sequence for 3830408P04Rik (NM_023647.2,1286-1304).
cattggagggagtttcatt

SEQ ID NO: 713953 - DNA, 19 bp, Mus musculus
  siRNA target sequence for 3830408P04Rik (NM_023647.2,1420-1438).
ccggtgaagtggccaattt

SEQ ID NO: 713954 - DNA, 19 bp, Mus musculus
  siRNA target sequence for Ush1c (NM_023649.1,34-52).
ggaaggtggcccgagaatt

SEQ ID NO: 713955 - DNA, 19 bp, Mus musculus
  siRNA target sequence for Ush1c (NM_023649.1,63-81).
gtggattttctcattgaaa

SEQ ID NO: 713956 - DNA, 19 bp, Mus musculus
  siRNA target sequence for Ush1c (NM_023649.1,87-105).
gcagagaaggactatcttt

SEQ ID NO: 713957 - DNA, 19 bp, Mus musculus
  siRNA target sequence for Ush1c (NM_023649.1,88-106).
cagagaaggactatcttta

SEQ ID NO: 713958 - DNA, 19 bp, Mus musculus
  siRNA target sequence for Ush1c (NM_023649.1,188-206).
ccgcctgccgctgtttgat

SEQ ID NO: 713959 - DNA, 19 bp, Mus musculus
  siRNA target sequence for Ush1c (NM_023649.1,332-350).
gcgtggaggcctggaattt

SEQ ID NO: 713960 - DNA, 19 bp, Mus musculus
  siRNA target sequence for Ush1c (NM_023649.1,351-369).
ggctgtggactctttatct

SEQ ID NO: 713961 - DNA, 19 bp, Mus musculus
  siRNA target sequence for Ush1c (NM_023649.1,432-450).
cggatcaacggctattcca

SEQ ID NO: 713962 - DNA, 19 bp, Mus musculus
  siRNA target sequence for Ush1c (NM_023649.1,433-451).
ggatcaacggctattccat

SEQ ID NO: 713963 - DNA, 19 bp, Mus musculus
  siRNA target sequence for Ush1c (NM_023649.1,460-478).
gtacccatgaggaagtcat

SEQ ID NO: 713964 - DNA, 19 bp, Mus musculus
  siRNA target sequence for Ush1c (NM_023649.1,552-570).
cctgaggagtccctcaaat

SEQ ID NO: 713965 - DNA, 19 bp, Mus musculus
  siRNA target sequence for Ush1c (NM_023649.1,562-580).
ccctcaaatggcagtatgt

SEQ ID NO: 713966 - DNA, 19 bp, Mus musculus
  siRNA target sequence for Ush1c (NM_023649.1,1225-1243).
gcaagcccaagtatgatca

SEQ ID NO: 713967 - DNA, 19 bp, Mus musculus
  siRNA target sequence for Ush1c (NM_023649.1,1326-1344).
gatccctactccatgttct

SEQ ID NO: 713968 - DNA, 19 bp, Mus musculus
  siRNA target sequence for Ush1c (NM_023649.1,1374-1392).
cggcttctgcgaatcaaga

SEQ ID NO: 713969 - DNA, 19 bp, Mus musculus
  siRNA target sequence for Ush1c (NM_023649.1,1451-1469).
ggtcgtctctgctgtttat

SEQ ID NO: 713970 - DNA, 19 bp, Mus musculus
  siRNA target sequence for Ush1c (NM_023649.1,1454-1472).
cgtctctgctgtttatgaa

SEQ ID NO: 713971 - DNA, 19 bp, Mus musculus
  siRNA target sequence for Ush1c (NM_023649.1,1567-1585).
ccgaggctgccctacagaa

SEQ ID NO: 713972 - DNA, 19 bp, Mus musculus
  siRNA target sequence for Ush1c (NM_023649.1,1633-1651).
gtccccctaaggagtatga

SEQ ID NO: 713973 - DNA, 19 bp, Mus musculus
  siRNA target sequence for Ush1c (NM_023649.1,1636-1654).
cccctaaggagtatgatga

SEQ ID NO: 713974 - DNA, 19 bp, Mus musculus
  siRNA target sequence for Ush1c (NM_023649.1,1653-1671).
gacgagctaaccttctttt

SEQ ID NO: 713975 - DNA, 19 bp, Mus musculus
  siRNA target sequence for Pcm1 (NM_023662.1,290-308).
ggatgaccgactcaacaat

SEQ ID NO: 713976 - DNA, 19 bp, Mus musculus
  siRNA target sequence for Pcm1 (NM_023662.1,291-309).
gatgaccgactcaacaata

SEQ ID NO: 713977 - DNA, 19 bp, Mus musculus
  siRNA target sequence for Pcm1 (NM_023662.1,332-350).
gaaggccaatagatcatca

SEQ ID NO: 713978 - DNA, 19 bp, Mus musculus
  siRNA target sequence for Pcm1 (NM_023662.1,335-353).
ggccaatagatcatcagaa

SEQ ID NO: 713979 - DNA, 19 bp, Mus musculus
  siRNA target sequence for Pcm1 (NM_023662.1,337-355).
ccaatagatcatcagaaaa

SEQ ID NO: 713980 - DNA, 19 bp, Mus musculus
  siRNA target sequence for Pcm1 (NM_023662.1,343-361).
gatcatcagaaaagaataa

SEQ ID NO: 713981 - DNA, 19 bp, Mus musculus
  siRNA target sequence for Pcm1 (NM_023662.1,392-410).
ggtaactaacgctatttct

SEQ ID NO: 713982 - DNA, 19 bp, Mus musculus
  siRNA target sequence for Pcm1 (NM_023662.1,445-463).
caaagattccacatacgtt

SEQ ID NO: 713983 - DNA, 19 bp, Mus musculus
  siRNA target sequence for Pcm1 (NM_023662.1,506-524).
ggcagaactagagaaactt

SEQ ID NO: 713984 - DNA, 19 bp, Mus musculus
  siRNA target sequence for Pcm1 (NM_023662.1,546-564).
gatttagatcagagaagta

SEQ ID NO: 713985 - DNA, 19 bp, Mus musculus
  siRNA target sequence for Pcm1 (NM_023662.1,552-570).
gatcagagaagtattggaa

SEQ ID NO: 713986 - DNA, 19 bp, Mus musculus
  siRNA target sequence for Pcm1 (NM_023662.1,586-604).
gagcaacagcggctaacaa

SEQ ID NO: 713987 - DNA, 19 bp, Mus musculus
  siRNA target sequence for Pcm1 (NM_023662.1,588-606).
gcaacagcggctaacaaca

SEQ ID NO: 713988 - DNA, 19 bp, Mus musculus
  siRNA target sequence for Pcm1 (NM_023662.1,626-644).
ccgaaagcccttcaacttt

SEQ ID NO: 713989 - DNA, 19 bp, Mus musculus
  siRNA target sequence for Pcm1 (NM_023662.1,647-665).
gcctatgcagattaatact

SEQ ID NO: 713990 - DNA, 19 bp, Mus musculus
  siRNA target sequence for Pcm1 (NM_023662.1,648-666).
cctatgcagattaatacta

SEQ ID NO: 713991 - DNA, 19 bp, Mus musculus
  siRNA target sequence for Pcm1 (NM_023662.1,649-667).
ctatgcagattaatactaa

SEQ ID NO: 713992 - DNA, 19 bp, Mus musculus
  siRNA target sequence for Pcm1 (NM_023662.1,843-861).
gttcaaatccgtgactata

SEQ ID NO: 713993 - DNA, 19 bp, Mus musculus
  siRNA target sequence for Pcm1 (NM_023662.1,846-864).
caaatccgtgactatatta

SEQ ID NO: 713994 - DNA, 19 bp, Mus musculus
  siRNA target sequence for Pcm1 (NM_023662.1,851-869).
ccgtgactatattactaaa

SEQ ID NO: 713995 - DNA, 19 bp, Mus musculus
  siRNA target sequence for Pcm1 (NM_023662.1,855-873).
gactatattactaaagcta

SEQ ID NO: 713996 - DNA, 19 bp, Mus musculus
  siRNA target sequence for Pcm1 (NM_023662.1,874-892).
gttctatgcgagaagatct

SEQ ID NO: 713997 - DNA, 19 bp, Mus musculus
  siRNA target sequence for Pcm1 (NM_023662.1,877-895).
ctatgcgagaagatcttgt

SEQ ID NO: 713998 - DNA, 19 bp, Mus musculus
  siRNA target sequence for Pcm1 (NM_023662.1,924-942).
gagcgtcttactcatctaa

SEQ ID NO: 713999 - DNA, 19 bp, Mus musculus
  siRNA target sequence for Pcm1 (NM_023662.1,926-944).
gcgtcttactcatctaata

SEQ ID NO: 714000 - DNA, 19 bp, Mus musculus
  siRNA target sequence for Pcm1 (NM_023662.1,1020-1038).
cctatggaagagacagaaa

SEQ ID NO: 714001 - DNA, 19 bp, Mus musculus
  siRNA target sequence for Pcm1 (NM_023662.1,1166-1184).
ggatgactctgttgttaca

SEQ ID NO: 714002 - DNA, 19 bp, Mus musculus
  siRNA target sequence for Pcm1 (NM_023662.1,1185-1203).
gaaactacaggaagcttat

SEQ ID NO: 714003 - DNA, 19 bp, Mus musculus
  siRNA target sequence for Pcm1 (NM_023662.1,1213-1231).
gcatcacatctgaactaaa

SEQ ID NO: 714004 - DNA, 19 bp, Mus musculus
  siRNA target sequence for Pcm1 (NM_023662.1,1362-1380).
ccctcagtttctgaacatt

SEQ ID NO: 714005 - DNA, 19 bp, Mus musculus
  siRNA target sequence for Pcm1 (NM_023662.1,1395-1413).
gtacagctttttagcaaaa

SEQ ID NO: 714006 - DNA, 19 bp, Mus musculus
  siRNA target sequence for Pcm1 (NM_023662.1,1408-1426).
gcaaaatgagagtactaca

SEQ ID NO: 714007 - DNA, 19 bp, Mus musculus
  siRNA target sequence for Pcm1 (NM_023662.1,1479-1497).
gatcagcatctgaacaact

SEQ ID NO: 714008 - DNA, 19 bp, Mus musculus
  siRNA target sequence for Pcm1 (NM_023662.1,1524-1542).
caaagaagtggggataaga

SEQ ID NO: 714009 - DNA, 19 bp, Mus musculus
  siRNA target sequence for Pcm1 (NM_023662.1,1566-1584).
gctcctgtgggctttgcat

SEQ ID NO: 714010 - DNA, 19 bp, Mus musculus
  siRNA target sequence for Pcm1 (NM_023662.1,1577-1595).
ctttgcatcagctgtcaat

SEQ ID NO: 714011 - DNA, 19 bp, Mus musculus
  siRNA target sequence for Pcm1 (NM_023662.1,1597-1615).
gagaggccaatagtcttat

SEQ ID NO: 714012 - DNA, 19 bp, Mus musculus
  siRNA target sequence for Pcm1 (NM_023662.1,1601-1619).
ggccaatagtcttatctca

SEQ ID NO: 714013 - DNA, 19 bp, Mus musculus
  siRNA target sequence for Pcm1 (NM_023662.1,1642-1660).
ctctagtttctcagaatga

SEQ ID NO: 714014 - DNA, 19 bp, Mus musculus
  siRNA target sequence for Pcm1 (NM_023662.1,1761-1779).
gaacaaacatcagatatga

SEQ ID NO: 714015 - DNA, 19 bp, Mus musculus
  siRNA target sequence for Pcm1 (NM_023662.1,1764-1782).
caaacatcagatatgatga

SEQ ID NO: 714016 - DNA, 19 bp, Mus musculus
  siRNA target sequence for Pcm1 (NM_023662.1,1855-1873).
ctgaacctgttactaacat

SEQ ID NO: 714017 - DNA, 19 bp, Mus musculus
  siRNA target sequence for Pcm1 (NM_023662.1,1857-1875).
gaacctgttactaacatta

SEQ ID NO: 714018 - DNA, 19 bp, Mus musculus
  siRNA target sequence for Pcm1 (NM_023662.1,1894-1912).
ctacctggaatgaagtgaa

SEQ ID NO: 714019 - DNA, 19 bp, Mus musculus
  siRNA target sequence for Pcm1 (NM_023662.1,1908-1926).
gtgaatactaacagtaata

SEQ ID NO: 714020 - DNA, 19 bp, Mus musculus
  siRNA target sequence for Pcm1 (NM_023662.1,1933-1951).
gtggttctaacaatagaga

SEQ ID NO: 714021 - DNA, 19 bp, Mus musculus
  siRNA target sequence for Pcm1 (NM_023662.1,1950-1968).
gatgggagaccagttaatt

SEQ ID NO: 714022 - DNA, 19 bp, Mus musculus
  siRNA target sequence for Pcm1 (NM_023662.1,1954-1972).
ggagaccagttaattctaa

SEQ ID NO: 714023 - DNA, 19 bp, Mus musculus
  siRNA target sequence for Pcm1 (NM_023662.1,1973-1991).
ctgtgaaattaataacaga

SEQ ID NO: 714024 - DNA, 19 bp, Mus musculus
  siRNA target sequence for Pcm1 (NM_023662.1,2026-2044).
cattagactgtcgatacaa

SEQ ID NO: 714025 - DNA, 19 bp, Mus musculus
  siRNA target sequence for Pcm1 (NM_023662.1,2033-2051).
ctgtcgatacaatagagaa

SEQ ID NO: 714026 - DNA, 19 bp, Mus musculus
  siRNA target sequence for Pcm1 (NM_023662.1,2115-2133).
gtcagtggggcttcattat

SEQ ID NO: 714027 - DNA, 19 bp, Mus musculus
  siRNA target sequence for Pcm1 (NM_023662.1,2117-2135).
cagtggggcttcattatct

SEQ ID NO: 714028 - DNA, 19 bp, Mus musculus
  siRNA target sequence for Pcm1 (NM_023662.1,2283-2301).
gtccctgctgcatcaaatt

SEQ ID NO: 714029 - DNA, 19 bp, Mus musculus
  siRNA target sequence for Pcm1 (NM_023662.1,2296-2314).
caaatttggatgatttcta

SEQ ID NO: 714030 - DNA, 19 bp, Mus musculus
  siRNA target sequence for Pcm1 (NM_023662.1,2316-2334).
gcagcagaagaagatatca

SEQ ID NO: 714031 - DNA, 19 bp, Mus musculus
  siRNA target sequence for Pcm1 (NM_023662.1,2317-2335).
cagcagaagaagatatcaa

SEQ ID NO: 714032 - DNA, 19 bp, Mus musculus
  siRNA target sequence for Pcm1 (NM_023662.1,2440-2458).
gagagcttaaacaattgca

SEQ ID NO: 714033 - DNA, 19 bp, Mus musculus
  siRNA target sequence for Pcm1 (NM_023662.1,2531-2549).
gctctcagccactagtata

SEQ ID NO: 714034 - DNA, 19 bp, Mus musculus
  siRNA target sequence for Pcm1 (NM_023662.1,2532-2550).
ctctcagccactagtataa

SEQ ID NO: 714035 - DNA, 19 bp, Mus musculus
  siRNA target sequence for Pcm1 (NM_023662.1,2551-2569).
gtagtggtcccacaaaaaa

SEQ ID NO: 714036 - DNA, 19 bp, Mus musculus
  siRNA target sequence for Pcm1 (NM_023662.1,2554-2572).
gtggtcccacaaaaaaata

SEQ ID NO: 714037 - DNA, 19 bp, Mus musculus
  siRNA target sequence for Pcm1 (NM_023662.1,2557-2575).
gtcccacaaaaaaatatct

SEQ ID NO: 714038 - DNA, 19 bp, Mus musculus
  siRNA target sequence for Pcm1 (NM_023662.1,2574-2592).
ctaccagctattacttcaa

SEQ ID NO: 714039 - DNA, 19 bp, Mus musculus
  siRNA target sequence for Pcm1 (NM_023662.1,2587-2605).
cttcaactccaactgttaa

SEQ ID NO: 714040 - DNA, 19 bp, Mus musculus
  siRNA target sequence for Pcm1 (NM_023662.1,2590-2608).
caactccaactgttaatga

SEQ ID NO: 714041 - DNA, 19 bp, Mus musculus
  siRNA target sequence for Pcm1 (NM_023662.1,2796-2814).
gtggctatatcattgagaa

SEQ ID NO: 714042 - DNA, 19 bp, Mus musculus
  siRNA target sequence for Pcm1 (NM_023662.1,2887-2905).
ctactcagtgtgcattaga

SEQ ID NO: 714043 - DNA, 19 bp, Mus musculus
  siRNA target sequence for Pcm1 (NM_023662.1,2890-2908).
ctcagtgtgcattagatga

SEQ ID NO: 714044 - DNA, 19 bp, Mus musculus
  siRNA target sequence for Pcm1 (NM_023662.1,2894-2912).
gtgtgcattagatgaagaa

SEQ ID NO: 714045 - DNA, 19 bp, Mus musculus
  siRNA target sequence for Pcm1 (NM_023662.1,2926-2944).
gctatctttcagaaggaat

SEQ ID NO: 714046 - DNA, 19 bp, Mus musculus
  siRNA target sequence for Pcm1 (NM_023662.1,2975-2993).
gcaggatgccagttccaat

SEQ ID NO: 714047 - DNA, 19 bp, Mus musculus
  siRNA target sequence for Pcm1 (NM_023662.1,2978-2996).
ggatgccagttccaatgat

SEQ ID NO: 714048 - DNA, 19 bp, Mus musculus
  siRNA target sequence for Pcm1 (NM_023662.1,3019-3037).
gcatgaatcaaaattctta

SEQ ID NO: 714049 - DNA, 19 bp, Mus musculus
  siRNA target sequence for Pcm1 (NM_023662.1,3068-3086).
gagcaatcgccctgtttca

SEQ ID NO: 714050 - DNA, 19 bp, Mus musculus
  siRNA target sequence for Pcm1 (NM_023662.1,3134-3152).
cagcatgcaacgacaagaa

SEQ ID NO: 714051 - DNA, 19 bp, Mus musculus
  siRNA target sequence for Pcm1 (NM_023662.1,3136-3154).
gcatgcaacgacaagaaaa

SEQ ID NO: 714052 - DNA, 19 bp, Mus musculus
  siRNA target sequence for Pcm1 (NM_023662.1,3163-3181).
gggtgtcagagctctctta

SEQ ID NO: 714053 - DNA, 19 bp, Mus musculus
  siRNA target sequence for Pcm1 (NM_023662.1,3165-3183).
gtgtcagagctctcttaca

SEQ ID NO: 714054 - DNA, 19 bp, Mus musculus
  siRNA target sequence for Pcm1 (NM_023662.1,3227-3245).
gaaacaactcgatttcagt

SEQ ID NO: 714055 - DNA, 19 bp, Mus musculus
  siRNA target sequence for Pcm1 (NM_023662.1,3269-3287).
gcaagaccaacagacttta

SEQ ID NO: 714056 - DNA, 19 bp, Mus musculus
  siRNA target sequence for Pcm1 (NM_023662.1,3275-3293).
ccaacagactttatcttgt

SEQ ID NO: 714057 - DNA, 19 bp, Mus musculus
  siRNA target sequence for Pcm1 (NM_023662.1,3276-3294).
caacagactttatcttgtt

SEQ ID NO: 714058 - DNA, 19 bp, Mus musculus
  siRNA target sequence for Pcm1 (NM_023662.1,3323-3341).
cagtgttctgcctagtaat

SEQ ID NO: 714059 - DNA, 19 bp, Mus musculus
  siRNA target sequence for Pcm1 (NM_023662.1,3325-3343).
gtgttctgcctagtaatgt

SEQ ID NO: 714060 - DNA, 19 bp, Mus musculus
  siRNA target sequence for Pcm1 (NM_023662.1,3349-3367).
cccctcaagtgcaccttat

SEQ ID NO: 714061 - DNA, 19 bp, Mus musculus
  siRNA target sequence for Pcm1 (NM_023662.1,3351-3369).
cctcaagtgcaccttatca

SEQ ID NO: 714062 - DNA, 19 bp, Mus musculus
  siRNA target sequence for Pcm1 (NM_023662.1,3352-3370).
ctcaagtgcaccttatcat

SEQ ID NO: 714063 - DNA, 19 bp, Mus musculus
  siRNA target sequence for Pcm1 (NM_023662.1,3416-3434).
caatgtccagaggttaaaa

SEQ ID NO: 714064 - DNA, 19 bp, Mus musculus
  siRNA target sequence for Pcm1 (NM_023662.1,3447-3465).
gaacttatgcgccaacaaa

SEQ ID NO: 714065 - DNA, 19 bp, Mus musculus
  siRNA target sequence for Pcm1 (NM_023662.1,3520-3538).
cttcttctcccaatttatt

SEQ ID NO: 714066 - DNA, 19 bp, Mus musculus
  siRNA target sequence for Pcm1 (NM_023662.1,3556-3574).
caacacagcctgtaaatct

SEQ ID NO: 714067 - DNA, 19 bp, Mus musculus
  siRNA target sequence for Pcm1 (NM_023662.1,3559-3577).
cacagcctgtaaatctgtt

SEQ ID NO: 714068 - DNA, 19 bp, Mus musculus
  siRNA target sequence for Pcm1 (NM_023662.1,3561-3579).
cagcctgtaaatctgttta

SEQ ID NO: 714069 - DNA, 19 bp, Mus musculus
  siRNA target sequence for Pcm1 (NM_023662.1,3582-3600).
ctgcctggatttactaact

SEQ ID NO: 714070 - DNA, 19 bp, Mus musculus
  siRNA target sequence for Pcm1 (NM_023662.1,3584-3602).
gcctggatttactaacttt

SEQ ID NO: 714071 - DNA, 19 bp, Mus musculus
  siRNA target sequence for Pcm1 (NM_023662.1,3588-3606).
ggatttactaactttccat

SEQ ID NO: 714072 - DNA, 19 bp, Mus musculus
  siRNA target sequence for Pcm1 (NM_023662.1,3698-3716).
gccattagctcaaaatcct

SEQ ID NO: 714073 - DNA, 19 bp, Mus musculus
  siRNA target sequence for Pcm1 (NM_023662.1,3699-3717).
ccattagctcaaaatcctt

SEQ ID NO: 714074 - DNA, 19 bp, Mus musculus
  siRNA target sequence for Pcm1 (NM_023662.1,3729-3747).
gagtatatggcttttccaa

SEQ ID NO: 714075 - DNA, 19 bp, Mus musculus
  siRNA target sequence for Pcm1 (NM_023662.1,3750-3768).
ccctttgaaagcagttctt

SEQ ID NO: 714076 - DNA, 19 bp, Mus musculus
  siRNA target sequence for Pcm1 (NM_023662.1,3855-3873).
ggtggagtagaaaaaccat

SEQ ID NO: 714077 - DNA, 19 bp, Mus musculus
  siRNA target sequence for Pcm1 (NM_023662.1,3900-3918).
gtagagaaagctacaaata

SEQ ID NO: 714078 - DNA, 19 bp, Mus musculus
  siRNA target sequence for Pcm1 (NM_023662.1,3903-3921).
gagaaagctacaaatagta

SEQ ID NO: 714079 - DNA, 19 bp, Mus musculus
  siRNA target sequence for Pcm1 (NM_023662.1,3947-3965).
caggagaagacgtcagttt

SEQ ID NO: 714080 - DNA, 19 bp, Mus musculus
  siRNA target sequence for Pcm1 (NM_023662.1,3972-3990).
gaatccttggaaagcttta

SEQ ID NO: 714081 - DNA, 19 bp, Mus musculus
  siRNA target sequence for Pcm1 (NM_023662.1,3992-4010).
cagtatgcctgatcctata

SEQ ID NO: 714082 - DNA, 19 bp, Mus musculus
  siRNA target sequence for Pcm1 (NM_023662.1,4011-4029).
gacccaacaacagtaacta

SEQ ID NO: 714083 - DNA, 19 bp, Mus musculus
  siRNA target sequence for Pcm1 (NM_023662.1,4079-4097).
ggacaaaactcccaaatca

SEQ ID NO: 714084 - DNA, 19 bp, Mus musculus
  siRNA target sequence for Pcm1 (NM_023662.1,4177-4195).
catgtgaaccttgcaaaaa

SEQ ID NO: 714085 - DNA, 19 bp, Mus musculus
  siRNA target sequence for Pcm1 (NM_023662.1,4227-4245).
cctgttcaagcaaaattat

SEQ ID NO: 714086 - DNA, 19 bp, Mus musculus
  siRNA target sequence for Pcm1 (NM_023662.1,4341-4359).
gaagctttacgggatacta

SEQ ID NO: 714087 - DNA, 19 bp, Mus musculus
  siRNA target sequence for Pcm1 (NM_023662.1,4344-4362).
gctttacgggatactattt

SEQ ID NO: 714088 - DNA, 19 bp, Mus musculus
  siRNA target sequence for Pcm1 (NM_023662.1,4366-4384).
ccgaagtggctacattaat

SEQ ID NO: 714089 - DNA, 19 bp, Mus musculus
  siRNA target sequence for Pcm1 (NM_023662.1,4367-4385).
cgaagtggctacattaatt

SEQ ID NO: 714090 - DNA, 19 bp, Mus musculus
  siRNA target sequence for Pcm1 (NM_023662.1,4373-4391).
ggctacattaatttctcaa

SEQ ID NO: 714091 - DNA, 19 bp, Mus musculus
  siRNA target sequence for Pcm1 (NM_023662.1,4431-4449).
gagctgcagctacttaata

SEQ ID NO: 714092 - DNA, 19 bp, Mus musculus
  siRNA target sequence for Pcm1 (NM_023662.1,4457-4475).
cttgagacagagagcttta

SEQ ID NO: 714093 - DNA, 19 bp, Mus musculus
  siRNA target sequence for Pcm1 (NM_023662.1,4493-4511).
cgtatccagacacatttct

SEQ ID NO: 714094 - DNA, 19 bp, Mus musculus
  siRNA target sequence for Pcm1 (NM_023662.1,4505-4523).
catttctgaaagtgatgaa

SEQ ID NO: 714095 - DNA, 19 bp, Mus musculus
  siRNA target sequence for Pcm1 (NM_023662.1,4564-4582).
gggtagcatccaattcaga

SEQ ID NO: 714096 - DNA, 19 bp, Mus musculus
  siRNA target sequence for Pcm1 (NM_023662.1,4590-4608).
ccgagtgagagccttgtta

SEQ ID NO: 714097 - DNA, 19 bp, Mus musculus
  siRNA target sequence for Pcm1 (NM_023662.1,4605-4623).
gttactactgacgatgaaa

SEQ ID NO: 714098 - DNA, 19 bp, Mus musculus
  siRNA target sequence for Pcm1 (NM_023662.1,4612-4630).
ctgacgatgaaacatttga

SEQ ID NO: 714099 - DNA, 19 bp, Mus musculus
  siRNA target sequence for Pcm1 (NM_023662.1,4709-4727).
caactttgagccatttgca

SEQ ID NO: 714100 - DNA, 19 bp, Mus musculus
  siRNA target sequence for Pcm1 (NM_023662.1,4740-4758).
ggtaacactgtgattcact

SEQ ID NO: 714101 - DNA, 19 bp, Mus musculus
  siRNA target sequence for Pcm1 (NM_023662.1,4741-4759).
gtaacactgtgattcactt

SEQ ID NO: 714102 - DNA, 19 bp, Mus musculus
  siRNA target sequence for Pcm1 (NM_023662.1,4774-4792).
ccagaatgagagagtatga

SEQ ID NO: 714103 - DNA, 19 bp, Mus musculus
  siRNA target sequence for Pcm1 (NM_023662.1,4785-4803).
gagtatgagcgcatgaaga

SEQ ID NO: 714104 - DNA, 19 bp, Mus musculus
  siRNA target sequence for Pcm1 (NM_023662.1,4808-4826).
gacagaaagtcactcaaat

SEQ ID NO: 714105 - DNA, 19 bp, Mus musculus
  siRNA target sequence for Pcm1 (NM_023662.1,4812-4830).
gaaagtcactcaaatatga

SEQ ID NO: 714106 - DNA, 19 bp, Mus musculus
  siRNA target sequence for Pcm1 (NM_023662.1,4834-4852).
gcacttgcagggttattga

SEQ ID NO: 714107 - DNA, 19 bp, Mus musculus
  siRNA target sequence for Pcm1 (NM_023662.1,4873-4891).
ccgctgccacagtcagtaa

SEQ ID NO: 714108 - DNA, 19 bp, Mus musculus
  siRNA target sequence for Pcm1 (NM_023662.1,4874-4892).
cgctgccacagtcagtaat

SEQ ID NO: 714109 - DNA, 19 bp, Mus musculus
  siRNA target sequence for Pcm1 (NM_023662.1,4875-4893).
gctgccacagtcagtaatt

SEQ ID NO: 714110 - DNA, 19 bp, Mus musculus
  siRNA target sequence for Pcm1 (NM_023662.1,4899-4917).
gaaactcccattattgaga

SEQ ID NO: 714111 - DNA, 19 bp, Mus musculus
  siRNA target sequence for Pcm1 (NM_023662.1,4932-4950).
caacctataagtgatgttt

SEQ ID NO: 714112 - DNA, 19 bp, Mus musculus
  siRNA target sequence for Pcm1 (NM_023662.1,4954-4972).
ccgtcccctgtcctagaat

SEQ ID NO: 714113 - DNA, 19 bp, Mus musculus
  siRNA target sequence for Pcm1 (NM_023662.1,4955-4973).
cgtcccctgtcctagaatt

SEQ ID NO: 714114 - DNA, 19 bp, Mus musculus
  siRNA target sequence for Pcm1 (NM_023662.1,4958-4976).
cccctgtcctagaattgat

SEQ ID NO: 714115 - DNA, 19 bp, Mus musculus
  siRNA target sequence for Pcm1 (NM_023662.1,4959-4977).
ccctgtcctagaattgata

SEQ ID NO: 714116 - DNA, 19 bp, Mus musculus
  siRNA target sequence for Pcm1 (NM_023662.1,4982-5000).
gcaactggaccgccaaatt

SEQ ID NO: 714117 - DNA, 19 bp, Mus musculus
  siRNA target sequence for Pcm1 (NM_023662.1,4983-5001).
caactggaccgccaaatta

SEQ ID NO: 714118 - DNA, 19 bp, Mus musculus
  siRNA target sequence for Pcm1 (NM_023662.1,4992-5010).
cgccaaattaaagcaatta

SEQ ID NO: 714119 - DNA, 19 bp, Mus musculus
  siRNA target sequence for Pcm1 (NM_023662.1,5099-5117).
ccttacccagcagaatgat

SEQ ID NO: 714120 - DNA, 19 bp, Mus musculus
  siRNA target sequence for Pcm1 (NM_023662.1,5135-5153).
gaagttctttcataaacaa

SEQ ID NO: 714121 - DNA, 19 bp, Mus musculus
  siRNA target sequence for Pcm1 (NM_023662.1,5274-5292).
ctcatgcaagacttggata

SEQ ID NO: 714122 - DNA, 19 bp, Mus musculus
  siRNA target sequence for Pcm1 (NM_023662.1,5276-5294).
catgcaagacttggataat

SEQ ID NO: 714123 - DNA, 19 bp, Mus musculus
  siRNA target sequence for Pcm1 (NM_023662.1,5279-5297).
gcaagacttggataataat

SEQ ID NO: 714124 - DNA, 19 bp, Mus musculus
  siRNA target sequence for Pcm1 (NM_023662.1,5283-5301).
gacttggataataatagca

SEQ ID NO: 714125 - DNA, 19 bp, Mus musculus
  siRNA target sequence for Pcm1 (NM_023662.1,5346-5364).
gtgaggcagtcttatgcaa

SEQ ID NO: 714126 - DNA, 19 bp, Mus musculus
  siRNA target sequence for Pcm1 (NM_023662.1,5348-5366).
gaggcagtcttatgcaaaa

SEQ ID NO: 714127 - DNA, 19 bp, Mus musculus
  siRNA target sequence for Pcm1 (NM_023662.1,5401-5419).
cacctgctggagagattga

SEQ ID NO: 714128 - DNA, 19 bp, Mus musculus
  siRNA target sequence for Pcm1 (NM_023662.1,5473-5491).
ctgaggtatatgatgctaa

SEQ ID NO: 714129 - DNA, 19 bp, Mus musculus
  siRNA target sequence for Pcm1 (NM_023662.1,5477-5495).
ggtatatgatgctaaaggt

SEQ ID NO: 714130 - DNA, 19 bp, Mus musculus
  siRNA target sequence for Pcm1 (NM_023662.1,5488-5506).
ctaaaggtcccaaaaatgt

SEQ ID NO: 714131 - DNA, 19 bp, Mus musculus
  siRNA target sequence for Pcm1 (NM_023662.1,5498-5516).
caaaaatgtaagatctgat

SEQ ID NO: 714132 - DNA, 19 bp, Mus musculus
  siRNA target sequence for Pcm1 (NM_023662.1,5550-5568).
cggtgtccagtgtctatta

SEQ ID NO: 714133 - DNA, 19 bp, Mus musculus
  siRNA target sequence for Pcm1 (NM_023662.1,5556-5574).
ccagtgtctattaatctgt

SEQ ID NO: 714134 - DNA, 19 bp, Mus musculus
  siRNA target sequence for Pcm1 (NM_023662.1,5561-5579).
gtctattaatctgtctaaa

SEQ ID NO: 714135 - DNA, 19 bp, Mus musculus
  siRNA target sequence for Pcm1 (NM_023662.1,5591-5609).
ggctttaactaattatgga

SEQ ID NO: 714136 - DNA, 19 bp, Mus musculus
  siRNA target sequence for Pcm1 (NM_023662.1,5592-5610).
gctttaactaattatggaa

SEQ ID NO: 714137 - DNA, 19 bp, Mus musculus
  siRNA target sequence for Pcm1 (NM_023662.1,5729-5747).
gattctgcaacatgatctt

SEQ ID NO: 714138 - DNA, 19 bp, Mus musculus
  siRNA target sequence for Pcm1 (NM_023662.1,5781-5799).
gaccaagaaccaactagta

SEQ ID NO: 714139 - DNA, 19 bp, Mus musculus
  siRNA target sequence for Pcm1 (NM_023662.1,5784-5802).
caagaaccaactagtaaga

SEQ ID NO: 714140 - DNA, 19 bp, Mus musculus
  siRNA target sequence for Pcm1 (NM_023662.1,5823-5841).
gtgaaaccttgttatctca

SEQ ID NO: 714141 - DNA, 19 bp, Mus musculus
  siRNA target sequence for Pcm1 (NM_023662.1,5825-5843).
gaaaccttgttatctcaat

SEQ ID NO: 714142 - DNA, 19 bp, Mus musculus
  siRNA target sequence for Pcm1 (NM_023662.1,5880-5898).
cataaggactcgcttacta

SEQ ID NO: 714143 - DNA, 19 bp, Mus musculus
  siRNA target sequence for Pcm1 (NM_023662.1,5885-5903).
ggactcgcttactactact

SEQ ID NO: 714144 - DNA, 19 bp, Mus musculus
  siRNA target sequence for Pcm1 (NM_023662.1,5896-5914).
ctactactgattcatctaa

SEQ ID NO: 714145 - DNA, 19 bp, Mus musculus
  siRNA target sequence for Pcm1 (NM_023662.1,5899-5917).
ctactgattcatctaaaca

SEQ ID NO: 714146 - DNA, 19 bp, Mus musculus
  siRNA target sequence for Pcm1 (NM_023662.1,5957-5975).
cttagtgcctagagtcaaa

SEQ ID NO: 714147 - DNA, 19 bp, Mus musculus
  siRNA target sequence for Pcm1 (NM_023662.1,6014-6032).
ggctggaagccctgatact

SEQ ID NO: 714148 - DNA, 19 bp, Mus musculus
  siRNA target sequence for Pcm1 (NM_023662.1,6018-6036).
ggaagccctgatactgaat

SEQ ID NO: 714149 - DNA, 19 bp, Mus musculus
  siRNA target sequence for Pcm1 (NM_023662.1,6031-6049).
ctgaatctccagtgttagt

SEQ ID NO: 714150 - DNA, 19 bp, Mus musculus
  siRNA target sequence for Pcm1 (NM_023662.1,6033-6051).
gaatctccagtgttagtga

SEQ ID NO: 714151 - DNA, 19 bp, Mus musculus
  siRNA target sequence for Pcm1 (NM_023662.1,6037-6055).
ctccagtgttagtgaatga

SEQ ID NO: 714152 - DNA, 19 bp, Mus musculus
  siRNA target sequence for Pcm1 (NM_023662.1,6039-6057).
ccagtgttagtgaatgact

SEQ ID NO: 714153 - DNA, 19 bp, Mus musculus
  siRNA target sequence for Pcm1 (NM_023662.1,6044-6062).
gttagtgaatgactatgaa

SEQ ID NO: 714154 - DNA, 19 bp, Mus musculus
  siRNA target sequence for Pcm1 (NM_023662.1,6068-6086).
gtctggtaacataagtcaa

SEQ ID NO: 714155 - DNA, 19 bp, Mus musculus
  siRNA target sequence for Pcm1 (NM_023662.1,6072-6090).
ggtaacataagtcaaaagt

SEQ ID NO: 714156 - DNA, 19 bp, Mus musculus
  siRNA target sequence for Pcm1 (NM_023662.1,6120-6138).
gatttgccgctcaaactga

SEQ ID NO: 714157 - DNA, 19 bp, Mus musculus
  siRNA target sequence for Pcm1 (NM_023662.1,6131-6149).
caaactgacagtctattca

SEQ ID NO: 714158 - DNA, 19 bp, Mus musculus
  siRNA target sequence for Pcm1 (NM_023662.1,6202-6220).
ctggtgaaatatgtgaaat

SEQ ID NO: 714159 - DNA, 19 bp, Mus musculus
  siRNA target sequence for D4Wsu53e (NM_023665.2,895-913).
ctgctgccagcatttatta

SEQ ID NO: 714160 - DNA, 19 bp, Mus musculus
  siRNA target sequence for Ndel1 (NM_023668.1,147-165).
gatataccggatttttcaa

SEQ ID NO: 714161 - DNA, 19 bp, Mus musculus
  siRNA target sequence for Ndel1 (NM_023668.1,153-171).
ccggatttttcaagtttaa

SEQ ID NO: 714162 - DNA, 19 bp, Mus musculus
  siRNA target sequence for Ndel1 (NM_023668.1,195-213).
gaactttccttgaagtata

SEQ ID NO: 714163 - DNA, 19 bp, Mus musculus
  siRNA target sequence for Ndel1 (NM_023668.1,232-250).
ctcgggatgagctagttga

SEQ ID NO: 714164 - DNA, 19 bp, Mus musculus
  siRNA target sequence for Ndel1 (NM_023668.1,296-314).
gttagtacaggctgaacaa

SEQ ID NO: 714165 - DNA, 19 bp, Mus musculus
  siRNA target sequence for Ndel1 (NM_023668.1,365-383).
ggcgttaaaggagaaacta

SEQ ID NO: 714166 - DNA, 19 bp, Mus musculus
  siRNA target sequence for Ndel1 (NM_023668.1,407-425).
caagcaggtctcagtgtta

SEQ ID NO: 714167 - DNA, 19 bp, Mus musculus
  siRNA target sequence for Ndel1 (NM_023668.1,420-438).
gtgttagaagatgatttaa

SEQ ID NO: 714168 - DNA, 19 bp, Mus musculus
  siRNA target sequence for Ndel1 (NM_023668.1,458-476).
ggagcaactgcataagtat

SEQ ID NO: 714169 - DNA, 19 bp, Mus musculus
  siRNA target sequence for Ndel1 (NM_023668.1,462-480).
caactgcataagtatgtga

SEQ ID NO: 714170 - DNA, 19 bp, Mus musculus
  siRNA target sequence for Ndel1 (NM_023668.1,504-522).
gacctggagcgagcaaaaa

SEQ ID NO: 714171 - DNA, 19 bp, Mus musculus
  siRNA target sequence for Ndel1 (NM_023668.1,523-541).
gggcaacaatagtttcact

SEQ ID NO: 714172 - DNA, 19 bp, Mus musculus
  siRNA target sequence for Ndel1 (NM_023668.1,569-587).
ggccattgaacgaaatgca

SEQ ID NO: 714173 - DNA, 19 bp, Mus musculus
  siRNA target sequence for Ndel1 (NM_023668.1,579-597).
cgaaatgcattcttagaaa

SEQ ID NO: 714174 - DNA, 19 bp, Mus musculus
  siRNA target sequence for Ndel1 (NM_023668.1,738-756).
gactgtgagaagatggatt

SEQ ID NO: 714175 - DNA, 19 bp, Mus musculus
  siRNA target sequence for Ndel1 (NM_023668.1,877-895).
ctaggatatcagcactaaa

SEQ ID NO: 714176 - DNA, 19 bp, Mus musculus
  siRNA target sequence for Ndel1 (NM_023668.1,926-944).
ggctttagaatccaagtta

SEQ ID NO: 714177 - DNA, 19 bp, Mus musculus
  siRNA target sequence for Ndel1 (NM_023668.1,972-990).
caagcatcccgcaaatctt

SEQ ID NO: 714178 - DNA, 19 bp, Mus musculus
  siRNA target sequence for Ndel1 (NM_023668.1,976-994).
catcccgcaaatcttatgt

SEQ ID NO: 714179 - DNA, 19 bp, Mus musculus
  siRNA target sequence for Ndel1 (NM_023668.1,1005-1023).
gttaactgtggggtaatga

SEQ ID NO: 714180 - DNA, 19 bp, Mus musculus
  siRNA target sequence for Ndel1 (NM_023668.1,1048-1066).
ggtcagggcgagcaacttt

SEQ ID NO: 714181 - DNA, 19 bp, Mus musculus
  siRNA target sequence for Ndel1 (NM_023668.1,1051-1069).
cagggcgagcaactttctt

SEQ ID NO: 714182 - DNA, 19 bp, Mus musculus
  siRNA target sequence for Ndel1 (NM_023668.1,1079-1097).
ggcagtaaatggctttgat

SEQ ID NO: 714183 - DNA, 19 bp, Mus musculus
  siRNA target sequence for 3322402L07Rik (NM_023727.1,573-591).
ctgcagttggaggatgtat

SEQ ID NO: 714184 - DNA, 19 bp, Mus musculus
  siRNA target sequence for 3322402L07Rik (NM_023727.1,575-593).
gcagttggaggatgtatgt

SEQ ID NO: 714185 - DNA, 19 bp, Mus musculus
  siRNA target sequence for 4933400N19Rik (NM_023729.2,82-100).
ggatgacggctgggatatt

SEQ ID NO: 714186 - DNA, 19 bp, Mus musculus
  siRNA target sequence for 4933400N19Rik (NM_023729.2,109-127).
cgaccggtcctctcagaaa

SEQ ID NO: 714187 - DNA, 19 bp, Mus musculus
  siRNA target sequence for 4933400N19Rik (NM_023729.2,110-128).
gaccggtcctctcagaaat

SEQ ID NO: 714188 - DNA, 19 bp, Mus musculus
  siRNA target sequence for 4933400N19Rik (NM_023729.2,112-130).
ccggtcctctcagaaatta

SEQ ID NO: 714189 - DNA, 19 bp, Mus musculus
  siRNA target sequence for 4933400N19Rik (NM_023729.2,113-131).
cggtcctctcagaaattaa

SEQ ID NO: 714190 - DNA, 19 bp, Mus musculus
  siRNA target sequence for 4933400N19Rik (NM_023729.2,135-153).
ggtctttacccgttgaaga

SEQ ID NO: 714191 - DNA, 19 bp, Mus musculus
  siRNA target sequence for 4933400N19Rik (NM_023729.2,255-273).
gatggacccctcttatgta

SEQ ID NO: 714192 - DNA, 19 bp, Mus musculus
  siRNA target sequence for 4933400N19Rik (NM_023729.2,326-344).
gctaatgccagctttgata

SEQ ID NO: 714193 - DNA, 19 bp, Mus musculus
  siRNA target sequence for 4933400N19Rik (NM_023729.2,413-431).
gtagagttactactttcaa

SEQ ID NO: 714194 - DNA, 19 bp, Mus musculus
  siRNA target sequence for 4933400N19Rik (NM_023729.2,416-434).
gagttactactttcaagaa

SEQ ID NO: 714195 - DNA, 19 bp, Mus musculus
  siRNA target sequence for 4933400N19Rik (NM_023729.2,450-468).
ctgcttgtaggagacttat

SEQ ID NO: 714196 - DNA, 19 bp, Mus musculus
  siRNA target sequence for 4933400N19Rik (NM_023729.2,452-470).
gcttgtaggagacttatga

SEQ ID NO: 714197 - DNA, 19 bp, Mus musculus
  siRNA target sequence for 4933400N19Rik (NM_023729.2,462-480).
gacttatgacgccaatcat

SEQ ID NO: 714198 - DNA, 19 bp, Mus musculus
  siRNA target sequence for 4933400N19Rik (NM_023729.2,464-482).
cttatgacgccaatcatgt

SEQ ID NO: 714199 - DNA, 19 bp, Mus musculus
  siRNA target sequence for 4933400N19Rik (NM_023729.2,489-507).
cccgagacggtcatactca

SEQ ID NO: 714200 - DNA, 19 bp, Mus musculus
  siRNA target sequence for 4933400N19Rik (NM_023729.2,527-545).
gctcacggagccgaagtta

SEQ ID NO: 714201 - DNA, 19 bp, Mus musculus
  siRNA target sequence for 4933400N19Rik (NM_023729.2,528-546).
ctcacggagccgaagttaa

SEQ ID NO: 714202 - DNA, 19 bp, Mus musculus
  siRNA target sequence for 4933400N19Rik (NM_023729.2,549-567).
cccaggatgagaatggtta

SEQ ID NO: 714203 - DNA, 19 bp, Mus musculus
  siRNA target sequence for 4933400N19Rik (NM_023729.2,551-569).
caggatgagaatggttata

SEQ ID NO: 714204 - DNA, 19 bp, Mus musculus
  siRNA target sequence for 4933400N19Rik (NM_023729.2,553-571).
ggatgagaatggttatact

SEQ ID NO: 714205 - DNA, 19 bp, Mus musculus
  siRNA target sequence for 4933400N19Rik (NM_023729.2,587-605).
gcacggcagggtcataaaa

SEQ ID NO: 714206 - DNA, 19 bp, Mus musculus
  siRNA target sequence for 4933400N19Rik (NM_023729.2,588-606).
cacggcagggtcataaaaa

SEQ ID NO: 714207 - DNA, 19 bp, Mus musculus
  siRNA target sequence for 4933400N19Rik (NM_023729.2,595-613).
gggtcataaaaatgtaatt

SEQ ID NO: 714208 - DNA, 19 bp, Mus musculus
  siRNA target sequence for 4933400N19Rik (NM_023729.2,623-641).
cttgaactgggagctaata

SEQ ID NO: 714209 - DNA, 19 bp, Mus musculus
  siRNA target sequence for 4933400N19Rik (NM_023729.2,626-644).
gaactgggagctaataaaa

SEQ ID NO: 714210 - DNA, 19 bp, Mus musculus
  siRNA target sequence for 4933400N19Rik (NM_023729.2,631-649).
gggagctaataaaatgcta

SEQ ID NO: 714211 - DNA, 19 bp, Mus musculus
  siRNA target sequence for 4933400N19Rik (NM_023729.2,727-745).
gactctaaatccattggaa

SEQ ID NO: 714212 - DNA, 19 bp, Mus musculus
  siRNA target sequence for 4933400N19Rik (NM_023729.2,823-841).
catatttagcccgtataca

SEQ ID NO: 714213 - DNA, 19 bp, Mus musculus
  siRNA target sequence for 4933400N19Rik (NM_023729.2,843-861).
cgtttggagatctggaaat

SEQ ID NO: 714214 - DNA, 19 bp, Mus musculus
  siRNA target sequence for 4933400N19Rik (NM_023729.2,844-862).
gtttggagatctggaaata

SEQ ID NO: 714215 - DNA, 19 bp, Mus musculus
  siRNA target sequence for 4933400N19Rik (NM_023729.2,873-891).
gccttggacttgaacatat

SEQ ID NO: 714216 - DNA, 19 bp, Mus musculus
  siRNA target sequence for 4933400N19Rik (NM_023729.2,875-893).
cttggacttgaacatatga

SEQ ID NO: 714217 - DNA, 19 bp, Mus musculus
  siRNA target sequence for 4933400N19Rik (NM_023729.2,887-905).
catatgacagactcattaa

SEQ ID NO: 714218 - DNA, 19 bp, Mus musculus
  siRNA target sequence for 4933400N19Rik (NM_023729.2,997-1015).
cttggctgctcttaaggaa

SEQ ID NO: 714219 - DNA, 19 bp, Mus musculus
  siRNA target sequence for 4933400N19Rik (NM_023729.2,1117-1135).
gtgtggccatttaatcaca

SEQ ID NO: 714220 - DNA, 19 bp, Mus musculus
  siRNA target sequence for 4933400N19Rik (NM_023729.2,1136-1154).
gctgtgcagaatatcatta

SEQ ID NO: 714221 - DNA, 19 bp, Mus musculus
  siRNA target sequence for 4933400N19Rik (NM_023729.2,1156-1174).
cgagttgcctgtaaattct

SEQ ID NO: 714222 - DNA, 19 bp, Mus musculus
  siRNA target sequence for 4933400N19Rik (NM_023729.2,1195-1213).
ggcttctcccagaaatttt

SEQ ID NO: 714223 - DNA, 19 bp, Mus musculus
  siRNA target sequence for 4933400N19Rik (NM_023729.2,1224-1242).
gtgaagaactggttagtaa

SEQ ID NO: 714224 - DNA, 19 bp, Mus musculus
  siRNA target sequence for 4933400N19Rik (NM_023729.2,1297-1315).
gcagaatgagcgggaaaat

SEQ ID NO: 714225 - DNA, 19 bp, Mus musculus
  siRNA target sequence for 4933400N19Rik (NM_023729.2,1310-1328).
gaaaatgacccaactcata

SEQ ID NO: 714226 - DNA, 19 bp, Mus musculus
  siRNA target sequence for 4933400N19Rik (NM_023729.2,1323-1341).
ctcatatcccactagtaga

SEQ ID NO: 714227 - DNA, 19 bp, Mus musculus
  siRNA target sequence for 4933400N19Rik (NM_023729.2,1372-1390).
gaagaggtcagcagttaca

SEQ ID NO: 714228 - DNA, 19 bp, Mus musculus
  siRNA target sequence for 6720480F16Rik (NM_023731.1,121-139).
ggcgaaacgggctcttgta

SEQ ID NO: 714229 - DNA, 19 bp, Mus musculus
  siRNA target sequence for 6720480F16Rik (NM_023731.1,123-141).
cgaaacgggctcttgtaga

SEQ ID NO: 714230 - DNA, 19 bp, Mus musculus
  siRNA target sequence for 6720480F16Rik (NM_023731.1,124-142).
gaaacgggctcttgtagat

SEQ ID NO: 714231 - DNA, 19 bp, Mus musculus
  siRNA target sequence for 6720480F16Rik (NM_023731.1,128-146).
cgggctcttgtagatttca

SEQ ID NO: 714232 - DNA, 19 bp, Mus musculus
  siRNA target sequence for 6720480F16Rik (NM_023731.1,129-147).
gggctcttgtagatttcaa

SEQ ID NO: 714233 - DNA, 19 bp, Mus musculus
  siRNA target sequence for 6720480F16Rik (NM_023731.1,628-646).
gcagccatccaaattacct

SEQ ID NO: 714234 - DNA, 19 bp, Mus musculus
  siRNA target sequence for 6720480F16Rik (NM_023731.1,859-877).
cctaaagaagcgagttata

SEQ ID NO: 714235 - DNA, 19 bp, Mus musculus
  siRNA target sequence for 6720480F16Rik (NM_023731.1,891-909).
ccccagcgtccaagaaatt

SEQ ID NO: 714236 - DNA, 19 bp, Mus musculus
  siRNA target sequence for 6720480F16Rik (NM_023731.1,893-911).
ccagcgtccaagaaattga

SEQ ID NO: 714237 - DNA, 19 bp, Mus musculus
  siRNA target sequence for 6720480F16Rik (NM_023731.1,1147-1165).
cctgagacgccgtctagaa

SEQ ID NO: 714238 - DNA, 19 bp, Mus musculus
  siRNA target sequence for 6720480F16Rik (NM_023731.1,1179-1197).
ctgagattgtccaagtgat

SEQ ID NO: 714239 - DNA, 19 bp, Mus musculus
  siRNA target sequence for 6720480F16Rik (NM_023731.1,1234-1252).
gcagttgcgttctattgaa

SEQ ID NO: 714240 - DNA, 19 bp, Mus musculus
  siRNA target sequence for 6720480F16Rik (NM_023731.1,1235-1253).
cagttgcgttctattgaaa

SEQ ID NO: 714241 - DNA, 19 bp, Mus musculus
  siRNA target sequence for 6720480F16Rik (NM_023731.1,1237-1255).
gttgcgttctattgaaaaa

SEQ ID NO: 714242 - DNA, 19 bp, Mus musculus
  siRNA target sequence for 6720480F16Rik (NM_023731.1,1240-1258).
gcgttctattgaaaaacga

SEQ ID NO: 714243 - DNA, 19 bp, Mus musculus
  siRNA target sequence for 1300004C08Rik (NM_023738.2,186-204).
gaagccaaagtcttgctat

SEQ ID NO: 714244 - DNA, 19 bp, Mus musculus
  siRNA target sequence for 1300004C08Rik (NM_023738.2,560-578).
gcggttattctgtgacttt

SEQ ID NO: 714245 - DNA, 19 bp, Mus musculus
  siRNA target sequence for 1300004C08Rik (NM_023738.2,579-597).
ggtgaggacttcacagttt

SEQ ID NO: 714246 - DNA, 19 bp, Mus musculus
  siRNA target sequence for 1300004C08Rik (NM_023738.2,580-598).
gtgaggacttcacagtttt

SEQ ID NO: 714247 - DNA, 19 bp, Mus musculus
  siRNA target sequence for 1300004C08Rik (NM_023738.2,672-690).
ctgagaggagacaccaaaa

SEQ ID NO: 714248 - DNA, 19 bp, Mus musculus
  siRNA target sequence for 1300004C08Rik (NM_023738.2,807-825).
ggagatacgacaactttct

SEQ ID NO: 714249 - DNA, 19 bp, Mus musculus
  siRNA target sequence for 1300004C08Rik (NM_023738.2,949-967).
gtgctcactgcctacatca

SEQ ID NO: 714250 - DNA, 19 bp, Mus musculus
  siRNA target sequence for 1300004C08Rik (NM_023738.2,1019-1037).
gccatgggatcctgatgat

SEQ ID NO: 714251 - DNA, 19 bp, Mus musculus
  siRNA target sequence for 1300004C08Rik (NM_023738.2,1064-1082).
ggacctggagccactaaaa

SEQ ID NO: 714252 - DNA, 19 bp, Mus musculus
  siRNA target sequence for 1300004C08Rik (NM_023738.2,1109-1127).
ggctctcctccgcacaatt

SEQ ID NO: 714253 - DNA, 19 bp, Mus musculus
  siRNA target sequence for 1300004C08Rik (NM_023738.2,1183-1201).
ctgctcaggaggtcctaaa

SEQ ID NO: 714254 - DNA, 19 bp, Mus musculus
  siRNA target sequence for 1300004C08Rik (NM_023738.2,1319-1337).
ccgatacgatgggcaaatt

SEQ ID NO: 714255 - DNA, 19 bp, Mus musculus
  siRNA target sequence for 1300004C08Rik (NM_023738.2,1476-1494).
gttgctgacatggattaca

SEQ ID NO: 714256 - DNA, 19 bp, Mus musculus
  siRNA target sequence for 1300004C08Rik (NM_023738.2,1529-1547).
caggcccaaggatgttaga

SEQ ID NO: 714257 - DNA, 19 bp, Mus musculus
  siRNA target sequence for 1300004C08Rik (NM_023738.2,1598-1616).
cctacgagcgactccatat

SEQ ID NO: 714258 - DNA, 19 bp, Mus musculus
  siRNA target sequence for 1300004C08Rik (NM_023738.2,1599-1617).
ctacgagcgactccatata

SEQ ID NO: 714259 - DNA, 19 bp, Mus musculus
  siRNA target sequence for 1300004C08Rik (NM_023738.2,1602-1620).
cgagcgactccatatacct

SEQ ID NO: 714260 - DNA, 19 bp, Mus musculus
  siRNA target sequence for 1300004C08Rik (NM_023738.2,1670-1688).
cagggtgaacggtgttgtt

SEQ ID NO: 714261 - DNA, 19 bp, Mus musculus
  siRNA target sequence for 1300004C08Rik (NM_023738.2,1729-1747).
ctcgatgcacccactatct

SEQ ID NO: 714262 - DNA, 19 bp, Mus musculus
  siRNA target sequence for 1300004C08Rik (NM_023738.2,1731-1749).
cgatgcacccactatctga

SEQ ID NO: 714263 - DNA, 19 bp, Mus musculus
  siRNA target sequence for 1300004C08Rik (NM_023738.2,1732-1750).
gatgcacccactatctgaa

SEQ ID NO: 714264 - DNA, 19 bp, Mus musculus
  siRNA target sequence for 1300004C08Rik (NM_023738.2,1784-1802).
ggggagtgcttcagtgttt

SEQ ID NO: 714265 - DNA, 19 bp, Mus musculus
  siRNA target sequence for 1300004C08Rik (NM_023738.2,1786-1804).
ggagtgcttcagtgtttgt

SEQ ID NO: 714266 - DNA, 19 bp, Mus musculus
  siRNA target sequence for 1300004C08Rik (NM_023738.2,1941-1959).
ggactcttcagactatcta

SEQ ID NO: 714267 - DNA, 19 bp, Mus musculus
  siRNA target sequence for 1300004C08Rik (NM_023738.2,2112-2130).
caactgtgcttccatgata

SEQ ID NO: 714268 - DNA, 19 bp, Mus musculus
  siRNA target sequence for 1300004C08Rik (NM_023738.2,2179-2197).
cacatcccttgcagtttga

SEQ ID NO: 714269 - DNA, 19 bp, Mus musculus
  siRNA target sequence for 1300004C08Rik (NM_023738.2,2200-2218).
ccaaccacgacatgcattt

SEQ ID NO: 714270 - DNA, 19 bp, Mus musculus
  siRNA target sequence for 1300004C08Rik (NM_023738.2,2310-2328).
cggctgctagagtctgatt

SEQ ID NO: 714271 - DNA, 19 bp, Mus musculus
  siRNA target sequence for 1300004C08Rik (NM_023738.2,2510-2528).
cgggatcctaccagttaat

SEQ ID NO: 714272 - DNA, 19 bp, Mus musculus
  siRNA target sequence for 1300004C08Rik (NM_023738.2,2512-2530).
ggatcctaccagttaatca

SEQ ID NO: 714273 - DNA, 19 bp, Mus musculus
  siRNA target sequence for 1300004C08Rik (NM_023738.2,2529-2547).
catgctcggatcaagcaaa

SEQ ID NO: 714274 - DNA, 19 bp, Mus musculus
  siRNA target sequence for 1300004C08Rik (NM_023738.2,2533-2551).
ctcggatcaagcaaatcgt

SEQ ID NO: 714275 - DNA, 19 bp, Mus musculus
  siRNA target sequence for 1300004C08Rik (NM_023738.2,2639-2657).
ccgatcccatggtaccttt

SEQ ID NO: 714276 - DNA, 19 bp, Mus musculus
  siRNA target sequence for 1300004C08Rik (NM_023738.2,2812-2830).
cccatctccaggaagaaca

SEQ ID NO: 714277 - DNA, 19 bp, Mus musculus
  siRNA target sequence for 1300004C08Rik (NM_023738.2,2864-2882).
ggctctgctctattcttca

SEQ ID NO: 714278 - DNA, 19 bp, Mus musculus
  siRNA target sequence for 1300004C08Rik (NM_023738.2,2884-2902).
gatggtcatctgaaaagca

SEQ ID NO: 714279 - DNA, 19 bp, Mus musculus
  siRNA target sequence for Zdhhc16 (NM_023740.1,457-475).
cgctccctgctctacaatt

SEQ ID NO: 714280 - DNA, 19 bp, Mus musculus
  siRNA target sequence for Zdhhc16 (NM_023740.1,461-479).
ccctgctctacaattcctt

SEQ ID NO: 714281 - DNA, 19 bp, Mus musculus
  siRNA target sequence for Zdhhc16 (NM_023740.1,668-686).
ggcatttcttctatagtca

SEQ ID NO: 714282 - DNA, 19 bp, Mus musculus
  siRNA target sequence for Zdhhc16 (NM_023740.1,753-771).
ccagggcaggaatgacatt

SEQ ID NO: 714283 - DNA, 19 bp, Mus musculus
  siRNA target sequence for Zdhhc16 (NM_023740.1,823-841).
caccactgcagcatctgta

SEQ ID NO: 714284 - DNA, 19 bp, Mus musculus
  siRNA target sequence for Zdhhc16 (NM_023740.1,826-844).
cactgcagcatctgtaata

SEQ ID NO: 714285 - DNA, 19 bp, Mus musculus
  siRNA target sequence for Zdhhc16 (NM_023740.1,1038-1056).
ctcctttcgagaaaggata

SEQ ID NO: 714286 - DNA, 19 bp, Mus musculus
  siRNA target sequence for Zdhhc16 (NM_023740.1,1041-1059).
ctttcgagaaaggataact

SEQ ID NO: 714287 - DNA, 19 bp, Mus musculus
  siRNA target sequence for Zdhhc16 (NM_023740.1,1153-1171).
ggtgagactagcatcgaaa

SEQ ID NO: 714288 - DNA, 19 bp, Mus musculus
  siRNA target sequence for Zdhhc16 (NM_023740.1,1163-1181).
gcatcgaaaggcatatcaa

SEQ ID NO: 714289 - DNA, 19 bp, Mus musculus
  siRNA target sequence for Zdhhc16 (NM_023740.1,1212-1230).
gggcagggtgtttaggaat

SEQ ID NO: 714290 - DNA, 19 bp, Mus musculus
  siRNA target sequence for Zdhhc16 (NM_023740.1,1217-1235).
gggtgtttaggaatcctta

SEQ ID NO: 714291 - DNA, 19 bp, Mus musculus
  siRNA target sequence for D930018N21Rik (NM_023755.1,108-126).
cgcagcccgaacactacaa

SEQ ID NO: 714292 - DNA, 19 bp, Mus musculus
  siRNA target sequence for D930018N21Rik (NM_023755.1,193-211).
gcagctatctcctgagaat

SEQ ID NO: 714293 - DNA, 19 bp, Mus musculus
  siRNA target sequence for D930018N21Rik (NM_023755.1,356-374).
caagatctgaacacgaaat

SEQ ID NO: 714294 - DNA, 19 bp, Mus musculus
  siRNA target sequence for D930018N21Rik (NM_023755.1,362-380).
ctgaacacgaaatatgtga

SEQ ID NO: 714295 - DNA, 19 bp, Mus musculus
  siRNA target sequence for D930018N21Rik (NM_023755.1,472-490).
ccgcatcctggacattgat

SEQ ID NO: 714296 - DNA, 19 bp, Mus musculus
  siRNA target sequence for D930018N21Rik (NM_023755.1,473-491).
cgcatcctggacattgata

SEQ ID NO: 714297 - DNA, 19 bp, Mus musculus
  siRNA target sequence for D930018N21Rik (NM_023755.1,474-492).
gcatcctggacattgatat

SEQ ID NO: 714298 - DNA, 19 bp, Mus musculus
  siRNA target sequence for D930018N21Rik (NM_023755.1,654-672).
cttttcgggtgcagattga

SEQ ID NO: 714299 - DNA, 19 bp, Mus musculus
  siRNA target sequence for D930018N21Rik (NM_023755.1,1224-1242).
gtcaggagctggagcaaaa

SEQ ID NO: 714300 - DNA, 19 bp, Mus musculus
  siRNA target sequence for D930018N21Rik (NM_023755.1,1280-1298).
gataacagcctgtgtgtat

SEQ ID NO: 714301 - DNA, 19 bp, Mus musculus
  siRNA target sequence for 4930550L24Rik (NM_023774.1,216-234).
ctgcctccgcaccaagtta

SEQ ID NO: 714302 - DNA, 19 bp, Mus musculus
  siRNA target sequence for 4930550L24Rik (NM_023774.1,218-236).
gcctccgcaccaagttaat

SEQ ID NO: 714303 - DNA, 19 bp, Mus musculus
  siRNA target sequence for 4930550L24Rik (NM_023774.1,285-303).
gagctccaagtatgtaaca

SEQ ID NO: 714304 - DNA, 19 bp, Mus musculus
  siRNA target sequence for 4930550L24Rik (NM_023774.1,287-305).
gctccaagtatgtaacaaa

SEQ ID NO: 714305 - DNA, 19 bp, Mus musculus
  siRNA target sequence for 4930550L24Rik (NM_023774.1,352-370).
cacaagggctactattcat

SEQ ID NO: 714306 - DNA, 19 bp, Mus musculus
  siRNA target sequence for 4930550L24Rik (NM_023774.1,358-376).
ggctactattcattgatct

SEQ ID NO: 714307 - DNA, 19 bp, Mus musculus
  siRNA target sequence for 4930550L24Rik (NM_023774.1,359-377).
gctactattcattgatctt

SEQ ID NO: 714308 - DNA, 19 bp, Mus musculus
  siRNA target sequence for 4930550L24Rik (NM_023774.1,406-424).
gtctgtggcatcgaagtaa

SEQ ID NO: 714309 - DNA, 19 bp, Mus musculus
  siRNA target sequence for 4930550L24Rik (NM_023774.1,449-467).
cctacctgctcctgaaagt

SEQ ID NO: 714310 - DNA, 19 bp, Mus musculus
  siRNA target sequence for 4930550L24Rik (NM_023774.1,468-486).
ccttgacctcacctatgat

SEQ ID NO: 714311 - DNA, 19 bp, Mus musculus
  siRNA target sequence for 4930550L24Rik (NM_023774.1,531-549).
ggtgcttgtccttggtata

SEQ ID NO: 714312 - DNA, 19 bp, Mus musculus
  siRNA target sequence for 4930550L24Rik (NM_023774.1,532-550).
gtgcttgtccttggtataa

SEQ ID NO: 714313 - DNA, 19 bp, Mus musculus
  siRNA target sequence for 4930550L24Rik (NM_023774.1,535-553).
cttgtccttggtataatct

SEQ ID NO: 714314 - DNA, 19 bp, Mus musculus
  siRNA target sequence for 4930550L24Rik (NM_023774.1,588-606).
ctgggaggtgctgaatatt

SEQ ID NO: 714315 - DNA, 19 bp, Mus musculus
  siRNA target sequence for 4930550L24Rik (NM_023774.1,622-640).
gaccaacatgattttatct

SEQ ID NO: 714316 - DNA, 19 bp, Mus musculus
  siRNA target sequence for 4930550L24Rik (NM_023774.1,643-661).
gggaatcccagaaagttca

SEQ ID NO: 714317 - DNA, 19 bp, Mus musculus
  siRNA target sequence for 4930550L24Rik (NM_023774.1,665-683).
ctgaagatttggtgttaga

SEQ ID NO: 714318 - DNA, 19 bp, Mus musculus
  siRNA target sequence for 4930550L24Rik (NM_023774.1,821-839).
cttccttcaccgctttgta

SEQ ID NO: 714319 - DNA, 19 bp, Mus musculus
  siRNA target sequence for 4930550L24Rik (NM_023774.1,828-846).
caccgctttgtataaggaa

SEQ ID NO: 714320 - DNA, 19 bp, Mus musculus
  siRNA target sequence for 1700020D05Rik (NM_023781.3,48-66).
ctccgcctggtcacatgtt

SEQ ID NO: 714321 - DNA, 19 bp, Mus musculus
  siRNA target sequence for 1700020D05Rik (NM_023781.3,53-71).
cctggtcacatgttgcaaa

SEQ ID NO: 714322 - DNA, 19 bp, Mus musculus
  siRNA target sequence for 1700020D05Rik (NM_023781.3,54-72).
ctggtcacatgttgcaaaa

SEQ ID NO: 714323 - DNA, 19 bp, Mus musculus
  siRNA target sequence for 1700020D05Rik (NM_023781.3,56-74).
ggtcacatgttgcaaaaaa

SEQ ID NO: 714324 - DNA, 19 bp, Mus musculus
  siRNA target sequence for 1700020D05Rik (NM_023781.3,193-211).
caccccgtcgccaagcttt

SEQ ID NO: 714325 - DNA, 19 bp, Mus musculus
  siRNA target sequence for 1700020D05Rik (NM_023781.3,331-349).
gtcagggatcatgaaacat

SEQ ID NO: 714326 - DNA, 19 bp, Mus musculus
  siRNA target sequence for 1700020D05Rik (NM_023781.3,333-351).
cagggatcatgaaacatgt

SEQ ID NO: 714327 - DNA, 19 bp, Mus musculus
  siRNA target sequence for 1700020D05Rik (NM_023781.3,350-368).
gtcgtccgagactacaaaa

SEQ ID NO: 714328 - DNA, 19 bp, Mus musculus
  siRNA target sequence for 1700020D05Rik (NM_023781.3,353-371).
gtccgagactacaaaaaca

SEQ ID NO: 714329 - DNA, 19 bp, Mus musculus
  siRNA target sequence for 1700020D05Rik (NM_023781.3,356-374).
cgagactacaaaaacatct

SEQ ID NO: 714330 - DNA, 19 bp, Mus musculus
  siRNA target sequence for 1700020D05Rik (NM_023781.3,373-391).
cttcccagacctgcttaaa

SEQ ID NO: 714331 - DNA, 19 bp, Mus musculus
  siRNA target sequence for 1700020D05Rik (NM_023781.3,534-552).
ccggcctcctgatgattat

SEQ ID NO: 714332 - DNA, 19 bp, Mus musculus
  siRNA target sequence for 1700020D05Rik (NM_023781.3,535-553).
cggcctcctgatgattatt

SEQ ID NO: 714333 - DNA, 19 bp, Mus musculus
  siRNA target sequence for 1700020D05Rik (NM_023781.3,536-554).
ggcctcctgatgattattt

SEQ ID NO: 714334 - DNA, 19 bp, Mus musculus
  siRNA target sequence for 1700020D05Rik (NM_023781.3,537-555).
gcctcctgatgattatttt

SEQ ID NO: 714335 - DNA, 19 bp, Mus musculus
  siRNA target sequence for 1700020D05Rik (NM_023781.3,538-556).
cctcctgatgattatttta

SEQ ID NO: 714336 - DNA, 19 bp, Mus musculus
  siRNA target sequence for 1700020D05Rik (NM_023781.3,634-652).
caccaagaagcattcagtt

SEQ ID NO: 714337 - DNA, 19 bp, Mus musculus
  siRNA target sequence for 1700020D05Rik (NM_023781.3,656-674).
ggctatccgaagaaactca

SEQ ID NO: 714338 - DNA, 19 bp, Mus musculus
  siRNA target sequence for 1700020D05Rik (NM_023781.3,657-675).
gctatccgaagaaactcat

SEQ ID NO: 714339 - DNA, 19 bp, Mus musculus
  siRNA target sequence for 1700020D05Rik (NM_023781.3,678-696).
ctgaagacttcgtgaaaca

SEQ ID NO: 714340 - DNA, 19 bp, Mus musculus
  siRNA target sequence for 1700020D05Rik (NM_023781.3,754-772).
gtggggtccgcgagcaaat

SEQ ID NO: 714341 - DNA, 19 bp, Mus musculus
  siRNA target sequence for 1700020D05Rik (NM_023781.3,810-828).
ccaaaatccataatcaaga

SEQ ID NO: 714342 - DNA, 19 bp, Mus musculus
  siRNA target sequence for 1700020D05Rik (NM_023781.3,846-864).
ctcagtactgtgaagcttt

SEQ ID NO: 714343 - DNA, 19 bp, Mus musculus
  siRNA target sequence for 2310016N21Rik (NM_023784.2,66-84).
gggcttctaccaatctaat

SEQ ID NO: 714344 - DNA, 19 bp, Mus musculus
  siRNA target sequence for 2310016N21Rik (NM_023784.2,67-85).
ggcttctaccaatctaatt

SEQ ID NO: 714345 - DNA, 19 bp, Mus musculus
  siRNA target sequence for 2310016N21Rik (NM_023784.2,68-86).
gcttctaccaatctaatta

SEQ ID NO: 714346 - DNA, 19 bp, Mus musculus
  siRNA target sequence for 2310016N21Rik (NM_023784.2,69-87).
cttctaccaatctaattat

SEQ ID NO: 714347 - DNA, 19 bp, Mus musculus
  siRNA target sequence for 2310016N21Rik (NM_023784.2,102-120).
ggagccgagttgcaatgat

SEQ ID NO: 714348 - DNA, 19 bp, Mus musculus
  siRNA target sequence for 2310016N21Rik (NM_023784.2,103-121).
gagccgagttgcaatgatt

SEQ ID NO: 714349 - DNA, 19 bp, Mus musculus
  siRNA target sequence for 2310016N21Rik (NM_023784.2,105-123).
gccgagttgcaatgattct

SEQ ID NO: 714350 - DNA, 19 bp, Mus musculus
  siRNA target sequence for 2310016N21Rik (NM_023784.2,106-124).
ccgagttgcaatgattcta

SEQ ID NO: 714351 - DNA, 19 bp, Mus musculus
  siRNA target sequence for 2310016N21Rik (NM_023784.2,107-125).
cgagttgcaatgattctaa

SEQ ID NO: 714352 - DNA, 19 bp, Mus musculus
  siRNA target sequence for 2310016N21Rik (NM_023784.2,108-126).
gagttgcaatgattctaat

SEQ ID NO: 714353 - DNA, 19 bp, Mus musculus
  siRNA target sequence for 2310016N21Rik (NM_023784.2,114-132).
caatgattctaatgcttat

SEQ ID NO: 714354 - DNA, 19 bp, Mus musculus
  siRNA target sequence for 2310016N21Rik (NM_023784.2,118-136).
gattctaatgcttatggaa

SEQ ID NO: 714355 - DNA, 19 bp, Mus musculus
  siRNA target sequence for 2310016N21Rik (NM_023784.2,238-256).
ccagcatccaacttggatt

SEQ ID NO: 714356 - DNA, 19 bp, Mus musculus
  siRNA target sequence for 2310016N21Rik (NM_023784.2,239-257).
cagcatccaacttggatta

SEQ ID NO: 714357 - DNA, 19 bp, Mus musculus
  siRNA target sequence for 2310016N21Rik (NM_023784.2,241-259).
gcatccaacttggattatt

SEQ ID NO: 714358 - DNA, 19 bp, Mus musculus
  siRNA target sequence for 2310016N21Rik (NM_023784.2,306-324).
gctagaggaacttggaatt

SEQ ID NO: 714359 - DNA, 19 bp, Mus musculus
  siRNA target sequence for 2310016N21Rik (NM_023784.2,307-325).
ctagaggaacttggaatta

SEQ ID NO: 714360 - DNA, 19 bp, Mus musculus
  siRNA target sequence for 2310016N21Rik (NM_023784.2,310-328).
gaggaacttggaattaatt

SEQ ID NO: 714361 - DNA, 19 bp, Mus musculus
  siRNA target sequence for 2310016N21Rik (NM_023784.2,320-338).
gaattaattttgatcacat

SEQ ID NO: 714362 - DNA, 19 bp, Mus musculus
  siRNA target sequence for 2310016N21Rik (NM_023784.2,356-374).
cggtgctaaacccaatgaa

SEQ ID NO: 714363 - DNA, 19 bp, Mus musculus
  siRNA target sequence for 2310016N21Rik (NM_023784.2,409-427).
ctcacaggacccatccttt

SEQ ID NO: 714364 - DNA, 19 bp, Mus musculus
  siRNA target sequence for 2310016N21Rik (NM_023784.2,469-487).
gcccagtttggttatgtat

SEQ ID NO: 714365 - DNA, 19 bp, Mus musculus
  siRNA target sequence for 2310016N21Rik (NM_023784.2,520-538).
cacgccttactgaacttga

SEQ ID NO: 714366 - DNA, 19 bp, Mus musculus
  siRNA target sequence for 2310016N21Rik (NM_023784.2,542-560).
gcaactccggggtgtcata

SEQ ID NO: 714367 - DNA, 19 bp, Mus musculus
  siRNA target sequence for 2310016N21Rik (NM_023784.2,543-561).
caactccggggtgtcatat

SEQ ID NO: 714368 - DNA, 19 bp, Mus musculus
  siRNA target sequence for 2310016N21Rik (NM_023784.2,637-655).
ctgcagggtaccataggaa

SEQ ID NO: 714369 - DNA, 19 bp, Mus musculus
  siRNA target sequence for 2310016N21Rik (NM_023784.2,756-774).
cccctgtgccttactttat

SEQ ID NO: 714370 - DNA, 19 bp, Mus musculus
  siRNA target sequence for 2310016N21Rik (NM_023784.2,759-777).
ctgtgccttactttatgga

SEQ ID NO: 714371 - DNA, 19 bp, Mus musculus
  siRNA target sequence for 2010107K23Rik (NM_023788.1,99-117).
cccgatggcggcttctgta

SEQ ID NO: 714372 - DNA, 19 bp, Mus musculus
  siRNA target sequence for 2010107K23Rik (NM_023788.1,121-139).
ccgagcacacccgaagaat

SEQ ID NO: 714373 - DNA, 19 bp, Mus musculus
  siRNA target sequence for 2010107K23Rik (NM_023788.1,122-140).
cgagcacacccgaagaata

SEQ ID NO: 714374 - DNA, 19 bp, Mus musculus
  siRNA target sequence for 2010107K23Rik (NM_023788.1,125-143).
gcacacccgaagaatacct

SEQ ID NO: 714375 - DNA, 19 bp, Mus musculus
  siRNA target sequence for 2010107K23Rik (NM_023788.1,392-410).
cgaagaaggtcgttacaga

SEQ ID NO: 714376 - DNA, 19 bp, Mus musculus
  siRNA target sequence for 2010107K23Rik (NM_023788.1,399-417).
ggtcgttacagaagagttt

SEQ ID NO: 714377 - DNA, 19 bp, Mus musculus
  siRNA target sequence for 2010107K23Rik (NM_023788.1,420-438).
gcgcagagggtatctgatt

SEQ ID NO: 714378 - DNA, 19 bp, Mus musculus
  siRNA target sequence for 2010107K23Rik (NM_023788.1,421-439).
cgcagagggtatctgattt

SEQ ID NO: 714379 - DNA, 19 bp, Mus musculus
  siRNA target sequence for 2010107K23Rik (NM_023788.1,422-440).
gcagagggtatctgattta

SEQ ID NO: 714380 - DNA, 19 bp, Mus musculus
  siRNA target sequence for 2010107K23Rik (NM_023788.1,458-476).
gcagtccagtggagtatga

SEQ ID NO: 714381 - DNA, 19 bp, Mus musculus
  siRNA target sequence for 2010107K23Rik (NM_023788.1,560-578).
ccaaagactggccatgtaa

SEQ ID NO: 714382 - DNA, 19 bp, Mus musculus
  siRNA target sequence for 2010107K23Rik (NM_023788.1,579-597).
ctatgactgggattcagat

SEQ ID NO: 714383 - DNA, 19 bp, Mus musculus
  siRNA target sequence for 2010107K23Rik (NM_023788.1,630-648).
gggtgctaggggttattct

SEQ ID NO: 714384 - DNA, 19 bp, Mus musculus
  siRNA target sequence for 1700030E05Rik (NM_023790.1,278-296).
ccgtgatctcacgcatttt

SEQ ID NO: 714385 - DNA, 19 bp, Mus musculus
  siRNA target sequence for 1700030E05Rik (NM_023790.1,362-380).
gcgccagctccacgttaaa

SEQ ID NO: 714386 - DNA, 19 bp, Mus musculus
  siRNA target sequence for 1700030E05Rik (NM_023790.1,364-382).
gccagctccacgttaaaga

SEQ ID NO: 714387 - DNA, 19 bp, Mus musculus
  siRNA target sequence for 1700030E05Rik (NM_023790.1,391-409).
gagtgagtcccccacttat

SEQ ID NO: 714388 - DNA, 19 bp, Mus musculus
  siRNA target sequence for 1700030E05Rik (NM_023790.1,393-411).
gtgagtcccccacttatca

SEQ ID NO: 714389 - DNA, 19 bp, Mus musculus
  siRNA target sequence for 1700030E05Rik (NM_023790.1,463-481).
cgcatcgagggatacagat

SEQ ID NO: 714390 - DNA, 19 bp, Mus musculus
  siRNA target sequence for 1700030E05Rik (NM_023790.1,469-487).
gagggatacagatgtatga

SEQ ID NO: 714391 - DNA, 19 bp, Mus musculus
  siRNA target sequence for 1700030E05Rik (NM_023790.1,471-489).
gggatacagatgtatgagt

SEQ ID NO: 714392 - DNA, 19 bp, Mus musculus
  siRNA target sequence for 1700030E05Rik (NM_023790.1,495-513).
ggctccgtcatggtttatt

SEQ ID NO: 714393 - DNA, 19 bp, Mus musculus
  siRNA target sequence for 1700030E05Rik (NM_023790.1,557-575).
gtttgcccgaggaattgct

SEQ ID NO: 714394 - DNA, 19 bp, Mus musculus
  siRNA target sequence for 1700030E05Rik (NM_023790.1,613-631).
gtcgagtactggtctttga

SEQ ID NO: 714395 - DNA, 19 bp, Mus musculus
  siRNA target sequence for 1700030E05Rik (NM_023790.1,615-633).
cgagtactggtctttgata

SEQ ID NO: 714396 - DNA, 19 bp, Mus musculus
  siRNA target sequence for 1700030E05Rik (NM_023790.1,616-634).
gagtactggtctttgatat

SEQ ID NO: 714397 - DNA, 19 bp, Mus musculus
  siRNA target sequence for 1700030E05Rik (NM_023790.1,684-702).
cagacaccaatcacagata

SEQ ID NO: 714398 - DNA, 19 bp, Mus musculus
  siRNA target sequence for 1700030E05Rik (NM_023790.1,686-704).
gacaccaatcacagatatt

SEQ ID NO: 714399 - DNA, 19 bp, Mus musculus
  siRNA target sequence for 1700030E05Rik (NM_023790.1,803-821).
cttactgacccgaatacca

SEQ ID NO: 714400 - DNA, 19 bp, Mus musculus
  siRNA target sequence for 1700030E05Rik (NM_023790.1,889-907).
ggcaagtgcgcctgtatga

SEQ ID NO: 714401 - DNA, 19 bp, Mus musculus
  siRNA target sequence for 1700030E05Rik (NM_023790.1,890-908).
gcaagtgcgcctgtatgat

SEQ ID NO: 714402 - DNA, 19 bp, Mus musculus
  siRNA target sequence for 1700030E05Rik (NM_023790.1,1076-1094).
ctgccatggtgaatgtatt

SEQ ID NO: 714403 - DNA, 19 bp, Mus musculus
  siRNA target sequence for 1700030E05Rik (NM_023790.1,1117-1135).
ctcggttctgtgatccatt

SEQ ID NO: 714404 - DNA, 19 bp, Mus musculus
  siRNA target sequence for Mgea5 (NM_023799.2,379-397).
gggttatggagcagagaaa

SEQ ID NO: 714405 - DNA, 19 bp, Mus musculus
  siRNA target sequence for Mgea5 (NM_023799.2,424-442).
gggaattaaacacatactt

SEQ ID NO: 714406 - DNA, 19 bp, Mus musculus
  siRNA target sequence for Mgea5 (NM_023799.2,440-458).
cttgtatgctccaaaagat

SEQ ID NO: 714407 - DNA, 19 bp, Mus musculus
  siRNA target sequence for Mgea5 (NM_023799.2,448-466).
ctccaaaagatgactacaa

SEQ ID NO: 714408 - DNA, 19 bp, Mus musculus
  siRNA target sequence for Mgea5 (NM_023799.2,481-499).
ggcgagagatgtattcagt

SEQ ID NO: 714409 - DNA, 19 bp, Mus musculus
  siRNA target sequence for Mgea5 (NM_023799.2,530-548).
ctctgctgcacgagaatat

SEQ ID NO: 714410 - DNA, 19 bp, Mus musculus
  siRNA target sequence for Mgea5 (NM_023799.2,532-550).
ctgctgcacgagaatatga

SEQ ID NO: 714411 - DNA, 19 bp, Mus musculus
  siRNA target sequence for Mgea5 (NM_023799.2,540-558).
cgagaatatgaaatagaat

SEQ ID NO: 714412 - DNA, 19 bp, Mus musculus
  siRNA target sequence for Mgea5 (NM_023799.2,575-593).
gccaggactagatatcact

SEQ ID NO: 714413 - DNA, 19 bp, Mus musculus
  siRNA target sequence for Mgea5 (NM_023799.2,616-634).
caacgttgaaacgcaaatt

SEQ ID NO: 714414 - DNA, 19 bp, Mus musculus
  siRNA target sequence for Mgea5 (NM_023799.2,619-637).
cgttgaaacgcaaattgga

SEQ ID NO: 714415 - DNA, 19 bp, Mus musculus
  siRNA target sequence for Mgea5 (NM_023799.2,635-653).
ggaccaggtctctcagttt

SEQ ID NO: 714416 - DNA, 19 bp, Mus musculus
  siRNA target sequence for Mgea5 (NM_023799.2,654-672).
gggtgcaggtcgtttgctt

SEQ ID NO: 714417 - DNA, 19 bp, Mus musculus
  siRNA target sequence for Mgea5 (NM_023799.2,655-673).
ggtgcaggtcgtttgcttt

SEQ ID NO: 714418 - DNA, 19 bp, Mus musculus
  siRNA target sequence for Mgea5 (NM_023799.2,659-677).
caggtcgtttgctttgctt

SEQ ID NO: 714419 - DNA, 19 bp, Mus musculus
  siRNA target sequence for Mgea5 (NM_023799.2,830-848).
ctgttatccaaatgtatct

SEQ ID NO: 714420 - DNA, 19 bp, Mus musculus
  siRNA target sequence for Mgea5 (NM_023799.2,832-850).
gttatccaaatgtatctca

SEQ ID NO: 714421 - DNA, 19 bp, Mus musculus
  siRNA target sequence for Mgea5 (NM_023799.2,907-925).
ggacaggtccaaaagttgt

SEQ ID NO: 714422 - DNA, 19 bp, Mus musculus
  siRNA target sequence for Mgea5 (NM_023799.2,908-926).
gacaggtccaaaagttgtt

SEQ ID NO: 714423 - DNA, 19 bp, Mus musculus
  siRNA target sequence for Mgea5 (NM_023799.2,912-930).
ggtccaaaagttgtttcaa

SEQ ID NO: 714424 - DNA, 19 bp, Mus musculus
  siRNA target sequence for Mgea5 (NM_023799.2,913-931).
gtccaaaagttgtttcaaa

SEQ ID NO: 714425 - DNA, 19 bp, Mus musculus
  siRNA target sequence for Mgea5 (NM_023799.2,940-958).
cagtggaatctattgaaga

SEQ ID NO: 714426 - DNA, 19 bp, Mus musculus
  siRNA target sequence for Mgea5 (NM_023799.2,944-962).
ggaatctattgaagaagtt

SEQ ID NO: 714427 - DNA, 19 bp, Mus musculus
  siRNA target sequence for Mgea5 (NM_023799.2,945-963).
gaatctattgaagaagttt

SEQ ID NO: 714428 - DNA, 19 bp, Mus musculus
  siRNA target sequence for Mgea5 (NM_023799.2,985-1003).
cagtgatctgggataacat

SEQ ID NO: 714429 - DNA, 19 bp, Mus musculus
  siRNA target sequence for Mgea5 (NM_023799.2,995-1013).
ggataacattcatgctaat

SEQ ID NO: 714430 - DNA, 19 bp, Mus musculus
  siRNA target sequence for Mgea5 (NM_023799.2,1077-1095).
cggttaaagggagtactaa

SEQ ID NO: 714431 - DNA, 19 bp, Mus musculus
  siRNA target sequence for Mgea5 (NM_023799.2,1086-1104).
ggagtactaaccaatccaa

SEQ ID NO: 714432 - DNA, 19 bp, Mus musculus
  siRNA target sequence for Mgea5 (NM_023799.2,1087-1105).
gagtactaaccaatccaaa

SEQ ID NO: 714433 - DNA, 19 bp, Mus musculus
  siRNA target sequence for Mgea5 (NM_023799.2,1089-1107).
gtactaaccaatccaaatt

SEQ ID NO: 714434 - DNA, 19 bp, Mus musculus
  siRNA target sequence for Mgea5 (NM_023799.2,1143-1161).
cttgccacttggtacaagt

SEQ ID NO: 714435 - DNA, 19 bp, Mus musculus
  siRNA target sequence for Mgea5 (NM_023799.2,1146-1164).
gccacttggtacaagtcaa

SEQ ID NO: 714436 - DNA, 19 bp, Mus musculus
  siRNA target sequence for Mgea5 (NM_023799.2,1147-1165).
ccacttggtacaagtcaaa

SEQ ID NO: 714437 - DNA, 19 bp, Mus musculus
  siRNA target sequence for Mgea5 (NM_023799.2,1150-1168).
cttggtacaagtcaaacat

SEQ ID NO: 714438 - DNA, 19 bp, Mus musculus
  siRNA target sequence for Mgea5 (NM_023799.2,1202-1220).
cagtgaagacagtactgta

SEQ ID NO: 714439 - DNA, 19 bp, Mus musculus
  siRNA target sequence for Mgea5 (NM_023799.2,1213-1231).
gtactgtatcaatacagat

SEQ ID NO: 714440 - DNA, 19 bp, Mus musculus
  siRNA target sequence for Mgea5 (NM_023799.2,1296-1314).
gctttaaagctggctttaa

SEQ ID NO: 714441 - DNA, 19 bp, Mus musculus
  siRNA target sequence for Mgea5 (NM_023799.2,1413-1431).
gttgctgcaccctctttaa

SEQ ID NO: 714442 - DNA, 19 bp, Mus musculus
  siRNA target sequence for Mgea5 (NM_023799.2,1434-1452).
gccacaactgtagttacaa

SEQ ID NO: 714443 - DNA, 19 bp, Mus musculus
  siRNA target sequence for Mgea5 (NM_023799.2,1604-1622).
ccagatactaactgagatt

SEQ ID NO: 714444 - DNA, 19 bp, Mus musculus
  siRNA target sequence for Mgea5 (NM_023799.2,1654-1672).
caatggacacggataagga

SEQ ID NO: 714445 - DNA, 19 bp, Mus musculus
  siRNA target sequence for Mgea5 (NM_023799.2,1772-1790).
gtttgtgccaggtccaaat

SEQ ID NO: 714446 - DNA, 19 bp, Mus musculus
  siRNA target sequence for Mgea5 (NM_023799.2,2056-2074).
ccaacaggaccatccttta

SEQ ID NO: 714447 - DNA, 19 bp, Mus musculus
  siRNA target sequence for Mgea5 (NM_023799.2,2057-2075).
caacaggaccatcctttat

SEQ ID NO: 714448 - DNA, 19 bp, Mus musculus
  siRNA target sequence for Mgea5 (NM_023799.2,2062-2080).
ggaccatcctttatgacat

SEQ ID NO: 714449 - DNA, 19 bp, Mus musculus
  siRNA target sequence for Mgea5 (NM_023799.2,2091-2109).
gtgtgggacatcaagagta

SEQ ID NO: 714450 - DNA, 19 bp, Mus musculus
  siRNA target sequence for Mgea5 (NM_023799.2,2093-2111).
gtgggacatcaagagtata

SEQ ID NO: 714451 - DNA, 19 bp, Mus musculus
  siRNA target sequence for Mgea5 (NM_023799.2,2095-2113).
gggacatcaagagtataat

SEQ ID NO: 714452 - DNA, 19 bp, Mus musculus
  siRNA target sequence for Mgea5 (NM_023799.2,2097-2115).
gacatcaagagtataatgt

SEQ ID NO: 714453 - DNA, 19 bp, Mus musculus
  siRNA target sequence for Mgea5 (NM_023799.2,2099-2117).
catcaagagtataatgtct

SEQ ID NO: 714454 - DNA, 19 bp, Mus musculus
  siRNA target sequence for Mgea5 (NM_023799.2,2189-2207).
ggagccctgggcctttaga

SEQ ID NO: 714455 - DNA, 19 bp, Mus musculus
  siRNA target sequence for Mgea5 (NM_023799.2,2231-2249).
gcgtttgctgccaattgat

SEQ ID NO: 714456 - DNA, 19 bp, Mus musculus
  siRNA target sequence for Mgea5 (NM_023799.2,2297-2315).
caaagtttatactatcaga

SEQ ID NO: 714457 - DNA, 19 bp, Mus musculus
  siRNA target sequence for Mgea5 (NM_023799.2,2336-2354).
ggcttccgtgtacaagatt

SEQ ID NO: 714458 - DNA, 19 bp, Mus musculus
  siRNA target sequence for Mgea5 (NM_023799.2,2337-2355).
gcttccgtgtacaagattt

SEQ ID NO: 714459 - DNA, 19 bp, Mus musculus
  siRNA target sequence for Mgea5 (NM_023799.2,2408-2426).
ccttattggagacaagtta

SEQ ID NO: 714460 - DNA, 19 bp, Mus musculus
  siRNA target sequence for Mgea5 (NM_023799.2,2462-2480).
cttcgtcctagaagatgaa

SEQ ID NO: 714461 - DNA, 19 bp, Mus musculus
  siRNA target sequence for Mgea5 (NM_023799.2,2465-2483).
cgtcctagaagatgaagat

SEQ ID NO: 714462 - DNA, 19 bp, Mus musculus
  siRNA target sequence for Mgea5 (NM_023799.2,2500-2518).
ccttaggcacagtagatgt

SEQ ID NO: 714463 - DNA, 19 bp, Mus musculus
  siRNA target sequence for Mgea5 (NM_023799.2,2517-2535).
gtgacccccttcattaaaa

SEQ ID NO: 714464 - DNA, 19 bp, Mus musculus
  siRNA target sequence for Mgea5 (NM_023799.2,2523-2541).
cccttcattaaaaagtgta

SEQ ID NO: 714465 - DNA, 19 bp, Mus musculus
  siRNA target sequence for Mgea5 (NM_023799.2,2525-2543).
cttcattaaaaagtgtaaa

SEQ ID NO: 714466 - DNA, 19 bp, Mus musculus
  siRNA target sequence for Mgea5 (NM_023799.2,2557-2575).
ccttcatgcaagagaagta

SEQ ID NO: 714467 - DNA, 19 bp, Mus musculus
  siRNA target sequence for Mgea5 (NM_023799.2,2573-2591).
gtataccaagccaaatggt

SEQ ID NO: 714468 - DNA, 19 bp, Mus musculus
  siRNA target sequence for Mgea5 (NM_023799.2,2680-2698).
cttctctgataaaaatgga

SEQ ID NO: 714469 - DNA, 19 bp, Mus musculus
  siRNA target sequence for Mgea5 (NM_023799.2,2722-2740).
cgagtgttgccaaaagcat

SEQ ID NO: 714470 - DNA, 19 bp, Mus musculus
  siRNA target sequence for Mgea5 (NM_023799.2,2825-2843).
ggaattttacagcaagtta

SEQ ID NO: 714471 - DNA, 19 bp, Mus musculus
  siRNA target sequence for Mgea5 (NM_023799.2,2878-2896).
caaaggatgtggttatact

SEQ ID NO: 714472 - DNA, 19 bp, Mus musculus
  siRNA target sequence for 1700012M14Rik (NM_023816.1,392-410).
gcagaagatgctcgaattt

SEQ ID NO: 714473 - DNA, 19 bp, Mus musculus
  siRNA target sequence for 1700012M14Rik (NM_023816.1,414-432).
gatattgacgtgaacgtta

SEQ ID NO: 714474 - DNA, 19 bp, Mus musculus
  siRNA target sequence for 1700012M14Rik (NM_023816.1,428-446).
cgttacagaccggaagaaa

SEQ ID NO: 714475 - DNA, 19 bp, Mus musculus
  siRNA target sequence for 1700012M14Rik (NM_023816.1,429-447).
gttacagaccggaagaaaa

SEQ ID NO: 714476 - DNA, 19 bp, Mus musculus
  siRNA target sequence for 1700012M14Rik (NM_023816.1,472-490).
ctcacggccagtcagaaat

SEQ ID NO: 714477 - DNA, 19 bp, Mus musculus
  siRNA target sequence for 1700012M14Rik (NM_023816.1,581-599).
cgagatctgtgtgaagatt

SEQ ID NO: 714478 - DNA, 19 bp, Mus musculus
  siRNA target sequence for 1700012M14Rik (NM_023816.1,584-602).
gatctgtgtgaagattctt

SEQ ID NO: 714479 - DNA, 19 bp, Mus musculus
  siRNA target sequence for 1700012M14Rik (NM_023816.1,657-675).
cactacacggtctacaaca

SEQ ID NO: 714480 - DNA, 19 bp, Mus musculus
  siRNA target sequence for 1700012M14Rik (NM_023816.1,714-732).
gcagacaccgaagttaaga

SEQ ID NO: 714481 - DNA, 19 bp, Mus musculus
  siRNA target sequence for 1700012M14Rik (NM_023816.1,717-735).
gacaccgaagttaagacaa

SEQ ID NO: 714482 - DNA, 19 bp, Mus musculus
  siRNA target sequence for 1700012M14Rik (NM_023816.1,743-761).
ctacacgccgcttatactt

SEQ ID NO: 714483 - DNA, 19 bp, Mus musculus
  siRNA target sequence for 1700012M14Rik (NM_023816.1,759-777).
cttgcggtgctagaaaaca

SEQ ID NO: 714484 - DNA, 19 bp, Mus musculus
  siRNA target sequence for 1700012M14Rik (NM_023816.1,804-822).
caggctgcagccaacataa

SEQ ID NO: 714485 - DNA, 19 bp, Mus musculus
  siRNA target sequence for 1700012M14Rik (NM_023816.1,839-857).
caagaggtccgcccttata

SEQ ID NO: 714486 - DNA, 19 bp, Mus musculus
  siRNA target sequence for 1700012M14Rik (NM_023816.1,842-860).
gaggtccgcccttatacat

SEQ ID NO: 714487 - DNA, 19 bp, Mus musculus
  siRNA target sequence for 1700012M14Rik (NM_023816.1,873-891).
cagtctaaaaacatgatca

SEQ ID NO: 714488 - DNA, 19 bp, Mus musculus
  siRNA target sequence for 1700012M14Rik (NM_023816.1,949-967).
cacaaagttacgctgtttt

SEQ ID NO: 714489 - DNA, 19 bp, Mus musculus
  siRNA target sequence for 1700012M14Rik (NM_023816.1,1028-1046).
ggccagacacagttttgat

SEQ ID NO: 714490 - DNA, 19 bp, Mus musculus
  siRNA target sequence for 1500035H01Rik (NM_023831.2,507-525).
cagtctcggccgagatcaa

SEQ ID NO: 714491 - DNA, 19 bp, Mus musculus
  siRNA target sequence for 1500035H01Rik (NM_023831.2,549-567).
ggtacacacctcagttgat

SEQ ID NO: 714492 - DNA, 19 bp, Mus musculus
  siRNA target sequence for 1500035H01Rik (NM_023831.2,620-638).
ggggatatcgatgcatttt

SEQ ID NO: 714493 - DNA, 19 bp, Mus musculus
  siRNA target sequence for 1500035H01Rik (NM_023831.2,727-745).
gctttcgctgtggttaaca

SEQ ID NO: 714494 - DNA, 19 bp, Mus musculus
  siRNA target sequence for 1500035H01Rik (NM_023831.2,761-779).
cataatattacgcaacata

SEQ ID NO: 714495 - DNA, 19 bp, Mus musculus
  siRNA target sequence for 1500035H01Rik (NM_023831.2,894-912).
ggcccatgcccgacattga

SEQ ID NO: 714496 - DNA, 19 bp, Mus musculus
  siRNA target sequence for 1500035H01Rik (NM_023831.2,925-943).
ggagtggtccccggaattt

SEQ ID NO: 714497 - DNA, 19 bp, Mus musculus
  siRNA target sequence for 1500035H01Rik (NM_023831.2,930-948).
ggtccccggaatttgaaga

SEQ ID NO: 714498 - DNA, 19 bp, Mus musculus
  siRNA target sequence for 1500035H01Rik (NM_023831.2,971-989).
cccactgtcgagatcgatt

SEQ ID NO: 714499 - DNA, 19 bp, Mus musculus
  siRNA target sequence for 1500035H01Rik (NM_023831.2,1022-1040).
gcgatcctggacattcctt

SEQ ID NO: 714500 - DNA, 19 bp, Mus musculus
  siRNA target sequence for 1500035H01Rik (NM_023831.2,1027-1045).
cctggacattcctttctat

SEQ ID NO: 714501 - DNA, 19 bp, Mus musculus
  siRNA target sequence for 1500035H01Rik (NM_023831.2,1028-1046).
ctggacattcctttctata

SEQ ID NO: 714502 - DNA, 19 bp, Mus musculus
  siRNA target sequence for 1500035H01Rik (NM_023831.2,1181-1199).
gcggagacactgactttca

SEQ ID NO: 714503 - DNA, 19 bp, Mus musculus
  siRNA target sequence for Jam2 (NM_023844.2,109-127).
cgtcgccctggactatcat

SEQ ID NO: 714504 - DNA, 19 bp, Mus musculus
  siRNA target sequence for Jam2 (NM_023844.2,161-179).
cgtcaagaagtcacagtaa

SEQ ID NO: 714505 - DNA, 19 bp, Mus musculus
  siRNA target sequence for Jam2 (NM_023844.2,162-180).
gtcaagaagtcacagtaat

SEQ ID NO: 714506 - DNA, 19 bp, Mus musculus
  siRNA target sequence for Jam2 (NM_023844.2,182-200).
gagttccaagaggctattt

SEQ ID NO: 714507 - DNA, 19 bp, Mus musculus
  siRNA target sequence for Jam2 (NM_023844.2,264-282).
gggtctccttggtctacta

SEQ ID NO: 714508 - DNA, 19 bp, Mus musculus
  siRNA target sequence for Jam2 (NM_023844.2,313-331).
ccgtgctgagatgatagat

SEQ ID NO: 714509 - DNA, 19 bp, Mus musculus
  siRNA target sequence for Jam2 (NM_023844.2,314-332).
cgtgctgagatgatagatt

SEQ ID NO: 714510 - DNA, 19 bp, Mus musculus
  siRNA target sequence for Jam2 (NM_023844.2,318-336).
ctgagatgatagatttcaa

SEQ ID NO: 714511 - DNA, 19 bp, Mus musculus
  siRNA target sequence for Jam2 (NM_023844.2,322-340).
gatgatagatttcaatata

SEQ ID NO: 714512 - DNA, 19 bp, Mus musculus
  siRNA target sequence for Jam2 (NM_023844.2,325-343).
gatagatttcaatatacga

SEQ ID NO: 714513 - DNA, 19 bp, Mus musculus
  siRNA target sequence for Jam2 (NM_023844.2,334-352).
caatatacgaatcaaaaat

SEQ ID NO: 714514 - DNA, 19 bp, Mus musculus
  siRNA target sequence for Jam2 (NM_023844.2,481-499).
gcccacttctgttatgact

SEQ ID NO: 714515 - DNA, 19 bp, Mus musculus
  siRNA target sequence for Jam2 (NM_023844.2,514-532).
gctacgatgccaggataaa

SEQ ID NO: 714516 - DNA, 19 bp, Mus musculus
  siRNA target sequence for Jam2 (NM_023844.2,542-560).
ccagctccggagtacatct

SEQ ID NO: 714517 - DNA, 19 bp, Mus musculus
  siRNA target sequence for Jam2 (NM_023844.2,550-568).
ggagtacatctggtttaaa

SEQ ID NO: 714518 - DNA, 19 bp, Mus musculus
  siRNA target sequence for Jam2 (NM_023844.2,553-571).
gtacatctggtttaaagat

SEQ ID NO: 714519 - DNA, 19 bp, Mus musculus
  siRNA target sequence for Jam2 (NM_023844.2,631-649).
gaacacgaagtctggaatt

SEQ ID NO: 714520 - DNA, 19 bp, Mus musculus
  siRNA target sequence for Jam2 (NM_023844.2,644-662).
ggaattctgcaattcaaca

SEQ ID NO: 714521 - DNA, 19 bp, Mus musculus
  siRNA target sequence for Jam2 (NM_023844.2,645-663).
gaattctgcaattcaacat

SEQ ID NO: 714522 - DNA, 19 bp, Mus musculus
  siRNA target sequence for Jam2 (NM_023844.2,730-748).
ccctgggaagcgaatgcaa

SEQ ID NO: 714523 - DNA, 19 bp, Mus musculus
  siRNA target sequence for Jam2 (NM_023844.2,735-753).
ggaagcgaatgcaagtaga

SEQ ID NO: 714524 - DNA, 19 bp, Mus musculus
  siRNA target sequence for Jam2 (NM_023844.2,736-754).
gaagcgaatgcaagtagat

SEQ ID NO: 714525 - DNA, 19 bp, Mus musculus
  siRNA target sequence for Jam2 (NM_023844.2,739-757).
gcgaatgcaagtagatgtt

SEQ ID NO: 714526 - DNA, 19 bp, Mus musculus
  siRNA target sequence for Jam2 (NM_023844.2,741-759).
gaatgcaagtagatgttct

SEQ ID NO: 714527 - DNA, 19 bp, Mus musculus
  siRNA target sequence for Jam2 (NM_023844.2,749-767).
gtagatgttctcaacataa

SEQ ID NO: 714528 - DNA, 19 bp, Mus musculus
  siRNA target sequence for Jam2 (NM_023844.2,791-809).
gtggtggccttcgtgattt

SEQ ID NO: 714529 - DNA, 19 bp, Mus musculus
  siRNA target sequence for Jam2 (NM_023844.2,793-811).
ggtggccttcgtgatttct

SEQ ID NO: 714530 - DNA, 19 bp, Mus musculus
  siRNA target sequence for Jam2 (NM_023844.2,797-815).
gccttcgtgatttctgtat

SEQ ID NO: 714531 - DNA, 19 bp, Mus musculus
  siRNA target sequence for Jam2 (NM_023844.2,799-817).
cttcgtgatttctgtatgt

SEQ ID NO: 714532 - DNA, 19 bp, Mus musculus
  siRNA target sequence for Jam2 (NM_023844.2,843-861).
ggaaaggctacttttcaaa

SEQ ID NO: 714533 - DNA, 19 bp, Mus musculus
  siRNA target sequence for Jam2 (NM_023844.2,880-898).
gggcagtcctgcatctaaa

SEQ ID NO: 714534 - DNA, 19 bp, Mus musculus
  siRNA target sequence for Jam2 (NM_023844.2,882-900).
gcagtcctgcatctaaagt

SEQ ID NO: 714535 - DNA, 19 bp, Mus musculus
  siRNA target sequence for Jam2 (NM_023844.2,901-919).
cactacgatgagcgaaaat

SEQ ID NO: 714536 - DNA, 19 bp, Mus musculus
  siRNA target sequence for Jam2 (NM_023844.2,903-921).
ctacgatgagcgaaaatga

SEQ ID NO: 714537 - DNA, 19 bp, Mus musculus
  siRNA target sequence for Jam2 (NM_023844.2,906-924).
cgatgagcgaaaatgattt

SEQ ID NO: 714538 - DNA, 19 bp, Mus musculus
  siRNA target sequence for 9530002B09Rik (NM_023865.2,126-144).
cactaggtcctcaagatct

SEQ ID NO: 714539 - DNA, 19 bp, Mus musculus
  siRNA target sequence for 9530002B09Rik (NM_023865.2,140-158).
gatctacagctagaatcat

SEQ ID NO: 714540 - DNA, 19 bp, Mus musculus
  siRNA target sequence for 9530002B09Rik (NM_023865.2,152-170).
gaatcatggcaaataactt

SEQ ID NO: 714541 - DNA, 19 bp, Mus musculus
  siRNA target sequence for 9530002B09Rik (NM_023865.2,156-174).
catggcaaataacttttgt

SEQ ID NO: 714542 - DNA, 19 bp, Mus musculus
  siRNA target sequence for 9530002B09Rik (NM_023865.2,235-253).
gaataaagctggagcttat

SEQ ID NO: 714543 - DNA, 19 bp, Mus musculus
  siRNA target sequence for 9530002B09Rik (NM_023865.2,318-336).
gctcacatgcatttaagat

SEQ ID NO: 714544 - DNA, 19 bp, Mus musculus
  siRNA target sequence for 9530002B09Rik (NM_023865.2,360-378).
gacatggccacactgattt

SEQ ID NO: 714545 - DNA, 19 bp, Mus musculus
  siRNA target sequence for 9530002B09Rik (NM_023865.2,396-414).
cccaaatgtggaaggtatt

SEQ ID NO: 714546 - DNA, 19 bp, Mus musculus
  siRNA target sequence for 9530002B09Rik (NM_023865.2,398-416).
caaatgtggaaggtattga

SEQ ID NO: 714547 - DNA, 19 bp, Mus musculus
  siRNA target sequence for 9530002B09Rik (NM_023865.2,429-447).
ctacccgctacaaattgaa

SEQ ID NO: 714548 - DNA, 19 bp, Mus musculus
  siRNA target sequence for 9530002B09Rik (NM_023865.2,432-450).
cccgctacaaattgaaatt

SEQ ID NO: 714549 - DNA, 19 bp, Mus musculus
  siRNA target sequence for 9530002B09Rik (NM_023865.2,433-451).
ccgctacaaattgaaattt

SEQ ID NO: 714550 - DNA, 19 bp, Mus musculus
  siRNA target sequence for 8030498B09Rik (NM_023867.1,338-356).
ggtttctcatagttgtgat

SEQ ID NO: 714551 - DNA, 19 bp, Mus musculus
  siRNA target sequence for 8030498B09Rik (NM_023867.1,339-357).
gtttctcatagttgtgatt

SEQ ID NO: 714552 - DNA, 19 bp, Mus musculus
  siRNA target sequence for 8030498B09Rik (NM_023867.1,345-363).
catagttgtgatttcagtt

SEQ ID NO: 714553 - DNA, 19 bp, Mus musculus
  siRNA target sequence for 8030498B09Rik (NM_023867.1,546-564).
gggctttatcacatctttt

SEQ ID NO: 714554 - DNA, 19 bp, Mus musculus
  siRNA target sequence for 8030498B09Rik (NM_023867.1,596-614).
gttcattaggggtagtaat

SEQ ID NO: 714555 - DNA, 19 bp, Mus musculus
  siRNA target sequence for 8030498B09Rik (NM_023867.1,610-628).
gtaatggctgcctcacaat

SEQ ID NO: 714556 - DNA, 19 bp, Mus musculus
  siRNA target sequence for 8030498B09Rik (NM_023867.1,621-639).
ctcacaatgtgcatattgt

SEQ ID NO: 714557 - DNA, 19 bp, Mus musculus
  siRNA target sequence for C030018L16Rik (NM_023873.2,153-171).
gactgagggaagtcaaata

SEQ ID NO: 714558 - DNA, 19 bp, Mus musculus
  siRNA target sequence for C030018L16Rik (NM_023873.2,180-198).
gccgatctctacttcagat

SEQ ID NO: 714559 - DNA, 19 bp, Mus musculus
  siRNA target sequence for C030018L16Rik (NM_023873.2,183-201).
gatctctacttcagattct

SEQ ID NO: 714560 - DNA, 19 bp, Mus musculus
  siRNA target sequence for C030018L16Rik (NM_023873.2,238-256).
caggatcctagccttttat

SEQ ID NO: 714561 - DNA, 19 bp, Mus musculus
  siRNA target sequence for C030018L16Rik (NM_023873.2,240-258).
ggatcctagccttttatca

SEQ ID NO: 714562 - DNA, 19 bp, Mus musculus
  siRNA target sequence for C030018L16Rik (NM_023873.2,244-262).
cctagccttttatcaaaca

SEQ ID NO: 714563 - DNA, 19 bp, Mus musculus
  siRNA target sequence for C030018L16Rik (NM_023873.2,305-323).
gcatcaatgggctattgat

SEQ ID NO: 714564 - DNA, 19 bp, Mus musculus
  siRNA target sequence for C030018L16Rik (NM_023873.2,326-344).
cacatggcttcaaaccttt

SEQ ID NO: 714565 - DNA, 19 bp, Mus musculus
  siRNA target sequence for C030018L16Rik (NM_023873.2,328-346).
catggcttcaaacctttat

SEQ ID NO: 714566 - DNA, 19 bp, Mus musculus
  siRNA target sequence for C030018L16Rik (NM_023873.2,332-350).
gcttcaaacctttatgtct

SEQ ID NO: 714567 - DNA, 19 bp, Mus musculus
  siRNA target sequence for C030018L16Rik (NM_023873.2,333-351).
cttcaaacctttatgtcta

SEQ ID NO: 714568 - DNA, 19 bp, Mus musculus
  siRNA target sequence for C030018L16Rik (NM_023873.2,382-400).
gtttttgacaaacaatcat

SEQ ID NO: 714569 - DNA, 19 bp, Mus musculus
  siRNA target sequence for C030018L16Rik (NM_023873.2,592-610).
ggtgaattggaagatgaat

SEQ ID NO: 714570 - DNA, 19 bp, Mus musculus
  siRNA target sequence for C030018L16Rik (NM_023873.2,649-667).
gaccttcaaaaggaatata

SEQ ID NO: 714571 - DNA, 19 bp, Mus musculus
  siRNA target sequence for C030018L16Rik (NM_023873.2,723-741).
gaccattgcttctttgcaa

SEQ ID NO: 714572 - DNA, 19 bp, Mus musculus
  siRNA target sequence for C030018L16Rik (NM_023873.2,833-851).
cagtcttggataaacaatt

SEQ ID NO: 714573 - DNA, 19 bp, Mus musculus
  siRNA target sequence for C030018L16Rik (NM_023873.2,880-898).
caacttagaaaacttcata

SEQ ID NO: 714574 - DNA, 19 bp, Mus musculus
  siRNA target sequence for C030018L16Rik (NM_023873.2,955-973).
ggtgcctcaccaaattata

SEQ ID NO: 714575 - DNA, 19 bp, Mus musculus
  siRNA target sequence for C030018L16Rik (NM_023873.2,1047-1065).
gctgagcctccagaaagat

SEQ ID NO: 714576 - DNA, 19 bp, Mus musculus
  siRNA target sequence for C030018L16Rik (NM_023873.2,1074-1092).
caggcccacagaacatgaa

SEQ ID NO: 714577 - DNA, 19 bp, Mus musculus
  siRNA target sequence for C030018L16Rik (NM_023873.2,1076-1094).
ggcccacagaacatgaatt

SEQ ID NO: 714578 - DNA, 19 bp, Mus musculus
  siRNA target sequence for C030018L16Rik (NM_023873.2,1097-1115).
gactttataaacaacaagt

SEQ ID NO: 714579 - DNA, 19 bp, Mus musculus
  siRNA target sequence for C030018L16Rik (NM_023873.2,1162-1180).
cttattggtcaaaaaaagt

SEQ ID NO: 714580 - DNA, 19 bp, Mus musculus
  siRNA target sequence for C030018L16Rik (NM_023873.2,1236-1254).
cattgagcagagctacttt

SEQ ID NO: 714581 - DNA, 19 bp, Mus musculus
  siRNA target sequence for C030018L16Rik (NM_023873.2,1258-1276).
gtgctgtgcagcatcaatt

SEQ ID NO: 714582 - DNA, 19 bp, Mus musculus
  siRNA target sequence for C030018L16Rik (NM_023873.2,1263-1281).
gtgcagcatcaattcaatt

SEQ ID NO: 714583 - DNA, 19 bp, Mus musculus
  siRNA target sequence for C030018L16Rik (NM_023873.2,1290-1308).
cccacgagctccagtgatt

SEQ ID NO: 714584 - DNA, 19 bp, Mus musculus
  siRNA target sequence for C030018L16Rik (NM_023873.2,1291-1309).
ccacgagctccagtgatta

SEQ ID NO: 714585 - DNA, 19 bp, Mus musculus
  siRNA target sequence for C030018L16Rik (NM_023873.2,1292-1310).
cacgagctccagtgattat

SEQ ID NO: 714586 - DNA, 19 bp, Mus musculus
  siRNA target sequence for C030018L16Rik (NM_023873.2,1295-1313).
gagctccagtgattattta

SEQ ID NO: 714587 - DNA, 19 bp, Mus musculus
  siRNA target sequence for C030018L16Rik (NM_023873.2,1331-1349).
gagccccaaacggcaataa

SEQ ID NO: 714588 - DNA, 19 bp, Mus musculus
  siRNA target sequence for C030018L16Rik (NM_023873.2,1334-1352).
ccccaaacggcaataaaga

SEQ ID NO: 714589 - DNA, 19 bp, Mus musculus
  siRNA target sequence for C030018L16Rik (NM_023873.2,1335-1353).
cccaaacggcaataaagat

SEQ ID NO: 714590 - DNA, 19 bp, Mus musculus
  siRNA target sequence for C030018L16Rik (NM_023873.2,1337-1355).
caaacggcaataaagatat

SEQ ID NO: 714591 - DNA, 19 bp, Mus musculus
  siRNA target sequence for C030018L16Rik (NM_023873.2,1341-1359).
cggcaataaagatattggt

SEQ ID NO: 714592 - DNA, 19 bp, Mus musculus
  siRNA target sequence for C030018L16Rik (NM_023873.2,1375-1393).
gaacatcttgttcctataa

SEQ ID NO: 714593 - DNA, 19 bp, Mus musculus
  siRNA target sequence for C030018L16Rik (NM_023873.2,1381-1399).
cttgttcctataatagaaa

SEQ ID NO: 714594 - DNA, 19 bp, Mus musculus
  siRNA target sequence for C030018L16Rik (NM_023873.2,1408-1426).
gatgaactgacatccttaa

SEQ ID NO: 714595 - DNA, 19 bp, Mus musculus
  siRNA target sequence for C030018L16Rik (NM_023873.2,1414-1432).
ctgacatccttaaaggatt

SEQ ID NO: 714596 - DNA, 19 bp, Mus musculus
  siRNA target sequence for C030018L16Rik (NM_023873.2,1468-1486).
gtgccttggcatagcttaa

SEQ ID NO: 714597 - DNA, 19 bp, Mus musculus
  siRNA target sequence for C030018L16Rik (NM_023873.2,1471-1489).
ccttggcatagcttaaaga

SEQ ID NO: 714598 - DNA, 19 bp, Mus musculus
  siRNA target sequence for C030018L16Rik (NM_023873.2,1584-1602).
cacgccgaactctcaaact

SEQ ID NO: 714599 - DNA, 19 bp, Mus musculus
  siRNA target sequence for C030018L16Rik (NM_023873.2,1586-1604).
cgccgaactctcaaacttt

SEQ ID NO: 714600 - DNA, 19 bp, Mus musculus
  siRNA target sequence for C030018L16Rik (NM_023873.2,1662-1680).
ctttccccggatgaatgaa

SEQ ID NO: 714601 - DNA, 19 bp, Mus musculus
  siRNA target sequence for C030018L16Rik (NM_023873.2,1667-1685).
cccggatgaatgaagtgta

SEQ ID NO: 714602 - DNA, 19 bp, Mus musculus
  siRNA target sequence for C030018L16Rik (NM_023873.2,1723-1741).
cttcaggagctcttagaat

SEQ ID NO: 714603 - DNA, 19 bp, Mus musculus
  siRNA target sequence for C030018L16Rik (NM_023873.2,1770-1788).
ggtcagcacagttggtaaa

SEQ ID NO: 714604 - DNA, 19 bp, Mus musculus
  siRNA target sequence for C030018L16Rik (NM_023873.2,1783-1801).
ggtaaactgtgtgagataa

SEQ ID NO: 714605 - DNA, 19 bp, Mus musculus
  siRNA target sequence for C030018L16Rik (NM_023873.2,1815-1833).
gagtgagcaggttaaacaa

SEQ ID NO: 714606 - DNA, 19 bp, Mus musculus
  siRNA target sequence for C030018L16Rik (NM_023873.2,1817-1835).
gtgagcaggttaaacaagt

SEQ ID NO: 714607 - DNA, 19 bp, Mus musculus
  siRNA target sequence for C030018L16Rik (NM_023873.2,1821-1839).
gcaggttaaacaagtgtta

SEQ ID NO: 714608 - DNA, 19 bp, Mus musculus
  siRNA target sequence for C030018L16Rik (NM_023873.2,1840-1858).
ggacctgaggatctacaaa

SEQ ID NO: 714609 - DNA, 19 bp, Mus musculus
  siRNA target sequence for C030018L16Rik (NM_023873.2,1843-1861).
cctgaggatctacaaagta

SEQ ID NO: 714610 - DNA, 19 bp, Mus musculus
  siRNA target sequence for C030018L16Rik (NM_023873.2,1846-1864).
gaggatctacaaagtatta

SEQ ID NO: 714611 - DNA, 19 bp, Mus musculus
  siRNA target sequence for C030018L16Rik (NM_023873.2,1849-1867).
gatctacaaagtattatca

SEQ ID NO: 714612 - DNA, 19 bp, Mus musculus
  siRNA target sequence for C030018L16Rik (NM_023873.2,1852-1870).
ctacaaagtattatcaaga

SEQ ID NO: 714613 - DNA, 19 bp, Mus musculus
  siRNA target sequence for C030018L16Rik (NM_023873.2,1900-1918).
gcgtttcaagcttttgcta

SEQ ID NO: 714614 - DNA, 19 bp, Mus musculus
  siRNA target sequence for C030018L16Rik (NM_023873.2,1901-1919).
cgtttcaagcttttgctaa

SEQ ID NO: 714615 - DNA, 19 bp, Mus musculus
  siRNA target sequence for C030018L16Rik (NM_023873.2,1902-1920).
gtttcaagcttttgctaat

SEQ ID NO: 714616 - DNA, 19 bp, Mus musculus
  siRNA target sequence for C030018L16Rik (NM_023873.2,1910-1928).
cttttgctaatgatcttct

SEQ ID NO: 714617 - DNA, 19 bp, Mus musculus
  siRNA target sequence for C030018L16Rik (NM_023873.2,1924-1942).
cttcttgaaatcttagaga

SEQ ID NO: 714618 - DNA, 19 bp, Mus musculus
  siRNA target sequence for C030018L16Rik (NM_023873.2,1962-1980).
cgtacctgcagtaaagaaa

SEQ ID NO: 714619 - DNA, 19 bp, Mus musculus
  siRNA target sequence for C030018L16Rik (NM_023873.2,1986-2004).
gatccctttcatactgaaa

SEQ ID NO: 714620 - DNA, 19 bp, Mus musculus
  siRNA target sequence for C030018L16Rik (NM_023873.2,1989-2007).
ccctttcatactgaaacaa

SEQ ID NO: 714621 - DNA, 19 bp, Mus musculus
  siRNA target sequence for C030018L16Rik (NM_023873.2,2012-2030).
ggtcaacttcctgtgtaaa

SEQ ID NO: 714622 - DNA, 19 bp, Mus musculus
  siRNA target sequence for C030018L16Rik (NM_023873.2,2024-2042).
gtgtaaactgcattcgtaa

SEQ ID NO: 714623 - DNA, 19 bp, Mus musculus
  siRNA target sequence for C030018L16Rik (NM_023873.2,2031-2049).
ctgcattcgtaacattcta

SEQ ID NO: 714624 - DNA, 19 bp, Mus musculus
  siRNA target sequence for C030018L16Rik (NM_023873.2,2122-2140).
ggtctgctcaacccatata

SEQ ID NO: 714625 - DNA, 19 bp, Mus musculus
  siRNA target sequence for C030018L16Rik (NM_023873.2,2123-2141).
gtctgctcaacccatataa

SEQ ID NO: 714626 - DNA, 19 bp, Mus musculus
  siRNA target sequence for C030018L16Rik (NM_023873.2,2127-2145).
gctcaacccatataatttt

SEQ ID NO: 714627 - DNA, 19 bp, Mus musculus
  siRNA target sequence for C030018L16Rik (NM_023873.2,2130-2148).
caacccatataatttttat

SEQ ID NO: 714628 - DNA, 19 bp, Mus musculus
  siRNA target sequence for Elp4 (NM_023876.2,255-273).
cacttcttctgattgaaga

SEQ ID NO: 714629 - DNA, 19 bp, Mus musculus
  siRNA target sequence for Elp4 (NM_023876.2,401-419).
gcaccactacttgatgata

SEQ ID NO: 714630 - DNA, 19 bp, Mus musculus
  siRNA target sequence for Elp4 (NM_023876.2,402-420).
caccactacttgatgataa

SEQ ID NO: 714631 - DNA, 19 bp, Mus musculus
  siRNA target sequence for Elp4 (NM_023876.2,404-422).
ccactacttgatgataata

SEQ ID NO: 714632 - DNA, 19 bp, Mus musculus
  siRNA target sequence for Elp4 (NM_023876.2,423-441).
gtaaaaaggagcttgaaga

SEQ ID NO: 714633 - DNA, 19 bp, Mus musculus
  siRNA target sequence for Elp4 (NM_023876.2,459-477).
ccccagagcctaatgtcaa

SEQ ID NO: 714634 - DNA, 19 bp, Mus musculus
  siRNA target sequence for Elp4 (NM_023876.2,464-482).
gagcctaatgtcaacatga

SEQ ID NO: 714635 - DNA, 19 bp, Mus musculus
  siRNA target sequence for Elp4 (NM_023876.2,467-485).
cctaatgtcaacatgaaga

SEQ ID NO: 714636 - DNA, 19 bp, Mus musculus
  siRNA target sequence for Elp4 (NM_023876.2,489-507).
cctggcggtaccagttaca

SEQ ID NO: 714637 - DNA, 19 bp, Mus musculus
  siRNA target sequence for Elp4 (NM_023876.2,490-508).
ctggcggtaccagttacaa

SEQ ID NO: 714638 - DNA, 19 bp, Mus musculus
  siRNA target sequence for Elp4 (NM_023876.2,529-547).
ggtctcgtcgtcacgattt

SEQ ID NO: 714639 - DNA, 19 bp, Mus musculus
  siRNA target sequence for Elp4 (NM_023876.2,532-550).
ctcgtcgtcacgatttggt

SEQ ID NO: 714640 - DNA, 19 bp, Mus musculus
  siRNA target sequence for Elp4 (NM_023876.2,538-556).
gtcacgatttggtcactat

SEQ ID NO: 714641 - DNA, 19 bp, Mus musculus
  siRNA target sequence for Elp4 (NM_023876.2,551-569).
cactattatgatttatcaa

SEQ ID NO: 714642 - DNA, 19 bp, Mus musculus
  siRNA target sequence for Elp4 (NM_023876.2,600-618).
caaagtggcatggattctt

SEQ ID NO: 714643 - DNA, 19 bp, Mus musculus
  siRNA target sequence for Elp4 (NM_023876.2,682-700).
gaggctgcttgagttcatt

SEQ ID NO: 714644 - DNA, 19 bp, Mus musculus
  siRNA target sequence for Elp4 (NM_023876.2,708-726).
gcgtttatgctgaaggatt

SEQ ID NO: 714645 - DNA, 19 bp, Mus musculus
  siRNA target sequence for Elp4 (NM_023876.2,731-749).
ggagctaatccccagaaaa

SEQ ID NO: 714646 - DNA, 19 bp, Mus musculus
  siRNA target sequence for Elp4 (NM_023876.2,732-750).
gagctaatccccagaaaaa

SEQ ID NO: 714647 - DNA, 19 bp, Mus musculus
  siRNA target sequence for Elp4 (NM_023876.2,795-813).
cgttatggggagatgacat

SEQ ID NO: 714648 - DNA, 19 bp, Mus musculus
  siRNA target sequence for Elp4 (NM_023876.2,869-887).
cttcgtggtcttctaagat

SEQ ID NO: 714649 - DNA, 19 bp, Mus musculus
  siRNA target sequence for Elp4 (NM_023876.2,893-911).
ctgtccgcctgcatcatca

SEQ ID NO: 714650 - DNA, 19 bp, Mus musculus
  siRNA target sequence for Elp4 (NM_023876.2,921-939).
cacatcttgtccagaataa

SEQ ID NO: 714651 - DNA, 19 bp, Mus musculus
  siRNA target sequence for Elp4 (NM_023876.2,934-952).
gaataaatcaattactact

SEQ ID NO: 714652 - DNA, 19 bp, Mus musculus
  siRNA target sequence for Elp4 (NM_023876.2,948-966).
ctactcgtgtgagaaattt

SEQ ID NO: 714653 - DNA, 19 bp, Mus musculus
  siRNA target sequence for Elp4 (NM_023876.2,956-974).
gtgagaaatttgtcagata

SEQ ID NO: 714654 - DNA, 19 bp, Mus musculus
  siRNA target sequence for Elp4 (NM_023876.2,986-1004).
ctggaatcctttattggtt

SEQ ID NO: 714655 - DNA, 19 bp, Mus musculus
  siRNA target sequence for Elp4 (NM_023876.2,1011-1029).
gagagactaacccattgta

SEQ ID NO: 714656 - DNA, 19 bp, Mus musculus
  siRNA target sequence for Elp4 (NM_023876.2,1021-1039).
cccattgtataaggattat

SEQ ID NO: 714657 - DNA, 19 bp, Mus musculus
  siRNA target sequence for Elp4 (NM_023876.2,1023-1041).
cattgtataaggattatca

SEQ ID NO: 714658 - DNA, 19 bp, Mus musculus
  siRNA target sequence for Elp4 (NM_023876.2,1060-1078).
gaagattcctcggcttaat

SEQ ID NO: 714659 - DNA, 19 bp, Mus musculus
  siRNA target sequence for Elp4 (NM_023876.2,1067-1085).
cctcggcttaataacttga

SEQ ID NO: 714660 - DNA, 19 bp, Mus musculus
  siRNA target sequence for Elp4 (NM_023876.2,1070-1088).
cggcttaataacttgactt

SEQ ID NO: 714661 - DNA, 19 bp, Mus musculus
  siRNA target sequence for Elp4 (NM_023876.2,1109-1127).
gacttagcttttaagttaa

SEQ ID NO: 714662 - DNA, 19 bp, Mus musculus
  siRNA target sequence for Elp4 (NM_023876.2,1115-1133).
gcttttaagttaaaaagga

SEQ ID NO: 714663 - DNA, 19 bp, Mus musculus
  siRNA target sequence for Elp4 (NM_023876.2,1143-1161).
ccattgagcgactgcattt

SEQ ID NO: 714664 - DNA, 19 bp, Mus musculus
  siRNA target sequence for 9530063M10Rik (NM_023900.1,113-131).
cggtacaacgagaaagagt

SEQ ID NO: 714665 - DNA, 19 bp, Mus musculus
  siRNA target sequence for 9530063M10Rik (NM_023900.1,355-373).
cagcaggaaatatcacttt

SEQ ID NO: 714666 - DNA, 19 bp, Mus musculus
  siRNA target sequence for 9530063M10Rik (NM_023900.1,555-573).
ggatgggcggactacttgt

SEQ ID NO: 714667 - DNA, 19 bp, Mus musculus
  siRNA target sequence for 9530063M10Rik (NM_023900.1,556-574).
gatgggcggactacttgta

SEQ ID NO: 714668 - DNA, 19 bp, Mus musculus
  siRNA target sequence for 1500019G21Rik (NM_024172.2,300-318).
ctgctgcagatggctatta

SEQ ID NO: 714669 - DNA, 19 bp, Mus musculus
  siRNA target sequence for 1500019G21Rik (NM_024172.2,541-559).
cagacctgtgcgagaacat

SEQ ID NO: 714670 - DNA, 19 bp, Mus musculus
  siRNA target sequence for Mrpl38 (NM_024177.2,565-583).
cagatcccaaagacaaaat

SEQ ID NO: 714671 - DNA, 19 bp, Mus musculus
  siRNA target sequence for Mrpl38 (NM_024177.2,611-629).
cagtcggacccaaaagcta

SEQ ID NO: 714672 - DNA, 19 bp, Mus musculus
  siRNA target sequence for Mrpl38 (NM_024177.2,869-887).
cctgatcccggtgtatcat

SEQ ID NO: 714673 - DNA, 19 bp, Mus musculus
  siRNA target sequence for Mrpl38 (NM_024177.2,878-896).
ggtgtatcatggcaatgaa

SEQ ID NO: 714674 - DNA, 19 bp, Mus musculus
  siRNA target sequence for Mrpl38 (NM_024177.2,955-973).
ccttgtggacactgctatt

SEQ ID NO: 714675 - DNA, 19 bp, Mus musculus
  siRNA target sequence for Mrpl38 (NM_024177.2,961-979).
ggacactgctattcatcaa

SEQ ID NO: 714676 - DNA, 19 bp, Mus musculus
  siRNA target sequence for Mrpl38 (NM_024177.2,964-982).
cactgctattcatcaactt

SEQ ID NO: 714677 - DNA, 19 bp, Mus musculus
  siRNA target sequence for Mrpl38 (NM_024177.2,1001-1019).
gccggacgctgagtatgtt

SEQ ID NO: 714678 - DNA, 19 bp, Mus musculus
  siRNA target sequence for Mrpl38 (NM_024177.2,1003-1021).
cggacgctgagtatgttca

SEQ ID NO: 714679 - DNA, 19 bp, Mus musculus
  siRNA target sequence for Mrpl38 (NM_024177.2,1143-1161).
caggacaagccaatcaact

SEQ ID NO: 714680 - DNA, 19 bp, Mus musculus
  siRNA target sequence for Mrpl38 (NM_024177.2,1207-1225).
ggaccttccgcacttttga

SEQ ID NO: 714681 - DNA, 19 bp, Mus musculus
  siRNA target sequence for Mrpl38 (NM_024177.2,1208-1226).
gaccttccgcacttttgat

SEQ ID NO: 714682 - DNA, 19 bp, Mus musculus
  siRNA target sequence for Mrpl38 (NM_024177.2,1215-1233).
cgcacttttgatttctaca

SEQ ID NO: 714683 - DNA, 19 bp, Mus musculus
  siRNA target sequence for Mrpl38 (NM_024177.2,1328-1346).
catgcgggaacctgtgttt

SEQ ID NO: 714684 - DNA, 19 bp, Mus musculus
  siRNA target sequence for Mrpl38 (NM_024177.2,1331-1349).
gcgggaacctgtgtttgaa

SEQ ID NO: 714685 - DNA, 19 bp, Mus musculus
  siRNA target sequence for Mrpl38 (NM_024177.2,1332-1350).
cgggaacctgtgtttgaat

SEQ ID NO: 714686 - DNA, 19 bp, Mus musculus
  siRNA target sequence for Mrpl38 (NM_024177.2,1333-1351).
gggaacctgtgtttgaatt

SEQ ID NO: 714687 - DNA, 19 bp, Mus musculus
  siRNA target sequence for Mrpl38 (NM_024177.2,1365-1383).
ccttaccaccccaaacaga

SEQ ID NO: 714688 - DNA, 19 bp, Mus musculus
  siRNA target sequence for Mrpl38 (NM_024177.2,1366-1384).
cttaccaccccaaacagaa

SEQ ID NO: 714689 - DNA, 19 bp, Mus musculus
  siRNA target sequence for 0610009O20Rik (NM_024179.3,185-203).
caaacccaccagttcagat

SEQ ID NO: 714690 - DNA, 19 bp, Mus musculus
  siRNA target sequence for 0610009O20Rik (NM_024179.3,259-277).
caggttcccacggttcaaa

SEQ ID NO: 714691 - DNA, 19 bp, Mus musculus
  siRNA target sequence for 0610009O20Rik (NM_024179.3,261-279).
ggttcccacggttcaaaga

SEQ ID NO: 714692 - DNA, 19 bp, Mus musculus
  siRNA target sequence for 0610009O20Rik (NM_024179.3,354-372).
ctgcgggacgccatctcat

SEQ ID NO: 714693 - DNA, 19 bp, Mus musculus
  siRNA target sequence for 0610009O20Rik (NM_024179.3,624-642).
cagtgccttccctcagata

SEQ ID NO: 714694 - DNA, 19 bp, Mus musculus
  siRNA target sequence for 0610009O20Rik (NM_024179.3,650-668).
gagatctggacttctgaat

SEQ ID NO: 714695 - DNA, 19 bp, Mus musculus
  siRNA target sequence for 0610009O20Rik (NM_024179.3,843-861).
gtagccatcactttcaact

SEQ ID NO: 714696 - DNA, 19 bp, Mus musculus
  siRNA target sequence for 0610009O20Rik (NM_024179.3,1010-1028).
ggctatcctcttttaccat

SEQ ID NO: 714697 - DNA, 19 bp, Mus musculus
  siRNA target sequence for 0610009O20Rik (NM_024179.3,1071-1089).
gccaggtgtctgttgcaaa

SEQ ID NO: 714698 - DNA, 19 bp, Mus musculus
  siRNA target sequence for 0610009O20Rik (NM_024179.3,1187-1205).
ggtgctctttactaaggaa

SEQ ID NO: 714699 - DNA, 19 bp, Mus musculus
  siRNA target sequence for 0610009O20Rik (NM_024179.3,1252-1270).
ccagcaatggggattctca

SEQ ID NO: 714700 - DNA, 19 bp, Mus musculus
  siRNA target sequence for 0610009O20Rik (NM_024179.3,1280-1298).
ccacttgggaatttgctat

SEQ ID NO: 714701 - DNA, 19 bp, Mus musculus
  siRNA target sequence for 0610009O20Rik (NM_024179.3,1587-1605).
cccagcaggactataccat

SEQ ID NO: 714702 - DNA, 19 bp, Mus musculus
  siRNA target sequence for 0610009O20Rik (NM_024179.3,1618-1636).
gcctcgtaagactaggttt

SEQ ID NO: 714703 - DNA, 19 bp, Mus musculus
  siRNA target sequence for Ormdl2 (NM_024180.3,201-219).
ggctggcctacatcatctt

SEQ ID NO: 714704 - DNA, 19 bp, Mus musculus
  siRNA target sequence for Ormdl2 (NM_024180.3,298-316).
ccataacttggcaatgtat

SEQ ID NO: 714705 - DNA, 19 bp, Mus musculus
  siRNA target sequence for Ormdl2 (NM_024180.3,365-383).
ggaaaggctcggcttttga

SEQ ID NO: 714706 - DNA, 19 bp, Mus musculus
  siRNA target sequence for Ormdl2 (NM_024180.3,371-389).
gctcggcttttgacacatt

SEQ ID NO: 714707 - DNA, 19 bp, Mus musculus
  siRNA target sequence for Ormdl2 (NM_024180.3,439-457).
cagcatctctcctattgta

SEQ ID NO: 714708 - DNA, 19 bp, Mus musculus
  siRNA target sequence for Ormdl2 (NM_024180.3,441-459).
gcatctctcctattgtact

SEQ ID NO: 714709 - DNA, 19 bp, Mus musculus
  siRNA target sequence for Ormdl2 (NM_024180.3,442-460).
catctctcctattgtactt

SEQ ID NO: 714710 - DNA, 19 bp, Mus musculus
  siRNA target sequence for Ormdl2 (NM_024180.3,447-465).
ctcctattgtactttacct

SEQ ID NO: 714711 - DNA, 19 bp, Mus musculus
  siRNA target sequence for Ormdl2 (NM_024180.3,559-577).
ccatggggttcgtctcttt

SEQ ID NO: 714712 - DNA, 19 bp, Mus musculus
  siRNA target sequence for Ormdl2 (NM_024180.3,563-581).
ggggttcgtctctttggaa

SEQ ID NO: 714713 - DNA, 19 bp, Mus musculus
  siRNA target sequence for Ormdl2 (NM_024180.3,569-587).
cgtctctttggaatcaaca

SEQ ID NO: 714714 - DNA, 19 bp, Mus musculus
  siRNA target sequence for Ormdl2 (NM_024180.3,570-588).
gtctctttggaatcaacaa

SEQ ID NO: 714715 - DNA, 19 bp, Mus musculus
  siRNA target sequence for 1300019H17Rik (NM_024183.3,283-301).
caaaggatctagatgagaa

SEQ ID NO: 714716 - DNA, 19 bp, Mus musculus
  siRNA target sequence for 1300019H17Rik (NM_024183.3,343-361).
ctccatctggaattgaaga

SEQ ID NO: 714717 - DNA, 19 bp, Mus musculus
  siRNA target sequence for 1300019H17Rik (NM_024183.3,458-476).
cactataggagacatcaaa

SEQ ID NO: 714718 - DNA, 19 bp, Mus musculus
  siRNA target sequence for 1300019H17Rik (NM_024183.3,489-507).
cagtatgggagttatggaa

SEQ ID NO: 714719 - DNA, 19 bp, Mus musculus
  siRNA target sequence for 1300019H17Rik (NM_024183.3,508-526).
cagcaccagtaaatcttaa

SEQ ID NO: 714720 - DNA, 19 bp, Mus musculus
  siRNA target sequence for 1300019H17Rik (NM_024183.3,510-528).
gcaccagtaaatcttaata

SEQ ID NO: 714721 - DNA, 19 bp, Mus musculus
  siRNA target sequence for 1300019H17Rik (NM_024183.3,513-531).
ccagtaaatcttaatatca

SEQ ID NO: 714722 - DNA, 19 bp, Mus musculus
  siRNA target sequence for 1300019H17Rik (NM_024183.3,530-548).
caaggcagggggaagagtt

SEQ ID NO: 714723 - DNA, 19 bp, Mus musculus
  siRNA target sequence for 1300019H17Rik (NM_024183.3,588-606).
gatgcacctggcagcatta

SEQ ID NO: 714724 - DNA, 19 bp, Mus musculus
  siRNA target sequence for 1300019H17Rik (NM_024183.3,662-680).
gaaacctggtgctgatctt

SEQ ID NO: 714725 - DNA, 19 bp, Mus musculus
  siRNA target sequence for 1300019H17Rik (NM_024183.3,669-687).
ggtgctgatctttctgatt

SEQ ID NO: 714726 - DNA, 19 bp, Mus musculus
  siRNA target sequence for 1300019H17Rik (NM_024183.3,750-768).
cgaatgggactggaagtta

SEQ ID NO: 714727 - DNA, 19 bp, Mus musculus
  siRNA target sequence for 1300019H17Rik (NM_024183.3,751-769).
gaatgggactggaagttat

SEQ ID NO: 714728 - DNA, 19 bp, Mus musculus
  siRNA target sequence for 1300019H17Rik (NM_024183.3,755-773).
gggactggaagttatacct

SEQ ID NO: 714729 - DNA, 19 bp, Mus musculus
  siRNA target sequence for 1300019H17Rik (NM_024183.3,761-779).
ggaagttatacctgttact

SEQ ID NO: 714730 - DNA, 19 bp, Mus musculus
  siRNA target sequence for 1300019H17Rik (NM_024183.3,762-780).
gaagttatacctgttactt

SEQ ID NO: 714731 - DNA, 19 bp, Mus musculus
  siRNA target sequence for 1300019H17Rik (NM_024183.3,765-783).
gttatacctgttacttcaa

SEQ ID NO: 714732 - DNA, 19 bp, Mus musculus
  siRNA target sequence for 1300019H17Rik (NM_024183.3,778-796).
cttcaaccacaaacaagat

SEQ ID NO: 714733 - DNA, 19 bp, Mus musculus
  siRNA target sequence for 1300019H17Rik (NM_024183.3,807-825).
caagggagaactggaaatt

SEQ ID NO: 714734 - DNA, 19 bp, Mus musculus
  siRNA target sequence for 1300019H17Rik (NM_024183.3,911-929).
gagattacctggagcaatt

SEQ ID NO: 714735 - DNA, 19 bp, Mus musculus
  siRNA target sequence for 1300019H17Rik (NM_024183.3,913-931).
gattacctggagcaattga

SEQ ID NO: 714736 - DNA, 19 bp, Mus musculus
  siRNA target sequence for 1300019H17Rik (NM_024183.3,919-937).
ctggagcaattgatgtcat

SEQ ID NO: 714737 - DNA, 19 bp, Mus musculus
  siRNA target sequence for 1300019H17Rik (NM_024183.3,930-948).
gatgtcattggtcaaacaa

SEQ ID NO: 714738 - DNA, 19 bp, Mus musculus
  siRNA target sequence for 1300019H17Rik (NM_024183.3,970-988).
gaagacggcgtgcaaatga

SEQ ID NO: 714739 - DNA, 19 bp, Mus musculus
  siRNA target sequence for 1300019H17Rik (NM_024183.3,973-991).
gacggcgtgcaaatgagaa

SEQ ID NO: 714740 - DNA, 19 bp, Mus musculus
  siRNA target sequence for 1300019H17Rik (NM_024183.3,1018-1036).
gatctgccactgaagtaga

SEQ ID NO: 714741 - DNA, 19 bp, Mus musculus
  siRNA target sequence for 1300019H17Rik (NM_024183.3,1024-1042).
ccactgaagtagacaacaa

SEQ ID NO: 714742 - DNA, 19 bp, Mus musculus
  siRNA target sequence for 1300019H17Rik (NM_024183.3,1046-1064).
cagcaaaccacctccattt

SEQ ID NO: 714743 - DNA, 19 bp, Mus musculus
  siRNA target sequence for 1300019H17Rik (NM_024183.3,1148-1166).
cattccaccaccaggtatt

SEQ ID NO: 714744 - DNA, 19 bp, Mus musculus
  siRNA target sequence for 1300019H17Rik (NM_024183.3,1152-1170).
ccaccaccaggtattccaa

SEQ ID NO: 714745 - DNA, 19 bp, Mus musculus
  siRNA target sequence for 1300019H17Rik (NM_024183.3,1153-1171).
caccaccaggtattccaat

SEQ ID NO: 714746 - DNA, 19 bp, Mus musculus
  siRNA target sequence for 1300019H17Rik (NM_024183.3,1222-1240).
ctcttataccaacaataga

SEQ ID NO: 714747 - DNA, 19 bp, Mus musculus
  siRNA target sequence for 1300019H17Rik (NM_024183.3,1362-1380).
cagtgggactattatgcaa

SEQ ID NO: 714748 - DNA, 19 bp, Mus musculus
  siRNA target sequence for 1300019H17Rik (NM_024183.3,1495-1513).
gccccaccccaagtgtttt

SEQ ID NO: 714749 - DNA, 19 bp, Mus musculus
  siRNA target sequence for 1300019H17Rik (NM_024183.3,1497-1515).
cccaccccaagtgttttca

SEQ ID NO: 714750 - DNA, 19 bp, Mus musculus
  siRNA target sequence for 1300019H17Rik (NM_024183.3,1524-1542).
gaagagcgatacagataca

SEQ ID NO: 714751 - DNA, 19 bp, Mus musculus
  siRNA target sequence for 1300019H17Rik (NM_024183.3,1643-1661).
caagtcctctcgcagtaat

SEQ ID NO: 714752 - DNA, 19 bp, Mus musculus
  siRNA target sequence for 1300019H17Rik (NM_024183.3,1649-1667).
ctctcgcagtaatagtaga

SEQ ID NO: 714753 - DNA, 19 bp, Mus musculus
  siRNA target sequence for Asf1b (NM_024184.1,284-302).
gtgaggagtttgatcagat

SEQ ID NO: 714754 - DNA, 19 bp, Mus musculus
  siRNA target sequence for Asf1b (NM_024184.1,453-471).
catccgtgtgggctactat

SEQ ID NO: 714755 - DNA, 19 bp, Mus musculus
  siRNA target sequence for Asf1b (NM_024184.1,457-475).
cgtgtgggctactatgtca

SEQ ID NO: 714756 - DNA, 19 bp, Mus musculus
  siRNA target sequence for Asf1b (NM_024184.1,458-476).
gtgtgggctactatgtcaa

SEQ ID NO: 714757 - DNA, 19 bp, Mus musculus
  siRNA target sequence for Asf1b (NM_024184.1,568-586).
cgggtgacccgattccata

SEQ ID NO: 714758 - DNA, 19 bp, Mus musculus
  siRNA target sequence for Asf1b (NM_024184.1,569-587).
gggtgacccgattccatat

SEQ ID NO: 714759 - DNA, 19 bp, Mus musculus
  siRNA target sequence for Asf1b (NM_024184.1,571-589).
gtgacccgattccatatca

SEQ ID NO: 714760 - DNA, 19 bp, Mus musculus
  siRNA target sequence for Asf1b (NM_024184.1,663-681).
cagttgcactcctgttaaa

SEQ ID NO: 714761 - DNA, 19 bp, Mus musculus
  siRNA target sequence for Asf1b (NM_024184.1,718-736).
cctgagaactccatggatt

SEQ ID NO: 714762 - DNA, 19 bp, Mus musculus
  siRNA target sequence for Ssbp2 (NM_024186.1,169-187).
gcactctacgtgtatgaat

SEQ ID NO: 714763 - DNA, 19 bp, Mus musculus
  siRNA target sequence for Ssbp2 (NM_024186.1,216-234).
ggctcagacatttttatca

SEQ ID NO: 714764 - DNA, 19 bp, Mus musculus
  siRNA target sequence for Ssbp2 (NM_024186.1,370-388).
gccttccatgattatcctt

SEQ ID NO: 714765 - DNA, 19 bp, Mus musculus
  siRNA target sequence for Ssbp2 (NM_024186.1,422-440).
ccccattgaggatacctaa

SEQ ID NO: 714766 - DNA, 19 bp, Mus musculus
  siRNA target sequence for Ssbp2 (NM_024186.1,716-734).
cgtctcctgggaattacgt

SEQ ID NO: 714767 - DNA, 19 bp, Mus musculus
  siRNA target sequence for Ssbp2 (NM_024186.1,717-735).
gtctcctgggaattacgta

SEQ ID NO: 714768 - DNA, 19 bp, Mus musculus
  siRNA target sequence for Ssbp2 (NM_024186.1,797-815).
ctaattctggagacaacat

SEQ ID NO: 714769 - DNA, 19 bp, Mus musculus
  siRNA target sequence for Ssbp2 (NM_024186.1,805-823).
ggagacaacatgtatactt

SEQ ID NO: 714770 - DNA, 19 bp, Mus musculus
  siRNA target sequence for Ssbp2 (NM_024186.1,844-862).
gggcctaacagacctaatt

SEQ ID NO: 714771 - DNA, 19 bp, Mus musculus
  siRNA target sequence for Ssbp2 (NM_024186.1,845-863).
ggcctaacagacctaattt

SEQ ID NO: 714772 - DNA, 19 bp, Mus musculus
  siRNA target sequence for Ssbp2 (NM_024186.1,908-926).
gaatggagtcccatcacat

SEQ ID NO: 714773 - DNA, 19 bp, Mus musculus
  siRNA target sequence for Ssbp2 (NM_024186.1,935-953).
ctttaggctcaggagatat

SEQ ID NO: 714774 - DNA, 19 bp, Mus musculus
  siRNA target sequence for Ssbp2 (NM_024186.1,946-964).
ggagatatggacagtattt

SEQ ID NO: 714775 - DNA, 19 bp, Mus musculus
  siRNA target sequence for Ssbp2 (NM_024186.1,1027-1045).
gaaatggggggaaatttct

SEQ ID NO: 714776 - DNA, 19 bp, Mus musculus
  siRNA target sequence for Arl2bp (NM_024191.1,153-171).
ccgcctctgatgcagaatt

SEQ ID NO: 714777 - DNA, 19 bp, Mus musculus
  siRNA target sequence for Arl2bp (NM_024191.1,177-195).
ctgtggttggatgtttaga

SEQ ID NO: 714778 - DNA, 19 bp, Mus musculus
  siRNA target sequence for Arl2bp (NM_024191.1,185-203).
ggatgtttagaggacatta

SEQ ID NO: 714779 - DNA, 19 bp, Mus musculus
  siRNA target sequence for Arl2bp (NM_024191.1,186-204).
gatgtttagaggacattat

SEQ ID NO: 714780 - DNA, 19 bp, Mus musculus
  siRNA target sequence for Arl2bp (NM_024191.1,247-265).
caagtactaccaggaattt

SEQ ID NO: 714781 - DNA, 19 bp, Mus musculus
  siRNA target sequence for Arl2bp (NM_024191.1,292-310).
ctatacacccatttttaat

SEQ ID NO: 714782 - DNA, 19 bp, Mus musculus
  siRNA target sequence for Arl2bp (NM_024191.1,297-315).
cacccatttttaatgaata

SEQ ID NO: 714783 - DNA, 19 bp, Mus musculus
  siRNA target sequence for Arl2bp (NM_024191.1,456-474).
cggattttctggctttcaa

SEQ ID NO: 714784 - DNA, 19 bp, Mus musculus
  siRNA target sequence for Arl2bp (NM_024191.1,509-527).
ggccgaggactggacttaa

SEQ ID NO: 714785 - DNA, 19 bp, Mus musculus
  siRNA target sequence for Arl2bp (NM_024191.1,512-530).
cgaggactggacttaagca

SEQ ID NO: 714786 - DNA, 19 bp, Mus musculus
  siRNA target sequence for Arl2bp (NM_024191.1,542-560).
gtgacttctctgtgtaagt

SEQ ID NO: 714787 - DNA, 19 bp, Mus musculus
  siRNA target sequence for 3010002G01Rik (NM_024192.1,308-326).
cagaggagaactttgatat

SEQ ID NO: 714788 - DNA, 19 bp, Mus musculus
  siRNA target sequence for 3010002G01Rik (NM_024192.1,373-391).
cacatccccagaggtataa

SEQ ID NO: 714789 - DNA, 19 bp, Mus musculus
  siRNA target sequence for 3010002G01Rik (NM_024192.1,428-446).
gcgatgctaggaacaaaga

SEQ ID NO: 714790 - DNA, 19 bp, Mus musculus
  siRNA target sequence for 3010002G01Rik (NM_024192.1,506-524).
cgaggcaagctgaaaagct

SEQ ID NO: 714791 - DNA, 19 bp, Mus musculus
  siRNA target sequence for 3010002G01Rik (NM_024192.1,554-572).
ccgggaacaccctagatga

SEQ ID NO: 714792 - DNA, 19 bp, Mus musculus
  siRNA target sequence for 3010002G01Rik (NM_024192.1,778-796).
caaaaggatgacttgaagt

SEQ ID NO: 714793 - DNA, 19 bp, Mus musculus
  siRNA target sequence for 3010002G01Rik (NM_024192.1,920-938).
ccaagggagagcgattcaa

SEQ ID NO: 714794 - DNA, 19 bp, Mus musculus
  siRNA target sequence for 3010002G01Rik (NM_024192.1,921-939).
caagggagagcgattcaaa

SEQ ID NO: 714795 - DNA, 19 bp, Mus musculus
  siRNA target sequence for 2810442O16Rik (NM_024196.1,157-175).
cgcagggaaggcagacttt

SEQ ID NO: 714796 - DNA, 19 bp, Mus musculus
  siRNA target sequence for 2810442O16Rik (NM_024196.1,250-268).
ccgacgaatggctatcagt

SEQ ID NO: 714797 - DNA, 19 bp, Mus musculus
  siRNA target sequence for 2810442O16Rik (NM_024196.1,290-308).
gagatcaggtgccaagtat

SEQ ID NO: 714798 - DNA, 19 bp, Mus musculus
  siRNA target sequence for 2810442O16Rik (NM_024196.1,403-421).
ggacgtcaggcgatctctt

SEQ ID NO: 714799 - DNA, 19 bp, Mus musculus
  siRNA target sequence for 2810442O16Rik (NM_024196.1,466-484).
ccaggaagagctaatcgat

SEQ ID NO: 714800 - DNA, 19 bp, Mus musculus
  siRNA target sequence for 2810442O16Rik (NM_024196.1,584-602).
gcaacatccctggtagaaa

SEQ ID NO: 714801 - DNA, 19 bp, Mus musculus
  siRNA target sequence for 2810442O16Rik (NM_024196.1,592-610).
cctggtagaaaaattgtct

SEQ ID NO: 714802 - DNA, 19 bp, Mus musculus
  siRNA target sequence for 2810442O16Rik (NM_024196.1,593-611).
ctggtagaaaaattgtcta

SEQ ID NO: 714803 - DNA, 19 bp, Mus musculus
  siRNA target sequence for 2810442O16Rik (NM_024196.1,652-670).
caccaagcacatcctaaat

SEQ ID NO: 714804 - DNA, 19 bp, Mus musculus
  siRNA target sequence for 2810442O16Rik (NM_024196.1,654-672).
ccaagcacatcctaaatta

SEQ ID NO: 714805 - DNA, 19 bp, Mus musculus
  siRNA target sequence for 2810442O16Rik (NM_024196.1,655-673).
caagcacatcctaaattat

SEQ ID NO: 714806 - DNA, 19 bp, Mus musculus
  siRNA target sequence for 2810442O16Rik (NM_024196.1,702-720).
cagagctccacgacttcat

SEQ ID NO: 714807 - DNA, 19 bp, Mus musculus
  siRNA target sequence for 2810442O16Rik (NM_024196.1,1056-1074).
gaacggcagcctctacttt

SEQ ID NO: 714808 - DNA, 19 bp, Mus musculus
  siRNA target sequence for 2810442O16Rik (NM_024196.1,1059-1077).
cggcagcctctactttcaa

SEQ ID NO: 714809 - DNA, 19 bp, Mus musculus
  siRNA target sequence for 2810442O16Rik (NM_024196.1,1060-1078).
ggcagcctctactttcaaa

SEQ ID NO: 714810 - DNA, 19 bp, Mus musculus
  siRNA target sequence for 2810442O16Rik (NM_024196.1,1068-1086).
ctactttcaaagactttga

SEQ ID NO: 714811 - DNA, 19 bp, Mus musculus
  siRNA target sequence for 2810442O16Rik (NM_024196.1,1149-1167).
ggcctgaggctcgaacaaa

SEQ ID NO: 714812 - DNA, 19 bp, Mus musculus
  siRNA target sequence for 2810442O16Rik (NM_024196.1,1188-1206).
ggaccaaccgctttgtgaa

SEQ ID NO: 714813 - DNA, 19 bp, Mus musculus
  siRNA target sequence for 2810442O16Rik (NM_024196.1,1189-1207).
gaccaaccgctttgtgaaa

SEQ ID NO: 714814 - DNA, 19 bp, Mus musculus
  siRNA target sequence for 3110050F08Rik (NM_024198.1,207-225).
gcttcacagaccagaacta

SEQ ID NO: 714815 - DNA, 19 bp, Mus musculus
  siRNA target sequence for 3110050F08Rik (NM_024198.1,351-369).
gcacctacagtgtctcttt

SEQ ID NO: 714816 - DNA, 19 bp, Mus musculus
  siRNA target sequence for 3110050F08Rik (NM_024198.1,366-384).
cttttcccatgtttagcaa

SEQ ID NO: 714817 - DNA, 19 bp, Mus musculus
  siRNA target sequence for 3110050F08Rik (NM_024198.1,408-426).
cccaccctgccttcaagta

SEQ ID NO: 714818 - DNA, 19 bp, Mus musculus
  siRNA target sequence for 3110050F08Rik (NM_024198.1,413-431).
cctgccttcaagtacctaa

SEQ ID NO: 714819 - DNA, 19 bp, Mus musculus
  siRNA target sequence for 3110050F08Rik (NM_024198.1,533-551).
gagatcaagccccgtatta

SEQ ID NO: 714820 - DNA, 19 bp, Mus musculus
  siRNA target sequence for 3110050F08Rik (NM_024198.1,535-553).
gatcaagccccgtattaca

SEQ ID NO: 714821 - DNA, 19 bp, Mus musculus
  siRNA target sequence for Cstf1 (NM_024199.1,65-83).
gaaccaaagtgggtttgaa

SEQ ID NO: 714822 - DNA, 19 bp, Mus musculus
  siRNA target sequence for Cstf1 (NM_024199.1,123-141).
gctctacgacggttacatt

SEQ ID NO: 714823 - DNA, 19 bp, Mus musculus
  siRNA target sequence for Cstf1 (NM_024199.1,124-142).
ctctacgacggttacatta

SEQ ID NO: 714824 - DNA, 19 bp, Mus musculus
  siRNA target sequence for Cstf1 (NM_024199.1,126-144).
ctacgacggttacattagt

SEQ ID NO: 714825 - DNA, 19 bp, Mus musculus
  siRNA target sequence for Cstf1 (NM_024199.1,296-314).
ggatcgacctggagtttga

SEQ ID NO: 714826 - DNA, 19 bp, Mus musculus
  siRNA target sequence for Cstf1 (NM_024199.1,316-334).
gcagacgttcaaacaatgt

SEQ ID NO: 714827 - DNA, 19 bp, Mus musculus
  siRNA target sequence for Cstf1 (NM_024199.1,340-358).
gaggcttccgagtatgaaa

SEQ ID NO: 714828 - DNA, 19 bp, Mus musculus
  siRNA target sequence for Cstf1 (NM_024199.1,348-366).
cgagtatgaaacctgttat

SEQ ID NO: 714829 - DNA, 19 bp, Mus musculus
  siRNA target sequence for Cstf1 (NM_024199.1,456-474).
gatactggacacagaaaga

SEQ ID NO: 714830 - DNA, 19 bp, Mus musculus
  siRNA target sequence for Cstf1 (NM_024199.1,546-564).
cccagtgatccgaactctt

SEQ ID NO: 714831 - DNA, 19 bp, Mus musculus
  siRNA target sequence for Cstf1 (NM_024199.1,547-565).
ccagtgatccgaactcttt

SEQ ID NO: 714832 - DNA, 19 bp, Mus musculus
  siRNA target sequence for Cstf1 (NM_024199.1,548-566).
cagtgatccgaactcttta

SEQ ID NO: 714833 - DNA, 19 bp, Mus musculus
  siRNA target sequence for Cstf1 (NM_024199.1,624-642).
ctcgggctcaagggattat

SEQ ID NO: 714834 - DNA, 19 bp, Mus musculus
  siRNA target sequence for Cstf1 (NM_024199.1,627-645).
gggctcaagggattatact

SEQ ID NO: 714835 - DNA, 19 bp, Mus musculus
  siRNA target sequence for Cstf1 (NM_024199.1,637-655).
gattatactctgaaattgt

SEQ ID NO: 714836 - DNA, 19 bp, Mus musculus
  siRNA target sequence for Cstf1 (NM_024199.1,644-662).
ctctgaaattgttcgatta

SEQ ID NO: 714837 - DNA, 19 bp, Mus musculus
  siRNA target sequence for Cstf1 (NM_024199.1,776-794).
cgcttcgcctgtatgacat

SEQ ID NO: 714838 - DNA, 19 bp, Mus musculus
  siRNA target sequence for Cstf1 (NM_024199.1,781-799).
cgcctgtatgacatcaaca

SEQ ID NO: 714839 - DNA, 19 bp, Mus musculus
  siRNA target sequence for Cstf1 (NM_024199.1,848-866).
ccatctgctccgttaacta

SEQ ID NO: 714840 - DNA, 19 bp, Mus musculus
  siRNA target sequence for Cstf1 (NM_024199.1,849-867).
catctgctccgttaactat

SEQ ID NO: 714841 - DNA, 19 bp, Mus musculus
  siRNA target sequence for Cstf1 (NM_024199.1,855-873).
ctccgttaactataatcct

SEQ ID NO: 714842 - DNA, 19 bp, Mus musculus
  siRNA target sequence for Cstf1 (NM_024199.1,1017-1035).
catcctctcaagtggaaaa

SEQ ID NO: 714843 - DNA, 19 bp, Mus musculus
  siRNA target sequence for Cstf1 (NM_024199.1,1036-1054).
gactctgtagcgaaactct

SEQ ID NO: 714844 - DNA, 19 bp, Mus musculus
  siRNA target sequence for Cstf1 (NM_024199.1,1124-1142).
ggacacaggcagtgttcaa

SEQ ID NO: 714845 - DNA, 19 bp, Mus musculus
  siRNA target sequence for 0610011N22Rik (NM_024201.2,69-87).
cgaccccccaaattggaat

SEQ ID NO: 714846 - DNA, 19 bp, Mus musculus
  siRNA target sequence for 0610011N22Rik (NM_024201.2,131-149).
ggaattatgccctattggt

SEQ ID NO: 714847 - DNA, 19 bp, Mus musculus
  siRNA target sequence for 0610011N22Rik (NM_024201.2,156-174).
gctcggattggcagcattt

SEQ ID NO: 714848 - DNA, 19 bp, Mus musculus
  siRNA target sequence for 0610011N22Rik (NM_024201.2,159-177).
cggattggcagcatttcgt

SEQ ID NO: 714849 - DNA, 19 bp, Mus musculus
  siRNA target sequence for 0610011N22Rik (NM_024201.2,160-178).
ggattggcagcatttcgtt

SEQ ID NO: 714850 - DNA, 19 bp, Mus musculus
  siRNA target sequence for 0610011N22Rik (NM_024201.2,165-183).
ggcagcatttcgttggatt

SEQ ID NO: 714851 - DNA, 19 bp, Mus musculus
  siRNA target sequence for 0610011N22Rik (NM_024201.2,169-187).
gcatttcgttggatttggt

SEQ ID NO: 714852 - DNA, 19 bp, Mus musculus
  siRNA target sequence for 0610011N22Rik (NM_024201.2,248-266).
ctttccaacaggatcttga

SEQ ID NO: 714853 - DNA, 19 bp, Mus musculus
  siRNA target sequence for 0610011N22Rik (NM_024201.2,339-357).
gcaaaatagaacaagtagt

SEQ ID NO: 714854 - DNA, 19 bp, Mus musculus
  siRNA target sequence for 0610011N22Rik (NM_024201.2,384-402).
gcgtaagttggcagaagaa

SEQ ID NO: 714855 - DNA, 19 bp, Mus musculus
  siRNA target sequence for 0610011N22Rik (NM_024201.2,385-403).
cgtaagttggcagaagaaa

SEQ ID NO: 714856 - DNA, 19 bp, Mus musculus
  siRNA target sequence for 0610011N22Rik (NM_024201.2,418-436).
caggaacgggctcagataa

SEQ ID NO: 714857 - DNA, 19 bp, Mus musculus
  siRNA target sequence for 0610011N22Rik (NM_024201.2,553-571).
gaggaacgccaaaatatct

SEQ ID NO: 714858 - DNA, 19 bp, Mus musculus
  siRNA target sequence for 0610011N22Rik (NM_024201.2,559-577).
cgccaaaatatctattgta

SEQ ID NO: 714859 - DNA, 19 bp, Mus musculus
  siRNA target sequence for 0610011N22Rik (NM_024201.2,627-645).
ggtgcgcacatctgttgat

SEQ ID NO: 714860 - DNA, 19 bp, Mus musculus
  siRNA target sequence for 0610011N22Rik (NM_024201.2,681-699).
gtctgacatatttaagcat

SEQ ID NO: 714861 - DNA, 19 bp, Mus musculus
  siRNA target sequence for 0610011N22Rik (NM_024201.2,726-744).
caccaacaaacgtcaaaat

SEQ ID NO: 714862 - DNA, 19 bp, Mus musculus
  siRNA target sequence for 0610011N22Rik (NM_024201.2,753-771).
catgtggatgtatctcaaa

SEQ ID NO: 714863 - DNA, 19 bp, Mus musculus
  siRNA target sequence for 0610011N22Rik (NM_024201.2,768-786).
caaatactgggaactactt

SEQ ID NO: 714864 - DNA, 19 bp, Mus musculus
  siRNA target sequence for 0610011N22Rik (NM_024201.2,778-796).
gaactacttgtcgaactta

SEQ ID NO: 714865 - DNA, 19 bp, Mus musculus
  siRNA target sequence for 0610011N22Rik (NM_024201.2,781-799).
ctacttgtcgaacttaaaa

SEQ ID NO: 714866 - DNA, 19 bp, Mus musculus
  siRNA target sequence for 0610011N22Rik (NM_024201.2,784-802).
cttgtcgaacttaaaaaat

SEQ ID NO: 714867 - DNA, 19 bp, Mus musculus
  siRNA target sequence for 0610011N22Rik (NM_024201.2,787-805).
gtcgaacttaaaaaattta

SEQ ID NO: 714868 - DNA, 19 bp, Mus musculus
  siRNA target sequence for 0610011N22Rik (NM_024201.2,790-808).
gaacttaaaaaatttaaga

SEQ ID NO: 714869 - DNA, 19 bp, Mus musculus
  siRNA target sequence for D19Ertd675e (NM_024204.3,279-297).
ggccacctgagaattgtct

SEQ ID NO: 714870 - DNA, 19 bp, Mus musculus
  siRNA target sequence for D19Ertd675e (NM_024204.3,310-328).
ggagaaatgctgatgtcaa

SEQ ID NO: 714871 - DNA, 19 bp, Mus musculus
  siRNA target sequence for D19Ertd675e (NM_024204.3,321-339).
gatgtcaacctcaaaaact

SEQ ID NO: 714872 - DNA, 19 bp, Mus musculus
  siRNA target sequence for D19Ertd675e (NM_024204.3,399-417).
ctactcattatccttttaa

SEQ ID NO: 714873 - DNA, 19 bp, Mus musculus
  siRNA target sequence for D19Ertd675e (NM_024204.3,444-462).
ctcatggtatcaaagacaa

SEQ ID NO: 714874 - DNA, 19 bp, Mus musculus
  siRNA target sequence for D19Ertd675e (NM_024204.3,482-500).
ccggatgctccttaatgct

SEQ ID NO: 714875 - DNA, 19 bp, Mus musculus
  siRNA target sequence for D19Ertd675e (NM_024204.3,501-519).
ggcgtagaagttaatgcta

SEQ ID NO: 714876 - DNA, 19 bp, Mus musculus
  siRNA target sequence for D19Ertd675e (NM_024204.3,536-554).
cactccctgcactatgctt

SEQ ID NO: 714877 - DNA, 19 bp, Mus musculus
  siRNA target sequence for 1200003C05Rik (NM_024205.1,96-114).
ctgtgggaagaccctatta

SEQ ID NO: 714878 - DNA, 19 bp, Mus musculus
  siRNA target sequence for 1200003C05Rik (NM_024205.1,240-258).
gggctttatggctatgctt

SEQ ID NO: 714879 - DNA, 19 bp, Mus musculus
  siRNA target sequence for 1200003C05Rik (NM_024205.1,265-283).
gttctgcattggttcttca

SEQ ID NO: 714880 - DNA, 19 bp, Mus musculus
  siRNA target sequence for 1200003C05Rik (NM_024205.1,270-288).
gcattggttcttcattgaa

SEQ ID NO: 714881 - DNA, 19 bp, Mus musculus
  siRNA target sequence for 1200003C05Rik (NM_024205.1,275-293).
ggttcttcattgaatggta

SEQ ID NO: 714882 - DNA, 19 bp, Mus musculus
  siRNA target sequence for 1200003C05Rik (NM_024205.1,330-348).
catcaccgcgctctttgaa

SEQ ID NO: 714883 - DNA, 19 bp, Mus musculus
  siRNA target sequence for 1200003C05Rik (NM_024205.1,388-406).
cccgtgggcgtcctttaca

SEQ ID NO: 714884 - DNA, 19 bp, Mus musculus
  siRNA target sequence for 1200003C05Rik (NM_024205.1,410-428).
gttcctgccgcgttctgat

SEQ ID NO: 714885 - DNA, 19 bp, Mus musculus
  siRNA target sequence for 1200003C05Rik (NM_024205.1,419-437).
gcgttctgatgctttctga

SEQ ID NO: 714886 - DNA, 19 bp, Mus musculus
  siRNA target sequence for 1200003C05Rik (NM_024205.1,541-559).
gcgttctgcttggtgttaa

SEQ ID NO: 714887 - DNA, 19 bp, Mus musculus
  siRNA target sequence for 1200003C05Rik (NM_024205.1,572-590).
ggcctctcctggtgaagaa

SEQ ID NO: 714888 - DNA, 19 bp, Mus musculus
  siRNA target sequence for 1200003C05Rik (NM_024205.1,614-632).
ctgaccgcttcaaaagtat

SEQ ID NO: 714889 - DNA, 19 bp, Mus musculus
  siRNA target sequence for 1200003C05Rik (NM_024205.1,616-634).
gaccgcttcaaaagtattt

SEQ ID NO: 714890 - DNA, 19 bp, Mus musculus
  siRNA target sequence for 1200003C05Rik (NM_024205.1,629-647).
gtatttacgcagctcttta

SEQ ID NO: 714891 - DNA, 19 bp, Mus musculus
  siRNA target sequence for 1200003C05Rik (NM_024205.1,702-720).
cgccttcccgtacattata

SEQ ID NO: 714892 - DNA, 19 bp, Mus musculus
  siRNA target sequence for 1200003C05Rik (NM_024205.1,703-721).
gccttcccgtacattatat

SEQ ID NO: 714893 - DNA, 19 bp, Mus musculus
  siRNA target sequence for 1200003C05Rik (NM_024205.1,705-723).
cttcccgtacattatatta

SEQ ID NO: 714894 - DNA, 19 bp, Mus musculus
  siRNA target sequence for 1200003C05Rik (NM_024205.1,709-727).
ccgtacattatattagtgt

SEQ ID NO: 714895 - DNA, 19 bp, Mus musculus
  siRNA target sequence for 1200003C05Rik (NM_024205.1,710-728).
cgtacattatattagtgtt

SEQ ID NO: 714896 - DNA, 19 bp, Mus musculus
  siRNA target sequence for 1200003C05Rik (NM_024205.1,714-732).
cattatattagtgttatct

SEQ ID NO: 714897 - DNA, 19 bp, Mus musculus
  siRNA target sequence for 1200003C05Rik (NM_024205.1,736-754).
gttaccctggctgtataca

SEQ ID NO: 714898 - DNA, 19 bp, Mus musculus
  siRNA target sequence for 1200003C05Rik (NM_024205.1,910-928).
cctacaccagctctgtttt

SEQ ID NO: 714899 - DNA, 19 bp, Mus musculus
  siRNA target sequence for 1200003C05Rik (NM_024205.1,911-929).
ctacaccagctctgtttta

SEQ ID NO: 714900 - DNA, 19 bp, Mus musculus
  siRNA target sequence for Sec13r (NM_024206.3,67-85).
ctcatgaggacatgattca

SEQ ID NO: 714901 - DNA, 19 bp, Mus musculus
  siRNA target sequence for Sec13r (NM_024206.3,133-151).
cggataggtccgtcaaaat

SEQ ID NO: 714902 - DNA, 19 bp, Mus musculus
  siRNA target sequence for Sec13r (NM_024206.3,134-152).
ggataggtccgtcaaaatt

SEQ ID NO: 714903 - DNA, 19 bp, Mus musculus
  siRNA target sequence for Sec13r (NM_024206.3,135-153).
gataggtccgtcaaaattt

SEQ ID NO: 714904 - DNA, 19 bp, Mus musculus
  siRNA target sequence for Sec13r (NM_024206.3,139-157).
ggtccgtcaaaattttcga

SEQ ID NO: 714905 - DNA, 19 bp, Mus musculus
  siRNA target sequence for Sec13r (NM_024206.3,140-158).
gtccgtcaaaattttcgat

SEQ ID NO: 714906 - DNA, 19 bp, Mus musculus
  siRNA target sequence for Sec13r (NM_024206.3,268-286).
cctatgaccggaaagtcat

SEQ ID NO: 714907 - DNA, 19 bp, Mus musculus
  siRNA target sequence for Sec13r (NM_024206.3,743-761).
ggatggtcgagtgtttatt

SEQ ID NO: 714908 - DNA, 19 bp, Mus musculus
  siRNA target sequence for Sec13r (NM_024206.3,744-762).
gatggtcgagtgtttattt

SEQ ID NO: 714909 - DNA, 19 bp, Mus musculus
  siRNA target sequence for Sec13r (NM_024206.3,747-765).
ggtcgagtgtttatttgga

SEQ ID NO: 714910 - DNA, 19 bp, Mus musculus
  siRNA target sequence for Sec13r (NM_024206.3,874-892).
caggtggagacaataaggt

SEQ ID NO: 714911 - DNA, 19 bp, Mus musculus
  siRNA target sequence for 1110021N07Rik (NM_024207.2,558-576).
ggttcggaacgcgatttaa

SEQ ID NO: 714912 - DNA, 19 bp, Mus musculus
  siRNA target sequence for 1110021N07Rik (NM_024207.2,569-587).
cgatttaaggcctgttact

SEQ ID NO: 714913 - DNA, 19 bp, Mus musculus
  siRNA target sequence for 1110021N07Rik (NM_024207.2,570-588).
gatttaaggcctgttactt

SEQ ID NO: 714914 - DNA, 19 bp, Mus musculus
  siRNA target sequence for 1110021N07Rik (NM_024207.2,591-609).
cttgggttatccttggatt

SEQ ID NO: 714915 - DNA, 19 bp, Mus musculus
  siRNA target sequence for 1110021N07Rik (NM_024207.2,596-614).
gttatccttggattcaact

SEQ ID NO: 714916 - DNA, 19 bp, Mus musculus
  siRNA target sequence for 1110021N07Rik (NM_024207.2,726-744).
ccacacctcagtttttgta

SEQ ID NO: 714917 - DNA, 19 bp, Mus musculus
  siRNA target sequence for 2310033P09Rik (NM_024210.1,100-118).
gcggacaagaccagttcaa

SEQ ID NO: 714918 - DNA, 19 bp, Mus musculus
  siRNA target sequence for 2310033P09Rik (NM_024210.1,101-119).
cggacaagaccagttcaat

SEQ ID NO: 714919 - DNA, 19 bp, Mus musculus
  siRNA target sequence for 2310033P09Rik (NM_024210.1,306-324).
gccgcacttggttacaaga

SEQ ID NO: 714920 - DNA, 19 bp, Mus musculus
  siRNA target sequence for 2310033P09Rik (NM_024210.1,307-325).
ccgcacttggttacaagaa

SEQ ID NO: 714921 - DNA, 19 bp, Mus musculus
  siRNA target sequence for 2310033P09Rik (NM_024210.1,463-481).
cgctatcccgagaagacaa

SEQ ID NO: 714922 - DNA, 19 bp, Mus musculus
  siRNA target sequence for 2310033P09Rik (NM_024210.1,600-618).
gatgcagagagccataaga

SEQ ID NO: 714923 - DNA, 19 bp, Mus musculus
  siRNA target sequence for D5Ertd249e (NM_024213.1,183-201).
gctgccacaggagattatt

SEQ ID NO: 714924 - DNA, 19 bp, Mus musculus
  siRNA target sequence for D5Ertd249e (NM_024213.1,184-202).
ctgccacaggagattattt

SEQ ID NO: 714925 - DNA, 19 bp, Mus musculus
  siRNA target sequence for D5Ertd249e (NM_024213.1,248-266).
ctacaggcgaggttttgct

SEQ ID NO: 714926 - DNA, 19 bp, Mus musculus
  siRNA target sequence for D5Ertd249e (NM_024213.1,267-285).
gcatcgccttgcaagtttt

SEQ ID NO: 714927 - DNA, 19 bp, Mus musculus
  siRNA target sequence for D5Ertd249e (NM_024213.1,296-314).
ggagtttcccaccaaatga

SEQ ID NO: 714928 - DNA, 19 bp, Mus musculus
  siRNA target sequence for D5Ertd249e (NM_024213.1,348-366).
gagaccagacggcaaactt

SEQ ID NO: 714929 - DNA, 19 bp, Mus musculus
  siRNA target sequence for D5Ertd249e (NM_024213.1,350-368).
gaccagacggcaaactttt

SEQ ID NO: 714930 - DNA, 19 bp, Mus musculus
  siRNA target sequence for D5Ertd249e (NM_024213.1,379-397).
cttgcggataccaagaaaa

SEQ ID NO: 714931 - DNA, 19 bp, Mus musculus
  siRNA target sequence for D5Ertd249e (NM_024213.1,382-400).
gcggataccaagaaaatta

SEQ ID NO: 714932 - DNA, 19 bp, Mus musculus
  siRNA target sequence for D5Ertd249e (NM_024213.1,384-402).
ggataccaagaaaattatt

SEQ ID NO: 714933 - DNA, 19 bp, Mus musculus
  siRNA target sequence for D5Ertd249e (NM_024213.1,448-466).
gaggctccggtctcttgta

SEQ ID NO: 714934 - DNA, 19 bp, Mus musculus
  siRNA target sequence for D5Ertd249e (NM_024213.1,497-515).
gtgttttaacatcgtttta

SEQ ID NO: 714935 - DNA, 19 bp, Mus musculus
  siRNA target sequence for D5Ertd249e (NM_024213.1,499-517).
gttttaacatcgttttata

SEQ ID NO: 714936 - DNA, 19 bp, Mus musculus
  siRNA target sequence for D5Ertd249e (NM_024213.1,557-575).
ccacattgccaaaaaatta

SEQ ID NO: 714937 - DNA, 19 bp, Mus musculus
  siRNA target sequence for D5Ertd249e (NM_024213.1,560-578).
cattgccaaaaaattacaa

SEQ ID NO: 714938 - DNA, 19 bp, Mus musculus
  siRNA target sequence for D5Ertd249e (NM_024213.1,668-686).
gaagctctggatttattga

SEQ ID NO: 714939 - DNA, 19 bp, Mus musculus
  siRNA target sequence for D5Ertd249e (NM_024213.1,694-712).
gcttatgggatgttcaaaa

SEQ ID NO: 714940 - DNA, 19 bp, Mus musculus
  siRNA target sequence for D5Ertd249e (NM_024213.1,695-713).
cttatgggatgttcaaaat

SEQ ID NO: 714941 - DNA, 19 bp, Mus musculus
  siRNA target sequence for D5Ertd249e (NM_024213.1,708-726).
caaaattgcccgagtaaca

SEQ ID NO: 714942 - DNA, 19 bp, Mus musculus
  siRNA target sequence for D5Ertd249e (NM_024213.1,727-745).
gggattgccggaacttgta

SEQ ID NO: 714943 - DNA, 19 bp, Mus musculus
  siRNA target sequence for D5Ertd249e (NM_024213.1,728-746).
ggattgccggaacttgtat

SEQ ID NO: 714944 - DNA, 19 bp, Mus musculus
  siRNA target sequence for D5Ertd249e (NM_024213.1,729-747).
gattgccggaacttgtatt

SEQ ID NO: 714945 - DNA, 19 bp, Mus musculus
  siRNA target sequence for D5Ertd249e (NM_024213.1,751-769).
ctgtgtttatcaagtgatt

SEQ ID NO: 714946 - DNA, 19 bp, Mus musculus
  siRNA target sequence for D5Ertd249e (NM_024213.1,755-773).
gtttatcaagtgatttgaa

SEQ ID NO: 714947 - DNA, 19 bp, Mus musculus
  siRNA target sequence for D5Ertd249e (NM_024213.1,801-819).
cagcggtggcgaatcagaa

SEQ ID NO: 714948 - DNA, 19 bp, Mus musculus
  siRNA target sequence for D5Ertd249e (NM_024213.1,809-827).
gcgaatcagaagtttcata

SEQ ID NO: 714949 - DNA, 19 bp, Mus musculus
  siRNA target sequence for D5Ertd249e (NM_024213.1,838-856).
gaaaccaatctgctgtatt

SEQ ID NO: 714950 - DNA, 19 bp, Mus musculus
  siRNA target sequence for D5Ertd249e (NM_024213.1,877-895).
cgtatggccaggaagttta

SEQ ID NO: 714951 - DNA, 19 bp, Mus musculus
  siRNA target sequence for D5Ertd249e (NM_024213.1,907-925).
gctctcttacagtatataa

SEQ ID NO: 714952 - DNA, 19 bp, Mus musculus
  siRNA target sequence for D5Ertd249e (NM_024213.1,910-928).
ctcttacagtatataaatt

SEQ ID NO: 714953 - DNA, 19 bp, Mus musculus
  siRNA target sequence for D5Ertd249e (NM_024213.1,947-965).
gtgaagcatgggaagaaat

SEQ ID NO: 714954 - DNA, 19 bp, Mus musculus
  siRNA target sequence for D5Ertd249e (NM_024213.1,981-999).
ctcccgtcttaccaagttt

SEQ ID NO: 714955 - DNA, 19 bp, Mus musculus
  siRNA target sequence for D5Ertd249e (NM_024213.1,983-1001).
cccgtcttaccaagtttgt

SEQ ID NO: 714956 - DNA, 19 bp, Mus musculus
  siRNA target sequence for D5Ertd249e (NM_024213.1,984-1002).
ccgtcttaccaagtttgta

SEQ ID NO: 714957 - DNA, 19 bp, Mus musculus
  siRNA target sequence for D5Ertd249e (NM_024213.1,1087-1105).
ctcctgatgaaccagttaa

SEQ ID NO: 714958 - DNA, 19 bp, Mus musculus
  siRNA target sequence for D5Ertd249e (NM_024213.1,1110-1128).
gaagggcttaaaaaagctt

SEQ ID NO: 714959 - DNA, 19 bp, Mus musculus
  siRNA target sequence for D5Ertd249e (NM_024213.1,1157-1175).
gtatacaaaaactggttat

SEQ ID NO: 714960 - DNA, 19 bp, Mus musculus
  siRNA target sequence for D5Ertd249e (NM_024213.1,1188-1206).
gagtggctctgagtcttta

SEQ ID NO: 714961 - DNA, 19 bp, Mus musculus
  siRNA target sequence for D5Ertd249e (NM_024213.1,1190-1208).
gtggctctgagtctttact

SEQ ID NO: 714962 - DNA, 19 bp, Mus musculus
  siRNA target sequence for D5Ertd249e (NM_024213.1,1193-1211).
gctctgagtctttactgta

SEQ ID NO: 714963 - DNA, 19 bp, Mus musculus
  siRNA target sequence for D5Ertd249e (NM_024213.1,1280-1298).
caggcattgaagatgctat

SEQ ID NO: 714964 - DNA, 19 bp, Mus musculus
  siRNA target sequence for D5Ertd249e (NM_024213.1,1301-1319).
ctgctgtgggttctttcat

SEQ ID NO: 714965 - DNA, 19 bp, Mus musculus
  siRNA target sequence for D5Ertd249e (NM_024213.1,1342-1360).
caagttatagacagtagta

SEQ ID NO: 714966 - DNA, 19 bp, Mus musculus
  siRNA target sequence for D5Ertd249e (NM_024213.1,1396-1414).
gtagcaatgctgagaatga

SEQ ID NO: 714967 - DNA, 19 bp, Mus musculus
  siRNA target sequence for D5Ertd249e (NM_024213.1,1503-1521).
ggctccagacctttataat

SEQ ID NO: 714968 - DNA, 19 bp, Mus musculus
  siRNA target sequence for D5Ertd249e (NM_024213.1,1507-1525).
ccagacctttataatagga

SEQ ID NO: 714969 - DNA, 19 bp, Mus musculus
  siRNA target sequence for D5Ertd249e (NM_024213.1,1529-1547).
gaaaatacttcaatgttga

SEQ ID NO: 714970 - DNA, 19 bp, Mus musculus
  siRNA target sequence for D5Ertd249e (NM_024213.1,1536-1554).
cttcaatgttgaaagagtt

SEQ ID NO: 714971 - DNA, 19 bp, Mus musculus
  siRNA target sequence for D5Ertd249e (NM_024213.1,1546-1564).
gaaagagttggtcagtatt

SEQ ID NO: 714972 - DNA, 19 bp, Mus musculus
  siRNA target sequence for D5Ertd249e (NM_024213.1,1550-1568).
gagttggtcagtatttgaa

SEQ ID NO: 714973 - DNA, 19 bp, Mus musculus
  siRNA target sequence for D5Ertd249e (NM_024213.1,1610-1628).
gaaaccagtggtatgactt

SEQ ID NO: 714974 - DNA, 19 bp, Mus musculus
  siRNA target sequence for D5Ertd249e (NM_024213.1,1619-1637).
ggtatgacttcctccaaaa

SEQ ID NO: 714975 - DNA, 19 bp, Mus musculus
  siRNA target sequence for D5Ertd249e (NM_024213.1,1680-1698).
ccctcgaaaatcattgcat

SEQ ID NO: 714976 - DNA, 19 bp, Mus musculus
  siRNA target sequence for D5Ertd249e (NM_024213.1,1681-1699).
cctcgaaaatcattgcatt

SEQ ID NO: 714977 - DNA, 19 bp, Mus musculus
  siRNA target sequence for D5Ertd249e (NM_024213.1,1682-1700).
ctcgaaaatcattgcattt

SEQ ID NO: 714978 - DNA, 19 bp, Mus musculus
  siRNA target sequence for D5Ertd249e (NM_024213.1,1709-1727).
ggcggatggagaacgttat

SEQ ID NO: 714979 - DNA, 19 bp, Mus musculus
  siRNA target sequence for D5Ertd249e (NM_024213.1,1710-1728).
gcggatggagaacgttatt

SEQ ID NO: 714980 - DNA, 19 bp, Mus musculus
  siRNA target sequence for D5Ertd249e (NM_024213.1,1712-1730).
ggatggagaacgttattga

SEQ ID NO: 714981 - DNA, 19 bp, Mus musculus
  siRNA target sequence for D5Ertd249e (NM_024213.1,1713-1731).
gatggagaacgttattgat

SEQ ID NO: 714982 - DNA, 19 bp, Mus musculus
  siRNA target sequence for D5Ertd249e (NM_024213.1,1741-1759).
caaaagccagcagatgtaa

SEQ ID NO: 714983 - DNA, 19 bp, Mus musculus
  siRNA target sequence for D5Ertd249e (NM_024213.1,1747-1765).
ccagcagatgtaattggaa

SEQ ID NO: 714984 - DNA, 19 bp, Mus musculus
  siRNA target sequence for D5Ertd249e (NM_024213.1,1766-1784).
gatcgatgaatcaagcaat

SEQ ID NO: 714985 - DNA, 19 bp, Mus musculus
  siRNA target sequence for D5Ertd249e (NM_024213.1,1773-1791).
gaatcaagcaatttgcatt

SEQ ID NO: 714986 - DNA, 19 bp, Mus musculus
  siRNA target sequence for D5Ertd249e (NM_024213.1,1787-1805).
gcattccattatataaaga

SEQ ID NO: 714987 - DNA, 19 bp, Mus musculus
  siRNA target sequence for D5Ertd249e (NM_024213.1,1821-1839).
ctgtgcacgaagattgtta

SEQ ID NO: 714988 - DNA, 19 bp, Mus musculus
  siRNA target sequence for D5Ertd249e (NM_024213.1,1823-1841).
gtgcacgaagattgttaaa

SEQ ID NO: 714989 - DNA, 19 bp, Mus musculus
  siRNA target sequence for D5Ertd249e (NM_024213.1,1825-1843).
gcacgaagattgttaaaat

SEQ ID NO: 714990 - DNA, 19 bp, Mus musculus
  siRNA target sequence for D5Ertd249e (NM_024213.1,1906-1924).
gattcggtttataaaatgt

SEQ ID NO: 714991 - DNA, 19 bp, Mus musculus
  siRNA target sequence for D5Ertd249e (NM_024213.1,1926-1944).
catcttaaggagacatact

SEQ ID NO: 714992 - DNA, 19 bp, Mus musculus
  siRNA target sequence for D5Ertd249e (NM_024213.1,1943-1961).
ctgatatttcccaatctgt

SEQ ID NO: 714993 - DNA, 19 bp, Mus musculus
  siRNA target sequence for D5Ertd249e (NM_024213.1,1945-1963).
gatatttcccaatctgtaa

SEQ ID NO: 714994 - DNA, 19 bp, Mus musculus
  siRNA target sequence for D5Ertd249e (NM_024213.1,1953-1971).
ccaatctgtaagtaatgga

SEQ ID NO: 714995 - DNA, 19 bp, Mus musculus
  siRNA target sequence for D5Ertd249e (NM_024213.1,1958-1976).
ctgtaagtaatggactaat

SEQ ID NO: 714996 - DNA, 19 bp, Mus musculus
  siRNA target sequence for D5Ertd249e (NM_024213.1,1969-1987).
ggactaattggtattaaat

SEQ ID NO: 714997 - DNA, 19 bp, Mus musculus
  siRNA target sequence for D5Ertd249e (NM_024213.1,2042-2060).
gtctagacgcccagttcta

SEQ ID NO: 714998 - DNA, 19 bp, Mus musculus
  siRNA target sequence for D5Ertd249e (NM_024213.1,2149-2167).
gtgtataacagtgaagatt

SEQ ID NO: 714999 - DNA, 19 bp, Mus musculus
  siRNA target sequence for D5Ertd249e (NM_024213.1,2164-2182).
gattctgacgaatatgagt

SEQ ID NO: 715000 - DNA, 19 bp, Mus musculus
  siRNA target sequence for D5Ertd249e (NM_024213.1,2179-2197).
gagttcactgggagttact

SEQ ID NO: 715001 - DNA, 19 bp, Mus musculus
  siRNA target sequence for D5Ertd249e (NM_024213.1,2234-2252).
cacgcaccatgcactttga

SEQ ID NO: 715002 - DNA, 19 bp, Mus musculus
  siRNA target sequence for D5Ertd249e (NM_024213.1,2276-2294).
gcatgagagcgcagtatgt

SEQ ID NO: 715003 - DNA, 19 bp, Mus musculus
  siRNA target sequence for D5Ertd249e (NM_024213.1,2277-2295).
catgagagcgcagtatgtt

SEQ ID NO: 715004 - DNA, 19 bp, Mus musculus
  siRNA target sequence for D5Ertd249e (NM_024213.1,2300-2318).
ggaacggccttcgaaaagt

SEQ ID NO: 715005 - DNA, 19 bp, Mus musculus
  siRNA target sequence for D5Ertd249e (NM_024213.1,2502-2520).
cccggacgtagtcatcaaa

SEQ ID NO: 715006 - DNA, 19 bp, Mus musculus
  siRNA target sequence for D5Ertd249e (NM_024213.1,2504-2522).
cggacgtagtcatcaaagt

SEQ ID NO: 715007 - DNA, 19 bp, Mus musculus
  siRNA target sequence for Hsbp1 (NM_024219.1,111-129).
gacaagtttcagatcatgt

SEQ ID NO: 715008 - DNA, 19 bp, Mus musculus
  siRNA target sequence for Hsbp1 (NM_024219.1,134-152).
ccagatcatcggaaggata

SEQ ID NO: 715009 - DNA, 19 bp, Mus musculus
  siRNA target sequence for Hsbp1 (NM_024219.1,137-155).
gatcatcggaaggatagat

SEQ ID NO: 715010 - DNA, 19 bp, Mus musculus
  siRNA target sequence for Hsbp1 (NM_024219.1,225-243).
gaactggaccctgaaaaca

SEQ ID NO: 715011 - DNA, 19 bp, Mus musculus
  siRNA target sequence for Hsbp1 (NM_024219.1,234-252).
cctgaaaacaagattccta

SEQ ID NO: 715012 - DNA, 19 bp, Mus musculus
  siRNA target sequence for 1810004I06Rik (NM_024220.1,128-146).
ggccatgagcccttaaaat

SEQ ID NO: 715013 - DNA, 19 bp, Mus musculus
  siRNA target sequence for 1810004I06Rik (NM_024220.1,129-147).
gccatgagcccttaaaatt

SEQ ID NO: 715014 - DNA, 19 bp, Mus musculus
  siRNA target sequence for 1810004I06Rik (NM_024220.1,432-450).
cctatgctgaaattcttga

SEQ ID NO: 715015 - DNA, 19 bp, Mus musculus
  siRNA target sequence for 1110030K22Rik (NM_024230.1,307-325).
gattgggcagaacatttgt

SEQ ID NO: 715016 - DNA, 19 bp, Mus musculus
  siRNA target sequence for 1110030K22Rik (NM_024230.1,311-329).
gggcagaacatttgtgtaa

SEQ ID NO: 715017 - DNA, 19 bp, Mus musculus
  siRNA target sequence for 1110030K22Rik (NM_024230.1,312-330).
ggcagaacatttgtgtaaa

SEQ ID NO: 715018 - DNA, 19 bp, Mus musculus
  siRNA target sequence for 1110030K22Rik (NM_024230.1,363-381).
cccaggggaagcaagtata

SEQ ID NO: 715019 - DNA, 19 bp, Mus musculus
  siRNA target sequence for 1110030K22Rik (NM_024230.1,364-382).
ccaggggaagcaagtatat

SEQ ID NO: 715020 - DNA, 19 bp, Mus musculus
  siRNA target sequence for 1110030K22Rik (NM_024230.1,523-541).
cctgaacccaatgaagtta

SEQ ID NO: 715021 - DNA, 19 bp, Mus musculus
  siRNA target sequence for 1110030K22Rik (NM_024230.1,595-613).
gagaccaatctagaatcta

SEQ ID NO: 715022 - DNA, 19 bp, Mus musculus
  siRNA target sequence for 1110030K22Rik (NM_024230.1,665-683).
ctggagcagaggttactgt

SEQ ID NO: 715023 - DNA, 19 bp, Mus musculus
  siRNA target sequence for 1110030K22Rik (NM_024230.1,828-846).
gggtaaggaaaatgaatca

SEQ ID NO: 715024 - DNA, 19 bp, Mus musculus
  siRNA target sequence for 1110030K22Rik (NM_024230.1,1014-1032).
gcctcaaccctcagagaaa

SEQ ID NO: 715025 - DNA, 19 bp, Mus musculus
  siRNA target sequence for 1110030K22Rik (NM_024230.1,1016-1034).
ctcaaccctcagagaaaaa

SEQ ID NO: 715026 - DNA, 19 bp, Mus musculus
  siRNA target sequence for 1110030K22Rik (NM_024230.1,1107-1125).
ggccatcatggacaaattt

SEQ ID NO: 715027 - DNA, 19 bp, Mus musculus
  siRNA target sequence for 1110030K22Rik (NM_024230.1,1301-1319).
ccctcatccacaagttttt

SEQ ID NO: 715028 - DNA, 19 bp, Mus musculus
  siRNA target sequence for 1110030K22Rik (NM_024230.1,1386-1404).
ctcgactgcagagaaacta

SEQ ID NO: 715029 - DNA, 19 bp, Mus musculus
  siRNA target sequence for Zfpl1 (NM_024231.1,83-101).
gcttcgaacaccgagttaa

SEQ ID NO: 715030 - DNA, 19 bp, Mus musculus
  siRNA target sequence for Zfpl1 (NM_024231.1,156-174).
cttgcagtggctacaagat

SEQ ID NO: 715031 - DNA, 19 bp, Mus musculus
  siRNA target sequence for Zfpl1 (NM_024231.1,159-177).
gcagtggctacaagatagt

SEQ ID NO: 715032 - DNA, 19 bp, Mus musculus
  siRNA target sequence for Zfpl1 (NM_024231.1,225-243).
ggagaccacccgtcttgtt

SEQ ID NO: 715033 - DNA, 19 bp, Mus musculus
  siRNA target sequence for Zfpl1 (NM_024231.1,226-244).
gagaccacccgtcttgttt

SEQ ID NO: 715034 - DNA, 19 bp, Mus musculus
  siRNA target sequence for Zfpl1 (NM_024231.1,230-248).
ccacccgtcttgtttgcta

SEQ ID NO: 715035 - DNA, 19 bp, Mus musculus
  siRNA target sequence for Zfpl1 (NM_024231.1,231-249).
cacccgtcttgtttgctat

SEQ ID NO: 715036 - DNA, 19 bp, Mus musculus
  siRNA target sequence for Zfpl1 (NM_024231.1,288-306).
ccagctaccacgaaacaca

SEQ ID NO: 715037 - DNA, 19 bp, Mus musculus
  siRNA target sequence for Zfpl1 (NM_024231.1,442-460).
ctgatcgatgaggtgataa

SEQ ID NO: 715038 - DNA, 19 bp, Mus musculus
  siRNA target sequence for Zfpl1 (NM_024231.1,466-484).
gagcccgagcccctcaatt

SEQ ID NO: 715039 - DNA, 19 bp, Mus musculus
  siRNA target sequence for Zfpl1 (NM_024231.1,469-487).
cccgagcccctcaattcct

SEQ ID NO: 715040 - DNA, 19 bp, Mus musculus
  siRNA target sequence for Zfpl1 (NM_024231.1,497-515).
ctgattggtccagctttaa

SEQ ID NO: 715041 - DNA, 19 bp, Mus musculus
  siRNA target sequence for Zfpl1 (NM_024231.1,661-679).
cacgccccaaggaaagtat

SEQ ID NO: 715042 - DNA, 19 bp, Mus musculus
  siRNA target sequence for Zfpl1 (NM_024231.1,663-681).
cgccccaaggaaagtatat

SEQ ID NO: 715043 - DNA, 19 bp, Mus musculus
  siRNA target sequence for Zfpl1 (NM_024231.1,667-685).
ccaaggaaagtatatgaca

SEQ ID NO: 715044 - DNA, 19 bp, Mus musculus
  siRNA target sequence for 2810037C03Rik (NM_024240.3,308-326).
gcaggcctggatgaatgaa

SEQ ID NO: 715045 - DNA, 19 bp, Mus musculus
  siRNA target sequence for 2810037C03Rik (NM_024240.3,309-327).
caggcctggatgaatgaaa

SEQ ID NO: 715046 - DNA, 19 bp, Mus musculus
  siRNA target sequence for 2810037C03Rik (NM_024240.3,496-514).
ggtgtcgactcatgaagat

SEQ ID NO: 715047 - DNA, 19 bp, Mus musculus
  siRNA target sequence for 2810037C03Rik (NM_024240.3,497-515).
gtgtcgactcatgaagata

SEQ ID NO: 715048 - DNA, 19 bp, Mus musculus
  siRNA target sequence for 2810037C03Rik (NM_024240.3,499-517).
gtcgactcatgaagataga

SEQ ID NO: 715049 - DNA, 19 bp, Mus musculus
  siRNA target sequence for 2810037C03Rik (NM_024240.3,702-720).
cccaaaccagacctagatt

SEQ ID NO: 715050 - DNA, 19 bp, Mus musculus
  siRNA target sequence for 2810037C03Rik (NM_024240.3,704-722).
caaaccagacctagattca

SEQ ID NO: 715051 - DNA, 19 bp, Mus musculus
  siRNA target sequence for 2810037C03Rik (NM_024240.3,725-743).
cgtgtttctgcgagtgaaa

SEQ ID NO: 715052 - DNA, 19 bp, Mus musculus
  siRNA target sequence for 2810037C03Rik (NM_024240.3,824-842).
gcacttgatccgatacaaa

SEQ ID NO: 715053 - DNA, 19 bp, Mus musculus
  siRNA target sequence for 2810037C03Rik (NM_024240.3,825-843).
cacttgatccgatacaaaa

SEQ ID NO: 715054 - DNA, 19 bp, Mus musculus
  siRNA target sequence for 2810037C03Rik (NM_024240.3,867-885).
ggagcagttcagctaatat

SEQ ID NO: 715055 - DNA, 19 bp, Mus musculus
  siRNA target sequence for 1200015N20Rik (NM_024244.3,577-595).
gcaggacttacatgagaat

SEQ ID NO: 715056 - DNA, 19 bp, Mus musculus
  siRNA target sequence for 1200015N20Rik (NM_024244.3,629-647).
ctgtgctccgcgtttctga

SEQ ID NO: 715057 - DNA, 19 bp, Mus musculus
  siRNA target sequence for 1200015N20Rik (NM_024244.3,666-684).
gccaggtgcacggagttaa

SEQ ID NO: 715058 - DNA, 19 bp, Mus musculus
  siRNA target sequence for 1200015N20Rik (NM_024244.3,744-762).
ccatgccagctcataagga

SEQ ID NO: 715059 - DNA, 19 bp, Mus musculus
  siRNA target sequence for 1200015N20Rik (NM_024244.3,745-763).
catgccagctcataaggat

SEQ ID NO: 715060 - DNA, 19 bp, Mus musculus
  siRNA target sequence for 1200015N20Rik (NM_024244.3,810-828).
ggaccagcaggctactcta

SEQ ID NO: 715061 - DNA, 19 bp, Mus musculus
  siRNA target sequence for 1200015N20Rik (NM_024244.3,811-829).
gaccagcaggctactctat

SEQ ID NO: 715062 - DNA, 19 bp, Mus musculus
  siRNA target sequence for 1200015N20Rik (NM_024244.3,813-831).
ccagcaggctactctatca

SEQ ID NO: 715063 - DNA, 19 bp, Mus musculus
  siRNA target sequence for 1200015N20Rik (NM_024244.3,832-850).
catcaccgatggtgacaat

SEQ ID NO: 715064 - DNA, 19 bp, Mus musculus
  siRNA target sequence for 1200015N20Rik (NM_024244.3,991-1009).
ggagccgcagaccattaca

SEQ ID NO: 715065 - DNA, 19 bp, Mus musculus
  siRNA target sequence for 1200015N20Rik (NM_024244.3,1013-1031).
ctcaccaagcacatccaaa

SEQ ID NO: 715066 - DNA, 19 bp, Mus musculus
  siRNA target sequence for 1200015N20Rik (NM_024244.3,1039-1057).
gaggaagattcgcaagttt

SEQ ID NO: 715067 - DNA, 19 bp, Mus musculus
  siRNA target sequence for 1200015N20Rik (NM_024244.3,1041-1059).
ggaagattcgcaagtttga

SEQ ID NO: 715068 - DNA, 19 bp, Mus musculus
  siRNA target sequence for 1200015N20Rik (NM_024244.3,1042-1060).
gaagattcgcaagtttgaa

SEQ ID NO: 715069 - DNA, 19 bp, Mus musculus
  siRNA target sequence for 1200015N20Rik (NM_024244.3,1110-1128).
cttcaaatcccgaagttct

SEQ ID NO: 715070 - DNA, 19 bp, Mus musculus
  siRNA target sequence for 1200015N20Rik (NM_024244.3,1377-1395).
gaactaagcaagacaagaa

SEQ ID NO: 715071 - DNA, 19 bp, Mus musculus
  siRNA target sequence for 1200015N20Rik (NM_024244.3,1422-1440).
gcagaggtatcaagcaaat

SEQ ID NO: 715072 - DNA, 19 bp, Mus musculus
  siRNA target sequence for 1200015N20Rik (NM_024244.3,1425-1443).
gaggtatcaagcaaatctt

SEQ ID NO: 715073 - DNA, 19 bp, Mus musculus
  siRNA target sequence for 1200015N20Rik (NM_024244.3,1455-1473).
cccttatcccaacaattca

SEQ ID NO: 715074 - DNA, 19 bp, Mus musculus
  siRNA target sequence for 1200015N20Rik (NM_024244.3,1556-1574).
ggtgatcacctcatctact

SEQ ID NO: 715075 - DNA, 19 bp, Mus musculus
  siRNA target sequence for 1200015N20Rik (NM_024244.3,1594-1612).
gaccctgctaccagatgaa

SEQ ID NO: 715076 - DNA, 19 bp, Mus musculus
  siRNA target sequence for 1200015N20Rik (NM_024244.3,1681-1699).
cgaccatctccgagaaact

SEQ ID NO: 715077 - DNA, 19 bp, Mus musculus
  siRNA target sequence for 1200015N20Rik (NM_024244.3,1682-1700).
gaccatctccgagaaacta

SEQ ID NO: 715078 - DNA, 19 bp, Mus musculus
  siRNA target sequence for 1200015N20Rik (NM_024244.3,1729-1747).
cctgcgagaatttgaagaa

SEQ ID NO: 715079 - DNA, 19 bp, Mus musculus
  siRNA target sequence for 1200015N20Rik (NM_024244.3,1733-1751).
cgagaatttgaagaacaat

SEQ ID NO: 715080 - DNA, 19 bp, Mus musculus
  siRNA target sequence for 1200015N20Rik (NM_024244.3,1802-1820).
gcagatgagtactgtgaat

SEQ ID NO: 715081 - DNA, 19 bp, Mus musculus
  siRNA target sequence for 2310042N02Rik (NM_024246.3,158-176).
gcccaccgcaggctttagt

SEQ ID NO: 715082 - DNA, 19 bp, Mus musculus
  siRNA target sequence for 2310042N02Rik (NM_024246.3,242-260).
cagtagggtctcctatagt

SEQ ID NO: 715083 - DNA, 19 bp, Mus musculus
  siRNA target sequence for 2310042N02Rik (NM_024246.3,284-302).
cagacagcacaataagtga

SEQ ID NO: 715084 - DNA, 19 bp, Mus musculus
  siRNA target sequence for 2310042N02Rik (NM_024246.3,363-381).
gggctggcgagatattgaa

SEQ ID NO: 715085 - DNA, 19 bp, Mus musculus
  siRNA target sequence for 2310042N02Rik (NM_024246.3,416-434).
cggaggagccattcaaaga

SEQ ID NO: 715086 - DNA, 19 bp, Mus musculus
  siRNA target sequence for 2310042N02Rik (NM_024246.3,448-466).
ctccccgagaagacagtta

SEQ ID NO: 715087 - DNA, 19 bp, Mus musculus
  siRNA target sequence for 2310042N02Rik (NM_024246.3,468-486).
ggccttcgtgcccattgat

SEQ ID NO: 715088 - DNA, 19 bp, Mus musculus
  siRNA target sequence for 2310042N02Rik (NM_024246.3,544-562).
ccaggcgagctcaggaatt

SEQ ID NO: 715089 - DNA, 19 bp, Mus musculus
  siRNA target sequence for 2310042N02Rik (NM_024246.3,545-563).
caggcgagctcaggaattt

SEQ ID NO: 715090 - DNA, 19 bp, Mus musculus
  siRNA target sequence for 2310042N02Rik (NM_024246.3,548-566).
gcgagctcaggaatttcct

SEQ ID NO: 715091 - DNA, 19 bp, Mus musculus
  siRNA target sequence for 2310042N02Rik (NM_024246.3,1048-1066).
gccatatctcggctgatat

SEQ ID NO: 715092 - DNA, 19 bp, Mus musculus
  siRNA target sequence for 2310042N02Rik (NM_024246.3,1049-1067).
ccatatctcggctgatata

SEQ ID NO: 715093 - DNA, 19 bp, Mus musculus
  siRNA target sequence for 2310042N02Rik (NM_024246.3,1144-1162).
ctggtgtggaacctctatt

SEQ ID NO: 715094 - DNA, 19 bp, Mus musculus
  siRNA target sequence for 2310042N02Rik (NM_024246.3,1147-1165).
gtgtggaacctctattaca

SEQ ID NO: 715095 - DNA, 19 bp, Mus musculus
  siRNA target sequence for 2310042N02Rik (NM_024246.3,1225-1243).
gaccatgctcggtctgttt

SEQ ID NO: 715096 - DNA, 19 bp, Mus musculus
  siRNA target sequence for 2010301N04Rik (NM_024251.2,145-163).
ggaggtggctacgagataa

SEQ ID NO: 715097 - DNA, 19 bp, Mus musculus
  siRNA target sequence for 2010301N04Rik (NM_024251.2,149-167).
gtggctacgagataacaga

SEQ ID NO: 715098 - DNA, 19 bp, Mus musculus
  siRNA target sequence for 2010301N04Rik (NM_024251.2,182-200).
gaagacatgccattcttga

SEQ ID NO: 715099 - DNA, 19 bp, Mus musculus
  siRNA target sequence for 2010301N04Rik (NM_024251.2,220-238).
cgaatcaagccaatccata

SEQ ID NO: 715100 - DNA, 19 bp, Mus musculus
  siRNA target sequence for 2010301N04Rik (NM_024251.2,225-243).
caagccaatccataggaat

SEQ ID NO: 715101 - DNA, 19 bp, Mus musculus
  siRNA target sequence for 2010301N04Rik (NM_024251.2,332-350).
ccctgttacttgacaagta

SEQ ID NO: 715102 - DNA, 19 bp, Mus musculus
  siRNA target sequence for 2010301N04Rik (NM_024251.2,351-369).
cgctttccgtgttttctct

SEQ ID NO: 715103 - DNA, 19 bp, Mus musculus
  siRNA target sequence for 2010301N04Rik (NM_024251.2,453-471).
gtcccctgtggttaactta

SEQ ID NO: 715104 - DNA, 19 bp, Mus musculus
  siRNA target sequence for 2010301N04Rik (NM_024251.2,463-481).
gttaacttacctgataaga

SEQ ID NO: 715105 - DNA, 19 bp, Mus musculus
  siRNA target sequence for 2010301N04Rik (NM_024251.2,533-551).
gtcccaccatagatcctat

SEQ ID NO: 715106 - DNA, 19 bp, Mus musculus
  siRNA target sequence for 2010301N04Rik (NM_024251.2,598-616).
cctacccagaggaaaagaa

SEQ ID NO: 715107 - DNA, 19 bp, Mus musculus
  siRNA target sequence for 2010301N04Rik (NM_024251.2,630-648).
gatgttggcggaaagtcta

SEQ ID NO: 715108 - DNA, 19 bp, Mus musculus
  siRNA target sequence for 2010301N04Rik (NM_024251.2,633-651).
gttggcggaaagtctaagt

SEQ ID NO: 715109 - DNA, 19 bp, Mus musculus
  siRNA target sequence for 2010301N04Rik (NM_024251.2,671-689).
cagctgaggggggagataa

SEQ ID NO: 715110 - DNA, 19 bp, Mus musculus
  siRNA target sequence for 2010301N04Rik (NM_024251.2,680-698).
ggggagataaggatgtcat

SEQ ID NO: 715111 - DNA, 19 bp, Mus musculus
  siRNA target sequence for 2010301N04Rik (NM_024251.2,771-789).
gcttagtccatcaggaaat

SEQ ID NO: 715112 - DNA, 19 bp, Mus musculus
  siRNA target sequence for 2010301N04Rik (NM_024251.2,847-865).
gaaggaccgggtgtttctt

SEQ ID NO: 715113 - DNA, 19 bp, Mus musculus
  siRNA target sequence for 2010301N04Rik (NM_024251.2,874-892).
gttccagaatcatcatctt

SEQ ID NO: 715114 - DNA, 19 bp, Mus musculus
  siRNA target sequence for 2010301N04Rik (NM_024251.2,916-934).
gtggatattgtgaagacaa

SEQ ID NO: 715115 - DNA, 19 bp, Mus musculus
  siRNA target sequence for 2010301N04Rik (NM_024251.2,940-958).
cagaaggacgggattttaa

SEQ ID NO: 715116 - DNA, 19 bp, Mus musculus
  siRNA target sequence for 2010301N04Rik (NM_024251.2,971-989).
gtgaggtctctaaacataa

SEQ ID NO: 715117 - DNA, 19 bp, Mus musculus
  siRNA target sequence for 2010301N04Rik (NM_024251.2,1031-1049).
gtgcacgtgtccaaagcaa

SEQ ID NO: 715118 - DNA, 19 bp, Mus musculus
  siRNA target sequence for 2010301N04Rik (NM_024251.2,1173-1191).
gaggacggcctgcatgtat

SEQ ID NO: 715119 - DNA, 19 bp, Mus musculus
  siRNA target sequence for 2010301N04Rik (NM_024251.2,1211-1229).
ggaaccccctccactttca

SEQ ID NO: 715120 - DNA, 19 bp, Mus musculus
  siRNA target sequence for 2010301N04Rik (NM_024251.2,1212-1230).
gaaccccctccactttcaa

SEQ ID NO: 715121 - DNA, 19 bp, Mus musculus
  siRNA target sequence for 2010301N04Rik (NM_024251.2,1312-1330).
ccctatggagcgtcttgtt

SEQ ID NO: 715122 - DNA, 19 bp, Mus musculus
  siRNA target sequence for 2010301N04Rik (NM_024251.2,1313-1331).
cctatggagcgtcttgtta

SEQ ID NO: 715123 - DNA, 19 bp, Mus musculus
  siRNA target sequence for 2010301N04Rik (NM_024251.2,1343-1361).
cccagcacaagatggaata

SEQ ID NO: 715124 - DNA, 19 bp, Mus musculus
  siRNA target sequence for 2010301N04Rik (NM_024251.2,1344-1362).
ccagcacaagatggaatat

SEQ ID NO: 715125 - DNA, 19 bp, Mus musculus
  siRNA target sequence for 2010301N04Rik (NM_024251.2,1449-1467).
ctatgagccgacagatgaa

SEQ ID NO: 715126 - DNA, 19 bp, Mus musculus
  siRNA target sequence for 2010301N04Rik (NM_024251.2,1510-1528).
gatgtggatgagcttttga

SEQ ID NO: 715127 - DNA, 19 bp, Mus musculus
  siRNA target sequence for 2410042D21Rik (NM_024254.2,171-189).
gatactcaccatgttaaaa

SEQ ID NO: 715128 - DNA, 19 bp, Mus musculus
  siRNA target sequence for 2410042D21Rik (NM_024254.2,183-201).
gttaaaaaacggaacttct

SEQ ID NO: 715129 - DNA, 19 bp, Mus musculus
  siRNA target sequence for 2410042D21Rik (NM_024254.2,192-210).
cggaacttctctaatagta

SEQ ID NO: 715130 - DNA, 19 bp, Mus musculus
  siRNA target sequence for 2410042D21Rik (NM_024254.2,193-211).
ggaacttctctaatagtat

SEQ ID NO: 715131 - DNA, 19 bp, Mus musculus
  siRNA target sequence for 2410042D21Rik (NM_024254.2,208-226).
gtattgatcttcctagaaa

SEQ ID NO: 715132 - DNA, 19 bp, Mus musculus
  siRNA target sequence for 2410042D21Rik (NM_024254.2,223-241).
gaaagaggatctctaactt

SEQ ID NO: 715133 - DNA, 19 bp, Mus musculus
  siRNA target sequence for 2410042D21Rik (NM_024254.2,282-300).
cagttggctgcttacataa

SEQ ID NO: 715134 - DNA, 19 bp, Mus musculus
  siRNA target sequence for 2410042D21Rik (NM_024254.2,287-305).
ggctgcttacataagtaga

SEQ ID NO: 715135 - DNA, 19 bp, Mus musculus
  siRNA target sequence for 2410042D21Rik (NM_024254.2,288-306).
gctgcttacataagtagaa

SEQ ID NO: 715136 - DNA, 19 bp, Mus musculus
  siRNA target sequence for 2410042D21Rik (NM_024254.2,353-371).
ctaccacagaaagttagtt

SEQ ID NO: 715137 - DNA, 19 bp, Mus musculus
  siRNA target sequence for 2410042D21Rik (NM_024254.2,375-393).
cgttccttcccaaatcctt

SEQ ID NO: 715138 - DNA, 19 bp, Mus musculus
  siRNA target sequence for 2410042D21Rik (NM_024254.2,497-515).
cagtcggacatttgtcatt

SEQ ID NO: 715139 - DNA, 19 bp, Mus musculus
  siRNA target sequence for 2410042D21Rik (NM_024254.2,499-517).
gtcggacatttgtcattaa

SEQ ID NO: 715140 - DNA, 19 bp, Mus musculus
  siRNA target sequence for 2410042D21Rik (NM_024254.2,501-519).
cggacatttgtcattaata

SEQ ID NO: 715141 - DNA, 19 bp, Mus musculus
  siRNA target sequence for 2410042D21Rik (NM_024254.2,510-528).
gtcattaataccagtgatt

SEQ ID NO: 715142 - DNA, 19 bp, Mus musculus
  siRNA target sequence for 2410042D21Rik (NM_024254.2,551-569).
cccatcatcaaaatatagt

SEQ ID NO: 715143 - DNA, 19 bp, Mus musculus
  siRNA target sequence for 2410042D21Rik (NM_024254.2,604-622).
caatggcccaggttctatt

SEQ ID NO: 715144 - DNA, 19 bp, Mus musculus
  siRNA target sequence for 2410042D21Rik (NM_024254.2,615-633).
gttctattcagcaggaatt

SEQ ID NO: 715145 - DNA, 19 bp, Mus musculus
  siRNA target sequence for 2410042D21Rik (NM_024254.2,618-636).
ctattcagcaggaatttga

SEQ ID NO: 715146 - DNA, 19 bp, Mus musculus
  siRNA target sequence for 2410042D21Rik (NM_024254.2,626-644).
caggaatttgagattgaat

SEQ ID NO: 715147 - DNA, 19 bp, Mus musculus
  siRNA target sequence for 2410042D21Rik (NM_024254.2,628-646).
ggaatttgagattgaatgt

SEQ ID NO: 715148 - DNA, 19 bp, Mus musculus
  siRNA target sequence for 2410042D21Rik (NM_024254.2,670-688).
gaagtataagtgaacttgt

SEQ ID NO: 715149 - DNA, 19 bp, Mus musculus
  siRNA target sequence for 2410042D21Rik (NM_024254.2,729-747).
gattgccttcctgttctaa

SEQ ID NO: 715150 - DNA, 19 bp, Mus musculus
  siRNA target sequence for 2410042D21Rik (NM_024254.2,734-752).
ccttcctgttctaaccaat

SEQ ID NO: 715151 - DNA, 19 bp, Mus musculus
  siRNA target sequence for 2410042D21Rik (NM_024254.2,738-756).
cctgttctaaccaatagtt

SEQ ID NO: 715152 - DNA, 19 bp, Mus musculus
  siRNA target sequence for 2410042D21Rik (NM_024254.2,812-830).
ggtaaagtctttacttcaa

SEQ ID NO: 715153 - DNA, 19 bp, Mus musculus
  siRNA target sequence for 2410042D21Rik (NM_024254.2,866-884).
ctggcttcaagcagtaata

SEQ ID NO: 715154 - DNA, 19 bp, Mus musculus
  siRNA target sequence for 2410042D21Rik (NM_024254.2,913-931).
cgtcagaaattataagtga

SEQ ID NO: 715155 - DNA, 19 bp, Mus musculus
  siRNA target sequence for 2410042D21Rik (NM_024254.2,928-946).
gtgatggaaatattaagat

SEQ ID NO: 715156 - DNA, 19 bp, Mus musculus
  siRNA target sequence for 1700034M03Rik (NM_024260.2,134-152).
ctccggagagcctcaatga

SEQ ID NO: 715157 - DNA, 19 bp, Mus musculus
  siRNA target sequence for 1700034M03Rik (NM_024260.2,137-155).
cggagagcctcaatgatct

SEQ ID NO: 715158 - DNA, 19 bp, Mus musculus
  siRNA target sequence for 1700034M03Rik (NM_024260.2,138-156).
ggagagcctcaatgatctt

SEQ ID NO: 715159 - DNA, 19 bp, Mus musculus
  siRNA target sequence for 1700034M03Rik (NM_024260.2,232-250).
gctgagcaagagttgatta

SEQ ID NO: 715160 - DNA, 19 bp, Mus musculus
  siRNA target sequence for 1700034M03Rik (NM_024260.2,235-253).
gagcaagagttgattaata

SEQ ID NO: 715161 - DNA, 19 bp, Mus musculus
  siRNA target sequence for 1700034M03Rik (NM_024260.2,238-256).
caagagttgattaatagca

SEQ ID NO: 715162 - DNA, 19 bp, Mus musculus
  siRNA target sequence for 1700034M03Rik (NM_024260.2,246-264).
gattaatagcattgaacaa

SEQ ID NO: 715163 - DNA, 19 bp, Mus musculus
  siRNA target sequence for 1700034M03Rik (NM_024260.2,275-293).
ctgcggatccatttgatat

SEQ ID NO: 715164 - DNA, 19 bp, Mus musculus
  siRNA target sequence for 1700034M03Rik (NM_024260.2,280-298).
gatccatttgatattgtta

SEQ ID NO: 715165 - DNA, 19 bp, Mus musculus
  siRNA target sequence for 1700034M03Rik (NM_024260.2,376-394).
caatctgcagtctctaaaa

SEQ ID NO: 715166 - DNA, 19 bp, Mus musculus
  siRNA target sequence for 1700034M03Rik (NM_024260.2,423-441).
gcctgcttatgtaaaggaa

SEQ ID NO: 715167 - DNA, 19 bp, Mus musculus
  siRNA target sequence for 1700034M03Rik (NM_024260.2,507-525).
gaggcacttgaatattgca

SEQ ID NO: 715168 - DNA, 19 bp, Mus musculus
  siRNA target sequence for 1700034M03Rik (NM_024260.2,509-527).
ggcacttgaatattgcaaa

SEQ ID NO: 715169 - DNA, 19 bp, Mus musculus
  siRNA target sequence for 1700034M03Rik (NM_024260.2,524-542).
caaaggaaggttttactca

SEQ ID NO: 715170 - DNA, 19 bp, Mus musculus
  siRNA target sequence for 1700034M03Rik (NM_024260.2,573-591).
gaagcgtcagttgctaatt

SEQ ID NO: 715171 - DNA, 19 bp, Mus musculus
  siRNA target sequence for 1700034M03Rik (NM_024260.2,576-594).
gcgtcagttgctaattgga

SEQ ID NO: 715172 - DNA, 19 bp, Mus musculus
  siRNA target sequence for 1700034M03Rik (NM_024260.2,600-618).
gaagtcgctgagaaccata

SEQ ID NO: 715173 - DNA, 19 bp, Mus musculus
  siRNA target sequence for 1700034M03Rik (NM_024260.2,716-734).
ccagcacttttaaacacta

SEQ ID NO: 715174 - DNA, 19 bp, Mus musculus
  siRNA target sequence for 1700034M03Rik (NM_024260.2,825-843).
gaattttgacattaaccat

SEQ ID NO: 715175 - DNA, 19 bp, Mus musculus
  siRNA target sequence for 1700034M03Rik (NM_024260.2,892-910).
gcgatggatcagcttcata

SEQ ID NO: 715176 - DNA, 19 bp, Mus musculus
  siRNA target sequence for 1700034M03Rik (NM_024260.2,893-911).
cgatggatcagcttcatat

SEQ ID NO: 715177 - DNA, 19 bp, Mus musculus
  siRNA target sequence for 1700034M03Rik (NM_024260.2,927-945).
cattcacaacaccgtattt

SEQ ID NO: 715178 - DNA, 19 bp, Mus musculus
  siRNA target sequence for 1700034M03Rik (NM_024260.2,979-997).
ggaaacacggatacaaaat

SEQ ID NO: 715179 - DNA, 19 bp, Mus musculus
  siRNA target sequence for 1700034M03Rik (NM_024260.2,980-998).
gaaacacggatacaaaatt

SEQ ID NO: 715180 - DNA, 19 bp, Mus musculus
  siRNA target sequence for 1700034M03Rik (NM_024260.2,1002-1020).
gaagcttcagtataaagat

SEQ ID NO: 715181 - DNA, 19 bp, Mus musculus
  siRNA target sequence for 1700034M03Rik (NM_024260.2,1033-1051).
gtgacaccagacagctata

SEQ ID NO: 715182 - DNA, 19 bp, Mus musculus
  siRNA target sequence for 1700034M03Rik (NM_024260.2,1035-1053).
gacaccagacagctatatt

SEQ ID NO: 715183 - DNA, 19 bp, Mus musculus
  siRNA target sequence for 1700034M03Rik (NM_024260.2,1184-1202).
ctgaggaggccacttttga

SEQ ID NO: 715184 - DNA, 19 bp, Mus musculus
  siRNA target sequence for 1700034M03Rik (NM_024260.2,1209-1227).
ctatgtaaagaagaagtta

SEQ ID NO: 715185 - DNA, 19 bp, Mus musculus
  siRNA target sequence for 1700034M03Rik (NM_024260.2,1245-1263).
gatatggcaggatgttcaa

SEQ ID NO: 715186 - DNA, 19 bp, Mus musculus
  siRNA target sequence for 1700034M03Rik (NM_024260.2,1250-1268).
ggcaggatgttcaactaaa

SEQ ID NO: 715187 - DNA, 19 bp, Mus musculus
  siRNA target sequence for 1700034M03Rik (NM_024260.2,1254-1272).
ggatgttcaactaaaagta

SEQ ID NO: 715188 - DNA, 19 bp, Mus musculus
  siRNA target sequence for 1700034M03Rik (NM_024260.2,1255-1273).
gatgttcaactaaaagtaa

SEQ ID NO: 715189 - DNA, 19 bp, Mus musculus
  siRNA target sequence for 1700034M03Rik (NM_024260.2,1284-1302).
gcttggaactgatttatct

SEQ ID NO: 715190 - DNA, 19 bp, Mus musculus
  siRNA target sequence for 1700034M03Rik (NM_024260.2,1288-1306).
ggaactgatttatctatat

SEQ ID NO: 715191 - DNA, 19 bp, Mus musculus
  siRNA target sequence for 1700034M03Rik (NM_024260.2,1378-1396).
ggtagcaagtctgaagttt

SEQ ID NO: 715192 - DNA, 19 bp, Mus musculus
  siRNA target sequence for 1700034M03Rik (NM_024260.2,1382-1400).
gcaagtctgaagttttgca

SEQ ID NO: 715193 - DNA, 19 bp, Mus musculus
  siRNA target sequence for 1700034M03Rik (NM_024260.2,1393-1411).
gttttgcaggagtccatta

SEQ ID NO: 715194 - DNA, 19 bp, Mus musculus
  siRNA target sequence for 1700034M03Rik (NM_024260.2,1443-1461).
ccataggatacgacttgat

SEQ ID NO: 715195 - DNA, 19 bp, Mus musculus
  siRNA target sequence for 1700034M03Rik (NM_024260.2,1448-1466).
ggatacgacttgatgaact

SEQ ID NO: 715196 - DNA, 19 bp, Mus musculus
  siRNA target sequence for 1700034M03Rik (NM_024260.2,1497-1515).
gctttgccctgttaagtca

SEQ ID NO: 715197 - DNA, 19 bp, Mus musculus
  siRNA target sequence for 1700034M03Rik (NM_024260.2,1502-1520).
gccctgttaagtcaaattt

SEQ ID NO: 715198 - DNA, 19 bp, Mus musculus
  siRNA target sequence for 1700034M03Rik (NM_024260.2,1645-1663).
ggtgggaatccatttgaaa

SEQ ID NO: 715199 - DNA, 19 bp, Mus musculus
  siRNA target sequence for 1700034M03Rik (NM_024260.2,1646-1664).
gtgggaatccatttgaaat

SEQ ID NO: 715200 - DNA, 19 bp, Mus musculus
  siRNA target sequence for 1700034M03Rik (NM_024260.2,1670-1688).
ccgaccacaaagatgaaga

SEQ ID NO: 715201 - DNA, 19 bp, Mus musculus
  siRNA target sequence for 1700034M03Rik (NM_024260.2,1671-1689).
cgaccacaaagatgaagaa

SEQ ID NO: 715202 - DNA, 19 bp, Mus musculus
  siRNA target sequence for 1700034M03Rik (NM_024260.2,1744-1762).
gcctatcaggactatgaca

SEQ ID NO: 715203 - DNA, 19 bp, Mus musculus
  siRNA target sequence for 1700034M03Rik (NM_024260.2,1863-1881).
gaagaagtcggattacagt

SEQ ID NO: 715204 - DNA, 19 bp, Mus musculus
  siRNA target sequence for 1700034M03Rik (NM_024260.2,1891-1909).
gtgaatgcacccatcttaa

SEQ ID NO: 715205 - DNA, 19 bp, Mus musculus
  siRNA target sequence for 1700034M03Rik (NM_024260.2,1934-1952).
ggcttgttggaaagtacat

SEQ ID NO: 715206 - DNA, 19 bp, Mus musculus
  siRNA target sequence for 1700034M03Rik (NM_024260.2,1981-1999).
gccttcgatgtgatccatt

SEQ ID NO: 715207 - DNA, 19 bp, Mus musculus
  siRNA target sequence for 1700034M03Rik (NM_024260.2,1982-2000).
ccttcgatgtgatccattt

SEQ ID NO: 715208 - DNA, 19 bp, Mus musculus
  siRNA target sequence for 1700034M03Rik (NM_024260.2,1987-2005).
gatgtgatccatttcatgt

SEQ ID NO: 715209 - DNA, 19 bp, Mus musculus
  siRNA target sequence for 1700034M03Rik (NM_024260.2,2011-2029).
ctctttgactattacttgt

SEQ ID NO: 715210 - DNA, 19 bp, Mus musculus
  siRNA target sequence for 1700034M03Rik (NM_024260.2,2034-2052).
catatataccttttttggt

SEQ ID NO: 715211 - DNA, 19 bp, Mus musculus
  siRNA target sequence for 1700034M03Rik (NM_024260.2,2077-2095).
ggacttggccttagtagta

SEQ ID NO: 715212 - DNA, 19 bp, Mus musculus
  siRNA target sequence for 1700034M03Rik (NM_024260.2,2217-2235).
cctcaatcagctagtgatt

SEQ ID NO: 715213 - DNA, 19 bp, Mus musculus
  siRNA target sequence for 1700034M03Rik (NM_024260.2,2218-2236).
ctcaatcagctagtgattt

SEQ ID NO: 715214 - DNA, 19 bp, Mus musculus
  siRNA target sequence for 1700034M03Rik (NM_024260.2,2277-2295).
ggtagccacagaatcctta

SEQ ID NO: 715215 - DNA, 19 bp, Mus musculus
  siRNA target sequence for 1700034M03Rik (NM_024260.2,2281-2299).
gccacagaatccttagtgt

SEQ ID NO: 715216 - DNA, 19 bp, Mus musculus
  siRNA target sequence for 1700034M03Rik (NM_024260.2,2322-2340).
ccttcagccacatttggat

SEQ ID NO: 715217 - DNA, 19 bp, Mus musculus
  siRNA target sequence for 1700034M03Rik (NM_024260.2,2413-2431).
ctgcgcaagcccatttact

SEQ ID NO: 715218 - DNA, 19 bp, Mus musculus
  siRNA target sequence for 1700034M03Rik (NM_024260.2,2433-2451).
gattgtggctggtaaagct

SEQ ID NO: 715219 - DNA, 19 bp, Mus musculus
  siRNA target sequence for 1700034M03Rik (NM_024260.2,2439-2457).
ggctggtaaagctattgat

SEQ ID NO: 715220 - DNA, 19 bp, Mus musculus
  siRNA target sequence for 1700034M03Rik (NM_024260.2,2440-2458).
gctggtaaagctattgatt

SEQ ID NO: 715221 - DNA, 19 bp, Mus musculus
  siRNA target sequence for 1700034M03Rik (NM_024260.2,2444-2462).
gtaaagctattgattatga

SEQ ID NO: 715222 - DNA, 19 bp, Mus musculus
  siRNA target sequence for 1700034M03Rik (NM_024260.2,2469-2487).
gcttctcctaatgatgaat

SEQ ID NO: 715223 - DNA, 19 bp, Mus musculus
  siRNA target sequence for 1700034M03Rik (NM_024260.2,2473-2491).
ctcctaatgatgaatgtga

SEQ ID NO: 715224 - DNA, 19 bp, Mus musculus
  siRNA target sequence for 1700034M03Rik (NM_024260.2,2495-2513).
gggatgtcaaagagatcat

SEQ ID NO: 715225 - DNA, 19 bp, Mus musculus
  siRNA target sequence for 1700034M03Rik (NM_024260.2,2516-2534).
cacagcacaacatctatgt

SEQ ID NO: 715226 - DNA, 19 bp, Mus musculus
  siRNA target sequence for 1700034M03Rik (NM_024260.2,2520-2538).
gcacaacatctatgtagat

SEQ ID NO: 715227 - DNA, 19 bp, Mus musculus
  siRNA target sequence for 1700034M03Rik (NM_024260.2,2571-2589).
gcggttaaatgaagtttct

SEQ ID NO: 715228 - DNA, 19 bp, Mus musculus
  siRNA target sequence for 1700034M03Rik (NM_024260.2,2601-2619).
gatacctctgcctgtatca

SEQ ID NO: 715229 - DNA, 19 bp, Mus musculus
  siRNA target sequence for 1700034M03Rik (NM_024260.2,2630-2648).
gggagcattgtatacgatt

SEQ ID NO: 715230 - DNA, 19 bp, Mus musculus
  siRNA target sequence for 1700034M03Rik (NM_024260.2,2631-2649).
ggagcattgtatacgatta

SEQ ID NO: 715231 - DNA, 19 bp, Mus musculus
  siRNA target sequence for 1700034M03Rik (NM_024260.2,2634-2652).
gcattgtatacgattagct

SEQ ID NO: 715232 - DNA, 19 bp, Mus musculus
  siRNA target sequence for 1700034M03Rik (NM_024260.2,2635-2653).
cattgtatacgattagcta

SEQ ID NO: 715233 - DNA, 19 bp, Mus musculus
  siRNA target sequence for 1700034M03Rik (NM_024260.2,2644-2662).
cgattagctaacagaacta

SEQ ID NO: 715234 - DNA, 19 bp, Mus musculus
  siRNA target sequence for 1700034M03Rik (NM_024260.2,2677-2695).
gccaatgtcaagaaatgca

SEQ ID NO: 715235 - DNA, 19 bp, Mus musculus
  siRNA target sequence for 1700034M03Rik (NM_024260.2,2704-2722).
gggcgtgccttgatgcaat

SEQ ID NO: 715236 - DNA, 19 bp, Mus musculus
  siRNA target sequence for 1700034M03Rik (NM_024260.2,2705-2723).
ggcgtgccttgatgcaatt

SEQ ID NO: 715237 - DNA, 19 bp, Mus musculus
  siRNA target sequence for 1700034M03Rik (NM_024260.2,2745-2763).
gaaactcgaaaaactaact

SEQ ID NO: 715238 - DNA, 19 bp, Mus musculus
  siRNA target sequence for 1700034M03Rik (NM_024260.2,2814-2832).
ctactacctaactgagaat

SEQ ID NO: 715239 - DNA, 19 bp, Mus musculus
  siRNA target sequence for 1700052N19Rik (NM_024261.1,85-103).
gacgaggggtcctttgcat

SEQ ID NO: 715240 - DNA, 19 bp, Mus musculus
  siRNA target sequence for 1700052N19Rik (NM_024261.1,87-105).
cgaggggtcctttgcatat

SEQ ID NO: 715241 - DNA, 19 bp, Mus musculus
  siRNA target sequence for 1700052N19Rik (NM_024261.1,95-113).
cctttgcatatcttacgat

SEQ ID NO: 715242 - DNA, 19 bp, Mus musculus
  siRNA target sequence for 1700052N19Rik (NM_024261.1,135-153).
cttaaccaaggttattgat

SEQ ID NO: 715243 - DNA, 19 bp, Mus musculus
  siRNA target sequence for 1700052N19Rik (NM_024261.1,239-257).
ctaaattacggaatgaact

SEQ ID NO: 715244 - DNA, 19 bp, Mus musculus
  siRNA target sequence for 1700052N19Rik (NM_024261.1,305-323).
cccacatatggaatcaata

SEQ ID NO: 715245 - DNA, 19 bp, Mus musculus
  siRNA target sequence for 1700052N19Rik (NM_024261.1,330-348).
gtatcagcggagcctttta

SEQ ID NO: 715246 - DNA, 19 bp, Mus musculus
  siRNA target sequence for 1700052N19Rik (NM_024261.1,408-426).
catgtatcggagaattcat

SEQ ID NO: 715247 - DNA, 19 bp, Mus musculus
  siRNA target sequence for 1200013A08Rik (NM_024263.3,338-356).
gccgacttgtggatatgta

SEQ ID NO: 715248 - DNA, 19 bp, Mus musculus
  siRNA target sequence for 1200013A08Rik (NM_024263.3,657-675).
gtggactgaccgccattta

SEQ ID NO: 715249 - DNA, 19 bp, Mus musculus
  siRNA target sequence for 1200013A08Rik (NM_024263.3,659-677).
ggactgaccgccatttaga

SEQ ID NO: 715250 - DNA, 19 bp, Mus musculus
  siRNA target sequence for 1200013A08Rik (NM_024263.3,1193-1211).
gcaagacgtcggacaaaaa

SEQ ID NO: 715251 - DNA, 19 bp, Mus musculus
  siRNA target sequence for 1200013A08Rik (NM_024263.3,1296-1314).
catccagctagattacaaa

SEQ ID NO: 715252 - DNA, 19 bp, Mus musculus
  siRNA target sequence for 1200013A08Rik (NM_024263.3,1300-1318).
cagctagattacaaaaaca

SEQ ID NO: 715253 - DNA, 19 bp, Mus musculus
  siRNA target sequence for 1700016D06Rik (NM_024271.1,97-115).
ggagcaatgaccttcttat

SEQ ID NO: 715254 - DNA, 19 bp, Mus musculus
  siRNA target sequence for 1700016D06Rik (NM_024271.1,175-193).
ggttcaagtggtaagcaat

SEQ ID NO: 715255 - DNA, 19 bp, Mus musculus
  siRNA target sequence for 1700016D06Rik (NM_024271.1,184-202).
ggtaagcaatggccaaatt

SEQ ID NO: 715256 - DNA, 19 bp, Mus musculus
  siRNA target sequence for 1700016D06Rik (NM_024271.1,185-203).
gtaagcaatggccaaattt

SEQ ID NO: 715257 - DNA, 19 bp, Mus musculus
  siRNA target sequence for 1700016D06Rik (NM_024271.1,189-207).
gcaatggccaaatttagaa

SEQ ID NO: 715258 - DNA, 19 bp, Mus musculus
  siRNA target sequence for 1700016D06Rik (NM_024271.1,267-285).
gccagggaaagcaccatat

SEQ ID NO: 715259 - DNA, 19 bp, Mus musculus
  siRNA target sequence for 1700016D06Rik (NM_024271.1,273-291).
gaaagcaccatattttgaa

SEQ ID NO: 715260 - DNA, 19 bp, Mus musculus
  siRNA target sequence for 1700016D06Rik (NM_024271.1,295-313).
caaagcccatcaacaactt

SEQ ID NO: 715261 - DNA, 19 bp, Mus musculus
  siRNA target sequence for 1700016D06Rik (NM_024271.1,355-373).
gaacccataccttctaaga

SEQ ID NO: 715262 - DNA, 19 bp, Mus musculus
  siRNA target sequence for 1700016D06Rik (NM_024271.1,359-377).
ccataccttctaagacata

SEQ ID NO: 715263 - DNA, 19 bp, Mus musculus
  siRNA target sequence for 1700016D06Rik (NM_024271.1,360-378).
cataccttctaagacatat

SEQ ID NO: 715264 - DNA, 19 bp, Mus musculus
  siRNA target sequence for 1700016D06Rik (NM_024271.1,364-382).
ccttctaagacatatcaga

SEQ ID NO: 715265 - DNA, 19 bp, Mus musculus
  siRNA target sequence for 1700016D06Rik (NM_024271.1,365-383).
cttctaagacatatcagaa

SEQ ID NO: 715266 - DNA, 19 bp, Mus musculus
  siRNA target sequence for 1700016D06Rik (NM_024271.1,410-428).
ccccttcctttgacgataa

SEQ ID NO: 715267 - DNA, 19 bp, Mus musculus
  siRNA target sequence for 1700016D06Rik (NM_024271.1,486-504).
caagattcgaagagctatt

SEQ ID NO: 715268 - DNA, 19 bp, Mus musculus
  siRNA target sequence for 1700016D06Rik (NM_024271.1,489-507).
gattcgaagagctattgaa

SEQ ID NO: 715269 - DNA, 19 bp, Mus musculus
  siRNA target sequence for 1700016D06Rik (NM_024271.1,493-511).
cgaagagctattgaaacta

SEQ ID NO: 715270 - DNA, 19 bp, Mus musculus
  siRNA target sequence for Map4k5 (NM_024275.1,349-367).
cgtgtacaaggccagaaat

SEQ ID NO: 715271 - DNA, 19 bp, Mus musculus
  siRNA target sequence for Map4k5 (NM_024275.1,355-373).
caaggccagaaatgtacat

SEQ ID NO: 715272 - DNA, 19 bp, Mus musculus
  siRNA target sequence for Map4k5 (NM_024275.1,378-396).
gagaattagctgcagtaaa

SEQ ID NO: 715273 - DNA, 19 bp, Mus musculus
  siRNA target sequence for Map4k5 (NM_024275.1,409-427).
ggagcctggtgatgatttt

SEQ ID NO: 715274 - DNA, 19 bp, Mus musculus
  siRNA target sequence for Map4k5 (NM_024275.1,440-458).
caagagatatttatggtta

SEQ ID NO: 715275 - DNA, 19 bp, Mus musculus
  siRNA target sequence for Map4k5 (NM_024275.1,475-493).
caacatcgtagcctacttt

SEQ ID NO: 715276 - DNA, 19 bp, Mus musculus
  siRNA target sequence for Map4k5 (NM_024275.1,538-556).
ctgcggtggcggatcactt

SEQ ID NO: 715277 - DNA, 19 bp, Mus musculus
  siRNA target sequence for Map4k5 (NM_024275.1,548-566).
ggatcacttcaagatatct

SEQ ID NO: 715278 - DNA, 19 bp, Mus musculus
  siRNA target sequence for Map4k5 (NM_024275.1,549-567).
gatcacttcaagatatcta

SEQ ID NO: 715279 - DNA, 19 bp, Mus musculus
  siRNA target sequence for Map4k5 (NM_024275.1,569-587).
cacgtgactgggccattat

SEQ ID NO: 715280 - DNA, 19 bp, Mus musculus
  siRNA target sequence for Map4k5 (NM_024275.1,574-592).
gactgggccattatctgaa

SEQ ID NO: 715281 - DNA, 19 bp, Mus musculus
  siRNA target sequence for Map4k5 (NM_024275.1,579-597).
ggccattatctgaaatgca

SEQ ID NO: 715282 - DNA, 19 bp, Mus musculus
  siRNA target sequence for Map4k5 (NM_024275.1,629-647).
ggtcttgcctacttgcata

SEQ ID NO: 715283 - DNA, 19 bp, Mus musculus
  siRNA target sequence for Map4k5 (NM_024275.1,653-671).
ggcaaaatgcatagagata

SEQ ID NO: 715284 - DNA, 19 bp, Mus musculus
  siRNA target sequence for Map4k5 (NM_024275.1,677-695).
ggtgcaaatatcttattaa

SEQ ID NO: 715285 - DNA, 19 bp, Mus musculus
  siRNA target sequence for Map4k5 (NM_024275.1,681-699).
caaatatcttattaacaga

SEQ ID NO: 715286 - DNA, 19 bp, Mus musculus
  siRNA target sequence for Map4k5 (NM_024275.1,698-716).
gaccatggtgatgtaaaat

SEQ ID NO: 715287 - DNA, 19 bp, Mus musculus
  siRNA target sequence for Map4k5 (NM_024275.1,700-718).
ccatggtgatgtaaaatta

SEQ ID NO: 715288 - DNA, 19 bp, Mus musculus
  siRNA target sequence for Map4k5 (NM_024275.1,728-746).
ggtgtggctgcaaaaatta

SEQ ID NO: 715289 - DNA, 19 bp, Mus musculus
  siRNA target sequence for Map4k5 (NM_024275.1,925-943).
ggctctcttcttaatgtca

SEQ ID NO: 715290 - DNA, 19 bp, Mus musculus
  siRNA target sequence for Map4k5 (NM_024275.1,967-985).
gctaaaggacaaaactaaa

SEQ ID NO: 715291 - DNA, 19 bp, Mus musculus
  siRNA target sequence for Map4k5 (NM_024275.1,988-1006).
gtcatcgacattccataat

SEQ ID NO: 715292 - DNA, 19 bp, Mus musculus
  siRNA target sequence for Map4k5 (NM_024275.1,990-1008).
catcgacattccataattt

SEQ ID NO: 715293 - DNA, 19 bp, Mus musculus
  siRNA target sequence for Map4k5 (NM_024275.1,993-1011).
cgacattccataattttgt

SEQ ID NO: 715294 - DNA, 19 bp, Mus musculus
  siRNA target sequence for Map4k5 (NM_024275.1,1010-1028).
gtcaaaatagcactaacta

SEQ ID NO: 715295 - DNA, 19 bp, Mus musculus
  siRNA target sequence for Map4k5 (NM_024275.1,1012-1030).
caaaatagcactaactaaa

SEQ ID NO: 715296 - DNA, 19 bp, Mus musculus
  siRNA target sequence for Map4k5 (NM_024275.1,1141-1159).
cattcgtcataccattaga

SEQ ID NO: 715297 - DNA, 19 bp, Mus musculus
  siRNA target sequence for Map4k5 (NM_024275.1,1145-1163).
cgtcataccattagatcaa

SEQ ID NO: 715298 - DNA, 19 bp, Mus musculus
  siRNA target sequence for Map4k5 (NM_024275.1,1148-1166).
cataccattagatcaacaa

SEQ ID NO: 715299 - DNA, 19 bp, Mus musculus
  siRNA target sequence for Map4k5 (NM_024275.1,1183-1201).
ggagcggacagcttcagaa

SEQ ID NO: 715300 - DNA, 19 bp, Mus musculus
  siRNA target sequence for Map4k5 (NM_024275.1,1186-1204).
gcggacagcttcagaaata

SEQ ID NO: 715301 - DNA, 19 bp, Mus musculus
  siRNA target sequence for Map4k5 (NM_024275.1,1197-1215).
cagaaataaactttgacaa

SEQ ID NO: 715302 - DNA, 19 bp, Mus musculus
  siRNA target sequence for Map4k5 (NM_024275.1,1256-1274).
cgggatgaaatgggattat

SEQ ID NO: 715303 - DNA, 19 bp, Mus musculus
  siRNA target sequence for Map4k5 (NM_024275.1,1322-1340).
gcaaatacaggcagatcaa

SEQ ID NO: 715304 - DNA, 19 bp, Mus musculus
  siRNA target sequence for Map4k5 (NM_024275.1,1342-1360).
ctctaagcgtgcaatacca

SEQ ID NO: 715305 - DNA, 19 bp, Mus musculus
  siRNA target sequence for Map4k5 (NM_024275.1,1489-1507).
gagtagcccaagttgtgtt

SEQ ID NO: 715306 - DNA, 19 bp, Mus musculus
  siRNA target sequence for Map4k5 (NM_024275.1,1525-1543).
ctcctctataggaaatggt

SEQ ID NO: 715307 - DNA, 19 bp, Mus musculus
  siRNA target sequence for Map4k5 (NM_024275.1,1622-1640).
cgggacttccccaaaccaa

SEQ ID NO: 715308 - DNA, 19 bp, Mus musculus
  siRNA target sequence for Map4k5 (NM_024275.1,1630-1648).
ccccaaaccaaccatcaat

SEQ ID NO: 715309 - DNA, 19 bp, Mus musculus
  siRNA target sequence for Map4k5 (NM_024275.1,1706-1724).
ggctgccctttgaaaatta

SEQ ID NO: 715310 - DNA, 19 bp, Mus musculus
  siRNA target sequence for Map4k5 (NM_024275.1,1708-1726).
ctgccctttgaaaattaat

SEQ ID NO: 715311 - DNA, 19 bp, Mus musculus
  siRNA target sequence for Map4k5 (NM_024275.1,1711-1729).
ccctttgaaaattaattgt

SEQ ID NO: 715312 - DNA, 19 bp, Mus musculus
  siRNA target sequence for Map4k5 (NM_024275.1,1749-1767).
ctgatacaaaagatcagta

SEQ ID NO: 715313 - DNA, 19 bp, Mus musculus
  siRNA target sequence for Map4k5 (NM_024275.1,1827-1845).
caactatggaacagttatt

SEQ ID NO: 715314 - DNA, 19 bp, Mus musculus
  siRNA target sequence for Map4k5 (NM_024275.1,1840-1858).
gttatttccacggaaatgt

SEQ ID NO: 715315 - DNA, 19 bp, Mus musculus
  siRNA target sequence for Map4k5 (NM_024275.1,1861-1879).
gtggctctacgtcatcaat

SEQ ID NO: 715316 - DNA, 19 bp, Mus musculus
  siRNA target sequence for Map4k5 (NM_024275.1,1863-1881).
ggctctacgtcatcaataa

SEQ ID NO: 715317 - DNA, 19 bp, Mus musculus
  siRNA target sequence for Map4k5 (NM_024275.1,1864-1882).
gctctacgtcatcaataat

SEQ ID NO: 715318 - DNA, 19 bp, Mus musculus
  siRNA target sequence for Map4k5 (NM_024275.1,1867-1885).
ctacgtcatcaataataca

SEQ ID NO: 715319 - DNA, 19 bp, Mus musculus
  siRNA target sequence for Map4k5 (NM_024275.1,2005-2023).
ccgcattctgccaagaaaa

SEQ ID NO: 715320 - DNA, 19 bp, Mus musculus
  siRNA target sequence for Map4k5 (NM_024275.1,2006-2024).
cgcattctgccaagaaaat

SEQ ID NO: 715321 - DNA, 19 bp, Mus musculus
  siRNA target sequence for Map4k5 (NM_024275.1,2008-2026).
cattctgccaagaaaattt

SEQ ID NO: 715322 - DNA, 19 bp, Mus musculus
  siRNA target sequence for Map4k5 (NM_024275.1,2037-2055).
ctaagattcccgatacaaa

SEQ ID NO: 715323 - DNA, 19 bp, Mus musculus
  siRNA target sequence for Map4k5 (NM_024275.1,2173-2191).
gctgataaagcatttcgat

SEQ ID NO: 715324 - DNA, 19 bp, Mus musculus
  siRNA target sequence for Map4k5 (NM_024275.1,2174-2192).
ctgataaagcatttcgatt

SEQ ID NO: 715325 - DNA, 19 bp, Mus musculus
  siRNA target sequence for Map4k5 (NM_024275.1,2201-2219).
ccaagtccactgaatgttt

SEQ ID NO: 715326 - DNA, 19 bp, Mus musculus
  siRNA target sequence for Map4k5 (NM_024275.1,2243-2261).
caggagtaccccatggttt

SEQ ID NO: 715327 - DNA, 19 bp, Mus musculus
  siRNA target sequence for Map4k5 (NM_024275.1,2283-2301).
cggactccagccaagtagt

SEQ ID NO: 715328 - DNA, 19 bp, Mus musculus
  siRNA target sequence for Map4k5 (NM_024275.1,2284-2302).
ggactccagccaagtagtt

SEQ ID NO: 715329 - DNA, 19 bp, Mus musculus
  siRNA target sequence for Map4k5 (NM_024275.1,2292-2310).
gccaagtagttcagtttga

SEQ ID NO: 715330 - DNA, 19 bp, Mus musculus
  siRNA target sequence for Map4k5 (NM_024275.1,2309-2327).
gagacaatcaacttgaatt

SEQ ID NO: 715331 - DNA, 19 bp, Mus musculus
  siRNA target sequence for Map4k5 (NM_024275.1,2338-2356).
ctggtttacagaaattggt

SEQ ID NO: 715332 - DNA, 19 bp, Mus musculus
  siRNA target sequence for Map4k5 (NM_024275.1,2416-2434).
ggtgtgtttagacaaattt

SEQ ID NO: 715333 - DNA, 19 bp, Mus musculus
  siRNA target sequence for Map4k5 (NM_024275.1,2517-2535).
ctgtggtgtgccttcaaga

SEQ ID NO: 715334 - DNA, 19 bp, Mus musculus
  siRNA target sequence for Map4k5 (NM_024275.1,2566-2584).
gcagggtaaaagcttcaaa

SEQ ID NO: 715335 - DNA, 19 bp, Mus musculus
  siRNA target sequence for Map4k5 (NM_024275.1,2567-2585).
cagggtaaaagcttcaaat

SEQ ID NO: 715336 - DNA, 19 bp, Mus musculus
  siRNA target sequence for 1700094C09Rik (NM_024279.1,74-92).
ggatcgaggaccttcttat

SEQ ID NO: 715337 - DNA, 19 bp, Mus musculus
  siRNA target sequence for 1700094C09Rik (NM_024279.1,128-146).
ctgcagccgatcaagacaa

SEQ ID NO: 715338 - DNA, 19 bp, Mus musculus
  siRNA target sequence for 1700094C09Rik (NM_024279.1,142-160).
gacaacttcaggtccaatt

SEQ ID NO: 715339 - DNA, 19 bp, Mus musculus
  siRNA target sequence for 1700094C09Rik (NM_024279.1,193-211).
catacccgaagcattagat

SEQ ID NO: 715340 - DNA, 19 bp, Mus musculus
  siRNA target sequence for 1700094C09Rik (NM_024279.1,198-216).
ccgaagcattagatgaaat

SEQ ID NO: 715341 - DNA, 19 bp, Mus musculus
  siRNA target sequence for 1700094C09Rik (NM_024279.1,199-217).
cgaagcattagatgaaatt

SEQ ID NO: 715342 - DNA, 19 bp, Mus musculus
  siRNA target sequence for 1700094C09Rik (NM_024279.1,299-317).
gtacaaaccaaggaaataa

SEQ ID NO: 715343 - DNA, 19 bp, Mus musculus
  siRNA target sequence for 1700094C09Rik (NM_024279.1,370-388).
ggtcctggagaacatagaa

SEQ ID NO: 715344 - DNA, 19 bp, Mus musculus
  siRNA target sequence for 1700094C09Rik (NM_024279.1,432-450).
cggttgcaaaccttcatga

SEQ ID NO: 715345 - DNA, 19 bp, Mus musculus
  siRNA target sequence for 1700094C09Rik (NM_024279.1,480-498).
cctcgtctcctgaaggaaa

SEQ ID NO: 715346 - DNA, 19 bp, Mus musculus
  siRNA target sequence for 1700094C09Rik (NM_024279.1,501-519).
ggagttcaaacgatgatgt

SEQ ID NO: 715347 - DNA, 19 bp, Mus musculus
  siRNA target sequence for 1700094C09Rik (NM_024279.1,504-522).
gttcaaacgatgatgtgta

SEQ ID NO: 715348 - DNA, 19 bp, Mus musculus
  siRNA target sequence for 1700094C09Rik (NM_024279.1,542-560).
gacaaaatccttgaaaaca

SEQ ID NO: 715349 - DNA, 19 bp, Mus musculus
  siRNA target sequence for 1700094C09Rik (NM_024279.1,586-604).
gctaacagaaagcatcttt

SEQ ID NO: 715350 - DNA, 19 bp, Mus musculus
  siRNA target sequence for 5830417C01Rik (NM_024282.2,266-284).
cacctcatctattggaatt

SEQ ID NO: 715351 - DNA, 19 bp, Mus musculus
  siRNA target sequence for 5830417C01Rik (NM_024282.2,433-451).
gaagtacggactttctaga

SEQ ID NO: 715352 - DNA, 19 bp, Mus musculus
  siRNA target sequence for 5830417C01Rik (NM_024282.2,436-454).
gtacggactttctagaaga

SEQ ID NO: 715353 - DNA, 19 bp, Mus musculus
  siRNA target sequence for 5830417C01Rik (NM_024282.2,477-495).
gaactggggaaagagtata

SEQ ID NO: 715354 - DNA, 19 bp, Mus musculus
  siRNA target sequence for 5830417C01Rik (NM_024282.2,519-537).
cacaaaaactgcaatcact

SEQ ID NO: 715355 - DNA, 19 bp, Mus musculus
  siRNA target sequence for 5830417C01Rik (NM_024282.2,613-631).
cctgtataccctttctaca

SEQ ID NO: 715356 - DNA, 19 bp, Mus musculus
  siRNA target sequence for 1500015O10Rik (NM_024283.1,288-306).
gggtccagatggcataagt

SEQ ID NO: 715357 - DNA, 19 bp, Mus musculus
  siRNA target sequence for 1500015O10Rik (NM_024283.1,343-361).
ggacctgtcccgtcaaaga

SEQ ID NO: 715358 - DNA, 19 bp, Mus musculus
  siRNA target sequence for 1500015O10Rik (NM_024283.1,346-364).
cctgtcccgtcaaagacta

SEQ ID NO: 715359 - DNA, 19 bp, Mus musculus
  siRNA target sequence for 1500015O10Rik (NM_024283.1,347-365).
ctgtcccgtcaaagactaa

SEQ ID NO: 715360 - DNA, 19 bp, Mus musculus
  siRNA target sequence for 1500015O10Rik (NM_024283.1,351-369).
cccgtcaaagactaatgta

SEQ ID NO: 715361 - DNA, 19 bp, Mus musculus
  siRNA target sequence for 1500015O10Rik (NM_024283.1,519-537).
caactattggctaaacaga

SEQ ID NO: 715362 - DNA, 19 bp, Mus musculus
  siRNA target sequence for 1500015O10Rik (NM_024283.1,542-560).
gaaacggccatgactacta

SEQ ID NO: 715363 - DNA, 19 bp, Mus musculus
  siRNA target sequence for 1500015O10Rik (NM_024283.1,567-585).
ctactaccagcgtcattat

SEQ ID NO: 715364 - DNA, 19 bp, Mus musculus
  siRNA target sequence for 1500015O10Rik (NM_024283.1,570-588).
ctaccagcgtcattatgat

SEQ ID NO: 715365 - DNA, 19 bp, Mus musculus
  siRNA target sequence for 1500015O10Rik (NM_024283.1,576-594).
gcgtcattatgatgaagat

SEQ ID NO: 715366 - DNA, 19 bp, Mus musculus
  siRNA target sequence for 1110007A06Rik (NM_024288.1,576-594).
cctctgaccacaaagacat

SEQ ID NO: 715367 - DNA, 19 bp, Mus musculus
  siRNA target sequence for 1110007A06Rik (NM_024288.1,590-608).
gacatccatagcagtgttt

SEQ ID NO: 715368 - DNA, 19 bp, Mus musculus
  siRNA target sequence for 1110007A06Rik (NM_024288.1,792-810).
caagtcagaaagaaccatt

SEQ ID NO: 715369 - DNA, 19 bp, Mus musculus
  siRNA target sequence for 1110007A06Rik (NM_024288.1,806-824).
ccatttgtggagttaaata

SEQ ID NO: 715370 - DNA, 19 bp, Mus musculus
  siRNA target sequence for 1110007A06Rik (NM_024288.1,812-830).
gtggagttaaatagaatat

SEQ ID NO: 715371 - DNA, 19 bp, Mus musculus
  siRNA target sequence for 1110007A06Rik (NM_024288.1,912-930).
gttccttggaatttaagct

SEQ ID NO: 715372 - DNA, 19 bp, Mus musculus
  siRNA target sequence for 1110007A06Rik (NM_024288.1,929-947).
ctacaccgactgtatttta

SEQ ID NO: 715373 - DNA, 19 bp, Mus musculus
  siRNA target sequence for 1110007A06Rik (NM_024288.1,932-950).
caccgactgtattttatta

SEQ ID NO: 715374 - DNA, 19 bp, Mus musculus
  siRNA target sequence for 1110007A06Rik (NM_024288.1,935-953).
cgactgtattttattagct

SEQ ID NO: 715375 - DNA, 19 bp, Mus musculus
  siRNA target sequence for 1110007A06Rik (NM_024288.1,979-997).
gcgagaagccttacaatat

SEQ ID NO: 715376 - DNA, 19 bp, Mus musculus
  siRNA target sequence for 1110007A06Rik (NM_024288.1,1014-1032).
catttgccctaaatcatca

SEQ ID NO: 715377 - DNA, 19 bp, Mus musculus
  siRNA target sequence for 1110007A06Rik (NM_024288.1,1092-1110).
caccatatgttcacttact

SEQ ID NO: 715378 - DNA, 19 bp, Mus musculus
  siRNA target sequence for 1110007A06Rik (NM_024288.1,1222-1240).
ggcgctgcctgcgctaatt

SEQ ID NO: 715379 - DNA, 19 bp, Mus musculus
  siRNA target sequence for 1110007A06Rik (NM_024288.1,1223-1241).
gcgctgcctgcgctaatta

SEQ ID NO: 715380 - DNA, 19 bp, Mus musculus
  siRNA target sequence for 1110007A06Rik (NM_024288.1,1224-1242).
cgctgcctgcgctaattaa

SEQ ID NO: 715381 - DNA, 19 bp, Mus musculus
  siRNA target sequence for 1110007A06Rik (NM_024288.1,1226-1244).
ctgcctgcgctaattaaca

SEQ ID NO: 715382 - DNA, 19 bp, Mus musculus
  siRNA target sequence for 1110007A06Rik (NM_024288.1,1229-1247).
cctgcgctaattaacatca

SEQ ID NO: 715383 - DNA, 19 bp, Mus musculus
  siRNA target sequence for 1110007A06Rik (NM_024288.1,1230-1248).
ctgcgctaattaacatcaa

SEQ ID NO: 715384 - DNA, 19 bp, Mus musculus
  siRNA target sequence for 1110007A06Rik (NM_024288.1,1284-1302).
ggaaccagaaagacgaatt

SEQ ID NO: 715385 - DNA, 19 bp, Mus musculus
  siRNA target sequence for 1110007A06Rik (NM_024288.1,1285-1303).
gaaccagaaagacgaatta

SEQ ID NO: 715386 - DNA, 19 bp, Mus musculus
  siRNA target sequence for 1110007A06Rik (NM_024288.1,1313-1331).
gtggaccttggtaaaaagt

SEQ ID NO: 715387 - DNA, 19 bp, Mus musculus
  siRNA target sequence for 1110007A06Rik (NM_024288.1,1367-1385).
cgtcagcaaacaacagata

SEQ ID NO: 715388 - DNA, 19 bp, Mus musculus
  siRNA target sequence for 1110007A06Rik (NM_024288.1,1405-1423).
ggtttgtggtcatattata

SEQ ID NO: 715389 - DNA, 19 bp, Mus musculus
  siRNA target sequence for 1110007A06Rik (NM_024288.1,1406-1424).
gtttgtggtcatattatat

SEQ ID NO: 715390 - DNA, 19 bp, Mus musculus
  siRNA target sequence for 1110007A06Rik (NM_024288.1,1425-1443).
caagagacgccctgaataa

SEQ ID NO: 715391 - DNA, 19 bp, Mus musculus
  siRNA target sequence for 1110007A06Rik (NM_024288.1,1430-1448).
gacgccctgaataaaatgt

SEQ ID NO: 715392 - DNA, 19 bp, Mus musculus
  siRNA target sequence for Ubxdc2 (NM_024432.2,501-519).
gccatcctgtcgcactttt

SEQ ID NO: 715393 - DNA, 19 bp, Mus musculus
  siRNA target sequence for Ubxdc2 (NM_024432.2,538-556).
cctccatcatgaagataca

SEQ ID NO: 715394 - DNA, 19 bp, Mus musculus
  siRNA target sequence for Ubxdc2 (NM_024432.2,614-632).
cctggacaacatccattta

SEQ ID NO: 715395 - DNA, 19 bp, Mus musculus
  siRNA target sequence for Ubxdc2 (NM_024432.2,709-727).
gaagccacgagttctttga

SEQ ID NO: 715396 - DNA, 19 bp, Mus musculus
  siRNA target sequence for Ubxdc2 (NM_024432.2,910-928).
cggctctggcctcacattt

SEQ ID NO: 715397 - DNA, 19 bp, Mus musculus
  siRNA target sequence for Ubxdc2 (NM_024432.2,911-929).
ggctctggcctcacatttt

SEQ ID NO: 715398 - DNA, 19 bp, Mus musculus
  siRNA target sequence for Ubxdc2 (NM_024432.2,930-948).
gaactcccctcagatttct

SEQ ID NO: 715399 - DNA, 19 bp, Mus musculus
  siRNA target sequence for Ubxdc2 (NM_024432.2,1055-1073).
gcgggagcttcgcaagtat

SEQ ID NO: 715400 - DNA, 19 bp, Mus musculus
  siRNA target sequence for Ubxdc2 (NM_024432.2,1056-1074).
cgggagcttcgcaagtata

SEQ ID NO: 715401 - DNA, 19 bp, Mus musculus
  siRNA target sequence for Ubxdc2 (NM_024432.2,1059-1077).
gagcttcgcaagtatacct

SEQ ID NO: 715402 - DNA, 19 bp, Mus musculus
  siRNA target sequence for Ubxdc2 (NM_024432.2,1241-1259).
cgaggccctggccttgaat

SEQ ID NO: 715403 - DNA, 19 bp, Mus musculus
  siRNA target sequence for Rab22 (NM_024436.1,250-268).
ggcgctgagggaacttaaa

SEQ ID NO: 715404 - DNA, 19 bp, Mus musculus
  siRNA target sequence for Rab22 (NM_024436.1,252-270).
cgctgagggaacttaaagt

SEQ ID NO: 715405 - DNA, 19 bp, Mus musculus
  siRNA target sequence for Rab22 (NM_024436.1,284-302).
gatacgggtgtgggtaaat

SEQ ID NO: 715406 - DNA, 19 bp, Mus musculus
  siRNA target sequence for Rab22 (NM_024436.1,338-356).
gatccgaatatcaatccaa

SEQ ID NO: 715407 - DNA, 19 bp, Mus musculus
  siRNA target sequence for Rab22 (NM_024436.1,343-361).
gaatatcaatccaaccata

SEQ ID NO: 715408 - DNA, 19 bp, Mus musculus
  siRNA target sequence for Rab22 (NM_024436.1,357-375).
ccataggggcatcttttat

SEQ ID NO: 715409 - DNA, 19 bp, Mus musculus
  siRNA target sequence for Rab22 (NM_024436.1,382-400).
gactgtccagtaccaaaat

SEQ ID NO: 715410 - DNA, 19 bp, Mus musculus
  siRNA target sequence for Rab22 (NM_024436.1,401-419).
gagctacataaattcctaa

SEQ ID NO: 715411 - DNA, 19 bp, Mus musculus
  siRNA target sequence for Rab22 (NM_024436.1,450-468).
gtgcattggcaccaatgta

SEQ ID NO: 715412 - DNA, 19 bp, Mus musculus
  siRNA target sequence for Rab22 (NM_024436.1,482-500).
gcagcagccatcatcgttt

SEQ ID NO: 715413 - DNA, 19 bp, Mus musculus
  siRNA target sequence for Rab22 (NM_024436.1,483-501).
cagcagccatcatcgttta

SEQ ID NO: 715414 - DNA, 19 bp, Mus musculus
  siRNA target sequence for Rab22 (NM_024436.1,496-514).
cgtttacgacatcacaaaa

SEQ ID NO: 715415 - DNA, 19 bp, Mus musculus
  siRNA target sequence for Rab22 (NM_024436.1,596-614).
gggaacaagtgcgatctta

SEQ ID NO: 715416 - DNA, 19 bp, Mus musculus
  siRNA target sequence for Rab22 (NM_024436.1,598-616).
gaacaagtgcgatcttact

SEQ ID NO: 715417 - DNA, 19 bp, Mus musculus
  siRNA target sequence for Rab22 (NM_024436.1,601-619).
caagtgcgatcttactgat

SEQ ID NO: 715418 - DNA, 19 bp, Mus musculus
  siRNA target sequence for Rab22 (NM_024436.1,663-681).
ccattcatgccatctttgt

SEQ ID NO: 715419 - DNA, 19 bp, Mus musculus
  siRNA target sequence for Rab22 (NM_024436.1,664-682).
cattcatgccatctttgta

SEQ ID NO: 715420 - DNA, 19 bp, Mus musculus
  siRNA target sequence for Rab22 (NM_024436.1,680-698).
gtagagaccagcgcaaaaa

SEQ ID NO: 715421 - DNA, 19 bp, Mus musculus
  siRNA target sequence for Rab22 (NM_024436.1,685-703).
gaccagcgcaaaaaatgca

SEQ ID NO: 715422 - DNA, 19 bp, Mus musculus
  siRNA target sequence for Rab22 (NM_024436.1,687-705).
ccagcgcaaaaaatgcaat

SEQ ID NO: 715423 - DNA, 19 bp, Mus musculus
  siRNA target sequence for Rab22 (NM_024436.1,688-706).
cagcgcaaaaaatgcaata

SEQ ID NO: 715424 - DNA, 19 bp, Mus musculus
  siRNA target sequence for Rab22 (NM_024436.1,690-708).
gcgcaaaaaatgcaataaa

SEQ ID NO: 715425 - DNA, 19 bp, Mus musculus
  siRNA target sequence for H47 (NM_024439.2,266-284).
gaacctgatgttgttgtta

SEQ ID NO: 715426 - DNA, 19 bp, Mus musculus
  siRNA target sequence for H47 (NM_024439.2,302-320).
gcagctgctcgtttgagaa

SEQ ID NO: 715427 - DNA, 19 bp, Mus musculus
  siRNA target sequence for H47 (NM_024439.2,316-334).
gagaatgcaggaagatcta

SEQ ID NO: 715428 - DNA, 19 bp, Mus musculus
  siRNA target sequence for H47 (NM_024439.2,318-336).
gaatgcaggaagatctaaa

SEQ ID NO: 715429 - DNA, 19 bp, Mus musculus
  siRNA target sequence for H47 (NM_024439.2,332-350).
ctaaatgcccaagttgaaa

SEQ ID NO: 715430 - DNA, 19 bp, Mus musculus
  siRNA target sequence for H47 (NM_024439.2,338-356).
gcccaagttgaaaaacata

SEQ ID NO: 715431 - DNA, 19 bp, Mus musculus
  siRNA target sequence for H47 (NM_024439.2,339-357).
cccaagttgaaaaacataa

SEQ ID NO: 715432 - DNA, 19 bp, Mus musculus
  siRNA target sequence for H47 (NM_024439.2,473-491).
ggtcctggaccttctactt

SEQ ID NO: 715433 - DNA, 19 bp, Mus musculus
  siRNA target sequence for H47 (NM_024439.2,476-494).
cctggaccttctacttcat

SEQ ID NO: 715434 - DNA, 19 bp, Mus musculus
  siRNA target sequence for H47 (NM_024439.2,497-515).
gtcatccccaaaggaaaat

SEQ ID NO: 715435 - DNA, 19 bp, Mus musculus
  siRNA target sequence for H47 (NM_024439.2,499-517).
catccccaaaggaaaatct

SEQ ID NO: 715436 - DNA, 19 bp, Mus musculus
  siRNA target sequence for 1810063P04Rik (NM_024440.1,225-243).
cctgggattcggcttcttt

SEQ ID NO: 715437 - DNA, 19 bp, Mus musculus
  siRNA target sequence for 1810063P04Rik (NM_024440.1,230-248).
gattcggcttctttttcaa

SEQ ID NO: 715438 - DNA, 19 bp, Mus musculus
  siRNA target sequence for 1810063P04Rik (NM_024440.1,336-354).
cggtggtgttcttatgact

SEQ ID NO: 715439 - DNA, 19 bp, Mus musculus
  siRNA target sequence for 1810063P04Rik (NM_024440.1,439-457).
cacgtgagggtcaacttct

SEQ ID NO: 715440 - DNA, 19 bp, Mus musculus
  siRNA target sequence for 1810063P04Rik (NM_024440.1,556-574).
cttgtgggccacatctact

SEQ ID NO: 715441 - DNA, 19 bp, Mus musculus
  siRNA target sequence for 1810063P04Rik (NM_024440.1,639-657).
gttgaagctgctactagat

SEQ ID NO: 715442 - DNA, 19 bp, Mus musculus
  siRNA target sequence for Sost (NM_024449.3,66-84).
gcctcatctgcctacttgt

SEQ ID NO: 715443 - DNA, 19 bp, Mus musculus
  siRNA target sequence for Luzp1 (NM_024452.1,262-280).
gcagaactcactaactaca

SEQ ID NO: 715444 - DNA, 19 bp, Mus musculus
  siRNA target sequence for Luzp1 (NM_024452.1,298-316).
cgccacctgcgatttaagt

SEQ ID NO: 715445 - DNA, 19 bp, Mus musculus
  siRNA target sequence for Luzp1 (NM_024452.1,299-317).
gccacctgcgatttaagtt

SEQ ID NO: 715446 - DNA, 19 bp, Mus musculus
  siRNA target sequence for Luzp1 (NM_024452.1,300-318).
ccacctgcgatttaagtta

SEQ ID NO: 715447 - DNA, 19 bp, Mus musculus
  siRNA target sequence for Luzp1 (NM_024452.1,561-579).
ccttacgcgagagctaaaa

SEQ ID NO: 715448 - DNA, 19 bp, Mus musculus
  siRNA target sequence for Luzp1 (NM_024452.1,562-580).
cttacgcgagagctaaaat

SEQ ID NO: 715449 - DNA, 19 bp, Mus musculus
  siRNA target sequence for Luzp1 (NM_024452.1,566-584).
cgcgagagctaaaatctga

SEQ ID NO: 715450 - DNA, 19 bp, Mus musculus
  siRNA target sequence for Luzp1 (NM_024452.1,567-585).
gcgagagctaaaatctgaa

SEQ ID NO: 715451 - DNA, 19 bp, Mus musculus
  siRNA target sequence for Luzp1 (NM_024452.1,589-607).
gagcggcttcagaaacgaa

SEQ ID NO: 715452 - DNA, 19 bp, Mus musculus
  siRNA target sequence for Luzp1 (NM_024452.1,594-612).
gcttcagaaacgaatggtt

SEQ ID NO: 715453 - DNA, 19 bp, Mus musculus
  siRNA target sequence for Luzp1 (NM_024452.1,604-622).
cgaatggttgatttagaga

SEQ ID NO: 715454 - DNA, 19 bp, Mus musculus
  siRNA target sequence for Luzp1 (NM_024452.1,634-652).
gctttgagcaggagtaaga

SEQ ID NO: 715455 - DNA, 19 bp, Mus musculus
  siRNA target sequence for Luzp1 (NM_024452.1,671-689).
gtttgagcctcaatgaaga

SEQ ID NO: 715456 - DNA, 19 bp, Mus musculus
  siRNA target sequence for Luzp1 (NM_024452.1,763-781).
gaggaccgcttagataaaa

SEQ ID NO: 715457 - DNA, 19 bp, Mus musculus
  siRNA target sequence for Luzp1 (NM_024452.1,789-807).
gagtttagtgtcagaatta

SEQ ID NO: 715458 - DNA, 19 bp, Mus musculus
  siRNA target sequence for Luzp1 (NM_024452.1,827-845).
ccctgagctttgtaaatga

SEQ ID NO: 715459 - DNA, 19 bp, Mus musculus
  siRNA target sequence for Luzp1 (NM_024452.1,829-847).
ctgagctttgtaaatgaga

SEQ ID NO: 715460 - DNA, 19 bp, Mus musculus
  siRNA target sequence for Luzp1 (NM_024452.1,1031-1049).
ggaagggcagtctagacta

SEQ ID NO: 715461 - DNA, 19 bp, Mus musculus
  siRNA target sequence for Luzp1 (NM_024452.1,1132-1150).
cttaaccaagagattgaga

SEQ ID NO: 715462 - DNA, 19 bp, Mus musculus
  siRNA target sequence for Luzp1 (NM_024452.1,1162-1180).
caaatcaaacattttgaat

SEQ ID NO: 715463 - DNA, 19 bp, Mus musculus
  siRNA target sequence for Luzp1 (NM_024452.1,1224-1242).
ccttcaggataattaccta

SEQ ID NO: 715464 - DNA, 19 bp, Mus musculus
  siRNA target sequence for Luzp1 (NM_024452.1,1225-1243).
cttcaggataattacctaa

SEQ ID NO: 715465 - DNA, 19 bp, Mus musculus
  siRNA target sequence for Luzp1 (NM_024452.1,1239-1257).
cctaactgagctgaataga

SEQ ID NO: 715466 - DNA, 19 bp, Mus musculus
  siRNA target sequence for Luzp1 (NM_024452.1,1251-1269).
gaatagaaacagaagctta

SEQ ID NO: 715467 - DNA, 19 bp, Mus musculus
  siRNA target sequence for Luzp1 (NM_024452.1,1293-1311).
gctgcaggtcaggaaacaa

SEQ ID NO: 715468 - DNA, 19 bp, Mus musculus
  siRNA target sequence for Luzp1 (NM_024452.1,1294-1312).
ctgcaggtcaggaaacaaa

SEQ ID NO: 715469 - DNA, 19 bp, Mus musculus
  siRNA target sequence for Luzp1 (NM_024452.1,1700-1718).
ctgcccaggagcacactaa

SEQ ID NO: 715470 - DNA, 19 bp, Mus musculus
  siRNA target sequence for Luzp1 (NM_024452.1,1779-1797).
gacaacacgaacatttagt

SEQ ID NO: 715471 - DNA, 19 bp, Mus musculus
  siRNA target sequence for Luzp1 (NM_024452.1,1814-1832).
ctgtgcccaatgatatagt

SEQ ID NO: 715472 - DNA, 19 bp, Mus musculus
  siRNA target sequence for Luzp1 (NM_024452.1,1957-1975).
gctctctcctcatctcaaa

SEQ ID NO: 715473 - DNA, 19 bp, Mus musculus
  siRNA target sequence for Luzp1 (NM_024452.1,1990-2008).
ggactttctaagggtaaaa

SEQ ID NO: 715474 - DNA, 19 bp, Mus musculus
  siRNA target sequence for Luzp1 (NM_024452.1,1991-2009).
gactttctaagggtaaaaa

SEQ ID NO: 715475 - DNA, 19 bp, Mus musculus
  siRNA target sequence for Luzp1 (NM_024452.1,2193-2211).
gaggtgccgtgtcatcaaa

SEQ ID NO: 715476 - DNA, 19 bp, Mus musculus
  siRNA target sequence for Luzp1 (NM_024452.1,2247-2265).
cctggacatagagtctttt

SEQ ID NO: 715477 - DNA, 19 bp, Mus musculus
  siRNA target sequence for Luzp1 (NM_024452.1,2250-2268).
ggacatagagtcttttgtt

SEQ ID NO: 715478 - DNA, 19 bp, Mus musculus
  siRNA target sequence for Luzp1 (NM_024452.1,2253-2271).
catagagtcttttgttact

SEQ ID NO: 715479 - DNA, 19 bp, Mus musculus
  siRNA target sequence for Luzp1 (NM_024452.1,2346-2364).
gtccagagggggaactaga

SEQ ID NO: 715480 - DNA, 19 bp, Mus musculus
  siRNA target sequence for Luzp1 (NM_024452.1,2360-2378).
ctagaactgccctatttga

SEQ ID NO: 715481 - DNA, 19 bp, Mus musculus
  siRNA target sequence for Luzp1 (NM_024452.1,2368-2386).
gccctatttgaaaatgata

SEQ ID NO: 715482 - DNA, 19 bp, Mus musculus
  siRNA target sequence for Luzp1 (NM_024452.1,2392-2410).
gctgcaatagaaaatgact

SEQ ID NO: 715483 - DNA, 19 bp, Mus musculus
  siRNA target sequence for Luzp1 (NM_024452.1,2427-2445).
gccttcctccaatgctata

SEQ ID NO: 715484 - DNA, 19 bp, Mus musculus
  siRNA target sequence for Luzp1 (NM_024452.1,2429-2447).
cttcctccaatgctataga

SEQ ID NO: 715485 - DNA, 19 bp, Mus musculus
  siRNA target sequence for Luzp1 (NM_024452.1,2432-2450).
cctccaatgctatagaatt

SEQ ID NO: 715486 - DNA, 19 bp, Mus musculus
  siRNA target sequence for Luzp1 (NM_024452.1,2508-2526).
cctgcggtctagagcaatt

SEQ ID NO: 715487 - DNA, 19 bp, Mus musculus
  siRNA target sequence for Luzp1 (NM_024452.1,2509-2527).
ctgcggtctagagcaatta

SEQ ID NO: 715488 - DNA, 19 bp, Mus musculus
  siRNA target sequence for Luzp1 (NM_024452.1,2511-2529).
gcggtctagagcaattata

SEQ ID NO: 715489 - DNA, 19 bp, Mus musculus
  siRNA target sequence for Luzp1 (NM_024452.1,2512-2530).
cggtctagagcaattataa

SEQ ID NO: 715490 - DNA, 19 bp, Mus musculus
  siRNA target sequence for Luzp1 (NM_024452.1,2513-2531).
ggtctagagcaattataaa

SEQ ID NO: 715491 - DNA, 19 bp, Mus musculus
  siRNA target sequence for Luzp1 (NM_024452.1,2534-2552).
ccgttatcattgataagga

SEQ ID NO: 715492 - DNA, 19 bp, Mus musculus
  siRNA target sequence for Luzp1 (NM_024452.1,2579-2597).
gaactgaggttgtattgga

SEQ ID NO: 715493 - DNA, 19 bp, Mus musculus
  siRNA target sequence for Luzp1 (NM_024452.1,2604-2622).
gaaatccacctctaaatct

SEQ ID NO: 715494 - DNA, 19 bp, Mus musculus
  siRNA target sequence for Luzp1 (NM_024452.1,2701-2719).
ccaagggagaggcatacat

SEQ ID NO: 715495 - DNA, 19 bp, Mus musculus
  siRNA target sequence for Luzp1 (NM_024452.1,2745-2763).
cccagagctcacagcaatt

SEQ ID NO: 715496 - DNA, 19 bp, Mus musculus
  siRNA target sequence for Luzp1 (NM_024452.1,2749-2767).
gagctcacagcaattagca

SEQ ID NO: 715497 - DNA, 19 bp, Mus musculus
  siRNA target sequence for Luzp1 (NM_024452.1,2781-2799).
ccctcttgagctctctatt

SEQ ID NO: 715498 - DNA, 19 bp, Mus musculus
  siRNA target sequence for Luzp1 (NM_024452.1,2790-2808).
gctctctattcataaacat

SEQ ID NO: 715499 - DNA, 19 bp, Mus musculus
  siRNA target sequence for Luzp1 (NM_024452.1,2795-2813).
ctattcataaacatgacat

SEQ ID NO: 715500 - DNA, 19 bp, Mus musculus
  siRNA target sequence for Luzp1 (NM_024452.1,2885-2903).
ctaggagtagcattctaat

SEQ ID NO: 715501 - DNA, 19 bp, Mus musculus
  siRNA target sequence for Luzp1 (NM_024452.1,3110-3128).
cagacttcttagaacttga

SEQ ID NO: 715502 - DNA, 19 bp, Mus musculus
  siRNA target sequence for 2410005K17Rik (NM_024462.1,139-157).
gcccggaaagaaaaatcca

SEQ ID NO: 715503 - DNA, 19 bp, Mus musculus
  siRNA target sequence for 2410005K17Rik (NM_024462.1,186-204).
gaaggctaagcagaaatct

SEQ ID NO: 715504 - DNA, 19 bp, Mus musculus
  siRNA target sequence for 1810059A23Rik (NM_024463.1,118-136).
gaggcgttccagttacctt

SEQ ID NO: 715505 - DNA, 19 bp, Mus musculus
  siRNA target sequence for 1810059A23Rik (NM_024463.1,287-305).
cacagatgccccactgttt

SEQ ID NO: 715506 - DNA, 19 bp, Mus musculus
  siRNA target sequence for 1810059A23Rik (NM_024463.1,291-309).
gatgccccactgttttgca

SEQ ID NO: 715507 - DNA, 19 bp, Mus musculus
  siRNA target sequence for 1810059A23Rik (NM_024463.1,317-335).
cccaacgagctagaataca

SEQ ID NO: 715508 - DNA, 19 bp, Mus musculus
  siRNA target sequence for 1810059A23Rik (NM_024463.1,318-336).
ccaacgagctagaatacaa

SEQ ID NO: 715509 - DNA, 19 bp, Mus musculus
  siRNA target sequence for 1810059A23Rik (NM_024463.1,319-337).
caacgagctagaatacaaa

SEQ ID NO: 715510 - DNA, 19 bp, Mus musculus
  siRNA target sequence for 1810059A23Rik (NM_024463.1,334-352).
caaattccagtatgcatat

SEQ ID NO: 715511 - DNA, 19 bp, Mus musculus
  siRNA target sequence for 1810059A23Rik (NM_024463.1,377-395).
gacatagtcaggacgaatt

SEQ ID NO: 715512 - DNA, 19 bp, Mus musculus
  siRNA target sequence for 1810059A23Rik (NM_024463.1,387-405).
ggacgaatttcttacagta

SEQ ID NO: 715513 - DNA, 19 bp, Mus musculus
  siRNA target sequence for 1810059A23Rik (NM_024463.1,501-519).
cctcactgaggaacattct

SEQ ID NO: 715514 - DNA, 19 bp, Mus musculus
  siRNA target sequence for 1810059A23Rik (NM_024463.1,561-579).
cctctgtcgaggagtttca

SEQ ID NO: 715515 - DNA, 19 bp, Mus musculus
  siRNA target sequence for 1810059A23Rik (NM_024463.1,564-582).
ctgtcgaggagtttcaagt

SEQ ID NO: 715516 - DNA, 19 bp, Mus musculus
  siRNA target sequence for 1810059A23Rik (NM_024463.1,566-584).
gtcgaggagtttcaagttt

SEQ ID NO: 715517 - DNA, 19 bp, Mus musculus
  siRNA target sequence for 1810059A23Rik (NM_024463.1,568-586).
cgaggagtttcaagttttt

SEQ ID NO: 715518 - DNA, 19 bp, Mus musculus
  siRNA target sequence for 1810059A23Rik (NM_024463.1,569-587).
gaggagtttcaagttttta

SEQ ID NO: 715519 - DNA, 19 bp, Mus musculus
  siRNA target sequence for 2010319C14Rik (NM_024464.2,475-493).
gctatcagaaagttttaat

SEQ ID NO: 715520 - DNA, 19 bp, Mus musculus
  siRNA target sequence for 2010319C14Rik (NM_024464.2,505-523).
caactacttgtccaatgaa

SEQ ID NO: 715521 - DNA, 19 bp, Mus musculus
  siRNA target sequence for 2010319C14Rik (NM_024464.2,521-539).
gaatctgcagtcctcattt

SEQ ID NO: 715522 - DNA, 19 bp, Mus musculus
  siRNA target sequence for 2010319C14Rik (NM_024464.2,600-618).
gctatcaccggccacataa

SEQ ID NO: 715523 - DNA, 19 bp, Mus musculus
  siRNA target sequence for 2010319C14Rik (NM_024464.2,607-625).
ccggccacataagaaagat

SEQ ID NO: 715524 - DNA, 19 bp, Mus musculus
  siRNA target sequence for 2010319C14Rik (NM_024464.2,674-692).
gaccaagagtttccaattt

SEQ ID NO: 715525 - DNA, 19 bp, Mus musculus
  siRNA target sequence for 2010319C14Rik (NM_024464.2,848-866).
gtgacgctgctcattacga

SEQ ID NO: 715526 - DNA, 19 bp, Mus musculus
  siRNA target sequence for 2010319C14Rik (NM_024464.2,850-868).
gacgctgctcattacgatt

SEQ ID NO: 715527 - DNA, 19 bp, Mus musculus
  siRNA target sequence for BC002216 (NM_024472.2,457-475).
gtgctgctggaccactata

SEQ ID NO: 715528 - DNA, 19 bp, Mus musculus
  siRNA target sequence for BC002216 (NM_024472.2,459-477).
gctgctggaccactatatt

SEQ ID NO: 715529 - DNA, 19 bp, Mus musculus
  siRNA target sequence for BC002216 (NM_024472.2,489-507).
gggacttgtcaggtttcta

SEQ ID NO: 715530 - DNA, 19 bp, Mus musculus
  siRNA target sequence for BC002216 (NM_024472.2,490-508).
ggacttgtcaggtttctaa

SEQ ID NO: 715531 - DNA, 19 bp, Mus musculus
  siRNA target sequence for BC002216 (NM_024472.2,491-509).
gacttgtcaggtttctaaa

SEQ ID NO: 715532 - DNA, 19 bp, Mus musculus
  siRNA target sequence for BC002216 (NM_024472.2,520-538).
gccgtcttctcattcattt

SEQ ID NO: 715533 - DNA, 19 bp, Mus musculus
  siRNA target sequence for BC002216 (NM_024472.2,587-605).
gcccacagtctgaacacta

SEQ ID NO: 715534 - DNA, 19 bp, Mus musculus
  siRNA target sequence for BC002216 (NM_024472.2,894-912).
cttcctcgaggccatgaat

SEQ ID NO: 715535 - DNA, 19 bp, Mus musculus
  siRNA target sequence for BC005537 (NM_024473.2,1770-1788).
cgtgctcagcttagaaaga

SEQ ID NO: 715536 - DNA, 19 bp, Mus musculus
  siRNA target sequence for BC005537 (NM_024473.2,1771-1789).
gtgctcagcttagaaagaa

SEQ ID NO: 715537 - DNA, 19 bp, Mus musculus
  siRNA target sequence for BC005537 (NM_024473.2,1809-1827).
cagtttgacttcaagatgt

SEQ ID NO: 715538 - DNA, 19 bp, Mus musculus
  siRNA target sequence for BC005537 (NM_024473.2,1935-1953).
gtgcgagattccagctatt

SEQ ID NO: 715539 - DNA, 19 bp, Mus musculus
  siRNA target sequence for BC005537 (NM_024473.2,1938-1956).
cgagattccagctattcct

SEQ ID NO: 715540 - DNA, 19 bp, Mus musculus
  siRNA target sequence for BC005537 (NM_024473.2,1963-1981).
gttcgctagagcttctaca

SEQ ID NO: 715541 - DNA, 19 bp, Mus musculus
  siRNA target sequence for BC005537 (NM_024473.2,1966-1984).
cgctagagcttctacagaa

SEQ ID NO: 715542 - DNA, 19 bp, Mus musculus
  siRNA target sequence for BC005537 (NM_024473.2,2005-2023).
cccctcggtaccagtctat

SEQ ID NO: 715543 - DNA, 19 bp, Mus musculus
  siRNA target sequence for BC005537 (NM_024473.2,2007-2025).
cctcggtaccagtctatga

SEQ ID NO: 715544 - DNA, 19 bp, Mus musculus
  siRNA target sequence for BC005537 (NM_024473.2,2010-2028).
cggtaccagtctatgagaa

SEQ ID NO: 715545 - DNA, 19 bp, Mus musculus
  siRNA target sequence for BC005537 (NM_024473.2,2071-2089).
ggcctcggaatgatattga

SEQ ID NO: 715546 - DNA, 19 bp, Mus musculus
  siRNA target sequence for BC005537 (NM_024473.2,2082-2100).
gatattgagaaaatcgttt

SEQ ID NO: 715547 - DNA, 19 bp, Mus musculus
  siRNA target sequence for BC005537 (NM_024473.2,2113-2131).
ctaggtggaaggaatctga

SEQ ID NO: 715548 - DNA, 19 bp, Mus musculus
  siRNA target sequence for BC005537 (NM_024473.2,2123-2141).
ggaatctgacgaacctttt

SEQ ID NO: 715549 - DNA, 19 bp, Mus musculus
  siRNA target sequence for BC005537 (NM_024473.2,2124-2142).
gaatctgacgaacctttta

SEQ ID NO: 715550 - DNA, 19 bp, Mus musculus
  siRNA target sequence for BC005537 (NM_024473.2,2148-2166).
gttcaggccaaatttgaat

SEQ ID NO: 715551 - DNA, 19 bp, Mus musculus
  siRNA target sequence for BC005537 (NM_024473.2,2216-2234).
ggacaagacaggaattgtt

SEQ ID NO: 715552 - DNA, 19 bp, Mus musculus
  siRNA target sequence for BC005537 (NM_024473.2,2224-2242).
caggaattgttgtcaacaa

SEQ ID NO: 715553 - DNA, 19 bp, Mus musculus
  siRNA target sequence for BC005537 (NM_024473.2,2279-2297).
gcatttgcagactccaaaa

SEQ ID NO: 715554 - DNA, 19 bp, Mus musculus
  siRNA target sequence for BC005537 (NM_024473.2,2304-2322).
gccaccatcttcaagttat

SEQ ID NO: 715555 - DNA, 19 bp, Mus musculus
  siRNA target sequence for BC002236 (NM_024475.1,148-166).
gaaagttttctgaattcta

SEQ ID NO: 715556 - DNA, 19 bp, Mus musculus
  siRNA target sequence for BC002236 (NM_024475.1,159-177).
gaattctacagcaaaaaga

SEQ ID NO: 715557 - DNA, 19 bp, Mus musculus
  siRNA target sequence for BC002236 (NM_024475.1,239-257).
gataaggcctttcatgaaa

SEQ ID NO: 715558 - DNA, 19 bp, Mus musculus
  siRNA target sequence for BC002236 (NM_024475.1,259-277).
ctcatctaaaccgtgataa

SEQ ID NO: 715559 - DNA, 19 bp, Mus musculus
  siRNA target sequence for BC002236 (NM_024475.1,264-282).
ctaaaccgtgataaagaca

SEQ ID NO: 715560 - DNA, 19 bp, Mus musculus
  siRNA target sequence for BC002236 (NM_024475.1,342-360).
gagctgaatcacaagtact

SEQ ID NO: 715561 - DNA, 19 bp, Mus musculus
  siRNA target sequence for BC002236 (NM_024475.1,356-374).
gtactgggagaggtatcta

SEQ ID NO: 715562 - DNA, 19 bp, Mus musculus
  siRNA target sequence for BC002236 (NM_024475.1,359-377).
ctgggagaggtatctatca

SEQ ID NO: 715563 - DNA, 19 bp, Mus musculus
  siRNA target sequence for BC002236 (NM_024475.1,361-379).
gggagaggtatctatcaaa

SEQ ID NO: 715564 - DNA, 19 bp, Mus musculus
  siRNA target sequence for AI428795 (NM_024477.2,164-182).
gccctcggcaaatacacaa

SEQ ID NO: 715565 - DNA, 19 bp, Mus musculus
  siRNA target sequence for AI428795 (NM_024477.2,165-183).
ccctcggcaaatacacaat

SEQ ID NO: 715566 - DNA, 19 bp, Mus musculus
  siRNA target sequence for AI428795 (NM_024477.2,180-198).
caatggcgttcaagtgtta

SEQ ID NO: 715567 - DNA, 19 bp, Mus musculus
  siRNA target sequence for AI428795 (NM_024477.2,269-287).
ggtatcacgaagatgaaca

SEQ ID NO: 715568 - DNA, 19 bp, Mus musculus
  siRNA target sequence for AI428795 (NM_024477.2,344-362).
cagctgagcgggaacgaat

SEQ ID NO: 715569 - DNA, 19 bp, Mus musculus
  siRNA target sequence for AI428795 (NM_024477.2,390-408).
gcaacctgggggattgcta

SEQ ID NO: 715570 - DNA, 19 bp, Mus musculus
  siRNA target sequence for AI428795 (NM_024477.2,430-448).
ggaggccatcaagtactat

SEQ ID NO: 715571 - DNA, 19 bp, Mus musculus
  siRNA target sequence for AI428795 (NM_024477.2,505-523).
ctaccggggtctaggaaat

SEQ ID NO: 715572 - DNA, 19 bp, Mus musculus
  siRNA target sequence for AI428795 (NM_024477.2,596-614).
ctcggggaggcctccaata

SEQ ID NO: 715573 - DNA, 19 bp, Mus musculus
  siRNA target sequence for AI428795 (NM_024477.2,601-619).
ggaggcctccaataaagct

SEQ ID NO: 715574 - DNA, 19 bp, Mus musculus
  siRNA target sequence for AI428795 (NM_024477.2,1029-1047).
cgcaggcagtcatgtactt

SEQ ID NO: 715575 - DNA, 19 bp, Mus musculus
  siRNA target sequence for AI428795 (NM_024477.2,1030-1048).
gcaggcagtcatgtactta

SEQ ID NO: 715576 - DNA, 19 bp, Mus musculus
  siRNA target sequence for AI428795 (NM_024477.2,1171-1189).
cagggcatcggccttgttt

SEQ ID NO: 715577 - DNA, 19 bp, Mus musculus
  siRNA target sequence for AI428795 (NM_024477.2,1174-1192).
ggcatcggccttgtttgaa

SEQ ID NO: 715578 - DNA, 19 bp, Mus musculus
  siRNA target sequence for AI428795 (NM_024477.2,1175-1193).
gcatcggccttgtttgaaa

SEQ ID NO: 715579 - DNA, 19 bp, Mus musculus
  siRNA target sequence for AI428795 (NM_024477.2,1179-1197).
cggccttgtttgaaacgat

SEQ ID NO: 715580 - DNA, 19 bp, Mus musculus
  siRNA target sequence for AI428795 (NM_024477.2,1180-1198).
ggccttgtttgaaacgatt

SEQ ID NO: 715581 - DNA, 19 bp, Mus musculus
  siRNA target sequence for AI428795 (NM_024477.2,1333-1351).
ccggacgagagcatttgct

SEQ ID NO: 715582 - DNA, 19 bp, Mus musculus
  siRNA target sequence for AI428795 (NM_024477.2,1410-1428).
ccatcgaccagatcttaga

SEQ ID NO: 715583 - DNA, 19 bp, Mus musculus
  siRNA target sequence for AI428795 (NM_024477.2,1448-1466).
ggactagtgctgtactact

SEQ ID NO: 715584 - DNA, 19 bp, Mus musculus
  siRNA target sequence for AI428795 (NM_024477.2,1509-1527).
gagcgggaatcctgaagtt

SEQ ID NO: 715585 - DNA, 19 bp, Mus musculus
  siRNA target sequence for AI428795 (NM_024477.2,1512-1530).
cgggaatcctgaagtttca

SEQ ID NO: 715586 - DNA, 19 bp, Mus musculus
  siRNA target sequence for AI428795 (NM_024477.2,1535-1553).
cattacttgggtgataatt

SEQ ID NO: 715587 - DNA, 19 bp, Mus musculus
  siRNA target sequence for AI428795 (NM_024477.2,1556-1574).
gtggaaagttccagtgatt

SEQ ID NO: 715588 - DNA, 19 bp, Mus musculus
  siRNA target sequence for AI428795 (NM_024477.2,1601-1619).
cccgtagcaaccaactcta

SEQ ID NO: 715589 - DNA, 19 bp, Mus musculus
  siRNA target sequence for AI428795 (NM_024477.2,1655-1673).
ctgggggtggagtcttact

SEQ ID NO: 715590 - DNA, 19 bp, Mus musculus
  siRNA target sequence for AI428795 (NM_024477.2,1791-1809).
ggatggtgcgccacaacaa

SEQ ID NO: 715591 - DNA, 19 bp, Mus musculus
  siRNA target sequence for AI428795 (NM_024477.2,2369-2387).
gagtgtgtccactttgcta

SEQ ID NO: 715592 - DNA, 19 bp, Mus musculus
  siRNA target sequence for AI428795 (NM_024477.2,2732-2750).
gtcgcggcttccaagatgt

SEQ ID NO: 715593 - DNA, 19 bp, Mus musculus
  siRNA target sequence for AI428795 (NM_024477.2,2753-2771).
gttcacgccttctactcat

SEQ ID NO: 715594 - DNA, 19 bp, Mus musculus
  siRNA target sequence for AI428795 (NM_024477.2,3026-3044).
cagcgcaatgccatgtaca

SEQ ID NO: 715595 - DNA, 19 bp, Mus musculus
  siRNA target sequence for AI428795 (NM_024477.2,3029-3047).
cgcaatgccatgtacacat

SEQ ID NO: 715596 - DNA, 19 bp, Mus musculus
  siRNA target sequence for AI428795 (NM_024477.2,3300-3318).
gggctgttaaaaatatggt

SEQ ID NO: 715597 - DNA, 19 bp, Mus musculus
  siRNA target sequence for AI428795 (NM_024477.2,3548-3566).
ctgctgtcactcttcgatt

SEQ ID NO: 715598 - DNA, 19 bp, Mus musculus
  siRNA target sequence for AI428795 (NM_024477.2,3705-3723).
cctccgacgccatttctgt

SEQ ID NO: 715599 - DNA, 19 bp, Mus musculus
  siRNA target sequence for AI428795 (NM_024477.2,3742-3760).
cgcctcctccatgagtttt

SEQ ID NO: 715600 - DNA, 19 bp, Mus musculus
  siRNA target sequence for AI428795 (NM_024477.2,3801-3819).
gaggacgacaggactatga

SEQ ID NO: 715601 - DNA, 19 bp, Mus musculus
  siRNA target sequence for AI428795 (NM_024477.2,3803-3821).
ggacgacaggactatgata

SEQ ID NO: 715602 - DNA, 19 bp, Mus musculus
  siRNA target sequence for AI428795 (NM_024477.2,4065-4083).
ccaactcccccgtgaagat

SEQ ID NO: 715603 - DNA, 19 bp, Mus musculus
  siRNA target sequence for AI428795 (NM_024477.2,4314-4332).
ccgaccgagaagatagtgt

SEQ ID NO: 715604 - DNA, 19 bp, Mus musculus
  siRNA target sequence for AI428795 (NM_024477.2,4420-4438).
gtcgccactcactgtcaaa

SEQ ID NO: 715605 - DNA, 19 bp, Mus musculus
  siRNA target sequence for AI428795 (NM_024477.2,4676-4694).
ccagcactctcgtactctt

SEQ ID NO: 715606 - DNA, 19 bp, Mus musculus
  siRNA target sequence for AI428795 (NM_024477.2,4828-4846).
gggaaccctgacgtcaaaa

SEQ ID NO: 715607 - DNA, 19 bp, Mus musculus
  siRNA target sequence for AI428795 (NM_024477.2,4834-4852).
cctgacgtcaaaaagagat

SEQ ID NO: 715608 - DNA, 19 bp, Mus musculus
  siRNA target sequence for AI428795 (NM_024477.2,5058-5076).
ccttggccaacggttacaa

SEQ ID NO: 715609 - DNA, 19 bp, Mus musculus
  siRNA target sequence for BC003251 (NM_024480.2,753-771).
gagtcagccaggaagctta

SEQ ID NO: 715610 - DNA, 19 bp, Mus musculus
  siRNA target sequence for BC003251 (NM_024480.2,943-961).
gggtcatggctgacaaaaa

SEQ ID NO: 715611 - DNA, 19 bp, Mus musculus
  siRNA target sequence for BC003251 (NM_024480.2,1246-1264).
cggtggccctgcgtaatct

SEQ ID NO: 715612 - DNA, 19 bp, Mus musculus
  siRNA target sequence for BC003251 (NM_024480.2,1459-1477).
cggacacgctaagcttatt

SEQ ID NO: 715613 - DNA, 19 bp, Mus musculus
  siRNA target sequence for BC003251 (NM_024480.2,1461-1479).
gacacgctaagcttattga

SEQ ID NO: 715614 - DNA, 19 bp, Mus musculus
  siRNA target sequence for BC003251 (NM_024480.2,1463-1481).
cacgctaagcttattgagt

SEQ ID NO: 715615 - DNA, 19 bp, Mus musculus
  siRNA target sequence for BC003251 (NM_024480.2,1544-1562).
ggaccatgccagtctagat

SEQ ID NO: 715616 - DNA, 19 bp, Mus musculus
  siRNA target sequence for Sgta (NM_024499.1,229-247).
cagaccctgccagagatat

SEQ ID NO: 715617 - DNA, 19 bp, Mus musculus
  siRNA target sequence for Sgta (NM_024499.1,231-249).
gaccctgccagagatattt

SEQ ID NO: 715618 - DNA, 19 bp, Mus musculus
  siRNA target sequence for Sgta (NM_024499.1,233-251).
ccctgccagagatatttga

SEQ ID NO: 715619 - DNA, 19 bp, Mus musculus
  siRNA target sequence for Sgta (NM_024499.1,598-616).
gctgtggcatactacaaga

SEQ ID NO: 715620 - DNA, 19 bp, Mus musculus
  siRNA target sequence for Sgta (NM_024499.1,599-617).
ctgtggcatactacaagaa

SEQ ID NO: 715621 - DNA, 19 bp, Mus musculus
  siRNA target sequence for Sgta (NM_024499.1,666-684).
gattgcagagctgaagtta

SEQ ID NO: 715622 - DNA, 19 bp, Mus musculus
  siRNA target sequence for Sgta (NM_024499.1,709-727).
ggcgtgggcagcttagaca

SEQ ID NO: 715623 - DNA, 19 bp, Mus musculus
  siRNA target sequence for Sgta (NM_024499.1,710-728).
gcgtgggcagcttagacat

SEQ ID NO: 715624 - DNA, 19 bp, Mus musculus
  siRNA target sequence for Sgta (NM_024499.1,766-784).
gcttcgagcttaatgaaca

SEQ ID NO: 715625 - DNA, 19 bp, Mus musculus
  siRNA target sequence for Atp6v0e (NM_025272.1,175-193).
cctaaccggggagttatca

SEQ ID NO: 715626 - DNA, 19 bp, Mus musculus
  siRNA target sequence for Atp6v0e (NM_025272.1,176-194).
ctaaccggggagttatcat

SEQ ID NO: 715627 - DNA, 19 bp, Mus musculus
  siRNA target sequence for Atp6v0e (NM_025272.1,217-235).
gtttgctgctatctctttt

SEQ ID NO: 715628 - DNA, 19 bp, Mus musculus
  siRNA target sequence for Atp6v0e (NM_025272.1,229-247).
ctcttttggctgattgcaa

SEQ ID NO: 715629 - DNA, 19 bp, Mus musculus
  siRNA target sequence for Atp6v0e (NM_025272.1,275-293).
gaccacagttgaaaaatga

SEQ ID NO: 715630 - DNA, 19 bp, Mus musculus
  siRNA target sequence for Pcbd (NM_025273.1,143-161).
ggccgagatgctatcttca

SEQ ID NO: 715631 - DNA, 19 bp, Mus musculus
  siRNA target sequence for Pcbd (NM_025273.1,239-257).
caccatcccgagtggttta

SEQ ID NO: 715632 - DNA, 19 bp, Mus musculus
  siRNA target sequence for Pcbd (NM_025273.1,333-351).
ccagcttcatcgaacaagt

SEQ ID NO: 715633 - DNA, 19 bp, Mus musculus
  siRNA target sequence for Pcbd (NM_025273.1,347-365).
caagtcgccgtgtctatga

SEQ ID NO: 715634 - DNA, 19 bp, Mus musculus
  siRNA target sequence for Kin (NM_025280.1,23-41).
ggcaagtcggattttctga

SEQ ID NO: 715635 - DNA, 19 bp, Mus musculus
  siRNA target sequence for Kin (NM_025280.1,262-280).
gcgacgctttggcactaaa

SEQ ID NO: 715636 - DNA, 19 bp, Mus musculus
  siRNA target sequence for Kin (NM_025280.1,263-281).
cgacgctttggcactaaaa

SEQ ID NO: 715637 - DNA, 19 bp, Mus musculus
  siRNA target sequence for Kin (NM_025280.1,356-374).
gagacactgaccgacttta

SEQ ID NO: 715638 - DNA, 19 bp, Mus musculus
  siRNA target sequence for Kin (NM_025280.1,420-438).
cgaaaggctggtacattca

SEQ ID NO: 715639 - DNA, 19 bp, Mus musculus
  siRNA target sequence for Kin (NM_025280.1,426-444).
gctggtacattcagtacat

SEQ ID NO: 715640 - DNA, 19 bp, Mus musculus
  siRNA target sequence for Kin (NM_025280.1,468-486).
gtcggcaactggaattaga

SEQ ID NO: 715641 - DNA, 19 bp, Mus musculus
  siRNA target sequence for Kin (NM_025280.1,471-489).
ggcaactggaattagaaaa

SEQ ID NO: 715642 - DNA, 19 bp, Mus musculus
  siRNA target sequence for Kin (NM_025280.1,626-644).
gttacgttcaatctgaata

SEQ ID NO: 715643 - DNA, 19 bp, Mus musculus
  siRNA target sequence for Kin (NM_025280.1,862-880).
ggggatcgttgtgaaaatt

SEQ ID NO: 715644 - DNA, 19 bp, Mus musculus
  siRNA target sequence for Kin (NM_025280.1,863-881).
gggatcgttgtgaaaatta

SEQ ID NO: 715645 - DNA, 19 bp, Mus musculus
  siRNA target sequence for Kin (NM_025280.1,869-887).
gttgtgaaaattataacga

SEQ ID NO: 715646 - DNA, 19 bp, Mus musculus
  siRNA target sequence for Kin (NM_025280.1,889-907).
gaagcttggggagaaatat

SEQ ID NO: 715647 - DNA, 19 bp, Mus musculus
  siRNA target sequence for Kin (NM_025280.1,916-934).
gaaaggggtcgttaaggaa

SEQ ID NO: 715648 - DNA, 19 bp, Mus musculus
  siRNA target sequence for Kin (NM_025280.1,921-939).
gggtcgttaaggaagtgat

SEQ ID NO: 715649 - DNA, 19 bp, Mus musculus
  siRNA target sequence for Kin (NM_025280.1,922-940).
ggtcgttaaggaagtgatt

SEQ ID NO: 715650 - DNA, 19 bp, Mus musculus
  siRNA target sequence for Kin (NM_025280.1,1078-1096).
cactctcgaatccatcaat

SEQ ID NO: 715651 - DNA, 19 bp, Mus musculus
  siRNA target sequence for Kin (NM_025280.1,1080-1098).
ctctcgaatccatcaatga

SEQ ID NO: 715652 - DNA, 19 bp, Mus musculus
  siRNA target sequence for Kin (NM_025280.1,1110-1128).
cagccacgatagtcattga

SEQ ID NO: 715653 - DNA, 19 bp, Mus musculus
  siRNA target sequence for Kin (NM_025280.1,1114-1132).
cacgatagtcattgaaact

SEQ ID NO: 715654 - DNA, 19 bp, Mus musculus
  siRNA target sequence for Kin (NM_025280.1,1146-1164).
gacgcagagttgaaggtat

SEQ ID NO: 715655 - DNA, 19 bp, Mus musculus
  siRNA target sequence for Kin (NM_025280.1,1149-1167).
gcagagttgaaggtattca

SEQ ID NO: 715656 - DNA, 19 bp, Mus musculus
  siRNA target sequence for Prei3 (NM_025283.2,55-73).
gcaccaaggcgcaggattt

SEQ ID NO: 715657 - DNA, 19 bp, Mus musculus
  siRNA target sequence for Prei3 (NM_025283.2,82-100).
ggcctgatgaatcatttga

SEQ ID NO: 715658 - DNA, 19 bp, Mus musculus
  siRNA target sequence for Prei3 (NM_025283.2,121-139).
ctgttcagcagtatattca

SEQ ID NO: 715659 - DNA, 19 bp, Mus musculus
  siRNA target sequence for Prei3 (NM_025283.2,151-169).
gggcagactgctccaatat

SEQ ID NO: 715660 - DNA, 19 bp, Mus musculus
  siRNA target sequence for Prei3 (NM_025283.2,156-174).
gactgctccaatattgaca

SEQ ID NO: 715661 - DNA, 19 bp, Mus musculus
  siRNA target sequence for Prei3 (NM_025283.2,158-176).
ctgctccaatattgacaaa

SEQ ID NO: 715662 - DNA, 19 bp, Mus musculus
  siRNA target sequence for Prei3 (NM_025283.2,160-178).
gctccaatattgacaaaat

SEQ ID NO: 715663 - DNA, 19 bp, Mus musculus
  siRNA target sequence for Prei3 (NM_025283.2,161-179).
ctccaatattgacaaaatt

SEQ ID NO: 715664 - DNA, 19 bp, Mus musculus
  siRNA target sequence for Prei3 (NM_025283.2,164-182).
caatattgacaaaattctt

SEQ ID NO: 715665 - DNA, 19 bp, Mus musculus
  siRNA target sequence for Prei3 (NM_025283.2,256-274).
gacttgctgtcaaacttca

SEQ ID NO: 715666 - DNA, 19 bp, Mus musculus
  siRNA target sequence for Prei3 (NM_025283.2,360-378).
gagtgtcctgccatagatt

SEQ ID NO: 715667 - DNA, 19 bp, Mus musculus
  siRNA target sequence for Prei3 (NM_025283.2,362-380).
gtgtcctgccatagattat

SEQ ID NO: 715668 - DNA, 19 bp, Mus musculus
  siRNA target sequence for Prei3 (NM_025283.2,366-384).
cctgccatagattatacaa

SEQ ID NO: 715669 - DNA, 19 bp, Mus musculus
  siRNA target sequence for Prei3 (NM_025283.2,405-423).
gcatgtcttctgaatagca

SEQ ID NO: 715670 - DNA, 19 bp, Mus musculus
  siRNA target sequence for Prei3 (NM_025283.2,406-424).
catgtcttctgaatagcaa

SEQ ID NO: 715671 - DNA, 19 bp, Mus musculus
  siRNA target sequence for Prei3 (NM_025283.2,436-454).
ccagcagggttagcataaa

SEQ ID NO: 715672 - DNA, 19 bp, Mus musculus
  siRNA target sequence for Prei3 (NM_025283.2,437-455).
cagcagggttagcataaaa

SEQ ID NO: 715673 - DNA, 19 bp, Mus musculus
  siRNA target sequence for Prei3 (NM_025283.2,449-467).
cataaaagaatcatctgta

SEQ ID NO: 715674 - DNA, 19 bp, Mus musculus
  siRNA target sequence for Prei3 (NM_025283.2,481-499).
cagtgtgccgtaggattta

SEQ ID NO: 715675 - DNA, 19 bp, Mus musculus
  siRNA target sequence for Prei3 (NM_025283.2,483-501).
gtgtgccgtaggatttata

SEQ ID NO: 715676 - DNA, 19 bp, Mus musculus
  siRNA target sequence for Prei3 (NM_025283.2,485-503).
gtgccgtaggatttataga

SEQ ID NO: 715677 - DNA, 19 bp, Mus musculus
  siRNA target sequence for Prei3 (NM_025283.2,487-505).
gccgtaggatttatagaat

SEQ ID NO: 715678 - DNA, 19 bp, Mus musculus
  siRNA target sequence for Prei3 (NM_025283.2,511-529).
cacatgcctattttcatca

SEQ ID NO: 715679 - DNA, 19 bp, Mus musculus
  siRNA target sequence for Prei3 (NM_025283.2,584-602).
caaatttgtgatgaaatat

SEQ ID NO: 715680 - DNA, 19 bp, Mus musculus
  siRNA target sequence for Prei3 (NM_025283.2,613-631).
cgaaggataacctgattgt

SEQ ID NO: 715681 - DNA, 19 bp, Mus musculus
  siRNA target sequence for Prei3 (NM_025283.2,614-632).
gaaggataacctgattgta

SEQ ID NO: 715682 - DNA, 19 bp, Mus musculus
  siRNA target sequence for Slc31a2 (NM_025286.1,329-347).
ggaccagaccaggattcta

SEQ ID NO: 715683 - DNA, 19 bp, Mus musculus
  siRNA target sequence for Slc31a2 (NM_025286.1,536-554).
ccacttctcaacatgactt

SEQ ID NO: 715684 - DNA, 19 bp, Mus musculus
  siRNA target sequence for Sra1 (NM_025291.1,125-143).
cgcactccccttactaaga

SEQ ID NO: 715685 - DNA, 19 bp, Mus musculus
  siRNA target sequence for Sra1 (NM_025291.1,282-300).
caagttccccagtcattga

SEQ ID NO: 715686 - DNA, 19 bp, Mus musculus
  siRNA target sequence for Sra1 (NM_025291.1,428-446).
gctggagggaagttgtcaa

SEQ ID NO: 715687 - DNA, 19 bp, Mus musculus
  siRNA target sequence for Sra1 (NM_025291.1,429-447).
ctggagggaagttgtcaat

SEQ ID NO: 715688 - DNA, 19 bp, Mus musculus
  siRNA target sequence for Sra1 (NM_025291.1,468-486).
cactgctagtgcaagaact

SEQ ID NO: 715689 - DNA, 19 bp, Mus musculus
  siRNA target sequence for Sra1 (NM_025291.1,470-488).
ctgctagtgcaagaacttt

SEQ ID NO: 715690 - DNA, 19 bp, Mus musculus
  siRNA target sequence for Sra1 (NM_025291.1,472-490).
gctagtgcaagaactttta

SEQ ID NO: 715691 - DNA, 19 bp, Mus musculus
  siRNA target sequence for Sra1 (NM_025291.1,502-520).
ggatgcagcagatgacatt

SEQ ID NO: 715692 - DNA, 19 bp, Mus musculus
  siRNA target sequence for Sra1 (NM_025291.1,619-637).
gaccaaagaagagaaattt

SEQ ID NO: 715693 - DNA, 19 bp, Mus musculus
  siRNA target sequence for Gtlf3a (NM_025293.1,435-453).
gatgcccatgggaagcaaa

SEQ ID NO: 715694 - DNA, 19 bp, Mus musculus
  siRNA target sequence for Gtlf3a (NM_025293.1,533-551).
ggtcgttgccactacataa

SEQ ID NO: 715695 - DNA, 19 bp, Mus musculus
  siRNA target sequence for Gtlf3a (NM_025293.1,536-554).
cgttgccactacataagca

SEQ ID NO: 715696 - DNA, 19 bp, Mus musculus
  siRNA target sequence for Gtlf3a (NM_025293.1,564-582).
cgtggccaaagcttgcatt

SEQ ID NO: 715697 - DNA, 19 bp, Mus musculus
  siRNA target sequence for Gtlf3a (NM_025293.1,579-597).
cattccagctccatattga

SEQ ID NO: 715698 - DNA, 19 bp, Mus musculus
  siRNA target sequence for Gtlf3a (NM_025293.1,648-666).
ggaccatgtgtctcttctt

SEQ ID NO: 715699 - DNA, 19 bp, Mus musculus
  siRNA target sequence for Gtlf3a (NM_025293.1,741-759).
ctcttgccacagaaaaggt

SEQ ID NO: 715700 - DNA, 19 bp, Mus musculus
  siRNA target sequence for Gtlf3a (NM_025293.1,785-803).
ctgattgtccacagtttga

SEQ ID NO: 715701 - DNA, 19 bp, Mus musculus
  siRNA target sequence for Gtlf3b (NM_025294.3,153-171).
gcgcctcaacggatgtcat

SEQ ID NO: 715702 - DNA, 19 bp, Mus musculus
  siRNA target sequence for Gtlf3b (NM_025294.3,179-197).
ctgtcctgctctatgagta

SEQ ID NO: 715703 - DNA, 19 bp, Mus musculus
  siRNA target sequence for AW210570 (NM_025296.2,224-242).
gcggaggcgaccgtaaaat

SEQ ID NO: 715704 - DNA, 19 bp, Mus musculus
  siRNA target sequence for AW210570 (NM_025296.2,225-243).
cggaggcgaccgtaaaatt

SEQ ID NO: 715705 - DNA, 19 bp, Mus musculus
  siRNA target sequence for AW210570 (NM_025296.2,259-277).
gagggtgacagctggattt

SEQ ID NO: 715706 - DNA, 19 bp, Mus musculus
  siRNA target sequence for AW210570 (NM_025296.2,279-297).
caagtctgtcctttctgaa

SEQ ID NO: 715707 - DNA, 19 bp, Mus musculus
  siRNA target sequence for AW210570 (NM_025296.2,327-345).
ctggtccccgtgtggaaat

SEQ ID NO: 715708 - DNA, 19 bp, Mus musculus
  siRNA target sequence for AW210570 (NM_025296.2,329-347).
ggtccccgtgtggaaatta

SEQ ID NO: 715709 - DNA, 19 bp, Mus musculus
  siRNA target sequence for AW210570 (NM_025296.2,332-350).
ccccgtgtggaaattacct

SEQ ID NO: 715710 - DNA, 19 bp, Mus musculus
  siRNA target sequence for AW210570 (NM_025296.2,367-385).
gatgccaccacttgtattt

SEQ ID NO: 715711 - DNA, 19 bp, Mus musculus
  siRNA target sequence for AW210570 (NM_025296.2,485-503).
ctacctgcagcagagataa

SEQ ID NO: 715712 - DNA, 19 bp, Mus musculus
  siRNA target sequence for AW210570 (NM_025296.2,566-584).
ctcatacgcaggacgttaa

SEQ ID NO: 715713 - DNA, 19 bp, Mus musculus
  siRNA target sequence for AW210570 (NM_025296.2,603-621).
gagccaggagcttttagct

SEQ ID NO: 715714 - DNA, 19 bp, Mus musculus
  siRNA target sequence for AW210570 (NM_025296.2,792-810).
gtatctaccgggcaatgaa

SEQ ID NO: 715715 - DNA, 19 bp, Mus musculus
  siRNA target sequence for AW210570 (NM_025296.2,1025-1043).
cccattcccaggatgtcaa

SEQ ID NO: 715716 - DNA, 19 bp, Mus musculus
  siRNA target sequence for AW210570 (NM_025296.2,1080-1098).
ggcctcttgtagtgatgat

SEQ ID NO: 715717 - DNA, 19 bp, Mus musculus
  siRNA target sequence for Txnl4 (NM_025299.1,168-186).
cgcgtggtcgtcattcgtt

SEQ ID NO: 715718 - DNA, 19 bp, Mus musculus
  siRNA target sequence for Txnl4 (NM_025299.1,169-187).
gcgtggtcgtcattcgttt

SEQ ID NO: 715719 - DNA, 19 bp, Mus musculus
  siRNA target sequence for Txnl4 (NM_025299.1,238-256).
gcatcgccgaaaaggttaa

SEQ ID NO: 715720 - DNA, 19 bp, Mus musculus
  siRNA target sequence for Txnl4 (NM_025299.1,239-257).
catcgccgaaaaggttaaa

SEQ ID NO: 715721 - DNA, 19 bp, Mus musculus
  siRNA target sequence for Txnl4 (NM_025299.1,242-260).
cgccgaaaaggttaaaaat

SEQ ID NO: 715722 - DNA, 19 bp, Mus musculus
  siRNA target sequence for Txnl4 (NM_025299.1,243-261).
gccgaaaaggttaaaaatt

SEQ ID NO: 715723 - DNA, 19 bp, Mus musculus
  siRNA target sequence for Txnl4 (NM_025299.1,244-262).
ccgaaaaggttaaaaattt

SEQ ID NO: 715724 - DNA, 19 bp, Mus musculus
  siRNA target sequence for Txnl4 (NM_025299.1,501-519).
gactattctaccaagtaca

SEQ ID NO: 715725 - DNA, 19 bp, Mus musculus
  siRNA target sequence for Epcs3 (NM_025310.2,102-120).
cgggacaagttctatcact

SEQ ID NO: 715726 - DNA, 19 bp, Mus musculus
  siRNA target sequence for Epcs3 (NM_025310.2,103-121).
gggacaagttctatcactt

SEQ ID NO: 715727 - DNA, 19 bp, Mus musculus
  siRNA target sequence for Epcs3 (NM_025310.2,145-163).
cgcgctctgccttcaaact

SEQ ID NO: 715728 - DNA, 19 bp, Mus musculus
  siRNA target sequence for Epcs3 (NM_025310.2,171-189).
ctcaatcgccgctttcagt

SEQ ID NO: 715729 - DNA, 19 bp, Mus musculus
  siRNA target sequence for Epcs3 (NM_025310.2,266-284).
gcctgtatccagtcttatt

SEQ ID NO: 715730 - DNA, 19 bp, Mus musculus
  siRNA target sequence for Epcs3 (NM_025310.2,289-307).
gagtggacctcgttccaat

SEQ ID NO: 715731 - DNA, 19 bp, Mus musculus
  siRNA target sequence for Epcs3 (NM_025310.2,386-404).
gaagacctggaaagttgat

SEQ ID NO: 715732 - DNA, 19 bp, Mus musculus
  siRNA target sequence for Epcs3 (NM_025310.2,513-531).
gcccgtggtggttgtttca

SEQ ID NO: 715733 - DNA, 19 bp, Mus musculus
  siRNA target sequence for Epcs3 (NM_025310.2,526-544).
gtttcatcacaaaagtctt

SEQ ID NO: 715734 - DNA, 19 bp, Mus musculus
  siRNA target sequence for Epcs3 (NM_025310.2,542-560).
ctttcgttcccgagactat

SEQ ID NO: 715735 - DNA, 19 bp, Mus musculus
  siRNA target sequence for Epcs3 (NM_025310.2,676-694).
cggacaaggttgatgctaa

SEQ ID NO: 715736 - DNA, 19 bp, Mus musculus
  siRNA target sequence for Epcs3 (NM_025310.2,715-733).
cctttaaggaggttgaagt

SEQ ID NO: 715737 - DNA, 19 bp, Mus musculus
  siRNA target sequence for Epcs3 (NM_025310.2,726-744).
gttgaagttcaggctaaaa

SEQ ID NO: 715738 - DNA, 19 bp, Mus musculus
  siRNA target sequence for Epcs3 (NM_025310.2,732-750).
gttcaggctaaaactgtta

SEQ ID NO: 715739 - DNA, 19 bp, Mus musculus
  siRNA target sequence for Epcs3 (NM_025310.2,793-811).
ccgaaggtgaccttactct

SEQ ID NO: 715740 - DNA, 19 bp, Mus musculus
  siRNA target sequence for Epcs3 (NM_025310.2,794-812).
cgaaggtgaccttactctt

SEQ ID NO: 715741 - DNA, 19 bp, Mus musculus
  siRNA target sequence for Epcs3 (NM_025310.2,823-841).
cctcagttacggacttctt

SEQ ID NO: 715742 - DNA, 19 bp, Mus musculus
  siRNA target sequence for Epcs3 (NM_025310.2,878-896).
cagcgaaatctcaatagat

SEQ ID NO: 715743 - DNA, 19 bp, Mus musculus
  siRNA target sequence for Epcs3 (NM_025310.2,880-898).
gcgaaatctcaatagatga

SEQ ID NO: 715744 - DNA, 19 bp, Mus musculus
  siRNA target sequence for Epcs3 (NM_025310.2,881-899).
cgaaatctcaatagatgat

SEQ ID NO: 715745 - DNA, 19 bp, Mus musculus
  siRNA target sequence for Epcs3 (NM_025310.2,919-937).
cagctacaactgaagacat

SEQ ID NO: 715746 - DNA, 19 bp, Mus musculus
  siRNA target sequence for Epcs3 (NM_025310.2,921-939).
gctacaactgaagacatta

SEQ ID NO: 715747 - DNA, 19 bp, Mus musculus
  siRNA target sequence for Epcs3 (NM_025310.2,925-943).
caactgaagacattagagt

SEQ ID NO: 715748 - DNA, 19 bp, Mus musculus
  siRNA target sequence for Epcs3 (NM_025310.2,990-1008).
cttctgaattggagaacaa

SEQ ID NO: 715749 - DNA, 19 bp, Mus musculus
  siRNA target sequence for Epcs3 (NM_025310.2,1015-1033).
ggcgatatgtggctaagaa

SEQ ID NO: 715750 - DNA, 19 bp, Mus musculus
  siRNA target sequence for Epcs3 (NM_025310.2,1352-1370).
gttattagaggaagtaaca

SEQ ID NO: 715751 - DNA, 19 bp, Mus musculus
  siRNA target sequence for Epcs3 (NM_025310.2,1412-1430).
gccaagggatgacatctat

SEQ ID NO: 715752 - DNA, 19 bp, Mus musculus
  siRNA target sequence for Epcs3 (NM_025310.2,1443-1461).
gaggacgatgatgatactt

SEQ ID NO: 715753 - DNA, 19 bp, Mus musculus
  siRNA target sequence for Epcs3 (NM_025310.2,1529-1547).
gaagtacttgcggtttact

SEQ ID NO: 715754 - DNA, 19 bp, Mus musculus
  siRNA target sequence for Epcs3 (NM_025310.2,1532-1550).
gtacttgcggtttactcaa

SEQ ID NO: 715755 - DNA, 19 bp, Mus musculus
  siRNA target sequence for Epcs3 (NM_025310.2,1535-1553).
cttgcggtttactcaagta

SEQ ID NO: 715756 - DNA, 19 bp, Mus musculus
  siRNA target sequence for Epcs3 (NM_025310.2,1538-1556).
gcggtttactcaagtagat

SEQ ID NO: 715757 - DNA, 19 bp, Mus musculus
  siRNA target sequence for Epcs3 (NM_025310.2,1761-1779).
ccaccacctactaacttga

SEQ ID NO: 715758 - DNA, 19 bp, Mus musculus
  siRNA target sequence for Epcs3 (NM_025310.2,1762-1780).
caccacctactaacttgaa

SEQ ID NO: 715759 - DNA, 19 bp, Mus musculus
  siRNA target sequence for Epcs3 (NM_025310.2,2011-2029).
cagtgaaataccgaattct

SEQ ID NO: 715760 - DNA, 19 bp, Mus musculus
  siRNA target sequence for Epcs3 (NM_025310.2,2104-2122).
cgttcaaccggtatgcttt

SEQ ID NO: 715761 - DNA, 19 bp, Mus musculus
  siRNA target sequence for Epcs3 (NM_025310.2,2105-2123).
gttcaaccggtatgctttt

SEQ ID NO: 715762 - DNA, 19 bp, Mus musculus
  siRNA target sequence for Epcs3 (NM_025310.2,2111-2129).
ccggtatgcttttaatgaa

SEQ ID NO: 715763 - DNA, 19 bp, Mus musculus
  siRNA target sequence for Epcs3 (NM_025310.2,2184-2202).
cgccagctgcctgttgata

SEQ ID NO: 715764 - DNA, 19 bp, Mus musculus
  siRNA target sequence for Epcs3 (NM_025310.2,2185-2203).
gccagctgcctgttgataa

SEQ ID NO: 715765 - DNA, 19 bp, Mus musculus
  siRNA target sequence for Epcs3 (NM_025310.2,2387-2405).
gcgaagtctctacaagaaa

SEQ ID NO: 715766 - DNA, 19 bp, Mus musculus
  siRNA target sequence for Epcs3 (NM_025310.2,2423-2441).
gaaacgccaggtcacttat

SEQ ID NO: 715767 - DNA, 19 bp, Mus musculus
  siRNA target sequence for Epcs3 (NM_025310.2,2428-2446).
gccaggtcacttatgttgt

SEQ ID NO: 715768 - DNA, 19 bp, Mus musculus
  siRNA target sequence for Epcs3 (NM_025310.2,2485-2503).
ctggagtcaaaggtcattt

SEQ ID NO: 715769 - DNA, 19 bp, Mus musculus
  siRNA target sequence for Epcs3 (NM_025310.2,2487-2505).
ggagtcaaaggtcatttca

SEQ ID NO: 715770 - DNA, 19 bp, Mus musculus
  siRNA target sequence for Epcs3 (NM_025310.2,2488-2506).
gagtcaaaggtcatttcaa

SEQ ID NO: 715771 - DNA, 19 bp, Mus musculus
  siRNA target sequence for D14Ertd449e (NM_025311.1,90-108).
gggaccccactgcatactt

SEQ ID NO: 715772 - DNA, 19 bp, Mus musculus
  siRNA target sequence for D14Ertd449e (NM_025311.1,217-235).
gggtcccttcacgaagtat

SEQ ID NO: 715773 - DNA, 19 bp, Mus musculus
  siRNA target sequence for D14Ertd449e (NM_025311.1,218-236).
ggtcccttcacgaagtatt

SEQ ID NO: 715774 - DNA, 19 bp, Mus musculus
  siRNA target sequence for D14Ertd449e (NM_025311.1,219-237).
gtcccttcacgaagtattt

SEQ ID NO: 715775 - DNA, 19 bp, Mus musculus
  siRNA target sequence for D14Ertd449e (NM_025311.1,222-240).
ccttcacgaagtatttggt

SEQ ID NO: 715776 - DNA, 19 bp, Mus musculus
  siRNA target sequence for D14Ertd449e (NM_025311.1,276-294).
ggcttgcttggctaattca

SEQ ID NO: 715777 - DNA, 19 bp, Mus musculus
  siRNA target sequence for D14Ertd449e (NM_025311.1,277-295).
gcttgcttggctaattcat

SEQ ID NO: 715778 - DNA, 19 bp, Mus musculus
  siRNA target sequence for D14Ertd449e (NM_025311.1,306-324).
ccttgtatgccttggtttt

SEQ ID NO: 715779 - DNA, 19 bp, Mus musculus
  siRNA target sequence for D14Ertd449e (NM_025311.1,328-346).
caagcgtaaaggaatcaca

SEQ ID NO: 715780 - DNA, 19 bp, Mus musculus
  siRNA target sequence for D14Ertd449e (NM_025311.1,424-442).
cagatcaaagcgccaaaaa

SEQ ID NO: 715781 - DNA, 19 bp, Mus musculus
  siRNA target sequence for D14Ertd449e (NM_025311.1,426-444).
gatcaaagcgccaaaaaca

SEQ ID NO: 715782 - DNA, 19 bp, Mus musculus
  siRNA target sequence for D14Ertd449e (NM_025311.1,429-447).
caaagcgccaaaaacacaa

SEQ ID NO: 715783 - DNA, 19 bp, Mus musculus
  siRNA target sequence for Sostdc1 (NM_025312.1,235-253).
ggaggcaggcatttcagta

SEQ ID NO: 715784 - DNA, 19 bp, Mus musculus
  siRNA target sequence for Sostdc1 (NM_025312.1,298-316).
gaactgcggtccaccaaat

SEQ ID NO: 715785 - DNA, 19 bp, Mus musculus
  siRNA target sequence for Sostdc1 (NM_025312.1,418-436).
ggctatggaacaaagtact

SEQ ID NO: 715786 - DNA, 19 bp, Mus musculus
  siRNA target sequence for Sostdc1 (NM_025312.1,519-537).
cagcacgcgcacctacaaa

SEQ ID NO: 715787 - DNA, 19 bp, Mus musculus
  siRNA target sequence for Sostdc1 (NM_025312.1,588-606).
cgagtccagccacaacttt

SEQ ID NO: 715788 - DNA, 19 bp, Mus musculus
  siRNA target sequence for Hars2 (NM_025314.1,203-221).
ggttcgaaagattttaaat

SEQ ID NO: 715789 - DNA, 19 bp, Mus musculus
  siRNA target sequence for Hars2 (NM_025314.1,259-277).
ccaagagcgtgatggataa

SEQ ID NO: 715790 - DNA, 19 bp, Mus musculus
  siRNA target sequence for Hars2 (NM_025314.1,415-433).
gctacagaccagagcttat

SEQ ID NO: 715791 - DNA, 19 bp, Mus musculus
  siRNA target sequence for Hars2 (NM_025314.1,419-437).
cagaccagagcttatcaga

SEQ ID NO: 715792 - DNA, 19 bp, Mus musculus
  siRNA target sequence for Hars2 (NM_025314.1,479-497).
cgatgggcctgtgactata

SEQ ID NO: 715793 - DNA, 19 bp, Mus musculus
  siRNA target sequence for Hars2 (NM_025314.1,623-641).
gaatgcaccccgcaaagaa

SEQ ID NO: 715794 - DNA, 19 bp, Mus musculus
  siRNA target sequence for Surb7 (NM_025315.1,72-90).
ctcgcttgcagatcagttt

SEQ ID NO: 715795 - DNA, 19 bp, Mus musculus
  siRNA target sequence for Surb7 (NM_025315.1,127-145).
cctgcctcttttagtaaca

SEQ ID NO: 715796 - DNA, 19 bp, Mus musculus
  siRNA target sequence for Surb7 (NM_025315.1,128-146).
ctgcctcttttagtaacat

SEQ ID NO: 715797 - DNA, 19 bp, Mus musculus
  siRNA target sequence for Surb7 (NM_025315.1,166-184).
gatcaaccagccaatccta

SEQ ID NO: 715798 - DNA, 19 bp, Mus musculus
  siRNA target sequence for Surb7 (NM_025315.1,176-194).
ccaatcctacagaagagta

SEQ ID NO: 715799 - DNA, 19 bp, Mus musculus
  siRNA target sequence for Surb7 (NM_025315.1,177-195).
caatcctacagaagagtat

SEQ ID NO: 715800 - DNA, 19 bp, Mus musculus
  siRNA target sequence for Surb7 (NM_025315.1,201-219).
gctttttgcagcactgatt

SEQ ID NO: 715801 - DNA, 19 bp, Mus musculus
  siRNA target sequence for Surb7 (NM_025315.1,220-238).
gcacgaacagcaaaagata

SEQ ID NO: 715802 - DNA, 19 bp, Mus musculus
  siRNA target sequence for Surb7 (NM_025315.1,227-245).
cagcaaaagatattgatgt

SEQ ID NO: 715803 - DNA, 19 bp, Mus musculus
  siRNA target sequence for Surb7 (NM_025315.1,289-307).
caggctgctagcttatata

SEQ ID NO: 715804 - DNA, 19 bp, Mus musculus
  siRNA target sequence for Surb7 (NM_025315.1,300-318).
cttatataagctagaagaa

SEQ ID NO: 715805 - DNA, 19 bp, Mus musculus
  siRNA target sequence for Surb7 (NM_025315.1,338-356).
catgtctggaggatgttgt

SEQ ID NO: 715806 - DNA, 19 bp, Mus musculus
  siRNA target sequence for Ndufb5 (NM_025316.2,96-114).
gactcggagtcggaagttt

SEQ ID NO: 715807 - DNA, 19 bp, Mus musculus
  siRNA target sequence for Ndufb5 (NM_025316.2,166-184).
ccatggcaagagactgttt

SEQ ID NO: 715808 - DNA, 19 bp, Mus musculus
  siRNA target sequence for Ndufb5 (NM_025316.2,185-203).
gtcgtcaagccttctttat

SEQ ID NO: 715809 - DNA, 19 bp, Mus musculus
  siRNA target sequence for Ndufb5 (NM_025316.2,188-206).
gtcaagccttctttatact

SEQ ID NO: 715810 - DNA, 19 bp, Mus musculus
  siRNA target sequence for Ndufb5 (NM_025316.2,212-230).
gctcgcttcttgaggttaa

SEQ ID NO: 715811 - DNA, 19 bp, Mus musculus
  siRNA target sequence for Ndufb5 (NM_025316.2,213-231).
ctcgcttcttgaggttaat

SEQ ID NO: 715812 - DNA, 19 bp, Mus musculus
  siRNA target sequence for Ndufb5 (NM_025316.2,215-233).
cgcttcttgaggttaatga

SEQ ID NO: 715813 - DNA, 19 bp, Mus musculus
  siRNA target sequence for Ndufb5 (NM_025316.2,216-234).
gcttcttgaggttaatgaa

SEQ ID NO: 715814 - DNA, 19 bp, Mus musculus
  siRNA target sequence for Ndufb5 (NM_025316.2,217-235).
cttcttgaggttaatgaaa

SEQ ID NO: 715815 - DNA, 19 bp, Mus musculus
  siRNA target sequence for Ndufb5 (NM_025316.2,250-268).
gactgggatcccagttata

SEQ ID NO: 715816 - DNA, 19 bp, Mus musculus
  siRNA target sequence for Ndufb5 (NM_025316.2,252-270).
ctgggatcccagttataat

SEQ ID NO: 715817 - DNA, 19 bp, Mus musculus
  siRNA target sequence for Ndufb5 (NM_025316.2,339-357).
ctgaacactgggagtatta

SEQ ID NO: 715818 - DNA, 19 bp, Mus musculus
  siRNA target sequence for Ndufb5 (NM_025316.2,341-359).
gaacactgggagtattaca

SEQ ID NO: 715819 - DNA, 19 bp, Mus musculus
  siRNA target sequence for Ndufb5 (NM_025316.2,358-376).
caagcatccgatatcaaga

SEQ ID NO: 715820 - DNA, 19 bp, Mus musculus
  siRNA target sequence for Ndufb5 (NM_025316.2,430-448).
ggctatcctccagattgaa

SEQ ID NO: 715821 - DNA, 19 bp, Mus musculus
  siRNA target sequence for Ndufb5 (NM_025316.2,436-454).
cctccagattgaatctgaa

SEQ ID NO: 715822 - DNA, 19 bp, Mus musculus
  siRNA target sequence for Ndufb5 (NM_025316.2,437-455).
ctccagattgaatctgaaa

SEQ ID NO: 715823 - DNA, 19 bp, Mus musculus
  siRNA target sequence for Ndufb5 (NM_025316.2,459-477).
ctgagttacggttaaagga

SEQ ID NO: 715824 - DNA, 19 bp, Mus musculus
  siRNA target sequence for Ndufb5 (NM_025316.2,512-530).
gatggaccctggtatcaat

SEQ ID NO: 715825 - DNA, 19 bp, Mus musculus
  siRNA target sequence for Ndufb5 (NM_025316.2,537-555).
cccctgaaaaggagttcat

SEQ ID NO: 715826 - DNA, 19 bp, Mus musculus
  siRNA target sequence for Mrpl54 (NM_025317.1,114-132).
gacctggaggattctctat

SEQ ID NO: 715827 - DNA, 19 bp, Mus musculus
  siRNA target sequence for Mrpl54 (NM_025317.1,127-145).
ctctatccgggaatatgct

SEQ ID NO: 715828 - DNA, 19 bp, Mus musculus
  siRNA target sequence for Mrpl54 (NM_025317.1,383-401).
cgactacttcgcaaacaga

SEQ ID NO: 715829 - DNA, 19 bp, Mus musculus
  siRNA target sequence for Mrpl54 (NM_025317.1,384-402).
gactacttcgcaaacagaa

SEQ ID NO: 715830 - DNA, 19 bp, Mus musculus
  siRNA target sequence for Mrpl54 (NM_025317.1,386-404).
ctacttcgcaaacagaata

SEQ ID NO: 715831 - DNA, 19 bp, Mus musculus
  siRNA target sequence for Mrpl54 (NM_025317.1,389-407).
cttcgcaaacagaatatct

SEQ ID NO: 715832 - DNA, 19 bp, Mus musculus
  siRNA target sequence for 0610009E20Rik (NM_025318.1,369-387).
gaacaaatattttaagtca

SEQ ID NO: 715833 - DNA, 19 bp, Mus musculus
  siRNA target sequence for 0610012G03Rik (NM_025320.1,369-387).
ccgtcccttcagtgatcta

SEQ ID NO: 715834 - DNA, 19 bp, Mus musculus
  siRNA target sequence for 0610012G03Rik (NM_025320.1,445-463).
ctcggattgtcctacagat

SEQ ID NO: 715835 - DNA, 19 bp, Mus musculus
  siRNA target sequence for 2300009P13Rik (NM_025324.1,111-129).
gacccgttgccttcaactt

SEQ ID NO: 715836 - DNA, 19 bp, Mus musculus
  siRNA target sequence for 2300009P13Rik (NM_025324.1,114-132).
ccgttgccttcaactttgt

SEQ ID NO: 715837 - DNA, 19 bp, Mus musculus
  siRNA target sequence for 2300009P13Rik (NM_025324.1,310-328).
gtggcagcagcgatcttct

SEQ ID NO: 715838 - DNA, 19 bp, Mus musculus
  siRNA target sequence for 2300009P13Rik (NM_025324.1,339-357).
gatcagggtgttccttata

SEQ ID NO: 715839 - DNA, 19 bp, Mus musculus
  siRNA target sequence for 2300009P13Rik (NM_025324.1,344-362).
gggtgttccttatacagtt

SEQ ID NO: 715840 - DNA, 19 bp, Mus musculus
  siRNA target sequence for 2300009P13Rik (NM_025324.1,475-493).
gcatctcacactcagaatt

SEQ ID NO: 715841 - DNA, 19 bp, Mus musculus
  siRNA target sequence for 2300009P13Rik (NM_025324.1,497-515).
gccacacgtgtgcaaagat

SEQ ID NO: 715842 - DNA, 19 bp, Mus musculus
  siRNA target sequence for 2300009P13Rik (NM_025324.1,498-516).
ccacacgtgtgcaaagatt

SEQ ID NO: 715843 - DNA, 19 bp, Mus musculus
  siRNA target sequence for 2300009P13Rik (NM_025324.1,695-713).
cttcaccgaggccaatact

SEQ ID NO: 715844 - DNA, 19 bp, Mus musculus
  siRNA target sequence for 2300009P13Rik (NM_025324.1,812-830).
cgagggcatccctgttcaa

SEQ ID NO: 715845 - DNA, 19 bp, Mus musculus
  siRNA target sequence for 2300009P13Rik (NM_025324.1,815-833).
gggcatccctgttcaagaa

SEQ ID NO: 715846 - DNA, 19 bp, Mus musculus
  siRNA target sequence for 2300009P13Rik (NM_025324.1,953-971).
ccaagacacccttgtttct

SEQ ID NO: 715847 - DNA, 19 bp, Mus musculus
  siRNA target sequence for 0610011I04Rik (NM_025326.2,162-180).
gtctgctctggccaaactt

SEQ ID NO: 715848 - DNA, 19 bp, Mus musculus
  siRNA target sequence for 0610011I04Rik (NM_025326.2,187-205).
gccggatgctcattgctaa

SEQ ID NO: 715849 - DNA, 19 bp, Mus musculus
  siRNA target sequence for 0610011I04Rik (NM_025326.2,306-324).
gggtggaaccctctacata

SEQ ID NO: 715850 - DNA, 19 bp, Mus musculus
  siRNA target sequence for 0610011I04Rik (NM_025326.2,315-333).
cctctacataggccattat

SEQ ID NO: 715851 - DNA, 19 bp, Mus musculus
  siRNA target sequence for 0610011I04Rik (NM_025326.2,316-334).
ctctacataggccattatt

SEQ ID NO: 715852 - DNA, 19 bp, Mus musculus
  siRNA target sequence for 0610011I04Rik (NM_025326.2,318-336).
ctacataggccattattta

SEQ ID NO: 715853 - DNA, 19 bp, Mus musculus
  siRNA target sequence for 0610011I04Rik (NM_025326.2,327-345).
ccattatttagccatgtat

SEQ ID NO: 715854 - DNA, 19 bp, Mus musculus
  siRNA target sequence for 0610011I04Rik (NM_025326.2,499-517).
gggtctcgtgagttgaatt

SEQ ID NO: 715855 - DNA, 19 bp, Mus musculus
  siRNA target sequence for 0610011I04Rik (NM_025326.2,501-519).
gtctcgtgagttgaatttt

SEQ ID NO: 715856 - DNA, 19 bp, Mus musculus
  siRNA target sequence for 0610011I04Rik (NM_025326.2,525-543).
gtattttctcggagatgat

SEQ ID NO: 715857 - DNA, 19 bp, Mus musculus
  siRNA target sequence for 0610011I04Rik (NM_025326.2,535-553).
ggagatgatgtctgtcaaa

SEQ ID NO: 715858 - DNA, 19 bp, Mus musculus
  siRNA target sequence for 0610011I04Rik (NM_025326.2,617-635).
ggattgccttgtgcatata

SEQ ID NO: 715859 - DNA, 19 bp, Mus musculus
  siRNA target sequence for 0610011I04Rik (NM_025326.2,622-640).
gccttgtgcatatactaca

SEQ ID NO: 715860 - DNA, 19 bp, Mus musculus
  siRNA target sequence for 0610011I04Rik (NM_025326.2,716-734).
ctctcacccatgtatgtgt

SEQ ID NO: 715861 - DNA, 19 bp, Mus musculus
  siRNA target sequence for 0610011I04Rik (NM_025326.2,722-740).
cccatgtatgtgtctacat

SEQ ID NO: 715862 - DNA, 19 bp, Mus musculus
  siRNA target sequence for 0610010I12Rik (NM_025327.1,250-268).
gagaatctggtctttggta

SEQ ID NO: 715863 - DNA, 19 bp, Mus musculus
  siRNA target sequence for 0610010I12Rik (NM_025327.1,266-284).
gtaaaggcttccaagcaaa

SEQ ID NO: 715864 - DNA, 19 bp, Mus musculus
  siRNA target sequence for 0610010I12Rik (NM_025327.1,272-290).
gcttccaagcaaaaatctt

SEQ ID NO: 715865 - DNA, 19 bp, Mus musculus
  siRNA target sequence for 0610010I12Rik (NM_025327.1,382-400).
gttggtctgtactacatca

SEQ ID NO: 715866 - DNA, 19 bp, Mus musculus
  siRNA target sequence for 0610010I12Rik (NM_025327.1,385-403).
ggtctgtactacatcaaca

SEQ ID NO: 715867 - DNA, 19 bp, Mus musculus
  siRNA target sequence for 0610010I12Rik (NM_025327.1,444-462).
cacaccggccaaaatcact

SEQ ID NO: 715868 - DNA, 19 bp, Mus musculus
  siRNA target sequence for 0610037H22Rik (NM_025332.1,30-48).
gcggctaggttgagtcata

SEQ ID NO: 715869 - DNA, 19 bp, Mus musculus
  siRNA target sequence for 0610037H22Rik (NM_025332.1,32-50).
ggctaggttgagtcataga

SEQ ID NO: 715870 - DNA, 19 bp, Mus musculus
  siRNA target sequence for 0610037H22Rik (NM_025332.1,131-149).
gctaaggctgccacagaaa

SEQ ID NO: 715871 - DNA, 19 bp, Mus musculus
  siRNA target sequence for 0610037H22Rik (NM_025332.1,371-389).
cataggccgaagcaatgtt

SEQ ID NO: 715872 - DNA, 19 bp, Mus musculus
  siRNA target sequence for 0610037H22Rik (NM_025332.1,376-394).
gccgaagcaatgttggaaa

SEQ ID NO: 715873 - DNA, 19 bp, Mus musculus
  siRNA target sequence for 0610037H22Rik (NM_025332.1,377-395).
ccgaagcaatgttggaaaa

SEQ ID NO: 715874 - DNA, 19 bp, Mus musculus
  siRNA target sequence for 0610037H22Rik (NM_025332.1,378-396).
cgaagcaatgttggaaaat

SEQ ID NO: 715875 - DNA, 19 bp, Mus musculus
  siRNA target sequence for 0610037H22Rik (NM_025332.1,400-418).
ctttgataaaggccttatt

SEQ ID NO: 715876 - DNA, 19 bp, Mus musculus
  siRNA target sequence for 0610037H22Rik (NM_025332.1,521-539).
gccagggtatggctataga

SEQ ID NO: 715877 - DNA, 19 bp, Mus musculus
  siRNA target sequence for 0610037H22Rik (NM_025332.1,571-589).
cttacctaaaggaacgaaa

SEQ ID NO: 715878 - DNA, 19 bp, Mus musculus
  siRNA target sequence for 0610037H22Rik (NM_025332.1,582-600).
gaacgaaataatttgaaga

SEQ ID NO: 715879 - DNA, 19 bp, Mus musculus
  siRNA target sequence for 0610037H22Rik (NM_025332.1,721-739).
ccaaggggtatcttttaaa

SEQ ID NO: 715880 - DNA, 19 bp, Mus musculus
  siRNA target sequence for 0610037H22Rik (NM_025332.1,741-759).
caagtgctccagattcaga

SEQ ID NO: 715881 - DNA, 19 bp, Mus musculus
  siRNA target sequence for 0610037H22Rik (NM_025332.1,749-767).
ccagattcagaagtttgtt

SEQ ID NO: 715882 - DNA, 19 bp, Mus musculus
  siRNA target sequence for 0610037H22Rik (NM_025332.1,792-810).
cctcagctgtttcctataa

SEQ ID NO: 715883 - DNA, 19 bp, Mus musculus
  siRNA target sequence for 0610037H22Rik (NM_025332.1,828-846).
ggagtccatctgttgaaat

SEQ ID NO: 715884 - DNA, 19 bp, Mus musculus
  siRNA target sequence for 0610037H22Rik (NM_025332.1,831-849).
gtccatctgttgaaatgct

SEQ ID NO: 715885 - DNA, 19 bp, Mus musculus
  siRNA target sequence for 0610037H22Rik (NM_025332.1,833-851).
ccatctgttgaaatgcttt

SEQ ID NO: 715886 - DNA, 19 bp, Mus musculus
  siRNA target sequence for 0610038F07Rik (NM_025333.2,90-108).
cctagtgtgacatcattca

SEQ ID NO: 715887 - DNA, 19 bp, Mus musculus
  siRNA target sequence for 0610038F07Rik (NM_025333.2,136-154).
cagactctcaaaaagacat

SEQ ID NO: 715888 - DNA, 19 bp, Mus musculus
  siRNA target sequence for 0610038F07Rik (NM_025333.2,216-234).
gcccgcttactctatgaga

SEQ ID NO: 715889 - DNA, 19 bp, Mus musculus
  siRNA target sequence for 0610038F07Rik (NM_025333.2,274-292).
gcctgtttgctaaagagta

SEQ ID NO: 715890 - DNA, 19 bp, Mus musculus
  siRNA target sequence for 0610038F07Rik (NM_025333.2,275-293).
cctgtttgctaaagagtat

SEQ ID NO: 715891 - DNA, 19 bp, Mus musculus
  siRNA target sequence for 0610038F07Rik (NM_025333.2,314-332).
gcagctgaacctctatgat

SEQ ID NO: 715892 - DNA, 19 bp, Mus musculus
  siRNA target sequence for 0610038F07Rik (NM_025333.2,324-342).
ctctatgatcgcctgatta

SEQ ID NO: 715893 - DNA, 19 bp, Mus musculus
  siRNA target sequence for 0610038F07Rik (NM_025333.2,338-356).
gattaacgagcctagcaat

SEQ ID NO: 715894 - DNA, 19 bp, Mus musculus
  siRNA target sequence for 0610038F07Rik (NM_025333.2,357-375).
gactgggatatttactact

SEQ ID NO: 715895 - DNA, 19 bp, Mus musculus
  siRNA target sequence for 0610041L09Rik (NM_025336.1,113-131).
cggacgagaacgagaacat

SEQ ID NO: 715896 - DNA, 19 bp, Mus musculus
  siRNA target sequence for 0610041L09Rik (NM_025336.1,147-165).
catccggctttcagaaaat

SEQ ID NO: 715897 - DNA, 19 bp, Mus musculus
  siRNA target sequence for 0610041L09Rik (NM_025336.1,151-169).
cggctttcagaaaatgtga

SEQ ID NO: 715898 - DNA, 19 bp, Mus musculus
  siRNA target sequence for 0610041L09Rik (NM_025336.1,213-231).
gcgatattccagcgtttat

SEQ ID NO: 715899 - DNA, 19 bp, Mus musculus
  siRNA target sequence for 0610041L09Rik (NM_025336.1,225-243).
cgtttatggtgcttcagtt

SEQ ID NO: 715900 - DNA, 19 bp, Mus musculus
  siRNA target sequence for 0610041L09Rik (NM_025336.1,226-244).
gtttatggtgcttcagttt

SEQ ID NO: 715901 - DNA, 19 bp, Mus musculus
  siRNA target sequence for 0610041L09Rik (NM_025336.1,241-259).
gtttctgatgaagatttga

SEQ ID NO: 715902 - DNA, 19 bp, Mus musculus
  siRNA target sequence for 0610041L09Rik (NM_025336.1,315-333).
ccagagacgccttaagcaa

SEQ ID NO: 715903 - DNA, 19 bp, Mus musculus
  siRNA target sequence for 0610041L09Rik (NM_025336.1,386-404).
ctgtccttcgggaaagaat

SEQ ID NO: 715904 - DNA, 19 bp, Mus musculus
  siRNA target sequence for 0610041L09Rik (NM_025336.1,388-406).
gtccttcgggaaagaatat

SEQ ID NO: 715905 - DNA, 19 bp, Mus musculus
  siRNA target sequence for 0610041L09Rik (NM_025336.1,391-409).
cttcgggaaagaatatcca

SEQ ID NO: 715906 - DNA, 19 bp, Mus musculus
  siRNA target sequence for 0610041L09Rik (NM_025336.1,527-545).
gctcagagttctacaaagt

SEQ ID NO: 715907 - DNA, 19 bp, Mus musculus
  siRNA target sequence for 0610041L09Rik (NM_025336.1,588-606).
caagttcaagcggtatgaa

SEQ ID NO: 715908 - DNA, 19 bp, Mus musculus
  siRNA target sequence for 0610041L09Rik (NM_025336.1,591-609).
gttcaagcggtatgaatat

SEQ ID NO: 715909 - DNA, 19 bp, Mus musculus
  siRNA target sequence for 0610041L09Rik (NM_025336.1,594-612).
caagcggtatgaatatcat

SEQ ID NO: 715910 - DNA, 19 bp, Mus musculus
  siRNA target sequence for 0610041L09Rik (NM_025336.1,635-653).
ccaaaatcctccagtgtta

SEQ ID NO: 715911 - DNA, 19 bp, Mus musculus
  siRNA target sequence for 0610041L09Rik (NM_025336.1,688-706).
gctctggctagccaataca

SEQ ID NO: 715912 - DNA, 19 bp, Mus musculus
  siRNA target sequence for Akr7a5 (NM_025337.2,246-264).
ctggacacggccttcatgt

SEQ ID NO: 715913 - DNA, 19 bp, Mus musculus
  siRNA target sequence for Akr7a5 (NM_025337.2,249-267).
gacacggccttcatgtact

SEQ ID NO: 715914 - DNA, 19 bp, Mus musculus
  siRNA target sequence for Akr7a5 (NM_025337.2,320-338).
cggcgactgcacagtgaaa

SEQ ID NO: 715915 - DNA, 19 bp, Mus musculus
  siRNA target sequence for Akr7a5 (NM_025337.2,321-339).
ggcgactgcacagtgaaaa

SEQ ID NO: 715916 - DNA, 19 bp, Mus musculus
  siRNA target sequence for Akr7a5 (NM_025337.2,322-340).
gcgactgcacagtgaaaat

SEQ ID NO: 715917 - DNA, 19 bp, Mus musculus
  siRNA target sequence for Akr7a5 (NM_025337.2,435-453).
cgggtggatctcttctact

SEQ ID NO: 715918 - DNA, 19 bp, Mus musculus
  siRNA target sequence for Akr7a5 (NM_025337.2,436-454).
gggtggatctcttctactt

SEQ ID NO: 715919 - DNA, 19 bp, Mus musculus
  siRNA target sequence for Akr7a5 (NM_025337.2,437-455).
ggtggatctcttctactta

SEQ ID NO: 715920 - DNA, 19 bp, Mus musculus
  siRNA target sequence for Akr7a5 (NM_025337.2,534-552).
gagcttggtctgtctaact

SEQ ID NO: 715921 - DNA, 19 bp, Mus musculus
  siRNA target sequence for Akr7a5 (NM_025337.2,728-746).
cctgctgactggcaagtat

SEQ ID NO: 715922 - DNA, 19 bp, Mus musculus
  siRNA target sequence for Akr7a5 (NM_025337.2,729-747).
ctgctgactggcaagtata

SEQ ID NO: 715923 - DNA, 19 bp, Mus musculus
  siRNA target sequence for Akr7a5 (NM_025337.2,736-754).
ctggcaagtataaatacga

SEQ ID NO: 715924 - DNA, 19 bp, Mus musculus
  siRNA target sequence for Akr7a5 (NM_025337.2,783-801).
cgcttctttgggaataact

SEQ ID NO: 715925 - DNA, 19 bp, Mus musculus
  siRNA target sequence for Akr7a5 (NM_025337.2,850-868).
ccatcgccctggtagaaaa

SEQ ID NO: 715926 - DNA, 19 bp, Mus musculus
  siRNA target sequence for Akr7a5 (NM_025337.2,1089-1107).
cacgagtgtcccaactact

SEQ ID NO: 715927 - DNA, 19 bp, Mus musculus
  siRNA target sequence for 0610033H09Rik (NM_025338.1,209-227).
gtgattggcagctatgctt

SEQ ID NO: 715928 - DNA, 19 bp, Mus musculus
  siRNA target sequence for 0610033H09Rik (NM_025338.1,224-242).
gcttttcgacccctttaca

SEQ ID NO: 715929 - DNA, 19 bp, Mus musculus
  siRNA target sequence for 0610033H09Rik (NM_025338.1,354-372).
gctggctgactgctcaata

SEQ ID NO: 715930 - DNA, 19 bp, Mus musculus
  siRNA target sequence for 0610033H09Rik (NM_025338.1,357-375).
ggctgactgctcaatactt

SEQ ID NO: 715931 - DNA, 19 bp, Mus musculus
  siRNA target sequence for 0610033H09Rik (NM_025338.1,358-376).
gctgactgctcaatactta

SEQ ID NO: 715932 - DNA, 19 bp, Mus musculus
  siRNA target sequence for 0610033H09Rik (NM_025338.1,359-377).
ctgactgctcaatacttat

SEQ ID NO: 715933 - DNA, 19 bp, Mus musculus
  siRNA target sequence for 0610033H09Rik (NM_025338.1,416-434).
ccctcccagttctacgaat

SEQ ID NO: 715934 - DNA, 19 bp, Mus musculus
  siRNA target sequence for 0610033H09Rik (NM_025338.1,557-575).
cgtaaactggtcaaaagga

SEQ ID NO: 715935 - DNA, 19 bp, Mus musculus
  siRNA target sequence for 0610033H09Rik (NM_025338.1,599-617).
cgggaaggacgtttgaaga

SEQ ID NO: 715936 - DNA, 19 bp, Mus musculus
  siRNA target sequence for 0610033H09Rik (NM_025338.1,600-618).
gggaaggacgtttgaagaa

SEQ ID NO: 715937 - DNA, 19 bp, Mus musculus
  siRNA target sequence for 0610033H09Rik (NM_025338.1,616-634).
gaagaagcagatcaaattt

SEQ ID NO: 715938 - DNA, 19 bp, Mus musculus
  siRNA target sequence for 0610033H09Rik (NM_025338.1,622-640).
gcagatcaaatttgagaaa

SEQ ID NO: 715939 - DNA, 19 bp, Mus musculus
  siRNA target sequence for 0610033H09Rik (NM_025338.1,693-711).
ggcagaccccgaagatcta

SEQ ID NO: 715940 - DNA, 19 bp, Mus musculus
  siRNA target sequence for 0610027O18Rik (NM_025339.2,245-263).
ggtcaatattggcttatgt

SEQ ID NO: 715941 - DNA, 19 bp, Mus musculus
  siRNA target sequence for 0610027O18Rik (NM_025339.2,281-299).
catggcaagcgccaattct

SEQ ID NO: 715942 - DNA, 19 bp, Mus musculus
  siRNA target sequence for 0610042C05Rik (NM_025343.2,134-152).
ccacaccctggcaagttta

SEQ ID NO: 715943 - DNA, 19 bp, Mus musculus
  siRNA target sequence for 0610042C05Rik (NM_025343.2,144-162).
gcaagtttacacagcatat

SEQ ID NO: 715944 - DNA, 19 bp, Mus musculus
  siRNA target sequence for 0610042C05Rik (NM_025343.2,177-195).
cagtgccagagacttactt

SEQ ID NO: 715945 - DNA, 19 bp, Mus musculus
  siRNA target sequence for 0610042C05Rik (NM_025343.2,189-207).
cttacttggcttacattaa

SEQ ID NO: 715946 - DNA, 19 bp, Mus musculus
  siRNA target sequence for 0610042C05Rik (NM_025343.2,202-220).
cattaagaccacttaggaa

SEQ ID NO: 715947 - DNA, 19 bp, Mus musculus
  siRNA target sequence for 0610042C05Rik (NM_025343.2,249-267).
ctgacaatacagcaacatt

SEQ ID NO: 715948 - DNA, 19 bp, Mus musculus
  siRNA target sequence for 0610042C05Rik (NM_025343.2,352-370).
gcagactctttccgttaaa

SEQ ID NO: 715949 - DNA, 19 bp, Mus musculus
  siRNA target sequence for 0610042C05Rik (NM_025343.2,353-371).
cagactctttccgttaaat

SEQ ID NO: 715950 - DNA, 19 bp, Mus musculus
  siRNA target sequence for 0610042C05Rik (NM_025343.2,382-400).
ggttggacggcaaagaaca

SEQ ID NO: 715951 - DNA, 19 bp, Mus musculus
  siRNA target sequence for 0610042C05Rik (NM_025343.2,437-455).
catgacccacaaaccaaat

SEQ ID NO: 715952 - DNA, 19 bp, Mus musculus
  siRNA target sequence for 0610042C05Rik (NM_025343.2,450-468).
ccaaatctcttgtgttcta

SEQ ID NO: 715953 - DNA, 19 bp, Mus musculus
  siRNA target sequence for 0610042C05Rik (NM_025343.2,451-469).
caaatctcttgtgttctaa

SEQ ID NO: 715954 - DNA, 19 bp, Mus musculus
  siRNA target sequence for 0610042C05Rik (NM_025343.2,494-512).
gcatcactcatctgtatca

SEQ ID NO: 715955 - DNA, 19 bp, Mus musculus
  siRNA target sequence for 0610042C05Rik (NM_025343.2,537-555).
gaccttccgcagatcaaga

SEQ ID NO: 715956 - DNA, 19 bp, Mus musculus
  siRNA target sequence for 0610042C05Rik (NM_025343.2,629-647).
gatgcagtgcacagcattt

SEQ ID NO: 715957 - DNA, 19 bp, Mus musculus
  siRNA target sequence for 0610042C05Rik (NM_025343.2,726-744).
cctagagatgcagcaaata

SEQ ID NO: 715958 - DNA, 19 bp, Mus musculus
  siRNA target sequence for 0610042C05Rik (NM_025343.2,727-745).
ctagagatgcagcaaatat

SEQ ID NO: 715959 - DNA, 19 bp, Mus musculus
  siRNA target sequence for 0610042C05Rik (NM_025343.2,730-748).
gagatgcagcaaatatttt

SEQ ID NO: 715960 - DNA, 19 bp, Mus musculus
  siRNA target sequence for 0610042C05Rik (NM_025343.2,781-799).
gtgatcccggaacaatatt

SEQ ID NO: 715961 - DNA, 19 bp, Mus musculus
  siRNA target sequence for 0610042C05Rik (NM_025343.2,854-872).
gcacgtgatgcaagttcta

SEQ ID NO: 715962 - DNA, 19 bp, Mus musculus
  siRNA target sequence for 0610042C05Rik (NM_025343.2,881-899).
cgaaacccagccctatgaa

SEQ ID NO: 715963 - DNA, 19 bp, Mus musculus
  siRNA target sequence for 0610042C05Rik (NM_025343.2,923-941).
cgaagaactcaactacata

SEQ ID NO: 715964 - DNA, 19 bp, Mus musculus
  siRNA target sequence for 0610042C05Rik (NM_025343.2,944-962).
gacagagggacaatcaaaa

SEQ ID NO: 715965 - DNA, 19 bp, Mus musculus
  siRNA target sequence for 0610042C05Rik (NM_025343.2,970-988).
gaggggaaatcaagctaaa

SEQ ID NO: 715966 - DNA, 19 bp, Mus musculus
  siRNA target sequence for 0610042C05Rik (NM_025343.2,972-990).
ggggaaatcaagctaaact

SEQ ID NO: 715967 - DNA, 19 bp, Mus musculus
  siRNA target sequence for 0610042C05Rik (NM_025343.2,1008-1026).
gacgccattctagagaaat

SEQ ID NO: 715968 - DNA, 19 bp, Mus musculus
  siRNA target sequence for 0610042C05Rik (NM_025343.2,1077-1095).
gcaaccctggacaaattta

SEQ ID NO: 715969 - DNA, 19 bp, Mus musculus
  siRNA target sequence for 0610042C05Rik (NM_025343.2,1078-1096).
caaccctggacaaatttat

SEQ ID NO: 715970 - DNA, 19 bp, Mus musculus
  siRNA target sequence for 0610042C05Rik (NM_025343.2,1088-1106).
caaatttattgagtctatt

SEQ ID NO: 715971 - DNA, 19 bp, Mus musculus
  siRNA target sequence for 0610042C05Rik (NM_025343.2,1134-1152).
gggaagaaagtcaaactgt

SEQ ID NO: 715972 - DNA, 19 bp, Mus musculus
  siRNA target sequence for 0610042C05Rik (NM_025343.2,1149-1167).
ctgtctcataaagaagtta

SEQ ID NO: 715973 - DNA, 19 bp, Mus musculus
  siRNA target sequence for 0610042C05Rik (NM_025343.2,1191-1209).
gccctcaggcaccgaataa

SEQ ID NO: 715974 - DNA, 19 bp, Mus musculus
  siRNA target sequence for 0610042C05Rik (NM_025343.2,1192-1210).
ccctcaggcaccgaataaa

SEQ ID NO: 715975 - DNA, 19 bp, Mus musculus
  siRNA target sequence for 0610042C05Rik (NM_025343.2,1300-1318).
gcatcacgcgaagagttaa

SEQ ID NO: 715976 - DNA, 19 bp, Mus musculus
  siRNA target sequence for 0610042C05Rik (NM_025343.2,1309-1327).
gaagagttaaggtcatgaa

SEQ ID NO: 715977 - DNA, 19 bp, Mus musculus
  siRNA target sequence for 0610042C05Rik (NM_025343.2,1312-1330).
gagttaaggtcatgaatga

SEQ ID NO: 715978 - DNA, 19 bp, Mus musculus
  siRNA target sequence for 0610042C05Rik (NM_025343.2,1368-1386).
cggaatcacctcaatgaga

SEQ ID NO: 715979 - DNA, 19 bp, Mus musculus
  siRNA target sequence for 0610042C05Rik (NM_025343.2,1427-1445).
caccattgaggtaatgttt

SEQ ID NO: 715980 - DNA, 19 bp, Mus musculus
  siRNA target sequence for 0610037P05Rik (NM_025345.2,16-34).
cgactgttacggaactgaa

SEQ ID NO: 715981 - DNA, 19 bp, Mus musculus
  siRNA target sequence for 0610037P05Rik (NM_025345.2,56-74).
ggaaaaaaggggagtgtta

SEQ ID NO: 715982 - DNA, 19 bp, Mus musculus
  siRNA target sequence for 0610037P05Rik (NM_025345.2,64-82).
ggggagtgttaggacattt

SEQ ID NO: 715983 - DNA, 19 bp, Mus musculus
  siRNA target sequence for 0610037P05Rik (NM_025345.2,65-83).
gggagtgttaggacattta

SEQ ID NO: 715984 - DNA, 19 bp, Mus musculus
  siRNA target sequence for 0610037P05Rik (NM_025345.2,67-85).
gagtgttaggacatttaaa

SEQ ID NO: 715985 - DNA, 19 bp, Mus musculus
  siRNA target sequence for 0610037P05Rik (NM_025345.2,95-113).
ccgtgctgaagttttcaat

SEQ ID NO: 715986 - DNA, 19 bp, Mus musculus
  siRNA target sequence for 0610037P05Rik (NM_025345.2,132-150).
gaaccccgaccgtctttgt

SEQ ID NO: 715987 - DNA, 19 bp, Mus musculus
  siRNA target sequence for 0610037P05Rik (NM_025345.2,244-262).
gtcaacctgtagttccatt

SEQ ID NO: 715988 - DNA, 19 bp, Mus musculus
  siRNA target sequence for 0610037P05Rik (NM_025345.2,337-355).
gaattttagcccatttctt

SEQ ID NO: 715989 - DNA, 19 bp, Mus musculus
  siRNA target sequence for 0710001P09Rik (NM_025351.2,151-169).
catccggctgtctgaaagt

SEQ ID NO: 715990 - DNA, 19 bp, Mus musculus
  siRNA target sequence for 0710001P09Rik (NM_025351.2,154-172).
ccggctgtctgaaagtgtt

SEQ ID NO: 715991 - DNA, 19 bp, Mus musculus
  siRNA target sequence for 0710001P09Rik (NM_025351.2,369-387).
gccctctgacagacgttaa

SEQ ID NO: 715992 - DNA, 19 bp, Mus musculus
  siRNA target sequence for 0710001P09Rik (NM_025351.2,370-388).
ccctctgacagacgttaaa

SEQ ID NO: 715993 - DNA, 19 bp, Mus musculus
  siRNA target sequence for 0710001P09Rik (NM_025351.2,664-682).
gcgcatccaggaaaagaat

SEQ ID NO: 715994 - DNA, 19 bp, Mus musculus
  siRNA target sequence for 0710001P09Rik (NM_025351.2,700-718).
gtcttcccaacaattccat

SEQ ID NO: 715995 - DNA, 19 bp, Mus musculus
  siRNA target sequence for 0710001P09Rik (NM_025351.2,715-733).
ccatgaggcggcttcaaaa

SEQ ID NO: 715996 - DNA, 19 bp, Mus musculus
  siRNA target sequence for 1100001D19Rik (NM_025355.2,700-718).
gctcgggaagagttaagga

SEQ ID NO: 715997 - DNA, 19 bp, Mus musculus
  siRNA target sequence for Tm4sf13 (NM_025359.2,208-226).
gcgctcaacctgctgtata

SEQ ID NO: 715998 - DNA, 19 bp, Mus musculus
  siRNA target sequence for Tm4sf13 (NM_025359.2,345-363).
cttggtggggctaattgga

SEQ ID NO: 715999 - DNA, 19 bp, Mus musculus
  siRNA target sequence for Tm4sf13 (NM_025359.2,353-371).
ggctaattggagctgtaaa

SEQ ID NO: 716000 - DNA, 19 bp, Mus musculus
  siRNA target sequence for Tm4sf13 (NM_025359.2,354-372).
gctaattggagctgtaaaa

SEQ ID NO: 716001 - DNA, 19 bp, Mus musculus
  siRNA target sequence for Tm4sf13 (NM_025359.2,373-391).
caccaccaggtgttgctat

SEQ ID NO: 716002 - DNA, 19 bp, Mus musculus
  siRNA target sequence for Tm4sf13 (NM_025359.2,402-420).
gatcattctcctacttgta

SEQ ID NO: 716003 - DNA, 19 bp, Mus musculus
  siRNA target sequence for Tm4sf13 (NM_025359.2,405-423).
cattctcctacttgtattt

SEQ ID NO: 716004 - DNA, 19 bp, Mus musculus
  siRNA target sequence for Tm4sf13 (NM_025359.2,489-507).
ggaagtcggatggaacaat

SEQ ID NO: 716005 - DNA, 19 bp, Mus musculus
  siRNA target sequence for Tm4sf13 (NM_025359.2,490-508).
gaagtcggatggaacaata

SEQ ID NO: 716006 - DNA, 19 bp, Mus musculus
  siRNA target sequence for Tm4sf13 (NM_025359.2,509-527).
cagcaagtgctcgaaatga

SEQ ID NO: 716007 - DNA, 19 bp, Mus musculus
  siRNA target sequence for Tm4sf13 (NM_025359.2,511-529).
gcaagtgctcgaaatgata

SEQ ID NO: 716008 - DNA, 19 bp, Mus musculus
  siRNA target sequence for Tm4sf13 (NM_025359.2,512-530).
caagtgctcgaaatgatat

SEQ ID NO: 716009 - DNA, 19 bp, Mus musculus
  siRNA target sequence for Tm4sf13 (NM_025359.2,515-533).
gtgctcgaaatgatatcca

SEQ ID NO: 716010 - DNA, 19 bp, Mus musculus
  siRNA target sequence for Tm4sf13 (NM_025359.2,551-569).
gtggcttccggagctataa

SEQ ID NO: 716011 - DNA, 19 bp, Mus musculus
  siRNA target sequence for Tm4sf13 (NM_025359.2,630-648).
ccccataatcggagagtat

SEQ ID NO: 716012 - DNA, 19 bp, Mus musculus
  siRNA target sequence for Tm4sf13 (NM_025359.2,682-700).
ggtctcttcttcagtttta

SEQ ID NO: 716013 - DNA, 19 bp, Mus musculus
  siRNA target sequence for Tm4sf13 (NM_025359.2,731-749).
gataccggaaccagaaaga

SEQ ID NO: 716014 - DNA, 19 bp, Mus musculus
  siRNA target sequence for 1110001J03Rik (NM_025363.2,114-132).
cctaccggtacctcgttaa

SEQ ID NO: 716015 - DNA, 19 bp, Mus musculus
  siRNA target sequence for 1110001J03Rik (NM_025363.2,150-168).
gggttaccagtgagaagtt

SEQ ID NO: 716016 - DNA, 19 bp, Mus musculus
  siRNA target sequence for 1110001J03Rik (NM_025363.2,152-170).
gttaccagtgagaagttgt

SEQ ID NO: 716017 - DNA, 19 bp, Mus musculus
  siRNA target sequence for 1110001J03Rik (NM_025363.2,225-243).
gtagcatccggcaacatgt

SEQ ID NO: 716018 - DNA, 19 bp, Mus musculus
  siRNA target sequence for 1110001J03Rik (NM_025363.2,286-304).
ggaggagtctgctggttta

SEQ ID NO: 716019 - DNA, 19 bp, Mus musculus
  siRNA target sequence for 1110002E23Rik (NM_025365.2,463-481).
gcttcgccaccgatcgaaa

SEQ ID NO: 716020 - DNA, 19 bp, Mus musculus
  siRNA target sequence for 1110002E23Rik (NM_025365.2,503-521).
cctcaatttgggactcttt

SEQ ID NO: 716021 - DNA, 19 bp, Mus musculus
  siRNA target sequence for 1110001O19Rik (NM_025366.1,46-64).
gcgaacccgggaaaaccta

SEQ ID NO: 716022 - DNA, 19 bp, Mus musculus
  siRNA target sequence for 1110001O19Rik (NM_025366.1,47-65).
cgaacccgggaaaacctat

SEQ ID NO: 716023 - DNA, 19 bp, Mus musculus
  siRNA target sequence for 1110001O19Rik (NM_025366.1,48-66).
gaacccgggaaaacctata

SEQ ID NO: 716024 - DNA, 19 bp, Mus musculus
  siRNA target sequence for 1110001O19Rik (NM_025366.1,52-70).
ccgggaaaacctatactga

SEQ ID NO: 716025 - DNA, 19 bp, Mus musculus
  siRNA target sequence for 1110001O19Rik (NM_025366.1,53-71).
cgggaaaacctatactgaa

SEQ ID NO: 716026 - DNA, 19 bp, Mus musculus
  siRNA target sequence for 1110001O19Rik (NM_025366.1,73-91).
cccaacaagcctcttatct

SEQ ID NO: 716027 - DNA, 19 bp, Mus musculus
  siRNA target sequence for 1110001O19Rik (NM_025366.1,74-92).
ccaacaagcctcttatctt

SEQ ID NO: 716028 - DNA, 19 bp, Mus musculus
  siRNA target sequence for 1110001O19Rik (NM_025366.1,105-123).
cgggaaccgacgtagagaa

SEQ ID NO: 716029 - DNA, 19 bp, Mus musculus
  siRNA target sequence for 1110001O19Rik (NM_025366.1,106-124).
gggaaccgacgtagagaaa

SEQ ID NO: 716030 - DNA, 19 bp, Mus musculus
  siRNA target sequence for 1110001O19Rik (NM_025366.1,127-145).
ggagaggcaacctgtatca

SEQ ID NO: 716031 - DNA, 19 bp, Mus musculus
  siRNA target sequence for 1110001O19Rik (NM_025366.1,146-164).
cggagatgtcgatgatgat

SEQ ID NO: 716032 - DNA, 19 bp, Mus musculus
  siRNA target sequence for 1110001O19Rik (NM_025366.1,196-214).
gaggcgtgcaggaaagaga

SEQ ID NO: 716033 - DNA, 19 bp, Mus musculus
  siRNA target sequence for 1110001O19Rik (NM_025366.1,220-238).
gacttcttcgattgttctt

SEQ ID NO: 716034 - DNA, 19 bp, Mus musculus
  siRNA target sequence for 1110001O19Rik (NM_025366.1,285-303).
gggacagtccgagagttta

SEQ ID NO: 716035 - DNA, 19 bp, Mus musculus
  siRNA target sequence for 1110001O19Rik (NM_025366.1,286-304).
ggacagtccgagagtttat

SEQ ID NO: 716036 - DNA, 19 bp, Mus musculus
  siRNA target sequence for 1110001O19Rik (NM_025366.1,331-349).
cagagatttcccaacaaat

SEQ ID NO: 716037 - DNA, 19 bp, Mus musculus
  siRNA target sequence for 1110001O19Rik (NM_025366.1,333-351).
gagatttcccaacaaatct

SEQ ID NO: 716038 - DNA, 19 bp, Mus musculus
  siRNA target sequence for 1110001O19Rik (NM_025366.1,335-353).
gatttcccaacaaatctca

SEQ ID NO: 716039 - DNA, 19 bp, Mus musculus
  siRNA target sequence for 1110007C05Rik (NM_025368.1,177-195).
gagtccaccctcagtgtat

SEQ ID NO: 716040 - DNA, 19 bp, Mus musculus
  siRNA target sequence for 1110007C05Rik (NM_025368.1,179-197).
gtccaccctcagtgtatca

SEQ ID NO: 716041 - DNA, 19 bp, Mus musculus
  siRNA target sequence for 1110007C05Rik (NM_025368.1,336-354).
cttgggcaccggcaactat

SEQ ID NO: 716042 - DNA, 19 bp, Mus musculus
  siRNA target sequence for 1110007C05Rik (NM_025368.1,341-359).
gcaccggcaactatgatgt

SEQ ID NO: 716043 - DNA, 19 bp, Mus musculus
  siRNA target sequence for 1110007C05Rik (NM_025368.1,344-362).
ccggcaactatgatgtcaa

SEQ ID NO: 716044 - DNA, 19 bp, Mus musculus
  siRNA target sequence for 1110007C05Rik (NM_025368.1,543-561).
ggtagatggcatctactat

SEQ ID NO: 716045 - DNA, 19 bp, Mus musculus
  siRNA target sequence for 1110007C05Rik (NM_025368.1,544-562).
gtagatggcatctactata

SEQ ID NO: 716046 - DNA, 19 bp, Mus musculus
  siRNA target sequence for 1110007C05Rik (NM_025368.1,647-665).
gcctgtgcgaggtgctatt

SEQ ID NO: 716047 - DNA, 19 bp, Mus musculus
  siRNA target sequence for 1110018J18Rik (NM_025370.1,208-226).
gtgtttgtgaggcatttct

SEQ ID NO: 716048 - DNA, 19 bp, Mus musculus
  siRNA target sequence for 1110018J18Rik (NM_025370.1,225-243).
cttgtgttacgtctgtaaa

SEQ ID NO: 716049 - DNA, 19 bp, Mus musculus
  siRNA target sequence for 1110018J18Rik (NM_025370.1,230-248).
gttacgtctgtaaagaata

SEQ ID NO: 716050 - DNA, 19 bp, Mus musculus
  siRNA target sequence for 1110018J18Rik (NM_025370.1,306-324).
catagtgattggacaatca

SEQ ID NO: 716051 - DNA, 19 bp, Mus musculus
  siRNA target sequence for 1110018J18Rik (NM_025370.1,310-328).
gtgattggacaatcatcat

SEQ ID NO: 716052 - DNA, 19 bp, Mus musculus
  siRNA target sequence for 1110018J18Rik (NM_025370.1,319-337).
caatcatcataccatcata

SEQ ID NO: 716053 - DNA, 19 bp, Mus musculus
  siRNA target sequence for 1110018J18Rik (NM_025370.1,348-366).
ctgcaaactgactggatat

SEQ ID NO: 716054 - DNA, 19 bp, Mus musculus
  siRNA target sequence for 1110018J18Rik (NM_025370.1,361-379).
ggatattctcatgaaatct

SEQ ID NO: 716055 - DNA, 19 bp, Mus musculus
  siRNA target sequence for 1110018J18Rik (NM_025370.1,385-403).
gatcctgagagagaaattt

SEQ ID NO: 716056 - DNA, 19 bp, Mus musculus
  siRNA target sequence for 1110018J18Rik (NM_025370.1,518-536).
gcccactttttgatttcca

SEQ ID NO: 716057 - DNA, 19 bp, Mus musculus
  siRNA target sequence for 1110018J18Rik (NM_025370.1,598-616).
gtgcaccgagacaggaata

SEQ ID NO: 716058 - DNA, 19 bp, Mus musculus
  siRNA target sequence for 1110018J18Rik (NM_025370.1,611-629).
ggaataggttggatcacaa

SEQ ID NO: 716059 - DNA, 19 bp, Mus musculus
  siRNA target sequence for 1110018J18Rik (NM_025370.1,612-630).
gaataggttggatcacaaa

SEQ ID NO: 716060 - DNA, 19 bp, Mus musculus
  siRNA target sequence for 1110018J18Rik (NM_025370.1,659-677).
gggttcagcctgtgaactt

SEQ ID NO: 716061 - DNA, 19 bp, Mus musculus
  siRNA target sequence for 1110005A05Rik (NM_025372.1,91-109).
cagattatgaacatgtaga

SEQ ID NO: 716062 - DNA, 19 bp, Mus musculus
  siRNA target sequence for 1110005A05Rik (NM_025372.1,208-226).
cgccaaagagaacagttaa

SEQ ID NO: 716063 - DNA, 19 bp, Mus musculus
  siRNA target sequence for 1110005A05Rik (NM_025372.1,209-227).
gccaaagagaacagttaaa

SEQ ID NO: 716064 - DNA, 19 bp, Mus musculus
  siRNA target sequence for 1110005A05Rik (NM_025372.1,243-261).
ctagatgctacgagattga

SEQ ID NO: 716065 - DNA, 19 bp, Mus musculus
  siRNA target sequence for 1110005A05Rik (NM_025372.1,246-264).
gatgctacgagattgactt

SEQ ID NO: 716066 - DNA, 19 bp, Mus musculus
  siRNA target sequence for 1110005A05Rik (NM_025372.1,325-343).
gtcatgaggctgaagactt

SEQ ID NO: 716067 - DNA, 19 bp, Mus musculus
  siRNA target sequence for 1110005A05Rik (NM_025372.1,339-357).
gacttgaaaacgctaatca

SEQ ID NO: 716068 - DNA, 19 bp, Mus musculus
  siRNA target sequence for 1110005A05Rik (NM_025372.1,341-359).
cttgaaaacgctaatcaga

SEQ ID NO: 716069 - DNA, 19 bp, Mus musculus
  siRNA target sequence for 1110005A05Rik (NM_025372.1,421-439).
gagtcgaaaacctaggaaa

SEQ ID NO: 716070 - DNA, 19 bp, Mus musculus
  siRNA target sequence for 1110005A05Rik (NM_025372.1,423-441).
gtcgaaaacctaggaaata

SEQ ID NO: 716071 - DNA, 19 bp, Mus musculus
  siRNA target sequence for 1110005A05Rik (NM_025372.1,446-464).
ggaggttcagacctgttta

SEQ ID NO: 716072 - DNA, 19 bp, Mus musculus
  siRNA target sequence for 1110005A05Rik (NM_025372.1,447-465).
gaggttcagacctgtttaa

SEQ ID NO: 716073 - DNA, 19 bp, Mus musculus
  siRNA target sequence for 1110005A05Rik (NM_025372.1,449-467).
ggttcagacctgtttaaaa

SEQ ID NO: 716074 - DNA, 19 bp, Mus musculus
  siRNA target sequence for 1110005A05Rik (NM_025372.1,455-473).
gacctgtttaaaacgaatt

SEQ ID NO: 716075 - DNA, 19 bp, Mus musculus
  siRNA target sequence for 1110005A05Rik (NM_025372.1,485-503).
gcctattgtacatgaagat

SEQ ID NO: 716076 - DNA, 19 bp, Mus musculus
  siRNA target sequence for 1110005A05Rik (NM_025372.1,486-504).
cctattgtacatgaagatt

SEQ ID NO: 716077 - DNA, 19 bp, Mus musculus
  siRNA target sequence for 1110005A05Rik (NM_025372.1,570-588).
cccttcttgacaagttctt

SEQ ID NO: 716078 - DNA, 19 bp, Mus musculus
  siRNA target sequence for 1110005A05Rik (NM_025372.1,572-590).
cttcttgacaagttcttct

SEQ ID NO: 716079 - DNA, 19 bp, Mus musculus
  siRNA target sequence for 1110005A05Rik (NM_025372.1,616-634).
caactagaagcctaacaga

SEQ ID NO: 716080 - DNA, 19 bp, Mus musculus
  siRNA target sequence for 1110005A05Rik (NM_025372.1,690-708).
gcaaagctactgagtaata

SEQ ID NO: 716081 - DNA, 19 bp, Mus musculus
  siRNA target sequence for 1110005A05Rik (NM_025372.1,762-780).
caagaagagtcaaatggat

SEQ ID NO: 716082 - DNA, 19 bp, Mus musculus
  siRNA target sequence for 1110005A05Rik (NM_025372.1,768-786).
gagtcaaatggattaaaca

SEQ ID NO: 716083 - DNA, 19 bp, Mus musculus
  siRNA target sequence for 1110005A05Rik (NM_025372.1,796-814).
ctgatggtccacatgatgt

SEQ ID NO: 716084 - DNA, 19 bp, Mus musculus
  siRNA target sequence for 1110005A05Rik (NM_025372.1,870-888).
gaccatactaacttagact

SEQ ID NO: 716085 - DNA, 19 bp, Mus musculus
  siRNA target sequence for 1110002H13Rik (NM_025376.1,325-343).
cttcatgcgccgtgacatt

SEQ ID NO: 716086 - DNA, 19 bp, Mus musculus
  siRNA target sequence for 1110002H13Rik (NM_025376.1,336-354).
gtgacattctggagtactt

SEQ ID NO: 716087 - DNA, 19 bp, Mus musculus
  siRNA target sequence for 1110002H13Rik (NM_025376.1,399-417).
cactggccgactttgatga

SEQ ID NO: 716088 - DNA, 19 bp, Mus musculus
  siRNA target sequence for 1110002H13Rik (NM_025376.1,460-478).
cgctgtgcggacttttcat

SEQ ID NO: 716089 - DNA, 19 bp, Mus musculus
  siRNA target sequence for 1110002H13Rik (NM_025376.1,462-480).
ctgtgcggacttttcatga

SEQ ID NO: 716090 - DNA, 19 bp, Mus musculus
  siRNA target sequence for 1110002H13Rik (NM_025376.1,639-657).
ccctgatgcttcgattctt

SEQ ID NO: 716091 - DNA, 19 bp, Mus musculus
  siRNA target sequence for 1110002H13Rik (NM_025376.1,641-659).
ctgatgcttcgattcttct

SEQ ID NO: 716092 - DNA, 19 bp, Mus musculus
  siRNA target sequence for 1110001A07Rik (NM_025377.1,45-63).
gttccagaaagctgattct

SEQ ID NO: 716093 - DNA, 19 bp, Mus musculus
  siRNA target sequence for 1110001A07Rik (NM_025377.1,64-82).
gatttggattaccttcaat

SEQ ID NO: 716094 - DNA, 19 bp, Mus musculus
  siRNA target sequence for 1110001A07Rik (NM_025377.1,105-123).
gactaatcacccacattca

SEQ ID NO: 716095 - DNA, 19 bp, Mus musculus
  siRNA target sequence for 1110001A07Rik (NM_025377.1,157-175).
gaattatcagcgataaagt

SEQ ID NO: 716096 - DNA, 19 bp, Mus musculus
  siRNA target sequence for 1110001A07Rik (NM_025377.1,168-186).
gataaagtctcgctatcaa

SEQ ID NO: 716097 - DNA, 19 bp, Mus musculus
  siRNA target sequence for 1110001A07Rik (NM_025377.1,174-192).
gtctcgctatcaagcttta

SEQ ID NO: 716098 - DNA, 19 bp, Mus musculus
  siRNA target sequence for 1110001A07Rik (NM_025377.1,229-247).
gagaccaagagctgcattt

SEQ ID NO: 716099 - DNA, 19 bp, Mus musculus
  siRNA target sequence for 1110001A07Rik (NM_025377.1,272-290).
ccatgatacaagaactaca

SEQ ID NO: 716100 - DNA, 19 bp, Mus musculus
  siRNA target sequence for 1110001A07Rik (NM_025377.1,299-317).
caaacctggagctaactct

SEQ ID NO: 716101 - DNA, 19 bp, Mus musculus
  siRNA target sequence for 1110001A07Rik (NM_025377.1,337-355).
gctgcaacagagccattaa

SEQ ID NO: 716102 - DNA, 19 bp, Mus musculus
  siRNA target sequence for 1110004C05Rik (NM_025378.1,152-170).
ccaaactacgaaagaatca

SEQ ID NO: 716103 - DNA, 19 bp, Mus musculus
  siRNA target sequence for 1110004C05Rik (NM_025378.1,441-459).
gcatcctgatggttgttat

SEQ ID NO: 716104 - DNA, 19 bp, Mus musculus
  siRNA target sequence for 1110004C05Rik (NM_025378.1,451-469).
ggttgttatcaccattgtt

SEQ ID NO: 716105 - DNA, 19 bp, Mus musculus
  siRNA target sequence for 1110004C05Rik (NM_025378.1,452-470).
gttgttatcaccattgtta

SEQ ID NO: 716106 - DNA, 19 bp, Mus musculus
  siRNA target sequence for 1110005F07Rik (NM_025383.2,125-143).
ggttacagggcctcagaat

SEQ ID NO: 716107 - DNA, 19 bp, Mus musculus
  siRNA target sequence for 1110005F07Rik (NM_025383.2,310-328).
cttcgtcatccgaattgaa

SEQ ID NO: 716108 - DNA, 19 bp, Mus musculus
  siRNA target sequence for 1110005F07Rik (NM_025383.2,375-393).
gaggggacgcctttgactt

SEQ ID NO: 716109 - DNA, 19 bp, Mus musculus
  siRNA target sequence for 1110005F07Rik (NM_025383.2,378-396).
gggacgcctttgacttcaa

SEQ ID NO: 716110 - DNA, 19 bp, Mus musculus
  siRNA target sequence for 1110005F07Rik (NM_025383.2,436-454).
gtgtgagtttgcgaaacaa

SEQ ID NO: 716111 - DNA, 19 bp, Mus musculus
  siRNA target sequence for 1110005F07Rik (NM_025383.2,680-698).
gttcagccagcagttgttt

SEQ ID NO: 716112 - DNA, 19 bp, Mus musculus
  siRNA target sequence for Dnajd1 (NM_025384.3,149-167).
gtgttgcagctgttgcatt

SEQ ID NO: 716113 - DNA, 19 bp, Mus musculus
  siRNA target sequence for Dnajd1 (NM_025384.3,170-188).
caggtcgctatgcatttca

SEQ ID NO: 716114 - DNA, 19 bp, Mus musculus
  siRNA target sequence for Dnajd1 (NM_025384.3,173-191).
gtcgctatgcatttcagat

SEQ ID NO: 716115 - DNA, 19 bp, Mus musculus
  siRNA target sequence for Dnajd1 (NM_025384.3,199-217).
cctctagaacaagtaatca

SEQ ID NO: 716116 - DNA, 19 bp, Mus musculus
  siRNA target sequence for Dnajd1 (NM_025384.3,234-252).
gatttcctctccaagcttt

SEQ ID NO: 716117 - DNA, 19 bp, Mus musculus
  siRNA target sequence for Dnajd1 (NM_025384.3,248-266).
gcttttcatcctactataa

SEQ ID NO: 716118 - DNA, 19 bp, Mus musculus
  siRNA target sequence for Dnajd1 (NM_025384.3,249-267).
cttttcatcctactataaa

SEQ ID NO: 716119 - DNA, 19 bp, Mus musculus
  siRNA target sequence for Dnajd1 (NM_025384.3,294-312).
gcgagaggctagtcttatt

SEQ ID NO: 716120 - DNA, 19 bp, Mus musculus
  siRNA target sequence for Dnajd1 (NM_025384.3,295-313).
cgagaggctagtcttattt

SEQ ID NO: 716121 - DNA, 19 bp, Mus musculus
  siRNA target sequence for Dnajd1 (NM_025384.3,355-373).
gcacacaagagaattatga

SEQ ID NO: 716122 - DNA, 19 bp, Mus musculus
  siRNA target sequence for Dnajd1 (NM_025384.3,397-415).
ggatctccttacttagcat

SEQ ID NO: 716123 - DNA, 19 bp, Mus musculus
  siRNA target sequence for Dnajd1 (NM_025384.3,403-421).
ccttacttagcatccaaaa

SEQ ID NO: 716124 - DNA, 19 bp, Mus musculus
  siRNA target sequence for Dnajd1 (NM_025384.3,408-426).
cttagcatccaaaataaat

SEQ ID NO: 716125 - DNA, 19 bp, Mus musculus
  siRNA target sequence for Dnajd1 (NM_025384.3,445-463).
gaagcatccagcaaagcta

SEQ ID NO: 716126 - DNA, 19 bp, Mus musculus
  siRNA target sequence for 1110020C13Rik (NM_025385.2,523-541).
gtgtcgtcccccttatcct

SEQ ID NO: 716127 - DNA, 19 bp, Mus musculus
  siRNA target sequence for 1110020C13Rik (NM_025385.2,654-672).
gtcccggaatcgtgataga

SEQ ID NO: 716128 - DNA, 19 bp, Mus musculus
  siRNA target sequence for 1110020C13Rik (NM_025385.2,656-674).
cccggaatcgtgatagaca

SEQ ID NO: 716129 - DNA, 19 bp, Mus musculus
  siRNA target sequence for 1110020C13Rik (NM_025385.2,657-675).
ccggaatcgtgatagacaa

SEQ ID NO: 716130 - DNA, 19 bp, Mus musculus
  siRNA target sequence for D1Ertd757e (NM_025386.1,53-71).
gactctgtttgaaattgta

SEQ ID NO: 716131 - DNA, 19 bp, Mus musculus
  siRNA target sequence for D1Ertd757e (NM_025386.1,82-100).
cagcgccgagcaaagacta

SEQ ID NO: 716132 - DNA, 19 bp, Mus musculus
  siRNA target sequence for D1Ertd757e (NM_025386.1,84-102).
gcgccgagcaaagactatt

SEQ ID NO: 716133 - DNA, 19 bp, Mus musculus
  siRNA target sequence for D1Ertd757e (NM_025386.1,85-103).
cgccgagcaaagactatta

SEQ ID NO: 716134 - DNA, 19 bp, Mus musculus
  siRNA target sequence for D1Ertd757e (NM_025386.1,119-137).
ccggactcagatcatcttt

SEQ ID NO: 716135 - DNA, 19 bp, Mus musculus
  siRNA target sequence for D1Ertd757e (NM_025386.1,120-138).
cggactcagatcatcttta

SEQ ID NO: 716136 - DNA, 19 bp, Mus musculus
  siRNA target sequence for D1Ertd757e (NM_025386.1,167-185).
gtatcggtcagcaaaacct

SEQ ID NO: 716137 - DNA, 19 bp, Mus musculus
  siRNA target sequence for D1Ertd757e (NM_025386.1,226-244).
ctcatctccaagttcaagt

SEQ ID NO: 716138 - DNA, 19 bp, Mus musculus
  siRNA target sequence for D1Ertd757e (NM_025386.1,237-255).
gttcaagtcgccgtagtat

SEQ ID NO: 716139 - DNA, 19 bp, Mus musculus
  siRNA target sequence for D1Ertd757e (NM_025386.1,248-266).
cgtagtatttggtacaaaa

SEQ ID NO: 716140 - DNA, 19 bp, Mus musculus
  siRNA target sequence for D1Ertd757e (NM_025386.1,249-267).
gtagtatttggtacaaaaa

SEQ ID NO: 716141 - DNA, 19 bp, Mus musculus
  siRNA target sequence for D1Ertd757e (NM_025386.1,252-270).
gtatttggtacaaaaatat

SEQ ID NO: 716142 - DNA, 19 bp, Mus musculus
  siRNA target sequence for D1Ertd757e (NM_025386.1,258-276).
ggtacaaaaatattagact

SEQ ID NO: 716143 - DNA, 19 bp, Mus musculus
  siRNA target sequence for D1Ertd757e (NM_025386.1,259-277).
gtacaaaaatattagacta

SEQ ID NO: 716144 - DNA, 19 bp, Mus musculus
  siRNA target sequence for D1Ertd757e (NM_025386.1,262-280).
caaaaatattagactatgt

SEQ ID NO: 716145 - DNA, 19 bp, Mus musculus
  siRNA target sequence for D1Ertd757e (NM_025386.1,386-404).
ccagacatcaagcaagttt

SEQ ID NO: 716146 - DNA, 19 bp, Mus musculus
  siRNA target sequence for Anapc11 (NM_025389.2,187-205).
gctctgggtagccaatgat

SEQ ID NO: 716147 - DNA, 19 bp, Mus musculus
  siRNA target sequence for Anapc11 (NM_025389.2,374-392).
cgccaggagtggaagttca

SEQ ID NO: 716148 - DNA, 19 bp, Mus musculus
  siRNA target sequence for Anapc11 (NM_025389.2,375-393).
gccaggagtggaagttcaa

SEQ ID NO: 716149 - DNA, 19 bp, Mus musculus
  siRNA target sequence for Anapc11 (NM_025389.2,376-394).
ccaggagtggaagttcaaa

SEQ ID NO: 716150 - DNA, 19 bp, Mus musculus
  siRNA target sequence for 1110023P21Rik (NM_025390.2,359-377).
gccgtgatcttggaatatt

SEQ ID NO: 716151 - DNA, 19 bp, Mus musculus
  siRNA target sequence for 1110023P21Rik (NM_025390.2,360-378).
ccgtgatcttggaatattt

SEQ ID NO: 716152 - DNA, 19 bp, Mus musculus
  siRNA target sequence for 1110023P21Rik (NM_025390.2,422-440).
ggcctctctgccaaacaga

SEQ ID NO: 716153 - DNA, 19 bp, Mus musculus
  siRNA target sequence for 1110023P21Rik (NM_025390.2,561-579).
cgcagccacagatgattca

SEQ ID NO: 716154 - DNA, 19 bp, Mus musculus
  siRNA target sequence for 1110023P21Rik (NM_025390.2,586-604).
gctcctaaaggcagatctt

SEQ ID NO: 716155 - DNA, 19 bp, Mus musculus
  siRNA target sequence for 1110023P21Rik (NM_025390.2,706-724).
cagagaagaccacctaaaa

SEQ ID NO: 716156 - DNA, 19 bp, Mus musculus
  siRNA target sequence for 1110023P21Rik (NM_025390.2,748-766).
gttcaccatagaaattgat

SEQ ID NO: 716157 - DNA, 19 bp, Mus musculus
  siRNA target sequence for 1110023P21Rik (NM_025390.2,815-833).
gagcggtctgccaagaagt

SEQ ID NO: 716158 - DNA, 19 bp, Mus musculus
  siRNA target sequence for 1110013J05Rik (NM_025392.1,43-61).
gcgagcggtgggaaatgga

SEQ ID NO: 716159 - DNA, 19 bp, Mus musculus
  siRNA target sequence for 1110013J05Rik (NM_025392.1,44-62).
cgagcggtgggaaatggaa

SEQ ID NO: 716160 - DNA, 19 bp, Mus musculus
  siRNA target sequence for 1110013J05Rik (NM_025392.1,48-66).
cggtgggaaatggaattca

SEQ ID NO: 716161 - DNA, 19 bp, Mus musculus
  siRNA target sequence for 1110013J05Rik (NM_025392.1,193-211).
ggaagtgaatattgagttt

SEQ ID NO: 716162 - DNA, 19 bp, Mus musculus
  siRNA target sequence for 1110013J05Rik (NM_025392.1,215-233).
gcctattccatctcagata

SEQ ID NO: 716163 - DNA, 19 bp, Mus musculus
  siRNA target sequence for 1110013J05Rik (NM_025392.1,216-234).
cctattccatctcagataa

SEQ ID NO: 716164 - DNA, 19 bp, Mus musculus
  siRNA target sequence for 1110013J05Rik (NM_025392.1,223-241).
catctcagataacgattat

SEQ ID NO: 716165 - DNA, 19 bp, Mus musculus
  siRNA target sequence for 1110013J05Rik (NM_025392.1,243-261).
gcggaattaagaaattact

SEQ ID NO: 716166 - DNA, 19 bp, Mus musculus
  siRNA target sequence for 1110013J05Rik (NM_025392.1,335-353).
gggagtgtgattaagcaaa

SEQ ID NO: 716167 - DNA, 19 bp, Mus musculus
  siRNA target sequence for 1110013J05Rik (NM_025392.1,339-357).
gtgtgattaagcaaacaga

SEQ ID NO: 716168 - DNA, 19 bp, Mus musculus
  siRNA target sequence for 1110013J05Rik (NM_025392.1,343-361).
gattaagcaaacagatgtt

SEQ ID NO: 716169 - DNA, 19 bp, Mus musculus
  siRNA target sequence for 1110013J05Rik (NM_025392.1,395-413).
gagatctttggcttcataa

SEQ ID NO: 716170 - DNA, 19 bp, Mus musculus
  siRNA target sequence for 1110013J05Rik (NM_025392.1,404-422).
ggcttcataagccttttaa

SEQ ID NO: 716171 - DNA, 19 bp, Mus musculus
  siRNA target sequence for 1110013J05Rik (NM_025392.1,442-460).
gactcagtgtgctgaacaa

SEQ ID NO: 716172 - DNA, 19 bp, Mus musculus
  siRNA target sequence for 1110013J05Rik (NM_025392.1,452-470).
gctgaacaaattaaagagt

SEQ ID NO: 716173 - DNA, 19 bp, Mus musculus
  siRNA target sequence for 1110013J05Rik (NM_025392.1,570-588).
gtgaaagattcattaacgt

SEQ ID NO: 716174 - DNA, 19 bp, Mus musculus
  siRNA target sequence for 1110013J05Rik (NM_025392.1,686-704).
ctgctgattagtaagacat

SEQ ID NO: 716175 - DNA, 19 bp, Mus musculus
  siRNA target sequence for 1110013J05Rik (NM_025392.1,758-776).
ggggcactgatgtttgcaa

SEQ ID NO: 716176 - DNA, 19 bp, Mus musculus
  siRNA target sequence for 1110013J05Rik (NM_025392.1,898-916).
gcggactgtgatggtaatt

SEQ ID NO: 716177 - DNA, 19 bp, Mus musculus
  siRNA target sequence for 1110020J08Rik (NM_025394.1,101-119).
catccgctggggctttatt

SEQ ID NO: 716178 - DNA, 19 bp, Mus musculus
  siRNA target sequence for 1110020J08Rik (NM_025394.1,126-144).
gtgatttacctgggattta

SEQ ID NO: 716179 - DNA, 19 bp, Mus musculus
  siRNA target sequence for 1110020J08Rik (NM_025394.1,128-146).
gatttacctgggatttaca

SEQ ID NO: 716180 - DNA, 19 bp, Mus musculus
  siRNA target sequence for 1110030J09Rik (NM_025397.2,230-248).
cagagctatccgctcaaat

SEQ ID NO: 716181 - DNA, 19 bp, Mus musculus
  siRNA target sequence for 1110030J09Rik (NM_025397.2,326-344).
ctctaaagcgagtagacta

SEQ ID NO: 716182 - DNA, 19 bp, Mus musculus
  siRNA target sequence for Nudt14 (NM_025399.1,140-158).
cagaagtcctgggacttta

SEQ ID NO: 716183 - DNA, 19 bp, Mus musculus
  siRNA target sequence for Nudt14 (NM_025399.1,229-247).
gttccggccagctgtatat

SEQ ID NO: 716184 - DNA, 19 bp, Mus musculus
  siRNA target sequence for Nudt14 (NM_025399.1,458-476).
cgcagagttgccacataca

SEQ ID NO: 716185 - DNA, 19 bp, Mus musculus
  siRNA target sequence for Nudt14 (NM_025399.1,459-477).
gcagagttgccacatacat

SEQ ID NO: 716186 - DNA, 19 bp, Mus musculus
  siRNA target sequence for Nudt14 (NM_025399.1,501-519).
ccaggcagaccatgttcta

SEQ ID NO: 716187 - DNA, 19 bp, Mus musculus
  siRNA target sequence for Nudt14 (NM_025399.1,576-594).
gagaactcatcgaagtgat

SEQ ID NO: 716188 - DNA, 19 bp, Mus musculus
  siRNA target sequence for Nudt14 (NM_025399.1,587-605).
gaagtgatccatctgaatt

SEQ ID NO: 716189 - DNA, 19 bp, Mus musculus
  siRNA target sequence for Nudt14 (NM_025399.1,592-610).
gatccatctgaatttagat

SEQ ID NO: 716190 - DNA, 19 bp, Mus musculus
  siRNA target sequence for Nudt14 (NM_025399.1,658-676).
ggttatctacgctatctct

SEQ ID NO: 716191 - DNA, 19 bp, Mus musculus
  siRNA target sequence for Nudt14 (NM_025399.1,659-677).
gttatctacgctatctctt

SEQ ID NO: 716192 - DNA, 19 bp, Mus musculus
  siRNA target sequence for Nudt14 (NM_025399.1,689-707).
caggtggttccccatttga

SEQ ID NO: 716193 - DNA, 19 bp, Mus musculus
  siRNA target sequence for Nudt14 (NM_025399.1,691-709).
ggtggttccccatttgagt

SEQ ID NO: 716194 - DNA, 19 bp, Mus musculus
  siRNA target sequence for Ubl5 (NM_025401.1,124-142).
cgaccgtctcggaaagaaa

SEQ ID NO: 716195 - DNA, 19 bp, Mus musculus
  siRNA target sequence for Nola3 (NM_025403.1,82-100).
gcagggcgatcgcgtttat

SEQ ID NO: 716196 - DNA, 19 bp, Mus musculus
  siRNA target sequence for Nola3 (NM_025403.1,83-101).
cagggcgatcgcgtttata

SEQ ID NO: 716197 - DNA, 19 bp, Mus musculus
  siRNA target sequence for Nola3 (NM_025403.1,93-111).
gcgtttatacgctgaagaa

SEQ ID NO: 716198 - DNA, 19 bp, Mus musculus
  siRNA target sequence for Nola3 (NM_025403.1,94-112).
cgtttatacgctgaagaaa

SEQ ID NO: 716199 - DNA, 19 bp, Mus musculus
  siRNA target sequence for Nola3 (NM_025403.1,187-205).
ccgaatcaccatcaagaaa

SEQ ID NO: 716200 - DNA, 19 bp, Mus musculus
  siRNA target sequence for 1110057H19Rik (NM_025409.1,195-213).
gggaatcggtggatttgga

SEQ ID NO: 716201 - DNA, 19 bp, Mus musculus
  siRNA target sequence for 1110057H19Rik (NM_025409.1,211-229).
ggagaggagccaggaatta

SEQ ID NO: 716202 - DNA, 19 bp, Mus musculus
  siRNA target sequence for 1110057H19Rik (NM_025409.1,246-264).
ccttattcggtctgtaaga

SEQ ID NO: 716203 - DNA, 19 bp, Mus musculus
  siRNA target sequence for 1110057H19Rik (NM_025409.1,247-265).
cttattcggtctgtaagaa

SEQ ID NO: 716204 - DNA, 19 bp, Mus musculus
  siRNA target sequence for 1110057H19Rik (NM_025409.1,285-303).
gataatagtaaactcaatt

SEQ ID NO: 716205 - DNA, 19 bp, Mus musculus
  siRNA target sequence for 1110049G11Rik (NM_025410.1,225-243).
gaagcctcccgaaattcca

SEQ ID NO: 716206 - DNA, 19 bp, Mus musculus
  siRNA target sequence for 1110049G11Rik (NM_025410.1,277-295).
gaacccgacatcacagatt

SEQ ID NO: 716207 - DNA, 19 bp, Mus musculus
  siRNA target sequence for 1110049G11Rik (NM_025410.1,426-444).
cgctggatcgcggaagatt

SEQ ID NO: 716208 - DNA, 19 bp, Mus musculus
  siRNA target sequence for 1110049G11Rik (NM_025410.1,428-446).
ctggatcgcggaagattct

SEQ ID NO: 716209 - DNA, 19 bp, Mus musculus
  siRNA target sequence for 1110049G11Rik (NM_025410.1,456-474).
cgactttccatcatcaact

SEQ ID NO: 716210 - DNA, 19 bp, Mus musculus
  siRNA target sequence for 1110049F12Rik (NM_025411.2,293-311).
gaccgaccgctccaagttt

SEQ ID NO: 716211 - DNA, 19 bp, Mus musculus
  siRNA target sequence for 1110049F12Rik (NM_025411.2,295-313).
ccgaccgctccaagtttgt

SEQ ID NO: 716212 - DNA, 19 bp, Mus musculus
  siRNA target sequence for 1110049F12Rik (NM_025411.2,296-314).
cgaccgctccaagtttgtt

SEQ ID NO: 716213 - DNA, 19 bp, Mus musculus
  siRNA target sequence for 1110049F12Rik (NM_025411.2,300-318).
cgctccaagtttgttgaaa

SEQ ID NO: 716214 - DNA, 19 bp, Mus musculus
  siRNA target sequence for 1110049F12Rik (NM_025411.2,327-345).
gacgaagagctcctgttta

SEQ ID NO: 716215 - DNA, 19 bp, Mus musculus
  siRNA target sequence for 1110049F12Rik (NM_025411.2,329-347).
cgaagagctcctgtttaat

SEQ ID NO: 716216 - DNA, 19 bp, Mus musculus
  siRNA target sequence for 1110049F12Rik (NM_025411.2,330-348).
gaagagctcctgtttaata

SEQ ID NO: 716217 - DNA, 19 bp, Mus musculus
  siRNA target sequence for 1110049F12Rik (NM_025411.2,351-369).
ccgtttacgggcaatgtca

SEQ ID NO: 716218 - DNA, 19 bp, Mus musculus
  siRNA target sequence for 1110049F12Rik (NM_025411.2,352-370).
cgtttacgggcaatgtcaa

SEQ ID NO: 716219 - DNA, 19 bp, Mus musculus
  siRNA target sequence for 1110049F12Rik (NM_025411.2,418-436).
cggagatgagactgtacaa

SEQ ID NO: 716220 - DNA, 19 bp, Mus musculus
  siRNA target sequence for 1110049F12Rik (NM_025411.2,513-531).
ggagaattagaatatgcta

SEQ ID NO: 716221 - DNA, 19 bp, Mus musculus
  siRNA target sequence for 1110049F12Rik (NM_025411.2,533-551).
gaaaatctccaggttttca

SEQ ID NO: 716222 - DNA, 19 bp, Mus musculus
  siRNA target sequence for 1110049F12Rik (NM_025411.2,557-575).
ctatcatctttccattcat

SEQ ID NO: 716223 - DNA, 19 bp, Mus musculus
  siRNA target sequence for 1110049F12Rik (NM_025411.2,594-612).
gcagatacgacgaagatct

SEQ ID NO: 716224 - DNA, 19 bp, Mus musculus
  siRNA target sequence for 1110049F12Rik (NM_025411.2,595-613).
cagatacgacgaagatctt

SEQ ID NO: 716225 - DNA, 19 bp, Mus musculus
  siRNA target sequence for 1110049F12Rik (NM_025411.2,597-615).
gatacgacgaagatctttt

SEQ ID NO: 716226 - DNA, 19 bp, Mus musculus
  siRNA target sequence for 1110049F12Rik (NM_025411.2,601-619).
cgacgaagatcttttatat

SEQ ID NO: 716227 - DNA, 19 bp, Mus musculus
  siRNA target sequence for 1110049F12Rik (NM_025411.2,602-620).
gacgaagatcttttatatt

SEQ ID NO: 716228 - DNA, 19 bp, Mus musculus
  siRNA target sequence for 1110049F12Rik (NM_025411.2,722-740).
ccgcagacacacttcattt

SEQ ID NO: 716229 - DNA, 19 bp, Mus musculus
  siRNA target sequence for 1110039H05Rik (NM_025417.1,127-145).
gtagccaggtgctaaagga

SEQ ID NO: 716230 - DNA, 19 bp, Mus musculus
  siRNA target sequence for 1110039H05Rik (NM_025417.1,152-170).
gggtcaggggattgattat

SEQ ID NO: 716231 - DNA, 19 bp, Mus musculus
  siRNA target sequence for 1110039H05Rik (NM_025417.1,192-210).
gctgatgccaagtttgagt

SEQ ID NO: 716232 - DNA, 19 bp, Mus musculus
  siRNA target sequence for 1110039H05Rik (NM_025417.1,229-247).
cggtcgcggtgctgagttt

SEQ ID NO: 716233 - DNA, 19 bp, Mus musculus
  siRNA target sequence for 1110039H05Rik (NM_025417.1,231-249).
gtcgcggtgctgagtttca

SEQ ID NO: 716234 - DNA, 19 bp, Mus musculus
  siRNA target sequence for 1110039H05Rik (NM_025417.1,259-277).
gtgcagccaagcatagtgt

SEQ ID NO: 716235 - DNA, 19 bp, Mus musculus
  siRNA target sequence for 1110039H05Rik (NM_025417.1,274-292).
gtgtcgacagtgattcctt

SEQ ID NO: 716236 - DNA, 19 bp, Mus musculus
  siRNA target sequence for 1110039H05Rik (NM_025417.1,341-359).
cctgtgccgctgttacgaa

SEQ ID NO: 716237 - DNA, 19 bp, Mus musculus
  siRNA target sequence for 1110039H05Rik (NM_025417.1,346-364).
gccgctgttacgaagagaa

SEQ ID NO: 716238 - DNA, 19 bp, Mus musculus
  siRNA target sequence for 1110059P08Rik (NM_025418.2,95-113).
cggcgcaggagcatgacaa

SEQ ID NO: 716239 - DNA, 19 bp, Mus musculus
  siRNA target sequence for 1110059P08Rik (NM_025418.2,121-139).
cccgtggtggcctactact

SEQ ID NO: 716240 - DNA, 19 bp, Mus musculus
  siRNA target sequence for 1110059P08Rik (NM_025418.2,129-147).
ggcctactactgtcgttta

SEQ ID NO: 716241 - DNA, 19 bp, Mus musculus
  siRNA target sequence for 1110059P08Rik (NM_025418.2,130-148).
gcctactactgtcgtttat

SEQ ID NO: 716242 - DNA, 19 bp, Mus musculus
  siRNA target sequence for 1110059P08Rik (NM_025418.2,131-149).
cctactactgtcgtttata

SEQ ID NO: 716243 - DNA, 19 bp, Mus musculus
  siRNA target sequence for 1110059P08Rik (NM_025418.2,132-150).
ctactactgtcgtttatat

SEQ ID NO: 716244 - DNA, 19 bp, Mus musculus
  siRNA target sequence for 1110059P08Rik (NM_025418.2,135-153).
ctactgtcgtttatatgct

SEQ ID NO: 716245 - DNA, 19 bp, Mus musculus
  siRNA target sequence for 1110059P08Rik (NM_025418.2,142-160).
cgtttatatgctatgcaaa

SEQ ID NO: 716246 - DNA, 19 bp, Mus musculus
  siRNA target sequence for 1110059P08Rik (NM_025418.2,163-181).
ggaatgaagattgatagta

SEQ ID NO: 716247 - DNA, 19 bp, Mus musculus
  siRNA target sequence for 1110059P08Rik (NM_025418.2,187-205).
cctgagtgtcgtaaatttt

SEQ ID NO: 716248 - DNA, 19 bp, Mus musculus
  siRNA target sequence for 1110059P08Rik (NM_025418.2,188-206).
ctgagtgtcgtaaattttt

SEQ ID NO: 716249 - DNA, 19 bp, Mus musculus
  siRNA target sequence for 1110059P08Rik (NM_025418.2,190-208).
gagtgtcgtaaatttttat

SEQ ID NO: 716250 - DNA, 19 bp, Mus musculus
  siRNA target sequence for 1110059P08Rik (NM_025418.2,194-212).
gtcgtaaatttttatcaaa

SEQ ID NO: 716251 - DNA, 19 bp, Mus musculus
  siRNA target sequence for 1110059P08Rik (NM_025418.2,209-227).
caaagctaatggatcagtt

SEQ ID NO: 716252 - DNA, 19 bp, Mus musculus
  siRNA target sequence for 1110059P08Rik (NM_025418.2,229-247).
gaagctcttaaaaaacagt

SEQ ID NO: 716253 - DNA, 19 bp, Mus musculus
  siRNA target sequence for 1110059P08Rik (NM_025418.2,283-301).
ggttgtgcccatttggaaa

SEQ ID NO: 716254 - DNA, 19 bp, Mus musculus
  siRNA target sequence for 1110059P08Rik (NM_025418.2,292-310).
catttggaaaattatgctt

SEQ ID NO: 716255 - DNA, 19 bp, Mus musculus
  siRNA target sequence for 1110059P08Rik (NM_025418.2,321-339).
cttgtatgcagacaatgaa

SEQ ID NO: 716256 - DNA, 19 bp, Mus musculus
  siRNA target sequence for 1110059P08Rik (NM_025418.2,343-361).
cgagctggacgatttcaca

SEQ ID NO: 716257 - DNA, 19 bp, Mus musculus
  siRNA target sequence for 1110059P08Rik (NM_025418.2,344-362).
gagctggacgatttcacaa

SEQ ID NO: 716258 - DNA, 19 bp, Mus musculus
  siRNA target sequence for 1110059P08Rik (NM_025418.2,349-367).
ggacgatttcacaaaaaca

SEQ ID NO: 716259 - DNA, 19 bp, Mus musculus
  siRNA target sequence for 1110059P08Rik (NM_025418.2,350-368).
gacgatttcacaaaaacat

SEQ ID NO: 716260 - DNA, 19 bp, Mus musculus
  siRNA target sequence for 1110059P08Rik (NM_025418.2,381-399).
ctacactgccagcctttta

SEQ ID NO: 716261 - DNA, 19 bp, Mus musculus
  siRNA target sequence for 1110059P08Rik (NM_025418.2,384-402).
cactgccagccttttaata

SEQ ID NO: 716262 - DNA, 19 bp, Mus musculus
  siRNA target sequence for 1110059P08Rik (NM_025418.2,392-410).
gccttttaatagatgtcat

SEQ ID NO: 716263 - DNA, 19 bp, Mus musculus
  siRNA target sequence for 1110059P08Rik (NM_025418.2,421-439).
ggtgaactcacagatgaaa

SEQ ID NO: 716264 - DNA, 19 bp, Mus musculus
  siRNA target sequence for 1110059P08Rik (NM_025418.2,461-479).
caaggtggaaggcaacata

SEQ ID NO: 716265 - DNA, 19 bp, Mus musculus
  siRNA target sequence for 1110059P08Rik (NM_025418.2,650-668).
gctacagtggcatacagat

SEQ ID NO: 716266 - DNA, 19 bp, Mus musculus
  siRNA target sequence for 1110059P08Rik (NM_025418.2,651-669).
ctacagtggcatacagatt

SEQ ID NO: 716267 - DNA, 19 bp, Mus musculus
  siRNA target sequence for 1110059P08Rik (NM_025418.2,679-697).
gcacatgctccagctaata

SEQ ID NO: 716268 - DNA, 19 bp, Mus musculus
  siRNA target sequence for 1110059P08Rik (NM_025418.2,720-738).
cacaggtgtaacgagtaat

SEQ ID NO: 716269 - DNA, 19 bp, Mus musculus
  siRNA target sequence for 1110059P08Rik (NM_025418.2,878-896).
ccctgcagtatgaagatgt

SEQ ID NO: 716270 - DNA, 19 bp, Mus musculus
  siRNA target sequence for 1110059G10Rik (NM_025419.2,267-285).
ctgaagaggtcatgaaaat

SEQ ID NO: 716271 - DNA, 19 bp, Mus musculus
  siRNA target sequence for 1110059G10Rik (NM_025419.2,301-319).
ggctgccaaaacagatgaa

SEQ ID NO: 716272 - DNA, 19 bp, Mus musculus
  siRNA target sequence for 1110059G10Rik (NM_025419.2,338-356).
ggaagaatagtttatcgaa

SEQ ID NO: 716273 - DNA, 19 bp, Mus musculus
  siRNA target sequence for 1110059G10Rik (NM_025419.2,339-357).
gaagaatagtttatcgaaa

SEQ ID NO: 716274 - DNA, 19 bp, Mus musculus
  siRNA target sequence for 1110059G10Rik (NM_025419.2,431-449).
gatgatgtaaataagcaaa

SEQ ID NO: 716275 - DNA, 19 bp, Mus musculus
  siRNA target sequence for 1110059G10Rik (NM_025419.2,446-464).
caaagttcagttagaaaga

SEQ ID NO: 716276 - DNA, 19 bp, Mus musculus
  siRNA target sequence for 1110059G10Rik (NM_025419.2,489-507).
gcagtctcctttcttttga

SEQ ID NO: 716277 - DNA, 19 bp, Mus musculus
  siRNA target sequence for 1110059E24Rik (NM_025423.1,124-142).
cagaagcaccagaatacgt

SEQ ID NO: 716278 - DNA, 19 bp, Mus musculus
  siRNA target sequence for 1110059E24Rik (NM_025423.1,135-153).
gaatacgttcaccttcaaa

SEQ ID NO: 716279 - DNA, 19 bp, Mus musculus
  siRNA target sequence for 1110059E24Rik (NM_025423.1,140-158).
cgttcaccttcaaaaatga

SEQ ID NO: 716280 - DNA, 19 bp, Mus musculus
  siRNA target sequence for 1110059E24Rik (NM_025423.1,238-256).
cttgagtggcgtgtaaagt

SEQ ID NO: 716281 - DNA, 19 bp, Mus musculus
  siRNA target sequence for 1110059E24Rik (NM_025423.1,241-259).
gagtggcgtgtaaagtaca

SEQ ID NO: 716282 - DNA, 19 bp, Mus musculus
  siRNA target sequence for 1110059E24Rik (NM_025423.1,322-340).
gactcttaccacataatgt

SEQ ID NO: 716283 - DNA, 19 bp, Mus musculus
  siRNA target sequence for 1110059E24Rik (NM_025423.1,324-342).
ctcttaccacataatgtgt

SEQ ID NO: 716284 - DNA, 19 bp, Mus musculus
  siRNA target sequence for 1110059E24Rik (NM_025423.1,387-405).
gaaagaagagatcgttatt

SEQ ID NO: 716285 - DNA, 19 bp, Mus musculus
  siRNA target sequence for 1110059E24Rik (NM_025423.1,396-414).
gatcgttattccgtttaat

SEQ ID NO: 716286 - DNA, 19 bp, Mus musculus
  siRNA target sequence for 1110059E24Rik (NM_025423.1,399-417).
cgttattccgtttaataaa

SEQ ID NO: 716287 - DNA, 19 bp, Mus musculus
  siRNA target sequence for 1110060M21Rik (NM_025424.1,202-220).
gaggatcagcccatctact

SEQ ID NO: 716288 - DNA, 19 bp, Mus musculus
  siRNA target sequence for Crsp9 (NM_025426.2,440-458).
cgcctccaatgcagtacat

SEQ ID NO: 716289 - DNA, 19 bp, Mus musculus
  siRNA target sequence for Crsp9 (NM_025426.2,451-469).
cagtacatcaaggaatata

SEQ ID NO: 716290 - DNA, 19 bp, Mus musculus
  siRNA target sequence for Crsp9 (NM_025426.2,570-588).
cattcgccctttagaaagt

SEQ ID NO: 716291 - DNA, 19 bp, Mus musculus
  siRNA target sequence for Crsp9 (NM_025426.2,601-619).
cggcttcatcctatgcaat

SEQ ID NO: 716292 - DNA, 19 bp, Mus musculus
  siRNA target sequence for Crsp9 (NM_025426.2,602-620).
ggcttcatcctatgcaatt

SEQ ID NO: 716293 - DNA, 19 bp, Mus musculus
  siRNA target sequence for Crsp9 (NM_025426.2,610-628).
cctatgcaatttgatcata

SEQ ID NO: 716294 - DNA, 19 bp, Mus musculus
  siRNA target sequence for Crsp9 (NM_025426.2,611-629).
ctatgcaatttgatcataa

SEQ ID NO: 716295 - DNA, 19 bp, Mus musculus
  siRNA target sequence for Crsp9 (NM_025426.2,634-652).
gagctgagaaaactcaata

SEQ ID NO: 716296 - DNA, 19 bp, Mus musculus
  siRNA target sequence for Crsp9 (NM_025426.2,641-659).
gaaaactcaatatgtctat

SEQ ID NO: 716297 - DNA, 19 bp, Mus musculus
  siRNA target sequence for Crsp9 (NM_025426.2,676-694).
gaccttttagacatcttaa

SEQ ID NO: 716298 - DNA, 19 bp, Mus musculus
  siRNA target sequence for Crsp9 (NM_025426.2,678-696).
ccttttagacatcttaata

SEQ ID NO: 716299 - DNA, 19 bp, Mus musculus
  siRNA target sequence for Crsp9 (NM_025426.2,708-726).
gagtataaaacgagaagaa

SEQ ID NO: 716300 - DNA, 19 bp, Mus musculus
  siRNA target sequence for Crsp9 (NM_025426.2,729-747).
gctagaagatcttaagcta

SEQ ID NO: 716301 - DNA, 19 bp, Mus musculus
  siRNA target sequence for Crsp9 (NM_025426.2,733-751).
gaagatcttaagctacttt

SEQ ID NO: 716302 - DNA, 19 bp, Mus musculus
  siRNA target sequence for Crsp9 (NM_025426.2,744-762).
gctactttttgtacatgta

SEQ ID NO: 716303 - DNA, 19 bp, Mus musculus
  siRNA target sequence for Crsp9 (NM_025426.2,763-781).
catcatcttataaatgaat

SEQ ID NO: 716304 - DNA, 19 bp, Mus musculus
  siRNA target sequence for Crsp9 (NM_025426.2,854-872).
ctgagaggtttcagaaaca

SEQ ID NO: 716305 - DNA, 19 bp, Mus musculus
  siRNA target sequence for Crsp9 (NM_025426.2,881-899).
gagtcattgaaatgattca

SEQ ID NO: 716306 - DNA, 19 bp, Mus musculus
  siRNA target sequence for Crsp9 (NM_025426.2,962-980).
ctgagccgatggatactga

SEQ ID NO: 716307 - DNA, 19 bp, Mus musculus
  siRNA target sequence for Crsp9 (NM_025426.2,967-985).
ccgatggatactgatgata

SEQ ID NO: 716308 - DNA, 19 bp, Mus musculus
  siRNA target sequence for Crsp9 (NM_025426.2,990-1008).
caattgtcctggacagaat

SEQ ID NO: 716309 - DNA, 19 bp, Mus musculus
  siRNA target sequence for Crsp9 (NM_025426.2,1035-1053).
cagaagggaccagattata

SEQ ID NO: 716310 - DNA, 19 bp, Mus musculus
  siRNA target sequence for Crsp9 (NM_025426.2,1037-1055).
gaagggaccagattataga

SEQ ID NO: 716311 - DNA, 19 bp, Mus musculus
  siRNA target sequence for Crsp9 (NM_025426.2,1040-1058).
gggaccagattatagaaaa

SEQ ID NO: 716312 - DNA, 19 bp, Mus musculus
  siRNA target sequence for Crsp9 (NM_025426.2,1067-1085).
ccttatgtgtgctaattga

SEQ ID NO: 716313 - DNA, 19 bp, Mus musculus
  siRNA target sequence for Crsp9 (NM_025426.2,1068-1086).
cttatgtgtgctaattgat

SEQ ID NO: 716314 - DNA, 19 bp, Mus musculus
  siRNA target sequence for Crsp9 (NM_025426.2,1077-1095).
gctaattgatgaaatgaat

SEQ ID NO: 716315 - DNA, 19 bp, Mus musculus
  siRNA target sequence for 1500006O09Rik (NM_025435.1,47-65).
gtgactgacgacgaagtta

SEQ ID NO: 716316 - DNA, 19 bp, Mus musculus
  siRNA target sequence for 1500006O09Rik (NM_025435.1,49-67).
gactgacgacgaagttata

SEQ ID NO: 716317 - DNA, 19 bp, Mus musculus
  siRNA target sequence for 1500006O09Rik (NM_025435.1,69-87).
ggaaacgtcttctgattga

SEQ ID NO: 716318 - DNA, 19 bp, Mus musculus
  siRNA target sequence for 1500006O09Rik (NM_025435.1,70-88).
gaaacgtcttctgattgat

SEQ ID NO: 716319 - DNA, 19 bp, Mus musculus
  siRNA target sequence for 1500006O09Rik (NM_025435.1,101-119).
ggggatgatcggagaatta

SEQ ID NO: 716320 - DNA, 19 bp, Mus musculus
  siRNA target sequence for 1500006O09Rik (NM_025435.1,102-120).
gggatgatcggagaattaa

SEQ ID NO: 716321 - DNA, 19 bp, Mus musculus
  siRNA target sequence for 1500006O09Rik (NM_025435.1,124-142).
cctcgtgaaaagcttcatt

SEQ ID NO: 716322 - DNA, 19 bp, Mus musculus
  siRNA target sequence for 1500006O09Rik (NM_025435.1,125-143).
ctcgtgaaaagcttcatta

SEQ ID NO: 716323 - DNA, 19 bp, Mus musculus
  siRNA target sequence for 1500006O09Rik (NM_025435.1,204-222).
ctctgtcccagtgtgaatt

SEQ ID NO: 716324 - DNA, 19 bp, Mus musculus
  siRNA target sequence for 1500006O09Rik (NM_025435.1,241-259).
gctggtatatgatatgaat

SEQ ID NO: 716325 - DNA, 19 bp, Mus musculus
  siRNA target sequence for 1500006O09Rik (NM_025435.1,245-263).
gtatatgatatgaatctca

SEQ ID NO: 716326 - DNA, 19 bp, Mus musculus
  siRNA target sequence for 1500006O09Rik (NM_025435.1,342-360).
gtaaaaagcagattcttca

SEQ ID NO: 716327 - DNA, 19 bp, Mus musculus
  siRNA target sequence for 1500006O09Rik (NM_025435.1,374-392).
cgaaaaaatcgacaagaat

SEQ ID NO: 716328 - DNA, 19 bp, Mus musculus
  siRNA target sequence for 1500006O09Rik (NM_025435.1,459-477).
ctctgggcaaagaattaga

SEQ ID NO: 716329 - DNA, 19 bp, Mus musculus
  siRNA target sequence for 1500006O09Rik (NM_025435.1,476-494).
gagcatctctcacatatta

SEQ ID NO: 716330 - DNA, 19 bp, Mus musculus
  siRNA target sequence for 1500006O09Rik (NM_025435.1,486-504).
cacatattaaagaaagtgt

SEQ ID NO: 716331 - DNA, 19 bp, Mus musculus
  siRNA target sequence for 1500006O09Rik (NM_025435.1,506-524).
gaagataagctggaattga

SEQ ID NO: 716332 - DNA, 19 bp, Mus musculus
  siRNA target sequence for 1500006O09Rik (NM_025435.1,533-551).
caatttcacgttcttctta

SEQ ID NO: 716333 - DNA, 19 bp, Mus musculus
  siRNA target sequence for 1500006O09Rik (NM_025435.1,552-570).
gtaccatccatgaacttca

SEQ ID NO: 716334 - DNA, 19 bp, Mus musculus
  siRNA target sequence for Sdccag1 (NM_025441.2,129-147).
gagagtaaacaacgtttat

SEQ ID NO: 716335 - DNA, 19 bp, Mus musculus
  siRNA target sequence for Sdccag1 (NM_025441.2,131-149).
gagtaaacaacgtttatga

SEQ ID NO: 716336 - DNA, 19 bp, Mus musculus
  siRNA target sequence for Sdccag1 (NM_025441.2,154-172).
gataacaagacatatctta

SEQ ID NO: 716337 - DNA, 19 bp, Mus musculus
  siRNA target sequence for Sdccag1 (NM_025441.2,207-225).
gttacttgagtctggtata

SEQ ID NO: 716338 - DNA, 19 bp, Mus musculus
  siRNA target sequence for Sdccag1 (NM_025441.2,211-229).
cttgagtctggtatacgta

SEQ ID NO: 716339 - DNA, 19 bp, Mus musculus
  siRNA target sequence for Sdccag1 (NM_025441.2,216-234).
gtctggtatacgtattcat

SEQ ID NO: 716340 - DNA, 19 bp, Mus musculus
  siRNA target sequence for Sdccag1 (NM_025441.2,226-244).
cgtattcatacaacagaat

SEQ ID NO: 716341 - DNA, 19 bp, Mus musculus
  siRNA target sequence for Sdccag1 (NM_025441.2,247-265).
gagtggcctaagaacatga

SEQ ID NO: 716342 - DNA, 19 bp, Mus musculus
  siRNA target sequence for Sdccag1 (NM_025441.2,261-279).
catgatgccgtcgagtttt

SEQ ID NO: 716343 - DNA, 19 bp, Mus musculus
  siRNA target sequence for Sdccag1 (NM_025441.2,281-299).
ccatgaagtgtcgaaaaca

SEQ ID NO: 716344 - DNA, 19 bp, Mus musculus
  siRNA target sequence for Sdccag1 (NM_025441.2,282-300).
catgaagtgtcgaaaacat

SEQ ID NO: 716345 - DNA, 19 bp, Mus musculus
  siRNA target sequence for Sdccag1 (NM_025441.2,314-332).
gattagtcagtgcaaaaca

SEQ ID NO: 716346 - DNA, 19 bp, Mus musculus
  siRNA target sequence for Sdccag1 (NM_025441.2,333-351).
gcttggtgtggacagaatt

SEQ ID NO: 716347 - DNA, 19 bp, Mus musculus
  siRNA target sequence for Sdccag1 (NM_025441.2,371-389).
gtgacgaagctgcttatca

SEQ ID NO: 716348 - DNA, 19 bp, Mus musculus
  siRNA target sequence for Sdccag1 (NM_025441.2,379-397).
gctgcttatcacttaatca

SEQ ID NO: 716349 - DNA, 19 bp, Mus musculus
  siRNA target sequence for Sdccag1 (NM_025441.2,380-398).
ctgcttatcacttaatcat

SEQ ID NO: 716350 - DNA, 19 bp, Mus musculus
  siRNA target sequence for Sdccag1 (NM_025441.2,383-401).
cttatcacttaatcattga

SEQ ID NO: 716351 - DNA, 19 bp, Mus musculus
  siRNA target sequence for Sdccag1 (NM_025441.2,405-423).
ctatgacagggggaacatt

SEQ ID NO: 716352 - DNA, 19 bp, Mus musculus
  siRNA target sequence for Sdccag1 (NM_025441.2,411-429).
cagggggaacattgttctt

SEQ ID NO: 716353 - DNA, 19 bp, Mus musculus
  siRNA target sequence for Sdccag1 (NM_025441.2,424-442).
gttcttacagattatgagt

SEQ ID NO: 716354 - DNA, 19 bp, Mus musculus
  siRNA target sequence for Sdccag1 (NM_025441.2,431-449).
cagattatgagtacctaat

SEQ ID NO: 716355 - DNA, 19 bp, Mus musculus
  siRNA target sequence for Sdccag1 (NM_025441.2,459-477).
cctaaggtttcgaactgat

SEQ ID NO: 716356 - DNA, 19 bp, Mus musculus
  siRNA target sequence for Sdccag1 (NM_025441.2,601-619).
gtgctgaagagagttctta

SEQ ID NO: 716357 - DNA, 19 bp, Mus musculus
  siRNA target sequence for Sdccag1 (NM_025441.2,632-650).
cctatggaccagctcttat

SEQ ID NO: 716358 - DNA, 19 bp, Mus musculus
  siRNA target sequence for Sdccag1 (NM_025441.2,633-651).
ctatggaccagctcttatt

SEQ ID NO: 716359 - DNA, 19 bp, Mus musculus
  siRNA target sequence for Sdccag1 (NM_025441.2,646-664).
cttattgagcactgtctta

SEQ ID NO: 716360 - DNA, 19 bp, Mus musculus
  siRNA target sequence for Sdccag1 (NM_025441.2,673-691).
ggattctctggcaatgcta

SEQ ID NO: 716361 - DNA, 19 bp, Mus musculus
  siRNA target sequence for Sdccag1 (NM_025441.2,768-786).
gaaaacatccaacttcaat

SEQ ID NO: 716362 - DNA, 19 bp, Mus musculus
  siRNA target sequence for Sdccag1 (NM_025441.2,783-801).
caatggaaagggctatata

SEQ ID NO: 716363 - DNA, 19 bp, Mus musculus
  siRNA target sequence for Sdccag1 (NM_025441.2,861-879).
cacgtatgaggagtttcat

SEQ ID NO: 716364 - DNA, 19 bp, Mus musculus
  siRNA target sequence for Sdccag1 (NM_025441.2,871-889).
gagtttcatcctttcttgt

SEQ ID NO: 716365 - DNA, 19 bp, Mus musculus
  siRNA target sequence for Sdccag1 (NM_025441.2,908-926).
gtccatatatagaatttga

SEQ ID NO: 716366 - DNA, 19 bp, Mus musculus
  siRNA target sequence for Sdccag1 (NM_025441.2,934-952).
gacaaggccgtggatgaat

SEQ ID NO: 716367 - DNA, 19 bp, Mus musculus
  siRNA target sequence for Sdccag1 (NM_025441.2,939-957).
ggccgtggatgaattttat

SEQ ID NO: 716368 - DNA, 19 bp, Mus musculus
  siRNA target sequence for Sdccag1 (NM_025441.2,963-981).
gatagaagggcagaaaatt

SEQ ID NO: 716369 - DNA, 19 bp, Mus musculus
  siRNA target sequence for Sdccag1 (NM_025441.2,1033-1051).
gtccgaaaggatcatgaaa

SEQ ID NO: 716370 - DNA, 19 bp, Mus musculus
  siRNA target sequence for Sdccag1 (NM_025441.2,1041-1059).
ggatcatgaaaacagatta

SEQ ID NO: 716371 - DNA, 19 bp, Mus musculus
  siRNA target sequence for Sdccag1 (NM_025441.2,1160-1178).
cgttggccaaccagataga

SEQ ID NO: 716372 - DNA, 19 bp, Mus musculus
  siRNA target sequence for Sdccag1 (NM_025441.2,1182-1200).
gacagaaatcggagtgatt

SEQ ID NO: 716373 - DNA, 19 bp, Mus musculus
  siRNA target sequence for Sdccag1 (NM_025441.2,1184-1202).
cagaaatcggagtgattgt

SEQ ID NO: 716374 - DNA, 19 bp, Mus musculus
  siRNA target sequence for Sdccag1 (NM_025441.2,1186-1204).
gaaatcggagtgattgtga

SEQ ID NO: 716375 - DNA, 19 bp, Mus musculus
  siRNA target sequence for Sdccag1 (NM_025441.2,1229-1247).
cggttgcatgtgcaatcaa

SEQ ID NO: 716376 - DNA, 19 bp, Mus musculus
  siRNA target sequence for Sdccag1 (NM_025441.2,1278-1296).
gatgctgctacgaaatcca

SEQ ID NO: 716377 - DNA, 19 bp, Mus musculus
  siRNA target sequence for Sdccag1 (NM_025441.2,1285-1303).
ctacgaaatccatacttgt

SEQ ID NO: 716378 - DNA, 19 bp, Mus musculus
  siRNA target sequence for Sdccag1 (NM_025441.2,1288-1306).
cgaaatccatacttgttat

SEQ ID NO: 716379 - DNA, 19 bp, Mus musculus
  siRNA target sequence for Sdccag1 (NM_025441.2,1419-1437).
caagccgctgcttgtagat

SEQ ID NO: 716380 - DNA, 19 bp, Mus musculus
  siRNA target sequence for Sdccag1 (NM_025441.2,1462-1480).
gccaatgccaaaaaatatt

SEQ ID NO: 716381 - DNA, 19 bp, Mus musculus
  siRNA target sequence for Sdccag1 (NM_025441.2,1464-1482).
caatgccaaaaaatattat

SEQ ID NO: 716382 - DNA, 19 bp, Mus musculus
  siRNA target sequence for Sdccag1 (NM_025441.2,1491-1509).
gaggtatgctgctaaaaaa

SEQ ID NO: 716383 - DNA, 19 bp, Mus musculus
  siRNA target sequence for Sdccag1 (NM_025441.2,1531-1549).
gctgagaaggcattcaaat

SEQ ID NO: 716384 - DNA, 19 bp, Mus musculus
  siRNA target sequence for Sdccag1 (NM_025441.2,1585-1603).
gtacaaacagttacttcta

SEQ ID NO: 716385 - DNA, 19 bp, Mus musculus
  siRNA target sequence for Sdccag1 (NM_025441.2,1621-1639).
gtgtattggtttgagaaat

SEQ ID NO: 716386 - DNA, 19 bp, Mus musculus
  siRNA target sequence for Sdccag1 (NM_025441.2,1650-1668).
cattagttcagagaactat

SEQ ID NO: 716387 - DNA, 19 bp, Mus musculus
  siRNA target sequence for Sdccag1 (NM_025441.2,1762-1780).
ggagctaccagctgtgtaa

SEQ ID NO: 716388 - DNA, 19 bp, Mus musculus
  siRNA target sequence for Sdccag1 (NM_025441.2,1763-1781).
gagctaccagctgtgtaat

SEQ ID NO: 716389 - DNA, 19 bp, Mus musculus
  siRNA target sequence for Sdccag1 (NM_025441.2,1765-1783).
gctaccagctgtgtaatta

SEQ ID NO: 716390 - DNA, 19 bp, Mus musculus
  siRNA target sequence for Sdccag1 (NM_025441.2,1766-1784).
ctaccagctgtgtaattaa

SEQ ID NO: 716391 - DNA, 19 bp, Mus musculus
  siRNA target sequence for Sdccag1 (NM_025441.2,1770-1788).
cagctgtgtaattaagaat

SEQ ID NO: 716392 - DNA, 19 bp, Mus musculus
  siRNA target sequence for Sdccag1 (NM_025441.2,1806-1824).
ccctccacggactttgact

SEQ ID NO: 716393 - DNA, 19 bp, Mus musculus
  siRNA target sequence for Sdccag1 (NM_025441.2,1832-1850).
gcacaatggcactttgcta

SEQ ID NO: 716394 - DNA, 19 bp, Mus musculus
  siRNA target sequence for Sdccag1 (NM_025441.2,1859-1877).
cttgggatgcacgtgttat

SEQ ID NO: 716395 - DNA, 19 bp, Mus musculus
  siRNA target sequence for Sdccag1 (NM_025441.2,1863-1881).
ggatgcacgtgttatcact

SEQ ID NO: 716396 - DNA, 19 bp, Mus musculus
  siRNA target sequence for Sdccag1 (NM_025441.2,1864-1882).
gatgcacgtgttatcacta

SEQ ID NO: 716397 - DNA, 19 bp, Mus musculus
  siRNA target sequence for Sdccag1 (NM_025441.2,1889-1907).
ggtgggtgtaccatcatca

SEQ ID NO: 716398 - DNA, 19 bp, Mus musculus
  siRNA target sequence for Sdccag1 (NM_025441.2,1981-1999).
cttcctccttcatacctaa

SEQ ID NO: 716399 - DNA, 19 bp, Mus musculus
  siRNA target sequence for Sdccag1 (NM_025441.2,1984-2002).
cctccttcatacctaatga

SEQ ID NO: 716400 - DNA, 19 bp, Mus musculus
  siRNA target sequence for Sdccag1 (NM_025441.2,1985-2003).
ctccttcatacctaatgat

SEQ ID NO: 716401 - DNA, 19 bp, Mus musculus
  siRNA target sequence for Sdccag1 (NM_025441.2,1996-2014).
ctaatgatggggtttagct

SEQ ID NO: 716402 - DNA, 19 bp, Mus musculus
  siRNA target sequence for Sdccag1 (NM_025441.2,2048-2066).
gacatcgaggtgaacgaaa

SEQ ID NO: 716403 - DNA, 19 bp, Mus musculus
  siRNA target sequence for Sdccag1 (NM_025441.2,2100-2118).
gacaagctgcacaagtgaa

SEQ ID NO: 716404 - DNA, 19 bp, Mus musculus
  siRNA target sequence for Sdccag1 (NM_025441.2,2105-2123).
gctgcacaagtgaactcat

SEQ ID NO: 716405 - DNA, 19 bp, Mus musculus
  siRNA target sequence for Sdccag1 (NM_025441.2,2195-2213).
ctggagacgtagaactcat

SEQ ID NO: 716406 - DNA, 19 bp, Mus musculus
  siRNA target sequence for Sdccag1 (NM_025441.2,2211-2229).
catgactcaggttgatcaa

SEQ ID NO: 716407 - DNA, 19 bp, Mus musculus
  siRNA target sequence for Sdccag1 (NM_025441.2,2308-2326).
gagcccattggtgaaatga

SEQ ID NO: 716408 - DNA, 19 bp, Mus musculus
  siRNA target sequence for Sdccag1 (NM_025441.2,2337-2355).
ggaagacacctttgaatat

SEQ ID NO: 716409 - DNA, 19 bp, Mus musculus
  siRNA target sequence for Sdccag1 (NM_025441.2,2391-2409).
ccaacggcctctacagaaa

SEQ ID NO: 716410 - DNA, 19 bp, Mus musculus
  siRNA target sequence for Sdccag1 (NM_025441.2,2422-2440).
gaagagtctttgaactcaa

SEQ ID NO: 716411 - DNA, 19 bp, Mus musculus
  siRNA target sequence for Sdccag1 (NM_025441.2,2436-2454).
ctcaaatgacagtaaatca

SEQ ID NO: 716412 - DNA, 19 bp, Mus musculus
  siRNA target sequence for Sdccag1 (NM_025441.2,2453-2471).
cacagggccgaagacattt

SEQ ID NO: 716413 - DNA, 19 bp, Mus musculus
  siRNA target sequence for Sdccag1 (NM_025441.2,2455-2473).
cagggccgaagacatttgt

SEQ ID NO: 716414 - DNA, 19 bp, Mus musculus
  siRNA target sequence for Sdccag1 (NM_025441.2,2457-2475).
gggccgaagacatttgtca

SEQ ID NO: 716415 - DNA, 19 bp, Mus musculus
  siRNA target sequence for Sdccag1 (NM_025441.2,2522-2540).
caggggatttagaagtgat

SEQ ID NO: 716416 - DNA, 19 bp, Mus musculus
  siRNA target sequence for Sdccag1 (NM_025441.2,2581-2599).
gaagcttaccaaaacacaa

SEQ ID NO: 716417 - DNA, 19 bp, Mus musculus
  siRNA target sequence for Sdccag1 (NM_025441.2,2692-2710).
gatcgtgaacttattatga

SEQ ID NO: 716418 - DNA, 19 bp, Mus musculus
  siRNA target sequence for Sdccag1 (NM_025441.2,2695-2713).
cgtgaacttattatgaagt

SEQ ID NO: 716419 - DNA, 19 bp, Mus musculus
  siRNA target sequence for Sdccag1 (NM_025441.2,2726-2744).
caggttcgaacaaagaaga

SEQ ID NO: 716420 - DNA, 19 bp, Mus musculus
  siRNA target sequence for Sdccag1 (NM_025441.2,2816-2834).
gtggacagcgggttttaga

SEQ ID NO: 716421 - DNA, 19 bp, Mus musculus
  siRNA target sequence for Sdccag1 (NM_025441.2,2819-2837).
gacagcgggttttagatgt

SEQ ID NO: 716422 - DNA, 19 bp, Mus musculus
  siRNA target sequence for Sdccag1 (NM_025441.2,2823-2841).
gcgggttttagatgttgtt

SEQ ID NO: 716423 - DNA, 19 bp, Mus musculus
  siRNA target sequence for Sdccag1 (NM_025441.2,2824-2842).
cgggttttagatgttgtta

SEQ ID NO: 716424 - DNA, 19 bp, Mus musculus
  siRNA target sequence for Sdccag1 (NM_025441.2,2849-2867).
ctccgtccctgcaggtttt

SEQ ID NO: 716425 - DNA, 19 bp, Mus musculus
  siRNA target sequence for Sdccag1 (NM_025441.2,2981-2999).
cacatcctgaggatgtact

SEQ ID NO: 716426 - DNA, 19 bp, Mus musculus
  siRNA target sequence for Sdccag1 (NM_025441.2,2992-3010).
gatgtactgatgtttgcta

SEQ ID NO: 716427 - DNA, 19 bp, Mus musculus
  siRNA target sequence for Sdccag1 (NM_025441.2,3000-3018).
gatgtttgctattccaata

SEQ ID NO: 716428 - DNA, 19 bp, Mus musculus
  siRNA target sequence for Sdccag1 (NM_025441.2,3003-3021).
gtttgctattccaatatgt

SEQ ID NO: 716429 - DNA, 19 bp, Mus musculus
  siRNA target sequence for Sdccag1 (NM_025441.2,3022-3040).
gccccttacaccatcatga

SEQ ID NO: 716430 - DNA, 19 bp, Mus musculus
  siRNA target sequence for Sdccag1 (NM_025441.2,3030-3048).
caccatcatgacaaactat

SEQ ID NO: 716431 - DNA, 19 bp, Mus musculus
  siRNA target sequence for Sdccag1 (NM_025441.2,3032-3050).
ccatcatgacaaactataa

SEQ ID NO: 716432 - DNA, 19 bp, Mus musculus
  siRNA target sequence for Sdccag1 (NM_025441.2,3033-3051).
catcatgacaaactataaa

SEQ ID NO: 716433 - DNA, 19 bp, Mus musculus
  siRNA target sequence for Sdccag1 (NM_025441.2,3167-3185).
gtgtgaaggacacagattt

SEQ ID NO: 716434 - DNA, 19 bp, Mus musculus
  siRNA target sequence for Aig1 (NM_025446.1,109-127).
gcaatcctgctatcctatt

SEQ ID NO: 716435 - DNA, 19 bp, Mus musculus
  siRNA target sequence for Aig1 (NM_025446.1,195-213).
gttcctgaccttcattgat

SEQ ID NO: 716436 - DNA, 19 bp, Mus musculus
  siRNA target sequence for Aig1 (NM_025446.1,203-221).
ccttcattgatctggttat

SEQ ID NO: 716437 - DNA, 19 bp, Mus musculus
  siRNA target sequence for Aig1 (NM_025446.1,360-378).
ccctgtcggggtttttgtt

SEQ ID NO: 716438 - DNA, 19 bp, Mus musculus
  siRNA target sequence for Aig1 (NM_025446.1,405-423).
ctatgacagagagatgata

SEQ ID NO: 716439 - DNA, 19 bp, Mus musculus
  siRNA target sequence for Aig1 (NM_025446.1,431-449).
gattgcttgacaactttat

SEQ ID NO: 716440 - DNA, 19 bp, Mus musculus
  siRNA target sequence for Aig1 (NM_025446.1,455-473).
ggtggctgaaccatggaat

SEQ ID NO: 716441 - DNA, 19 bp, Mus musculus
  siRNA target sequence for Aig1 (NM_025446.1,482-500).
cggttttgccctttatatt

SEQ ID NO: 716442 - DNA, 19 bp, Mus musculus
  siRNA target sequence for Aig1 (NM_025446.1,512-530).
gaacatcccaccatcagta

SEQ ID NO: 716443 - DNA, 19 bp, Mus musculus
  siRNA target sequence for Aig1 (NM_025446.1,566-584).
ccttctccgtgggctatat

SEQ ID NO: 716444 - DNA, 19 bp, Mus musculus
  siRNA target sequence for Aig1 (NM_025446.1,570-588).
ctccgtgggctatatatta

SEQ ID NO: 716445 - DNA, 19 bp, Mus musculus
  siRNA target sequence for Aig1 (NM_025446.1,591-609).
ggtgtgctggatacatcat

SEQ ID NO: 716446 - DNA, 19 bp, Mus musculus
  siRNA target sequence for Aig1 (NM_025446.1,630-648).
ccctttcctggaacatatt

SEQ ID NO: 716447 - DNA, 19 bp, Mus musculus
  siRNA target sequence for Aig1 (NM_025446.1,683-701).
caaccatcctaatgaattt

SEQ ID NO: 716448 - DNA, 19 bp, Mus musculus
  siRNA target sequence for Aig1 (NM_025446.1,705-723).
gtacctgcttggagaagta

SEQ ID NO: 716449 - DNA, 19 bp, Mus musculus
  siRNA target sequence for Aig1 (NM_025446.1,708-726).
cctgcttggagaagtacta

SEQ ID NO: 716450 - DNA, 19 bp, Mus musculus
  siRNA target sequence for Aig1 (NM_025446.1,718-736).
gaagtactaaacagctata

SEQ ID NO: 716451 - DNA, 19 bp, Mus musculus
  siRNA target sequence for Aig1 (NM_025446.1,721-739).
gtactaaacagctatatct

SEQ ID NO: 716452 - DNA, 19 bp, Mus musculus
  siRNA target sequence for Aig1 (NM_025446.1,775-793).
gacacccaatcttctctaa

SEQ ID NO: 716453 - DNA, 19 bp, Mus musculus
  siRNA target sequence for Aig1 (NM_025446.1,810-828).
ccaaaatctatgtaaagat

SEQ ID NO: 716454 - DNA, 19 bp, Mus musculus
  siRNA target sequence for Aig1 (NM_025446.1,817-835).
ctatgtaaagatacattca

SEQ ID NO: 716455 - DNA, 19 bp, Mus musculus
  siRNA target sequence for Ssr2 (NM_025448.2,249-267).
cgtcagtcaagcagaagaa

SEQ ID NO: 716456 - DNA, 19 bp, Mus musculus
  siRNA target sequence for Ssr2 (NM_025448.2,276-294).
gcttttggcctccaaatca

SEQ ID NO: 716457 - DNA, 19 bp, Mus musculus
  siRNA target sequence for Ssr2 (NM_025448.2,325-343).
gacctgaccctgcagtata

SEQ ID NO: 716458 - DNA, 19 bp, Mus musculus
  siRNA target sequence for Ssr2 (NM_025448.2,328-346).
ctgaccctgcagtataaca

SEQ ID NO: 716459 - DNA, 19 bp, Mus musculus
  siRNA target sequence for Ssr2 (NM_025448.2,357-375).
cggctccagcgctgcatta

SEQ ID NO: 716460 - DNA, 19 bp, Mus musculus
  siRNA target sequence for Ssr2 (NM_025448.2,359-377).
gctccagcgctgcattaga

SEQ ID NO: 716461 - DNA, 19 bp, Mus musculus
  siRNA target sequence for Ssr2 (NM_025448.2,360-378).
ctccagcgctgcattagat

SEQ ID NO: 716462 - DNA, 19 bp, Mus musculus
  siRNA target sequence for Ssr2 (NM_025448.2,362-380).
ccagcgctgcattagatgt

SEQ ID NO: 716463 - DNA, 19 bp, Mus musculus
  siRNA target sequence for Ssr2 (NM_025448.2,368-386).
ctgcattagatgtggaatt

SEQ ID NO: 716464 - DNA, 19 bp, Mus musculus
  siRNA target sequence for Ssr2 (NM_025448.2,370-388).
gcattagatgtggaattat

SEQ ID NO: 716465 - DNA, 19 bp, Mus musculus
  siRNA target sequence for Ssr2 (NM_025448.2,409-427).
gaagacttcggcattgtct

SEQ ID NO: 716466 - DNA, 19 bp, Mus musculus
  siRNA target sequence for Ssr2 (NM_025448.2,429-447).
cggtatgctcaatgtcaaa

SEQ ID NO: 716467 - DNA, 19 bp, Mus musculus
  siRNA target sequence for Ssr2 (NM_025448.2,430-448).
ggtatgctcaatgtcaaat

SEQ ID NO: 716468 - DNA, 19 bp, Mus musculus
  siRNA target sequence for Ssr2 (NM_025448.2,502-520).
ctcaaagctggctacttca

SEQ ID NO: 716469 - DNA, 19 bp, Mus musculus
  siRNA target sequence for Ssr2 (NM_025448.2,525-543).
cacttctgccacgattact

SEQ ID NO: 716470 - DNA, 19 bp, Mus musculus
  siRNA target sequence for Ssr2 (NM_025448.2,527-545).
cttctgccacgattactta

SEQ ID NO: 716471 - DNA, 19 bp, Mus musculus
  siRNA target sequence for Ssr2 (NM_025448.2,558-576).
ggatggacctgttgtgatt

SEQ ID NO: 716472 - DNA, 19 bp, Mus musculus
  siRNA target sequence for Ssr2 (NM_025448.2,613-631).
gctcagcgggagtttgaca

SEQ ID NO: 716473 - DNA, 19 bp, Mus musculus
  siRNA target sequence for Ssr2 (NM_025448.2,622-640).
gagtttgacaggagattct

SEQ ID NO: 716474 - DNA, 19 bp, Mus musculus
  siRNA target sequence for Nicn1 (NM_025449.2,167-185).
ggtcgtcgatgtcactttt

SEQ ID NO: 716475 - DNA, 19 bp, Mus musculus
  siRNA target sequence for Nicn1 (NM_025449.2,251-269).
catccgtgttcgtcaacaa

SEQ ID NO: 716476 - DNA, 19 bp, Mus musculus
  siRNA target sequence for Nicn1 (NM_025449.2,290-308).
caagtgggtaacttgtctt

SEQ ID NO: 716477 - DNA, 19 bp, Mus musculus
  siRNA target sequence for Nicn1 (NM_025449.2,304-322).
gtcttcgggattactgttt

SEQ ID NO: 716478 - DNA, 19 bp, Mus musculus
  siRNA target sequence for Nicn1 (NM_025449.2,306-324).
cttcgggattactgtttga

SEQ ID NO: 716479 - DNA, 19 bp, Mus musculus
  siRNA target sequence for Nicn1 (NM_025449.2,348-366).
ggagcccaggactatgtat

SEQ ID NO: 716480 - DNA, 19 bp, Mus musculus
  siRNA target sequence for Nicn1 (NM_025449.2,352-370).
cccaggactatgtatcact

SEQ ID NO: 716481 - DNA, 19 bp, Mus musculus
  siRNA target sequence for Nicn1 (NM_025449.2,671-689).
cgacgtggatggctgttat

SEQ ID NO: 716482 - DNA, 19 bp, Mus musculus
  siRNA target sequence for Nicn1 (NM_025449.2,681-699).
ggctgttatgatctgaatt

SEQ ID NO: 716483 - DNA, 19 bp, Mus musculus
  siRNA target sequence for 1810017F10Rik (NM_025452.2,250-268).
gtgacgctgtggttctaca

SEQ ID NO: 716484 - DNA, 19 bp, Mus musculus
  siRNA target sequence for 1810017F10Rik (NM_025452.2,372-390).
cgctggaccgtgtttagct

SEQ ID NO: 716485 - DNA, 19 bp, Mus musculus
  siRNA target sequence for 1810017F10Rik (NM_025452.2,373-391).
gctggaccgtgtttagctt

SEQ ID NO: 716486 - DNA, 19 bp, Mus musculus
  siRNA target sequence for 1810017F10Rik (NM_025452.2,466-484).
ccaagggtagagcactatt

SEQ ID NO: 716487 - DNA, 19 bp, Mus musculus
  siRNA target sequence for 1810017F10Rik (NM_025452.2,546-564).
cctactcgaatttatagct

SEQ ID NO: 716488 - DNA, 19 bp, Mus musculus
  siRNA target sequence for 1810017F10Rik (NM_025452.2,578-596).
ctgggccatctctctcata

SEQ ID NO: 716489 - DNA, 19 bp, Mus musculus
  siRNA target sequence for 1810017F10Rik (NM_025452.2,580-598).
gggccatctctctcatatt

SEQ ID NO: 716490 - DNA, 19 bp, Mus musculus
  siRNA target sequence for 1810017F10Rik (NM_025452.2,645-663).
catggactactggaactaa

SEQ ID NO: 716491 - DNA, 19 bp, Mus musculus
  siRNA target sequence for 1810017F10Rik (NM_025452.2,720-738).
gatgctcatgacctattga

SEQ ID NO: 716492 - DNA, 19 bp, Mus musculus
  siRNA target sequence for 1810010N17Rik (NM_025455.1,359-377).
cagaggtgacagatgttta

SEQ ID NO: 716493 - DNA, 19 bp, Mus musculus
  siRNA target sequence for 1810010N17Rik (NM_025455.1,364-382).
gtgacagatgtttatgaga

SEQ ID NO: 716494 - DNA, 19 bp, Mus musculus
  siRNA target sequence for 1810010N17Rik (NM_025455.1,397-415).
ctgaacttgctcaatgatt

SEQ ID NO: 716495 - DNA, 19 bp, Mus musculus
  siRNA target sequence for 1810010N17Rik (NM_025455.1,405-423).
gctcaatgattttcattca

SEQ ID NO: 716496 - DNA, 19 bp, Mus musculus
  siRNA target sequence for 1810010N17Rik (NM_025455.1,436-454).
gcctttgggaaggaatgtt

SEQ ID NO: 716497 - DNA, 19 bp, Mus musculus
  siRNA target sequence for 1810010N17Rik (NM_025455.1,637-655).
ctggaagatcttagcaatt

SEQ ID NO: 716498 - DNA, 19 bp, Mus musculus
  siRNA target sequence for 1810010N17Rik (NM_025455.1,646-664).
cttagcaattccatacaga

SEQ ID NO: 716499 - DNA, 19 bp, Mus musculus
  siRNA target sequence for 1810011O16Rik (NM_025456.2,114-132).
ccgactccaggatgactat

SEQ ID NO: 716500 - DNA, 19 bp, Mus musculus
  siRNA target sequence for 1810011O16Rik (NM_025456.2,223-241).
gaccaaaagcgaaaactca

SEQ ID NO: 716501 - DNA, 19 bp, Mus musculus
  siRNA target sequence for 1810011O16Rik (NM_025456.2,240-258).
catccgggaatgtcttact

SEQ ID NO: 716502 - DNA, 19 bp, Mus musculus
  siRNA target sequence for 1810011O16Rik (NM_025456.2,251-269).
gtcttactggagaaagtga

SEQ ID NO: 716503 - DNA, 19 bp, Mus musculus
  siRNA target sequence for 1810011O16Rik (NM_025456.2,391-409).
ggaggagtcacagaaaagt

SEQ ID NO: 716504 - DNA, 19 bp, Mus musculus
  siRNA target sequence for 1810011O16Rik (NM_025456.2,489-507).
caggattccaacaaacgat

SEQ ID NO: 716505 - DNA, 19 bp, Mus musculus
  siRNA target sequence for 1810011O16Rik (NM_025456.2,504-522).
cgatgagctgctgtatgat

SEQ ID NO: 716506 - DNA, 19 bp, Mus musculus
  siRNA target sequence for 1810011O16Rik (NM_025456.2,520-538).
gatcctgagaaagataaca

SEQ ID NO: 716507 - DNA, 19 bp, Mus musculus
  siRNA target sequence for 1810011O16Rik (NM_025456.2,566-584).
ggaggggttatcatgcttt

SEQ ID NO: 716508 - DNA, 19 bp, Mus musculus
  siRNA target sequence for 1810011O16Rik (NM_025456.2,567-585).
gaggggttatcatgctttt

SEQ ID NO: 716509 - DNA, 19 bp, Mus musculus
  siRNA target sequence for 1810011O16Rik (NM_025456.2,570-588).
gggttatcatgcttttgga

SEQ ID NO: 716510 - DNA, 19 bp, Mus musculus
  siRNA target sequence for 1810011O16Rik (NM_025456.2,577-595).
catgcttttggattgcaaa

SEQ ID NO: 716511 - DNA, 19 bp, Mus musculus
  siRNA target sequence for 1810011O16Rik (NM_025456.2,591-609).
gcaaaggccacgtcagaaa

SEQ ID NO: 716512 - DNA, 19 bp, Mus musculus
  siRNA target sequence for 1810011O16Rik (NM_025456.2,652-670).
gcctgtatgacgacattgt

SEQ ID NO: 716513 - DNA, 19 bp, Mus musculus
  siRNA target sequence for 1810011O16Rik (NM_025456.2,676-694).
gattgccagaggcatgaat

SEQ ID NO: 716514 - DNA, 19 bp, Mus musculus
  siRNA target sequence for 1810011O16Rik (NM_025456.2,704-722).
cgcagtacagggcaatgtt

SEQ ID NO: 716515 - DNA, 19 bp, Mus musculus
  siRNA target sequence for 1810011O16Rik (NM_025456.2,705-723).
gcagtacagggcaatgttt

SEQ ID NO: 716516 - DNA, 19 bp, Mus musculus
  siRNA target sequence for 1810011O16Rik (NM_025456.2,720-738).
gtttgtgatgaattgttct

SEQ ID NO: 716517 - DNA, 19 bp, Mus musculus
  siRNA target sequence for 1810011O16Rik (NM_025456.2,746-764).
gagaagaggttctgagata

SEQ ID NO: 716518 - DNA, 19 bp, Mus musculus
  siRNA target sequence for 1810011O16Rik (NM_025456.2,751-769).
gaggttctgagatacaaga

SEQ ID NO: 716519 - DNA, 19 bp, Mus musculus
  siRNA target sequence for 1810011O16Rik (NM_025456.2,753-771).
ggttctgagatacaagaat

SEQ ID NO: 716520 - DNA, 19 bp, Mus musculus
  siRNA target sequence for 1810011O16Rik (NM_025456.2,791-809).
ggcggagtgctaagaagat

SEQ ID NO: 716521 - DNA, 19 bp, Mus musculus
  siRNA target sequence for 1810011O16Rik (NM_025456.2,793-811).
cggagtgctaagaagatga

SEQ ID NO: 716522 - DNA, 19 bp, Mus musculus
  siRNA target sequence for 1810011O16Rik (NM_025456.2,810-828).
gaggtctaatcctgaagat

SEQ ID NO: 716523 - DNA, 19 bp, Mus musculus
  siRNA target sequence for 1810011O16Rik (NM_025456.2,839-857).
gagaagcggaggaaatcta

SEQ ID NO: 716524 - DNA, 19 bp, Mus musculus
  siRNA target sequence for 1810011O16Rik (NM_025456.2,870-888).
gtgcacagagtgttcaact

SEQ ID NO: 716525 - DNA, 19 bp, Mus musculus
  siRNA target sequence for 1810011O16Rik (NM_025456.2,889-907).
gaagtggcagtctatgaca

SEQ ID NO: 716526 - DNA, 19 bp, Mus musculus
  siRNA target sequence for 1810008A14Rik (NM_025457.1,239-257).
cacccgcacgagaacagaa

SEQ ID NO: 716527 - DNA, 19 bp, Mus musculus
  siRNA target sequence for 1810008A14Rik (NM_025457.1,243-261).
cgcacgagaacagaacttt

SEQ ID NO: 716528 - DNA, 19 bp, Mus musculus
  siRNA target sequence for 1810008A14Rik (NM_025457.1,244-262).
gcacgagaacagaactttt

SEQ ID NO: 716529 - DNA, 19 bp, Mus musculus
  siRNA target sequence for 1810008A14Rik (NM_025457.1,284-302).
gacagttaaccttttaaga

SEQ ID NO: 716530 - DNA, 19 bp, Mus musculus
  siRNA target sequence for 1810015P03Rik (NM_025458.1,182-200).
ccaggagccatcgaatgtt

SEQ ID NO: 716531 - DNA, 19 bp, Mus musculus
  siRNA target sequence for 1810015P03Rik (NM_025458.1,183-201).
caggagccatcgaatgttt

SEQ ID NO: 716532 - DNA, 19 bp, Mus musculus
  siRNA target sequence for 1810015P03Rik (NM_025458.1,270-288).
cacatgaccgccacattgt

SEQ ID NO: 716533 - DNA, 19 bp, Mus musculus
  siRNA target sequence for 1810015P03Rik (NM_025458.1,303-321).
ccccgcagggtttccttat

SEQ ID NO: 716534 - DNA, 19 bp, Mus musculus
  siRNA target sequence for 1810015P03Rik (NM_025458.1,304-322).
cccgcagggtttccttatt

SEQ ID NO: 716535 - DNA, 19 bp, Mus musculus
  siRNA target sequence for 1810015P03Rik (NM_025458.1,344-362).
ggccagattaactttgcta

SEQ ID NO: 716536 - DNA, 19 bp, Mus musculus
  siRNA target sequence for 1810015P03Rik (NM_025458.1,401-419).
gagcagaatcgcttcagtt

SEQ ID NO: 716537 - DNA, 19 bp, Mus musculus
  siRNA target sequence for 1810015P03Rik (NM_025458.1,404-422).
cagaatcgcttcagttcta

SEQ ID NO: 716538 - DNA, 19 bp, Mus musculus
  siRNA target sequence for 1810015P03Rik (NM_025458.1,411-429).
gcttcagttctatacaagt

SEQ ID NO: 716539 - DNA, 19 bp, Mus musculus
  siRNA target sequence for 1810015P03Rik (NM_025458.1,417-435).
gttctatacaagtgtatct

SEQ ID NO: 716540 - DNA, 19 bp, Mus musculus
  siRNA target sequence for 1810015P03Rik (NM_025458.1,562-580).
gtggcgcttctacaactat

SEQ ID NO: 716541 - DNA, 19 bp, Mus musculus
  siRNA target sequence for 1810015P03Rik (NM_025458.1,577-595).
ctatgccaggatgagaaaa

SEQ ID NO: 716542 - DNA, 19 bp, Mus musculus
  siRNA target sequence for 1810015P03Rik (NM_025458.1,611-629).
ctcctgcagtctaactaca

SEQ ID NO: 716543 - DNA, 19 bp, Mus musculus
  siRNA target sequence for 1810015P03Rik (NM_025458.1,621-639).
ctaactacacctatgtgaa

SEQ ID NO: 716544 - DNA, 19 bp, Mus musculus
  siRNA target sequence for 1810015P03Rik (NM_025458.1,651-669).
cagctcagagccttgctat

SEQ ID NO: 716545 - DNA, 19 bp, Mus musculus
  siRNA target sequence for 1810015P03Rik (NM_025458.1,658-676).
gagccttgctattgttctt

SEQ ID NO: 716546 - DNA, 19 bp, Mus musculus
  siRNA target sequence for 1810015P03Rik (NM_025458.1,683-701).
gccctccagctctatttct

SEQ ID NO: 716547 - DNA, 19 bp, Mus musculus
  siRNA target sequence for 1810015P03Rik (NM_025458.1,688-706).
ccagctctatttcttgaaa

SEQ ID NO: 716548 - DNA, 19 bp, Mus musculus
  siRNA target sequence for 1810015P03Rik (NM_025458.1,689-707).
cagctctatttcttgaaaa

SEQ ID NO: 716549 - DNA, 19 bp, Mus musculus
  siRNA target sequence for 1810015P03Rik (NM_025458.1,691-709).
gctctatttcttgaaaaga

SEQ ID NO: 716550 - DNA, 19 bp, Mus musculus
  siRNA target sequence for 1810015C04Rik (NM_025459.2,258-276).
cagcatgtttcttcaagaa

SEQ ID NO: 716551 - DNA, 19 bp, Mus musculus
  siRNA target sequence for 1810015C04Rik (NM_025459.2,260-278).
gcatgtttcttcaagaaat

SEQ ID NO: 716552 - DNA, 19 bp, Mus musculus
  siRNA target sequence for 1810015C04Rik (NM_025459.2,295-313).
cagagtcctggcaagtttt

SEQ ID NO: 716553 - DNA, 19 bp, Mus musculus
  siRNA target sequence for 1810015C04Rik (NM_025459.2,416-434).
cactgtttaaatgtaatga

SEQ ID NO: 716554 - DNA, 19 bp, Mus musculus
  siRNA target sequence for 1810015C04Rik (NM_025459.2,418-436).
ctgtttaaatgtaatgata

SEQ ID NO: 716555 - DNA, 19 bp, Mus musculus
  siRNA target sequence for 1810015C04Rik (NM_025459.2,428-446).
gtaatgatattggacaaaa

SEQ ID NO: 716556 - DNA, 19 bp, Mus musculus
  siRNA target sequence for 1810015C04Rik (NM_025459.2,433-451).
gatattggacaaaaaatat

SEQ ID NO: 716557 - DNA, 19 bp, Mus musculus
  siRNA target sequence for 1810015C04Rik (NM_025459.2,460-478).
gtcaagtccattctattaa

SEQ ID NO: 716558 - DNA, 19 bp, Mus musculus
  siRNA target sequence for 1810015C04Rik (NM_025459.2,462-480).
caagtccattctattaaaa

SEQ ID NO: 716559 - DNA, 19 bp, Mus musculus
  siRNA target sequence for 1810015C04Rik (NM_025459.2,468-486).
cattctattaaaactagat

SEQ ID NO: 716560 - DNA, 19 bp, Mus musculus
  siRNA target sequence for 1810015C04Rik (NM_025459.2,516-534).
gaaacgtgagagatctgaa

SEQ ID NO: 716561 - DNA, 19 bp, Mus musculus
  siRNA target sequence for 1810015C04Rik (NM_025459.2,555-573).
caaggatgacagtgaatta

SEQ ID NO: 716562 - DNA, 19 bp, Mus musculus
  siRNA target sequence for 1810015C04Rik (NM_025459.2,559-577).
gatgacagtgaattagact

SEQ ID NO: 716563 - DNA, 19 bp, Mus musculus
  siRNA target sequence for 1810015C04Rik (NM_025459.2,562-580).
gacagtgaattagactttt

SEQ ID NO: 716564 - DNA, 19 bp, Mus musculus
  siRNA target sequence for 1810015C04Rik (NM_025459.2,583-601).
gctctttgtcctaagatta

SEQ ID NO: 716565 - DNA, 19 bp, Mus musculus
  siRNA target sequence for 1810015C04Rik (NM_025459.2,608-626).
cagttgctgccaaagagtt

SEQ ID NO: 716566 - DNA, 19 bp, Mus musculus
  siRNA target sequence for 1810015C04Rik (NM_025459.2,610-628).
gttgctgccaaagagttat

SEQ ID NO: 716567 - DNA, 19 bp, Mus musculus
  siRNA target sequence for 1810015C04Rik (NM_025459.2,614-632).
ctgccaaagagttatctgt

SEQ ID NO: 716568 - DNA, 19 bp, Mus musculus
  siRNA target sequence for 1810015C04Rik (NM_025459.2,755-773).
ctcgagatctttcagattt

SEQ ID NO: 716569 - DNA, 19 bp, Mus musculus
  siRNA target sequence for 1810015C04Rik (NM_025459.2,791-809).
ggacgggaacaaatgatga

SEQ ID NO: 716570 - DNA, 19 bp, Mus musculus
  siRNA target sequence for 1810015C04Rik (NM_025459.2,929-947).
gcgaccaagcccttcactt

SEQ ID NO: 716571 - DNA, 19 bp, Mus musculus
  siRNA target sequence for 1810015C04Rik (NM_025459.2,1102-1120).
caggcagagctagatcaaa

SEQ ID NO: 716572 - DNA, 19 bp, Mus musculus
  siRNA target sequence for 1810015C04Rik (NM_025459.2,1125-1143).
gagtgagctgggactaaca

SEQ ID NO: 716573 - DNA, 19 bp, Mus musculus
  siRNA target sequence for 1810015C04Rik (NM_025459.2,1127-1145).
gtgagctgggactaacaca

SEQ ID NO: 716574 - DNA, 19 bp, Mus musculus
  siRNA target sequence for 1810020E01Rik (NM_025460.1,165-183).
gtactagcaaagatgattt

SEQ ID NO: 716575 - DNA, 19 bp, Mus musculus
  siRNA target sequence for 1810020E01Rik (NM_025460.1,171-189).
gcaaagatgatttaatact

SEQ ID NO: 716576 - DNA, 19 bp, Mus musculus
  siRNA target sequence for 1810020E01Rik (NM_025460.1,179-197).
gatttaatacttaatatca

SEQ ID NO: 716577 - DNA, 19 bp, Mus musculus
  siRNA target sequence for 1810020E01Rik (NM_025460.1,290-308).
ctaatagcaaacagtctat

SEQ ID NO: 716578 - DNA, 19 bp, Mus musculus
  siRNA target sequence for 1810020E01Rik (NM_025460.1,303-321).
gtctatttcggcgaatctt

SEQ ID NO: 716579 - DNA, 19 bp, Mus musculus
  siRNA target sequence for 1810020E01Rik (NM_025460.1,305-323).
ctatttcggcgaatcttga

SEQ ID NO: 716580 - DNA, 19 bp, Mus musculus
  siRNA target sequence for 1810020E01Rik (NM_025460.1,661-679).
ctatcttgggtctagacaa

SEQ ID NO: 716581 - DNA, 19 bp, Mus musculus
  siRNA target sequence for 1810020E01Rik (NM_025460.1,665-683).
cttgggtctagacaatata

SEQ ID NO: 716582 - DNA, 19 bp, Mus musculus
  siRNA target sequence for 1810020E01Rik (NM_025460.1,669-687).
ggtctagacaatataaact

SEQ ID NO: 716583 - DNA, 19 bp, Mus musculus
  siRNA target sequence for 1810020E01Rik (NM_025460.1,716-734).
cctgacttagaaattcatt

SEQ ID NO: 716584 - DNA, 19 bp, Mus musculus
  siRNA target sequence for 1810020G14Rik (NM_025461.2,168-186).
cgagctctgcgtaagaaca

SEQ ID NO: 716585 - DNA, 19 bp, Mus musculus
  siRNA target sequence for 1810020G14Rik (NM_025461.2,241-259).
gtcttcgtgaattttcaca

SEQ ID NO: 716586 - DNA, 19 bp, Mus musculus
  siRNA target sequence for 1810020G14Rik (NM_025461.2,265-283).
ggtacgatgctgtgacaat

SEQ ID NO: 716587 - DNA, 19 bp, Mus musculus
  siRNA target sequence for 1810020G14Rik (NM_025461.2,266-284).
gtacgatgctgtgacaatt

SEQ ID NO: 716588 - DNA, 19 bp, Mus musculus
  siRNA target sequence for 1810020G14Rik (NM_025461.2,274-292).
ctgtgacaattaagattga

SEQ ID NO: 716589 - DNA, 19 bp, Mus musculus
  siRNA target sequence for 1810020G14Rik (NM_025461.2,331-349).
ctttagagtcagagtatga

SEQ ID NO: 716590 - DNA, 19 bp, Mus musculus
  siRNA target sequence for 1810020G14Rik (NM_025461.2,336-354).
gagtcagagtatgagaaaa

SEQ ID NO: 716591 - DNA, 19 bp, Mus musculus
  siRNA target sequence for 1810020G14Rik (NM_025461.2,360-378).
gactccacttttgaaaact

SEQ ID NO: 716592 - DNA, 19 bp, Mus musculus
  siRNA target sequence for 1810009A15Rik (NM_025463.1,29-47).
cacctccgggaggaaagat

SEQ ID NO: 716593 - DNA, 19 bp, Mus musculus
  siRNA target sequence for 1810009A15Rik (NM_025463.1,31-49).
cctccgggaggaaagatca

SEQ ID NO: 716594 - DNA, 19 bp, Mus musculus
  siRNA target sequence for 1810009A15Rik (NM_025463.1,129-147).
ggtggtcggggctgtgata

SEQ ID NO: 716595 - DNA, 19 bp, Mus musculus
  siRNA target sequence for 1810009A15Rik (NM_025463.1,323-341).
cacagcccaagcaacaaaa

SEQ ID NO: 716596 - DNA, 19 bp, Mus musculus
  siRNA target sequence for 1810021J13Rik (NM_025464.2,206-224).
cctcggagctctgatcatt

SEQ ID NO: 716597 - DNA, 19 bp, Mus musculus
  siRNA target sequence for 1810021J13Rik (NM_025464.2,207-225).
ctcggagctctgatcatta

SEQ ID NO: 716598 - DNA, 19 bp, Mus musculus
  siRNA target sequence for 1810021J13Rik (NM_025464.2,209-227).
cggagctctgatcattact

SEQ ID NO: 716599 - DNA, 19 bp, Mus musculus
  siRNA target sequence for 1810021J13Rik (NM_025464.2,210-228).
ggagctctgatcattacta

SEQ ID NO: 716600 - DNA, 19 bp, Mus musculus
  siRNA target sequence for 1810021J13Rik (NM_025464.2,218-236).
gatcattactacagttcta

SEQ ID NO: 716601 - DNA, 19 bp, Mus musculus
  siRNA target sequence for 1810029B16Rik (NM_025465.1,96-114).
gcctaaaggactaaaagga

SEQ ID NO: 716602 - DNA, 19 bp, Mus musculus
  siRNA target sequence for 1810029B16Rik (NM_025465.1,98-116).
ctaaaggactaaaaggaaa

SEQ ID NO: 716603 - DNA, 19 bp, Mus musculus
  siRNA target sequence for 1810029B16Rik (NM_025465.1,144-162).
ccatccgtacagtagaaaa

SEQ ID NO: 716604 - DNA, 19 bp, Mus musculus
  siRNA target sequence for 1810029B16Rik (NM_025465.1,176-194).
caagagagtctcacaaaca

SEQ ID NO: 716605 - DNA, 19 bp, Mus musculus
  siRNA target sequence for 1810029B16Rik (NM_025465.1,179-197).
gagagtctcacaaacaaga

SEQ ID NO: 716606 - DNA, 19 bp, Mus musculus
  siRNA target sequence for 1810029B16Rik (NM_025465.1,226-244).
gccttgcgtctcaacctta

SEQ ID NO: 716607 - DNA, 19 bp, Mus musculus
  siRNA target sequence for 1810029B16Rik (NM_025465.1,227-245).
ccttgcgtctcaaccttat

SEQ ID NO: 716608 - DNA, 19 bp, Mus musculus
  siRNA target sequence for 1810029B16Rik (NM_025465.1,231-249).
gcgtctcaaccttattggt

SEQ ID NO: 716609 - DNA, 19 bp, Mus musculus
  siRNA target sequence for 1810029B16Rik (NM_025465.1,248-266).
gtgacaaacttcaatggtt

SEQ ID NO: 716610 - DNA, 19 bp, Mus musculus
  siRNA target sequence for 1810029B16Rik (NM_025465.1,272-290).
gtcatctggatatgaaaaa

SEQ ID NO: 716611 - DNA, 19 bp, Mus musculus
  siRNA target sequence for 1810029B16Rik (NM_025465.1,313-331).
gcctgtgaattagttgaaa

SEQ ID NO: 716612 - DNA, 19 bp, Mus musculus
  siRNA target sequence for 1810029B16Rik (NM_025465.1,488-506).
cagacattttagactctaa

SEQ ID NO: 716613 - DNA, 19 bp, Mus musculus
  siRNA target sequence for 1810029B16Rik (NM_025465.1,492-510).
cattttagactctaatact

SEQ ID NO: 716614 - DNA, 19 bp, Mus musculus
  siRNA target sequence for 1810029B16Rik (NM_025465.1,503-521).
ctaatactctgcagacttt

SEQ ID NO: 716615 - DNA, 19 bp, Mus musculus
  siRNA target sequence for 1810029B16Rik (NM_025465.1,522-540).
ccgggaatgggattttgat

SEQ ID NO: 716616 - DNA, 19 bp, Mus musculus
  siRNA target sequence for Gkn1 (NM_025466.1,101-119).
gcttacacggtcaacatca

SEQ ID NO: 716617 - DNA, 19 bp, Mus musculus
  siRNA target sequence for Gkn1 (NM_025466.1,102-120).
cttacacggtcaacatcaa

SEQ ID NO: 716618 - DNA, 19 bp, Mus musculus
  siRNA target sequence for Gkn1 (NM_025466.1,108-126).
cggtcaacatcaatggtaa

SEQ ID NO: 716619 - DNA, 19 bp, Mus musculus
  siRNA target sequence for Gkn1 (NM_025466.1,154-172).
gcagtcggtgagcatcaat

SEQ ID NO: 716620 - DNA, 19 bp, Mus musculus
  siRNA target sequence for Gkn1 (NM_025466.1,187-205).
ggccaatatcgacaacaat

SEQ ID NO: 716621 - DNA, 19 bp, Mus musculus
  siRNA target sequence for Gkn1 (NM_025466.1,188-206).
gccaatatcgacaacaata

SEQ ID NO: 716622 - DNA, 19 bp, Mus musculus
  siRNA target sequence for Gkn1 (NM_025466.1,266-284).
ctcttctccaagaagtcat

SEQ ID NO: 716623 - DNA, 19 bp, Mus musculus
  siRNA target sequence for Gkn1 (NM_025466.1,271-289).
ctccaagaagtcatgcatt

SEQ ID NO: 716624 - DNA, 19 bp, Mus musculus
  siRNA target sequence for Gkn1 (NM_025466.1,285-303).
gcattgtgcacagaatgaa

SEQ ID NO: 716625 - DNA, 19 bp, Mus musculus
  siRNA target sequence for Gkn1 (NM_025466.1,323-341).
cttcaggacctcgatacaa

SEQ ID NO: 716626 - DNA, 19 bp, Mus musculus
  siRNA target sequence for Gkn1 (NM_025466.1,380-398).
cctcccaaggacttgatgt

SEQ ID NO: 716627 - DNA, 19 bp, Mus musculus
  siRNA target sequence for Gkn1 (NM_025466.1,419-437).
gtggaggacctgaatacat

SEQ ID NO: 716628 - DNA, 19 bp, Mus musculus
  siRNA target sequence for Gkn1 (NM_025466.1,501-519).
gaccaaaccagcctttgta

SEQ ID NO: 716629 - DNA, 19 bp, Mus musculus
  siRNA target sequence for Gkn1 (NM_025466.1,503-521).
ccaaaccagcctttgtact

SEQ ID NO: 716630 - DNA, 19 bp, Mus musculus
  siRNA target sequence for 1810036H07Rik (NM_025467.1,59-77).
gtgctgtccatctttggaa

SEQ ID NO: 716631 - DNA, 19 bp, Mus musculus
  siRNA target sequence for 1810036H07Rik (NM_025467.1,61-79).
gctgtccatctttggaata

SEQ ID NO: 716632 - DNA, 19 bp, Mus musculus
  siRNA target sequence for 1810036H07Rik (NM_025467.1,84-102).
cgcaggcagaggagatttt

SEQ ID NO: 716633 - DNA, 19 bp, Mus musculus
  siRNA target sequence for 1810036H07Rik (NM_025467.1,88-106).
ggcagaggagatttttaat

SEQ ID NO: 716634 - DNA, 19 bp, Mus musculus
  siRNA target sequence for 1810036H07Rik (NM_025467.1,207-225).
cctccaccacgatttttga

SEQ ID NO: 716635 - DNA, 19 bp, Mus musculus
  siRNA target sequence for 1810036H07Rik (NM_025467.1,211-229).
caccacgatttttgactat

SEQ ID NO: 716636 - DNA, 19 bp, Mus musculus
  siRNA target sequence for 1810036H07Rik (NM_025467.1,213-231).
ccacgatttttgactataa

SEQ ID NO: 716637 - DNA, 19 bp, Mus musculus
  siRNA target sequence for 1810036H07Rik (NM_025467.1,267-285).
gagcctgttacgtcatcaa

SEQ ID NO: 716638 - DNA, 19 bp, Mus musculus
  siRNA target sequence for 1810036H07Rik (NM_025467.1,269-287).
gcctgttacgtcatcaaga

SEQ ID NO: 716639 - DNA, 19 bp, Mus musculus
  siRNA target sequence for 1810036H07Rik (NM_025467.1,270-288).
cctgttacgtcatcaagat

SEQ ID NO: 716640 - DNA, 19 bp, Mus musculus
  siRNA target sequence for 1810036H07Rik (NM_025467.1,337-355).
cgagaagcagacaatgaat

SEQ ID NO: 716641 - DNA, 19 bp, Mus musculus
  siRNA target sequence for 1810036H07Rik (NM_025467.1,433-451).
gtttgggtcgcctattcga

SEQ ID NO: 716642 - DNA, 19 bp, Mus musculus
  siRNA target sequence for 1810036H07Rik (NM_025467.1,559-577).
ctccatctgtggaggaatt

SEQ ID NO: 716643 - DNA, 19 bp, Mus musculus
  siRNA target sequence for 1810030J14Rik (NM_025470.1,331-349).
ctatgttgggaatatggta

SEQ ID NO: 716644 - DNA, 19 bp, Mus musculus
  siRNA target sequence for 1810030J14Rik (NM_025470.1,596-614).
catgtggtccccctagaaa

SEQ ID NO: 716645 - DNA, 19 bp, Mus musculus
  siRNA target sequence for 1810030J14Rik (NM_025470.1,601-619).
ggtccccctagaaaaggta

SEQ ID NO: 716646 - DNA, 19 bp, Mus musculus
  siRNA target sequence for 1810030J14Rik (NM_025470.1,602-620).
gtccccctagaaaaggtat

SEQ ID NO: 716647 - DNA, 19 bp, Mus musculus
  siRNA target sequence for 1810030N24Rik (NM_025471.1,345-363).
cagttaaaaaagaaccatt

SEQ ID NO: 716648 - DNA, 19 bp, Mus musculus
  siRNA target sequence for 1810030N24Rik (NM_025471.1,401-419).
gcgcacacaaccaccttat

SEQ ID NO: 716649 - DNA, 19 bp, Mus musculus
  siRNA target sequence for 1810030N24Rik (NM_025471.1,406-424).
cacaaccaccttatttcga

SEQ ID NO: 716650 - DNA, 19 bp, Mus musculus
  siRNA target sequence for 1810030N24Rik (NM_025471.1,415-433).
cttatttcgagctgtgaat

SEQ ID NO: 716651 - DNA, 19 bp, Mus musculus
  siRNA target sequence for 1810030N24Rik (NM_025471.1,477-495).
gattggtaaccctttcact

SEQ ID NO: 716652 - DNA, 19 bp, Mus musculus
  siRNA target sequence for 1810030N24Rik (NM_025471.1,498-516).
gtgtggcttacattggtta

SEQ ID NO: 716653 - DNA, 19 bp, Mus musculus
  siRNA target sequence for 1810030N24Rik (NM_025471.1,580-598).
gtacatgaggagaaaaaca

SEQ ID NO: 716654 - DNA, 19 bp, Mus musculus
  siRNA target sequence for 1810032O08Rik (NM_025472.2,210-228).
ggcatctgcctcagacata

SEQ ID NO: 716655 - DNA, 19 bp, Mus musculus
  siRNA target sequence for 1810032O08Rik (NM_025472.2,212-230).
catctgcctcagacatagt

SEQ ID NO: 716656 - DNA, 19 bp, Mus musculus
  siRNA target sequence for 2410007P03Rik (NM_025475.1,65-83).
ctgggttactgctaaacca

SEQ ID NO: 716657 - DNA, 19 bp, Mus musculus
  siRNA target sequence for 2410007P03Rik (NM_025475.1,88-106).
gtagcttcgggcatagtca

SEQ ID NO: 716658 - DNA, 19 bp, Mus musculus
  siRNA target sequence for 2410007P03Rik (NM_025475.1,105-123).
cactaaggagatgttagat

SEQ ID NO: 716659 - DNA, 19 bp, Mus musculus
  siRNA target sequence for 2410007P03Rik (NM_025475.1,117-135).
gttagatgtatctaagaaa

SEQ ID NO: 716660 - DNA, 19 bp, Mus musculus
  siRNA target sequence for 2410007P03Rik (NM_025475.1,140-158).
ctccttgctttgtgaactt

SEQ ID NO: 716661 - DNA, 19 bp, Mus musculus
  siRNA target sequence for 2410007P03Rik (NM_025475.1,289-307).
gttctgcaaagcatgaata

SEQ ID NO: 716662 - DNA, 19 bp, Mus musculus
  siRNA target sequence for 2410007P03Rik (NM_025475.1,294-312).
gcaaagcatgaataatcat

SEQ ID NO: 716663 - DNA, 19 bp, Mus musculus
  siRNA target sequence for 2410007P03Rik (NM_025475.1,375-393).
ggagaacttgccattggaa

SEQ ID NO: 716664 - DNA, 19 bp, Mus musculus
  siRNA target sequence for 2410007P03Rik (NM_025475.1,384-402).
gccattggaagctgtttat

SEQ ID NO: 716665 - DNA, 19 bp, Mus musculus
  siRNA target sequence for 2410007P03Rik (NM_025475.1,461-479).
cccatcttgaaacagttaa

SEQ ID NO: 716666 - DNA, 19 bp, Mus musculus
  siRNA target sequence for 2410007P03Rik (NM_025475.1,490-508).
catttagacgcaaacctaa

SEQ ID NO: 716667 - DNA, 19 bp, Mus musculus
  siRNA target sequence for 2410007P03Rik (NM_025475.1,496-514).
gacgcaaacctaaagcaaa

SEQ ID NO: 716668 - DNA, 19 bp, Mus musculus
  siRNA target sequence for 2410007P03Rik (NM_025475.1,524-542).
ctttagccaagatggatat

SEQ ID NO: 716669 - DNA, 19 bp, Mus musculus
  siRNA target sequence for 2410007P03Rik (NM_025475.1,565-583).
ctggcagagaatatactca

SEQ ID NO: 716670 - DNA, 19 bp, Mus musculus
  siRNA target sequence for 2410007P03Rik (NM_025475.1,615-633).
gtatatccccaaaatgcta

SEQ ID NO: 716671 - DNA, 19 bp, Mus musculus
  siRNA target sequence for 2410007P03Rik (NM_025475.1,644-662).
gccatcttcatgaacttga

SEQ ID NO: 716672 - DNA, 19 bp, Mus musculus
  siRNA target sequence for 2410005O16Rik (NM_025476.3,114-132).
gcttgcgaggtgataggaa

SEQ ID NO: 716673 - DNA, 19 bp, Mus musculus
  siRNA target sequence for 2410005O16Rik (NM_025476.3,115-133).
cttgcgaggtgataggaaa

SEQ ID NO: 716674 - DNA, 19 bp, Mus musculus
  siRNA target sequence for 2410005O16Rik (NM_025476.3,261-279).
gcagactacctctatgaaa

SEQ ID NO: 716675 - DNA, 19 bp, Mus musculus
  siRNA target sequence for 2410005O16Rik (NM_025476.3,491-509).
gtatgcaatctgcattagt

SEQ ID NO: 716676 - DNA, 19 bp, Mus musculus
  siRNA target sequence for 2410005O16Rik (NM_025476.3,569-587).
gcattttgagaaagcaatt

SEQ ID NO: 716677 - DNA, 19 bp, Mus musculus
  siRNA target sequence for 2410005O16Rik (NM_025476.3,597-615).
cctaaagatgctacttcaa

SEQ ID NO: 716678 - DNA, 19 bp, Mus musculus
  siRNA target sequence for 2410005O16Rik (NM_025476.3,598-616).
ctaaagatgctacttcaat

SEQ ID NO: 716679 - DNA, 19 bp, Mus musculus
  siRNA target sequence for 2410005O16Rik (NM_025476.3,618-636).
caccttatgggtatttggt

SEQ ID NO: 716680 - DNA, 19 bp, Mus musculus
  siRNA target sequence for 2410005O16Rik (NM_025476.3,626-644).
gggtatttggtgctataca

SEQ ID NO: 716681 - DNA, 19 bp, Mus musculus
  siRNA target sequence for 2410005O16Rik (NM_025476.3,627-645).
ggtatttggtgctatacat

SEQ ID NO: 716682 - DNA, 19 bp, Mus musculus
  siRNA target sequence for 2410005O16Rik (NM_025476.3,628-646).
gtatttggtgctatacatt

SEQ ID NO: 716683 - DNA, 19 bp, Mus musculus
  siRNA target sequence for 2410005O16Rik (NM_025476.3,662-680).
gtatcaaagaagaattgct

SEQ ID NO: 716684 - DNA, 19 bp, Mus musculus
  siRNA target sequence for 2410005O16Rik (NM_025476.3,678-696).
gctaaagtgctgtttgcaa

SEQ ID NO: 716685 - DNA, 19 bp, Mus musculus
  siRNA target sequence for 2410005O16Rik (NM_025476.3,713-731).
ctatgaggaggccttaaga

SEQ ID NO: 716686 - DNA, 19 bp, Mus musculus
  siRNA target sequence for 2410005O16Rik (NM_025476.3,717-735).
gaggaggccttaagatact

SEQ ID NO: 716687 - DNA, 19 bp, Mus musculus
  siRNA target sequence for 2410005O16Rik (NM_025476.3,719-737).
ggaggccttaagatacttt

SEQ ID NO: 716688 - DNA, 19 bp, Mus musculus
  siRNA target sequence for 2410005O16Rik (NM_025476.3,723-741).
gccttaagatactttcaca

SEQ ID NO: 716689 - DNA, 19 bp, Mus musculus
  siRNA target sequence for 2410005O16Rik (NM_025476.3,724-742).
ccttaagatactttcacaa

SEQ ID NO: 716690 - DNA, 19 bp, Mus musculus
  siRNA target sequence for 2410005O16Rik (NM_025476.3,725-743).
cttaagatactttcacaaa

SEQ ID NO: 716691 - DNA, 19 bp, Mus musculus
  siRNA target sequence for 2410005O16Rik (NM_025476.3,750-768).
gaagtggatccaaacttct

SEQ ID NO: 716692 - DNA, 19 bp, Mus musculus
  siRNA target sequence for 2410005O16Rik (NM_025476.3,799-817).
catacttgaagctaaacaa

SEQ ID NO: 716693 - DNA, 19 bp, Mus musculus
  siRNA target sequence for 2410005O16Rik (NM_025476.3,828-846).
gctgcgttctggttggtaa

SEQ ID NO: 716694 - DNA, 19 bp, Mus musculus
  siRNA target sequence for 2810021B07Rik (NM_025479.2,76-94).
gcaccgaccgaattttcga

SEQ ID NO: 716695 - DNA, 19 bp, Mus musculus
  siRNA target sequence for 2810021B07Rik (NM_025479.2,131-149).
ggttggggtggcggaaata

SEQ ID NO: 716696 - DNA, 19 bp, Mus musculus
  siRNA target sequence for 2810021B07Rik (NM_025479.2,135-153).
ggggtggcggaaataactt

SEQ ID NO: 716697 - DNA, 19 bp, Mus musculus
  siRNA target sequence for 2810021B07Rik (NM_025479.2,565-583).
caatacgcaaacattcaca

SEQ ID NO: 716698 - DNA, 19 bp, Mus musculus
  siRNA target sequence for 2810021O14Rik (NM_025480.2,125-143).
cccacagctgttgagaaaa

SEQ ID NO: 716699 - DNA, 19 bp, Mus musculus
  siRNA target sequence for 2810021O14Rik (NM_025480.2,148-166).
gcgacctcttccaagactt

SEQ ID NO: 716700 - DNA, 19 bp, Mus musculus
  siRNA target sequence for 2810021O14Rik (NM_025480.2,149-167).
cgacctcttccaagactta

SEQ ID NO: 716701 - DNA, 19 bp, Mus musculus
  siRNA target sequence for 2810021O14Rik (NM_025480.2,150-168).
gacctcttccaagacttaa

SEQ ID NO: 716702 - DNA, 19 bp, Mus musculus
  siRNA target sequence for 2810021O14Rik (NM_025480.2,152-170).
cctcttccaagacttaaca

SEQ ID NO: 716703 - DNA, 19 bp, Mus musculus
  siRNA target sequence for 2810021O14Rik (NM_025480.2,173-191).
cattctggattctggattt

SEQ ID NO: 716704 - DNA, 19 bp, Mus musculus
  siRNA target sequence for 2810021O14Rik (NM_025480.2,198-216).
ccatcgttgtgacctatta

SEQ ID NO: 716705 - DNA, 19 bp, Mus musculus
  siRNA target sequence for 2810021O14Rik (NM_025480.2,199-217).
catcgttgtgacctattat

SEQ ID NO: 716706 - DNA, 19 bp, Mus musculus
  siRNA target sequence for 2810021O14Rik (NM_025480.2,271-289).
ctttggcggagccttgtta

SEQ ID NO: 716707 - DNA, 19 bp, Mus musculus
  siRNA target sequence for 2810021O14Rik (NM_025480.2,276-294).
gcggagccttgttatttgt

SEQ ID NO: 716708 - DNA, 19 bp, Mus musculus
  siRNA target sequence for 2810021O14Rik (NM_025480.2,278-296).
ggagccttgttatttgtca

SEQ ID NO: 716709 - DNA, 19 bp, Mus musculus
  siRNA target sequence for 2810021O14Rik (NM_025480.2,295-313).
cagcctgtcaattgcattt

SEQ ID NO: 716710 - DNA, 19 bp, Mus musculus
  siRNA target sequence for 2810021O14Rik (NM_025480.2,297-315).
gcctgtcaattgcatttta

SEQ ID NO: 716711 - DNA, 19 bp, Mus musculus
  siRNA target sequence for 2810021O14Rik (NM_025480.2,299-317).
ctgtcaattgcattttact

SEQ ID NO: 716712 - DNA, 19 bp, Mus musculus
  siRNA target sequence for 2810021O14Rik (NM_025480.2,337-355).
gtaccgtgggattgaagaa

SEQ ID NO: 716713 - DNA, 19 bp, Mus musculus
  siRNA target sequence for 2810021O14Rik (NM_025480.2,340-358).
ccgtgggattgaagaatat

SEQ ID NO: 716714 - DNA, 19 bp, Mus musculus
  siRNA target sequence for 2810021O14Rik (NM_025480.2,342-360).
gtgggattgaagaatatga

SEQ ID NO: 716715 - DNA, 19 bp, Mus musculus
  siRNA target sequence for 2810021O14Rik (NM_025480.2,350-368).
gaagaatatgatgtcaaat

SEQ ID NO: 716716 - DNA, 19 bp, Mus musculus
  siRNA target sequence for 2810021O14Rik (NM_025480.2,488-506).
ggggtcgtgatgttcatct

SEQ ID NO: 716717 - DNA, 19 bp, Mus musculus
  siRNA target sequence for 2810411G23Rik (NM_025482.2,69-87).
ctgctagccaagatatcaa

SEQ ID NO: 716718 - DNA, 19 bp, Mus musculus
  siRNA target sequence for 2810411G23Rik (NM_025482.2,77-95).
caagatatcaacctgaatt

SEQ ID NO: 716719 - DNA, 19 bp, Mus musculus
  siRNA target sequence for 2810411G23Rik (NM_025482.2,110-128).
gtgctgtctgactttatga

SEQ ID NO: 716720 - DNA, 19 bp, Mus musculus
  siRNA target sequence for 2810411G23Rik (NM_025482.2,157-175).
ccaccggactccagttgta

SEQ ID NO: 716721 - DNA, 19 bp, Mus musculus
  siRNA target sequence for 2810411G23Rik (NM_025482.2,160-178).
ccggactccagttgtagaa

SEQ ID NO: 716722 - DNA, 19 bp, Mus musculus
  siRNA target sequence for 2810411G23Rik (NM_025482.2,447-465).
ctcaagaaactctttcaca

SEQ ID NO: 716723 - DNA, 19 bp, Mus musculus
  siRNA target sequence for 2810411G23Rik (NM_025482.2,585-603).
cagccaccttcaagtcatt

SEQ ID NO: 716724 - DNA, 19 bp, Mus musculus
  siRNA target sequence for 2810411G23Rik (NM_025482.2,608-626).
gaccgagtggggaccataa

SEQ ID NO: 716725 - DNA, 19 bp, Mus musculus
  siRNA target sequence for 2810413I22Rik (NM_025483.1,178-196).
gttgttaactgtaaagtca

SEQ ID NO: 716726 - DNA, 19 bp, Mus musculus
  siRNA target sequence for 2810413I22Rik (NM_025483.1,320-338).
cctcctaagggattaccaa

SEQ ID NO: 716727 - DNA, 19 bp, Mus musculus
  siRNA target sequence for 2810413I22Rik (NM_025483.1,321-339).
ctcctaagggattaccaaa

SEQ ID NO: 716728 - DNA, 19 bp, Mus musculus
  siRNA target sequence for 2810413I22Rik (NM_025483.1,378-396).
cggacttaggacgagaatt

SEQ ID NO: 716729 - DNA, 19 bp, Mus musculus
  siRNA target sequence for 2810413I22Rik (NM_025483.1,382-400).
cttaggacgagaattcaga

SEQ ID NO: 716730 - DNA, 19 bp, Mus musculus
  siRNA target sequence for 2810413I22Rik (NM_025483.1,409-427).
gcctagaaaggatgctaat

SEQ ID NO: 716731 - DNA, 19 bp, Mus musculus
  siRNA target sequence for 2810413I22Rik (NM_025483.1,410-428).
cctagaaaggatgctaatt

SEQ ID NO: 716732 - DNA, 19 bp, Mus musculus
  siRNA target sequence for 2810413I22Rik (NM_025483.1,411-429).
ctagaaaggatgctaattt

SEQ ID NO: 716733 - DNA, 19 bp, Mus musculus
  siRNA target sequence for 2810413I22Rik (NM_025483.1,515-533).
caccaaagccttaatttat

SEQ ID NO: 716734 - DNA, 19 bp, Mus musculus
  siRNA target sequence for 2810413I22Rik (NM_025483.1,561-579).
cggatatccggcaaacaga

SEQ ID NO: 716735 - DNA, 19 bp, Mus musculus
  siRNA target sequence for 2810413I22Rik (NM_025483.1,562-580).
ggatatccggcaaacagaa

SEQ ID NO: 716736 - DNA, 19 bp, Mus musculus
  siRNA target sequence for 2810413I22Rik (NM_025483.1,563-581).
gatatccggcaaacagaat

SEQ ID NO: 716737 - DNA, 19 bp, Mus musculus
  siRNA target sequence for 2810413I22Rik (NM_025483.1,568-586).
ccggcaaacagaattagga

SEQ ID NO: 716738 - DNA, 19 bp, Mus musculus
  siRNA target sequence for 2810413I22Rik (NM_025483.1,569-587).
cggcaaacagaattaggaa

SEQ ID NO: 716739 - DNA, 19 bp, Mus musculus
  siRNA target sequence for 2810413I22Rik (NM_025483.1,686-704).
gagtcttgtcagagtgtaa

SEQ ID NO: 716740 - DNA, 19 bp, Mus musculus
  siRNA target sequence for 2810413I22Rik (NM_025483.1,690-708).
cttgtcagagtgtaaatca

SEQ ID NO: 716741 - DNA, 19 bp, Mus musculus
  siRNA target sequence for 2810413I22Rik (NM_025483.1,712-730).
caagagctttttatctgaa

SEQ ID NO: 716742 - DNA, 19 bp, Mus musculus
  siRNA target sequence for 2810413I22Rik (NM_025483.1,803-821).
ggacctgcctgcaccaata

SEQ ID NO: 716743 - DNA, 19 bp, Mus musculus
  siRNA target sequence for 1700006C06Rik (NM_025486.1,161-179).
gttttaccttcggatcata

SEQ ID NO: 716744 - DNA, 19 bp, Mus musculus
  siRNA target sequence for 1700006C06Rik (NM_025486.1,591-609).
cggcagatgaaaaggttat

SEQ ID NO: 716745 - DNA, 19 bp, Mus musculus
  siRNA target sequence for 1700017I11Rik (NM_025491.2,188-206).
ctggggactgtgctcatat

SEQ ID NO: 716746 - DNA, 19 bp, Mus musculus
  siRNA target sequence for 1700017I11Rik (NM_025491.2,192-210).
ggactgtgctcatattcca

SEQ ID NO: 716747 - DNA, 19 bp, Mus musculus
  siRNA target sequence for 1700017I11Rik (NM_025491.2,416-434).
ctcaagtgtgtgcagaaaa

SEQ ID NO: 716748 - DNA, 19 bp, Mus musculus
  siRNA target sequence for 1700017I11Rik (NM_025491.2,530-548).
ggacacaaccacaataaca

SEQ ID NO: 716749 - DNA, 19 bp, Mus musculus
  siRNA target sequence for 1700017I11Rik (NM_025491.2,681-699).
cccacagtgtggacaaaga

SEQ ID NO: 716750 - DNA, 19 bp, Mus musculus
  siRNA target sequence for 1700017I11Rik (NM_025491.2,809-827).
cctgggaggcccaaagtgt

SEQ ID NO: 716751 - DNA, 19 bp, Mus musculus
  siRNA target sequence for 1700020L24Rik (NM_025492.1,442-460).
gtgcgcgctgtgagattct

SEQ ID NO: 716752 - DNA, 19 bp, Mus musculus
  siRNA target sequence for 1700020L24Rik (NM_025492.1,444-462).
gcgcgctgtgagattcttt

SEQ ID NO: 716753 - DNA, 19 bp, Mus musculus
  siRNA target sequence for 1700020L24Rik (NM_025492.1,445-463).
cgcgctgtgagattctttt

SEQ ID NO: 716754 - DNA, 19 bp, Mus musculus
  siRNA target sequence for 1700020L24Rik (NM_025492.1,447-465).
cgctgtgagattcttttct

SEQ ID NO: 716755 - DNA, 19 bp, Mus musculus
  siRNA target sequence for 1700020L24Rik (NM_025492.1,499-517).
cctacgtggagcactgtat

SEQ ID NO: 716756 - DNA, 19 bp, Mus musculus
  siRNA target sequence for 1700020L24Rik (NM_025492.1,503-521).
cgtggagcactgtattctt

SEQ ID NO: 716757 - DNA, 19 bp, Mus musculus
  siRNA target sequence for 1700020L24Rik (NM_025492.1,591-609).
ccgcaatgctccaaactct

SEQ ID NO: 716758 - DNA, 19 bp, Mus musculus
  siRNA target sequence for 1700020L24Rik (NM_025492.1,592-610).
cgcaatgctccaaactctt

SEQ ID NO: 716759 - DNA, 19 bp, Mus musculus
  siRNA target sequence for 1700022C02Rik (NM_025495.1,142-160).
gtccggagcctggaaatca

SEQ ID NO: 716760 - DNA, 19 bp, Mus musculus
  siRNA target sequence for 1700022C02Rik (NM_025495.1,144-162).
ccggagcctggaaatcatt

SEQ ID NO: 716761 - DNA, 19 bp, Mus musculus
  siRNA target sequence for 1700022C02Rik (NM_025495.1,145-163).
cggagcctggaaatcattt

SEQ ID NO: 716762 - DNA, 19 bp, Mus musculus
  siRNA target sequence for 1700022C02Rik (NM_025495.1,247-265).
ctcatttctaagtaaactt

SEQ ID NO: 716763 - DNA, 19 bp, Mus musculus
  siRNA target sequence for 1700022C02Rik (NM_025495.1,428-446).
gagaaaaaatcttcgatta

SEQ ID NO: 716764 - DNA, 19 bp, Mus musculus
  siRNA target sequence for 1700022C02Rik (NM_025495.1,430-448).
gaaaaaatcttcgattata

SEQ ID NO: 716765 - DNA, 19 bp, Mus musculus
  siRNA target sequence for 1700022C02Rik (NM_025495.1,450-468).
ctgacctcagcataataat

SEQ ID NO: 716766 - DNA, 19 bp, Mus musculus
  siRNA target sequence for 1700022C02Rik (NM_025495.1,474-492).
ccacagaatattcagaatt

SEQ ID NO: 716767 - DNA, 19 bp, Mus musculus
  siRNA target sequence for 1700022C02Rik (NM_025495.1,697-715).
ggtgattgtctggaagata

SEQ ID NO: 716768 - DNA, 19 bp, Mus musculus
  siRNA target sequence for 1700022C02Rik (NM_025495.1,700-718).
gattgtctggaagatacaa

SEQ ID NO: 716769 - DNA, 19 bp, Mus musculus
  siRNA target sequence for 1700022C02Rik (NM_025495.1,706-724).
ctggaagatacaaatcgat

SEQ ID NO: 716770 - DNA, 19 bp, Mus musculus
  siRNA target sequence for 1700022C02Rik (NM_025495.1,780-798).
ccctaggactggacaagaa

SEQ ID NO: 716771 - DNA, 19 bp, Mus musculus
  siRNA target sequence for 1700022C02Rik (NM_025495.1,782-800).
ctaggactggacaagaaca

SEQ ID NO: 716772 - DNA, 19 bp, Mus musculus
  siRNA target sequence for 1700022C02Rik (NM_025495.1,793-811).
caagaacagagtcatagaa

SEQ ID NO: 716773 - DNA, 19 bp, Mus musculus
  siRNA target sequence for 1700022C02Rik (NM_025495.1,838-856).
gctaggtgtacttggtatt

SEQ ID NO: 716774 - DNA, 19 bp, Mus musculus
  siRNA target sequence for 1700022C02Rik (NM_025495.1,863-881).
gctctagacagcctgataa

SEQ ID NO: 716775 - DNA, 19 bp, Mus musculus
  siRNA target sequence for 1700022C02Rik (NM_025495.1,866-884).
ctagacagcctgataagat

SEQ ID NO: 716776 - DNA, 19 bp, Mus musculus
  siRNA target sequence for 1700022C02Rik (NM_025495.1,882-900).
gattgttcagtggagataa

SEQ ID NO: 716777 - DNA, 19 bp, Mus musculus
  siRNA target sequence for 1700019I23Rik (NM_025496.1,166-184).
cgtggaaccccaggaatta

SEQ ID NO: 716778 - DNA, 19 bp, Mus musculus
  siRNA target sequence for 1700019I23Rik (NM_025496.1,167-185).
gtggaaccccaggaattat

SEQ ID NO: 716779 - DNA, 19 bp, Mus musculus
  siRNA target sequence for 1700019I23Rik (NM_025496.1,170-188).
gaaccccaggaattattca

SEQ ID NO: 716780 - DNA, 19 bp, Mus musculus
  siRNA target sequence for 1700019I23Rik (NM_025496.1,189-207).
gcaagactcacggaaaaca

SEQ ID NO: 716781 - DNA, 19 bp, Mus musculus
  siRNA target sequence for 1700019I23Rik (NM_025496.1,206-224).
cattggactccctctgata

SEQ ID NO: 716782 - DNA, 19 bp, Mus musculus
  siRNA target sequence for 1700019I23Rik (NM_025496.1,216-234).
cctctgatactgcttgaaa

SEQ ID NO: 716783 - DNA, 19 bp, Mus musculus
  siRNA target sequence for 1700019I23Rik (NM_025496.1,250-268).
cagcctacgtcgcttacat

SEQ ID NO: 716784 - DNA, 19 bp, Mus musculus
  siRNA target sequence for 1700019I23Rik (NM_025496.1,252-270).
gcctacgtcgcttacatct

SEQ ID NO: 716785 - DNA, 19 bp, Mus musculus
  siRNA target sequence for 1700019I23Rik (NM_025496.1,308-326).
cagggacctagagtacatt

SEQ ID NO: 716786 - DNA, 19 bp, Mus musculus
  siRNA target sequence for 1700019I23Rik (NM_025496.1,310-328).
gggacctagagtacattta

SEQ ID NO: 716787 - DNA, 19 bp, Mus musculus
  siRNA target sequence for 1700019I23Rik (NM_025496.1,314-332).
cctagagtacatttatgct

SEQ ID NO: 716788 - DNA, 19 bp, Mus musculus
  siRNA target sequence for 1700019I23Rik (NM_025496.1,354-372).
gtaaagcgcagcaaacata

SEQ ID NO: 716789 - DNA, 19 bp, Mus musculus
  siRNA target sequence for 1700019I23Rik (NM_025496.1,460-478).
gggaatgctccaccatata

SEQ ID NO: 716790 - DNA, 19 bp, Mus musculus
  siRNA target sequence for 1700019I23Rik (NM_025496.1,461-479).
ggaatgctccaccatatat

SEQ ID NO: 716791 - DNA, 19 bp, Mus musculus
  siRNA target sequence for 1700019I23Rik (NM_025496.1,541-559).
catcaaactacaacaagat

SEQ ID NO: 716792 - DNA, 19 bp, Mus musculus
  siRNA target sequence for 1700019I23Rik (NM_025496.1,575-593).
gcctgcgatgaggaaactt

SEQ ID NO: 716793 - DNA, 19 bp, Mus musculus
  siRNA target sequence for 1700019I23Rik (NM_025496.1,580-598).
cgatgaggaaacttccatt

SEQ ID NO: 716794 - DNA, 19 bp, Mus musculus
  siRNA target sequence for 1700019I23Rik (NM_025496.1,581-599).
gatgaggaaacttccattt

SEQ ID NO: 716795 - DNA, 19 bp, Mus musculus
  siRNA target sequence for 1700019I23Rik (NM_025496.1,620-638).
ggagatgcataccaaagat

SEQ ID NO: 716796 - DNA, 19 bp, Mus musculus
  siRNA target sequence for 1700019I23Rik (NM_025496.1,621-639).
gagatgcataccaaagatt

SEQ ID NO: 716797 - DNA, 19 bp, Mus musculus
  siRNA target sequence for 1700023M09Rik (NM_025498.2,221-239).
cttggagcgggtatccaat

SEQ ID NO: 716798 - DNA, 19 bp, Mus musculus
  siRNA target sequence for 1700023M09Rik (NM_025498.2,254-272).
cctgtgccggaagtactat

SEQ ID NO: 716799 - DNA, 19 bp, Mus musculus
  siRNA target sequence for 1700023M09Rik (NM_025498.2,257-275).
gtgccggaagtactatctt

SEQ ID NO: 716800 - DNA, 19 bp, Mus musculus
  siRNA target sequence for 1700023M09Rik (NM_025498.2,266-284).
gtactatcttggtggattt

SEQ ID NO: 716801 - DNA, 19 bp, Mus musculus
  siRNA target sequence for 1700023M09Rik (NM_025498.2,295-313).
cttttctttggttagtcaa

SEQ ID NO: 716802 - DNA, 19 bp, Mus musculus
  siRNA target sequence for 1700023M09Rik (NM_025498.2,300-318).
ctttggttagtcaacattt

SEQ ID NO: 716803 - DNA, 19 bp, Mus musculus
  siRNA target sequence for 1700027M21Rik (NM_025499.1,280-298).
gagagaagtgccgcaaaat

SEQ ID NO: 716804 - DNA, 19 bp, Mus musculus
  siRNA target sequence for 1700027M21Rik (NM_025499.1,466-484).
cctctgatctgggtaaaga

SEQ ID NO: 716805 - DNA, 19 bp, Mus musculus
  siRNA target sequence for 1700027M21Rik (NM_025499.1,495-513).
cagctaaacaccgatatga

SEQ ID NO: 716806 - DNA, 19 bp, Mus musculus
  siRNA target sequence for 1700027M21Rik (NM_025499.1,498-516).
ctaaacaccgatatgaact

SEQ ID NO: 716807 - DNA, 19 bp, Mus musculus
  siRNA target sequence for 1700027M21Rik (NM_025499.1,506-524).
cgatatgaacttttttaat

SEQ ID NO: 716808 - DNA, 19 bp, Mus musculus
  siRNA target sequence for 1700027M21Rik (NM_025499.1,598-616).
gcgactgcgatgatagcat

SEQ ID NO: 716809 - DNA, 19 bp, Mus musculus
  siRNA target sequence for 1700027M21Rik (NM_025499.1,599-617).
cgactgcgatgatagcata

SEQ ID NO: 716810 - DNA, 19 bp, Mus musculus
  siRNA target sequence for 1700027M21Rik (NM_025499.1,602-620).
ctgcgatgatagcatagtt

SEQ ID NO: 716811 - DNA, 19 bp, Mus musculus
  siRNA target sequence for 1700027M21Rik (NM_025499.1,604-622).
gcgatgatagcatagttct

SEQ ID NO: 716812 - DNA, 19 bp, Mus musculus
  siRNA target sequence for 1700027M21Rik (NM_025499.1,605-623).
cgatgatagcatagttctt

SEQ ID NO: 716813 - DNA, 19 bp, Mus musculus
  siRNA target sequence for 1700027M21Rik (NM_025499.1,674-692).
cgaaacgttccacttcatt

SEQ ID NO: 716814 - DNA, 19 bp, Mus musculus
  siRNA target sequence for 1700027M21Rik (NM_025499.1,675-693).
gaaacgttccacttcattt

SEQ ID NO: 716815 - DNA, 19 bp, Mus musculus
  siRNA target sequence for 1700027M21Rik (NM_025499.1,774-792).
ggagatatgcctacaaagt

SEQ ID NO: 716816 - DNA, 19 bp, Mus musculus
  siRNA target sequence for 1700027M21Rik (NM_025499.1,775-793).
gagatatgcctacaaagtt

SEQ ID NO: 716817 - DNA, 19 bp, Mus musculus
  siRNA target sequence for 1700027M21Rik (NM_025499.1,777-795).
gatatgcctacaaagttga

SEQ ID NO: 716818 - DNA, 19 bp, Mus musculus
  siRNA target sequence for 1700027M21Rik (NM_025499.1,799-817).
ggctggatgtgcatgctaa

SEQ ID NO: 716819 - DNA, 19 bp, Mus musculus
  siRNA target sequence for 1700027M21Rik (NM_025499.1,800-818).
gctggatgtgcatgctaat

SEQ ID NO: 716820 - DNA, 19 bp, Mus musculus
  siRNA target sequence for 1700027M21Rik (NM_025499.1,886-904).
ccgatactccagtgtcata

SEQ ID NO: 716821 - DNA, 19 bp, Mus musculus
  siRNA target sequence for 1700027M21Rik (NM_025499.1,915-933).
gtgattgatccaaactcat

SEQ ID NO: 716822 - DNA, 19 bp, Mus musculus
  siRNA target sequence for 1700027M21Rik (NM_025499.1,1021-1039).
caattctagagccaactaa

SEQ ID NO: 716823 - DNA, 19 bp, Mus musculus
  siRNA target sequence for 1700027M21Rik (NM_025499.1,1046-1064).
ccaggtggatgatgaaagt

SEQ ID NO: 716824 - DNA, 19 bp, Mus musculus
  siRNA target sequence for 1700027M21Rik (NM_025499.1,1082-1100).
caggaaacaaggcgttata

SEQ ID NO: 716825 - DNA, 19 bp, Mus musculus
  siRNA target sequence for 1700027M21Rik (NM_025499.1,1085-1103).
gaaacaaggcgttatatct

SEQ ID NO: 716826 - DNA, 19 bp, Mus musculus
  siRNA target sequence for 1700027M21Rik (NM_025499.1,1089-1107).
caaggcgttatatctttga

SEQ ID NO: 716827 - DNA, 19 bp, Mus musculus
  siRNA target sequence for 1700027M21Rik (NM_025499.1,1094-1112).
cgttatatctttgagttta

SEQ ID NO: 716828 - DNA, 19 bp, Mus musculus
  siRNA target sequence for 1700027M21Rik (NM_025499.1,1135-1153).
ccacttttgaaatttcaga

SEQ ID NO: 716829 - DNA, 19 bp, Mus musculus
  siRNA target sequence for Mrpl37 (NM_025500.1,221-239).
ggtctggagcccattacct

SEQ ID NO: 716830 - DNA, 19 bp, Mus musculus
  siRNA target sequence for Mrpl37 (NM_025500.1,222-240).
gtctggagcccattaccta

SEQ ID NO: 716831 - DNA, 19 bp, Mus musculus
  siRNA target sequence for Mrpl37 (NM_025500.1,419-437).
gctctctggcttactaaga

SEQ ID NO: 716832 - DNA, 19 bp, Mus musculus
  siRNA target sequence for Mrpl37 (NM_025500.1,427-445).
gcttactaagaccaagtta

SEQ ID NO: 716833 - DNA, 19 bp, Mus musculus
  siRNA target sequence for Mrpl37 (NM_025500.1,428-446).
cttactaagaccaagttaa

SEQ ID NO: 716834 - DNA, 19 bp, Mus musculus
  siRNA target sequence for Mrpl37 (NM_025500.1,432-450).
ctaagaccaagttaataga

SEQ ID NO: 716835 - DNA, 19 bp, Mus musculus
  siRNA target sequence for Mrpl37 (NM_025500.1,459-477).
ccaagaaagtgcttagtct

SEQ ID NO: 716836 - DNA, 19 bp, Mus musculus
  siRNA target sequence for Mrpl37 (NM_025500.1,463-481).
gaaagtgcttagtcttgtt

SEQ ID NO: 716837 - DNA, 19 bp, Mus musculus
  siRNA target sequence for Mrpl37 (NM_025500.1,469-487).
gcttagtcttgttgatgat

SEQ ID NO: 716838 - DNA, 19 bp, Mus musculus
  siRNA target sequence for Mrpl37 (NM_025500.1,482-500).
gatgatccagctaatcaca

SEQ ID NO: 716839 - DNA, 19 bp, Mus musculus
  siRNA target sequence for Mrpl37 (NM_025500.1,518-536).
cgtgttttggatatcatct

SEQ ID NO: 716840 - DNA, 19 bp, Mus musculus
  siRNA target sequence for Mrpl37 (NM_025500.1,572-590).
cccaagagagagacttact

SEQ ID NO: 716841 - DNA, 19 bp, Mus musculus
  siRNA target sequence for Mrpl37 (NM_025500.1,583-601).
gacttactgcccactcatt

SEQ ID NO: 716842 - DNA, 19 bp, Mus musculus
  siRNA target sequence for Mrpl37 (NM_025500.1,609-627).
gcctcatacagctgtgtaa

SEQ ID NO: 716843 - DNA, 19 bp, Mus musculus
  siRNA target sequence for Mrpl37 (NM_025500.1,610-628).
cctcatacagctgtgtaaa

SEQ ID NO: 716844 - DNA, 19 bp, Mus musculus
  siRNA target sequence for Mrpl37 (NM_025500.1,722-740).
caggtccgaggtactagta

SEQ ID NO: 716845 - DNA, 19 bp, Mus musculus
  siRNA target sequence for Mrpl37 (NM_025500.1,724-742).
ggtccgaggtactagtagt

SEQ ID NO: 716846 - DNA, 19 bp, Mus musculus
  siRNA target sequence for Mrpl37 (NM_025500.1,725-743).
gtccgaggtactagtagta

SEQ ID NO: 716847 - DNA, 19 bp, Mus musculus
  siRNA target sequence for Mrpl37 (NM_025500.1,801-819).
ctaccagaagtcatgttct

SEQ ID NO: 716848 - DNA, 19 bp, Mus musculus
  siRNA target sequence for Mrpl37 (NM_025500.1,840-858).
ctcctaccatcgatcttca

SEQ ID NO: 716849 - DNA, 19 bp, Mus musculus
  siRNA target sequence for Mrpl37 (NM_025500.1,843-861).
ctaccatcgatcttcaaga

SEQ ID NO: 716850 - DNA, 19 bp, Mus musculus
  siRNA target sequence for Mrpl37 (NM_025500.1,864-882).
gccacgtttatgaagtgaa

SEQ ID NO: 716851 - DNA, 19 bp, Mus musculus
  siRNA target sequence for Mrpl37 (NM_025500.1,865-883).
ccacgtttatgaagtgaaa

SEQ ID NO: 716852 - DNA, 19 bp, Mus musculus
  siRNA target sequence for Mrpl37 (NM_025500.1,1049-1067).
gggaacacagccaaagtct

SEQ ID NO: 716853 - DNA, 19 bp, Mus musculus
  siRNA target sequence for Mrpl37 (NM_025500.1,1050-1068).
ggaacacagccaaagtctt

SEQ ID NO: 716854 - DNA, 19 bp, Mus musculus
  siRNA target sequence for Mrpl37 (NM_025500.1,1165-1183).
gggcgtcaagaatttggta

SEQ ID NO: 716855 - DNA, 19 bp, Mus musculus
  siRNA target sequence for Mrpl37 (NM_025500.1,1166-1184).
ggcgtcaagaatttggtat

SEQ ID NO: 716856 - DNA, 19 bp, Mus musculus
  siRNA target sequence for Mrpl37 (NM_025500.1,1221-1239).
ggtgtcgcccagtcatcaa

SEQ ID NO: 716857 - DNA, 19 bp, Mus musculus
  siRNA target sequence for Mrpl37 (NM_025500.1,1222-1240).
gtgtcgcccagtcatcaaa

SEQ ID NO: 716858 - DNA, 19 bp, Mus musculus
  siRNA target sequence for Mrpl37 (NM_025500.1,1224-1242).
gtcgcccagtcatcaaaaa

SEQ ID NO: 716859 - DNA, 19 bp, Mus musculus
  siRNA target sequence for Mrpl37 (NM_025500.1,1230-1248).
cagtcatcaaaaaaaaggt

SEQ ID NO: 716860 - DNA, 19 bp, Mus musculus
  siRNA target sequence for Mrpl37 (NM_025500.1,1285-1303).
ggagacgttcaggaagttt

SEQ ID NO: 716861 - DNA, 19 bp, Mus musculus
  siRNA target sequence for 1700029P11Rik (NM_025503.1,83-101).
ccactttgctggaaatcca

SEQ ID NO: 716862 - DNA, 19 bp, Mus musculus
  siRNA target sequence for 1700029P11Rik (NM_025503.1,194-212).
gacgaaaacgtgtacttga

SEQ ID NO: 716863 - DNA, 19 bp, Mus musculus
  siRNA target sequence for 1700029P11Rik (NM_025503.1,268-286).
gcacgccgtcttcttcttt

SEQ ID NO: 716864 - DNA, 19 bp, Mus musculus
  siRNA target sequence for 1700029P11Rik (NM_025503.1,304-322).
ggtccttggcactaccttt

SEQ ID NO: 716865 - DNA, 19 bp, Mus musculus
  siRNA target sequence for 1700029P11Rik (NM_025503.1,327-345).
cttatgtgccaaactataa

SEQ ID NO: 716866 - DNA, 19 bp, Mus musculus
  siRNA target sequence for 1700029P11Rik (NM_025503.1,332-350).
gtgccaaactataagatga

SEQ ID NO: 716867 - DNA, 19 bp, Mus musculus
  siRNA target sequence for 1700029P11Rik (NM_025503.1,415-433).
catggagtccaactatttt

SEQ ID NO: 716868 - DNA, 19 bp, Mus musculus
  siRNA target sequence for 2310004L02Rik (NM_025504.2,1154-1172).
gtcaacagggagaatcgat

SEQ ID NO: 716869 - DNA, 19 bp, Mus musculus
  siRNA target sequence for 2310004L02Rik (NM_025504.2,1163-1181).
gagaatcgatccttcacta

SEQ ID NO: 716870 - DNA, 19 bp, Mus musculus
  siRNA target sequence for 2310004L02Rik (NM_025504.2,1192-1210).
gaaatatggcccgtatgtt

SEQ ID NO: 716871 - DNA, 19 bp, Mus musculus
  siRNA target sequence for 2310004L02Rik (NM_025504.2,1268-1286).
gaatggatccggccaaata

SEQ ID NO: 716872 - DNA, 19 bp, Mus musculus
  siRNA target sequence for 1700030G05Rik (NM_025505.2,309-327).
cttaaaagttcggaaaaca

SEQ ID NO: 716873 - DNA, 19 bp, Mus musculus
  siRNA target sequence for 1700030G05Rik (NM_025505.2,409-427).
cccctaagtctgttgaagt

SEQ ID NO: 716874 - DNA, 19 bp, Mus musculus
  siRNA target sequence for 1700030G05Rik (NM_025505.2,436-454).
gagtccaacccataaatca

SEQ ID NO: 716875 - DNA, 19 bp, Mus musculus
  siRNA target sequence for 1700030G05Rik (NM_025505.2,440-458).
ccaacccataaatcaacat

SEQ ID NO: 716876 - DNA, 19 bp, Mus musculus
  siRNA target sequence for 1700030G05Rik (NM_025505.2,466-484).
caagtccacggaagaaagt

SEQ ID NO: 716877 - DNA, 19 bp, Mus musculus
  siRNA target sequence for 1700030G05Rik (NM_025505.2,515-533).
ggggaagattcttaatgaa

SEQ ID NO: 716878 - DNA, 19 bp, Mus musculus
  siRNA target sequence for 1700030G05Rik (NM_025505.2,521-539).
gattcttaatgaaagaaca

SEQ ID NO: 716879 - DNA, 19 bp, Mus musculus
  siRNA target sequence for 1700030G05Rik (NM_025505.2,684-702).
gaactctcagaggtaaaga

SEQ ID NO: 716880 - DNA, 19 bp, Mus musculus
  siRNA target sequence for 1700030G05Rik (NM_025505.2,710-728).
ggaaaagctcaagaattct

SEQ ID NO: 716881 - DNA, 19 bp, Mus musculus
  siRNA target sequence for 1700030G05Rik (NM_025505.2,736-754).
ggctacttcaggacaaaga

SEQ ID NO: 716882 - DNA, 19 bp, Mus musculus
  siRNA target sequence for 1700030G05Rik (NM_025505.2,737-755).
gctacttcaggacaaagaa

SEQ ID NO: 716883 - DNA, 19 bp, Mus musculus
  siRNA target sequence for 1700030G05Rik (NM_025505.2,749-767).
caaagaaggcctttccaat

SEQ ID NO: 716884 - DNA, 19 bp, Mus musculus
  siRNA target sequence for 1700030G05Rik (NM_025505.2,774-792).
cgagtacagacagagataa

SEQ ID NO: 716885 - DNA, 19 bp, Mus musculus
  siRNA target sequence for 1700030G05Rik (NM_025505.2,809-827).
gttactcgtggcttctgtt

SEQ ID NO: 716886 - DNA, 19 bp, Mus musculus
  siRNA target sequence for 1700030G05Rik (NM_025505.2,829-847).
gggatgacccgcagtatca

SEQ ID NO: 716887 - DNA, 19 bp, Mus musculus
  siRNA target sequence for 1700030G05Rik (NM_025505.2,936-954).
gaacggatgtcaatacagt

SEQ ID NO: 716888 - DNA, 19 bp, Mus musculus
  siRNA target sequence for 1700030G05Rik (NM_025505.2,962-980).
ctggagaagtaaattcctt

SEQ ID NO: 716889 - DNA, 19 bp, Mus musculus
  siRNA target sequence for 1700030G05Rik (NM_025505.2,988-1006).
gggtaatggcagatgagtt

SEQ ID NO: 716890 - DNA, 19 bp, Mus musculus
  siRNA target sequence for 1700030G05Rik (NM_025505.2,989-1007).
ggtaatggcagatgagtta

SEQ ID NO: 716891 - DNA, 19 bp, Mus musculus
  siRNA target sequence for 1700030G05Rik (NM_025505.2,999-1017).
gatgagttaacaaacttca

SEQ ID NO: 716892 - DNA, 19 bp, Mus musculus
  siRNA target sequence for 1700030G05Rik (NM_025505.2,1086-1104).
cagtttcgtcaggaaatga

SEQ ID NO: 716893 - DNA, 19 bp, Mus musculus
  siRNA target sequence for 1700030G05Rik (NM_025505.2,1187-1205).
ccatagcacggcagactta

SEQ ID NO: 716894 - DNA, 19 bp, Mus musculus
  siRNA target sequence for 1700030G05Rik (NM_025505.2,1222-1240).
gactggcacaagcaataca

SEQ ID NO: 716895 - DNA, 19 bp, Mus musculus
  siRNA target sequence for 1700030G05Rik (NM_025505.2,1234-1252).
caatacatgcccatctgtt

SEQ ID NO: 716896 - DNA, 19 bp, Mus musculus
  siRNA target sequence for 1700030G05Rik (NM_025505.2,1260-1278).
gttggcattagccatcaaa

SEQ ID NO: 716897 - DNA, 19 bp, Mus musculus
  siRNA target sequence for 1700030G05Rik (NM_025505.2,1309-1327).
gtaccccagctgagaaaat

SEQ ID NO: 716898 - DNA, 19 bp, Mus musculus
  siRNA target sequence for 1700030G05Rik (NM_025505.2,1337-1355).
ggttctgcggattttggat

SEQ ID NO: 716899 - DNA, 19 bp, Mus musculus
  siRNA target sequence for 1700030G05Rik (NM_025505.2,1375-1393).
gctctccggacaaccaatt

SEQ ID NO: 716900 - DNA, 19 bp, Mus musculus
  siRNA target sequence for 1700030G05Rik (NM_025505.2,1376-1394).
ctctccggacaaccaattt

SEQ ID NO: 716901 - DNA, 19 bp, Mus musculus
  siRNA target sequence for 1700030G05Rik (NM_025505.2,1385-1403).
caaccaatttgctgaatct

SEQ ID NO: 716902 - DNA, 19 bp, Mus musculus
  siRNA target sequence for 1700030G05Rik (NM_025505.2,1388-1406).
ccaatttgctgaatcttca

SEQ ID NO: 716903 - DNA, 19 bp, Mus musculus
  siRNA target sequence for 1700030G05Rik (NM_025505.2,1443-1461).
cgtttccatccctatacca

SEQ ID NO: 716904 - DNA, 19 bp, Mus musculus
  siRNA target sequence for 1700030G05Rik (NM_025505.2,1448-1466).
ccatccctataccagatat

SEQ ID NO: 716905 - DNA, 19 bp, Mus musculus
  siRNA target sequence for 1700030G05Rik (NM_025505.2,1452-1470).
ccctataccagatatgaaa

SEQ ID NO: 716906 - DNA, 19 bp, Mus musculus
  siRNA target sequence for 1700030G05Rik (NM_025505.2,1453-1471).
cctataccagatatgaaaa

SEQ ID NO: 716907 - DNA, 19 bp, Mus musculus
  siRNA target sequence for 1700030G05Rik (NM_025505.2,1454-1472).
ctataccagatatgaaaat

SEQ ID NO: 716908 - DNA, 19 bp, Mus musculus
  siRNA target sequence for 2310007A19Rik (NM_025506.1,248-266).
gagcagttgcgagatttca

SEQ ID NO: 716909 - DNA, 19 bp, Mus musculus
  siRNA target sequence for 2310007A19Rik (NM_025506.1,278-296).
cggatcgcaaatgaaaagt

SEQ ID NO: 716910 - DNA, 19 bp, Mus musculus
  siRNA target sequence for 2310007A19Rik (NM_025506.1,279-297).
ggatcgcaaatgaaaagta

SEQ ID NO: 716911 - DNA, 19 bp, Mus musculus
  siRNA target sequence for 2310007A19Rik (NM_025506.1,366-384).
cggacaacattcttgaatt

SEQ ID NO: 716912 - DNA, 19 bp, Mus musculus
  siRNA target sequence for 2310007A19Rik (NM_025506.1,380-398).
gaatttgctgcacactatt

SEQ ID NO: 716913 - DNA, 19 bp, Mus musculus
  siRNA target sequence for 2310008M10Rik (NM_025509.2,55-73).
gtaccgagtcccattctta

SEQ ID NO: 716914 - DNA, 19 bp, Mus musculus
  siRNA target sequence for 2310008M10Rik (NM_025509.2,158-176).
gtatcttacttcctcatta

SEQ ID NO: 716915 - DNA, 19 bp, Mus musculus
  siRNA target sequence for 2310008M10Rik (NM_025509.2,169-187).
cctcattaccggaggaata

SEQ ID NO: 716916 - DNA, 19 bp, Mus musculus
  siRNA target sequence for 2310008M10Rik (NM_025509.2,177-195).
ccggaggaataatctatga

SEQ ID NO: 716917 - DNA, 19 bp, Mus musculus
  siRNA target sequence for 2310008M10Rik (NM_025509.2,180-198).
gaggaataatctatgatgt

SEQ ID NO: 716918 - DNA, 19 bp, Mus musculus
  siRNA target sequence for 2310008M10Rik (NM_025509.2,182-200).
ggaataatctatgatgtta

SEQ ID NO: 716919 - DNA, 19 bp, Mus musculus
  siRNA target sequence for 2310008M10Rik (NM_025509.2,212-230).
ccaagtgttggctcaatga

SEQ ID NO: 716920 - DNA, 19 bp, Mus musculus
  siRNA target sequence for 2310008M10Rik (NM_025509.2,274-292).
cagagtaaacggacagtat

SEQ ID NO: 716921 - DNA, 19 bp, Mus musculus
  siRNA target sequence for 2310008M10Rik (NM_025509.2,276-294).
gagtaaacggacagtatat

SEQ ID NO: 716922 - DNA, 19 bp, Mus musculus
  siRNA target sequence for 2310008M10Rik (NM_025509.2,278-296).
gtaaacggacagtatatca

SEQ ID NO: 716923 - DNA, 19 bp, Mus musculus
  siRNA target sequence for 2310008M10Rik (NM_025509.2,305-323).
cttgcgtccagctttctct

SEQ ID NO: 716924 - DNA, 19 bp, Mus musculus
  siRNA target sequence for 2310008M10Rik (NM_025509.2,322-340).
ctttacaatgggaggttta

SEQ ID NO: 716925 - DNA, 19 bp, Mus musculus
  siRNA target sequence for 2310008M10Rik (NM_025509.2,327-345).
caatgggaggtttaggttt

SEQ ID NO: 716926 - DNA, 19 bp, Mus musculus
  siRNA target sequence for 2310008M10Rik (NM_025509.2,331-349).
gggaggtttaggtttcata

SEQ ID NO: 716927 - DNA, 19 bp, Mus musculus
  siRNA target sequence for 2310008M10Rik (NM_025509.2,333-351).
gaggtttaggtttcataat

SEQ ID NO: 716928 - DNA, 19 bp, Mus musculus
  siRNA target sequence for 2310008M10Rik (NM_025509.2,336-354).
gtttaggtttcataatcct

SEQ ID NO: 716929 - DNA, 19 bp, Mus musculus
  siRNA target sequence for 2310008M10Rik (NM_025509.2,360-378).
gatccaatgcaccaaacat

SEQ ID NO: 716930 - DNA, 19 bp, Mus musculus
  siRNA target sequence for 2310005N03Rik (NM_025511.1,30-48).
ccccacgagacggagaaaa

SEQ ID NO: 716931 - DNA, 19 bp, Mus musculus
  siRNA target sequence for 2310005N03Rik (NM_025511.1,31-49).
cccacgagacggagaaaaa

SEQ ID NO: 716932 - DNA, 19 bp, Mus musculus
  siRNA target sequence for 2310005N03Rik (NM_025511.1,52-70).
ccttcaagctcctaggtat

SEQ ID NO: 716933 - DNA, 19 bp, Mus musculus
  siRNA target sequence for 2310005N03Rik (NM_025511.1,53-71).
cttcaagctcctaggtatt

SEQ ID NO: 716934 - DNA, 19 bp, Mus musculus
  siRNA target sequence for 2310005N03Rik (NM_025511.1,59-77).
gctcctaggtattttagat

SEQ ID NO: 716935 - DNA, 19 bp, Mus musculus
  siRNA target sequence for 2310005N03Rik (NM_025511.1,62-80).
cctaggtattttagatgtt

SEQ ID NO: 716936 - DNA, 19 bp, Mus musculus
  siRNA target sequence for 2310005N03Rik (NM_025511.1,90-108).
ccatgtgctcgagaatcta

SEQ ID NO: 716937 - DNA, 19 bp, Mus musculus
  siRNA target sequence for 2310005N03Rik (NM_025511.1,91-109).
catgtgctcgagaatctat

SEQ ID NO: 716938 - DNA, 19 bp, Mus musculus
  siRNA target sequence for 2310005N03Rik (NM_025511.1,94-112).
gtgctcgagaatctatact

SEQ ID NO: 716939 - DNA, 19 bp, Mus musculus
  siRNA target sequence for 2310005N03Rik (NM_025511.1,97-115).
ctcgagaatctatactcta

SEQ ID NO: 716940 - DNA, 19 bp, Mus musculus
  siRNA target sequence for 2310005N03Rik (NM_025511.1,111-129).
ctctatggctcattaggat

SEQ ID NO: 716941 - DNA, 19 bp, Mus musculus
  siRNA target sequence for 2310005N03Rik (NM_025511.1,118-136).
gctcattaggatctattgt

SEQ ID NO: 716942 - DNA, 19 bp, Mus musculus
  siRNA target sequence for 2310005N03Rik (NM_025511.1,155-173).
cttggtgaccagtagaatt

SEQ ID NO: 716943 - DNA, 19 bp, Mus musculus
  siRNA target sequence for 2310005N03Rik (NM_025511.1,158-176).
ggtgaccagtagaattaga

SEQ ID NO: 716944 - DNA, 19 bp, Mus musculus
  siRNA target sequence for 2310005N03Rik (NM_025511.1,229-247).
ggttccactgtaggtataa

SEQ ID NO: 716945 - DNA, 19 bp, Mus musculus
  siRNA target sequence for 2310005N03Rik (NM_025511.1,230-248).
gttccactgtaggtataat

SEQ ID NO: 716946 - DNA, 19 bp, Mus musculus
  siRNA target sequence for 2310005N03Rik (NM_025511.1,320-338).
ccaccttgatcctgaaaga

SEQ ID NO: 716947 - DNA, 19 bp, Mus musculus
  siRNA target sequence for 2310005D06Rik (NM_025513.1,335-353).
gcggtatgtacctgtgaaa

SEQ ID NO: 716948 - DNA, 19 bp, Mus musculus
  siRNA target sequence for 2310005D06Rik (NM_025513.1,371-389).
catagtgatcgctaaatct

SEQ ID NO: 716949 - DNA, 19 bp, Mus musculus
  siRNA target sequence for 2310005D06Rik (NM_025513.1,388-406).
ctggagatatattcaaagt

SEQ ID NO: 716950 - DNA, 19 bp, Mus musculus
  siRNA target sequence for 2310005D06Rik (NM_025513.1,437-455).
gtcttacctggcatttgaa

SEQ ID NO: 716951 - DNA, 19 bp, Mus musculus
  siRNA target sequence for 2310005D06Rik (NM_025513.1,448-466).
catttgaaggggcaactaa

SEQ ID NO: 716952 - DNA, 19 bp, Mus musculus
  siRNA target sequence for 2310005D06Rik (NM_025513.1,453-471).
gaaggggcaactaaaagaa

SEQ ID NO: 716953 - DNA, 19 bp, Mus musculus
  siRNA target sequence for 2310005D06Rik (NM_025513.1,510-528).
cagtgtgtggtcgctaata

SEQ ID NO: 716954 - DNA, 19 bp, Mus musculus
  siRNA target sequence for 2310005D06Rik (NM_025513.1,512-530).
gtgtgtggtcgctaataaa

SEQ ID NO: 716955 - DNA, 19 bp, Mus musculus
  siRNA target sequence for 2310005D06Rik (NM_025513.1,514-532).
gtgtggtcgctaataaaga

SEQ ID NO: 716956 - DNA, 19 bp, Mus musculus
  siRNA target sequence for 2310005D06Rik (NM_025513.1,618-636).
gtgacgttgggcttaatta

SEQ ID NO: 716957 - DNA, 19 bp, Mus musculus
  siRNA target sequence for 2310005D06Rik (NM_025513.1,627-645).
ggcttaattagaaagctat

SEQ ID NO: 716958 - DNA, 19 bp, Mus musculus
  siRNA target sequence for 2310005D06Rik (NM_025513.1,628-646).
gcttaattagaaagctatt

SEQ ID NO: 716959 - DNA, 19 bp, Mus musculus
  siRNA target sequence for 2310005D06Rik (NM_025513.1,629-647).
cttaattagaaagctatta

SEQ ID NO: 716960 - DNA, 19 bp, Mus musculus
  siRNA target sequence for 2310005D06Rik (NM_025513.1,721-739).
gaatatgggtcaaagctaa

SEQ ID NO: 716961 - DNA, 19 bp, Mus musculus
  siRNA target sequence for 2310005D06Rik (NM_025513.1,749-767).
gcagacgttaattttagca

SEQ ID NO: 716962 - DNA, 19 bp, Mus musculus
  siRNA target sequence for 2310005D06Rik (NM_025513.1,750-768).
cagacgttaattttagcaa

SEQ ID NO: 716963 - DNA, 19 bp, Mus musculus
  siRNA target sequence for 2310005D06Rik (NM_025513.1,752-770).
gacgttaattttagcaaat

SEQ ID NO: 716964 - DNA, 19 bp, Mus musculus
  siRNA target sequence for D10Ertd641e (NM_025514.1,342-360).
ctctgtgagtcggtgttta

SEQ ID NO: 716965 - DNA, 19 bp, Mus musculus
  siRNA target sequence for D10Ertd641e (NM_025514.1,350-368).
gtcggtgtttagctatcaa

SEQ ID NO: 716966 - DNA, 19 bp, Mus musculus
  siRNA target sequence for D10Ertd641e (NM_025514.1,352-370).
cggtgtttagctatcaagt

SEQ ID NO: 716967 - DNA, 19 bp, Mus musculus
  siRNA target sequence for D10Ertd641e (NM_025514.1,405-423).
caagtcgctcggatggaaa

SEQ ID NO: 716968 - DNA, 19 bp, Mus musculus
  siRNA target sequence for D10Ertd641e (NM_025514.1,454-472).
ccgacgagtggcggtttaa

SEQ ID NO: 716969 - DNA, 19 bp, Mus musculus
  siRNA target sequence for D10Ertd641e (NM_025514.1,455-473).
cgacgagtggcggtttaaa

SEQ ID NO: 716970 - DNA, 19 bp, Mus musculus
  siRNA target sequence for 2310015N07Rik (NM_025515.1,54-72).
ggaatccgctggacttcaa

SEQ ID NO: 716971 - DNA, 19 bp, Mus musculus
  siRNA target sequence for 2310015N07Rik (NM_025515.1,116-134).
gaccaccacaactaagtca

SEQ ID NO: 716972 - DNA, 19 bp, Mus musculus
  siRNA target sequence for 2310015N07Rik (NM_025515.1,121-139).
ccacaactaagtcagatta

SEQ ID NO: 716973 - DNA, 19 bp, Mus musculus
  siRNA target sequence for 2310015N07Rik (NM_025515.1,122-140).
cacaactaagtcagattat

SEQ ID NO: 716974 - DNA, 19 bp, Mus musculus
  siRNA target sequence for 2310015N07Rik (NM_025515.1,124-142).
caactaagtcagattatga

SEQ ID NO: 716975 - DNA, 19 bp, Mus musculus
  siRNA target sequence for 2310015N07Rik (NM_025515.1,155-173).
ggatataactcctctagaa

SEQ ID NO: 716976 - DNA, 19 bp, Mus musculus
  siRNA target sequence for 2310015N07Rik (NM_025515.1,241-259).
cacaagcacagacaattgt

SEQ ID NO: 716977 - DNA, 19 bp, Mus musculus
  siRNA target sequence for 2310015N07Rik (NM_025515.1,243-261).
caagcacagacaattgtat

SEQ ID NO: 716978 - DNA, 19 bp, Mus musculus
  siRNA target sequence for 2310015N07Rik (NM_025515.1,264-282).
gtgctaagtacgctatcaa

SEQ ID NO: 716979 - DNA, 19 bp, Mus musculus
  siRNA target sequence for 2310015N07Rik (NM_025515.1,285-303).
gtcagcctggatactatct

SEQ ID NO: 716980 - DNA, 19 bp, Mus musculus
  siRNA target sequence for 2310015N07Rik (NM_025515.1,350-368).
gctaatggctcatttggat

SEQ ID NO: 716981 - DNA, 19 bp, Mus musculus
  siRNA target sequence for 2310015N07Rik (NM_025515.1,351-369).
ctaatggctcatttggatt

SEQ ID NO: 716982 - DNA, 19 bp, Mus musculus
  siRNA target sequence for 2310015N07Rik (NM_025515.1,366-384).
gattccatcagaaaagaca

SEQ ID NO: 716983 - DNA, 19 bp, Mus musculus
  siRNA target sequence for 2310015N07Rik (NM_025515.1,464-482).
gcagcagctgactaatgaa

SEQ ID NO: 716984 - DNA, 19 bp, Mus musculus
  siRNA target sequence for 2310015N07Rik (NM_025515.1,489-507).
cgaatcagagcggacaata

SEQ ID NO: 716985 - DNA, 19 bp, Mus musculus
  siRNA target sequence for 2310015N07Rik (NM_025515.1,490-508).
gaatcagagcggacaataa

SEQ ID NO: 716986 - DNA, 19 bp, Mus musculus
  siRNA target sequence for 2310015N07Rik (NM_025515.1,501-519).
gacaataagctggacatta

SEQ ID NO: 716987 - DNA, 19 bp, Mus musculus
  siRNA target sequence for 2310015N07Rik (NM_025515.1,532-550).
gcagagtgacagacatgtt

SEQ ID NO: 716988 - DNA, 19 bp, Mus musculus
  siRNA target sequence for 2310015N07Rik (NM_025515.1,555-573).
gatcaagaaaagcaactta

SEQ ID NO: 716989 - DNA, 19 bp, Mus musculus
  siRNA target sequence for 2310015N07Rik (NM_025515.1,588-606).
gaatttgccaaaaaggata

SEQ ID NO: 716990 - DNA, 19 bp, Mus musculus
  siRNA target sequence for 2310015N07Rik (NM_025515.1,602-620).
ggatacacaaaccaaaagt

SEQ ID NO: 716991 - DNA, 19 bp, Mus musculus
  siRNA target sequence for 2310015N07Rik (NM_025515.1,628-646).
cagagaccagtaataaaat

SEQ ID NO: 716992 - DNA, 19 bp, Mus musculus
  siRNA target sequence for 2310015N07Rik (NM_025515.1,652-670).
ctgaaatcgcttccttaaa

SEQ ID NO: 716993 - DNA, 19 bp, Mus musculus
  siRNA target sequence for 2310015N07Rik (NM_025515.1,677-695).
gatggagtcgagcaaactt

SEQ ID NO: 716994 - DNA, 19 bp, Mus musculus
  siRNA target sequence for 2310015N07Rik (NM_025515.1,680-698).
ggagtcgagcaaacttgaa

SEQ ID NO: 716995 - DNA, 19 bp, Mus musculus
  siRNA target sequence for 2310015N07Rik (NM_025515.1,681-699).
gagtcgagcaaacttgaaa

SEQ ID NO: 716996 - DNA, 19 bp, Mus musculus
  siRNA target sequence for 2310015N07Rik (NM_025515.1,683-701).
gtcgagcaaacttgaaaca

SEQ ID NO: 716997 - DNA, 19 bp, Mus musculus
  siRNA target sequence for 2310015N07Rik (NM_025515.1,685-703).
cgagcaaacttgaaacaat

SEQ ID NO: 716998 - DNA, 19 bp, Mus musculus
  siRNA target sequence for 2310015N07Rik (NM_025515.1,689-707).
caaacttgaaacaattcgt

SEQ ID NO: 716999 - DNA, 19 bp, Mus musculus
  siRNA target sequence for 2310015N07Rik (NM_025515.1,730-748).
cttgcttggcgatagcatt

SEQ ID NO: 717000 - DNA, 19 bp, Mus musculus
  siRNA target sequence for 2310015N07Rik (NM_025515.1,739-757).
cgatagcattggggtttta

SEQ ID NO: 717001 - DNA, 19 bp, Mus musculus
  siRNA target sequence for 2310015N07Rik (NM_025515.1,744-762).
gcattggggttttataggt

SEQ ID NO: 717002 - DNA, 19 bp, Mus musculus
  siRNA target sequence for 2310015N07Rik (NM_025515.1,745-763).
cattggggttttataggtt

SEQ ID NO: 717003 - DNA, 19 bp, Mus musculus
  siRNA target sequence for Sdbcag84 (NM_025516.2,71-89).
cgatgcctaccctaagact

SEQ ID NO: 717004 - DNA, 19 bp, Mus musculus
  siRNA target sequence for Sdbcag84 (NM_025516.2,152-170).
catgctcctgcttttccta

SEQ ID NO: 717005 - DNA, 19 bp, Mus musculus
  siRNA target sequence for Sdbcag84 (NM_025516.2,168-186).
ctatcggagttgcagtatt

SEQ ID NO: 717006 - DNA, 19 bp, Mus musculus
  siRNA target sequence for Sdbcag84 (NM_025516.2,172-190).
cggagttgcagtattatct

SEQ ID NO: 717007 - DNA, 19 bp, Mus musculus
  siRNA target sequence for Sdbcag84 (NM_025516.2,174-192).
gagttgcagtattatctca

SEQ ID NO: 717008 - DNA, 19 bp, Mus musculus
  siRNA target sequence for Sdbcag84 (NM_025516.2,234-252).
ggggataaactgaagatca

SEQ ID NO: 717009 - DNA, 19 bp, Mus musculus
  siRNA target sequence for Sdbcag84 (NM_025516.2,248-266).
gatcaacatcgatgttctt

SEQ ID NO: 717010 - DNA, 19 bp, Mus musculus
  siRNA target sequence for Sdbcag84 (NM_025516.2,546-564).
cgaggctgggccttcaaga

SEQ ID NO: 717011 - DNA, 19 bp, Mus musculus
  siRNA target sequence for Sdbcag84 (NM_025516.2,747-765).
ggccttgacaatatcaaca

SEQ ID NO: 717012 - DNA, 19 bp, Mus musculus
  siRNA target sequence for Sdbcag84 (NM_025516.2,748-766).
gccttgacaatatcaacat

SEQ ID NO: 717013 - DNA, 19 bp, Mus musculus
  siRNA target sequence for 2310009A18Rik (NM_025517.1,470-488).
gtcggagctccgtctgaaa

SEQ ID NO: 717014 - DNA, 19 bp, Mus musculus
  siRNA target sequence for 2310009A18Rik (NM_025517.1,536-554).
ggttttcaagccaattgct

SEQ ID NO: 717015 - DNA, 19 bp, Mus musculus
  siRNA target sequence for 2310009A18Rik (NM_025517.1,632-650).
ccgagtgtccccagttaaa

SEQ ID NO: 717016 - DNA, 19 bp, Mus musculus
  siRNA target sequence for 2310009A18Rik (NM_025517.1,636-654).
gtgtccccagttaaacgat

SEQ ID NO: 717017 - DNA, 19 bp, Mus musculus
  siRNA target sequence for 2310009A18Rik (NM_025517.1,652-670).
gattggacccaataaatct

SEQ ID NO: 717018 - DNA, 19 bp, Mus musculus
  siRNA target sequence for 2310009A18Rik (NM_025517.1,718-736).
ccggtgttttgccactaaa

SEQ ID NO: 717019 - DNA, 19 bp, Mus musculus
  siRNA target sequence for 2310009A18Rik (NM_025517.1,719-737).
cggtgttttgccactaaaa

SEQ ID NO: 717020 - DNA, 19 bp, Mus musculus
  siRNA target sequence for 2310009A18Rik (NM_025517.1,991-1009).
ctgtggatgagtatctaca

SEQ ID NO: 717021 - DNA, 19 bp, Mus musculus
  siRNA target sequence for 2310009A18Rik (NM_025517.1,1005-1023).
ctacaagaccagctgatta

SEQ ID NO: 717022 - DNA, 19 bp, Mus musculus
  siRNA target sequence for 2310009A18Rik (NM_025517.1,1031-1049).
ggcgctagccaatggaatt

SEQ ID NO: 717023 - DNA, 19 bp, Mus musculus
  siRNA target sequence for 2310009A18Rik (NM_025517.1,1032-1050).
gcgctagccaatggaattt

SEQ ID NO: 717024 - DNA, 19 bp, Mus musculus
  siRNA target sequence for 2310009A18Rik (NM_025517.1,1079-1097).
ccacacgcagactgctata

SEQ ID NO: 717025 - DNA, 19 bp, Mus musculus
  siRNA target sequence for 2310009A18Rik (NM_025517.1,1082-1100).
cacgcagactgctatacat

SEQ ID NO: 717026 - DNA, 19 bp, Mus musculus
  siRNA target sequence for 2310009A18Rik (NM_025517.1,1084-1102).
cgcagactgctatacattt

SEQ ID NO: 717027 - DNA, 19 bp, Mus musculus
  siRNA target sequence for 2310009A18Rik (NM_025517.1,1085-1103).
gcagactgctatacatttt

SEQ ID NO: 717028 - DNA, 19 bp, Mus musculus
  siRNA target sequence for 2310009A18Rik (NM_025517.1,1088-1106).
gactgctatacattttgct

SEQ ID NO: 717029 - DNA, 19 bp, Mus musculus
  siRNA target sequence for 2310009A18Rik (NM_025517.1,1113-1131).
ctagcaaaggccaaattta

SEQ ID NO: 717030 - DNA, 19 bp, Mus musculus
  siRNA target sequence for 2310009A18Rik (NM_025517.1,1181-1199).
catcgagtgtgaaggaatt

SEQ ID NO: 717031 - DNA, 19 bp, Mus musculus
  siRNA target sequence for 2310011J03Rik (NM_025521.2,404-422).
ggcctacgtggctatgaat

SEQ ID NO: 717032 - DNA, 19 bp, Mus musculus
  siRNA target sequence for 2310011J03Rik (NM_025521.2,406-424).
cctacgtggctatgaatga

SEQ ID NO: 717033 - DNA, 19 bp, Mus musculus
  siRNA target sequence for Ndufc1 (NM_025523.1,99-117).
cacggtcgaagttctatgt

SEQ ID NO: 717034 - DNA, 19 bp, Mus musculus
  siRNA target sequence for Ndufc1 (NM_025523.1,178-196).
ggttttcatgtggatttat

SEQ ID NO: 717035 - DNA, 19 bp, Mus musculus
  siRNA target sequence for Ndufc1 (NM_025523.1,199-217).
catccaaacacacaatgaa

SEQ ID NO: 717036 - DNA, 19 bp, Mus musculus
  siRNA target sequence for Ndufc1 (NM_025523.1,202-220).
ccaaacacacaatgaagat

SEQ ID NO: 717037 - DNA, 19 bp, Mus musculus
  siRNA target sequence for Ndufc1 (NM_025523.1,218-236).
gatgttttggagtataaaa

SEQ ID NO: 717038 - DNA, 19 bp, Mus musculus
  siRNA target sequence for 2310039H17Rik (NM_025529.2,292-310).
cccgacgaccaagatgtaa

SEQ ID NO: 717039 - DNA, 19 bp, Mus musculus
  siRNA target sequence for 2310039H17Rik (NM_025529.2,293-311).
ccgacgaccaagatgtaat

SEQ ID NO: 717040 - DNA, 19 bp, Mus musculus
  siRNA target sequence for 2310039H17Rik (NM_025529.2,294-312).
cgacgaccaagatgtaata

SEQ ID NO: 717041 - DNA, 19 bp, Mus musculus
  siRNA target sequence for 2310039H17Rik (NM_025529.2,297-315).
cgaccaagatgtaatacat

SEQ ID NO: 717042 - DNA, 19 bp, Mus musculus
  siRNA target sequence for 2310039H17Rik (NM_025529.2,399-417).
ccgggaaaaggcaaccata

SEQ ID NO: 717043 - DNA, 19 bp, Mus musculus
  siRNA target sequence for 2310039I18Rik (NM_025530.1,230-248).
gaaatggatttcttatgga

SEQ ID NO: 717044 - DNA, 19 bp, Mus musculus
  siRNA target sequence for 2310039I18Rik (NM_025530.1,264-282).
ggtggagtccgctgtgaat

SEQ ID NO: 717045 - DNA, 19 bp, Mus musculus
  siRNA target sequence for 2310039I18Rik (NM_025530.1,296-314).
gtgctggtcggattgaact

SEQ ID NO: 717046 - DNA, 19 bp, Mus musculus
  siRNA target sequence for 2310039I18Rik (NM_025530.1,413-431).
cacgcggaggcgacttctt

SEQ ID NO: 717047 - DNA, 19 bp, Mus musculus
  siRNA target sequence for 2310039I18Rik (NM_025530.1,415-433).
cgcggaggcgacttcttat

SEQ ID NO: 717048 - DNA, 19 bp, Mus musculus
  siRNA target sequence for 2310039I18Rik (NM_025530.1,416-434).
gcggaggcgacttcttata

SEQ ID NO: 717049 - DNA, 19 bp, Mus musculus
  siRNA target sequence for 2310039I18Rik (NM_025530.1,418-436).
ggaggcgacttcttatact

SEQ ID NO: 717050 - DNA, 19 bp, Mus musculus
  siRNA target sequence for 2310039I18Rik (NM_025530.1,474-492).
ccttgccaagctttatggt

SEQ ID NO: 717051 - DNA, 19 bp, Mus musculus
  siRNA target sequence for 2310039I18Rik (NM_025530.1,504-522).
ggtgtttggggcattgact

SEQ ID NO: 717052 - DNA, 19 bp, Mus musculus
  siRNA target sequence for 2310039I18Rik (NM_025530.1,546-564).
gctatgcttgtctcttgta

SEQ ID NO: 717053 - DNA, 19 bp, Mus musculus
  siRNA target sequence for 2310039I18Rik (NM_025530.1,606-624).
ggagaccctcctaacctta

SEQ ID NO: 717054 - DNA, 19 bp, Mus musculus
  siRNA target sequence for 2310039I18Rik (NM_025530.1,611-629).
ccctcctaaccttaggatt

SEQ ID NO: 717055 - DNA, 19 bp, Mus musculus
  siRNA target sequence for 2310039I18Rik (NM_025530.1,612-630).
cctcctaaccttaggattt

SEQ ID NO: 717056 - DNA, 19 bp, Mus musculus
  siRNA target sequence for 2310039I18Rik (NM_025530.1,680-698).
ctctaataaagcaactcat

SEQ ID NO: 717057 - DNA, 19 bp, Mus musculus
  siRNA target sequence for 2310039I18Rik (NM_025530.1,729-747).
gccaggaggtggaataaca

SEQ ID NO: 717058 - DNA, 19 bp, Mus musculus
  siRNA target sequence for 2310039I18Rik (NM_025530.1,775-793).
ggttccggtgctacagaat

SEQ ID NO: 717059 - DNA, 19 bp, Mus musculus
  siRNA target sequence for 2310039I18Rik (NM_025530.1,776-794).
gttccggtgctacagaatt

SEQ ID NO: 717060 - DNA, 19 bp, Mus musculus
  siRNA target sequence for 2310039I18Rik (NM_025530.1,779-797).
ccggtgctacagaattcca

SEQ ID NO: 717061 - DNA, 19 bp, Mus musculus
  siRNA target sequence for 2310039I18Rik (NM_025530.1,826-844).
ggaatgaagtttcgaaatt

SEQ ID NO: 717062 - DNA, 19 bp, Mus musculus
  siRNA target sequence for 2310039I18Rik (NM_025530.1,863-881).
cttcgcttgctcattcaga

SEQ ID NO: 717063 - DNA, 19 bp, Mus musculus
  siRNA target sequence for 2310039I18Rik (NM_025530.1,874-892).
cattcagaatattctctaa

SEQ ID NO: 717064 - DNA, 19 bp, Mus musculus
  siRNA target sequence for 2310039I18Rik (NM_025530.1,918-936).
gactttgaatgcaattgca

SEQ ID NO: 717065 - DNA, 19 bp, Mus musculus
  siRNA target sequence for 2310039I18Rik (NM_025530.1,934-952).
gcaaaggacgtcctagttt

SEQ ID NO: 717066 - DNA, 19 bp, Mus musculus
  siRNA target sequence for 2310042G06Rik (NM_025531.2,252-270).
gtggggcctgccttccatt

SEQ ID NO: 717067 - DNA, 19 bp, Mus musculus
  siRNA target sequence for 2310042G06Rik (NM_025531.2,267-285).
cattgtgaagtctcttatt

SEQ ID NO: 717068 - DNA, 19 bp, Mus musculus
  siRNA target sequence for 2310042G06Rik (NM_025531.2,289-307).
gcagcaagaacgaaaacgt

SEQ ID NO: 717069 - DNA, 19 bp, Mus musculus
  siRNA target sequence for 2310042G06Rik (NM_025531.2,290-308).
cagcaagaacgaaaacgta

SEQ ID NO: 717070 - DNA, 19 bp, Mus musculus
  siRNA target sequence for 2310042G06Rik (NM_025531.2,312-330).
gcaggagcattctgtagtt

SEQ ID NO: 717071 - DNA, 19 bp, Mus musculus
  siRNA target sequence for 2310042G06Rik (NM_025531.2,365-383).
ccaacatctcatttacaaa

SEQ ID NO: 717072 - DNA, 19 bp, Mus musculus
  siRNA target sequence for 2310042G06Rik (NM_025531.2,397-415).
gatgagaggctgacataca

SEQ ID NO: 717073 - DNA, 19 bp, Mus musculus
  siRNA target sequence for 2310042G06Rik (NM_025531.2,554-572).
caatggagtgggtgataca

SEQ ID NO: 717074 - DNA, 19 bp, Mus musculus
  siRNA target sequence for 2310042G06Rik (NM_025531.2,558-576).
ggagtgggtgatacataaa

SEQ ID NO: 717075 - DNA, 19 bp, Mus musculus
  siRNA target sequence for 2310042G06Rik (NM_025531.2,563-581).
gggtgatacataaactgaa

SEQ ID NO: 717076 - DNA, 19 bp, Mus musculus
  siRNA target sequence for 2310042G06Rik (NM_025531.2,646-664).
gcagcactggtggacaaat

SEQ ID NO: 717077 - DNA, 19 bp, Mus musculus
  siRNA target sequence for 2310061K06Rik (NM_025533.1,149-167).
gagccgggacgctgtgaaa

SEQ ID NO: 717078 - DNA, 19 bp, Mus musculus
  siRNA target sequence for 2310061K06Rik (NM_025533.1,151-169).
gccgggacgctgtgaaaga

SEQ ID NO: 717079 - DNA, 19 bp, Mus musculus
  siRNA target sequence for 2310061K06Rik (NM_025533.1,153-171).
cgggacgctgtgaaagact

SEQ ID NO: 717080 - DNA, 19 bp, Mus musculus
  siRNA target sequence for 2310061K06Rik (NM_025533.1,225-243).
gacggctacctgtatgaga

SEQ ID NO: 717081 - DNA, 19 bp, Mus musculus
  siRNA target sequence for 2310061K06Rik (NM_025533.1,693-711).
cgcagtgagcgctacgttt

SEQ ID NO: 717082 - DNA, 19 bp, Mus musculus
  siRNA target sequence for 2310043N13Rik (NM_025534.1,948-966).
cagaattctctttgtaagt

SEQ ID NO: 717083 - DNA, 19 bp, Mus musculus
  siRNA target sequence for 2310043N13Rik (NM_025534.1,982-1000).
gtttctgccttgttcaaat

SEQ ID NO: 717084 - DNA, 19 bp, Mus musculus
  siRNA target sequence for 2310043N13Rik (NM_025534.1,988-1006).
gccttgttcaaatcattat

SEQ ID NO: 717085 - DNA, 19 bp, Mus musculus
  siRNA target sequence for D15Ertd81e (NM_025536.1,123-141).
ctgcggctccatacttaca

SEQ ID NO: 717086 - DNA, 19 bp, Mus musculus
  siRNA target sequence for D15Ertd81e (NM_025536.1,221-239).
ctcttgaaggacttagaca

SEQ ID NO: 717087 - DNA, 19 bp, Mus musculus
  siRNA target sequence for D15Ertd81e (NM_025536.1,243-261).
gcaccttcagaaagttgtt

SEQ ID NO: 717088 - DNA, 19 bp, Mus musculus
  siRNA target sequence for D15Ertd81e (NM_025536.1,278-296).
gccctccatgggaaagact

SEQ ID NO: 717089 - DNA, 19 bp, Mus musculus
  siRNA target sequence for D15Ertd81e (NM_025536.1,452-470).
cttggcattccccaagata

SEQ ID NO: 717090 - DNA, 19 bp, Mus musculus
  siRNA target sequence for D15Ertd81e (NM_025536.1,455-473).
ggcattccccaagatatga

SEQ ID NO: 717091 - DNA, 19 bp, Mus musculus
  siRNA target sequence for D15Ertd81e (NM_025536.1,456-474).
gcattccccaagatatgat

SEQ ID NO: 717092 - DNA, 19 bp, Mus musculus
  siRNA target sequence for D15Ertd81e (NM_025536.1,457-475).
cattccccaagatatgatt

SEQ ID NO: 717093 - DNA, 19 bp, Mus musculus
  siRNA target sequence for D15Ertd81e (NM_025536.1,551-569).
ctgcctcgtgtgtcgaatt

SEQ ID NO: 717094 - DNA, 19 bp, Mus musculus
  siRNA target sequence for 2310045B01Rik (NM_025538.1,31-49).
ctagcgatgcggttgcttt

SEQ ID NO: 717095 - DNA, 19 bp, Mus musculus
  siRNA target sequence for 2310045B01Rik (NM_025538.1,349-367).
gaacctcggggctacatca

SEQ ID NO: 717096 - DNA, 19 bp, Mus musculus
  siRNA target sequence for 2310045B01Rik (NM_025538.1,390-408).
gttctgtggatctaccatt

SEQ ID NO: 717097 - DNA, 19 bp, Mus musculus
  siRNA target sequence for 2310045B01Rik (NM_025538.1,420-438).
cctgttgtctccaagtgtt

SEQ ID NO: 717098 - DNA, 19 bp, Mus musculus
  siRNA target sequence for 2310045B01Rik (NM_025538.1,496-514).
gggtctctctatatcttaa

SEQ ID NO: 717099 - DNA, 19 bp, Mus musculus
  siRNA target sequence for 2310045B01Rik (NM_025538.1,515-533).
ggggttcagcccgatatga

SEQ ID NO: 717100 - DNA, 19 bp, Mus musculus
  siRNA target sequence for 2310045B01Rik (NM_025538.1,517-535).
ggttcagcccgatatgact

SEQ ID NO: 717101 - DNA, 19 bp, Mus musculus
  siRNA target sequence for 2310045B01Rik (NM_025538.1,549-567).
ccttagagatgaagaatca

SEQ ID NO: 717102 - DNA, 19 bp, Mus musculus
  siRNA target sequence for 2310045B01Rik (NM_025538.1,597-615).
ccgacgcatctcagtgatt

SEQ ID NO: 717103 - DNA, 19 bp, Mus musculus
  siRNA target sequence for 2310045B01Rik (NM_025538.1,598-616).
cgacgcatctcagtgattt

SEQ ID NO: 717104 - DNA, 19 bp, Mus musculus
  siRNA target sequence for Nudt2 (NM_025539.1,51-69).
gcatgtggcttgatcatct

SEQ ID NO: 717105 - DNA, 19 bp, Mus musculus
  siRNA target sequence for Nudt2 (NM_025539.1,52-70).
catgtggcttgatcatctt

SEQ ID NO: 717106 - DNA, 19 bp, Mus musculus
  siRNA target sequence for Nudt2 (NM_025539.1,128-146).
ggcatcagacggcattcat

SEQ ID NO: 717107 - DNA, 19 bp, Mus musculus
  siRNA target sequence for Nudt2 (NM_025539.1,176-194).
cccaggagagaatgactta

SEQ ID NO: 717108 - DNA, 19 bp, Mus musculus
  siRNA target sequence for Nudt2 (NM_025539.1,241-259).
gccaactgaccatcattga

SEQ ID NO: 717109 - DNA, 19 bp, Mus musculus
  siRNA target sequence for Nudt2 (NM_025539.1,268-286).
gaagggagctcaattacgt

SEQ ID NO: 717110 - DNA, 19 bp, Mus musculus
  siRNA target sequence for Nudt2 (NM_025539.1,300-318).
cctaaaacggtcatttact

SEQ ID NO: 717111 - DNA, 19 bp, Mus musculus
  siRNA target sequence for Nudt2 (NM_025539.1,447-465).
gaaggacaccagtttctct

SEQ ID NO: 717112 - DNA, 19 bp, Mus musculus
  siRNA target sequence for Asf1a (NM_025541.2,281-299).
gacttggagtggaaaataa

SEQ ID NO: 717113 - DNA, 19 bp, Mus musculus
  siRNA target sequence for Asf1a (NM_025541.2,286-304).
ggagtggaaaataatctat

SEQ ID NO: 717114 - DNA, 19 bp, Mus musculus
  siRNA target sequence for Asf1a (NM_025541.2,315-333).
cagaaagtgaagaatacga

SEQ ID NO: 717115 - DNA, 19 bp, Mus musculus
  siRNA target sequence for Asf1a (NM_025541.2,321-339).
gtgaagaatacgatcaagt

SEQ ID NO: 717116 - DNA, 19 bp, Mus musculus
  siRNA target sequence for Asf1a (NM_025541.2,323-341).
gaagaatacgatcaagttt

SEQ ID NO: 717117 - DNA, 19 bp, Mus musculus
  siRNA target sequence for Asf1a (NM_025541.2,444-462).
gggtaacagttgttctgat

SEQ ID NO: 717118 - DNA, 19 bp, Mus musculus
  siRNA target sequence for Asf1a (NM_025541.2,445-463).
ggtaacagttgttctgatt

SEQ ID NO: 717119 - DNA, 19 bp, Mus musculus
  siRNA target sequence for Asf1a (NM_025541.2,446-464).
gtaacagttgttctgatta

SEQ ID NO: 717120 - DNA, 19 bp, Mus musculus
  siRNA target sequence for Asf1a (NM_025541.2,471-489).
cctaccgaggtcaagaatt

SEQ ID NO: 717121 - DNA, 19 bp, Mus musculus
  siRNA target sequence for Asf1a (NM_025541.2,472-490).
ctaccgaggtcaagaattt

SEQ ID NO: 717122 - DNA, 19 bp, Mus musculus
  siRNA target sequence for Asf1a (NM_025541.2,475-493).
ccgaggtcaagaatttatt

SEQ ID NO: 717123 - DNA, 19 bp, Mus musculus
  siRNA target sequence for Asf1a (NM_025541.2,476-494).
cgaggtcaagaatttatta

SEQ ID NO: 717124 - DNA, 19 bp, Mus musculus
  siRNA target sequence for Asf1a (NM_025541.2,497-515).
gttggctactatgtaaata

SEQ ID NO: 717125 - DNA, 19 bp, Mus musculus
  siRNA target sequence for Asf1a (NM_025541.2,570-588).
ctaagcttcaaaggaatat

SEQ ID NO: 717126 - DNA, 19 bp, Mus musculus
  siRNA target sequence for Asf1a (NM_025541.2,664-682).
gagcagtaacccaaatcta

SEQ ID NO: 717127 - DNA, 19 bp, Mus musculus
  siRNA target sequence for Asf1a (NM_025541.2,680-698).
ctacagtcccttctttcaa

SEQ ID NO: 717128 - DNA, 19 bp, Mus musculus
  siRNA target sequence for Asf1a (NM_025541.2,726-744).
gatggtccacgtcagaaaa

SEQ ID NO: 717129 - DNA, 19 bp, Mus musculus
  siRNA target sequence for Asf1a (NM_025541.2,747-765).
cactcaatgttatgttaga

SEQ ID NO: 717130 - DNA, 19 bp, Mus musculus
  siRNA target sequence for Asf1a (NM_025541.2,749-767).
ctcaatgttatgttagaat

SEQ ID NO: 717131 - DNA, 19 bp, Mus musculus
  siRNA target sequence for 2410001C21Rik (NM_025542.1,727-745).
gccgggtaccacacaagat

SEQ ID NO: 717132 - DNA, 19 bp, Mus musculus
  siRNA target sequence for 2410001C21Rik (NM_025542.1,728-746).
ccgggtaccacacaagatt

SEQ ID NO: 717133 - DNA, 19 bp, Mus musculus
  siRNA target sequence for 2410001C21Rik (NM_025542.1,747-765).
ccgcagggccatcaaaagt

SEQ ID NO: 717134 - DNA, 19 bp, Mus musculus
  siRNA target sequence for 2410001C21Rik (NM_025542.1,850-868).
gagtgcgtctgggaaagtt

SEQ ID NO: 717135 - DNA, 19 bp, Mus musculus
  siRNA target sequence for 2410001C21Rik (NM_025542.1,912-930).
gcgaggagtctgaaaccta

SEQ ID NO: 717136 - DNA, 19 bp, Mus musculus
  siRNA target sequence for 2410001C21Rik (NM_025542.1,917-935).
gagtctgaaacctacaagt

SEQ ID NO: 717137 - DNA, 19 bp, Mus musculus
  siRNA target sequence for 2410001C21Rik (NM_025542.1,923-941).
gaaacctacaagtctatct

SEQ ID NO: 717138 - DNA, 19 bp, Mus musculus
  siRNA target sequence for 2400002F11Rik (NM_025543.1,163-181).
ctgcatccaactgaaaact

SEQ ID NO: 717139 - DNA, 19 bp, Mus musculus
  siRNA target sequence for 2400002F11Rik (NM_025543.1,232-250).
cgagccgtggcttaatcaa

SEQ ID NO: 717140 - DNA, 19 bp, Mus musculus
  siRNA target sequence for 2400002F11Rik (NM_025543.1,266-284).
gatcccgtcaaaatagtga

SEQ ID NO: 717141 - DNA, 19 bp, Mus musculus
  siRNA target sequence for 2400002F11Rik (NM_025543.1,363-381).
caacgctaagactacttca

SEQ ID NO: 717142 - DNA, 19 bp, Mus musculus
  siRNA target sequence for 2400002F11Rik (NM_025543.1,366-384).
cgctaagactacttcacaa

SEQ ID NO: 717143 - DNA, 19 bp, Mus musculus
  siRNA target sequence for 2400002F11Rik (NM_025543.1,493-511).
ctacactgctgcagtagat

SEQ ID NO: 717144 - DNA, 19 bp, Mus musculus
  siRNA target sequence for Aptx (NM_025545.2,234-252).
caggcaccagcgaatcaaa

SEQ ID NO: 717145 - DNA, 19 bp, Mus musculus
  siRNA target sequence for Aptx (NM_025545.2,236-254).
ggcaccagcgaatcaaact

SEQ ID NO: 717146 - DNA, 19 bp, Mus musculus
  siRNA target sequence for Aptx (NM_025545.2,320-338).
cccgacagcaagtacagtt

SEQ ID NO: 717147 - DNA, 19 bp, Mus musculus
  siRNA target sequence for Aptx (NM_025545.2,323-341).
gacagcaagtacagttgaa

SEQ ID NO: 717148 - DNA, 19 bp, Mus musculus
  siRNA target sequence for Aptx (NM_025545.2,354-372).
caagggatatgtcaaagta

SEQ ID NO: 717149 - DNA, 19 bp, Mus musculus
  siRNA target sequence for Aptx (NM_025545.2,462-480).
catggtgaatggactttat

SEQ ID NO: 717150 - DNA, 19 bp, Mus musculus
  siRNA target sequence for Aptx (NM_025545.2,465-483).
ggtgaatggactttatcca

SEQ ID NO: 717151 - DNA, 19 bp, Mus musculus
  siRNA target sequence for Aptx (NM_025545.2,466-484).
gtgaatggactttatccat

SEQ ID NO: 717152 - DNA, 19 bp, Mus musculus
  siRNA target sequence for Aptx (NM_025545.2,482-500).
catacatcgtagagtttga

SEQ ID NO: 717153 - DNA, 19 bp, Mus musculus
  siRNA target sequence for Aptx (NM_025545.2,507-525).
ggcagagagccctaaccta

SEQ ID NO: 717154 - DNA, 19 bp, Mus musculus
  siRNA target sequence for Aptx (NM_025545.2,508-526).
gcagagagccctaacctaa

SEQ ID NO: 717155 - DNA, 19 bp, Mus musculus
  siRNA target sequence for Aptx (NM_025545.2,796-814).
ccgtgggcctccatttcca

SEQ ID NO: 717156 - DNA, 19 bp, Mus musculus
  siRNA target sequence for Aptx (NM_025545.2,945-963).
catgagccacgtacatctt

SEQ ID NO: 717157 - DNA, 19 bp, Mus musculus
  siRNA target sequence for Aptx (NM_025545.2,948-966).
gagccacgtacatcttcat

SEQ ID NO: 717158 - DNA, 19 bp, Mus musculus
  siRNA target sequence for Aptx (NM_025545.2,950-968).
gccacgtacatcttcatgt

SEQ ID NO: 717159 - DNA, 19 bp, Mus musculus
  siRNA target sequence for Aptx (NM_025545.2,972-990).
cagccaggattttgattct

SEQ ID NO: 717160 - DNA, 19 bp, Mus musculus
  siRNA target sequence for Aptx (NM_025545.2,1079-1097).
ccggcagagtgactgttaa

SEQ ID NO: 717161 - DNA, 19 bp, Mus musculus
  siRNA target sequence for Aptx (NM_025545.2,1080-1098).
cggcagagtgactgttaaa

SEQ ID NO: 717162 - DNA, 19 bp, Mus musculus
  siRNA target sequence for Aptx (NM_025545.2,1103-1121).
gcacttgtgagctcttgaa

SEQ ID NO: 717163 - DNA, 19 bp, Mus musculus
  siRNA target sequence for 2410017I18Rik (NM_025547.1,182-200).
gacggttcaactcagttaa

SEQ ID NO: 717164 - DNA, 19 bp, Mus musculus
  siRNA target sequence for 2410017I18Rik (NM_025547.1,184-202).
cggttcaactcagttaagt

SEQ ID NO: 717165 - DNA, 19 bp, Mus musculus
  siRNA target sequence for 2410017I18Rik (NM_025547.1,185-203).
ggttcaactcagttaagtt

SEQ ID NO: 717166 - DNA, 19 bp, Mus musculus
  siRNA target sequence for 2410017I18Rik (NM_025547.1,201-219).
gttgactagcttcattaaa

SEQ ID NO: 717167 - DNA, 19 bp, Mus musculus
  siRNA target sequence for 2410017I18Rik (NM_025547.1,345-363).
gttctggaatcgtttccat

SEQ ID NO: 717168 - DNA, 19 bp, Mus musculus
  siRNA target sequence for 2410017I18Rik (NM_025547.1,372-390).
cacaaataggacaaagagt

SEQ ID NO: 717169 - DNA, 19 bp, Mus musculus
  siRNA target sequence for 2410017I18Rik (NM_025547.1,432-450).
ggagaggatacttagtctt

SEQ ID NO: 717170 - DNA, 19 bp, Mus musculus
  siRNA target sequence for 2410017I18Rik (NM_025547.1,438-456).
gatacttagtcttgaatca

SEQ ID NO: 717171 - DNA, 19 bp, Mus musculus
  siRNA target sequence for 2410017I18Rik (NM_025547.1,490-508).
ccattgtctccgttacagt

SEQ ID NO: 717172 - DNA, 19 bp, Mus musculus
  siRNA target sequence for 2410017I18Rik (NM_025547.1,566-584).
ccttcacacttgcagatta

SEQ ID NO: 717173 - DNA, 19 bp, Mus musculus
  siRNA target sequence for 2410017I18Rik (NM_025547.1,570-588).
cacacttgcagattacgta

SEQ ID NO: 717174 - DNA, 19 bp, Mus musculus
  siRNA target sequence for 2410017I18Rik (NM_025547.1,621-639).
gcttggagtggatttgtct

SEQ ID NO: 717175 - DNA, 19 bp, Mus musculus
  siRNA target sequence for 2410017I18Rik (NM_025547.1,622-640).
cttggagtggatttgtcta

SEQ ID NO: 717176 - DNA, 19 bp, Mus musculus
  siRNA target sequence for 2410017I18Rik (NM_025547.1,625-643).
ggagtggatttgtctaaga

SEQ ID NO: 717177 - DNA, 19 bp, Mus musculus
  siRNA target sequence for 2410017I18Rik (NM_025547.1,626-644).
gagtggatttgtctaagat

SEQ ID NO: 717178 - DNA, 19 bp, Mus musculus
  siRNA target sequence for 2410017I18Rik (NM_025547.1,672-690).
ccttctaaggctggatttt

SEQ ID NO: 717179 - DNA, 19 bp, Mus musculus
  siRNA target sequence for 2410017I18Rik (NM_025547.1,691-709).
gaaaagcacattaagcaaa

SEQ ID NO: 717180 - DNA, 19 bp, Mus musculus
  siRNA target sequence for 2410017I18Rik (NM_025547.1,727-745).
gatttgggtttagaagata

SEQ ID NO: 717181 - DNA, 19 bp, Mus musculus
  siRNA target sequence for 2410017I18Rik (NM_025547.1,765-783).
gacaaaaaattatgctatt

SEQ ID NO: 717182 - DNA, 19 bp, Mus musculus
  siRNA target sequence for 2410017I18Rik (NM_025547.1,810-828).
gaccagagtagcttatcta

SEQ ID NO: 717183 - DNA, 19 bp, Mus musculus
  siRNA target sequence for 2410017I18Rik (NM_025547.1,867-885).
ggtcaaaaatgcaccattt

SEQ ID NO: 717184 - DNA, 19 bp, Mus musculus
  siRNA target sequence for 2410017I18Rik (NM_025547.1,897-915).
ctccgtggaaagactagat

SEQ ID NO: 717185 - DNA, 19 bp, Mus musculus
  siRNA target sequence for 2410017I18Rik (NM_025547.1,899-917).
ccgtggaaagactagataa

SEQ ID NO: 717186 - DNA, 19 bp, Mus musculus
  siRNA target sequence for 2410017I18Rik (NM_025547.1,1101-1119).
gatgctaactgcaaacaaa

SEQ ID NO: 717187 - DNA, 19 bp, Mus musculus
  siRNA target sequence for 2410017I18Rik (NM_025547.1,1147-1165).
gtacacaatgtgatgaata

SEQ ID NO: 717188 - DNA, 19 bp, Mus musculus
  siRNA target sequence for 2410017I18Rik (NM_025547.1,1182-1200).
cgtcaagtttccacagtta

SEQ ID NO: 717189 - DNA, 19 bp, Mus musculus
  siRNA target sequence for 2410017I18Rik (NM_025547.1,1183-1201).
gtcaagtttccacagttat

SEQ ID NO: 717190 - DNA, 19 bp, Mus musculus
  siRNA target sequence for 2410017I18Rik (NM_025547.1,1185-1203).
caagtttccacagttattt

SEQ ID NO: 717191 - DNA, 19 bp, Mus musculus
  siRNA target sequence for 2410017I18Rik (NM_025547.1,1266-1284).
gtatgacccagcaaaacct

SEQ ID NO: 717192 - DNA, 19 bp, Mus musculus
  siRNA target sequence for 2410017I18Rik (NM_025547.1,1302-1320).
caagttcgtatcttttcct

SEQ ID NO: 717193 - DNA, 19 bp, Mus musculus
  siRNA target sequence for 2410017I18Rik (NM_025547.1,1346-1364).
ccaaagcttcactaaatga

SEQ ID NO: 717194 - DNA, 19 bp, Mus musculus
  siRNA target sequence for 2410017I18Rik (NM_025547.1,1352-1370).
cttcactaaatgattttga

SEQ ID NO: 717195 - DNA, 19 bp, Mus musculus
  siRNA target sequence for Ckap1 (NM_025548.1,118-136).
cccaccgtgatggttttca

SEQ ID NO: 717196 - DNA, 19 bp, Mus musculus
  siRNA target sequence for Ckap1 (NM_025548.1,119-137).
ccaccgtgatggttttcat

SEQ ID NO: 717197 - DNA, 19 bp, Mus musculus
  siRNA target sequence for Ckap1 (NM_025548.1,249-267).
ggaactggagctatatgga

SEQ ID NO: 717198 - DNA, 19 bp, Mus musculus
  siRNA target sequence for Ckap1 (NM_025548.1,266-284).
gagcagacgacaagttcta

SEQ ID NO: 717199 - DNA, 19 bp, Mus musculus
  siRNA target sequence for Ckap1 (NM_025548.1,369-387).
cgtccggctcggagagtat

SEQ ID NO: 717200 - DNA, 19 bp, Mus musculus
  siRNA target sequence for Ckap1 (NM_025548.1,452-470).
cagttcgatccttcatgaa

SEQ ID NO: 717201 - DNA, 19 bp, Mus musculus
  siRNA target sequence for Ckap1 (NM_025548.1,477-495).
caagctaggcccgtacaat

SEQ ID NO: 717202 - DNA, 19 bp, Mus musculus
  siRNA target sequence for Ckap1 (NM_025548.1,480-498).
gctaggcccgtacaatgaa

SEQ ID NO: 717203 - DNA, 19 bp, Mus musculus
  siRNA target sequence for Ckap1 (NM_025548.1,485-503).
gcccgtacaatgaagaact

SEQ ID NO: 717204 - DNA, 19 bp, Mus musculus
  siRNA target sequence for Ckap1 (NM_025548.1,668-686).
gggttggtgtccgatatga

SEQ ID NO: 717205 - DNA, 19 bp, Mus musculus
  siRNA target sequence for Ckap1 (NM_025548.1,669-687).
ggttggtgtccgatatgat

SEQ ID NO: 717206 - DNA, 19 bp, Mus musculus
  siRNA target sequence for Ckap1 (NM_025548.1,690-708).
gccgttaggaaaaaacgat

SEQ ID NO: 717207 - DNA, 19 bp, Mus musculus
  siRNA target sequence for Ckap1 (NM_025548.1,776-794).
ctgtcaccgtaggagattt

SEQ ID NO: 717208 - DNA, 19 bp, Mus musculus
  siRNA target sequence for 2410004B18Rik (NM_025555.1,86-104).
ccgactcgtcggatgagaa

SEQ ID NO: 717209 - DNA, 19 bp, Mus musculus
  siRNA target sequence for 2410004B18Rik (NM_025555.1,298-316).
cctccaaaggagttcaaga

SEQ ID NO: 717210 - DNA, 19 bp, Mus musculus
  siRNA target sequence for 2410004B18Rik (NM_025555.1,384-402).
gctggacatggcgatcaaa

SEQ ID NO: 717211 - DNA, 19 bp, Mus musculus
  siRNA target sequence for 2410004B18Rik (NM_025555.1,385-403).
ctggacatggcgatcaaat

SEQ ID NO: 717212 - DNA, 19 bp, Mus musculus
  siRNA target sequence for 2410004B18Rik (NM_025555.1,388-406).
gacatggcgatcaaatggt

SEQ ID NO: 717213 - DNA, 19 bp, Mus musculus
  siRNA target sequence for 2410004B18Rik (NM_025555.1,394-412).
gcgatcaaatggtcgaata

SEQ ID NO: 717214 - DNA, 19 bp, Mus musculus
  siRNA target sequence for 2410004B18Rik (NM_025555.1,395-413).
cgatcaaatggtcgaatat

SEQ ID NO: 717215 - DNA, 19 bp, Mus musculus
  siRNA target sequence for 2410004B18Rik (NM_025555.1,404-422).
ggtcgaatatctatgaaga

SEQ ID NO: 717216 - DNA, 19 bp, Mus musculus
  siRNA target sequence for 2410004B18Rik (NM_025555.1,508-526).
gatgagcgggcatctaaga

SEQ ID NO: 717217 - DNA, 19 bp, Mus musculus
  siRNA target sequence for 2410022L05Rik (NM_025556.1,321-339).
gaacaggctgcagatcttt

SEQ ID NO: 717218 - DNA, 19 bp, Mus musculus
  siRNA target sequence for 2410022L05Rik (NM_025556.1,370-388).
cagaccaaggaaatcctta

SEQ ID NO: 717219 - DNA, 19 bp, Mus musculus
  siRNA target sequence for 2410022L05Rik (NM_025556.1,450-468).
ccacagggagacatgatat

SEQ ID NO: 717220 - DNA, 19 bp, Mus musculus
  siRNA target sequence for 2410022L05Rik (NM_025556.1,485-503).
ccatccacctccactcata

SEQ ID NO: 717221 - DNA, 19 bp, Mus musculus
  siRNA target sequence for 1810044O22Rik (NM_025558.2,176-194).
cacgggcgagtctacgata

SEQ ID NO: 717222 - DNA, 19 bp, Mus musculus
  siRNA target sequence for 1810044O22Rik (NM_025558.2,179-197).
gggcgagtctacgatatca

SEQ ID NO: 717223 - DNA, 19 bp, Mus musculus
  siRNA target sequence for 1810044O22Rik (NM_025558.2,337-355).
ccatccgagtgaccttaaa

SEQ ID NO: 717224 - DNA, 19 bp, Mus musculus
  siRNA target sequence for 1810044O22Rik (NM_025558.2,341-359).
ccgagtgaccttaaaccta

SEQ ID NO: 717225 - DNA, 19 bp, Mus musculus
  siRNA target sequence for 1810044O22Rik (NM_025558.2,342-360).
cgagtgaccttaaacctaa

SEQ ID NO: 717226 - DNA, 19 bp, Mus musculus
  siRNA target sequence for 1810044O22Rik (NM_025558.2,343-361).
gagtgaccttaaacctaaa

SEQ ID NO: 717227 - DNA, 19 bp, Mus musculus
  siRNA target sequence for 1810044O22Rik (NM_025558.2,373-391).
ggatccttccaagaacaat

SEQ ID NO: 717228 - DNA, 19 bp, Mus musculus
  siRNA target sequence for 1810044O22Rik (NM_025558.2,402-420).
gttcctgggcgtattggtt

SEQ ID NO: 717229 - DNA, 19 bp, Mus musculus
  siRNA target sequence for 1810044O22Rik (NM_025558.2,430-448).
cgtgggcgctattcttata

SEQ ID NO: 717230 - DNA, 19 bp, Mus musculus
  siRNA target sequence for 1810044O22Rik (NM_025558.2,433-451).
gggcgctattcttataggt

SEQ ID NO: 717231 - DNA, 19 bp, Mus musculus
  siRNA target sequence for 1810044O22Rik (NM_025558.2,434-452).
ggcgctattcttataggtt

SEQ ID NO: 717232 - DNA, 19 bp, Mus musculus
  siRNA target sequence for 1810044O22Rik (NM_025558.2,435-453).
gcgctattcttataggttt

SEQ ID NO: 717233 - DNA, 19 bp, Mus musculus
  siRNA target sequence for 1810044O22Rik (NM_025558.2,438-456).
ctattcttataggtttctt

SEQ ID NO: 717234 - DNA, 19 bp, Mus musculus
  siRNA target sequence for 1810046J19Rik (NM_025559.1,100-118).
cgtggtggagtactgtaaa

SEQ ID NO: 717235 - DNA, 19 bp, Mus musculus
  siRNA target sequence for 1810046J19Rik (NM_025559.1,170-188).
gagtatccgggcattgaga

SEQ ID NO: 717236 - DNA, 19 bp, Mus musculus
  siRNA target sequence for 1810046J19Rik (NM_025559.1,213-231).
gggccttcgagattgagat

SEQ ID NO: 717237 - DNA, 19 bp, Mus musculus
  siRNA target sequence for 1810046J19Rik (NM_025559.1,260-278).
gagaatggagggtttcctt

SEQ ID NO: 717238 - DNA, 19 bp, Mus musculus
  siRNA target sequence for 1810046J19Rik (NM_025559.1,262-280).
gaatggagggtttccttat

SEQ ID NO: 717239 - DNA, 19 bp, Mus musculus
  siRNA target sequence for 1810049H13Rik (NM_025560.1,250-268).
cagggaacgcaacatttct

SEQ ID NO: 717240 - DNA, 19 bp, Mus musculus
  siRNA target sequence for 1810049H13Rik (NM_025560.1,310-328).
ccagtgcaagtcactgata

SEQ ID NO: 717241 - DNA, 19 bp, Mus musculus
  siRNA target sequence for 1810049H13Rik (NM_025560.1,323-341).
ctgatagccgcagaaactt

SEQ ID NO: 717242 - DNA, 19 bp, Mus musculus
  siRNA target sequence for 1810049H13Rik (NM_025560.1,483-501).
gagtggctgccctaactgt

SEQ ID NO: 717243 - DNA, 19 bp, Mus musculus
  siRNA target sequence for Ttc11 (NM_025562.1,189-207).
gtccaagagcacgcaattt

SEQ ID NO: 717244 - DNA, 19 bp, Mus musculus
  siRNA target sequence for Ttc11 (NM_025562.1,219-237).
gtgcctggttcgaagcaaa

SEQ ID NO: 717245 - DNA, 19 bp, Mus musculus
  siRNA target sequence for Ttc11 (NM_025562.1,223-241).
ctggttcgaagcaaataca

SEQ ID NO: 717246 - DNA, 19 bp, Mus musculus
  siRNA target sequence for Ttc11 (NM_025562.1,304-322).
gaacagcgggactatgtct

SEQ ID NO: 717247 - DNA, 19 bp, Mus musculus
  siRNA target sequence for Ttc11 (NM_025562.1,342-360).
ctaccggctcaaggaatat

SEQ ID NO: 717248 - DNA, 19 bp, Mus musculus
  siRNA target sequence for Ttc11 (NM_025562.1,345-363).
ccggctcaaggaatatgaa

SEQ ID NO: 717249 - DNA, 19 bp, Mus musculus
  siRNA target sequence for Ttc11 (NM_025562.1,346-364).
cggctcaaggaatatgaaa

SEQ ID NO: 717250 - DNA, 19 bp, Mus musculus
  siRNA target sequence for Ttc11 (NM_025562.1,427-445).
ctggaacgcctgattgata

SEQ ID NO: 717251 - DNA, 19 bp, Mus musculus
  siRNA target sequence for 2010012O05Rik (NM_025563.2,119-137).
cctgtggcaccgatgtaat

SEQ ID NO: 717252 - DNA, 19 bp, Mus musculus
  siRNA target sequence for 2010012O05Rik (NM_025563.2,188-206).
ggcaggcagctcgaaacat

SEQ ID NO: 717253 - DNA, 19 bp, Mus musculus
  siRNA target sequence for 2010012O05Rik (NM_025563.2,217-235).
gaagatgccatcttacact

SEQ ID NO: 717254 - DNA, 19 bp, Mus musculus
  siRNA target sequence for 2010012O05Rik (NM_025563.2,228-246).
cttacactcggaagatagt

SEQ ID NO: 717255 - DNA, 19 bp, Mus musculus
  siRNA target sequence for 2010012O05Rik (NM_025563.2,232-250).
cactcggaagatagtttaa

SEQ ID NO: 717256 - DNA, 19 bp, Mus musculus
  siRNA target sequence for 2010012O05Rik (NM_025563.2,333-351).
ggaccagttgagtcactta

SEQ ID NO: 717257 - DNA, 19 bp, Mus musculus
  siRNA target sequence for 2600017H08Rik (NM_025565.1,161-179).
cagctctgtaagcagaata

SEQ ID NO: 717258 - DNA, 19 bp, Mus musculus
  siRNA target sequence for 2600017H08Rik (NM_025565.1,172-190).
gcagaataagctcattcaa

SEQ ID NO: 717259 - DNA, 19 bp, Mus musculus
  siRNA target sequence for 2600017H08Rik (NM_025565.1,175-193).
gaataagctcattcaagaa

SEQ ID NO: 717260 - DNA, 19 bp, Mus musculus
  siRNA target sequence for 2600017H08Rik (NM_025565.1,200-218).
gagaatgtgttgaagatga

SEQ ID NO: 717261 - DNA, 19 bp, Mus musculus
  siRNA target sequence for 2600017H08Rik (NM_025565.1,346-364).
gaaaggactgcagaaatca

SEQ ID NO: 717262 - DNA, 19 bp, Mus musculus
  siRNA target sequence for 2600017H08Rik (NM_025565.1,358-376).
gaaatcagcggatctgtat

SEQ ID NO: 717263 - DNA, 19 bp, Mus musculus
  siRNA target sequence for 2600017H08Rik (NM_025565.1,365-383).
gcggatctgtatagagatt

SEQ ID NO: 717264 - DNA, 19 bp, Mus musculus
  siRNA target sequence for 2600017H08Rik (NM_025565.1,366-384).
cggatctgtatagagatta

SEQ ID NO: 717265 - DNA, 19 bp, Mus musculus
  siRNA target sequence for 2600017H08Rik (NM_025565.1,402-420).
gaaagattcacggtaataa

SEQ ID NO: 717266 - DNA, 19 bp, Mus musculus
  siRNA target sequence for 2600017H08Rik (NM_025565.1,487-505).
cataaatgaagctaaggaa

SEQ ID NO: 717267 - DNA, 19 bp, Mus musculus
  siRNA target sequence for 2600017H08Rik (NM_025565.1,517-535).
cgacagttcgcctcatctt

SEQ ID NO: 717268 - DNA, 19 bp, Mus musculus
  siRNA target sequence for 2600017H08Rik (NM_025565.1,546-564).
cagaatttcaggagaaagt

SEQ ID NO: 717269 - DNA, 19 bp, Mus musculus
  siRNA target sequence for 2600017H08Rik (NM_025565.1,568-586).
gaagaccaacaatttttca

SEQ ID NO: 717270 - DNA, 19 bp, Mus musculus
  siRNA target sequence for 2600017H08Rik (NM_025565.1,605-623).
cggaaggcttttatagcta

SEQ ID NO: 717271 - DNA, 19 bp, Mus musculus
  siRNA target sequence for 2600017H08Rik (NM_025565.1,606-624).
ggaaggcttttatagctaa

SEQ ID NO: 717272 - DNA, 19 bp, Mus musculus
  siRNA target sequence for 2600017H08Rik (NM_025565.1,610-628).
ggcttttatagctaaggtt

SEQ ID NO: 717273 - DNA, 19 bp, Mus musculus
  siRNA target sequence for 2600017J23Rik (NM_025566.2,157-175).
gtgaggtcttggatgaact

SEQ ID NO: 717274 - DNA, 19 bp, Mus musculus
  siRNA target sequence for 2600017J23Rik (NM_025566.2,474-492).
cgcatcaatcacatcttca

SEQ ID NO: 717275 - DNA, 19 bp, Mus musculus
  siRNA target sequence for 2010110I09Rik (NM_025571.1,102-120).
gtacctggcccagatcatt

SEQ ID NO: 717276 - DNA, 19 bp, Mus musculus
  siRNA target sequence for 2610528J11Rik (NM_025572.1,180-198).
catctcaggggccatcaat

SEQ ID NO: 717277 - DNA, 19 bp, Mus musculus
  siRNA target sequence for 2610528J11Rik (NM_025572.1,381-399).
cccaccggtgggtgaagat

SEQ ID NO: 717278 - DNA, 19 bp, Mus musculus
  siRNA target sequence for 2610022G08Rik (NM_025574.2,248-266).
ccaagaagccgcttagata

SEQ ID NO: 717279 - DNA, 19 bp, Mus musculus
  siRNA target sequence for 2610022G08Rik (NM_025574.2,249-267).
caagaagccgcttagatat

SEQ ID NO: 717280 - DNA, 19 bp, Mus musculus
  siRNA target sequence for 2610022G08Rik (NM_025574.2,252-270).
gaagccgcttagatatgaa

SEQ ID NO: 717281 - DNA, 19 bp, Mus musculus
  siRNA target sequence for 2610022G08Rik (NM_025574.2,272-290).
catcgacaaatgaattggt

SEQ ID NO: 717282 - DNA, 19 bp, Mus musculus
  siRNA target sequence for 2610022G08Rik (NM_025574.2,275-293).
cgacaaatgaattggttaa

SEQ ID NO: 717283 - DNA, 19 bp, Mus musculus
  siRNA target sequence for 2610022G08Rik (NM_025574.2,325-343).
gatgggatccctaatatga

SEQ ID NO: 717284 - DNA, 19 bp, Mus musculus
  siRNA target sequence for 2610022G08Rik (NM_025574.2,356-374).
caaggaccacacgtcaaaa

SEQ ID NO: 717285 - DNA, 19 bp, Mus musculus
  siRNA target sequence for 2610042O14Rik (NM_025575.1,225-243).
gtgtgggacccgttgctaa

SEQ ID NO: 717286 - DNA, 19 bp, Mus musculus
  siRNA target sequence for 2610042O14Rik (NM_025575.1,229-247).
gggacccgttgctaatcct

SEQ ID NO: 717287 - DNA, 19 bp, Mus musculus
  siRNA target sequence for 2610042O14Rik (NM_025575.1,263-281).
catgcagaccgtctactat

SEQ ID NO: 717288 - DNA, 19 bp, Mus musculus
  siRNA target sequence for 2810428I15Rik (NM_025577.1,252-270).
ctgcctcgcgggaggtatt

SEQ ID NO: 717289 - DNA, 19 bp, Mus musculus
  siRNA target sequence for 2810428I15Rik (NM_025577.1,424-442).
gttgcaccagctgaaaata

SEQ ID NO: 717290 - DNA, 19 bp, Mus musculus
  siRNA target sequence for 2810433K01Rik (NM_025581.2,161-179).
gagctagaagacttatgct

SEQ ID NO: 717291 - DNA, 19 bp, Mus musculus
  siRNA target sequence for 2810433K01Rik (NM_025581.2,170-188).
gacttatgctcttatgtta

SEQ ID NO: 717292 - DNA, 19 bp, Mus musculus
  siRNA target sequence for 2810433K01Rik (NM_025581.2,211-229).
gaaaattctgtcgataaga

SEQ ID NO: 717293 - DNA, 19 bp, Mus musculus
  siRNA target sequence for 2810433K01Rik (NM_025581.2,253-271).
gaagaccaccttaagtaaa

SEQ ID NO: 717294 - DNA, 19 bp, Mus musculus
  siRNA target sequence for 2810433K01Rik (NM_025581.2,290-308).
gcagtaaatgagcttctaa

SEQ ID NO: 717295 - DNA, 19 bp, Mus musculus
  siRNA target sequence for 2810433K01Rik (NM_025581.2,302-320).
cttctaaataaatttgaat

SEQ ID NO: 717296 - DNA, 19 bp, Mus musculus
  siRNA target sequence for 2810433K01Rik (NM_025581.2,329-347).
cagtatcaagaacaaacta

SEQ ID NO: 717297 - DNA, 19 bp, Mus musculus
  siRNA target sequence for 2810433K01Rik (NM_025581.2,335-353).
caagaacaaactaacagtt

SEQ ID NO: 717298 - DNA, 19 bp, Mus musculus
  siRNA target sequence for 2810433K01Rik (NM_025581.2,362-380).
gagctctgtgaatctctta

SEQ ID NO: 717299 - DNA, 19 bp, Mus musculus
  siRNA target sequence for 2810433K01Rik (NM_025581.2,367-385).
ctgtgaatctcttagagaa

SEQ ID NO: 717300 - DNA, 19 bp, Mus musculus
  siRNA target sequence for 2810433K01Rik (NM_025581.2,450-468).
cccagagcttagttcacaa

SEQ ID NO: 717301 - DNA, 19 bp, Mus musculus
  siRNA target sequence for 2810433K01Rik (NM_025581.2,473-491).
gagccggatcctaaagagt

SEQ ID NO: 717302 - DNA, 19 bp, Mus musculus
  siRNA target sequence for 2810433K01Rik (NM_025581.2,550-568).
caaggaaatgcaatttata

SEQ ID NO: 717303 - DNA, 19 bp, Mus musculus
  siRNA target sequence for 2810433K01Rik (NM_025581.2,587-605).
gacgttcctgcgtacatga

SEQ ID NO: 717304 - DNA, 19 bp, Mus musculus
  siRNA target sequence for 2810433K01Rik (NM_025581.2,589-607).
cgttcctgcgtacatgaaa

SEQ ID NO: 717305 - DNA, 19 bp, Mus musculus
  siRNA target sequence for 2810433K01Rik (NM_025581.2,590-608).
gttcctgcgtacatgaaat

SEQ ID NO: 717306 - DNA, 19 bp, Mus musculus
  siRNA target sequence for 2810433K01Rik (NM_025581.2,609-627).
cccgtttaacatattgtca

SEQ ID NO: 717307 - DNA, 19 bp, Mus musculus
  siRNA target sequence for 2810433K01Rik (NM_025581.2,610-628).
ccgtttaacatattgtcaa

SEQ ID NO: 717308 - DNA, 19 bp, Mus musculus
  siRNA target sequence for 2810433K01Rik (NM_025581.2,611-629).
cgtttaacatattgtcaaa

SEQ ID NO: 717309 - DNA, 19 bp, Mus musculus
  siRNA target sequence for 2810433K01Rik (NM_025581.2,624-642).
gtcaaattaatgatattat

SEQ ID NO: 717310 - DNA, 19 bp, Mus musculus
  siRNA target sequence for 2810433K01Rik (NM_025581.2,655-673).
caaggcagtagttagcaaa

SEQ ID NO: 717311 - DNA, 19 bp, Mus musculus
  siRNA target sequence for 2810433K01Rik (NM_025581.2,658-676).
ggcagtagttagcaaatat

SEQ ID NO: 717312 - DNA, 19 bp, Mus musculus
  siRNA target sequence for 2810433K01Rik (NM_025581.2,659-677).
gcagtagttagcaaatata

SEQ ID NO: 717313 - DNA, 19 bp, Mus musculus
  siRNA target sequence for 2810433K01Rik (NM_025581.2,662-680).
gtagttagcaaatataaga

SEQ ID NO: 717314 - DNA, 19 bp, Mus musculus
  siRNA target sequence for 2810433K01Rik (NM_025581.2,669-687).
gcaaatataagattatgca

SEQ ID NO: 717315 - DNA, 19 bp, Mus musculus
  siRNA target sequence for 2810433K01Rik (NM_025581.2,670-688).
caaatataagattatgcat

SEQ ID NO: 717316 - DNA, 19 bp, Mus musculus
  siRNA target sequence for 2810433K01Rik (NM_025581.2,708-726).
gctctgtgaagagaaatct

SEQ ID NO: 717317 - DNA, 19 bp, Mus musculus
  siRNA target sequence for 2810433K01Rik (NM_025581.2,720-738).
gaaatctctaccagagatt

SEQ ID NO: 717318 - DNA, 19 bp, Mus musculus
  siRNA target sequence for 2810433K01Rik (NM_025581.2,725-743).
ctctaccagagatttatta

SEQ ID NO: 717319 - DNA, 19 bp, Mus musculus
  siRNA target sequence for 2810433K01Rik (NM_025581.2,727-745).
ctaccagagatttattaat

SEQ ID NO: 717320 - DNA, 19 bp, Mus musculus
  siRNA target sequence for 2810433K01Rik (NM_025581.2,762-780).
cgaaaggtcatcacttcat

SEQ ID NO: 717321 - DNA, 19 bp, Mus musculus
  siRNA target sequence for 2810433K01Rik (NM_025581.2,778-796).
catcgtggaagctgacata

SEQ ID NO: 717322 - DNA, 19 bp, Mus musculus
  siRNA target sequence for 2810433K01Rik (NM_025581.2,799-817).
ggaattcacggctttgaaa

SEQ ID NO: 717323 - DNA, 19 bp, Mus musculus
  siRNA target sequence for 2810433K01Rik (NM_025581.2,807-825).
cggctttgaaagttgacaa

SEQ ID NO: 717324 - DNA, 19 bp, Mus musculus
  siRNA target sequence for 2810433K01Rik (NM_025581.2,821-839).
gacaagaggttttatgtga

SEQ ID NO: 717325 - DNA, 19 bp, Mus musculus
  siRNA target sequence for 2810405K02Rik (NM_025582.2,316-334).
cttgatgagagcaagcaaa

SEQ ID NO: 717326 - DNA, 19 bp, Mus musculus
  siRNA target sequence for 2810405K02Rik (NM_025582.2,319-337).
gatgagagcaagcaaatct

SEQ ID NO: 717327 - DNA, 19 bp, Mus musculus
  siRNA target sequence for 2810405K02Rik (NM_025582.2,322-340).
gagagcaagcaaatctata

SEQ ID NO: 717328 - DNA, 19 bp, Mus musculus
  siRNA target sequence for 2810405K02Rik (NM_025582.2,358-376).
cggtacaacagcttaagca

SEQ ID NO: 717329 - DNA, 19 bp, Mus musculus
  siRNA target sequence for 2810405K02Rik (NM_025582.2,359-377).
ggtacaacagcttaagcat

SEQ ID NO: 717330 - DNA, 19 bp, Mus musculus
  siRNA target sequence for 2810405K02Rik (NM_025582.2,500-518).
gtggcgacaaggtactgtt

SEQ ID NO: 717331 - DNA, 19 bp, Mus musculus
  siRNA target sequence for 1700029F12Rik (NM_025585.1,130-148).
catcagggcatgataagga

SEQ ID NO: 717332 - DNA, 19 bp, Mus musculus
  siRNA target sequence for 1700029F12Rik (NM_025585.1,237-255).
gcctgtagccactgctata

SEQ ID NO: 717333 - DNA, 19 bp, Mus musculus
  siRNA target sequence for 1700029F12Rik (NM_025585.1,239-257).
ctgtagccactgctatact

SEQ ID NO: 717334 - DNA, 19 bp, Mus musculus
  siRNA target sequence for 1700029F12Rik (NM_025585.1,273-291).
gctgacacctgccatcatt

SEQ ID NO: 717335 - DNA, 19 bp, Mus musculus
  siRNA target sequence for 1700029F12Rik (NM_025585.1,358-376).
cagacttctaccacgatta

SEQ ID NO: 717336 - DNA, 19 bp, Mus musculus
  siRNA target sequence for 1700029F12Rik (NM_025585.1,418-436).
ctgatgctaatgtttacca

SEQ ID NO: 717337 - DNA, 19 bp, Mus musculus
  siRNA target sequence for 2410030I24Rik (NM_025588.2,107-125).
ccggcagcccccacttgta

SEQ ID NO: 717338 - DNA, 19 bp, Mus musculus
  siRNA target sequence for 2410030I24Rik (NM_025588.2,127-145).
caggcatctctccaaatga

SEQ ID NO: 717339 - DNA, 19 bp, Mus musculus
  siRNA target sequence for 2410030I24Rik (NM_025588.2,134-152).
ctctccaaatgaaggaata

SEQ ID NO: 717340 - DNA, 19 bp, Mus musculus
  siRNA target sequence for 2410030I24Rik (NM_025588.2,209-227).
cataggcttgacaatttgt

SEQ ID NO: 717341 - DNA, 19 bp, Mus musculus
  siRNA target sequence for 2410030I24Rik (NM_025588.2,283-301).
gagtgggacaagccaaaaa

SEQ ID NO: 717342 - DNA, 19 bp, Mus musculus
  siRNA target sequence for 2410030I24Rik (NM_025588.2,288-306).
ggacaagccaaaaatgaca

SEQ ID NO: 717343 - DNA, 19 bp, Mus musculus
  siRNA target sequence for 2410030I24Rik (NM_025588.2,289-307).
gacaagccaaaaatgacaa

SEQ ID NO: 717344 - DNA, 19 bp, Mus musculus
  siRNA target sequence for 2410030I24Rik (NM_025588.2,312-330).
gacattattgtcacaacta

SEQ ID NO: 717345 - DNA, 19 bp, Mus musculus
  siRNA target sequence for 2410030I24Rik (NM_025588.2,368-386).
gctactcaagcctgaaaaa

SEQ ID NO: 717346 - DNA, 19 bp, Mus musculus
  siRNA target sequence for 2410030I24Rik (NM_025588.2,423-441).
gaaatgaattattatgata

SEQ ID NO: 717347 - DNA, 19 bp, Mus musculus
  siRNA target sequence for 2410030I24Rik (NM_025588.2,443-461).
gcggactgacaggaacaaa

SEQ ID NO: 717348 - DNA, 19 bp, Mus musculus
  siRNA target sequence for 2410030I24Rik (NM_025588.2,501-519).
ggcattgaaattgagaaat

SEQ ID NO: 717349 - DNA, 19 bp, Mus musculus
  siRNA target sequence for 2410030I24Rik (NM_025588.2,533-551).
gaagaacttagaagtgtta

SEQ ID NO: 717350 - DNA, 19 bp, Mus musculus
  siRNA target sequence for 2410030I24Rik (NM_025588.2,558-576).
ggcatgagtgctgatttta

SEQ ID NO: 717351 - DNA, 19 bp, Mus musculus
  siRNA target sequence for 2410030I24Rik (NM_025588.2,597-615).
gcctggtatctcatagaga

SEQ ID NO: 717352 - DNA, 19 bp, Mus musculus
  siRNA target sequence for 2410030I24Rik (NM_025588.2,599-617).
ctggtatctcatagagaat

SEQ ID NO: 717353 - DNA, 19 bp, Mus musculus
  siRNA target sequence for 2410030I24Rik (NM_025588.2,601-619).
ggtatctcatagagaatca

SEQ ID NO: 717354 - DNA, 19 bp, Mus musculus
  siRNA target sequence for 2410030I24Rik (NM_025588.2,651-669).
gcggtcaccaacctcaaaa

SEQ ID NO: 717355 - DNA, 19 bp, Mus musculus
  siRNA target sequence for 2410030I24Rik (NM_025588.2,821-839).
ggagaatgtcctcaataga

SEQ ID NO: 717356 - DNA, 19 bp, Mus musculus
  siRNA target sequence for 2410030I24Rik (NM_025588.2,844-862).
gtaacaccgctgacacatt

SEQ ID NO: 717357 - DNA, 19 bp, Mus musculus
  siRNA target sequence for 2410030I24Rik (NM_025588.2,857-875).
cacattgttccaagaagta

SEQ ID NO: 717358 - DNA, 19 bp, Mus musculus
  siRNA target sequence for 2410030I24Rik (NM_025588.2,859-877).
cattgttccaagaagtatt

SEQ ID NO: 717359 - DNA, 19 bp, Mus musculus
  siRNA target sequence for 2410030I24Rik (NM_025588.2,873-891).
gtattaggtcggaaagaca

SEQ ID NO: 717360 - DNA, 19 bp, Mus musculus
  siRNA target sequence for 2410030I24Rik (NM_025588.2,920-938).
cgtacttcagcgatttaaa

SEQ ID NO: 717361 - DNA, 19 bp, Mus musculus
  siRNA target sequence for 2410030I24Rik (NM_025588.2,921-939).
gtacttcagcgatttaaat

SEQ ID NO: 717362 - DNA, 19 bp, Mus musculus
  siRNA target sequence for 2410030I24Rik (NM_025588.2,950-968).
ccttcctctcaatattaaa

SEQ ID NO: 717363 - DNA, 19 bp, Mus musculus
  siRNA target sequence for 2410030I24Rik (NM_025588.2,959-977).
caatattaaacggaatatt

SEQ ID NO: 717364 - DNA, 19 bp, Mus musculus
  siRNA target sequence for 2410030I24Rik (NM_025588.2,984-1002).
ggggattatgatgtagtta

SEQ ID NO: 717365 - DNA, 19 bp, Mus musculus
  siRNA target sequence for 2410030I24Rik (NM_025588.2,985-1003).
gggattatgatgtagttat

SEQ ID NO: 717366 - DNA, 19 bp, Mus musculus
  siRNA target sequence for 2410030I24Rik (NM_025588.2,986-1004).
ggattatgatgtagttatt

SEQ ID NO: 717367 - DNA, 19 bp, Mus musculus
  siRNA target sequence for 2410030I24Rik (NM_025588.2,987-1005).
gattatgatgtagttatta

SEQ ID NO: 717368 - DNA, 19 bp, Mus musculus
  siRNA target sequence for 2410030I24Rik (NM_025588.2,999-1017).
gttattaatgattatgaaa

SEQ ID NO: 717369 - DNA, 19 bp, Mus musculus
  siRNA target sequence for 2410030I24Rik (NM_025588.2,1044-1062).
gaggtgcaagttttcaaga

SEQ ID NO: 717370 - DNA, 19 bp, Mus musculus
  siRNA target sequence for 2410030I24Rik (NM_025588.2,1047-1065).
gtgcaagttttcaagaaat

SEQ ID NO: 717371 - DNA, 19 bp, Mus musculus
  siRNA target sequence for 2410030I24Rik (NM_025588.2,1102-1120).
gagagttacttctaaagaa

SEQ ID NO: 717372 - DNA, 19 bp, Mus musculus
  siRNA target sequence for 2410030I24Rik (NM_025588.2,1127-1145).
cgagactccatcaacctta

SEQ ID NO: 717373 - DNA, 19 bp, Mus musculus
  siRNA target sequence for 2410030I24Rik (NM_025588.2,1149-1167).
gaccagaagcgctacataa

SEQ ID NO: 717374 - DNA, 19 bp, Mus musculus
  siRNA target sequence for 2410030I24Rik (NM_025588.2,1154-1172).
gaagcgctacataaggtat

SEQ ID NO: 717375 - DNA, 19 bp, Mus musculus
  siRNA target sequence for 2410030I24Rik (NM_025588.2,1157-1175).
gcgctacataaggtatctt

SEQ ID NO: 717376 - DNA, 19 bp, Mus musculus
  siRNA target sequence for 2410030I24Rik (NM_025588.2,1158-1176).
cgctacataaggtatcttt

SEQ ID NO: 717377 - DNA, 19 bp, Mus musculus
  siRNA target sequence for 2410030I24Rik (NM_025588.2,1271-1289).
catgaagagcctaaaaggt

SEQ ID NO: 717378 - DNA, 19 bp, Mus musculus
  siRNA target sequence for 2410030I24Rik (NM_025588.2,1309-1327).
ccatgctcgacctagacaa

SEQ ID NO: 717379 - DNA, 19 bp, Mus musculus
  siRNA target sequence for 2410030I24Rik (NM_025588.2,1407-1425).
gatgacacatggaggtata

SEQ ID NO: 717380 - DNA, 19 bp, Mus musculus
  siRNA target sequence for 2410030I24Rik (NM_025588.2,1412-1430).
cacatggaggtataagact

SEQ ID NO: 717381 - DNA, 19 bp, Mus musculus
  siRNA target sequence for 2410030I24Rik (NM_025588.2,1433-1451).
ccacagagtggcatttgtt

SEQ ID NO: 717382 - DNA, 19 bp, Mus musculus
  siRNA target sequence for 2410030I24Rik (NM_025588.2,1496-1514).
gaaactctggatttcatat

SEQ ID NO: 717383 - DNA, 19 bp, Mus musculus
  siRNA target sequence for 2410030I24Rik (NM_025588.2,1500-1518).
ctctggatttcatatgtta

SEQ ID NO: 717384 - DNA, 19 bp, Mus musculus
  siRNA target sequence for 2410030I24Rik (NM_025588.2,1502-1520).
ctggatttcatatgttaat

SEQ ID NO: 717385 - DNA, 19 bp, Mus musculus
  siRNA target sequence for 2410030I24Rik (NM_025588.2,1555-1573).
gccagagtgaaagatcaaa

SEQ ID NO: 717386 - DNA, 19 bp, Mus musculus
  siRNA target sequence for 2410030I24Rik (NM_025588.2,1582-1600).
ggcagagacaaaacgattt

SEQ ID NO: 717387 - DNA, 19 bp, Mus musculus
  siRNA target sequence for 2410030I24Rik (NM_025588.2,1735-1753).
ggctcgcacacgttatcca

SEQ ID NO: 717388 - DNA, 19 bp, Mus musculus
  siRNA target sequence for 2410030I24Rik (NM_025588.2,1743-1761).
cacgttatccagaccataa

SEQ ID NO: 717389 - DNA, 19 bp, Mus musculus
  siRNA target sequence for 2410030I24Rik (NM_025588.2,1754-1772).
gaccataaggctaacatat

SEQ ID NO: 717390 - DNA, 19 bp, Mus musculus
  siRNA target sequence for 2410030I24Rik (NM_025588.2,1756-1774).
ccataaggctaacatatga

SEQ ID NO: 717391 - DNA, 19 bp, Mus musculus
  siRNA target sequence for 2410030I24Rik (NM_025588.2,1757-1775).
cataaggctaacatatgaa

SEQ ID NO: 717392 - DNA, 19 bp, Mus musculus
  siRNA target sequence for 2410030I24Rik (NM_025588.2,1762-1780).
ggctaacatatgaatcact

SEQ ID NO: 717393 - DNA, 19 bp, Mus musculus
  siRNA target sequence for 2410030I24Rik (NM_025588.2,1793-1811).
gattcccaatgacatgtta

SEQ ID NO: 717394 - DNA, 19 bp, Mus musculus
  siRNA target sequence for 2410030I24Rik (NM_025588.2,1814-1832).
gattatccaggacctaatt

SEQ ID NO: 717395 - DNA, 19 bp, Mus musculus
  siRNA target sequence for 2410030I24Rik (NM_025588.2,1849-1867).
gttgcataatggtgacatt

SEQ ID NO: 717396 - DNA, 19 bp, Mus musculus
  siRNA target sequence for 2410030I24Rik (NM_025588.2,1872-1890).
catacggccgaagagataa

SEQ ID NO: 717397 - DNA, 19 bp, Mus musculus
  siRNA target sequence for 2410030I24Rik (NM_025588.2,1877-1895).
ggccgaagagataaagaga

SEQ ID NO: 717398 - DNA, 19 bp, Mus musculus
  siRNA target sequence for 2410030I24Rik (NM_025588.2,1878-1896).
gccgaagagataaagagat

SEQ ID NO: 717399 - DNA, 19 bp, Mus musculus
  siRNA target sequence for 2410030I24Rik (NM_025588.2,1879-1897).
ccgaagagataaagagatt

SEQ ID NO: 717400 - DNA, 19 bp, Mus musculus
  siRNA target sequence for 2410030I24Rik (NM_025588.2,1943-1961).
cctaccatgtcagtttgaa

SEQ ID NO: 717401 - DNA, 19 bp, Mus musculus
  siRNA target sequence for 2410030I24Rik (NM_025588.2,1994-2012).
gggtgttgtcgattgcaaa

SEQ ID NO: 717402 - DNA, 19 bp, Mus musculus
  siRNA target sequence for 2410030I24Rik (NM_025588.2,2064-2082).
cagttatgcatcaatatca

SEQ ID NO: 717403 - DNA, 19 bp, Mus musculus
  siRNA target sequence for 2410030I24Rik (NM_025588.2,2120-2138).
caagcctgatgcagacata

SEQ ID NO: 717404 - DNA, 19 bp, Mus musculus
  siRNA target sequence for 2410030I24Rik (NM_025588.2,2240-2258).
gagtaattgctgctattta

SEQ ID NO: 717405 - DNA, 19 bp, Mus musculus
  siRNA target sequence for 2410030I24Rik (NM_025588.2,2259-2277).
gaacgtcacaccttcctaa

SEQ ID NO: 717406 - DNA, 19 bp, Mus musculus
  siRNA target sequence for 2410030I24Rik (NM_025588.2,2262-2280).
cgtcacaccttcctaaaca

SEQ ID NO: 717407 - DNA, 19 bp, Mus musculus
  siRNA target sequence for 2410030I24Rik (NM_025588.2,2263-2281).
gtcacaccttcctaaacat

SEQ ID NO: 717408 - DNA, 19 bp, Mus musculus
  siRNA target sequence for 2410030I24Rik (NM_025588.2,2273-2291).
cctaaacatagcagaacat

SEQ ID NO: 717409 - DNA, 19 bp, Mus musculus
  siRNA target sequence for 2410030I24Rik (NM_025588.2,2274-2292).
ctaaacatagcagaacatt

SEQ ID NO: 717410 - DNA, 19 bp, Mus musculus
  siRNA target sequence for 2410030I24Rik (NM_025588.2,2279-2297).
catagcagaacattttgaa

SEQ ID NO: 717411 - DNA, 19 bp, Mus musculus
  siRNA target sequence for 2410030I24Rik (NM_025588.2,2360-2378).
ggatcaacgactctttgaa

SEQ ID NO: 717412 - DNA, 19 bp, Mus musculus
  siRNA target sequence for 2410030I24Rik (NM_025588.2,2361-2379).
gatcaacgactctttgaaa

SEQ ID NO: 717413 - DNA, 19 bp, Mus musculus
  siRNA target sequence for 2410030I24Rik (NM_025588.2,2364-2382).
caacgactctttgaaaatt

SEQ ID NO: 717414 - DNA, 19 bp, Mus musculus
  siRNA target sequence for 2410030I24Rik (NM_025588.2,2367-2385).
cgactctttgaaaattaca

SEQ ID NO: 717415 - DNA, 19 bp, Mus musculus
  siRNA target sequence for 2410030I24Rik (NM_025588.2,2405-2423).
cattgttggatccttagaa

SEQ ID NO: 717416 - DNA, 19 bp, Mus musculus
  siRNA target sequence for 2410030I24Rik (NM_025588.2,2429-2447).
gatctacgcaggctacttt

SEQ ID NO: 717417 - DNA, 19 bp, Mus musculus
  siRNA target sequence for 2410030I24Rik (NM_025588.2,2437-2455).
caggctactttgattggaa

SEQ ID NO: 717418 - DNA, 19 bp, Mus musculus
  siRNA target sequence for 2410030I24Rik (NM_025588.2,2470-2488).
cggcaggtgtcagaaacta

SEQ ID NO: 717419 - DNA, 19 bp, Mus musculus
  siRNA target sequence for 2410030I24Rik (NM_025588.2,2471-2489).
ggcaggtgtcagaaactat

SEQ ID NO: 717420 - DNA, 19 bp, Mus musculus
  siRNA target sequence for 2410030I24Rik (NM_025588.2,2472-2490).
gcaggtgtcagaaactatt

SEQ ID NO: 717421 - DNA, 19 bp, Mus musculus
  siRNA target sequence for 2410030I24Rik (NM_025588.2,2473-2491).
caggtgtcagaaactattt

SEQ ID NO: 717422 - DNA, 19 bp, Mus musculus
  siRNA target sequence for 2410030I24Rik (NM_025588.2,2475-2493).
ggtgtcagaaactatttaa

SEQ ID NO: 717423 - DNA, 19 bp, Mus musculus
  siRNA target sequence for 2410030I24Rik (NM_025588.2,2518-2536).
ctgtgcatgcagaggtatt

SEQ ID NO: 717424 - DNA, 19 bp, Mus musculus
  siRNA target sequence for 2410030I24Rik (NM_025588.2,2520-2538).
gtgcatgcagaggtattca

SEQ ID NO: 717425 - DNA, 19 bp, Mus musculus
  siRNA target sequence for 2410030I24Rik (NM_025588.2,2522-2540).
gcatgcagaggtattcact

SEQ ID NO: 717426 - DNA, 19 bp, Mus musculus
  siRNA target sequence for 2410030I24Rik (NM_025588.2,2680-2698).
gggacactgtagccattta

SEQ ID NO: 717427 - DNA, 19 bp, Mus musculus
  siRNA target sequence for 2410030I24Rik (NM_025588.2,2707-2725).
cggaaagcaggtctagttt

SEQ ID NO: 717428 - DNA, 19 bp, Mus musculus
  siRNA target sequence for 2410030I24Rik (NM_025588.2,2757-2775).
gcaagtggtgcggacaaaa

SEQ ID NO: 717429 - DNA, 19 bp, Mus musculus
  siRNA target sequence for 2610510D14Rik (NM_025594.2,25-43).
gtctggcagcgggacaaaa

SEQ ID NO: 717430 - DNA, 19 bp, Mus musculus
  siRNA target sequence for 2610510D14Rik (NM_025594.2,27-45).
ctggcagcgggacaaaaaa

SEQ ID NO: 717431 - DNA, 19 bp, Mus musculus
  siRNA target sequence for 2610510D14Rik (NM_025594.2,29-47).
ggcagcgggacaaaaaact

SEQ ID NO: 717432 - DNA, 19 bp, Mus musculus
  siRNA target sequence for 2610510D14Rik (NM_025594.2,30-48).
gcagcgggacaaaaaactt

SEQ ID NO: 717433 - DNA, 19 bp, Mus musculus
  siRNA target sequence for 2610510D14Rik (NM_025594.2,58-76).
ccgaaagtgggacaaagat

SEQ ID NO: 717434 - DNA, 19 bp, Mus musculus
  siRNA target sequence for 2610510D14Rik (NM_025594.2,203-221).
ctggggaagacgattgtta

SEQ ID NO: 717435 - DNA, 19 bp, Mus musculus
  siRNA target sequence for 2610510D14Rik (NM_025594.2,206-224).
gggaagacgattgttatca

SEQ ID NO: 717436 - DNA, 19 bp, Mus musculus
  siRNA target sequence for 2610510D14Rik (NM_025594.2,231-249).
cgaccccacagtctgaaat

SEQ ID NO: 717437 - DNA, 19 bp, Mus musculus
  siRNA target sequence for 2610510D14Rik (NM_025594.2,254-272).
ggctactactgcaatgtct

SEQ ID NO: 717438 - DNA, 19 bp, Mus musculus
  siRNA target sequence for 2610510D14Rik (NM_025594.2,369-387).
ccactctggatcaggtaaa

SEQ ID NO: 717439 - DNA, 19 bp, Mus musculus
  siRNA target sequence for 2610510D14Rik (NM_025594.2,392-410).
cgttttgaggtgaacaaga

SEQ ID NO: 717440 - DNA, 19 bp, Mus musculus
  siRNA target sequence for 2610510D14Rik (NM_025594.2,484-502).
ggctaaagcatacaaaaaa

SEQ ID NO: 717441 - DNA, 19 bp, Mus musculus
  siRNA target sequence for 2610510D14Rik (NM_025594.2,486-504).
ctaaagcatacaaaaaaga

SEQ ID NO: 717442 - DNA, 19 bp, Mus musculus
  siRNA target sequence for 2610510D14Rik (NM_025594.2,531-549).
ccgaggaggacttgacttt

SEQ ID NO: 717443 - DNA, 19 bp, Mus musculus
  siRNA target sequence for 2610510D14Rik (NM_025594.2,532-550).
cgaggaggacttgactttt

SEQ ID NO: 717444 - DNA, 19 bp, Mus musculus
  siRNA target sequence for 2610524G07Rik (NM_025596.3,1776-1794).
cctatagcaaacatgtctt

SEQ ID NO: 717445 - DNA, 19 bp, Mus musculus
  siRNA target sequence for 2610524G07Rik (NM_025596.3,1777-1795).
ctatagcaaacatgtctta

SEQ ID NO: 717446 - DNA, 19 bp, Mus musculus
  siRNA target sequence for Ndufb3 (NM_025597.1,116-134).
gacatggccatggtaaaat

SEQ ID NO: 717447 - DNA, 19 bp, Mus musculus
  siRNA target sequence for Ndufb3 (NM_025597.1,166-184).
gaagggacgccattagaaa

SEQ ID NO: 717448 - DNA, 19 bp, Mus musculus
  siRNA target sequence for Ndufb3 (NM_025597.1,278-296).
ccttcccgagtgtaatatt

SEQ ID NO: 717449 - DNA, 19 bp, Mus musculus
  siRNA target sequence for Ndufb3 (NM_025597.1,279-297).
cttcccgagtgtaatatta

SEQ ID NO: 717450 - DNA, 19 bp, Mus musculus
  siRNA target sequence for Ndufb3 (NM_025597.1,282-300).
cccgagtgtaatattaaaa

SEQ ID NO: 717451 - DNA, 19 bp, Mus musculus
  siRNA target sequence for 2700038C09Rik (NM_025598.1,278-296).
ggctacccatgactactat

SEQ ID NO: 717452 - DNA, 19 bp, Mus musculus
  siRNA target sequence for 2610528E23Rik (NM_025599.1,400-418).
ctgatcagagaccattaca

SEQ ID NO: 717453 - DNA, 19 bp, Mus musculus
  siRNA target sequence for 2610528E23Rik (NM_025599.1,422-440).
gcagccgttccgtgataga

SEQ ID NO: 717454 - DNA, 19 bp, Mus musculus
  siRNA target sequence for 2610528E23Rik (NM_025599.1,423-441).
cagccgttccgtgatagaa

SEQ ID NO: 717455 - DNA, 19 bp, Mus musculus
  siRNA target sequence for 2610528E23Rik (NM_025599.1,425-443).
gccgttccgtgatagaatt

SEQ ID NO: 717456 - DNA, 19 bp, Mus musculus
  siRNA target sequence for 2610528E23Rik (NM_025599.1,426-444).
ccgttccgtgatagaatta

SEQ ID NO: 717457 - DNA, 19 bp, Mus musculus
  siRNA target sequence for 2610528E23Rik (NM_025599.1,428-446).
gttccgtgatagaattaga

SEQ ID NO: 717458 - DNA, 19 bp, Mus musculus
  siRNA target sequence for 2610528E23Rik (NM_025599.1,431-449).
ccgtgatagaattagaaga

SEQ ID NO: 717459 - DNA, 19 bp, Mus musculus
  siRNA target sequence for 2610528E23Rik (NM_025599.1,475-493).
ctcaaggccaatgatttga

SEQ ID NO: 717460 - DNA, 19 bp, Mus musculus
  siRNA target sequence for 2610528E23Rik (NM_025599.1,627-645).
gtctctgacagcattcaaa

SEQ ID NO: 717461 - DNA, 19 bp, Mus musculus
  siRNA target sequence for 2610528E23Rik (NM_025599.1,649-667).
gatgccaaagttatgaaat

SEQ ID NO: 717462 - DNA, 19 bp, Mus musculus
  siRNA target sequence for 2610528E23Rik (NM_025599.1,739-757).
gggactccggggagaatca

SEQ ID NO: 717463 - DNA, 19 bp, Mus musculus
  siRNA target sequence for 2610528E23Rik (NM_025599.1,740-758).
ggactccggggagaatcaa

SEQ ID NO: 717464 - DNA, 19 bp, Mus musculus
  siRNA target sequence for 2610528E23Rik (NM_025599.1,746-764).
cggggagaatcaaagaact

SEQ ID NO: 717465 - DNA, 19 bp, Mus musculus
  siRNA target sequence for 2610528E23Rik (NM_025599.1,752-770).
gaatcaaagaacttgtcaa

SEQ ID NO: 717466 - DNA, 19 bp, Mus musculus
  siRNA target sequence for 2610528E23Rik (NM_025599.1,772-790).
caagatggcctccatttga

SEQ ID NO: 717467 - DNA, 19 bp, Mus musculus
  siRNA target sequence for 2610528E23Rik (NM_025599.1,852-870).
ggacattcccgagataaga

SEQ ID NO: 717468 - DNA, 19 bp, Mus musculus
  siRNA target sequence for 2610528E23Rik (NM_025599.1,876-894).
ggttttcgagcttctagat

SEQ ID NO: 717469 - DNA, 19 bp, Mus musculus
  siRNA target sequence for 2610528E23Rik (NM_025599.1,877-895).
gttttcgagcttctagata

SEQ ID NO: 717470 - DNA, 19 bp, Mus musculus
  siRNA target sequence for 1700029H14Rik (NM_025601.1,358-376).
ggacctcaagtgtgcaaaa

SEQ ID NO: 717471 - DNA, 19 bp, Mus musculus
  siRNA target sequence for 1700029H14Rik (NM_025601.1,432-450).
cctgcaaaggacgatgtat

SEQ ID NO: 717472 - DNA, 19 bp, Mus musculus
  siRNA target sequence for 1700029H14Rik (NM_025601.1,436-454).
caaaggacgatgtatctct

SEQ ID NO: 717473 - DNA, 19 bp, Mus musculus
  siRNA target sequence for 1700029H14Rik (NM_025601.1,487-505).
gctggatcaccttctagaa

SEQ ID NO: 717474 - DNA, 19 bp, Mus musculus
  siRNA target sequence for 1700029H14Rik (NM_025601.1,565-583).
catcacctgtgccatcaaa

SEQ ID NO: 717475 - DNA, 19 bp, Mus musculus
  siRNA target sequence for 1700029H14Rik (NM_025601.1,589-607).
gaagaggctccccaacata

SEQ ID NO: 717476 - DNA, 19 bp, Mus musculus
  siRNA target sequence for 1700029H14Rik (NM_025601.1,656-674).
ccgtaccacacaaagaaga

SEQ ID NO: 717477 - DNA, 19 bp, Mus musculus
  siRNA target sequence for D10Ertd718e (NM_025602.1,86-104).
ggatctctcaggtcagatt

SEQ ID NO: 717478 - DNA, 19 bp, Mus musculus
  siRNA target sequence for D10Ertd718e (NM_025602.1,177-195).
gggacaaggttttgcattt

SEQ ID NO: 717479 - DNA, 19 bp, Mus musculus
  siRNA target sequence for D10Ertd718e (NM_025602.1,190-208).
gcatttcggagaaaactga

SEQ ID NO: 717480 - DNA, 19 bp, Mus musculus
  siRNA target sequence for D10Ertd718e (NM_025602.1,272-290).
cccagttcacagatcgtta

SEQ ID NO: 717481 - DNA, 19 bp, Mus musculus
  siRNA target sequence for D10Ertd718e (NM_025602.1,569-587).
gtgctgctaagaaatttga

SEQ ID NO: 717482 - DNA, 19 bp, Mus musculus
  siRNA target sequence for D10Ertd718e (NM_025602.1,619-637).
gctcaaaggctctacaaaa

SEQ ID NO: 717483 - DNA, 19 bp, Mus musculus
  siRNA target sequence for D10Ertd718e (NM_025602.1,620-638).
ctcaaaggctctacaaaaa

SEQ ID NO: 717484 - DNA, 19 bp, Mus musculus
  siRNA target sequence for D10Ertd718e (NM_025602.1,685-703).
ggccagcctaacctgaatt

SEQ ID NO: 717485 - DNA, 19 bp, Mus musculus
  siRNA target sequence for D10Ertd718e (NM_025602.1,686-704).
gccagcctaacctgaattt

SEQ ID NO: 717486 - DNA, 19 bp, Mus musculus
  siRNA target sequence for 2500002L14Rik (NM_025607.2,573-591).
gaggtgtggtgcagataat

SEQ ID NO: 717487 - DNA, 19 bp, Mus musculus
  siRNA target sequence for 2500002L14Rik (NM_025607.2,608-626).
gccatggttctcatatgca

SEQ ID NO: 717488 - DNA, 19 bp, Mus musculus
  siRNA target sequence for 2500002L14Rik (NM_025607.2,624-642).
gcatcgtggcttcctattt

SEQ ID NO: 717489 - DNA, 19 bp, Mus musculus
  siRNA target sequence for 2500002L14Rik (NM_025607.2,625-643).
catcgtggcttcctatttt

SEQ ID NO: 717490 - DNA, 19 bp, Mus musculus
  siRNA target sequence for 2500002L14Rik (NM_025607.2,677-695).
ggcagcggcttcggaaata

SEQ ID NO: 717491 - DNA, 19 bp, Mus musculus
  siRNA target sequence for 2500002L14Rik (NM_025607.2,678-696).
gcagcggcttcggaaataa

SEQ ID NO: 717492 - DNA, 19 bp, Mus musculus
  siRNA target sequence for 2500002L14Rik (NM_025607.2,681-699).
gcggcttcggaaataacta

SEQ ID NO: 717493 - DNA, 19 bp, Mus musculus
  siRNA target sequence for 2500002L14Rik (NM_025607.2,682-700).
cggcttcggaaataactat

SEQ ID NO: 717494 - DNA, 19 bp, Mus musculus
  siRNA target sequence for 2500002L14Rik (NM_025607.2,683-701).
ggcttcggaaataactatt

SEQ ID NO: 717495 - DNA, 19 bp, Mus musculus
  siRNA target sequence for 2500002L14Rik (NM_025607.2,684-702).
gcttcggaaataactatta

SEQ ID NO: 717496 - DNA, 19 bp, Mus musculus
  siRNA target sequence for 2500002L14Rik (NM_025607.2,817-835).
cctcactatgggcgtttta

SEQ ID NO: 717497 - DNA, 19 bp, Mus musculus
  siRNA target sequence for 2500002L14Rik (NM_025607.2,924-942).
gcgtcgccattggctttta

SEQ ID NO: 717498 - DNA, 19 bp, Mus musculus
  siRNA target sequence for 2500002L14Rik (NM_025607.2,950-968).
gcggcgttgcgcatcaatt

SEQ ID NO: 717499 - DNA, 19 bp, Mus musculus
  siRNA target sequence for 2500002L14Rik (NM_025607.2,953-971).
gcgttgcgcatcaattcca

SEQ ID NO: 717500 - DNA, 19 bp, Mus musculus
  siRNA target sequence for 2500002L14Rik (NM_025607.2,1013-1031).
ggcctcacctggatgaact

SEQ ID NO: 717501 - DNA, 19 bp, Mus musculus
  siRNA target sequence for 2500002L14Rik (NM_025607.2,1063-1081).
caccttcgcttgtcttcta

SEQ ID NO: 717502 - DNA, 19 bp, Mus musculus
  siRNA target sequence for 2500002L14Rik (NM_025607.2,1069-1087).
cgcttgtcttctagtgatt

SEQ ID NO: 717503 - DNA, 19 bp, Mus musculus
  siRNA target sequence for 2500002L14Rik (NM_025607.2,1165-1183).
cagaaattaccgtgatgtt

SEQ ID NO: 717504 - DNA, 19 bp, Mus musculus
  siRNA target sequence for Cri1 (NM_025613.1,299-317).
ggaaggcgacgagtttgat

SEQ ID NO: 717505 - DNA, 19 bp, Mus musculus
  siRNA target sequence for Cri1 (NM_025613.1,478-496).
ctttcgaccagctagcttt

SEQ ID NO: 717506 - DNA, 19 bp, Mus musculus
  siRNA target sequence for Cri1 (NM_025613.1,485-503).
ccagctagcttttatcgaa

SEQ ID NO: 717507 - DNA, 19 bp, Mus musculus
  siRNA target sequence for Cri1 (NM_025613.1,539-557).
cgaagagctcggttgtgat

SEQ ID NO: 717508 - DNA, 19 bp, Mus musculus
  siRNA target sequence for Rwdd1 (NM_025614.1,238-256).
cgactccttcacagtgtta

SEQ ID NO: 717509 - DNA, 19 bp, Mus musculus
  siRNA target sequence for Rwdd1 (NM_025614.1,484-502).
cctcgtgacagctgttcaa

SEQ ID NO: 717510 - DNA, 19 bp, Mus musculus
  siRNA target sequence for 2810004N23Rik (NM_025615.1,222-240).
ctgtacgaggccagaagaa

SEQ ID NO: 717511 - DNA, 19 bp, Mus musculus
  siRNA target sequence for 2810004N23Rik (NM_025615.1,224-242).
gtacgaggccagaagaaga

SEQ ID NO: 717512 - DNA, 19 bp, Mus musculus
  siRNA target sequence for 2810004N23Rik (NM_025615.1,522-540).
cgggctatggcaaaggaaa

SEQ ID NO: 717513 - DNA, 19 bp, Mus musculus
  siRNA target sequence for 2810004N23Rik (NM_025615.1,581-599).
gctaagcctcccaagaaca

SEQ ID NO: 717514 - DNA, 19 bp, Mus musculus
  siRNA target sequence for 2810004N23Rik (NM_025615.1,820-838).
ccccactgatatcaagaaa

SEQ ID NO: 717515 - DNA, 19 bp, Mus musculus
  siRNA target sequence for 2810004N23Rik (NM_025615.1,821-839).
cccactgatatcaagaaaa

SEQ ID NO: 717516 - DNA, 19 bp, Mus musculus
  siRNA target sequence for 2810004N23Rik (NM_025615.1,822-840).
ccactgatatcaagaaaat

SEQ ID NO: 717517 - DNA, 19 bp, Mus musculus
  siRNA target sequence for 2810403L02Rik (NM_025616.1,115-133).
cccgagcaggtcactgaaa

SEQ ID NO: 717518 - DNA, 19 bp, Mus musculus
  siRNA target sequence for 2810403L02Rik (NM_025616.1,117-135).
cgagcaggtcactgaaatt

SEQ ID NO: 717519 - DNA, 19 bp, Mus musculus
  siRNA target sequence for 2810403L02Rik (NM_025616.1,191-209).
gtcccagctatgccaaaaa

SEQ ID NO: 717520 - DNA, 19 bp, Mus musculus
  siRNA target sequence for 2810403L02Rik (NM_025616.1,251-269).
ctgtcagcatcgtctatat

SEQ ID NO: 717521 - DNA, 19 bp, Mus musculus
  siRNA target sequence for 2810403L02Rik (NM_025616.1,253-271).
gtcagcatcgtctatattt

SEQ ID NO: 717522 - DNA, 19 bp, Mus musculus
  siRNA target sequence for 2810403L02Rik (NM_025616.1,255-273).
cagcatcgtctatattttt

SEQ ID NO: 717523 - DNA, 19 bp, Mus musculus
  siRNA target sequence for 2810403L02Rik (NM_025616.1,355-373).
cggacatacaaatacttca

SEQ ID NO: 717524 - DNA, 19 bp, Mus musculus
  siRNA target sequence for 2810403L02Rik (NM_025616.1,359-377).
catacaaatacttcaaaga

SEQ ID NO: 717525 - DNA, 19 bp, Mus musculus
  siRNA target sequence for 2810403L02Rik (NM_025616.1,441-459).
ctactaccagccaccttat

SEQ ID NO: 717526 - DNA, 19 bp, Mus musculus
  siRNA target sequence for 2810403L02Rik (NM_025616.1,444-462).
ctaccagccaccttataca

SEQ ID NO: 717527 - DNA, 19 bp, Mus musculus
  siRNA target sequence for 2810403L02Rik (NM_025616.1,572-590).
ctctgtatgaaatagtcat

SEQ ID NO: 717528 - DNA, 19 bp, Mus musculus
  siRNA target sequence for 2810403L02Rik (NM_025616.1,612-630).
gactgcatttccactcatt

SEQ ID NO: 717529 - DNA, 19 bp, Mus musculus
  siRNA target sequence for 2810403L02Rik (NM_025616.1,672-690).
ccgggacgccaccagatat

SEQ ID NO: 717530 - DNA, 19 bp, Mus musculus
  siRNA target sequence for 2810403L02Rik (NM_025616.1,673-691).
cgggacgccaccagatata

SEQ ID NO: 717531 - DNA, 19 bp, Mus musculus
  siRNA target sequence for 2810403L02Rik (NM_025616.1,674-692).
gggacgccaccagatatat

SEQ ID NO: 717532 - DNA, 19 bp, Mus musculus
  siRNA target sequence for 2810403L02Rik (NM_025616.1,711-729).
ggacatctcctgtctgaat

SEQ ID NO: 717533 - DNA, 19 bp, Mus musculus
  siRNA target sequence for 2810403L02Rik (NM_025616.1,732-750).
ggacccagcccgagtagta

SEQ ID NO: 717534 - DNA, 19 bp, Mus musculus
  siRNA target sequence for 2210012G02Rik (NM_025617.1,180-198).
ctcggagaaaaggtttaca

SEQ ID NO: 717535 - DNA, 19 bp, Mus musculus
  siRNA target sequence for 2210012G02Rik (NM_025617.1,224-242).
gagagttgtggttatagaa

SEQ ID NO: 717536 - DNA, 19 bp, Mus musculus
  siRNA target sequence for 2210012G02Rik (NM_025617.1,234-252).
gttatagaagacataaaaa

SEQ ID NO: 717537 - DNA, 19 bp, Mus musculus
  siRNA target sequence for 2210012G02Rik (NM_025617.1,272-290).
gcttcctgatcaaaccaaa

SEQ ID NO: 717538 - DNA, 19 bp, Mus musculus
  siRNA target sequence for 2210012G02Rik (NM_025617.1,276-294).
cctgatcaaaccaaagaaa

SEQ ID NO: 717539 - DNA, 19 bp, Mus musculus
  siRNA target sequence for 2210012G02Rik (NM_025617.1,467-485).
ggacagaccttctattgaa

SEQ ID NO: 717540 - DNA, 19 bp, Mus musculus
  siRNA target sequence for 2210012G02Rik (NM_025617.1,486-504).
gtccggagcgatccaaaaa

SEQ ID NO: 717541 - DNA, 19 bp, Mus musculus
  siRNA target sequence for 2210012G02Rik (NM_025617.1,488-506).
ccggagcgatccaaaaact

SEQ ID NO: 717542 - DNA, 19 bp, Mus musculus
  siRNA target sequence for 2210012G02Rik (NM_025617.1,490-508).
ggagcgatccaaaaactga

SEQ ID NO: 717543 - DNA, 19 bp, Mus musculus
  siRNA target sequence for 2210012G02Rik (NM_025617.1,527-545).
ccagaaattactttcagaa

SEQ ID NO: 717544 - DNA, 19 bp, Mus musculus
  siRNA target sequence for 2210012G02Rik (NM_025617.1,564-582).
gatcacctactggttgaaa

SEQ ID NO: 717545 - DNA, 19 bp, Mus musculus
  siRNA target sequence for 2210012G02Rik (NM_025617.1,606-624).
ctctgctcccggctcatta

SEQ ID NO: 717546 - DNA, 19 bp, Mus musculus
  siRNA target sequence for 2210012G02Rik (NM_025617.1,648-666).
cgcgctctggtcttcacat

SEQ ID NO: 717547 - DNA, 19 bp, Mus musculus
  siRNA target sequence for 2210012G02Rik (NM_025617.1,649-667).
gcgctctggtcttcacatt

SEQ ID NO: 717548 - DNA, 19 bp, Mus musculus
  siRNA target sequence for 2210012G02Rik (NM_025617.1,650-668).
cgctctggtcttcacatta

SEQ ID NO: 717549 - DNA, 19 bp, Mus musculus
  siRNA target sequence for 2210012G02Rik (NM_025617.1,713-731).
gccggtcggcacgtttgta

SEQ ID NO: 717550 - DNA, 19 bp, Mus musculus
  siRNA target sequence for 2210012G02Rik (NM_025617.1,715-733).
cggtcggcacgtttgtaca

SEQ ID NO: 717551 - DNA, 19 bp, Mus musculus
  siRNA target sequence for 2210417D09Rik (NM_025620.1,196-214).
gtggtcagtgcggctattt

SEQ ID NO: 717552 - DNA, 19 bp, Mus musculus
  siRNA target sequence for 2210417D09Rik (NM_025620.1,238-256).
gagtacctcgggtttgagt

SEQ ID NO: 717553 - DNA, 19 bp, Mus musculus
  siRNA target sequence for 2210417D09Rik (NM_025620.1,240-258).
gtacctcgggtttgagtat

SEQ ID NO: 717554 - DNA, 19 bp, Mus musculus
  siRNA target sequence for 2210417D09Rik (NM_025620.1,484-502).
cctctgacggacccaaaat

SEQ ID NO: 717555 - DNA, 19 bp, Mus musculus
  siRNA target sequence for 2210417D09Rik (NM_025620.1,582-600).
ggactgtctgggtctgttt

SEQ ID NO: 717556 - DNA, 19 bp, Mus musculus
  siRNA target sequence for 2210417D09Rik (NM_025620.1,583-601).
gactgtctgggtctgttta

SEQ ID NO: 717557 - DNA, 19 bp, Mus musculus
  siRNA target sequence for 2210417D09Rik (NM_025620.1,589-607).
ctgggtctgtttatcatct

SEQ ID NO: 717558 - DNA, 19 bp, Mus musculus
  siRNA target sequence for 2210417D09Rik (NM_025620.1,790-808).
gacatgggcagagtttaca

SEQ ID NO: 717559 - DNA, 19 bp, Mus musculus
  siRNA target sequence for 2700063N13Rik (NM_025623.1,113-131).
ctgacgcctcaggtatgtt

SEQ ID NO: 717560 - DNA, 19 bp, Mus musculus
  siRNA target sequence for 2700063N13Rik (NM_025623.1,115-133).
gacgcctcaggtatgttca

SEQ ID NO: 717561 - DNA, 19 bp, Mus musculus
  siRNA target sequence for 2700063N13Rik (NM_025623.1,144-162).
caggccccaggcaaagcaa

SEQ ID NO: 717562 - DNA, 19 bp, Mus musculus
  siRNA target sequence for 2700063N13Rik (NM_025623.1,299-317).
ggcagaacgaacagagttt

SEQ ID NO: 717563 - DNA, 19 bp, Mus musculus
  siRNA target sequence for 2700063N13Rik (NM_025623.1,300-318).
gcagaacgaacagagtttt

SEQ ID NO: 717564 - DNA, 19 bp, Mus musculus
  siRNA target sequence for 2700063N13Rik (NM_025623.1,303-321).
gaacgaacagagttttcca

SEQ ID NO: 717565 - DNA, 19 bp, Mus musculus
  siRNA target sequence for 2700063N13Rik (NM_025623.1,306-324).
cgaacagagttttccatat

SEQ ID NO: 717566 - DNA, 19 bp, Mus musculus
  siRNA target sequence for 2700063N13Rik (NM_025623.1,542-560).
ctgtggggtaatgcattta

SEQ ID NO: 717567 - DNA, 19 bp, Mus musculus
  siRNA target sequence for 2700063N13Rik (NM_025623.1,544-562).
gtggggtaatgcatttaaa

SEQ ID NO: 717568 - DNA, 19 bp, Mus musculus
  siRNA target sequence for 2700063N13Rik (NM_025623.1,586-604).
gcttggctactctacacta

SEQ ID NO: 717569 - DNA, 19 bp, Mus musculus
  siRNA target sequence for 2700063N13Rik (NM_025623.1,597-615).
ctacactagttggtgtttt

SEQ ID NO: 717570 - DNA, 19 bp, Mus musculus
  siRNA target sequence for 2700063N13Rik (NM_025623.1,755-773).
gagtcccagcagaatacgt

SEQ ID NO: 717571 - DNA, 19 bp, Mus musculus
  siRNA target sequence for 2510048O06Rik (NM_025624.1,281-299).
gtttgctcccctgaagtta

SEQ ID NO: 717572 - DNA, 19 bp, Mus musculus
  siRNA target sequence for 2510048O06Rik (NM_025624.1,386-404).
cgatgagaccattggtttt

SEQ ID NO: 717573 - DNA, 19 bp, Mus musculus
  siRNA target sequence for 2510048O06Rik (NM_025624.1,399-417).
ggttttgaggatattctta

SEQ ID NO: 717574 - DNA, 19 bp, Mus musculus
  siRNA target sequence for 2510048O06Rik (NM_025624.1,414-432).
cttaatgatccatcacaaa

SEQ ID NO: 717575 - DNA, 19 bp, Mus musculus
  siRNA target sequence for 2510048O06Rik (NM_025624.1,453-471).
cacgtgatggtggaacata

SEQ ID NO: 717576 - DNA, 19 bp, Mus musculus
  siRNA target sequence for 3110001A13Rik (NM_025626.3,464-482).
gaaatccgacctggaaata

SEQ ID NO: 717577 - DNA, 19 bp, Mus musculus
  siRNA target sequence for 3110001A13Rik (NM_025626.3,469-487).
ccgacctggaaatagaact

SEQ ID NO: 717578 - DNA, 19 bp, Mus musculus
  siRNA target sequence for 3110001A13Rik (NM_025626.3,470-488).
cgacctggaaatagaacta

SEQ ID NO: 717579 - DNA, 19 bp, Mus musculus
  siRNA target sequence for 3110001A13Rik (NM_025626.3,471-489).
gacctggaaatagaactat

SEQ ID NO: 717580 - DNA, 19 bp, Mus musculus
  siRNA target sequence for 3110001A13Rik (NM_025626.3,506-524).
gctggagcagcttgaactt

SEQ ID NO: 717581 - DNA, 19 bp, Mus musculus
  siRNA target sequence for 2010109H09Rik (NM_025629.1,211-229).
cttcactgcctcttggtaa

SEQ ID NO: 717582 - DNA, 19 bp, Mus musculus
  siRNA target sequence for 2010109H09Rik (NM_025629.1,286-304).
ctcctgagctgtgatttga

SEQ ID NO: 717583 - DNA, 19 bp, Mus musculus
  siRNA target sequence for 2010109H09Rik (NM_025629.1,412-430).
cttcccggagaggaacttt

SEQ ID NO: 717584 - DNA, 19 bp, Mus musculus
  siRNA target sequence for 2010109H09Rik (NM_025629.1,434-452).
ggggcgacagccatgaata

SEQ ID NO: 717585 - DNA, 19 bp, Mus musculus
  siRNA target sequence for 2010109H09Rik (NM_025629.1,870-888).
gaggggtgtccctttaaca

SEQ ID NO: 717586 - DNA, 19 bp, Mus musculus
  siRNA target sequence for 2510027J23Rik (NM_025637.1,75-93).
ccaacgagtgggagatgtt

SEQ ID NO: 717587 - DNA, 19 bp, Mus musculus
  siRNA target sequence for 2510027J23Rik (NM_025637.1,151-169).
cggcatccaccataagcat

SEQ ID NO: 717588 - DNA, 19 bp, Mus musculus
  siRNA target sequence for 2510027J23Rik (NM_025637.1,152-170).
ggcatccaccataagcatt

SEQ ID NO: 717589 - DNA, 19 bp, Mus musculus
  siRNA target sequence for 2510027J23Rik (NM_025637.1,157-175).
ccaccataagcatttgtgt

SEQ ID NO: 717590 - DNA, 19 bp, Mus musculus
  siRNA target sequence for 2510027J23Rik (NM_025637.1,161-179).
cataagcatttgtgtatca

SEQ ID NO: 717591 - DNA, 19 bp, Mus musculus
  siRNA target sequence for 2610019I03Rik (NM_025639.2,164-182).
cggagtcgatgctcaaaga

SEQ ID NO: 717592 - DNA, 19 bp, Mus musculus
  siRNA target sequence for 2610019I03Rik (NM_025639.2,165-183).
ggagtcgatgctcaaagat

SEQ ID NO: 717593 - DNA, 19 bp, Mus musculus
  siRNA target sequence for 2610019I03Rik (NM_025639.2,226-244).
cctctgccctccaatgtga

SEQ ID NO: 717594 - DNA, 19 bp, Mus musculus
  siRNA target sequence for 2610019I03Rik (NM_025639.2,251-269).
cccgaattgacctgattgt

SEQ ID NO: 717595 - DNA, 19 bp, Mus musculus
  siRNA target sequence for 2610019I03Rik (NM_025639.2,253-271).
cgaattgacctgattgtgt

SEQ ID NO: 717596 - DNA, 19 bp, Mus musculus
  siRNA target sequence for 2610019I03Rik (NM_025639.2,254-272).
gaattgacctgattgtgtt

SEQ ID NO: 717597 - DNA, 19 bp, Mus musculus
  siRNA target sequence for 2610019I03Rik (NM_025639.2,449-467).
cgctgctcctctgtgattt

SEQ ID NO: 717598 - DNA, 19 bp, Mus musculus
  siRNA target sequence for 0610009C03Rik (NM_025645.1,183-201).
ggaccgcccaggtgttctt

SEQ ID NO: 717599 - DNA, 19 bp, Mus musculus
  siRNA target sequence for 0610009C03Rik (NM_025645.1,202-220).
cccttcaagctccaatcat

SEQ ID NO: 717600 - DNA, 19 bp, Mus musculus
  siRNA target sequence for 0610009C03Rik (NM_025645.1,232-250).
gacatgagggggaagtgta

SEQ ID NO: 717601 - DNA, 19 bp, Mus musculus
  siRNA target sequence for 0610009C03Rik (NM_025645.1,295-313).
gatttgaccggctaatact

SEQ ID NO: 717602 - DNA, 19 bp, Mus musculus
  siRNA target sequence for 0610009C03Rik (NM_025645.1,380-398).
ggagctgcactataacaca

SEQ ID NO: 717603 - DNA, 19 bp, Mus musculus
  siRNA target sequence for 0610009C03Rik (NM_025645.1,416-434).
ctcagcgtcgacagacaaa

SEQ ID NO: 717604 - DNA, 19 bp, Mus musculus
  siRNA target sequence for 0610009C03Rik (NM_025645.1,421-439).
cgtcgacagacaaaactgt

SEQ ID NO: 717605 - DNA, 19 bp, Mus musculus
  siRNA target sequence for 0610009C03Rik (NM_025645.1,440-458).
ggcggtgtgggatagtgaa

SEQ ID NO: 717606 - DNA, 19 bp, Mus musculus
  siRNA target sequence for 0610009C03Rik (NM_025645.1,486-504).
gggcatacttcctttgtga

SEQ ID NO: 717607 - DNA, 19 bp, Mus musculus
  siRNA target sequence for 0610009C03Rik (NM_025645.1,551-569).
cagtgacgatggtacagtt

SEQ ID NO: 717608 - DNA, 19 bp, Mus musculus
  siRNA target sequence for 0610009C03Rik (NM_025645.1,553-571).
gtgacgatggtacagttaa

SEQ ID NO: 717609 - DNA, 19 bp, Mus musculus
  siRNA target sequence for 0610009C03Rik (NM_025645.1,557-575).
cgatggtacagttaagctt

SEQ ID NO: 717610 - DNA, 19 bp, Mus musculus
  siRNA target sequence for 0610009C03Rik (NM_025645.1,648-666).
gacacgagcgatcagatta

SEQ ID NO: 717611 - DNA, 19 bp, Mus musculus
  siRNA target sequence for 0610009C03Rik (NM_025645.1,653-671).
gagcgatcagattatctct

SEQ ID NO: 717612 - DNA, 19 bp, Mus musculus
  siRNA target sequence for 0610009C03Rik (NM_025645.1,662-680).
gattatctctggtggaata

SEQ ID NO: 717613 - DNA, 19 bp, Mus musculus
  siRNA target sequence for 0610009C03Rik (NM_025645.1,672-690).
ggtggaatagataatgaca

SEQ ID NO: 717614 - DNA, 19 bp, Mus musculus
  siRNA target sequence for 0610009C03Rik (NM_025645.1,700-718).
gggacctacgccaaaacaa

SEQ ID NO: 717615 - DNA, 19 bp, Mus musculus
  siRNA target sequence for 0610009C03Rik (NM_025645.1,702-720).
gacctacgccaaaacaagt

SEQ ID NO: 717616 - DNA, 19 bp, Mus musculus
  siRNA target sequence for 0610009C03Rik (NM_025645.1,704-722).
cctacgccaaaacaagtta

SEQ ID NO: 717617 - DNA, 19 bp, Mus musculus
  siRNA target sequence for 0610009C03Rik (NM_025645.1,705-723).
ctacgccaaaacaagttaa

SEQ ID NO: 717618 - DNA, 19 bp, Mus musculus
  siRNA target sequence for 0610009C03Rik (NM_025645.1,708-726).
cgccaaaacaagttaacct

SEQ ID NO: 717619 - DNA, 19 bp, Mus musculus
  siRNA target sequence for 0610009C03Rik (NM_025645.1,827-845).
ggatgtccggccatttgct

SEQ ID NO: 717620 - DNA, 19 bp, Mus musculus
  siRNA target sequence for 0610009C03Rik (NM_025645.1,987-1005).
gccgaagggtcctgtacaa

SEQ ID NO: 717621 - DNA, 19 bp, Mus musculus
  siRNA target sequence for 0610009C03Rik (NM_025645.1,1018-1036).
cgctggctccatcaatgaa

SEQ ID NO: 717622 - DNA, 19 bp, Mus musculus
  siRNA target sequence for 0610012A19Rik (NM_025648.1,16-34).
cggataatcccgttttgga

SEQ ID NO: 717623 - DNA, 19 bp, Mus musculus
  siRNA target sequence for 0610012A19Rik (NM_025648.1,148-166).
ctctgggtgaggtcattga

SEQ ID NO: 717624 - DNA, 19 bp, Mus musculus
  siRNA target sequence for 0610012A19Rik (NM_025648.1,236-254).
ccatgaggcccgtgtgttt

SEQ ID NO: 717625 - DNA, 19 bp, Mus musculus
  siRNA target sequence for 0610012A19Rik (NM_025648.1,237-255).
catgaggcccgtgtgttta

SEQ ID NO: 717626 - DNA, 19 bp, Mus musculus
  siRNA target sequence for 0610012A19Rik (NM_025648.1,391-409).
gagtggtggacagtataga

SEQ ID NO: 717627 - DNA, 19 bp, Mus musculus
  siRNA target sequence for 0610012A19Rik (NM_025648.1,616-634).
ggagggaccgacctttcaa

SEQ ID NO: 717628 - DNA, 19 bp, Mus musculus
  siRNA target sequence for 0610012A19Rik (NM_025648.1,617-635).
gagggaccgacctttcaaa

SEQ ID NO: 717629 - DNA, 19 bp, Mus musculus
  siRNA target sequence for 0610012A19Rik (NM_025648.1,703-721).
gctctcagttccgacaaat

SEQ ID NO: 717630 - DNA, 19 bp, Mus musculus
  siRNA target sequence for 0610012A19Rik (NM_025648.1,706-724).
ctcagttccgacaaatctt

SEQ ID NO: 717631 - DNA, 19 bp, Mus musculus
  siRNA target sequence for 0610012A19Rik (NM_025648.1,708-726).
cagttccgacaaatcttct

SEQ ID NO: 717632 - DNA, 19 bp, Mus musculus
  siRNA target sequence for 0610012A19Rik (NM_025648.1,744-762).
gagatgcctacggacaatt

SEQ ID NO: 717633 - DNA, 19 bp, Mus musculus
  siRNA target sequence for 0610012A19Rik (NM_025648.1,749-767).
gcctacggacaatttcatt

SEQ ID NO: 717634 - DNA, 19 bp, Mus musculus
  siRNA target sequence for 0610012A19Rik (NM_025648.1,773-791).
ctccttctggaactttgat

SEQ ID NO: 717635 - DNA, 19 bp, Mus musculus
  siRNA target sequence for 0610012A19Rik (NM_025648.1,825-843).
gaccaacatgatactttct

SEQ ID NO: 717636 - DNA, 19 bp, Mus musculus
  siRNA target sequence for Mad2l1bp (NM_025649.1,86-104).
gctgccccaaatttggatt

SEQ ID NO: 717637 - DNA, 19 bp, Mus musculus
  siRNA target sequence for Mad2l1bp (NM_025649.1,453-471).
gtcacctacgagacttctt

SEQ ID NO: 717638 - DNA, 19 bp, Mus musculus
  siRNA target sequence for Mad2l1bp (NM_025649.1,480-498).
cactcgtaccacaagtgtt

SEQ ID NO: 717639 - DNA, 19 bp, Mus musculus
  siRNA target sequence for Mad2l1bp (NM_025649.1,521-539).
ctcagccctaaagaattct

SEQ ID NO: 717640 - DNA, 19 bp, Mus musculus
  siRNA target sequence for Mad2l1bp (NM_025649.1,523-541).
cagccctaaagaattctat

SEQ ID NO: 717641 - DNA, 19 bp, Mus musculus
  siRNA target sequence for Mad2l1bp (NM_025649.1,528-546).
ctaaagaattctatgaact

SEQ ID NO: 717642 - DNA, 19 bp, Mus musculus
  siRNA target sequence for Mad2l1bp (NM_025649.1,668-686).
ctcatgggtaccattgtca

SEQ ID NO: 717643 - DNA, 19 bp, Mus musculus
  siRNA target sequence for Mad2l1bp (NM_025649.1,700-718).
ccgtgactgtggagaagat

SEQ ID NO: 717644 - DNA, 19 bp, Mus musculus
  siRNA target sequence for Mad2l1bp (NM_025649.1,701-719).
cgtgactgtggagaagatt

SEQ ID NO: 717645 - DNA, 19 bp, Mus musculus
  siRNA target sequence for Mad2l1bp (NM_025649.1,807-825).
ccatggcttcagaggatta

SEQ ID NO: 717646 - DNA, 19 bp, Mus musculus
  siRNA target sequence for Mad2l1bp (NM_025649.1,836-854).
caggcaccagtgacactta

SEQ ID NO: 717647 - DNA, 19 bp, Mus musculus
  siRNA target sequence for Mad2l1bp (NM_025649.1,838-856).
ggcaccagtgacacttaaa

SEQ ID NO: 717648 - DNA, 19 bp, Mus musculus
  siRNA target sequence for Mad2l1bp (NM_025649.1,842-860).
ccagtgacacttaaaggtt

SEQ ID NO: 717649 - DNA, 19 bp, Mus musculus
  siRNA target sequence for 3110001I22Rik (NM_025653.1,299-317).
ccaggatcagtgtacagaa

SEQ ID NO: 717650 - DNA, 19 bp, Mus musculus
  siRNA target sequence for 3110001I22Rik (NM_025653.1,322-340).
caagatgtggcctaacaga

SEQ ID NO: 717651 - DNA, 19 bp, Mus musculus
  siRNA target sequence for 3110001I22Rik (NM_025653.1,328-346).
gtggcctaacagatcatat

SEQ ID NO: 717652 - DNA, 19 bp, Mus musculus
  siRNA target sequence for 3110001I22Rik (NM_025653.1,330-348).
ggcctaacagatcatatga

SEQ ID NO: 717653 - DNA, 19 bp, Mus musculus
  siRNA target sequence for 3110001I22Rik (NM_025653.1,331-349).
gcctaacagatcatatgat

SEQ ID NO: 717654 - DNA, 19 bp, Mus musculus
  siRNA target sequence for 3110001I22Rik (NM_025653.1,333-351).
ctaacagatcatatgatga

SEQ ID NO: 717655 - DNA, 19 bp, Mus musculus
  siRNA target sequence for 3110001I22Rik (NM_025653.1,534-552).
caggtatagatcagaagaa

SEQ ID NO: 717656 - DNA, 19 bp, Mus musculus
  siRNA target sequence for 3110001I22Rik (NM_025653.1,710-728).
ggccagtctttgaaaacat

SEQ ID NO: 717657 - DNA, 19 bp, Mus musculus
  siRNA target sequence for 3110001I22Rik (NM_025653.1,734-752).
gacacacacccaaaaagtt

SEQ ID NO: 717658 - DNA, 19 bp, Mus musculus
  siRNA target sequence for 3110001I22Rik (NM_025653.1,761-779).
gttccttcgtcagaaagtt

SEQ ID NO: 717659 - DNA, 19 bp, Mus musculus
  siRNA target sequence for 3110001I22Rik (NM_025653.1,837-855).
ctgtagaaaagccaatgat

SEQ ID NO: 717660 - DNA, 19 bp, Mus musculus
  siRNA target sequence for 3110001I22Rik (NM_025653.1,848-866).
ccaatgatggcagatgaaa

SEQ ID NO: 717661 - DNA, 19 bp, Mus musculus
  siRNA target sequence for 3110001I22Rik (NM_025653.1,856-874).
ggcagatgaaagtgactta

SEQ ID NO: 717662 - DNA, 19 bp, Mus musculus
  siRNA target sequence for 3110001I22Rik (NM_025653.1,860-878).
gatgaaagtgacttaccta

SEQ ID NO: 717663 - DNA, 19 bp, Mus musculus
  siRNA target sequence for 3110001I22Rik (NM_025653.1,929-947).
gaacctgggtcaaacaaaa

SEQ ID NO: 717664 - DNA, 19 bp, Mus musculus
  siRNA target sequence for 3110001I22Rik (NM_025653.1,981-999).
ccaatcgccgtaaagcaat

SEQ ID NO: 717665 - DNA, 19 bp, Mus musculus
  siRNA target sequence for 3110001I22Rik (NM_025653.1,982-1000).
caatcgccgtaaagcaata

SEQ ID NO: 717666 - DNA, 19 bp, Mus musculus
  siRNA target sequence for 3110001I22Rik (NM_025653.1,986-1004).
cgccgtaaagcaatagtgt

SEQ ID NO: 717667 - DNA, 19 bp, Mus musculus
  siRNA target sequence for 3110001I22Rik (NM_025653.1,1116-1134).
cgctccggcagaatttaca

SEQ ID NO: 717668 - DNA, 19 bp, Mus musculus
  siRNA target sequence for 3110001I22Rik (NM_025653.1,1117-1135).
gctccggcagaatttacat

SEQ ID NO: 717669 - DNA, 19 bp, Mus musculus
  siRNA target sequence for 2010002A20Rik (NM_025655.1,62-80).
gcttctcttagtggtttta

SEQ ID NO: 717670 - DNA, 19 bp, Mus musculus
  siRNA target sequence for 2010002A20Rik (NM_025655.1,63-81).
cttctcttagtggttttat

SEQ ID NO: 717671 - DNA, 19 bp, Mus musculus
  siRNA target sequence for 2010002A20Rik (NM_025655.1,66-84).
ctcttagtggttttatctt

SEQ ID NO: 717672 - DNA, 19 bp, Mus musculus
  siRNA target sequence for 2010002A20Rik (NM_025655.1,124-142).
gtagaactgagaactatat

SEQ ID NO: 717673 - DNA, 19 bp, Mus musculus
  siRNA target sequence for 2010002A20Rik (NM_025655.1,240-258).
gtagatctgaaaaatggaa

SEQ ID NO: 717674 - DNA, 19 bp, Mus musculus
  siRNA target sequence for 2010002A20Rik (NM_025655.1,266-284).
caacatcagttctgtttgt

SEQ ID NO: 717675 - DNA, 19 bp, Mus musculus
  siRNA target sequence for 2010002A20Rik (NM_025655.1,285-303).
gtctctcccatcaacgaaa

SEQ ID NO: 717676 - DNA, 19 bp, Mus musculus
  siRNA target sequence for 2010002A20Rik (NM_025655.1,347-365).
gacggtgtccgttacagta

SEQ ID NO: 717677 - DNA, 19 bp, Mus musculus
  siRNA target sequence for 2010002A20Rik (NM_025655.1,420-438).
gaggaaaacagcgatgtaa

SEQ ID NO: 717678 - DNA, 19 bp, Mus musculus
  siRNA target sequence for 2010002A20Rik (NM_025655.1,422-440).
ggaaaacagcgatgtaagt

SEQ ID NO: 717679 - DNA, 19 bp, Mus musculus
  siRNA target sequence for 2010002A20Rik (NM_025655.1,428-446).
cagcgatgtaagtttggtt

SEQ ID NO: 717680 - DNA, 19 bp, Mus musculus
  siRNA target sequence for 2010002A20Rik (NM_025655.1,465-483).
cctcaagcgcaaatgatgt

SEQ ID NO: 717681 - DNA, 19 bp, Mus musculus
  siRNA target sequence for 2010002A20Rik (NM_025655.1,471-489).
gcgcaaatgatgtggtata

SEQ ID NO: 717682 - DNA, 19 bp, Mus musculus
  siRNA target sequence for 2010002A20Rik (NM_025655.1,473-491).
gcaaatgatgtggtataaa

SEQ ID NO: 717683 - DNA, 19 bp, Mus musculus
  siRNA target sequence for 2010002A20Rik (NM_025655.1,494-512).
caacagcgccttggtttta

SEQ ID NO: 717684 - DNA, 19 bp, Mus musculus
  siRNA target sequence for 2010002A20Rik (NM_025655.1,499-517).
gcgccttggttttagagaa

SEQ ID NO: 717685 - DNA, 19 bp, Mus musculus
  siRNA target sequence for 2010002A20Rik (NM_025655.1,647-665).
cctgcttgttaaagacaaa

SEQ ID NO: 717686 - DNA, 19 bp, Mus musculus
  siRNA target sequence for 2010002A20Rik (NM_025655.1,650-668).
gcttgttaaagacaaagtt

SEQ ID NO: 717687 - DNA, 19 bp, Mus musculus
  siRNA target sequence for 2010002A20Rik (NM_025655.1,677-695).
gccggcagagcccatcatt

SEQ ID NO: 717688 - DNA, 19 bp, Mus musculus
  siRNA target sequence for 2810002D13Rik (NM_025657.2,210-228).
gaagctgacaagcaatctt

SEQ ID NO: 717689 - DNA, 19 bp, Mus musculus
  siRNA target sequence for 2810002D13Rik (NM_025657.2,226-244).
cttaggaccatcgatttat

SEQ ID NO: 717690 - DNA, 19 bp, Mus musculus
  siRNA target sequence for 2810002D13Rik (NM_025657.2,230-248).
ggaccatcgatttatccaa

SEQ ID NO: 717691 - DNA, 19 bp, Mus musculus
  siRNA target sequence for 2810002D13Rik (NM_025657.2,263-281).
gcctaccgcctctgataat

SEQ ID NO: 717692 - DNA, 19 bp, Mus musculus
  siRNA target sequence for 2810002D13Rik (NM_025657.2,264-282).
cctaccgcctctgataata

SEQ ID NO: 717693 - DNA, 19 bp, Mus musculus
  siRNA target sequence for 2810002D13Rik (NM_025657.2,268-286).
ccgcctctgataataggaa

SEQ ID NO: 717694 - DNA, 19 bp, Mus musculus
  siRNA target sequence for 2810002D13Rik (NM_025657.2,269-287).
cgcctctgataataggaaa

SEQ ID NO: 717695 - DNA, 19 bp, Mus musculus
  siRNA target sequence for 2810002D13Rik (NM_025657.2,284-302).
gaaagttcactctgctaaa

SEQ ID NO: 717696 - DNA, 19 bp, Mus musculus
  siRNA target sequence for 2810002D13Rik (NM_025657.2,321-339).
caacaaactgactgttcta

SEQ ID NO: 717697 - DNA, 19 bp, Mus musculus
  siRNA target sequence for 2810002D13Rik (NM_025657.2,330-348).
gactgttctacctgatgaa

SEQ ID NO: 717698 - DNA, 19 bp, Mus musculus
  siRNA target sequence for 2810002D13Rik (NM_025657.2,334-352).
gttctacctgatgaattat

SEQ ID NO: 717699 - DNA, 19 bp, Mus musculus
  siRNA target sequence for 2810002D13Rik (NM_025657.2,337-355).
ctacctgatgaattatgca

SEQ ID NO: 717700 - DNA, 19 bp, Mus musculus
  siRNA target sequence for 2810002D13Rik (NM_025657.2,353-371).
gcaatctgaaaaaactaga

SEQ ID NO: 717701 - DNA, 19 bp, Mus musculus
  siRNA target sequence for 2810002D13Rik (NM_025657.2,491-509).
gttgcctgagacatctaga

SEQ ID NO: 717702 - DNA, 19 bp, Mus musculus
  siRNA target sequence for 2810002D13Rik (NM_025657.2,494-512).
gcctgagacatctagatgt

SEQ ID NO: 717703 - DNA, 19 bp, Mus musculus
  siRNA target sequence for 2810002D13Rik (NM_025657.2,495-513).
cctgagacatctagatgta

SEQ ID NO: 717704 - DNA, 19 bp, Mus musculus
  siRNA target sequence for 2810002D13Rik (NM_025657.2,500-518).
gacatctagatgtagtaga

SEQ ID NO: 717705 - DNA, 19 bp, Mus musculus
  siRNA target sequence for 2810002D13Rik (NM_025657.2,511-529).
gtagtagatctctctaaaa

SEQ ID NO: 717706 - DNA, 19 bp, Mus musculus
  siRNA target sequence for 2810002D13Rik (NM_025657.2,531-549).
ccagattcggagtatacct

SEQ ID NO: 717707 - DNA, 19 bp, Mus musculus
  siRNA target sequence for 2810002D13Rik (NM_025657.2,567-585).
gcaggccatcgaactcaat

SEQ ID NO: 717708 - DNA, 19 bp, Mus musculus
  siRNA target sequence for 2810002D13Rik (NM_025657.2,571-589).
gccatcgaactcaatctca

SEQ ID NO: 717709 - DNA, 19 bp, Mus musculus
  siRNA target sequence for 2810002D13Rik (NM_025657.2,572-590).
ccatcgaactcaatctcaa

SEQ ID NO: 717710 - DNA, 19 bp, Mus musculus
  siRNA target sequence for 2810002D13Rik (NM_025657.2,610-628).
ctctctgtgaagatatcct

SEQ ID NO: 717711 - DNA, 19 bp, Mus musculus
  siRNA target sequence for 2810002D13Rik (NM_025657.2,737-755).
gcaatctctttgaaataaa

SEQ ID NO: 717712 - DNA, 19 bp, Mus musculus
  siRNA target sequence for 2810002D13Rik (NM_025657.2,764-782).
gagaactagagggttatga

SEQ ID NO: 717713 - DNA, 19 bp, Mus musculus
  siRNA target sequence for 2810002D13Rik (NM_025657.2,769-787).
ctagagggttatgataagt

SEQ ID NO: 717714 - DNA, 19 bp, Mus musculus
  siRNA target sequence for 2810002D13Rik (NM_025657.2,772-790).
gagggttatgataagtaca

SEQ ID NO: 717715 - DNA, 19 bp, Mus musculus
  siRNA target sequence for 2210414K06Rik (NM_025659.1,103-121).
ctacgggtggccaactact

SEQ ID NO: 717716 - DNA, 19 bp, Mus musculus
  siRNA target sequence for 2210414K06Rik (NM_025659.1,520-538).
ctgtctcgcaagagcataa

SEQ ID NO: 717717 - DNA, 19 bp, Mus musculus
  siRNA target sequence for 2210414K06Rik (NM_025659.1,860-878).
ctctagagggggatgaact

SEQ ID NO: 717718 - DNA, 19 bp, Mus musculus
  siRNA target sequence for 2210414K06Rik (NM_025659.1,971-989).
catacacccggcaaaagga

SEQ ID NO: 717719 - DNA, 19 bp, Mus musculus
  siRNA target sequence for 2610028I09Rik (NM_025660.1,270-288).
gccattgaagctagaagaa

SEQ ID NO: 717720 - DNA, 19 bp, Mus musculus
  siRNA target sequence for 2610028I09Rik (NM_025660.1,303-321).
cgccaaagccgattcttca

SEQ ID NO: 717721 - DNA, 19 bp, Mus musculus
  siRNA target sequence for 2610028I09Rik (NM_025660.1,410-428).
caaagatatcgcttatggt

SEQ ID NO: 717722 - DNA, 19 bp, Mus musculus
  siRNA target sequence for 2610028I09Rik (NM_025660.1,430-448).
ccaagcatgcgcactatga

SEQ ID NO: 717723 - DNA, 19 bp, Mus musculus
  siRNA target sequence for 2610028I09Rik (NM_025660.1,431-449).
caagcatgcgcactatgat

SEQ ID NO: 717724 - DNA, 19 bp, Mus musculus
  siRNA target sequence for 2610028I09Rik (NM_025660.1,591-609).
gagtttcgggtcccttatt

SEQ ID NO: 717725 - DNA, 19 bp, Mus musculus
  siRNA target sequence for 2610028I09Rik (NM_025660.1,597-615).
cgggtcccttattatgaga

SEQ ID NO: 717726 - DNA, 19 bp, Mus musculus
  siRNA target sequence for 2610028I09Rik (NM_025660.1,598-616).
gggtcccttattatgagaa

SEQ ID NO: 717727 - DNA, 19 bp, Mus musculus
  siRNA target sequence for 2610028I09Rik (NM_025660.1,673-691).
gggcctcacacgtgagaat

SEQ ID NO: 717728 - DNA, 19 bp, Mus musculus
  siRNA target sequence for 2610028I09Rik (NM_025660.1,1028-1046).
ccgggtcctgccctattgt

SEQ ID NO: 717729 - DNA, 19 bp, Mus musculus
  siRNA target sequence for 2610028I09Rik (NM_025660.1,1029-1047).
cgggtcctgccctattgtt

SEQ ID NO: 717730 - DNA, 19 bp, Mus musculus
  siRNA target sequence for 2610028I09Rik (NM_025660.1,1122-1140).
cagcgccaagccgaaaagt

SEQ ID NO: 717731 - DNA, 19 bp, Mus musculus
  siRNA target sequence for 2610028I09Rik (NM_025660.1,1124-1142).
gcgccaagccgaaaagtta

SEQ ID NO: 717732 - DNA, 19 bp, Mus musculus
  siRNA target sequence for 2610028I09Rik (NM_025660.1,1126-1144).
gccaagccgaaaagttagt

SEQ ID NO: 717733 - DNA, 19 bp, Mus musculus
  siRNA target sequence for 2610028I09Rik (NM_025660.1,1239-1257).
ggactgggctccttcaaca

SEQ ID NO: 717734 - DNA, 19 bp, Mus musculus
  siRNA target sequence for 2610028I09Rik (NM_025660.1,1275-1293).
cagcaagctcagcaaaatt

SEQ ID NO: 717735 - DNA, 19 bp, Mus musculus
  siRNA target sequence for 2610028I09Rik (NM_025660.1,1284-1302).
cagcaaaattatctgaatt

SEQ ID NO: 717736 - DNA, 19 bp, Mus musculus
  siRNA target sequence for 2610028I09Rik (NM_025660.1,1320-1338).
caaccgactgcgcactatt

SEQ ID NO: 717737 - DNA, 19 bp, Mus musculus
  siRNA target sequence for 2610028I09Rik (NM_025660.1,1324-1342).
cgactgcgcactattacct

SEQ ID NO: 717738 - DNA, 19 bp, Mus musculus
  siRNA target sequence for 2610028I09Rik (NM_025660.1,1325-1343).
gactgcgcactattaccta

SEQ ID NO: 717739 - DNA, 19 bp, Mus musculus
  siRNA target sequence for 2610028I09Rik (NM_025660.1,1330-1348).
cgcactattacctacagtt

SEQ ID NO: 717740 - DNA, 19 bp, Mus musculus
  siRNA target sequence for 2610209M04Rik (NM_025665.1,198-216).
ctccccttctcgactgaaa

SEQ ID NO: 717741 - DNA, 19 bp, Mus musculus
  siRNA target sequence for 2610209M04Rik (NM_025665.1,200-218).
ccccttctcgactgaaaga

SEQ ID NO: 717742 - DNA, 19 bp, Mus musculus
  siRNA target sequence for 2610209M04Rik (NM_025665.1,201-219).
cccttctcgactgaaagaa

SEQ ID NO: 717743 - DNA, 19 bp, Mus musculus
  siRNA target sequence for 2610209M04Rik (NM_025665.1,202-220).
ccttctcgactgaaagaaa

SEQ ID NO: 717744 - DNA, 19 bp, Mus musculus
  siRNA target sequence for 2610209M04Rik (NM_025665.1,283-301).
gaagacctggagggtaaaa

SEQ ID NO: 717745 - DNA, 19 bp, Mus musculus
  siRNA target sequence for 2610209M04Rik (NM_025665.1,369-387).
ggtagacggctctgtaaat

SEQ ID NO: 717746 - DNA, 19 bp, Mus musculus
  siRNA target sequence for 2610209M04Rik (NM_025665.1,394-412).
gccatcaacgtgtctcaaa

SEQ ID NO: 717747 - DNA, 19 bp, Mus musculus
  siRNA target sequence for 2610209M04Rik (NM_025665.1,395-413).
ccatcaacgtgtctcaaaa

SEQ ID NO: 717748 - DNA, 19 bp, Mus musculus
  siRNA target sequence for 2610209M04Rik (NM_025665.1,425-443).
ggcagtacatgaatcgaaa

SEQ ID NO: 717749 - DNA, 19 bp, Mus musculus
  siRNA target sequence for 2610209M04Rik (NM_025665.1,426-444).
gcagtacatgaatcgaaaa

SEQ ID NO: 717750 - DNA, 19 bp, Mus musculus
  siRNA target sequence for 2610209M04Rik (NM_025665.1,439-457).
cgaaaaggcggattcaaca

SEQ ID NO: 717751 - DNA, 19 bp, Mus musculus
  siRNA target sequence for 5730403B10Rik (NM_025670.2,525-543).
gccacacggccacagtatt

SEQ ID NO: 717752 - DNA, 19 bp, Mus musculus
  siRNA target sequence for Tcf19 (NM_025674.1,523-541).
gagtccatgcggaattgca

SEQ ID NO: 717753 - DNA, 19 bp, Mus musculus
  siRNA target sequence for Tcf19 (NM_025674.1,594-612).
caagggactttggtcaata

SEQ ID NO: 717754 - DNA, 19 bp, Mus musculus
  siRNA target sequence for Tcf19 (NM_025674.1,598-616).
ggactttggtcaataatgt

SEQ ID NO: 717755 - DNA, 19 bp, Mus musculus
  siRNA target sequence for Tcf19 (NM_025674.1,703-721).
cctcagagttctacttcat

SEQ ID NO: 717756 - DNA, 19 bp, Mus musculus
  siRNA target sequence for Tcf19 (NM_025674.1,713-731).
ctacttcatgtttcaacaa

SEQ ID NO: 717757 - DNA, 19 bp, Mus musculus
  siRNA target sequence for Tcf19 (NM_025674.1,874-892).
cactgattctcaattccat

SEQ ID NO: 717758 - DNA, 19 bp, Mus musculus
  siRNA target sequence for Tcf19 (NM_025674.1,978-996).
catggggaagcgcaagttt

SEQ ID NO: 717759 - DNA, 19 bp, Mus musculus
  siRNA target sequence for Tcf19 (NM_025674.1,1024-1042).
ggaaatcagctcataaagt

SEQ ID NO: 717760 - DNA, 19 bp, Mus musculus
  siRNA target sequence for 5730421E18Rik (NM_025675.2,142-160).
ctgaggggcatcaaattgt

SEQ ID NO: 717761 - DNA, 19 bp, Mus musculus
  siRNA target sequence for 5730421E18Rik (NM_025675.2,153-171).
caaattgttgcattagcaa

SEQ ID NO: 717762 - DNA, 19 bp, Mus musculus
  siRNA target sequence for 5730421E18Rik (NM_025675.2,159-177).
gttgcattagcaaatctaa

SEQ ID NO: 717763 - DNA, 19 bp, Mus musculus
  siRNA target sequence for 5730421E18Rik (NM_025675.2,202-220).
cagatgaactggatagcta

SEQ ID NO: 717764 - DNA, 19 bp, Mus musculus
  siRNA target sequence for 5730421E18Rik (NM_025675.2,207-225).
gaactggatagctatatgt

SEQ ID NO: 717765 - DNA, 19 bp, Mus musculus
  siRNA target sequence for 5730421E18Rik (NM_025675.2,237-255).
ggtcaccatgccattgact

SEQ ID NO: 717766 - DNA, 19 bp, Mus musculus
  siRNA target sequence for 5730421E18Rik (NM_025675.2,238-256).
gtcaccatgccattgactt

SEQ ID NO: 717767 - DNA, 19 bp, Mus musculus
  siRNA target sequence for 5730421E18Rik (NM_025675.2,242-260).
ccatgccattgacttgtat

SEQ ID NO: 717768 - DNA, 19 bp, Mus musculus
  siRNA target sequence for 5730421E18Rik (NM_025675.2,325-343).
gagtttatacgcaatgtga

SEQ ID NO: 717769 - DNA, 19 bp, Mus musculus
  siRNA target sequence for 5730421E18Rik (NM_025675.2,346-364).
gtgacgaggttgaagatct

SEQ ID NO: 717770 - DNA, 19 bp, Mus musculus
  siRNA target sequence for 5730421E18Rik (NM_025675.2,445-463).
gtggacgagtagaaaatgt

SEQ ID NO: 717771 - DNA, 19 bp, Mus musculus
  siRNA target sequence for 5730421E18Rik (NM_025675.2,525-543).
ctccgagagatgatagctt

SEQ ID NO: 717772 - DNA, 19 bp, Mus musculus
  siRNA target sequence for 5730421E18Rik (NM_025675.2,529-547).
gagagatgatagcttctaa

SEQ ID NO: 717773 - DNA, 19 bp, Mus musculus
  siRNA target sequence for 5730421E18Rik (NM_025675.2,544-562).
ctaatatcaaggccattat

SEQ ID NO: 717774 - DNA, 19 bp, Mus musculus
  siRNA target sequence for 5730421E18Rik (NM_025675.2,583-601).
gcttagatcctgataagca

SEQ ID NO: 717775 - DNA, 19 bp, Mus musculus
  siRNA target sequence for 5730421E18Rik (NM_025675.2,584-602).
cttagatcctgataagcat

SEQ ID NO: 717776 - DNA, 19 bp, Mus musculus
  siRNA target sequence for 5730421E18Rik (NM_025675.2,606-624).
gggaaaaccctggttgaaa

SEQ ID NO: 717777 - DNA, 19 bp, Mus musculus
  siRNA target sequence for 5730421E18Rik (NM_025675.2,607-625).
ggaaaaccctggttgaaat

SEQ ID NO: 717778 - DNA, 19 bp, Mus musculus
  siRNA target sequence for 5730421E18Rik (NM_025675.2,835-853).
cagtacctgcggatgatga

SEQ ID NO: 717779 - DNA, 19 bp, Mus musculus
  siRNA target sequence for 5730421E18Rik (NM_025675.2,837-855).
gtacctgcggatgatgaaa

SEQ ID NO: 717780 - DNA, 19 bp, Mus musculus
  siRNA target sequence for 5730449L18Rik (NM_025677.1,210-228).
gggcacacaccctaagtat

SEQ ID NO: 717781 - DNA, 19 bp, Mus musculus
  siRNA target sequence for 5730449L18Rik (NM_025677.1,212-230).
gcacacaccctaagtattt

SEQ ID NO: 717782 - DNA, 19 bp, Mus musculus
  siRNA target sequence for 5730449L18Rik (NM_025677.1,213-231).
cacacaccctaagtattta

SEQ ID NO: 717783 - DNA, 19 bp, Mus musculus
  siRNA target sequence for 5730449L18Rik (NM_025677.1,215-233).
cacaccctaagtatttaga

SEQ ID NO: 717784 - DNA, 19 bp, Mus musculus
  siRNA target sequence for 5730449L18Rik (NM_025677.1,220-238).
cctaagtatttagaaatga

SEQ ID NO: 717785 - DNA, 19 bp, Mus musculus
  siRNA target sequence for 5730449L18Rik (NM_025677.1,237-255).
gatggaattagatatagga

SEQ ID NO: 717786 - DNA, 19 bp, Mus musculus
  siRNA target sequence for 5730449L18Rik (NM_025677.1,256-274).
gatgccacccaagtttata

SEQ ID NO: 717787 - DNA, 19 bp, Mus musculus
  siRNA target sequence for 5730449L18Rik (NM_025677.1,261-279).
cacccaagtttatatagca

SEQ ID NO: 717788 - DNA, 19 bp, Mus musculus
  siRNA target sequence for 5730449L18Rik (NM_025677.1,263-281).
cccaagtttatatagcatt

SEQ ID NO: 717789 - DNA, 19 bp, Mus musculus
  siRNA target sequence for 5730449L18Rik (NM_025677.1,295-313).
gatctcatggagagtaaaa

SEQ ID NO: 717790 - DNA, 19 bp, Mus musculus
  siRNA target sequence for 5730449L18Rik (NM_025677.1,298-316).
ctcatggagagtaaaagtt

SEQ ID NO: 717791 - DNA, 19 bp, Mus musculus
  siRNA target sequence for 5730449L18Rik (NM_025677.1,424-442).
gcttccctcagccataata

SEQ ID NO: 717792 - DNA, 19 bp, Mus musculus
  siRNA target sequence for 5730449L18Rik (NM_025677.1,429-447).
cctcagccataataggata

SEQ ID NO: 717793 - DNA, 19 bp, Mus musculus
  siRNA target sequence for 5730449L18Rik (NM_025677.1,443-461).
ggataagggaaatcttgaa

SEQ ID NO: 717794 - DNA, 19 bp, Mus musculus
  siRNA target sequence for 5730449L18Rik (NM_025677.1,490-508).
gaactgccgatgtctttta

SEQ ID NO: 717795 - DNA, 19 bp, Mus musculus
  siRNA target sequence for 5730449L18Rik (NM_025677.1,493-511).
ctgccgatgtcttttactt

SEQ ID NO: 717796 - DNA, 19 bp, Mus musculus
  siRNA target sequence for 5730449L18Rik (NM_025677.1,522-540).
ggagtcagattccacaata

SEQ ID NO: 717797 - DNA, 19 bp, Mus musculus
  siRNA target sequence for 5730449L18Rik (NM_025677.1,533-551).
ccacaatagtctattataa

SEQ ID NO: 717798 - DNA, 19 bp, Mus musculus
  siRNA target sequence for 5730449L18Rik (NM_025677.1,585-603).
gaatatttctcttagaaga

SEQ ID NO: 717799 - DNA, 19 bp, Mus musculus
  siRNA target sequence for 5730470L24Rik (NM_025679.2,81-99).
gcacgatcgagaagatctt

SEQ ID NO: 717800 - DNA, 19 bp, Mus musculus
  siRNA target sequence for 5730470L24Rik (NM_025679.2,220-238).
gttacccgagcagtatcaa

SEQ ID NO: 717801 - DNA, 19 bp, Mus musculus
  siRNA target sequence for 5730470L24Rik (NM_025679.2,251-269).
gacgtgaaggacatgtcta

SEQ ID NO: 717802 - DNA, 19 bp, Mus musculus
  siRNA target sequence for 5730470L24Rik (NM_025679.2,253-271).
cgtgaaggacatgtctaaa

SEQ ID NO: 717803 - DNA, 19 bp, Mus musculus
  siRNA target sequence for 5730470L24Rik (NM_025679.2,254-272).
gtgaaggacatgtctaaat

SEQ ID NO: 717804 - DNA, 19 bp, Mus musculus
  siRNA target sequence for 5730470L24Rik (NM_025679.2,256-274).
gaaggacatgtctaaatat

SEQ ID NO: 717805 - DNA, 19 bp, Mus musculus
  siRNA target sequence for 5730470L24Rik (NM_025679.2,259-277).
ggacatgtctaaatataaa

SEQ ID NO: 717806 - DNA, 19 bp, Mus musculus
  siRNA target sequence for 5730470L24Rik (NM_025679.2,262-280).
catgtctaaatataaacct

SEQ ID NO: 717807 - DNA, 19 bp, Mus musculus
  siRNA target sequence for 5730470L24Rik (NM_025679.2,371-389).
gcgttggaactgatcatga

SEQ ID NO: 717808 - DNA, 19 bp, Mus musculus
  siRNA target sequence for 5730470L24Rik (NM_025679.2,394-412).
gtaccggaaacagatgtta

SEQ ID NO: 717809 - DNA, 19 bp, Mus musculus
  siRNA target sequence for 5730470L24Rik (NM_025679.2,415-433).
gttaatggtcgctaagaaa

SEQ ID NO: 717810 - DNA, 19 bp, Mus musculus
  siRNA target sequence for 5730470L24Rik (NM_025679.2,537-555).
ctgttcaggtggacgataa

SEQ ID NO: 717811 - DNA, 19 bp, Mus musculus
  siRNA target sequence for 5730470L24Rik (NM_025679.2,547-565).
ggacgataaccaattctgt

SEQ ID NO: 717812 - DNA, 19 bp, Mus musculus
  siRNA target sequence for 5730470L24Rik (NM_025679.2,548-566).
gacgataaccaattctgta

SEQ ID NO: 717813 - DNA, 19 bp, Mus musculus
  siRNA target sequence for 5730470L24Rik (NM_025679.2,608-626).
gaacttcgagagttactgt

SEQ ID NO: 717814 - DNA, 19 bp, Mus musculus
  siRNA target sequence for 5730470L24Rik (NM_025679.2,623-641).
ctgtccatcagcagtgaat

SEQ ID NO: 717815 - DNA, 19 bp, Mus musculus
  siRNA target sequence for Lix1 (NM_025681.1,271-289).
ccctttgtgagctatgtga

SEQ ID NO: 717816 - DNA, 19 bp, Mus musculus
  siRNA target sequence for Lix1 (NM_025681.1,348-366).
caggcgggatgctgctaaa

SEQ ID NO: 717817 - DNA, 19 bp, Mus musculus
  siRNA target sequence for Lix1 (NM_025681.1,350-368).
ggcgggatgctgctaaagt

SEQ ID NO: 717818 - DNA, 19 bp, Mus musculus
  siRNA target sequence for Lix1 (NM_025681.1,362-380).
ctaaagtggcgctcatcaa

SEQ ID NO: 717819 - DNA, 19 bp, Mus musculus
  siRNA target sequence for Lix1 (NM_025681.1,375-393).
catcaactctctcttcaat

SEQ ID NO: 717820 - DNA, 19 bp, Mus musculus
  siRNA target sequence for Lix1 (NM_025681.1,459-477).
caccaggggcacgttagat

SEQ ID NO: 717821 - DNA, 19 bp, Mus musculus
  siRNA target sequence for Lix1 (NM_025681.1,461-479).
ccaggggcacgttagatga

SEQ ID NO: 717822 - DNA, 19 bp, Mus musculus
  siRNA target sequence for Lix1 (NM_025681.1,462-480).
caggggcacgttagatgat

SEQ ID NO: 717823 - DNA, 19 bp, Mus musculus
  siRNA target sequence for 5730521E12Rik (NM_025684.1,104-122).
gatgcagttgtgattctat

SEQ ID NO: 717824 - DNA, 19 bp, Mus musculus
  siRNA target sequence for 5730521E12Rik (NM_025684.1,154-172).
ctcccatcaggcattcctt

SEQ ID NO: 717825 - DNA, 19 bp, Mus musculus
  siRNA target sequence for 5730521E12Rik (NM_025684.1,211-229).
cagcaccttcagctatcta

SEQ ID NO: 717826 - DNA, 19 bp, Mus musculus
  siRNA target sequence for 5730521E12Rik (NM_025684.1,272-290).
ccagtggaacagagtctat

SEQ ID NO: 717827 - DNA, 19 bp, Mus musculus
  siRNA target sequence for 5730521E12Rik (NM_025684.1,379-397).
gccaaccttgaggtgttaa

SEQ ID NO: 717828 - DNA, 19 bp, Mus musculus
  siRNA target sequence for 5730521E12Rik (NM_025684.1,381-399).
caaccttgaggtgttaaaa

SEQ ID NO: 717829 - DNA, 19 bp, Mus musculus
  siRNA target sequence for 5730521E12Rik (NM_025684.1,384-402).
ccttgaggtgttaaaatta

SEQ ID NO: 717830 - DNA, 19 bp, Mus musculus
  siRNA target sequence for 5730521E12Rik (NM_025684.1,385-403).
cttgaggtgttaaaattaa

SEQ ID NO: 717831 - DNA, 19 bp, Mus musculus
  siRNA target sequence for 5730521E12Rik (NM_025684.1,543-561).
ggtggatggtaacaacata

SEQ ID NO: 717832 - DNA, 19 bp, Mus musculus
  siRNA target sequence for 5730521E12Rik (NM_025684.1,547-565).
gatggtaacaacatagagt

SEQ ID NO: 717833 - DNA, 19 bp, Mus musculus
  siRNA target sequence for 5730521E12Rik (NM_025684.1,584-602).
gccttccgcatctcaagta

SEQ ID NO: 717834 - DNA, 19 bp, Mus musculus
  siRNA target sequence for 5730521E12Rik (NM_025684.1,618-636).
caaccaactccaccttata

SEQ ID NO: 717835 - DNA, 19 bp, Mus musculus
  siRNA target sequence for 5730521E12Rik (NM_025684.1,648-666).
cttcacttccctacagaat

SEQ ID NO: 717836 - DNA, 19 bp, Mus musculus
  siRNA target sequence for 5730521E12Rik (NM_025684.1,675-693).
cctcagtttcagtggtaat

SEQ ID NO: 717837 - DNA, 19 bp, Mus musculus
  siRNA target sequence for 5730521E12Rik (NM_025684.1,676-694).
ctcagtttcagtggtaatt

SEQ ID NO: 717838 - DNA, 19 bp, Mus musculus
  siRNA target sequence for 5730521E12Rik (NM_025684.1,684-702).
cagtggtaattttctaact

SEQ ID NO: 717839 - DNA, 19 bp, Mus musculus
  siRNA target sequence for 5730521E12Rik (NM_025684.1,686-704).
gtggtaattttctaactaa

SEQ ID NO: 717840 - DNA, 19 bp, Mus musculus
  siRNA target sequence for 5730521E12Rik (NM_025684.1,689-707).
gtaattttctaactaaaat

SEQ ID NO: 717841 - DNA, 19 bp, Mus musculus
  siRNA target sequence for 5730521E12Rik (NM_025684.1,718-736).
ctacccaaatccttgctat

SEQ ID NO: 717842 - DNA, 19 bp, Mus musculus
  siRNA target sequence for 5730521E12Rik (NM_025684.1,722-740).
ccaaatccttgctatcttt

SEQ ID NO: 717843 - DNA, 19 bp, Mus musculus
  siRNA target sequence for 5730521E12Rik (NM_025684.1,728-746).
ccttgctatctttaaagat

SEQ ID NO: 717844 - DNA, 19 bp, Mus musculus
  siRNA target sequence for 5730521E12Rik (NM_025684.1,769-787).
gtcaggtttcgcgatatga

SEQ ID NO: 717845 - DNA, 19 bp, Mus musculus
  siRNA target sequence for 5730521E12Rik (NM_025684.1,771-789).
caggtttcgcgatatgaaa

SEQ ID NO: 717846 - DNA, 19 bp, Mus musculus
  siRNA target sequence for 5730521E12Rik (NM_025684.1,773-791).
ggtttcgcgatatgaaaca

SEQ ID NO: 717847 - DNA, 19 bp, Mus musculus
  siRNA target sequence for 5730521E12Rik (NM_025684.1,855-873).
gcagctgaccaatttaaca

SEQ ID NO: 717848 - DNA, 19 bp, Mus musculus
  siRNA target sequence for 5730521E12Rik (NM_025684.1,856-874).
cagctgaccaatttaacaa

SEQ ID NO: 717849 - DNA, 19 bp, Mus musculus
  siRNA target sequence for 5730521E12Rik (NM_025684.1,919-937).
ctaccatcgaggttacaga

SEQ ID NO: 717850 - DNA, 19 bp, Mus musculus
  siRNA target sequence for 5730521E12Rik (NM_025684.1,940-958).
cttgattgtagcagtaact

SEQ ID NO: 717851 - DNA, 19 bp, Mus musculus
  siRNA target sequence for 5730521E12Rik (NM_025684.1,943-961).
gattgtagcagtaacttca

SEQ ID NO: 717852 - DNA, 19 bp, Mus musculus
  siRNA target sequence for 5730521E12Rik (NM_025684.1,993-1011).
cctccgagacctgaaacat

SEQ ID NO: 717853 - DNA, 19 bp, Mus musculus
  siRNA target sequence for 5730521E12Rik (NM_025684.1,1236-1254).
ccggatctcggccttagat

SEQ ID NO: 717854 - DNA, 19 bp, Mus musculus
  siRNA target sequence for 5730521E12Rik (NM_025684.1,1237-1255).
cggatctcggccttagatt

SEQ ID NO: 717855 - DNA, 19 bp, Mus musculus
  siRNA target sequence for 5730521E12Rik (NM_025684.1,1238-1256).
ggatctcggccttagattt

SEQ ID NO: 717856 - DNA, 19 bp, Mus musculus
  siRNA target sequence for 5730521E12Rik (NM_025684.1,1445-1463).
ggcaatgtgagcatcactt

SEQ ID NO: 717857 - DNA, 19 bp, Mus musculus
  siRNA target sequence for 5730521E12Rik (NM_025684.1,1520-1538).
ccagcatcagactcaacat

SEQ ID NO: 717858 - DNA, 19 bp, Mus musculus
  siRNA target sequence for 5730521E12Rik (NM_025684.1,1552-1570).
gacgattatgaaatagatt

SEQ ID NO: 717859 - DNA, 19 bp, Mus musculus
  siRNA target sequence for Brf2 (NM_025686.1,104-122).
cgtggaagattcgcattat

SEQ ID NO: 717860 - DNA, 19 bp, Mus musculus
  siRNA target sequence for Brf2 (NM_025686.1,105-123).
gtggaagattcgcattatt

SEQ ID NO: 717861 - DNA, 19 bp, Mus musculus
  siRNA target sequence for Brf2 (NM_025686.1,107-125).
ggaagattcgcattattct

SEQ ID NO: 717862 - DNA, 19 bp, Mus musculus
  siRNA target sequence for Brf2 (NM_025686.1,291-309).
gacctgtgtcggattctga

SEQ ID NO: 717863 - DNA, 19 bp, Mus musculus
  siRNA target sequence for Brf2 (NM_025686.1,308-326).
gaagctgccgctaacgttt

SEQ ID NO: 717864 - DNA, 19 bp, Mus musculus
  siRNA target sequence for Brf2 (NM_025686.1,411-429).
gtcggatgctgtgttttaa

SEQ ID NO: 717865 - DNA, 19 bp, Mus musculus
  siRNA target sequence for Brf2 (NM_025686.1,491-509).
cgatctggacttgttttct

SEQ ID NO: 717866 - DNA, 19 bp, Mus musculus
  siRNA target sequence for Brf2 (NM_025686.1,619-637).
cgtccgtgccagccaaata

SEQ ID NO: 717867 - DNA, 19 bp, Mus musculus
  siRNA target sequence for Brf2 (NM_025686.1,622-640).
ccgtgccagccaaatacgt

SEQ ID NO: 717868 - DNA, 19 bp, Mus musculus
  siRNA target sequence for Brf2 (NM_025686.1,794-812).
ctctcttgcccagttttgt

SEQ ID NO: 717869 - DNA, 19 bp, Mus musculus
  siRNA target sequence for Brf2 (NM_025686.1,798-816).
cttgcccagttttgtaaat

SEQ ID NO: 717870 - DNA, 19 bp, Mus musculus
  siRNA target sequence for Brf2 (NM_025686.1,900-918).
gcctggctacaggttctaa

SEQ ID NO: 717871 - DNA, 19 bp, Mus musculus
  siRNA target sequence for Brf2 (NM_025686.1,901-919).
cctggctacaggttctaaa

SEQ ID NO: 717872 - DNA, 19 bp, Mus musculus
  siRNA target sequence for Brf2 (NM_025686.1,902-920).
ctggctacaggttctaaaa

SEQ ID NO: 717873 - DNA, 19 bp, Mus musculus
  siRNA target sequence for Brf2 (NM_025686.1,904-922).
ggctacaggttctaaaact

SEQ ID NO: 717874 - DNA, 19 bp, Mus musculus
  siRNA target sequence for Brf2 (NM_025686.1,905-923).
gctacaggttctaaaactt

SEQ ID NO: 717875 - DNA, 19 bp, Mus musculus
  siRNA target sequence for Brf2 (NM_025686.1,906-924).
ctacaggttctaaaactta

SEQ ID NO: 717876 - DNA, 19 bp, Mus musculus
  siRNA target sequence for Brf2 (NM_025686.1,930-948).
cggtcggtggtgaaacaca

SEQ ID NO: 717877 - DNA, 19 bp, Mus musculus
  siRNA target sequence for Brf2 (NM_025686.1,932-950).
gtcggtggtgaaacacatt

SEQ ID NO: 717878 - DNA, 19 bp, Mus musculus
  siRNA target sequence for Brf2 (NM_025686.1,1077-1095).
ggggatggtcccttcgatt

SEQ ID NO: 717879 - DNA, 19 bp, Mus musculus
  siRNA target sequence for Brf2 (NM_025686.1,1078-1096).
gggatggtcccttcgattt

SEQ ID NO: 717880 - DNA, 19 bp, Mus musculus
  siRNA target sequence for Brf2 (NM_025686.1,1196-1214).
gactggcgatgaggatatt

SEQ ID NO: 717881 - DNA, 19 bp, Mus musculus
  siRNA target sequence for Brf2 (NM_025686.1,1203-1221).
gatgaggatatttcagata

SEQ ID NO: 717882 - DNA, 19 bp, Mus musculus
  siRNA target sequence for Brf2 (NM_025686.1,1242-1260).
cgcacccctcaggaagtta

SEQ ID NO: 717883 - DNA, 19 bp, Mus musculus
  siRNA target sequence for Tex12 (NM_025687.1,109-127).
ggcaaaccaccttgtaaaa

SEQ ID NO: 717884 - DNA, 19 bp, Mus musculus
  siRNA target sequence for Tex12 (NM_025687.1,122-140).
gtaaaacccgactctagaa

SEQ ID NO: 717885 - DNA, 19 bp, Mus musculus
  siRNA target sequence for Tex12 (NM_025687.1,179-197).
gatagtccacaggtatctt

SEQ ID NO: 717886 - DNA, 19 bp, Mus musculus
  siRNA target sequence for Tex12 (NM_025687.1,227-245).
gaggcttctggactctttt

SEQ ID NO: 717887 - DNA, 19 bp, Mus musculus
  siRNA target sequence for Tex12 (NM_025687.1,234-252).
ctggactcttttataaaga

SEQ ID NO: 717888 - DNA, 19 bp, Mus musculus
  siRNA target sequence for Tex12 (NM_025687.1,277-295).
cgatatgagcaaggaaatt

SEQ ID NO: 717889 - DNA, 19 bp, Mus musculus
  siRNA target sequence for Tex12 (NM_025687.1,285-303).
gcaaggaaattaatctgat

SEQ ID NO: 717890 - DNA, 19 bp, Mus musculus
  siRNA target sequence for Tex12 (NM_025687.1,339-357).
cagcagtagatgcatctta

SEQ ID NO: 717891 - DNA, 19 bp, Mus musculus
  siRNA target sequence for Tex12 (NM_025687.1,341-359).
gcagtagatgcatcttaca

SEQ ID NO: 717892 - DNA, 19 bp, Mus musculus
  siRNA target sequence for Tex12 (NM_025687.1,342-360).
cagtagatgcatcttacat

SEQ ID NO: 717893 - DNA, 19 bp, Mus musculus
  siRNA target sequence for Tex12 (NM_025687.1,351-369).
catcttacatcgatgagat

SEQ ID NO: 717894 - DNA, 19 bp, Mus musculus
  siRNA target sequence for Tex12 (NM_025687.1,354-372).
cttacatcgatgagataga

SEQ ID NO: 717895 - DNA, 19 bp, Mus musculus
  siRNA target sequence for Tex12 (NM_025687.1,386-404).
gaagccaatattattgaaa

SEQ ID NO: 717896 - DNA, 19 bp, Mus musculus
  siRNA target sequence for Tex12 (NM_025687.1,436-454).
gcagaggtttacagtaatt

SEQ ID NO: 717897 - DNA, 19 bp, Mus musculus
  siRNA target sequence for Tex12 (NM_025687.1,441-459).
ggtttacagtaattaccaa

SEQ ID NO: 717898 - DNA, 19 bp, Mus musculus
  siRNA target sequence for 5730568A12Rik (NM_025689.1,256-274).
ggtgggacagatatgaaga

SEQ ID NO: 717899 - DNA, 19 bp, Mus musculus
  siRNA target sequence for 5730568A12Rik (NM_025689.1,275-293).
gtttgtgggactcaatgaa

SEQ ID NO: 717900 - DNA, 19 bp, Mus musculus
  siRNA target sequence for 5730568A12Rik (NM_025689.1,623-641).
ccttattgggtcagttcta

SEQ ID NO: 717901 - DNA, 19 bp, Mus musculus
  siRNA target sequence for 5730568A12Rik (NM_025689.1,659-677).
ggccggttccacctatgtt

SEQ ID NO: 717902 - DNA, 19 bp, Mus musculus
  siRNA target sequence for 5730568A12Rik (NM_025689.1,660-678).
gccggttccacctatgtta

SEQ ID NO: 717903 - DNA, 19 bp, Mus musculus
  siRNA target sequence for 5730568A12Rik (NM_025689.1,661-679).
ccggttccacctatgttaa

SEQ ID NO: 717904 - DNA, 19 bp, Mus musculus
  siRNA target sequence for 5730568A12Rik (NM_025689.1,759-777).
gaacaggcttctagctatt

SEQ ID NO: 717905 - DNA, 19 bp, Mus musculus
  siRNA target sequence for 5730568A12Rik (NM_025689.1,792-810).
gacctccaggaccttatga

SEQ ID NO: 717906 - DNA, 19 bp, Mus musculus
  siRNA target sequence for 5730568A12Rik (NM_025689.1,857-875).
gtcaccaacaggttcttct

SEQ ID NO: 717907 - DNA, 19 bp, Mus musculus
  siRNA target sequence for 5730568A12Rik (NM_025689.1,874-892).
ctaccagaggaaaagacat

SEQ ID NO: 717908 - DNA, 19 bp, Mus musculus
  siRNA target sequence for 5730568A12Rik (NM_025689.1,950-968).
ctgcctagagggtttacga

SEQ ID NO: 717909 - DNA, 19 bp, Mus musculus
  siRNA target sequence for 5730568A12Rik (NM_025689.1,987-1005).
gaaaagacttgcagtcaaa

SEQ ID NO: 717910 - DNA, 19 bp, Mus musculus
  siRNA target sequence for 5730578N08Rik (NM_025693.1,98-116).
ggctgcaccttcgcattat

SEQ ID NO: 717911 - DNA, 19 bp, Mus musculus
  siRNA target sequence for 5730578N08Rik (NM_025693.1,99-117).
gctgcaccttcgcattata

SEQ ID NO: 717912 - DNA, 19 bp, Mus musculus
  siRNA target sequence for 5730578N08Rik (NM_025693.1,102-120).
gcaccttcgcattatacct

SEQ ID NO: 717913 - DNA, 19 bp, Mus musculus
  siRNA target sequence for 5730578N08Rik (NM_025693.1,251-269).
gagcaccaggcctatgtgt

SEQ ID NO: 717914 - DNA, 19 bp, Mus musculus
  siRNA target sequence for 5730578N08Rik (NM_025693.1,459-477).
cctactttcctgataaagt

SEQ ID NO: 717915 - DNA, 19 bp, Mus musculus
  siRNA target sequence for 5730578N08Rik (NM_025693.1,508-526).
ccgaaacagcctgttcttt

SEQ ID NO: 717916 - DNA, 19 bp, Mus musculus
  siRNA target sequence for 5730578N08Rik (NM_025693.1,624-642).
cagtgctcatcggtttgat

SEQ ID NO: 717917 - DNA, 19 bp, Mus musculus
  siRNA target sequence for 5730578N08Rik (NM_025693.1,634-652).
cggtttgatcccttacaat

SEQ ID NO: 717918 - DNA, 19 bp, Mus musculus
  siRNA target sequence for 5730578N08Rik (NM_025693.1,745-763).
cgccctggtcgctttggtt

SEQ ID NO: 717919 - DNA, 19 bp, Mus musculus
  siRNA target sequence for 5730578N08Rik (NM_025693.1,764-782).
ccgggaacgctcatcaaaa

SEQ ID NO: 717920 - DNA, 19 bp, Mus musculus
  siRNA target sequence for 5730578N08Rik (NM_025693.1,765-783).
cgggaacgctcatcaaaaa

SEQ ID NO: 717921 - DNA, 19 bp, Mus musculus
  siRNA target sequence for 5730578N08Rik (NM_025693.1,768-786).
gaacgctcatcaaaaaatt

SEQ ID NO: 717922 - DNA, 19 bp, Mus musculus
  siRNA target sequence for 5730578N08Rik (NM_025693.1,797-815).
cgcctggcgctgagtgaaa

SEQ ID NO: 717923 - DNA, 19 bp, Mus musculus
  siRNA target sequence for 6330409N04Rik (NM_025697.1,360-378).
gcacatgggaacagatgtt

SEQ ID NO: 717924 - DNA, 19 bp, Mus musculus
  siRNA target sequence for 6330409N04Rik (NM_025697.1,428-446).
ccagtgcacccttacatca

SEQ ID NO: 717925 - DNA, 19 bp, Mus musculus
  siRNA target sequence for 6330409N04Rik (NM_025697.1,431-449).
gtgcacccttacatcagaa

SEQ ID NO: 717926 - DNA, 19 bp, Mus musculus
  siRNA target sequence for 6330409N04Rik (NM_025697.1,436-454).
cccttacatcagaacaaaa

SEQ ID NO: 717927 - DNA, 19 bp, Mus musculus
  siRNA target sequence for 6330409N04Rik (NM_025697.1,455-473).
gctactttgagttcaaaat

SEQ ID NO: 717928 - DNA, 19 bp, Mus musculus
  siRNA target sequence for 6330409N04Rik (NM_025697.1,509-527).
ctcagaaagttaacttgaa

SEQ ID NO: 717929 - DNA, 19 bp, Mus musculus
  siRNA target sequence for 6330409N04Rik (NM_025697.1,659-677).
catatgaccatgtagaatt

SEQ ID NO: 717930 - DNA, 19 bp, Mus musculus
  siRNA target sequence for 6330409N04Rik (NM_025697.1,786-804).
cagtgaattttatcatact

SEQ ID NO: 717931 - DNA, 19 bp, Mus musculus
  siRNA target sequence for 3230401D17Rik (NM_025699.2,150-168).
ccttcaagaaattaagagt

SEQ ID NO: 717932 - DNA, 19 bp, Mus musculus
  siRNA target sequence for 3230401D17Rik (NM_025699.2,172-190).
cgcatcagggtccatcata

SEQ ID NO: 717933 - DNA, 19 bp, Mus musculus
  siRNA target sequence for 3230401D17Rik (NM_025699.2,173-191).
gcatcagggtccatcatat

SEQ ID NO: 717934 - DNA, 19 bp, Mus musculus
  siRNA target sequence for 3230401D17Rik (NM_025699.2,237-255).
cagcagccgatgataccaa

SEQ ID NO: 717935 - DNA, 19 bp, Mus musculus
  siRNA target sequence for 3230401D17Rik (NM_025699.2,248-266).
gataccaaaccgaaaacca

SEQ ID NO: 717936 - DNA, 19 bp, Mus musculus
  siRNA target sequence for 3230401D17Rik (NM_025699.2,264-282).
ccatgtgtgcatctaaaga

SEQ ID NO: 717937 - DNA, 19 bp, Mus musculus
  siRNA target sequence for 3230401D17Rik (NM_025699.2,293-311).
gggtctacaaggaagtctt

SEQ ID NO: 717938 - DNA, 19 bp, Mus musculus
  siRNA target sequence for 3230401D17Rik (NM_025699.2,335-353).
cgtcgtagacggtctaagt

SEQ ID NO: 717939 - DNA, 19 bp, Mus musculus
  siRNA target sequence for 3230401D17Rik (NM_025699.2,379-397).
catacattgcagtacaaca

SEQ ID NO: 717940 - DNA, 19 bp, Mus musculus
  siRNA target sequence for 3230401D17Rik (NM_025699.2,570-588).
ggctcccatcagagagtaa

SEQ ID NO: 717941 - DNA, 19 bp, Mus musculus
  siRNA target sequence for 3230401D17Rik (NM_025699.2,574-592).
cccatcagagagtaaaaca

SEQ ID NO: 717942 - DNA, 19 bp, Mus musculus
  siRNA target sequence for 3230401D17Rik (NM_025699.2,643-661).
cgatctctctgactttcaa

SEQ ID NO: 717943 - DNA, 19 bp, Mus musculus
  siRNA target sequence for Trappc5 (NM_025701.2,182-200).
gcgcctttgcccttctctt

SEQ ID NO: 717944 - DNA, 19 bp, Mus musculus
  siRNA target sequence for Trappc5 (NM_025701.2,601-619).
gggaccacactcatgatca

SEQ ID NO: 717945 - DNA, 19 bp, Mus musculus
  siRNA target sequence for Trappc5 (NM_025701.2,602-620).
ggaccacactcatgatcaa

SEQ ID NO: 717946 - DNA, 19 bp, Mus musculus
  siRNA target sequence for Trappc5 (NM_025701.2,605-623).
ccacactcatgatcaaatt

SEQ ID NO: 717947 - DNA, 19 bp, Mus musculus
  siRNA target sequence for Trappc5 (NM_025701.2,606-624).
cacactcatgatcaaattt

SEQ ID NO: 717948 - DNA, 19 bp, Mus musculus
  siRNA target sequence for Trappc5 (NM_025701.2,608-626).
cactcatgatcaaatttga

SEQ ID NO: 717949 - DNA, 19 bp, Mus musculus
  siRNA target sequence for 3526402H21Rik (NM_025702.2,453-471).
catacagtatatcatctaa

SEQ ID NO: 717950 - DNA, 19 bp, Mus musculus
  siRNA target sequence for 3526402H21Rik (NM_025702.2,491-509).
gtcaggaatgctgagtatt

SEQ ID NO: 717951 - DNA, 19 bp, Mus musculus
  siRNA target sequence for 3526402H21Rik (NM_025702.2,503-521).
gagtattatagcgtattga

SEQ ID NO: 717952 - DNA, 19 bp, Mus musculus
  siRNA target sequence for 3526402H21Rik (NM_025702.2,670-688).
gtatgttaccagtcactta

SEQ ID NO: 717953 - DNA, 19 bp, Mus musculus
  siRNA target sequence for 3526402H21Rik (NM_025702.2,710-728).
cttttccccctgctttgtt

SEQ ID NO: 717954 - DNA, 19 bp, Mus musculus
  siRNA target sequence for 3930402F23Rik (NM_025703.2,228-246).
cgaaggccatccttcagaa

SEQ ID NO: 717955 - DNA, 19 bp, Mus musculus
  siRNA target sequence for 3930402F23Rik (NM_025703.2,365-383).
ctcccgcaaggcatctgaa

SEQ ID NO: 717956 - DNA, 19 bp, Mus musculus
  siRNA target sequence for 3930402F23Rik (NM_025703.2,381-399).
gaaccccgaagaagtgata

SEQ ID NO: 717957 - DNA, 19 bp, Mus musculus
  siRNA target sequence for 3930402F23Rik (NM_025703.2,384-402).
ccccgaagaagtgataaga

SEQ ID NO: 717958 - DNA, 19 bp, Mus musculus
  siRNA target sequence for 3930402F23Rik (NM_025703.2,468-486).
gcattggaagcaaagacat

SEQ ID NO: 717959 - DNA, 19 bp, Mus musculus
  siRNA target sequence for Dcbld1 (NM_025705.1,254-272).
gtggcacaatgacatctaa

SEQ ID NO: 717960 - DNA, 19 bp, Mus musculus
  siRNA target sequence for Dcbld1 (NM_025705.1,258-276).
cacaatgacatctaagaat

SEQ ID NO: 717961 - DNA, 19 bp, Mus musculus
  siRNA target sequence for Dcbld1 (NM_025705.1,281-299).
cagggacttaccccaatta

SEQ ID NO: 717962 - DNA, 19 bp, Mus musculus
  siRNA target sequence for Dcbld1 (NM_025705.1,285-303).
gacttaccccaattacact

SEQ ID NO: 717963 - DNA, 19 bp, Mus musculus
  siRNA target sequence for Dcbld1 (NM_025705.1,354-372).
gttgggagatttgaacatt

SEQ ID NO: 717964 - DNA, 19 bp, Mus musculus
  siRNA target sequence for Dcbld1 (NM_025705.1,383-401).
cctgcgcttctgactatct

SEQ ID NO: 717965 - DNA, 19 bp, Mus musculus
  siRNA target sequence for Dcbld1 (NM_025705.1,410-428).
gcagtgcaacagatcagta

SEQ ID NO: 717966 - DNA, 19 bp, Mus musculus
  siRNA target sequence for Dcbld1 (NM_025705.1,411-429).
cagtgcaacagatcagtat

SEQ ID NO: 717967 - DNA, 19 bp, Mus musculus
  siRNA target sequence for Dcbld1 (NM_025705.1,421-439).
gatcagtatggtccatatt

SEQ ID NO: 717968 - DNA, 19 bp, Mus musculus
  siRNA target sequence for Dcbld1 (NM_025705.1,449-467).
gggctgttcccaaagaact

SEQ ID NO: 717969 - DNA, 19 bp, Mus musculus
  siRNA target sequence for Dcbld1 (NM_025705.1,463-481).
gaactccggctgaactcaa

SEQ ID NO: 717970 - DNA, 19 bp, Mus musculus
  siRNA target sequence for Dcbld1 (NM_025705.1,468-486).
ccggctgaactcaaacgaa

SEQ ID NO: 717971 - DNA, 19 bp, Mus musculus
  siRNA target sequence for Dcbld1 (NM_025705.1,504-522).
gagtggatctcacatttct

SEQ ID NO: 717972 - DNA, 19 bp, Mus musculus
  siRNA target sequence for Dcbld1 (NM_025705.1,559-577).
catccagatttaataacct

SEQ ID NO: 717973 - DNA, 19 bp, Mus musculus
  siRNA target sequence for Dcbld1 (NM_025705.1,582-600).
ggaacgaggcagccattat

SEQ ID NO: 717974 - DNA, 19 bp, Mus musculus
  siRNA target sequence for Dcbld1 (NM_025705.1,587-605).
gaggcagccattatttcga

SEQ ID NO: 717975 - DNA, 19 bp, Mus musculus
  siRNA target sequence for Dcbld1 (NM_025705.1,643-661).
gacatagcaggagatattt

SEQ ID NO: 717976 - DNA, 19 bp, Mus musculus
  siRNA target sequence for Dcbld1 (NM_025705.1,725-743).
ggatcatcacagatgaact

SEQ ID NO: 717977 - DNA, 19 bp, Mus musculus
  siRNA target sequence for Dcbld1 (NM_025705.1,726-744).
gatcatcacagatgaacta

SEQ ID NO: 717978 - DNA, 19 bp, Mus musculus
  siRNA target sequence for Dcbld1 (NM_025705.1,771-789).
caaagggataagtcactat

SEQ ID NO: 717979 - DNA, 19 bp, Mus musculus
  siRNA target sequence for Dcbld1 (NM_025705.1,857-875).
caaccccaggaatgaatat

SEQ ID NO: 717980 - DNA, 19 bp, Mus musculus
  siRNA target sequence for Dcbld1 (NM_025705.1,925-943).
ggaatggggatctttgcaa

SEQ ID NO: 717981 - DNA, 19 bp, Mus musculus
  siRNA target sequence for Dcbld1 (NM_025705.1,926-944).
gaatggggatctttgcaat

SEQ ID NO: 717982 - DNA, 19 bp, Mus musculus
  siRNA target sequence for Dcbld1 (NM_025705.1,981-999).
gtcagctgacgctcagaaa

SEQ ID NO: 717983 - DNA, 19 bp, Mus musculus
  siRNA target sequence for Dcbld1 (NM_025705.1,985-1003).
gctgacgctcagaaaacaa

SEQ ID NO: 717984 - DNA, 19 bp, Mus musculus
  siRNA target sequence for Dcbld1 (NM_025705.1,1038-1056).
gcatcagtcgacggaattt

SEQ ID NO: 717985 - DNA, 19 bp, Mus musculus
  siRNA target sequence for Dcbld1 (NM_025705.1,1039-1057).
catcagtcgacggaattta

SEQ ID NO: 717986 - DNA, 19 bp, Mus musculus
  siRNA target sequence for Dcbld1 (NM_025705.1,1042-1060).
cagtcgacggaatttacca

SEQ ID NO: 717987 - DNA, 19 bp, Mus musculus
  siRNA target sequence for Dcbld1 (NM_025705.1,1098-1116).
ggatctcatcactagtgat

SEQ ID NO: 717988 - DNA, 19 bp, Mus musculus
  siRNA target sequence for Dcbld1 (NM_025705.1,1099-1117).
gatctcatcactagtgata

SEQ ID NO: 717989 - DNA, 19 bp, Mus musculus
  siRNA target sequence for Dcbld1 (NM_025705.1,1112-1130).
gtgatatggcagattatca

SEQ ID NO: 717990 - DNA, 19 bp, Mus musculus
  siRNA target sequence for Dcbld1 (NM_025705.1,1290-1308).
gcactcagaacctgagtat

SEQ ID NO: 717991 - DNA, 19 bp, Mus musculus
  siRNA target sequence for Dcbld1 (NM_025705.1,1622-1640).
cggccatgactgctctttt

SEQ ID NO: 717992 - DNA, 19 bp, Mus musculus
  siRNA target sequence for 4432405K22Rik (NM_025706.2,84-102).
gagcgggaagattatatat

SEQ ID NO: 717993 - DNA, 19 bp, Mus musculus
  siRNA target sequence for 4432405K22Rik (NM_025706.2,86-104).
gcgggaagattatatatga

SEQ ID NO: 717994 - DNA, 19 bp, Mus musculus
  siRNA target sequence for 4432405K22Rik (NM_025706.2,87-105).
cgggaagattatatatgaa

SEQ ID NO: 717995 - DNA, 19 bp, Mus musculus
  siRNA target sequence for 4432405K22Rik (NM_025706.2,109-127).
gaaggagtatatattcact

SEQ ID NO: 717996 - DNA, 19 bp, Mus musculus
  siRNA target sequence for 4432405K22Rik (NM_025706.2,131-149).
cttgcggaaaggcaaatga

SEQ ID NO: 717997 - DNA, 19 bp, Mus musculus
  siRNA target sequence for 4432405K22Rik (NM_025706.2,148-166).
gaccaagacagcttgattt

SEQ ID NO: 717998 - DNA, 19 bp, Mus musculus
  siRNA target sequence for 4432405K22Rik (NM_025706.2,170-188).
gaatattgcgtgttttaga

SEQ ID NO: 717999 - DNA, 19 bp, Mus musculus
  siRNA target sequence for 4432405K22Rik (NM_025706.2,177-195).
gcgtgttttagaaaaggat

SEQ ID NO: 718000 - DNA, 19 bp, Mus musculus
  siRNA target sequence for 4432405K22Rik (NM_025706.2,218-236).
gaccattggatgatgcatt

SEQ ID NO: 718001 - DNA, 19 bp, Mus musculus
  siRNA target sequence for 4432405K22Rik (NM_025706.2,225-243).
ggatgatgcattagattct

SEQ ID NO: 718002 - DNA, 19 bp, Mus musculus
  siRNA target sequence for 4432405K22Rik (NM_025706.2,238-256).
gattcttccagtattctgt

SEQ ID NO: 718003 - DNA, 19 bp, Mus musculus
  siRNA target sequence for 4432405K22Rik (NM_025706.2,349-367).
gcggagtgggacatggtta

SEQ ID NO: 718004 - DNA, 19 bp, Mus musculus
  siRNA target sequence for 4432405K22Rik (NM_025706.2,352-370).
gagtgggacatggttacta

SEQ ID NO: 718005 - DNA, 19 bp, Mus musculus
  siRNA target sequence for 4432405K22Rik (NM_025706.2,364-382).
gttactacagtgtccttta

SEQ ID NO: 718006 - DNA, 19 bp, Mus musculus
  siRNA target sequence for 4432405K22Rik (NM_025706.2,595-613).
gagaaatacgtggtattgt

SEQ ID NO: 718007 - DNA, 19 bp, Mus musculus
  siRNA target sequence for 4432405K22Rik (NM_025706.2,597-615).
gaaatacgtggtattgtgt

SEQ ID NO: 718008 - DNA, 19 bp, Mus musculus
  siRNA target sequence for 4432405K22Rik (NM_025706.2,616-634).
gagtcaccacaagatagta

SEQ ID NO: 718009 - DNA, 19 bp, Mus musculus
  siRNA target sequence for 4432405K22Rik (NM_025706.2,632-650).
gtagaacacttctagtcaa

SEQ ID NO: 718010 - DNA, 19 bp, Mus musculus
  siRNA target sequence for 4432405K22Rik (NM_025706.2,638-656).
cacttctagtcaattgtca

SEQ ID NO: 718011 - DNA, 19 bp, Mus musculus
  siRNA target sequence for 4432405K22Rik (NM_025706.2,643-661).
ctagtcaattgtcagaata

SEQ ID NO: 718012 - DNA, 19 bp, Mus musculus
  siRNA target sequence for 4432405K22Rik (NM_025706.2,648-666).
caattgtcagaataagagt

SEQ ID NO: 718013 - DNA, 19 bp, Mus musculus
  siRNA target sequence for 4432405K22Rik (NM_025706.2,663-681).
gagtctctcacagtctttt

SEQ ID NO: 718014 - DNA, 19 bp, Mus musculus
  siRNA target sequence for 4432405K22Rik (NM_025706.2,665-683).
gtctctcacagtcttttga

SEQ ID NO: 718015 - DNA, 19 bp, Mus musculus
  siRNA target sequence for 4432405K22Rik (NM_025706.2,743-761).
cagcaaccatggtaggatt

SEQ ID NO: 718016 - DNA, 19 bp, Mus musculus
  siRNA target sequence for 4432405K22Rik (NM_025706.2,754-772).
gtaggattttccaaagtta

SEQ ID NO: 718017 - DNA, 19 bp, Mus musculus
  siRNA target sequence for 4432405K22Rik (NM_025706.2,833-851).
cagaaatggcagattttct

SEQ ID NO: 718018 - DNA, 19 bp, Mus musculus
  siRNA target sequence for 4432405K22Rik (NM_025706.2,835-853).
gaaatggcagattttctta

SEQ ID NO: 718019 - DNA, 19 bp, Mus musculus
  siRNA target sequence for 4432405K22Rik (NM_025706.2,898-916).
ggatttgaagtcatcacta

SEQ ID NO: 718020 - DNA, 19 bp, Mus musculus
  siRNA target sequence for 4432405K22Rik (NM_025706.2,907-925).
gtcatcactagaattgatt

SEQ ID NO: 718021 - DNA, 19 bp, Mus musculus
  siRNA target sequence for 4432405K22Rik (NM_025706.2,1041-1059).
cagagggggtcttagtcat

SEQ ID NO: 718022 - DNA, 19 bp, Mus musculus
  siRNA target sequence for 4432405K22Rik (NM_025706.2,1045-1063).
gggggtcttagtcattcat

SEQ ID NO: 718023 - DNA, 19 bp, Mus musculus
  siRNA target sequence for 4432405K22Rik (NM_025706.2,1047-1065).
gggtcttagtcattcatta

SEQ ID NO: 718024 - DNA, 19 bp, Mus musculus
  siRNA target sequence for 4432405K22Rik (NM_025706.2,1235-1253).
gaagtctgatcgagaaaga

SEQ ID NO: 718025 - DNA, 19 bp, Mus musculus
  siRNA target sequence for 4432405K22Rik (NM_025706.2,1238-1256).
gtctgatcgagaaagatgt

SEQ ID NO: 718026 - DNA, 19 bp, Mus musculus
  siRNA target sequence for 4432405K22Rik (NM_025706.2,1265-1283).
cagatcgaacgaacaagtt

SEQ ID NO: 718027 - DNA, 19 bp, Mus musculus
  siRNA target sequence for 4432405K22Rik (NM_025706.2,1267-1285).
gatcgaacgaacaagtttt

SEQ ID NO: 718028 - DNA, 19 bp, Mus musculus
  siRNA target sequence for 4432405K22Rik (NM_025706.2,1315-1333).
ctgcttcacgacattttga

SEQ ID NO: 718029 - DNA, 19 bp, Mus musculus
  siRNA target sequence for 4432405K22Rik (NM_025706.2,1332-1350).
gatgacctactgtatgtat

SEQ ID NO: 718030 - DNA, 19 bp, Mus musculus
  siRNA target sequence for 4432405K22Rik (NM_025706.2,1337-1355).
cctactgtatgtatgactt

SEQ ID NO: 718031 - DNA, 19 bp, Mus musculus
  siRNA target sequence for 4432405K22Rik (NM_025706.2,1338-1356).
ctactgtatgtatgacttt

SEQ ID NO: 718032 - DNA, 19 bp, Mus musculus
  siRNA target sequence for 4432405K22Rik (NM_025706.2,1375-1393).
ggaatgagcgacttacttt

SEQ ID NO: 718033 - DNA, 19 bp, Mus musculus
  siRNA target sequence for 4432405K22Rik (NM_025706.2,1404-1422).
gtatgtgatggagaatgaa

SEQ ID NO: 718034 - DNA, 19 bp, Mus musculus
  siRNA target sequence for 4432405K22Rik (NM_025706.2,1436-1454).
ggtgctttgcctcttacat

SEQ ID NO: 718035 - DNA, 19 bp, Mus musculus
  siRNA target sequence for 4432405K22Rik (NM_025706.2,1461-1479).
gatgcatcaaaattttgaa

SEQ ID NO: 718036 - DNA, 19 bp, Mus musculus
  siRNA target sequence for 4432405K22Rik (NM_025706.2,1483-1501).
caaatgcagggcatgaaga

SEQ ID NO: 718037 - DNA, 19 bp, Mus musculus
  siRNA target sequence for 4432405K22Rik (NM_025706.2,1492-1510).
ggcatgaagacgcagttaa

SEQ ID NO: 718038 - DNA, 19 bp, Mus musculus
  siRNA target sequence for 4432405K22Rik (NM_025706.2,1493-1511).
gcatgaagacgcagttaat

SEQ ID NO: 718039 - DNA, 19 bp, Mus musculus
  siRNA target sequence for 4432405K22Rik (NM_025706.2,1504-1522).
cagttaatccagttgagta

SEQ ID NO: 718040 - DNA, 19 bp, Mus musculus
  siRNA target sequence for 4432405K22Rik (NM_025706.2,1513-1531).
cagttgagtaccttactca

SEQ ID NO: 718041 - DNA, 19 bp, Mus musculus
  siRNA target sequence for 4432405K22Rik (NM_025706.2,1542-1560).
cagtggattttgtagctat

SEQ ID NO: 718042 - DNA, 19 bp, Mus musculus
  siRNA target sequence for 4432405K22Rik (NM_025706.2,1547-1565).
gattttgtagctatttaga

SEQ ID NO: 718043 - DNA, 19 bp, Mus musculus
  siRNA target sequence for 4432405K22Rik (NM_025706.2,1570-1588).
caggactctggatatctat

SEQ ID NO: 718044 - DNA, 19 bp, Mus musculus
  siRNA target sequence for 4432405K22Rik (NM_025706.2,1572-1590).
ggactctggatatctatat

SEQ ID NO: 718045 - DNA, 19 bp, Mus musculus
  siRNA target sequence for 4432405K22Rik (NM_025706.2,1585-1603).
ctatatttttgcttcagat

SEQ ID NO: 718046 - DNA, 19 bp, Mus musculus
  siRNA target sequence for 4432405K22Rik (NM_025706.2,1604-1622).
ggcttttaatcagatttaa

SEQ ID NO: 718047 - DNA, 19 bp, Mus musculus
  siRNA target sequence for 4432405K22Rik (NM_025706.2,1639-1657).
ctagatatacttcgattat

SEQ ID NO: 718048 - DNA, 19 bp, Mus musculus
  siRNA target sequence for 4432405K22Rik (NM_025706.2,1651-1669).
cgattatgggaggtaatgt

SEQ ID NO: 718049 - DNA, 19 bp, Mus musculus
  siRNA target sequence for 4432405K22Rik (NM_025706.2,1675-1693).
gaactgccctgtaagaatt

SEQ ID NO: 718050 - DNA, 19 bp, Mus musculus
  siRNA target sequence for 4432405K22Rik (NM_025706.2,1715-1733).
ccatcctggaatcagaaaa

SEQ ID NO: 718051 - DNA, 19 bp, Mus musculus
  siRNA target sequence for 4432405K22Rik (NM_025706.2,1753-1771).
cactatggcttcaatgaaa

SEQ ID NO: 718052 - DNA, 19 bp, Mus musculus
  siRNA target sequence for 4432405K22Rik (NM_025706.2,1791-1809).
gttgtccatgaagattgat

SEQ ID NO: 718053 - DNA, 19 bp, Mus musculus
  siRNA target sequence for 4432405K22Rik (NM_025706.2,1803-1821).
gattgatgtggaagatata

SEQ ID NO: 718054 - DNA, 19 bp, Mus musculus
  siRNA target sequence for 4432405K22Rik (NM_025706.2,1807-1825).
gatgtggaagatatactct

SEQ ID NO: 718055 - DNA, 19 bp, Mus musculus
  siRNA target sequence for 4432405K22Rik (NM_025706.2,1931-1949).
ccgacactgatgaaaatgt

SEQ ID NO: 718056 - DNA, 19 bp, Mus musculus
  siRNA target sequence for 4432405K22Rik (NM_025706.2,1932-1950).
cgacactgatgaaaatgtt

SEQ ID NO: 718057 - DNA, 19 bp, Mus musculus
  siRNA target sequence for 4432405K22Rik (NM_025706.2,2025-2043).
cagtccaacacagacatta

SEQ ID NO: 718058 - DNA, 19 bp, Mus musculus
  siRNA target sequence for 4432405K22Rik (NM_025706.2,2049-2067).
cccgaatgcctgcagatta

SEQ ID NO: 718059 - DNA, 19 bp, Mus musculus
  siRNA target sequence for 4432405K22Rik (NM_025706.2,2050-2068).
ccgaatgcctgcagattaa

SEQ ID NO: 718060 - DNA, 19 bp, Mus musculus
  siRNA target sequence for 4432405K22Rik (NM_025706.2,2052-2070).
gaatgcctgcagattaaca

SEQ ID NO: 718061 - DNA, 19 bp, Mus musculus
  siRNA target sequence for 4432406C05Rik (NM_025708.1,302-320).
cagggggattccaaaaggt

SEQ ID NO: 718062 - DNA, 19 bp, Mus musculus
  siRNA target sequence for 4432406C05Rik (NM_025708.1,362-380).
ggcaccgagaccgaaacat

SEQ ID NO: 718063 - DNA, 19 bp, Mus musculus
  siRNA target sequence for 4432406C05Rik (NM_025708.1,363-381).
gcaccgagaccgaaacatt

SEQ ID NO: 718064 - DNA, 19 bp, Mus musculus
  siRNA target sequence for 4432406C05Rik (NM_025708.1,681-699).
gtgccgtgtcagacatgat

SEQ ID NO: 718065 - DNA, 19 bp, Mus musculus
  siRNA target sequence for 4432406C05Rik (NM_025708.1,723-741).
gggttcaggatgtgtttgt

SEQ ID NO: 718066 - DNA, 19 bp, Mus musculus
  siRNA target sequence for 4432404J10Rik (NM_025709.2,586-604).
gtgaagctagatattcaca

SEQ ID NO: 718067 - DNA, 19 bp, Mus musculus
  siRNA target sequence for 4432404J10Rik (NM_025709.2,621-639).
caagcaggaacgcttatat

SEQ ID NO: 718068 - DNA, 19 bp, Mus musculus
  siRNA target sequence for 4432404J10Rik (NM_025709.2,625-643).
caggaacgcttatatgtga

SEQ ID NO: 718069 - DNA, 19 bp, Mus musculus
  siRNA target sequence for 4432404J10Rik (NM_025709.2,657-675).
gctcattcagaggctaaat

SEQ ID NO: 718070 - DNA, 19 bp, Mus musculus
  siRNA target sequence for 4432404J10Rik (NM_025709.2,668-686).
ggctaaatgccgatgtact

SEQ ID NO: 718071 - DNA, 19 bp, Mus musculus
  siRNA target sequence for 4432404J10Rik (NM_025709.2,694-712).
gctgaaaagctgtatcgaa

SEQ ID NO: 718072 - DNA, 19 bp, Mus musculus
  siRNA target sequence for 4432404J10Rik (NM_025709.2,709-727).
cgaacagcgtggattgcaa

SEQ ID NO: 718073 - DNA, 19 bp, Mus musculus
  siRNA target sequence for 4432404J10Rik (NM_025709.2,710-728).
gaacagcgtggattgcaaa

SEQ ID NO: 718074 - DNA, 19 bp, Mus musculus
  siRNA target sequence for 4432404J10Rik (NM_025709.2,748-766).
gatcgtcttattataacca

SEQ ID NO: 718075 - DNA, 19 bp, Mus musculus
  siRNA target sequence for 4432404J10Rik (NM_025709.2,821-839).
cacagtttgttgatggata

SEQ ID NO: 718076 - DNA, 19 bp, Mus musculus
  siRNA target sequence for 4432404J10Rik (NM_025709.2,823-841).
cagtttgttgatggatata

SEQ ID NO: 718077 - DNA, 19 bp, Mus musculus
  siRNA target sequence for 4432404J10Rik (NM_025709.2,880-898).
ctgagtcggttaagagaaa

SEQ ID NO: 718078 - DNA, 19 bp, Mus musculus
  siRNA target sequence for 4432404J10Rik (NM_025709.2,893-911).
gagaaaatccacgacttat

SEQ ID NO: 718079 - DNA, 19 bp, Mus musculus
  siRNA target sequence for 4432404J10Rik (NM_025709.2,1033-1051).
caggttttacgatacttga

SEQ ID NO: 718080 - DNA, 19 bp, Mus musculus
  siRNA target sequence for 4432404J10Rik (NM_025709.2,1035-1053).
ggttttacgatacttgatt

SEQ ID NO: 718081 - DNA, 19 bp, Mus musculus
  siRNA target sequence for 4432404J10Rik (NM_025709.2,1047-1065).
cttgattgaatttgaactt

SEQ ID NO: 718082 - DNA, 19 bp, Mus musculus
  siRNA target sequence for 4432404J10Rik (NM_025709.2,1109-1127).
gtgccttcagcatcttatt

SEQ ID NO: 718083 - DNA, 19 bp, Mus musculus
  siRNA target sequence for 4432404J10Rik (NM_025709.2,1112-1130).
ccttcagcatcttatttaa

SEQ ID NO: 718084 - DNA, 19 bp, Mus musculus
  siRNA target sequence for 4432404J10Rik (NM_025709.2,1167-1185).
ccttacggctactttgcat

SEQ ID NO: 718085 - DNA, 19 bp, Mus musculus
  siRNA target sequence for 4432404J10Rik (NM_025709.2,1178-1196).
ctttgcatgagccaatcat

SEQ ID NO: 718086 - DNA, 19 bp, Mus musculus
  siRNA target sequence for 4432404J10Rik (NM_025709.2,1237-1255).
ccaaacaagctgatagaga

SEQ ID NO: 718087 - DNA, 19 bp, Mus musculus
  siRNA target sequence for 4432404J10Rik (NM_025709.2,1245-1263).
gctgatagagagattctct

SEQ ID NO: 718088 - DNA, 19 bp, Mus musculus
  siRNA target sequence for 4432404J10Rik (NM_025709.2,1293-1311).
gaaaggctcagatagattt

SEQ ID NO: 718089 - DNA, 19 bp, Mus musculus
  siRNA target sequence for 4432404J10Rik (NM_025709.2,1340-1358).
ccaatgaggctaaactagt

SEQ ID NO: 718090 - DNA, 19 bp, Mus musculus
  siRNA target sequence for 4432404J10Rik (NM_025709.2,1359-1377).
ggctttggtgaacaaattt

SEQ ID NO: 718091 - DNA, 19 bp, Mus musculus
  siRNA target sequence for 4432404J10Rik (NM_025709.2,1438-1456).
cagatgtacaaaactcttt

SEQ ID NO: 718092 - DNA, 19 bp, Mus musculus
  siRNA target sequence for 4432404J10Rik (NM_025709.2,1493-1511).
caatgtgtaccgatcttct

SEQ ID NO: 718093 - DNA, 19 bp, Mus musculus
  siRNA target sequence for 4432404J10Rik (NM_025709.2,1551-1569).
gcagtatgggataatatct

SEQ ID NO: 718094 - DNA, 19 bp, Mus musculus
  siRNA target sequence for 4432404J10Rik (NM_025709.2,1554-1572).
gtatgggataatatctgat

SEQ ID NO: 718095 - DNA, 19 bp, Mus musculus
  siRNA target sequence for 4432404J10Rik (NM_025709.2,1568-1586).
ctgatgctcctattaatga

SEQ ID NO: 718096 - DNA, 19 bp, Mus musculus
  siRNA target sequence for 4432404J10Rik (NM_025709.2,1657-1675).
ggagatccccggaccaaaa

SEQ ID NO: 718097 - DNA, 19 bp, Mus musculus
  siRNA target sequence for 4432404J10Rik (NM_025709.2,1658-1676).
gagatccccggaccaaaaa

SEQ ID NO: 718098 - DNA, 19 bp, Mus musculus
  siRNA target sequence for 4432404J10Rik (NM_025709.2,1754-1772).
cgccaatgtcctctgttaa

SEQ ID NO: 718099 - DNA, 19 bp, Mus musculus
  siRNA target sequence for 4432404J10Rik (NM_025709.2,1798-1816).
gtggtgtatataagttaca

SEQ ID NO: 718100 - DNA, 19 bp, Mus musculus
  siRNA target sequence for 4432404J10Rik (NM_025709.2,1821-1839).
gcttattactctggtaaat

SEQ ID NO: 718101 - DNA, 19 bp, Mus musculus
  siRNA target sequence for 4432404J10Rik (NM_025709.2,1948-1966).
gacatgactccctatagca

SEQ ID NO: 718102 - DNA, 19 bp, Mus musculus
  siRNA target sequence for 4432404J10Rik (NM_025709.2,1996-2014).
gccaacaagaagaatcgat

SEQ ID NO: 718103 - DNA, 19 bp, Mus musculus
  siRNA target sequence for 4432404J10Rik (NM_025709.2,2001-2019).
caagaagaatcgattacct

SEQ ID NO: 718104 - DNA, 19 bp, Mus musculus
  siRNA target sequence for 4432404J10Rik (NM_025709.2,2004-2022).
gaagaatcgattacctata

SEQ ID NO: 718105 - DNA, 19 bp, Mus musculus
  siRNA target sequence for 4432404J10Rik (NM_025709.2,2030-2048).
ggagcagaagccgaagtaa

SEQ ID NO: 718106 - DNA, 19 bp, Mus musculus
  siRNA target sequence for 4432404J10Rik (NM_025709.2,2031-2049).
gagcagaagccgaagtaat

SEQ ID NO: 718107 - DNA, 19 bp, Mus musculus
  siRNA target sequence for 4432404J10Rik (NM_025709.2,2036-2054).
gaagccgaagtaatatgtt

SEQ ID NO: 718108 - DNA, 19 bp, Mus musculus
  siRNA target sequence for 4432404J10Rik (NM_025709.2,2039-2057).
gccgaagtaatatgttaat

SEQ ID NO: 718109 - DNA, 19 bp, Mus musculus
  siRNA target sequence for 4432404J10Rik (NM_025709.2,2061-2079).
cctacatatggatcatgaa

SEQ ID NO: 718110 - DNA, 19 bp, Mus musculus
  siRNA target sequence for 4432404J10Rik (NM_025709.2,2119-2137).
gaggtgctggtcatttcct

SEQ ID NO: 718111 - DNA, 19 bp, Mus musculus
  siRNA target sequence for 4432404J10Rik (NM_025709.2,2161-2179).
ccagggatgatgtcagaaa

SEQ ID NO: 718112 - DNA, 19 bp, Mus musculus
  siRNA target sequence for 4432404J10Rik (NM_025709.2,2254-2272).
ccttccaatcgctccaatt

SEQ ID NO: 718113 - DNA, 19 bp, Mus musculus
  siRNA target sequence for 4432404J10Rik (NM_025709.2,2292-2310).
ggagggagagtctgtatct

SEQ ID NO: 718114 - DNA, 19 bp, Mus musculus
  siRNA target sequence for 4432404J10Rik (NM_025709.2,2367-2385).
gcacgagcaagctacaaca

SEQ ID NO: 718115 - DNA, 19 bp, Mus musculus
  siRNA target sequence for 4432404J10Rik (NM_025709.2,2370-2388).
cgagcaagctacaacacaa

SEQ ID NO: 718116 - DNA, 19 bp, Mus musculus
  siRNA target sequence for 4432404J10Rik (NM_025709.2,2373-2391).
gcaagctacaacacaagat

SEQ ID NO: 718117 - DNA, 19 bp, Mus musculus
  siRNA target sequence for 4432404J10Rik (NM_025709.2,2374-2392).
caagctacaacacaagata

SEQ ID NO: 718118 - DNA, 19 bp, Mus musculus
  siRNA target sequence for 4432404J10Rik (NM_025709.2,2384-2402).
cacaagataatcttgatga

SEQ ID NO: 718119 - DNA, 19 bp, Mus musculus
  siRNA target sequence for 4432404J10Rik (NM_025709.2,2511-2529).
cgacccgaacgttgatgaa

SEQ ID NO: 718120 - DNA, 19 bp, Mus musculus
  siRNA target sequence for 4432404J10Rik (NM_025709.2,2560-2578).
gcagagaacgtgttaggta

SEQ ID NO: 718121 - DNA, 19 bp, Mus musculus
  siRNA target sequence for 4432404J10Rik (NM_025709.2,2627-2645).
ctggctctaccatatcaga

SEQ ID NO: 718122 - DNA, 19 bp, Mus musculus
  siRNA target sequence for 4432404J10Rik (NM_025709.2,2660-2678).
cttggagtgtagaggtatt

SEQ ID NO: 718123 - DNA, 19 bp, Mus musculus
  siRNA target sequence for 4432404J10Rik (NM_025709.2,2688-2706).
ctcagaggctccagactta

SEQ ID NO: 718124 - DNA, 19 bp, Mus musculus
  siRNA target sequence for 4432404J10Rik (NM_025709.2,2690-2708).
cagaggctccagacttaaa

SEQ ID NO: 718125 - DNA, 19 bp, Mus musculus
  siRNA target sequence for 4432404J10Rik (NM_025709.2,2752-2770).
ggcagcacatctgatgata

SEQ ID NO: 718126 - DNA, 19 bp, Mus musculus
  siRNA target sequence for 4432404J10Rik (NM_025709.2,2843-2861).
cggaggatattcccaataa

SEQ ID NO: 718127 - DNA, 19 bp, Mus musculus
  siRNA target sequence for 4432404J10Rik (NM_025709.2,2902-2920).
ggcaaagattctgtaacta

SEQ ID NO: 718128 - DNA, 19 bp, Mus musculus
  siRNA target sequence for 4432404J10Rik (NM_025709.2,2904-2922).
caaagattctgtaactagt

SEQ ID NO: 718129 - DNA, 19 bp, Mus musculus
  siRNA target sequence for 4432404J10Rik (NM_025709.2,2912-2930).
ctgtaactagtccagatat

SEQ ID NO: 718130 - DNA, 19 bp, Mus musculus
  siRNA target sequence for 4432404J10Rik (NM_025709.2,2921-2939).
gtccagatatggatgacat

SEQ ID NO: 718131 - DNA, 19 bp, Mus musculus
  siRNA target sequence for 4432404J10Rik (NM_025709.2,3123-3141).
ggccaggttgccaaacttt

SEQ ID NO: 718132 - DNA, 19 bp, Mus musculus
  siRNA target sequence for 4432404J10Rik (NM_025709.2,3214-3232).
cgcagcagaagctctgata

SEQ ID NO: 718133 - DNA, 19 bp, Mus musculus
  siRNA target sequence for 4432404J10Rik (NM_025709.2,3215-3233).
gcagcagaagctctgatat

SEQ ID NO: 718134 - DNA, 19 bp, Mus musculus
  siRNA target sequence for 4432404J10Rik (NM_025709.2,3216-3234).
cagcagaagctctgatata

SEQ ID NO: 718135 - DNA, 19 bp, Mus musculus
  siRNA target sequence for 4432404J10Rik (NM_025709.2,3276-3294).
ccgacgtccagggaatgaa

SEQ ID NO: 718136 - DNA, 19 bp, Mus musculus
  siRNA target sequence for 4432404J10Rik (NM_025709.2,3278-3296).
gacgtccagggaatgaaga

SEQ ID NO: 718137 - DNA, 19 bp, Mus musculus
  siRNA target sequence for 4432404J10Rik (NM_025709.2,3314-3332).
ccactggtgctacttcttt

SEQ ID NO: 718138 - DNA, 19 bp, Mus musculus
  siRNA target sequence for 4432404J10Rik (NM_025709.2,3471-3489).
gcctaaagctcctatacca

SEQ ID NO: 718139 - DNA, 19 bp, Mus musculus
  siRNA target sequence for 4432404J10Rik (NM_025709.2,3473-3491).
ctaaagctcctataccatt

SEQ ID NO: 718140 - DNA, 19 bp, Mus musculus
  siRNA target sequence for 4432404J10Rik (NM_025709.2,3478-3496).
gctcctataccatttagaa

SEQ ID NO: 718141 - DNA, 19 bp, Mus musculus
  siRNA target sequence for 4432404J10Rik (NM_025709.2,3481-3499).
cctataccatttagaaaga

SEQ ID NO: 718142 - DNA, 19 bp, Mus musculus
  siRNA target sequence for 4432404J10Rik (NM_025709.2,3482-3500).
ctataccatttagaaagaa

SEQ ID NO: 718143 - DNA, 19 bp, Mus musculus
  siRNA target sequence for 4432404J10Rik (NM_025709.2,3532-3550).
ggtcctgacagattctcaa

SEQ ID NO: 718144 - DNA, 19 bp, Mus musculus
  siRNA target sequence for 4432404J10Rik (NM_025709.2,3618-3636).
gtaccggaatgccattaaa

SEQ ID NO: 718145 - DNA, 19 bp, Mus musculus
  siRNA target sequence for 4432404J10Rik (NM_025709.2,3863-3881).
ccttcccagtgctaactca

SEQ ID NO: 718146 - DNA, 19 bp, Mus musculus
  siRNA target sequence for 4432404J10Rik (NM_025709.2,3864-3882).
cttcccagtgctaactcat

SEQ ID NO: 718147 - DNA, 19 bp, Mus musculus
  siRNA target sequence for 4432404J10Rik (NM_025709.2,3867-3885).
cccagtgctaactcattca

SEQ ID NO: 718148 - DNA, 19 bp, Mus musculus
  siRNA target sequence for 4432404J10Rik (NM_025709.2,3868-3886).
ccagtgctaactcattcaa

SEQ ID NO: 718149 - DNA, 19 bp, Mus musculus
  siRNA target sequence for 4432404J10Rik (NM_025709.2,3871-3889).
gtgctaactcattcaacaa

SEQ ID NO: 718150 - DNA, 19 bp, Mus musculus
  siRNA target sequence for 4432404J10Rik (NM_025709.2,3915-3933).
cccagaagacaatgaaatt

SEQ ID NO: 718151 - DNA, 19 bp, Mus musculus
  siRNA target sequence for 4432404J10Rik (NM_025709.2,3928-3946).
gaaattgtatgcttcttaa

SEQ ID NO: 718152 - DNA, 19 bp, Mus musculus
  siRNA target sequence for 4432404J10Rik (NM_025709.2,3952-3970).
caaatagctgaagcaatta

SEQ ID NO: 718153 - DNA, 19 bp, Mus musculus
  siRNA target sequence for 4432404J10Rik (NM_025709.2,3964-3982).
gcaattaatttacaagata

SEQ ID NO: 718154 - DNA, 19 bp, Mus musculus
  siRNA target sequence for 4432404J10Rik (NM_025709.2,3986-4004).
gcttaatggctcaacttca

SEQ ID NO: 718155 - DNA, 19 bp, Mus musculus
  siRNA target sequence for 4432404J10Rik (NM_025709.2,3993-4011).
ggctcaacttcaagaaaca

SEQ ID NO: 718156 - DNA, 19 bp, Mus musculus
  siRNA target sequence for 4432404J10Rik (NM_025709.2,4019-4037).
gtgtgtgccgctttgacaa

SEQ ID NO: 718157 - DNA, 19 bp, Mus musculus
  siRNA target sequence for 4432404J10Rik (NM_025709.2,4050-4068).
gaagttgctggcatccatt

SEQ ID NO: 718158 - DNA, 19 bp, Mus musculus
  siRNA target sequence for 4432404J10Rik (NM_025709.2,4082-4100).
gaaaaagagctccgtatat

SEQ ID NO: 718159 - DNA, 19 bp, Mus musculus
  siRNA target sequence for 4432404J10Rik (NM_025709.2,4088-4106).
gagctccgtatattgctta

SEQ ID NO: 718160 - DNA, 19 bp, Mus musculus
  siRNA target sequence for 4432404J10Rik (NM_025709.2,4091-4109).
ctccgtatattgcttatct

SEQ ID NO: 718161 - DNA, 19 bp, Mus musculus
  siRNA target sequence for 4432404J10Rik (NM_025709.2,4093-4111).
ccgtatattgcttatctta

SEQ ID NO: 718162 - DNA, 19 bp, Mus musculus
  siRNA target sequence for 4432404J10Rik (NM_025709.2,4157-4175).
ggctcttgcaaagagtttt

SEQ ID NO: 718163 - DNA, 19 bp, Mus musculus
  siRNA target sequence for 4432404J10Rik (NM_025709.2,4169-4187).
gagttttgcgggacaaaga

SEQ ID NO: 718164 - DNA, 19 bp, Mus musculus
  siRNA target sequence for 4432404J10Rik (NM_025709.2,4189-4207).
gtggccaatcggtacttca

SEQ ID NO: 718165 - DNA, 19 bp, Mus musculus
  siRNA target sequence for 4432404J10Rik (NM_025709.2,4256-4274).
gggagttcattcaagactt

SEQ ID NO: 718166 - DNA, 19 bp, Mus musculus
  siRNA target sequence for 4432404J10Rik (NM_025709.2,4307-4325).
ctcaggtggaggattttct

SEQ ID NO: 718167 - DNA, 19 bp, Mus musculus
  siRNA target sequence for 4432404J10Rik (NM_025709.2,4410-4428).
cgagcggagtgtgatgaat

SEQ ID NO: 718168 - DNA, 19 bp, Mus musculus
  siRNA target sequence for 4432404J10Rik (NM_025709.2,4420-4438).
gtgatgaatcggatcttca

SEQ ID NO: 718169 - DNA, 19 bp, Mus musculus
  siRNA target sequence for 4432404J10Rik (NM_025709.2,4483-4501).
caggttctgcatgaacata

SEQ ID NO: 718170 - DNA, 19 bp, Mus musculus
  siRNA target sequence for 4432404J10Rik (NM_025709.2,4503-4521).
ccagagattatctaaagta

SEQ ID NO: 718171 - DNA, 19 bp, Mus musculus
  siRNA target sequence for 4432404J10Rik (NM_025709.2,4545-4563).
gcagatccctgaggtttat

SEQ ID NO: 718172 - DNA, 19 bp, Mus musculus
  siRNA target sequence for 4432404J10Rik (NM_025709.2,4604-4622).
ggacaataagtgcttacaa

SEQ ID NO: 718173 - DNA, 19 bp, Mus musculus
  siRNA target sequence for 4432404J10Rik (NM_025709.2,4605-4623).
gacaataagtgcttacaaa

SEQ ID NO: 718174 - DNA, 19 bp, Mus musculus
  siRNA target sequence for 4432404J10Rik (NM_025709.2,4853-4871).
cagcagccgtggagtttat

SEQ ID NO: 718175 - DNA, 19 bp, Mus musculus
  siRNA target sequence for 4432404J10Rik (NM_025709.2,4855-4873).
gcagccgtggagtttatta

SEQ ID NO: 718176 - DNA, 19 bp, Mus musculus
  siRNA target sequence for 4432404J10Rik (NM_025709.2,4856-4874).
cagccgtggagtttattaa

SEQ ID NO: 718177 - DNA, 19 bp, Mus musculus
  siRNA target sequence for 4432404J10Rik (NM_025709.2,4861-4879).
gtggagtttattaaaacca

SEQ ID NO: 718178 - DNA, 19 bp, Mus musculus
  siRNA target sequence for D3Ertd250e (NM_025714.1,123-141).
ggagatgcctactagtgat

SEQ ID NO: 718179 - DNA, 19 bp, Mus musculus
  siRNA target sequence for D3Ertd250e (NM_025714.1,157-175).
ggcctgatttcttatctca

SEQ ID NO: 718180 - DNA, 19 bp, Mus musculus
  siRNA target sequence for D3Ertd250e (NM_025714.1,234-252).
gcaagacgtcgcaaataca

SEQ ID NO: 718181 - DNA, 19 bp, Mus musculus
  siRNA target sequence for D3Ertd250e (NM_025714.1,235-253).
caagacgtcgcaaatacaa

SEQ ID NO: 718182 - DNA, 19 bp, Mus musculus
  siRNA target sequence for D3Ertd250e (NM_025714.1,238-256).
gacgtcgcaaatacaaaga

SEQ ID NO: 718183 - DNA, 19 bp, Mus musculus
  siRNA target sequence for D3Ertd250e (NM_025714.1,313-331).
cttttgccattatttaaga

SEQ ID NO: 718184 - DNA, 19 bp, Mus musculus
  siRNA target sequence for D3Ertd250e (NM_025714.1,339-357).
ggaaggaattagtctagaa

SEQ ID NO: 718185 - DNA, 19 bp, Mus musculus
  siRNA target sequence for D3Ertd250e (NM_025714.1,340-358).
gaaggaattagtctagaaa

SEQ ID NO: 718186 - DNA, 19 bp, Mus musculus
  siRNA target sequence for D3Ertd250e (NM_025714.1,350-368).
gtctagaaaacgctaatct

SEQ ID NO: 718187 - DNA, 19 bp, Mus musculus
  siRNA target sequence for D3Ertd250e (NM_025714.1,352-370).
ctagaaaacgctaatcttt

SEQ ID NO: 718188 - DNA, 19 bp, Mus musculus
  siRNA target sequence for D3Ertd250e (NM_025714.1,367-385).
ctttctgcatccagtttga

SEQ ID NO: 718189 - DNA, 19 bp, Mus musculus
  siRNA target sequence for D3Ertd250e (NM_025714.1,397-415).
gaacagaacgacatattat

SEQ ID NO: 718190 - DNA, 19 bp, Mus musculus
  siRNA target sequence for D3Ertd250e (NM_025714.1,405-423).
cgacatattatcaaaagaa

SEQ ID NO: 718191 - DNA, 19 bp, Mus musculus
  siRNA target sequence for D3Ertd250e (NM_025714.1,597-615).
ctcgtgtctgtttcagaat

SEQ ID NO: 718192 - DNA, 19 bp, Mus musculus
  siRNA target sequence for D3Ertd250e (NM_025714.1,637-655).
gcaaacaggctttctcaat

SEQ ID NO: 718193 - DNA, 19 bp, Mus musculus
  siRNA target sequence for D3Ertd250e (NM_025714.1,645-663).
gctttctcaatcagtcaaa

SEQ ID NO: 718194 - DNA, 19 bp, Mus musculus
  siRNA target sequence for D3Ertd250e (NM_025714.1,650-668).
ctcaatcagtcaaagtagt

SEQ ID NO: 718195 - DNA, 19 bp, Mus musculus
  siRNA target sequence for D3Ertd250e (NM_025714.1,677-695).
gtctacagcgccaaattca

SEQ ID NO: 718196 - DNA, 19 bp, Mus musculus
  siRNA target sequence for D3Ertd250e (NM_025714.1,1009-1027).
gaagtgcagatcgaaacaa

SEQ ID NO: 718197 - DNA, 19 bp, Mus musculus
  siRNA target sequence for D3Ertd250e (NM_025714.1,1012-1030).
gtgcagatcgaaacaatga

SEQ ID NO: 718198 - DNA, 19 bp, Mus musculus
  siRNA target sequence for D3Ertd250e (NM_025714.1,1014-1032).
gcagatcgaaacaatgaaa

SEQ ID NO: 718199 - DNA, 19 bp, Mus musculus
  siRNA target sequence for D3Ertd250e (NM_025714.1,1062-1080).
gagaaaaatggaaactcat

SEQ ID NO: 718200 - DNA, 19 bp, Mus musculus
  siRNA target sequence for D3Ertd250e (NM_025714.1,1195-1213).
gaagttgcttctgttgaaa

SEQ ID NO: 718201 - DNA, 19 bp, Mus musculus
  siRNA target sequence for D3Ertd250e (NM_025714.1,1312-1330).
gtgaaaagtagatgcaaaa

SEQ ID NO: 718202 - DNA, 19 bp, Mus musculus
  siRNA target sequence for D3Ertd250e (NM_025714.1,1322-1340).
gatgcaaaaatttactaca

SEQ ID NO: 718203 - DNA, 19 bp, Mus musculus
  siRNA target sequence for D3Ertd250e (NM_025714.1,1432-1450).
gaaaatcatctcattcagt

SEQ ID NO: 718204 - DNA, 19 bp, Mus musculus
  siRNA target sequence for D3Ertd250e (NM_025714.1,1438-1456).
catctcattcagttaaagt

SEQ ID NO: 718205 - DNA, 19 bp, Mus musculus
  siRNA target sequence for D3Ertd250e (NM_025714.1,1648-1666).
gtagagaaaatgtcatcta

SEQ ID NO: 718206 - DNA, 19 bp, Mus musculus
  siRNA target sequence for D3Ertd250e (NM_025714.1,1669-1687).
gagagggctttacaaatta

SEQ ID NO: 718207 - DNA, 19 bp, Mus musculus
  siRNA target sequence for D3Ertd250e (NM_025714.1,1673-1691).
gggctttacaaattaaaat

SEQ ID NO: 718208 - DNA, 19 bp, Mus musculus
  siRNA target sequence for D3Ertd250e (NM_025714.1,1738-1756).
caacttgttgacaagatga

SEQ ID NO: 718209 - DNA, 19 bp, Mus musculus
  siRNA target sequence for D3Ertd250e (NM_025714.1,1741-1759).
cttgttgacaagatgaaca

SEQ ID NO: 718210 - DNA, 19 bp, Mus musculus
  siRNA target sequence for D3Ertd250e (NM_025714.1,1744-1762).
gttgacaagatgaacacta

SEQ ID NO: 718211 - DNA, 19 bp, Mus musculus
  siRNA target sequence for D3Ertd250e (NM_025714.1,1823-1841).
ctcggaatgagagcattaa

SEQ ID NO: 718212 - DNA, 19 bp, Mus musculus
  siRNA target sequence for D3Ertd250e (NM_025714.1,1825-1843).
cggaatgagagcattaaga

SEQ ID NO: 718213 - DNA, 19 bp, Mus musculus
  siRNA target sequence for D3Ertd250e (NM_025714.1,1831-1849).
gagagcattaagaattact

SEQ ID NO: 718214 - DNA, 19 bp, Mus musculus
  siRNA target sequence for D3Ertd250e (NM_025714.1,1869-1887).
ctatgtaacgatgtttaga

SEQ ID NO: 718215 - DNA, 19 bp, Mus musculus
  siRNA target sequence for 4921504I05Rik (NM_025719.1,61-79).
cccgatctcgccctaatga

SEQ ID NO: 718216 - DNA, 19 bp, Mus musculus
  siRNA target sequence for 4921504I05Rik (NM_025719.1,123-141).
ccaccgtcggcgttacaga

SEQ ID NO: 718217 - DNA, 19 bp, Mus musculus
  siRNA target sequence for 4921504I05Rik (NM_025719.1,329-347).
ccgttaccaccacaactat

SEQ ID NO: 718218 - DNA, 19 bp, Mus musculus
  siRNA target sequence for 4921504I05Rik (NM_025719.1,667-685).
ctagctctgatagtgataa

SEQ ID NO: 718219 - DNA, 19 bp, Mus musculus
  siRNA target sequence for 4921504I05Rik (NM_025719.1,838-856).
gtgcagagagcatggattt

SEQ ID NO: 718220 - DNA, 19 bp, Mus musculus
  siRNA target sequence for 4921504I05Rik (NM_025719.1,878-896).
gatacacacctctcaagat

SEQ ID NO: 718221 - DNA, 19 bp, Mus musculus
  siRNA target sequence for 4921504I05Rik (NM_025719.1,1078-1096).
ctgtaagactgcgtaaaga

SEQ ID NO: 718222 - DNA, 19 bp, Mus musculus
  siRNA target sequence for 4921504I05Rik (NM_025719.1,1080-1098).
gtaagactgcgtaaagaga

SEQ ID NO: 718223 - DNA, 19 bp, Mus musculus
  siRNA target sequence for 4921504I05Rik (NM_025719.1,1191-1209).
cgagaaatggtgtacagaa

SEQ ID NO: 718224 - DNA, 19 bp, Mus musculus
  siRNA target sequence for 4921508E09Rik (NM_025721.1,166-184).
gctggcgtatccaaccata

SEQ ID NO: 718225 - DNA, 19 bp, Mus musculus
  siRNA target sequence for 4921508E09Rik (NM_025721.1,169-187).
ggcgtatccaaccataact

SEQ ID NO: 718226 - DNA, 19 bp, Mus musculus
  siRNA target sequence for 4921508E09Rik (NM_025721.1,171-189).
cgtatccaaccataactgt

SEQ ID NO: 718227 - DNA, 19 bp, Mus musculus
  siRNA target sequence for 4921508E09Rik (NM_025721.1,194-212).
cccgatgaagagcagaatt

SEQ ID NO: 718228 - DNA, 19 bp, Mus musculus
  siRNA target sequence for 4921508E09Rik (NM_025721.1,195-213).
ccgatgaagagcagaattt

SEQ ID NO: 718229 - DNA, 19 bp, Mus musculus
  siRNA target sequence for 4921508E09Rik (NM_025721.1,203-221).
gagcagaatttgaatcatt

SEQ ID NO: 718230 - DNA, 19 bp, Mus musculus
  siRNA target sequence for 4921508E09Rik (NM_025721.1,272-290).
gatctcgggaaaaagttga

SEQ ID NO: 718231 - DNA, 19 bp, Mus musculus
  siRNA target sequence for 4921508E09Rik (NM_025721.1,358-376).
gttagtctccgctcaagat

SEQ ID NO: 718232 - DNA, 19 bp, Mus musculus
  siRNA target sequence for 4921508E09Rik (NM_025721.1,384-402).
ctgagagcgatgttctgat

SEQ ID NO: 718233 - DNA, 19 bp, Mus musculus
  siRNA target sequence for 4921508E09Rik (NM_025721.1,409-427).
cgtcgatgaaacgacaaat

SEQ ID NO: 718234 - DNA, 19 bp, Mus musculus
  siRNA target sequence for 4921508E09Rik (NM_025721.1,410-428).
gtcgatgaaacgacaaatt

SEQ ID NO: 718235 - DNA, 19 bp, Mus musculus
  siRNA target sequence for 4921508E09Rik (NM_025721.1,421-439).
gacaaattcccgtactaga

SEQ ID NO: 718236 - DNA, 19 bp, Mus musculus
  siRNA target sequence for 4921508E09Rik (NM_025721.1,483-501).
ggtccatccggccaaacaa

SEQ ID NO: 718237 - DNA, 19 bp, Mus musculus
  siRNA target sequence for 4921508E09Rik (NM_025721.1,484-502).
gtccatccggccaaacaat

SEQ ID NO: 718238 - DNA, 19 bp, Mus musculus
  siRNA target sequence for 4921508E09Rik (NM_025721.1,486-504).
ccatccggccaaacaatat

SEQ ID NO: 718239 - DNA, 19 bp, Mus musculus
  siRNA target sequence for 4921508E09Rik (NM_025721.1,487-505).
catccggccaaacaatatt

SEQ ID NO: 718240 - DNA, 19 bp, Mus musculus
  siRNA target sequence for 4921508E09Rik (NM_025721.1,490-508).
ccggccaaacaatatttct

SEQ ID NO: 718241 - DNA, 19 bp, Mus musculus
  siRNA target sequence for 4921508E09Rik (NM_025721.1,518-536).
cgcacggaggaaccattta

SEQ ID NO: 718242 - DNA, 19 bp, Mus musculus
  siRNA target sequence for 4921508E09Rik (NM_025721.1,519-537).
gcacggaggaaccatttat

SEQ ID NO: 718243 - DNA, 19 bp, Mus musculus
  siRNA target sequence for 4921508E09Rik (NM_025721.1,520-538).
cacggaggaaccatttatt

SEQ ID NO: 718244 - DNA, 19 bp, Mus musculus
  siRNA target sequence for 4921508E09Rik (NM_025721.1,522-540).
cggaggaaccatttattga

SEQ ID NO: 718245 - DNA, 19 bp, Mus musculus
  siRNA target sequence for 4921508E09Rik (NM_025721.1,623-641).
gctgaatcccggcaaatgt

SEQ ID NO: 718246 - DNA, 19 bp, Mus musculus
  siRNA target sequence for 4921508E09Rik (NM_025721.1,694-712).
ggggacctcacggatatca

SEQ ID NO: 718247 - DNA, 19 bp, Mus musculus
  siRNA target sequence for 4921508E09Rik (NM_025721.1,739-757).
ccaggcaactcgtattact

SEQ ID NO: 718248 - DNA, 19 bp, Mus musculus
  siRNA target sequence for 4921508E09Rik (NM_025721.1,742-760).
ggcaactcgtattactgta

SEQ ID NO: 718249 - DNA, 19 bp, Mus musculus
  siRNA target sequence for 4921508E09Rik (NM_025721.1,743-761).
gcaactcgtattactgtaa

SEQ ID NO: 718250 - DNA, 19 bp, Mus musculus
  siRNA target sequence for 4921508E09Rik (NM_025721.1,747-765).
ctcgtattactgtaacagt

SEQ ID NO: 718251 - DNA, 19 bp, Mus musculus
  siRNA target sequence for 4921508E09Rik (NM_025721.1,838-856).
cccgagtgctgaagactta

SEQ ID NO: 718252 - DNA, 19 bp, Mus musculus
  siRNA target sequence for 4921508E09Rik (NM_025721.1,860-878).
ggacgtcactcactgaata

SEQ ID NO: 718253 - DNA, 19 bp, Mus musculus
  siRNA target sequence for 4921508E09Rik (NM_025721.1,863-881).
cgtcactcactgaatacga

SEQ ID NO: 718254 - DNA, 19 bp, Mus musculus
  siRNA target sequence for 4921508E09Rik (NM_025721.1,879-897).
cgagacatgaggatatttt

SEQ ID NO: 718255 - DNA, 19 bp, Mus musculus
  siRNA target sequence for 4921508E09Rik (NM_025721.1,937-955).
gcttcttggtggcaataat

SEQ ID NO: 718256 - DNA, 19 bp, Mus musculus
  siRNA target sequence for 4921508E09Rik (NM_025721.1,1138-1156).
gtccaagttgtcagattat

SEQ ID NO: 718257 - DNA, 19 bp, Mus musculus
  siRNA target sequence for 4921508E09Rik (NM_025721.1,1267-1285).
gaagctgttaagcaataat

SEQ ID NO: 718258 - DNA, 19 bp, Mus musculus
  siRNA target sequence for 4921508E09Rik (NM_025721.1,1271-1289).
ctgttaagcaataatatga

SEQ ID NO: 718259 - DNA, 19 bp, Mus musculus
  siRNA target sequence for 4921508E09Rik (NM_025721.1,1278-1296).
gcaataatatgaaaatcct

SEQ ID NO: 718260 - DNA, 19 bp, Mus musculus
  siRNA target sequence for 4921508E09Rik (NM_025721.1,1279-1297).
caataatatgaaaatccta

SEQ ID NO: 718261 - DNA, 19 bp, Mus musculus
  siRNA target sequence for 4921524J17Rik (NM_025722.1,118-136).
caactcgagccaagaaagt

SEQ ID NO: 718262 - DNA, 19 bp, Mus musculus
  siRNA target sequence for 4921524J17Rik (NM_025722.1,160-178).
ccgagtgcgaccaacagat

SEQ ID NO: 718263 - DNA, 19 bp, Mus musculus
  siRNA target sequence for 4921524J17Rik (NM_025722.1,161-179).
cgagtgcgaccaacagatt

SEQ ID NO: 718264 - DNA, 19 bp, Mus musculus
  siRNA target sequence for 4921524J17Rik (NM_025722.1,176-194).
gattcctgttgcgtgtaaa

SEQ ID NO: 718265 - DNA, 19 bp, Mus musculus
  siRNA target sequence for 4921524J17Rik (NM_025722.1,199-217).
gtccctgtggttacatatt

SEQ ID NO: 718266 - DNA, 19 bp, Mus musculus
  siRNA target sequence for 4921524J17Rik (NM_025722.1,259-277).
caccgccgtctacagaaaa

SEQ ID NO: 718267 - DNA, 19 bp, Mus musculus
  siRNA target sequence for 4921524J17Rik (NM_025722.1,261-279).
ccgccgtctacagaaaaca

SEQ ID NO: 718268 - DNA, 19 bp, Mus musculus
  siRNA target sequence for 4921524J17Rik (NM_025722.1,262-280).
cgccgtctacagaaaacaa

SEQ ID NO: 718269 - DNA, 19 bp, Mus musculus
  siRNA target sequence for 4921524J17Rik (NM_025722.1,310-328).
gagttaggcgagagaagat

SEQ ID NO: 718270 - DNA, 19 bp, Mus musculus
  siRNA target sequence for 4921524J17Rik (NM_025722.1,312-330).
gttaggcgagagaagataa

SEQ ID NO: 718271 - DNA, 19 bp, Mus musculus
  siRNA target sequence for 4921524J17Rik (NM_025722.1,317-335).
gcgagagaagataaattct

SEQ ID NO: 718272 - DNA, 19 bp, Mus musculus
  siRNA target sequence for 4921524J17Rik (NM_025722.1,361-379).
gaaagagatctcgaagtaa

SEQ ID NO: 718273 - DNA, 19 bp, Mus musculus
  siRNA target sequence for 4921524J17Rik (NM_025722.1,506-524).
ggctttcgtgttttcagtt

SEQ ID NO: 718274 - DNA, 19 bp, Mus musculus
  siRNA target sequence for 4921515J06Rik (NM_025723.1,485-503).
gaaagcataccgtgcaata

SEQ ID NO: 718275 - DNA, 19 bp, Mus musculus
  siRNA target sequence for 4921515J06Rik (NM_025723.1,517-535).
caattttaaagaagttagt

SEQ ID NO: 718276 - DNA, 19 bp, Mus musculus
  siRNA target sequence for 4921515J06Rik (NM_025723.1,530-548).
gttagtccagagaaggtaa

SEQ ID NO: 718277 - DNA, 19 bp, Mus musculus
  siRNA target sequence for 4921515J06Rik (NM_025723.1,541-559).
gaaggtaattcggttcaaa

SEQ ID NO: 718278 - DNA, 19 bp, Mus musculus
  siRNA target sequence for 4921515J06Rik (NM_025723.1,551-569).
cggttcaaaccaccattat

SEQ ID NO: 718279 - DNA, 19 bp, Mus musculus
  siRNA target sequence for 4921515J06Rik (NM_025723.1,575-593).
caacggtatcagtttgtta

SEQ ID NO: 718280 - DNA, 19 bp, Mus musculus
  siRNA target sequence for 4921515J06Rik (NM_025723.1,655-673).
gctcctaaagctgctaaaa

SEQ ID NO: 718281 - DNA, 19 bp, Mus musculus
  siRNA target sequence for 4921515J06Rik (NM_025723.1,702-720).
gggtggatatcaatgaaga

SEQ ID NO: 718282 - DNA, 19 bp, Mus musculus
  siRNA target sequence for 4921515J06Rik (NM_025723.1,778-796).
ccgagatctagatttgact

SEQ ID NO: 718283 - DNA, 19 bp, Mus musculus
  siRNA target sequence for 4921515J06Rik (NM_025723.1,835-853).
ccgcttgcttggattcgat

SEQ ID NO: 718284 - DNA, 19 bp, Mus musculus
  siRNA target sequence for 4921515J06Rik (NM_025723.1,836-854).
cgcttgcttggattcgatt

SEQ ID NO: 718285 - DNA, 19 bp, Mus musculus
  siRNA target sequence for 4921515J06Rik (NM_025723.1,837-855).
gcttgcttggattcgattt

SEQ ID NO: 718286 - DNA, 19 bp, Mus musculus
  siRNA target sequence for 4921515J06Rik (NM_025723.1,850-868).
cgatttgataacatgcatt

SEQ ID NO: 718287 - DNA, 19 bp, Mus musculus
  siRNA target sequence for 4921515J06Rik (NM_025723.1,957-975).
gcaccccaaatgctgaatt

SEQ ID NO: 718288 - DNA, 19 bp, Mus musculus
  siRNA target sequence for 4921515J06Rik (NM_025723.1,960-978).
ccccaaatgctgaattcaa

SEQ ID NO: 718289 - DNA, 19 bp, Mus musculus
  siRNA target sequence for 4921515J06Rik (NM_025723.1,1006-1024).
ggacgccgaccataaattt

SEQ ID NO: 718290 - DNA, 19 bp, Mus musculus
  siRNA target sequence for 4921515J06Rik (NM_025723.1,1010-1028).
gccgaccataaatttgagt

SEQ ID NO: 718291 - DNA, 19 bp, Mus musculus
  siRNA target sequence for 4921515J06Rik (NM_025723.1,1063-1081).
cgtggcaaactgctacaat

SEQ ID NO: 718292 - DNA, 19 bp, Mus musculus
  siRNA target sequence for 4921515J06Rik (NM_025723.1,1064-1082).
gtggcaaactgctacaatt

SEQ ID NO: 718293 - DNA, 19 bp, Mus musculus
  siRNA target sequence for 4921515J06Rik (NM_025723.1,1122-1140).
gatctgagcatgttggata

SEQ ID NO: 718294 - DNA, 19 bp, Mus musculus
  siRNA target sequence for 4921515J06Rik (NM_025723.1,1174-1192).
cgggaagctctctaaacct

SEQ ID NO: 718295 - DNA, 19 bp, Mus musculus
  siRNA target sequence for 4921515J06Rik (NM_025723.1,1175-1193).
gggaagctctctaaacctt

SEQ ID NO: 718296 - DNA, 19 bp, Mus musculus
  siRNA target sequence for 4921515J06Rik (NM_025723.1,1207-1225).
gtgtgaccagcacgtttat

SEQ ID NO: 718297 - DNA, 19 bp, Mus musculus
  siRNA target sequence for 4921515J06Rik (NM_025723.1,1209-1227).
gtgaccagcacgtttataa

SEQ ID NO: 718298 - DNA, 19 bp, Mus musculus
  siRNA target sequence for 4921515J06Rik (NM_025723.1,1219-1237).
cgtttataaacctgtttat

SEQ ID NO: 718299 - DNA, 19 bp, Mus musculus
  siRNA target sequence for 4921515J06Rik (NM_025723.1,1242-1260).
cctcctacccgagtttaca

SEQ ID NO: 718300 - DNA, 19 bp, Mus musculus
  siRNA target sequence for 4921510H08Rik (NM_025724.1,442-460).
gggaggaccccctcaatct

SEQ ID NO: 718301 - DNA, 19 bp, Mus musculus
  siRNA target sequence for 4921510H08Rik (NM_025724.1,554-572).
ccgtgatggccccaaaatt

SEQ ID NO: 718302 - DNA, 19 bp, Mus musculus
  siRNA target sequence for 4921510H08Rik (NM_025724.1,562-580).
gccccaaaattgagtatga

SEQ ID NO: 718303 - DNA, 19 bp, Mus musculus
  siRNA target sequence for 4921510H08Rik (NM_025724.1,892-910).
cgaggaatccaccaataga

SEQ ID NO: 718304 - DNA, 19 bp, Mus musculus
  siRNA target sequence for 4921510H08Rik (NM_025724.1,1124-1142).
cagcggcgtcgaagaagat

SEQ ID NO: 718305 - DNA, 19 bp, Mus musculus
  siRNA target sequence for 4921510H08Rik (NM_025724.1,1144-1162).
cgcagttgccggaagatct

SEQ ID NO: 718306 - DNA, 19 bp, Mus musculus
  siRNA target sequence for 4921510H08Rik (NM_025724.1,1148-1166).
gttgccggaagatctgtat

SEQ ID NO: 718307 - DNA, 19 bp, Mus musculus
  siRNA target sequence for 4921510H08Rik (NM_025724.1,1178-1196).
ggatccctctctaaccttt

SEQ ID NO: 718308 - DNA, 19 bp, Mus musculus
  siRNA target sequence for 4921510H08Rik (NM_025724.1,1192-1210).
cctttagtcctgctctaat

SEQ ID NO: 718309 - DNA, 19 bp, Mus musculus
  siRNA target sequence for 4921510H08Rik (NM_025724.1,1279-1297).
gtgacgtagaggtttgtga

SEQ ID NO: 718310 - DNA, 19 bp, Mus musculus
  siRNA target sequence for 4921510H08Rik (NM_025724.1,1464-1482).
cagagagcggaagaaaaat

SEQ ID NO: 718311 - DNA, 19 bp, Mus musculus
  siRNA target sequence for 4921510H08Rik (NM_025724.1,1559-1577).
cttaagccaagaacaaata

SEQ ID NO: 718312 - DNA, 19 bp, Mus musculus
  siRNA target sequence for 4921510H08Rik (NM_025724.1,1595-1613).
ggcagatctatttatggta

SEQ ID NO: 718313 - DNA, 19 bp, Mus musculus
  siRNA target sequence for 4921513E08Rik (NM_025725.2,123-141).
ggcagtcgctcgagatcaa

SEQ ID NO: 718314 - DNA, 19 bp, Mus musculus
  siRNA target sequence for 4921513E08Rik (NM_025725.2,250-268).
ggtgtcggacagctcaaaa

SEQ ID NO: 718315 - DNA, 19 bp, Mus musculus
  siRNA target sequence for 4921513E08Rik (NM_025725.2,275-293).
gattcggaggggatcgatt

SEQ ID NO: 718316 - DNA, 19 bp, Mus musculus
  siRNA target sequence for 4921513E08Rik (NM_025725.2,582-600).
cgctgaccacaattgttga

SEQ ID NO: 718317 - DNA, 19 bp, Mus musculus
  siRNA target sequence for 4921513E08Rik (NM_025725.2,689-707).
gatcgagaacgacacaaaa

SEQ ID NO: 718318 - DNA, 19 bp, Mus musculus
  siRNA target sequence for 4921513E08Rik (NM_025725.2,763-781).
ggcgtccactgaagagttt

SEQ ID NO: 718319 - DNA, 19 bp, Mus musculus
  siRNA target sequence for 4921513E08Rik (NM_025725.2,765-783).
cgtccactgaagagtttga

SEQ ID NO: 718320 - DNA, 19 bp, Mus musculus
  siRNA target sequence for 4921513E08Rik (NM_025725.2,828-846).
gcgagctggtggaacagta

SEQ ID NO: 718321 - DNA, 19 bp, Mus musculus
  siRNA target sequence for 4921513E08Rik (NM_025725.2,872-890).
cgttatcagcgctacaaca

SEQ ID NO: 718322 - DNA, 19 bp, Mus musculus
  siRNA target sequence for 4921513E08Rik (NM_025725.2,873-891).
gttatcagcgctacaacat

SEQ ID NO: 718323 - DNA, 19 bp, Mus musculus
  siRNA target sequence for 4921513E08Rik (NM_025725.2,975-993).
ccgaatctcccgagaaaga

SEQ ID NO: 718324 - DNA, 19 bp, Mus musculus
  siRNA target sequence for 4921513E08Rik (NM_025725.2,1421-1439).
gaacgaaacgaggaacttt

SEQ ID NO: 718325 - DNA, 19 bp, Mus musculus
  siRNA target sequence for 4921513E08Rik (NM_025725.2,1424-1442).
cgaaacgaggaacttttaa

SEQ ID NO: 718326 - DNA, 19 bp, Mus musculus
  siRNA target sequence for 4921513E08Rik (NM_025725.2,1425-1443).
gaaacgaggaacttttaaa

SEQ ID NO: 718327 - DNA, 19 bp, Mus musculus
  siRNA target sequence for 4921513E08Rik (NM_025725.2,1461-1479).
ccagcaacgtgcagattat

SEQ ID NO: 718328 - DNA, 19 bp, Mus musculus
  siRNA target sequence for 4921513E08Rik (NM_025725.2,1462-1480).
cagcaacgtgcagattata

SEQ ID NO: 718329 - DNA, 19 bp, Mus musculus
  siRNA target sequence for 4921513E08Rik (NM_025725.2,1577-1595).
gacctgttgacgaagacaa

SEQ ID NO: 718330 - DNA, 19 bp, Mus musculus
  siRNA target sequence for 4921513E08Rik (NM_025725.2,1628-1646).
gtcaagctgagtcagaaat

SEQ ID NO: 718331 - DNA, 19 bp, Mus musculus
  siRNA target sequence for 4921513E08Rik (NM_025725.2,1630-1648).
caagctgagtcagaaatgt

SEQ ID NO: 718332 - DNA, 19 bp, Mus musculus
  siRNA target sequence for 4921513E08Rik (NM_025725.2,1649-1667).
gggcttctgggtaaggaat

SEQ ID NO: 718333 - DNA, 19 bp, Mus musculus
  siRNA target sequence for 4921522P10Rik (NM_025726.1,627-645).
gcaaagctgaaatttcaca

SEQ ID NO: 718334 - DNA, 19 bp, Mus musculus
  siRNA target sequence for 4921522P10Rik (NM_025726.1,628-646).
caaagctgaaatttcacaa

SEQ ID NO: 718335 - DNA, 19 bp, Mus musculus
  siRNA target sequence for 4921522P10Rik (NM_025726.1,676-694).
cgacacaccaggcttctaa

SEQ ID NO: 718336 - DNA, 19 bp, Mus musculus
  siRNA target sequence for 4921522P10Rik (NM_025726.1,686-704).
ggcttctaagccaatgcta

SEQ ID NO: 718337 - DNA, 19 bp, Mus musculus
  siRNA target sequence for 4921522P10Rik (NM_025726.1,744-762).
ctaacagctccaaatcgtt

SEQ ID NO: 718338 - DNA, 19 bp, Mus musculus
  siRNA target sequence for 4921522P10Rik (NM_025726.1,771-789).
gggaaagcgcgatcacatt

SEQ ID NO: 718339 - DNA, 19 bp, Mus musculus
  siRNA target sequence for 4921522P10Rik (NM_025726.1,773-791).
gaaagcgcgatcacattct

SEQ ID NO: 718340 - DNA, 19 bp, Mus musculus
  siRNA target sequence for 4921522P10Rik (NM_025726.1,779-797).
gcgatcacattctttagga

SEQ ID NO: 718341 - DNA, 19 bp, Mus musculus
  siRNA target sequence for 4921522P10Rik (NM_025726.1,780-798).
cgatcacattctttaggaa

SEQ ID NO: 718342 - DNA, 19 bp, Mus musculus
  siRNA target sequence for 4921522P10Rik (NM_025726.1,815-833).
ggctctcgttcaacctttt

SEQ ID NO: 718343 - DNA, 19 bp, Mus musculus
  siRNA target sequence for 4921522P10Rik (NM_025726.1,819-837).
ctcgttcaaccttttcctt

SEQ ID NO: 718344 - DNA, 19 bp, Mus musculus
  siRNA target sequence for 4921522P10Rik (NM_025726.1,821-839).
cgttcaaccttttccttta

SEQ ID NO: 718345 - DNA, 19 bp, Mus musculus
  siRNA target sequence for 4921522P10Rik (NM_025726.1,822-840).
gttcaaccttttcctttat

SEQ ID NO: 718346 - DNA, 19 bp, Mus musculus
  siRNA target sequence for 4921522P10Rik (NM_025726.1,871-889).
gcagtaatggtactatatt

SEQ ID NO: 718347 - DNA, 19 bp, Mus musculus
  siRNA target sequence for 4921526G09Rik (NM_025729.2,1839-1857).
gccttcgatgatgtatcta

SEQ ID NO: 718348 - DNA, 19 bp, Mus musculus
  siRNA target sequence for 4921526G09Rik (NM_025729.2,1841-1859).
cttcgatgatgtatctagt

SEQ ID NO: 718349 - DNA, 19 bp, Mus musculus
  siRNA target sequence for 4921526G09Rik (NM_025729.2,1892-1910).
ggccccagttcatttgctt

SEQ ID NO: 718350 - DNA, 19 bp, Mus musculus
  siRNA target sequence for 4921526G09Rik (NM_025729.2,1897-1915).
cagttcatttgcttgctat

SEQ ID NO: 718351 - DNA, 19 bp, Mus musculus
  siRNA target sequence for 4921526G09Rik (NM_025729.2,1933-1951).
catcaggggccattaagaa

SEQ ID NO: 718352 - DNA, 19 bp, Mus musculus
  siRNA target sequence for 4921526G09Rik (NM_025729.2,1938-1956).
ggggccattaagaaagctt

SEQ ID NO: 718353 - DNA, 19 bp, Mus musculus
  siRNA target sequence for 4921526G09Rik (NM_025729.2,1954-1972).
ctttggacgtggtaaggtt

SEQ ID NO: 718354 - DNA, 19 bp, Mus musculus
  siRNA target sequence for 4921526G09Rik (NM_025729.2,1958-1976).
ggacgtggtaaggtttgaa

SEQ ID NO: 718355 - DNA, 19 bp, Mus musculus
  siRNA target sequence for 4921526G09Rik (NM_025729.2,1959-1977).
gacgtggtaaggtttgaat

SEQ ID NO: 718356 - DNA, 19 bp, Mus musculus
  siRNA target sequence for 4921526G09Rik (NM_025729.2,1970-1988).
gtttgaatgcccacataca

SEQ ID NO: 718357 - DNA, 19 bp, Mus musculus
  siRNA target sequence for 4921526G09Rik (NM_025729.2,1987-2005).
cattttattcagttcctaa

SEQ ID NO: 718358 - DNA, 19 bp, Mus musculus
  siRNA target sequence for 4921526G09Rik (NM_025729.2,2043-2061).
catttgactgtatcatata

SEQ ID NO: 718359 - DNA, 19 bp, Mus musculus
  siRNA target sequence for 4921526G09Rik (NM_025729.2,2093-2111).
gaccactttgaataagaat

SEQ ID NO: 718360 - DNA, 19 bp, Mus musculus
  siRNA target sequence for 4921526G09Rik (NM_025729.2,2117-2135).
gagccgtccaggtggtttt

SEQ ID NO: 718361 - DNA, 19 bp, Mus musculus
  siRNA target sequence for 4921526G09Rik (NM_025729.2,2162-2180).
gctcagattggcatccata

SEQ ID NO: 718362 - DNA, 19 bp, Mus musculus
  siRNA target sequence for 4921526G09Rik (NM_025729.2,2163-2181).
ctcagattggcatccataa

SEQ ID NO: 718363 - DNA, 19 bp, Mus musculus
  siRNA target sequence for 4921526G09Rik (NM_025729.2,2189-2207).
gcatatggtggatactact

SEQ ID NO: 718364 - DNA, 19 bp, Mus musculus
  siRNA target sequence for 4921526G09Rik (NM_025729.2,2190-2208).
catatggtggatactacta

SEQ ID NO: 718365 - DNA, 19 bp, Mus musculus
  siRNA target sequence for 4921526K24Rik (NM_025731.1,193-211).
ctcgaagacctcaagtaca

SEQ ID NO: 718366 - DNA, 19 bp, Mus musculus
  siRNA target sequence for 4921526K24Rik (NM_025731.1,316-334).
gcaagaccgccgattagaa

SEQ ID NO: 718367 - DNA, 19 bp, Mus musculus
  siRNA target sequence for 4921526K24Rik (NM_025731.1,356-374).
ggagagaagccggaaacta

SEQ ID NO: 718368 - DNA, 19 bp, Mus musculus
  siRNA target sequence for 4921526K24Rik (NM_025731.1,359-377).
gagaagccggaaactagtt

SEQ ID NO: 718369 - DNA, 19 bp, Mus musculus
  siRNA target sequence for 4921526K24Rik (NM_025731.1,409-427).
gctgattccaacatcaaat

SEQ ID NO: 718370 - DNA, 19 bp, Mus musculus
  siRNA target sequence for 4921526K24Rik (NM_025731.1,458-476).
gcagttgagggcaatccaa

SEQ ID NO: 718371 - DNA, 19 bp, Mus musculus
  siRNA target sequence for 4921526K24Rik (NM_025731.1,496-514).
gattgagatttttcgaatt

SEQ ID NO: 718372 - DNA, 19 bp, Mus musculus
  siRNA target sequence for 4921526K24Rik (NM_025731.1,509-527).
cgaattggctatgaacatt

SEQ ID NO: 718373 - DNA, 19 bp, Mus musculus
  siRNA target sequence for 4921526K24Rik (NM_025731.1,567-585).
ctcccccaagtgagtttga

SEQ ID NO: 718374 - DNA, 19 bp, Mus musculus
  siRNA target sequence for 4921526K24Rik (NM_025731.1,590-608).
gggagcatcacctctatct

SEQ ID NO: 718375 - DNA, 19 bp, Mus musculus
  siRNA target sequence for 4921526K24Rik (NM_025731.1,617-635).
cgagctgtggtgaagtaca

SEQ ID NO: 718376 - DNA, 19 bp, Mus musculus
  siRNA target sequence for 4921526K24Rik (NM_025731.1,660-678).
gttgctcctggaagatcaa

SEQ ID NO: 718377 - DNA, 19 bp, Mus musculus
  siRNA target sequence for 4921526K24Rik (NM_025731.1,721-739).
gatcatgcagcgcacaaaa

SEQ ID NO: 718378 - DNA, 19 bp, Mus musculus
  siRNA target sequence for 4921526K24Rik (NM_025731.1,728-746).
cagcgcacaaaaaacatga

SEQ ID NO: 718379 - DNA, 19 bp, Mus musculus
  siRNA target sequence for 4921526K24Rik (NM_025731.1,730-748).
gcgcacaaaaaacatgata

SEQ ID NO: 718380 - DNA, 19 bp, Mus musculus
  siRNA target sequence for 4921526K24Rik (NM_025731.1,731-749).
cgcacaaaaaacatgataa

SEQ ID NO: 718381 - DNA, 19 bp, Mus musculus
  siRNA target sequence for 4921526K24Rik (NM_025731.1,742-760).
catgataaacaagatagtt

SEQ ID NO: 718382 - DNA, 19 bp, Mus musculus
  siRNA target sequence for 4921520G13Rik (NM_025732.1,159-177).
cacgaccctgcactctaaa

SEQ ID NO: 718383 - DNA, 19 bp, Mus musculus
  siRNA target sequence for 4921520G13Rik (NM_025732.1,161-179).
cgaccctgcactctaaact

SEQ ID NO: 718384 - DNA, 19 bp, Mus musculus
  siRNA target sequence for 4921520G13Rik (NM_025732.1,267-285).
caactccacccgttacaga

SEQ ID NO: 718385 - DNA, 19 bp, Mus musculus
  siRNA target sequence for 4921520G13Rik (NM_025732.1,336-354).
gtaccgcaagccacaaagt

SEQ ID NO: 718386 - DNA, 19 bp, Mus musculus
  siRNA target sequence for 4921520G13Rik (NM_025732.1,376-394).
ggtgctgacccagaagtaa

SEQ ID NO: 718387 - DNA, 19 bp, Mus musculus
  siRNA target sequence for 4921520G13Rik (NM_025732.1,397-415).
gacgcccaaggcttcacta

SEQ ID NO: 718388 - DNA, 19 bp, Mus musculus
  siRNA target sequence for 4921520G13Rik (NM_025732.1,541-559).
gaccacggagctcaagtta

SEQ ID NO: 718389 - DNA, 19 bp, Mus musculus
  siRNA target sequence for 4921520G13Rik (NM_025732.1,543-561).
ccacggagctcaagttaat

SEQ ID NO: 718390 - DNA, 19 bp, Mus musculus
  siRNA target sequence for 4921520G13Rik (NM_025732.1,593-611).
ccctccacctggccataat

SEQ ID NO: 718391 - DNA, 19 bp, Mus musculus
  siRNA target sequence for 4921520G13Rik (NM_025732.1,594-612).
cctccacctggccataata

SEQ ID NO: 718392 - DNA, 19 bp, Mus musculus
  siRNA target sequence for 4921520G13Rik (NM_025732.1,652-670).
ggtgcccaggtcaatgcta

SEQ ID NO: 718393 - DNA, 19 bp, Mus musculus
  siRNA target sequence for 4921520G13Rik (NM_025732.1,660-678).
ggtcaatgctactaatgaa

SEQ ID NO: 718394 - DNA, 19 bp, Mus musculus
  siRNA target sequence for 4921520G13Rik (NM_025732.1,661-679).
gtcaatgctactaatgaat

SEQ ID NO: 718395 - DNA, 19 bp, Mus musculus
  siRNA target sequence for 4921520G13Rik (NM_025732.1,726-744).
catgatagagacactcatt

SEQ ID NO: 718396 - DNA, 19 bp, Mus musculus
  siRNA target sequence for 4921520G13Rik (NM_025732.1,745-763).
gcctttggggccaatgtga

SEQ ID NO: 718397 - DNA, 19 bp, Mus musculus
  siRNA target sequence for 4921520G13Rik (NM_025732.1,746-764).
cctttggggccaatgtgaa

SEQ ID NO: 718398 - DNA, 19 bp, Mus musculus
  siRNA target sequence for 4921520G13Rik (NM_025732.1,774-792).
ctcatctaccggaaacaca

SEQ ID NO: 718399 - DNA, 19 bp, Mus musculus
  siRNA target sequence for 4921520G13Rik (NM_025732.1,982-1000).
gaggcaaacgttaacattt

SEQ ID NO: 718400 - DNA, 19 bp, Mus musculus
  siRNA target sequence for 4921520G13Rik (NM_025732.1,1013-1031).
gggagtctcccatttacat

SEQ ID NO: 718401 - DNA, 19 bp, Mus musculus
  siRNA target sequence for 4921520G13Rik (NM_025732.1,1015-1033).
gagtctcccatttacatgt

SEQ ID NO: 718402 - DNA, 19 bp, Mus musculus
  siRNA target sequence for 4921520G13Rik (NM_025732.1,1084-1102).
ctttaccgcacttatcctt

SEQ ID NO: 718403 - DNA, 19 bp, Mus musculus
  siRNA target sequence for 4921520G13Rik (NM_025732.1,1089-1107).
ccgcacttatcctttaaga

SEQ ID NO: 718404 - DNA, 19 bp, Mus musculus
  siRNA target sequence for 4921520G13Rik (NM_025732.1,1113-1131).
caataaacaggggattcta

SEQ ID NO: 718405 - DNA, 19 bp, Mus musculus
  siRNA target sequence for 4921520G13Rik (NM_025732.1,1139-1157).
gaatcatgctgccagaata

SEQ ID NO: 718406 - DNA, 19 bp, Mus musculus
  siRNA target sequence for 4921520G13Rik (NM_025732.1,1165-1183).
ctaagggaaaccctagtaa

SEQ ID NO: 718407 - DNA, 19 bp, Mus musculus
  siRNA target sequence for 4921520G13Rik (NM_025732.1,1169-1187).
gggaaaccctagtaaagtt

SEQ ID NO: 718408 - DNA, 19 bp, Mus musculus
  siRNA target sequence for 4921520G13Rik (NM_025732.1,1176-1194).
cctagtaaagttatcaaaa

SEQ ID NO: 718409 - DNA, 19 bp, Mus musculus
  siRNA target sequence for 4921520G13Rik (NM_025732.1,1185-1203).
gttatcaaaaaaaccttta

SEQ ID NO: 718410 - DNA, 19 bp, Mus musculus
  siRNA target sequence for 4921520G13Rik (NM_025732.1,1205-1223).
ccctcgaggccatctgtaa

SEQ ID NO: 718411 - DNA, 19 bp, Mus musculus
  siRNA target sequence for 4921520G13Rik (NM_025732.1,1207-1225).
ctcgaggccatctgtaaga

SEQ ID NO: 718412 - DNA, 19 bp, Mus musculus
  siRNA target sequence for 4921520G13Rik (NM_025732.1,1210-1228).
gaggccatctgtaagagaa

SEQ ID NO: 718413 - DNA, 19 bp, Mus musculus
  siRNA target sequence for 4921520G13Rik (NM_025732.1,1224-1242).
gagaagcatcaggaatgtt

SEQ ID NO: 718414 - DNA, 19 bp, Mus musculus
  siRNA target sequence for 4921520G13Rik (NM_025732.1,1240-1258).
gtttatggggagaagtaca

SEQ ID NO: 718415 - DNA, 19 bp, Mus musculus
  siRNA target sequence for 4921520G13Rik (NM_025732.1,1290-1308).
gctctggaactccatatat

SEQ ID NO: 718416 - DNA, 19 bp, Mus musculus
  siRNA target sequence for 4921520G13Rik (NM_025732.1,1301-1319).
ccatatatggcatctatga

SEQ ID NO: 718417 - DNA, 19 bp, Mus musculus
  siRNA target sequence for 4921530L21Rik (NM_025733.1,225-243).
ggaaaatactgcagttgtt

SEQ ID NO: 718418 - DNA, 19 bp, Mus musculus
  siRNA target sequence for 4921530L21Rik (NM_025733.1,255-273).
cttgtacccgaaatcagaa

SEQ ID NO: 718419 - DNA, 19 bp, Mus musculus
  siRNA target sequence for 4921530L21Rik (NM_025733.1,258-276).
gtacccgaaatcagaagaa

SEQ ID NO: 718420 - DNA, 19 bp, Mus musculus
  siRNA target sequence for 4921530L21Rik (NM_025733.1,263-281).
cgaaatcagaagaaactca

SEQ ID NO: 718421 - DNA, 19 bp, Mus musculus
  siRNA target sequence for 4921530L21Rik (NM_025733.1,329-347).
gcgttgagagatgaaaaca

SEQ ID NO: 718422 - DNA, 19 bp, Mus musculus
  siRNA target sequence for 4921530L21Rik (NM_025733.1,393-411).
ccttaggacgagagaataa

SEQ ID NO: 718423 - DNA, 19 bp, Mus musculus
  siRNA target sequence for 4921530L21Rik (NM_025733.1,394-412).
cttaggacgagagaataaa

SEQ ID NO: 718424 - DNA, 19 bp, Mus musculus
  siRNA target sequence for 4921530L21Rik (NM_025733.1,398-416).
ggacgagagaataaaacct

SEQ ID NO: 718425 - DNA, 19 bp, Mus musculus
  siRNA target sequence for 4921530L21Rik (NM_025733.1,399-417).
gacgagagaataaaacctt

SEQ ID NO: 718426 - DNA, 19 bp, Mus musculus
  siRNA target sequence for 4921530L21Rik (NM_025733.1,420-438).
ggatggacaaccagttcat

SEQ ID NO: 718427 - DNA, 19 bp, Mus musculus
  siRNA target sequence for 4921530L21Rik (NM_025733.1,479-497).
ctccggaaggtgaaaaggt

SEQ ID NO: 718428 - DNA, 19 bp, Mus musculus
  siRNA target sequence for 4921530L21Rik (NM_025733.1,544-562).
gagcacagaaggaaagtct

SEQ ID NO: 718429 - DNA, 19 bp, Mus musculus
  siRNA target sequence for 4921530L21Rik (NM_025733.1,559-577).
gtctttttggcaacagaat

SEQ ID NO: 718430 - DNA, 19 bp, Mus musculus
  siRNA target sequence for 4921530L21Rik (NM_025733.1,916-934).
cctccaggagtggaataat

SEQ ID NO: 718431 - DNA, 19 bp, Mus musculus
  siRNA target sequence for 4921530L21Rik (NM_025733.1,919-937).
ccaggagtggaataatctt

SEQ ID NO: 718432 - DNA, 19 bp, Mus musculus
  siRNA target sequence for 4921530L21Rik (NM_025733.1,922-940).
ggagtggaataatcttctt

SEQ ID NO: 718433 - DNA, 19 bp, Mus musculus
  siRNA target sequence for 4921530L21Rik (NM_025733.1,941-959).
caggggaagatcacaaaca

SEQ ID NO: 718434 - DNA, 19 bp, Mus musculus
  siRNA target sequence for Kcng4 (NM_025734.2,936-954).
ggggcatcgaggaaaccaa

SEQ ID NO: 718435 - DNA, 19 bp, Mus musculus
  siRNA target sequence for Kcng4 (NM_025734.2,1241-1259).
ggagaatgcactagaaagt

SEQ ID NO: 718436 - DNA, 19 bp, Mus musculus
  siRNA target sequence for Kcng4 (NM_025734.2,1248-1266).
gcactagaaagtgctatta

SEQ ID NO: 718437 - DNA, 19 bp, Mus musculus
  siRNA target sequence for Kcng4 (NM_025734.2,1251-1269).
ctagaaagtgctattacat

SEQ ID NO: 718438 - DNA, 19 bp, Mus musculus
  siRNA target sequence for Kcng4 (NM_025734.2,1369-1387).
gaatgtcatcgacattcta

SEQ ID NO: 718439 - DNA, 19 bp, Mus musculus
  siRNA target sequence for Kcng4 (NM_025734.2,1639-1657).
ctcaccgttggtctatgta

SEQ ID NO: 718440 - DNA, 19 bp, Mus musculus
  siRNA target sequence for Kcng4 (NM_025734.2,1648-1666).
ggtctatgtagctgagaat

SEQ ID NO: 718441 - DNA, 19 bp, Mus musculus
  siRNA target sequence for Kcng4 (NM_025734.2,1802-1820).
cttagcgggatccttatca

SEQ ID NO: 718442 - DNA, 19 bp, Mus musculus
  siRNA target sequence for Kcng4 (NM_025734.2,1913-1931).
cgtcttcagaacaccaatt

SEQ ID NO: 718443 - DNA, 19 bp, Mus musculus
  siRNA target sequence for Kcng4 (NM_025734.2,1951-1969).
cctgagtgacgtagatgat

SEQ ID NO: 718444 - DNA, 19 bp, Mus musculus
  siRNA target sequence for 1010001H21Rik (NM_025735.1,148-166).
cctccgaccggcctttcaa

SEQ ID NO: 718445 - DNA, 19 bp, Mus musculus
  siRNA target sequence for 1010001H21Rik (NM_025735.1,229-247).
gtaagatcccggtgatcat

SEQ ID NO: 718446 - DNA, 19 bp, Mus musculus
  siRNA target sequence for 1010001H21Rik (NM_025735.1,300-318).
ctggtcccagaccatgtta

SEQ ID NO: 718447 - DNA, 19 bp, Mus musculus
  siRNA target sequence for 1010001H21Rik (NM_025735.1,303-321).
gtcccagaccatgttaaca

SEQ ID NO: 718448 - DNA, 19 bp, Mus musculus
  siRNA target sequence for 1010001H21Rik (NM_025735.1,306-324).
ccagaccatgttaacatga

SEQ ID NO: 718449 - DNA, 19 bp, Mus musculus
  siRNA target sequence for 1010001H21Rik (NM_025735.1,325-343).
gcgagttggtcaagatcat

SEQ ID NO: 718450 - DNA, 19 bp, Mus musculus
  siRNA target sequence for 1010001H21Rik (NM_025735.1,421-439).
cacccatcgctgacatcta

SEQ ID NO: 718451 - DNA, 19 bp, Mus musculus
  siRNA target sequence for 1010001H21Rik (NM_025735.1,477-495).
gtctacgcctcccaagaaa

SEQ ID NO: 718452 - DNA, 19 bp, Mus musculus
  siRNA target sequence for 4931417E11Rik (NM_025737.1,107-125).
ggcatgctttggactctat

SEQ ID NO: 718453 - DNA, 19 bp, Mus musculus
  siRNA target sequence for 4931417E11Rik (NM_025737.1,315-333).
caatggaatgcaaagaata

SEQ ID NO: 718454 - DNA, 19 bp, Mus musculus
  siRNA target sequence for 4931417E11Rik (NM_025737.1,324-342).
gcaaagaatagtaattcca

SEQ ID NO: 718455 - DNA, 19 bp, Mus musculus
  siRNA target sequence for 4931417E11Rik (NM_025737.1,359-377).
gcaagtctctgcgctatta

SEQ ID NO: 718456 - DNA, 19 bp, Mus musculus
  siRNA target sequence for 4931417E11Rik (NM_025737.1,363-381).
gtctctgcgctattagaat

SEQ ID NO: 718457 - DNA, 19 bp, Mus musculus
  siRNA target sequence for 4931417E11Rik (NM_025737.1,421-439).
ctgtcggcacccttgtcat

SEQ ID NO: 718458 - DNA, 19 bp, Mus musculus
  siRNA target sequence for 4931417E11Rik (NM_025737.1,452-470).
ggtgctgatgctttcagat

SEQ ID NO: 718459 - DNA, 19 bp, Mus musculus
  siRNA target sequence for 4931417E11Rik (NM_025737.1,574-592).
ctttctgcttagtattgat

SEQ ID NO: 718460 - DNA, 19 bp, Mus musculus
  siRNA target sequence for 4931417E11Rik (NM_025737.1,603-621).
cgaccactactggtaaaga

SEQ ID NO: 718461 - DNA, 19 bp, Mus musculus
  siRNA target sequence for 4931417E11Rik (NM_025737.1,604-622).
gaccactactggtaaagaa

SEQ ID NO: 718462 - DNA, 19 bp, Mus musculus
  siRNA target sequence for 4931417E11Rik (NM_025737.1,631-649).
ggcacctatacgtgtcaaa

SEQ ID NO: 718463 - DNA, 19 bp, Mus musculus
  siRNA target sequence for 4931417E11Rik (NM_025737.1,714-732).
gcaggaggcctcctatatt

SEQ ID NO: 718464 - DNA, 19 bp, Mus musculus
  siRNA target sequence for 4931417E11Rik (NM_025737.1,715-733).
caggaggcctcctatatta

SEQ ID NO: 718465 - DNA, 19 bp, Mus musculus
  siRNA target sequence for 4931417E11Rik (NM_025737.1,735-753).
gccttcccatacattgtgt

SEQ ID NO: 718466 - DNA, 19 bp, Mus musculus
  siRNA target sequence for 4931417E11Rik (NM_025737.1,769-787).
ctaatctggctgtttatct

SEQ ID NO: 718467 - DNA, 19 bp, Mus musculus
  siRNA target sequence for 4931417E11Rik (NM_025737.1,806-824).
gagctacagtgatctgata

SEQ ID NO: 718468 - DNA, 19 bp, Mus musculus
  siRNA target sequence for 4931417E11Rik (NM_025737.1,808-826).
gctacagtgatctgataaa

SEQ ID NO: 718469 - DNA, 19 bp, Mus musculus
  siRNA target sequence for 4931417E11Rik (NM_025737.1,892-910).
ccagggggcagcaacttga

SEQ ID NO: 718470 - DNA, 19 bp, Mus musculus
  siRNA target sequence for 4931417E11Rik (NM_025737.1,915-933).
gatctgctccttttaactt

SEQ ID NO: 718471 - DNA, 19 bp, Mus musculus
  siRNA target sequence for 4931417E11Rik (NM_025737.1,942-960).
gcccccactcttttttact

SEQ ID NO: 718472 - DNA, 19 bp, Mus musculus
  siRNA target sequence for 4931417E11Rik (NM_025737.1,965-983).
cactattaaatttaccaaa

SEQ ID NO: 718473 - DNA, 19 bp, Mus musculus
  siRNA target sequence for 4931420D14Rik (NM_025738.1,78-96).
gctgctgccaaaatttcga

SEQ ID NO: 718474 - DNA, 19 bp, Mus musculus
  siRNA target sequence for 4931420D14Rik (NM_025738.1,79-97).
ctgctgccaaaatttcgaa

SEQ ID NO: 718475 - DNA, 19 bp, Mus musculus
  siRNA target sequence for 4931420D14Rik (NM_025738.1,166-184).
gatcttcacactctttact

SEQ ID NO: 718476 - DNA, 19 bp, Mus musculus
  siRNA target sequence for 4931420D14Rik (NM_025738.1,300-318).
gtgagagatcccaagttct

SEQ ID NO: 718477 - DNA, 19 bp, Mus musculus
  siRNA target sequence for 4931420D14Rik (NM_025738.1,309-327).
cccaagttctttcagatta

SEQ ID NO: 718478 - DNA, 19 bp, Mus musculus
  siRNA target sequence for 4931420D14Rik (NM_025738.1,338-356).
ggagcaatcacttcaaaga

SEQ ID NO: 718479 - DNA, 19 bp, Mus musculus
  siRNA target sequence for 4931406I20Rik (NM_025739.2,595-613).
cttttgccaatcgtgattt

SEQ ID NO: 718480 - DNA, 19 bp, Mus musculus
  siRNA target sequence for 4931406I20Rik (NM_025739.2,644-662).
gtttgctcccccaaaccta

SEQ ID NO: 718481 - DNA, 19 bp, Mus musculus
  siRNA target sequence for 4931406I20Rik (NM_025739.2,648-666).
gctcccccaaacctagatt

SEQ ID NO: 718482 - DNA, 19 bp, Mus musculus
  siRNA target sequence for 4931406I20Rik (NM_025739.2,663-681).
gattgcaccccaatcagta

SEQ ID NO: 718483 - DNA, 19 bp, Mus musculus
  siRNA target sequence for 4931406I20Rik (NM_025739.2,668-686).
caccccaatcagtatgcta

SEQ ID NO: 718484 - DNA, 19 bp, Mus musculus
  siRNA target sequence for 4931406I20Rik (NM_025739.2,670-688).
ccccaatcagtatgctaaa

SEQ ID NO: 718485 - DNA, 19 bp, Mus musculus
  siRNA target sequence for 4931406I20Rik (NM_025739.2,671-689).
cccaatcagtatgctaaat

SEQ ID NO: 718486 - DNA, 19 bp, Mus musculus
  siRNA target sequence for 4931406I20Rik (NM_025739.2,673-691).
caatcagtatgctaaatca

SEQ ID NO: 718487 - DNA, 19 bp, Mus musculus
  siRNA target sequence for 4931406I20Rik (NM_025739.2,819-837).
gatgcagatggcaaggaat

SEQ ID NO: 718488 - DNA, 19 bp, Mus musculus
  siRNA target sequence for 4931406I20Rik (NM_025739.2,865-883).
gctcccctggctcacttaa

SEQ ID NO: 718489 - DNA, 19 bp, Mus musculus
  siRNA target sequence for 4931406I20Rik (NM_025739.2,868-886).
cccctggctcacttaaggt

SEQ ID NO: 718490 - DNA, 19 bp, Mus musculus
  siRNA target sequence for 4931406I20Rik (NM_025739.2,869-887).
ccctggctcacttaaggtt

SEQ ID NO: 718491 - DNA, 19 bp, Mus musculus
  siRNA target sequence for 4931406I20Rik (NM_025739.2,874-892).
gctcacttaaggttgatga

SEQ ID NO: 718492 - DNA, 19 bp, Mus musculus
  siRNA target sequence for 4931406I20Rik (NM_025739.2,875-893).
ctcacttaaggttgatgat

SEQ ID NO: 718493 - DNA, 19 bp, Mus musculus
  siRNA target sequence for 4931406I20Rik (NM_025739.2,954-972).
ccagaggatcggaatgaca

SEQ ID NO: 718494 - DNA, 19 bp, Mus musculus
  siRNA target sequence for 4931406I20Rik (NM_025739.2,960-978).
gatcggaatgacagatgta

SEQ ID NO: 718495 - DNA, 19 bp, Mus musculus
  siRNA target sequence for 4931406I20Rik (NM_025739.2,963-981).
cggaatgacagatgtaaga

SEQ ID NO: 718496 - DNA, 19 bp, Mus musculus
  siRNA target sequence for 4931406I20Rik (NM_025739.2,1051-1069).
gcgagttgcaggaacatat

SEQ ID NO: 718497 - DNA, 19 bp, Mus musculus
  siRNA target sequence for 4931406I20Rik (NM_025739.2,1280-1298).
ccggcaaacccgactgaat

SEQ ID NO: 718498 - DNA, 19 bp, Mus musculus
  siRNA target sequence for 4931406I20Rik (NM_025739.2,1774-1792).
gcaagaacagcgacattga

SEQ ID NO: 718499 - DNA, 19 bp, Mus musculus
  siRNA target sequence for 4931406I20Rik (NM_025739.2,1806-1824).
gagtcagctgtaactacat

SEQ ID NO: 718500 - DNA, 19 bp, Mus musculus
  siRNA target sequence for 4931406I20Rik (NM_025739.2,1810-1828).
cagctgtaactacatttga

SEQ ID NO: 718501 - DNA, 19 bp, Mus musculus
  siRNA target sequence for 4931406I20Rik (NM_025739.2,2031-2049).
ctgcggaggatctacttat

SEQ ID NO: 718502 - DNA, 19 bp, Mus musculus
  siRNA target sequence for 4931428D14Rik (NM_025740.1,244-262).
gagcagaaatgcgaagttt

SEQ ID NO: 718503 - DNA, 19 bp, Mus musculus
  siRNA target sequence for 4931428D14Rik (NM_025740.1,249-267).
gaaatgcgaagtttttgat

SEQ ID NO: 718504 - DNA, 19 bp, Mus musculus
  siRNA target sequence for 4931428D14Rik (NM_025740.1,254-272).
gcgaagtttttgatgatga

SEQ ID NO: 718505 - DNA, 19 bp, Mus musculus
  siRNA target sequence for 4931428D14Rik (NM_025740.1,298-316).
gaaatccatcaagaataca

SEQ ID NO: 718506 - DNA, 19 bp, Mus musculus
  siRNA target sequence for 4931428D14Rik (NM_025740.1,416-434).
gcacatcacaggccatttt

SEQ ID NO: 718507 - DNA, 19 bp, Mus musculus
  siRNA target sequence for 4931428D14Rik (NM_025740.1,419-437).
catcacaggccattttgca

SEQ ID NO: 718508 - DNA, 19 bp, Mus musculus
  siRNA target sequence for 4931428D14Rik (NM_025740.1,449-467).
cagcagaagattttactat

SEQ ID NO: 718509 - DNA, 19 bp, Mus musculus
  siRNA target sequence for 4931428D14Rik (NM_025740.1,508-526).
cttcaagccatccgaataa

SEQ ID NO: 718510 - DNA, 19 bp, Mus musculus
  siRNA target sequence for 4931428D14Rik (NM_025740.1,546-564).
gttacctgactgcttaact

SEQ ID NO: 718511 - DNA, 19 bp, Mus musculus
  siRNA target sequence for 4931428D14Rik (NM_025740.1,700-718).
gaagaactgccagtataca

SEQ ID NO: 718512 - DNA, 19 bp, Mus musculus
  siRNA target sequence for 4931428D14Rik (NM_025740.1,817-835).
caacccttggcaagaaaga

SEQ ID NO: 718513 - DNA, 19 bp, Mus musculus
  siRNA target sequence for 4931428D14Rik (NM_025740.1,860-878).
ccctcacacaaaaaggttt

SEQ ID NO: 718514 - DNA, 19 bp, Mus musculus
  siRNA target sequence for 4931428D14Rik (NM_025740.1,866-884).
cacaaaaaggtttgaagat

SEQ ID NO: 718515 - DNA, 19 bp, Mus musculus
  siRNA target sequence for 4931428D14Rik (NM_025740.1,906-924).
catggaaggaccaatagca

SEQ ID NO: 718516 - DNA, 19 bp, Mus musculus
  siRNA target sequence for 4931428D14Rik (NM_025740.1,956-974).
gtcaacgagagcattatct

SEQ ID NO: 718517 - DNA, 19 bp, Mus musculus
  siRNA target sequence for 4931428D14Rik (NM_025740.1,958-976).
caacgagagcattatctca

SEQ ID NO: 718518 - DNA, 19 bp, Mus musculus
  siRNA target sequence for 4931428D14Rik (NM_025740.1,1131-1149).
gcgattgcttgcagagaaa

SEQ ID NO: 718519 - DNA, 19 bp, Mus musculus
  siRNA target sequence for 4931412G03Rik (NM_025741.1,243-261).
gacctctgcgtccacaaat

SEQ ID NO: 718520 - DNA, 19 bp, Mus musculus
  siRNA target sequence for 4931412G03Rik (NM_025741.1,303-321).
gcaactggaactcaaatct

SEQ ID NO: 718521 - DNA, 19 bp, Mus musculus
  siRNA target sequence for 4931412G03Rik (NM_025741.1,393-411).
cgaactcaagaggaagtta

SEQ ID NO: 718522 - DNA, 19 bp, Mus musculus
  siRNA target sequence for 4931412G03Rik (NM_025741.1,547-565).
ggagatgtgaagaattcgt

SEQ ID NO: 718523 - DNA, 19 bp, Mus musculus
  siRNA target sequence for 4931412G03Rik (NM_025741.1,567-585).
cacgttcagatctcttgaa

SEQ ID NO: 718524 - DNA, 19 bp, Mus musculus
  siRNA target sequence for 4931412G03Rik (NM_025741.1,689-707).
ggagtggatatgaaactgt

SEQ ID NO: 718525 - DNA, 19 bp, Mus musculus
  siRNA target sequence for 4931412G03Rik (NM_025741.1,713-731).
ggcttgatgagcaactgtt

SEQ ID NO: 718526 - DNA, 19 bp, Mus musculus
  siRNA target sequence for 4931412G03Rik (NM_025741.1,714-732).
gcttgatgagcaactgttt

SEQ ID NO: 718527 - DNA, 19 bp, Mus musculus
  siRNA target sequence for 4931412G03Rik (NM_025741.1,715-733).
cttgatgagcaactgtttt

SEQ ID NO: 718528 - DNA, 19 bp, Mus musculus
  siRNA target sequence for 4933404M02Rik (NM_025744.1,312-330).
gtctccggcctttctcaaa

SEQ ID NO: 718529 - DNA, 19 bp, Mus musculus
  siRNA target sequence for 4933404M02Rik (NM_025744.1,314-332).
ctccggcctttctcaaagt

SEQ ID NO: 718530 - DNA, 19 bp, Mus musculus
  siRNA target sequence for 4933404M02Rik (NM_025744.1,316-334).
ccggcctttctcaaagtaa

SEQ ID NO: 718531 - DNA, 19 bp, Mus musculus
  siRNA target sequence for 4933404M02Rik (NM_025744.1,764-782).
ccgcacggctgtcgaaata

SEQ ID NO: 718532 - DNA, 19 bp, Mus musculus
  siRNA target sequence for 4933404M02Rik (NM_025744.1,766-784).
gcacggctgtcgaaatact

SEQ ID NO: 718533 - DNA, 19 bp, Mus musculus
  siRNA target sequence for 4933404M02Rik (NM_025744.1,910-928).
gtgcaggcatcaaaaagca

SEQ ID NO: 718534 - DNA, 19 bp, Mus musculus
  siRNA target sequence for 4933404M02Rik (NM_025744.1,931-949).
caaaatggcagattgctat

SEQ ID NO: 718535 - DNA, 19 bp, Mus musculus
  siRNA target sequence for 4933404M02Rik (NM_025744.1,938-956).
gcagattgctattgtatga

SEQ ID NO: 718536 - DNA, 19 bp, Mus musculus
  siRNA target sequence for 4933404M02Rik (NM_025744.1,951-969).
gtatgatccgaaggaaaaa

SEQ ID NO: 718537 - DNA, 19 bp, Mus musculus
  siRNA target sequence for 4933404M02Rik (NM_025744.1,955-973).
gatccgaaggaaaaactga

SEQ ID NO: 718538 - DNA, 19 bp, Mus musculus
  siRNA target sequence for 4933404M02Rik (NM_025744.1,981-999).
gcctaataaagaaaagtca

SEQ ID NO: 718539 - DNA, 19 bp, Mus musculus
  siRNA target sequence for 4933407N01Rik (NM_025745.2,236-254).
gaagataattacatcatca

SEQ ID NO: 718540 - DNA, 19 bp, Mus musculus
  siRNA target sequence for 4933407N01Rik (NM_025745.2,239-257).
gataattacatcatcatga

SEQ ID NO: 718541 - DNA, 19 bp, Mus musculus
  siRNA target sequence for 4933407N01Rik (NM_025745.2,355-373).
gcttttggaaccactattt

SEQ ID NO: 718542 - DNA, 19 bp, Mus musculus
  siRNA target sequence for 4933407N01Rik (NM_025745.2,356-374).
cttttggaaccactattta

SEQ ID NO: 718543 - DNA, 19 bp, Mus musculus
  siRNA target sequence for 4933407N01Rik (NM_025745.2,464-482).
gaaactggccaaaaagtaa

SEQ ID NO: 718544 - DNA, 19 bp, Mus musculus
  siRNA target sequence for 4933407N01Rik (NM_025745.2,505-523).
gaatatgttggctaagaat

SEQ ID NO: 718545 - DNA, 19 bp, Mus musculus
  siRNA target sequence for 4933407N01Rik (NM_025745.2,514-532).
ggctaagaatcttctgtat

SEQ ID NO: 718546 - DNA, 19 bp, Mus musculus
  siRNA target sequence for 4933407N01Rik (NM_025745.2,516-534).
ctaagaatcttctgtatga

SEQ ID NO: 718547 - DNA, 19 bp, Mus musculus
  siRNA target sequence for 4933407N01Rik (NM_025745.2,572-590).
gagattcccactaaaaaca

SEQ ID NO: 718548 - DNA, 19 bp, Mus musculus
  siRNA target sequence for 4933407N01Rik (NM_025745.2,642-660).
cttgtagtctgaaacaaaa

SEQ ID NO: 718549 - DNA, 19 bp, Mus musculus
  siRNA target sequence for 4933407N01Rik (NM_025745.2,672-690).
caagtactgtgatgtacat

SEQ ID NO: 718550 - DNA, 19 bp, Mus musculus
  siRNA target sequence for 4933407N01Rik (NM_025745.2,688-706).
catatgccatcctgaatct

SEQ ID NO: 718551 - DNA, 19 bp, Mus musculus
  siRNA target sequence for 4933407N01Rik (NM_025745.2,709-727).
gcatgagatcctttcagta

SEQ ID NO: 718552 - DNA, 19 bp, Mus musculus
  siRNA target sequence for 4933407N01Rik (NM_025745.2,783-801).
gtcatcctaaatacaagtt

SEQ ID NO: 718553 - DNA, 19 bp, Mus musculus
  siRNA target sequence for 4933407N01Rik (NM_025745.2,785-803).
catcctaaatacaagttca

SEQ ID NO: 718554 - DNA, 19 bp, Mus musculus
  siRNA target sequence for 4933407N01Rik (NM_025745.2,804-822).
gagcctctcctgtgaatga

SEQ ID NO: 718555 - DNA, 19 bp, Mus musculus
  siRNA target sequence for 4933407N01Rik (NM_025745.2,807-825).
cctctcctgtgaatgacat

SEQ ID NO: 718556 - DNA, 19 bp, Mus musculus
  siRNA target sequence for 4933407N01Rik (NM_025745.2,962-980).
ccagccatccacaaaccta

SEQ ID NO: 718557 - DNA, 19 bp, Mus musculus
  siRNA target sequence for 4933407N01Rik (NM_025745.2,1010-1028).
gttggaacaacccacattt

SEQ ID NO: 718558 - DNA, 19 bp, Mus musculus
  siRNA target sequence for 4933407N01Rik (NM_025745.2,1117-1135).
ctgctatggcaaacatgta

SEQ ID NO: 718559 - DNA, 19 bp, Mus musculus
  siRNA target sequence for 4933407N01Rik (NM_025745.2,1125-1143).
gcaaacatgtacatcaata

SEQ ID NO: 718560 - DNA, 19 bp, Mus musculus
  siRNA target sequence for 4933407N01Rik (NM_025745.2,1164-1182).
gaaaaacttctgtagttgt

SEQ ID NO: 718561 - DNA, 19 bp, Mus musculus
  siRNA target sequence for 4933407N01Rik (NM_025745.2,1211-1229).
gagtgggctaagaaaaata

SEQ ID NO: 718562 - DNA, 19 bp, Mus musculus
  siRNA target sequence for 4933407N01Rik (NM_025745.2,1213-1231).
gtgggctaagaaaaatact

SEQ ID NO: 718563 - DNA, 19 bp, Mus musculus
  siRNA target sequence for 4933407N01Rik (NM_025745.2,1230-1248).
ctgctagagcgtatcatct

SEQ ID NO: 718564 - DNA, 19 bp, Mus musculus
  siRNA target sequence for 4933407N01Rik (NM_025745.2,1271-1289).
gtcaggatggtgtcacatt

SEQ ID NO: 718565 - DNA, 19 bp, Mus musculus
  siRNA target sequence for 4933407N01Rik (NM_025745.2,1273-1291).
caggatggtgtcacatttt

SEQ ID NO: 718566 - DNA, 19 bp, Mus musculus
  siRNA target sequence for 4933407N01Rik (NM_025745.2,1303-1321).
ggatatttgtgatataact

SEQ ID NO: 718567 - DNA, 19 bp, Mus musculus
  siRNA target sequence for 4933407N01Rik (NM_025745.2,1328-1346).
cccagacaagtgactgtaa

SEQ ID NO: 718568 - DNA, 19 bp, Mus musculus
  siRNA target sequence for 4933407N01Rik (NM_025745.2,1337-1355).
gtgactgtaaaactaaagt

SEQ ID NO: 718569 - DNA, 19 bp, Mus musculus
  siRNA target sequence for 4933407N01Rik (NM_025745.2,1403-1421).
cctcactcgtgccagtata

SEQ ID NO: 718570 - DNA, 19 bp, Mus musculus
  siRNA target sequence for 4933407N01Rik (NM_025745.2,1408-1426).
ctcgtgccagtatattctt

SEQ ID NO: 718571 - DNA, 19 bp, Mus musculus
  siRNA target sequence for 4933407N01Rik (NM_025745.2,1428-1446).
gggttgaatctccagtaat

SEQ ID NO: 718572 - DNA, 19 bp, Mus musculus
  siRNA target sequence for 4933407N01Rik (NM_025745.2,1433-1451).
gaatctccagtaatctgta

SEQ ID NO: 718573 - DNA, 19 bp, Mus musculus
  siRNA target sequence for 4933415F23Rik (NM_025746.1,152-170).
cgggaacaacccggataaa

SEQ ID NO: 718574 - DNA, 19 bp, Mus musculus
  siRNA target sequence for 4933415F23Rik (NM_025746.1,154-172).
ggaacaacccggataaaga

SEQ ID NO: 718575 - DNA, 19 bp, Mus musculus
  siRNA target sequence for 4933415F23Rik (NM_025746.1,155-173).
gaacaacccggataaagat

SEQ ID NO: 718576 - DNA, 19 bp, Mus musculus
  siRNA target sequence for 4933411K20Rik (NM_025747.2,25-43).
gatcggtttggagatatct

SEQ ID NO: 718577 - DNA, 19 bp, Mus musculus
  siRNA target sequence for 4933411K20Rik (NM_025747.2,58-76).
gaccactctttctttgaca

SEQ ID NO: 718578 - DNA, 19 bp, Mus musculus
  siRNA target sequence for 4933411K20Rik (NM_025747.2,141-159).
ccttaaggaaggaataaat

SEQ ID NO: 718579 - DNA, 19 bp, Mus musculus
  siRNA target sequence for 4933411K20Rik (NM_025747.2,366-384).
ctcagtgttgacttcttca

SEQ ID NO: 718580 - DNA, 19 bp, Mus musculus
  siRNA target sequence for 4933411K20Rik (NM_025747.2,408-426).
cacaaaaggacataaatta

SEQ ID NO: 718581 - DNA, 19 bp, Mus musculus
  siRNA target sequence for 4933411K20Rik (NM_025747.2,429-447).
cttgcccgttccagataga

SEQ ID NO: 718582 - DNA, 19 bp, Mus musculus
  siRNA target sequence for 4933411K20Rik (NM_025747.2,432-450).
gcccgttccagatagaatt

SEQ ID NO: 718583 - DNA, 19 bp, Mus musculus
  siRNA target sequence for 4933411K20Rik (NM_025747.2,466-484).
ggtgaggacgattactaca

SEQ ID NO: 718584 - DNA, 19 bp, Mus musculus
  siRNA target sequence for 4933411K20Rik (NM_025747.2,503-521).
gcgacgatgggaagaagta

SEQ ID NO: 718585 - DNA, 19 bp, Mus musculus
  siRNA target sequence for 4933411K20Rik (NM_025747.2,551-569).
gcaacttaaaaaaaaacgt

SEQ ID NO: 718586 - DNA, 19 bp, Mus musculus
  siRNA target sequence for 4933411K20Rik (NM_025747.2,568-586).
gtgagtaagaagtattcct

SEQ ID NO: 718587 - DNA, 19 bp, Mus musculus
  siRNA target sequence for 4933411K20Rik (NM_025747.2,712-730).
ccaaaacagaggtgtaagt

SEQ ID NO: 718588 - DNA, 19 bp, Mus musculus
  siRNA target sequence for 4933411K20Rik (NM_025747.2,753-771).
gccttccagcactaaacaa

SEQ ID NO: 718589 - DNA, 19 bp, Mus musculus
  siRNA target sequence for 4933411K20Rik (NM_025747.2,754-772).
ccttccagcactaaacaaa

SEQ ID NO: 718590 - DNA, 19 bp, Mus musculus
  siRNA target sequence for 4933411K20Rik (NM_025747.2,755-773).
cttccagcactaaacaaaa

SEQ ID NO: 718591 - DNA, 19 bp, Mus musculus
  siRNA target sequence for 4933411K20Rik (NM_025747.2,801-819).
caatgtaccagacataact

SEQ ID NO: 718592 - DNA, 19 bp, Mus musculus
  siRNA target sequence for 4933411K20Rik (NM_025747.2,811-829).
gacataactcctttgtcaa

SEQ ID NO: 718593 - DNA, 19 bp, Mus musculus
  siRNA target sequence for 4933411K20Rik (NM_025747.2,845-863).
ctgcccagtcgcttgagtt

SEQ ID NO: 718594 - DNA, 19 bp, Mus musculus
  siRNA target sequence for 4933411K20Rik (NM_025747.2,866-884).
gccaaccgcctgatcaaaa

SEQ ID NO: 718595 - DNA, 19 bp, Mus musculus
  siRNA target sequence for 4933411K20Rik (NM_025747.2,867-885).
ccaaccgcctgatcaaaaa

SEQ ID NO: 718596 - DNA, 19 bp, Mus musculus
  siRNA target sequence for 4933411K20Rik (NM_025747.2,872-890).
cgcctgatcaaaaagtaaa

SEQ ID NO: 718597 - DNA, 19 bp, Mus musculus
  siRNA target sequence for 4933411K20Rik (NM_025747.2,937-955).
gaggctttaaagaatgatt

SEQ ID NO: 718598 - DNA, 19 bp, Mus musculus
  siRNA target sequence for 4933411K20Rik (NM_025747.2,952-970).
gattcaagatgtgtgaaat

SEQ ID NO: 718599 - DNA, 19 bp, Mus musculus
  siRNA target sequence for 4933411K20Rik (NM_025747.2,990-1008).
gcatggacagagttttgct

SEQ ID NO: 718600 - DNA, 19 bp, Mus musculus
  siRNA target sequence for 4933411K20Rik (NM_025747.2,997-1015).
cagagttttgctccaaaat

SEQ ID NO: 718601 - DNA, 19 bp, Mus musculus
  siRNA target sequence for 4933411K20Rik (NM_025747.2,999-1017).
gagttttgctccaaaatct

SEQ ID NO: 718602 - DNA, 19 bp, Mus musculus
  siRNA target sequence for 4933411K20Rik (NM_025747.2,1019-1037).
cagtgttagatgcaaatct

SEQ ID NO: 718603 - DNA, 19 bp, Mus musculus
  siRNA target sequence for 4933411K20Rik (NM_025747.2,1039-1057).
gaccgtagatctaaacaaa

SEQ ID NO: 718604 - DNA, 19 bp, Mus musculus
  siRNA target sequence for 4933411K20Rik (NM_025747.2,1041-1059).
ccgtagatctaaacaaaaa

SEQ ID NO: 718605 - DNA, 19 bp, Mus musculus
  siRNA target sequence for 4933411K20Rik (NM_025747.2,1049-1067).
ctaaacaaaaagtcttaca

SEQ ID NO: 718606 - DNA, 19 bp, Mus musculus
  siRNA target sequence for 4933411K20Rik (NM_025747.2,1073-1091).
caatggacctaaatcatct

SEQ ID NO: 718607 - DNA, 19 bp, Mus musculus
  siRNA target sequence for 4933411K20Rik (NM_025747.2,1099-1117).
gctttcctgcagttagata

SEQ ID NO: 718608 - DNA, 19 bp, Mus musculus
  siRNA target sequence for 4933411K20Rik (NM_025747.2,1100-1118).
ctttcctgcagttagataa

SEQ ID NO: 718609 - DNA, 19 bp, Mus musculus
  siRNA target sequence for 4933411K20Rik (NM_025747.2,1140-1158).
ctttgagcagcctgcaata

SEQ ID NO: 718610 - DNA, 19 bp, Mus musculus
  siRNA target sequence for 4933411K20Rik (NM_025747.2,1147-1165).
cagcctgcaataataccta

SEQ ID NO: 718611 - DNA, 19 bp, Mus musculus
  siRNA target sequence for 4933411K20Rik (NM_025747.2,1162-1180).
cctaggaagaactactctt

SEQ ID NO: 718612 - DNA, 19 bp, Mus musculus
  siRNA target sequence for 4933411K20Rik (NM_025747.2,1259-1277).
caggaagcaaaagtacaat

SEQ ID NO: 718613 - DNA, 19 bp, Mus musculus
  siRNA target sequence for 4933411K20Rik (NM_025747.2,1300-1318).
ccccctaagttgtatcata

SEQ ID NO: 718614 - DNA, 19 bp, Mus musculus
  siRNA target sequence for 4933411K20Rik (NM_025747.2,1339-1357).
gaacaacaaaggatcgaaa

SEQ ID NO: 718615 - DNA, 19 bp, Mus musculus
  siRNA target sequence for 4933411K20Rik (NM_025747.2,1435-1453).
gactaccatcggaatatga

SEQ ID NO: 718616 - DNA, 19 bp, Mus musculus
  siRNA target sequence for 4933411K20Rik (NM_025747.2,1437-1455).
ctaccatcggaatatgagt

SEQ ID NO: 718617 - DNA, 19 bp, Mus musculus
  siRNA target sequence for 4933411K20Rik (NM_025747.2,1477-1495).
gtccgacgagtgagatcta

SEQ ID NO: 718618 - DNA, 19 bp, Mus musculus
  siRNA target sequence for 4933411K20Rik (NM_025747.2,1479-1497).
ccgacgagtgagatctact

SEQ ID NO: 718619 - DNA, 19 bp, Mus musculus
  siRNA target sequence for 4933417A18Rik (NM_025750.1,188-206).
cccagcctgacgtcttgaa

SEQ ID NO: 718620 - DNA, 19 bp, Mus musculus
  siRNA target sequence for 4933417A18Rik (NM_025750.1,189-207).
ccagcctgacgtcttgaat

SEQ ID NO: 718621 - DNA, 19 bp, Mus musculus
  siRNA target sequence for 4933417A18Rik (NM_025750.1,265-283).
gtgcttcattcctacagaa

SEQ ID NO: 718622 - DNA, 19 bp, Mus musculus
  siRNA target sequence for 4933417A18Rik (NM_025750.1,343-361).
gcaagacatcagttaccaa

SEQ ID NO: 718623 - DNA, 19 bp, Mus musculus
  siRNA target sequence for 4933417A18Rik (NM_025750.1,347-365).
gacatcagttaccaaaaga

SEQ ID NO: 718624 - DNA, 19 bp, Mus musculus
  siRNA target sequence for 4933417A18Rik (NM_025750.1,410-428).
gaaggataatcaacaatat

SEQ ID NO: 718625 - DNA, 19 bp, Mus musculus
  siRNA target sequence for 4933417A18Rik (NM_025750.1,532-550).
gaggacctcaaatcagtta

SEQ ID NO: 718626 - DNA, 19 bp, Mus musculus
  siRNA target sequence for 4933417A18Rik (NM_025750.1,538-556).
ctcaaatcagttatccaaa

SEQ ID NO: 718627 - DNA, 19 bp, Mus musculus
  siRNA target sequence for 4933417A18Rik (NM_025750.1,565-583).
gcacttggcccaattatct

SEQ ID NO: 718628 - DNA, 19 bp, Mus musculus
  siRNA target sequence for 4933417A18Rik (NM_025750.1,616-634).
gtggtgttcagagatatca

SEQ ID NO: 718629 - DNA, 19 bp, Mus musculus
  siRNA target sequence for 4933417A18Rik (NM_025750.1,763-781).
cttagaaaaaagagaatca

SEQ ID NO: 718630 - DNA, 19 bp, Mus musculus
  siRNA target sequence for 4933425O20Rik (NM_025753.2,82-100).
cgagtggagtcggatatca

SEQ ID NO: 718631 - DNA, 19 bp, Mus musculus
  siRNA target sequence for 4933425O20Rik (NM_025753.2,83-101).
gagtggagtcggatatcat

SEQ ID NO: 718632 - DNA, 19 bp, Mus musculus
  siRNA target sequence for 4933425O20Rik (NM_025753.2,201-219).
gacccagtggtggaataca

SEQ ID NO: 718633 - DNA, 19 bp, Mus musculus
  siRNA target sequence for 4933425O20Rik (NM_025753.2,280-298).
ctgctggcactgatgctat

SEQ ID NO: 718634 - DNA, 19 bp, Mus musculus
  siRNA target sequence for 4933428G09Rik (NM_025755.2,143-161).
gaggtgtgcagttgagaaa

SEQ ID NO: 718635 - DNA, 19 bp, Mus musculus
  siRNA target sequence for 4933428G09Rik (NM_025755.2,164-182).
gagcgacaggtagtaatga

SEQ ID NO: 718636 - DNA, 19 bp, Mus musculus
  siRNA target sequence for 4933428G09Rik (NM_025755.2,226-244).
gttcagcggagcaaatcct

SEQ ID NO: 718637 - DNA, 19 bp, Mus musculus
  siRNA target sequence for 4933428G09Rik (NM_025755.2,283-301).
cgtcctcggccaagtgata

SEQ ID NO: 718638 - DNA, 19 bp, Mus musculus
  siRNA target sequence for 4933428G09Rik (NM_025755.2,284-302).
gtcctcggccaagtgataa

SEQ ID NO: 718639 - DNA, 19 bp, Mus musculus
  siRNA target sequence for 4933428G09Rik (NM_025755.2,287-305).
ctcggccaagtgataagct

SEQ ID NO: 718640 - DNA, 19 bp, Mus musculus
  siRNA target sequence for 4933428G09Rik (NM_025755.2,303-321).
gctcaaccctaaaaccatt

SEQ ID NO: 718641 - DNA, 19 bp, Mus musculus
  siRNA target sequence for 4933428G09Rik (NM_025755.2,353-371).
ctgcattcgcagctattta

SEQ ID NO: 718642 - DNA, 19 bp, Mus musculus
  siRNA target sequence for 4933428G09Rik (NM_025755.2,399-417).
ggtacatggctcagtaaaa

SEQ ID NO: 718643 - DNA, 19 bp, Mus musculus
  siRNA target sequence for 4933428G09Rik (NM_025755.2,454-472).
ccatttgacccgcttctaa

SEQ ID NO: 718644 - DNA, 19 bp, Mus musculus
  siRNA target sequence for 4933428G09Rik (NM_025755.2,455-473).
catttgacccgcttctaat

SEQ ID NO: 718645 - DNA, 19 bp, Mus musculus
  siRNA target sequence for 4933428G09Rik (NM_025755.2,460-478).
gacccgcttctaattacgt

SEQ ID NO: 718646 - DNA, 19 bp, Mus musculus
  siRNA target sequence for 4933428G09Rik (NM_025755.2,462-480).
cccgcttctaattacgtta

SEQ ID NO: 718647 - DNA, 19 bp, Mus musculus
  siRNA target sequence for 4933428G09Rik (NM_025755.2,555-573).
caagggtgctcctgaaaaa

SEQ ID NO: 718648 - DNA, 19 bp, Mus musculus
  siRNA target sequence for 4933428G09Rik (NM_025755.2,606-624).
gctgaaggcagctctagtt

SEQ ID NO: 718649 - DNA, 19 bp, Mus musculus
  siRNA target sequence for 4933428G09Rik (NM_025755.2,695-713).
ctctgaatggccatctgaa

SEQ ID NO: 718650 - DNA, 19 bp, Mus musculus
  siRNA target sequence for 4933428G09Rik (NM_025755.2,740-758).
ggctaatggacaaaaaatt

SEQ ID NO: 718651 - DNA, 19 bp, Mus musculus
  siRNA target sequence for 4933428G09Rik (NM_025755.2,795-813).
gcagcacggcggaaatgca

SEQ ID NO: 718652 - DNA, 19 bp, Mus musculus
  siRNA target sequence for 4933428G09Rik (NM_025755.2,801-819).
cggcggaaatgcaagtctt

SEQ ID NO: 718653 - DNA, 19 bp, Mus musculus
  siRNA target sequence for 4933428G09Rik (NM_025755.2,802-820).
ggcggaaatgcaagtctta

SEQ ID NO: 718654 - DNA, 19 bp, Mus musculus
  siRNA target sequence for 4933428G09Rik (NM_025755.2,806-824).
gaaatgcaagtcttatcat

SEQ ID NO: 718655 - DNA, 19 bp, Mus musculus
  siRNA target sequence for 4933428G09Rik (NM_025755.2,811-829).
gcaagtcttatcatcatca

SEQ ID NO: 718656 - DNA, 19 bp, Mus musculus
  siRNA target sequence for 4933428G09Rik (NM_025755.2,812-830).
caagtcttatcatcatcaa

SEQ ID NO: 718657 - DNA, 19 bp, Mus musculus
  siRNA target sequence for 4933427E11Rik (NM_025756.1,273-291).
ctcagcctccggtagaaca

SEQ ID NO: 718658 - DNA, 19 bp, Mus musculus
  siRNA target sequence for 4933427E11Rik (NM_025756.1,458-476).
ccttgtggacccttctttt

SEQ ID NO: 718659 - DNA, 19 bp, Mus musculus
  siRNA target sequence for 4933439F18Rik (NM_025757.3,567-585).
ctttgtgggtacctaaaga

SEQ ID NO: 718660 - DNA, 19 bp, Mus musculus
  siRNA target sequence for 4933439F18Rik (NM_025757.3,613-631).
cccttacaaccttctttga

SEQ ID NO: 718661 - DNA, 19 bp, Mus musculus
  siRNA target sequence for 4933439F18Rik (NM_025757.3,690-708).
gacgtggatcggaaacact

SEQ ID NO: 718662 - DNA, 19 bp, Mus musculus
  siRNA target sequence for 4933439F18Rik (NM_025757.3,701-719).
gaaacactggggcaagttt

SEQ ID NO: 718663 - DNA, 19 bp, Mus musculus
  siRNA target sequence for 4933439F18Rik (NM_025757.3,712-730).
gcaagtttctggcttttta

SEQ ID NO: 718664 - DNA, 19 bp, Mus musculus
  siRNA target sequence for 4933439F18Rik (NM_025757.3,713-731).
caagtttctggctttttat

SEQ ID NO: 718665 - DNA, 19 bp, Mus musculus
  siRNA target sequence for 4933439F18Rik (NM_025757.3,786-804).
ggggattatgtcttcatga

SEQ ID NO: 718666 - DNA, 19 bp, Mus musculus
  siRNA target sequence for 4933439F18Rik (NM_025757.3,825-843).
gtcccggaccacacaatca

SEQ ID NO: 718667 - DNA, 19 bp, Mus musculus
  siRNA target sequence for 4933439F18Rik (NM_025757.3,827-845).
cccggaccacacaatcaaa

SEQ ID NO: 718668 - DNA, 19 bp, Mus musculus
  siRNA target sequence for 4933439F18Rik (NM_025757.3,848-866).
catcagcggtgcttccttt

SEQ ID NO: 718669 - DNA, 19 bp, Mus musculus
  siRNA target sequence for 4933439F18Rik (NM_025757.3,907-925).
ccatagagggctactacta

SEQ ID NO: 718670 - DNA, 19 bp, Mus musculus
  siRNA target sequence for 4933428I03Rik (NM_025760.2,78-96).
ctgcagcccaggtatagga

SEQ ID NO: 718671 - DNA, 19 bp, Mus musculus
  siRNA target sequence for 4933428I03Rik (NM_025760.2,83-101).
gcccaggtataggaagaat

SEQ ID NO: 718672 - DNA, 19 bp, Mus musculus
  siRNA target sequence for 4933428I03Rik (NM_025760.2,86-104).
caggtataggaagaatgta

SEQ ID NO: 718673 - DNA, 19 bp, Mus musculus
  siRNA target sequence for 4933428I03Rik (NM_025760.2,102-120).
gtatatcttttcatctatt

SEQ ID NO: 718674 - DNA, 19 bp, Mus musculus
  siRNA target sequence for 4933428I03Rik (NM_025760.2,134-152).
ctgtggccactcatggata

SEQ ID NO: 718675 - DNA, 19 bp, Mus musculus
  siRNA target sequence for 4933428I03Rik (NM_025760.2,145-163).
catggatactggcaaatat

SEQ ID NO: 718676 - DNA, 19 bp, Mus musculus
  siRNA target sequence for 4933428I03Rik (NM_025760.2,149-167).
gatactggcaaatatgaca

SEQ ID NO: 718677 - DNA, 19 bp, Mus musculus
  siRNA target sequence for 4933428I03Rik (NM_025760.2,176-194).
cttctcatttgggaaagat

SEQ ID NO: 718678 - DNA, 19 bp, Mus musculus
  siRNA target sequence for 4933428I03Rik (NM_025760.2,181-199).
catttgggaaagattccat

SEQ ID NO: 718679 - DNA, 19 bp, Mus musculus
  siRNA target sequence for 4933428I03Rik (NM_025760.2,233-251).
gcgggtttgccaatccatt

SEQ ID NO: 718680 - DNA, 19 bp, Mus musculus
  siRNA target sequence for 4933428I03Rik (NM_025760.2,234-252).
cgggtttgccaatccattt

SEQ ID NO: 718681 - DNA, 19 bp, Mus musculus
  siRNA target sequence for 4933428I03Rik (NM_025760.2,323-341).
cacagagagagtgatcatt

SEQ ID NO: 718682 - DNA, 19 bp, Mus musculus
  siRNA target sequence for 4933428I03Rik (NM_025760.2,327-345).
gagagagtgatcattctct

SEQ ID NO: 718683 - DNA, 19 bp, Mus musculus
  siRNA target sequence for 4933428I03Rik (NM_025760.2,329-347).
gagagtgatcattctcttt

SEQ ID NO: 718684 - DNA, 19 bp, Mus musculus
  siRNA target sequence for 4933428I03Rik (NM_025760.2,423-441).
gatatggtaaggtacactt

SEQ ID NO: 718685 - DNA, 19 bp, Mus musculus
  siRNA target sequence for 4933428I03Rik (NM_025760.2,458-476).
catagggacatcttatgct

SEQ ID NO: 718686 - DNA, 19 bp, Mus musculus
  siRNA target sequence for 4933428I03Rik (NM_025760.2,540-558).
gcattcaccatctatcagt

SEQ ID NO: 718687 - DNA, 19 bp, Mus musculus
  siRNA target sequence for 4933428I03Rik (NM_025760.2,600-618).
cttccgttcgacctatcta

SEQ ID NO: 718688 - DNA, 19 bp, Mus musculus
  siRNA target sequence for 4933428I03Rik (NM_025760.2,656-674).
gctcttcataggtatgtat

SEQ ID NO: 718689 - DNA, 19 bp, Mus musculus
  siRNA target sequence for 4933428I03Rik (NM_025760.2,677-695).
cacctacagccatctttat

SEQ ID NO: 718690 - DNA, 19 bp, Mus musculus
  siRNA target sequence for 4933428I03Rik (NM_025760.2,686-704).
ccatctttatacagaaaga

SEQ ID NO: 718691 - DNA, 19 bp, Mus musculus
  siRNA target sequence for 4933428I03Rik (NM_025760.2,716-734).
ccgagttttttctgtcaaa

SEQ ID NO: 718692 - DNA, 19 bp, Mus musculus
  siRNA target sequence for 4933436I01Rik (NM_025763.1,74-92).
ctcatggacttcacatact

SEQ ID NO: 718693 - DNA, 19 bp, Mus musculus
  siRNA target sequence for 4933436I01Rik (NM_025763.1,85-103).
cacatactaacctgacaaa

SEQ ID NO: 718694 - DNA, 19 bp, Mus musculus
  siRNA target sequence for 4933436I01Rik (NM_025763.1,133-151).
ggggttctggcaagaacta

SEQ ID NO: 718695 - DNA, 19 bp, Mus musculus
  siRNA target sequence for 4933436I01Rik (NM_025763.1,146-164).
gaactacactgaatacatt

SEQ ID NO: 718696 - DNA, 19 bp, Mus musculus
  siRNA target sequence for 4933436I01Rik (NM_025763.1,191-209).
ggtcctaaaaagggttaaa

SEQ ID NO: 718697 - DNA, 19 bp, Mus musculus
  siRNA target sequence for 4933436I01Rik (NM_025763.1,192-210).
gtcctaaaaagggttaaaa

SEQ ID NO: 718698 - DNA, 19 bp, Mus musculus
  siRNA target sequence for 4933436I01Rik (NM_025763.1,252-270).
cataccacccctctatgta

SEQ ID NO: 718699 - DNA, 19 bp, Mus musculus
  siRNA target sequence for 4933436I01Rik (NM_025763.1,257-275).
cacccctctatgtaaacct

SEQ ID NO: 718700 - DNA, 19 bp, Mus musculus
  siRNA target sequence for 4933436I01Rik (NM_025763.1,332-350).
gcgtaaaacgcgacatgaa

SEQ ID NO: 718701 - DNA, 19 bp, Mus musculus
  siRNA target sequence for 4933436I01Rik (NM_025763.1,340-358).
cgcgacatgaacgaaacaa

SEQ ID NO: 718702 - DNA, 19 bp, Mus musculus
  siRNA target sequence for 4933436I01Rik (NM_025763.1,341-359).
gcgacatgaacgaaacaaa

SEQ ID NO: 718703 - DNA, 19 bp, Mus musculus
  siRNA target sequence for 4933436I01Rik (NM_025763.1,342-360).
cgacatgaacgaaacaaaa

SEQ ID NO: 718704 - DNA, 19 bp, Mus musculus
  siRNA target sequence for 4933436I01Rik (NM_025763.1,343-361).
gacatgaacgaaacaaaat

SEQ ID NO: 718705 - DNA, 19 bp, Mus musculus
  siRNA target sequence for 4933436I01Rik (NM_025763.1,380-398).
gatgctgtggggtcagtat

SEQ ID NO: 718706 - DNA, 19 bp, Mus musculus
  siRNA target sequence for 4933436I01Rik (NM_025763.1,431-449).
ggatcaatactctcactta

SEQ ID NO: 718707 - DNA, 19 bp, Mus musculus
  siRNA target sequence for 4933436I01Rik (NM_025763.1,517-535).
gtggtcaagacaaacatct

SEQ ID NO: 718708 - DNA, 19 bp, Mus musculus
  siRNA target sequence for 4933436I01Rik (NM_025763.1,520-538).
gtcaagacaaacatctcaa

SEQ ID NO: 718709 - DNA, 19 bp, Mus musculus
  siRNA target sequence for 4933436I01Rik (NM_025763.1,542-560).
gttggtgatcacacagttt

SEQ ID NO: 718710 - DNA, 19 bp, Mus musculus
  siRNA target sequence for 4933436I01Rik (NM_025763.1,545-563).
ggtgatcacacagtttgat

SEQ ID NO: 718711 - DNA, 19 bp, Mus musculus
  siRNA target sequence for 4933436I01Rik (NM_025763.1,576-594).
gttaaagaagagataagca

SEQ ID NO: 718712 - DNA, 19 bp, Mus musculus
  siRNA target sequence for 4933436I01Rik (NM_025763.1,613-631).
gacgtgaaaaggaagataa

SEQ ID NO: 718713 - DNA, 19 bp, Mus musculus
  siRNA target sequence for 4933436I01Rik (NM_025763.1,671-689).
gagaatcacacactttgaa

SEQ ID NO: 718714 - DNA, 19 bp, Mus musculus
  siRNA target sequence for 4933436I01Rik (NM_025763.1,699-717).
cacgttaagaggaacacaa

SEQ ID NO: 718715 - DNA, 19 bp, Mus musculus
  siRNA target sequence for 4933436I01Rik (NM_025763.1,710-728).
gaacacaaaactttatcga

SEQ ID NO: 718716 - DNA, 19 bp, Mus musculus
  siRNA target sequence for 4933436I01Rik (NM_025763.1,937-955).
ggcatgcaaaagaacataa

SEQ ID NO: 718717 - DNA, 19 bp, Mus musculus
  siRNA target sequence for 4933436I01Rik (NM_025763.1,1007-1025).
cttagaccaaaataatcaa

SEQ ID NO: 718718 - DNA, 19 bp, Mus musculus
  siRNA target sequence for 4933436I01Rik (NM_025763.1,1034-1052).
gaacacactatttgatcat

SEQ ID NO: 718719 - DNA, 19 bp, Mus musculus
  siRNA target sequence for 4933436I01Rik (NM_025763.1,1157-1175).
gataccggtccccttctat

SEQ ID NO: 718720 - DNA, 19 bp, Mus musculus
  siRNA target sequence for 4933436I01Rik (NM_025763.1,1162-1180).
cggtccccttctatcaaca

SEQ ID NO: 718721 - DNA, 19 bp, Mus musculus
  siRNA target sequence for 4933437N03Rik (NM_025765.1,486-504).
gggagtctcattttgacat

SEQ ID NO: 718722 - DNA, 19 bp, Mus musculus
  siRNA target sequence for 4933437N03Rik (NM_025765.1,538-556).
ccatcctccctcaaaccta

SEQ ID NO: 718723 - DNA, 19 bp, Mus musculus
  siRNA target sequence for 4933437N03Rik (NM_025765.1,678-696).
ggcagtggaatgttatact

SEQ ID NO: 718724 - DNA, 19 bp, Mus musculus
  siRNA target sequence for 4933439F11Rik (NM_025766.1,273-291).
gaaggagagcgtttttcaa

SEQ ID NO: 718725 - DNA, 19 bp, Mus musculus
  siRNA target sequence for 4933439F11Rik (NM_025766.1,307-325).
gctttcctggtgtttgata

SEQ ID NO: 718726 - DNA, 19 bp, Mus musculus
  siRNA target sequence for 4933439F11Rik (NM_025766.1,308-326).
ctttcctggtgtttgataa

SEQ ID NO: 718727 - DNA, 19 bp, Mus musculus
  siRNA target sequence for 4933439F11Rik (NM_025766.1,392-410).
cagtggtctggtattacca

SEQ ID NO: 718728 - DNA, 19 bp, Mus musculus
  siRNA target sequence for 4933439F11Rik (NM_025766.1,437-455).
cggtgctcacagactttga

SEQ ID NO: 718729 - DNA, 19 bp, Mus musculus
  siRNA target sequence for 4933439F11Rik (NM_025766.1,438-456).
ggtgctcacagactttgat

SEQ ID NO: 718730 - DNA, 19 bp, Mus musculus
  siRNA target sequence for 4933439F11Rik (NM_025766.1,562-580).
gacacaggcctatattttt

SEQ ID NO: 718731 - DNA, 19 bp, Mus musculus
  siRNA target sequence for 4933439F11Rik (NM_025766.1,564-582).
cacaggcctatatttttgt

SEQ ID NO: 718732 - DNA, 19 bp, Mus musculus
  siRNA target sequence for 4933439F11Rik (NM_025766.1,619-637).
gtggacatccagagcaata

SEQ ID NO: 718733 - DNA, 19 bp, Mus musculus
  siRNA target sequence for 4933439F11Rik (NM_025766.1,677-695).
cgttgccagatgagtacta

SEQ ID NO: 718734 - DNA, 19 bp, Mus musculus
  siRNA target sequence for 4933439F11Rik (NM_025766.1,678-696).
gttgccagatgagtactat

SEQ ID NO: 718735 - DNA, 19 bp, Mus musculus
  siRNA target sequence for 4933439F11Rik (NM_025766.1,805-823).
ctctcgcctcgctacatta

SEQ ID NO: 718736 - DNA, 19 bp, Mus musculus
  siRNA target sequence for 4933439F11Rik (NM_025766.1,810-828).
gcctcgctacattaagact

SEQ ID NO: 718737 - DNA, 19 bp, Mus musculus
  siRNA target sequence for 4933439F11Rik (NM_025766.1,964-982).
gtgctggcaatctacagtt

SEQ ID NO: 718738 - DNA, 19 bp, Mus musculus
  siRNA target sequence for 4933439F11Rik (NM_025766.1,970-988).
gcaatctacagttatgtgt

SEQ ID NO: 718739 - DNA, 19 bp, Mus musculus
  siRNA target sequence for 4933439F11Rik (NM_025766.1,1241-1259).
gctggctgcaagggttaaa

SEQ ID NO: 718740 - DNA, 19 bp, Mus musculus
  siRNA target sequence for 4933439F11Rik (NM_025766.1,1244-1262).
ggctgcaagggttaaaaat

SEQ ID NO: 718741 - DNA, 19 bp, Mus musculus
  siRNA target sequence for 4933439F11Rik (NM_025766.1,1269-1287).
cttccggttgggcgtaata

SEQ ID NO: 718742 - DNA, 19 bp, Mus musculus
  siRNA target sequence for 4933439F11Rik (NM_025766.1,1420-1438).
cgctgttgtcccaacttct

SEQ ID NO: 718743 - DNA, 19 bp, Mus musculus
  siRNA target sequence for Prkrip1 (NM_025774.1,180-198).
cggacaaagcagttccaat

SEQ ID NO: 718744 - DNA, 19 bp, Mus musculus
  siRNA target sequence for Prkrip1 (NM_025774.1,181-199).
ggacaaagcagttccaatt

SEQ ID NO: 718745 - DNA, 19 bp, Mus musculus
  siRNA target sequence for Prkrip1 (NM_025774.1,184-202).
caaagcagttccaattcca

SEQ ID NO: 718746 - DNA, 19 bp, Mus musculus
  siRNA target sequence for Prkrip1 (NM_025774.1,225-243).
ctcgagcgcctccagaatt

SEQ ID NO: 718747 - DNA, 19 bp, Mus musculus
  siRNA target sequence for Prkrip1 (NM_025774.1,228-246).
gagcgcctccagaatttgt

SEQ ID NO: 718748 - DNA, 19 bp, Mus musculus
  siRNA target sequence for 8430438D04Rik (NM_025775.1,386-404).
gggacagcctgcttattga

SEQ ID NO: 718749 - DNA, 19 bp, Mus musculus
  siRNA target sequence for 8430438D04Rik (NM_025775.1,387-405).
ggacagcctgcttattgat

SEQ ID NO: 718750 - DNA, 19 bp, Mus musculus
  siRNA target sequence for 8430438D04Rik (NM_025775.1,388-406).
gacagcctgcttattgatt

SEQ ID NO: 718751 - DNA, 19 bp, Mus musculus
  siRNA target sequence for 8430438D04Rik (NM_025775.1,403-421).
gattgctgaagctaatcca

SEQ ID NO: 718752 - DNA, 19 bp, Mus musculus
  siRNA target sequence for 8430438D04Rik (NM_025775.1,413-431).
gctaatccaactttggttt

SEQ ID NO: 718753 - DNA, 19 bp, Mus musculus
  siRNA target sequence for 8430438D04Rik (NM_025775.1,414-432).
ctaatccaactttggtttt

SEQ ID NO: 718754 - DNA, 19 bp, Mus musculus
  siRNA target sequence for 8430438D04Rik (NM_025775.1,471-489).
cttggctcgtgcacataaa

SEQ ID NO: 718755 - DNA, 19 bp, Mus musculus
  siRNA target sequence for 8430438D04Rik (NM_025775.1,474-492).
ggctcgtgcacataaacat

SEQ ID NO: 718756 - DNA, 19 bp, Mus musculus
  siRNA target sequence for 8430438D04Rik (NM_025775.1,482-500).
cacataaacattttatggt

SEQ ID NO: 718757 - DNA, 19 bp, Mus musculus
  siRNA target sequence for 8430438D04Rik (NM_025775.1,509-527).
cctaggcttcctaagtgtt

SEQ ID NO: 718758 - DNA, 19 bp, Mus musculus
  siRNA target sequence for 8430438D04Rik (NM_025775.1,510-528).
ctaggcttcctaagtgttt

SEQ ID NO: 718759 - DNA, 19 bp, Mus musculus
  siRNA target sequence for 8430438D04Rik (NM_025775.1,514-532).
gcttcctaagtgtttagca

SEQ ID NO: 718760 - DNA, 19 bp, Mus musculus
  siRNA target sequence for 8430438D04Rik (NM_025775.1,515-533).
cttcctaagtgtttagcat

SEQ ID NO: 718761 - DNA, 19 bp, Mus musculus
  siRNA target sequence for 8430438D04Rik (NM_025775.1,541-559).
ctgtcatgtctcaaaacga

SEQ ID NO: 718762 - DNA, 19 bp, Mus musculus
  siRNA target sequence for 8430438D04Rik (NM_025775.1,580-598).
cactcgtagaggtgataca

SEQ ID NO: 718763 - DNA, 19 bp, Mus musculus
  siRNA target sequence for 8430438D04Rik (NM_025775.1,649-667).
gatattgtcagtattgtct

SEQ ID NO: 718764 - DNA, 19 bp, Mus musculus
  siRNA target sequence for 8430438D04Rik (NM_025775.1,664-682).
gtctcccgtgttgtttagt

SEQ ID NO: 718765 - DNA, 19 bp, Mus musculus
  siRNA target sequence for 8430438D04Rik (NM_025775.1,668-686).
cccgtgttgtttagtagat

SEQ ID NO: 718766 - DNA, 19 bp, Mus musculus
  siRNA target sequence for 8430438D04Rik (NM_025775.1,670-688).
cgtgttgtttagtagatct

SEQ ID NO: 718767 - DNA, 19 bp, Mus musculus
  siRNA target sequence for 8430438D04Rik (NM_025775.1,673-691).
gttgtttagtagatctcat

SEQ ID NO: 718768 - DNA, 19 bp, Mus musculus
  siRNA target sequence for 8430438D04Rik (NM_025775.1,676-694).
gtttagtagatctcattgt

SEQ ID NO: 718769 - DNA, 19 bp, Mus musculus
  siRNA target sequence for 8430438D04Rik (NM_025775.1,681-699).
gtagatctcattgtattaa

SEQ ID NO: 718770 - DNA, 19 bp, Mus musculus
  siRNA target sequence for 8430438D04Rik (NM_025775.1,684-702).
gatctcattgtattaattt

SEQ ID NO: 718771 - DNA, 19 bp, Mus musculus
  siRNA target sequence for 9030623N16Rik (NM_025777.1,207-225).
gtaccgctgctcattgtta

SEQ ID NO: 718772 - DNA, 19 bp, Mus musculus
  siRNA target sequence for 9030623N16Rik (NM_025777.1,211-229).
cgctgctcattgttatcct

SEQ ID NO: 718773 - DNA, 19 bp, Mus musculus
  siRNA target sequence for 9030623N16Rik (NM_025777.1,326-344).
gttcataggtgccgaaatt

SEQ ID NO: 718774 - DNA, 19 bp, Mus musculus
  siRNA target sequence for 9030623N16Rik (NM_025777.1,389-407).
gaccaacacatcctacaaa

SEQ ID NO: 718775 - DNA, 19 bp, Mus musculus
  siRNA target sequence for 9030623N16Rik (NM_025777.1,413-431).
cagtccatcccgtgttcaa

SEQ ID NO: 718776 - DNA, 19 bp, Mus musculus
  siRNA target sequence for 9030623N16Rik (NM_025777.1,415-433).
gtccatcccgtgttcaagt

SEQ ID NO: 718777 - DNA, 19 bp, Mus musculus
  siRNA target sequence for 9030623N16Rik (NM_025777.1,518-536).
ctacaatgagcgtttcact

SEQ ID NO: 718778 - DNA, 19 bp, Mus musculus
  siRNA target sequence for 9030623N16Rik (NM_025777.1,643-661).
gcgggctgtaccaccaata

SEQ ID NO: 718779 - DNA, 19 bp, Mus musculus
  siRNA target sequence for 9030623N16Rik (NM_025777.1,644-662).
cgggctgtaccaccaatat

SEQ ID NO: 718780 - DNA, 19 bp, Mus musculus
  siRNA target sequence for 9030623N16Rik (NM_025777.1,810-828).
gccttcgcctcgatttcca

SEQ ID NO: 718781 - DNA, 19 bp, Mus musculus
  siRNA target sequence for 9030623N16Rik (NM_025777.1,862-880).
ccgtcctcacgccttacta

SEQ ID NO: 718782 - DNA, 19 bp, Mus musculus
  siRNA target sequence for 9030623N16Rik (NM_025777.1,944-962).
ggtgattctccactatact

SEQ ID NO: 718783 - DNA, 19 bp, Mus musculus
  siRNA target sequence for 9030623N16Rik (NM_025777.1,990-1008).
gatctaagtgtcaaagact

SEQ ID NO: 718784 - DNA, 19 bp, Mus musculus
  siRNA target sequence for 9030623N16Rik (NM_025777.1,1054-1072).
cgcaacacgaacagttgaa

SEQ ID NO: 718785 - DNA, 19 bp, Mus musculus
  siRNA target sequence for 9030623N16Rik (NM_025777.1,1070-1088).
gaagagtccagacttaaat

SEQ ID NO: 718786 - DNA, 19 bp, Mus musculus
  siRNA target sequence for 9030408N13Rik (NM_025779.2,329-347).
ggatgaaataacagttact

SEQ ID NO: 718787 - DNA, 19 bp, Mus musculus
  siRNA target sequence for 9030408N13Rik (NM_025779.2,400-418).
gctgccagtttgtagtcaa

SEQ ID NO: 718788 - DNA, 19 bp, Mus musculus
  siRNA target sequence for 9030408N13Rik (NM_025779.2,411-429).
gtagtcaagccgatgttgt

SEQ ID NO: 718789 - DNA, 19 bp, Mus musculus
  siRNA target sequence for 9030408N13Rik (NM_025779.2,467-485).
ggataaaggcatcaaaact

SEQ ID NO: 718790 - DNA, 19 bp, Mus musculus
  siRNA target sequence for 9030408N13Rik (NM_025779.2,513-531).
gaaattccagcttcaacat

SEQ ID NO: 718791 - DNA, 19 bp, Mus musculus
  siRNA target sequence for 9030408N13Rik (NM_025779.2,563-581).
gctcatcattaacaaacta

SEQ ID NO: 718792 - DNA, 19 bp, Mus musculus
  siRNA target sequence for 9030408N13Rik (NM_025779.2,575-593).
caaactacggtatgatata

SEQ ID NO: 718793 - DNA, 19 bp, Mus musculus
  siRNA target sequence for 9030408N13Rik (NM_025779.2,659-677).
ggttcacagactattcact

SEQ ID NO: 718794 - DNA, 19 bp, Mus musculus
  siRNA target sequence for 9030408N13Rik (NM_025779.2,660-678).
gttcacagactattcacta

SEQ ID NO: 718795 - DNA, 19 bp, Mus musculus
  siRNA target sequence for 9030408N13Rik (NM_025779.2,706-724).
gacgagagcgccatctgat

SEQ ID NO: 718796 - DNA, 19 bp, Mus musculus
  siRNA target sequence for 9030408N13Rik (NM_025779.2,770-788).
ggtcaaagctgcaatagaa

SEQ ID NO: 718797 - DNA, 19 bp, Mus musculus
  siRNA target sequence for 9030408N13Rik (NM_025779.2,921-939).
ctgtcgtttgcgaattcca

SEQ ID NO: 718798 - DNA, 19 bp, Mus musculus
  siRNA target sequence for 9030408N13Rik (NM_025779.2,930-948).
gcgaattccatcgtctttt

SEQ ID NO: 718799 - DNA, 19 bp, Mus musculus
  siRNA target sequence for 9030408N13Rik (NM_025779.2,932-950).
gaattccatcgtctttttt

SEQ ID NO: 718800 - DNA, 19 bp, Mus musculus
  siRNA target sequence for 9030408N13Rik (NM_025779.2,942-960).
gtcttttttgcatacttca

SEQ ID NO: 718801 - DNA, 19 bp, Mus musculus
  siRNA target sequence for 9030408N13Rik (NM_025779.2,1056-1074).
gaacaatacaacaagctaa

SEQ ID NO: 718802 - DNA, 19 bp, Mus musculus
  siRNA target sequence for 9030408N13Rik (NM_025779.2,1124-1142).
cctccgcttgcgaatccaa

SEQ ID NO: 718803 - DNA, 19 bp, Mus musculus
  siRNA target sequence for 9030625G08Rik (NM_025780.2,271-289).
gcctggttaggcgcaaaaa

SEQ ID NO: 718804 - DNA, 19 bp, Mus musculus
  siRNA target sequence for 9030625G08Rik (NM_025780.2,272-290).
cctggttaggcgcaaaaat

SEQ ID NO: 718805 - DNA, 19 bp, Mus musculus
  siRNA target sequence for 9030625G08Rik (NM_025780.2,273-291).
ctggttaggcgcaaaaatt

SEQ ID NO: 718806 - DNA, 19 bp, Mus musculus
  siRNA target sequence for 9030625G08Rik (NM_025780.2,275-293).
ggttaggcgcaaaaatttt

SEQ ID NO: 718807 - DNA, 19 bp, Mus musculus
  siRNA target sequence for 9030625G08Rik (NM_025780.2,336-354).
gcctcctgttttgatctaa

SEQ ID NO: 718808 - DNA, 19 bp, Mus musculus
  siRNA target sequence for 9030625G08Rik (NM_025780.2,358-376).
gacaaacccgacgacttaa

SEQ ID NO: 718809 - DNA, 19 bp, Mus musculus
  siRNA target sequence for 9030625G08Rik (NM_025780.2,360-378).
caaacccgacgacttaaaa

SEQ ID NO: 718810 - DNA, 19 bp, Mus musculus
  siRNA target sequence for 9030625G08Rik (NM_025780.2,364-382).
cccgacgacttaaaatgga

SEQ ID NO: 718811 - DNA, 19 bp, Mus musculus
  siRNA target sequence for 9030625G08Rik (NM_025780.2,365-383).
ccgacgacttaaaatggat

SEQ ID NO: 718812 - DNA, 19 bp, Mus musculus
  siRNA target sequence for 9030625G08Rik (NM_025780.2,387-405).
gttccaaccatttttgatt

SEQ ID NO: 718813 - DNA, 19 bp, Mus musculus
  siRNA target sequence for 9030625G08Rik (NM_025780.2,402-420).
gatttttgtacccatataa

SEQ ID NO: 718814 - DNA, 19 bp, Mus musculus
  siRNA target sequence for 9030625G08Rik (NM_025780.2,455-473).
gacaaacaacagttttcct

SEQ ID NO: 718815 - DNA, 19 bp, Mus musculus
  siRNA target sequence for 9030625G08Rik (NM_025780.2,474-492).
ccaactggaccatgtaatt

SEQ ID NO: 718816 - DNA, 19 bp, Mus musculus
  siRNA target sequence for 9030625G08Rik (NM_025780.2,478-496).
ctggaccatgtaatttaaa

SEQ ID NO: 718817 - DNA, 19 bp, Mus musculus
  siRNA target sequence for 9030625G08Rik (NM_025780.2,528-546).
cacagttatgcctttagga

SEQ ID NO: 718818 - DNA, 19 bp, Mus musculus
  siRNA target sequence for 9030625G08Rik (NM_025780.2,557-575).
ggcgaaaaaaaggataatt

SEQ ID NO: 718819 - DNA, 19 bp, Mus musculus
  siRNA target sequence for 9030625G08Rik (NM_025780.2,558-576).
gcgaaaaaaaggataatta

SEQ ID NO: 718820 - DNA, 19 bp, Mus musculus
  siRNA target sequence for 9030625G08Rik (NM_025780.2,559-577).
cgaaaaaaaggataattaa

SEQ ID NO: 718821 - DNA, 19 bp, Mus musculus
  siRNA target sequence for 9030625G08Rik (NM_025780.2,691-709).
caagtaacatgctacctaa

SEQ ID NO: 718822 - DNA, 19 bp, Mus musculus
  siRNA target sequence for 9030409E16Rik (NM_025781.1,308-326).
gggcatcgtgggaccaatt

SEQ ID NO: 718823 - DNA, 19 bp, Mus musculus
  siRNA target sequence for 9030409E16Rik (NM_025781.1,309-327).
ggcatcgtgggaccaatta

SEQ ID NO: 718824 - DNA, 19 bp, Mus musculus
  siRNA target sequence for 9030409E16Rik (NM_025781.1,311-329).
catcgtgggaccaattact

SEQ ID NO: 718825 - DNA, 19 bp, Mus musculus
  siRNA target sequence for 9030409E16Rik (NM_025781.1,341-359).
gacaagtgcagcaattgct

SEQ ID NO: 718826 - DNA, 19 bp, Mus musculus
  siRNA target sequence for 9030409E16Rik (NM_025781.1,369-387).
cgagcggcagggaaggaaa

SEQ ID NO: 718827 - DNA, 19 bp, Mus musculus
  siRNA target sequence for 9030409E16Rik (NM_025781.1,383-401).
ggaaatgatcccctttgaa

SEQ ID NO: 718828 - DNA, 19 bp, Mus musculus
  siRNA target sequence for 9030409E16Rik (NM_025781.1,433-451).
gtgtagtggtagtctcttt

SEQ ID NO: 718829 - DNA, 19 bp, Mus musculus
  siRNA target sequence for 9030409E16Rik (NM_025781.1,446-464).
ctcttttttacgggtttta

SEQ ID NO: 718830 - DNA, 19 bp, Mus musculus
  siRNA target sequence for 9030409E16Rik (NM_025781.1,456-474).
cgggttttagctactctat

SEQ ID NO: 718831 - DNA, 19 bp, Mus musculus
  siRNA target sequence for Bcs1l (NM_025784.2,243-261).
ctactttggggctggattt

SEQ ID NO: 718832 - DNA, 19 bp, Mus musculus
  siRNA target sequence for Bcs1l (NM_025784.2,424-442).
cagcacctcagtgttgaaa

SEQ ID NO: 718833 - DNA, 19 bp, Mus musculus
  siRNA target sequence for Bcs1l (NM_025784.2,470-488).
ggatctccaccaagtttga

SEQ ID NO: 718834 - DNA, 19 bp, Mus musculus
  siRNA target sequence for Bcs1l (NM_025784.2,536-554).
ggatccgggtagaacgaaa

SEQ ID NO: 718835 - DNA, 19 bp, Mus musculus
  siRNA target sequence for Bcs1l (NM_025784.2,720-738).
gtctgaatggcgtaccttt

SEQ ID NO: 718836 - DNA, 19 bp, Mus musculus
  siRNA target sequence for Bcs1l (NM_025784.2,724-742).
gaatggcgtacctttggtt

SEQ ID NO: 718837 - DNA, 19 bp, Mus musculus
  siRNA target sequence for Bcs1l (NM_025784.2,755-773).
gtcggccactggattctgt

SEQ ID NO: 718838 - DNA, 19 bp, Mus musculus
  siRNA target sequence for Bcs1l (NM_025784.2,792-810).
ggctgaccgaattgtcaaa

SEQ ID NO: 718839 - DNA, 19 bp, Mus musculus
  siRNA target sequence for Bcs1l (NM_025784.2,794-812).
ctgaccgaattgtcaaaga

SEQ ID NO: 718840 - DNA, 19 bp, Mus musculus
  siRNA target sequence for Bcs1l (NM_025784.2,796-814).
gaccgaattgtcaaagata

SEQ ID NO: 718841 - DNA, 19 bp, Mus musculus
  siRNA target sequence for Bcs1l (NM_025784.2,807-825).
caaagatatccgggaattt

SEQ ID NO: 718842 - DNA, 19 bp, Mus musculus
  siRNA target sequence for Bcs1l (NM_025784.2,869-887).
gacgtggctaccttcttta

SEQ ID NO: 718843 - DNA, 19 bp, Mus musculus
  siRNA target sequence for Bcs1l (NM_025784.2,1081-1099).
gctgtggagaaccctataa

SEQ ID NO: 718844 - DNA, 19 bp, Mus musculus
  siRNA target sequence for Bcs1l (NM_025784.2,1082-1100).
ctgtggagaaccctataaa

SEQ ID NO: 718845 - DNA, 19 bp, Mus musculus
  siRNA target sequence for Bcs1l (NM_025784.2,1084-1102).
gtggagaaccctataaagt

SEQ ID NO: 718846 - DNA, 19 bp, Mus musculus
  siRNA target sequence for Bcs1l (NM_025784.2,1130-1148).
gtggactgcttaatgcttt

SEQ ID NO: 718847 - DNA, 19 bp, Mus musculus
  siRNA target sequence for Bcs1l (NM_025784.2,1185-1203).
catgaccaccaactacatt

SEQ ID NO: 718848 - DNA, 19 bp, Mus musculus
  siRNA target sequence for Bcs1l (NM_025784.2,1310-1328).
cagggcaagcaccttcttt

SEQ ID NO: 718849 - DNA, 19 bp, Mus musculus
  siRNA target sequence for Bcs1l (NM_025784.2,1393-1411).
ggctacttcatgctgtata

SEQ ID NO: 718850 - DNA, 19 bp, Mus musculus
  siRNA target sequence for Bcs1l (NM_025784.2,1395-1413).
ctacttcatgctgtataaa

SEQ ID NO: 718851 - DNA, 19 bp, Mus musculus
  siRNA target sequence for Bcs1l (NM_025784.2,1421-1439).
ccatgggggctgttcacaa

SEQ ID NO: 718852 - DNA, 19 bp, Mus musculus
  siRNA target sequence for Bcs1l (NM_025784.2,1427-1445).
gggctgttcacaacattga

SEQ ID NO: 718853 - DNA, 19 bp, Mus musculus
  siRNA target sequence for Bcs1l (NM_025784.2,1428-1446).
ggctgttcacaacattgaa

SEQ ID NO: 718854 - DNA, 19 bp, Mus musculus
  siRNA target sequence for Bcs1l (NM_025784.2,1429-1447).
gctgttcacaacattgaat

SEQ ID NO: 718855 - DNA, 19 bp, Mus musculus
  siRNA target sequence for Fbxo25 (NM_025785.1,185-203).
ccatcaaccacagcattat

SEQ ID NO: 718856 - DNA, 19 bp, Mus musculus
  siRNA target sequence for Fbxo25 (NM_025785.1,189-207).
caaccacagcattatctta

SEQ ID NO: 718857 - DNA, 19 bp, Mus musculus
  siRNA target sequence for Fbxo25 (NM_025785.1,193-211).
cacagcattatcttaaata

SEQ ID NO: 718858 - DNA, 19 bp, Mus musculus
  siRNA target sequence for Fbxo25 (NM_025785.1,242-260).
gtgaatacgcagccaaaaa

SEQ ID NO: 718859 - DNA, 19 bp, Mus musculus
  siRNA target sequence for Fbxo25 (NM_025785.1,244-262).
gaatacgcagccaaaaaga

SEQ ID NO: 718860 - DNA, 19 bp, Mus musculus
  siRNA target sequence for Fbxo25 (NM_025785.1,290-308).
cagctgctcacagttttta

SEQ ID NO: 718861 - DNA, 19 bp, Mus musculus
  siRNA target sequence for Fbxo25 (NM_025785.1,300-318).
cagtttttatcgtgaaaaa

SEQ ID NO: 718862 - DNA, 19 bp, Mus musculus
  siRNA target sequence for Fbxo25 (NM_025785.1,320-338).
ggatctacgtccataagga

SEQ ID NO: 718863 - DNA, 19 bp, Mus musculus
  siRNA target sequence for Fbxo25 (NM_025785.1,321-339).
gatctacgtccataaggaa

SEQ ID NO: 718864 - DNA, 19 bp, Mus musculus
  siRNA target sequence for Fbxo25 (NM_025785.1,380-398).
ccttcaaccggctagactt

SEQ ID NO: 718865 - DNA, 19 bp, Mus musculus
  siRNA target sequence for Fbxo25 (NM_025785.1,415-433).
gacatcaggaggttcactt

SEQ ID NO: 718866 - DNA, 19 bp, Mus musculus
  siRNA target sequence for Fbxo25 (NM_025785.1,429-447).
cacttacgtggtcaaacta

SEQ ID NO: 718867 - DNA, 19 bp, Mus musculus
  siRNA target sequence for Fbxo25 (NM_025785.1,431-449).
cttacgtggtcaaactact

SEQ ID NO: 718868 - DNA, 19 bp, Mus musculus
  siRNA target sequence for Fbxo25 (NM_025785.1,460-478).
gcgaagtcccagttaacct

SEQ ID NO: 718869 - DNA, 19 bp, Mus musculus
  siRNA target sequence for Fbxo25 (NM_025785.1,488-506).
gagtggcacagaagaacta

SEQ ID NO: 718870 - DNA, 19 bp, Mus musculus
  siRNA target sequence for Fbxo25 (NM_025785.1,490-508).
gtggcacagaagaactact

SEQ ID NO: 718871 - DNA, 19 bp, Mus musculus
  siRNA target sequence for Fbxo25 (NM_025785.1,555-573).
gaaccctcgcctgatcaaa

SEQ ID NO: 718872 - DNA, 19 bp, Mus musculus
  siRNA target sequence for Fbxo25 (NM_025785.1,637-655).
ctagtcgggaacatcaaca

SEQ ID NO: 718873 - DNA, 19 bp, Mus musculus
  siRNA target sequence for Fbxo25 (NM_025785.1,796-814).
gatggctgggacattgtca

SEQ ID NO: 718874 - DNA, 19 bp, Mus musculus
  siRNA target sequence for Fbxo25 (NM_025785.1,895-913).
gctgagcagcagttttgta

SEQ ID NO: 718875 - DNA, 19 bp, Mus musculus
  siRNA target sequence for Fbxo25 (NM_025785.1,929-947).
cagaaaaaggtcatatcga

SEQ ID NO: 718876 - DNA, 19 bp, Mus musculus
  siRNA target sequence for Fbxo25 (NM_025785.1,945-963).
cgagtggaagctgatgtat

SEQ ID NO: 718877 - DNA, 19 bp, Mus musculus
  siRNA target sequence for Fbxo25 (NM_025785.1,1104-1122).
gtctccggagcacttcatt

SEQ ID NO: 718878 - DNA, 19 bp, Mus musculus
  siRNA target sequence for 9130020G10Rik (NM_025786.1,304-322).
gcctgaagcttctgctata

SEQ ID NO: 718879 - DNA, 19 bp, Mus musculus
  siRNA target sequence for 9130020G10Rik (NM_025786.1,646-664).
gggtgttggcctttgtcat

SEQ ID NO: 718880 - DNA, 19 bp, Mus musculus
  siRNA target sequence for 9130020G10Rik (NM_025786.1,647-665).
ggtgttggcctttgtcatt

SEQ ID NO: 718881 - DNA, 19 bp, Mus musculus
  siRNA target sequence for 4930524H12Rik (NM_025789.2,248-266).
gccggaagtgccctttact

SEQ ID NO: 718882 - DNA, 19 bp, Mus musculus
  siRNA target sequence for 4930524H12Rik (NM_025789.2,624-642).
cgccaccgagacagcattt

SEQ ID NO: 718883 - DNA, 19 bp, Mus musculus
  siRNA target sequence for 4930524H12Rik (NM_025789.2,651-669).
gttgaagaacctatgagtt

SEQ ID NO: 718884 - DNA, 19 bp, Mus musculus
  siRNA target sequence for 4930524H12Rik (NM_025789.2,667-685).
gttacgggaacatcatgta

SEQ ID NO: 718885 - DNA, 19 bp, Mus musculus
  siRNA target sequence for 4930524H12Rik (NM_025789.2,901-919).
ctgatcgcatagttgaagt

SEQ ID NO: 718886 - DNA, 19 bp, Mus musculus
  siRNA target sequence for 4930524H12Rik (NM_025789.2,912-930).
gttgaagtcgacatggaat

SEQ ID NO: 718887 - DNA, 19 bp, Mus musculus
  siRNA target sequence for 4930524H12Rik (NM_025789.2,971-989).
cttcattcctgccaaaact

SEQ ID NO: 718888 - DNA, 19 bp, Mus musculus
  siRNA target sequence for 4930524H12Rik (NM_025789.2,1021-1039).
gagagcttttcgactttga

SEQ ID NO: 718889 - DNA, 19 bp, Mus musculus
  siRNA target sequence for 4930524H12Rik (NM_025789.2,1070-1088).
ggtggggaagacgattgaa

SEQ ID NO: 718890 - DNA, 19 bp, Mus musculus
  siRNA target sequence for 4930524H12Rik (NM_025789.2,1138-1156).
ccaggcagtacgcatatga

SEQ ID NO: 718891 - DNA, 19 bp, Mus musculus
  siRNA target sequence for 4930524H12Rik (NM_025789.2,1139-1157).
caggcagtacgcatatgaa

SEQ ID NO: 718892 - DNA, 19 bp, Mus musculus
  siRNA target sequence for 4930524H12Rik (NM_025789.2,1141-1159).
ggcagtacgcatatgaaga

SEQ ID NO: 718893 - DNA, 19 bp, Mus musculus
  siRNA target sequence for 4930524H12Rik (NM_025789.2,1145-1163).
gtacgcatatgaagagata

SEQ ID NO: 718894 - DNA, 19 bp, Mus musculus
  siRNA target sequence for 4930524H12Rik (NM_025789.2,1260-1278).
gtccataagcggaatgaga

SEQ ID NO: 718895 - DNA, 19 bp, Mus musculus
  siRNA target sequence for 4930524H12Rik (NM_025789.2,1270-1288).
ggaatgagacgttacagaa

SEQ ID NO: 718896 - DNA, 19 bp, Mus musculus
  siRNA target sequence for 4930524H12Rik (NM_025789.2,1487-1505).
ccgcgacgtggttgaaaga

SEQ ID NO: 718897 - DNA, 19 bp, Mus musculus
  siRNA target sequence for 4930524H12Rik (NM_025789.2,1550-1568).
gaagacaaatgtgattaat

SEQ ID NO: 718898 - DNA, 19 bp, Mus musculus
  siRNA target sequence for 4930524H12Rik (NM_025789.2,1610-1628).
cacgcagaagccagtttta

SEQ ID NO: 718899 - DNA, 19 bp, Mus musculus
  siRNA target sequence for 4930524H12Rik (NM_025789.2,1612-1630).
cgcagaagccagttttaga

SEQ ID NO: 718900 - DNA, 19 bp, Mus musculus
  siRNA target sequence for 0610006I08Rik (NM_025791.1,26-44).
gtgccgctgcggaatgtca

SEQ ID NO: 718901 - DNA, 19 bp, Mus musculus
  siRNA target sequence for 0610006I08Rik (NM_025791.1,36-54).
ggaatgtcagccacctttt

SEQ ID NO: 718902 - DNA, 19 bp, Mus musculus
  siRNA target sequence for 0610006I08Rik (NM_025791.1,544-562).
ggacaaagctggacacttt

SEQ ID NO: 718903 - DNA, 19 bp, Mus musculus
  siRNA target sequence for 0610006I08Rik (NM_025791.1,564-582).
ccaacactcaactctttga

SEQ ID NO: 718904 - DNA, 19 bp, Mus musculus
  siRNA target sequence for 0610008N23Rik (NM_025793.1,175-193).
ggaccacgggtgttttgca

SEQ ID NO: 718905 - DNA, 19 bp, Mus musculus
  siRNA target sequence for 0610008N23Rik (NM_025793.1,176-194).
gaccacgggtgttttgcat

SEQ ID NO: 718906 - DNA, 19 bp, Mus musculus
  siRNA target sequence for 0610008N23Rik (NM_025793.1,292-310).
gttatttcgctgtaactat

SEQ ID NO: 718907 - DNA, 19 bp, Mus musculus
  siRNA target sequence for 0610008N23Rik (NM_025793.1,348-366).
ctcccaacaaagtgatgat

SEQ ID NO: 718908 - DNA, 19 bp, Mus musculus
  siRNA target sequence for 0610008N23Rik (NM_025793.1,388-406).
gacagtcatcgagatagaa

SEQ ID NO: 718909 - DNA, 19 bp, Mus musculus
  siRNA target sequence for 0610008N23Rik (NM_025793.1,390-408).
cagtcatcgagatagaatt

SEQ ID NO: 718910 - DNA, 19 bp, Mus musculus
  siRNA target sequence for 0610008N23Rik (NM_025793.1,392-410).
gtcatcgagatagaattct

SEQ ID NO: 718911 - DNA, 19 bp, Mus musculus
  siRNA target sequence for 0610008N23Rik (NM_025793.1,428-446).
gtcaagttgcggagagata

SEQ ID NO: 718912 - DNA, 19 bp, Mus musculus
  siRNA target sequence for 0610008N23Rik (NM_025793.1,430-448).
caagttgcggagagataga

SEQ ID NO: 718913 - DNA, 19 bp, Mus musculus
  siRNA target sequence for 0610008N23Rik (NM_025793.1,433-451).
gttgcggagagatagaatt

SEQ ID NO: 718914 - DNA, 19 bp, Mus musculus
  siRNA target sequence for 0610008N23Rik (NM_025793.1,505-523).
ccagttgcacgtctttgaa

SEQ ID NO: 718915 - DNA, 19 bp, Mus musculus
  siRNA target sequence for 0610008N23Rik (NM_025793.1,694-712).
caacctgcagggaacaaga

SEQ ID NO: 718916 - DNA, 19 bp, Mus musculus
  siRNA target sequence for 0610008N23Rik (NM_025793.1,734-752).
gggacccttataagaatat

SEQ ID NO: 718917 - DNA, 19 bp, Mus musculus
  siRNA target sequence for 0610008N23Rik (NM_025793.1,738-756).
cccttataagaatatttga

SEQ ID NO: 718918 - DNA, 19 bp, Mus musculus
  siRNA target sequence for 0610008N23Rik (NM_025793.1,739-757).
ccttataagaatatttgat

SEQ ID NO: 718919 - DNA, 19 bp, Mus musculus
  siRNA target sequence for 0610008N23Rik (NM_025793.1,759-777).
cttcatcagggcatttaat

SEQ ID NO: 718920 - DNA, 19 bp, Mus musculus
  siRNA target sequence for 0610008N23Rik (NM_025793.1,762-780).
catcagggcatttaatcca

SEQ ID NO: 718921 - DNA, 19 bp, Mus musculus
  siRNA target sequence for 0610008N23Rik (NM_025793.1,795-813).
gatctcaagcagccaatat

SEQ ID NO: 718922 - DNA, 19 bp, Mus musculus
  siRNA target sequence for 0610008N23Rik (NM_025793.1,798-816).
ctcaagcagccaatatcta

SEQ ID NO: 718923 - DNA, 19 bp, Mus musculus
  siRNA target sequence for 0610008N23Rik (NM_025793.1,803-821).
gcagccaatatctattgca

SEQ ID NO: 718924 - DNA, 19 bp, Mus musculus
  siRNA target sequence for 0610008N23Rik (NM_025793.1,804-822).
cagccaatatctattgcat

SEQ ID NO: 718925 - DNA, 19 bp, Mus musculus
  siRNA target sequence for 0610008N23Rik (NM_025793.1,887-905).
gcagccgaagatccaaaaa

SEQ ID NO: 718926 - DNA, 19 bp, Mus musculus
  siRNA target sequence for 0610008N23Rik (NM_025793.1,890-908).
gccgaagatccaaaaagga

SEQ ID NO: 718927 - DNA, 19 bp, Mus musculus
  siRNA target sequence for 0610008N23Rik (NM_025793.1,891-909).
ccgaagatccaaaaaggaa

SEQ ID NO: 718928 - DNA, 19 bp, Mus musculus
  siRNA target sequence for 0610008N23Rik (NM_025793.1,892-910).
cgaagatccaaaaaggaat

SEQ ID NO: 718929 - DNA, 19 bp, Mus musculus
  siRNA target sequence for 0610008N23Rik (NM_025793.1,899-917).
ccaaaaaggaataaacagt

SEQ ID NO: 718930 - DNA, 19 bp, Mus musculus
  siRNA target sequence for 0610008N23Rik (NM_025793.1,960-978).
ccaagtggagtttttccaa

SEQ ID NO: 718931 - DNA, 19 bp, Mus musculus
  siRNA target sequence for 0610008N23Rik (NM_025793.1,1055-1073).
gatggcagctactacaagt

SEQ ID NO: 718932 - DNA, 19 bp, Mus musculus
  siRNA target sequence for D15Ertd785e (NM_025795.2,106-124).
ccatccgggatctcactaa

SEQ ID NO: 718933 - DNA, 19 bp, Mus musculus
  siRNA target sequence for D15Ertd785e (NM_025795.2,111-129).
cgggatctcactaagaact

SEQ ID NO: 718934 - DNA, 19 bp, Mus musculus
  siRNA target sequence for D15Ertd785e (NM_025795.2,157-175).
ctggaccagatctgcattt

SEQ ID NO: 718935 - DNA, 19 bp, Mus musculus
  siRNA target sequence for D15Ertd785e (NM_025795.2,159-177).
ggaccagatctgcatttct

SEQ ID NO: 718936 - DNA, 19 bp, Mus musculus
  siRNA target sequence for D15Ertd785e (NM_025795.2,160-178).
gaccagatctgcatttctt

SEQ ID NO: 718937 - DNA, 19 bp, Mus musculus
  siRNA target sequence for D15Ertd785e (NM_025795.2,184-202).
gaaggcaaaaccacaatga

SEQ ID NO: 718938 - DNA, 19 bp, Mus musculus
  siRNA target sequence for D15Ertd785e (NM_025795.2,238-256).
gcctgtgtctacagtaaga

SEQ ID NO: 718939 - DNA, 19 bp, Mus musculus
  siRNA target sequence for D15Ertd785e (NM_025795.2,239-257).
cctgtgtctacagtaagaa

SEQ ID NO: 718940 - DNA, 19 bp, Mus musculus
  siRNA target sequence for D15Ertd785e (NM_025795.2,380-398).
cctgtgaaacagagaatga

SEQ ID NO: 718941 - DNA, 19 bp, Mus musculus
  siRNA target sequence for D15Ertd785e (NM_025795.2,432-450).
ggctaatgtggatctgaaa

SEQ ID NO: 718942 - DNA, 19 bp, Mus musculus
  siRNA target sequence for D15Ertd785e (NM_025795.2,433-451).
gctaatgtggatctgaaaa

SEQ ID NO: 718943 - DNA, 19 bp, Mus musculus
  siRNA target sequence for D15Ertd785e (NM_025795.2,434-452).
ctaatgtggatctgaaaaa

SEQ ID NO: 718944 - DNA, 19 bp, Mus musculus
  siRNA target sequence for D15Ertd785e (NM_025795.2,461-479).
catccagtgagctgcttat

SEQ ID NO: 718945 - DNA, 19 bp, Mus musculus
  siRNA target sequence for D15Ertd785e (NM_025795.2,509-527).
cccctgatgaagtggaaaa

SEQ ID NO: 718946 - DNA, 19 bp, Mus musculus
  siRNA target sequence for D15Ertd785e (NM_025795.2,568-586).
gccagccggaaggatttca

SEQ ID NO: 718947 - DNA, 19 bp, Mus musculus
  siRNA target sequence for D15Ertd785e (NM_025795.2,612-630).
cagaggctgctttatgtta

SEQ ID NO: 718948 - DNA, 19 bp, Mus musculus
  siRNA target sequence for D15Ertd785e (NM_025795.2,614-632).
gaggctgctttatgttaga

SEQ ID NO: 718949 - DNA, 19 bp, Mus musculus
  siRNA target sequence for D15Ertd785e (NM_025795.2,1164-1182).
gcggaagggcccaaccttt

SEQ ID NO: 718950 - DNA, 19 bp, Mus musculus
  siRNA target sequence for D15Ertd785e (NM_025795.2,1243-1261).
ctgcggagacgtaagatca

SEQ ID NO: 718951 - DNA, 19 bp, Mus musculus
  siRNA target sequence for 0610010I17Rik (NM_025798.2,140-158).
ccaaaactgaactctttca

SEQ ID NO: 718952 - DNA, 19 bp, Mus musculus
  siRNA target sequence for 0610010I17Rik (NM_025798.2,195-213).
caaaccagcggcactttat

SEQ ID NO: 718953 - DNA, 19 bp, Mus musculus
  siRNA target sequence for 0610010I17Rik (NM_025798.2,199-217).
ccagcggcactttatcatt

SEQ ID NO: 718954 - DNA, 19 bp, Mus musculus
  siRNA target sequence for 0610010I17Rik (NM_025798.2,200-218).
cagcggcactttatcatta

SEQ ID NO: 718955 - DNA, 19 bp, Mus musculus
  siRNA target sequence for 0610010I17Rik (NM_025798.2,203-221).
cggcactttatcattatct

SEQ ID NO: 718956 - DNA, 19 bp, Mus musculus
  siRNA target sequence for 0610010I17Rik (NM_025798.2,223-241).
gtcgtgccaaagaagcata

SEQ ID NO: 718957 - DNA, 19 bp, Mus musculus
  siRNA target sequence for 0610010I17Rik (NM_025798.2,225-243).
cgtgccaaagaagcatatt

SEQ ID NO: 718958 - DNA, 19 bp, Mus musculus
  siRNA target sequence for 0610010I17Rik (NM_025798.2,244-262).
ggaagttgcaaggatctaa

SEQ ID NO: 718959 - DNA, 19 bp, Mus musculus
  siRNA target sequence for 0610010I17Rik (NM_025798.2,248-266).
gttgcaaggatctaaacaa

SEQ ID NO: 718960 - DNA, 19 bp, Mus musculus
  siRNA target sequence for 0610010I17Rik (NM_025798.2,252-270).
caaggatctaaacaaagat

SEQ ID NO: 718961 - DNA, 19 bp, Mus musculus
  siRNA target sequence for 0610010I17Rik (NM_025798.2,311-329).
ccatgcttgagaggaataa

SEQ ID NO: 718962 - DNA, 19 bp, Mus musculus
  siRNA target sequence for 0610010I17Rik (NM_025798.2,312-330).
catgcttgagaggaataat

SEQ ID NO: 718963 - DNA, 19 bp, Mus musculus
  siRNA target sequence for 0610010I17Rik (NM_025798.2,424-442).
gagtttggcttcttatcaa

SEQ ID NO: 718964 - DNA, 19 bp, Mus musculus
  siRNA target sequence for 0610010I17Rik (NM_025798.2,460-478).
gattcctactggtttgtca

SEQ ID NO: 718965 - DNA, 19 bp, Mus musculus
  siRNA target sequence for 0610010I17Rik (NM_025798.2,468-486).
ctggtttgtcacagttgat

SEQ ID NO: 718966 - DNA, 19 bp, Mus musculus
  siRNA target sequence for 0610010I17Rik (NM_025798.2,470-488).
ggtttgtcacagttgatta

SEQ ID NO: 718967 - DNA, 19 bp, Mus musculus
  siRNA target sequence for 1100001H23Rik (NM_025806.1,280-298).
gtcccctgaatcgaagaaa

SEQ ID NO: 718968 - DNA, 19 bp, Mus musculus
  siRNA target sequence for 1100001H23Rik (NM_025806.1,282-300).
cccctgaatcgaagaaagt

SEQ ID NO: 718969 - DNA, 19 bp, Mus musculus
  siRNA target sequence for 1100001H23Rik (NM_025806.1,310-328).
gacggtactggacaagaat

SEQ ID NO: 718970 - DNA, 19 bp, Mus musculus
  siRNA target sequence for 1100001H23Rik (NM_025806.1,332-350).
gacgcctacggctactaca

SEQ ID NO: 718971 - DNA, 19 bp, Mus musculus
  siRNA target sequence for 1100001H23Rik (NM_025806.1,334-352).
cgcctacggctactacaat

SEQ ID NO: 718972 - DNA, 19 bp, Mus musculus
  siRNA target sequence for 1100001H23Rik (NM_025806.1,505-523).
cccacagctgttcaagaat

SEQ ID NO: 718973 - DNA, 19 bp, Mus musculus
  siRNA target sequence for 1100001H23Rik (NM_025806.1,514-532).
gttcaagaatccttccatt

SEQ ID NO: 718974 - DNA, 19 bp, Mus musculus
  siRNA target sequence for 1100001H23Rik (NM_025806.1,643-661).
gctcgacgggctgtatctt

SEQ ID NO: 718975 - DNA, 19 bp, Mus musculus
  siRNA target sequence for 1100001H23Rik (NM_025806.1,698-716).
cccatgacaatgttccaaa

SEQ ID NO: 718976 - DNA, 19 bp, Mus musculus
  siRNA target sequence for 1100001H23Rik (NM_025806.1,783-801).
gcagcatgatgaagtttaa

SEQ ID NO: 718977 - DNA, 19 bp, Mus musculus
  siRNA target sequence for 1100001H23Rik (NM_025806.1,872-890).
cactcaagttggtacacat

SEQ ID NO: 718978 - DNA, 19 bp, Mus musculus
  siRNA target sequence for 1100001H23Rik (NM_025806.1,896-914).
gccatgctcaggatctata

SEQ ID NO: 718979 - DNA, 19 bp, Mus musculus
  siRNA target sequence for 1100001H23Rik (NM_025806.1,897-915).
ccatgctcaggatctataa

SEQ ID NO: 718980 - DNA, 19 bp, Mus musculus
  siRNA target sequence for 1100001H23Rik (NM_025806.1,898-916).
catgctcaggatctataaa

SEQ ID NO: 718981 - DNA, 19 bp, Mus musculus
  siRNA target sequence for 1100001H23Rik (NM_025806.1,917-935).
cattgggacttcaacatca

SEQ ID NO: 718982 - DNA, 19 bp, Mus musculus
  siRNA target sequence for 1100001H23Rik (NM_025806.1,964-982).
gtctttcagcagttatcca

SEQ ID NO: 718983 - DNA, 19 bp, Mus musculus
  siRNA target sequence for 1100001H23Rik (NM_025806.1,1020-1038).
gcagtggcctgatattgct

SEQ ID NO: 718984 - DNA, 19 bp, Mus musculus
  siRNA target sequence for 1100001H23Rik (NM_025806.1,1247-1265).
gacaaaggcactctctata

SEQ ID NO: 718985 - DNA, 19 bp, Mus musculus
  siRNA target sequence for 1100001H23Rik (NM_025806.1,1270-1288).
ggagcaaatccctacatat

SEQ ID NO: 718986 - DNA, 19 bp, Mus musculus
  siRNA target sequence for 1100001H23Rik (NM_025806.1,1289-1307).
gtagaatactccgatcaaa

SEQ ID NO: 718987 - DNA, 19 bp, Mus musculus
  siRNA target sequence for 1100001H23Rik (NM_025806.1,1304-1322).
caaaccaatgtcctaagaa

SEQ ID NO: 718988 - DNA, 19 bp, Mus musculus
  siRNA target sequence for 1100001H23Rik (NM_025806.1,1325-1343).
ggatactgggcttcctata

SEQ ID NO: 718989 - DNA, 19 bp, Mus musculus
  siRNA target sequence for 1100001H23Rik (NM_025806.1,1326-1344).
gatactgggcttcctataa

SEQ ID NO: 718990 - DNA, 19 bp, Mus musculus
  siRNA target sequence for 1100001H23Rik (NM_025806.1,1350-1368).
ctttccacaaaacaatcta

SEQ ID NO: 718991 - DNA, 19 bp, Mus musculus
  siRNA target sequence for 1100001H23Rik (NM_025806.1,1355-1373).
cacaaaacaatctacaact

SEQ ID NO: 718992 - DNA, 19 bp, Mus musculus
  siRNA target sequence for 1100001H23Rik (NM_025806.1,1430-1448).
gctccacgtgccaaaatct

SEQ ID NO: 718993 - DNA, 19 bp, Mus musculus
  siRNA target sequence for 1100001H23Rik (NM_025806.1,1475-1493).
gacatggcctccatgaaat

SEQ ID NO: 718994 - DNA, 19 bp, Mus musculus
  siRNA target sequence for 1100001H23Rik (NM_025806.1,1477-1495).
catggcctccatgaaatat

SEQ ID NO: 718995 - DNA, 19 bp, Mus musculus
  siRNA target sequence for 1100001H23Rik (NM_025806.1,1482-1500).
cctccatgaaatatatcat

SEQ ID NO: 718996 - DNA, 19 bp, Mus musculus
  siRNA target sequence for 1100001H23Rik (NM_025806.1,1498-1516).
catgcgatacaacaattat

SEQ ID NO: 718997 - DNA, 19 bp, Mus musculus
  siRNA target sequence for 1100001H23Rik (NM_025806.1,1682-1700).
gatggactcccgcctttta

SEQ ID NO: 718998 - DNA, 19 bp, Mus musculus
  siRNA target sequence for 1100001H23Rik (NM_025806.1,1685-1703).
ggactcccgccttttaact

SEQ ID NO: 718999 - DNA, 19 bp, Mus musculus
  siRNA target sequence for 1100001H23Rik (NM_025806.1,1734-1752).
ggatgccagaagtctttga

SEQ ID NO: 719000 - DNA, 19 bp, Mus musculus
  siRNA target sequence for 1100001H23Rik (NM_025806.1,1768-1786).
catgaaaccaattttgtca

SEQ ID NO: 719001 - DNA, 19 bp, Mus musculus
  siRNA target sequence for 1200003C15Rik (NM_025807.1,170-188).
ggtggggctgggtgattgt

SEQ ID NO: 719002 - DNA, 19 bp, Mus musculus
  siRNA target sequence for 1200003C15Rik (NM_025807.1,236-254).
ctgttggggtcttgtatgt

SEQ ID NO: 719003 - DNA, 19 bp, Mus musculus
  siRNA target sequence for 1200003C15Rik (NM_025807.1,371-389).
gagcaagacccgtcacaat

SEQ ID NO: 719004 - DNA, 19 bp, Mus musculus
  siRNA target sequence for 1200003C15Rik (NM_025807.1,373-391).
gcaagacccgtcacaatct

SEQ ID NO: 719005 - DNA, 19 bp, Mus musculus
  siRNA target sequence for 1200003C15Rik (NM_025807.1,374-392).
caagacccgtcacaatctt

SEQ ID NO: 719006 - DNA, 19 bp, Mus musculus
  siRNA target sequence for 1200003C15Rik (NM_025807.1,482-500).
gtctcggatgtggcttatt

SEQ ID NO: 719007 - DNA, 19 bp, Mus musculus
  siRNA target sequence for 1200003C15Rik (NM_025807.1,484-502).
ctcggatgtggcttattat

SEQ ID NO: 719008 - DNA, 19 bp, Mus musculus
  siRNA target sequence for 1200003C15Rik (NM_025807.1,487-505).
ggatgtggcttattataca

SEQ ID NO: 719009 - DNA, 19 bp, Mus musculus
  siRNA target sequence for 1200003C15Rik (NM_025807.1,508-526).
gcgacggtgaccatcacat

SEQ ID NO: 719010 - DNA, 19 bp, Mus musculus
  siRNA target sequence for 1200003C15Rik (NM_025807.1,553-571).
ctcgccctcggcctgattt

SEQ ID NO: 719011 - DNA, 19 bp, Mus musculus
  siRNA target sequence for 1200003C15Rik (NM_025807.1,555-573).
cgccctcggcctgatttca

SEQ ID NO: 719012 - DNA, 19 bp, Mus musculus
  siRNA target sequence for 1200003C15Rik (NM_025807.1,558-576).
cctcggcctgatttcaaca

SEQ ID NO: 719013 - DNA, 19 bp, Mus musculus
  siRNA target sequence for 1200003C15Rik (NM_025807.1,578-596).
gttcgagtgtgggtctatt

SEQ ID NO: 719014 - DNA, 19 bp, Mus musculus
  siRNA target sequence for 1200003C15Rik (NM_025807.1,581-599).
cgagtgtgggtctattcat

SEQ ID NO: 719015 - DNA, 19 bp, Mus musculus
  siRNA target sequence for 1200003C15Rik (NM_025807.1,584-602).
gtgtgggtctattcatcta

SEQ ID NO: 719016 - DNA, 19 bp, Mus musculus
  siRNA target sequence for 1200003C15Rik (NM_025807.1,657-675).
catcgtgggcgctttagct

SEQ ID NO: 719017 - DNA, 19 bp, Mus musculus
  siRNA target sequence for 1200003C15Rik (NM_025807.1,660-678).
cgtgggcgctttagcttta

SEQ ID NO: 719018 - DNA, 19 bp, Mus musculus
  siRNA target sequence for 1200003C15Rik (NM_025807.1,661-679).
gtgggcgctttagctttaa

SEQ ID NO: 719019 - DNA, 19 bp, Mus musculus
  siRNA target sequence for 1200003C15Rik (NM_025807.1,664-682).
ggcgctttagctttaaaca

SEQ ID NO: 719020 - DNA, 19 bp, Mus musculus
  siRNA target sequence for 1200003C15Rik (NM_025807.1,700-718).
ctgatgaggcccttgcaaa

SEQ ID NO: 719021 - DNA, 19 bp, Mus musculus
  siRNA target sequence for 1200003C15Rik (NM_025807.1,744-762).
gacagctccagagaatgtt

SEQ ID NO: 719022 - DNA, 19 bp, Mus musculus
  siRNA target sequence for 1200003C15Rik (NM_025807.1,770-788).
gatactccatgtataacga

SEQ ID NO: 719023 - DNA, 19 bp, Mus musculus
  siRNA target sequence for 1200003C15Rik (NM_025807.1,802-820).
ccagaggagactatgaact

SEQ ID NO: 719024 - DNA, 19 bp, Mus musculus
  siRNA target sequence for 1200003C15Rik (NM_025807.1,832-850).
ggctacagtagcgaagata

SEQ ID NO: 719025 - DNA, 19 bp, Mus musculus
  siRNA target sequence for 1200003C15Rik (NM_025807.1,833-851).
gctacagtagcgaagataa

SEQ ID NO: 719026 - DNA, 19 bp, Mus musculus
  siRNA target sequence for 1200003C15Rik (NM_025807.1,834-852).
ctacagtagcgaagataaa

SEQ ID NO: 719027 - DNA, 19 bp, Mus musculus
  siRNA target sequence for 1200003C15Rik (NM_025807.1,839-857).
gtagcgaagataaatgctt

SEQ ID NO: 719028 - DNA, 19 bp, Mus musculus
  siRNA target sequence for 1200003C15Rik (NM_025807.1,924-942).
ggagcccgagacgtacaaa

SEQ ID NO: 719029 - DNA, 19 bp, Mus musculus
  siRNA target sequence for 1200003C15Rik (NM_025807.1,925-943).
gagcccgagacgtacaaaa

SEQ ID NO: 719030 - DNA, 19 bp, Mus musculus
  siRNA target sequence for 1200003C15Rik (NM_025807.1,948-966).
ggtcgtagaacagactaat

SEQ ID NO: 719031 - DNA, 19 bp, Mus musculus
  siRNA target sequence for 1200003C15Rik (NM_025807.1,949-967).
gtcgtagaacagactaatt

SEQ ID NO: 719032 - DNA, 19 bp, Mus musculus
  siRNA target sequence for 1200003C15Rik (NM_025807.1,951-969).
cgtagaacagactaatttt

SEQ ID NO: 719033 - DNA, 19 bp, Mus musculus
  siRNA target sequence for 1200003C15Rik (NM_025807.1,997-1015).
cagctatataggaactact

SEQ ID NO: 719034 - DNA, 19 bp, Mus musculus
  siRNA target sequence for 1200003C15Rik (NM_025807.1,1019-1037).
gagagaccgcgtctctttt

SEQ ID NO: 719035 - DNA, 19 bp, Mus musculus
  siRNA target sequence for 1200003C15Rik (NM_025807.1,1021-1039).
gagaccgcgtctcttttta

SEQ ID NO: 719036 - DNA, 19 bp, Mus musculus
  siRNA target sequence for 1200003C15Rik (NM_025807.1,1023-1041).
gaccgcgtctctttttaaa

SEQ ID NO: 719037 - DNA, 19 bp, Mus musculus
  siRNA target sequence for 1200003C15Rik (NM_025807.1,1025-1043).
ccgcgtctctttttaaaaa

SEQ ID NO: 719038 - DNA, 19 bp, Mus musculus
  siRNA target sequence for 1200003C15Rik (NM_025807.1,1048-1066).
gtcttctccgcgctattca

SEQ ID NO: 719039 - DNA, 19 bp, Mus musculus
  siRNA target sequence for 1200003C15Rik (NM_025807.1,1117-1135).
gaggatgtcgcgagaagtt

SEQ ID NO: 719040 - DNA, 19 bp, Mus musculus
  siRNA target sequence for 1200003C15Rik (NM_025807.1,1140-1158).
cgtgagggaagaagatctt

SEQ ID NO: 719041 - DNA, 19 bp, Mus musculus
  siRNA target sequence for 1200003C15Rik (NM_025807.1,1195-1213).
gccgtgggcaagcttcttt

SEQ ID NO: 719042 - DNA, 19 bp, Mus musculus
  siRNA target sequence for 1200003C15Rik (NM_025807.1,1238-1256).
ggatcaacaccctgtatct

SEQ ID NO: 719043 - DNA, 19 bp, Mus musculus
  siRNA target sequence for 1200003C15Rik (NM_025807.1,1321-1339).
gtcacgctggctatccttt

SEQ ID NO: 719044 - DNA, 19 bp, Mus musculus
  siRNA target sequence for 1200003C15Rik (NM_025807.1,1342-1360).
ggcatcttgggttttctta

SEQ ID NO: 719045 - DNA, 19 bp, Mus musculus
  siRNA target sequence for 1200003C15Rik (NM_025807.1,1361-1379).
ctggtaactggtctatctt

SEQ ID NO: 719046 - DNA, 19 bp, Mus musculus
  siRNA target sequence for 1200003C15Rik (NM_025807.1,1398-1416).
gactgtggggattgacaaa

SEQ ID NO: 719047 - DNA, 19 bp, Mus musculus
  siRNA target sequence for 1200003C15Rik (NM_025807.1,1400-1418).
ctgtggggattgacaaatt

SEQ ID NO: 719048 - DNA, 19 bp, Mus musculus
  siRNA target sequence for 1200003C15Rik (NM_025807.1,1423-1441).
cacgcctatggaatactca

SEQ ID NO: 719049 - DNA, 19 bp, Mus musculus
  siRNA target sequence for 1200003C15Rik (NM_025807.1,1427-1445).
cctatggaatactcatgtt

SEQ ID NO: 719050 - DNA, 19 bp, Mus musculus
  siRNA target sequence for 1200003C15Rik (NM_025807.1,1428-1446).
ctatggaatactcatgttt

SEQ ID NO: 719051 - DNA, 19 bp, Mus musculus
  siRNA target sequence for 1200003C15Rik (NM_025807.1,1467-1485).
cctcgggccacccatagtt

SEQ ID NO: 719052 - DNA, 19 bp, Mus musculus
  siRNA target sequence for 1200003C15Rik (NM_025807.1,1511-1529).
cctatgacatcgcctttta

SEQ ID NO: 719053 - DNA, 19 bp, Mus musculus
  siRNA target sequence for 1200003C15Rik (NM_025807.1,1516-1534).
gacatcgccttttatttca

SEQ ID NO: 719054 - DNA, 19 bp, Mus musculus
  siRNA target sequence for 1200003C15Rik (NM_025807.1,1518-1536).
catcgccttttatttcagt

SEQ ID NO: 719055 - DNA, 19 bp, Mus musculus
  siRNA target sequence for 1200003C15Rik (NM_025807.1,1624-1642).
gcagtgccaaccacctttt

SEQ ID NO: 719056 - DNA, 19 bp, Mus musculus
  siRNA target sequence for 1200003C15Rik (NM_025807.1,1630-1648).
ccaaccacctttttctaca

SEQ ID NO: 719057 - DNA, 19 bp, Mus musculus
  siRNA target sequence for 1200003C15Rik (NM_025807.1,1644-1662).
ctacaaagttgcctctaat

SEQ ID NO: 719058 - DNA, 19 bp, Mus musculus
  siRNA target sequence for 1200003C15Rik (NM_025807.1,1647-1665).
caaagttgcctctaatgtt

SEQ ID NO: 719059 - DNA, 19 bp, Mus musculus
  siRNA target sequence for 1200009K13Rik (NM_025814.1,163-181).
ccgattcgaccagctattt

SEQ ID NO: 719060 - DNA, 19 bp, Mus musculus
  siRNA target sequence for 1200009K13Rik (NM_025814.1,318-336).
gcaaacagttgcgtaaaga

SEQ ID NO: 719061 - DNA, 19 bp, Mus musculus
  siRNA target sequence for 1200009K13Rik (NM_025814.1,330-348).
gtaaagagtcccagaaaga

SEQ ID NO: 719062 - DNA, 19 bp, Mus musculus
  siRNA target sequence for 1200009K13Rik (NM_025814.1,374-392).
gtcggcgtggccgacaaaa

SEQ ID NO: 719063 - DNA, 19 bp, Mus musculus
  siRNA target sequence for 1200009K13Rik (NM_025814.1,411-429).
cggtggcgcttaagaaaga

SEQ ID NO: 719064 - DNA, 19 bp, Mus musculus
  siRNA target sequence for 1200009K13Rik (NM_025814.1,412-430).
ggtggcgcttaagaaagaa

SEQ ID NO: 719065 - DNA, 19 bp, Mus musculus
  siRNA target sequence for 1200009K13Rik (NM_025814.1,417-435).
cgcttaagaaagaaggaat

SEQ ID NO: 719066 - DNA, 19 bp, Mus musculus
  siRNA target sequence for 1200009K13Rik (NM_025814.1,418-436).
gcttaagaaagaaggaata

SEQ ID NO: 719067 - DNA, 19 bp, Mus musculus
  siRNA target sequence for 1200009K13Rik (NM_025814.1,453-471).
gacccgatcaacaactaca

SEQ ID NO: 719068 - DNA, 19 bp, Mus musculus
  siRNA target sequence for 1200009K13Rik (NM_025814.1,476-494).
gatgggaaactaattgata

SEQ ID NO: 719069 - DNA, 19 bp, Mus musculus
  siRNA target sequence for 1200009K13Rik (NM_025814.1,508-526).
gcgaccaccccgtgaaaga

SEQ ID NO: 719070 - DNA, 19 bp, Mus musculus
  siRNA target sequence for 1200009K13Rik (NM_025814.1,509-527).
cgaccaccccgtgaaagaa

SEQ ID NO: 719071 - DNA, 19 bp, Mus musculus
  siRNA target sequence for 1200009K13Rik (NM_025814.1,512-530).
ccaccccgtgaaagaagat

SEQ ID NO: 719072 - DNA, 19 bp, Mus musculus
  siRNA target sequence for 1200009K13Rik (NM_025814.1,513-531).
caccccgtgaaagaagatt

SEQ ID NO: 719073 - DNA, 19 bp, Mus musculus
  siRNA target sequence for 1200009K13Rik (NM_025814.1,563-581).
ggtgaattttcagttgata

SEQ ID NO: 719074 - DNA, 19 bp, Mus musculus
  siRNA target sequence for 1200009K13Rik (NM_025814.1,573-591).
cagttgatagaccgattat

SEQ ID NO: 719075 - DNA, 19 bp, Mus musculus
  siRNA target sequence for 1200009K13Rik (NM_025814.1,658-676).
ccgaggcgatggatttgat

SEQ ID NO: 719076 - DNA, 19 bp, Mus musculus
  siRNA target sequence for 1200009K13Rik (NM_025814.1,659-677).
cgaggcgatggatttgatt

SEQ ID NO: 719077 - DNA, 19 bp, Mus musculus
  siRNA target sequence for 1200009K13Rik (NM_025814.1,678-696).
ctcgtggcaagcgtgaatt

SEQ ID NO: 719078 - DNA, 19 bp, Mus musculus
  siRNA target sequence for 1200009K13Rik (NM_025814.1,681-699).
gtggcaagcgtgaatttga

SEQ ID NO: 719079 - DNA, 19 bp, Mus musculus
  siRNA target sequence for 1200009K13Rik (NM_025814.1,683-701).
ggcaagcgtgaatttgata

SEQ ID NO: 719080 - DNA, 19 bp, Mus musculus
  siRNA target sequence for 1200009K13Rik (NM_025814.1,787-805).
ctggggaactgtcaaagat

SEQ ID NO: 719081 - DNA, 19 bp, Mus musculus
  siRNA target sequence for 1200009K13Rik (NM_025814.1,907-925).
gcaccctgtggcagatact

SEQ ID NO: 719082 - DNA, 19 bp, Mus musculus
  siRNA target sequence for 1200009K13Rik (NM_025814.1,989-1007).
gagtggaaagctattcaaa

SEQ ID NO: 719083 - DNA, 19 bp, Mus musculus
  siRNA target sequence for 1200009K13Rik (NM_025814.1,1013-1031).
gaccgagcaaaagtagaat

SEQ ID NO: 719084 - DNA, 19 bp, Mus musculus
  siRNA target sequence for 1200009K13Rik (NM_025814.1,1015-1033).
ccgagcaaaagtagaattt

SEQ ID NO: 719085 - DNA, 19 bp, Mus musculus
  siRNA target sequence for 1200009K13Rik (NM_025814.1,1016-1034).
cgagcaaaagtagaattta

SEQ ID NO: 719086 - DNA, 19 bp, Mus musculus
  siRNA target sequence for 1200009K13Rik (NM_025814.1,1058-1076).
gccgatggacaatggaaaa

SEQ ID NO: 719087 - DNA, 19 bp, Mus musculus
  siRNA target sequence for 1200009K13Rik (NM_025814.1,1078-1096).
gggatttgttctgcataaa

SEQ ID NO: 719088 - DNA, 19 bp, Mus musculus
  siRNA target sequence for 1200009K13Rik (NM_025814.1,1079-1097).
ggatttgttctgcataaat

SEQ ID NO: 719089 - DNA, 19 bp, Mus musculus
  siRNA target sequence for 1200009K13Rik (NM_025814.1,1111-1129).
ggctcatgctgaagattca

SEQ ID NO: 719090 - DNA, 19 bp, Mus musculus
  siRNA target sequence for 1200009K13Rik (NM_025814.1,1113-1131).
ctcatgctgaagattcagt

SEQ ID NO: 719091 - DNA, 19 bp, Mus musculus
  siRNA target sequence for 1200009K13Rik (NM_025814.1,1119-1137).
ctgaagattcagttatgga

SEQ ID NO: 719092 - DNA, 19 bp, Mus musculus
  siRNA target sequence for 1200009K13Rik (NM_025814.1,1128-1146).
cagttatggaccatcattt

SEQ ID NO: 719093 - DNA, 19 bp, Mus musculus
  siRNA target sequence for 1200009K13Rik (NM_025814.1,1154-1172).
ccagcaaatgatataacat

SEQ ID NO: 719094 - DNA, 19 bp, Mus musculus
  siRNA target sequence for 1200009K13Rik (NM_025814.1,1173-1191).
ctcaactggagatcaattt

SEQ ID NO: 719095 - DNA, 19 bp, Mus musculus
  siRNA target sequence for 1200009K13Rik (NM_025814.1,1270-1288).
cagcaggactgataagtca

SEQ ID NO: 719096 - DNA, 19 bp, Mus musculus
  siRNA target sequence for 1200009K13Rik (NM_025814.1,1293-1311).
cttctgctcctgatgtaga

SEQ ID NO: 719097 - DNA, 19 bp, Mus musculus
  siRNA target sequence for Cpne8 (NM_025815.1,137-155).
cgggcatcggggacttgaa

SEQ ID NO: 719098 - DNA, 19 bp, Mus musculus
  siRNA target sequence for Cpne8 (NM_025815.1,209-227).
gaaatctccttgatagaga

SEQ ID NO: 719099 - DNA, 19 bp, Mus musculus
  siRNA target sequence for Cpne8 (NM_025815.1,247-265).
ccaatttgtgtcctatata

SEQ ID NO: 719100 - DNA, 19 bp, Mus musculus
  siRNA target sequence for Cpne8 (NM_025815.1,305-323).
gaactgaagtgatcgataa

SEQ ID NO: 719101 - DNA, 19 bp, Mus musculus
  siRNA target sequence for Cpne8 (NM_025815.1,313-331).
gtgatcgataatactttga

SEQ ID NO: 719102 - DNA, 19 bp, Mus musculus
  siRNA target sequence for Cpne8 (NM_025815.1,315-333).
gatcgataatactttgaat

SEQ ID NO: 719103 - DNA, 19 bp, Mus musculus
  siRNA target sequence for Cpne8 (NM_025815.1,380-398).
gagagaatcttcgttttga

SEQ ID NO: 719104 - DNA, 19 bp, Mus musculus
  siRNA target sequence for Cpne8 (NM_025815.1,384-402).
gaatcttcgttttgactta

SEQ ID NO: 719105 - DNA, 19 bp, Mus musculus
  siRNA target sequence for Cpne8 (NM_025815.1,425-443).
ccaacttgtccaaacatga

SEQ ID NO: 719106 - DNA, 19 bp, Mus musculus
  siRNA target sequence for Cpne8 (NM_025815.1,429-447).
cttgtccaaacatgacttt

SEQ ID NO: 719107 - DNA, 19 bp, Mus musculus
  siRNA target sequence for Cpne8 (NM_025815.1,500-518).
gcctggaaaagccaatagt

SEQ ID NO: 719108 - DNA, 19 bp, Mus musculus
  siRNA target sequence for Cpne8 (NM_025815.1,510-528).
gccaatagtaggaattcca

SEQ ID NO: 719109 - DNA, 19 bp, Mus musculus
  siRNA target sequence for Cpne8 (NM_025815.1,533-551).
ggaaatgtgggacaatcat

SEQ ID NO: 719110 - DNA, 19 bp, Mus musculus
  siRNA target sequence for Cpne8 (NM_025815.1,534-552).
gaaatgtgggacaatcata

SEQ ID NO: 719111 - DNA, 19 bp, Mus musculus
  siRNA target sequence for Cpne8 (NM_025815.1,578-596).
gcagggatgctgtcttgat

SEQ ID NO: 719112 - DNA, 19 bp, Mus musculus
  siRNA target sequence for Cpne8 (NM_025815.1,605-623).
gtgcaaacaaattggataa

SEQ ID NO: 719113 - DNA, 19 bp, Mus musculus
  siRNA target sequence for Cpne8 (NM_025815.1,607-625).
gcaaacaaattggataaga

SEQ ID NO: 719114 - DNA, 19 bp, Mus musculus
  siRNA target sequence for Cpne8 (NM_025815.1,644-662).
cagatcctttcctggtatt

SEQ ID NO: 719115 - DNA, 19 bp, Mus musculus
  siRNA target sequence for Cpne8 (NM_025815.1,676-694).
gaggatggaagctttacaa

SEQ ID NO: 719116 - DNA, 19 bp, Mus musculus
  siRNA target sequence for Cpne8 (NM_025815.1,794-812).
caatcaaggtagaagtgta

SEQ ID NO: 719117 - DNA, 19 bp, Mus musculus
  siRNA target sequence for Cpne8 (NM_025815.1,822-840).
ccgagacgggagtcatgat

SEQ ID NO: 719118 - DNA, 19 bp, Mus musculus
  siRNA target sequence for Cpne8 (NM_025815.1,823-841).
cgagacgggagtcatgatt

SEQ ID NO: 719119 - DNA, 19 bp, Mus musculus
  siRNA target sequence for Cpne8 (NM_025815.1,824-842).
gagacgggagtcatgattt

SEQ ID NO: 719120 - DNA, 19 bp, Mus musculus
  siRNA target sequence for Cpne8 (NM_025815.1,828-846).
cgggagtcatgatttcatt

SEQ ID NO: 719121 - DNA, 19 bp, Mus musculus
  siRNA target sequence for Cpne8 (NM_025815.1,878-896).
caagagggcagtcacaatt

SEQ ID NO: 719122 - DNA, 19 bp, Mus musculus
  siRNA target sequence for Cpne8 (NM_025815.1,881-899).
gagggcagtcacaattcaa

SEQ ID NO: 719123 - DNA, 19 bp, Mus musculus
  siRNA target sequence for Cpne8 (NM_025815.1,956-974).
caggaacagtaaccttatt

SEQ ID NO: 719124 - DNA, 19 bp, Mus musculus
  siRNA target sequence for Cpne8 (NM_025815.1,958-976).
ggaacagtaaccttattgt

SEQ ID NO: 719125 - DNA, 19 bp, Mus musculus
  siRNA target sequence for Cpne8 (NM_025815.1,1146-1164).
ggctgtaggagaaatcgtt

SEQ ID NO: 719126 - DNA, 19 bp, Mus musculus
  siRNA target sequence for Cpne8 (NM_025815.1,1154-1172).
gagaaatcgttcaagatta

SEQ ID NO: 719127 - DNA, 19 bp, Mus musculus
  siRNA target sequence for Cpne8 (NM_025815.1,1219-1237).
cctccagatggaaggatat

SEQ ID NO: 719128 - DNA, 19 bp, Mus musculus
  siRNA target sequence for Cpne8 (NM_025815.1,1254-1272).
gaatggcaaccctcagaat

SEQ ID NO: 719129 - DNA, 19 bp, Mus musculus
  siRNA target sequence for Cpne8 (NM_025815.1,1259-1277).
gcaaccctcagaatcctta

SEQ ID NO: 719130 - DNA, 19 bp, Mus musculus
  siRNA target sequence for Cpne8 (NM_025815.1,1295-1313).
gtgtcatggaagcttacta

SEQ ID NO: 719131 - DNA, 19 bp, Mus musculus
  siRNA target sequence for Cpne8 (NM_025815.1,1297-1315).
gtcatggaagcttactata

SEQ ID NO: 719132 - DNA, 19 bp, Mus musculus
  siRNA target sequence for Cpne8 (NM_025815.1,1338-1356).
gtatgggccaaccaacttt

SEQ ID NO: 719133 - DNA, 19 bp, Mus musculus
  siRNA target sequence for Cpne8 (NM_025815.1,1350-1368).
caactttgctcccgtaata

SEQ ID NO: 719134 - DNA, 19 bp, Mus musculus
  siRNA target sequence for Cpne8 (NM_025815.1,1386-1404).
cgcatcctctgtaaaagat

SEQ ID NO: 719135 - DNA, 19 bp, Mus musculus
  siRNA target sequence for Cpne8 (NM_025815.1,1449-1467).
ctcagatatggctcaaact

SEQ ID NO: 719136 - DNA, 19 bp, Mus musculus
  siRNA target sequence for Cpne8 (NM_025815.1,1451-1469).
cagatatggctcaaactaa

SEQ ID NO: 719137 - DNA, 19 bp, Mus musculus
  siRNA target sequence for Cpne8 (NM_025815.1,1494-1512).
gcttcccatgtcaataata

SEQ ID NO: 719138 - DNA, 19 bp, Mus musculus
  siRNA target sequence for Cpne8 (NM_025815.1,1524-1542).
gggacctgcagaatttgat

SEQ ID NO: 719139 - DNA, 19 bp, Mus musculus
  siRNA target sequence for Cpne8 (NM_025815.1,1529-1547).
ctgcagaatttgatgcaat

SEQ ID NO: 719140 - DNA, 19 bp, Mus musculus
  siRNA target sequence for Cpne8 (NM_025815.1,1561-1579).
ggagatgatgtaagagttt

SEQ ID NO: 719141 - DNA, 19 bp, Mus musculus
  siRNA target sequence for Cpne8 (NM_025815.1,1581-1599).
ctccagagggaaatatgct

SEQ ID NO: 719142 - DNA, 19 bp, Mus musculus
  siRNA target sequence for Cpne8 (NM_025815.1,1621-1639).
gtgccgttcagggattata

SEQ ID NO: 719143 - DNA, 19 bp, Mus musculus
  siRNA target sequence for Cpne8 (NM_025815.1,1623-1641).
gccgttcagggattatatt

SEQ ID NO: 719144 - DNA, 19 bp, Mus musculus
  siRNA target sequence for Cpne8 (NM_025815.1,1625-1643).
cgttcagggattatattga

SEQ ID NO: 719145 - DNA, 19 bp, Mus musculus
  siRNA target sequence for Cpne8 (NM_025815.1,1673-1691).
cgagactggccaaagatgt

SEQ ID NO: 719146 - DNA, 19 bp, Mus musculus
  siRNA target sequence for Cpne8 (NM_025815.1,1785-1803).
cgtgctgcagacgcaaata

SEQ ID NO: 719147 - DNA, 19 bp, Mus musculus
  siRNA target sequence for Cpne8 (NM_025815.1,1786-1804).
gtgctgcagacgcaaatat

SEQ ID NO: 719148 - DNA, 19 bp, Mus musculus
  siRNA target sequence for D6Ertd772e (NM_025816.1,151-169).
ccaattttgcccatgtcat

SEQ ID NO: 719149 - DNA, 19 bp, Mus musculus
  siRNA target sequence for D6Ertd772e (NM_025816.1,184-202).
ctaaaagttaccttcctaa

SEQ ID NO: 719150 - DNA, 19 bp, Mus musculus
  siRNA target sequence for D6Ertd772e (NM_025816.1,213-231).
gagtgccattacaccttaa

SEQ ID NO: 719151 - DNA, 19 bp, Mus musculus
  siRNA target sequence for D6Ertd772e (NM_025816.1,215-233).
gtgccattacaccttaact

SEQ ID NO: 719152 - DNA, 19 bp, Mus musculus
  siRNA target sequence for D6Ertd772e (NM_025816.1,242-260).
ccatccacactccaaagat

SEQ ID NO: 719153 - DNA, 19 bp, Mus musculus
  siRNA target sequence for D6Ertd772e (NM_025816.1,253-271).
ccaaagattgggttggtat

SEQ ID NO: 719154 - DNA, 19 bp, Mus musculus
  siRNA target sequence for D6Ertd772e (NM_025816.1,254-272).
caaagattgggttggtata

SEQ ID NO: 719155 - DNA, 19 bp, Mus musculus
  siRNA target sequence for D6Ertd772e (NM_025816.1,287-305).
gagtactgctcgtgactat

SEQ ID NO: 719156 - DNA, 19 bp, Mus musculus
  siRNA target sequence for D6Ertd772e (NM_025816.1,289-307).
gtactgctcgtgactatta

SEQ ID NO: 719157 - DNA, 19 bp, Mus musculus
  siRNA target sequence for D6Ertd772e (NM_025816.1,294-312).
gctcgtgactattacacat

SEQ ID NO: 719158 - DNA, 19 bp, Mus musculus
  siRNA target sequence for D6Ertd772e (NM_025816.1,295-313).
ctcgtgactattacacatt

SEQ ID NO: 719159 - DNA, 19 bp, Mus musculus
  siRNA target sequence for D6Ertd772e (NM_025816.1,300-318).
gactattacacatttttat

SEQ ID NO: 719160 - DNA, 19 bp, Mus musculus
  siRNA target sequence for D6Ertd772e (NM_025816.1,325-343).
ctatgcctgaacattatgt

SEQ ID NO: 719161 - DNA, 19 bp, Mus musculus
  siRNA target sequence for D6Ertd772e (NM_025816.1,539-557).
ggtggtaaccacaaaagct

SEQ ID NO: 719162 - DNA, 19 bp, Mus musculus
  siRNA target sequence for D6Ertd772e (NM_025816.1,652-670).
gagaacaagttggaagaat

SEQ ID NO: 719163 - DNA, 19 bp, Mus musculus
  siRNA target sequence for D6Ertd772e (NM_025816.1,697-715).
ggcggtgtgagcaattgca

SEQ ID NO: 719164 - DNA, 19 bp, Mus musculus
  siRNA target sequence for D6Ertd772e (NM_025816.1,722-740).
gcagaagggccttcttgaa

SEQ ID NO: 719165 - DNA, 19 bp, Mus musculus
  siRNA target sequence for D6Ertd772e (NM_025816.1,728-746).
gggccttcttgaagtatca

SEQ ID NO: 719166 - DNA, 19 bp, Mus musculus
  siRNA target sequence for D6Ertd772e (NM_025816.1,730-748).
gccttcttgaagtatcaca

SEQ ID NO: 719167 - DNA, 19 bp, Mus musculus
  siRNA target sequence for D6Ertd772e (NM_025816.1,738-756).
gaagtatcacaaagtttga

SEQ ID NO: 719168 - DNA, 19 bp, Mus musculus
  siRNA target sequence for D6Ertd772e (NM_025816.1,751-769).
gtttgagagtggaaaacga

SEQ ID NO: 719169 - DNA, 19 bp, Mus musculus
  siRNA target sequence for D6Ertd772e (NM_025816.1,773-791).
gtttatgaagagatacagt

SEQ ID NO: 719170 - DNA, 19 bp, Mus musculus
  siRNA target sequence for D6Ertd772e (NM_025816.1,790-808).
gtgatgctacagctaaagt

SEQ ID NO: 719171 - DNA, 19 bp, Mus musculus
  siRNA target sequence for D6Ertd772e (NM_025816.1,839-857).
gacacataaagccattgaa

SEQ ID NO: 719172 - DNA, 19 bp, Mus musculus
  siRNA target sequence for D6Ertd772e (NM_025816.1,957-975).
gagctgtataaggtacatt

SEQ ID NO: 719173 - DNA, 19 bp, Mus musculus
  siRNA target sequence for D6Ertd772e (NM_025816.1,1054-1072).
gcatgattacccatttcaa

SEQ ID NO: 719174 - DNA, 19 bp, Mus musculus
  siRNA target sequence for D6Ertd772e (NM_025816.1,1099-1117).
gcttggctgacaaggaaaa

SEQ ID NO: 719175 - DNA, 19 bp, Mus musculus
  siRNA target sequence for D6Ertd772e (NM_025816.1,1244-1262).
gctcagtgatgcagtgaat

SEQ ID NO: 719176 - DNA, 19 bp, Mus musculus
  siRNA target sequence for D6Ertd772e (NM_025816.1,1255-1273).
cagtgaatgtgcgagataa

SEQ ID NO: 719177 - DNA, 19 bp, Mus musculus
  siRNA target sequence for D6Ertd772e (NM_025816.1,1257-1275).
gtgaatgtgcgagataaaa

SEQ ID NO: 719178 - DNA, 19 bp, Mus musculus
  siRNA target sequence for D6Ertd772e (NM_025816.1,1259-1277).
gaatgtgcgagataaaact

SEQ ID NO: 719179 - DNA, 19 bp, Mus musculus
  siRNA target sequence for D6Ertd772e (NM_025816.1,1289-1307).
gcatactgcacgcttagaa

SEQ ID NO: 719180 - DNA, 19 bp, Mus musculus
  siRNA target sequence for D6Ertd772e (NM_025816.1,1290-1308).
catactgcacgcttagaaa

SEQ ID NO: 719181 - DNA, 19 bp, Mus musculus
  siRNA target sequence for D6Ertd772e (NM_025816.1,1353-1371).
cagctacatgctgtaaaga

SEQ ID NO: 719182 - DNA, 19 bp, Mus musculus
  siRNA target sequence for D6Ertd772e (NM_025816.1,1355-1373).
gctacatgctgtaaagaaa

SEQ ID NO: 719183 - DNA, 19 bp, Mus musculus
  siRNA target sequence for D6Ertd772e (NM_025816.1,1443-1461).
cagatggctgcagatcatt

SEQ ID NO: 719184 - DNA, 19 bp, Mus musculus
  siRNA target sequence for D6Ertd772e (NM_025816.1,1448-1466).
ggctgcagatcattacaga

SEQ ID NO: 719185 - DNA, 19 bp, Mus musculus
  siRNA target sequence for D6Ertd772e (NM_025816.1,1523-1541).
ggcagcgagtactaacagt

SEQ ID NO: 719186 - DNA, 19 bp, Mus musculus
  siRNA target sequence for D6Ertd772e (NM_025816.1,1577-1595).
gaacgatgcttcaataaat

SEQ ID NO: 719187 - DNA, 19 bp, Mus musculus
  siRNA target sequence for D6Ertd772e (NM_025816.1,1580-1598).
cgatgcttcaataaataca

SEQ ID NO: 719188 - DNA, 19 bp, Mus musculus
  siRNA target sequence for D6Ertd772e (NM_025816.1,1661-1679).
gacaggctttgatatgtca

SEQ ID NO: 719189 - DNA, 19 bp, Mus musculus
  siRNA target sequence for D6Ertd772e (NM_025816.1,1733-1751).
gtataataagtgtaaacaa

SEQ ID NO: 719190 - DNA, 19 bp, Mus musculus
  siRNA target sequence for D6Ertd772e (NM_025816.1,1832-1850).
gaaaattgctgaaaatgta

SEQ ID NO: 719191 - DNA, 19 bp, Mus musculus
  siRNA target sequence for D6Ertd772e (NM_025816.1,1927-1945).
cttcatatttggaaaatct

SEQ ID NO: 719192 - DNA, 19 bp, Mus musculus
  siRNA target sequence for D6Ertd772e (NM_025816.1,1955-1973).
gaaggaacttacaaagagt

SEQ ID NO: 719193 - DNA, 19 bp, Mus musculus
  siRNA target sequence for D6Ertd772e (NM_025816.1,1966-1984).
caaagagtttagaagatca

SEQ ID NO: 719194 - DNA, 19 bp, Mus musculus
  siRNA target sequence for D6Ertd772e (NM_025816.1,2039-2057).
cacatgttctgagcaaaat

SEQ ID NO: 719195 - DNA, 19 bp, Mus musculus
  siRNA target sequence for D6Ertd772e (NM_025816.1,2099-2117).
gtatggcaacccttactca

SEQ ID NO: 719196 - DNA, 19 bp, Mus musculus
  siRNA target sequence for D6Ertd772e (NM_025816.1,2191-2209).
catcttgggaagacaatgt

SEQ ID NO: 719197 - DNA, 19 bp, Mus musculus
  siRNA target sequence for D6Ertd772e (NM_025816.1,2220-2238).
cagcctgctcgaaacctta

SEQ ID NO: 719198 - DNA, 19 bp, Mus musculus
  siRNA target sequence for D6Ertd772e (NM_025816.1,2310-2328).
gcaaaccagcacttacgta

SEQ ID NO: 719199 - DNA, 19 bp, Mus musculus
  siRNA target sequence for D6Ertd772e (NM_025816.1,2315-2333).
ccagcacttacgtagtcat

SEQ ID NO: 719200 - DNA, 19 bp, Mus musculus
  siRNA target sequence for D6Ertd772e (NM_025816.1,2495-2513).
cgaccagcaggggtttgaa

SEQ ID NO: 719201 - DNA, 19 bp, Mus musculus
  siRNA target sequence for D6Ertd772e (NM_025816.1,2496-2514).
gaccagcaggggtttgaaa

SEQ ID NO: 719202 - DNA, 19 bp, Mus musculus
  siRNA target sequence for D6Ertd772e (NM_025816.1,2528-2546).
ccattttgatcagaatgtt

SEQ ID NO: 719203 - DNA, 19 bp, Mus musculus
  siRNA target sequence for 1200009O22Rik (NM_025817.3,653-671).
gcctaggcggcaacttcat

SEQ ID NO: 719204 - DNA, 19 bp, Mus musculus
  siRNA target sequence for 1200009O22Rik (NM_025817.3,850-868).
cgcaagttgcgcatccttt

SEQ ID NO: 719205 - DNA, 19 bp, Mus musculus
  siRNA target sequence for 1200009O22Rik (NM_025817.3,851-869).
gcaagttgcgcatccttta

SEQ ID NO: 719206 - DNA, 19 bp, Mus musculus
  siRNA target sequence for 1200009O22Rik (NM_025817.3,1022-1040).
ctaaccggatccgtttttt

SEQ ID NO: 719207 - DNA, 19 bp, Mus musculus
  siRNA target sequence for 1200009O22Rik (NM_025817.3,1072-1090).
cttcgattcctcaatctct

SEQ ID NO: 719208 - DNA, 19 bp, Mus musculus
  siRNA target sequence for 1200009O22Rik (NM_025817.3,1475-1493).
ccctttctggggacatctt

SEQ ID NO: 719209 - DNA, 19 bp, Mus musculus
  siRNA target sequence for 1200009O22Rik (NM_025817.3,1522-1540).
gatctagacggcaatggtt

SEQ ID NO: 719210 - DNA, 19 bp, Mus musculus
  siRNA target sequence for 1200009O22Rik (NM_025817.3,1554-1572).
ccggttgcggggtctgaaa

SEQ ID NO: 719211 - DNA, 19 bp, Mus musculus
  siRNA target sequence for 1200009O22Rik (NM_025817.3,1888-1906).
ggcaaccgcagcgcattaa

SEQ ID NO: 719212 - DNA, 19 bp, Mus musculus
  siRNA target sequence for 1200009O22Rik (NM_025817.3,2150-2168).
ccgttagtggggttggttt

SEQ ID NO: 719213 - DNA, 19 bp, Mus musculus
  siRNA target sequence for 1200009O22Rik (NM_025817.3,2309-2327).
gcttccgcctgcttttcga

SEQ ID NO: 719214 - DNA, 19 bp, Mus musculus
  siRNA target sequence for 1200009O22Rik (NM_025817.3,2413-2431).
gacaccccctacctagtat

SEQ ID NO: 719215 - DNA, 19 bp, Mus musculus
  siRNA target sequence for 1200009O22Rik (NM_025817.3,2481-2499).
ccactgcgcagggttagta

SEQ ID NO: 719216 - DNA, 19 bp, Mus musculus
  siRNA target sequence for 1200009O22Rik (NM_025817.3,2482-2500).
cactgcgcagggttagtaa

SEQ ID NO: 719217 - DNA, 19 bp, Mus musculus
  siRNA target sequence for 1200009O22Rik (NM_025817.3,2779-2797).
gaggccgacctcattgagt

SEQ ID NO: 719218 - DNA, 19 bp, Mus musculus
  siRNA target sequence for 1200009O22Rik (NM_025817.3,2857-2875).
gaggatcacctcttgcaaa

SEQ ID NO: 719219 - DNA, 19 bp, Mus musculus
  siRNA target sequence for 1200014J11Rik (NM_025818.1,263-281).
cctccaaggaagcaattga

SEQ ID NO: 719220 - DNA, 19 bp, Mus musculus
  siRNA target sequence for 1200014J11Rik (NM_025818.1,355-373).
gaccgagacatgatgaaga

SEQ ID NO: 719221 - DNA, 19 bp, Mus musculus
  siRNA target sequence for 1200014J11Rik (NM_025818.1,436-454).
caggatatcttctcctatt

SEQ ID NO: 719222 - DNA, 19 bp, Mus musculus
  siRNA target sequence for 1200014J11Rik (NM_025818.1,450-468).
ctattttaaggaatatcct

SEQ ID NO: 719223 - DNA, 19 bp, Mus musculus
  siRNA target sequence for 1200014J11Rik (NM_025818.1,534-552).
cacacgagctctcatcaat

SEQ ID NO: 719224 - DNA, 19 bp, Mus musculus
  siRNA target sequence for 1200014J11Rik (NM_025818.1,536-554).
cacgagctctcatcaatat

SEQ ID NO: 719225 - DNA, 19 bp, Mus musculus
  siRNA target sequence for 1200014J11Rik (NM_025818.1,538-556).
cgagctctcatcaatatga

SEQ ID NO: 719226 - DNA, 19 bp, Mus musculus
  siRNA target sequence for 1200014J11Rik (NM_025818.1,541-559).
gctctcatcaatatgagtt

SEQ ID NO: 719227 - DNA, 19 bp, Mus musculus
  siRNA target sequence for 1200014J11Rik (NM_025818.1,716-734).
cgttgtctcaggtagaaga

SEQ ID NO: 719228 - DNA, 19 bp, Mus musculus
  siRNA target sequence for 1200014J11Rik (NM_025818.1,717-735).
gttgtctcaggtagaagaa

SEQ ID NO: 719229 - DNA, 19 bp, Mus musculus
  siRNA target sequence for 1200014J11Rik (NM_025818.1,738-756).
gtctctgttacgaaatgat

SEQ ID NO: 719230 - DNA, 19 bp, Mus musculus
  siRNA target sequence for 1200014J11Rik (NM_025818.1,740-758).
ctctgttacgaaatgatct

SEQ ID NO: 719231 - DNA, 19 bp, Mus musculus
  siRNA target sequence for 1200014J11Rik (NM_025818.1,784-802).
ggaaatagactattcatga

SEQ ID NO: 719232 - DNA, 19 bp, Mus musculus
  siRNA target sequence for 1200014J11Rik (NM_025818.1,793-811).
ctattcatgagatttgcta

SEQ ID NO: 719233 - DNA, 19 bp, Mus musculus
  siRNA target sequence for 1200014J11Rik (NM_025818.1,841-859).
gccagaagaagtcaatact

SEQ ID NO: 719234 - DNA, 19 bp, Mus musculus
  siRNA target sequence for 1200014J11Rik (NM_025818.1,842-860).
ccagaagaagtcaatacta

SEQ ID NO: 719235 - DNA, 19 bp, Mus musculus
  siRNA target sequence for 1200014J11Rik (NM_025818.1,851-869).
gtcaatactacatgaagta

SEQ ID NO: 719236 - DNA, 19 bp, Mus musculus
  siRNA target sequence for 1200014J11Rik (NM_025818.1,867-885).
gtatggaaatccaaattat

SEQ ID NO: 719237 - DNA, 19 bp, Mus musculus
  siRNA target sequence for 1200014J11Rik (NM_025818.1,914-932).
catggaagcgaagatatca

SEQ ID NO: 719238 - DNA, 19 bp, Mus musculus
  siRNA target sequence for 1200014J11Rik (NM_025818.1,941-959).
gcattcagcgggatgtgat

SEQ ID NO: 719239 - DNA, 19 bp, Mus musculus
  siRNA target sequence for 1200014J11Rik (NM_025818.1,988-1006).
gttggcttgacgtcgtata

SEQ ID NO: 719240 - DNA, 19 bp, Mus musculus
  siRNA target sequence for 1200014J11Rik (NM_025818.1,992-1010).
gcttgacgtcgtataaaca

SEQ ID NO: 719241 - DNA, 19 bp, Mus musculus
  siRNA target sequence for 1200014J11Rik (NM_025818.1,1012-1030).
cgacattccggattagtga

SEQ ID NO: 719242 - DNA, 19 bp, Mus musculus
  siRNA target sequence for 1200014J11Rik (NM_025818.1,1013-1031).
gacattccggattagtgaa

SEQ ID NO: 719243 - DNA, 19 bp, Mus musculus
  siRNA target sequence for 1200014J11Rik (NM_025818.1,1251-1269).
cccaaagaaaagcatgaaa

SEQ ID NO: 719244 - DNA, 19 bp, Mus musculus
  siRNA target sequence for 1200014J11Rik (NM_025818.1,1291-1309).
gtagagtcccaactgaaaa

SEQ ID NO: 719245 - DNA, 19 bp, Mus musculus
  siRNA target sequence for 1200014J11Rik (NM_025818.1,1300-1318).
caactgaaaagtattagga

SEQ ID NO: 719246 - DNA, 19 bp, Mus musculus
  siRNA target sequence for 1200014J11Rik (NM_025818.1,1321-1339).
cccatgagggcagatagta

SEQ ID NO: 719247 - DNA, 19 bp, Mus musculus
  siRNA target sequence for 1200014J11Rik (NM_025818.1,1448-1466).
cagcagtcagcagtactaa

SEQ ID NO: 719248 - DNA, 19 bp, Mus musculus
  siRNA target sequence for 1200014J11Rik (NM_025818.1,1457-1475).
gcagtactaaaccagatat

SEQ ID NO: 719249 - DNA, 19 bp, Mus musculus
  siRNA target sequence for 1200014J11Rik (NM_025818.1,1477-1495).
cgccagcggttaggaaaaa

SEQ ID NO: 719250 - DNA, 19 bp, Mus musculus
  siRNA target sequence for 1200014J11Rik (NM_025818.1,1479-1497).
ccagcggttaggaaaaaga

SEQ ID NO: 719251 - DNA, 19 bp, Mus musculus
  siRNA target sequence for 1200014J11Rik (NM_025818.1,1579-1597).
gttcccaggcaagatgtta

SEQ ID NO: 719252 - DNA, 19 bp, Mus musculus
  siRNA target sequence for 1200014J11Rik (NM_025818.1,1612-1630).
gatactcgggagaggaaat

SEQ ID NO: 719253 - DNA, 19 bp, Mus musculus
  siRNA target sequence for 1200014J11Rik (NM_025818.1,1644-1662).
gactcgcttaggatctaca

SEQ ID NO: 719254 - DNA, 19 bp, Mus musculus
  siRNA target sequence for 1200014J11Rik (NM_025818.1,1661-1679).
cacccaagaccaaagaaaa

SEQ ID NO: 719255 - DNA, 19 bp, Mus musculus
  siRNA target sequence for 1200014J11Rik (NM_025818.1,1745-1763).
catggggtgctctgatcaa

SEQ ID NO: 719256 - DNA, 19 bp, Mus musculus
  siRNA target sequence for 1200014J11Rik (NM_025818.1,1774-1792).
gagtctcgccagaagaaga

SEQ ID NO: 719257 - DNA, 19 bp, Mus musculus
  siRNA target sequence for 1200014J11Rik (NM_025818.1,1809-1827).
gccttcgctccagattgaa

SEQ ID NO: 719258 - DNA, 19 bp, Mus musculus
  siRNA target sequence for 1200014J11Rik (NM_025818.1,1811-1829).
cttcgctccagattgaagt

SEQ ID NO: 719259 - DNA, 19 bp, Mus musculus
  siRNA target sequence for 1200014J11Rik (NM_025818.1,1825-1843).
gaagtcagccgggaaagta

SEQ ID NO: 719260 - DNA, 19 bp, Mus musculus
  siRNA target sequence for 1200016B10Rik (NM_025819.2,156-174).
cacaagcttgagactgttt

SEQ ID NO: 719261 - DNA, 19 bp, Mus musculus
  siRNA target sequence for 1200016B10Rik (NM_025819.2,158-176).
caagcttgagactgtttat

SEQ ID NO: 719262 - DNA, 19 bp, Mus musculus
  siRNA target sequence for 1200016B10Rik (NM_025819.2,169-187).
ctgtttatgaccataagtt

SEQ ID NO: 719263 - DNA, 19 bp, Mus musculus
  siRNA target sequence for 1200016B10Rik (NM_025819.2,177-195).
gaccataagtttctaaaga

SEQ ID NO: 719264 - DNA, 19 bp, Mus musculus
  siRNA target sequence for 1200016B10Rik (NM_025819.2,180-198).
cataagtttctaaagatgt

SEQ ID NO: 719265 - DNA, 19 bp, Mus musculus
  siRNA target sequence for 1200016B10Rik (NM_025819.2,256-274).
caccaacttttaatgaaga

SEQ ID NO: 719266 - DNA, 19 bp, Mus musculus
  siRNA target sequence for 1200016B10Rik (NM_025819.2,321-339).
ggcgttcagcctgtttcaa

SEQ ID NO: 719267 - DNA, 19 bp, Mus musculus
  siRNA target sequence for 1200016B10Rik (NM_025819.2,361-379).
cagatgatacagacaatgt

SEQ ID NO: 719268 - DNA, 19 bp, Mus musculus
  siRNA target sequence for 1200016B10Rik (NM_025819.2,366-384).
gatacagacaatgtatact

SEQ ID NO: 719269 - DNA, 19 bp, Mus musculus
  siRNA target sequence for 1200016B10Rik (NM_025819.2,370-388).
cagacaatgtatactataa

SEQ ID NO: 719270 - DNA, 19 bp, Mus musculus
  siRNA target sequence for 1200016B10Rik (NM_025819.2,404-422).
cagtaaaagattgaatgta

SEQ ID NO: 719271 - DNA, 19 bp, Mus musculus
  siRNA target sequence for 1200016B10Rik (NM_025819.2,406-424).
gtaaaagattgaatgtaga

SEQ ID NO: 719272 - DNA, 19 bp, Mus musculus
  siRNA target sequence for 1200016B10Rik (NM_025819.2,435-453).
cctaaaaagagactaaaat

SEQ ID NO: 719273 - DNA, 19 bp, Mus musculus
  siRNA target sequence for 1200016B10Rik (NM_025819.2,463-481).
cgacccaagcggtatcata

SEQ ID NO: 719274 - DNA, 19 bp, Mus musculus
  siRNA target sequence for 1200016B10Rik (NM_025819.2,464-482).
gacccaagcggtatcatat

SEQ ID NO: 719275 - DNA, 19 bp, Mus musculus
  siRNA target sequence for 1200016B10Rik (NM_025819.2,466-484).
cccaagcggtatcatattt

SEQ ID NO: 719276 - DNA, 19 bp, Mus musculus
  siRNA target sequence for 1200016B10Rik (NM_025819.2,467-485).
ccaagcggtatcatattta

SEQ ID NO: 719277 - DNA, 19 bp, Mus musculus
  siRNA target sequence for 1200016B10Rik (NM_025819.2,468-486).
caagcggtatcatatttaa

SEQ ID NO: 719278 - DNA, 19 bp, Mus musculus
  siRNA target sequence for 1200016B10Rik (NM_025819.2,471-489).
gcggtatcatatttaaata

SEQ ID NO: 719279 - DNA, 19 bp, Mus musculus
  siRNA target sequence for 1200016B10Rik (NM_025819.2,472-490).
cggtatcatatttaaataa

SEQ ID NO: 719280 - DNA, 19 bp, Mus musculus
  siRNA target sequence for 1200016B10Rik (NM_025819.2,534-552).
gatactaaagttaaagatt

SEQ ID NO: 719281 - DNA, 19 bp, Mus musculus
  siRNA target sequence for 1200016B10Rik (NM_025819.2,599-617).
ccatagccgcattaaaatt

SEQ ID NO: 719282 - DNA, 19 bp, Mus musculus
  siRNA target sequence for 1200016B10Rik (NM_025819.2,600-618).
catagccgcattaaaatta

SEQ ID NO: 719283 - DNA, 19 bp, Mus musculus
  siRNA target sequence for 1200016B10Rik (NM_025819.2,673-691).
ctttgcttattcagaagaa

SEQ ID NO: 719284 - DNA, 19 bp, Mus musculus
  siRNA target sequence for 1200016B10Rik (NM_025819.2,797-815).
caaggaatcatttgaatca

SEQ ID NO: 719285 - DNA, 19 bp, Mus musculus
  siRNA target sequence for 1200016B10Rik (NM_025819.2,824-842).
gaagattagcttcaaaatt

SEQ ID NO: 719286 - DNA, 19 bp, Mus musculus
  siRNA target sequence for 1200016B10Rik (NM_025819.2,876-894).
gtcgaagaaaagatcttta

SEQ ID NO: 719287 - DNA, 19 bp, Mus musculus
  siRNA target sequence for 1200016B10Rik (NM_025819.2,887-905).
gatctttactatagattct

SEQ ID NO: 719288 - DNA, 19 bp, Mus musculus
  siRNA target sequence for 1200016B10Rik (NM_025819.2,930-948).
gagaagcaacacttgcaaa

SEQ ID NO: 719289 - DNA, 19 bp, Mus musculus
  siRNA target sequence for 1200016B10Rik (NM_025819.2,971-989).
ggccaggcacaaaactgaa

SEQ ID NO: 719290 - DNA, 19 bp, Mus musculus
  siRNA target sequence for 1200016B10Rik (NM_025819.2,1000-1018).
cagattctacacataagca

SEQ ID NO: 719291 - DNA, 19 bp, Mus musculus
  siRNA target sequence for 1200016B10Rik (NM_025819.2,1072-1090).
gttccgattctaaggaaaa

SEQ ID NO: 719292 - DNA, 19 bp, Mus musculus
  siRNA target sequence for 1200016B10Rik (NM_025819.2,1075-1093).
ccgattctaaggaaaacca

SEQ ID NO: 719293 - DNA, 19 bp, Mus musculus
  siRNA target sequence for 1200016B10Rik (NM_025819.2,1076-1094).
cgattctaaggaaaaccat

SEQ ID NO: 719294 - DNA, 19 bp, Mus musculus
  siRNA target sequence for 1200016B10Rik (NM_025819.2,1307-1325).
cacgaagcttctcattgtt

SEQ ID NO: 719295 - DNA, 19 bp, Mus musculus
  siRNA target sequence for 1200016B10Rik (NM_025819.2,1309-1327).
cgaagcttctcattgttat

SEQ ID NO: 719296 - DNA, 19 bp, Mus musculus
  siRNA target sequence for 1200016B10Rik (NM_025819.2,1333-1351).
caaatgttctcatgaatca

SEQ ID NO: 719297 - DNA, 19 bp, Mus musculus
  siRNA target sequence for 1200016B10Rik (NM_025819.2,1341-1359).
ctcatgaatcatctcaaat

SEQ ID NO: 719298 - DNA, 19 bp, Mus musculus
  siRNA target sequence for 1200016B10Rik (NM_025819.2,1393-1411).
gatttgacacacttgtgtt

SEQ ID NO: 719299 - DNA, 19 bp, Mus musculus
  siRNA target sequence for 1200016B10Rik (NM_025819.2,1404-1422).
cttgtgttaataattcctt

SEQ ID NO: 719300 - DNA, 19 bp, Mus musculus
  siRNA target sequence for 1200016B10Rik (NM_025819.2,1420-1438).
cttgggtggttatacaaga

SEQ ID NO: 719301 - DNA, 19 bp, Mus musculus
  siRNA target sequence for 1200016B10Rik (NM_025819.2,1446-1464).
cgtatgaaggcaggaaaat

SEQ ID NO: 719302 - DNA, 19 bp, Mus musculus
  siRNA target sequence for 1200016B10Rik (NM_025819.2,1447-1465).
gtatgaaggcaggaaaatt

SEQ ID NO: 719303 - DNA, 19 bp, Mus musculus
  siRNA target sequence for 1200016B10Rik (NM_025819.2,1451-1469).
gaaggcaggaaaattacta

SEQ ID NO: 719304 - DNA, 19 bp, Mus musculus
  siRNA target sequence for 1200016B10Rik (NM_025819.2,1494-1512).
cctgcaattcattttatca

SEQ ID NO: 719305 - DNA, 19 bp, Mus musculus
  siRNA target sequence for 1200016B10Rik (NM_025819.2,1497-1515).
gcaattcattttatcaaca

SEQ ID NO: 719306 - DNA, 19 bp, Mus musculus
  siRNA target sequence for 1200016B10Rik (NM_025819.2,1563-1581).
ctggcatcccaaaaacttt

SEQ ID NO: 719307 - DNA, 19 bp, Mus musculus
  siRNA target sequence for 1200016B10Rik (NM_025819.2,1585-1603).
gactgagtgacgagaacaa

SEQ ID NO: 719308 - DNA, 19 bp, Mus musculus
  siRNA target sequence for 1200016B10Rik (NM_025819.2,1601-1619).
caatgatgaccgagtatta

SEQ ID NO: 719309 - DNA, 19 bp, Mus musculus
  siRNA target sequence for 1200016B10Rik (NM_025819.2,1605-1623).
gatgaccgagtattaaagt

SEQ ID NO: 719310 - DNA, 19 bp, Mus musculus
  siRNA target sequence for 1200016B10Rik (NM_025819.2,1627-1645).
gtcttcagtaccagcaatt

SEQ ID NO: 719311 - DNA, 19 bp, Mus musculus
  siRNA target sequence for 1200016B10Rik (NM_025819.2,1629-1647).
cttcagtaccagcaattat

SEQ ID NO: 719312 - DNA, 19 bp, Mus musculus
  siRNA target sequence for 1200016B10Rik (NM_025819.2,1668-1686).
ctgtgcacggatgatagaa

SEQ ID NO: 719313 - DNA, 19 bp, Mus musculus
  siRNA target sequence for 1200016B10Rik (NM_025819.2,1670-1688).
gtgcacggatgatagaaat

SEQ ID NO: 719314 - DNA, 19 bp, Mus musculus
  siRNA target sequence for 1200016B10Rik (NM_025819.2,1672-1690).
gcacggatgatagaaattt

SEQ ID NO: 719315 - DNA, 19 bp, Mus musculus
  siRNA target sequence for 1200016B10Rik (NM_025819.2,1673-1691).
cacggatgatagaaattta

SEQ ID NO: 719316 - DNA, 19 bp, Mus musculus
  siRNA target sequence for 1200016B10Rik (NM_025819.2,1676-1694).
ggatgatagaaatttaaga

SEQ ID NO: 719317 - DNA, 19 bp, Mus musculus
  siRNA target sequence for 1200016B10Rik (NM_025819.2,1714-1732).
gtgtgaagtccctcagtaa

SEQ ID NO: 719318 - DNA, 19 bp, Mus musculus
  siRNA target sequence for 1200016B10Rik (NM_025819.2,1740-1758).
ctggatacagagatattaa

SEQ ID NO: 719319 - DNA, 19 bp, Mus musculus
  siRNA target sequence for 1200016B10Rik (NM_025819.2,1867-1885).
ccggactgtccattctact

SEQ ID NO: 719320 - DNA, 19 bp, Mus musculus
  siRNA target sequence for 1200016B10Rik (NM_025819.2,1881-1899).
ctactggagcggatcattt

SEQ ID NO: 719321 - DNA, 19 bp, Mus musculus
  siRNA target sequence for 1200016B10Rik (NM_025819.2,1889-1907).
gcggatcatttgtgatctt

SEQ ID NO: 719322 - DNA, 19 bp, Mus musculus
  siRNA target sequence for 1200016B10Rik (NM_025819.2,1891-1909).
ggatcatttgtgatcttga

SEQ ID NO: 719323 - DNA, 19 bp, Mus musculus
  siRNA target sequence for 1200016B10Rik (NM_025819.2,1892-1910).
gatcatttgtgatcttgaa

SEQ ID NO: 719324 - DNA, 19 bp, Mus musculus
  siRNA target sequence for 1200016B10Rik (NM_025819.2,1922-1940).
gacagctttatcttcaata

SEQ ID NO: 719325 - DNA, 19 bp, Mus musculus
  siRNA target sequence for 1200016B10Rik (NM_025819.2,2001-2019).
ccaccatggactctaataa

SEQ ID NO: 719326 - DNA, 19 bp, Mus musculus
  siRNA target sequence for 1200016B10Rik (NM_025819.2,2009-2027).
gactctaataaatctatta

SEQ ID NO: 719327 - DNA, 19 bp, Mus musculus
  siRNA target sequence for 1200016B10Rik (NM_025819.2,2011-2029).
ctctaataaatctattaca

SEQ ID NO: 719328 - DNA, 19 bp, Mus musculus
  siRNA target sequence for 1200016B10Rik (NM_025819.2,2022-2040).
ctattacagtgctttaaaa

SEQ ID NO: 719329 - DNA, 19 bp, Mus musculus
  siRNA target sequence for 1200016B10Rik (NM_025819.2,2052-2070).
gctgtatttggattagtta

SEQ ID NO: 719330 - DNA, 19 bp, Mus musculus
  siRNA target sequence for 1200016B10Rik (NM_025819.2,2092-2110).
ctgttgagagcctatatga

SEQ ID NO: 719331 - DNA, 19 bp, Mus musculus
  siRNA target sequence for 1200016B10Rik (NM_025819.2,2168-2186).
ggattctaaaagtttgtta

SEQ ID NO: 719332 - DNA, 19 bp, Mus musculus
  siRNA target sequence for 1200016B10Rik (NM_025819.2,2192-2210).
cttcagtacaaggtcaaat

SEQ ID NO: 719333 - DNA, 19 bp, Mus musculus
  siRNA target sequence for 1200016B10Rik (NM_025819.2,2195-2213).
cagtacaaggtcaaattat

SEQ ID NO: 719334 - DNA, 19 bp, Mus musculus
  siRNA target sequence for 1200016B10Rik (NM_025819.2,2197-2215).
gtacaaggtcaaattatga

SEQ ID NO: 719335 - DNA, 19 bp, Mus musculus
  siRNA target sequence for 1200016B10Rik (NM_025819.2,2228-2246).
ccagacctttgctcaagta

SEQ ID NO: 719336 - DNA, 19 bp, Mus musculus
  siRNA target sequence for 1200016B10Rik (NM_025819.2,2229-2247).
cagacctttgctcaagtaa

SEQ ID NO: 719337 - DNA, 19 bp, Mus musculus
  siRNA target sequence for 1200016B10Rik (NM_025819.2,2239-2257).
ctcaagtaaacaaactact

SEQ ID NO: 719338 - DNA, 19 bp, Mus musculus
  siRNA target sequence for 1200016B10Rik (NM_025819.2,2265-2283).
ctcgcagaggtcaagacaa

SEQ ID NO: 719339 - DNA, 19 bp, Mus musculus
  siRNA target sequence for 1200016B10Rik (NM_025819.2,2267-2285).
cgcagaggtcaagacaaaa

SEQ ID NO: 719340 - DNA, 19 bp, Mus musculus
  siRNA target sequence for 1200016B10Rik (NM_025819.2,2342-2360).
ggtgaagcttcataaccaa

SEQ ID NO: 719341 - DNA, 19 bp, Mus musculus
  siRNA target sequence for 1200016B10Rik (NM_025819.2,2440-2458).
ggatgtcaatatatcagaa

SEQ ID NO: 719342 - DNA, 19 bp, Mus musculus
  siRNA target sequence for 1200016B10Rik (NM_025819.2,2475-2493).
caaacactggactcaagtt

SEQ ID NO: 719343 - DNA, 19 bp, Mus musculus
  siRNA target sequence for 1200016B10Rik (NM_025819.2,2497-2515).
ccctgacaacttcgaaaat

SEQ ID NO: 719344 - DNA, 19 bp, Mus musculus
  siRNA target sequence for 1200016B10Rik (NM_025819.2,2498-2516).
cctgacaacttcgaaaata

SEQ ID NO: 719345 - DNA, 19 bp, Mus musculus
  siRNA target sequence for 1200016B10Rik (NM_025819.2,2510-2528).
gaaaatagcatcctttgaa

SEQ ID NO: 719346 - DNA, 19 bp, Mus musculus
  siRNA target sequence for 1200016B10Rik (NM_025819.2,2538-2556).
gtgtatcttcaaaagttaa

SEQ ID NO: 719347 - DNA, 19 bp, Mus musculus
  siRNA target sequence for 1200016B10Rik (NM_025819.2,2594-2612).
gattttggctcctaatagt

SEQ ID NO: 719348 - DNA, 19 bp, Mus musculus
  siRNA target sequence for 1200016B10Rik (NM_025819.2,2602-2620).
ctcctaatagtaattacca

SEQ ID NO: 719349 - DNA, 19 bp, Mus musculus
  siRNA target sequence for 1200016B10Rik (NM_025819.2,2634-2652).
ctctataacttcctaatca

SEQ ID NO: 719350 - DNA, 19 bp, Mus musculus
  siRNA target sequence for 1200016B10Rik (NM_025819.2,2689-2707).
gggaactttatgattgtgt

SEQ ID NO: 719351 - DNA, 19 bp, Mus musculus
  siRNA target sequence for 1200016B10Rik (NM_025819.2,2723-2741).
ccgggaaagattaaccatt

SEQ ID NO: 719352 - DNA, 19 bp, Mus musculus
  siRNA target sequence for 1200016B10Rik (NM_025819.2,2727-2745).
gaaagattaaccattggat

SEQ ID NO: 719353 - DNA, 19 bp, Mus musculus
  siRNA target sequence for 1200016B10Rik (NM_025819.2,2743-2761).
gatgccgccagctgattga

SEQ ID NO: 719354 - DNA, 19 bp, Mus musculus
  siRNA target sequence for 1200016B10Rik (NM_025819.2,2746-2764).
gccgccagctgattgagat

SEQ ID NO: 719355 - DNA, 19 bp, Mus musculus
  siRNA target sequence for Appbp2 (NM_025825.2,340-358).
ccggagacgctctacaaca

SEQ ID NO: 719356 - DNA, 19 bp, Mus musculus
  siRNA target sequence for Appbp2 (NM_025825.2,368-386).
ccgctgtcgtggacaacta

SEQ ID NO: 719357 - DNA, 19 bp, Mus musculus
  siRNA target sequence for Appbp2 (NM_025825.2,370-388).
gctgtcgtggacaactaca

SEQ ID NO: 719358 - DNA, 19 bp, Mus musculus
  siRNA target sequence for Appbp2 (NM_025825.2,409-427).
cgctccttgccggagaata

SEQ ID NO: 719359 - DNA, 19 bp, Mus musculus
  siRNA target sequence for Appbp2 (NM_025825.2,410-428).
gctccttgccggagaatat

SEQ ID NO: 719360 - DNA, 19 bp, Mus musculus
  siRNA target sequence for Appbp2 (NM_025825.2,413-431).
ccttgccggagaatatcca

SEQ ID NO: 719361 - DNA, 19 bp, Mus musculus
  siRNA target sequence for Appbp2 (NM_025825.2,430-448).
cagttcgacgtttactaca

SEQ ID NO: 719362 - DNA, 19 bp, Mus musculus
  siRNA target sequence for Appbp2 (NM_025825.2,436-454).
gacgtttactacaagcttt

SEQ ID NO: 719363 - DNA, 19 bp, Mus musculus
  siRNA target sequence for Appbp2 (NM_025825.2,473-491).
gtcagctcggcagtgaatt

SEQ ID NO: 719364 - DNA, 19 bp, Mus musculus
  siRNA target sequence for Appbp2 (NM_025825.2,475-493).
cagctcggcagtgaattct

SEQ ID NO: 719365 - DNA, 19 bp, Mus musculus
  siRNA target sequence for Appbp2 (NM_025825.2,644-662).
ccgacgctgcagtaaagga

SEQ ID NO: 719366 - DNA, 19 bp, Mus musculus
  siRNA target sequence for Appbp2 (NM_025825.2,672-690).
ccaggttggctttgtctta

SEQ ID NO: 719367 - DNA, 19 bp, Mus musculus
  siRNA target sequence for Appbp2 (NM_025825.2,720-738).
cagtgatgctgaaaaggtt

SEQ ID NO: 719368 - DNA, 19 bp, Mus musculus
  siRNA target sequence for Appbp2 (NM_025825.2,756-774).
gttgtgtacgctacatgat

SEQ ID NO: 719369 - DNA, 19 bp, Mus musculus
  siRNA target sequence for Appbp2 (NM_025825.2,761-779).
gtacgctacatgatgagat

SEQ ID NO: 719370 - DNA, 19 bp, Mus musculus
  siRNA target sequence for Appbp2 (NM_025825.2,829-847).
cgaaatggaaattgtaaat

SEQ ID NO: 719371 - DNA, 19 bp, Mus musculus
  siRNA target sequence for Appbp2 (NM_025825.2,888-906).
catggataagctgtctaaa

SEQ ID NO: 719372 - DNA, 19 bp, Mus musculus
  siRNA target sequence for Appbp2 (NM_025825.2,891-909).
ggataagctgtctaaacat

SEQ ID NO: 719373 - DNA, 19 bp, Mus musculus
  siRNA target sequence for Appbp2 (NM_025825.2,931-949).
gctctctacggagaactat

SEQ ID NO: 719374 - DNA, 19 bp, Mus musculus
  siRNA target sequence for Appbp2 (NM_025825.2,995-1013).
ggtgcgttgaggcaatgaa

SEQ ID NO: 719375 - DNA, 19 bp, Mus musculus
  siRNA target sequence for Appbp2 (NM_025825.2,1025-1043).
caggcttaccagtcaaagt

SEQ ID NO: 719376 - DNA, 19 bp, Mus musculus
  siRNA target sequence for Appbp2 (NM_025825.2,1028-1046).
gcttaccagtcaaagttgt

SEQ ID NO: 719377 - DNA, 19 bp, Mus musculus
  siRNA target sequence for Appbp2 (NM_025825.2,1079-1097).
gtgtagtcaaacgtgaatt

SEQ ID NO: 719378 - DNA, 19 bp, Mus musculus
  siRNA target sequence for Appbp2 (NM_025825.2,1153-1171).
ggatccaaacacccaaaat

SEQ ID NO: 719379 - DNA, 19 bp, Mus musculus
  siRNA target sequence for Appbp2 (NM_025825.2,1175-1193).
ctgacacactgctagatta

SEQ ID NO: 719380 - DNA, 19 bp, Mus musculus
  siRNA target sequence for Appbp2 (NM_025825.2,1186-1204).
ctagattatgggttctact

SEQ ID NO: 719381 - DNA, 19 bp, Mus musculus
  siRNA target sequence for Appbp2 (NM_025825.2,1196-1214).
ggttctacttactcaatgt

SEQ ID NO: 719382 - DNA, 19 bp, Mus musculus
  siRNA target sequence for Appbp2 (NM_025825.2,1197-1215).
gttctacttactcaatgta

SEQ ID NO: 719383 - DNA, 19 bp, Mus musculus
  siRNA target sequence for Appbp2 (NM_025825.2,1209-1227).
caatgtagacaatatctgt

SEQ ID NO: 719384 - DNA, 19 bp, Mus musculus
  siRNA target sequence for Appbp2 (NM_025825.2,1224-1242).
ctgtcagtctgttgcaatt

SEQ ID NO: 719385 - DNA, 19 bp, Mus musculus
  siRNA target sequence for Appbp2 (NM_025825.2,1226-1244).
gtcagtctgttgcaattta

SEQ ID NO: 719386 - DNA, 19 bp, Mus musculus
  siRNA target sequence for Appbp2 (NM_025825.2,1362-1380).
cgacaatgcactatttcat

SEQ ID NO: 719387 - DNA, 19 bp, Mus musculus
  siRNA target sequence for Appbp2 (NM_025825.2,1381-1399).
gcagaaagagccattggta

SEQ ID NO: 719388 - DNA, 19 bp, Mus musculus
  siRNA target sequence for Appbp2 (NM_025825.2,1382-1400).
cagaaagagccattggtat

SEQ ID NO: 719389 - DNA, 19 bp, Mus musculus
  siRNA target sequence for Appbp2 (NM_025825.2,1413-1431).
cctacctgaagatcatctt

SEQ ID NO: 719390 - DNA, 19 bp, Mus musculus
  siRNA target sequence for Appbp2 (NM_025825.2,1531-1549).
cacgacttgcacttgtctt

SEQ ID NO: 719391 - DNA, 19 bp, Mus musculus
  siRNA target sequence for Appbp2 (NM_025825.2,1615-1633).
ctcggaaggctctatcagt

SEQ ID NO: 719392 - DNA, 19 bp, Mus musculus
  siRNA target sequence for Appbp2 (NM_025825.2,1619-1637).
gaaggctctatcagtcaat

SEQ ID NO: 719393 - DNA, 19 bp, Mus musculus
  siRNA target sequence for Appbp2 (NM_025825.2,1623-1641).
gctctatcagtcaatgaga

SEQ ID NO: 719394 - DNA, 19 bp, Mus musculus
  siRNA target sequence for Appbp2 (NM_025825.2,1624-1642).
ctctatcagtcaatgagaa

SEQ ID NO: 719395 - DNA, 19 bp, Mus musculus
  siRNA target sequence for Appbp2 (NM_025825.2,1743-1761).
ggcatctctgtataattat

SEQ ID NO: 719396 - DNA, 19 bp, Mus musculus
  siRNA target sequence for Appbp2 (NM_025825.2,1764-1782).
catgaatcagtatgaaaat

SEQ ID NO: 719397 - DNA, 19 bp, Mus musculus
  siRNA target sequence for Appbp2 (NM_025825.2,1767-1785).
gaatcagtatgaaaatgct

SEQ ID NO: 719398 - DNA, 19 bp, Mus musculus
  siRNA target sequence for Appbp2 (NM_025825.2,1811-1829).
ccattgggaagaaactgtt

SEQ ID NO: 719399 - DNA, 19 bp, Mus musculus
  siRNA target sequence for Appbp2 (NM_025825.2,1812-1830).
cattgggaagaaactgttt

SEQ ID NO: 719400 - DNA, 19 bp, Mus musculus
  siRNA target sequence for Appbp2 (NM_025825.2,1837-1855).
ggctacagtggactagaat

SEQ ID NO: 719401 - DNA, 19 bp, Mus musculus
  siRNA target sequence for Appbp2 (NM_025825.2,1842-1860).
cagtggactagaatatgat

SEQ ID NO: 719402 - DNA, 19 bp, Mus musculus
  siRNA target sequence for Appbp2 (NM_025825.2,1889-1907).
ccattgggaattatgagaa

SEQ ID NO: 719403 - DNA, 19 bp, Mus musculus
  siRNA target sequence for Appbp2 (NM_025825.2,1894-1912).
gggaattatgagaaagtgt

SEQ ID NO: 719404 - DNA, 19 bp, Mus musculus
  siRNA target sequence for Appbp2 (NM_025825.2,1895-1913).
ggaattatgagaaagtgtt

SEQ ID NO: 719405 - DNA, 19 bp, Mus musculus
  siRNA target sequence for Appbp2 (NM_025825.2,1921-1939).
cacaacgttctgtctaact

SEQ ID NO: 719406 - DNA, 19 bp, Mus musculus
  siRNA target sequence for Appbp2 (NM_025825.2,1947-1965).
gttgcgagatcgacagtat

SEQ ID NO: 719407 - DNA, 19 bp, Mus musculus
  siRNA target sequence for Appbp2 (NM_025825.2,1950-1968).
gcgagatcgacagtattca

SEQ ID NO: 719408 - DNA, 19 bp, Mus musculus
  siRNA target sequence for Appbp2 (NM_025825.2,2020-2038).
gtggtgcagtcctttctga

SEQ ID NO: 719409 - DNA, 19 bp, Mus musculus
  siRNA target sequence for 1300019C06Rik (NM_025832.2,98-116).
gcgcgtgctgaaatgttat

SEQ ID NO: 719410 - DNA, 19 bp, Mus musculus
  siRNA target sequence for 1300019C06Rik (NM_025832.2,100-118).
gcgtgctgaaatgttatga

SEQ ID NO: 719411 - DNA, 19 bp, Mus musculus
  siRNA target sequence for 1300019C06Rik (NM_025832.2,101-119).
cgtgctgaaatgttatgaa

SEQ ID NO: 719412 - DNA, 19 bp, Mus musculus
  siRNA target sequence for 1300019C06Rik (NM_025832.2,143-161).
caagttttgcaagatgatt

SEQ ID NO: 719413 - DNA, 19 bp, Mus musculus
  siRNA target sequence for 1300019C06Rik (NM_025832.2,151-169).
gcaagatgattctttctaa

SEQ ID NO: 719414 - DNA, 19 bp, Mus musculus
  siRNA target sequence for 1300019C06Rik (NM_025832.2,210-228).
ggattaatactgaactgtt

SEQ ID NO: 719415 - DNA, 19 bp, Mus musculus
  siRNA target sequence for 1300019C06Rik (NM_025832.2,211-229).
gattaatactgaactgttt

SEQ ID NO: 719416 - DNA, 19 bp, Mus musculus
  siRNA target sequence for 1300019C06Rik (NM_025832.2,321-339).
caacgttctgataagaagt

SEQ ID NO: 719417 - DNA, 19 bp, Mus musculus
  siRNA target sequence for 1300019C06Rik (NM_025832.2,325-343).
gttctgataagaagtatga

SEQ ID NO: 719418 - DNA, 19 bp, Mus musculus
  siRNA target sequence for 1300019C06Rik (NM_025832.2,362-380).
ccgaaatgccctcaaatta

SEQ ID NO: 719419 - DNA, 19 bp, Mus musculus
  siRNA target sequence for 1300019C06Rik (NM_025832.2,364-382).
gaaatgccctcaaattaga

SEQ ID NO: 719420 - DNA, 19 bp, Mus musculus
  siRNA target sequence for 1300019C06Rik (NM_025832.2,371-389).
cctcaaattagataaagat

SEQ ID NO: 719421 - DNA, 19 bp, Mus musculus
  siRNA target sequence for 1300019C06Rik (NM_025832.2,372-390).
ctcaaattagataaagata

SEQ ID NO: 719422 - DNA, 19 bp, Mus musculus
  siRNA target sequence for 1300019C06Rik (NM_025832.2,374-392).
caaattagataaagataat

SEQ ID NO: 719423 - DNA, 19 bp, Mus musculus
  siRNA target sequence for 1300019C06Rik (NM_025832.2,381-399).
gataaagataatttgcaaa

SEQ ID NO: 719424 - DNA, 19 bp, Mus musculus
  siRNA target sequence for 1300019C06Rik (NM_025832.2,415-433).
ctctattgcagattcagat

SEQ ID NO: 719425 - DNA, 19 bp, Mus musculus
  siRNA target sequence for 1300019C06Rik (NM_025832.2,434-452).
gagagaccttgaaggttat

SEQ ID NO: 719426 - DNA, 19 bp, Mus musculus
  siRNA target sequence for 1300019C06Rik (NM_025832.2,458-476).
gacgagataccaacttctt

SEQ ID NO: 719427 - DNA, 19 bp, Mus musculus
  siRNA target sequence for 1300019C06Rik (NM_025832.2,460-478).
cgagataccaacttcttca

SEQ ID NO: 719428 - DNA, 19 bp, Mus musculus
  siRNA target sequence for 1300019C06Rik (NM_025832.2,463-481).
gataccaacttcttcagtt

SEQ ID NO: 719429 - DNA, 19 bp, Mus musculus
  siRNA target sequence for 1300019C06Rik (NM_025832.2,495-513).
cgtgcttcctggattggat

SEQ ID NO: 719430 - DNA, 19 bp, Mus musculus
  siRNA target sequence for 1300019C06Rik (NM_025832.2,496-514).
gtgcttcctggattggata

SEQ ID NO: 719431 - DNA, 19 bp, Mus musculus
  siRNA target sequence for 1300019C06Rik (NM_025832.2,511-529).
gatatgccatcgcttatca

SEQ ID NO: 719432 - DNA, 19 bp, Mus musculus
  siRNA target sequence for 1300019C06Rik (NM_025832.2,517-535).
ccatcgcttatcatttgct

SEQ ID NO: 719433 - DNA, 19 bp, Mus musculus
  siRNA target sequence for 1300019C06Rik (NM_025832.2,550-568).
cagcgctaaagctattaga

SEQ ID NO: 719434 - DNA, 19 bp, Mus musculus
  siRNA target sequence for 1300019C06Rik (NM_025832.2,555-573).
ctaaagctattagaagaat

SEQ ID NO: 719435 - DNA, 19 bp, Mus musculus
  siRNA target sequence for 1300019C06Rik (NM_025832.2,560-578).
gctattagaagaatttaga

SEQ ID NO: 719436 - DNA, 19 bp, Mus musculus
  siRNA target sequence for 1300019C06Rik (NM_025832.2,594-612).
cctcccaacaaaatagctt

SEQ ID NO: 719437 - DNA, 19 bp, Mus musculus
  siRNA target sequence for 1300019C06Rik (NM_025832.2,598-616).
ccaacaaaatagcttatga

SEQ ID NO: 719438 - DNA, 19 bp, Mus musculus
  siRNA target sequence for 1300019C06Rik (NM_025832.2,599-617).
caacaaaatagcttatgaa

SEQ ID NO: 719439 - DNA, 19 bp, Mus musculus
  siRNA target sequence for 1300019C06Rik (NM_025832.2,674-692).
ggaatctttggaacatata

SEQ ID NO: 719440 - DNA, 19 bp, Mus musculus
  siRNA target sequence for 1300019C06Rik (NM_025832.2,702-720).
gagaagttgatatgtgata

SEQ ID NO: 719441 - DNA, 19 bp, Mus musculus
  siRNA target sequence for 1300019C06Rik (NM_025832.2,704-722).
gaagttgatatgtgataaa

SEQ ID NO: 719442 - DNA, 19 bp, Mus musculus
  siRNA target sequence for 1300019C06Rik (NM_025832.2,777-795).
gaagccagtgaagtattca

SEQ ID NO: 719443 - DNA, 19 bp, Mus musculus
  siRNA target sequence for 1300019C06Rik (NM_025832.2,875-893).
cgagaggcttcagctttat

SEQ ID NO: 719444 - DNA, 19 bp, Mus musculus
  siRNA target sequence for 1300019C06Rik (NM_025832.2,911-929).
gcaccccagagcagtttca

SEQ ID NO: 719445 - DNA, 19 bp, Mus musculus
  siRNA target sequence for 1300019C06Rik (NM_025832.2,949-967).
gtttcgccccaggtaagaa

SEQ ID NO: 719446 - DNA, 19 bp, Mus musculus
  siRNA target sequence for 1300019C06Rik (NM_025832.2,953-971).
cgccccaggtaagaagttt

SEQ ID NO: 719447 - DNA, 19 bp, Mus musculus
  siRNA target sequence for 1300019C06Rik (NM_025832.2,972-990).
cgagaactcatggataagt

SEQ ID NO: 719448 - DNA, 19 bp, Mus musculus
  siRNA target sequence for 1300019C06Rik (NM_025832.2,973-991).
gagaactcatggataagtt

SEQ ID NO: 719449 - DNA, 19 bp, Mus musculus
  siRNA target sequence for 1300019C06Rik (NM_025832.2,993-1011).
ctgagaccaaactttagca

SEQ ID NO: 719450 - DNA, 19 bp, Mus musculus
  siRNA target sequence for 1300019C06Rik (NM_025832.2,995-1013).
gagaccaaactttagcaaa

SEQ ID NO: 719451 - DNA, 19 bp, Mus musculus
  siRNA target sequence for 1300019C06Rik (NM_025832.2,1040-1058).
gaaatccttgtattgtgat

SEQ ID NO: 719452 - DNA, 19 bp, Mus musculus
  siRNA target sequence for 1300019C06Rik (NM_025832.2,1045-1063).
ccttgtattgtgatacaga

SEQ ID NO: 719453 - DNA, 19 bp, Mus musculus
  siRNA target sequence for 1300019C06Rik (NM_025832.2,1046-1064).
cttgtattgtgatacagaa

SEQ ID NO: 719454 - DNA, 19 bp, Mus musculus
  siRNA target sequence for 1300019C06Rik (NM_025832.2,1072-1090).
caataatccaggaacttgt

SEQ ID NO: 719455 - DNA, 19 bp, Mus musculus
  siRNA target sequence for 1300019C06Rik (NM_025832.2,1079-1097).
ccaggaacttgttactaat

SEQ ID NO: 719456 - DNA, 19 bp, Mus musculus
  siRNA target sequence for 1300019C06Rik (NM_025832.2,1080-1098).
caggaacttgttactaatt

SEQ ID NO: 719457 - DNA, 19 bp, Mus musculus
  siRNA target sequence for 1300019C06Rik (NM_025832.2,1158-1176).
cccccaacaactctaatct

SEQ ID NO: 719458 - DNA, 19 bp, Mus musculus
  siRNA target sequence for 1300019C06Rik (NM_025832.2,1170-1188).
ctaatctgggtccagtatt

SEQ ID NO: 719459 - DNA, 19 bp, Mus musculus
  siRNA target sequence for 1300019C06Rik (NM_025832.2,1220-1238).
gtattttctggctttggaa

SEQ ID NO: 719460 - DNA, 19 bp, Mus musculus
  siRNA target sequence for 1300019C06Rik (NM_025832.2,1258-1276).
ctagtactccaactctaat

SEQ ID NO: 719461 - DNA, 19 bp, Mus musculus
  siRNA target sequence for 1300019C06Rik (NM_025832.2,1261-1279).
gtactccaactctaataga

SEQ ID NO: 719462 - DNA, 19 bp, Mus musculus
  siRNA target sequence for 1300019C06Rik (NM_025832.2,1266-1284).
ccaactctaatagaactat

SEQ ID NO: 719463 - DNA, 19 bp, Mus musculus
  siRNA target sequence for 1300019C06Rik (NM_025832.2,1267-1285).
caactctaatagaactatt

SEQ ID NO: 719464 - DNA, 19 bp, Mus musculus
  siRNA target sequence for 1300019C06Rik (NM_025832.2,1270-1288).
ctctaatagaactattcta

SEQ ID NO: 719465 - DNA, 19 bp, Mus musculus
  siRNA target sequence for 1300019C06Rik (NM_025832.2,1281-1299).
ctattctacatgaaagcaa

SEQ ID NO: 719466 - DNA, 19 bp, Mus musculus
  siRNA target sequence for 1300019C06Rik (NM_025832.2,1369-1387).
cggctgacaggttcatcaa

SEQ ID NO: 719467 - DNA, 19 bp, Mus musculus
  siRNA target sequence for 1300019C06Rik (NM_025832.2,1371-1389).
gctgacaggttcatcaatt

SEQ ID NO: 719468 - DNA, 19 bp, Mus musculus
  siRNA target sequence for 1300019C06Rik (NM_025832.2,1374-1392).
gacaggttcatcaattcca

SEQ ID NO: 719469 - DNA, 19 bp, Mus musculus
  siRNA target sequence for 1300019C06Rik (NM_025832.2,1376-1394).
caggttcatcaattccaaa

SEQ ID NO: 719470 - DNA, 19 bp, Mus musculus
  siRNA target sequence for 1300019C06Rik (NM_025832.2,1379-1397).
gttcatcaattccaaatgt

SEQ ID NO: 719471 - DNA, 19 bp, Mus musculus
  siRNA target sequence for 1300019C06Rik (NM_025832.2,1409-1427).
gcttcgagcaaatatgata

SEQ ID NO: 719472 - DNA, 19 bp, Mus musculus
  siRNA target sequence for 1300019C06Rik (NM_025832.2,1457-1475).
cacaagggaaggaacatct

SEQ ID NO: 719473 - DNA, 19 bp, Mus musculus
  siRNA target sequence for 1300019C06Rik (NM_025832.2,1568-1586).
gaaaaagtgccatgaagta

SEQ ID NO: 719474 - DNA, 19 bp, Mus musculus
  siRNA target sequence for 1300019C06Rik (NM_025832.2,1604-1622).
gataaccgatgatcagttt

SEQ ID NO: 719475 - DNA, 19 bp, Mus musculus
  siRNA target sequence for 1300019C06Rik (NM_025832.2,1649-1667).
gatgaccctccgtgcttat

SEQ ID NO: 719476 - DNA, 19 bp, Mus musculus
  siRNA target sequence for 1300019C06Rik (NM_025832.2,1652-1670).
gaccctccgtgcttatgtt

SEQ ID NO: 719477 - DNA, 19 bp, Mus musculus
  siRNA target sequence for 1300019C06Rik (NM_025832.2,1695-1713).
ctcagaagacatacttttt

SEQ ID NO: 719478 - DNA, 19 bp, Mus musculus
  siRNA target sequence for 1300019C06Rik (NM_025832.2,1721-1739).
ggctgctagatcagcaatt

SEQ ID NO: 719479 - DNA, 19 bp, Mus musculus
  siRNA target sequence for 1300019C06Rik (NM_025832.2,1729-1747).
gatcagcaattgaaatata

SEQ ID NO: 719480 - DNA, 19 bp, Mus musculus
  siRNA target sequence for 1300019C06Rik (NM_025832.2,1838-1856).
gcttagcaagcaaagaaga

SEQ ID NO: 719481 - DNA, 19 bp, Mus musculus
  siRNA target sequence for 1300019C06Rik (NM_025832.2,1903-1921).
gggaacgccaacagaaaaa

SEQ ID NO: 719482 - DNA, 19 bp, Mus musculus
  siRNA target sequence for 1300019C06Rik (NM_025832.2,2000-2018).
ggttgacaatccattagaa

SEQ ID NO: 719483 - DNA, 19 bp, Mus musculus
  siRNA target sequence for 1300019C06Rik (NM_025832.2,2030-2048).
gttcctcactcctctgaaa

SEQ ID NO: 719484 - DNA, 19 bp, Mus musculus
  siRNA target sequence for 1300019C06Rik (NM_025832.2,2055-2073).
gctgctgagagcattgata

SEQ ID NO: 719485 - DNA, 19 bp, Mus musculus
  siRNA target sequence for 1300019C06Rik (NM_025832.2,2121-2139).
ctaatgttgcagtctgtta

SEQ ID NO: 719486 - DNA, 19 bp, Mus musculus
  siRNA target sequence for 1300019C06Rik (NM_025832.2,2126-2144).
gttgcagtctgttaaacga

SEQ ID NO: 719487 - DNA, 19 bp, Mus musculus
  siRNA target sequence for 1300019C06Rik (NM_025832.2,2170-2188).
cttggttacatgaatgctt

SEQ ID NO: 719488 - DNA, 19 bp, Mus musculus
  siRNA target sequence for 1300019C06Rik (NM_025832.2,2178-2196).
catgaatgcttgattaagt

SEQ ID NO: 719489 - DNA, 19 bp, Mus musculus
  siRNA target sequence for 1300019C06Rik (NM_025832.2,2181-2199).
gaatgcttgattaagtttt

SEQ ID NO: 719490 - DNA, 19 bp, Mus musculus
  siRNA target sequence for 1300019C06Rik (NM_025832.2,2200-2218).
ctaaatctgtctctaatca

SEQ ID NO: 719491 - DNA, 19 bp, Mus musculus
  siRNA target sequence for 1300019C06Rik (NM_025832.2,2210-2228).
ctctaatcacagtaatctt

SEQ ID NO: 719492 - DNA, 19 bp, Mus musculus
  siRNA target sequence for 1300019C06Rik (NM_025832.2,2234-2252).
cattgtgagcaaagttcta

SEQ ID NO: 719493 - DNA, 19 bp, Mus musculus
  siRNA target sequence for 1300019C06Rik (NM_025832.2,2343-2361).
ctacttgcaggtgctaaaa

SEQ ID NO: 719494 - DNA, 19 bp, Mus musculus
  siRNA target sequence for 1300019C06Rik (NM_025832.2,2346-2364).
cttgcaggtgctaaaatga

SEQ ID NO: 719495 - DNA, 19 bp, Mus musculus
  siRNA target sequence for 1300019C06Rik (NM_025832.2,2352-2370).
ggtgctaaaatgatgtatt

SEQ ID NO: 719496 - DNA, 19 bp, Mus musculus
  siRNA target sequence for 1300019C06Rik (NM_025832.2,2411-2429).
cactaggttggatgaaact

SEQ ID NO: 719497 - DNA, 19 bp, Mus musculus
  siRNA target sequence for 1300019C06Rik (NM_025832.2,2413-2431).
ctaggttggatgaaactat

SEQ ID NO: 719498 - DNA, 19 bp, Mus musculus
  siRNA target sequence for 1300019C06Rik (NM_025832.2,2416-2434).
ggttggatgaaactataaa

SEQ ID NO: 719499 - DNA, 19 bp, Mus musculus
  siRNA target sequence for 1300019C06Rik (NM_025832.2,2417-2435).
gttggatgaaactataaaa

SEQ ID NO: 719500 - DNA, 19 bp, Mus musculus
  siRNA target sequence for 1300019C06Rik (NM_025832.2,2498-2516).
ctgtagctcccaatatgaa

SEQ ID NO: 719501 - DNA, 19 bp, Mus musculus
  siRNA target sequence for 1300019C06Rik (NM_025832.2,2503-2521).
gctcccaatatgaagagta

SEQ ID NO: 719502 - DNA, 19 bp, Mus musculus
  siRNA target sequence for 1300019C06Rik (NM_025832.2,2619-2637).
gaccacaagctcttaatga

SEQ ID NO: 719503 - DNA, 19 bp, Mus musculus
  siRNA target sequence for 1300019C06Rik (NM_025832.2,2627-2645).
gctcttaatgaatgaaatt

SEQ ID NO: 719504 - DNA, 19 bp, Mus musculus
  siRNA target sequence for 1300006M19Rik (NM_025833.2,344-362).
ccctggactacggaactta

SEQ ID NO: 719505 - DNA, 19 bp, Mus musculus
  siRNA target sequence for 1300006M19Rik (NM_025833.2,346-364).
ctggactacggaacttaat

SEQ ID NO: 719506 - DNA, 19 bp, Mus musculus
  siRNA target sequence for 1300006M19Rik (NM_025833.2,368-386).
cctaggaaaaaattatgaa

SEQ ID NO: 719507 - DNA, 19 bp, Mus musculus
  siRNA target sequence for 1300006M19Rik (NM_025833.2,384-402).
gaaaaagcggtgaatgcta

SEQ ID NO: 719508 - DNA, 19 bp, Mus musculus
  siRNA target sequence for 1300006M19Rik (NM_025833.2,514-532).
cccacaagaaactcaatga

SEQ ID NO: 719509 - DNA, 19 bp, Mus musculus
  siRNA target sequence for 1300006M19Rik (NM_025833.2,617-635).
gaacgctactcttaaaaga

SEQ ID NO: 719510 - DNA, 19 bp, Mus musculus
  siRNA target sequence for 1300006M19Rik (NM_025833.2,647-665).
gcacaggaataaattagat

SEQ ID NO: 719511 - DNA, 19 bp, Mus musculus
  siRNA target sequence for 1300006M19Rik (NM_025833.2,724-742).
gaaacgcactcaaatacga

SEQ ID NO: 719512 - DNA, 19 bp, Mus musculus
  siRNA target sequence for 1300006M19Rik (NM_025833.2,734-752).
caaatacgagcacaaagaa

SEQ ID NO: 719513 - DNA, 19 bp, Mus musculus
  siRNA target sequence for 1300006M19Rik (NM_025833.2,825-843).
gccctgcttgaggaaaaaa

SEQ ID NO: 719514 - DNA, 19 bp, Mus musculus
  siRNA target sequence for 1300006M19Rik (NM_025833.2,877-895).
gctttgccagtcacataca

SEQ ID NO: 719515 - DNA, 19 bp, Mus musculus
  siRNA target sequence for 1300006M19Rik (NM_025833.2,883-901).
ccagtcacatacactacta

SEQ ID NO: 719516 - DNA, 19 bp, Mus musculus
  siRNA target sequence for 1300006M19Rik (NM_025833.2,884-902).
cagtcacatacactactat

SEQ ID NO: 719517 - DNA, 19 bp, Mus musculus
  siRNA target sequence for 1300006M19Rik (NM_025833.2,886-904).
gtcacatacactactatca

SEQ ID NO: 719518 - DNA, 19 bp, Mus musculus
  siRNA target sequence for 1300006M19Rik (NM_025833.2,916-934).
cagagttacttaattccaa

SEQ ID NO: 719519 - DNA, 19 bp, Mus musculus
  siRNA target sequence for 1300006M19Rik (NM_025833.2,1089-1107).
gattatgacaccctttcta

SEQ ID NO: 719520 - DNA, 19 bp, Mus musculus
  siRNA target sequence for 1300006M19Rik (NM_025833.2,1147-1165).
cctacaccagtcctttgat

SEQ ID NO: 719521 - DNA, 19 bp, Mus musculus
  siRNA target sequence for 1300006M19Rik (NM_025833.2,1148-1166).
ctacaccagtcctttgatt

SEQ ID NO: 719522 - DNA, 19 bp, Mus musculus
  siRNA target sequence for 1300006M19Rik (NM_025833.2,1153-1171).
ccagtcctttgattgacat

SEQ ID NO: 719523 - DNA, 19 bp, Mus musculus
  siRNA target sequence for 1300006M19Rik (NM_025833.2,1156-1174).
gtcctttgattgacatgtt

SEQ ID NO: 719524 - DNA, 19 bp, Mus musculus
  siRNA target sequence for 1300006M19Rik (NM_025833.2,1323-1341).
cacacggctggcaacaata

SEQ ID NO: 719525 - DNA, 19 bp, Mus musculus
  siRNA target sequence for 1300006M19Rik (NM_025833.2,1445-1463).
ctggttcccatcgtcatat

SEQ ID NO: 719526 - DNA, 19 bp, Mus musculus
  siRNA target sequence for 1300006M19Rik (NM_025833.2,1448-1466).
gttcccatcgtcatataca

SEQ ID NO: 719527 - DNA, 19 bp, Mus musculus
  siRNA target sequence for 1300006M19Rik (NM_025833.2,1606-1624).
gagccacctcagacaagaa

SEQ ID NO: 719528 - DNA, 19 bp, Mus musculus
  siRNA target sequence for 1300006M19Rik (NM_025833.2,1772-1790).
ccggccaacagtgacaaat

SEQ ID NO: 719529 - DNA, 19 bp, Mus musculus
  siRNA target sequence for 1300006M19Rik (NM_025833.2,1774-1792).
ggccaacagtgacaaatga

SEQ ID NO: 719530 - DNA, 19 bp, Mus musculus
  siRNA target sequence for 1300012C15Rik (NM_025836.1,79-97).
gtctagcaatggtacagat

SEQ ID NO: 719531 - DNA, 19 bp, Mus musculus
  siRNA target sequence for 1300012C15Rik (NM_025836.1,410-428).
cagccgactgagaaggttt

SEQ ID NO: 719532 - DNA, 19 bp, Mus musculus
  siRNA target sequence for 1300012C15Rik (NM_025836.1,494-512).
gtgtctagtgcgaaggaaa

SEQ ID NO: 719533 - DNA, 19 bp, Mus musculus
  siRNA target sequence for 1300012C15Rik (NM_025836.1,597-615).
ccagcggtgtccaatcagt

SEQ ID NO: 719534 - DNA, 19 bp, Mus musculus
  siRNA target sequence for 1300012C15Rik (NM_025836.1,656-674).
gacagagtgcttgtgaaat

SEQ ID NO: 719535 - DNA, 19 bp, Mus musculus
  siRNA target sequence for 1300012C15Rik (NM_025836.1,712-730).
ggcggagctagctctgatt

SEQ ID NO: 719536 - DNA, 19 bp, Mus musculus
  siRNA target sequence for 1300012C15Rik (NM_025836.1,776-794).
cgacaggagcagaactact

SEQ ID NO: 719537 - DNA, 19 bp, Mus musculus
  siRNA target sequence for 1300012C15Rik (NM_025836.1,826-844).
gcgcaatcacgcctatgaa

SEQ ID NO: 719538 - DNA, 19 bp, Mus musculus
  siRNA target sequence for 1300012C15Rik (NM_025836.1,1348-1366).
cttcgctcctggaatcaca

SEQ ID NO: 719539 - DNA, 19 bp, Mus musculus
  siRNA target sequence for 1110004B13Rik (NM_025838.1,184-202).
ctcatctggtggttgtcat

SEQ ID NO: 719540 - DNA, 19 bp, Mus musculus
  siRNA target sequence for 1110004B13Rik (NM_025838.1,259-277).
ccccggaggaatacgaaaa

SEQ ID NO: 719541 - DNA, 19 bp, Mus musculus
  siRNA target sequence for 1110004B13Rik (NM_025838.1,354-372).
ggagtctccatgttcaata

SEQ ID NO: 719542 - DNA, 19 bp, Mus musculus
  siRNA target sequence for 1110004B13Rik (NM_025838.1,457-475).
ccacgtactggtacatttt

SEQ ID NO: 719543 - DNA, 19 bp, Mus musculus
  siRNA target sequence for 1110004B13Rik (NM_025838.1,458-476).
cacgtactggtacattttt

SEQ ID NO: 719544 - DNA, 19 bp, Mus musculus
  siRNA target sequence for 1110001K21Rik (NM_025839.1,45-63).
cggttccggagctgaaaca

SEQ ID NO: 719545 - DNA, 19 bp, Mus musculus
  siRNA target sequence for 1110001K21Rik (NM_025839.1,250-268).
gctggaggatggcttgaat

SEQ ID NO: 719546 - DNA, 19 bp, Mus musculus
  siRNA target sequence for 1110001K21Rik (NM_025839.1,300-318).
gccttaccgaagctgatta

SEQ ID NO: 719547 - DNA, 19 bp, Mus musculus
  siRNA target sequence for 1110001K21Rik (NM_025839.1,488-506).
cgagtaggcggctttccta

SEQ ID NO: 719548 - DNA, 19 bp, Mus musculus
  siRNA target sequence for 1110001K21Rik (NM_025839.1,495-513).
gcggctttcctaactttct

SEQ ID NO: 719549 - DNA, 19 bp, Mus musculus
  siRNA target sequence for 1110001K21Rik (NM_025839.1,532-550).
cactgccaaatatcaactt

SEQ ID NO: 719550 - DNA, 19 bp, Mus musculus
  siRNA target sequence for 1110001K21Rik (NM_025839.1,558-576).
cccttaaggtactcaacat

SEQ ID NO: 719551 - DNA, 19 bp, Mus musculus
  siRNA target sequence for Vps28 (NM_025842.1,142-160).
gaagtaaagctctacaaga

SEQ ID NO: 719552 - DNA, 19 bp, Mus musculus
  siRNA target sequence for Vps28 (NM_025842.1,167-185).
gggagcgggagaagtatga

SEQ ID NO: 719553 - DNA, 19 bp, Mus musculus
  siRNA target sequence for Vps28 (NM_025842.1,355-373).
gaattttgccgaaagttca

SEQ ID NO: 719554 - DNA, 19 bp, Mus musculus
  siRNA target sequence for Vps28 (NM_025842.1,433-451).
gacgacaagggcaatctca

SEQ ID NO: 719555 - DNA, 19 bp, Mus musculus
  siRNA target sequence for Vps28 (NM_025842.1,469-487).
gttgtttcgctcttcatta

SEQ ID NO: 719556 - DNA, 19 bp, Mus musculus
  siRNA target sequence for Vps28 (NM_025842.1,704-722).
ccgcttacaacgcctttaa

SEQ ID NO: 719557 - DNA, 19 bp, Mus musculus
  siRNA target sequence for Ndufb7 (NM_025843.1,110-128).
gcctgaccccgagaagata

SEQ ID NO: 719558 - DNA, 19 bp, Mus musculus
  siRNA target sequence for Ndufb7 (NM_025843.1,176-194).
gatggtggccacacaacaa

SEQ ID NO: 719559 - DNA, 19 bp, Mus musculus
  siRNA target sequence for Chordc1 (NM_025844.1,245-263).
gggttggtcttgctgtaaa

SEQ ID NO: 719560 - DNA, 19 bp, Mus musculus
  siRNA target sequence for Chordc1 (NM_025844.1,295-313).
gcattgtaggctgtacaaa

SEQ ID NO: 719561 - DNA, 19 bp, Mus musculus
  siRNA target sequence for Chordc1 (NM_025844.1,296-314).
cattgtaggctgtacaaaa

SEQ ID NO: 719562 - DNA, 19 bp, Mus musculus
  siRNA target sequence for Chordc1 (NM_025844.1,300-318).
gtaggctgtacaaaaggta

SEQ ID NO: 719563 - DNA, 19 bp, Mus musculus
  siRNA target sequence for Chordc1 (NM_025844.1,430-448).
ctaagccagtagaagcaat

SEQ ID NO: 719564 - DNA, 19 bp, Mus musculus
  siRNA target sequence for Chordc1 (NM_025844.1,519-537).
cttgataaacttaaactgt

SEQ ID NO: 719565 - DNA, 19 bp, Mus musculus
  siRNA target sequence for Chordc1 (NM_025844.1,587-605).
gattgggacttcctgtaaa

SEQ ID NO: 719566 - DNA, 19 bp, Mus musculus
  siRNA target sequence for Chordc1 (NM_025844.1,610-628).
gagggtgttcaaagacata

SEQ ID NO: 719567 - DNA, 19 bp, Mus musculus
  siRNA target sequence for Chordc1 (NM_025844.1,645-663).
ctagaagaagtctgtgtat

SEQ ID NO: 719568 - DNA, 19 bp, Mus musculus
  siRNA target sequence for Chordc1 (NM_025844.1,686-704).
ccacgaggggatgaaatat

SEQ ID NO: 719569 - DNA, 19 bp, Mus musculus
  siRNA target sequence for Chordc1 (NM_025844.1,687-705).
cacgaggggatgaaatatt

SEQ ID NO: 719570 - DNA, 19 bp, Mus musculus
  siRNA target sequence for Chordc1 (NM_025844.1,776-794).
gcatgtatggactaaaaaa

SEQ ID NO: 719571 - DNA, 19 bp, Mus musculus
  siRNA target sequence for Chordc1 (NM_025844.1,837-855).
cagactgggggtgaagtta

SEQ ID NO: 719572 - DNA, 19 bp, Mus musculus
  siRNA target sequence for Chordc1 (NM_025844.1,856-874).
ccatctcagtgtatgctaa

SEQ ID NO: 719573 - DNA, 19 bp, Mus musculus
  siRNA target sequence for Chordc1 (NM_025844.1,884-902).
gccagaactcagtcaagta

SEQ ID NO: 719574 - DNA, 19 bp, Mus musculus
  siRNA target sequence for Chordc1 (NM_025844.1,886-904).
cagaactcagtcaagtaga

SEQ ID NO: 719575 - DNA, 19 bp, Mus musculus
  siRNA target sequence for Chordc1 (NM_025844.1,900-918).
gtagaagccaacagtactt

SEQ ID NO: 719576 - DNA, 19 bp, Mus musculus
  siRNA target sequence for Chordc1 (NM_025844.1,903-921).
gaagccaacagtactttgt

SEQ ID NO: 719577 - DNA, 19 bp, Mus musculus
  siRNA target sequence for Chordc1 (NM_025844.1,908-926).
caacagtactttgttaaat

SEQ ID NO: 719578 - DNA, 19 bp, Mus musculus
  siRNA target sequence for Chordc1 (NM_025844.1,954-972).
gaatttcatcaaaatgtga

SEQ ID NO: 719579 - DNA, 19 bp, Mus musculus
  siRNA target sequence for Chordc1 (NM_025844.1,960-978).
catcaaaatgtgaaactgt

SEQ ID NO: 719580 - DNA, 19 bp, Mus musculus
  siRNA target sequence for Chordc1 (NM_025844.1,971-989).
gaaactgtggggtgtaatt

SEQ ID NO: 719581 - DNA, 19 bp, Mus musculus
  siRNA target sequence for Chordc1 (NM_025844.1,984-1002).
gtaattgatgttaaacgaa

SEQ ID NO: 719582 - DNA, 19 bp, Mus musculus
  siRNA target sequence for Chordc1 (NM_025844.1,993-1011).
gttaaacgaagttatgtaa

SEQ ID NO: 719583 - DNA, 19 bp, Mus musculus
  siRNA target sequence for Chordc1 (NM_025844.1,999-1017).
cgaagttatgtaactatga

SEQ ID NO: 719584 - DNA, 19 bp, Mus musculus
  siRNA target sequence for Chordc1 (NM_025844.1,1012-1030).
ctatgactgcaacaaagat

SEQ ID NO: 719585 - DNA, 19 bp, Mus musculus
  siRNA target sequence for Chordc1 (NM_025844.1,1024-1042).
caaagattgagatcactat

SEQ ID NO: 719586 - DNA, 19 bp, Mus musculus
  siRNA target sequence for Chordc1 (NM_025844.1,1028-1046).
gattgagatcactatgaga

SEQ ID NO: 719587 - DNA, 19 bp, Mus musculus
  siRNA target sequence for Chordc1 (NM_025844.1,1064-1082).
gtgggcaagtcttgaacta

SEQ ID NO: 719588 - DNA, 19 bp, Mus musculus
  siRNA target sequence for 1110021E09Rik (NM_025845.1,464-482).
ctgtcgtcgccttacttca

SEQ ID NO: 719589 - DNA, 19 bp, Mus musculus
  siRNA target sequence for 1110021E09Rik (NM_025845.1,466-484).
gtcgtcgccttacttcaaa

SEQ ID NO: 719590 - DNA, 19 bp, Mus musculus
  siRNA target sequence for 1110021E09Rik (NM_025845.1,468-486).
cgtcgccttacttcaaagt

SEQ ID NO: 719591 - DNA, 19 bp, Mus musculus
  siRNA target sequence for 1110021E09Rik (NM_025845.1,520-538).
ggtggacgagatctacttt

SEQ ID NO: 719592 - DNA, 19 bp, Mus musculus
  siRNA target sequence for 1110021E09Rik (NM_025845.1,521-539).
gtggacgagatctacttta

SEQ ID NO: 719593 - DNA, 19 bp, Mus musculus
  siRNA target sequence for 1110021E09Rik (NM_025845.1,623-641).
ggaacaggaggcattgttt

SEQ ID NO: 719594 - DNA, 19 bp, Mus musculus
  siRNA target sequence for 1110021E09Rik (NM_025845.1,679-697).
gaagttaactcgaaagcaa

SEQ ID NO: 719595 - DNA, 19 bp, Mus musculus
  siRNA target sequence for 1110021E09Rik (NM_025845.1,695-713).
caagtgatgggtctcataa

SEQ ID NO: 719596 - DNA, 19 bp, Mus musculus
  siRNA target sequence for 1110021E09Rik (NM_025845.1,700-718).
gatgggtctcataacacat

SEQ ID NO: 719597 - DNA, 19 bp, Mus musculus
  siRNA target sequence for 1110021E09Rik (NM_025845.1,716-734).
catacagactctccatata

SEQ ID NO: 719598 - DNA, 19 bp, Mus musculus
  siRNA target sequence for 1110021E09Rik (NM_025845.1,738-756).
gagcccttggatttatgta

SEQ ID NO: 719599 - DNA, 19 bp, Mus musculus
  siRNA target sequence for 1110021E09Rik (NM_025845.1,746-764).
ggatttatgtatataaggt

SEQ ID NO: 719600 - DNA, 19 bp, Mus musculus
  siRNA target sequence for 1110021E09Rik (NM_025845.1,747-765).
gatttatgtatataaggta

SEQ ID NO: 719601 - DNA, 19 bp, Mus musculus
  siRNA target sequence for 1110021E09Rik (NM_025845.1,785-803).
ctgtgggactggtttgagt

SEQ ID NO: 719602 - DNA, 19 bp, Mus musculus
  siRNA target sequence for 1110021E09Rik (NM_025845.1,820-838).
ggaggacctagatgtcaaa

SEQ ID NO: 719603 - DNA, 19 bp, Mus musculus
  siRNA target sequence for 1110021E09Rik (NM_025845.1,949-967).
cattgatcagcagattaaa

SEQ ID NO: 719604 - DNA, 19 bp, Mus musculus
  siRNA target sequence for 1110021E09Rik (NM_025845.1,969-987).
ctcgacctaggaaaatcaa

SEQ ID NO: 719605 - DNA, 19 bp, Mus musculus
  siRNA target sequence for 1110021E09Rik (NM_025845.1,1012-1030).
ggagatagacagacatgtt

SEQ ID NO: 719606 - DNA, 19 bp, Mus musculus
  siRNA target sequence for 1110021E09Rik (NM_025845.1,1210-1228).
gcgaagatcccgaagcatt

SEQ ID NO: 719607 - DNA, 19 bp, Mus musculus
  siRNA target sequence for 1110021E09Rik (NM_025845.1,1225-1243).
cattgatcggggcttagat

SEQ ID NO: 719608 - DNA, 19 bp, Mus musculus
  siRNA target sequence for 1110021E09Rik (NM_025845.1,1284-1302).
gtcgcagtcgtgataggaa

SEQ ID NO: 719609 - DNA, 19 bp, Mus musculus
  siRNA target sequence for 1110021E09Rik (NM_025845.1,1356-1374).
gaagacgagaccgagatta

SEQ ID NO: 719610 - DNA, 19 bp, Mus musculus
  siRNA target sequence for 1110021E09Rik (NM_025845.1,1359-1377).
gacgagaccgagattatga

SEQ ID NO: 719611 - DNA, 19 bp, Mus musculus
  siRNA target sequence for 1110021E09Rik (NM_025845.1,1361-1379).
cgagaccgagattatgaca

SEQ ID NO: 719612 - DNA, 19 bp, Mus musculus
  siRNA target sequence for 1110021E09Rik (NM_025845.1,1613-1631).
gacaagtcaagcagacata

SEQ ID NO: 719613 - DNA, 19 bp, Mus musculus
  siRNA target sequence for 1110021E09Rik (NM_025845.1,1615-1633).
caagtcaagcagacataaa

SEQ ID NO: 719614 - DNA, 19 bp, Mus musculus
  siRNA target sequence for 1110021E09Rik (NM_025845.1,1770-1788).
cccacaagagagagcataa

SEQ ID NO: 719615 - DNA, 19 bp, Mus musculus
  siRNA target sequence for 1110021E09Rik (NM_025845.1,1774-1792).
caagagagagcataatgat

SEQ ID NO: 719616 - DNA, 19 bp, Mus musculus
  siRNA target sequence for Sdhd (NM_025848.1,112-130).
cgcttatgtgtcagcattt

SEQ ID NO: 719617 - DNA, 19 bp, Mus musculus
  siRNA target sequence for Sdhd (NM_025848.1,114-132).
cttatgtgtcagcatttct

SEQ ID NO: 719618 - DNA, 19 bp, Mus musculus
  siRNA target sequence for 3110001D03Rik (NM_025849.2,174-192).
cgggaccctgagttaaaaa

SEQ ID NO: 719619 - DNA, 19 bp, Mus musculus
  siRNA target sequence for 3110001D03Rik (NM_025849.2,177-195).
gaccctgagttaaaaacct

SEQ ID NO: 719620 - DNA, 19 bp, Mus musculus
  siRNA target sequence for 3110001D03Rik (NM_025849.2,241-259).
gcacctacgtctatttggt

SEQ ID NO: 719621 - DNA, 19 bp, Mus musculus
  siRNA target sequence for 3110001D03Rik (NM_025849.2,317-335).
ggtcatcggcatcagtatt

SEQ ID NO: 719622 - DNA, 19 bp, Mus musculus
  siRNA target sequence for 3110001D03Rik (NM_025849.2,374-392).
gaagagccacccagttatt

SEQ ID NO: 719623 - DNA, 19 bp, Mus musculus
  siRNA target sequence for 1700007B22Rik (NM_025850.2,129-147).
ctcatcacagcatcgaatt

SEQ ID NO: 719624 - DNA, 19 bp, Mus musculus
  siRNA target sequence for 1700007B22Rik (NM_025850.2,131-149).
catcacagcatcgaattgt

SEQ ID NO: 719625 - DNA, 19 bp, Mus musculus
  siRNA target sequence for 1700007B22Rik (NM_025850.2,134-152).
cacagcatcgaattgtact

SEQ ID NO: 719626 - DNA, 19 bp, Mus musculus
  siRNA target sequence for 1700007B22Rik (NM_025850.2,236-254).
cacagctacggtgtcattt

SEQ ID NO: 719627 - DNA, 19 bp, Mus musculus
  siRNA target sequence for 1700007B22Rik (NM_025850.2,293-311).
gaaccaaggacactataca

SEQ ID NO: 719628 - DNA, 19 bp, Mus musculus
  siRNA target sequence for 1700007B22Rik (NM_025850.2,301-319).
gacactatacaaatttcga

SEQ ID NO: 719629 - DNA, 19 bp, Mus musculus
  siRNA target sequence for 1700007B22Rik (NM_025850.2,336-354).
cctctggagaatatgagta

SEQ ID NO: 719630 - DNA, 19 bp, Mus musculus
  siRNA target sequence for 1700007B22Rik (NM_025850.2,379-397).
gacccgggagcccataagt

SEQ ID NO: 719631 - DNA, 19 bp, Mus musculus
  siRNA target sequence for 1700007B22Rik (NM_025850.2,390-408).
ccataagtagcgaacactt

SEQ ID NO: 719632 - DNA, 19 bp, Mus musculus
  siRNA target sequence for 1700007B22Rik (NM_025850.2,391-409).
cataagtagcgaacacttt

SEQ ID NO: 719633 - DNA, 19 bp, Mus musculus
  siRNA target sequence for 1700007B22Rik (NM_025850.2,423-441).
gtgtgaacgatgaagatct

SEQ ID NO: 719634 - DNA, 19 bp, Mus musculus
  siRNA target sequence for 1700007B22Rik (NM_025850.2,437-455).
gatctcctgcttcgaattt

SEQ ID NO: 719635 - DNA, 19 bp, Mus musculus
  siRNA target sequence for 1700007B22Rik (NM_025850.2,531-549).
gttacaccaggcttgtgaa

SEQ ID NO: 719636 - DNA, 19 bp, Mus musculus
  siRNA target sequence for 1700007B22Rik (NM_025850.2,547-565).
gaagatcctagtttccaat

SEQ ID NO: 719637 - DNA, 19 bp, Mus musculus
  siRNA target sequence for 1700007B22Rik (NM_025850.2,630-648).
ggcacctagatgttgtcaa

SEQ ID NO: 719638 - DNA, 19 bp, Mus musculus
  siRNA target sequence for 1700007B22Rik (NM_025850.2,631-649).
gcacctagatgttgtcaaa

SEQ ID NO: 719639 - DNA, 19 bp, Mus musculus
  siRNA target sequence for 1700007B22Rik (NM_025850.2,632-650).
cacctagatgttgtcaaat

SEQ ID NO: 719640 - DNA, 19 bp, Mus musculus
  siRNA target sequence for 1700007B22Rik (NM_025850.2,763-781).
cggttgtgaggtagatgtt

SEQ ID NO: 719641 - DNA, 19 bp, Mus musculus
  siRNA target sequence for 1700007B22Rik (NM_025850.2,869-887).
ggggctgacgtgaacatca

SEQ ID NO: 719642 - DNA, 19 bp, Mus musculus
  siRNA target sequence for 1700007B22Rik (NM_025850.2,870-888).
gggctgacgtgaacatcaa

SEQ ID NO: 719643 - DNA, 19 bp, Mus musculus
  siRNA target sequence for 1700007B22Rik (NM_025850.2,911-929).
ctcatggtcgctgtcttaa

SEQ ID NO: 719644 - DNA, 19 bp, Mus musculus
  siRNA target sequence for 1700007B22Rik (NM_025850.2,916-934).
ggtcgctgtcttaaataat

SEQ ID NO: 719645 - DNA, 19 bp, Mus musculus
  siRNA target sequence for 1700007B22Rik (NM_025850.2,1010-1028).
ctagaaatggccagagttt

SEQ ID NO: 719646 - DNA, 19 bp, Mus musculus
  siRNA target sequence for 1700010I14Rik (NM_025851.1,60-78).
gaacctgacttttacctaa

SEQ ID NO: 719647 - DNA, 19 bp, Mus musculus
  siRNA target sequence for 1700010I14Rik (NM_025851.1,63-81).
cctgacttttacctaaagt

SEQ ID NO: 719648 - DNA, 19 bp, Mus musculus
  siRNA target sequence for 1700010I14Rik (NM_025851.1,95-113).
gaaaccgggtgttaagact

SEQ ID NO: 719649 - DNA, 19 bp, Mus musculus
  siRNA target sequence for 1700010I14Rik (NM_025851.1,99-117).
ccgggtgttaagactctaa

SEQ ID NO: 719650 - DNA, 19 bp, Mus musculus
  siRNA target sequence for 1700010I14Rik (NM_025851.1,103-121).
gtgttaagactctaagcaa

SEQ ID NO: 719651 - DNA, 19 bp, Mus musculus
  siRNA target sequence for 1700010I14Rik (NM_025851.1,217-235).
cacctgagaccattttcca

SEQ ID NO: 719652 - DNA, 19 bp, Mus musculus
  siRNA target sequence for 1700010I14Rik (NM_025851.1,234-252).
cagcactggcgcaattcca

SEQ ID NO: 719653 - DNA, 19 bp, Mus musculus
  siRNA target sequence for 1700010I14Rik (NM_025851.1,332-350).
ggacgcttgggttcacttt

SEQ ID NO: 719654 - DNA, 19 bp, Mus musculus
  siRNA target sequence for 1700010I14Rik (NM_025851.1,333-351).
gacgcttgggttcacttta

SEQ ID NO: 719655 - DNA, 19 bp, Mus musculus
  siRNA target sequence for 1700010I14Rik (NM_025851.1,337-355).
cttgggttcactttacagt

SEQ ID NO: 719656 - DNA, 19 bp, Mus musculus
  siRNA target sequence for 1700010I14Rik (NM_025851.1,425-443).
ggcctcccgtgctctcaaa

SEQ ID NO: 719657 - DNA, 19 bp, Mus musculus
  siRNA target sequence for 1700010I14Rik (NM_025851.1,427-445).
cctcccgtgctctcaaaga

SEQ ID NO: 719658 - DNA, 19 bp, Mus musculus
  siRNA target sequence for 1700010I14Rik (NM_025851.1,428-446).
ctcccgtgctctcaaagat

SEQ ID NO: 719659 - DNA, 19 bp, Mus musculus
  siRNA target sequence for 1700010I14Rik (NM_025851.1,488-506).
ggaaagacttgcattttct

SEQ ID NO: 719660 - DNA, 19 bp, Mus musculus
  siRNA target sequence for 1700010I14Rik (NM_025851.1,610-628).
gggatgtgtaccgttacat

SEQ ID NO: 719661 - DNA, 19 bp, Mus musculus
  siRNA target sequence for 1700010I14Rik (NM_025851.1,612-630).
gatgtgtaccgttacatca

SEQ ID NO: 719662 - DNA, 19 bp, Mus musculus
  siRNA target sequence for 1700010I14Rik (NM_025851.1,633-651).
ccctacctagctggtataa

SEQ ID NO: 719663 - DNA, 19 bp, Mus musculus
  siRNA target sequence for 1700010I14Rik (NM_025851.1,658-676).
ccgacagctacaagaagtt

SEQ ID NO: 719664 - DNA, 19 bp, Mus musculus
  siRNA target sequence for 1700010I14Rik (NM_025851.1,671-689).
gaagttcctgagtttccaa

SEQ ID NO: 719665 - DNA, 19 bp, Mus musculus
  siRNA target sequence for 1700010I14Rik (NM_025851.1,799-817).
gcaaccctcagcagttcaa

SEQ ID NO: 719666 - DNA, 19 bp, Mus musculus
  siRNA target sequence for 1700010I14Rik (NM_025851.1,836-854).
ggaaatctttgaggatatt

SEQ ID NO: 719667 - DNA, 19 bp, Mus musculus
  siRNA target sequence for 1700010I14Rik (NM_025851.1,872-890).
ctttggggatctactgaaa

SEQ ID NO: 719668 - DNA, 19 bp, Mus musculus
  siRNA target sequence for 1700010I14Rik (NM_025851.1,876-894).
ggggatctactgaaagaga

SEQ ID NO: 719669 - DNA, 19 bp, Mus musculus
  siRNA target sequence for 1700010I14Rik (NM_025851.1,998-1016).
caggcccagctgtgacatt

SEQ ID NO: 719670 - DNA, 19 bp, Mus musculus
  siRNA target sequence for 1700010I14Rik (NM_025851.1,1043-1061).
ggtccagcaggcttatcta

SEQ ID NO: 719671 - DNA, 19 bp, Mus musculus
  siRNA target sequence for 1700010I14Rik (NM_025851.1,1118-1136).
gctgcagtctgctaaggaa

SEQ ID NO: 719672 - DNA, 19 bp, Mus musculus
  siRNA target sequence for 1700010I14Rik (NM_025851.1,1268-1286).
ggtgcactcgggagtattt

SEQ ID NO: 719673 - DNA, 19 bp, Mus musculus
  siRNA target sequence for 1700010I14Rik (NM_025851.1,1328-1346).
cataaagttggaaacatca

SEQ ID NO: 719674 - DNA, 19 bp, Mus musculus
  siRNA target sequence for 1700010I14Rik (NM_025851.1,1338-1356).
gaaacatcaaacagaatct

SEQ ID NO: 719675 - DNA, 19 bp, Mus musculus
  siRNA target sequence for 1700010I14Rik (NM_025851.1,1427-1445).
ggaaaggcaacgaacatct

SEQ ID NO: 719676 - DNA, 19 bp, Mus musculus
  siRNA target sequence for 1700010I14Rik (NM_025851.1,1511-1529).
ccatcctcggcttgttgat

SEQ ID NO: 719677 - DNA, 19 bp, Mus musculus
  siRNA target sequence for 1700010I14Rik (NM_025851.1,1547-1565).
gactccttccactttatat

SEQ ID NO: 719678 - DNA, 19 bp, Mus musculus
  siRNA target sequence for 1700021P10Rik (NM_025852.2,775-793).
cttcaacagatctagagta

SEQ ID NO: 719679 - DNA, 19 bp, Mus musculus
  siRNA target sequence for 1700021P10Rik (NM_025852.2,795-813).
gacccactgtccaactact

SEQ ID NO: 719680 - DNA, 19 bp, Mus musculus
  siRNA target sequence for 1700021P10Rik (NM_025852.2,881-899).
gggtgctgagccatacact

SEQ ID NO: 719681 - DNA, 19 bp, Mus musculus
  siRNA target sequence for 1700021P10Rik (NM_025852.2,1207-1225).
gggtccccaaggaaggtaa

SEQ ID NO: 719682 - DNA, 19 bp, Mus musculus
  siRNA target sequence for 1700021P10Rik (NM_025852.2,1277-1295).
ggttcgcaagaaagacaaa

SEQ ID NO: 719683 - DNA, 19 bp, Mus musculus
  siRNA target sequence for 1700021P10Rik (NM_025852.2,1338-1356).
gtgtgtacggacaagaaga

SEQ ID NO: 719684 - DNA, 19 bp, Mus musculus
  siRNA target sequence for 1700021P10Rik (NM_025852.2,1607-1625).
cacccctaagctcaagaaa

SEQ ID NO: 719685 - DNA, 19 bp, Mus musculus
  siRNA target sequence for 1700021P10Rik (NM_025852.2,1631-1649).
cctgagccatgctgaacta

SEQ ID NO: 719686 - DNA, 19 bp, Mus musculus
  siRNA target sequence for 1700021P10Rik (NM_025852.2,1634-1652).
gagccatgctgaactattt

SEQ ID NO: 719687 - DNA, 19 bp, Mus musculus
  siRNA target sequence for 1700021P10Rik (NM_025852.2,1728-1746).
cttagctcagactcagaat

SEQ ID NO: 719688 - DNA, 19 bp, Mus musculus
  siRNA target sequence for 1700021P10Rik (NM_025852.2,2406-2424).
ctgaagacacgcacattgt

SEQ ID NO: 719689 - DNA, 19 bp, Mus musculus
  siRNA target sequence for 1700021P10Rik (NM_025852.2,2408-2426).
gaagacacgcacattgtca

SEQ ID NO: 719690 - DNA, 19 bp, Mus musculus
  siRNA target sequence for 1700021P10Rik (NM_025852.2,2547-2565).
gtccgccagcgctatctca

SEQ ID NO: 719691 - DNA, 19 bp, Mus musculus
  siRNA target sequence for 1700021P10Rik (NM_025852.2,2953-2971).
cagggggtgccatcatctt

SEQ ID NO: 719692 - DNA, 19 bp, Mus musculus
  siRNA target sequence for 1700021P10Rik (NM_025852.2,2955-2973).
gggggtgccatcatcttca

SEQ ID NO: 719693 - DNA, 19 bp, Mus musculus
  siRNA target sequence for 1700021P10Rik (NM_025852.2,2996-3014).
ggacccctcctgcagaatt

SEQ ID NO: 719694 - DNA, 19 bp, Mus musculus
  siRNA target sequence for 1700021P10Rik (NM_025852.2,2997-3015).
gacccctcctgcagaattt

SEQ ID NO: 719695 - DNA, 19 bp, Mus musculus
  siRNA target sequence for 1700021P10Rik (NM_025852.2,3066-3084).
cgcagtgaggagtgttact

SEQ ID NO: 719696 - DNA, 19 bp, Mus musculus
  siRNA target sequence for 1700021P10Rik (NM_025852.2,3296-3314).
gatgtcctacactacatat

SEQ ID NO: 719697 - DNA, 19 bp, Mus musculus
  siRNA target sequence for 1700021P10Rik (NM_025852.2,3363-3381).
gtgtatgacacctttgtca

SEQ ID NO: 719698 - DNA, 19 bp, Mus musculus
  siRNA target sequence for 1700021P10Rik (NM_025852.2,3655-3673).
gacagatcatccaagacaa

SEQ ID NO: 719699 - DNA, 19 bp, Mus musculus
  siRNA target sequence for 1700022L09Rik (NM_025853.1,339-357).
cccctcaagaacagtctat

SEQ ID NO: 719700 - DNA, 19 bp, Mus musculus
  siRNA target sequence for 1700022L09Rik (NM_025853.1,385-403).
gagacgagcaagcatgaaa

SEQ ID NO: 719701 - DNA, 19 bp, Mus musculus
  siRNA target sequence for 1700022L09Rik (NM_025853.1,387-405).
gacgagcaagcatgaaaga

SEQ ID NO: 719702 - DNA, 19 bp, Mus musculus
  siRNA target sequence for 1700022L09Rik (NM_025853.1,462-480).
ggtccatcagtgtgaagtt

SEQ ID NO: 719703 - DNA, 19 bp, Mus musculus
  siRNA target sequence for 1700022L09Rik (NM_025853.1,726-744).
ctgaggtgaaagaatatat

SEQ ID NO: 719704 - DNA, 19 bp, Mus musculus
  siRNA target sequence for 1700022L09Rik (NM_025853.1,730-748).
ggtgaaagaatatataaca

SEQ ID NO: 719705 - DNA, 19 bp, Mus musculus
  siRNA target sequence for 1700022L09Rik (NM_025853.1,731-749).
gtgaaagaatatataacaa

SEQ ID NO: 719706 - DNA, 19 bp, Mus musculus
  siRNA target sequence for 1700022L09Rik (NM_025853.1,771-789).
cctgggatcggctcttact

SEQ ID NO: 719707 - DNA, 19 bp, Mus musculus
  siRNA target sequence for 1700022L09Rik (NM_025853.1,823-841).
gcccagaggatcaactgaa

SEQ ID NO: 719708 - DNA, 19 bp, Mus musculus
  siRNA target sequence for 1700022L09Rik (NM_025853.1,824-842).
cccagaggatcaactgaaa

SEQ ID NO: 719709 - DNA, 19 bp, Mus musculus
  siRNA target sequence for 1700022L09Rik (NM_025853.1,930-948).
gaatagtacaagatcagaa

SEQ ID NO: 719710 - DNA, 19 bp, Mus musculus
  siRNA target sequence for 1700022L09Rik (NM_025853.1,959-977).
gcctacgtggagttagtga

SEQ ID NO: 719711 - DNA, 19 bp, Mus musculus
  siRNA target sequence for 1700022L09Rik (NM_025853.1,960-978).
cctacgtggagttagtgat

SEQ ID NO: 719712 - DNA, 19 bp, Mus musculus
  siRNA target sequence for 1700022L09Rik (NM_025853.1,1069-1087).
gagaagtatggaccaatta

SEQ ID NO: 719713 - DNA, 19 bp, Mus musculus
  siRNA target sequence for 1700022L09Rik (NM_025853.1,1071-1089).
gaagtatggaccaattaga

SEQ ID NO: 719714 - DNA, 19 bp, Mus musculus
  siRNA target sequence for 1700029G01Rik (NM_025856.1,127-145).
gacgagctgacgcttcaaa

SEQ ID NO: 719715 - DNA, 19 bp, Mus musculus
  siRNA target sequence for 1700029G01Rik (NM_025856.1,139-157).
cttcaaactggggagattt

SEQ ID NO: 719716 - DNA, 19 bp, Mus musculus
  siRNA target sequence for 1700029G01Rik (NM_025856.1,195-213).
ccgccaattaccccaaatt

SEQ ID NO: 719717 - DNA, 19 bp, Mus musculus
  siRNA target sequence for 1700029G01Rik (NM_025856.1,197-215).
gccaattaccccaaattca

SEQ ID NO: 719718 - DNA, 19 bp, Mus musculus
  siRNA target sequence for 1700029G01Rik (NM_025856.1,214-232).
cacagaggcctcctaagtt

SEQ ID NO: 719719 - DNA, 19 bp, Mus musculus
  siRNA target sequence for 1700029G01Rik (NM_025856.1,295-313).
gcagggtcctatttgacta

SEQ ID NO: 719720 - DNA, 19 bp, Mus musculus
  siRNA target sequence for 1700029G01Rik (NM_025856.1,350-368).
gggggacctggtgaaagtt

SEQ ID NO: 719721 - DNA, 19 bp, Mus musculus
  siRNA target sequence for 1700029G01Rik (NM_025856.1,352-370).
gggacctggtgaaagttct

SEQ ID NO: 719722 - DNA, 19 bp, Mus musculus
  siRNA target sequence for 1700029G01Rik (NM_025856.1,419-437).
cagaagaggagtttttcct

SEQ ID NO: 719723 - DNA, 19 bp, Mus musculus
  siRNA target sequence for 1700029G01Rik (NM_025856.1,473-491).
gctgatccctcggaaaatt

SEQ ID NO: 719724 - DNA, 19 bp, Mus musculus
  siRNA target sequence for 1700029G01Rik (NM_025856.1,474-492).
ctgatccctcggaaaatta

SEQ ID NO: 719725 - DNA, 19 bp, Mus musculus
  siRNA target sequence for 1700029G01Rik (NM_025856.1,476-494).
gatccctcggaaaattatt

SEQ ID NO: 719726 - DNA, 19 bp, Mus musculus
  siRNA target sequence for 1700029G01Rik (NM_025856.1,479-497).
ccctcggaaaattatttct

SEQ ID NO: 719727 - DNA, 19 bp, Mus musculus
  siRNA target sequence for 1700029G01Rik (NM_025856.1,498-516).
cgggaatcagctcctatta

SEQ ID NO: 719728 - DNA, 19 bp, Mus musculus
  siRNA target sequence for 1700029G01Rik (NM_025856.1,507-525).
gctcctattaaggaaacaa

SEQ ID NO: 719729 - DNA, 19 bp, Mus musculus
  siRNA target sequence for 1700029G01Rik (NM_025856.1,508-526).
ctcctattaaggaaacaaa

SEQ ID NO: 719730 - DNA, 19 bp, Mus musculus
  siRNA target sequence for 1700029G01Rik (NM_025856.1,547-565).
ctctacctactgtaaagaa

SEQ ID NO: 719731 - DNA, 19 bp, Mus musculus
  siRNA target sequence for 1700029G01Rik (NM_025856.1,814-832).
ctcgacttccagataaggt

SEQ ID NO: 719732 - DNA, 19 bp, Mus musculus
  siRNA target sequence for 1700029G01Rik (NM_025856.1,852-870).
ccggctcctgacaaagtct

SEQ ID NO: 719733 - DNA, 19 bp, Mus musculus
  siRNA target sequence for 1700029G01Rik (NM_025856.1,861-879).
gacaaagtctccattccaa

SEQ ID NO: 719734 - DNA, 19 bp, Mus musculus
  siRNA target sequence for 1700029G01Rik (NM_025856.1,877-895).
caaaggaccccgttccaaa

SEQ ID NO: 719735 - DNA, 19 bp, Mus musculus
  siRNA target sequence for 1700029G01Rik (NM_025856.1,881-899).
ggaccccgttccaaagaaa

SEQ ID NO: 719736 - DNA, 19 bp, Mus musculus
  siRNA target sequence for 1700029G01Rik (NM_025856.1,980-998).
gaataagccagctaaggat

SEQ ID NO: 719737 - DNA, 19 bp, Mus musculus
  siRNA target sequence for 1700029G01Rik (NM_025856.1,1038-1056).
gcccctgcattagtaaaga

SEQ ID NO: 719738 - DNA, 19 bp, Mus musculus
  siRNA target sequence for 1700029G01Rik (NM_025856.1,1039-1057).
cccctgcattagtaaagat

SEQ ID NO: 719739 - DNA, 19 bp, Mus musculus
  siRNA target sequence for 1700029G01Rik (NM_025856.1,1159-1177).
ctgcaccctcaaataacat

SEQ ID NO: 719740 - DNA, 19 bp, Mus musculus
  siRNA target sequence for 1700029G01Rik (NM_025856.1,1295-1313).
ggaggaggccaatttttta

SEQ ID NO: 719741 - DNA, 19 bp, Mus musculus
  siRNA target sequence for 1700029G01Rik (NM_025856.1,1316-1334).
ggagccactagccaaagat

SEQ ID NO: 719742 - DNA, 19 bp, Mus musculus
  siRNA target sequence for 1700029G01Rik (NM_025856.1,1332-1350).
gatgagaggaccctaaaca

SEQ ID NO: 719743 - DNA, 19 bp, Mus musculus
  siRNA target sequence for 1700029G01Rik (NM_025856.1,1538-1556).
gttggaatccttaaaggaa

SEQ ID NO: 719744 - DNA, 19 bp, Mus musculus
  siRNA target sequence for 1700029G01Rik (NM_025856.1,1554-1572).
gaagaggtggggttgctaa

SEQ ID NO: 719745 - DNA, 19 bp, Mus musculus
  siRNA target sequence for 1700029G01Rik (NM_025856.1,1557-1575).
gaggtggggttgctaagaa

SEQ ID NO: 719746 - DNA, 19 bp, Mus musculus
  siRNA target sequence for 1700029G01Rik (NM_025856.1,1657-1675).
cgccggaggttcagatgat

SEQ ID NO: 719747 - DNA, 19 bp, Mus musculus
  siRNA target sequence for 2310009N05Rik (NM_025861.1,704-722).
ccgttcataccccaataca

SEQ ID NO: 719748 - DNA, 19 bp, Mus musculus
  siRNA target sequence for 2310009N05Rik (NM_025861.1,727-745).
catccggacgactcagaat

SEQ ID NO: 719749 - DNA, 19 bp, Mus musculus
  siRNA target sequence for 2310009N05Rik (NM_025861.1,1102-1120).
catcgactcggctctgttt

SEQ ID NO: 719750 - DNA, 19 bp, Mus musculus
  siRNA target sequence for 2310009N05Rik (NM_025861.1,1175-1193).
cagctgtaccgaaactact

SEQ ID NO: 719751 - DNA, 19 bp, Mus musculus
  siRNA target sequence for 2310009N05Rik (NM_025861.1,1300-1318).
ctcagtctgcggtctacta

SEQ ID NO: 719752 - DNA, 19 bp, Mus musculus
  siRNA target sequence for 2310009N05Rik (NM_025861.1,1302-1320).
cagtctgcggtctactaca

SEQ ID NO: 719753 - DNA, 19 bp, Mus musculus
  siRNA target sequence for 2310028N02Rik (NM_025864.2,173-191).
ggagctggtccaagtacaa

SEQ ID NO: 719754 - DNA, 19 bp, Mus musculus
  siRNA target sequence for 2310028N02Rik (NM_025864.2,255-273).
gcttgcctgaagaatgtct

SEQ ID NO: 719755 - DNA, 19 bp, Mus musculus
  siRNA target sequence for 2310028N02Rik (NM_025864.2,373-391).
ctgtcatgtccgtgtctta

SEQ ID NO: 719756 - DNA, 19 bp, Mus musculus
  siRNA target sequence for 2310028N02Rik (NM_025864.2,375-393).
gtcatgtccgtgtcttaca

SEQ ID NO: 719757 - DNA, 19 bp, Mus musculus
  siRNA target sequence for 2310028N02Rik (NM_025864.2,457-475).
gctgtaagcaccactatga

SEQ ID NO: 719758 - DNA, 19 bp, Mus musculus
  siRNA target sequence for 2310028N02Rik (NM_025864.2,464-482).
gcaccactatgaggttatt

SEQ ID NO: 719759 - DNA, 19 bp, Mus musculus
  siRNA target sequence for 2310028N02Rik (NM_025864.2,467-485).
ccactatgaggttattcca

SEQ ID NO: 719760 - DNA, 19 bp, Mus musculus
  siRNA target sequence for 2310028N02Rik (NM_025864.2,524-542).
caccactcagaggatcaat

SEQ ID NO: 719761 - DNA, 19 bp, Mus musculus
  siRNA target sequence for 2310028N02Rik (NM_025864.2,862-880).
ccagcgtggttaactatat

SEQ ID NO: 719762 - DNA, 19 bp, Mus musculus
  siRNA target sequence for 2310028N02Rik (NM_025864.2,865-883).
gcgtggttaactatattga

SEQ ID NO: 719763 - DNA, 19 bp, Mus musculus
  siRNA target sequence for 2310028N02Rik (NM_025864.2,926-944).
ggtcttcgaatggaaagat

SEQ ID NO: 719764 - DNA, 19 bp, Mus musculus
  siRNA target sequence for 2310028N02Rik (NM_025864.2,1047-1065).
gccaaactaagcgtgaaat

SEQ ID NO: 719765 - DNA, 19 bp, Mus musculus
  siRNA target sequence for 2310028N02Rik (NM_025864.2,1057-1075).
gcgtgaaatggatgatcaa

SEQ ID NO: 719766 - DNA, 19 bp, Mus musculus
  siRNA target sequence for 2310028N02Rik (NM_025864.2,1058-1076).
cgtgaaatggatgatcaaa

SEQ ID NO: 719767 - DNA, 19 bp, Mus musculus
  siRNA target sequence for 2310028N02Rik (NM_025864.2,1107-1125).
caggcgacaaaccacataa

SEQ ID NO: 719768 - DNA, 19 bp, Mus musculus
  siRNA target sequence for 2310028N02Rik (NM_025864.2,1110-1128).
gcgacaaaccacataagct

SEQ ID NO: 719769 - DNA, 19 bp, Mus musculus
  siRNA target sequence for 2310030G06Rik (NM_025865.2,203-221).
ccacgtatgagcaagtgtt

SEQ ID NO: 719770 - DNA, 19 bp, Mus musculus
  siRNA target sequence for 2310030G06Rik (NM_025865.2,279-297).
gcattatgcggacattcat

SEQ ID NO: 719771 - DNA, 19 bp, Mus musculus
  siRNA target sequence for 2310030G06Rik (NM_025865.2,336-354).
gaaatgcctgcattcagaa

SEQ ID NO: 719772 - DNA, 19 bp, Mus musculus
  siRNA target sequence for 2310030G06Rik (NM_025865.2,391-409).
gccacacctcagtatgaca

SEQ ID NO: 719773 - DNA, 19 bp, Mus musculus
  siRNA target sequence for 2310075G14Rik (NM_025873.1,74-92).
gcgaacactgccacttgta

SEQ ID NO: 719774 - DNA, 19 bp, Mus musculus
  siRNA target sequence for 2310075G14Rik (NM_025873.1,76-94).
gaacactgccacttgtagt

SEQ ID NO: 719775 - DNA, 19 bp, Mus musculus
  siRNA target sequence for 2310075G14Rik (NM_025873.1,79-97).
cactgccacttgtagtgat

SEQ ID NO: 719776 - DNA, 19 bp, Mus musculus
  siRNA target sequence for 2310075G14Rik (NM_025873.1,195-213).
gaagggctagacatcatca

SEQ ID NO: 719777 - DNA, 19 bp, Mus musculus
  siRNA target sequence for 2310075G14Rik (NM_025873.1,295-313).
ccgtggtggactttaggaa

SEQ ID NO: 719778 - DNA, 19 bp, Mus musculus
  siRNA target sequence for 2310075G14Rik (NM_025873.1,322-340).
cggccctgattgaagatat

SEQ ID NO: 719779 - DNA, 19 bp, Mus musculus
  siRNA target sequence for 2310075G14Rik (NM_025873.1,324-342).
gccctgattgaagatattt

SEQ ID NO: 719780 - DNA, 19 bp, Mus musculus
  siRNA target sequence for 2310075G14Rik (NM_025873.1,366-384).
gtggtgggaggaaccaatt

SEQ ID NO: 719781 - DNA, 19 bp, Mus musculus
  siRNA target sequence for 2310075G14Rik (NM_025873.1,368-386).
ggtgggaggaaccaattat

SEQ ID NO: 719782 - DNA, 19 bp, Mus musculus
  siRNA target sequence for 2310075G14Rik (NM_025873.1,369-387).
gtgggaggaaccaattatt

SEQ ID NO: 719783 - DNA, 19 bp, Mus musculus
  siRNA target sequence for 2310075G14Rik (NM_025873.1,372-390).
ggaggaaccaattattaca

SEQ ID NO: 719784 - DNA, 19 bp, Mus musculus
  siRNA target sequence for 2310075G14Rik (NM_025873.1,376-394).
gaaccaattattacattga

SEQ ID NO: 719785 - DNA, 19 bp, Mus musculus
  siRNA target sequence for 2310075G14Rik (NM_025873.1,380-398).
caattattacattgaatct

SEQ ID NO: 719786 - DNA, 19 bp, Mus musculus
  siRNA target sequence for 2310075G14Rik (NM_025873.1,401-419).
gctctggaaagttcttatt

SEQ ID NO: 719787 - DNA, 19 bp, Mus musculus
  siRNA target sequence for 2310075G14Rik (NM_025873.1,402-420).
ctctggaaagttcttatta

SEQ ID NO: 719788 - DNA, 19 bp, Mus musculus
  siRNA target sequence for 2310075G14Rik (NM_025873.1,462-480).
cggaaagtagagcttgaaa

SEQ ID NO: 719789 - DNA, 19 bp, Mus musculus
  siRNA target sequence for 2310075G14Rik (NM_025873.1,720-738).
ctagatgagcgcttggata

SEQ ID NO: 719790 - DNA, 19 bp, Mus musculus
  siRNA target sequence for 2310075G14Rik (NM_025873.1,723-741).
gatgagcgcttggataaaa

SEQ ID NO: 719791 - DNA, 19 bp, Mus musculus
  siRNA target sequence for 2310075G14Rik (NM_025873.1,792-810).
cacagacgttataatctta

SEQ ID NO: 719792 - DNA, 19 bp, Mus musculus
  siRNA target sequence for 2310075G14Rik (NM_025873.1,796-814).
gacgttataatcttaagaa

SEQ ID NO: 719793 - DNA, 19 bp, Mus musculus
  siRNA target sequence for 2310075G14Rik (NM_025873.1,798-816).
cgttataatcttaagaaca

SEQ ID NO: 719794 - DNA, 19 bp, Mus musculus
  siRNA target sequence for 2310075G14Rik (NM_025873.1,799-817).
gttataatcttaagaacat

SEQ ID NO: 719795 - DNA, 19 bp, Mus musculus
  siRNA target sequence for 2310075G14Rik (NM_025873.1,845-863).
cggtatcttccagtcaatt

SEQ ID NO: 719796 - DNA, 19 bp, Mus musculus
  siRNA target sequence for 2310075G14Rik (NM_025873.1,907-925).
gcacaccagagactagtaa

SEQ ID NO: 719797 - DNA, 19 bp, Mus musculus
  siRNA target sequence for 2310075G14Rik (NM_025873.1,919-937).
ctagtaaccagcttctaaa

SEQ ID NO: 719798 - DNA, 19 bp, Mus musculus
  siRNA target sequence for 2310075G14Rik (NM_025873.1,948-966).
gaggctctgaaacaagtaa

SEQ ID NO: 719799 - DNA, 19 bp, Mus musculus
  siRNA target sequence for 2310075G14Rik (NM_025873.1,950-968).
ggctctgaaacaagtaact

SEQ ID NO: 719800 - DNA, 19 bp, Mus musculus
  siRNA target sequence for 2310075G14Rik (NM_025873.1,954-972).
ctgaaacaagtaactaaga

SEQ ID NO: 719801 - DNA, 19 bp, Mus musculus
  siRNA target sequence for 2310075G14Rik (NM_025873.1,987-1005).
cagaaccgatgggttaaaa

SEQ ID NO: 719802 - DNA, 19 bp, Mus musculus
  siRNA target sequence for 2310075G14Rik (NM_025873.1,1092-1110).
ctggaacctgctctcaata

SEQ ID NO: 719803 - DNA, 19 bp, Mus musculus
  siRNA target sequence for 2310075G14Rik (NM_025873.1,1094-1112).
ggaacctgctctcaatata

SEQ ID NO: 719804 - DNA, 19 bp, Mus musculus
  siRNA target sequence for 2310075G14Rik (NM_025873.1,1101-1119).
gctctcaatatagtacaaa

SEQ ID NO: 719805 - DNA, 19 bp, Mus musculus
  siRNA target sequence for 2310075G14Rik (NM_025873.1,1153-1171).
cagtgaagatggcatacaa

SEQ ID NO: 719806 - DNA, 19 bp, Mus musculus
  siRNA target sequence for 2310075G14Rik (NM_025873.1,1157-1175).
gaagatggcatacaatgaa

SEQ ID NO: 719807 - DNA, 19 bp, Mus musculus
  siRNA target sequence for 2310075G14Rik (NM_025873.1,1160-1178).
gatggcatacaatgaaagt

SEQ ID NO: 719808 - DNA, 19 bp, Mus musculus
  siRNA target sequence for 2310075G14Rik (NM_025873.1,1237-1255).
gggaatgggcagcacattt

SEQ ID NO: 719809 - DNA, 19 bp, Mus musculus
  siRNA target sequence for 2310075G14Rik (NM_025873.1,1267-1285).
ctcacttgcaccaattgaa

SEQ ID NO: 719810 - DNA, 19 bp, Mus musculus
  siRNA target sequence for 2310075G14Rik (NM_025873.1,1269-1287).
cacttgcaccaattgaaga

SEQ ID NO: 719811 - DNA, 19 bp, Mus musculus
  siRNA target sequence for 2310075G14Rik (NM_025873.1,1320-1338).
gccacaggaagtcaaagta

SEQ ID NO: 719812 - DNA, 19 bp, Mus musculus
  siRNA target sequence for 2310075G14Rik (NM_025873.1,1321-1339).
ccacaggaagtcaaagtaa

SEQ ID NO: 719813 - DNA, 19 bp, Mus musculus
  siRNA target sequence for 2310075G14Rik (NM_025873.1,1378-1396).
cctcggggcagcacaatca

SEQ ID NO: 719814 - DNA, 19 bp, Mus musculus
  siRNA target sequence for 2310075G14Rik (NM_025873.1,1381-1399).
cggggcagcacaatcaaga

SEQ ID NO: 719815 - DNA, 19 bp, Mus musculus
  siRNA target sequence for 2310076L09Rik (NM_025874.2,256-274).
ccgtgtccagtgcttacaa

SEQ ID NO: 719816 - DNA, 19 bp, Mus musculus
  siRNA target sequence for 2310076L09Rik (NM_025874.2,258-276).
gtgtccagtgcttacaact

SEQ ID NO: 719817 - DNA, 19 bp, Mus musculus
  siRNA target sequence for 2310076L09Rik (NM_025874.2,401-419).
ggccacagtgaatgatctt

SEQ ID NO: 719818 - DNA, 19 bp, Mus musculus
  siRNA target sequence for 2310076L09Rik (NM_025874.2,421-439).
cctgcaggggactagacaa

SEQ ID NO: 719819 - DNA, 19 bp, Mus musculus
  siRNA target sequence for 2310076L09Rik (NM_025874.2,427-445).
ggggactagacaaattgga

SEQ ID NO: 719820 - DNA, 19 bp, Mus musculus
  siRNA target sequence for 2310076L09Rik (NM_025874.2,428-446).
gggactagacaaattggaa

SEQ ID NO: 719821 - DNA, 19 bp, Mus musculus
  siRNA target sequence for 2310076L09Rik (NM_025874.2,500-518).
ggatacagtggccaaaagt

SEQ ID NO: 719822 - DNA, 19 bp, Mus musculus
  siRNA target sequence for 2310076L09Rik (NM_025874.2,767-785).
ccgccatctcgcctatgaa

SEQ ID NO: 719823 - DNA, 19 bp, Mus musculus
  siRNA target sequence for 2310076L09Rik (NM_025874.2,786-804).
cactctttggggaaactga

SEQ ID NO: 719824 - DNA, 19 bp, Mus musculus
  siRNA target sequence for 2310076L09Rik (NM_025874.2,890-908).
ccctagccctactttccat

SEQ ID NO: 719825 - DNA, 19 bp, Mus musculus
  siRNA target sequence for 2310076L09Rik (NM_025874.2,941-959).
gagcccgtgtctagagaat

SEQ ID NO: 719826 - DNA, 19 bp, Mus musculus
  siRNA target sequence for 2310076L09Rik (NM_025874.2,996-1014).
gctctgtctcgaagtttga

SEQ ID NO: 719827 - DNA, 19 bp, Mus musculus
  siRNA target sequence for 2310067G05Rik (NM_025877.1,381-399).
ctaccaggcagtaaggaat

SEQ ID NO: 719828 - DNA, 19 bp, Mus musculus
  siRNA target sequence for 2310067G05Rik (NM_025877.1,518-536).
cttccttccaggctagtaa

SEQ ID NO: 719829 - DNA, 19 bp, Mus musculus
  siRNA target sequence for 2310067G05Rik (NM_025877.1,555-573).
ctctgggagggctgaatct

SEQ ID NO: 719830 - DNA, 19 bp, Mus musculus
  siRNA target sequence for 2310067G05Rik (NM_025877.1,712-730).
cagcatccagtatgcaaat

SEQ ID NO: 719831 - DNA, 19 bp, Mus musculus
  siRNA target sequence for 2310067G05Rik (NM_025877.1,718-736).
ccagtatgcaaattaagta

SEQ ID NO: 719832 - DNA, 19 bp, Mus musculus
  siRNA target sequence for 2310067G05Rik (NM_025877.1,744-762).
gctgactcggagtctattt

SEQ ID NO: 719833 - DNA, 19 bp, Mus musculus
  siRNA target sequence for 2310067G05Rik (NM_025877.1,745-763).
ctgactcggagtctatttt

SEQ ID NO: 719834 - DNA, 19 bp, Mus musculus
  siRNA target sequence for 2310067G05Rik (NM_025877.1,749-767).
ctcggagtctatttttcta

SEQ ID NO: 719835 - DNA, 19 bp, Mus musculus
  siRNA target sequence for 2310067G05Rik (NM_025877.1,813-831).
cacacttcaagattggatt

SEQ ID NO: 719836 - DNA, 19 bp, Mus musculus
  siRNA target sequence for 2410002O22Rik (NM_025879.1,457-475).
gttgactttaccccaaaat

SEQ ID NO: 719837 - DNA, 19 bp, Mus musculus
  siRNA target sequence for 2410002O22Rik (NM_025879.1,468-486).
cccaaaatttcgggaatat

SEQ ID NO: 719838 - DNA, 19 bp, Mus musculus
  siRNA target sequence for 2410002O22Rik (NM_025879.1,469-487).
ccaaaatttcgggaatata

SEQ ID NO: 719839 - DNA, 19 bp, Mus musculus
  siRNA target sequence for 2410002O22Rik (NM_025879.1,497-515).
gagaccttttccagttata

SEQ ID NO: 719840 - DNA, 19 bp, Mus musculus
  siRNA target sequence for 2410002O22Rik (NM_025879.1,532-550).
cagcaatcaagttgtaaaa

SEQ ID NO: 719841 - DNA, 19 bp, Mus musculus
  siRNA target sequence for 2410002O22Rik (NM_025879.1,579-597).
cgagttctcagcgtttaaa

SEQ ID NO: 719842 - DNA, 19 bp, Mus musculus
  siRNA target sequence for 2410002O22Rik (NM_025879.1,636-654).
ccgactgctgtattgatga

SEQ ID NO: 719843 - DNA, 19 bp, Mus musculus
  siRNA target sequence for 2410002O22Rik (NM_025879.1,645-663).
gtattgatgacgtcataca

SEQ ID NO: 719844 - DNA, 19 bp, Mus musculus
  siRNA target sequence for 2410002O22Rik (NM_025879.1,655-673).
cgtcatacaccatgaagta

SEQ ID NO: 719845 - DNA, 19 bp, Mus musculus
  siRNA target sequence for 2410002O22Rik (NM_025879.1,656-674).
gtcatacaccatgaagtaa

SEQ ID NO: 719846 - DNA, 19 bp, Mus musculus
  siRNA target sequence for 2410002O22Rik (NM_025879.1,700-718).
gtgtgctgtgagttacaca

SEQ ID NO: 719847 - DNA, 19 bp, Mus musculus
  siRNA target sequence for 2410002O22Rik (NM_025879.1,717-735).
caacgcagggtggagaaaa

SEQ ID NO: 719848 - DNA, 19 bp, Mus musculus
  siRNA target sequence for 2410002O22Rik (NM_025879.1,720-738).
cgcagggtggagaaaaaat

SEQ ID NO: 719849 - DNA, 19 bp, Mus musculus
  siRNA target sequence for 2410002O22Rik (NM_025879.1,725-743).
ggtggagaaaaaatgtact

SEQ ID NO: 719850 - DNA, 19 bp, Mus musculus
  siRNA target sequence for 2410002O22Rik (NM_025879.1,726-744).
gtggagaaaaaatgtactt

SEQ ID NO: 719851 - DNA, 19 bp, Mus musculus
  siRNA target sequence for 2410002O22Rik (NM_025879.1,766-784).
ggttctcaaaccattggat

SEQ ID NO: 719852 - DNA, 19 bp, Mus musculus
  siRNA target sequence for 2410002O22Rik (NM_025879.1,772-790).
caaaccattggatgtgaaa

SEQ ID NO: 719853 - DNA, 19 bp, Mus musculus
  siRNA target sequence for 2410002O22Rik (NM_025879.1,776-794).
ccattggatgtgaaaacca

SEQ ID NO: 719854 - DNA, 19 bp, Mus musculus
  siRNA target sequence for 2410002O22Rik (NM_025879.1,900-918).
cactagagccatcaataat

SEQ ID NO: 719855 - DNA, 19 bp, Mus musculus
  siRNA target sequence for 2410002O22Rik (NM_025879.1,907-925).
gccatcaataatgtacaat

SEQ ID NO: 719856 - DNA, 19 bp, Mus musculus
  siRNA target sequence for 2410002O22Rik (NM_025879.1,1003-1021).
ggatacacgccaatactta

SEQ ID NO: 719857 - DNA, 19 bp, Mus musculus
  siRNA target sequence for 2410002O22Rik (NM_025879.1,1004-1022).
gatacacgccaatacttat

SEQ ID NO: 719858 - DNA, 19 bp, Mus musculus
  siRNA target sequence for 2410002O22Rik (NM_025879.1,1028-1046).
ctaaagcccaagaaggaat

SEQ ID NO: 719859 - DNA, 19 bp, Mus musculus
  siRNA target sequence for 2410002O22Rik (NM_025879.1,1033-1051).
gcccaagaaggaatttgca

SEQ ID NO: 719860 - DNA, 19 bp, Mus musculus
  siRNA target sequence for 2410002O22Rik (NM_025879.1,1050-1068).
cagaaaaagccggcataat

SEQ ID NO: 719861 - DNA, 19 bp, Mus musculus
  siRNA target sequence for 2410002O22Rik (NM_025879.1,1052-1070).
gaaaaagccggcataatta

SEQ ID NO: 719862 - DNA, 19 bp, Mus musculus
  siRNA target sequence for 2410002O22Rik (NM_025879.1,1088-1106).
gggaaactggatatagtgt

SEQ ID NO: 719863 - DNA, 19 bp, Mus musculus
  siRNA target sequence for 2410002O22Rik (NM_025879.1,1199-1217).
gccatcccagacactgtaa

SEQ ID NO: 719864 - DNA, 19 bp, Mus musculus
  siRNA target sequence for 2410002O22Rik (NM_025879.1,1200-1218).
ccatcccagacactgtaaa

SEQ ID NO: 719865 - DNA, 19 bp, Mus musculus
  siRNA target sequence for 2410002O22Rik (NM_025879.1,1210-1228).
cactgtaaacctagaagaa

SEQ ID NO: 719866 - DNA, 19 bp, Mus musculus
  siRNA target sequence for 2410002O22Rik (NM_025879.1,1219-1237).
cctagaagaacctttccat

SEQ ID NO: 719867 - DNA, 19 bp, Mus musculus
  siRNA target sequence for 2410002O22Rik (NM_025879.1,1292-1310).
gagatgtgcaacaccaatt

SEQ ID NO: 719868 - DNA, 19 bp, Mus musculus
  siRNA target sequence for 2410002O22Rik (NM_025879.1,1448-1466).
ctaaagagaacatacgaat

SEQ ID NO: 719869 - DNA, 19 bp, Mus musculus
  siRNA target sequence for 2410002O22Rik (NM_025879.1,1453-1471).
gagaacatacgaatatgat

SEQ ID NO: 719870 - DNA, 19 bp, Mus musculus
  siRNA target sequence for 2410002O22Rik (NM_025879.1,1455-1473).
gaacatacgaatatgatga

SEQ ID NO: 719871 - DNA, 19 bp, Mus musculus
  siRNA target sequence for 2410002O22Rik (NM_025879.1,1458-1476).
catacgaatatgatgacat

SEQ ID NO: 719872 - DNA, 19 bp, Mus musculus
  siRNA target sequence for Luc7l (NM_025881.1,125-143).
gctcgggacggagatgaaa

SEQ ID NO: 719873 - DNA, 19 bp, Mus musculus
  siRNA target sequence for Luc7l (NM_025881.1,221-239).
gctgggacgcgcatggatt

SEQ ID NO: 719874 - DNA, 19 bp, Mus musculus
  siRNA target sequence for Luc7l (NM_025881.1,226-244).
gacgcgcatggatttagga

SEQ ID NO: 719875 - DNA, 19 bp, Mus musculus
  siRNA target sequence for Luc7l (NM_025881.1,270-288).
ctcttcgagcagattatga

SEQ ID NO: 719876 - DNA, 19 bp, Mus musculus
  siRNA target sequence for Luc7l (NM_025881.1,272-290).
cttcgagcagattatgaaa

SEQ ID NO: 719877 - DNA, 19 bp, Mus musculus
  siRNA target sequence for Luc7l (NM_025881.1,372-390).
gaaccgaacttgccaaaaa

SEQ ID NO: 719878 - DNA, 19 bp, Mus musculus
  siRNA target sequence for Luc7l (NM_025881.1,440-458).
gcagaaaaggtacatgaat

SEQ ID NO: 719879 - DNA, 19 bp, Mus musculus
  siRNA target sequence for Luc7l (NM_025881.1,443-461).
gaaaaggtacatgaattaa

SEQ ID NO: 719880 - DNA, 19 bp, Mus musculus
  siRNA target sequence for Luc7l (NM_025881.1,528-546).
cccagaagattcttatgga

SEQ ID NO: 719881 - DNA, 19 bp, Mus musculus
  siRNA target sequence for Luc7l (NM_025881.1,529-547).
ccagaagattcttatggaa

SEQ ID NO: 719882 - DNA, 19 bp, Mus musculus
  siRNA target sequence for Luc7l (NM_025881.1,553-571).
gaaagttcgtgcaaagaaa

SEQ ID NO: 719883 - DNA, 19 bp, Mus musculus
  siRNA target sequence for Luc7l (NM_025881.1,635-653).
cgtgtttgcgaggtttgtt

SEQ ID NO: 719884 - DNA, 19 bp, Mus musculus
  siRNA target sequence for Luc7l (NM_025881.1,746-764).
cttgatcagttgaggaaaa

SEQ ID NO: 719885 - DNA, 19 bp, Mus musculus
  siRNA target sequence for Luc7l (NM_025881.1,1023-1041).
ccagggaccggagtacaaa

SEQ ID NO: 719886 - DNA, 19 bp, Mus musculus
  siRNA target sequence for Luc7l (NM_025881.1,1024-1042).
cagggaccggagtacaaaa

SEQ ID NO: 719887 - DNA, 19 bp, Mus musculus
  siRNA target sequence for Luc7l (NM_025881.1,1028-1046).
gaccggagtacaaaataca

SEQ ID NO: 719888 - DNA, 19 bp, Mus musculus
  siRNA target sequence for 2410003C20Rik (NM_025884.2,57-75).
ggaagcgagtggtgaatca

SEQ ID NO: 719889 - DNA, 19 bp, Mus musculus
  siRNA target sequence for 2410003C20Rik (NM_025884.2,141-159).
ctccattcgccaagtacaa

SEQ ID NO: 719890 - DNA, 19 bp, Mus musculus
  siRNA target sequence for 2410003C20Rik (NM_025884.2,463-481).
cggtttactgcctgattat

SEQ ID NO: 719891 - DNA, 19 bp, Mus musculus
  siRNA target sequence for 2410003C20Rik (NM_025884.2,465-483).
gtttactgcctgattatga

SEQ ID NO: 719892 - DNA, 19 bp, Mus musculus
  siRNA target sequence for 2410003C20Rik (NM_025884.2,601-619).
caatgtgctgccaaacgat

SEQ ID NO: 719893 - DNA, 19 bp, Mus musculus
  siRNA target sequence for 2410003C20Rik (NM_025884.2,610-628).
gccaaacgatccgtttaat

SEQ ID NO: 719894 - DNA, 19 bp, Mus musculus
  siRNA target sequence for 2410003C20Rik (NM_025884.2,611-629).
ccaaacgatccgtttaata

SEQ ID NO: 719895 - DNA, 19 bp, Mus musculus
  siRNA target sequence for 2410003C20Rik (NM_025884.2,616-634).
cgatccgtttaatacaaat

SEQ ID NO: 719896 - DNA, 19 bp, Mus musculus
  siRNA target sequence for 2410003C20Rik (NM_025884.2,646-664).
ccccttagttcctcattca

SEQ ID NO: 719897 - DNA, 19 bp, Mus musculus
  siRNA target sequence for 2410003C20Rik (NM_025884.2,659-677).
cattcagggtccattgaga

SEQ ID NO: 719898 - DNA, 19 bp, Mus musculus
  siRNA target sequence for 2410003C20Rik (NM_025884.2,715-733).
gaacaccgccgaagcatta

SEQ ID NO: 719899 - DNA, 19 bp, Mus musculus
  siRNA target sequence for 2410003C20Rik (NM_025884.2,812-830).
gagtgggacgagtttcaaa

SEQ ID NO: 719900 - DNA, 19 bp, Mus musculus
  siRNA target sequence for 2410003C20Rik (NM_025884.2,841-859).
gcaagtcaacactatctct

SEQ ID NO: 719901 - DNA, 19 bp, Mus musculus
  siRNA target sequence for 2410003C20Rik (NM_025884.2,901-919).
ccggcagattggagagatt

SEQ ID NO: 719902 - DNA, 19 bp, Mus musculus
  siRNA target sequence for 2410003C20Rik (NM_025884.2,936-954).
gttaccgccgagtggaaaa

SEQ ID NO: 719903 - DNA, 19 bp, Mus musculus
  siRNA target sequence for 2410003C20Rik (NM_025884.2,959-977).
cggaatcgccaggatgaaa

SEQ ID NO: 719904 - DNA, 19 bp, Mus musculus
  siRNA target sequence for 2410003C20Rik (NM_025884.2,960-978).
ggaatcgccaggatgaaat

SEQ ID NO: 719905 - DNA, 19 bp, Mus musculus
  siRNA target sequence for 2410003C20Rik (NM_025884.2,965-983).
cgccaggatgaaataaaaa

SEQ ID NO: 719906 - DNA, 19 bp, Mus musculus
  siRNA target sequence for 2410003C20Rik (NM_025884.2,1047-1065).
gtgacgacgaaggagaatt

SEQ ID NO: 719907 - DNA, 19 bp, Mus musculus
  siRNA target sequence for 2410004A20Rik (NM_025890.1,94-112).
caaacaaggtaccttattt

SEQ ID NO: 719908 - DNA, 19 bp, Mus musculus
  siRNA target sequence for 2410004A20Rik (NM_025890.1,102-120).
gtaccttatttgaaattat

SEQ ID NO: 719909 - DNA, 19 bp, Mus musculus
  siRNA target sequence for 2410004A20Rik (NM_025890.1,229-247).
gcacatcccacatcttgaa

SEQ ID NO: 719910 - DNA, 19 bp, Mus musculus
  siRNA target sequence for 2410004A20Rik (NM_025890.1,236-254).
ccacatcttgaatctatgt

SEQ ID NO: 719911 - DNA, 19 bp, Mus musculus
  siRNA target sequence for 2410004A20Rik (NM_025890.1,237-255).
cacatcttgaatctatgtt

SEQ ID NO: 719912 - DNA, 19 bp, Mus musculus
  siRNA target sequence for 2410004A20Rik (NM_025890.1,290-308).
gaaaggcgagctgagattt

SEQ ID NO: 719913 - DNA, 19 bp, Mus musculus
  siRNA target sequence for 2410004A20Rik (NM_025890.1,294-312).
ggcgagctgagatttggat

SEQ ID NO: 719914 - DNA, 19 bp, Mus musculus
  siRNA target sequence for 2410004A20Rik (NM_025890.1,296-314).
cgagctgagatttggatat

SEQ ID NO: 719915 - DNA, 19 bp, Mus musculus
  siRNA target sequence for 2410004A20Rik (NM_025890.1,297-315).
gagctgagatttggatatt

SEQ ID NO: 719916 - DNA, 19 bp, Mus musculus
  siRNA target sequence for 2410004A20Rik (NM_025890.1,1097-1115).
cccgtggaggccactgata

SEQ ID NO: 719917 - DNA, 19 bp, Mus musculus
  siRNA target sequence for 2410004A20Rik (NM_025890.1,1099-1117).
cgtggaggccactgatact

SEQ ID NO: 719918 - DNA, 19 bp, Mus musculus
  siRNA target sequence for 2410004A20Rik (NM_025890.1,1100-1118).
gtggaggccactgatacta

SEQ ID NO: 719919 - DNA, 19 bp, Mus musculus
  siRNA target sequence for 2410004A20Rik (NM_025890.1,1194-1212).
ggcagtctcccattgaagt

SEQ ID NO: 719920 - DNA, 19 bp, Mus musculus
  siRNA target sequence for 2410004A20Rik (NM_025890.1,1228-1246).
cgggcagcattctctagat

SEQ ID NO: 719921 - DNA, 19 bp, Mus musculus
  siRNA target sequence for 2410004A20Rik (NM_025890.1,1267-1285).
gaagtgtcctgaggttttt

SEQ ID NO: 719922 - DNA, 19 bp, Mus musculus
  siRNA target sequence for 2410004A20Rik (NM_025890.1,1314-1332).
gcagctatgtcatagttca

SEQ ID NO: 719923 - DNA, 19 bp, Mus musculus
  siRNA target sequence for 2410004A20Rik (NM_025890.1,1343-1361).
gatgcctgggaatcattta

SEQ ID NO: 719924 - DNA, 19 bp, Mus musculus
  siRNA target sequence for 2410004A20Rik (NM_025890.1,1346-1364).
gcctgggaatcatttatca

SEQ ID NO: 719925 - DNA, 19 bp, Mus musculus
  siRNA target sequence for 2410004A20Rik (NM_025890.1,1347-1365).
cctgggaatcatttatcat

SEQ ID NO: 719926 - DNA, 19 bp, Mus musculus
  siRNA target sequence for 2410004A20Rik (NM_025890.1,1352-1370).
gaatcatttatcatattat

SEQ ID NO: 719927 - DNA, 19 bp, Mus musculus
  siRNA target sequence for 1500031L02Rik (NM_025892.1,471-489).
gtgatcttgatttatgaga

SEQ ID NO: 719928 - DNA, 19 bp, Mus musculus
  siRNA target sequence for 1500031L02Rik (NM_025892.1,524-542).
gcctgtccgaaacttttca

SEQ ID NO: 719929 - DNA, 19 bp, Mus musculus
  siRNA target sequence for 1500031L02Rik (NM_025892.1,525-543).
cctgtccgaaacttttcaa

SEQ ID NO: 719930 - DNA, 19 bp, Mus musculus
  siRNA target sequence for 1500031L02Rik (NM_025892.1,531-549).
cgaaacttttcaaagttct

SEQ ID NO: 719931 - DNA, 19 bp, Mus musculus
  siRNA target sequence for 1500031L02Rik (NM_025892.1,559-577).
ccagagctgcggaacagtt

SEQ ID NO: 719932 - DNA, 19 bp, Mus musculus
  siRNA target sequence for 1500031L02Rik (NM_025892.1,565-583).
ctgcggaacagttaaagaa

SEQ ID NO: 719933 - DNA, 19 bp, Mus musculus
  siRNA target sequence for 1500031L02Rik (NM_025892.1,568-586).
cggaacagttaaagaataa

SEQ ID NO: 719934 - DNA, 19 bp, Mus musculus
  siRNA target sequence for 1500031L02Rik (NM_025892.1,892-910).
cagcgtcagtggatgactt

SEQ ID NO: 719935 - DNA, 19 bp, Mus musculus
  siRNA target sequence for 1500003D12Rik (NM_025895.2,213-231).
cccttgtgagtcaggatta

SEQ ID NO: 719936 - DNA, 19 bp, Mus musculus
  siRNA target sequence for 1500003D12Rik (NM_025895.2,214-232).
ccttgtgagtcaggattat

SEQ ID NO: 719937 - DNA, 19 bp, Mus musculus
  siRNA target sequence for 1500003D12Rik (NM_025895.2,220-238).
gagtcaggattatgtcaat

SEQ ID NO: 719938 - DNA, 19 bp, Mus musculus
  siRNA target sequence for 1500003D12Rik (NM_025895.2,241-259).
gactgatcaggaagaaatt

SEQ ID NO: 719939 - DNA, 19 bp, Mus musculus
  siRNA target sequence for 1500003D12Rik (NM_025895.2,264-282).
ctggtgttgatcagtgtat

SEQ ID NO: 719940 - DNA, 19 bp, Mus musculus
  siRNA target sequence for 1500003D12Rik (NM_025895.2,310-328).
gacagaatgttttttccta

SEQ ID NO: 719941 - DNA, 19 bp, Mus musculus
  siRNA target sequence for 1500003O22Rik (NM_025897.1,583-601).
ggacgagtactgctacaat

SEQ ID NO: 719942 - DNA, 19 bp, Mus musculus
  siRNA target sequence for 1500003O22Rik (NM_025897.1,584-602).
gacgagtactgctacaatt

SEQ ID NO: 719943 - DNA, 19 bp, Mus musculus
  siRNA target sequence for 1500003O22Rik (NM_025897.1,586-604).
cgagtactgctacaattga

SEQ ID NO: 719944 - DNA, 19 bp, Mus musculus
  siRNA target sequence for 1500003O22Rik (NM_025897.1,670-688).
ggcggaaccggcagaaaaa

SEQ ID NO: 719945 - DNA, 19 bp, Mus musculus
  siRNA target sequence for 1500003O22Rik (NM_025897.1,671-689).
gcggaaccggcagaaaaat

SEQ ID NO: 719946 - DNA, 19 bp, Mus musculus
  siRNA target sequence for 1500003O22Rik (NM_025897.1,672-690).
cggaaccggcagaaaaata

SEQ ID NO: 719947 - DNA, 19 bp, Mus musculus
  siRNA target sequence for 1500003O22Rik (NM_025897.1,673-691).
ggaaccggcagaaaaataa

SEQ ID NO: 719948 - DNA, 19 bp, Mus musculus
  siRNA target sequence for 1500003O22Rik (NM_025897.1,853-871).
cccgatttcgctaccttaa

SEQ ID NO: 719949 - DNA, 19 bp, Mus musculus
  siRNA target sequence for 1500003O22Rik (NM_025897.1,854-872).
ccgatttcgctaccttaat

SEQ ID NO: 719950 - DNA, 19 bp, Mus musculus
  siRNA target sequence for 1500003O22Rik (NM_025897.1,856-874).
gatttcgctaccttaatga

SEQ ID NO: 719951 - DNA, 19 bp, Mus musculus
  siRNA target sequence for 1500003O22Rik (NM_025897.1,862-880).
gctaccttaatgaacagtt

SEQ ID NO: 719952 - DNA, 19 bp, Mus musculus
  siRNA target sequence for 1500003O22Rik (NM_025897.1,901-919).
ctgcccgacgcctattcca

SEQ ID NO: 719953 - DNA, 19 bp, Mus musculus
  siRNA target sequence for 1500003O22Rik (NM_025897.1,995-1013).
ggaccgtattgccaaagat

SEQ ID NO: 719954 - DNA, 19 bp, Mus musculus
  siRNA target sequence for 1500003O22Rik (NM_025897.1,1124-1142).
ccccagggtcacagtatgt

SEQ ID NO: 719955 - DNA, 19 bp, Mus musculus
  siRNA target sequence for 1500003O22Rik (NM_025897.1,1126-1144).
ccagggtcacagtatgtga

SEQ ID NO: 719956 - DNA, 19 bp, Mus musculus
  siRNA target sequence for 1500003O22Rik (NM_025897.1,1229-1247).
ccttgaggaggcaaatcga

SEQ ID NO: 719957 - DNA, 19 bp, Mus musculus
  siRNA target sequence for 1500003O22Rik (NM_025897.1,1258-1276).
cagggggtcttctcaaagt

SEQ ID NO: 719958 - DNA, 19 bp, Mus musculus
  siRNA target sequence for 1500003O22Rik (NM_025897.1,1330-1348).
ccaaactcggctttaagat

SEQ ID NO: 719959 - DNA, 19 bp, Mus musculus
  siRNA target sequence for 1500003O22Rik (NM_025897.1,1331-1349).
caaactcggctttaagatt

SEQ ID NO: 719960 - DNA, 19 bp, Mus musculus
  siRNA target sequence for 1500003O22Rik (NM_025897.1,1338-1356).
ggctttaagattatctaca

SEQ ID NO: 719961 - DNA, 19 bp, Mus musculus
  siRNA target sequence for 1500003O22Rik (NM_025897.1,1430-1448).
ccaactctcaggccttaaa

SEQ ID NO: 719962 - DNA, 19 bp, Mus musculus
  siRNA target sequence for 1500009M05Rik (NM_025902.2,270-288).
gaaggatagcttgatcaat

SEQ ID NO: 719963 - DNA, 19 bp, Mus musculus
  siRNA target sequence for 1500009M05Rik (NM_025902.2,273-291).
ggatagcttgatcaatctt

SEQ ID NO: 719964 - DNA, 19 bp, Mus musculus
  siRNA target sequence for 1500009M05Rik (NM_025902.2,274-292).
gatagcttgatcaatctta

SEQ ID NO: 719965 - DNA, 19 bp, Mus musculus
  siRNA target sequence for 1500009M05Rik (NM_025902.2,312-330).
caaggtggtgaatgagata

SEQ ID NO: 719966 - DNA, 19 bp, Mus musculus
  siRNA target sequence for 1500009M05Rik (NM_025902.2,318-336).
ggtgaatgagataaacatt

SEQ ID NO: 719967 - DNA, 19 bp, Mus musculus
  siRNA target sequence for 1500009M05Rik (NM_025902.2,351-369).
caccaaagcagcttattgt

SEQ ID NO: 719968 - DNA, 19 bp, Mus musculus
  siRNA target sequence for 1500009M05Rik (NM_025902.2,401-419).
gtgatggatcccataataa

SEQ ID NO: 719969 - DNA, 19 bp, Mus musculus
  siRNA target sequence for 1500009M05Rik (NM_025902.2,406-424).
ggatcccataataagcata

SEQ ID NO: 719970 - DNA, 19 bp, Mus musculus
  siRNA target sequence for 1500009M05Rik (NM_025902.2,407-425).
gatcccataataagcataa

SEQ ID NO: 719971 - DNA, 19 bp, Mus musculus
  siRNA target sequence for 1500009M05Rik (NM_025902.2,410-428).
cccataataagcataatga

SEQ ID NO: 719972 - DNA, 19 bp, Mus musculus
  siRNA target sequence for 1500009M05Rik (NM_025902.2,411-429).
ccataataagcataatgaa

SEQ ID NO: 719973 - DNA, 19 bp, Mus musculus
  siRNA target sequence for 1500009M05Rik (NM_025902.2,449-467).
gtcctctcatcctgaagaa

SEQ ID NO: 719974 - DNA, 19 bp, Mus musculus
  siRNA target sequence for Ifrd2 (NM_025903.1,489-507).
gcctacttccggactttct

SEQ ID NO: 719975 - DNA, 19 bp, Mus musculus
  siRNA target sequence for Ifrd2 (NM_025903.1,530-548).
gcggatgccctggaaaagt

SEQ ID NO: 719976 - DNA, 19 bp, Mus musculus
  siRNA target sequence for Ifrd2 (NM_025903.1,925-943).
ccacatcagccatatcctt

SEQ ID NO: 719977 - DNA, 19 bp, Mus musculus
  siRNA target sequence for Ifrd2 (NM_025903.1,970-988).
gctcttgtccagtgaaagt

SEQ ID NO: 719978 - DNA, 19 bp, Mus musculus
  siRNA target sequence for Ifrd2 (NM_025903.1,1017-1035).
ccatcgcgctactctttga

SEQ ID NO: 719979 - DNA, 19 bp, Mus musculus
  siRNA target sequence for Ifrd2 (NM_025903.1,1054-1072).
ggaggacttcgtctatgaa

SEQ ID NO: 719980 - DNA, 19 bp, Mus musculus
  siRNA target sequence for Ifrd2 (NM_025903.1,1109-1127).
gccaccgacagcaataagt

SEQ ID NO: 719981 - DNA, 19 bp, Mus musculus
  siRNA target sequence for Ifrd2 (NM_025903.1,1270-1288).
ctacacagccttcaaagat

SEQ ID NO: 719982 - DNA, 19 bp, Mus musculus
  siRNA target sequence for Ifrd2 (NM_025903.1,1275-1293).
cagccttcaaagatgtgtt

SEQ ID NO: 719983 - DNA, 19 bp, Mus musculus
  siRNA target sequence for Ifrd2 (NM_025903.1,1475-1493).
gacaagcgggcagatatct

SEQ ID NO: 719984 - DNA, 19 bp, Mus musculus
  siRNA target sequence for 1600012F09Rik (NM_025904.1,73-91).
gagaccaggacgtgtttga

SEQ ID NO: 719985 - DNA, 19 bp, Mus musculus
  siRNA target sequence for 1600012F09Rik (NM_025904.1,212-230).
cttcaatcaagggtacaaa

SEQ ID NO: 719986 - DNA, 19 bp, Mus musculus
  siRNA target sequence for 1600012F09Rik (NM_025904.1,231-249).
gagggtgcagacgtcatta

SEQ ID NO: 719987 - DNA, 19 bp, Mus musculus
  siRNA target sequence for 1600012F09Rik (NM_025904.1,233-251).
gggtgcagacgtcattata

SEQ ID NO: 719988 - DNA, 19 bp, Mus musculus
  siRNA target sequence for 1600012F09Rik (NM_025904.1,234-252).
ggtgcagacgtcattataa

SEQ ID NO: 719989 - DNA, 19 bp, Mus musculus
  siRNA target sequence for 1600012F09Rik (NM_025904.1,235-253).
gtgcagacgtcattataaa

SEQ ID NO: 719990 - DNA, 19 bp, Mus musculus
  siRNA target sequence for 1600012F09Rik (NM_025904.1,237-255).
gcagacgtcattataaact

SEQ ID NO: 719991 - DNA, 19 bp, Mus musculus
  siRNA target sequence for 1600012F09Rik (NM_025904.1,319-337).
cgactctgatcagtaagat

SEQ ID NO: 719992 - DNA, 19 bp, Mus musculus
  siRNA target sequence for 1600012F09Rik (NM_025904.1,320-338).
gactctgatcagtaagata

SEQ ID NO: 719993 - DNA, 19 bp, Mus musculus
  siRNA target sequence for 1600012F09Rik (NM_025904.1,324-342).
ctgatcagtaagataagta

SEQ ID NO: 719994 - DNA, 19 bp, Mus musculus
  siRNA target sequence for 1600012F09Rik (NM_025904.1,387-405).
cgtctgaaatcggttacat

SEQ ID NO: 719995 - DNA, 19 bp, Mus musculus
  siRNA target sequence for 1600012F09Rik (NM_025904.1,410-428).
gccacgagttacggattta

SEQ ID NO: 719996 - DNA, 19 bp, Mus musculus
  siRNA target sequence for 1600012F09Rik (NM_025904.1,411-429).
ccacgagttacggatttat

SEQ ID NO: 719997 - DNA, 19 bp, Mus musculus
  siRNA target sequence for 1600012F09Rik (NM_025904.1,412-430).
cacgagttacggatttatt

SEQ ID NO: 719998 - DNA, 19 bp, Mus musculus
  siRNA target sequence for 1600012F09Rik (NM_025904.1,565-583).
caaaagagcatgcacattt

SEQ ID NO: 719999 - DNA, 19 bp, Mus musculus
  siRNA target sequence for 1600012F09Rik (NM_025904.1,615-633).
cagacatccagtttagtga

SEQ ID NO: 720000 - DNA, 19 bp, Mus musculus
  siRNA target sequence for 1600012F09Rik (NM_025904.1,617-635).
gacatccagtttagtgaaa

SEQ ID NO: 720001 - DNA, 19 bp, Mus musculus
  siRNA target sequence for 1600012F09Rik (NM_025904.1,641-659).
gggagtaccggcagacata

SEQ ID NO: 720002 - DNA, 19 bp, Mus musculus
  siRNA target sequence for 1600012F09Rik (NM_025904.1,642-660).
ggagtaccggcagacatat

SEQ ID NO: 720003 - DNA, 19 bp, Mus musculus
  siRNA target sequence for 1600012F09Rik (NM_025904.1,643-661).
gagtaccggcagacatatt

SEQ ID NO: 720004 - DNA, 19 bp, Mus musculus
  siRNA target sequence for 1600012F09Rik (NM_025904.1,663-681).
cagcacctgagacaactat

SEQ ID NO: 720005 - DNA, 19 bp, Mus musculus
  siRNA target sequence for 1600012K10Rik (NM_025905.2,483-501).
ctgtcagcgtcacttctaa

SEQ ID NO: 720006 - DNA, 19 bp, Mus musculus
  siRNA target sequence for 1600012K10Rik (NM_025905.2,634-652).
gcgctgtgtggcactaaca

SEQ ID NO: 720007 - DNA, 19 bp, Mus musculus
  siRNA target sequence for 1600012K10Rik (NM_025905.2,635-653).
cgctgtgtggcactaacaa

SEQ ID NO: 720008 - DNA, 19 bp, Mus musculus
  siRNA target sequence for 1600012K10Rik (NM_025905.2,639-657).
gtgtggcactaacaagaat

SEQ ID NO: 720009 - DNA, 19 bp, Mus musculus
  siRNA target sequence for 1600012K10Rik (NM_025905.2,641-659).
gtggcactaacaagaattt

SEQ ID NO: 720010 - DNA, 19 bp, Mus musculus
  siRNA target sequence for 1600012K10Rik (NM_025905.2,644-662).
gcactaacaagaatttgct

SEQ ID NO: 720011 - DNA, 19 bp, Mus musculus
  siRNA target sequence for 1600012K10Rik (NM_025905.2,645-663).
cactaacaagaatttgcta

SEQ ID NO: 720012 - DNA, 19 bp, Mus musculus
  siRNA target sequence for 1600012K10Rik (NM_025905.2,667-685).
cgactggcactggaaacta

SEQ ID NO: 720013 - DNA, 19 bp, Mus musculus
  siRNA target sequence for 1600012K10Rik (NM_025905.2,683-701).
ctagcggaggcgtatgtta

SEQ ID NO: 720014 - DNA, 19 bp, Mus musculus
  siRNA target sequence for 1600012K10Rik (NM_025905.2,687-705).
cggaggcgtatgttaatct

SEQ ID NO: 720015 - DNA, 19 bp, Mus musculus
  siRNA target sequence for 1600012K10Rik (NM_025905.2,804-822).
gtcacaacaaaacagatat

SEQ ID NO: 720016 - DNA, 19 bp, Mus musculus
  siRNA target sequence for 1600012K10Rik (NM_025905.2,864-882).
cgctgctctcccttcaaaa

SEQ ID NO: 720017 - DNA, 19 bp, Mus musculus
  siRNA target sequence for 1600012K10Rik (NM_025905.2,937-955).
gctgcaatgtgggaacatt

SEQ ID NO: 720018 - DNA, 19 bp, Mus musculus
  siRNA target sequence for 1600012K10Rik (NM_025905.2,997-1015).
gtcgtttgcacagttgtat

SEQ ID NO: 720019 - DNA, 19 bp, Mus musculus
  siRNA target sequence for 1600012K10Rik (NM_025905.2,999-1017).
cgtttgcacagttgtatca

SEQ ID NO: 720020 - DNA, 19 bp, Mus musculus
  siRNA target sequence for 1600012K10Rik (NM_025905.2,1040-1058).
gctttcccgttctatcaaa

SEQ ID NO: 720021 - DNA, 19 bp, Mus musculus
  siRNA target sequence for 1600012K10Rik (NM_025905.2,1041-1059).
ctttcccgttctatcaaaa

SEQ ID NO: 720022 - DNA, 19 bp, Mus musculus
  siRNA target sequence for 1600012K10Rik (NM_025905.2,1313-1331).
gcacatctcatcatcctaa

SEQ ID NO: 720023 - DNA, 19 bp, Mus musculus
  siRNA target sequence for 1600012K10Rik (NM_025905.2,1415-1433).
cgtgatgtggccgagaaat

SEQ ID NO: 720024 - DNA, 19 bp, Mus musculus
  siRNA target sequence for 1600012K10Rik (NM_025905.2,1416-1434).
gtgatgtggccgagaaata

SEQ ID NO: 720025 - DNA, 19 bp, Mus musculus
  siRNA target sequence for 1600012K10Rik (NM_025905.2,1418-1436).
gatgtggccgagaaatact

SEQ ID NO: 720026 - DNA, 19 bp, Mus musculus
  siRNA target sequence for 1600012K10Rik (NM_025905.2,1478-1496).
gaaagagccaagttccttt

SEQ ID NO: 720027 - DNA, 19 bp, Mus musculus
  siRNA target sequence for 1600012K10Rik (NM_025905.2,1482-1500).
gagccaagttcctttcgat

SEQ ID NO: 720028 - DNA, 19 bp, Mus musculus
  siRNA target sequence for 1600012K10Rik (NM_025905.2,1486-1504).
caagttcctttcgattcaa

SEQ ID NO: 720029 - DNA, 19 bp, Mus musculus
  siRNA target sequence for 1600012K10Rik (NM_025905.2,1489-1507).
gttcctttcgattcaagat

SEQ ID NO: 720030 - DNA, 19 bp, Mus musculus
  siRNA target sequence for 1600012K10Rik (NM_025905.2,1570-1588).
gtccctggaagccaaagta

SEQ ID NO: 720031 - DNA, 19 bp, Mus musculus
  siRNA target sequence for 1600012K10Rik (NM_025905.2,1611-1629).
ctgaggtggcagaaacgta

SEQ ID NO: 720032 - DNA, 19 bp, Mus musculus
  siRNA target sequence for 1600012K10Rik (NM_025905.2,1652-1670).
ctggcgcagggaaacaaca

SEQ ID NO: 720033 - DNA, 19 bp, Mus musculus
  siRNA target sequence for 1600012K10Rik (NM_025905.2,1673-1691).
ggagcgtacgcgaagctaa

SEQ ID NO: 720034 - DNA, 19 bp, Mus musculus
  siRNA target sequence for 1600012K10Rik (NM_025905.2,1674-1692).
gagcgtacgcgaagctaaa

SEQ ID NO: 720035 - DNA, 19 bp, Mus musculus
  siRNA target sequence for 1600012K10Rik (NM_025905.2,1676-1694).
gcgtacgcgaagctaaaga

SEQ ID NO: 720036 - DNA, 19 bp, Mus musculus
  siRNA target sequence for 1600012K10Rik (NM_025905.2,1677-1695).
cgtacgcgaagctaaagaa

SEQ ID NO: 720037 - DNA, 19 bp, Mus musculus
  siRNA target sequence for 1600012K10Rik (NM_025905.2,1703-1721).
cagattgagacgttcttgt

SEQ ID NO: 720038 - DNA, 19 bp, Mus musculus
  siRNA target sequence for 1600012K10Rik (NM_025905.2,1705-1723).
gattgagacgttcttgtat

SEQ ID NO: 720039 - DNA, 19 bp, Mus musculus
  siRNA target sequence for 1600012K10Rik (NM_025905.2,1709-1727).
gagacgttcttgtatggat

SEQ ID NO: 720040 - DNA, 19 bp, Mus musculus
  siRNA target sequence for 1600012K10Rik (NM_025905.2,1766-1784).
gacacactgtcaaagatct

SEQ ID NO: 720041 - DNA, 19 bp, Mus musculus
  siRNA target sequence for Mina (NM_025910.2,536-554).
gaaacgctttctgtattaa

SEQ ID NO: 720042 - DNA, 19 bp, Mus musculus
  siRNA target sequence for Mina (NM_025910.2,540-558).
cgctttctgtattaaactt

SEQ ID NO: 720043 - DNA, 19 bp, Mus musculus
  siRNA target sequence for Mina (NM_025910.2,560-578).
gacagccccagtagtttct

SEQ ID NO: 720044 - DNA, 19 bp, Mus musculus
  siRNA target sequence for Mina (NM_025910.2,566-584).
cccagtagtttcttcgaaa

SEQ ID NO: 720045 - DNA, 19 bp, Mus musculus
  siRNA target sequence for Mina (NM_025910.2,573-591).
gtttcttcgaaagtttaat

SEQ ID NO: 720046 - DNA, 19 bp, Mus musculus
  siRNA target sequence for Mina (NM_025910.2,598-616).
catcaaagtagagactttt

SEQ ID NO: 720047 - DNA, 19 bp, Mus musculus
  siRNA target sequence for Mina (NM_025910.2,608-626).
gagacttttttcaaggaat

SEQ ID NO: 720048 - DNA, 19 bp, Mus musculus
  siRNA target sequence for Mina (NM_025910.2,665-683).
cctgtactggccaaatatt

SEQ ID NO: 720049 - DNA, 19 bp, Mus musculus
  siRNA target sequence for Mina (NM_025910.2,666-684).
ctgtactggccaaatatta

SEQ ID NO: 720050 - DNA, 19 bp, Mus musculus
  siRNA target sequence for Mina (NM_025910.2,723-741).
gcaagaaaggagtgtacta

SEQ ID NO: 720051 - DNA, 19 bp, Mus musculus
  siRNA target sequence for Mina (NM_025910.2,908-926).
gaaaagctggaatgttact

SEQ ID NO: 720052 - DNA, 19 bp, Mus musculus
  siRNA target sequence for Mina (NM_025910.2,979-997).
cctccctccacattatgat

SEQ ID NO: 720053 - DNA, 19 bp, Mus musculus
  siRNA target sequence for Mina (NM_025910.2,982-1000).
ccctccacattatgatgat

SEQ ID NO: 720054 - DNA, 19 bp, Mus musculus
  siRNA target sequence for Mina (NM_025910.2,984-1002).
ctccacattatgatgatgt

SEQ ID NO: 720055 - DNA, 19 bp, Mus musculus
  siRNA target sequence for Mina (NM_025910.2,995-1013).
gatgatgttgaggttttta

SEQ ID NO: 720056 - DNA, 19 bp, Mus musculus
  siRNA target sequence for Mina (NM_025910.2,1136-1154).
cctggagatttgttgtact

SEQ ID NO: 720057 - DNA, 19 bp, Mus musculus
  siRNA target sequence for Mina (NM_025910.2,1168-1186).
cattcatcaggcagaaact

SEQ ID NO: 720058 - DNA, 19 bp, Mus musculus
  siRNA target sequence for Mina (NM_025910.2,1191-1209).
caggcctggcctactctat

SEQ ID NO: 720059 - DNA, 19 bp, Mus musculus
  siRNA target sequence for Mina (NM_025910.2,1225-1243).
cacctaccagaacaattca

SEQ ID NO: 720060 - DNA, 19 bp, Mus musculus
  siRNA target sequence for Mina (NM_025910.2,1246-1264).
gggagactgccttttggat

SEQ ID NO: 720061 - DNA, 19 bp, Mus musculus
  siRNA target sequence for Mina (NM_025910.2,1247-1265).
ggagactgccttttggatt

SEQ ID NO: 720062 - DNA, 19 bp, Mus musculus
  siRNA target sequence for Mina (NM_025910.2,1266-1284).
ccatttcggggttcgtatt

SEQ ID NO: 720063 - DNA, 19 bp, Mus musculus
  siRNA target sequence for Mina (NM_025910.2,1267-1285).
catttcggggttcgtattt

SEQ ID NO: 720064 - DNA, 19 bp, Mus musculus
  siRNA target sequence for Mina (NM_025910.2,1272-1290).
cggggttcgtatttgacat

SEQ ID NO: 720065 - DNA, 19 bp, Mus musculus
  siRNA target sequence for Mina (NM_025910.2,1298-1316).
gaagatgtggcattaagga

SEQ ID NO: 720066 - DNA, 19 bp, Mus musculus
  siRNA target sequence for Mina (NM_025910.2,1501-1519).
gacgatggacccaggtaaa

SEQ ID NO: 720067 - DNA, 19 bp, Mus musculus
  siRNA target sequence for Mina (NM_025910.2,1503-1521).
cgatggacccaggtaaaca

SEQ ID NO: 720068 - DNA, 19 bp, Mus musculus
  siRNA target sequence for Mina (NM_025910.2,1578-1596).
cagtagggccagataagaa

SEQ ID NO: 720069 - DNA, 19 bp, Mus musculus
  siRNA target sequence for Mina (NM_025910.2,1583-1601).
gggccagataagaatccat

SEQ ID NO: 720070 - DNA, 19 bp, Mus musculus
  siRNA target sequence for Mina (NM_025910.2,1584-1602).
ggccagataagaatccatt

SEQ ID NO: 720071 - DNA, 19 bp, Mus musculus
  siRNA target sequence for Mina (NM_025910.2,1585-1603).
gccagataagaatccattt

SEQ ID NO: 720072 - DNA, 19 bp, Mus musculus
  siRNA target sequence for Mina (NM_025910.2,1654-1672).
gaggcagatgcacatgata

SEQ ID NO: 720073 - DNA, 19 bp, Mus musculus
  siRNA target sequence for Mina (NM_025910.2,1699-1717).
cggtcttcgctttccttta

SEQ ID NO: 720074 - DNA, 19 bp, Mus musculus
  siRNA target sequence for Mina (NM_025910.2,1818-1836).
ctctctggtcggagtcttt

SEQ ID NO: 720075 - DNA, 19 bp, Mus musculus
  siRNA target sequence for Mina (NM_025910.2,1820-1838).
ctctggtcggagtctttaa

SEQ ID NO: 720076 - DNA, 19 bp, Mus musculus
  siRNA target sequence for Mina (NM_025910.2,1824-1842).
ggtcggagtctttaatcca

SEQ ID NO: 720077 - DNA, 19 bp, Mus musculus
  siRNA target sequence for 1810060J02Rik (NM_025911.1,335-353).
cagcttctccggagcttat

SEQ ID NO: 720078 - DNA, 19 bp, Mus musculus
  siRNA target sequence for 1810060J02Rik (NM_025911.1,338-356).
cttctccggagcttatcct

SEQ ID NO: 720079 - DNA, 19 bp, Mus musculus
  siRNA target sequence for 1810060J02Rik (NM_025911.1,509-527).
ctctcttcccacttggttt

SEQ ID NO: 720080 - DNA, 19 bp, Mus musculus
  siRNA target sequence for 1810060J02Rik (NM_025911.1,511-529).
ctcttcccacttggtttaa

SEQ ID NO: 720081 - DNA, 19 bp, Mus musculus
  siRNA target sequence for 1810060J02Rik (NM_025911.1,606-624).
gctccggcaaaaaatatca

SEQ ID NO: 720082 - DNA, 19 bp, Mus musculus
  siRNA target sequence for 1810060J02Rik (NM_025911.1,607-625).
ctccggcaaaaaatatcaa

SEQ ID NO: 720083 - DNA, 19 bp, Mus musculus
  siRNA target sequence for 1810060J02Rik (NM_025911.1,609-627).
ccggcaaaaaatatcaagt

SEQ ID NO: 720084 - DNA, 19 bp, Mus musculus
  siRNA target sequence for 1810060J02Rik (NM_025911.1,771-789).
ccgtgagcttcaggaaaaa

SEQ ID NO: 720085 - DNA, 19 bp, Mus musculus
  siRNA target sequence for 1810060J02Rik (NM_025911.1,826-844).
cacgaggcgctgagcatta

SEQ ID NO: 720086 - DNA, 19 bp, Mus musculus
  siRNA target sequence for 1810060J02Rik (NM_025911.1,828-846).
cgaggcgctgagcattata

SEQ ID NO: 720087 - DNA, 19 bp, Mus musculus
  siRNA target sequence for 1810060J02Rik (NM_025911.1,839-857).
gcattatagtggatgagta

SEQ ID NO: 720088 - DNA, 19 bp, Mus musculus
  siRNA target sequence for 1810060J02Rik (NM_025911.1,899-917).
ccatcgagaagcaatatgt

SEQ ID NO: 720089 - DNA, 19 bp, Mus musculus
  siRNA target sequence for 1810060J02Rik (NM_025911.1,1488-1506).
gcagctgagtgctctaata

SEQ ID NO: 720090 - DNA, 19 bp, Mus musculus
  siRNA target sequence for 1810060J02Rik (NM_025911.1,1513-1531).
gagcctgttgacattgagt

SEQ ID NO: 720091 - DNA, 19 bp, Mus musculus
  siRNA target sequence for 2010011I20Rik (NM_025912.2,278-296).
gtcaccggcacagagaaaa

SEQ ID NO: 720092 - DNA, 19 bp, Mus musculus
  siRNA target sequence for 2010011I20Rik (NM_025912.2,283-301).
cggcacagagaaaaagcta

SEQ ID NO: 720093 - DNA, 19 bp, Mus musculus
  siRNA target sequence for 2010011I20Rik (NM_025912.2,429-447).
ctgcaatcctgcttaaact

SEQ ID NO: 720094 - DNA, 19 bp, Mus musculus
  siRNA target sequence for 2010011I20Rik (NM_025912.2,462-480).
ccctggtgcagtccaaaat

SEQ ID NO: 720095 - DNA, 19 bp, Mus musculus
  siRNA target sequence for 2010011I20Rik (NM_025912.2,569-587).
ccctttgtcgtcagatact

SEQ ID NO: 720096 - DNA, 19 bp, Mus musculus
  siRNA target sequence for 2010011I20Rik (NM_025912.2,570-588).
cctttgtcgtcagatactt

SEQ ID NO: 720097 - DNA, 19 bp, Mus musculus
  siRNA target sequence for 2010011I20Rik (NM_025912.2,589-607).
ccgcagcgttggactcttt

SEQ ID NO: 720098 - DNA, 19 bp, Mus musculus
  siRNA target sequence for 2010011I20Rik (NM_025912.2,590-608).
cgcagcgttggactcttta

SEQ ID NO: 720099 - DNA, 19 bp, Mus musculus
  siRNA target sequence for 2010011I20Rik (NM_025912.2,591-609).
gcagcgttggactctttaa

SEQ ID NO: 720100 - DNA, 19 bp, Mus musculus
  siRNA target sequence for 2010011I20Rik (NM_025912.2,592-610).
cagcgttggactctttaaa

SEQ ID NO: 720101 - DNA, 19 bp, Mus musculus
  siRNA target sequence for 2010011I20Rik (NM_025912.2,595-613).
cgttggactctttaaacct

SEQ ID NO: 720102 - DNA, 19 bp, Mus musculus
  siRNA target sequence for 2010200J04Rik (NM_025914.1,60-78).
cgaccctagttctggataa

SEQ ID NO: 720103 - DNA, 19 bp, Mus musculus
  siRNA target sequence for 2010200J04Rik (NM_025914.1,61-79).
gaccctagttctggataat

SEQ ID NO: 720104 - DNA, 19 bp, Mus musculus
  siRNA target sequence for 2010200J04Rik (NM_025914.1,64-82).
cctagttctggataatgga

SEQ ID NO: 720105 - DNA, 19 bp, Mus musculus
  siRNA target sequence for 2010200J04Rik (NM_025914.1,81-99).
gagcttacaacgccaaaat

SEQ ID NO: 720106 - DNA, 19 bp, Mus musculus
  siRNA target sequence for 2010200J04Rik (NM_025914.1,121-139).
ctcggttattcccaattgt

SEQ ID NO: 720107 - DNA, 19 bp, Mus musculus
  siRNA target sequence for 2010200J04Rik (NM_025914.1,123-141).
cggttattcccaattgtca

SEQ ID NO: 720108 - DNA, 19 bp, Mus musculus
  siRNA target sequence for 2010200J04Rik (NM_025914.1,131-149).
cccaattgtcagttcagat

SEQ ID NO: 720109 - DNA, 19 bp, Mus musculus
  siRNA target sequence for 2010200J04Rik (NM_025914.1,150-168).
ccaaaacagcacgtcttaa

SEQ ID NO: 720110 - DNA, 19 bp, Mus musculus
  siRNA target sequence for 2010200J04Rik (NM_025914.1,156-174).
cagcacgtcttaaaacatt

SEQ ID NO: 720111 - DNA, 19 bp, Mus musculus
  siRNA target sequence for 2010200J04Rik (NM_025914.1,158-176).
gcacgtcttaaaacattta

SEQ ID NO: 720112 - DNA, 19 bp, Mus musculus
  siRNA target sequence for 2010200J04Rik (NM_025914.1,203-221).
gacccttcaggactctttt

SEQ ID NO: 720113 - DNA, 19 bp, Mus musculus
  siRNA target sequence for 2010200J04Rik (NM_025914.1,205-223).
cccttcaggactcttttat

SEQ ID NO: 720114 - DNA, 19 bp, Mus musculus
  siRNA target sequence for 2010200J04Rik (NM_025914.1,259-277).
ggatgtccagcgacaagtt

SEQ ID NO: 720115 - DNA, 19 bp, Mus musculus
  siRNA target sequence for 2010200J04Rik (NM_025914.1,260-278).
gatgtccagcgacaagttt

SEQ ID NO: 720116 - DNA, 19 bp, Mus musculus
  siRNA target sequence for 2010200J04Rik (NM_025914.1,310-328).
ggttgattttttagatact

SEQ ID NO: 720117 - DNA, 19 bp, Mus musculus
  siRNA target sequence for 2010200J04Rik (NM_025914.1,363-381).
cttcaatccaagaatcaat

SEQ ID NO: 720118 - DNA, 19 bp, Mus musculus
  siRNA target sequence for 2010200J04Rik (NM_025914.1,378-396).
caatgaatgaaatcctatt

SEQ ID NO: 720119 - DNA, 19 bp, Mus musculus
  siRNA target sequence for 2010200J04Rik (NM_025914.1,382-400).
gaatgaaatcctattcgaa

SEQ ID NO: 720120 - DNA, 19 bp, Mus musculus
  siRNA target sequence for 2010200J04Rik (NM_025914.1,392-410).
ctattcgaagaatatcagt

SEQ ID NO: 720121 - DNA, 19 bp, Mus musculus
  siRNA target sequence for 2010200J04Rik (NM_025914.1,407-425).
cagttccaagcagtattaa

SEQ ID NO: 720122 - DNA, 19 bp, Mus musculus
  siRNA target sequence for 2010200J04Rik (NM_025914.1,409-427).
gttccaagcagtattaaga

SEQ ID NO: 720123 - DNA, 19 bp, Mus musculus
  siRNA target sequence for 2010200J04Rik (NM_025914.1,412-430).
ccaagcagtattaagagta

SEQ ID NO: 720124 - DNA, 19 bp, Mus musculus
  siRNA target sequence for 2010200J04Rik (NM_025914.1,521-539).
cacattgttccttactgta

SEQ ID NO: 720125 - DNA, 19 bp, Mus musculus
  siRNA target sequence for 2010200J04Rik (NM_025914.1,582-600).
gtggaaagctcttaacgaa

SEQ ID NO: 720126 - DNA, 19 bp, Mus musculus
  siRNA target sequence for 2010200J04Rik (NM_025914.1,592-610).
cttaacgaaccatctaaaa

SEQ ID NO: 720127 - DNA, 19 bp, Mus musculus
  siRNA target sequence for 2010200J04Rik (NM_025914.1,601-619).
ccatctaaaagagatcata

SEQ ID NO: 720128 - DNA, 19 bp, Mus musculus
  siRNA target sequence for 2010200J04Rik (NM_025914.1,602-620).
catctaaaagagatcatat

SEQ ID NO: 720129 - DNA, 19 bp, Mus musculus
  siRNA target sequence for 2010200J04Rik (NM_025914.1,605-623).
ctaaaagagatcatatcct

SEQ ID NO: 720130 - DNA, 19 bp, Mus musculus
  siRNA target sequence for 2010200J04Rik (NM_025914.1,634-652).
gcatgtgatggatgaaact

SEQ ID NO: 720131 - DNA, 19 bp, Mus musculus
  siRNA target sequence for 2010200J04Rik (NM_025914.1,727-745).
gttaaaaggagaagacaat

SEQ ID NO: 720132 - DNA, 19 bp, Mus musculus
  siRNA target sequence for 2010200J04Rik (NM_025914.1,747-765).
cagtgatgattgactatgt

SEQ ID NO: 720133 - DNA, 19 bp, Mus musculus
  siRNA target sequence for 2010200J04Rik (NM_025914.1,770-788).
cctgacttcagcacaatta

SEQ ID NO: 720134 - DNA, 19 bp, Mus musculus
  siRNA target sequence for 2010200J04Rik (NM_025914.1,884-902).
gtgccagaaatactcttta

SEQ ID NO: 720135 - DNA, 19 bp, Mus musculus
  siRNA target sequence for 2010200J04Rik (NM_025914.1,937-955).
cccagaagccattgtctat

SEQ ID NO: 720136 - DNA, 19 bp, Mus musculus
  siRNA target sequence for 2010200J04Rik (NM_025914.1,938-956).
ccagaagccattgtctatt

SEQ ID NO: 720137 - DNA, 19 bp, Mus musculus
  siRNA target sequence for 2010200J04Rik (NM_025914.1,941-959).
gaagccattgtctattcaa

SEQ ID NO: 720138 - DNA, 19 bp, Mus musculus
  siRNA target sequence for 2010200J04Rik (NM_025914.1,1006-1024).
cgttttgacgggaggaaat

SEQ ID NO: 720139 - DNA, 19 bp, Mus musculus
  siRNA target sequence for 2010200J04Rik (NM_025914.1,1007-1025).
gttttgacgggaggaaatt

SEQ ID NO: 720140 - DNA, 19 bp, Mus musculus
  siRNA target sequence for 2010200J04Rik (NM_025914.1,1038-1056).
gattcagagagcgtgttta

SEQ ID NO: 720141 - DNA, 19 bp, Mus musculus
  siRNA target sequence for 2010200J04Rik (NM_025914.1,1048-1066).
gcgtgtttactcagaagtt

SEQ ID NO: 720142 - DNA, 19 bp, Mus musculus
  siRNA target sequence for 2010200J04Rik (NM_025914.1,1083-1101).
cagactatgacgtttctgt

SEQ ID NO: 720143 - DNA, 19 bp, Mus musculus
  siRNA target sequence for 2010200J04Rik (NM_025914.1,1112-1130).
gagaaccccatcacttact

SEQ ID NO: 720144 - DNA, 19 bp, Mus musculus
  siRNA target sequence for 2010200J04Rik (NM_025914.1,1134-1152).
gggaaggtgggaagttgat

SEQ ID NO: 720145 - DNA, 19 bp, Mus musculus
  siRNA target sequence for 2010200J04Rik (NM_025914.1,1135-1153).
ggaaggtgggaagttgata

SEQ ID NO: 720146 - DNA, 19 bp, Mus musculus
  siRNA target sequence for 2010200J04Rik (NM_025914.1,1140-1158).
gtgggaagttgatatctga

SEQ ID NO: 720147 - DNA, 19 bp, Mus musculus
  siRNA target sequence for 2010200J04Rik (NM_025914.1,1147-1165).
gttgatatctgaaaacgat

SEQ ID NO: 720148 - DNA, 19 bp, Mus musculus
  siRNA target sequence for 2010200J04Rik (NM_025914.1,1180-1198).
ggtggttacaagagaagat

SEQ ID NO: 720149 - DNA, 19 bp, Mus musculus
  siRNA target sequence for 2600017H02Rik (NM_025915.2,62-80).
cctcgggatcccctagatt

SEQ ID NO: 720150 - DNA, 19 bp, Mus musculus
  siRNA target sequence for 2600017H02Rik (NM_025915.2,86-104).
gcctgtgcagtgctagtaa

SEQ ID NO: 720151 - DNA, 19 bp, Mus musculus
  siRNA target sequence for 2600017H02Rik (NM_025915.2,283-301).
gttggtcactggattccta

SEQ ID NO: 720152 - DNA, 19 bp, Mus musculus
  siRNA target sequence for 2010315L10Rik (NM_025917.1,21-39).
ggcggaaggagcctatcat

SEQ ID NO: 720153 - DNA, 19 bp, Mus musculus
  siRNA target sequence for 2010315L10Rik (NM_025917.1,53-71).
cgtcgcggttggagttgaa

SEQ ID NO: 720154 - DNA, 19 bp, Mus musculus
  siRNA target sequence for 2010315L10Rik (NM_025917.1,99-117).
gtcgatggcggcagaaaaa

SEQ ID NO: 720155 - DNA, 19 bp, Mus musculus
  siRNA target sequence for 2010315L10Rik (NM_025917.1,102-120).
gatggcggcagaaaaacga

SEQ ID NO: 720156 - DNA, 19 bp, Mus musculus
  siRNA target sequence for 2010315L10Rik (NM_025917.1,230-248).
cccgcaaagtggactttct

SEQ ID NO: 720157 - DNA, 19 bp, Mus musculus
  siRNA target sequence for 2010315L10Rik (NM_025917.1,362-380).
ccaagactgtacatttgca

SEQ ID NO: 720158 - DNA, 19 bp, Mus musculus
  siRNA target sequence for D11Ertd707e (NM_025918.1,125-143).
ccgtttacgccgcttacat

SEQ ID NO: 720159 - DNA, 19 bp, Mus musculus
  siRNA target sequence for D11Ertd707e (NM_025918.1,220-238).
gaagagtctctccttgata

SEQ ID NO: 720160 - DNA, 19 bp, Mus musculus
  siRNA target sequence for D11Ertd707e (NM_025918.1,315-333).
ggccatcgccaccttgatt

SEQ ID NO: 720161 - DNA, 19 bp, Mus musculus
  siRNA target sequence for D11Ertd707e (NM_025918.1,365-383).
gggtggtttcagaagaaga

SEQ ID NO: 720162 - DNA, 19 bp, Mus musculus
  siRNA target sequence for 2010320B01Rik (NM_025920.2,662-680).
gcaggttgagaagaagaat

SEQ ID NO: 720163 - DNA, 19 bp, Mus musculus
  siRNA target sequence for 2010320B01Rik (NM_025920.2,969-987).
ctcaacttctcgttcaact

SEQ ID NO: 720164 - DNA, 19 bp, Mus musculus
  siRNA target sequence for 2010320B01Rik (NM_025920.2,1191-1209).
cagatcactcggaaattca

SEQ ID NO: 720165 - DNA, 19 bp, Mus musculus
  siRNA target sequence for 2010320B01Rik (NM_025920.2,1256-1274).
cactacacagccaatgact

SEQ ID NO: 720166 - DNA, 19 bp, Mus musculus
  siRNA target sequence for 2010320B01Rik (NM_025920.2,1267-1285).
caatgactcaacatcttca

SEQ ID NO: 720167 - DNA, 19 bp, Mus musculus
  siRNA target sequence for 2010320B01Rik (NM_025920.2,1271-1289).
gactcaacatcttcacatt

SEQ ID NO: 720168 - DNA, 19 bp, Mus musculus
  siRNA target sequence for Pmf1 (NM_025928.1,215-233).
ggtgacgcagaggatctat

SEQ ID NO: 720169 - DNA, 19 bp, Mus musculus
  siRNA target sequence for Pmf1 (NM_025928.1,220-238).
cgcagaggatctatgacaa

SEQ ID NO: 720170 - DNA, 19 bp, Mus musculus
  siRNA target sequence for Pmf1 (NM_025928.1,259-277).
catccatccgcgaggaaat

SEQ ID NO: 720171 - DNA, 19 bp, Mus musculus
  siRNA target sequence for Pmf1 (NM_025928.1,267-285).
cgcgaggaaatctcagaaa

SEQ ID NO: 720172 - DNA, 19 bp, Mus musculus
  siRNA target sequence for Pmf1 (NM_025928.1,268-286).
gcgaggaaatctcagaaat

SEQ ID NO: 720173 - DNA, 19 bp, Mus musculus
  siRNA target sequence for Pmf1 (NM_025928.1,320-338).
ctccctggataagatcata

SEQ ID NO: 720174 - DNA, 19 bp, Mus musculus
  siRNA target sequence for Pmf1 (NM_025928.1,437-455).
ggataccctgtgtcatcaa

SEQ ID NO: 720175 - DNA, 19 bp, Mus musculus
  siRNA target sequence for 2010109I03Rik (NM_025929.1,96-114).
ggcgttgaagtgtcatgaa

SEQ ID NO: 720176 - DNA, 19 bp, Mus musculus
  siRNA target sequence for 2010109I03Rik (NM_025929.1,97-115).
gcgttgaagtgtcatgaat

SEQ ID NO: 720177 - DNA, 19 bp, Mus musculus
  siRNA target sequence for 2010109I03Rik (NM_025929.1,174-192).
cttgaccaactggtataca

SEQ ID NO: 720178 - DNA, 19 bp, Mus musculus
  siRNA target sequence for 2010109I03Rik (NM_025929.1,239-257).
gccctgacattaatcatgt

SEQ ID NO: 720179 - DNA, 19 bp, Mus musculus
  siRNA target sequence for 2010109I03Rik (NM_025929.1,288-306).
cacggacctctgcaatagt

SEQ ID NO: 720180 - DNA, 19 bp, Mus musculus
  siRNA target sequence for 2010109I03Rik (NM_025929.1,340-358).
gccctcggcctctgctata

SEQ ID NO: 720181 - DNA, 19 bp, Mus musculus
  siRNA target sequence for 2010109I03Rik (NM_025929.1,341-359).
ccctcggcctctgctatat

SEQ ID NO: 720182 - DNA, 19 bp, Mus musculus
  siRNA target sequence for 2010109I03Rik (NM_025929.1,343-361).
ctcggcctctgctatatct

SEQ ID NO: 720183 - DNA, 19 bp, Mus musculus
  siRNA target sequence for 2010109I03Rik (NM_025929.1,345-363).
cggcctctgctatatctat

SEQ ID NO: 720184 - DNA, 19 bp, Mus musculus
  siRNA target sequence for 2600011C06Rik (NM_025930.1,15-33).
ggctaaacgactaaaagaa

SEQ ID NO: 720185 - DNA, 19 bp, Mus musculus
  siRNA target sequence for 2600011C06Rik (NM_025930.1,16-34).
gctaaacgactaaaagaat

SEQ ID NO: 720186 - DNA, 19 bp, Mus musculus
  siRNA target sequence for 2600011C06Rik (NM_025930.1,17-35).
ctaaacgactaaaagaatt

SEQ ID NO: 720187 - DNA, 19 bp, Mus musculus
  siRNA target sequence for 2600011C06Rik (NM_025930.1,59-77).
gagatgacccgaagtacta

SEQ ID NO: 720188 - DNA, 19 bp, Mus musculus
  siRNA target sequence for 2600011C06Rik (NM_025930.1,61-79).
gatgacccgaagtactaca

SEQ ID NO: 720189 - DNA, 19 bp, Mus musculus
  siRNA target sequence for 2600011C06Rik (NM_025930.1,105-123).
gcgtgatagggaaaaagaa

SEQ ID NO: 720190 - DNA, 19 bp, Mus musculus
  siRNA target sequence for 2600011C06Rik (NM_025930.1,251-269).
ggcgcaggcaacctcaaat

SEQ ID NO: 720191 - DNA, 19 bp, Mus musculus
  siRNA target sequence for 2600011C06Rik (NM_025930.1,252-270).
gcgcaggcaacctcaaata

SEQ ID NO: 720192 - DNA, 19 bp, Mus musculus
  siRNA target sequence for 2600011C06Rik (NM_025930.1,253-271).
cgcaggcaacctcaaataa

SEQ ID NO: 720193 - DNA, 19 bp, Mus musculus
  siRNA target sequence for 2600011C06Rik (NM_025930.1,257-275).
ggcaacctcaaataaagca

SEQ ID NO: 720194 - DNA, 19 bp, Mus musculus
  siRNA target sequence for 2600011C06Rik (NM_025930.1,460-478).
gagtctccttgtggtatta

SEQ ID NO: 720195 - DNA, 19 bp, Mus musculus
  siRNA target sequence for 2600011C06Rik (NM_025930.1,517-535).
gaggagcataggccaaaaa

SEQ ID NO: 720196 - DNA, 19 bp, Mus musculus
  siRNA target sequence for 2600011C06Rik (NM_025930.1,572-590).
ctggccaacctaattcagt

SEQ ID NO: 720197 - DNA, 19 bp, Mus musculus
  siRNA target sequence for 2600011C06Rik (NM_025930.1,613-631).
gatagtgtctttaacaaat

SEQ ID NO: 720198 - DNA, 19 bp, Mus musculus
  siRNA target sequence for 2600011C06Rik (NM_025930.1,617-635).
gtgtctttaacaaattcga

SEQ ID NO: 720199 - DNA, 19 bp, Mus musculus
  siRNA target sequence for 2600011C06Rik (NM_025930.1,652-670).
gatgtgccccgaaaaagga

SEQ ID NO: 720200 - DNA, 19 bp, Mus musculus
  siRNA target sequence for 2600011C06Rik (NM_025930.1,685-703).
gattatggcgaagatgata

SEQ ID NO: 720201 - DNA, 19 bp, Mus musculus
  siRNA target sequence for 2600011C06Rik (NM_025930.1,790-808).
gagctctttgcttatcctt

SEQ ID NO: 720202 - DNA, 19 bp, Mus musculus
  siRNA target sequence for 2600011C06Rik (NM_025930.1,806-824).
ctttggattggtctattgt

SEQ ID NO: 720203 - DNA, 19 bp, Mus musculus
  siRNA target sequence for 2600011C06Rik (NM_025930.1,879-897).
cgaatacataggtgaagaa

SEQ ID NO: 720204 - DNA, 19 bp, Mus musculus
  siRNA target sequence for 2600011C06Rik (NM_025930.1,995-1013).
cagaagtttttatagtcaa

SEQ ID NO: 720205 - DNA, 19 bp, Mus musculus
  siRNA target sequence for 2600011C06Rik (NM_025930.1,997-1015).
gaagtttttatagtcaaaa

SEQ ID NO: 720206 - DNA, 19 bp, Mus musculus
  siRNA target sequence for 2600013G09Rik (NM_025931.2,362-380).
cggccctggtgcagatgtt

SEQ ID NO: 720207 - DNA, 19 bp, Mus musculus
  siRNA target sequence for 2600013G09Rik (NM_025931.2,386-404).
gcgacgggacccatttcca

SEQ ID NO: 720208 - DNA, 19 bp, Mus musculus
  siRNA target sequence for 2600013G09Rik (NM_025931.2,422-440).
caactggagtggatttggt

SEQ ID NO: 720209 - DNA, 19 bp, Mus musculus
  siRNA target sequence for 2600013G09Rik (NM_025931.2,521-539).
ctgaaatgctggataagtt

SEQ ID NO: 720210 - DNA, 19 bp, Mus musculus
  siRNA target sequence for 2600013G09Rik (NM_025931.2,650-668).
ccctcccaggtgttttagt

SEQ ID NO: 720211 - DNA, 19 bp, Mus musculus
  siRNA target sequence for 2600013G09Rik (NM_025931.2,659-677).
gtgttttagtgggaactaa

SEQ ID NO: 720212 - DNA, 19 bp, Mus musculus
  siRNA target sequence for 2600013G09Rik (NM_025931.2,684-702).
cctggctggccgacaaaca

SEQ ID NO: 720213 - DNA, 19 bp, Mus musculus
  siRNA target sequence for 2600013G09Rik (NM_025931.2,766-784).
gtgaaggagatggataatt

SEQ ID NO: 720214 - DNA, 19 bp, Mus musculus
  siRNA target sequence for 2600013G09Rik (NM_025931.2,803-821).
gtctggccaagcagttcta

SEQ ID NO: 720215 - DNA, 19 bp, Mus musculus
  siRNA target sequence for 2600013G09Rik (NM_025931.2,822-840).
ccagctgtaccgggaaaaa

SEQ ID NO: 720216 - DNA, 19 bp, Mus musculus
  siRNA target sequence for Syap1 (NM_025932.1,355-373).
gccttggcaattatttgta

SEQ ID NO: 720217 - DNA, 19 bp, Mus musculus
  siRNA target sequence for Syap1 (NM_025932.1,356-374).
ccttggcaattatttgtat

SEQ ID NO: 720218 - DNA, 19 bp, Mus musculus
  siRNA target sequence for Syap1 (NM_025932.1,361-379).
gcaattatttgtataactt

SEQ ID NO: 720219 - DNA, 19 bp, Mus musculus
  siRNA target sequence for Syap1 (NM_025932.1,398-416).
gaagataactgaatctgtt

SEQ ID NO: 720220 - DNA, 19 bp, Mus musculus
  siRNA target sequence for Syap1 (NM_025932.1,426-444).
gctcagacaatcaagaaat

SEQ ID NO: 720221 - DNA, 19 bp, Mus musculus
  siRNA target sequence for Syap1 (NM_025932.1,468-486).
gatatccttgacaagacta

SEQ ID NO: 720222 - DNA, 19 bp, Mus musculus
  siRNA target sequence for Syap1 (NM_025932.1,482-500).
gactattttaggagatttt

SEQ ID NO: 720223 - DNA, 19 bp, Mus musculus
  siRNA target sequence for Syap1 (NM_025932.1,566-584).
gtgggttgagagtcatgat

SEQ ID NO: 720224 - DNA, 19 bp, Mus musculus
  siRNA target sequence for Syap1 (NM_025932.1,568-586).
gggttgagagtcatgatga

SEQ ID NO: 720225 - DNA, 19 bp, Mus musculus
  siRNA target sequence for Syap1 (NM_025932.1,569-587).
ggttgagagtcatgatgaa

SEQ ID NO: 720226 - DNA, 19 bp, Mus musculus
  siRNA target sequence for Syap1 (NM_025932.1,577-595).
gtcatgatgaagagacaat

SEQ ID NO: 720227 - DNA, 19 bp, Mus musculus
  siRNA target sequence for Syap1 (NM_025932.1,654-672).
gctggtgtgcagtttaact

SEQ ID NO: 720228 - DNA, 19 bp, Mus musculus
  siRNA target sequence for Syap1 (NM_025932.1,742-760).
gatttgcccttgttcctaa

SEQ ID NO: 720229 - DNA, 19 bp, Mus musculus
  siRNA target sequence for Syap1 (NM_025932.1,802-820).
gaatctccctgattaagca

SEQ ID NO: 720230 - DNA, 19 bp, Mus musculus
  siRNA target sequence for Syap1 (NM_025932.1,914-932).
ggcagtacggcccaaaaca

SEQ ID NO: 720231 - DNA, 19 bp, Mus musculus
  siRNA target sequence for Syap1 (NM_025932.1,931-949).
caccacctgtcgtaatcaa

SEQ ID NO: 720232 - DNA, 19 bp, Mus musculus
  siRNA target sequence for Syap1 (NM_025932.1,933-951).
ccacctgtcgtaatcaaat

SEQ ID NO: 720233 - DNA, 19 bp, Mus musculus
  siRNA target sequence for Syap1 (NM_025932.1,1014-1032).
gttagtgatgccttcgata

SEQ ID NO: 720234 - DNA, 19 bp, Mus musculus
  siRNA target sequence for Syap1 (NM_025932.1,1028-1046).
cgatacgtgcagcttaaat

SEQ ID NO: 720235 - DNA, 19 bp, Mus musculus
  siRNA target sequence for Syap1 (NM_025932.1,1039-1057).
gcttaaatcaggaggattt

SEQ ID NO: 720236 - DNA, 19 bp, Mus musculus
  siRNA target sequence for Syap1 (NM_025932.1,1040-1058).
cttaaatcaggaggattta

SEQ ID NO: 720237 - DNA, 19 bp, Mus musculus
  siRNA target sequence for Syap1 (NM_025932.1,1049-1067).
ggaggatttaagaaaggaa

SEQ ID NO: 720238 - DNA, 19 bp, Mus musculus
  siRNA target sequence for Syap1 (NM_025932.1,1074-1092).
caacttgtgcttgataaga

SEQ ID NO: 720239 - DNA, 19 bp, Mus musculus
  siRNA target sequence for Syap1 (NM_025932.1,1105-1123).
caactgcactagaagaaga

SEQ ID NO: 720240 - DNA, 19 bp, Mus musculus
  siRNA target sequence for Syap1 (NM_025932.1,1188-1206).
gagaagcgagatgaaaact

SEQ ID NO: 720241 - DNA, 19 bp, Mus musculus
  siRNA target sequence for 2010110M21Rik (NM_025933.1,80-98).
cgtccaagcccccagttat

SEQ ID NO: 720242 - DNA, 19 bp, Mus musculus
  siRNA target sequence for 2010110M21Rik (NM_025933.1,83-101).
ccaagcccccagttatcga

SEQ ID NO: 720243 - DNA, 19 bp, Mus musculus
  siRNA target sequence for 2010110M21Rik (NM_025933.1,251-269).
gccaccgatcccaactcat

SEQ ID NO: 720244 - DNA, 19 bp, Mus musculus
  siRNA target sequence for 2010110M21Rik (NM_025933.1,302-320).
cggtcgtagccatcttgtt

SEQ ID NO: 720245 - DNA, 19 bp, Mus musculus
  siRNA target sequence for 2010110M21Rik (NM_025933.1,328-346).
gcggcatctgctatgaagt

SEQ ID NO: 720246 - DNA, 19 bp, Mus musculus
  siRNA target sequence for 2610009C09Rik (NM_025935.1,75-93).
cgactctcagaggaacttt

SEQ ID NO: 720247 - DNA, 19 bp, Mus musculus
  siRNA target sequence for 2610009C09Rik (NM_025935.1,90-108).
ctttcgatcagtctactat

SEQ ID NO: 720248 - DNA, 19 bp, Mus musculus
  siRNA target sequence for 2610009C09Rik (NM_025935.1,94-112).
cgatcagtctactatgaga

SEQ ID NO: 720249 - DNA, 19 bp, Mus musculus
  siRNA target sequence for 2610009C09Rik (NM_025935.1,95-113).
gatcagtctactatgagaa

SEQ ID NO: 720250 - DNA, 19 bp, Mus musculus
  siRNA target sequence for 2610009C09Rik (NM_025935.1,183-201).
cgagaagctttgcacattt

SEQ ID NO: 720251 - DNA, 19 bp, Mus musculus
  siRNA target sequence for 2610009C09Rik (NM_025935.1,213-231).
ccctctcccatccatgtat

SEQ ID NO: 720252 - DNA, 19 bp, Mus musculus
  siRNA target sequence for 2610009C09Rik (NM_025935.1,249-267).
ggcgcttctaggcatctta

SEQ ID NO: 720253 - DNA, 19 bp, Mus musculus
  siRNA target sequence for 2610009C09Rik (NM_025935.1,271-289).
ccgcaccatgacactcatt

SEQ ID NO: 720254 - DNA, 19 bp, Mus musculus
  siRNA target sequence for 2610009C09Rik (NM_025935.1,374-392).
cacaggctgaagtgtatct

SEQ ID NO: 720255 - DNA, 19 bp, Mus musculus
  siRNA target sequence for 2610009C09Rik (NM_025935.1,394-412).
cgcatgtatcagcttgaat

SEQ ID NO: 720256 - DNA, 19 bp, Mus musculus
  siRNA target sequence for 2610009C09Rik (NM_025935.1,450-468).
gccggaggatgaagtcttt

SEQ ID NO: 720257 - DNA, 19 bp, Mus musculus
  siRNA target sequence for 2610009C09Rik (NM_025935.1,452-470).
cggaggatgaagtctttct

SEQ ID NO: 720258 - DNA, 19 bp, Mus musculus
  siRNA target sequence for 2610009C09Rik (NM_025935.1,592-610).
gctttcgagcagtacttga

SEQ ID NO: 720259 - DNA, 19 bp, Mus musculus
  siRNA target sequence for 2610009C09Rik (NM_025935.1,593-611).
ctttcgagcagtacttgaa

SEQ ID NO: 720260 - DNA, 19 bp, Mus musculus
  siRNA target sequence for 2610009C09Rik (NM_025935.1,778-796).
gtagcggtagaaatactat

SEQ ID NO: 720261 - DNA, 19 bp, Mus musculus
  siRNA target sequence for 2610009C09Rik (NM_025935.1,781-799).
gcggtagaaatactattaa

SEQ ID NO: 720262 - DNA, 19 bp, Mus musculus
  siRNA target sequence for 2610009C09Rik (NM_025935.1,830-848).
gtgcagagaagataacgaa

SEQ ID NO: 720263 - DNA, 19 bp, Mus musculus
  siRNA target sequence for 2610020O08Rik (NM_025937.2,459-477).
catcctcgtccgcctatta

SEQ ID NO: 720264 - DNA, 19 bp, Mus musculus
  siRNA target sequence for 2610020O08Rik (NM_025937.2,613-631).
gggactttccccaaagaat

SEQ ID NO: 720265 - DNA, 19 bp, Mus musculus
  siRNA target sequence for 2610020O08Rik (NM_025937.2,677-695).
ccaaagaaaagcactactt

SEQ ID NO: 720266 - DNA, 19 bp, Mus musculus
  siRNA target sequence for 2610020O08Rik (NM_025937.2,688-706).
cactacttcagcatctagt

SEQ ID NO: 720267 - DNA, 19 bp, Mus musculus
  siRNA target sequence for 2610020O08Rik (NM_025937.2,727-745).
gaaaaggaaatctagtcat

SEQ ID NO: 720268 - DNA, 19 bp, Mus musculus
  siRNA target sequence for 2610020O08Rik (NM_025937.2,847-865).
ctccagcgatgaagattca

SEQ ID NO: 720269 - DNA, 19 bp, Mus musculus
  siRNA target sequence for 2610020O08Rik (NM_025937.2,964-982).
cagtgattcgagctctaaa

SEQ ID NO: 720270 - DNA, 19 bp, Mus musculus
  siRNA target sequence for 2610020O08Rik (NM_025937.2,966-984).
gtgattcgagctctaaaga

SEQ ID NO: 720271 - DNA, 19 bp, Mus musculus
  siRNA target sequence for 2610020O08Rik (NM_025937.2,968-986).
gattcgagctctaaagagt

SEQ ID NO: 720272 - DNA, 19 bp, Mus musculus
  siRNA target sequence for 2610020O08Rik (NM_025937.2,1031-1049).
gcagaagaaccatcagatt

SEQ ID NO: 720273 - DNA, 19 bp, Mus musculus
  siRNA target sequence for 2610020O08Rik (NM_025937.2,1032-1050).
cagaagaaccatcagattt

SEQ ID NO: 720274 - DNA, 19 bp, Mus musculus
  siRNA target sequence for 2610020O08Rik (NM_025937.2,1034-1052).
gaagaaccatcagatttga

SEQ ID NO: 720275 - DNA, 19 bp, Mus musculus
  siRNA target sequence for 2610020O08Rik (NM_025937.2,1088-1106).
gatgataagcctttgaact

SEQ ID NO: 720276 - DNA, 19 bp, Mus musculus
  siRNA target sequence for 2610020O08Rik (NM_025937.2,1385-1403).
cgtgagatggtatacagaa

SEQ ID NO: 720277 - DNA, 19 bp, Mus musculus
  siRNA target sequence for 2610020O08Rik (NM_025937.2,1386-1404).
gtgagatggtatacagaaa

SEQ ID NO: 720278 - DNA, 19 bp, Mus musculus
  siRNA target sequence for 2610511E03Rik (NM_025938.1,166-184).
gccagcgactgcatatgaa

SEQ ID NO: 720279 - DNA, 19 bp, Mus musculus
  siRNA target sequence for 2610511E03Rik (NM_025938.1,229-247).
ctgtctagagtttcaagaa

SEQ ID NO: 720280 - DNA, 19 bp, Mus musculus
  siRNA target sequence for 2610511E03Rik (NM_025938.1,368-386).
ctgtcggccatcttgagaa

SEQ ID NO: 720281 - DNA, 19 bp, Mus musculus
  siRNA target sequence for 2610511E03Rik (NM_025938.1,370-388).
gtcggccatcttgagaata

SEQ ID NO: 720282 - DNA, 19 bp, Mus musculus
  siRNA target sequence for 2610511E03Rik (NM_025938.1,393-411).
gcagtggtctggtcaaatt

SEQ ID NO: 720283 - DNA, 19 bp, Mus musculus
  siRNA target sequence for 2610511E03Rik (NM_025938.1,394-412).
cagtggtctggtcaaatta

SEQ ID NO: 720284 - DNA, 19 bp, Mus musculus
  siRNA target sequence for 2610511E03Rik (NM_025938.1,398-416).
ggtctggtcaaattatgga

SEQ ID NO: 720285 - DNA, 19 bp, Mus musculus
  siRNA target sequence for 2610511E03Rik (NM_025938.1,404-422).
gtcaaattatggagttctt

SEQ ID NO: 720286 - DNA, 19 bp, Mus musculus
  siRNA target sequence for 2610511E03Rik (NM_025938.1,427-445).
cttgtttggagcctataaa

SEQ ID NO: 720287 - DNA, 19 bp, Mus musculus
  siRNA target sequence for 2610511E03Rik (NM_025938.1,456-474).
gtgccttcagagtgattca

SEQ ID NO: 720288 - DNA, 19 bp, Mus musculus
  siRNA target sequence for 2610511E03Rik (NM_025938.1,494-512).
gcattatctggcaatagca

SEQ ID NO: 720289 - DNA, 19 bp, Mus musculus
  siRNA target sequence for 2810428J06Rik (NM_025941.1,1037-1055).
gactccagtccctaggtat

SEQ ID NO: 720290 - DNA, 19 bp, Mus musculus
  siRNA target sequence for 2810428J06Rik (NM_025941.1,1042-1060).
cagtccctaggtatctgat

SEQ ID NO: 720291 - DNA, 19 bp, Mus musculus
  siRNA target sequence for 2810428J06Rik (NM_025941.1,1061-1079).
gccttttctggtcttcata

SEQ ID NO: 720292 - DNA, 19 bp, Mus musculus
  siRNA target sequence for 2810428J06Rik (NM_025941.1,1183-1201).
ctgatgggactataagact

SEQ ID NO: 720293 - DNA, 19 bp, Mus musculus
  siRNA target sequence for 2810428J06Rik (NM_025941.1,1185-1203).
gatgggactataagactat

SEQ ID NO: 720294 - DNA, 19 bp, Mus musculus
  siRNA target sequence for 2810428J06Rik (NM_025941.1,1189-1207).
ggactataagactatcctt

SEQ ID NO: 720295 - DNA, 19 bp, Mus musculus
  siRNA target sequence for 2810428J06Rik (NM_025941.1,1190-1208).
gactataagactatccttt

SEQ ID NO: 720296 - DNA, 19 bp, Mus musculus
  siRNA target sequence for 2810428J06Rik (NM_025941.1,1192-1210).
ctataagactatcctttaa

SEQ ID NO: 720297 - DNA, 19 bp, Mus musculus
  siRNA target sequence for 2810428J06Rik (NM_025941.1,1211-1229).
catagctcgtgccattcaa

SEQ ID NO: 720298 - DNA, 19 bp, Mus musculus
  siRNA target sequence for 2810428J06Rik (NM_025941.1,1216-1234).
ctcgtgccattcaacagaa

SEQ ID NO: 720299 - DNA, 19 bp, Mus musculus
  siRNA target sequence for 2810428J06Rik (NM_025941.1,1219-1237).
gtgccattcaacagaaaca

SEQ ID NO: 720300 - DNA, 19 bp, Mus musculus
  siRNA target sequence for 2810428J06Rik (NM_025941.1,1227-1245).
caacagaaacagctaatat

SEQ ID NO: 720301 - DNA, 19 bp, Mus musculus
  siRNA target sequence for 2810428J06Rik (NM_025941.1,1248-1266).
gatccatacttttctaaat

SEQ ID NO: 720302 - DNA, 19 bp, Mus musculus
  siRNA target sequence for 2810432L12Rik (NM_025944.2,329-347).
gtgcagctcttcattctaa

SEQ ID NO: 720303 - DNA, 19 bp, Mus musculus
  siRNA target sequence for 2810432L12Rik (NM_025944.2,388-406).
ccggctcctccactcatat

SEQ ID NO: 720304 - DNA, 19 bp, Mus musculus
  siRNA target sequence for 2810432L12Rik (NM_025944.2,389-407).
cggctcctccactcatatt

SEQ ID NO: 720305 - DNA, 19 bp, Mus musculus
  siRNA target sequence for 2810432L12Rik (NM_025944.2,413-431).
ctgcgtcattggcatctaa

SEQ ID NO: 720306 - DNA, 19 bp, Mus musculus
  siRNA target sequence for 2810432L12Rik (NM_025944.2,556-574).
ctggctggtgattaccata

SEQ ID NO: 720307 - DNA, 19 bp, Mus musculus
  siRNA target sequence for 2810432L12Rik (NM_025944.2,558-576).
ggctggtgattaccataat

SEQ ID NO: 720308 - DNA, 19 bp, Mus musculus
  siRNA target sequence for 2810432L12Rik (NM_025944.2,560-578).
ctggtgattaccataatca

SEQ ID NO: 720309 - DNA, 19 bp, Mus musculus
  siRNA target sequence for 2810432L12Rik (NM_025944.2,562-580).
ggtgattaccataatcact

SEQ ID NO: 720310 - DNA, 19 bp, Mus musculus
  siRNA target sequence for 2810432L12Rik (NM_025944.2,589-607).
gcagcctggctttcattat

SEQ ID NO: 720311 - DNA, 19 bp, Mus musculus
  siRNA target sequence for 2810432L12Rik (NM_025944.2,597-615).
gctttcattatgtcttaca

SEQ ID NO: 720312 - DNA, 19 bp, Mus musculus
  siRNA target sequence for 2810432L12Rik (NM_025944.2,788-806).
gacccttccactaactcat

SEQ ID NO: 720313 - DNA, 19 bp, Mus musculus
  siRNA target sequence for 2810432L12Rik (NM_025944.2,790-808).
cccttccactaactcattt

SEQ ID NO: 720314 - DNA, 19 bp, Mus musculus
  siRNA target sequence for 2810432L12Rik (NM_025944.2,967-985).
ccaagatgccctgtatcta

SEQ ID NO: 720315 - DNA, 19 bp, Mus musculus
  siRNA target sequence for 2810432L12Rik (NM_025944.2,1005-1023).
ggctacagcactacatcaa

SEQ ID NO: 720316 - DNA, 19 bp, Mus musculus
  siRNA target sequence for 2810432L12Rik (NM_025944.2,1175-1193).
ctggtgggccgacactatt

SEQ ID NO: 720317 - DNA, 19 bp, Mus musculus
  siRNA target sequence for 2810432L12Rik (NM_025944.2,1177-1195).
ggtgggccgacactatttt

SEQ ID NO: 720318 - DNA, 19 bp, Mus musculus
  siRNA target sequence for 2810432L12Rik (NM_025944.2,1400-1418).
cccaaccttgtgaaacaca

SEQ ID NO: 720319 - DNA, 19 bp, Mus musculus
  siRNA target sequence for 2810432L12Rik (NM_025944.2,1401-1419).
ccaaccttgtgaaacacat

SEQ ID NO: 720320 - DNA, 19 bp, Mus musculus
  siRNA target sequence for 2810432L12Rik (NM_025944.2,1429-1447).
ctccagcctacggtacaat

SEQ ID NO: 720321 - DNA, 19 bp, Mus musculus
  siRNA target sequence for 2810432L12Rik (NM_025944.2,1431-1449).
ccagcctacggtacaattt

SEQ ID NO: 720322 - DNA, 19 bp, Mus musculus
  siRNA target sequence for 2810432L12Rik (NM_025944.2,1432-1450).
cagcctacggtacaatttt

SEQ ID NO: 720323 - DNA, 19 bp, Mus musculus
  siRNA target sequence for 2810432L12Rik (NM_025944.2,1434-1452).
gcctacggtacaattttca

SEQ ID NO: 720324 - DNA, 19 bp, Mus musculus
  siRNA target sequence for 2810432L12Rik (NM_025944.2,1435-1453).
cctacggtacaattttcat

SEQ ID NO: 720325 - DNA, 19 bp, Mus musculus
  siRNA target sequence for Dncl2a (NM_025947.1,208-226).
gcactgtgcgtgagattga

SEQ ID NO: 720326 - DNA, 19 bp, Mus musculus
  siRNA target sequence for Dncl2a (NM_025947.1,229-247).
cccaaaacgacctaacctt

SEQ ID NO: 720327 - DNA, 19 bp, Mus musculus
  siRNA target sequence for Dncl2a (NM_025947.1,284-302).
ggcaccagataaagactat

SEQ ID NO: 720328 - DNA, 19 bp, Mus musculus
  siRNA target sequence for Dncl2a (NM_025947.1,285-303).
gcaccagataaagactatt

SEQ ID NO: 720329 - DNA, 19 bp, Mus musculus
  siRNA target sequence for 2700023B17Rik (NM_025948.1,167-185).
ggtagccctcgccaaagtt

SEQ ID NO: 720330 - DNA, 19 bp, Mus musculus
  siRNA target sequence for 2700023B17Rik (NM_025948.1,229-247).
cgcctcgagatgaagtctt

SEQ ID NO: 720331 - DNA, 19 bp, Mus musculus
  siRNA target sequence for 2700023B17Rik (NM_025948.1,303-321).
cccaaaccacaatgttctt

SEQ ID NO: 720332 - DNA, 19 bp, Mus musculus
  siRNA target sequence for 2700023B17Rik (NM_025948.1,304-322).
ccaaaccacaatgttcttt

SEQ ID NO: 720333 - DNA, 19 bp, Mus musculus
  siRNA target sequence for 2700023B17Rik (NM_025948.1,354-372).
ctaggttcgtcgtcatctt

SEQ ID NO: 720334 - DNA, 19 bp, Mus musculus
  siRNA target sequence for 2700023B17Rik (NM_025948.1,386-404).
gggttcctatggacctttt

SEQ ID NO: 720335 - DNA, 19 bp, Mus musculus
  siRNA target sequence for 2700023B17Rik (NM_025948.1,428-446).
gttcagtccaagtacatta

SEQ ID NO: 720336 - DNA, 19 bp, Mus musculus
  siRNA target sequence for 2700023B17Rik (NM_025948.1,431-449).
cagtccaagtacattagtt

SEQ ID NO: 720337 - DNA, 19 bp, Mus musculus
  siRNA target sequence for 2700023B17Rik (NM_025948.1,474-492).
gttgctggaaactctttga

SEQ ID NO: 720338 - DNA, 19 bp, Mus musculus
  siRNA target sequence for 2700023B17Rik (NM_025948.1,560-578).
cacacaagacacaagatct

SEQ ID NO: 720339 - DNA, 19 bp, Mus musculus
  siRNA target sequence for 2700023B17Rik (NM_025948.1,569-587).
cacaagatctgtaaaacca

SEQ ID NO: 720340 - DNA, 19 bp, Mus musculus
  siRNA target sequence for 2700023B17Rik (NM_025948.1,604-622).
gatcaagccctcagttaga

SEQ ID NO: 720341 - DNA, 19 bp, Mus musculus
  siRNA target sequence for 2700023B17Rik (NM_025948.1,615-633).
cagttagaccctttgagaa

SEQ ID NO: 720342 - DNA, 19 bp, Mus musculus
  siRNA target sequence for 2700023B17Rik (NM_025948.1,892-910).
gcaggggaagatttggtat

SEQ ID NO: 720343 - DNA, 19 bp, Mus musculus
  siRNA target sequence for 2700023B17Rik (NM_025948.1,913-931).
gtcgagatggtccaatgaa

SEQ ID NO: 720344 - DNA, 19 bp, Mus musculus
  siRNA target sequence for 2700023B17Rik (NM_025948.1,915-933).
cgagatggtccaatgaaat

SEQ ID NO: 720345 - DNA, 19 bp, Mus musculus
  siRNA target sequence for 2700023B17Rik (NM_025948.1,921-939).
ggtccaatgaaatttgaga

SEQ ID NO: 720346 - DNA, 19 bp, Mus musculus
  siRNA target sequence for 2700023B17Rik (NM_025948.1,983-1001).
ggaaattgacagagagttt

SEQ ID NO: 720347 - DNA, 19 bp, Mus musculus
  siRNA target sequence for 2700023B17Rik (NM_025948.1,994-1012).
gagagtttcataataaact

SEQ ID NO: 720348 - DNA, 19 bp, Mus musculus
  siRNA target sequence for 2700023B17Rik (NM_025948.1,996-1014).
gagtttcataataaactta

SEQ ID NO: 720349 - DNA, 19 bp, Mus musculus
  siRNA target sequence for 2700023B17Rik (NM_025948.1,1002-1020).
cataataaacttaaactga

SEQ ID NO: 720350 - DNA, 19 bp, Mus musculus
  siRNA target sequence for 2700023B17Rik (NM_025948.1,1011-1029).
cttaaactgaaagaagata

SEQ ID NO: 720351 - DNA, 19 bp, Mus musculus
  siRNA target sequence for 2700023B17Rik (NM_025948.1,1175-1193).
catctcttgtgatgataat

SEQ ID NO: 720352 - DNA, 19 bp, Mus musculus
  siRNA target sequence for 2700023B17Rik (NM_025948.1,1367-1385).
gtttcgtgctggattcaga

SEQ ID NO: 720353 - DNA, 19 bp, Mus musculus
  siRNA target sequence for 2700023B17Rik (NM_025948.1,1402-1420).
gggagtttgcagactttga

SEQ ID NO: 720354 - DNA, 19 bp, Mus musculus
  siRNA target sequence for 2700023B17Rik (NM_025948.1,1403-1421).
ggagtttgcagactttgaa

SEQ ID NO: 720355 - DNA, 19 bp, Mus musculus
  siRNA target sequence for 1700019N12Rik (NM_025953.1,98-116).
gcccaaacacgcaaaccat

SEQ ID NO: 720356 - DNA, 19 bp, Mus musculus
  siRNA target sequence for 1700019N12Rik (NM_025953.1,137-155).
cagcctgtacggagatgtt

SEQ ID NO: 720357 - DNA, 19 bp, Mus musculus
  siRNA target sequence for 1700019N12Rik (NM_025953.1,224-242).
cgacgaagagggcaaatct

SEQ ID NO: 720358 - DNA, 19 bp, Mus musculus
  siRNA target sequence for 1700019N12Rik (NM_025953.1,231-249).
gagggcaaatctgtaagaa

SEQ ID NO: 720359 - DNA, 19 bp, Mus musculus
  siRNA target sequence for 1700019N12Rik (NM_025953.1,328-346).
cacgtcgagagcttgaact

SEQ ID NO: 720360 - DNA, 19 bp, Mus musculus
  siRNA target sequence for 1700019N12Rik (NM_025953.1,401-419).
cttagcatcgtctacttca

SEQ ID NO: 720361 - DNA, 19 bp, Mus musculus
  siRNA target sequence for 1700019N12Rik (NM_025953.1,409-427).
cgtctacttcagaatcact

SEQ ID NO: 720362 - DNA, 19 bp, Mus musculus
  siRNA target sequence for 1700019N12Rik (NM_025953.1,410-428).
gtctacttcagaatcacta

SEQ ID NO: 720363 - DNA, 19 bp, Mus musculus
  siRNA target sequence for 1700019N12Rik (NM_025953.1,412-430).
ctacttcagaatcactaat

SEQ ID NO: 720364 - DNA, 19 bp, Mus musculus
  siRNA target sequence for 1700019N12Rik (NM_025953.1,540-558).
gccctcatcacatataggt

SEQ ID NO: 720365 - DNA, 19 bp, Mus musculus
  siRNA target sequence for 1700019N12Rik (NM_025953.1,567-585).
ggcaggaaccacttcatga

SEQ ID NO: 720366 - DNA, 19 bp, Mus musculus
  siRNA target sequence for 1700019N12Rik (NM_025953.1,571-589).
ggaaccacttcatgactaa

SEQ ID NO: 720367 - DNA, 19 bp, Mus musculus
  siRNA target sequence for 1700019N12Rik (NM_025953.1,572-590).
gaaccacttcatgactaaa

SEQ ID NO: 720368 - DNA, 19 bp, Mus musculus
  siRNA target sequence for 1700019N12Rik (NM_025953.1,628-646).
ggaacaagaggctgtactt

SEQ ID NO: 720369 - DNA, 19 bp, Mus musculus
  siRNA target sequence for 1700019N12Rik (NM_025953.1,629-647).
gaacaagaggctgtacttt

SEQ ID NO: 720370 - DNA, 19 bp, Mus musculus
  siRNA target sequence for 1700011H14Rik (NM_025956.2,76-94).
cctcgggtgatcaaagtca

SEQ ID NO: 720371 - DNA, 19 bp, Mus musculus
  siRNA target sequence for 1700011H14Rik (NM_025956.2,84-102).
gatcaaagtcacaccttta

SEQ ID NO: 720372 - DNA, 19 bp, Mus musculus
  siRNA target sequence for 1700011H14Rik (NM_025956.2,133-151).
ggccctgtgttctttgcat

SEQ ID NO: 720373 - DNA, 19 bp, Mus musculus
  siRNA target sequence for 1700011H14Rik (NM_025956.2,226-244).
ccaccgcttcgagaaactt

SEQ ID NO: 720374 - DNA, 19 bp, Mus musculus
  siRNA target sequence for 1700011H14Rik (NM_025956.2,235-253).
cgagaaacttggtatggaa

SEQ ID NO: 720375 - DNA, 19 bp, Mus musculus
  siRNA target sequence for 1700011H14Rik (NM_025956.2,288-306).
catcccactgaaacatgaa

SEQ ID NO: 720376 - DNA, 19 bp, Mus musculus
  siRNA target sequence for 1700011H14Rik (NM_025956.2,331-349).
ccaccccgaagaattcaaa

SEQ ID NO: 720377 - DNA, 19 bp, Mus musculus
  siRNA target sequence for 1700011H14Rik (NM_025956.2,332-350).
caccccgaagaattcaaaa

SEQ ID NO: 720378 - DNA, 19 bp, Mus musculus
  siRNA target sequence for 1700011H14Rik (NM_025956.2,364-382).
gacctgccacaagcaatta

SEQ ID NO: 720379 - DNA, 19 bp, Mus musculus
  siRNA target sequence for 1700011H14Rik (NM_025956.2,367-385).
ctgccacaagcaattacct

SEQ ID NO: 720380 - DNA, 19 bp, Mus musculus
  siRNA target sequence for 1700011H14Rik (NM_025956.2,468-486).
gtacacttctgggaaaaga

SEQ ID NO: 720381 - DNA, 19 bp, Mus musculus
  siRNA target sequence for 1700011H14Rik (NM_025956.2,511-529).
ctagagatgaaccataaaa

SEQ ID NO: 720382 - DNA, 19 bp, Mus musculus
  siRNA target sequence for 1700011H14Rik (NM_025956.2,530-548).
gacaagaggcccaaatgga

SEQ ID NO: 720383 - DNA, 19 bp, Mus musculus
  siRNA target sequence for 1700011H14Rik (NM_025956.2,569-587).
gtaaggcgatgcttgatat

SEQ ID NO: 720384 - DNA, 19 bp, Mus musculus
  siRNA target sequence for 1700011H14Rik (NM_025956.2,600-618).
ggaccataatggcaataaa

SEQ ID NO: 720385 - DNA, 19 bp, Mus musculus
  siRNA target sequence for 1700011H14Rik (NM_025956.2,601-619).
gaccataatggcaataaaa

SEQ ID NO: 720386 - DNA, 19 bp, Mus musculus
  siRNA target sequence for 1700011H14Rik (NM_025956.2,662-680).
ccatactgcctaatgaaaa

SEQ ID NO: 720387 - DNA, 19 bp, Mus musculus
  siRNA target sequence for 1700011H14Rik (NM_025956.2,732-750).
cacagagaatgactattat

SEQ ID NO: 720388 - DNA, 19 bp, Mus musculus
  siRNA target sequence for 1700011H14Rik (NM_025956.2,744-762).
ctattatgtccggaaaatt

SEQ ID NO: 720389 - DNA, 19 bp, Mus musculus
  siRNA target sequence for 1700011H14Rik (NM_025956.2,901-919).
cctctttatgatgactttt

SEQ ID NO: 720390 - DNA, 19 bp, Mus musculus
  siRNA target sequence for Ceacam14 (NM_025957.2,185-203).
ccagctcaccatcaaatca

SEQ ID NO: 720391 - DNA, 19 bp, Mus musculus
  siRNA target sequence for Ceacam14 (NM_025957.2,294-312).
gctagagtgctcaagagtt

SEQ ID NO: 720392 - DNA, 19 bp, Mus musculus
  siRNA target sequence for Ceacam14 (NM_025957.2,300-318).
gtgctcaagagttgtgaaa

SEQ ID NO: 720393 - DNA, 19 bp, Mus musculus
  siRNA target sequence for Ceacam14 (NM_025957.2,353-371).
gatcggactttcacatagt

SEQ ID NO: 720394 - DNA, 19 bp, Mus musculus
  siRNA target sequence for Ceacam14 (NM_025957.2,462-480).
gcaaactcaagacctaaaa

SEQ ID NO: 720395 - DNA, 19 bp, Mus musculus
  siRNA target sequence for Ceacam14 (NM_025957.2,709-727).
ccatgctggggcatgcata

SEQ ID NO: 720396 - DNA, 19 bp, Mus musculus
  siRNA target sequence for 1810073E21Rik (NM_025960.2,62-80).
cggacgcggtgctattcga

SEQ ID NO: 720397 - DNA, 19 bp, Mus musculus
  siRNA target sequence for 1810073E21Rik (NM_025960.2,68-86).
cggtgctattcgagtttct

SEQ ID NO: 720398 - DNA, 19 bp, Mus musculus
  siRNA target sequence for 1810037K07Rik (NM_025962.1,328-346).
ccaatcggcgacctaagat

SEQ ID NO: 720399 - DNA, 19 bp, Mus musculus
  siRNA target sequence for 1810037K07Rik (NM_025962.1,329-347).
caatcggcgacctaagatt

SEQ ID NO: 720400 - DNA, 19 bp, Mus musculus
  siRNA target sequence for 1810037K07Rik (NM_025962.1,477-495).
gccatccgaggggttatgt

SEQ ID NO: 720401 - DNA, 19 bp, Mus musculus
  siRNA target sequence for 1810037K07Rik (NM_025962.1,478-496).
ccatccgaggggttatgtt

SEQ ID NO: 720402 - DNA, 19 bp, Mus musculus
  siRNA target sequence for 1810037K07Rik (NM_025962.1,505-523).
ggattgaagtgccaaattt

SEQ ID NO: 720403 - DNA, 19 bp, Mus musculus
  siRNA target sequence for 1810037K07Rik (NM_025962.1,576-594).
ctgcttgaaggtttcaatt

SEQ ID NO: 720404 - DNA, 19 bp, Mus musculus
  siRNA target sequence for 1810037K07Rik (NM_025962.1,643-661).
ggtactccgaagaacagaa

SEQ ID NO: 720405 - DNA, 19 bp, Mus musculus
  siRNA target sequence for 1810037K07Rik (NM_025962.1,686-704).
ccaacgcttggccctatta

SEQ ID NO: 720406 - DNA, 19 bp, Mus musculus
  siRNA target sequence for 2310038H17Rik (NM_025964.2,781-799).
gcaatagggctccagaaat

SEQ ID NO: 720407 - DNA, 19 bp, Mus musculus
  siRNA target sequence for 2310038H17Rik (NM_025964.2,896-914).
cggctgtcgtcctttccat

SEQ ID NO: 720408 - DNA, 19 bp, Mus musculus
  siRNA target sequence for 2310038H17Rik (NM_025964.2,1028-1046).
cggatcggaaagtagcatt

SEQ ID NO: 720409 - DNA, 19 bp, Mus musculus
  siRNA target sequence for 2310038H17Rik (NM_025964.2,1029-1047).
ggatcggaaagtagcatta

SEQ ID NO: 720410 - DNA, 19 bp, Mus musculus
  siRNA target sequence for 2310038H17Rik (NM_025964.2,1033-1051).
cggaaagtagcattagagt

SEQ ID NO: 720411 - DNA, 19 bp, Mus musculus
  siRNA target sequence for 2310038H17Rik (NM_025964.2,1039-1057).
gtagcattagagtttctta

SEQ ID NO: 720412 - DNA, 19 bp, Mus musculus
  siRNA target sequence for 2310038H17Rik (NM_025964.2,1092-1110).
ccaacctaaggctgttgtt

SEQ ID NO: 720413 - DNA, 19 bp, Mus musculus
  siRNA target sequence for 2310038H17Rik (NM_025964.2,1093-1111).
caacctaaggctgttgtta

SEQ ID NO: 720414 - DNA, 19 bp, Mus musculus
  siRNA target sequence for 2310038H17Rik (NM_025964.2,1116-1134).
gctgacttggggacaaaat

SEQ ID NO: 720415 - DNA, 19 bp, Mus musculus
  siRNA target sequence for 2310038H17Rik (NM_025964.2,1117-1135).
ctgacttggggacaaaatt

SEQ ID NO: 720416 - DNA, 19 bp, Mus musculus
  siRNA target sequence for 2310038H17Rik (NM_025964.2,1154-1172).
gagaatttgatctcatact

SEQ ID NO: 720417 - DNA, 19 bp, Mus musculus
  siRNA target sequence for 2310038H17Rik (NM_025964.2,1175-1193).
gagctgatgtcatatactt

SEQ ID NO: 720418 - DNA, 19 bp, Mus musculus
  siRNA target sequence for 2310038H17Rik (NM_025964.2,1178-1196).
ctgatgtcatatacttaga

SEQ ID NO: 720419 - DNA, 19 bp, Mus musculus
  siRNA target sequence for 2310038H17Rik (NM_025964.2,1231-1249).
catctctgtagcaacaatt

SEQ ID NO: 720420 - DNA, 19 bp, Mus musculus
  siRNA target sequence for 2310038H17Rik (NM_025964.2,1241-1259).
gcaacaattctgtgattct

SEQ ID NO: 720421 - DNA, 19 bp, Mus musculus
  siRNA target sequence for 2310038H17Rik (NM_025964.2,1276-1294).
cgctatgaacgggatagta

SEQ ID NO: 720422 - DNA, 19 bp, Mus musculus
  siRNA target sequence for 2310038H17Rik (NM_025964.2,1277-1295).
gctatgaacgggatagtaa

SEQ ID NO: 720423 - DNA, 19 bp, Mus musculus
  siRNA target sequence for 2310038H17Rik (NM_025964.2,1282-1300).
gaacgggatagtaacttct

SEQ ID NO: 720424 - DNA, 19 bp, Mus musculus
  siRNA target sequence for 2310038H17Rik (NM_025964.2,1285-1303).
cgggatagtaacttcttaa

SEQ ID NO: 720425 - DNA, 19 bp, Mus musculus
  siRNA target sequence for 2310038H17Rik (NM_025964.2,1287-1305).
ggatagtaacttcttaaca

SEQ ID NO: 720426 - DNA, 19 bp, Mus musculus
  siRNA target sequence for 2310038H17Rik (NM_025964.2,1288-1306).
gatagtaacttcttaacaa

SEQ ID NO: 720427 - DNA, 19 bp, Mus musculus
  siRNA target sequence for 2310038H17Rik (NM_025964.2,1325-1343).
ctgtgagtaaggttcacta

SEQ ID NO: 720428 - DNA, 19 bp, Mus musculus
  siRNA target sequence for 2310038H17Rik (NM_025964.2,1349-1367).
ctgagaaggacgtacacat

SEQ ID NO: 720429 - DNA, 19 bp, Mus musculus
  siRNA target sequence for Ssr1 (NM_025965.2,180-198).
ggctcaagatcctacagaa

SEQ ID NO: 720430 - DNA, 19 bp, Mus musculus
  siRNA target sequence for Ssr1 (NM_025965.2,329-347).
ccagtgcagacacaactat

SEQ ID NO: 720431 - DNA, 19 bp, Mus musculus
  siRNA target sequence for Ssr1 (NM_025965.2,330-348).
cagtgcagacacaactatt

SEQ ID NO: 720432 - DNA, 19 bp, Mus musculus
  siRNA target sequence for Ssr1 (NM_025965.2,367-385).
gattttccggcaaacaaca

SEQ ID NO: 720433 - DNA, 19 bp, Mus musculus
  siRNA target sequence for Ssr1 (NM_025965.2,377-395).
caaacaacatcgtgaagtt

SEQ ID NO: 720434 - DNA, 19 bp, Mus musculus
  siRNA target sequence for Ssr1 (NM_025965.2,393-411).
gttcctggttggctttaca

SEQ ID NO: 720435 - DNA, 19 bp, Mus musculus
  siRNA target sequence for Ssr1 (NM_025965.2,414-432).
caaggggacagaagatttt

SEQ ID NO: 720436 - DNA, 19 bp, Mus musculus
  siRNA target sequence for Ssr1 (NM_025965.2,466-484).
cctcaggactaccagtttt

SEQ ID NO: 720437 - DNA, 19 bp, Mus musculus
  siRNA target sequence for Ssr1 (NM_025965.2,535-553).
cggcaggcaacttttgagt

SEQ ID NO: 720438 - DNA, 19 bp, Mus musculus
  siRNA target sequence for Ssr1 (NM_025965.2,536-554).
ggcaggcaacttttgagta

SEQ ID NO: 720439 - DNA, 19 bp, Mus musculus
  siRNA target sequence for Ssr1 (NM_025965.2,537-555).
gcaggcaacttttgagtat

SEQ ID NO: 720440 - DNA, 19 bp, Mus musculus
  siRNA target sequence for Ssr1 (NM_025965.2,541-559).
gcaacttttgagtattcct

SEQ ID NO: 720441 - DNA, 19 bp, Mus musculus
  siRNA target sequence for Ssr1 (NM_025965.2,587-605).
gaccctttggtctggttat

SEQ ID NO: 720442 - DNA, 19 bp, Mus musculus
  siRNA target sequence for Ssr1 (NM_025965.2,589-607).
ccctttggtctggttatca

SEQ ID NO: 720443 - DNA, 19 bp, Mus musculus
  siRNA target sequence for Ssr1 (NM_025965.2,590-608).
cctttggtctggttatcaa

SEQ ID NO: 720444 - DNA, 19 bp, Mus musculus
  siRNA target sequence for Ssr1 (NM_025965.2,591-609).
ctttggtctggttatcaat

SEQ ID NO: 720445 - DNA, 19 bp, Mus musculus
  siRNA target sequence for Ssr1 (NM_025965.2,596-614).
gtctggttatcaatctgaa

SEQ ID NO: 720446 - DNA, 19 bp, Mus musculus
  siRNA target sequence for Ssr1 (NM_025965.2,601-619).
gttatcaatctgaactaca

SEQ ID NO: 720447 - DNA, 19 bp, Mus musculus
  siRNA target sequence for Ssr1 (NM_025965.2,610-628).
ctgaactacaaagatttga

SEQ ID NO: 720448 - DNA, 19 bp, Mus musculus
  siRNA target sequence for Ssr1 (NM_025965.2,622-640).
gatttgaacggcaatgtat

SEQ ID NO: 720449 - DNA, 19 bp, Mus musculus
  siRNA target sequence for Ssr1 (NM_025965.2,663-681).
gacggtcacagttattgaa

SEQ ID NO: 720450 - DNA, 19 bp, Mus musculus
  siRNA target sequence for Ssr1 (NM_025965.2,701-719).
gagaaacaatttttatgta

SEQ ID NO: 720451 - DNA, 19 bp, Mus musculus
  siRNA target sequence for Ssr1 (NM_025965.2,766-784).
cagctcctggaatctagaa

SEQ ID NO: 720452 - DNA, 19 bp, Mus musculus
  siRNA target sequence for Ssr1 (NM_025965.2,788-806).
gcaagagacccatacagaa

SEQ ID NO: 720453 - DNA, 19 bp, Mus musculus
  siRNA target sequence for Ssr1 (NM_025965.2,792-810).
gagacccatacagaaagta

SEQ ID NO: 720454 - DNA, 19 bp, Mus musculus
  siRNA target sequence for Ssr1 (NM_025965.2,821-839).
cctcaagtcagaatgatgt

SEQ ID NO: 720455 - DNA, 19 bp, Mus musculus
  siRNA target sequence for Ssr1 (NM_025965.2,824-842).
caagtcagaatgatgttga

SEQ ID NO: 720456 - DNA, 19 bp, Mus musculus
  siRNA target sequence for Ssr1 (NM_025965.2,827-845).
gtcagaatgatgttgacat

SEQ ID NO: 720457 - DNA, 19 bp, Mus musculus
  siRNA target sequence for Ssr1 (NM_025965.2,870-888).
gaatcagatcaataaagct

SEQ ID NO: 720458 - DNA, 19 bp, Mus musculus
  siRNA target sequence for Ssr1 (NM_025965.2,924-942).
gcgatcggtgggatctgat

SEQ ID NO: 720459 - DNA, 19 bp, Mus musculus
  siRNA target sequence for D16Ertd472e (NM_025967.2,212-230).
cagtttgtaagcattgact

SEQ ID NO: 720460 - DNA, 19 bp, Mus musculus
  siRNA target sequence for D16Ertd472e (NM_025967.2,239-257).
gacaacatttgcagtgttt

SEQ ID NO: 720461 - DNA, 19 bp, Mus musculus
  siRNA target sequence for D16Ertd472e (NM_025967.2,241-259).
caacatttgcagtgtttgt

SEQ ID NO: 720462 - DNA, 19 bp, Mus musculus
  siRNA target sequence for D16Ertd472e (NM_025967.2,298-316).
catttgcttcgagctaaat

SEQ ID NO: 720463 - DNA, 19 bp, Mus musculus
  siRNA target sequence for D16Ertd472e (NM_025967.2,424-442).
caagctttccaaaagtact

SEQ ID NO: 720464 - DNA, 19 bp, Mus musculus
  siRNA target sequence for D16Ertd472e (NM_025967.2,460-478).
catcgtgagtaagaagata

SEQ ID NO: 720465 - DNA, 19 bp, Mus musculus
  siRNA target sequence for D16Ertd472e (NM_025967.2,488-506).
gtgcagtatgcccaaaata

SEQ ID NO: 720466 - DNA, 19 bp, Mus musculus
  siRNA target sequence for D16Ertd472e (NM_025967.2,523-541).
gtccgagtgttccaaaact

SEQ ID NO: 720467 - DNA, 19 bp, Mus musculus
  siRNA target sequence for D16Ertd472e (NM_025967.2,583-601).
gaaattgctcccacagttt

SEQ ID NO: 720468 - DNA, 19 bp, Mus musculus
  siRNA target sequence for D16Ertd472e (NM_025967.2,660-678).
caagctatgcgcagagaat

SEQ ID NO: 720469 - DNA, 19 bp, Mus musculus
  siRNA target sequence for D16Ertd472e (NM_025967.2,826-844).
cagccgtgaagaattgaat

SEQ ID NO: 720470 - DNA, 19 bp, Mus musculus
  siRNA target sequence for D16Ertd472e (NM_025967.2,847-865).
gatgactcttgctgaagta

SEQ ID NO: 720471 - DNA, 19 bp, Mus musculus
  siRNA target sequence for D16Ertd472e (NM_025967.2,852-870).
ctcttgctgaagtagtaca

SEQ ID NO: 720472 - DNA, 19 bp, Mus musculus
  siRNA target sequence for D16Ertd472e (NM_025967.2,883-901).
gctccaacagcgaatccaa

SEQ ID NO: 720473 - DNA, 19 bp, Mus musculus
  siRNA target sequence for D16Ertd472e (NM_025967.2,904-922).
ggtttttgaagagttaaca

SEQ ID NO: 720474 - DNA, 19 bp, Mus musculus
  siRNA target sequence for 1700034H14Rik (NM_025969.1,238-256).
cttttctacgagttgtaca

SEQ ID NO: 720475 - DNA, 19 bp, Mus musculus
  siRNA target sequence for 1700034H14Rik (NM_025969.1,289-307).
ggcagttgttgccacattt

SEQ ID NO: 720476 - DNA, 19 bp, Mus musculus
  siRNA target sequence for 1700034H14Rik (NM_025969.1,290-308).
gcagttgttgccacatttt

SEQ ID NO: 720477 - DNA, 19 bp, Mus musculus
  siRNA target sequence for 1700034H14Rik (NM_025969.1,352-370).
ggctgcgagagcagaagat

SEQ ID NO: 720478 - DNA, 19 bp, Mus musculus
  siRNA target sequence for 1700034H14Rik (NM_025969.1,353-371).
gctgcgagagcagaagata

SEQ ID NO: 720479 - DNA, 19 bp, Mus musculus
  siRNA target sequence for 1700034H14Rik (NM_025969.1,354-372).
ctgcgagagcagaagataa

SEQ ID NO: 720480 - DNA, 19 bp, Mus musculus
  siRNA target sequence for 1700034H14Rik (NM_025969.1,356-374).
gcgagagcagaagataaca

SEQ ID NO: 720481 - DNA, 19 bp, Mus musculus
  siRNA target sequence for 1700034H14Rik (NM_025969.1,393-411).
cttaggttcacccagaaaa

SEQ ID NO: 720482 - DNA, 19 bp, Mus musculus
  siRNA target sequence for 1700034H14Rik (NM_025969.1,457-475).
gtaccaagcaagtgtctat

SEQ ID NO: 720483 - DNA, 19 bp, Mus musculus
  siRNA target sequence for 1700034H14Rik (NM_025969.1,495-513).
gaaaccggcgtctcaatgt

SEQ ID NO: 720484 - DNA, 19 bp, Mus musculus
  siRNA target sequence for 1700034H14Rik (NM_025969.1,538-556).
gagacgtcagctacttgat

SEQ ID NO: 720485 - DNA, 19 bp, Mus musculus
  siRNA target sequence for 1700034H14Rik (NM_025969.1,578-596).
ccttacaggcggcttgtta

SEQ ID NO: 720486 - DNA, 19 bp, Mus musculus
  siRNA target sequence for 1700034H14Rik (NM_025969.1,579-597).
cttacaggcggcttgttat

SEQ ID NO: 720487 - DNA, 19 bp, Mus musculus
  siRNA target sequence for 1700034H14Rik (NM_025969.1,593-611).
gttatacgcgatcttcaaa

SEQ ID NO: 720488 - DNA, 19 bp, Mus musculus
  siRNA target sequence for 1700034H14Rik (NM_025969.1,601-619).
cgatcttcaaagaactgtt

SEQ ID NO: 720489 - DNA, 19 bp, Mus musculus
  siRNA target sequence for 1700034H14Rik (NM_025969.1,625-643).
cgtccagccctaatatcat

SEQ ID NO: 720490 - DNA, 19 bp, Mus musculus
  siRNA target sequence for 1700034H14Rik (NM_025969.1,628-646).
ccagccctaatatcatata

SEQ ID NO: 720491 - DNA, 19 bp, Mus musculus
  siRNA target sequence for 1700034H14Rik (NM_025969.1,679-697).
ctgaggtgattggtgtatt

SEQ ID NO: 720492 - DNA, 19 bp, Mus musculus
  siRNA target sequence for 1700034H14Rik (NM_025969.1,790-808).
gcatccgtgtgaaattcta

SEQ ID NO: 720493 - DNA, 19 bp, Mus musculus
  siRNA target sequence for 1700034H14Rik (NM_025969.1,794-812).
ccgtgtgaaattctacatt

SEQ ID NO: 720494 - DNA, 19 bp, Mus musculus
  siRNA target sequence for 1700034H14Rik (NM_025969.1,868-886).
cagggagtggccagtttga

SEQ ID NO: 720495 - DNA, 19 bp, Mus musculus
  siRNA target sequence for 1700034H14Rik (NM_025969.1,877-895).
gccagtttgaatttcgata

SEQ ID NO: 720496 - DNA, 19 bp, Mus musculus
  siRNA target sequence for 1700034H14Rik (NM_025969.1,911-929).
gactcctacaagatctatt

SEQ ID NO: 720497 - DNA, 19 bp, Mus musculus
  siRNA target sequence for 1700034H14Rik (NM_025969.1,939-957).
gataaccgttccgaacaaa

SEQ ID NO: 720498 - DNA, 19 bp, Mus musculus
  siRNA target sequence for 2010001H09Rik (NM_025970.1,37-55).
gatgttagagattacaatt

SEQ ID NO: 720499 - DNA, 19 bp, Mus musculus
  siRNA target sequence for 2010001H09Rik (NM_025970.1,40-58).
gttagagattacaatttga

SEQ ID NO: 720500 - DNA, 19 bp, Mus musculus
  siRNA target sequence for 2010001H09Rik (NM_025970.1,84-102).
caagtatcctccagtcaat

SEQ ID NO: 720501 - DNA, 19 bp, Mus musculus
  siRNA target sequence for 2010001H09Rik (NM_025970.1,92-110).
ctccagtcaatcgaaaata

SEQ ID NO: 720502 - DNA, 19 bp, Mus musculus
  siRNA target sequence for 2010001H09Rik (NM_025970.1,97-115).
gtcaatcgaaaatatgaat

SEQ ID NO: 720503 - DNA, 19 bp, Mus musculus
  siRNA target sequence for 2010001H09Rik (NM_025970.1,99-117).
caatcgaaaatatgaatat

SEQ ID NO: 720504 - DNA, 19 bp, Mus musculus
  siRNA target sequence for 2010001H09Rik (NM_025970.1,187-205).
gccatggccatgtttggtt

SEQ ID NO: 720505 - DNA, 19 bp, Mus musculus
  siRNA target sequence for 2010001H09Rik (NM_025970.1,298-316).
gacgagtggctttacaagt

SEQ ID NO: 720506 - DNA, 19 bp, Mus musculus
  siRNA target sequence for 2010001H09Rik (NM_025970.1,301-319).
gagtggctttacaagttca

SEQ ID NO: 720507 - DNA, 19 bp, Mus musculus
  siRNA target sequence for 2010001H09Rik (NM_025970.1,320-338).
gcgctgatgagtacttcat

SEQ ID NO: 720508 - DNA, 19 bp, Mus musculus
  siRNA target sequence for 2010001H09Rik (NM_025970.1,321-339).
cgctgatgagtacttcata

SEQ ID NO: 720509 - DNA, 19 bp, Mus musculus
  siRNA target sequence for 2010001H09Rik (NM_025970.1,344-362).
gggaagtgaaagtacttaa

SEQ ID NO: 720510 - DNA, 19 bp, Mus musculus
  siRNA target sequence for 2010001H09Rik (NM_025970.1,346-364).
gaagtgaaagtacttaata

SEQ ID NO: 720511 - DNA, 19 bp, Mus musculus
  siRNA target sequence for 2900001A12Rik (NM_025971.1,262-280).
cccaaatctgggttcacaa

SEQ ID NO: 720512 - DNA, 19 bp, Mus musculus
  siRNA target sequence for 2900001A12Rik (NM_025971.1,263-281).
ccaaatctgggttcacaaa

SEQ ID NO: 720513 - DNA, 19 bp, Mus musculus
  siRNA target sequence for 2900001A12Rik (NM_025971.1,264-282).
caaatctgggttcacaaaa

SEQ ID NO: 720514 - DNA, 19 bp, Mus musculus
  siRNA target sequence for 2900001A12Rik (NM_025971.1,283-301).
ccagttcagagtgaaaatt

SEQ ID NO: 720515 - DNA, 19 bp, Mus musculus
  siRNA target sequence for 2900001A12Rik (NM_025971.1,322-340).
gtggagaggccatatggaa

SEQ ID NO: 720516 - DNA, 19 bp, Mus musculus
  siRNA target sequence for 2210023K21Rik (NM_025972.1,158-176).
ggactccgcctctcttcaa

SEQ ID NO: 720517 - DNA, 19 bp, Mus musculus
  siRNA target sequence for 2210023K21Rik (NM_025972.1,297-315).
cgggatggtcggagaaatt

SEQ ID NO: 720518 - DNA, 19 bp, Mus musculus
  siRNA target sequence for 2210023K21Rik (NM_025972.1,435-453).
cgcattctgcaccagtatt

SEQ ID NO: 720519 - DNA, 19 bp, Mus musculus
  siRNA target sequence for 2210023K21Rik (NM_025972.1,437-455).
cattctgcaccagtattgt

SEQ ID NO: 720520 - DNA, 19 bp, Mus musculus
  siRNA target sequence for 2210023K21Rik (NM_025972.1,467-485).
cccaaggccatatttacca

SEQ ID NO: 720521 - DNA, 19 bp, Mus musculus
  siRNA target sequence for 2210023K21Rik (NM_025972.1,490-508).
cggaacctggactatcctt

SEQ ID NO: 720522 - DNA, 19 bp, Mus musculus
  siRNA target sequence for 2210023K21Rik (NM_025972.1,491-509).
ggaacctggactatccttt

SEQ ID NO: 720523 - DNA, 19 bp, Mus musculus
  siRNA target sequence for 2210023K21Rik (NM_025972.1,492-510).
gaacctggactatcctttt

SEQ ID NO: 720524 - DNA, 19 bp, Mus musculus
  siRNA target sequence for 2210023K21Rik (NM_025972.1,533-551).
cagcgaacgtgcagtttat

SEQ ID NO: 720525 - DNA, 19 bp, Mus musculus
  siRNA target sequence for 2210023K21Rik (NM_025972.1,535-553).
gcgaacgtgcagtttataa

SEQ ID NO: 720526 - DNA, 19 bp, Mus musculus
  siRNA target sequence for 2210023K21Rik (NM_025972.1,536-554).
cgaacgtgcagtttataaa

SEQ ID NO: 720527 - DNA, 19 bp, Mus musculus
  siRNA target sequence for 2210023K21Rik (NM_025972.1,620-638).
gtccacacaagtttacaat

SEQ ID NO: 720528 - DNA, 19 bp, Mus musculus
  siRNA target sequence for 2210023K21Rik (NM_025972.1,622-640).
ccacacaagtttacaattt

SEQ ID NO: 720529 - DNA, 19 bp, Mus musculus
  siRNA target sequence for 2210023K21Rik (NM_025972.1,788-806).
ccctcattgctgacgttta

SEQ ID NO: 720530 - DNA, 19 bp, Mus musculus
  siRNA target sequence for 2210023K21Rik (NM_025972.1,789-807).
cctcattgctgacgtttat

SEQ ID NO: 720531 - DNA, 19 bp, Mus musculus
  siRNA target sequence for 2210023K21Rik (NM_025972.1,830-848).
ccaaggagggagtagtcat

SEQ ID NO: 720532 - DNA, 19 bp, Mus musculus
  siRNA target sequence for 2210023K21Rik (NM_025972.1,909-927).
gttccgagttgagacaaat

SEQ ID NO: 720533 - DNA, 19 bp, Mus musculus
  siRNA target sequence for 2210023K21Rik (NM_025972.1,912-930).
ccgagttgagacaaattat

SEQ ID NO: 720534 - DNA, 19 bp, Mus musculus
  siRNA target sequence for 2210023K21Rik (NM_025972.1,914-932).
gagttgagacaaattatga

SEQ ID NO: 720535 - DNA, 19 bp, Mus musculus
  siRNA target sequence for 2210023K21Rik (NM_025972.1,954-972).
ggtggatgaccgaagaaca

SEQ ID NO: 720536 - DNA, 19 bp, Mus musculus
  siRNA target sequence for 2210023K21Rik (NM_025972.1,1001-1019).
ggcaagctcacctcaatct

SEQ ID NO: 720537 - DNA, 19 bp, Mus musculus
  siRNA target sequence for 2210023K21Rik (NM_025972.1,1051-1069).
cctgtttataacaactaca

SEQ ID NO: 720538 - DNA, 19 bp, Mus musculus
  siRNA target sequence for 2210023K21Rik (NM_025972.1,1054-1072).
gtttataacaactacacaa

SEQ ID NO: 720539 - DNA, 19 bp, Mus musculus
  siRNA target sequence for 2210023K21Rik (NM_025972.1,1062-1080).
caactacacaatttatact

SEQ ID NO: 720540 - DNA, 19 bp, Mus musculus
  siRNA target sequence for 2210023K21Rik (NM_025972.1,1065-1083).
ctacacaatttatactaca

SEQ ID NO: 720541 - DNA, 19 bp, Mus musculus
  siRNA target sequence for Tcte1l (NM_025975.3,129-147).
gctgatgaagcccataata

SEQ ID NO: 720542 - DNA, 19 bp, Mus musculus
  siRNA target sequence for Tcte1l (NM_025975.3,135-153).
gaagcccataatatagtca

SEQ ID NO: 720543 - DNA, 19 bp, Mus musculus
  siRNA target sequence for Tcte1l (NM_025975.3,139-157).
cccataatatagtcaaaga

SEQ ID NO: 720544 - DNA, 19 bp, Mus musculus
  siRNA target sequence for Tcte1l (NM_025975.3,171-189).
gttttgggtggtaacgatt

SEQ ID NO: 720545 - DNA, 19 bp, Mus musculus
  siRNA target sequence for Tcte1l (NM_025975.3,178-196).
gtggtaacgattataatga

SEQ ID NO: 720546 - DNA, 19 bp, Mus musculus
  siRNA target sequence for Tcte1l (NM_025975.3,186-204).
gattataatgagaataaca

SEQ ID NO: 720547 - DNA, 19 bp, Mus musculus
  siRNA target sequence for Tcte1l (NM_025975.3,195-213).
gagaataacatcaaccaat

SEQ ID NO: 720548 - DNA, 19 bp, Mus musculus
  siRNA target sequence for Tcte1l (NM_025975.3,209-227).
ccaatggactgcaagcata

SEQ ID NO: 720549 - DNA, 19 bp, Mus musculus
  siRNA target sequence for Tcte1l (NM_025975.3,223-241).
gcatagtggaacagtctat

SEQ ID NO: 720550 - DNA, 19 bp, Mus musculus
  siRNA target sequence for Tcte1l (NM_025975.3,224-242).
catagtggaacagtctata

SEQ ID NO: 720551 - DNA, 19 bp, Mus musculus
  siRNA target sequence for Tcte1l (NM_025975.3,230-248).
ggaacagtctataacacat

SEQ ID NO: 720552 - DNA, 19 bp, Mus musculus
  siRNA target sequence for Tcte1l (NM_025975.3,231-249).
gaacagtctataacacatt

SEQ ID NO: 720553 - DNA, 19 bp, Mus musculus
  siRNA target sequence for Tcte1l (NM_025975.3,258-276).
ctggggaaagcttacaagt

SEQ ID NO: 720554 - DNA, 19 bp, Mus musculus
  siRNA target sequence for Tcte1l (NM_025975.3,263-281).
gaaagcttacaagtacatt

SEQ ID NO: 720555 - DNA, 19 bp, Mus musculus
  siRNA target sequence for Tcte1l (NM_025975.3,381-399).
gagaaccgtaccatgaact

SEQ ID NO: 720556 - DNA, 19 bp, Mus musculus
  siRNA target sequence for Tcte1l (NM_025975.3,401-419).
catcgtgaatgtttttgca

SEQ ID NO: 720557 - DNA, 19 bp, Mus musculus
  siRNA target sequence for Bfar (NM_025976.1,270-288).
gctacgacaccctggttaa

SEQ ID NO: 720558 - DNA, 19 bp, Mus musculus
  siRNA target sequence for Bfar (NM_025976.1,423-441).
gggatgccattgaaaagtt

SEQ ID NO: 720559 - DNA, 19 bp, Mus musculus
  siRNA target sequence for Bfar (NM_025976.1,454-472).
cattagaatgcgagttgaa

SEQ ID NO: 720560 - DNA, 19 bp, Mus musculus
  siRNA target sequence for Bfar (NM_025976.1,459-477).
gaatgcgagttgaagacat

SEQ ID NO: 720561 - DNA, 19 bp, Mus musculus
  siRNA target sequence for Bfar (NM_025976.1,556-574).
cacagggcgagtaaatcct

SEQ ID NO: 720562 - DNA, 19 bp, Mus musculus
  siRNA target sequence for Bfar (NM_025976.1,598-616).
cggtgttctcacagcttta

SEQ ID NO: 720563 - DNA, 19 bp, Mus musculus
  siRNA target sequence for Bfar (NM_025976.1,647-665).
cattggcgcagcagagaat

SEQ ID NO: 720564 - DNA, 19 bp, Mus musculus
  siRNA target sequence for Bfar (NM_025976.1,651-669).
ggcgcagcagagaatctga

SEQ ID NO: 720565 - DNA, 19 bp, Mus musculus
  siRNA target sequence for Bfar (NM_025976.1,655-673).
cagcagagaatctgaacat

SEQ ID NO: 720566 - DNA, 19 bp, Mus musculus
  siRNA target sequence for Bfar (NM_025976.1,686-704).
cacaaggctgtagataagt

SEQ ID NO: 720567 - DNA, 19 bp, Mus musculus
  siRNA target sequence for Bfar (NM_025976.1,760-778).
gtacagagacaggttctta

SEQ ID NO: 720568 - DNA, 19 bp, Mus musculus
  siRNA target sequence for Bfar (NM_025976.1,788-806).
gtaaatggaaggttgcttt

SEQ ID NO: 720569 - DNA, 19 bp, Mus musculus
  siRNA target sequence for Bfar (NM_025976.1,831-849).
ccagggcaccttataccat

SEQ ID NO: 720570 - DNA, 19 bp, Mus musculus
  siRNA target sequence for Bfar (NM_025976.1,954-972).
cgggtagatccctattctt

SEQ ID NO: 720571 - DNA, 19 bp, Mus musculus
  siRNA target sequence for Bfar (NM_025976.1,995-1013).
cccagacttggcttgctat

SEQ ID NO: 720572 - DNA, 19 bp, Mus musculus
  siRNA target sequence for Bfar (NM_025976.1,996-1014).
ccagacttggcttgctata

SEQ ID NO: 720573 - DNA, 19 bp, Mus musculus
  siRNA target sequence for Bfar (NM_025976.1,999-1017).
gacttggcttgctatacct

SEQ ID NO: 720574 - DNA, 19 bp, Mus musculus
  siRNA target sequence for Bfar (NM_025976.1,1086-1104).
gctctggcgaggacatttt

SEQ ID NO: 720575 - DNA, 19 bp, Mus musculus
  siRNA target sequence for Bfar (NM_025976.1,1159-1177).
cgtcaagtactcctttctt

SEQ ID NO: 720576 - DNA, 19 bp, Mus musculus
  siRNA target sequence for Bfar (NM_025976.1,1342-1360).
gagccacttctggaaagta

SEQ ID NO: 720577 - DNA, 19 bp, Mus musculus
  siRNA target sequence for Bfar (NM_025976.1,1362-1380).
cgacacaggggcttttcat

SEQ ID NO: 720578 - DNA, 19 bp, Mus musculus
  siRNA target sequence for Bfar (NM_025976.1,1387-1405).
gttctggccgcttattcct

SEQ ID NO: 720579 - DNA, 19 bp, Mus musculus
  siRNA target sequence for Bfar (NM_025976.1,1393-1411).
gccgcttattcctcagttt

SEQ ID NO: 720580 - DNA, 19 bp, Mus musculus
  siRNA target sequence for Bfar (NM_025976.1,1395-1413).
cgcttattcctcagtttgt

SEQ ID NO: 720581 - DNA, 19 bp, Mus musculus
  siRNA target sequence for Bfar (NM_025976.1,1406-1424).
cagtttgtctgcaactgtt

SEQ ID NO: 720582 - DNA, 19 bp, Mus musculus
  siRNA target sequence for Bfar (NM_025976.1,1412-1430).
gtctgcaactgtttatttt

SEQ ID NO: 720583 - DNA, 19 bp, Mus musculus
  siRNA target sequence for Bfar (NM_025976.1,1439-1457).
ctgtacttcaacccaatta

SEQ ID NO: 720584 - DNA, 19 bp, Mus musculus
  siRNA target sequence for Bfar (NM_025976.1,1441-1459).
gtacttcaacccaattatt

SEQ ID NO: 720585 - DNA, 19 bp, Mus musculus
  siRNA target sequence for Bfar (NM_025976.1,1447-1465).
caacccaattattaacatt

SEQ ID NO: 720586 - DNA, 19 bp, Mus musculus
  siRNA target sequence for Bfar (NM_025976.1,1452-1470).
caattattaacattgatct

SEQ ID NO: 720587 - DNA, 19 bp, Mus musculus
  siRNA target sequence for 2510048L02Rik (NM_025977.1,292-310).
ctgacgactgtgtttctca

SEQ ID NO: 720588 - DNA, 19 bp, Mus musculus
  siRNA target sequence for 2510048L02Rik (NM_025977.1,324-342).
ccgttactcgccatcacat

SEQ ID NO: 720589 - DNA, 19 bp, Mus musculus
  siRNA target sequence for 2510048L02Rik (NM_025977.1,461-479).
gaacactgcttctgaacaa

SEQ ID NO: 720590 - DNA, 19 bp, Mus musculus
  siRNA target sequence for 2510048L02Rik (NM_025977.1,560-578).
cgtgaacaaggaccattat

SEQ ID NO: 720591 - DNA, 19 bp, Mus musculus
  siRNA target sequence for 2510048L02Rik (NM_025977.1,563-581).
gaacaaggaccattatcat

SEQ ID NO: 720592 - DNA, 19 bp, Mus musculus
  siRNA target sequence for 2510048L02Rik (NM_025977.1,845-863).
ccgccaaggagagaagtat

SEQ ID NO: 720593 - DNA, 19 bp, Mus musculus
  siRNA target sequence for 2510048L02Rik (NM_025977.1,1091-1109).
ggatgagatctcagagaat

SEQ ID NO: 720594 - DNA, 19 bp, Mus musculus
  siRNA target sequence for 2510048L02Rik (NM_025977.1,1102-1120).
cagagaatctcctgaatat

SEQ ID NO: 720595 - DNA, 19 bp, Mus musculus
  siRNA target sequence for 2510048L02Rik (NM_025977.1,1150-1168).
gccgcaaggttcttaccaa

SEQ ID NO: 720596 - DNA, 19 bp, Mus musculus
  siRNA target sequence for 2510048L02Rik (NM_025977.1,1176-1194).
cagcaggcatacgattcat

SEQ ID NO: 720597 - DNA, 19 bp, Mus musculus
  siRNA target sequence for 2510048L02Rik (NM_025977.1,1257-1275).
gagctgggtgacatatggt

SEQ ID NO: 720598 - DNA, 19 bp, Mus musculus
  siRNA target sequence for 2510048L02Rik (NM_025977.1,1305-1323).
gactgtcttgctttgtcaa

SEQ ID NO: 720599 - DNA, 19 bp, Mus musculus
  siRNA target sequence for 2510048L02Rik (NM_025977.1,1396-1414).
cctgggactccgattcaga

SEQ ID NO: 720600 - DNA, 19 bp, Mus musculus
  siRNA target sequence for Nrarp (NM_025980.1,312-330).
ccgacatccgcctagctaa

SEQ ID NO: 720601 - DNA, 19 bp, Mus musculus
  siRNA target sequence for Nrarp (NM_025980.1,339-357).
gctggagcgcgctacacat

SEQ ID NO: 720602 - DNA, 19 bp, Mus musculus
  siRNA target sequence for 2700085A14Rik (NM_025982.1,126-144).
gcgctctcaacgtggttta

SEQ ID NO: 720603 - DNA, 19 bp, Mus musculus
  siRNA target sequence for 2700085A14Rik (NM_025982.1,128-146).
gctctcaacgtggtttata

SEQ ID NO: 720604 - DNA, 19 bp, Mus musculus
  siRNA target sequence for 2700085A14Rik (NM_025982.1,133-151).
caacgtggtttatatgctt

SEQ ID NO: 720605 - DNA, 19 bp, Mus musculus
  siRNA target sequence for 2700085A14Rik (NM_025982.1,196-214).
cggtgtggtgtctagcatt

SEQ ID NO: 720606 - DNA, 19 bp, Mus musculus
  siRNA target sequence for 2700085A14Rik (NM_025982.1,302-320).
gtgctgctcttcttttata

SEQ ID NO: 720607 - DNA, 19 bp, Mus musculus
  siRNA target sequence for 2700085A14Rik (NM_025982.1,305-323).
ctgctcttcttttatatga

SEQ ID NO: 720608 - DNA, 19 bp, Mus musculus
  siRNA target sequence for 2700085A14Rik (NM_025982.1,366-384).
gctcatgtctggctattaa

SEQ ID NO: 720609 - DNA, 19 bp, Mus musculus
  siRNA target sequence for 2700085A14Rik (NM_025982.1,372-390).
gtctggctattaacagaaa

SEQ ID NO: 720610 - DNA, 19 bp, Mus musculus
  siRNA target sequence for 2700085A14Rik (NM_025982.1,476-494).
ggcttgttcaaccttacaa

SEQ ID NO: 720611 - DNA, 19 bp, Mus musculus
  siRNA target sequence for 2700085A14Rik (NM_025982.1,495-513).
ccctgcgcctacaagatga

SEQ ID NO: 720612 - DNA, 19 bp, Mus musculus
  siRNA target sequence for 2700085A14Rik (NM_025982.1,496-514).
cctgcgcctacaagatgat

SEQ ID NO: 720613 - DNA, 19 bp, Mus musculus
  siRNA target sequence for 2700085A14Rik (NM_025982.1,497-515).
ctgcgcctacaagatgata

SEQ ID NO: 720614 - DNA, 19 bp, Mus musculus
  siRNA target sequence for 2700085A14Rik (NM_025982.1,499-517).
gcgcctacaagatgatact

SEQ ID NO: 720615 - DNA, 19 bp, Mus musculus
  siRNA target sequence for 2700085A14Rik (NM_025982.1,500-518).
cgcctacaagatgatactt

SEQ ID NO: 720616 - DNA, 19 bp, Mus musculus
  siRNA target sequence for 2700085A14Rik (NM_025982.1,525-543).
gtgcggtgtgcaaaactaa

SEQ ID NO: 720617 - DNA, 19 bp, Mus musculus
  siRNA target sequence for 2700085A14Rik (NM_025982.1,527-545).
gcggtgtgcaaaactaaga

SEQ ID NO: 720618 - DNA, 19 bp, Mus musculus
  siRNA target sequence for 2700085A14Rik (NM_025982.1,567-585).
gggagaggttccttaaaca

SEQ ID NO: 720619 - DNA, 19 bp, Mus musculus
  siRNA target sequence for 2310021H06Rik (NM_025990.1,226-244).
ctccagtcgtgtctacata

SEQ ID NO: 720620 - DNA, 19 bp, Mus musculus
  siRNA target sequence for 2310021H06Rik (NM_025990.1,255-273).
catcttgatagaaacttca

SEQ ID NO: 720621 - DNA, 19 bp, Mus musculus
  siRNA target sequence for 2310021H06Rik (NM_025990.1,314-332).
gagctttctggaacacata

SEQ ID NO: 720622 - DNA, 19 bp, Mus musculus
  siRNA target sequence for 2310021H06Rik (NM_025990.1,333-351).
ccactcttaaactatgtga

SEQ ID NO: 720623 - DNA, 19 bp, Mus musculus
  siRNA target sequence for 2310021H06Rik (NM_025990.1,384-402).
ggtgtgcttggaaaagtga

SEQ ID NO: 720624 - DNA, 19 bp, Mus musculus
  siRNA target sequence for 2310021H06Rik (NM_025990.1,393-411).
ggaaaagtgatttcatcaa

SEQ ID NO: 720625 - DNA, 19 bp, Mus musculus
  siRNA target sequence for 2310021H06Rik (NM_025990.1,600-618).
gtctatgctgtgagagatt

SEQ ID NO: 720626 - DNA, 19 bp, Mus musculus
  siRNA target sequence for 2310021H06Rik (NM_025990.1,602-620).
ctatgctgtgagagattct

SEQ ID NO: 720627 - DNA, 19 bp, Mus musculus
  siRNA target sequence for 2310021H06Rik (NM_025990.1,674-692).
gcgtatctccttgcttaat

SEQ ID NO: 720628 - DNA, 19 bp, Mus musculus
  siRNA target sequence for 2310021H06Rik (NM_025990.1,675-693).
cgtatctccttgcttaata

SEQ ID NO: 720629 - DNA, 19 bp, Mus musculus
  siRNA target sequence for 2310021H06Rik (NM_025990.1,680-698).
ctccttgcttaatagactt

SEQ ID NO: 720630 - DNA, 19 bp, Mus musculus
  siRNA target sequence for 2310021H06Rik (NM_025990.1,700-718).
gtcccctgcaaaaccttat

SEQ ID NO: 720631 - DNA, 19 bp, Mus musculus
  siRNA target sequence for 2310021H06Rik (NM_025990.1,726-744).
ctcacagacatcttgacta

SEQ ID NO: 720632 - DNA, 19 bp, Mus musculus
  siRNA target sequence for 2310021H06Rik (NM_025990.1,815-833).
caccctagcacatgatgtt

SEQ ID NO: 720633 - DNA, 19 bp, Mus musculus
  siRNA target sequence for 2310021H06Rik (NM_025990.1,845-863).
gctgcgtggagtacagttt

SEQ ID NO: 720634 - DNA, 19 bp, Mus musculus
  siRNA target sequence for 2510026C23Rik (NM_025991.1,242-260).
gtggctcagggcatcatga

SEQ ID NO: 720635 - DNA, 19 bp, Mus musculus
  siRNA target sequence for 2510026C23Rik (NM_025991.1,244-262).
ggctcagggcatcatgaaa

SEQ ID NO: 720636 - DNA, 19 bp, Mus musculus
  siRNA target sequence for 2510026C23Rik (NM_025991.1,396-414).
ctcacaaccgggtgattgt

SEQ ID NO: 720637 - DNA, 19 bp, Mus musculus
  siRNA target sequence for 2510026C23Rik (NM_025991.1,445-463).
gctcctagttgactatata

SEQ ID NO: 720638 - DNA, 19 bp, Mus musculus
  siRNA target sequence for 2510026C23Rik (NM_025991.1,446-464).
ctcctagttgactatatat

SEQ ID NO: 720639 - DNA, 19 bp, Mus musculus
  siRNA target sequence for 2510026C23Rik (NM_025991.1,511-529).
cgaggtgtcagacatgtat

SEQ ID NO: 720640 - DNA, 19 bp, Mus musculus
  siRNA target sequence for 2510026C23Rik (NM_025991.1,722-740).
ctactcactgatatcatct

SEQ ID NO: 720641 - DNA, 19 bp, Mus musculus
  siRNA target sequence for 2510026C23Rik (NM_025991.1,818-836).
gcttttgccgagtcactaa

SEQ ID NO: 720642 - DNA, 19 bp, Mus musculus
  siRNA target sequence for 2510026C23Rik (NM_025991.1,894-912).
catcccgcacgcactcatt

SEQ ID NO: 720643 - DNA, 19 bp, Mus musculus
  siRNA target sequence for 2510026C23Rik (NM_025991.1,938-956).
gatgactccatcagtgtaa

SEQ ID NO: 720644 - DNA, 19 bp, Mus musculus
  siRNA target sequence for 2510026C23Rik (NM_025991.1,970-988).
cttatgccaccaaatcact

SEQ ID NO: 720645 - DNA, 19 bp, Mus musculus
  siRNA target sequence for 2510026C23Rik (NM_025991.1,1037-1055).
ccacgacgcatgtggaaat

SEQ ID NO: 720646 - DNA, 19 bp, Mus musculus
  siRNA target sequence for 2510026C23Rik (NM_025991.1,1043-1061).
cgcatgtggaaatgtaaca

SEQ ID NO: 720647 - DNA, 19 bp, Mus musculus
  siRNA target sequence for 2510026C23Rik (NM_025991.1,1109-1127).
ctccagcacaccctagtat

SEQ ID NO: 720648 - DNA, 19 bp, Mus musculus
  siRNA target sequence for 2510026C23Rik (NM_025991.1,1182-1200).
ccctctcgaatgcagttat

SEQ ID NO: 720649 - DNA, 19 bp, Mus musculus
  siRNA target sequence for 2510026C23Rik (NM_025991.1,1184-1202).
ctctcgaatgcagttatct

SEQ ID NO: 720650 - DNA, 19 bp, Mus musculus
  siRNA target sequence for 2510026C23Rik (NM_025991.1,1188-1206).
cgaatgcagttatctacta

SEQ ID NO: 720651 - DNA, 19 bp, Mus musculus
  siRNA target sequence for 2510026C23Rik (NM_025991.1,1282-1300).
gaatggaatcatctactta

SEQ ID NO: 720652 - DNA, 19 bp, Mus musculus
  siRNA target sequence for 2510026C23Rik (NM_025991.1,1305-1323).
ggggtgaggagaatgatct

SEQ ID NO: 720653 - DNA, 19 bp, Mus musculus
  siRNA target sequence for 2510026C23Rik (NM_025991.1,1306-1324).
gggtgaggagaatgatcta

SEQ ID NO: 720654 - DNA, 19 bp, Mus musculus
  siRNA target sequence for 2510026C23Rik (NM_025991.1,1315-1333).
gaatgatctagacttcttt

SEQ ID NO: 720655 - DNA, 19 bp, Mus musculus
  siRNA target sequence for 2510026C23Rik (NM_025991.1,1319-1337).
gatctagacttctttacca

SEQ ID NO: 720656 - DNA, 19 bp, Mus musculus
  siRNA target sequence for 2510026C23Rik (NM_025991.1,1325-1343).
gacttctttaccaaacctt

SEQ ID NO: 720657 - DNA, 19 bp, Mus musculus
  siRNA target sequence for 2510026C23Rik (NM_025991.1,1426-1444).
cgcagcagtgcataaggat

SEQ ID NO: 720658 - DNA, 19 bp, Mus musculus
  siRNA target sequence for 2510026C23Rik (NM_025991.1,1482-1500).
gctataatccccttctaga

SEQ ID NO: 720659 - DNA, 19 bp, Mus musculus
  siRNA target sequence for 2510026C23Rik (NM_025991.1,1586-1604).
gtcttcagggatcgatata

SEQ ID NO: 720660 - DNA, 19 bp, Mus musculus
  siRNA target sequence for 2510026C23Rik (NM_025991.1,1656-1674).
ctgtcacaagaggcattaa

SEQ ID NO: 720661 - DNA, 19 bp, Mus musculus
  siRNA target sequence for 2510025F08Rik (NM_025993.1,796-814).
ctatgaggcccagttcttt

SEQ ID NO: 720662 - DNA, 19 bp, Mus musculus
  siRNA target sequence for 2510025F08Rik (NM_025993.1,841-859).
gaggatctacgtagcattt

SEQ ID NO: 720663 - DNA, 19 bp, Mus musculus
  siRNA target sequence for 2510025F08Rik (NM_025993.1,843-861).
ggatctacgtagcatttca

SEQ ID NO: 720664 - DNA, 19 bp, Mus musculus
  siRNA target sequence for 2510025F08Rik (NM_025993.1,844-862).
gatctacgtagcatttcaa

SEQ ID NO: 720665 - DNA, 19 bp, Mus musculus
  siRNA target sequence for 2510025F08Rik (NM_025993.1,893-911).
gaacaggttatcctaaaga

SEQ ID NO: 720666 - DNA, 19 bp, Mus musculus
  siRNA target sequence for 2510025F08Rik (NM_025993.1,947-965).
gtccagactcggaaatgca

SEQ ID NO: 720667 - DNA, 19 bp, Mus musculus
  siRNA target sequence for 2510025F08Rik (NM_025993.1,992-1010).
ggacgcttcgataaccttt

SEQ ID NO: 720668 - DNA, 19 bp, Mus musculus
  siRNA target sequence for 2510025F08Rik (NM_025993.1,993-1011).
gacgcttcgataacctttt

SEQ ID NO: 720669 - DNA, 19 bp, Mus musculus
  siRNA target sequence for 2510025F08Rik (NM_025993.1,1028-1046).
ctgattttgcagtcgattt

SEQ ID NO: 720670 - DNA, 19 bp, Mus musculus
  siRNA target sequence for 2510025F08Rik (NM_025993.1,1039-1057).
gtcgattttgtgtattcct

SEQ ID NO: 720671 - DNA, 19 bp, Mus musculus
  siRNA target sequence for 2510025F08Rik (NM_025993.1,1186-1204).
ggcccttcttgcagaatta

SEQ ID NO: 720672 - DNA, 19 bp, Mus musculus
  siRNA target sequence for 2510025F08Rik (NM_025993.1,1276-1294).
cagatatcaaggaactagt

SEQ ID NO: 720673 - DNA, 19 bp, Mus musculus
  siRNA target sequence for 2510025F08Rik (NM_025993.1,1278-1296).
gatatcaaggaactagtaa

SEQ ID NO: 720674 - DNA, 19 bp, Mus musculus
  siRNA target sequence for 2510025F08Rik (NM_025993.1,1293-1311).
gtaactttagggagagttt

SEQ ID NO: 720675 - DNA, 19 bp, Mus musculus
  siRNA target sequence for 2510025F08Rik (NM_025993.1,1345-1363).
gagcattagagacaatgta

SEQ ID NO: 720676 - DNA, 19 bp, Mus musculus
  siRNA target sequence for 2510025F08Rik (NM_025993.1,1374-1392).
gcaggagactggaaacaca

SEQ ID NO: 720677 - DNA, 19 bp, Mus musculus
  siRNA target sequence for D4Wsu27e (NM_025994.2,442-460).
cacttgggcctcaagagta

SEQ ID NO: 720678 - DNA, 19 bp, Mus musculus
  siRNA target sequence for D4Wsu27e (NM_025994.2,506-524).
gggagttccttctgatctt

SEQ ID NO: 720679 - DNA, 19 bp, Mus musculus
  siRNA target sequence for D4Wsu27e (NM_025994.2,757-775).
ctgcagtccacgttcaagt

SEQ ID NO: 720680 - DNA, 19 bp, Mus musculus
  siRNA target sequence for Fbxo5 (NM_025995.1,317-335).
cctacagtcccgtgtgttt

SEQ ID NO: 720681 - DNA, 19 bp, Mus musculus
  siRNA target sequence for Fbxo5 (NM_025995.1,337-355).
gaaccttcctgtaatgact

SEQ ID NO: 720682 - DNA, 19 bp, Mus musculus
  siRNA target sequence for Fbxo5 (NM_025995.1,345-363).
ctgtaatgactgtgttaga

SEQ ID NO: 720683 - DNA, 19 bp, Mus musculus
  siRNA target sequence for Fbxo5 (NM_025995.1,367-385).
catgagaggttgtctttca

SEQ ID NO: 720684 - DNA, 19 bp, Mus musculus
  siRNA target sequence for Fbxo5 (NM_025995.1,418-436).
gaaaatcaacgcgtacaaa

SEQ ID NO: 720685 - DNA, 19 bp, Mus musculus
  siRNA target sequence for Fbxo5 (NM_025995.1,490-508).
gaggacagtggctactcat

SEQ ID NO: 720686 - DNA, 19 bp, Mus musculus
  siRNA target sequence for Fbxo5 (NM_025995.1,526-544).
cgtgacgatggcatcctta

SEQ ID NO: 720687 - DNA, 19 bp, Mus musculus
  siRNA target sequence for Fbxo5 (NM_025995.1,549-567).
ggagaatttcagaaacagt

SEQ ID NO: 720688 - DNA, 19 bp, Mus musculus
  siRNA target sequence for Fbxo5 (NM_025995.1,600-618).
ggaccagcatcccaacaaa

SEQ ID NO: 720689 - DNA, 19 bp, Mus musculus
  siRNA target sequence for Fbxo5 (NM_025995.1,628-646).
cctgtcctgcattttgaaa

SEQ ID NO: 720690 - DNA, 19 bp, Mus musculus
  siRNA target sequence for Fbxo5 (NM_025995.1,651-669).
ggtttgctcaacactaaaa

SEQ ID NO: 720691 - DNA, 19 bp, Mus musculus
  siRNA target sequence for Fbxo5 (NM_025995.1,677-695).
gcaagcgaaaccctaaagt

SEQ ID NO: 720692 - DNA, 19 bp, Mus musculus
  siRNA target sequence for Fbxo5 (NM_025995.1,732-750).
gaactttagactgcaaaat

SEQ ID NO: 720693 - DNA, 19 bp, Mus musculus
  siRNA target sequence for Fbxo5 (NM_025995.1,735-753).
ctttagactgcaaaatata

SEQ ID NO: 720694 - DNA, 19 bp, Mus musculus
  siRNA target sequence for Fbxo5 (NM_025995.1,770-788).
gcctggagcacctagacat

SEQ ID NO: 720695 - DNA, 19 bp, Mus musculus
  siRNA target sequence for Fbxo5 (NM_025995.1,849-867).
cagcggcatggacttagta

SEQ ID NO: 720696 - DNA, 19 bp, Mus musculus
  siRNA target sequence for Fbxo5 (NM_025995.1,851-869).
gcggcatggacttagtaaa

SEQ ID NO: 720697 - DNA, 19 bp, Mus musculus
  siRNA target sequence for Fbxo5 (NM_025995.1,852-870).
cggcatggacttagtaaat

SEQ ID NO: 720698 - DNA, 19 bp, Mus musculus
  siRNA target sequence for Fbxo5 (NM_025995.1,854-872).
gcatggacttagtaaatct

SEQ ID NO: 720699 - DNA, 19 bp, Mus musculus
  siRNA target sequence for Fbxo5 (NM_025995.1,861-879).
cttagtaaatctgtctaaa

SEQ ID NO: 720700 - DNA, 19 bp, Mus musculus
  siRNA target sequence for Fbxo5 (NM_025995.1,989-1007).
caacgagaggatatgttgt

SEQ ID NO: 720701 - DNA, 19 bp, Mus musculus
  siRNA target sequence for Fbxo5 (NM_025995.1,1008-1026).
gggcagagctgcactaact

SEQ ID NO: 720702 - DNA, 19 bp, Mus musculus
  siRNA target sequence for Fbxo5 (NM_025995.1,1009-1027).
ggcagagctgcactaactt

SEQ ID NO: 720703 - DNA, 19 bp, Mus musculus
  siRNA target sequence for Fbxo5 (NM_025995.1,1018-1036).
gcactaacttgtgttcaaa

SEQ ID NO: 720704 - DNA, 19 bp, Mus musculus
  siRNA target sequence for Fbxo5 (NM_025995.1,1019-1037).
cactaacttgtgttcaaaa

SEQ ID NO: 720705 - DNA, 19 bp, Mus musculus
  siRNA target sequence for Fbxo5 (NM_025995.1,1046-1064).
cctgggcacctcccaaaaa

SEQ ID NO: 720706 - DNA, 19 bp, Mus musculus
  siRNA target sequence for Fbxo5 (NM_025995.1,1055-1073).
ctcccaaaaaagatgttca

SEQ ID NO: 720707 - DNA, 19 bp, Mus musculus
  siRNA target sequence for Fbxo5 (NM_025995.1,1112-1130).
cctacagccggcacaatga

SEQ ID NO: 720708 - DNA, 19 bp, Mus musculus
  siRNA target sequence for Fbxo5 (NM_025995.1,1178-1196).
cctgtgttcgctgtaattt

SEQ ID NO: 720709 - DNA, 19 bp, Mus musculus
  siRNA target sequence for Fbxo5 (NM_025995.1,1201-1219).
gcaaaatatgaccactatt

SEQ ID NO: 720710 - DNA, 19 bp, Mus musculus
  siRNA target sequence for Fbxo5 (NM_025995.1,1241-1259).
gggaaagctgtcaatttga

SEQ ID NO: 720711 - DNA, 19 bp, Mus musculus
  siRNA target sequence for Fbxo5 (NM_025995.1,1280-1298).
gtgcttaccataacaacaa

SEQ ID NO: 720712 - DNA, 19 bp, Mus musculus
  siRNA target sequence for Fbxo5 (NM_025995.1,1320-1338).
cctaaaagccagctgtaaa

SEQ ID NO: 720713 - DNA, 19 bp, Mus musculus
  siRNA target sequence for Fbxo5 (NM_025995.1,1351-1369).
cctggaactaaaaagagta

SEQ ID NO: 720714 - DNA, 19 bp, Mus musculus
  siRNA target sequence for Fbxo5 (NM_025995.1,1352-1370).
ctggaactaaaaagagtaa

SEQ ID NO: 720715 - DNA, 19 bp, Mus musculus
  siRNA target sequence for 2610200G18Rik (NM_025998.1,306-324).
ggctggaacgccttcatca

SEQ ID NO: 720716 - DNA, 19 bp, Mus musculus
  siRNA target sequence for 2610200G18Rik (NM_025998.1,307-325).
gctggaacgccttcatcat

SEQ ID NO: 720717 - DNA, 19 bp, Mus musculus
  siRNA target sequence for 2610200G18Rik (NM_025998.1,566-584).
cttcgtgtttgcctgttat

SEQ ID NO: 720718 - DNA, 19 bp, Mus musculus
  siRNA target sequence for 2610200G18Rik (NM_025998.1,634-652).
gctttgactcctatggata

SEQ ID NO: 720719 - DNA, 19 bp, Mus musculus
  siRNA target sequence for 2610200G18Rik (NM_025998.1,662-680).
gcagaagacgtcgcattta

SEQ ID NO: 720720 - DNA, 19 bp, Mus musculus
  siRNA target sequence for 2610103J23Rik (NM_026002.3,330-348).
ctcggtcggcctaggtttt

SEQ ID NO: 720721 - DNA, 19 bp, Mus musculus
  siRNA target sequence for 2610103J23Rik (NM_026002.3,332-350).
cggtcggcctaggttttct

SEQ ID NO: 720722 - DNA, 19 bp, Mus musculus
  siRNA target sequence for 2610103J23Rik (NM_026002.3,660-678).
cgaggatgaagttgttaga

SEQ ID NO: 720723 - DNA, 19 bp, Mus musculus
  siRNA target sequence for 2610103J23Rik (NM_026002.3,684-702).
ccgaagtataactgcaaaa

SEQ ID NO: 720724 - DNA, 19 bp, Mus musculus
  siRNA target sequence for 2610103J23Rik (NM_026002.3,686-704).
gaagtataactgcaaaaca

SEQ ID NO: 720725 - DNA, 19 bp, Mus musculus
  siRNA target sequence for 2610103J23Rik (NM_026002.3,788-806).
gttcacgccatgatggaaa

SEQ ID NO: 720726 - DNA, 19 bp, Mus musculus
  siRNA target sequence for 2610103J23Rik (NM_026002.3,825-843).
ctgggaaactaaaattagt

SEQ ID NO: 720727 - DNA, 19 bp, Mus musculus
  siRNA target sequence for 2610103J23Rik (NM_026002.3,874-892).
gataaagtgctgactgatt

SEQ ID NO: 720728 - DNA, 19 bp, Mus musculus
  siRNA target sequence for 2610103J23Rik (NM_026002.3,895-913).
ggttcattggattcaacta

SEQ ID NO: 720729 - DNA, 19 bp, Mus musculus
  siRNA target sequence for 2610103J23Rik (NM_026002.3,896-914).
gttcattggattcaactat

SEQ ID NO: 720730 - DNA, 19 bp, Mus musculus
  siRNA target sequence for 2610103J23Rik (NM_026002.3,911-929).
ctatccctgggatagaaaa

SEQ ID NO: 720731 - DNA, 19 bp, Mus musculus
  siRNA target sequence for 2610103J23Rik (NM_026002.3,945-963).
caccgagcaacttacaact

SEQ ID NO: 720732 - DNA, 19 bp, Mus musculus
  siRNA target sequence for 2610103J23Rik (NM_026002.3,976-994).
gttggttccaagaagaata

SEQ ID NO: 720733 - DNA, 19 bp, Mus musculus
  siRNA target sequence for 2610103J23Rik (NM_026002.3,1006-1024).
catctaaatgttcaagtta

SEQ ID NO: 720734 - DNA, 19 bp, Mus musculus
  siRNA target sequence for 2610103J23Rik (NM_026002.3,1015-1033).
gttcaagttagcaacttta

SEQ ID NO: 720735 - DNA, 19 bp, Mus musculus
  siRNA target sequence for 2610103J23Rik (NM_026002.3,1018-1036).
caagttagcaactttaagt

SEQ ID NO: 720736 - DNA, 19 bp, Mus musculus
  siRNA target sequence for 2610103J23Rik (NM_026002.3,1029-1047).
ctttaagtctggaaaagga

SEQ ID NO: 720737 - DNA, 19 bp, Mus musculus
  siRNA target sequence for 2610103J23Rik (NM_026002.3,1221-1239).
cactggtgacactaatgca

SEQ ID NO: 720738 - DNA, 19 bp, Mus musculus
  siRNA target sequence for 2610103J23Rik (NM_026002.3,1265-1283).
ggagtgatcgctcaatatt

SEQ ID NO: 720739 - DNA, 19 bp, Mus musculus
  siRNA target sequence for 2610103J23Rik (NM_026002.3,1266-1284).
gagtgatcgctcaatattt

SEQ ID NO: 720740 - DNA, 19 bp, Mus musculus
  siRNA target sequence for 2610103J23Rik (NM_026002.3,1318-1336).
cagtctaccacttctgatt

SEQ ID NO: 720741 - DNA, 19 bp, Mus musculus
  siRNA target sequence for 2610103J23Rik (NM_026002.3,1320-1338).
gtctaccacttctgattat

SEQ ID NO: 720742 - DNA, 19 bp, Mus musculus
  siRNA target sequence for 2610103J23Rik (NM_026002.3,1322-1340).
ctaccacttctgattatca

SEQ ID NO: 720743 - DNA, 19 bp, Mus musculus
  siRNA target sequence for 2610103J23Rik (NM_026002.3,1333-1351).
gattatcagtgggatgtta

SEQ ID NO: 720744 - DNA, 19 bp, Mus musculus
  siRNA target sequence for 2610103J23Rik (NM_026002.3,1343-1361).
gggatgttagccgtaatca

SEQ ID NO: 720745 - DNA, 19 bp, Mus musculus
  siRNA target sequence for 2610103J23Rik (NM_026002.3,1352-1370).
gccgtaatcaaccttatat

SEQ ID NO: 720746 - DNA, 19 bp, Mus musculus
  siRNA target sequence for 2610103J23Rik (NM_026002.3,1363-1381).
ccttatatcgatgatgaat

SEQ ID NO: 720747 - DNA, 19 bp, Mus musculus
  siRNA target sequence for 2610103J23Rik (NM_026002.3,1387-1405).
gggttaaatggtttgtctt

SEQ ID NO: 720748 - DNA, 19 bp, Mus musculus
  siRNA target sequence for 2610103J23Rik (NM_026002.3,1455-1473).
ctgggtagatgaagataga

SEQ ID NO: 720749 - DNA, 19 bp, Mus musculus
  siRNA target sequence for 2610103J23Rik (NM_026002.3,1490-1508).
cccaggaaccaatttctaa

SEQ ID NO: 720750 - DNA, 19 bp, Mus musculus
  siRNA target sequence for 2610103J23Rik (NM_026002.3,1491-1509).
ccaggaaccaatttctaat

SEQ ID NO: 720751 - DNA, 19 bp, Mus musculus
  siRNA target sequence for 2610103J23Rik (NM_026002.3,1499-1517).
caatttctaatgatcaaaa

SEQ ID NO: 720752 - DNA, 19 bp, Mus musculus
  siRNA target sequence for 2610103J23Rik (NM_026002.3,1552-1570).
gctcttccaactggaaaat

SEQ ID NO: 720753 - DNA, 19 bp, Mus musculus
  siRNA target sequence for 2610103J23Rik (NM_026002.3,1555-1573).
cttccaactggaaaatcta

SEQ ID NO: 720754 - DNA, 19 bp, Mus musculus
  siRNA target sequence for 2610103J23Rik (NM_026002.3,1733-1751).
gtgacccagctgaagtact

SEQ ID NO: 720755 - DNA, 19 bp, Mus musculus
  siRNA target sequence for 2610103J23Rik (NM_026002.3,1739-1757).
cagctgaagtactcatcaa

SEQ ID NO: 720756 - DNA, 19 bp, Mus musculus
  siRNA target sequence for 2610103J23Rik (NM_026002.3,1794-1812).
ctctgccgagccatctatt

SEQ ID NO: 720757 - DNA, 19 bp, Mus musculus
  siRNA target sequence for 2610103J23Rik (NM_026002.3,1798-1816).
gccgagccatctattacct

SEQ ID NO: 720758 - DNA, 19 bp, Mus musculus
  siRNA target sequence for 2610103J23Rik (NM_026002.3,1800-1818).
cgagccatctattacctta

SEQ ID NO: 720759 - DNA, 19 bp, Mus musculus
  siRNA target sequence for 2610103J23Rik (NM_026002.3,1801-1819).
gagccatctattaccttat

SEQ ID NO: 720760 - DNA, 19 bp, Mus musculus
  siRNA target sequence for 2610103J23Rik (NM_026002.3,1804-1822).
ccatctattaccttatcaa

SEQ ID NO: 720761 - DNA, 19 bp, Mus musculus
  siRNA target sequence for 2610103J23Rik (NM_026002.3,1848-1866).
ccaagtgccaccgatgtta

SEQ ID NO: 720762 - DNA, 19 bp, Mus musculus
  siRNA target sequence for 2610103J23Rik (NM_026002.3,1921-1939).
cagaccaagtctgaaacta

SEQ ID NO: 720763 - DNA, 19 bp, Mus musculus
  siRNA target sequence for 2610301B20Rik (NM_026005.1,403-421).
gattggaacaaatacttca

SEQ ID NO: 720764 - DNA, 19 bp, Mus musculus
  siRNA target sequence for 2610207F23Rik (NM_026008.1,458-476).
ccacagaaatcgacttact

SEQ ID NO: 720765 - DNA, 19 bp, Mus musculus
  siRNA target sequence for 2610207F23Rik (NM_026008.1,481-499).
gaccaaaaagataaactaa

SEQ ID NO: 720766 - DNA, 19 bp, Mus musculus
  siRNA target sequence for 2610207F23Rik (NM_026008.1,514-532).
cagcatcaaatcgaacata

SEQ ID NO: 720767 - DNA, 19 bp, Mus musculus
  siRNA target sequence for 2610207F23Rik (NM_026008.1,516-534).
gcatcaaatcgaacatatt

SEQ ID NO: 720768 - DNA, 19 bp, Mus musculus
  siRNA target sequence for 2610207F23Rik (NM_026008.1,517-535).
catcaaatcgaacatattt

SEQ ID NO: 720769 - DNA, 19 bp, Mus musculus
  siRNA target sequence for 2610207F23Rik (NM_026008.1,520-538).
caaatcgaacatattttca

SEQ ID NO: 720770 - DNA, 19 bp, Mus musculus
  siRNA target sequence for 2610207F23Rik (NM_026008.1,578-596).
gaggtgacacactagtaga

SEQ ID NO: 720771 - DNA, 19 bp, Mus musculus
  siRNA target sequence for 2610207F23Rik (NM_026008.1,585-603).
cacactagtagactcaata

SEQ ID NO: 720772 - DNA, 19 bp, Mus musculus
  siRNA target sequence for 2610207F23Rik (NM_026008.1,690-708).
gcacatgggtgagatgaaa

SEQ ID NO: 720773 - DNA, 19 bp, Mus musculus
  siRNA target sequence for 2610207F23Rik (NM_026008.1,696-714).
gggtgagatgaaactacaa

SEQ ID NO: 720774 - DNA, 19 bp, Mus musculus
  siRNA target sequence for 2610207F23Rik (NM_026008.1,698-716).
gtgagatgaaactacaact

SEQ ID NO: 720775 - DNA, 19 bp, Mus musculus
  siRNA target sequence for 2610207F23Rik (NM_026008.1,702-720).
gatgaaactacaacttgaa

SEQ ID NO: 720776 - DNA, 19 bp, Mus musculus
  siRNA target sequence for 2610207F23Rik (NM_026008.1,705-723).
gaaactacaacttgaaact

SEQ ID NO: 720777 - DNA, 19 bp, Mus musculus
  siRNA target sequence for 2610207F23Rik (NM_026008.1,767-785).
ctgttgaaaagcaattgga

SEQ ID NO: 720778 - DNA, 19 bp, Mus musculus
  siRNA target sequence for 2610207F23Rik (NM_026008.1,871-889).
gccaatcaagagaaaactt

SEQ ID NO: 720779 - DNA, 19 bp, Mus musculus
  siRNA target sequence for 2610207F23Rik (NM_026008.1,968-986).
cccagattcatgaatttga

SEQ ID NO: 720780 - DNA, 19 bp, Mus musculus
  siRNA target sequence for 2610207F23Rik (NM_026008.1,1008-1026).
gctgaacaattttcaacaa

SEQ ID NO: 720781 - DNA, 19 bp, Mus musculus
  siRNA target sequence for 2610207F23Rik (NM_026008.1,1035-1053).
gaaactccatgttgctaat

SEQ ID NO: 720782 - DNA, 19 bp, Mus musculus
  siRNA target sequence for 2610207F23Rik (NM_026008.1,1039-1057).
ctccatgttgctaatgaga

SEQ ID NO: 720783 - DNA, 19 bp, Mus musculus
  siRNA target sequence for 2610207F23Rik (NM_026008.1,1139-1157).
ggcaagccagattagatct

SEQ ID NO: 720784 - DNA, 19 bp, Mus musculus
  siRNA target sequence for 2610207F23Rik (NM_026008.1,1158-1176).
gagagttgcagtatcgaaa

SEQ ID NO: 720785 - DNA, 19 bp, Mus musculus
  siRNA target sequence for 2610207F23Rik (NM_026008.1,1282-1300).
gtacagcagttacaatcta

SEQ ID NO: 720786 - DNA, 19 bp, Mus musculus
  siRNA target sequence for 2610207F23Rik (NM_026008.1,1287-1305).
gcagttacaatctagtata

SEQ ID NO: 720787 - DNA, 19 bp, Mus musculus
  siRNA target sequence for 2610207F23Rik (NM_026008.1,1288-1306).
cagttacaatctagtataa

SEQ ID NO: 720788 - DNA, 19 bp, Mus musculus
  siRNA target sequence for 2610207F23Rik (NM_026008.1,1294-1312).
caatctagtataaaacagt

SEQ ID NO: 720789 - DNA, 19 bp, Mus musculus
  siRNA target sequence for 2610207F23Rik (NM_026008.1,1309-1327).
cagttagagtcaagattgt

SEQ ID NO: 720790 - DNA, 19 bp, Mus musculus
  siRNA target sequence for 2610207F23Rik (NM_026008.1,1311-1329).
gttagagtcaagattgtgt

SEQ ID NO: 720791 - DNA, 19 bp, Mus musculus
  siRNA target sequence for 2610207F23Rik (NM_026008.1,1322-1340).
gattgtgtgtagcaattga

SEQ ID NO: 720792 - DNA, 19 bp, Mus musculus
  siRNA target sequence for 2610207F23Rik (NM_026008.1,1339-1357).
gaagaagccgatgtactaa

SEQ ID NO: 720793 - DNA, 19 bp, Mus musculus
  siRNA target sequence for 2610207F23Rik (NM_026008.1,1342-1360).
gaagccgatgtactaaaaa

SEQ ID NO: 720794 - DNA, 19 bp, Mus musculus
  siRNA target sequence for 2610207F23Rik (NM_026008.1,1361-1379).
cagggaaatcaaatttgga

SEQ ID NO: 720795 - DNA, 19 bp, Mus musculus
  siRNA target sequence for 2610207F23Rik (NM_026008.1,1470-1488).
cttagaagaagctaacatt

SEQ ID NO: 720796 - DNA, 19 bp, Mus musculus
  siRNA target sequence for 2610204L23Rik (NM_026009.1,224-242).
ctcggaagccaagtttgat

SEQ ID NO: 720797 - DNA, 19 bp, Mus musculus
  siRNA target sequence for 2610204L23Rik (NM_026009.1,403-421).
gccaagaaggtgatttcga

SEQ ID NO: 720798 - DNA, 19 bp, Mus musculus
  siRNA target sequence for 2610204L23Rik (NM_026009.1,404-422).
ccaagaaggtgatttcgaa

SEQ ID NO: 720799 - DNA, 19 bp, Mus musculus
  siRNA target sequence for 2610204L23Rik (NM_026009.1,960-978).
gtcggcactcgcaaagctt

SEQ ID NO: 720800 - DNA, 19 bp, Mus musculus
  siRNA target sequence for 2610204L23Rik (NM_026009.1,976-994).
ctttgctgcgactacagaa

SEQ ID NO: 720801 - DNA, 19 bp, Mus musculus
  siRNA target sequence for 2610204L23Rik (NM_026009.1,1016-1034).
gttttgcagtgataaacca

SEQ ID NO: 720802 - DNA, 19 bp, Mus musculus
  siRNA target sequence for 2610204L23Rik (NM_026009.1,1105-1123).
gaatgatggatacaaagat

SEQ ID NO: 720803 - DNA, 19 bp, Mus musculus
  siRNA target sequence for 2610204L23Rik (NM_026009.1,1138-1156).
cacactatgctgataagat

SEQ ID NO: 720804 - DNA, 19 bp, Mus musculus
  siRNA target sequence for 2610204L23Rik (NM_026009.1,1181-1199).
gttctctggtccaaagatt

SEQ ID NO: 720805 - DNA, 19 bp, Mus musculus
  siRNA target sequence for 2610204L23Rik (NM_026009.1,1206-1224).
gaggaaggccagcctttaa

SEQ ID NO: 720806 - DNA, 19 bp, Mus musculus
  siRNA target sequence for 2610204L23Rik (NM_026009.1,1237-1255).
ccaagaggacgctactgtt

SEQ ID NO: 720807 - DNA, 19 bp, Mus musculus
  siRNA target sequence for 2610204L23Rik (NM_026009.1,1238-1256).
caagaggacgctactgttt

SEQ ID NO: 720808 - DNA, 19 bp, Mus musculus
  siRNA target sequence for 2610204L23Rik (NM_026009.1,1241-1259).
gaggacgctactgtttaca

SEQ ID NO: 720809 - DNA, 19 bp, Mus musculus
  siRNA target sequence for 2610204L23Rik (NM_026009.1,1243-1261).
ggacgctactgtttacatt

SEQ ID NO: 720810 - DNA, 19 bp, Mus musculus
  siRNA target sequence for 2610204L23Rik (NM_026009.1,1246-1264).
cgctactgtttacatttaa

SEQ ID NO: 720811 - DNA, 19 bp, Mus musculus
  siRNA target sequence for 2610204L23Rik (NM_026009.1,1465-1483).
ctcggcgtgaggagaaaaa

SEQ ID NO: 720812 - DNA, 19 bp, Mus musculus
  siRNA target sequence for 2610204L23Rik (NM_026009.1,1467-1485).
cggcgtgaggagaaaaaaa

SEQ ID NO: 720813 - DNA, 19 bp, Mus musculus
  siRNA target sequence for 2610318G18Rik (NM_026013.1,210-228).
cttccgtcggcccttgtaa

SEQ ID NO: 720814 - DNA, 19 bp, Mus musculus
  siRNA target sequence for 2610318G18Rik (NM_026013.1,213-231).
ccgtcggcccttgtaattt

SEQ ID NO: 720815 - DNA, 19 bp, Mus musculus
  siRNA target sequence for 2610318G18Rik (NM_026013.1,225-243).
gtaatttggacatttgcta

SEQ ID NO: 720816 - DNA, 19 bp, Mus musculus
  siRNA target sequence for 2610318G18Rik (NM_026013.1,244-262).
ccttcatattctcatatat

SEQ ID NO: 720817 - DNA, 19 bp, Mus musculus
  siRNA target sequence for 2610318G18Rik (NM_026013.1,248-266).
catattctcatatatcact

SEQ ID NO: 720818 - DNA, 19 bp, Mus musculus
  siRNA target sequence for 2610318G18Rik (NM_026013.1,288-306).
gaccctgcattgccttata

SEQ ID NO: 720819 - DNA, 19 bp, Mus musculus
  siRNA target sequence for 2610318G18Rik (NM_026013.1,311-329).
cgacacagggacaatacct

SEQ ID NO: 720820 - DNA, 19 bp, Mus musculus
  siRNA target sequence for 2610318G18Rik (NM_026013.1,337-355).
gatgcctctttggagtaat

SEQ ID NO: 720821 - DNA, 19 bp, Mus musculus
  siRNA target sequence for 2610318G18Rik (NM_026013.1,380-398).
cattgctaccatgtatgtt

SEQ ID NO: 720822 - DNA, 19 bp, Mus musculus
  siRNA target sequence for 2610318G18Rik (NM_026013.1,385-403).
ctaccatgtatgttcgtta

SEQ ID NO: 720823 - DNA, 19 bp, Mus musculus
  siRNA target sequence for 2610318G18Rik (NM_026013.1,388-406).
ccatgtatgttcgttacaa

SEQ ID NO: 720824 - DNA, 19 bp, Mus musculus
  siRNA target sequence for 2610318G18Rik (NM_026013.1,438-456).
cttatcatcaaattaaaca

SEQ ID NO: 720825 - DNA, 19 bp, Mus musculus
  siRNA target sequence for 2610318G18Rik (NM_026013.1,465-483).
cttgtacttgggatactga

SEQ ID NO: 720826 - DNA, 19 bp, Mus musculus
  siRNA target sequence for 2610318G18Rik (NM_026013.1,515-533).
ccagaaatcaacactattt

SEQ ID NO: 720827 - DNA, 19 bp, Mus musculus
  siRNA target sequence for 2610318G18Rik (NM_026013.1,568-586).
gtatgggctcattttacat

SEQ ID NO: 720828 - DNA, 19 bp, Mus musculus
  siRNA target sequence for 2610318G18Rik (NM_026013.1,587-605).
gtttgttcagacaatcctt

SEQ ID NO: 720829 - DNA, 19 bp, Mus musculus
  siRNA target sequence for 2610318G18Rik (NM_026013.1,598-616).
caatcctttcctaccaaat

SEQ ID NO: 720830 - DNA, 19 bp, Mus musculus
  siRNA target sequence for 2610318G18Rik (NM_026013.1,651-669).
gtccgactactgttggtta

SEQ ID NO: 720831 - DNA, 19 bp, Mus musculus
  siRNA target sequence for 2610318G18Rik (NM_026013.1,654-672).
cgactactgttggttatct

SEQ ID NO: 720832 - DNA, 19 bp, Mus musculus
  siRNA target sequence for 2610318G18Rik (NM_026013.1,679-697).
gagtaagtgcacttagcat

SEQ ID NO: 720833 - DNA, 19 bp, Mus musculus
  siRNA target sequence for 2610318G18Rik (NM_026013.1,698-716).
gatgacttgctcatcaatt

SEQ ID NO: 720834 - DNA, 19 bp, Mus musculus
  siRNA target sequence for 2610318G18Rik (NM_026013.1,786-804).
gtgcttcacctggttacta

SEQ ID NO: 720835 - DNA, 19 bp, Mus musculus
  siRNA target sequence for 2610318G18Rik (NM_026013.1,810-828).
gcagaatggtccatgtcat

SEQ ID NO: 720836 - DNA, 19 bp, Mus musculus
  siRNA target sequence for 2610318G18Rik (NM_026013.1,813-831).
gaatggtccatgtcatttt

SEQ ID NO: 720837 - DNA, 19 bp, Mus musculus
  siRNA target sequence for 2610318G18Rik (NM_026013.1,861-879).
cgtgattttcagaaaatta

SEQ ID NO: 720838 - DNA, 19 bp, Mus musculus
  siRNA target sequence for 2610318G18Rik (NM_026013.1,894-912).
gccaatttacatggattaa

SEQ ID NO: 720839 - DNA, 19 bp, Mus musculus
  siRNA target sequence for 2610318G18Rik (NM_026013.1,906-924).
ggattaaccctctatgaca

SEQ ID NO: 720840 - DNA, 19 bp, Mus musculus
  siRNA target sequence for 2610318G18Rik (NM_026013.1,927-945).
gttccttgccctgttaaca

SEQ ID NO: 720841 - DNA, 19 bp, Mus musculus
  siRNA target sequence for 2610318G18Rik (NM_026013.1,931-949).
cttgccctgttaacaatga

SEQ ID NO: 720842 - DNA, 19 bp, Mus musculus
  siRNA target sequence for 2610318G18Rik (NM_026013.1,935-953).
ccctgttaacaatgaaaga

SEQ ID NO: 720843 - DNA, 19 bp, Mus musculus
  siRNA target sequence for Dullard (NM_026017.1,406-424).
gcagatccgcacggtaatt

SEQ ID NO: 720844 - DNA, 19 bp, Mus musculus
  siRNA target sequence for Dullard (NM_026017.1,412-430).
ccgcacggtaattcagtat

SEQ ID NO: 720845 - DNA, 19 bp, Mus musculus
  siRNA target sequence for Dullard (NM_026017.1,414-432).
gcacggtaattcagtatca

SEQ ID NO: 720846 - DNA, 19 bp, Mus musculus
  siRNA target sequence for Dullard (NM_026017.1,427-445).
gtatcagactgttcgatat

SEQ ID NO: 720847 - DNA, 19 bp, Mus musculus
  siRNA target sequence for Dullard (NM_026017.1,431-449).
cagactgttcgatatgata

SEQ ID NO: 720848 - DNA, 19 bp, Mus musculus
  siRNA target sequence for Dullard (NM_026017.1,579-597).
ggacacctcccgacttcat

SEQ ID NO: 720849 - DNA, 19 bp, Mus musculus
  siRNA target sequence for Dullard (NM_026017.1,595-613).
catcctcaaggtggtaata

SEQ ID NO: 720850 - DNA, 19 bp, Mus musculus
  siRNA target sequence for Dullard (NM_026017.1,622-640).
cccagtccggttttttgta

SEQ ID NO: 720851 - DNA, 19 bp, Mus musculus
  siRNA target sequence for Dullard (NM_026017.1,626-644).
gtccggttttttgtacata

SEQ ID NO: 720852 - DNA, 19 bp, Mus musculus
  siRNA target sequence for Dullard (NM_026017.1,629-647).
cggttttttgtacataaga

SEQ ID NO: 720853 - DNA, 19 bp, Mus musculus
  siRNA target sequence for Dullard (NM_026017.1,729-747).
gctctgctgtggcagataa

SEQ ID NO: 720854 - DNA, 19 bp, Mus musculus
  siRNA target sequence for Dullard (NM_026017.1,730-748).
ctctgctgtggcagataaa

SEQ ID NO: 720855 - DNA, 19 bp, Mus musculus
  siRNA target sequence for Dullard (NM_026017.1,806-824).
gagttgggcagctacatca

SEQ ID NO: 720856 - DNA, 19 bp, Mus musculus
  siRNA target sequence for Dullard (NM_026017.1,808-826).
gttgggcagctacatcaaa

SEQ ID NO: 720857 - DNA, 19 bp, Mus musculus
  siRNA target sequence for 2700030M23Rik (NM_026018.1,610-628).
gagcacagtgatgatcatt

SEQ ID NO: 720858 - DNA, 19 bp, Mus musculus
  siRNA target sequence for 2700030M23Rik (NM_026018.1,676-694).
ctcaatggcatctggtttt

SEQ ID NO: 720859 - DNA, 19 bp, Mus musculus
  siRNA target sequence for 2700030M23Rik (NM_026018.1,696-714).
ggtccagcgagcacaagaa

SEQ ID NO: 720860 - DNA, 19 bp, Mus musculus
  siRNA target sequence for 2700030M23Rik (NM_026018.1,697-715).
gtccagcgagcacaagaat

SEQ ID NO: 720861 - DNA, 19 bp, Mus musculus
  siRNA target sequence for 2700030M23Rik (NM_026018.1,712-730).
gaatgcctacgagaatgtt

SEQ ID NO: 720862 - DNA, 19 bp, Mus musculus
  siRNA target sequence for D11Ertd603e (NM_026023.3,488-506).
ggggaaactgtttgattct

SEQ ID NO: 720863 - DNA, 19 bp, Mus musculus
  siRNA target sequence for D11Ertd603e (NM_026023.3,554-572).
ccgcattgtcctgacaaaa

SEQ ID NO: 720864 - DNA, 19 bp, Mus musculus
  siRNA target sequence for D11Ertd603e (NM_026023.3,555-573).
cgcattgtcctgacaaaaa

SEQ ID NO: 720865 - DNA, 19 bp, Mus musculus
  siRNA target sequence for D11Ertd603e (NM_026023.3,634-652).
cctgggtgcaagaccaaat

SEQ ID NO: 720866 - DNA, 19 bp, Mus musculus
  siRNA target sequence for D11Ertd603e (NM_026023.3,637-655).
gggtgcaagaccaaatgca

SEQ ID NO: 720867 - DNA, 19 bp, Mus musculus
  siRNA target sequence for D11Ertd603e (NM_026023.3,672-690).
gagcgattccagaaagaaa

SEQ ID NO: 720868 - DNA, 19 bp, Mus musculus
  siRNA target sequence for 2700091N06Rik (NM_026028.1,526-544).
gctggtgaagtgacctatt

SEQ ID NO: 720869 - DNA, 19 bp, Mus musculus
  siRNA target sequence for 2700091N06Rik (NM_026028.1,527-545).
ctggtgaagtgacctattt

SEQ ID NO: 720870 - DNA, 19 bp, Mus musculus
  siRNA target sequence for 2700091N06Rik (NM_026028.1,644-662).
gcaaaagacaagtaagaat

SEQ ID NO: 720871 - DNA, 19 bp, Mus musculus
  siRNA target sequence for 2700091N06Rik (NM_026028.1,650-668).
gacaagtaagaataaagga

SEQ ID NO: 720872 - DNA, 19 bp, Mus musculus
  siRNA target sequence for 2700091N06Rik (NM_026028.1,748-766).
ggagagcagacaaagcttt

SEQ ID NO: 720873 - DNA, 19 bp, Mus musculus
  siRNA target sequence for 2700091N06Rik (NM_026028.1,906-924).
caccaaggactttctacaa

SEQ ID NO: 720874 - DNA, 19 bp, Mus musculus
  siRNA target sequence for 2700091N06Rik (NM_026028.1,940-958).
caaaataaagagaaggtat

SEQ ID NO: 720875 - DNA, 19 bp, Mus musculus
  siRNA target sequence for 2700091N06Rik (NM_026028.1,973-991).
gatcacctgatgtcaaaga

SEQ ID NO: 720876 - DNA, 19 bp, Mus musculus
  siRNA target sequence for 2700091N06Rik (NM_026028.1,1059-1077).
cgagagtcatcatactcaa

SEQ ID NO: 720877 - DNA, 19 bp, Mus musculus
  siRNA target sequence for 2700091N06Rik (NM_026028.1,1062-1080).
gagtcatcatactcaaaat

SEQ ID NO: 720878 - DNA, 19 bp, Mus musculus
  siRNA target sequence for 2700091N06Rik (NM_026028.1,1064-1082).
gtcatcatactcaaaatga

SEQ ID NO: 720879 - DNA, 19 bp, Mus musculus
  siRNA target sequence for 2700091N06Rik (NM_026028.1,1236-1254).
gggcaagcgcttacagata

SEQ ID NO: 720880 - DNA, 19 bp, Mus musculus
  siRNA target sequence for 2700091N06Rik (NM_026028.1,1237-1255).
ggcaagcgcttacagataa

SEQ ID NO: 720881 - DNA, 19 bp, Mus musculus
  siRNA target sequence for 2700091N06Rik (NM_026028.1,1242-1260).
gcgcttacagataatgaca

SEQ ID NO: 720882 - DNA, 19 bp, Mus musculus
  siRNA target sequence for 2700091N06Rik (NM_026028.1,1243-1261).
cgcttacagataatgacaa

SEQ ID NO: 720883 - DNA, 19 bp, Mus musculus
  siRNA target sequence for 2700091N06Rik (NM_026028.1,1297-1315).
gaagtagaaggcttcaaga

SEQ ID NO: 720884 - DNA, 19 bp, Mus musculus
  siRNA target sequence for 2700091N06Rik (NM_026028.1,1306-1324).
ggcttcaagacggacatta

SEQ ID NO: 720885 - DNA, 19 bp, Mus musculus
  siRNA target sequence for 2700091N06Rik (NM_026028.1,1307-1325).
gcttcaagacggacattaa

SEQ ID NO: 720886 - DNA, 19 bp, Mus musculus
  siRNA target sequence for 2700091N06Rik (NM_026028.1,1346-1364).
gagacctggagcaaatgct

SEQ ID NO: 720887 - DNA, 19 bp, Mus musculus
  siRNA target sequence for 2700091N06Rik (NM_026028.1,1437-1455).
caggagagctcataagata

SEQ ID NO: 720888 - DNA, 19 bp, Mus musculus
  siRNA target sequence for 2700091N06Rik (NM_026028.1,1439-1457).
ggagagctcataagataca

SEQ ID NO: 720889 - DNA, 19 bp, Mus musculus
  siRNA target sequence for 2700091N06Rik (NM_026028.1,1465-1483).
ctgaagaacctcaagtcta

SEQ ID NO: 720890 - DNA, 19 bp, Mus musculus
  siRNA target sequence for 2810037C14Rik (NM_026034.1,940-958).
gttatacggagaagaatgt

SEQ ID NO: 720891 - DNA, 19 bp, Mus musculus
  siRNA target sequence for Mrpl55 (NM_026035.1,246-264).
gtgagagcagccttaccta

SEQ ID NO: 720892 - DNA, 19 bp, Mus musculus
  siRNA target sequence for Mrpl55 (NM_026035.1,538-556).
gttttgacactgaacgata

SEQ ID NO: 720893 - DNA, 19 bp, Mus musculus
  siRNA target sequence for Mrpl55 (NM_026035.1,552-570).
cgatataaacagttttgga

SEQ ID NO: 720894 - DNA, 19 bp, Mus musculus
  siRNA target sequence for 2810049G06Rik (NM_026037.2,230-248).
catcgatcaggtcaacttt

SEQ ID NO: 720895 - DNA, 19 bp, Mus musculus
  siRNA target sequence for 2810049G06Rik (NM_026037.2,233-251).
cgatcaggtcaactttgta

SEQ ID NO: 720896 - DNA, 19 bp, Mus musculus
  siRNA target sequence for 2810049G06Rik (NM_026037.2,272-290).
gttagcagccgtttggttt

SEQ ID NO: 720897 - DNA, 19 bp, Mus musculus
  siRNA target sequence for 2810049G06Rik (NM_026037.2,276-294).
gcagccgtttggtttcgaa

SEQ ID NO: 720898 - DNA, 19 bp, Mus musculus
  siRNA target sequence for 2810049G06Rik (NM_026037.2,280-298).
ccgtttggtttcgaactta

SEQ ID NO: 720899 - DNA, 19 bp, Mus musculus
  siRNA target sequence for 2810049G06Rik (NM_026037.2,286-304).
ggtttcgaacttatctaca

SEQ ID NO: 720900 - DNA, 19 bp, Mus musculus
  siRNA target sequence for 2810049G06Rik (NM_026037.2,300-318).
ctacactcaagcaaaacta

SEQ ID NO: 720901 - DNA, 19 bp, Mus musculus
  siRNA target sequence for 2810049G06Rik (NM_026037.2,310-328).
gcaaaactagctcttttat

SEQ ID NO: 720902 - DNA, 19 bp, Mus musculus
  siRNA target sequence for 2810049G06Rik (NM_026037.2,353-371).
gggcctttatcttgcattt

SEQ ID NO: 720903 - DNA, 19 bp, Mus musculus
  siRNA target sequence for 2810049G06Rik (NM_026037.2,354-372).
ggcctttatcttgcatttt

SEQ ID NO: 720904 - DNA, 19 bp, Mus musculus
  siRNA target sequence for 2810049G06Rik (NM_026037.2,381-399).
ggatggtatgccttacact

SEQ ID NO: 720905 - DNA, 19 bp, Mus musculus
  siRNA target sequence for 2810049G06Rik (NM_026037.2,382-400).
gatggtatgccttacactt

SEQ ID NO: 720906 - DNA, 19 bp, Mus musculus
  siRNA target sequence for 2810049G06Rik (NM_026037.2,385-403).
ggtatgccttacactttct

SEQ ID NO: 720907 - DNA, 19 bp, Mus musculus
  siRNA target sequence for 2810049G06Rik (NM_026037.2,386-404).
gtatgccttacactttctt

SEQ ID NO: 720908 - DNA, 19 bp, Mus musculus
  siRNA target sequence for 2810049G06Rik (NM_026037.2,391-409).
ccttacactttcttgtaca

SEQ ID NO: 720909 - DNA, 19 bp, Mus musculus
  siRNA target sequence for 2810049G06Rik (NM_026037.2,392-410).
cttacactttcttgtacaa

SEQ ID NO: 720910 - DNA, 19 bp, Mus musculus
  siRNA target sequence for 2810049G06Rik (NM_026037.2,405-423).
gtacaaagtgggatttcct

SEQ ID NO: 720911 - DNA, 19 bp, Mus musculus
  siRNA target sequence for 2810049G06Rik (NM_026037.2,421-439).
cctactgcatcatgatcat

SEQ ID NO: 720912 - DNA, 19 bp, Mus musculus
  siRNA target sequence for 2810049G06Rik (NM_026037.2,422-440).
ctactgcatcatgatcata

SEQ ID NO: 720913 - DNA, 19 bp, Mus musculus
  siRNA target sequence for 2810049G06Rik (NM_026037.2,494-512).
ctcagtgtgtcagattact

SEQ ID NO: 720914 - DNA, 19 bp, Mus musculus
  siRNA target sequence for 2810049G06Rik (NM_026037.2,504-522).
cagattactagagtctata

SEQ ID NO: 720915 - DNA, 19 bp, Mus musculus
  siRNA target sequence for 2810049G06Rik (NM_026037.2,511-529).
ctagagtctatatctttga

SEQ ID NO: 720916 - DNA, 19 bp, Mus musculus
  siRNA target sequence for 2810049G06Rik (NM_026037.2,518-536).
ctatatctttgattatgga

SEQ ID NO: 720917 - DNA, 19 bp, Mus musculus
  siRNA target sequence for 2810049G06Rik (NM_026037.2,558-576).
ggcccaatgatgatcatta

SEQ ID NO: 720918 - DNA, 19 bp, Mus musculus
  siRNA target sequence for 2810049G06Rik (NM_026037.2,577-595).
cgcagaagatcactagttt

SEQ ID NO: 720919 - DNA, 19 bp, Mus musculus
  siRNA target sequence for 2810049G06Rik (NM_026037.2,587-605).
cactagtttggcttacgaa

SEQ ID NO: 720920 - DNA, 19 bp, Mus musculus
  siRNA target sequence for 2810049G06Rik (NM_026037.2,589-607).
ctagtttggcttacgaaat

SEQ ID NO: 720921 - DNA, 19 bp, Mus musculus
  siRNA target sequence for 2810049G06Rik (NM_026037.2,647-665).
gtcgcagaggggattagct

SEQ ID NO: 720922 - DNA, 19 bp, Mus musculus
  siRNA target sequence for 2810049G06Rik (NM_026037.2,684-702).
ctcctggagtatgtaagtt

SEQ ID NO: 720923 - DNA, 19 bp, Mus musculus
  siRNA target sequence for 2810049G06Rik (NM_026037.2,686-704).
cctggagtatgtaagttat

SEQ ID NO: 720924 - DNA, 19 bp, Mus musculus
  siRNA target sequence for 2810049G06Rik (NM_026037.2,687-705).
ctggagtatgtaagttata

SEQ ID NO: 720925 - DNA, 19 bp, Mus musculus
  siRNA target sequence for 2810049G06Rik (NM_026037.2,690-708).
gagtatgtaagttatacct

SEQ ID NO: 720926 - DNA, 19 bp, Mus musculus
  siRNA target sequence for 2810049G06Rik (NM_026037.2,742-760).
gctcctacaaagactacat

SEQ ID NO: 720927 - DNA, 19 bp, Mus musculus
  siRNA target sequence for 2810049G06Rik (NM_026037.2,880-898).
gtggactctccttattatt

SEQ ID NO: 720928 - DNA, 19 bp, Mus musculus
  siRNA target sequence for 2810049G06Rik (NM_026037.2,883-901).
gactctccttattattcca

SEQ ID NO: 720929 - DNA, 19 bp, Mus musculus
  siRNA target sequence for 2810049G06Rik (NM_026037.2,921-939).
ctacccgtggagtacaaca

SEQ ID NO: 720930 - DNA, 19 bp, Mus musculus
  siRNA target sequence for 2810049G06Rik (NM_026037.2,1008-1026).
gctgccagacctaagtact

SEQ ID NO: 720931 - DNA, 19 bp, Mus musculus
  siRNA target sequence for 2810049G06Rik (NM_026037.2,1009-1027).
ctgccagacctaagtacta

SEQ ID NO: 720932 - DNA, 19 bp, Mus musculus
  siRNA target sequence for 2810049G06Rik (NM_026037.2,1011-1029).
gccagacctaagtactatt

SEQ ID NO: 720933 - DNA, 19 bp, Mus musculus
  siRNA target sequence for 2810049G06Rik (NM_026037.2,1012-1030).
ccagacctaagtactattt

SEQ ID NO: 720934 - DNA, 19 bp, Mus musculus
  siRNA target sequence for 2810049G06Rik (NM_026037.2,1013-1031).
cagacctaagtactatttt

SEQ ID NO: 720935 - DNA, 19 bp, Mus musculus
  siRNA target sequence for 2810049G06Rik (NM_026037.2,1017-1035).
cctaagtactattttgcat

SEQ ID NO: 720936 - DNA, 19 bp, Mus musculus
  siRNA target sequence for 2810049G06Rik (NM_026037.2,1039-1057).
ccttagctgacgccattaa

SEQ ID NO: 720937 - DNA, 19 bp, Mus musculus
  siRNA target sequence for 2810049G06Rik (NM_026037.2,1079-1097).
cagaggatacgacaagaat

SEQ ID NO: 720938 - DNA, 19 bp, Mus musculus
  siRNA target sequence for 2810049G06Rik (NM_026037.2,1101-1119).
gtggctcgctgggacttaa

SEQ ID NO: 720939 - DNA, 19 bp, Mus musculus
  siRNA target sequence for 2810049G06Rik (NM_026037.2,1107-1125).
cgctgggacttaatttcca

SEQ ID NO: 720940 - DNA, 19 bp, Mus musculus
  siRNA target sequence for 2810049G06Rik (NM_026037.2,1108-1126).
gctgggacttaatttccaa

SEQ ID NO: 720941 - DNA, 19 bp, Mus musculus
  siRNA target sequence for 2810049G06Rik (NM_026037.2,1146-1164).
gagatgtcaacaagtttta

SEQ ID NO: 720942 - DNA, 19 bp, Mus musculus
  siRNA target sequence for 2810049G06Rik (NM_026037.2,1242-1260).
ccgacaatccagacattct

SEQ ID NO: 720943 - DNA, 19 bp, Mus musculus
  siRNA target sequence for 2810049G06Rik (NM_026037.2,1243-1261).
cgacaatccagacattctt

SEQ ID NO: 720944 - DNA, 19 bp, Mus musculus
  siRNA target sequence for 2810049G06Rik (NM_026037.2,1244-1262).
gacaatccagacattcttt

SEQ ID NO: 720945 - DNA, 19 bp, Mus musculus
  siRNA target sequence for 2810049G06Rik (NM_026037.2,1283-1301).
ggtctacccaggatactat

SEQ ID NO: 720946 - DNA, 19 bp, Mus musculus
  siRNA target sequence for 2810049G06Rik (NM_026037.2,1311-1329).
ctaacgggagtgctaatga

SEQ ID NO: 720947 - DNA, 19 bp, Mus musculus
  siRNA target sequence for 2810049G06Rik (NM_026037.2,1342-1360).
gggctgtgagaaataactt

SEQ ID NO: 720948 - DNA, 19 bp, Mus musculus
  siRNA target sequence for 2810049G06Rik (NM_026037.2,1344-1362).
gctgtgagaaataacttta

SEQ ID NO: 720949 - DNA, 19 bp, Mus musculus
  siRNA target sequence for 2810049G06Rik (NM_026037.2,1377-1395).
gagccccctcaacttaagt

SEQ ID NO: 720950 - DNA, 19 bp, Mus musculus
  siRNA target sequence for 2810049G06Rik (NM_026037.2,1379-1397).
gccccctcaacttaagtta

SEQ ID NO: 720951 - DNA, 19 bp, Mus musculus
  siRNA target sequence for 2810049G06Rik (NM_026037.2,1380-1398).
ccccctcaacttaagttat

SEQ ID NO: 720952 - DNA, 19 bp, Mus musculus
  siRNA target sequence for 2810049G06Rik (NM_026037.2,1381-1399).
cccctcaacttaagttatt

SEQ ID NO: 720953 - DNA, 19 bp, Mus musculus
  siRNA target sequence for 2810049G06Rik (NM_026037.2,1382-1400).
ccctcaacttaagttattt

SEQ ID NO: 720954 - DNA, 19 bp, Mus musculus
  siRNA target sequence for 2810049G06Rik (NM_026037.2,1383-1401).
cctcaacttaagttatttt

SEQ ID NO: 720955 - DNA, 19 bp, Mus musculus
  siRNA target sequence for 2810049G06Rik (NM_026037.2,1384-1402).
ctcaacttaagttatttta

SEQ ID NO: 720956 - DNA, 19 bp, Mus musculus
  siRNA target sequence for 2810049G06Rik (NM_026037.2,1421-1439).
ggccacccagataacaata

SEQ ID NO: 720957 - DNA, 19 bp, Mus musculus
  siRNA target sequence for 2810049G06Rik (NM_026037.2,1422-1440).
gccacccagataacaataa

SEQ ID NO: 720958 - DNA, 19 bp, Mus musculus
  siRNA target sequence for 2810049G06Rik (NM_026037.2,1424-1442).
cacccagataacaataagt

SEQ ID NO: 720959 - DNA, 19 bp, Mus musculus
  siRNA target sequence for 2810049G06Rik (NM_026037.2,1479-1497).
ccgtcgttcacgttttaca

SEQ ID NO: 720960 - DNA, 19 bp, Mus musculus
  siRNA target sequence for 2810049G06Rik (NM_026037.2,1513-1531).
gccttcacgtctgtagtat

SEQ ID NO: 720961 - DNA, 19 bp, Mus musculus
  siRNA target sequence for 2810049G06Rik (NM_026037.2,1542-1560).
ctgttgctgcctgtgaaaa

SEQ ID NO: 720962 - DNA, 19 bp, Mus musculus
  siRNA target sequence for 2810049G06Rik (NM_026037.2,1547-1565).
gctgcctgtgaaaaagtct

SEQ ID NO: 720963 - DNA, 19 bp, Mus musculus
  siRNA target sequence for 2810049G06Rik (NM_026037.2,1576-1594).
cgagcacacaggaaaatgt

SEQ ID NO: 720964 - DNA, 19 bp, Mus musculus
  siRNA target sequence for 2810049G06Rik (NM_026037.2,1601-1619).
ctcacaggccaaaaagttt

SEQ ID NO: 720965 - DNA, 19 bp, Mus musculus
  siRNA target sequence for 2810049G06Rik (NM_026037.2,1638-1656).
ctgggacagaacagttttt

SEQ ID NO: 720966 - DNA, 19 bp, Mus musculus
  siRNA target sequence for 2810049G06Rik (NM_026037.2,1641-1659).
ggacagaacagtttttcca

SEQ ID NO: 720967 - DNA, 19 bp, Mus musculus
  siRNA target sequence for 2810049G06Rik (NM_026037.2,1651-1669).
gtttttccacgatgaataa

SEQ ID NO: 720968 - DNA, 19 bp, Mus musculus
  siRNA target sequence for 2810049G06Rik (NM_026037.2,1660-1678).
cgatgaataacgtttgcaa

SEQ ID NO: 720969 - DNA, 19 bp, Mus musculus
  siRNA target sequence for 2810049G06Rik (NM_026037.2,1661-1679).
gatgaataacgtttgcaat

SEQ ID NO: 720970 - DNA, 19 bp, Mus musculus
  siRNA target sequence for 2810049G06Rik (NM_026037.2,1700-1718).
cagacactcgtcactaaca

SEQ ID NO: 720971 - DNA, 19 bp, Mus musculus
  siRNA target sequence for 2810049G06Rik (NM_026037.2,1702-1720).
gacactcgtcactaacaca

SEQ ID NO: 720972 - DNA, 19 bp, Mus musculus
  siRNA target sequence for 2810055F11Rik (NM_026038.1,322-340).
gtcaacacctcgactacat

SEQ ID NO: 720973 - DNA, 19 bp, Mus musculus
  siRNA target sequence for 2810055F11Rik (NM_026038.1,701-719).
gctggtggacattgcatat

SEQ ID NO: 720974 - DNA, 19 bp, Mus musculus
  siRNA target sequence for 2810055F11Rik (NM_026038.1,714-732).
gcatatggtggggcatttt

SEQ ID NO: 720975 - DNA, 19 bp, Mus musculus
  siRNA target sequence for 2810055F11Rik (NM_026038.1,725-743).
ggcattttatgcgtttgtt

SEQ ID NO: 720976 - DNA, 19 bp, Mus musculus
  siRNA target sequence for 2810055F11Rik (NM_026038.1,726-744).
gcattttatgcgtttgtta

SEQ ID NO: 720977 - DNA, 19 bp, Mus musculus
  siRNA target sequence for 2810055F11Rik (NM_026038.1,736-754).
cgtttgttagtgcagaaaa

SEQ ID NO: 720978 - DNA, 19 bp, Mus musculus
  siRNA target sequence for 2810055F11Rik (NM_026038.1,886-904).
ccatcttgacggatggaaa

SEQ ID NO: 720979 - DNA, 19 bp, Mus musculus
  siRNA target sequence for 2810055F11Rik (NM_026038.1,890-908).
cttgacggatggaaaagat

SEQ ID NO: 720980 - DNA, 19 bp, Mus musculus
  siRNA target sequence for 2810055F11Rik (NM_026038.1,901-919).
gaaaagatgcttatagtga

SEQ ID NO: 720981 - DNA, 19 bp, Mus musculus
  siRNA target sequence for 2810055F11Rik (NM_026038.1,1087-1105).
gtgccgtgagggaagcaaa

SEQ ID NO: 720982 - DNA, 19 bp, Mus musculus
  siRNA target sequence for 2810055F11Rik (NM_026038.1,1140-1158).
gcaggacaagcccattaca

SEQ ID NO: 720983 - DNA, 19 bp, Mus musculus
  siRNA target sequence for 2810046C01Rik (NM_026039.1,339-357).
gaggtttgtgtgacaacat

SEQ ID NO: 720984 - DNA, 19 bp, Mus musculus
  siRNA target sequence for 2810046C01Rik (NM_026039.1,589-607).
ccgcatggaccatgagttt

SEQ ID NO: 720985 - DNA, 19 bp, Mus musculus
  siRNA target sequence for 2810036K01Rik (NM_026040.2,47-65).
gggactctgaacctcaata

SEQ ID NO: 720986 - DNA, 19 bp, Mus musculus
  siRNA target sequence for 2810036K01Rik (NM_026040.2,51-69).
ctctgaacctcaataacga

SEQ ID NO: 720987 - DNA, 19 bp, Mus musculus
  siRNA target sequence for 2810036K01Rik (NM_026040.2,59-77).
ctcaataacgaggttgtaa

SEQ ID NO: 720988 - DNA, 19 bp, Mus musculus
  siRNA target sequence for 2810036K01Rik (NM_026040.2,221-239).
catgccatgaaggaattga

SEQ ID NO: 720989 - DNA, 19 bp, Mus musculus
  siRNA target sequence for 2810036K01Rik (NM_026040.2,238-256).
gaaacctgatgttgtaact

SEQ ID NO: 720990 - DNA, 19 bp, Mus musculus
  siRNA target sequence for 2810036K01Rik (NM_026040.2,242-260).
cctgatgttgtaactaaat

SEQ ID NO: 720991 - DNA, 19 bp, Mus musculus
  siRNA target sequence for 2810036K01Rik (NM_026040.2,261-279).
ctgctcttagtgatgatat

SEQ ID NO: 720992 - DNA, 19 bp, Mus musculus
  siRNA target sequence for 2810036K01Rik (NM_026040.2,263-281).
gctcttagtgatgatatca

SEQ ID NO: 720993 - DNA, 19 bp, Mus musculus
  siRNA target sequence for 2810036K01Rik (NM_026040.2,264-282).
ctcttagtgatgatatcaa

SEQ ID NO: 720994 - DNA, 19 bp, Mus musculus
  siRNA target sequence for 2810036K01Rik (NM_026040.2,266-284).
cttagtgatgatatcaact

SEQ ID NO: 720995 - DNA, 19 bp, Mus musculus
  siRNA target sequence for 2810036K01Rik (NM_026040.2,272-290).
gatgatatcaactttgaaa

SEQ ID NO: 720996 - DNA, 19 bp, Mus musculus
  siRNA target sequence for 2810036K01Rik (NM_026040.2,345-363).
caggtcacccgcttctgaa

SEQ ID NO: 720997 - DNA, 19 bp, Mus musculus
  siRNA target sequence for 2810036K01Rik (NM_026040.2,348-366).
gtcacccgcttctgaagaa

SEQ ID NO: 720998 - DNA, 19 bp, Mus musculus
  siRNA target sequence for 2810036K01Rik (NM_026040.2,475-493).
cattgcaaggtcaaaggat

SEQ ID NO: 720999 - DNA, 19 bp, Mus musculus
  siRNA target sequence for 2810036K01Rik (NM_026040.2,724-742).
ggggaaagcctcaaccaaa

SEQ ID NO: 721000 - DNA, 19 bp, Mus musculus
  siRNA target sequence for 2810036K01Rik (NM_026040.2,757-775).
cgtgtgtgaacctgctaat

SEQ ID NO: 721001 - DNA, 19 bp, Mus musculus
  siRNA target sequence for 2810036K01Rik (NM_026040.2,803-821).
gagggggaaaaggagtatt

SEQ ID NO: 721002 - DNA, 19 bp, Mus musculus
  siRNA target sequence for 2810036K01Rik (NM_026040.2,834-852).
ctgaagaacggttctacaa

SEQ ID NO: 721003 - DNA, 19 bp, Mus musculus
  siRNA target sequence for 2810036K01Rik (NM_026040.2,961-979).
gaagcccctcccaaaggta

SEQ ID NO: 721004 - DNA, 19 bp, Mus musculus
  siRNA target sequence for 2810036K01Rik (NM_026040.2,971-989).
ccaaaggtaccatctaaaa

SEQ ID NO: 721005 - DNA, 19 bp, Mus musculus
  siRNA target sequence for 2810036K01Rik (NM_026040.2,1001-1019).
gaaaccccctgggatgtaa

SEQ ID NO: 721006 - DNA, 19 bp, Mus musculus
  siRNA target sequence for 2810036K01Rik (NM_026040.2,1011-1029).
gggatgtaagaaacgataa

SEQ ID NO: 721007 - DNA, 19 bp, Mus musculus
  siRNA target sequence for 2810036K01Rik (NM_026040.2,1012-1030).
ggatgtaagaaacgataaa

SEQ ID NO: 721008 - DNA, 19 bp, Mus musculus
  siRNA target sequence for 2810036K01Rik (NM_026040.2,1046-1064).
gaagccaggaagttcgaat

SEQ ID NO: 721009 - DNA, 19 bp, Mus musculus
  siRNA target sequence for 2810036K01Rik (NM_026040.2,1078-1096).
ctcgttggctggacctaaa

SEQ ID NO: 721010 - DNA, 19 bp, Mus musculus
  siRNA target sequence for 2810036K01Rik (NM_026040.2,1118-1136).
gaacaggccccaaagaata

SEQ ID NO: 721011 - DNA, 19 bp, Mus musculus
  siRNA target sequence for 2810036K01Rik (NM_026040.2,1132-1150).
gaataaagccccagatttt

SEQ ID NO: 721012 - DNA, 19 bp, Mus musculus
  siRNA target sequence for 2810036K01Rik (NM_026040.2,1166-1184).
ccagtcaagaagcagttta

SEQ ID NO: 721013 - DNA, 19 bp, Mus musculus
  siRNA target sequence for 2810430M08Rik (NM_026041.1,102-120).
cagcgtcgaagctagaaga

SEQ ID NO: 721014 - DNA, 19 bp, Mus musculus
  siRNA target sequence for 2810430M08Rik (NM_026041.1,105-123).
cgtcgaagctagaagatga

SEQ ID NO: 721015 - DNA, 19 bp, Mus musculus
  siRNA target sequence for 2810430M08Rik (NM_026041.1,166-184).
gatggaccactcagatgat

SEQ ID NO: 721016 - DNA, 19 bp, Mus musculus
  siRNA target sequence for 2810430M08Rik (NM_026041.1,256-274).
gagtgctgggaccaattca

SEQ ID NO: 721017 - DNA, 19 bp, Mus musculus
  siRNA target sequence for 2810430M08Rik (NM_026041.1,448-466).
gaagccagatgttgtcaaa

SEQ ID NO: 721018 - DNA, 19 bp, Mus musculus
  siRNA target sequence for 2810430M08Rik (NM_026041.1,550-568).
gaatgttggcgaaaaggtt

SEQ ID NO: 721019 - DNA, 19 bp, Mus musculus
  siRNA target sequence for 2810430M08Rik (NM_026041.1,650-668).
ggaatggatggtacaagta

SEQ ID NO: 721020 - DNA, 19 bp, Mus musculus
  siRNA target sequence for 2810430M08Rik (NM_026041.1,739-757).
gaagattctgcgagatgat

SEQ ID NO: 721021 - DNA, 19 bp, Mus musculus
  siRNA target sequence for 2810443J12Rik (NM_026044.1,114-132).
ggtgcccagtagaaggtta

SEQ ID NO: 721022 - DNA, 19 bp, Mus musculus
  siRNA target sequence for 2810443J12Rik (NM_026044.1,201-219).
gtgagcctcaagttcgttt

SEQ ID NO: 721023 - DNA, 19 bp, Mus musculus
  siRNA target sequence for 2810443J12Rik (NM_026044.1,205-223).
gcctcaagttcgtttaggt

SEQ ID NO: 721024 - DNA, 19 bp, Mus musculus
  siRNA target sequence for 2810443J12Rik (NM_026044.1,250-268).
gcacaacacggctaaacct

SEQ ID NO: 721025 - DNA, 19 bp, Mus musculus
  siRNA target sequence for 2810443J12Rik (NM_026044.1,440-458).
ctcgccctggatgagaatt

SEQ ID NO: 721026 - DNA, 19 bp, Mus musculus
  siRNA target sequence for 2810443J12Rik (NM_026044.1,480-498).
ggtccactgggaaatctgt

SEQ ID NO: 721027 - DNA, 19 bp, Mus musculus
  siRNA target sequence for 2810443J12Rik (NM_026044.1,523-541).
gatcattagcagtgattct

SEQ ID NO: 721028 - DNA, 19 bp, Mus musculus
  siRNA target sequence for 2810443J12Rik (NM_026044.1,603-621).
cttggccagcccatcactt

SEQ ID NO: 721029 - DNA, 19 bp, Mus musculus
  siRNA target sequence for 2810443J12Rik (NM_026044.1,653-671).
cagacagaactcgtgtatt

SEQ ID NO: 721030 - DNA, 19 bp, Mus musculus
  siRNA target sequence for 2810443J12Rik (NM_026044.1,655-673).
gacagaactcgtgtattca

SEQ ID NO: 721031 - DNA, 19 bp, Mus musculus
  siRNA target sequence for 2810443J12Rik (NM_026044.1,725-743).
cctgtcttcactagcaaaa

SEQ ID NO: 721032 - DNA, 19 bp, Mus musculus
  siRNA target sequence for 2810443J12Rik (NM_026044.1,735-753).
ctagcaaaagacattgcat

SEQ ID NO: 721033 - DNA, 19 bp, Mus musculus
  siRNA target sequence for 2810443J12Rik (NM_026044.1,778-796).
cccccatcaggagcatata

SEQ ID NO: 721034 - DNA, 19 bp, Mus musculus
  siRNA target sequence for 2810443J12Rik (NM_026044.1,780-798).
cccatcaggagcatatact

SEQ ID NO: 721035 - DNA, 19 bp, Mus musculus
  siRNA target sequence for 2810443J12Rik (NM_026044.1,801-819).
caactggaagctatgatga

SEQ ID NO: 721036 - DNA, 19 bp, Mus musculus
  siRNA target sequence for 2810443J12Rik (NM_026044.1,832-850).
gtgggacactcgaaacata

SEQ ID NO: 721037 - DNA, 19 bp, Mus musculus
  siRNA target sequence for 2810443J12Rik (NM_026044.1,835-853).
ggacactcgaaacataaga

SEQ ID NO: 721038 - DNA, 19 bp, Mus musculus
  siRNA target sequence for 2810443J12Rik (NM_026044.1,991-1009).
gcaggacataactgtttta

SEQ ID NO: 721039 - DNA, 19 bp, Mus musculus
  siRNA target sequence for 2810443J12Rik (NM_026044.1,1016-1034).
cacgaaatgcctaactcat

SEQ ID NO: 721040 - DNA, 19 bp, Mus musculus
  siRNA target sequence for 2810443J12Rik (NM_026044.1,1083-1101).
ctcctacctggttctttga

SEQ ID NO: 721041 - DNA, 19 bp, Mus musculus
  siRNA target sequence for 2810443J12Rik (NM_026044.1,1086-1104).
ctacctggttctttgatca

SEQ ID NO: 721042 - DNA, 19 bp, Mus musculus
  siRNA target sequence for 2810443J12Rik (NM_026044.1,1152-1170).
cagaggagccaccaataca

SEQ ID NO: 721043 - DNA, 19 bp, Mus musculus
  siRNA target sequence for 2810443J12Rik (NM_026044.1,1154-1172).
gaggagccaccaatacatt

SEQ ID NO: 721044 - DNA, 19 bp, Mus musculus
  siRNA target sequence for 2810443J12Rik (NM_026044.1,1156-1174).
ggagccaccaatacattct

SEQ ID NO: 721045 - DNA, 19 bp, Mus musculus
  siRNA target sequence for 2810443J12Rik (NM_026044.1,1245-1263).
ctctccttccattaacaga

SEQ ID NO: 721046 - DNA, 19 bp, Mus musculus
  siRNA target sequence for 2810443J12Rik (NM_026044.1,1301-1319).
gtcaagactcgtgatctta

SEQ ID NO: 721047 - DNA, 19 bp, Mus musculus
  siRNA target sequence for 2810443J12Rik (NM_026044.1,1334-1352).
gggcagagctttgacaata

SEQ ID NO: 721048 - DNA, 19 bp, Mus musculus
  siRNA target sequence for 2810443J12Rik (NM_026044.1,1360-1378).
ggccacctgctccttttat

SEQ ID NO: 721049 - DNA, 19 bp, Mus musculus
  siRNA target sequence for 2810443J12Rik (NM_026044.1,1371-1389).
ccttttatgaccatgttct

SEQ ID NO: 721050 - DNA, 19 bp, Mus musculus
  siRNA target sequence for 2810441A10Rik (NM_026045.2,190-208).
gagtgaactggcgagaaaa

SEQ ID NO: 721051 - DNA, 19 bp, Mus musculus
  siRNA target sequence for 2810441A10Rik (NM_026045.2,212-230).
gaggaagcgtattacgaaa

SEQ ID NO: 721052 - DNA, 19 bp, Mus musculus
  siRNA target sequence for 2810441A10Rik (NM_026045.2,215-233).
gaagcgtattacgaaagat

SEQ ID NO: 721053 - DNA, 19 bp, Mus musculus
  siRNA target sequence for 2810441A10Rik (NM_026045.2,227-245).
gaaagatgtggctacaaga

SEQ ID NO: 721054 - DNA, 19 bp, Mus musculus
  siRNA target sequence for 2810441A10Rik (NM_026045.2,231-249).
gatgtggctacaagataca

SEQ ID NO: 721055 - DNA, 19 bp, Mus musculus
  siRNA target sequence for 2810441A10Rik (NM_026045.2,372-390).
gaggagagccgattagact

SEQ ID NO: 721056 - DNA, 19 bp, Mus musculus
  siRNA target sequence for 2810441A10Rik (NM_026045.2,414-432).
ctttccagcgtttaaggaa

SEQ ID NO: 721057 - DNA, 19 bp, Mus musculus
  siRNA target sequence for 2810441A10Rik (NM_026045.2,418-436).
ccagcgtttaaggaagata

SEQ ID NO: 721058 - DNA, 19 bp, Mus musculus
  siRNA target sequence for 2810441A10Rik (NM_026045.2,430-448).
gaagatagagattcttaca

SEQ ID NO: 721059 - DNA, 19 bp, Mus musculus
  siRNA target sequence for 2810441A10Rik (NM_026045.2,455-473).
gttaacaagggcttaagga

SEQ ID NO: 721060 - DNA, 19 bp, Mus musculus
  siRNA target sequence for 2810441A10Rik (NM_026045.2,589-607).
caccaccattgaagaatta

SEQ ID NO: 721061 - DNA, 19 bp, Mus musculus
  siRNA target sequence for 2810441A10Rik (NM_026045.2,630-648).
ggaaaggtgacgatcataa

SEQ ID NO: 721062 - DNA, 19 bp, Mus musculus
  siRNA target sequence for 2810441A10Rik (NM_026045.2,690-708).
gtgtttgggctaaagaact

SEQ ID NO: 721063 - DNA, 19 bp, Mus musculus
  siRNA target sequence for 2810441A10Rik (NM_026045.2,949-967).
caccatggttggtatccat

SEQ ID NO: 721064 - DNA, 19 bp, Mus musculus
  siRNA target sequence for 2810441A10Rik (NM_026045.2,1088-1106).
cctacagatccgtcaaaat

SEQ ID NO: 721065 - DNA, 19 bp, Mus musculus
  siRNA target sequence for 2810441A10Rik (NM_026045.2,1092-1110).
cagatccgtcaaaatgtgt

SEQ ID NO: 721066 - DNA, 19 bp, Mus musculus
  siRNA target sequence for 2610206B13Rik (NM_026047.3,348-366).
gtagaagaacttaaaagta

SEQ ID NO: 721067 - DNA, 19 bp, Mus musculus
  siRNA target sequence for 2610206B13Rik (NM_026047.3,395-413).
gaccattctggatccttta

SEQ ID NO: 721068 - DNA, 19 bp, Mus musculus
  siRNA target sequence for 2610206B13Rik (NM_026047.3,450-468).
ccactggccgataatccaa

SEQ ID NO: 721069 - DNA, 19 bp, Mus musculus
  siRNA target sequence for 2610206B13Rik (NM_026047.3,455-473).
ggccgataatccaagtaaa

SEQ ID NO: 721070 - DNA, 19 bp, Mus musculus
  siRNA target sequence for 2610206B13Rik (NM_026047.3,456-474).
gccgataatccaagtaaaa

SEQ ID NO: 721071 - DNA, 19 bp, Mus musculus
  siRNA target sequence for 2610206B13Rik (NM_026047.3,457-475).
ccgataatccaagtaaaat

SEQ ID NO: 721072 - DNA, 19 bp, Mus musculus
  siRNA target sequence for 2610206B13Rik (NM_026047.3,514-532).
gaacagctaatgaaatata

SEQ ID NO: 721073 - DNA, 19 bp, Mus musculus
  siRNA target sequence for 2610206B13Rik (NM_026047.3,546-564).
gatgatgtggataagttaa

SEQ ID NO: 721074 - DNA, 19 bp, Mus musculus
  siRNA target sequence for 2610206B13Rik (NM_026047.3,600-618).
ggcctgctgagggagaatt

SEQ ID NO: 721075 - DNA, 19 bp, Mus musculus
  siRNA target sequence for 2610206B13Rik (NM_026047.3,630-648).
gctgaagttgacaacagat

SEQ ID NO: 721076 - DNA, 19 bp, Mus musculus
  siRNA target sequence for 2610206B13Rik (NM_026047.3,780-798).
gtagcacacctgaaacact

SEQ ID NO: 721077 - DNA, 19 bp, Mus musculus
  siRNA target sequence for 2610206B13Rik (NM_026047.3,1133-1151).
cgactgtgcaccttacaaa

SEQ ID NO: 721078 - DNA, 19 bp, Mus musculus
  siRNA target sequence for 2610206B13Rik (NM_026047.3,1458-1476).
gagggaaacgcaatagcaa

SEQ ID NO: 721079 - DNA, 19 bp, Mus musculus
  siRNA target sequence for 2610206B13Rik (NM_026047.3,1490-1508).
gataccttcaaaattgagt

SEQ ID NO: 721080 - DNA, 19 bp, Mus musculus
  siRNA target sequence for 2610206B13Rik (NM_026047.3,1546-1564).
gtatccgctccctcgaaat

SEQ ID NO: 721081 - DNA, 19 bp, Mus musculus
  siRNA target sequence for 2610206B13Rik (NM_026047.3,1559-1577).
cgaaatgaatcgaacaaga

SEQ ID NO: 721082 - DNA, 19 bp, Mus musculus
  siRNA target sequence for 2610206B13Rik (NM_026047.3,1602-1620).
gctgcttatctcgacaaaa

SEQ ID NO: 721083 - DNA, 19 bp, Mus musculus
  siRNA target sequence for 2610206B13Rik (NM_026047.3,1658-1676).
cagcaagagcccttgtaat

SEQ ID NO: 721084 - DNA, 19 bp, Mus musculus
  siRNA target sequence for 2610206B13Rik (NM_026047.3,1660-1678).
gcaagagcccttgtaataa

SEQ ID NO: 721085 - DNA, 19 bp, Mus musculus
  siRNA target sequence for 2610206B13Rik (NM_026047.3,1668-1686).
ccttgtaataacggtttta

SEQ ID NO: 721086 - DNA, 19 bp, Mus musculus
  siRNA target sequence for 2610206B13Rik (NM_026047.3,1739-1757).
cgaggaacctgacaagtta

SEQ ID NO: 721087 - DNA, 19 bp, Mus musculus
  siRNA target sequence for 2610206B13Rik (NM_026047.3,1742-1760).
ggaacctgacaagttacaa

SEQ ID NO: 721088 - DNA, 19 bp, Mus musculus
  siRNA target sequence for 2610206B13Rik (NM_026047.3,1768-1786).
gtaaactgaacctttccaa

SEQ ID NO: 721089 - DNA, 19 bp, Mus musculus
  siRNA target sequence for 2610206B13Rik (NM_026047.3,1866-1884).
cacgagatgagtgaagatt

SEQ ID NO: 721090 - DNA, 19 bp, Mus musculus
  siRNA target sequence for 2610206B13Rik (NM_026047.3,1868-1886).
cgagatgagtgaagatttt

SEQ ID NO: 721091 - DNA, 19 bp, Mus musculus
  siRNA target sequence for 2610206B13Rik (NM_026047.3,1923-1941).
gtcaaacctccaaactgtt

SEQ ID NO: 721092 - DNA, 19 bp, Mus musculus
  siRNA target sequence for 2610206B13Rik (NM_026047.3,1978-1996).
gcagttcccagggattatt

SEQ ID NO: 721093 - DNA, 19 bp, Mus musculus
  siRNA target sequence for 2610206B13Rik (NM_026047.3,1979-1997).
cagttcccagggattattt

SEQ ID NO: 721094 - DNA, 19 bp, Mus musculus
  siRNA target sequence for 2610206B13Rik (NM_026047.3,2008-2026).
ggtttggatcgtccttatt

SEQ ID NO: 721095 - DNA, 19 bp, Mus musculus
  siRNA target sequence for 2610206B13Rik (NM_026047.3,2009-2027).
gtttggatcgtccttattt

SEQ ID NO: 721096 - DNA, 19 bp, Mus musculus
  siRNA target sequence for 2610206B13Rik (NM_026047.3,2013-2031).
ggatcgtccttatttaaga

SEQ ID NO: 721097 - DNA, 19 bp, Mus musculus
  siRNA target sequence for 2610206B13Rik (NM_026047.3,2166-2184).
ccgtccaaagccaccaaaa

SEQ ID NO: 721098 - DNA, 19 bp, Mus musculus
  siRNA target sequence for 2810452K22Rik (NM_026048.1,80-98).
gtcagtgcgaggaaactta

SEQ ID NO: 721099 - DNA, 19 bp, Mus musculus
  siRNA target sequence for 2810452K22Rik (NM_026048.1,84-102).
gtgcgaggaaacttaagga

SEQ ID NO: 721100 - DNA, 19 bp, Mus musculus
  siRNA target sequence for 2810452K22Rik (NM_026048.1,110-128).
gctgactggcataacttaa

SEQ ID NO: 721101 - DNA, 19 bp, Mus musculus
  siRNA target sequence for 2810452K22Rik (NM_026048.1,111-129).
ctgactggcataacttaat

SEQ ID NO: 721102 - DNA, 19 bp, Mus musculus
  siRNA target sequence for 2810452K22Rik (NM_026048.1,119-137).
cataacttaatcctgaaat

SEQ ID NO: 721103 - DNA, 19 bp, Mus musculus
  siRNA target sequence for 2810452K22Rik (NM_026048.1,163-181).
caccacagcgagcagtatt

SEQ ID NO: 721104 - DNA, 19 bp, Mus musculus
  siRNA target sequence for 2810452K22Rik (NM_026048.1,198-216).
gcttgctgagtaaagagaa

SEQ ID NO: 721105 - DNA, 19 bp, Mus musculus
  siRNA target sequence for 2810452K22Rik (NM_026048.1,322-340).
cttggacggcttgactaaa

SEQ ID NO: 721106 - DNA, 19 bp, Mus musculus
  siRNA target sequence for 2810452K22Rik (NM_026048.1,325-343).
ggacggcttgactaaaata

SEQ ID NO: 721107 - DNA, 19 bp, Mus musculus
  siRNA target sequence for 2810452K22Rik (NM_026048.1,328-346).
cggcttgactaaaatacaa

SEQ ID NO: 721108 - DNA, 19 bp, Mus musculus
  siRNA target sequence for 2810452K22Rik (NM_026048.1,329-347).
ggcttgactaaaatacaaa

SEQ ID NO: 721109 - DNA, 19 bp, Mus musculus
  siRNA target sequence for 2810452K22Rik (NM_026048.1,387-405).
gtgagctagaaaattacca

SEQ ID NO: 721110 - DNA, 19 bp, Mus musculus
  siRNA target sequence for 2810452K22Rik (NM_026048.1,448-466).
gcccacagccttcttttat

SEQ ID NO: 721111 - DNA, 19 bp, Mus musculus
  siRNA target sequence for 2810452K22Rik (NM_026048.1,480-498).
ggctctctgaagcatacaa

SEQ ID NO: 721112 - DNA, 19 bp, Mus musculus
  siRNA target sequence for 2810452K22Rik (NM_026048.1,482-500).
ctctctgaagcatacaaga

SEQ ID NO: 721113 - DNA, 19 bp, Mus musculus
  siRNA target sequence for 2810452K22Rik (NM_026048.1,590-608).
caccagccctacatagaga

SEQ ID NO: 721114 - DNA, 19 bp, Mus musculus
  siRNA target sequence for 2810453I06Rik (NM_026050.1,626-644).
gaggtgacccggacaaact

SEQ ID NO: 721115 - DNA, 19 bp, Mus musculus
  siRNA target sequence for 2810453I06Rik (NM_026050.1,897-915).
gtcccctgctccttcagaa

SEQ ID NO: 721116 - DNA, 19 bp, Mus musculus
  siRNA target sequence for 2810453I06Rik (NM_026050.1,1037-1055).
gacggccaggccatccaaa

SEQ ID NO: 721117 - DNA, 19 bp, Mus musculus
  siRNA target sequence for 2810453I06Rik (NM_026050.1,1042-1060).
ccaggccatccaaaactga

SEQ ID NO: 721118 - DNA, 19 bp, Mus musculus
  siRNA target sequence for 2810453I06Rik (NM_026050.1,1152-1170).
gggccagctgccatatgct

SEQ ID NO: 721119 - DNA, 19 bp, Mus musculus
  siRNA target sequence for 2810453I06Rik (NM_026050.1,1153-1171).
ggccagctgccatatgctt

SEQ ID NO: 721120 - DNA, 19 bp, Mus musculus
  siRNA target sequence for 2810453I06Rik (NM_026050.1,1163-1181).
catatgcttacccctatta

SEQ ID NO: 721121 - DNA, 19 bp, Mus musculus
  siRNA target sequence for 2810453I06Rik (NM_026050.1,1169-1187).
cttacccctattataaagt

SEQ ID NO: 721122 - DNA, 19 bp, Mus musculus
  siRNA target sequence for 2810453I06Rik (NM_026050.1,1215-1233).
gtcccttgaccgtttcaat

SEQ ID NO: 721123 - DNA, 19 bp, Mus musculus
  siRNA target sequence for 2810453I06Rik (NM_026050.1,1284-1302).
cagatggtccgcagatagt

SEQ ID NO: 721124 - DNA, 19 bp, Mus musculus
  siRNA target sequence for 2900005J15Rik (NM_026059.2,1084-1102).
ctggctcctcactaaagga

SEQ ID NO: 721125 - DNA, 19 bp, Mus musculus
  siRNA target sequence for 2900005J15Rik (NM_026059.2,1105-1123).
cccaggaccccaaaagaca

SEQ ID NO: 721126 - DNA, 19 bp, Mus musculus
  siRNA target sequence for 2900005J15Rik (NM_026059.2,1110-1128).
gaccccaaaagacatcatt

SEQ ID NO: 721127 - DNA, 19 bp, Mus musculus
  siRNA target sequence for 2900005J15Rik (NM_026059.2,1136-1154).
gggttcagactgcttctta

SEQ ID NO: 721128 - DNA, 19 bp, Mus musculus
  siRNA target sequence for 2900005J15Rik (NM_026059.2,1204-1222).
gctaccctcagccactaaa

SEQ ID NO: 721129 - DNA, 19 bp, Mus musculus
  siRNA target sequence for 2900005J15Rik (NM_026059.2,1205-1223).
ctaccctcagccactaaaa

SEQ ID NO: 721130 - DNA, 19 bp, Mus musculus
  siRNA target sequence for 2900005J15Rik (NM_026059.2,1268-1286).
ctgtaggttggaatgttca

SEQ ID NO: 721131 - DNA, 19 bp, Mus musculus
  siRNA target sequence for 2900005J15Rik (NM_026059.2,1274-1292).
gttggaatgttcatctctt

SEQ ID NO: 721132 - DNA, 19 bp, Mus musculus
  siRNA target sequence for 2900005J15Rik (NM_026059.2,1277-1295).
ggaatgttcatctcttcat

SEQ ID NO: 721133 - DNA, 19 bp, Mus musculus
  siRNA target sequence for 2900005J15Rik (NM_026059.2,1304-1322).
gccaggatgcataaatggt

SEQ ID NO: 721134 - DNA, 19 bp, Mus musculus
  siRNA target sequence for 2900005J15Rik (NM_026059.2,1305-1323).
ccaggatgcataaatggta

SEQ ID NO: 721135 - DNA, 19 bp, Mus musculus
  siRNA target sequence for 2900024C23Rik (NM_026062.2,101-119).
catgcgggtgaagtatctt

SEQ ID NO: 721136 - DNA, 19 bp, Mus musculus
  siRNA target sequence for 2900024C23Rik (NM_026062.2,144-162).
gtcggaagctggatcatat

SEQ ID NO: 721137 - DNA, 19 bp, Mus musculus
  siRNA target sequence for 2900024C23Rik (NM_026062.2,146-164).
cggaagctggatcatatat

SEQ ID NO: 721138 - DNA, 19 bp, Mus musculus
  siRNA target sequence for 2900024C23Rik (NM_026062.2,158-176).
catatatgtgcagtattca

SEQ ID NO: 721139 - DNA, 19 bp, Mus musculus
  siRNA target sequence for 2900024C23Rik (NM_026062.2,165-183).
gtgcagtattcaacctata

SEQ ID NO: 721140 - DNA, 19 bp, Mus musculus
  siRNA target sequence for 2900024C23Rik (NM_026062.2,167-185).
gcagtattcaacctataca

SEQ ID NO: 721141 - DNA, 19 bp, Mus musculus
  siRNA target sequence for 2900024C23Rik (NM_026062.2,198-216).
gggaaggactgtaagaaaa

SEQ ID NO: 721142 - DNA, 19 bp, Mus musculus
  siRNA target sequence for 2900024C23Rik (NM_026062.2,203-221).
ggactgtaagaaaatcata

SEQ ID NO: 721143 - DNA, 19 bp, Mus musculus
  siRNA target sequence for 2900024C23Rik (NM_026062.2,206-224).
ctgtaagaaaatcatatgt

SEQ ID NO: 721144 - DNA, 19 bp, Mus musculus
  siRNA target sequence for 2900024C23Rik (NM_026062.2,317-335).
gcccagcaaccagatgtat

SEQ ID NO: 721145 - DNA, 19 bp, Mus musculus
  siRNA target sequence for 2900024C23Rik (NM_026062.2,320-338).
cagcaaccagatgtattta

SEQ ID NO: 721146 - DNA, 19 bp, Mus musculus
  siRNA target sequence for 2900024C23Rik (NM_026062.2,360-378).
ggtgttgtgaagtgtcaaa

SEQ ID NO: 721147 - DNA, 19 bp, Mus musculus
  siRNA target sequence for 2900024C23Rik (NM_026062.2,429-447).
gaaatagtgctatttgata

SEQ ID NO: 721148 - DNA, 19 bp, Mus musculus
  siRNA target sequence for 2900024C23Rik (NM_026062.2,435-453).
gtgctatttgataaaccaa

SEQ ID NO: 721149 - DNA, 19 bp, Mus musculus
  siRNA target sequence for 2900024C23Rik (NM_026062.2,522-540).
caagggaacctctctgaat

SEQ ID NO: 721150 - DNA, 19 bp, Mus musculus
  siRNA target sequence for 2900024C23Rik (NM_026062.2,526-544).
ggaacctctctgaattggt

SEQ ID NO: 721151 - DNA, 19 bp, Mus musculus
  siRNA target sequence for 2900024C23Rik (NM_026062.2,530-548).
cctctctgaattggttaat

SEQ ID NO: 721152 - DNA, 19 bp, Mus musculus
  siRNA target sequence for 2900024C23Rik (NM_026062.2,535-553).
ctgaattggttaatctcat

SEQ ID NO: 721153 - DNA, 19 bp, Mus musculus
  siRNA target sequence for 2900024C23Rik (NM_026062.2,619-637).
cacttcttcagttgaatga

SEQ ID NO: 721154 - DNA, 19 bp, Mus musculus
  siRNA target sequence for 2900024C23Rik (NM_026062.2,621-639).
cttcttcagttgaatgagt

SEQ ID NO: 721155 - DNA, 19 bp, Mus musculus
  siRNA target sequence for 2900024C23Rik (NM_026062.2,644-662).
cctgatggtgatacttcaa

SEQ ID NO: 721156 - DNA, 19 bp, Mus musculus
  siRNA target sequence for 2900024C23Rik (NM_026062.2,647-665).
gatggtgatacttcaagat

SEQ ID NO: 721157 - DNA, 19 bp, Mus musculus
  siRNA target sequence for 2900024C23Rik (NM_026062.2,702-720).
gatctctacgtgatggaaa

SEQ ID NO: 721158 - DNA, 19 bp, Mus musculus
  siRNA target sequence for 2900024C23Rik (NM_026062.2,710-728).
cgtgatggaaagtgttgaa

SEQ ID NO: 721159 - DNA, 19 bp, Mus musculus
  siRNA target sequence for 2900024C23Rik (NM_026062.2,734-752).
ctctctgtatggaataagt

SEQ ID NO: 721160 - DNA, 19 bp, Mus musculus
  siRNA target sequence for 2900024C23Rik (NM_026062.2,751-769).
gtctaccatgggttatgga

SEQ ID NO: 721161 - DNA, 19 bp, Mus musculus
  siRNA target sequence for 2900024C23Rik (NM_026062.2,757-775).
catgggttatggaactttt

SEQ ID NO: 721162 - DNA, 19 bp, Mus musculus
  siRNA target sequence for 2900024C23Rik (NM_026062.2,796-814).
ggagcatggatcaattgtt

SEQ ID NO: 721163 - DNA, 19 bp, Mus musculus
  siRNA target sequence for 2900024C23Rik (NM_026062.2,846-864).
gccataggacttctagaat

SEQ ID NO: 721164 - DNA, 19 bp, Mus musculus
  siRNA target sequence for 2900024C23Rik (NM_026062.2,886-904).
gcccctatggaaactttct

SEQ ID NO: 721165 - DNA, 19 bp, Mus musculus
  siRNA target sequence for 2900024C23Rik (NM_026062.2,888-906).
ccctatggaaactttctca

SEQ ID NO: 721166 - DNA, 19 bp, Mus musculus
  siRNA target sequence for 2900024C23Rik (NM_026062.2,919-937).
gtgccaaaaacctaggata

SEQ ID NO: 721167 - DNA, 19 bp, Mus musculus
  siRNA target sequence for 2900024C23Rik (NM_026062.2,921-939).
gccaaaaacctaggatata

SEQ ID NO: 721168 - DNA, 19 bp, Mus musculus
  siRNA target sequence for 2900024C23Rik (NM_026062.2,991-1009).
caaacctaaaggaacttat

SEQ ID NO: 721169 - DNA, 19 bp, Mus musculus
  siRNA target sequence for 2900024C23Rik (NM_026062.2,1049-1067).
cggtacagactgtagaact

SEQ ID NO: 721170 - DNA, 19 bp, Mus musculus
  siRNA target sequence for 2900024C23Rik (NM_026062.2,1050-1068).
ggtacagactgtagaacta

SEQ ID NO: 721171 - DNA, 19 bp, Mus musculus
  siRNA target sequence for 2900024C23Rik (NM_026062.2,1069-1087).
gctgtgacctgagtacaat

SEQ ID NO: 721172 - DNA, 19 bp, Mus musculus
  siRNA target sequence for 2900024C23Rik (NM_026062.2,1072-1090).
gtgacctgagtacaatgaa

SEQ ID NO: 721173 - DNA, 19 bp, Mus musculus
  siRNA target sequence for 2900024C23Rik (NM_026062.2,1088-1106).
gaagtgcacttctgaagta

SEQ ID NO: 721174 - DNA, 19 bp, Mus musculus
  siRNA target sequence for 2900024C23Rik (NM_026062.2,1091-1109).
gtgcacttctgaagtaata

SEQ ID NO: 721175 - DNA, 19 bp, Mus musculus
  siRNA target sequence for 2900024C23Rik (NM_026062.2,1093-1111).
gcacttctgaagtaataca

SEQ ID NO: 721176 - DNA, 19 bp, Mus musculus
  siRNA target sequence for 2900024C23Rik (NM_026062.2,1094-1112).
cacttctgaagtaatacaa

SEQ ID NO: 721177 - DNA, 19 bp, Mus musculus
  siRNA target sequence for 2900024C23Rik (NM_026062.2,1099-1117).
ctgaagtaatacaaccaaa

SEQ ID NO: 721178 - DNA, 19 bp, Mus musculus
  siRNA target sequence for 2900024C23Rik (NM_026062.2,1121-1139).
ggcaaaagcctgtcagtta

SEQ ID NO: 721179 - DNA, 19 bp, Mus musculus
  siRNA target sequence for 2900024C23Rik (NM_026062.2,1207-1225).
cttgtattgctctcaaagt

SEQ ID NO: 721180 - DNA, 19 bp, Mus musculus
  siRNA target sequence for 2900024C23Rik (NM_026062.2,1247-1265).
ggaacattctttgatatta

SEQ ID NO: 721181 - DNA, 19 bp, Mus musculus
  siRNA target sequence for 2900010M23Rik (NM_026063.1,30-48).
ccgctaccggcgtttcctt

SEQ ID NO: 721182 - DNA, 19 bp, Mus musculus
  siRNA target sequence for 2900010M23Rik (NM_026063.1,31-49).
cgctaccggcgtttcctta

SEQ ID NO: 721183 - DNA, 19 bp, Mus musculus
  siRNA target sequence for 2900010M23Rik (NM_026063.1,32-50).
gctaccggcgtttccttaa

SEQ ID NO: 721184 - DNA, 19 bp, Mus musculus
  siRNA target sequence for 2900010M23Rik (NM_026063.1,167-185).
ccgaggcctgtgatcagat

SEQ ID NO: 721185 - DNA, 19 bp, Mus musculus
  siRNA target sequence for 2900010M23Rik (NM_026063.1,199-217).
gcacgactgcattcaaact

SEQ ID NO: 721186 - DNA, 19 bp, Mus musculus
  siRNA target sequence for 2900010M23Rik (NM_026063.1,200-218).
cacgactgcattcaaacta

SEQ ID NO: 721187 - DNA, 19 bp, Mus musculus
  siRNA target sequence for 2900010M23Rik (NM_026063.1,202-220).
cgactgcattcaaactact

SEQ ID NO: 721188 - DNA, 19 bp, Mus musculus
  siRNA target sequence for 3110004H13Rik (NM_026068.1,60-78).
cgctatggagacagatgat

SEQ ID NO: 721189 - DNA, 19 bp, Mus musculus
  siRNA target sequence for 3110004H13Rik (NM_026068.1,111-129).
ggaatttgtgcaatgttta

SEQ ID NO: 721190 - DNA, 19 bp, Mus musculus
  siRNA target sequence for 3110004H13Rik (NM_026068.1,125-143).
gtttagccaacccaaacta

SEQ ID NO: 721191 - DNA, 19 bp, Mus musculus
  siRNA target sequence for 3110004H13Rik (NM_026068.1,135-153).
cccaaactaccttaatttt

SEQ ID NO: 721192 - DNA, 19 bp, Mus musculus
  siRNA target sequence for 3110004H13Rik (NM_026068.1,157-175).
gcccaaagaggttacttca

SEQ ID NO: 721193 - DNA, 19 bp, Mus musculus
  siRNA target sequence for 3110004H13Rik (NM_026068.1,158-176).
cccaaagaggttacttcaa

SEQ ID NO: 721194 - DNA, 19 bp, Mus musculus
  siRNA target sequence for 3110004H13Rik (NM_026068.1,159-177).
ccaaagaggttacttcaaa

SEQ ID NO: 721195 - DNA, 19 bp, Mus musculus
  siRNA target sequence for 3110004H13Rik (NM_026068.1,199-217).
cttaagtatttgctttact

SEQ ID NO: 721196 - DNA, 19 bp, Mus musculus
  siRNA target sequence for 3110004H13Rik (NM_026068.1,227-245).
cagaatatgccaaatatct

SEQ ID NO: 721197 - DNA, 19 bp, Mus musculus
  siRNA target sequence for 3110004H13Rik (NM_026068.1,249-267).
gtaccctcagtgcttacat

SEQ ID NO: 721198 - DNA, 19 bp, Mus musculus
  siRNA target sequence for 3110004H13Rik (NM_026068.1,253-271).
cctcagtgcttacatatgt

SEQ ID NO: 721199 - DNA, 19 bp, Mus musculus
  siRNA target sequence for 3110004H13Rik (NM_026068.1,316-334).
gcgcagtgtgcgaagttca

SEQ ID NO: 721200 - DNA, 19 bp, Mus musculus
  siRNA target sequence for 3110004H13Rik (NM_026068.1,317-335).
cgcagtgtgcgaagttcat

SEQ ID NO: 721201 - DNA, 19 bp, Mus musculus
  siRNA target sequence for 2900091E11Rik (NM_026070.1,195-213).
gaccaaggtgccagctatt

SEQ ID NO: 721202 - DNA, 19 bp, Mus musculus
  siRNA target sequence for 2900091E11Rik (NM_026070.1,197-215).
ccaaggtgccagctattca

SEQ ID NO: 721203 - DNA, 19 bp, Mus musculus
  siRNA target sequence for 2900091E11Rik (NM_026070.1,198-216).
caaggtgccagctattcaa

SEQ ID NO: 721204 - DNA, 19 bp, Mus musculus
  siRNA target sequence for 2900091E11Rik (NM_026070.1,204-222).
gccagctattcaacagaaa

SEQ ID NO: 721205 - DNA, 19 bp, Mus musculus
  siRNA target sequence for 2900091E11Rik (NM_026070.1,224-242).
gaaccgtggcctttctaaa

SEQ ID NO: 721206 - DNA, 19 bp, Mus musculus
  siRNA target sequence for 2900091E11Rik (NM_026070.1,227-245).
ccgtggcctttctaaacca

SEQ ID NO: 721207 - DNA, 19 bp, Mus musculus
  siRNA target sequence for 2900091E11Rik (NM_026070.1,400-418).
gttgaagtgtctcctttaa

SEQ ID NO: 721208 - DNA, 19 bp, Mus musculus
  siRNA target sequence for 2900091E11Rik (NM_026070.1,430-448).
gtcacaaacggatcacatt

SEQ ID NO: 721209 - DNA, 19 bp, Mus musculus
  siRNA target sequence for 2900091E11Rik (NM_026070.1,432-450).
cacaaacggatcacattct

SEQ ID NO: 721210 - DNA, 19 bp, Mus musculus
  siRNA target sequence for 2900091E11Rik (NM_026070.1,434-452).
caaacggatcacattctga

SEQ ID NO: 721211 - DNA, 19 bp, Mus musculus
  siRNA target sequence for 2900091E11Rik (NM_026070.1,466-484).
caaacgcagcagaatagca

SEQ ID NO: 721212 - DNA, 19 bp, Mus musculus
  siRNA target sequence for 2900091E11Rik (NM_026070.1,507-525).
gagtgaagcgccatcagaa

SEQ ID NO: 721213 - DNA, 19 bp, Mus musculus
  siRNA target sequence for 2900091E11Rik (NM_026070.1,509-527).
gtgaagcgccatcagaaaa

SEQ ID NO: 721214 - DNA, 19 bp, Mus musculus
  siRNA target sequence for 2900091E11Rik (NM_026070.1,683-701).
gcgaaagagccgtagaaga

SEQ ID NO: 721215 - DNA, 19 bp, Mus musculus
  siRNA target sequence for 3110017O03Rik (NM_026073.2,551-569).
gtccgggtggagttcatca

SEQ ID NO: 721216 - DNA, 19 bp, Mus musculus
  siRNA target sequence for 3110017O03Rik (NM_026073.2,556-574).
ggtggagttcatcaagtat

SEQ ID NO: 721217 - DNA, 19 bp, Mus musculus
  siRNA target sequence for 3110017O03Rik (NM_026073.2,557-575).
gtggagttcatcaagtatt

SEQ ID NO: 721218 - DNA, 19 bp, Mus musculus
  siRNA target sequence for 3110017O03Rik (NM_026073.2,611-629).
gaccgcgaggagatgctta

SEQ ID NO: 721219 - DNA, 19 bp, Mus musculus
  siRNA target sequence for 3110017O03Rik (NM_026073.2,614-632).
cgcgaggagatgcttatca

SEQ ID NO: 721220 - DNA, 19 bp, Mus musculus
  siRNA target sequence for 3110040N11Rik (NM_026077.1,68-86).
gcgacaagcaagggtaaaa

SEQ ID NO: 721221 - DNA, 19 bp, Mus musculus
  siRNA target sequence for 3110040N11Rik (NM_026077.1,326-344).
ctggataagggtggtaaat

SEQ ID NO: 721222 - DNA, 19 bp, Mus musculus
  siRNA target sequence for 3110040N11Rik (NM_026077.1,339-357).
gtaaatctcgggaaaaggt

SEQ ID NO: 721223 - DNA, 19 bp, Mus musculus
  siRNA target sequence for 3110040N11Rik (NM_026077.1,364-382).
gctcttggcctctacaact

SEQ ID NO: 721224 - DNA, 19 bp, Mus musculus
  siRNA target sequence for Pigc (NM_026078.1,283-301).
gtgctcaacgtgtaacaga

SEQ ID NO: 721225 - DNA, 19 bp, Mus musculus
  siRNA target sequence for Pigc (NM_026078.1,340-358).
ggcagccgttccctgataa

SEQ ID NO: 721226 - DNA, 19 bp, Mus musculus
  siRNA target sequence for Pigc (NM_026078.1,344-362).
gccgttccctgataactat

SEQ ID NO: 721227 - DNA, 19 bp, Mus musculus
  siRNA target sequence for Pigc (NM_026078.1,346-364).
cgttccctgataactatgt

SEQ ID NO: 721228 - DNA, 19 bp, Mus musculus
  siRNA target sequence for Pigc (NM_026078.1,347-365).
gttccctgataactatgtt

SEQ ID NO: 721229 - DNA, 19 bp, Mus musculus
  siRNA target sequence for Pigc (NM_026078.1,646-664).
ctctggtctttatcacttt

SEQ ID NO: 721230 - DNA, 19 bp, Mus musculus
  siRNA target sequence for Pigc (NM_026078.1,648-666).
ctggtctttatcactttca

SEQ ID NO: 721231 - DNA, 19 bp, Mus musculus
  siRNA target sequence for Pigc (NM_026078.1,673-691).
gtttttcacctgtgctaaa

SEQ ID NO: 721232 - DNA, 19 bp, Mus musculus
  siRNA target sequence for Pigc (NM_026078.1,776-794).
cggtgccaatgctgctatt

SEQ ID NO: 721233 - DNA, 19 bp, Mus musculus
  siRNA target sequence for Pigc (NM_026078.1,778-796).
gtgccaatgctgctattgt

SEQ ID NO: 721234 - DNA, 19 bp, Mus musculus
  siRNA target sequence for Pigc (NM_026078.1,780-798).
gccaatgctgctattgtat

SEQ ID NO: 721235 - DNA, 19 bp, Mus musculus
  siRNA target sequence for Pigc (NM_026078.1,863-881).
gtcactccacgccttcatt

SEQ ID NO: 721236 - DNA, 19 bp, Mus musculus
  siRNA target sequence for Pigc (NM_026078.1,889-907).
cgtttgctatccagatctt

SEQ ID NO: 721237 - DNA, 19 bp, Mus musculus
  siRNA target sequence for Pigc (NM_026078.1,1073-1091).
cccttactacctcattcat

SEQ ID NO: 721238 - DNA, 19 bp, Mus musculus
  siRNA target sequence for Pigc (NM_026078.1,1075-1093).
cttactacctcattcatct

SEQ ID NO: 721239 - DNA, 19 bp, Mus musculus
  siRNA target sequence for Ikbkap (NM_026079.1,170-188).
cagggaaacctcagtgttt

SEQ ID NO: 721240 - DNA, 19 bp, Mus musculus
  siRNA target sequence for Ikbkap (NM_026079.1,380-398).
cctctggggacgtcatagt

SEQ ID NO: 721241 - DNA, 19 bp, Mus musculus
  siRNA target sequence for Ikbkap (NM_026079.1,391-409).
gtcatagtctgcaatctca

SEQ ID NO: 721242 - DNA, 19 bp, Mus musculus
  siRNA target sequence for Ikbkap (NM_026079.1,502-520).
gctcaacagaccctgatta

SEQ ID NO: 721243 - DNA, 19 bp, Mus musculus
  siRNA target sequence for Ikbkap (NM_026079.1,512-530).
ccctgattatgatgacaaa

SEQ ID NO: 721244 - DNA, 19 bp, Mus musculus
  siRNA target sequence for Ikbkap (NM_026079.1,513-531).
cctgattatgatgacaaaa

SEQ ID NO: 721245 - DNA, 19 bp, Mus musculus
  siRNA target sequence for Ikbkap (NM_026079.1,715-733).
cgtggggatgggcagtatt

SEQ ID NO: 721246 - DNA, 19 bp, Mus musculus
  siRNA target sequence for Ikbkap (NM_026079.1,716-734).
gtggggatgggcagtattt

SEQ ID NO: 721247 - DNA, 19 bp, Mus musculus
  siRNA target sequence for Ikbkap (NM_026079.1,770-788).
ggaagatccgcgtatggaa

SEQ ID NO: 721248 - DNA, 19 bp, Mus musculus
  siRNA target sequence for Ikbkap (NM_026079.1,780-798).
cgtatggaaccgagagttt

SEQ ID NO: 721249 - DNA, 19 bp, Mus musculus
  siRNA target sequence for Ikbkap (NM_026079.1,893-911).
ccaaccagcaagatgttgt

SEQ ID NO: 721250 - DNA, 19 bp, Mus musculus
  siRNA target sequence for Ikbkap (NM_026079.1,897-915).
ccagcaagatgttgtgttt

SEQ ID NO: 721251 - DNA, 19 bp, Mus musculus
  siRNA target sequence for Ikbkap (NM_026079.1,1052-1070).
gttccactctgaaaagcta

SEQ ID NO: 721252 - DNA, 19 bp, Mus musculus
  siRNA target sequence for Ikbkap (NM_026079.1,1080-1098).
ctggaccgtggggaactat

SEQ ID NO: 721253 - DNA, 19 bp, Mus musculus
  siRNA target sequence for Ikbkap (NM_026079.1,1082-1100).
ggaccgtggggaactatca

SEQ ID NO: 721254 - DNA, 19 bp, Mus musculus
  siRNA target sequence for Ikbkap (NM_026079.1,1181-1199).
cgtgtcgactccatgttct

SEQ ID NO: 721255 - DNA, 19 bp, Mus musculus
  siRNA target sequence for Ikbkap (NM_026079.1,1258-1276).
gggaatagtgccaatgact

SEQ ID NO: 721256 - DNA, 19 bp, Mus musculus
  siRNA target sequence for Ikbkap (NM_026079.1,1259-1277).
ggaatagtgccaatgactt

SEQ ID NO: 721257 - DNA, 19 bp, Mus musculus
  siRNA target sequence for Ikbkap (NM_026079.1,1268-1286).
ccaatgacttggcaaatgt

SEQ ID NO: 721258 - DNA, 19 bp, Mus musculus
  siRNA target sequence for Ikbkap (NM_026079.1,1280-1298).
caaatgtggctgttattga

SEQ ID NO: 721259 - DNA, 19 bp, Mus musculus
  siRNA target sequence for Ikbkap (NM_026079.1,1339-1357).
gtcccacctcccatgtgta

SEQ ID NO: 721260 - DNA, 19 bp, Mus musculus
  siRNA target sequence for Ikbkap (NM_026079.1,1371-1389).
gatcccacatccagtgaat

SEQ ID NO: 721261 - DNA, 19 bp, Mus musculus
  siRNA target sequence for Ikbkap (NM_026079.1,1386-1404).
gaatcaagtcatattctct

SEQ ID NO: 721262 - DNA, 19 bp, Mus musculus
  siRNA target sequence for Ikbkap (NM_026079.1,1437-1455).
cgccagtaaccagatttct

SEQ ID NO: 721263 - DNA, 19 bp, Mus musculus
  siRNA target sequence for Ikbkap (NM_026079.1,1439-1457).
ccagtaaccagatttctgt

SEQ ID NO: 721264 - DNA, 19 bp, Mus musculus
  siRNA target sequence for Ikbkap (NM_026079.1,1447-1465).
cagatttctgtctacaagt

SEQ ID NO: 721265 - DNA, 19 bp, Mus musculus
  siRNA target sequence for Ikbkap (NM_026079.1,1471-1489).
gataagccaaacatggatt

SEQ ID NO: 721266 - DNA, 19 bp, Mus musculus
  siRNA target sequence for Ikbkap (NM_026079.1,1485-1503).
ggattccacagtgaaacta

SEQ ID NO: 721267 - DNA, 19 bp, Mus musculus
  siRNA target sequence for Ikbkap (NM_026079.1,1507-1525).
gccgtgggtggaaatggat

SEQ ID NO: 721268 - DNA, 19 bp, Mus musculus
  siRNA target sequence for Ikbkap (NM_026079.1,1508-1526).
ccgtgggtggaaatggatt

SEQ ID NO: 721269 - DNA, 19 bp, Mus musculus
  siRNA target sequence for Ikbkap (NM_026079.1,1509-1527).
cgtgggtggaaatggattt

SEQ ID NO: 721270 - DNA, 19 bp, Mus musculus
  siRNA target sequence for Ikbkap (NM_026079.1,1512-1530).
gggtggaaatggatttaaa

SEQ ID NO: 721271 - DNA, 19 bp, Mus musculus
  siRNA target sequence for Ikbkap (NM_026079.1,1541-1559).
caacacctcatttggaaaa

SEQ ID NO: 721272 - DNA, 19 bp, Mus musculus
  siRNA target sequence for Ikbkap (NM_026079.1,1569-1587).
gattcagttcgggaacaat

SEQ ID NO: 721273 - DNA, 19 bp, Mus musculus
  siRNA target sequence for Ikbkap (NM_026079.1,1651-1669).
gacactttcctggctataa

SEQ ID NO: 721274 - DNA, 19 bp, Mus musculus
  siRNA target sequence for Ikbkap (NM_026079.1,1777-1795).
gatggagtcgtcattggtt

SEQ ID NO: 721275 - DNA, 19 bp, Mus musculus
  siRNA target sequence for Ikbkap (NM_026079.1,1780-1798).
ggagtcgtcattggtttat

SEQ ID NO: 721276 - DNA, 19 bp, Mus musculus
  siRNA target sequence for Ikbkap (NM_026079.1,1783-1801).
gtcgtcattggtttatgct

SEQ ID NO: 721277 - DNA, 19 bp, Mus musculus
  siRNA target sequence for Ikbkap (NM_026079.1,1805-1823).
gttctaagaccaagtcatt

SEQ ID NO: 721278 - DNA, 19 bp, Mus musculus
  siRNA target sequence for Ikbkap (NM_026079.1,1899-1917).
gaattctgaaggaattcct

SEQ ID NO: 721279 - DNA, 19 bp, Mus musculus
  siRNA target sequence for Ikbkap (NM_026079.1,1910-1928).
gaattcctgttcgatttgt

SEQ ID NO: 721280 - DNA, 19 bp, Mus musculus
  siRNA target sequence for Ikbkap (NM_026079.1,1997-2015).
ggtgtcgcttttttatcaa

SEQ ID NO: 721281 - DNA, 19 bp, Mus musculus
  siRNA target sequence for Ikbkap (NM_026079.1,1998-2016).
gtgtcgcttttttatcaat

SEQ ID NO: 721282 - DNA, 19 bp, Mus musculus
  siRNA target sequence for Ikbkap (NM_026079.1,2000-2018).
gtcgcttttttatcaatga

SEQ ID NO: 721283 - DNA, 19 bp, Mus musculus
  siRNA target sequence for Ikbkap (NM_026079.1,2021-2039).
ctgaggtcgcatcaaatat

SEQ ID NO: 721284 - DNA, 19 bp, Mus musculus
  siRNA target sequence for Ikbkap (NM_026079.1,2023-2041).
gaggtcgcatcaaatatca

SEQ ID NO: 721285 - DNA, 19 bp, Mus musculus
  siRNA target sequence for Ikbkap (NM_026079.1,2110-2128).
ctaagtggtgcctcactta

SEQ ID NO: 721286 - DNA, 19 bp, Mus musculus
  siRNA target sequence for Ikbkap (NM_026079.1,2222-2240).
cccaggacacaaagcttat

SEQ ID NO: 721287 - DNA, 19 bp, Mus musculus
  siRNA target sequence for Ikbkap (NM_026079.1,2223-2241).
ccaggacacaaagcttata

SEQ ID NO: 721288 - DNA, 19 bp, Mus musculus
  siRNA target sequence for Ikbkap (NM_026079.1,2226-2244).
ggacacaaagcttatacta

SEQ ID NO: 721289 - DNA, 19 bp, Mus musculus
  siRNA target sequence for Ikbkap (NM_026079.1,2231-2249).
caaagcttatactacagat

SEQ ID NO: 721290 - DNA, 19 bp, Mus musculus
  siRNA target sequence for Ikbkap (NM_026079.1,2312-2330).
ggctggacaaacttatgtt

SEQ ID NO: 721291 - DNA, 19 bp, Mus musculus
  siRNA target sequence for Ikbkap (NM_026079.1,2313-2331).
gctggacaaacttatgttt

SEQ ID NO: 721292 - DNA, 19 bp, Mus musculus
  siRNA target sequence for Ikbkap (NM_026079.1,2363-2381).
gaattaacctcaatctgat

SEQ ID NO: 721293 - DNA, 19 bp, Mus musculus
  siRNA target sequence for Ikbkap (NM_026079.1,2419-2437).
gaaaccttcgtaaaacaga

SEQ ID NO: 721294 - DNA, 19 bp, Mus musculus
  siRNA target sequence for Ikbkap (NM_026079.1,2423-2441).
ccttcgtaaaacagattga

SEQ ID NO: 721295 - DNA, 19 bp, Mus musculus
  siRNA target sequence for Ikbkap (NM_026079.1,2424-2442).
cttcgtaaaacagattgat

SEQ ID NO: 721296 - DNA, 19 bp, Mus musculus
  siRNA target sequence for Ikbkap (NM_026079.1,2603-2621).
ccatcaatcctcgaaagtt

SEQ ID NO: 721297 - DNA, 19 bp, Mus musculus
  siRNA target sequence for Ikbkap (NM_026079.1,2657-2675).
ccaccccggagctggaaat

SEQ ID NO: 721298 - DNA, 19 bp, Mus musculus
  siRNA target sequence for Ikbkap (NM_026079.1,2685-2703).
gaaggtacaggaacttcaa

SEQ ID NO: 721299 - DNA, 19 bp, Mus musculus
  siRNA target sequence for Ikbkap (NM_026079.1,2735-2753).
gtgtagaggaggctttgaa

SEQ ID NO: 721300 - DNA, 19 bp, Mus musculus
  siRNA target sequence for Ikbkap (NM_026079.1,2761-2779).
ctgctcctggtggatgtta

SEQ ID NO: 721301 - DNA, 19 bp, Mus musculus
  siRNA target sequence for Ikbkap (NM_026079.1,2763-2781).
gctcctggtggatgttaat

SEQ ID NO: 721302 - DNA, 19 bp, Mus musculus
  siRNA target sequence for Ikbkap (NM_026079.1,2770-2788).
gtggatgttaatgagttat

SEQ ID NO: 721303 - DNA, 19 bp, Mus musculus
  siRNA target sequence for Ikbkap (NM_026079.1,2772-2790).
ggatgttaatgagttattt

SEQ ID NO: 721304 - DNA, 19 bp, Mus musculus
  siRNA target sequence for Ikbkap (NM_026079.1,2803-2821).
gggacctatgactttaatt

SEQ ID NO: 721305 - DNA, 19 bp, Mus musculus
  siRNA target sequence for Ikbkap (NM_026079.1,2804-2822).
ggacctatgactttaattt

SEQ ID NO: 721306 - DNA, 19 bp, Mus musculus
  siRNA target sequence for Ikbkap (NM_026079.1,2805-2823).
gacctatgactttaattta

SEQ ID NO: 721307 - DNA, 19 bp, Mus musculus
  siRNA target sequence for Ikbkap (NM_026079.1,2844-2862).
gtcacaaaaggatcctaaa

SEQ ID NO: 721308 - DNA, 19 bp, Mus musculus
  siRNA target sequence for Ikbkap (NM_026079.1,2858-2876).
ctaaagaatatcttccatt

SEQ ID NO: 721309 - DNA, 19 bp, Mus musculus
  siRNA target sequence for Ikbkap (NM_026079.1,2911-2929).
cagaggttcaccatagaca

SEQ ID NO: 721310 - DNA, 19 bp, Mus musculus
  siRNA target sequence for Ikbkap (NM_026079.1,2915-2933).
ggttcaccatagacaagta

SEQ ID NO: 721311 - DNA, 19 bp, Mus musculus
  siRNA target sequence for Ikbkap (NM_026079.1,2926-2944).
gacaagtacttgaaacgat

SEQ ID NO: 721312 - DNA, 19 bp, Mus musculus
  siRNA target sequence for Ikbkap (NM_026079.1,2928-2946).
caagtacttgaaacgatat

SEQ ID NO: 721313 - DNA, 19 bp, Mus musculus
  siRNA target sequence for Ikbkap (NM_026079.1,2993-3011).
cagaatgcttaaatttgat

SEQ ID NO: 721314 - DNA, 19 bp, Mus musculus
  siRNA target sequence for Ikbkap (NM_026079.1,3330-3348).
gtacgcccaggattatgaa

SEQ ID NO: 721315 - DNA, 19 bp, Mus musculus
  siRNA target sequence for Ikbkap (NM_026079.1,3398-3416).
ggctggtctacaagtatga

SEQ ID NO: 721316 - DNA, 19 bp, Mus musculus
  siRNA target sequence for Ikbkap (NM_026079.1,3411-3429).
gtatgacagagtggatatt

SEQ ID NO: 721317 - DNA, 19 bp, Mus musculus
  siRNA target sequence for Ikbkap (NM_026079.1,3617-3635).
cggaaaccagcagtattat

SEQ ID NO: 721318 - DNA, 19 bp, Mus musculus
  siRNA target sequence for Ikbkap (NM_026079.1,3656-3674).
gcagatactcccacagtaa

SEQ ID NO: 721319 - DNA, 19 bp, Mus musculus
  siRNA target sequence for Ikbkap (NM_026079.1,3667-3685).
cacagtaactccaggatat

SEQ ID NO: 721320 - DNA, 19 bp, Mus musculus
  siRNA target sequence for Ikbkap (NM_026079.1,3781-3799).
ctgagtgaagtggtacaaa

SEQ ID NO: 721321 - DNA, 19 bp, Mus musculus
  siRNA target sequence for Ikbkap (NM_026079.1,3817-3835).
gatgaggtgcgtgctattt

SEQ ID NO: 721322 - DNA, 19 bp, Mus musculus
  siRNA target sequence for Ikbkap (NM_026079.1,3820-3838).
gaggtgcgtgctattttga

SEQ ID NO: 721323 - DNA, 19 bp, Mus musculus
  siRNA target sequence for Ikbkap (NM_026079.1,3841-3859).
gtgctctttctctttgagt

SEQ ID NO: 721324 - DNA, 19 bp, Mus musculus
  siRNA target sequence for Mrps24 (NM_026080.1,117-135).
cgcggtctgcgccaagaat

SEQ ID NO: 721325 - DNA, 19 bp, Mus musculus
  siRNA target sequence for 3110031O14Rik (NM_026081.3,275-293).
cctggggatgagaatgcta

SEQ ID NO: 721326 - DNA, 19 bp, Mus musculus
  siRNA target sequence for 3110031O14Rik (NM_026081.3,336-354).
ccaaggttaggacacaaat

SEQ ID NO: 721327 - DNA, 19 bp, Mus musculus
  siRNA target sequence for 3110031O14Rik (NM_026081.3,341-359).
gttaggacacaaatcatga

SEQ ID NO: 721328 - DNA, 19 bp, Mus musculus
  siRNA target sequence for 3110031O14Rik (NM_026081.3,362-380).
ggagcaaggcccaaagtga

SEQ ID NO: 721329 - DNA, 19 bp, Mus musculus
  siRNA target sequence for 3110031O14Rik (NM_026081.3,434-452).
ggggcatatgccaaatgta

SEQ ID NO: 721330 - DNA, 19 bp, Mus musculus
  siRNA target sequence for 3110031O14Rik (NM_026081.3,435-453).
gggcatatgccaaatgtaa

SEQ ID NO: 721331 - DNA, 19 bp, Mus musculus
  siRNA target sequence for 3110031O14Rik (NM_026081.3,518-536).
cgtggcgagtccatgtcaa

SEQ ID NO: 721332 - DNA, 19 bp, Mus musculus
  siRNA target sequence for 3110031O14Rik (NM_026081.3,575-593).
ccactgctcagtaatgatt

SEQ ID NO: 721333 - DNA, 19 bp, Mus musculus
  siRNA target sequence for 3110031O14Rik (NM_026081.3,597-615).
ggatggttgctcaagctaa

SEQ ID NO: 721334 - DNA, 19 bp, Mus musculus
  siRNA target sequence for 3110031O14Rik (NM_026081.3,711-729).
cagaggagggaaccaatat

SEQ ID NO: 721335 - DNA, 19 bp, Mus musculus
  siRNA target sequence for 3110031O14Rik (NM_026081.3,764-782).
ggagaggcctatgagaatt

SEQ ID NO: 721336 - DNA, 19 bp, Mus musculus
  siRNA target sequence for 3110031O14Rik (NM_026081.3,776-794).
gagaattccgatttcaaat

SEQ ID NO: 721337 - DNA, 19 bp, Mus musculus
  siRNA target sequence for 3110031O14Rik (NM_026081.3,813-831).
gaagtccctccttttggaa

SEQ ID NO: 721338 - DNA, 19 bp, Mus musculus
  siRNA target sequence for 3110031O14Rik (NM_026081.3,894-912).
ggcatatggccaaacaaga

SEQ ID NO: 721339 - DNA, 19 bp, Mus musculus
  siRNA target sequence for 3110031O14Rik (NM_026081.3,921-939).
ccatgcctaggcacaaaaa

SEQ ID NO: 721340 - DNA, 19 bp, Mus musculus
  siRNA target sequence for 3110031O14Rik (NM_026081.3,977-995).
gaggatgagtctggtaaaa

SEQ ID NO: 721341 - DNA, 19 bp, Mus musculus
  siRNA target sequence for 3110031O14Rik (NM_026081.3,1032-1050).
ggtctaagcccaaagaaga

SEQ ID NO: 721342 - DNA, 19 bp, Mus musculus
  siRNA target sequence for 3110031O14Rik (NM_026081.3,1081-1099).
gaaagaagtccgtgttgaa

SEQ ID NO: 721343 - DNA, 19 bp, Mus musculus
  siRNA target sequence for 3110031O14Rik (NM_026081.3,1159-1177).
ggctaaatctagatccaaa

SEQ ID NO: 721344 - DNA, 19 bp, Mus musculus
  siRNA target sequence for 3110031O14Rik (NM_026081.3,1245-1263).
ccatgtctggagctataga

SEQ ID NO: 721345 - DNA, 19 bp, Mus musculus
  siRNA target sequence for 3110031O14Rik (NM_026081.3,1246-1264).
catgtctggagctatagat

SEQ ID NO: 721346 - DNA, 19 bp, Mus musculus
  siRNA target sequence for 3110031O14Rik (NM_026081.3,1262-1280).
gatacaaataagaaagagt

SEQ ID NO: 721347 - DNA, 19 bp, Mus musculus
  siRNA target sequence for 3110031O14Rik (NM_026081.3,1348-1366).
cagagcagtgccaaaggaa

SEQ ID NO: 721348 - DNA, 19 bp, Mus musculus
  siRNA target sequence for 3110031O14Rik (NM_026081.3,1461-1479).
ccactatggcagataggat

SEQ ID NO: 721349 - DNA, 19 bp, Mus musculus
  siRNA target sequence for 3110031O14Rik (NM_026081.3,1462-1480).
cactatggcagataggata

SEQ ID NO: 721350 - DNA, 19 bp, Mus musculus
  siRNA target sequence for 3110031O14Rik (NM_026081.3,1472-1490).
gataggataagcatcaaga

SEQ ID NO: 721351 - DNA, 19 bp, Mus musculus
  siRNA target sequence for 3110031O14Rik (NM_026081.3,1483-1501).
catcaagaccacttttgta

SEQ ID NO: 721352 - DNA, 19 bp, Mus musculus
  siRNA target sequence for 3110031O14Rik (NM_026081.3,1594-1612).
ggaggagcaagttagtagt

SEQ ID NO: 721353 - DNA, 19 bp, Mus musculus
  siRNA target sequence for 3110031O14Rik (NM_026081.3,1595-1613).
gaggagcaagttagtagtt

SEQ ID NO: 721354 - DNA, 19 bp, Mus musculus
  siRNA target sequence for 3110031O14Rik (NM_026081.3,1598-1616).
gagcaagttagtagtttct

SEQ ID NO: 721355 - DNA, 19 bp, Mus musculus
  siRNA target sequence for 3110031O14Rik (NM_026081.3,2000-2018).
gaaccttgctcagatatca

SEQ ID NO: 721356 - DNA, 19 bp, Mus musculus
  siRNA target sequence for 3110031O14Rik (NM_026081.3,2056-2074).
gttctgggctaaagtagat

SEQ ID NO: 721357 - DNA, 19 bp, Mus musculus
  siRNA target sequence for 3110031O14Rik (NM_026081.3,2062-2080).
ggctaaagtagataatagt

SEQ ID NO: 721358 - DNA, 19 bp, Mus musculus
  siRNA target sequence for 3110031O14Rik (NM_026081.3,2064-2082).
ctaaagtagataatagtgt

SEQ ID NO: 721359 - DNA, 19 bp, Mus musculus
  siRNA target sequence for 3110031O14Rik (NM_026081.3,2090-2108).
gaagttaacagtaagtcta

SEQ ID NO: 721360 - DNA, 19 bp, Mus musculus
  siRNA target sequence for 3110031O14Rik (NM_026081.3,2131-2149).
cattagatccccttggttt

SEQ ID NO: 721361 - DNA, 19 bp, Mus musculus
  siRNA target sequence for 3110031O14Rik (NM_026081.3,2157-2175).
gagaacaaaccgatatgaa

SEQ ID NO: 721362 - DNA, 19 bp, Mus musculus
  siRNA target sequence for 3110031O14Rik (NM_026081.3,2159-2177).
gaacaaaccgatatgaagt

SEQ ID NO: 721363 - DNA, 19 bp, Mus musculus
  siRNA target sequence for 3110031O14Rik (NM_026081.3,2181-2199).
cagctggtatcagatacaa

SEQ ID NO: 721364 - DNA, 19 bp, Mus musculus
  siRNA target sequence for 3110031O14Rik (NM_026081.3,2208-2226).
cagaagctgaggatgctaa

SEQ ID NO: 721365 - DNA, 19 bp, Mus musculus
  siRNA target sequence for 3110031O14Rik (NM_026081.3,2328-2346).
ggctctggtccaataatta

SEQ ID NO: 721366 - DNA, 19 bp, Mus musculus
  siRNA target sequence for 3110031O14Rik (NM_026081.3,2329-2347).
gctctggtccaataattat

SEQ ID NO: 721367 - DNA, 19 bp, Mus musculus
  siRNA target sequence for 3110031O14Rik (NM_026081.3,2332-2350).
ctggtccaataattatcca

SEQ ID NO: 721368 - DNA, 19 bp, Mus musculus
  siRNA target sequence for 3110031O14Rik (NM_026081.3,2439-2457).
ctttagaggacaatgcatt

SEQ ID NO: 721369 - DNA, 19 bp, Mus musculus
  siRNA target sequence for 3110031O14Rik (NM_026081.3,2500-2518).
ggctcccaagagagaagaa

SEQ ID NO: 721370 - DNA, 19 bp, Mus musculus
  siRNA target sequence for 3110031O14Rik (NM_026081.3,2501-2519).
gctcccaagagagaagaat

SEQ ID NO: 721371 - DNA, 19 bp, Mus musculus
  siRNA target sequence for 3110031O14Rik (NM_026081.3,2590-2608).
gccagctgctaagattaat

SEQ ID NO: 721372 - DNA, 19 bp, Mus musculus
  siRNA target sequence for 3110031O14Rik (NM_026081.3,2595-2613).
ctgctaagattaatgaaga

SEQ ID NO: 721373 - DNA, 19 bp, Mus musculus
  siRNA target sequence for 3110031O14Rik (NM_026081.3,2620-2638).
gatagcatctgaagatgaa

SEQ ID NO: 721374 - DNA, 19 bp, Mus musculus
  siRNA target sequence for 3110031O14Rik (NM_026081.3,2655-2673).
ggttctggggcaatgaaga

SEQ ID NO: 721375 - DNA, 19 bp, Mus musculus
  siRNA target sequence for 3110031O14Rik (NM_026081.3,2688-2706).
cagtgagaaggggtacttt

SEQ ID NO: 721376 - DNA, 19 bp, Mus musculus
  siRNA target sequence for 3110031O14Rik (NM_026081.3,2795-2813).
gtcgaaactgggtcagaaa

SEQ ID NO: 721377 - DNA, 19 bp, Mus musculus
  siRNA target sequence for 3110031O14Rik (NM_026081.3,2797-2815).
cgaaactgggtcagaaact

SEQ ID NO: 721378 - DNA, 19 bp, Mus musculus
  siRNA target sequence for 3110031O14Rik (NM_026081.3,2839-2857).
cttgatctgggctgcaaaa

SEQ ID NO: 721379 - DNA, 19 bp, Mus musculus
  siRNA target sequence for 3110031O14Rik (NM_026081.3,2850-2868).
ctgcaaaaaaggacagtat

SEQ ID NO: 721380 - DNA, 19 bp, Mus musculus
  siRNA target sequence for 3110031O14Rik (NM_026081.3,2886-2904).
gtgtgtccaagccaaaaga

SEQ ID NO: 721381 - DNA, 19 bp, Mus musculus
  siRNA target sequence for 3110031O14Rik (NM_026081.3,2943-2961).
gtgacaaggccacaaaaga

SEQ ID NO: 721382 - DNA, 19 bp, Mus musculus
  siRNA target sequence for 3110031O14Rik (NM_026081.3,2950-2968).
ggccacaaaagaagctaaa

SEQ ID NO: 721383 - DNA, 19 bp, Mus musculus
  siRNA target sequence for 3110031O14Rik (NM_026081.3,2982-3000).
gtgaggccagtccagaaaa

SEQ ID NO: 721384 - DNA, 19 bp, Mus musculus
  siRNA target sequence for 3110031O14Rik (NM_026081.3,3002-3020).
gggaaagagtcagttgtta

SEQ ID NO: 721385 - DNA, 19 bp, Mus musculus
  siRNA target sequence for 3110031O14Rik (NM_026081.3,3003-3021).
ggaaagagtcagttgttaa

SEQ ID NO: 721386 - DNA, 19 bp, Mus musculus
  siRNA target sequence for 3110031O14Rik (NM_026081.3,3027-3045).
ggtcaagagcaaaagatga

SEQ ID NO: 721387 - DNA, 19 bp, Mus musculus
  siRNA target sequence for Dock7 (NM_026082.1,8-26).
ggacagaatcacttatttt

SEQ ID NO: 721388 - DNA, 19 bp, Mus musculus
  siRNA target sequence for Dock7 (NM_026082.1,42-60).
ctccggcgtttcatgtact

SEQ ID NO: 721389 - DNA, 19 bp, Mus musculus
  siRNA target sequence for Dock7 (NM_026082.1,61-79).
gcacacccttcactttaga

SEQ ID NO: 721390 - DNA, 19 bp, Mus musculus
  siRNA target sequence for Dock7 (NM_026082.1,93-111).
ggggagcttcatgaacaat

SEQ ID NO: 721391 - DNA, 19 bp, Mus musculus
  siRNA target sequence for Dock7 (NM_026082.1,136-154).
cgtctcatgcctttcctta

SEQ ID NO: 721392 - DNA, 19 bp, Mus musculus
  siRNA target sequence for Dock7 (NM_026082.1,180-198).
cacaaagaagagataatct

SEQ ID NO: 721393 - DNA, 19 bp, Mus musculus
  siRNA target sequence for Dock7 (NM_026082.1,202-220).
caccaattgaagttgctat

SEQ ID NO: 721394 - DNA, 19 bp, Mus musculus
  siRNA target sequence for Dock7 (NM_026082.1,279-297).
gaccccaaaatgcttcaaa

SEQ ID NO: 721395 - DNA, 19 bp, Mus musculus
  siRNA target sequence for Dock7 (NM_026082.1,308-326).
ggggtctgtaggaacaact

SEQ ID NO: 721396 - DNA, 19 bp, Mus musculus
  siRNA target sequence for Dock7 (NM_026082.1,417-435).
ctttgtttcaaggacttta

SEQ ID NO: 721397 - DNA, 19 bp, Mus musculus
  siRNA target sequence for Dock7 (NM_026082.1,486-504).
gatcaaaaggagtatcaaa

SEQ ID NO: 721398 - DNA, 19 bp, Mus musculus
  siRNA target sequence for Dock7 (NM_026082.1,539-557).
ggctctgcagccactgata

SEQ ID NO: 721399 - DNA, 19 bp, Mus musculus
  siRNA target sequence for Dock7 (NM_026082.1,562-580).
gaaaaatccctcagctata

SEQ ID NO: 721400 - DNA, 19 bp, Mus musculus
  siRNA target sequence for Dock7 (NM_026082.1,622-640).
gccgaatgagccttcgaaa

SEQ ID NO: 721401 - DNA, 19 bp, Mus musculus
  siRNA target sequence for Dock7 (NM_026082.1,623-641).
ccgaatgagccttcgaaaa

SEQ ID NO: 721402 - DNA, 19 bp, Mus musculus
  siRNA target sequence for Dock7 (NM_026082.1,624-642).
cgaatgagccttcgaaaaa

SEQ ID NO: 721403 - DNA, 19 bp, Mus musculus
  siRNA target sequence for 3110070M22Rik (NM_026084.1,349-367).
ccccttggggatttctcaa

SEQ ID NO: 721404 - DNA, 19 bp, Mus musculus
  siRNA target sequence for 3110070M22Rik (NM_026084.1,424-442).
gacatcgagggcaaagcaa

SEQ ID NO: 721405 - DNA, 19 bp, Mus musculus
  siRNA target sequence for Ceacam12 (NM_026087.1,229-247).
ctactgcccagataactat

SEQ ID NO: 721406 - DNA, 19 bp, Mus musculus
  siRNA target sequence for Ceacam12 (NM_026087.1,345-363).
ggtaaactgctcaagatgt

SEQ ID NO: 721407 - DNA, 19 bp, Mus musculus
  siRNA target sequence for Ceacam12 (NM_026087.1,346-364).
gtaaactgctcaagatgtt

SEQ ID NO: 721408 - DNA, 19 bp, Mus musculus
  siRNA target sequence for Ceacam12 (NM_026087.1,353-371).
gctcaagatgtttgaaatt

SEQ ID NO: 721409 - DNA, 19 bp, Mus musculus
  siRNA target sequence for Ceacam12 (NM_026087.1,431-449).
gacgatgctcaataatgga

SEQ ID NO: 721410 - DNA, 19 bp, Mus musculus
  siRNA target sequence for Ceacam12 (NM_026087.1,581-599).
gcatcctacttctcaactt

SEQ ID NO: 721411 - DNA, 19 bp, Mus musculus
  siRNA target sequence for Ceacam12 (NM_026087.1,642-660).
gttcttctgctggtttata

SEQ ID NO: 721412 - DNA, 19 bp, Mus musculus
  siRNA target sequence for Ceacam12 (NM_026087.1,1015-1033).
ctgttacaatctattacaa

SEQ ID NO: 721413 - DNA, 19 bp, Mus musculus
  siRNA target sequence for Ceacam12 (NM_026087.1,1017-1035).
gttacaatctattacaatt

SEQ ID NO: 721414 - DNA, 19 bp, Mus musculus
  siRNA target sequence for 1700042N06Rik (NM_026090.1,120-138).
gggaatgtccactttagta

SEQ ID NO: 721415 - DNA, 19 bp, Mus musculus
  siRNA target sequence for 1700042N06Rik (NM_026090.1,121-139).
ggaatgtccactttagtat

SEQ ID NO: 721416 - DNA, 19 bp, Mus musculus
  siRNA target sequence for 1700042N06Rik (NM_026090.1,122-140).
gaatgtccactttagtata

SEQ ID NO: 721417 - DNA, 19 bp, Mus musculus
  siRNA target sequence for 1700042N06Rik (NM_026090.1,251-269).
cacgtggccctcgaagtta

SEQ ID NO: 721418 - DNA, 19 bp, Mus musculus
  siRNA target sequence for 1700042N06Rik (NM_026090.1,278-296).
cctacagcatctatcacaa

SEQ ID NO: 721419 - DNA, 19 bp, Mus musculus
  siRNA target sequence for 1700042N06Rik (NM_026090.1,427-445).
gaaaagaatcgactgataa

SEQ ID NO: 721420 - DNA, 19 bp, Mus musculus
  siRNA target sequence for 1700042N06Rik (NM_026090.1,450-468).
gcacttgatggcacaagaa

SEQ ID NO: 721421 - DNA, 19 bp, Mus musculus
  siRNA target sequence for 1700042N06Rik (NM_026090.1,496-514).
gggtccggatgctgaaaat

SEQ ID NO: 721422 - DNA, 19 bp, Mus musculus
  siRNA target sequence for 1700042N06Rik (NM_026090.1,506-524).
gctgaaaatccgtcagaat

SEQ ID NO: 721423 - DNA, 19 bp, Mus musculus
  siRNA target sequence for 1700042N06Rik (NM_026090.1,561-579).
gcgtcgtggcgctggtata

SEQ ID NO: 721424 - DNA, 19 bp, Mus musculus
  siRNA target sequence for 1700042N06Rik (NM_026090.1,562-580).
cgtcgtggcgctggtataa

SEQ ID NO: 721425 - DNA, 19 bp, Mus musculus
  siRNA target sequence for 1700042N06Rik (NM_026090.1,583-601).
gccgcacccgtggcttttt

SEQ ID NO: 721426 - DNA, 19 bp, Mus musculus
  siRNA target sequence for 1700042N06Rik (NM_026090.1,633-651).
ctacgtttacggcttgata

SEQ ID NO: 721427 - DNA, 19 bp, Mus musculus
  siRNA target sequence for 1700042N06Rik (NM_026090.1,636-654).
cgtttacggcttgatatct

SEQ ID NO: 721428 - DNA, 19 bp, Mus musculus
  siRNA target sequence for 1700042N06Rik (NM_026090.1,637-655).
gtttacggcttgatatctt

SEQ ID NO: 721429 - DNA, 19 bp, Mus musculus
  siRNA target sequence for 1700042N06Rik (NM_026090.1,675-693).
cgaatatcagactgcatat

SEQ ID NO: 721430 - DNA, 19 bp, Mus musculus
  siRNA target sequence for 1700037H04Rik (NM_026091.1,248-266).
gagccacgtccactttgat

SEQ ID NO: 721431 - DNA, 19 bp, Mus musculus
  siRNA target sequence for 1700037H04Rik (NM_026091.1,251-269).
ccacgtccactttgatgaa

SEQ ID NO: 721432 - DNA, 19 bp, Mus musculus
  siRNA target sequence for 1700037H04Rik (NM_026091.1,252-270).
cacgtccactttgatgaaa

SEQ ID NO: 721433 - DNA, 19 bp, Mus musculus
  siRNA target sequence for 1700037H04Rik (NM_026091.1,279-297).
gactcggtggtcatggtta

SEQ ID NO: 721434 - DNA, 19 bp, Mus musculus
  siRNA target sequence for 1700037H04Rik (NM_026091.1,305-323).
gagtgacaacagcttctta

SEQ ID NO: 721435 - DNA, 19 bp, Mus musculus
  siRNA target sequence for 1700037H04Rik (NM_026091.1,307-325).
gtgacaacagcttcttagt

SEQ ID NO: 721436 - DNA, 19 bp, Mus musculus
  siRNA target sequence for 1700037H04Rik (NM_026091.1,309-327).
gacaacagcttcttagtca

SEQ ID NO: 721437 - DNA, 19 bp, Mus musculus
  siRNA target sequence for 1700037H04Rik (NM_026091.1,347-365).
cctgcacaggtatgagatt

SEQ ID NO: 721438 - DNA, 19 bp, Mus musculus
  siRNA target sequence for 1700037H04Rik (NM_026091.1,348-366).
ctgcacaggtatgagatta

SEQ ID NO: 721439 - DNA, 19 bp, Mus musculus
  siRNA target sequence for 1700037H04Rik (NM_026091.1,351-369).
cacaggtatgagattacct

SEQ ID NO: 721440 - DNA, 19 bp, Mus musculus
  siRNA target sequence for 1700037H04Rik (NM_026091.1,454-472).
cacccacctctgaaggtta

SEQ ID NO: 721441 - DNA, 19 bp, Mus musculus
  siRNA target sequence for 1700042F02Rik (NM_026094.1,135-153).
gggagaaccttgaggataa

SEQ ID NO: 721442 - DNA, 19 bp, Mus musculus
  siRNA target sequence for 1700042F02Rik (NM_026094.1,181-199).
ggccaatgacagaacctat

SEQ ID NO: 721443 - DNA, 19 bp, Mus musculus
  siRNA target sequence for 1700042F02Rik (NM_026094.1,297-315).
gcctgtgctaccatgtgtt

SEQ ID NO: 721444 - DNA, 19 bp, Mus musculus
  siRNA target sequence for 1700042F02Rik (NM_026094.1,331-349).
ctcaccaagtctcttaact

SEQ ID NO: 721445 - DNA, 19 bp, Mus musculus
  siRNA target sequence for 1700042F02Rik (NM_026094.1,404-422).
ggcatatccacaatctctt

SEQ ID NO: 721446 - DNA, 19 bp, Mus musculus
  siRNA target sequence for 1700042F02Rik (NM_026094.1,439-457).
ccatgactttgcactaagt

SEQ ID NO: 721447 - DNA, 19 bp, Mus musculus
  siRNA target sequence for 1700042F02Rik (NM_026094.1,452-470).
ctaagtagaacctcaatta

SEQ ID NO: 721448 - DNA, 19 bp, Mus musculus
  siRNA target sequence for 1700065I17Rik (NM_026099.1,118-136).
gctcaggtgggacgatatt

SEQ ID NO: 721449 - DNA, 19 bp, Mus musculus
  siRNA target sequence for 1700055O19Rik (NM_026100.1,305-323).
gcagggtgctgaaagctta

SEQ ID NO: 721450 - DNA, 19 bp, Mus musculus
  siRNA target sequence for 1700055O19Rik (NM_026100.1,392-410).
gcccagccagcgtgatgaa

SEQ ID NO: 721451 - DNA, 19 bp, Mus musculus
  siRNA target sequence for 1700055O19Rik (NM_026100.1,518-536).
cctacaagaagcacaatat

SEQ ID NO: 721452 - DNA, 19 bp, Mus musculus
  siRNA target sequence for 1700055O19Rik (NM_026100.1,587-605).
gacccaggtcaaggaatta

SEQ ID NO: 721453 - DNA, 19 bp, Mus musculus
  siRNA target sequence for 1700055O19Rik (NM_026100.1,589-607).
cccaggtcaaggaattagt

SEQ ID NO: 721454 - DNA, 19 bp, Mus musculus
  siRNA target sequence for 1700055O19Rik (NM_026100.1,593-611).
ggtcaaggaattagtgatt

SEQ ID NO: 721455 - DNA, 19 bp, Mus musculus
  siRNA target sequence for 1700055O19Rik (NM_026100.1,608-626).
gattccgagatataaacta

SEQ ID NO: 721456 - DNA, 19 bp, Mus musculus
  siRNA target sequence for 1700055O19Rik (NM_026100.1,613-631).
cgagatataaactaattgt

SEQ ID NO: 721457 - DNA, 19 bp, Mus musculus
  siRNA target sequence for 1700055O19Rik (NM_026100.1,654-672).
gatgaccagagcatagtta

SEQ ID NO: 721458 - DNA, 19 bp, Mus musculus
  siRNA target sequence for 1700055O19Rik (NM_026100.1,686-704).
cctctggaatcctaaaagt

SEQ ID NO: 721459 - DNA, 19 bp, Mus musculus
  siRNA target sequence for 1700055O19Rik (NM_026100.1,692-710).
gaatcctaaaagtgatact

SEQ ID NO: 721460 - DNA, 19 bp, Mus musculus
  siRNA target sequence for 1700055O19Rik (NM_026100.1,705-723).
gatactgtctcgtcctata

SEQ ID NO: 721461 - DNA, 19 bp, Mus musculus
  siRNA target sequence for 1700055O19Rik (NM_026100.1,709-727).
ctgtctcgtcctatacttt

SEQ ID NO: 721462 - DNA, 19 bp, Mus musculus
  siRNA target sequence for 1700055O19Rik (NM_026100.1,713-731).
ctcgtcctatactttcaaa

SEQ ID NO: 721463 - DNA, 19 bp, Mus musculus
  siRNA target sequence for 1700055O19Rik (NM_026100.1,715-733).
cgtcctatactttcaaaaa

SEQ ID NO: 721464 - DNA, 19 bp, Mus musculus
  siRNA target sequence for 1700055O19Rik (NM_026100.1,716-734).
gtcctatactttcaaaaat

SEQ ID NO: 721465 - DNA, 19 bp, Mus musculus
  siRNA target sequence for 1700055O19Rik (NM_026100.1,719-737).
ctatactttcaaaaattct

SEQ ID NO: 721466 - DNA, 19 bp, Mus musculus
  siRNA target sequence for 1700055O19Rik (NM_026100.1,754-772).
caaatgtctatgcagttta

SEQ ID NO: 721467 - DNA, 19 bp, Mus musculus
  siRNA target sequence for 1700095F04Rik (NM_026104.1,135-153).
cccaatcaaagaagaacat

SEQ ID NO: 721468 - DNA, 19 bp, Mus musculus
  siRNA target sequence for 1700095F04Rik (NM_026104.1,180-198).
gggatatgcagagaataga

SEQ ID NO: 721469 - DNA, 19 bp, Mus musculus
  siRNA target sequence for 1700095F04Rik (NM_026104.1,181-199).
ggatatgcagagaatagat

SEQ ID NO: 721470 - DNA, 19 bp, Mus musculus
  siRNA target sequence for 1700095F04Rik (NM_026104.1,217-235).
gcttctcgagatacaagaa

SEQ ID NO: 721471 - DNA, 19 bp, Mus musculus
  siRNA target sequence for 1700095F04Rik (NM_026104.1,304-322).
gtgggagaaggaaaactat

SEQ ID NO: 721472 - DNA, 19 bp, Mus musculus
  siRNA target sequence for 1700095F04Rik (NM_026104.1,416-434).
gaacttcagagaaagctta

SEQ ID NO: 721473 - DNA, 19 bp, Mus musculus
  siRNA target sequence for 1700095F04Rik (NM_026104.1,438-456).
gaaaatcacaaaaggtaat

SEQ ID NO: 721474 - DNA, 19 bp, Mus musculus
  siRNA target sequence for 1700095F04Rik (NM_026104.1,451-469).
ggtaatcaggtatgaacaa

SEQ ID NO: 721475 - DNA, 19 bp, Mus musculus
  siRNA target sequence for 1700095F04Rik (NM_026104.1,460-478).
gtatgaacaaggtgatcta

SEQ ID NO: 721476 - DNA, 19 bp, Mus musculus
  siRNA target sequence for 1700095F04Rik (NM_026104.1,489-507).
cagaagagtccaaggttaa

SEQ ID NO: 721477 - DNA, 19 bp, Mus musculus
  siRNA target sequence for 1700095F04Rik (NM_026104.1,550-568).
gctcggcaagataatggaa

SEQ ID NO: 721478 - DNA, 19 bp, Mus musculus
  siRNA target sequence for 1700095F04Rik (NM_026104.1,606-624).
ctctctgcataaagaagta

SEQ ID NO: 721479 - DNA, 19 bp, Mus musculus
  siRNA target sequence for 1700095F04Rik (NM_026104.1,670-688).
ccttgagagagaagtatca

SEQ ID NO: 721480 - DNA, 19 bp, Mus musculus
  siRNA target sequence for 1700095F04Rik (NM_026104.1,683-701).
gtatcaaaagtcttaagca

SEQ ID NO: 721481 - DNA, 19 bp, Mus musculus
  siRNA target sequence for 1700095F04Rik (NM_026104.1,810-828).
cgctgtttttcatcagatt

SEQ ID NO: 721482 - DNA, 19 bp, Mus musculus
  siRNA target sequence for 1700095F04Rik (NM_026104.1,833-851).
ggatacctgatcttccatt

SEQ ID NO: 721483 - DNA, 19 bp, Mus musculus
  siRNA target sequence for 1700095F04Rik (NM_026104.1,838-856).
cctgatcttccatttaagt

SEQ ID NO: 721484 - DNA, 19 bp, Mus musculus
  siRNA target sequence for 1700095F04Rik (NM_026104.1,880-898).
caacgcgctgcctaagata

SEQ ID NO: 721485 - DNA, 19 bp, Mus musculus
  siRNA target sequence for 1700095F04Rik (NM_026104.1,884-902).
gcgctgcctaagatactga

SEQ ID NO: 721486 - DNA, 19 bp, Mus musculus
  siRNA target sequence for 1700095F04Rik (NM_026104.1,951-969).
cgcttgagacagaagacat

SEQ ID NO: 721487 - DNA, 19 bp, Mus musculus
  siRNA target sequence for 1700093K21Rik (NM_026105.2,188-206).
gtgacactgggaaaataga

SEQ ID NO: 721488 - DNA, 19 bp, Mus musculus
  siRNA target sequence for 1700093K21Rik (NM_026105.2,196-214).
gggaaaatagaggagattt

SEQ ID NO: 721489 - DNA, 19 bp, Mus musculus
  siRNA target sequence for 1700093K21Rik (NM_026105.2,238-256).
gagaccacagcgatcacat

SEQ ID NO: 721490 - DNA, 19 bp, Mus musculus
  siRNA target sequence for 1700093K21Rik (NM_026105.2,242-260).
ccacagcgatcacattctt

SEQ ID NO: 721491 - DNA, 19 bp, Mus musculus
  siRNA target sequence for 1700093K21Rik (NM_026105.2,245-263).
cagcgatcacattcttctt

SEQ ID NO: 721492 - DNA, 19 bp, Mus musculus
  siRNA target sequence for 1700093K21Rik (NM_026105.2,294-312).
cctcttactggcaattttt

SEQ ID NO: 721493 - DNA, 19 bp, Mus musculus
  siRNA target sequence for 1700093K21Rik (NM_026105.2,378-396).
ctgcgtagctgctaatgca

SEQ ID NO: 721494 - DNA, 19 bp, Mus musculus
  siRNA target sequence for 1700093K21Rik (NM_026105.2,426-444).
ggtcctaatgcacttttta

SEQ ID NO: 721495 - DNA, 19 bp, Mus musculus
  siRNA target sequence for 1700093K21Rik (NM_026105.2,427-445).
gtcctaatgcactttttaa

SEQ ID NO: 721496 - DNA, 19 bp, Mus musculus
  siRNA target sequence for 1700093K21Rik (NM_026105.2,456-474).
gccgatgaagcctagcatt

SEQ ID NO: 721497 - DNA, 19 bp, Mus musculus
  siRNA target sequence for 1700093K21Rik (NM_026105.2,512-530).
ccttaggagacaacatcaa

SEQ ID NO: 721498 - DNA, 19 bp, Mus musculus
  siRNA target sequence for 1700093K21Rik (NM_026105.2,532-550).
gcagaagactaccaaaaga

SEQ ID NO: 721499 - DNA, 19 bp, Mus musculus
  siRNA target sequence for 1700093K21Rik (NM_026105.2,533-551).
cagaagactaccaaaagaa

SEQ ID NO: 721500 - DNA, 19 bp, Mus musculus
  siRNA target sequence for 1700093K21Rik (NM_026105.2,555-573).
gacatatgagcctgtgaat

SEQ ID NO: 721501 - DNA, 19 bp, Mus musculus
  siRNA target sequence for 1700093K21Rik (NM_026105.2,625-643).
gtccacagatcttcagata

SEQ ID NO: 721502 - DNA, 19 bp, Mus musculus
  siRNA target sequence for 1700093K21Rik (NM_026105.2,683-701).
ctaaggaggtgattgttgt

SEQ ID NO: 721503 - DNA, 19 bp, Mus musculus
  siRNA target sequence for 1700093K21Rik (NM_026105.2,720-738).
ccctacacctcgaagctat

SEQ ID NO: 721504 - DNA, 19 bp, Mus musculus
  siRNA target sequence for 1810019P04Rik (NM_026111.2,53-71).
ggatcgtggcctcatgaaa

SEQ ID NO: 721505 - DNA, 19 bp, Mus musculus
  siRNA target sequence for 1810019P04Rik (NM_026111.2,148-166).
gcttggctttctatatcgt

SEQ ID NO: 721506 - DNA, 19 bp, Mus musculus
  siRNA target sequence for 1810019P04Rik (NM_026111.2,505-523).
ccctcgcctgccattatga

SEQ ID NO: 721507 - DNA, 19 bp, Mus musculus
  siRNA target sequence for 1810019P04Rik (NM_026111.2,749-767).
gatcatggagtctatacca

SEQ ID NO: 721508 - DNA, 19 bp, Mus musculus
  siRNA target sequence for 1810019P04Rik (NM_026111.2,885-903).
cgactgaggagcattgaga

SEQ ID NO: 721509 - DNA, 19 bp, Mus musculus
  siRNA target sequence for 1810019P04Rik (NM_026111.2,886-904).
gactgaggagcattgagaa

SEQ ID NO: 721510 - DNA, 19 bp, Mus musculus
  siRNA target sequence for 1810019P04Rik (NM_026111.2,940-958).
cccaggaagtgatgtactt

SEQ ID NO: 721511 - DNA, 19 bp, Mus musculus
  siRNA target sequence for 1810019P04Rik (NM_026111.2,1099-1117).
cacccactgtgcataacct

SEQ ID NO: 721512 - DNA, 19 bp, Mus musculus
  siRNA target sequence for 2410016F19Rik (NM_026113.2,92-110).
cagtttgttctggtagaat

SEQ ID NO: 721513 - DNA, 19 bp, Mus musculus
  siRNA target sequence for 2410016F19Rik (NM_026113.2,112-130).
gtcaggaatcattgattca

SEQ ID NO: 721514 - DNA, 19 bp, Mus musculus
  siRNA target sequence for 2410016F19Rik (NM_026113.2,214-232).
gtttgctggggagtatgaa

SEQ ID NO: 721515 - DNA, 19 bp, Mus musculus
  siRNA target sequence for 2410016F19Rik (NM_026113.2,281-299).
gatccagaggggactgata

SEQ ID NO: 721516 - DNA, 19 bp, Mus musculus
  siRNA target sequence for 2410016F19Rik (NM_026113.2,284-302).
ccagaggggactgataaga

SEQ ID NO: 721517 - DNA, 19 bp, Mus musculus
  siRNA target sequence for 2410016F19Rik (NM_026113.2,351-369).
ggacgcttctgacagaaaa

SEQ ID NO: 721518 - DNA, 19 bp, Mus musculus
  siRNA target sequence for 2410016F19Rik (NM_026113.2,396-414).
gcgtagagtggctgcaaat

SEQ ID NO: 721519 - DNA, 19 bp, Mus musculus
  siRNA target sequence for 2410016F19Rik (NM_026113.2,398-416).
gtagagtggctgcaaatga

SEQ ID NO: 721520 - DNA, 19 bp, Mus musculus
  siRNA target sequence for 2410016F19Rik (NM_026113.2,405-423).
ggctgcaaatgaaggataa

SEQ ID NO: 721521 - DNA, 19 bp, Mus musculus
  siRNA target sequence for 2410016F19Rik (NM_026113.2,419-437).
gataatgatttctcctata

SEQ ID NO: 721522 - DNA, 19 bp, Mus musculus
  siRNA target sequence for 2410016F19Rik (NM_026113.2,432-450).
cctatagacccaacatgat

SEQ ID NO: 721523 - DNA, 19 bp, Mus musculus
  siRNA target sequence for 2410016F19Rik (NM_026113.2,433-451).
ctatagacccaacatgatt

SEQ ID NO: 721524 - DNA, 19 bp, Mus musculus
  siRNA target sequence for 2410016F19Rik (NM_026113.2,456-474).
gctttctccatgaacatga

SEQ ID NO: 721525 - DNA, 19 bp, Mus musculus
  siRNA target sequence for 2410016F19Rik (NM_026113.2,620-638).
ccttctgagatggaaagtt

SEQ ID NO: 721526 - DNA, 19 bp, Mus musculus
  siRNA target sequence for Hat1 (NM_026115.2,125-143).
cagcaatcgagctgaaact

SEQ ID NO: 721527 - DNA, 19 bp, Mus musculus
  siRNA target sequence for Hat1 (NM_026115.2,128-146).
caatcgagctgaaactagt

SEQ ID NO: 721528 - DNA, 19 bp, Mus musculus
  siRNA target sequence for Hat1 (NM_026115.2,138-156).
gaaactagttcgttttcct

SEQ ID NO: 721529 - DNA, 19 bp, Mus musculus
  siRNA target sequence for Hat1 (NM_026115.2,210-228).
ctttggggatgatgaaact

SEQ ID NO: 721530 - DNA, 19 bp, Mus musculus
  siRNA target sequence for Hat1 (NM_026115.2,236-254).
gttacaagggcctgaagat

SEQ ID NO: 721531 - DNA, 19 bp, Mus musculus
  siRNA target sequence for Hat1 (NM_026115.2,252-270).
gatcttgctgtactatatt

SEQ ID NO: 721532 - DNA, 19 bp, Mus musculus
  siRNA target sequence for Hat1 (NM_026115.2,255-273).
cttgctgtactatattgct

SEQ ID NO: 721533 - DNA, 19 bp, Mus musculus
  siRNA target sequence for Hat1 (NM_026115.2,287-305).
cactgttccgtgttgaata

SEQ ID NO: 721534 - DNA, 19 bp, Mus musculus
  siRNA target sequence for Hat1 (NM_026115.2,291-309).
gttccgtgttgaatattca

SEQ ID NO: 721535 - DNA, 19 bp, Mus musculus
  siRNA target sequence for Hat1 (NM_026115.2,295-313).
cgtgttgaatattcatcta

SEQ ID NO: 721536 - DNA, 19 bp, Mus musculus
  siRNA target sequence for Hat1 (NM_026115.2,311-329).
ctaaagttgatgagaactt

SEQ ID NO: 721537 - DNA, 19 bp, Mus musculus
  siRNA target sequence for Hat1 (NM_026115.2,349-367).
gatgttgaaggcaaaatca

SEQ ID NO: 721538 - DNA, 19 bp, Mus musculus
  siRNA target sequence for Hat1 (NM_026115.2,421-439).
ctggaaaaggaaactaatt

SEQ ID NO: 721539 - DNA, 19 bp, Mus musculus
  siRNA target sequence for Hat1 (NM_026115.2,490-508).
ggaggtgaaacctttactt

SEQ ID NO: 721540 - DNA, 19 bp, Mus musculus
  siRNA target sequence for Hat1 (NM_026115.2,517-535).
cacaaggctgacatgacat

SEQ ID NO: 721541 - DNA, 19 bp, Mus musculus
  siRNA target sequence for Hat1 (NM_026115.2,522-540).
ggctgacatgacatgtaga

SEQ ID NO: 721542 - DNA, 19 bp, Mus musculus
  siRNA target sequence for Hat1 (NM_026115.2,536-554).
gtagaggctttcgagaata

SEQ ID NO: 721543 - DNA, 19 bp, Mus musculus
  siRNA target sequence for Hat1 (NM_026115.2,539-557).
gaggctttcgagaatatca

SEQ ID NO: 721544 - DNA, 19 bp, Mus musculus
  siRNA target sequence for Hat1 (NM_026115.2,543-561).
ctttcgagaatatcatgaa

SEQ ID NO: 721545 - DNA, 19 bp, Mus musculus
  siRNA target sequence for Hat1 (NM_026115.2,563-581).
ggcttcagacctttttgat

SEQ ID NO: 721546 - DNA, 19 bp, Mus musculus
  siRNA target sequence for Hat1 (NM_026115.2,626-644).
gatggcactactttctagt

SEQ ID NO: 721547 - DNA, 19 bp, Mus musculus
  siRNA target sequence for Hat1 (NM_026115.2,629-647).
ggcactactttctagtatt

SEQ ID NO: 721548 - DNA, 19 bp, Mus musculus
  siRNA target sequence for Hat1 (NM_026115.2,691-709).
ggctacatgacagtctata

SEQ ID NO: 721549 - DNA, 19 bp, Mus musculus
  siRNA target sequence for Hat1 (NM_026115.2,692-710).
gctacatgacagtctataa

SEQ ID NO: 721550 - DNA, 19 bp, Mus musculus
  siRNA target sequence for Hat1 (NM_026115.2,699-717).
gacagtctataattactat

SEQ ID NO: 721551 - DNA, 19 bp, Mus musculus
  siRNA target sequence for Hat1 (NM_026115.2,714-732).
ctatgtgtacccagacaaa

SEQ ID NO: 721552 - DNA, 19 bp, Mus musculus
  siRNA target sequence for Hat1 (NM_026115.2,759-777).
gatactgactccatttcaa

SEQ ID NO: 721553 - DNA, 19 bp, Mus musculus
  siRNA target sequence for Hat1 (NM_026115.2,794-812).
ctcaacttcttgaaacagt

SEQ ID NO: 721554 - DNA, 19 bp, Mus musculus
  siRNA target sequence for Hat1 (NM_026115.2,805-823).
gaaacagttcatagatact

SEQ ID NO: 721555 - DNA, 19 bp, Mus musculus
  siRNA target sequence for Hat1 (NM_026115.2,809-827).
cagttcatagatactacat

SEQ ID NO: 721556 - DNA, 19 bp, Mus musculus
  siRNA target sequence for Hat1 (NM_026115.2,835-853).
cctacagttcttgatatta

SEQ ID NO: 721557 - DNA, 19 bp, Mus musculus
  siRNA target sequence for Hat1 (NM_026115.2,862-880).
gatccgtccagaagctatt

SEQ ID NO: 721558 - DNA, 19 bp, Mus musculus
  siRNA target sequence for Hat1 (NM_026115.2,865-883).
ccgtccagaagctatttga

SEQ ID NO: 721559 - DNA, 19 bp, Mus musculus
  siRNA target sequence for Hat1 (NM_026115.2,904-922).
gtgaagttttgtcaatttt

SEQ ID NO: 721560 - DNA, 19 bp, Mus musculus
  siRNA target sequence for Hat1 (NM_026115.2,916-934).
caatttttgcccagtttct

SEQ ID NO: 721561 - DNA, 19 bp, Mus musculus
  siRNA target sequence for Hat1 (NM_026115.2,952-970).
caaggattcagtgaagata

SEQ ID NO: 721562 - DNA, 19 bp, Mus musculus
  siRNA target sequence for Hat1 (NM_026115.2,962-980).
gtgaagatatggcaataca

SEQ ID NO: 721563 - DNA, 19 bp, Mus musculus
  siRNA target sequence for Hat1 (NM_026115.2,1015-1033).
gctagaagggtttatgaaa

SEQ ID NO: 721564 - DNA, 19 bp, Mus musculus
  siRNA target sequence for Hat1 (NM_026115.2,1016-1034).
ctagaagggtttatgaaat

SEQ ID NO: 721565 - DNA, 19 bp, Mus musculus
  siRNA target sequence for Hat1 (NM_026115.2,1062-1080).
cgatgctgagcaatacaga

SEQ ID NO: 721566 - DNA, 19 bp, Mus musculus
  siRNA target sequence for Hat1 (NM_026115.2,1092-1110).
ggatattaaaagaagacta

SEQ ID NO: 721567 - DNA, 19 bp, Mus musculus
  siRNA target sequence for Hat1 (NM_026115.2,1108-1126).
ctaattagcccttacaaga

SEQ ID NO: 721568 - DNA, 19 bp, Mus musculus
  siRNA target sequence for Hat1 (NM_026115.2,1115-1133).
gcccttacaagaaaaagca

SEQ ID NO: 721569 - DNA, 19 bp, Mus musculus
  siRNA target sequence for Hat1 (NM_026115.2,1191-1209).
gaaccagatagaaataagt

SEQ ID NO: 721570 - DNA, 19 bp, Mus musculus
  siRNA target sequence for Hat1 (NM_026115.2,1254-1272).
ggactaccggcgtgtcatt

SEQ ID NO: 721571 - DNA, 19 bp, Mus musculus
  siRNA target sequence for 2410050E11Rik (NM_026117.1,341-359).
cagagctgggactcacttt

SEQ ID NO: 721572 - DNA, 19 bp, Mus musculus
  siRNA target sequence for 2410050E11Rik (NM_026117.1,343-361).
gagctgggactcactttca

SEQ ID NO: 721573 - DNA, 19 bp, Mus musculus
  siRNA target sequence for 2410046H15Rik (NM_026119.2,129-147).
cttgtcgagggaactcata

SEQ ID NO: 721574 - DNA, 19 bp, Mus musculus
  siRNA target sequence for 1110002A21Rik (NM_026123.2,318-336).
ccaagtacttccttgagtt

SEQ ID NO: 721575 - DNA, 19 bp, Mus musculus
  siRNA target sequence for 1110002A21Rik (NM_026123.2,344-362).
gcacgggaatggagtatta

SEQ ID NO: 721576 - DNA, 19 bp, Mus musculus
  siRNA target sequence for 1110002A21Rik (NM_026123.2,347-365).
cgggaatggagtattaaat

SEQ ID NO: 721577 - DNA, 19 bp, Mus musculus
  siRNA target sequence for 1110002A21Rik (NM_026123.2,348-366).
gggaatggagtattaaatt

SEQ ID NO: 721578 - DNA, 19 bp, Mus musculus
  siRNA target sequence for 1110002A21Rik (NM_026123.2,490-508).
ctcagagggtttatagaaa

SEQ ID NO: 721579 - DNA, 19 bp, Mus musculus
  siRNA target sequence for 1110002A21Rik (NM_026123.2,492-510).
cagagggtttatagaaact

SEQ ID NO: 721580 - DNA, 19 bp, Mus musculus
  siRNA target sequence for 1110002A21Rik (NM_026123.2,560-578).
cttcttagtcctcttaagt

SEQ ID NO: 721581 - DNA, 19 bp, Mus musculus
  siRNA target sequence for 1110002A21Rik (NM_026123.2,621-639).
gacatgggattttttgaga

SEQ ID NO: 721582 - DNA, 19 bp, Mus musculus
  siRNA target sequence for 1110002A21Rik (NM_026123.2,626-644).
gggattttttgagacaata

SEQ ID NO: 721583 - DNA, 19 bp, Mus musculus
  siRNA target sequence for 1110002A21Rik (NM_026123.2,659-677).
ggttgtgtttatagattgt

SEQ ID NO: 721584 - DNA, 19 bp, Mus musculus
  siRNA target sequence for 1110002A21Rik (NM_026123.2,689-707).
ccttctgatctcaacgtta

SEQ ID NO: 721585 - DNA, 19 bp, Mus musculus
  siRNA target sequence for 1110002A21Rik (NM_026123.2,690-708).
cttctgatctcaacgttaa

SEQ ID NO: 721586 - DNA, 19 bp, Mus musculus
  siRNA target sequence for 1110002A21Rik (NM_026123.2,788-806).
gcatctgaacgccttctat

SEQ ID NO: 721587 - DNA, 19 bp, Mus musculus
  siRNA target sequence for 1110002A21Rik (NM_026123.2,852-870).
catgttattctcacagata

SEQ ID NO: 721588 - DNA, 19 bp, Mus musculus
  siRNA target sequence for 1110002A21Rik (NM_026123.2,855-873).
gttattctcacagatacat

SEQ ID NO: 721589 - DNA, 19 bp, Mus musculus
  siRNA target sequence for 1110002A21Rik (NM_026123.2,865-883).
cagatacatttattggata

SEQ ID NO: 721590 - DNA, 19 bp, Mus musculus
  siRNA target sequence for 1110002A21Rik (NM_026123.2,879-897).
ggatatttagttggaaata

SEQ ID NO: 721591 - DNA, 19 bp, Mus musculus
  siRNA target sequence for 1110002A21Rik (NM_026123.2,888-906).
gttggaaataccttatggt

SEQ ID NO: 721592 - DNA, 19 bp, Mus musculus
  siRNA target sequence for 1110002A21Rik (NM_026123.2,908-926).
gattgctgttggctattat

SEQ ID NO: 721593 - DNA, 19 bp, Mus musculus
  siRNA target sequence for 1110002A21Rik (NM_026123.2,913-931).
ctgttggctattatatcta

SEQ ID NO: 721594 - DNA, 19 bp, Mus musculus
  siRNA target sequence for 1110002A21Rik (NM_026123.2,978-996).
gtgatcctgctctatccat

SEQ ID NO: 721595 - DNA, 19 bp, Mus musculus
  siRNA target sequence for 1110002A21Rik (NM_026123.2,1031-1049).
ggcactgggatggaacttt

SEQ ID NO: 721596 - DNA, 19 bp, Mus musculus
  siRNA target sequence for 1110002A21Rik (NM_026123.2,1046-1064).
ctttacccacacattgtgt

SEQ ID NO: 721597 - DNA, 19 bp, Mus musculus
  siRNA target sequence for 1110008F13Rik (NM_026124.1,285-303).
cgacaaggatgaattttta

SEQ ID NO: 721598 - DNA, 19 bp, Mus musculus
  siRNA target sequence for 1110008F13Rik (NM_026124.1,408-426).
caatgcaggagttctgtat

SEQ ID NO: 721599 - DNA, 19 bp, Mus musculus
  siRNA target sequence for 1110008F13Rik (NM_026124.1,437-455).
gtaactacctacaaatcga

SEQ ID NO: 721600 - DNA, 19 bp, Mus musculus
  siRNA target sequence for 1110008F13Rik (NM_026124.1,493-511).
gaaggctttatgacatcat

SEQ ID NO: 721601 - DNA, 19 bp, Mus musculus
  siRNA target sequence for 1110035L05Rik (NM_026125.1,363-381).
gtgtggattcccccaatat

SEQ ID NO: 721602 - DNA, 19 bp, Mus musculus
  siRNA target sequence for 1110035L05Rik (NM_026125.1,368-386).
gattcccccaatattacca

SEQ ID NO: 721603 - DNA, 19 bp, Mus musculus
  siRNA target sequence for 1110035L05Rik (NM_026125.1,458-476).
cacatgacgtggttgaact

SEQ ID NO: 721604 - DNA, 19 bp, Mus musculus
  siRNA target sequence for 1110035L05Rik (NM_026125.1,655-673).
gaaagaggccacagaactt

SEQ ID NO: 721605 - DNA, 19 bp, Mus musculus
  siRNA target sequence for 1110035L05Rik (NM_026125.1,681-699).
cagggctaccagacacatt

SEQ ID NO: 721606 - DNA, 19 bp, Mus musculus
  siRNA target sequence for 1110035L05Rik (NM_026125.1,728-746).
gtggttgaggccttctact

SEQ ID NO: 721607 - DNA, 19 bp, Mus musculus
  siRNA target sequence for 1110035L05Rik (NM_026125.1,738-756).
ccttctactgccgtttgaa

SEQ ID NO: 721608 - DNA, 19 bp, Mus musculus
  siRNA target sequence for 1110035L05Rik (NM_026125.1,790-808).
ggaactgcaaggattccaa

SEQ ID NO: 721609 - DNA, 19 bp, Mus musculus
  siRNA target sequence for 1110035L05Rik (NM_026125.1,856-874).
gtccttgggccgattcaca

SEQ ID NO: 721610 - DNA, 19 bp, Mus musculus
  siRNA target sequence for 1110035L05Rik (NM_026125.1,968-986).
gtccgtgttctcatctgta

SEQ ID NO: 721611 - DNA, 19 bp, Mus musculus
  siRNA target sequence for 1110035L05Rik (NM_026125.1,972-990).
gtgttctcatctgtattga

SEQ ID NO: 721612 - DNA, 19 bp, Mus musculus
  siRNA target sequence for 1110035L05Rik (NM_026125.1,1109-1127).
gtgttcgtggacaacagtt

SEQ ID NO: 721613 - DNA, 19 bp, Mus musculus
  siRNA target sequence for 4833415N24Rik (NM_026126.2,16-34).
ccgctaacagtcaaggaaa

SEQ ID NO: 721614 - DNA, 19 bp, Mus musculus
  siRNA target sequence for 4833415N24Rik (NM_026126.2,118-136).
ctgggccatcagctgaaaa

SEQ ID NO: 721615 - DNA, 19 bp, Mus musculus
  siRNA target sequence for 4833415N24Rik (NM_026126.2,127-145).
cagctgaaaaatatagtgt

SEQ ID NO: 721616 - DNA, 19 bp, Mus musculus
  siRNA target sequence for 4833415N24Rik (NM_026126.2,158-176).
ggtaattgggggtgttact

SEQ ID NO: 721617 - DNA, 19 bp, Mus musculus
  siRNA target sequence for 4833415N24Rik (NM_026126.2,251-269).
ccttcagctggcaaaccat

SEQ ID NO: 721618 - DNA, 19 bp, Mus musculus
  siRNA target sequence for 4833415N24Rik (NM_026126.2,327-345).
gagcagttgaaaattcgta

SEQ ID NO: 721619 - DNA, 19 bp, Mus musculus
  siRNA target sequence for 4833415N24Rik (NM_026126.2,332-350).
gttgaaaattcgtaagaat

SEQ ID NO: 721620 - DNA, 19 bp, Mus musculus
  siRNA target sequence for 4833415N24Rik (NM_026126.2,381-399).
gctgaggaggttgtatcat

SEQ ID NO: 721621 - DNA, 19 bp, Mus musculus
  siRNA target sequence for 4833415N24Rik (NM_026126.2,382-400).
ctgaggaggttgtatcatt

SEQ ID NO: 721622 - DNA, 19 bp, Mus musculus
  siRNA target sequence for 4833415N24Rik (NM_026126.2,387-405).
gaggttgtatcatttgtaa

SEQ ID NO: 721623 - DNA, 19 bp, Mus musculus
  siRNA target sequence for 4833420G17Rik (NM_026127.3,586-604).
ctccttgcggctctgaatt

SEQ ID NO: 721624 - DNA, 19 bp, Mus musculus
  siRNA target sequence for 4833420G17Rik (NM_026127.3,662-680).
ccgtcaacggacacacttt

SEQ ID NO: 721625 - DNA, 19 bp, Mus musculus
  siRNA target sequence for 4833420G17Rik (NM_026127.3,664-682).
gtcaacggacacactttgt

SEQ ID NO: 721626 - DNA, 19 bp, Mus musculus
  siRNA target sequence for 4833420G17Rik (NM_026127.3,666-684).
caacggacacactttgtta

SEQ ID NO: 721627 - DNA, 19 bp, Mus musculus
  siRNA target sequence for 4833420G17Rik (NM_026127.3,669-687).
cggacacactttgttatta

SEQ ID NO: 721628 - DNA, 19 bp, Mus musculus
  siRNA target sequence for 4833420G17Rik (NM_026127.3,716-734).
cctagattttcgaaactct

SEQ ID NO: 721629 - DNA, 19 bp, Mus musculus
  siRNA target sequence for 4833420G17Rik (NM_026127.3,717-735).
ctagattttcgaaactctt

SEQ ID NO: 721630 - DNA, 19 bp, Mus musculus
  siRNA target sequence for 4833420G17Rik (NM_026127.3,736-754).
cagctacatgccctttttt

SEQ ID NO: 721631 - DNA, 19 bp, Mus musculus
  siRNA target sequence for 4833420G17Rik (NM_026127.3,738-756).
gctacatgcccttttttat

SEQ ID NO: 721632 - DNA, 19 bp, Mus musculus
  siRNA target sequence for 4833420G17Rik (NM_026127.3,764-782).
catcatacctcctgaaaga

SEQ ID NO: 721633 - DNA, 19 bp, Mus musculus
  siRNA target sequence for 4833420G17Rik (NM_026127.3,775-793).
ctgaaagaaaaaagcatat

SEQ ID NO: 721634 - DNA, 19 bp, Mus musculus
  siRNA target sequence for 4833420G17Rik (NM_026127.3,801-819).
gatttctcggaagtagaat

SEQ ID NO: 721635 - DNA, 19 bp, Mus musculus
  siRNA target sequence for 4833420G17Rik (NM_026127.3,888-906).
gatggacacgcgtaccttt

SEQ ID NO: 721636 - DNA, 19 bp, Mus musculus
  siRNA target sequence for 4833420G17Rik (NM_026127.3,923-941).
gcatgaatttacagtacat

SEQ ID NO: 721637 - DNA, 19 bp, Mus musculus
  siRNA target sequence for 4833420G17Rik (NM_026127.3,924-942).
catgaatttacagtacatt

SEQ ID NO: 721638 - DNA, 19 bp, Mus musculus
  siRNA target sequence for 4833420G17Rik (NM_026127.3,959-977).
ccagaggccagattcatct

SEQ ID NO: 721639 - DNA, 19 bp, Mus musculus
  siRNA target sequence for 4833420G17Rik (NM_026127.3,969-987).
gattcatctggcatactat

SEQ ID NO: 721640 - DNA, 19 bp, Mus musculus
  siRNA target sequence for 4833420G17Rik (NM_026127.3,979-997).
gcatactatccgaaacaca

SEQ ID NO: 721641 - DNA, 19 bp, Mus musculus
  siRNA target sequence for 4833420G17Rik (NM_026127.3,998-1016).
gaatcaggaccccaaaaat

SEQ ID NO: 721642 - DNA, 19 bp, Mus musculus
  siRNA target sequence for 4833420G17Rik (NM_026127.3,1046-1064).
cagatgtggaaatttatca

SEQ ID NO: 721643 - DNA, 19 bp, Mus musculus
  siRNA target sequence for 4833420G17Rik (NM_026127.3,1096-1114).
ctccttaccagatcttgaa

SEQ ID NO: 721644 - DNA, 19 bp, Mus musculus
  siRNA target sequence for 4833420G17Rik (NM_026127.3,1296-1314).
gttcgtgctgcatctgaaa

SEQ ID NO: 721645 - DNA, 19 bp, Mus musculus
  siRNA target sequence for 4833420G17Rik (NM_026127.3,1329-1347).
cctgcgagtagcattgtga

SEQ ID NO: 721646 - DNA, 19 bp, Mus musculus
  siRNA target sequence for 4833420G17Rik (NM_026127.3,1388-1406).
ccttcccagggccttgtta

SEQ ID NO: 721647 - DNA, 19 bp, Mus musculus
  siRNA target sequence for 4833420G17Rik (NM_026127.3,1473-1491).
gatgcagaagacttttcct

SEQ ID NO: 721648 - DNA, 19 bp, Mus musculus
  siRNA target sequence for 4833420G17Rik (NM_026127.3,1516-1534).
ggtataagggtgttacatt

SEQ ID NO: 721649 - DNA, 19 bp, Mus musculus
  siRNA target sequence for 4833420G17Rik (NM_026127.3,1554-1572).
gtaaactcaatagagattt

SEQ ID NO: 721650 - DNA, 19 bp, Mus musculus
  siRNA target sequence for 4833420G17Rik (NM_026127.3,1578-1596).
ggagacggatcggttttca

SEQ ID NO: 721651 - DNA, 19 bp, Mus musculus
  siRNA target sequence for 4833420G17Rik (NM_026127.3,1581-1599).
gacggatcggttttcaagt

SEQ ID NO: 721652 - DNA, 19 bp, Mus musculus
  siRNA target sequence for 4833420G17Rik (NM_026127.3,1598-1616).
gtcagaaggggctcatttt

SEQ ID NO: 721653 - DNA, 19 bp, Mus musculus
  siRNA target sequence for 4833420G17Rik (NM_026127.3,1602-1620).
gaaggggctcattttggta

SEQ ID NO: 721654 - DNA, 19 bp, Mus musculus
  siRNA target sequence for 4833420G17Rik (NM_026127.3,1606-1624).
gggctcattttggtaacta

SEQ ID NO: 721655 - DNA, 19 bp, Mus musculus
  siRNA target sequence for 4833420G17Rik (NM_026127.3,1607-1625).
ggctcattttggtaactat

SEQ ID NO: 721656 - DNA, 19 bp, Mus musculus
  siRNA target sequence for 4833420G17Rik (NM_026127.3,1622-1640).
ctattttacatattatcca

SEQ ID NO: 721657 - DNA, 19 bp, Mus musculus
  siRNA target sequence for 4833420G17Rik (NM_026127.3,1761-1779).
caacattgtgccaagataa

SEQ ID NO: 721658 - DNA, 19 bp, Mus musculus
  siRNA target sequence for 4833420G17Rik (NM_026127.3,1824-1842).
gcacctggagtaagtgtta

SEQ ID NO: 721659 - DNA, 19 bp, Mus musculus
  siRNA target sequence for 4833420G17Rik (NM_026127.3,1854-1872).
cccgtgcttctgaaggaat

SEQ ID NO: 721660 - DNA, 19 bp, Mus musculus
  siRNA target sequence for 4833420G17Rik (NM_026127.3,1937-1955).
ggatggcgtcacagtaaca

SEQ ID NO: 721661 - DNA, 19 bp, Mus musculus
  siRNA target sequence for 4833420G17Rik (NM_026127.3,1985-2003).
gaagaaacaagtagatcaa

SEQ ID NO: 721662 - DNA, 19 bp, Mus musculus
  siRNA target sequence for 4833420G17Rik (NM_026127.3,2012-2030).
cttcggttggtgcagatta

SEQ ID NO: 721663 - DNA, 19 bp, Mus musculus
  siRNA target sequence for 4833420G17Rik (NM_026127.3,2015-2033).
cggttggtgcagattaact

SEQ ID NO: 721664 - DNA, 19 bp, Mus musculus
  siRNA target sequence for 4833420G17Rik (NM_026127.3,2016-2034).
ggttggtgcagattaactt

SEQ ID NO: 721665 - DNA, 19 bp, Mus musculus
  siRNA target sequence for 4833420G17Rik (NM_026127.3,2017-2035).
gttggtgcagattaacttt

SEQ ID NO: 721666 - DNA, 19 bp, Mus musculus
  siRNA target sequence for 4833420G17Rik (NM_026127.3,2299-2317).
caggatcttcagaaacctt

SEQ ID NO: 721667 - DNA, 19 bp, Mus musculus
  siRNA target sequence for 4833420G17Rik (NM_026127.3,2342-2360).
ggtatcggtagcattgaaa

SEQ ID NO: 721668 - DNA, 19 bp, Mus musculus
  siRNA target sequence for 4833420G17Rik (NM_026127.3,2397-2415).
ctgtcactctctagaaagt

SEQ ID NO: 721669 - DNA, 19 bp, Mus musculus
  siRNA target sequence for 4930403L05Rik (NM_026128.1,144-162).
catcaaggggatactcaaa

SEQ ID NO: 721670 - DNA, 19 bp, Mus musculus
  siRNA target sequence for 4930403L05Rik (NM_026128.1,225-243).
ggagttgcaacggaagaaa

SEQ ID NO: 721671 - DNA, 19 bp, Mus musculus
  siRNA target sequence for 4930403L05Rik (NM_026128.1,226-244).
gagttgcaacggaagaaat

SEQ ID NO: 721672 - DNA, 19 bp, Mus musculus
  siRNA target sequence for 4930403L05Rik (NM_026128.1,252-270).
gtgggatgaatccaacata

SEQ ID NO: 721673 - DNA, 19 bp, Mus musculus
  siRNA target sequence for 4930403L05Rik (NM_026128.1,254-272).
gggatgaatccaacatact

SEQ ID NO: 721674 - DNA, 19 bp, Mus musculus
  siRNA target sequence for 4930403L05Rik (NM_026128.1,255-273).
ggatgaatccaacatacta

SEQ ID NO: 721675 - DNA, 19 bp, Mus musculus
  siRNA target sequence for 4930403L05Rik (NM_026128.1,359-377).
gagaagacaccttaagtga

SEQ ID NO: 721676 - DNA, 19 bp, Mus musculus
  siRNA target sequence for 4930403L05Rik (NM_026128.1,366-384).
caccttaagtgaaattcaa

SEQ ID NO: 721677 - DNA, 19 bp, Mus musculus
  siRNA target sequence for 4930403L05Rik (NM_026128.1,440-458).
ctttgggaaccagttatca

SEQ ID NO: 721678 - DNA, 19 bp, Mus musculus
  siRNA target sequence for 4930403L05Rik (NM_026128.1,521-539).
ggcaacggcaatttgagtt

SEQ ID NO: 721679 - DNA, 19 bp, Mus musculus
  siRNA target sequence for 4930403L05Rik (NM_026128.1,526-544).
cggcaatttgagttgaaaa

SEQ ID NO: 721680 - DNA, 19 bp, Mus musculus
  siRNA target sequence for 4930403L05Rik (NM_026128.1,553-571).
cactacaacgaaggattaa

SEQ ID NO: 721681 - DNA, 19 bp, Mus musculus
  siRNA target sequence for 4930403L05Rik (NM_026128.1,561-579).
cgaaggattaaacatcaaa

SEQ ID NO: 721682 - DNA, 19 bp, Mus musculus
  siRNA target sequence for 4930403L05Rik (NM_026128.1,599-617).
cggaggagctacaatctga

SEQ ID NO: 721683 - DNA, 19 bp, Mus musculus
  siRNA target sequence for 4930403L05Rik (NM_026128.1,637-655).
caaccatgtctacattcaa

SEQ ID NO: 721684 - DNA, 19 bp, Mus musculus
  siRNA target sequence for 4930403L05Rik (NM_026128.1,641-659).
catgtctacattcaaatta

SEQ ID NO: 721685 - DNA, 19 bp, Mus musculus
  siRNA target sequence for 3230401N03Rik (NM_026139.2,837-855).
gtgtagctgctggaatagt

SEQ ID NO: 721686 - DNA, 19 bp, Mus musculus
  siRNA target sequence for 3230401N03Rik (NM_026139.2,839-857).
gtagctgctggaatagtga

SEQ ID NO: 721687 - DNA, 19 bp, Mus musculus
  siRNA target sequence for 3230401N03Rik (NM_026139.2,873-891).
ggtactgtgtctacaaata

SEQ ID NO: 721688 - DNA, 19 bp, Mus musculus
  siRNA target sequence for 3230401N03Rik (NM_026139.2,982-1000).
cagagctggattcacaatt

SEQ ID NO: 721689 - DNA, 19 bp, Mus musculus
  siRNA target sequence for 3230401N03Rik (NM_026139.2,1023-1041).
ccccaaaccccgtcgatat

SEQ ID NO: 721690 - DNA, 19 bp, Mus musculus
  siRNA target sequence for 3230401N03Rik (NM_026139.2,1024-1042).
cccaaaccccgtcgatatt

SEQ ID NO: 721691 - DNA, 19 bp, Mus musculus
  siRNA target sequence for 3230401N03Rik (NM_026139.2,1026-1044).
caaaccccgtcgatattga

SEQ ID NO: 721692 - DNA, 19 bp, Mus musculus
  siRNA target sequence for 3230401N03Rik (NM_026139.2,1030-1048).
ccccgtcgatattgagata

SEQ ID NO: 721693 - DNA, 19 bp, Mus musculus
  siRNA target sequence for 3230401N03Rik (NM_026139.2,1031-1049).
cccgtcgatattgagataa

SEQ ID NO: 721694 - DNA, 19 bp, Mus musculus
  siRNA target sequence for 3230401N03Rik (NM_026139.2,1032-1050).
ccgtcgatattgagataat

SEQ ID NO: 721695 - DNA, 19 bp, Mus musculus
  siRNA target sequence for 3230401N03Rik (NM_026139.2,1034-1052).
gtcgatattgagataatga

SEQ ID NO: 721696 - DNA, 19 bp, Mus musculus
  siRNA target sequence for 3230401N03Rik (NM_026139.2,1084-1102).
caccaccgtagctgaagaa

SEQ ID NO: 721697 - DNA, 19 bp, Mus musculus
  siRNA target sequence for 3230401N03Rik (NM_026139.2,1086-1104).
ccaccgtagctgaagaagt

SEQ ID NO: 721698 - DNA, 19 bp, Mus musculus
  siRNA target sequence for 3230401N03Rik (NM_026139.2,1120-1138).
cagtcctaaggttcagaat

SEQ ID NO: 721699 - DNA, 19 bp, Mus musculus
  siRNA target sequence for 3230401N03Rik (NM_026139.2,1162-1180).
gttaaatggggctaaaact

SEQ ID NO: 721700 - DNA, 19 bp, Mus musculus
  siRNA target sequence for 3230401N03Rik (NM_026139.2,1353-1371).
caacagtatctccaatgat

SEQ ID NO: 721701 - DNA, 19 bp, Mus musculus
  siRNA target sequence for 3230401N03Rik (NM_026139.2,1393-1411).
ggtaccttcgccaacaata

SEQ ID NO: 721702 - DNA, 19 bp, Mus musculus
  siRNA target sequence for 3230401N03Rik (NM_026139.2,1397-1415).
ccttcgccaacaatagtgt

SEQ ID NO: 721703 - DNA, 19 bp, Mus musculus
  siRNA target sequence for 3230401N03Rik (NM_026139.2,1491-1509).
ccatggcagtccaatctct

SEQ ID NO: 721704 - DNA, 19 bp, Mus musculus
  siRNA target sequence for 3230401N03Rik (NM_026139.2,1492-1510).
catggcagtccaatctctt

SEQ ID NO: 721705 - DNA, 19 bp, Mus musculus
  siRNA target sequence for 3230401N03Rik (NM_026139.2,1666-1684).
caggggagtcccatcagta

SEQ ID NO: 721706 - DNA, 19 bp, Mus musculus
  siRNA target sequence for 3230401N03Rik (NM_026139.2,1724-1742).
cctgtggcagcccaatcta

SEQ ID NO: 721707 - DNA, 19 bp, Mus musculus
  siRNA target sequence for 3230401N03Rik (NM_026139.2,1758-1776).
ctcctagggcagtacagta

SEQ ID NO: 721708 - DNA, 19 bp, Mus musculus
  siRNA target sequence for 3230401N03Rik (NM_026139.2,2054-2072).
cacactggggctataccta

SEQ ID NO: 721709 - DNA, 19 bp, Mus musculus
  siRNA target sequence for 3230401N03Rik (NM_026139.2,2056-2074).
cactggggctatacctaaa

SEQ ID NO: 721710 - DNA, 19 bp, Mus musculus
  siRNA target sequence for 3230401N03Rik (NM_026139.2,2112-2130).
gaggcaagggtggaaacaa

SEQ ID NO: 721711 - DNA, 19 bp, Mus musculus
  siRNA target sequence for 3230401N03Rik (NM_026139.2,2364-2382).
gaaccattcccatgcataa

SEQ ID NO: 721712 - DNA, 19 bp, Mus musculus
  siRNA target sequence for 3230401N03Rik (NM_026139.2,2386-2404).
cccctttccatatgaaatt

SEQ ID NO: 721713 - DNA, 19 bp, Mus musculus
  siRNA target sequence for 3230401N03Rik (NM_026139.2,2449-2467).
gcttcagaagtcagatgat

SEQ ID NO: 721714 - DNA, 19 bp, Mus musculus
  siRNA target sequence for 3230401N03Rik (NM_026139.2,2458-2476).
gtcagatgatcccttcatt

SEQ ID NO: 721715 - DNA, 19 bp, Mus musculus
  siRNA target sequence for 3230401N03Rik (NM_026139.2,2503-2521).
caacaatgccaattattca

SEQ ID NO: 721716 - DNA, 19 bp, Mus musculus
  siRNA target sequence for 3230401N03Rik (NM_026139.2,2520-2538).
catgtaatcaagaaacaat

SEQ ID NO: 721717 - DNA, 19 bp, Mus musculus
  siRNA target sequence for 3230401N03Rik (NM_026139.2,2548-2566).
gggaggcctcccaattatt

SEQ ID NO: 721718 - DNA, 19 bp, Mus musculus
  siRNA target sequence for 3230401N03Rik (NM_026139.2,2558-2576).
ccaattattgcaaacatga

SEQ ID NO: 721719 - DNA, 19 bp, Mus musculus
  siRNA target sequence for 3230401N03Rik (NM_026139.2,2559-2577).
caattattgcaaacatgat

SEQ ID NO: 721720 - DNA, 19 bp, Mus musculus
  siRNA target sequence for 3230401N03Rik (NM_026139.2,2588-2606).
gacccccacattaaggaaa

SEQ ID NO: 721721 - DNA, 19 bp, Mus musculus
  siRNA target sequence for 3230401N03Rik (NM_026139.2,2609-2627).
gccttaatggccatgaata

SEQ ID NO: 721722 - DNA, 19 bp, Mus musculus
  siRNA target sequence for 3230401N03Rik (NM_026139.2,2658-2676).
gacttcaggtgtacatgaa

SEQ ID NO: 721723 - DNA, 19 bp, Mus musculus
  siRNA target sequence for 3230401N03Rik (NM_026139.2,2725-2743).
ggtagttgggctaaaattt

SEQ ID NO: 721724 - DNA, 19 bp, Mus musculus
  siRNA target sequence for 3230401N03Rik (NM_026139.2,2726-2744).
gtagttgggctaaaatttt

SEQ ID NO: 721725 - DNA, 19 bp, Mus musculus
  siRNA target sequence for 3230401N03Rik (NM_026139.2,2774-2792).
cagcacctgcttgtcaatt

SEQ ID NO: 721726 - DNA, 19 bp, Mus musculus
  siRNA target sequence for 3230401N03Rik (NM_026139.2,2779-2797).
cctgcttgtcaattccatt

SEQ ID NO: 721727 - DNA, 19 bp, Mus musculus
  siRNA target sequence for 3230401N03Rik (NM_026139.2,2800-2818).
caactttttccgcttgtta

SEQ ID NO: 721728 - DNA, 19 bp, Mus musculus
  siRNA target sequence for 3230401N03Rik (NM_026139.2,2820-2838).
ctcaggggggtggaaaaat

SEQ ID NO: 721729 - DNA, 19 bp, Mus musculus
  siRNA target sequence for 3230401N03Rik (NM_026139.2,2822-2840).
caggggggtggaaaaatca

SEQ ID NO: 721730 - DNA, 19 bp, Mus musculus
  siRNA target sequence for 3230401N03Rik (NM_026139.2,2876-2894).
gaaaatccggacatgctaa

SEQ ID NO: 721731 - DNA, 19 bp, Mus musculus
  siRNA target sequence for 3230401N03Rik (NM_026139.2,2883-2901).
cggacatgctaaagaaact

SEQ ID NO: 721732 - DNA, 19 bp, Mus musculus
  siRNA target sequence for 3230401N03Rik (NM_026139.2,2910-2928).
cccaggtgccgtcatcatt

SEQ ID NO: 721733 - DNA, 19 bp, Mus musculus
  siRNA target sequence for 3230401N03Rik (NM_026139.2,2911-2929).
ccaggtgccgtcatcattt

SEQ ID NO: 721734 - DNA, 19 bp, Mus musculus
  siRNA target sequence for 3230401N03Rik (NM_026139.2,2914-2932).
ggtgccgtcatcatttagt

SEQ ID NO: 721735 - DNA, 19 bp, Mus musculus
  siRNA target sequence for 3230401N03Rik (NM_026139.2,2915-2933).
gtgccgtcatcatttagtt

SEQ ID NO: 721736 - DNA, 19 bp, Mus musculus
  siRNA target sequence for 3230401N03Rik (NM_026139.2,2934-2952).
ccctttataattcttatgt

SEQ ID NO: 721737 - DNA, 19 bp, Mus musculus
  siRNA target sequence for 3230401N03Rik (NM_026139.2,2951-2969).
gtggaatcagaaattctta

SEQ ID NO: 721738 - DNA, 19 bp, Mus musculus
  siRNA target sequence for 3230401N03Rik (NM_026139.2,2953-2971).
ggaatcagaaattcttatt

SEQ ID NO: 721739 - DNA, 19 bp, Mus musculus
  siRNA target sequence for 3230401N03Rik (NM_026139.2,2975-2993).
gcccttactctatttgaga

SEQ ID NO: 721740 - DNA, 19 bp, Mus musculus
  siRNA target sequence for 3230401N03Rik (NM_026139.2,2976-2994).
cccttactctatttgagat

SEQ ID NO: 721741 - DNA, 19 bp, Mus musculus
  siRNA target sequence for 3230401N03Rik (NM_026139.2,2977-2995).
ccttactctatttgagatt

SEQ ID NO: 721742 - DNA, 19 bp, Mus musculus
  siRNA target sequence for 3230401N03Rik (NM_026139.2,2978-2996).
cttactctatttgagatta

SEQ ID NO: 721743 - DNA, 19 bp, Mus musculus
  siRNA target sequence for 3230401N03Rik (NM_026139.2,3046-3064).
ggggtccctgttttactta

SEQ ID NO: 721744 - DNA, 19 bp, Mus musculus
  siRNA target sequence for 3230401N03Rik (NM_026139.2,3140-3158).
gttataaagctggtaaaca

SEQ ID NO: 721745 - DNA, 19 bp, Mus musculus
  siRNA target sequence for 3632451O06Rik (NM_026142.1,649-667).
catggttctctggattatt

SEQ ID NO: 721746 - DNA, 19 bp, Mus musculus
  siRNA target sequence for 3632451O06Rik (NM_026142.1,675-693).
ccagttatttgcagctaaa

SEQ ID NO: 721747 - DNA, 19 bp, Mus musculus
  siRNA target sequence for 3632451O06Rik (NM_026142.1,676-694).
cagttatttgcagctaaaa

SEQ ID NO: 721748 - DNA, 19 bp, Mus musculus
  siRNA target sequence for 3632451O06Rik (NM_026142.1,938-956).
gtattttgggggatgctaa

SEQ ID NO: 721749 - DNA, 19 bp, Mus musculus
  siRNA target sequence for 3632451O06Rik (NM_026142.1,1419-1437).
ggaagcaggaaatgtgtta

SEQ ID NO: 721750 - DNA, 19 bp, Mus musculus
  siRNA target sequence for 3632451O06Rik (NM_026142.1,1420-1438).
gaagcaggaaatgtgttaa

SEQ ID NO: 721751 - DNA, 19 bp, Mus musculus
  siRNA target sequence for 3632451O06Rik (NM_026142.1,1690-1708).
gatctcatggacacaatca

SEQ ID NO: 721752 - DNA, 19 bp, Mus musculus
  siRNA target sequence for 3632451O06Rik (NM_026142.1,1709-1727).
ctggaccaagtgaagaatt

SEQ ID NO: 721753 - DNA, 19 bp, Mus musculus
  siRNA target sequence for 3632451O06Rik (NM_026142.1,1711-1729).
ggaccaagtgaagaattca

SEQ ID NO: 721754 - DNA, 19 bp, Mus musculus
  siRNA target sequence for 3632451O06Rik (NM_026142.1,1712-1730).
gaccaagtgaagaattcat

SEQ ID NO: 721755 - DNA, 19 bp, Mus musculus
  siRNA target sequence for 3632451O06Rik (NM_026142.1,1771-1789).
gtggaggctcccacaattt

SEQ ID NO: 721756 - DNA, 19 bp, Mus musculus
  siRNA target sequence for 3632451O06Rik (NM_026142.1,1858-1876).
ggcctagaacaacttgaat

SEQ ID NO: 721757 - DNA, 19 bp, Mus musculus
  siRNA target sequence for 3632451O06Rik (NM_026142.1,1978-1996).
gactccttgtataaagact

SEQ ID NO: 721758 - DNA, 19 bp, Mus musculus
  siRNA target sequence for 3632451O06Rik (NM_026142.1,1995-2013).
cttcgatggtgatactgaa

SEQ ID NO: 721759 - DNA, 19 bp, Mus musculus
  siRNA target sequence for 3632451O06Rik (NM_026142.1,2047-2065).
caggaacctgacatacgtt

SEQ ID NO: 721760 - DNA, 19 bp, Mus musculus
  siRNA target sequence for 3632451O06Rik (NM_026142.1,2069-2087).
gaagcatggacctactaga

SEQ ID NO: 721761 - DNA, 19 bp, Mus musculus
  siRNA target sequence for 3632451O06Rik (NM_026142.1,2121-2139).
gtgggaacagcagaatcaa

SEQ ID NO: 721762 - DNA, 19 bp, Mus musculus
  siRNA target sequence for 3632451O06Rik (NM_026142.1,2245-2263).
ggagcgctatacagcatta

SEQ ID NO: 721763 - DNA, 19 bp, Mus musculus
  siRNA target sequence for 3632451O06Rik (NM_026142.1,2246-2264).
gagcgctatacagcattaa

SEQ ID NO: 721764 - DNA, 19 bp, Mus musculus
  siRNA target sequence for 3632451O06Rik (NM_026142.1,2249-2267).
cgctatacagcattaaggt

SEQ ID NO: 721765 - DNA, 19 bp, Mus musculus
  siRNA target sequence for 3632451O06Rik (NM_026142.1,2250-2268).
gctatacagcattaaggtt

SEQ ID NO: 721766 - DNA, 19 bp, Mus musculus
  siRNA target sequence for 3632451O06Rik (NM_026142.1,2251-2269).
ctatacagcattaaggtta

SEQ ID NO: 721767 - DNA, 19 bp, Mus musculus
  siRNA target sequence for 3632451O06Rik (NM_026142.1,2276-2294).
gccgaagaagaaatggatt

SEQ ID NO: 721768 - DNA, 19 bp, Mus musculus
  siRNA target sequence for 3632451O06Rik (NM_026142.1,2290-2308).
ggattcaaaaggcataaaa

SEQ ID NO: 721769 - DNA, 19 bp, Mus musculus
  siRNA target sequence for 3732409C05Rik (NM_026143.1,240-258).
cagggtgaattctgtctat

SEQ ID NO: 721770 - DNA, 19 bp, Mus musculus
  siRNA target sequence for 3732409C05Rik (NM_026143.1,242-260).
gggtgaattctgtctatgt

SEQ ID NO: 721771 - DNA, 19 bp, Mus musculus
  siRNA target sequence for 3732409C05Rik (NM_026143.1,243-261).
ggtgaattctgtctatgtt

SEQ ID NO: 721772 - DNA, 19 bp, Mus musculus
  siRNA target sequence for 3732409C05Rik (NM_026143.1,330-348).
cgacaggttgagagatgaa

SEQ ID NO: 721773 - DNA, 19 bp, Mus musculus
  siRNA target sequence for 3732409C05Rik (NM_026143.1,429-447).
ggagatcattatagattct

SEQ ID NO: 721774 - DNA, 19 bp, Mus musculus
  siRNA target sequence for 3732409C05Rik (NM_026143.1,435-453).
cattatagattctacaaat

SEQ ID NO: 721775 - DNA, 19 bp, Mus musculus
  siRNA target sequence for 3732409C05Rik (NM_026143.1,446-464).
ctacaaatgtcatattcca

SEQ ID NO: 721776 - DNA, 19 bp, Mus musculus
  siRNA target sequence for 3732409C05Rik (NM_026143.1,462-480).
ccactgtgcggctactgta

SEQ ID NO: 721777 - DNA, 19 bp, Mus musculus
  siRNA target sequence for 3732409C05Rik (NM_026143.1,463-481).
cactgtgcggctactgtaa

SEQ ID NO: 721778 - DNA, 19 bp, Mus musculus
  siRNA target sequence for 3732409C05Rik (NM_026143.1,465-483).
ctgtgcggctactgtaaga

SEQ ID NO: 721779 - DNA, 19 bp, Mus musculus
  siRNA target sequence for 3732409C05Rik (NM_026143.1,467-485).
gtgcggctactgtaagatt

SEQ ID NO: 721780 - DNA, 19 bp, Mus musculus
  siRNA target sequence for 3732409C05Rik (NM_026143.1,505-523).
gctgtccagttaaatgtga

SEQ ID NO: 721781 - DNA, 19 bp, Mus musculus
  siRNA target sequence for 3732409C05Rik (NM_026143.1,527-545).
ctacacgacagcttattct

SEQ ID NO: 721782 - DNA, 19 bp, Mus musculus
  siRNA target sequence for 3732409C05Rik (NM_026143.1,544-562).
ctccttgcacagcaaatga

SEQ ID NO: 721783 - DNA, 19 bp, Mus musculus
  siRNA target sequence for 3732409C05Rik (NM_026143.1,606-624).
ctgcaatcgaaagcatatt

SEQ ID NO: 721784 - DNA, 19 bp, Mus musculus
  siRNA target sequence for 3732409C05Rik (NM_026143.1,608-626).
gcaatcgaaagcatattga

SEQ ID NO: 721785 - DNA, 19 bp, Mus musculus
  siRNA target sequence for 3732409C05Rik (NM_026143.1,609-627).
caatcgaaagcatattgat

SEQ ID NO: 721786 - DNA, 19 bp, Mus musculus
  siRNA target sequence for 3732409C05Rik (NM_026143.1,687-705).
ggatgatggcctagtaaat

SEQ ID NO: 721787 - DNA, 19 bp, Mus musculus
  siRNA target sequence for 3732409C05Rik (NM_026143.1,691-709).
gatggcctagtaaatgata

SEQ ID NO: 721788 - DNA, 19 bp, Mus musculus
  siRNA target sequence for 3732409C05Rik (NM_026143.1,694-712).
ggcctagtaaatgatatca

SEQ ID NO: 721789 - DNA, 19 bp, Mus musculus
  siRNA target sequence for 3732409C05Rik (NM_026143.1,706-724).
gatatcacaccaaaattga

SEQ ID NO: 721790 - DNA, 19 bp, Mus musculus
  siRNA target sequence for 3732409C05Rik (NM_026143.1,732-750).
caggcctaacacgtacata

SEQ ID NO: 721791 - DNA, 19 bp, Mus musculus
  siRNA target sequence for 3732409C05Rik (NM_026143.1,761-779).
cattggcagagtatgttgt

SEQ ID NO: 721792 - DNA, 19 bp, Mus musculus
  siRNA target sequence for 3732409C05Rik (NM_026143.1,786-804).
ggaaggagcaaagctaaat

SEQ ID NO: 721793 - DNA, 19 bp, Mus musculus
  siRNA target sequence for 3732409C05Rik (NM_026143.1,798-816).
gctaaatgttgccattgta

SEQ ID NO: 721794 - DNA, 19 bp, Mus musculus
  siRNA target sequence for 3732409C05Rik (NM_026143.1,799-817).
ctaaatgttgccattgtaa

SEQ ID NO: 721795 - DNA, 19 bp, Mus musculus
  siRNA target sequence for 3732409C05Rik (NM_026143.1,884-902).
cttgggactcagagtttca

SEQ ID NO: 721796 - DNA, 19 bp, Mus musculus
  siRNA target sequence for 3732409C05Rik (NM_026143.1,887-905).
gggactcagagtttcaagt

SEQ ID NO: 721797 - DNA, 19 bp, Mus musculus
  siRNA target sequence for Eps8l1 (NM_026146.2,94-112).
ccaagtgcaaagtctatct

SEQ ID NO: 721798 - DNA, 19 bp, Mus musculus
  siRNA target sequence for Eps8l1 (NM_026146.2,95-113).
caagtgcaaagtctatcta

SEQ ID NO: 721799 - DNA, 19 bp, Mus musculus
  siRNA target sequence for Eps8l1 (NM_026146.2,128-146).
gttactccaccgtggttat

SEQ ID NO: 721800 - DNA, 19 bp, Mus musculus
  siRNA target sequence for Eps8l1 (NM_026146.2,156-174).
gtcccagtatcatgtcaat

SEQ ID NO: 721801 - DNA, 19 bp, Mus musculus
  siRNA target sequence for Eps8l1 (NM_026146.2,291-309).
gagagtgtcacctagtcaa

SEQ ID NO: 721802 - DNA, 19 bp, Mus musculus
  siRNA target sequence for Eps8l1 (NM_026146.2,443-461).
gtgcacagccggatgttca

SEQ ID NO: 721803 - DNA, 19 bp, Mus musculus
  siRNA target sequence for Eps8l1 (NM_026146.2,448-466).
cagccggatgttcatttct

SEQ ID NO: 721804 - DNA, 19 bp, Mus musculus
  siRNA target sequence for Eps8l1 (NM_026146.2,689-707).
gaccccaagtggagtcaat

SEQ ID NO: 721805 - DNA, 19 bp, Mus musculus
  siRNA target sequence for Eps8l1 (NM_026146.2,693-711).
ccaagtggagtcaattcca

SEQ ID NO: 721806 - DNA, 19 bp, Mus musculus
  siRNA target sequence for Eps8l1 (NM_026146.2,823-841).
cgggatgtggatattctga

SEQ ID NO: 721807 - DNA, 19 bp, Mus musculus
  siRNA target sequence for Eps8l1 (NM_026146.2,824-842).
gggatgtggatattctgaa

SEQ ID NO: 721808 - DNA, 19 bp, Mus musculus
  siRNA target sequence for Eps8l1 (NM_026146.2,855-873).
cgacgtggagagttttgta

SEQ ID NO: 721809 - DNA, 19 bp, Mus musculus
  siRNA target sequence for Eps8l1 (NM_026146.2,856-874).
gacgtggagagttttgtat

SEQ ID NO: 721810 - DNA, 19 bp, Mus musculus
  siRNA target sequence for Eps8l1 (NM_026146.2,1009-1027).
gacgtgcttcagaaaatca

SEQ ID NO: 721811 - DNA, 19 bp, Mus musculus
  siRNA target sequence for Eps8l1 (NM_026146.2,1011-1029).
cgtgcttcagaaaatcaaa

SEQ ID NO: 721812 - DNA, 19 bp, Mus musculus
  siRNA target sequence for Eps8l1 (NM_026146.2,1162-1180).
gtgcgacgaccgcatttga

SEQ ID NO: 721813 - DNA, 19 bp, Mus musculus
  siRNA target sequence for Eps8l1 (NM_026146.2,1305-1323).
cagtccggaattctacaat

SEQ ID NO: 721814 - DNA, 19 bp, Mus musculus
  siRNA target sequence for Eps8l1 (NM_026146.2,1365-1383).
ggaggacccagtggaaaaa

SEQ ID NO: 721815 - DNA, 19 bp, Mus musculus
  siRNA target sequence for Eps8l1 (NM_026146.2,1801-1819).
cccagcgagaaggagaaat

SEQ ID NO: 721816 - DNA, 19 bp, Mus musculus
  siRNA target sequence for Eps8l1 (NM_026146.2,1802-1820).
ccagcgagaaggagaaatt

SEQ ID NO: 721817 - DNA, 19 bp, Mus musculus
  siRNA target sequence for Eps8l1 (NM_026146.2,2028-2046).
cttctcgctgcaaaaggaa

SEQ ID NO: 721818 - DNA, 19 bp, Mus musculus
  siRNA target sequence for Eps8l1 (NM_026146.2,2178-2196).
ggaaggcgagaccaaaaca

SEQ ID NO: 721819 - DNA, 19 bp, Mus musculus
  siRNA target sequence for 4921532K09Rik (NM_026149.2,308-326).
ctgtgatgcctggtatcaa

SEQ ID NO: 721820 - DNA, 19 bp, Mus musculus
  siRNA target sequence for 4921532K09Rik (NM_026149.2,310-328).
gtgatgcctggtatcaaga

SEQ ID NO: 721821 - DNA, 19 bp, Mus musculus
  siRNA target sequence for 4921532K09Rik (NM_026149.2,331-349).
gtgtctactacattgataa

SEQ ID NO: 721822 - DNA, 19 bp, Mus musculus
  siRNA target sequence for 4921532K09Rik (NM_026149.2,335-353).
ctactacattgataacctt

SEQ ID NO: 721823 - DNA, 19 bp, Mus musculus
  siRNA target sequence for 4921532K09Rik (NM_026149.2,358-376).
gaattatgaacttaacagt

SEQ ID NO: 721824 - DNA, 19 bp, Mus musculus
  siRNA target sequence for 4921532K09Rik (NM_026149.2,383-401).
ggacaccgccttaggaaaa

SEQ ID NO: 721825 - DNA, 19 bp, Mus musculus
  siRNA target sequence for 4921532K09Rik (NM_026149.2,508-526).
ctggaagactgtatgtcat

SEQ ID NO: 721826 - DNA, 19 bp, Mus musculus
  siRNA target sequence for 4921532K09Rik (NM_026149.2,552-570).
cctgaaaaatgggagatta

SEQ ID NO: 721827 - DNA, 19 bp, Mus musculus
  siRNA target sequence for 4921532K09Rik (NM_026149.2,562-580).
gggagattatgtttaatga

SEQ ID NO: 721828 - DNA, 19 bp, Mus musculus
  siRNA target sequence for 4921532K09Rik (NM_026149.2,582-600).
gagcttgggaaccctttta

SEQ ID NO: 721829 - DNA, 19 bp, Mus musculus
  siRNA target sequence for 4921532K09Rik (NM_026149.2,589-607).
ggaacccttttattataat

SEQ ID NO: 721830 - DNA, 19 bp, Mus musculus
  siRNA target sequence for 4921532K09Rik (NM_026149.2,590-608).
gaacccttttattataatt

SEQ ID NO: 721831 - DNA, 19 bp, Mus musculus
  siRNA target sequence for 4921532K09Rik (NM_026149.2,649-667).
ctatcctgcttcttcgaat

SEQ ID NO: 721832 - DNA, 19 bp, Mus musculus
  siRNA target sequence for 4921532K09Rik (NM_026149.2,721-739).
gggtcgttgtcactaagaa

SEQ ID NO: 721833 - DNA, 19 bp, Mus musculus
  siRNA target sequence for 4921532K09Rik (NM_026149.2,723-741).
gtcgttgtcactaagaaga

SEQ ID NO: 721834 - DNA, 19 bp, Mus musculus
  siRNA target sequence for 4921532K09Rik (NM_026149.2,747-765).
gatagtaaaaagtatgaaa

SEQ ID NO: 721835 - DNA, 19 bp, Mus musculus
  siRNA target sequence for 4921532K09Rik (NM_026149.2,758-776).
gtatgaaattacaaagcat

SEQ ID NO: 721836 - DNA, 19 bp, Mus musculus
  siRNA target sequence for 4921532K09Rik (NM_026149.2,794-812).
gtcagtgccacattatgct

SEQ ID NO: 721837 - DNA, 19 bp, Mus musculus
  siRNA target sequence for 4921532K09Rik (NM_026149.2,800-818).
gccacattatgctgcaatt

SEQ ID NO: 721838 - DNA, 19 bp, Mus musculus
  siRNA target sequence for 4921532K09Rik (NM_026149.2,802-820).
cacattatgctgcaattga

SEQ ID NO: 721839 - DNA, 19 bp, Mus musculus
  siRNA target sequence for 4921532K09Rik (NM_026149.2,813-831).
gcaattgaacctaatggaa

SEQ ID NO: 721840 - DNA, 19 bp, Mus musculus
  siRNA target sequence for 4921532K09Rik (NM_026149.2,823-841).
ctaatggaaatggtctaat

SEQ ID NO: 721841 - DNA, 19 bp, Mus musculus
  siRNA target sequence for 4921532K09Rik (NM_026149.2,829-847).
gaaatggtctaatgattgt

SEQ ID NO: 721842 - DNA, 19 bp, Mus musculus
  siRNA target sequence for 4921532K09Rik (NM_026149.2,835-853).
gtctaatgattgtatctta

SEQ ID NO: 721843 - DNA, 19 bp, Mus musculus
  siRNA target sequence for 4921532K09Rik (NM_026149.2,837-855).
ctaatgattgtatcttaca

SEQ ID NO: 721844 - DNA, 19 bp, Mus musculus
  siRNA target sequence for 4921532K09Rik (NM_026149.2,926-944).
caaagtagaacctctgtat

SEQ ID NO: 721845 - DNA, 19 bp, Mus musculus
  siRNA target sequence for 4921532K09Rik (NM_026149.2,951-969).
caacaaagtgaggatgatt

SEQ ID NO: 721846 - DNA, 19 bp, Mus musculus
  siRNA target sequence for 4921532K09Rik (NM_026149.2,954-972).
caaagtgaggatgatttga

SEQ ID NO: 721847 - DNA, 19 bp, Mus musculus
  siRNA target sequence for 4921532K09Rik (NM_026149.2,1023-1041).
caatttttgcctgataata

SEQ ID NO: 721848 - DNA, 19 bp, Mus musculus
  siRNA target sequence for 4921532K09Rik (NM_026149.2,1053-1071).
ctgaaggatatccaagttt

SEQ ID NO: 721849 - DNA, 19 bp, Mus musculus
  siRNA target sequence for 4921532K09Rik (NM_026149.2,1064-1082).
ccaagttttggaaggaaaa

SEQ ID NO: 721850 - DNA, 19 bp, Mus musculus
  siRNA target sequence for 4921532K09Rik (NM_026149.2,1074-1092).
gaaggaaaactctattcat

SEQ ID NO: 721851 - DNA, 19 bp, Mus musculus
  siRNA target sequence for 4921532K09Rik (NM_026149.2,1077-1095).
ggaaaactctattcatcta

SEQ ID NO: 721852 - DNA, 19 bp, Mus musculus
  siRNA target sequence for 4921532K09Rik (NM_026149.2,1078-1096).
gaaaactctattcatctat

SEQ ID NO: 721853 - DNA, 19 bp, Mus musculus
  siRNA target sequence for 4921532K09Rik (NM_026149.2,1108-1126).
gcagcacatggacaattaa

SEQ ID NO: 721854 - DNA, 19 bp, Mus musculus
  siRNA target sequence for 4921532K09Rik (NM_026149.2,1109-1127).
cagcacatggacaattaaa

SEQ ID NO: 721855 - DNA, 19 bp, Mus musculus
  siRNA target sequence for 4921532K09Rik (NM_026149.2,1117-1135).
ggacaattaaagagaatga

SEQ ID NO: 721856 - DNA, 19 bp, Mus musculus
  siRNA target sequence for 4921532K09Rik (NM_026149.2,1200-1218).
gataaacaaggtgaacttt

SEQ ID NO: 721857 - DNA, 19 bp, Mus musculus
  siRNA target sequence for 4921532K09Rik (NM_026149.2,1232-1250).
ccaatgtgctgcaatagca

SEQ ID NO: 721858 - DNA, 19 bp, Mus musculus
  siRNA target sequence for 4921532K09Rik (NM_026149.2,1268-1286).
gacctctgatgaactgaat

SEQ ID NO: 721859 - DNA, 19 bp, Mus musculus
  siRNA target sequence for 4921532K09Rik (NM_026149.2,1273-1291).
ctgatgaactgaatccaaa

SEQ ID NO: 721860 - DNA, 19 bp, Mus musculus
  siRNA target sequence for 4921532K09Rik (NM_026149.2,1301-1319).
ggaaaagcctgcatgtaat

SEQ ID NO: 721861 - DNA, 19 bp, Mus musculus
  siRNA target sequence for 4921532K09Rik (NM_026149.2,1311-1329).
gcatgtaatgctcaagaat

SEQ ID NO: 721862 - DNA, 19 bp, Mus musculus
  siRNA target sequence for 4921532K09Rik (NM_026149.2,1361-1379).
ctccagtttatgcagattt

SEQ ID NO: 721863 - DNA, 19 bp, Mus musculus
  siRNA target sequence for 4921532K09Rik (NM_026149.2,1363-1381).
ccagtttatgcagatttga

SEQ ID NO: 721864 - DNA, 19 bp, Mus musculus
  siRNA target sequence for 4921532K09Rik (NM_026149.2,1364-1382).
cagtttatgcagatttgat

SEQ ID NO: 721865 - DNA, 19 bp, Mus musculus
  siRNA target sequence for 4921532K09Rik (NM_026149.2,1383-1401).
ggcaatacattacaaacaa

SEQ ID NO: 721866 - DNA, 19 bp, Mus musculus
  siRNA target sequence for 4921532K09Rik (NM_026149.2,1399-1417).
caactcatgtggtgaatct

SEQ ID NO: 721867 - DNA, 19 bp, Mus musculus
  siRNA target sequence for 4921532K09Rik (NM_026149.2,1441-1459).
cagtcattgtggatcctaa

SEQ ID NO: 721868 - DNA, 19 bp, Mus musculus
  siRNA target sequence for 4921532K09Rik (NM_026149.2,1544-1562).
gcacattgccaccttcaat

SEQ ID NO: 721869 - DNA, 19 bp, Mus musculus
  siRNA target sequence for 4921532K09Rik (NM_026149.2,1627-1645).
cgtatgcagccctttgtga

SEQ ID NO: 721870 - DNA, 19 bp, Mus musculus
  siRNA target sequence for 4921532K09Rik (NM_026149.2,1648-1666).
gccttcgccgagtattcat

SEQ ID NO: 721871 - DNA, 19 bp, Mus musculus
  siRNA target sequence for 4921532K09Rik (NM_026149.2,1650-1668).
cttcgccgagtattcatct

SEQ ID NO: 721872 - DNA, 19 bp, Mus musculus
  siRNA target sequence for 4921532K09Rik (NM_026149.2,1746-1764).
caggtagcaagcctagaaa

SEQ ID NO: 721873 - DNA, 19 bp, Mus musculus
  siRNA target sequence for 4921532K09Rik (NM_026149.2,1783-1801).
gctttcaggcaacaaatga

SEQ ID NO: 721874 - DNA, 19 bp, Mus musculus
  siRNA target sequence for 4921532K09Rik (NM_026149.2,1790-1808).
ggcaacaaatgagagatta

SEQ ID NO: 721875 - DNA, 19 bp, Mus musculus
  siRNA target sequence for 4921532K09Rik (NM_026149.2,1819-1837).
ctaccaaaaacctcttttt

SEQ ID NO: 721876 - DNA, 19 bp, Mus musculus
  siRNA target sequence for 4921532K09Rik (NM_026149.2,1829-1847).
cctctttttaataagagta

SEQ ID NO: 721877 - DNA, 19 bp, Mus musculus
  siRNA target sequence for 4921536K21Rik (NM_026150.1,237-255).
cccactccccaagttgtta

SEQ ID NO: 721878 - DNA, 19 bp, Mus musculus
  siRNA target sequence for 4921536K21Rik (NM_026150.1,238-256).
ccactccccaagttgttat

SEQ ID NO: 721879 - DNA, 19 bp, Mus musculus
  siRNA target sequence for 4921536K21Rik (NM_026150.1,239-257).
cactccccaagttgttatt

SEQ ID NO: 721880 - DNA, 19 bp, Mus musculus
  siRNA target sequence for 4921536K21Rik (NM_026150.1,258-276).
cagcttaatgaataccaat

SEQ ID NO: 721881 - DNA, 19 bp, Mus musculus
  siRNA target sequence for 4921536K21Rik (NM_026150.1,261-279).
cttaatgaataccaatgat

SEQ ID NO: 721882 - DNA, 19 bp, Mus musculus
  siRNA target sequence for 4921536K21Rik (NM_026150.1,418-436).
cacctgaaaaagaagttca

SEQ ID NO: 721883 - DNA, 19 bp, Mus musculus
  siRNA target sequence for 4921536K21Rik (NM_026150.1,442-460).
gaccagctgagaaagatga

SEQ ID NO: 721884 - DNA, 19 bp, Mus musculus
  siRNA target sequence for 4921536K21Rik (NM_026150.1,488-506).
cccaggactacttggataa

SEQ ID NO: 721885 - DNA, 19 bp, Mus musculus
  siRNA target sequence for 4921536K21Rik (NM_026150.1,492-510).
ggactacttggataaggaa

SEQ ID NO: 721886 - DNA, 19 bp, Mus musculus
  siRNA target sequence for 0610010D20Rik (NM_026152.1,117-135).
gcttgtctaggaatgtgaa

SEQ ID NO: 721887 - DNA, 19 bp, Mus musculus
  siRNA target sequence for 0610010D20Rik (NM_026152.1,136-154).
gggcaagaaggtagacatt

SEQ ID NO: 721888 - DNA, 19 bp, Mus musculus
  siRNA target sequence for 0610010D20Rik (NM_026152.1,192-210).
ccaccgcagaggtagacta

SEQ ID NO: 721889 - DNA, 19 bp, Mus musculus
  siRNA target sequence for 0610010D20Rik (NM_026152.1,274-292).
gggttcgactggagagttt

SEQ ID NO: 721890 - DNA, 19 bp, Mus musculus
  siRNA target sequence for 0610010D20Rik (NM_026152.1,393-411).
cgcaagccacagtagagat

SEQ ID NO: 721891 - DNA, 19 bp, Mus musculus
  siRNA target sequence for 0610010D20Rik (NM_026152.1,452-470).
gtggtgaccccttgttact

SEQ ID NO: 721892 - DNA, 19 bp, Mus musculus
  siRNA target sequence for 0610010D20Rik (NM_026152.1,534-552).
caatccctgtggtgttgta

SEQ ID NO: 721893 - DNA, 19 bp, Mus musculus
  siRNA target sequence for 0610010D20Rik (NM_026152.1,587-605).
gtggatgccgtggttacat

SEQ ID NO: 721894 - DNA, 19 bp, Mus musculus
  siRNA target sequence for 0610010D20Rik (NM_026152.1,590-608).
gatgccgtggttacattgt

SEQ ID NO: 721895 - DNA, 19 bp, Mus musculus
  siRNA target sequence for 0610010D20Rik (NM_026152.1,609-627).
ctcagcacccaaatatcat

SEQ ID NO: 721896 - DNA, 19 bp, Mus musculus
  siRNA target sequence for 0610010D20Rik (NM_026152.1,655-673).
gaccaggattggactgata

SEQ ID NO: 721897 - DNA, 19 bp, Mus musculus
  siRNA target sequence for 0610010D20Rik (NM_026152.1,657-675).
ccaggattggactgatagt

SEQ ID NO: 721898 - DNA, 19 bp, Mus musculus
  siRNA target sequence for 0610010D20Rik (NM_026152.1,658-676).
caggattggactgatagtt

SEQ ID NO: 721899 - DNA, 19 bp, Mus musculus
  siRNA target sequence for 0610010D20Rik (NM_026152.1,900-918).
gaataccagggctgaagaa

SEQ ID NO: 721900 - DNA, 19 bp, Mus musculus
  siRNA target sequence for 0610010D20Rik (NM_026152.1,995-1013).
gcactgcgcttggatttca

SEQ ID NO: 721901 - DNA, 19 bp, Mus musculus
  siRNA target sequence for Mrpl10 (NM_026154.1,156-174).
gatggctataactgagtat

SEQ ID NO: 721902 - DNA, 19 bp, Mus musculus
  siRNA target sequence for Mrpl10 (NM_026154.1,159-177).
ggctataactgagtatatt

SEQ ID NO: 721903 - DNA, 19 bp, Mus musculus
  siRNA target sequence for Mrpl10 (NM_026154.1,253-271).
cggctcctgcgtcaagata

SEQ ID NO: 721904 - DNA, 19 bp, Mus musculus
  siRNA target sequence for Mrpl10 (NM_026154.1,254-272).
ggctcctgcgtcaagatat

SEQ ID NO: 721905 - DNA, 19 bp, Mus musculus
  siRNA target sequence for Mrpl10 (NM_026154.1,255-273).
gctcctgcgtcaagatata

SEQ ID NO: 721906 - DNA, 19 bp, Mus musculus
  siRNA target sequence for Mrpl10 (NM_026154.1,258-276).
cctgcgtcaagatatagta

SEQ ID NO: 721907 - DNA, 19 bp, Mus musculus
  siRNA target sequence for Mrpl10 (NM_026154.1,364-382).
cggaaacacaagatcttca

SEQ ID NO: 721908 - DNA, 19 bp, Mus musculus
  siRNA target sequence for Mrpl10 (NM_026154.1,402-420).
ggtcctaaagccttttcta

SEQ ID NO: 721909 - DNA, 19 bp, Mus musculus
  siRNA target sequence for Mrpl10 (NM_026154.1,405-423).
cctaaagccttttctagaa

SEQ ID NO: 721910 - DNA, 19 bp, Mus musculus
  siRNA target sequence for Mrpl10 (NM_026154.1,579-597).
gcagggactcgtagactat

SEQ ID NO: 721911 - DNA, 19 bp, Mus musculus
  siRNA target sequence for Mrpl10 (NM_026154.1,707-725).
ccctgttggatcagtatgt

SEQ ID NO: 721912 - DNA, 19 bp, Mus musculus
  siRNA target sequence for Mrpl10 (NM_026154.1,732-750).
gcaaaacgagggagattgt

SEQ ID NO: 721913 - DNA, 19 bp, Mus musculus
  siRNA target sequence for Mrpl10 (NM_026154.1,752-770).
ccacgtcagccaatgagaa

SEQ ID NO: 721914 - DNA, 19 bp, Mus musculus
  siRNA target sequence for 0610038P07Rik (NM_026155.1,140-158).
catccccatctggttgtat

SEQ ID NO: 721915 - DNA, 19 bp, Mus musculus
  siRNA target sequence for 0610038P07Rik (NM_026155.1,144-162).
cccatctggttgtattgga

SEQ ID NO: 721916 - DNA, 19 bp, Mus musculus
  siRNA target sequence for 0610038P07Rik (NM_026155.1,160-178).
ggagaatatggcatatgga

SEQ ID NO: 721917 - DNA, 19 bp, Mus musculus
  siRNA target sequence for 0610038P07Rik (NM_026155.1,203-221).
cagtgtgatgaccttagta

SEQ ID NO: 721918 - DNA, 19 bp, Mus musculus
  siRNA target sequence for 0610038P07Rik (NM_026155.1,215-233).
cttagtaagcacttactta

SEQ ID NO: 721919 - DNA, 19 bp, Mus musculus
  siRNA target sequence for 0610038P07Rik (NM_026155.1,234-252).
gtagccttcgcgtacaaga

SEQ ID NO: 721920 - DNA, 19 bp, Mus musculus
  siRNA target sequence for 0610038P07Rik (NM_026155.1,242-260).
cgcgtacaagaatgtaaaa

SEQ ID NO: 721921 - DNA, 19 bp, Mus musculus
  siRNA target sequence for 0610038P07Rik (NM_026155.1,243-261).
gcgtacaagaatgtaaaat

SEQ ID NO: 721922 - DNA, 19 bp, Mus musculus
  siRNA target sequence for 0610038P07Rik (NM_026155.1,312-330).
gaagtgactcgaaagcttt

SEQ ID NO: 721923 - DNA, 19 bp, Mus musculus
  siRNA target sequence for 0610038P07Rik (NM_026155.1,317-335).
gactcgaaagctttctgaa

SEQ ID NO: 721924 - DNA, 19 bp, Mus musculus
  siRNA target sequence for 0610038P07Rik (NM_026155.1,331-349).
ctgaagctgataataggaa

SEQ ID NO: 721925 - DNA, 19 bp, Mus musculus
  siRNA target sequence for 0610038P07Rik (NM_026155.1,392-410).
gaatgaagttgctgattat

SEQ ID NO: 721926 - DNA, 19 bp, Mus musculus
  siRNA target sequence for 0610038P07Rik (NM_026155.1,421-439).
cattctccatcttctataa

SEQ ID NO: 721927 - DNA, 19 bp, Mus musculus
  siRNA target sequence for 0610038P07Rik (NM_026155.1,471-489).
gcttccttctttatactga

SEQ ID NO: 721928 - DNA, 19 bp, Mus musculus
  siRNA target sequence for 0610038P07Rik (NM_026155.1,500-518).
ccccacagtaaactacatt

SEQ ID NO: 721929 - DNA, 19 bp, Mus musculus
  siRNA target sequence for 0610038P07Rik (NM_026155.1,501-519).
cccacagtaaactacattt

SEQ ID NO: 721930 - DNA, 19 bp, Mus musculus
  siRNA target sequence for 0610038P07Rik (NM_026155.1,512-530).
ctacattttgtccataagt

SEQ ID NO: 721931 - DNA, 19 bp, Mus musculus
  siRNA target sequence for 0610038P07Rik (NM_026155.1,521-539).
gtccataagtgcttcatct

SEQ ID NO: 721932 - DNA, 19 bp, Mus musculus
  siRNA target sequence for 0610038P07Rik (NM_026155.1,543-561).
ctcatcgccctcttgtcta

SEQ ID NO: 721933 - DNA, 19 bp, Mus musculus
  siRNA target sequence for 0610039N19Rik (NM_026159.2,556-574).
cttcagtccaccaactact

SEQ ID NO: 721934 - DNA, 19 bp, Mus musculus
  siRNA target sequence for 0610039N19Rik (NM_026159.2,561-579).
gtccaccaactactatgtt

SEQ ID NO: 721935 - DNA, 19 bp, Mus musculus
  siRNA target sequence for 0610039N19Rik (NM_026159.2,566-584).
ccaactactatgtttattt

SEQ ID NO: 721936 - DNA, 19 bp, Mus musculus
  siRNA target sequence for 0610039N19Rik (NM_026159.2,604-622).
gcgatggagcgctatgtct

SEQ ID NO: 721937 - DNA, 19 bp, Mus musculus
  siRNA target sequence for 0610039N19Rik (NM_026159.2,839-857).
ctatgtcggtgatcatgaa

SEQ ID NO: 721938 - DNA, 19 bp, Mus musculus
  siRNA target sequence for 0610039N19Rik (NM_026159.2,908-926).
cactgaccaaccagtacta

SEQ ID NO: 721939 - DNA, 19 bp, Mus musculus
  siRNA target sequence for 0610039N19Rik (NM_026159.2,988-1006).
catgcaatggcttccataa

SEQ ID NO: 721940 - DNA, 19 bp, Mus musculus
  siRNA target sequence for 0610039N19Rik (NM_026159.2,1036-1054).
ctgacaggccaagatatct

SEQ ID NO: 721941 - DNA, 19 bp, Mus musculus
  siRNA target sequence for 0610039N19Rik (NM_026159.2,1111-1129).
ctgaaacggaacttgtact

SEQ ID NO: 721942 - DNA, 19 bp, Mus musculus
  siRNA target sequence for 0710001E10Rik (NM_026161.1,754-772).
gacaccgagctggtaaaca

SEQ ID NO: 721943 - DNA, 19 bp, Mus musculus
  siRNA target sequence for 0710001E10Rik (NM_026161.1,817-835).
ctgccgggagcctatttct

SEQ ID NO: 721944 - DNA, 19 bp, Mus musculus
  siRNA target sequence for 0710001E10Rik (NM_026161.1,900-918).
cgaggtgcaggccatgatt

SEQ ID NO: 721945 - DNA, 19 bp, Mus musculus
  siRNA target sequence for 0710001E10Rik (NM_026161.1,988-1006).
gacgccgtctggctactta

SEQ ID NO: 721946 - DNA, 19 bp, Mus musculus
  siRNA target sequence for 0710001E10Rik (NM_026161.1,1037-1055).
gcaaccacggcaagtacat

SEQ ID NO: 721947 - DNA, 19 bp, Mus musculus
  siRNA target sequence for 0710001E10Rik (NM_026161.1,1042-1060).
cacggcaagtacatcactt

SEQ ID NO: 721948 - DNA, 19 bp, Mus musculus
  siRNA target sequence for 1200008D14Rik (NM_026163.1,296-314).
gctacacgtggttgagaat

SEQ ID NO: 721949 - DNA, 19 bp, Mus musculus
  siRNA target sequence for 1200008D14Rik (NM_026163.1,300-318).
cacgtggttgagaatgact

SEQ ID NO: 721950 - DNA, 19 bp, Mus musculus
  siRNA target sequence for 1200008D14Rik (NM_026163.1,302-320).
cgtggttgagaatgacttt

SEQ ID NO: 721951 - DNA, 19 bp, Mus musculus
  siRNA target sequence for 1200008D14Rik (NM_026163.1,936-954).
gggaatgcagacatcgaaa

SEQ ID NO: 721952 - DNA, 19 bp, Mus musculus
  siRNA target sequence for 1200008D14Rik (NM_026163.1,937-955).
ggaatgcagacatcgaaat

SEQ ID NO: 721953 - DNA, 19 bp, Mus musculus
  siRNA target sequence for 1200008D14Rik (NM_026163.1,1018-1036).
ccgcagctaccttcataca

SEQ ID NO: 721954 - DNA, 19 bp, Mus musculus
  siRNA target sequence for 1200008D14Rik (NM_026163.1,1035-1053).
cagcatgagagcttccaaa

SEQ ID NO: 721955 - DNA, 19 bp, Mus musculus
  siRNA target sequence for 1200008D14Rik (NM_026163.1,1063-1081).
cacggaaaagggtcaatca

SEQ ID NO: 721956 - DNA, 19 bp, Mus musculus
  siRNA target sequence for 1200008D14Rik (NM_026163.1,1067-1085).
gaaaagggtcaatcaactt

SEQ ID NO: 721957 - DNA, 19 bp, Mus musculus
  siRNA target sequence for 1200008D14Rik (NM_026163.1,1090-1108).
gcatccctaagcttctaca

SEQ ID NO: 721958 - DNA, 19 bp, Mus musculus
  siRNA target sequence for 1200008D14Rik (NM_026163.1,1091-1109).
catccctaagcttctacaa

SEQ ID NO: 721959 - DNA, 19 bp, Mus musculus
  siRNA target sequence for 1200008D14Rik (NM_026163.1,1150-1168).
gtggggccttgagaaactt

SEQ ID NO: 721960 - DNA, 19 bp, Mus musculus
  siRNA target sequence for 1200008D14Rik (NM_026163.1,1166-1184).
cttggtatttgaagacaat

SEQ ID NO: 721961 - DNA, 19 bp, Mus musculus
  siRNA target sequence for 1200008D14Rik (NM_026163.1,1295-1313).
cctgtcctctagtgataaa

SEQ ID NO: 721962 - DNA, 19 bp, Mus musculus
  siRNA target sequence for 1200008D14Rik (NM_026163.1,1300-1318).
cctctagtgataaactcaa

SEQ ID NO: 721963 - DNA, 19 bp, Mus musculus
  siRNA target sequence for 1200008D14Rik (NM_026163.1,1314-1332).
ctcaagcatctcatgataa

SEQ ID NO: 721964 - DNA, 19 bp, Mus musculus
  siRNA target sequence for 1200008D14Rik (NM_026163.1,1449-1467).
ggatgcctaaggaacatga

SEQ ID NO: 721965 - DNA, 19 bp, Mus musculus
  siRNA target sequence for 1200008D14Rik (NM_026163.1,1504-1522).
ggtgtgatggtctcattga

SEQ ID NO: 721966 - DNA, 19 bp, Mus musculus
  siRNA target sequence for 1200008D14Rik (NM_026163.1,1629-1647).
gcagagctcccagagaaat

SEQ ID NO: 721967 - DNA, 19 bp, Mus musculus
  siRNA target sequence for 1200008D14Rik (NM_026163.1,1632-1650).
gagctcccagagaaatatt

SEQ ID NO: 721968 - DNA, 19 bp, Mus musculus
  siRNA target sequence for 1200008D14Rik (NM_026163.1,1653-1671).
cagagtatctacatgcaaa

SEQ ID NO: 721969 - DNA, 19 bp, Mus musculus
  siRNA target sequence for 1200008D14Rik (NM_026163.1,1674-1692).
cggaatatccagactaaca

SEQ ID NO: 721970 - DNA, 19 bp, Mus musculus
  siRNA target sequence for 1200008D14Rik (NM_026163.1,1676-1694).
gaatatccagactaacagt

SEQ ID NO: 721971 - DNA, 19 bp, Mus musculus
  siRNA target sequence for 1200008D14Rik (NM_026163.1,1718-1736).
cagccgaagtaggaaacta

SEQ ID NO: 721972 - DNA, 19 bp, Mus musculus
  siRNA target sequence for 1200008D14Rik (NM_026163.1,1720-1738).
gccgaagtaggaaactaaa

SEQ ID NO: 721973 - DNA, 19 bp, Mus musculus
  siRNA target sequence for 1200008D14Rik (NM_026163.1,1721-1739).
ccgaagtaggaaactaaaa

SEQ ID NO: 721974 - DNA, 19 bp, Mus musculus
  siRNA target sequence for 1200008D14Rik (NM_026163.1,1802-1820).
gtggcattccattgtgata

SEQ ID NO: 721975 - DNA, 19 bp, Mus musculus
  siRNA target sequence for 1200008D14Rik (NM_026163.1,1806-1824).
cattccattgtgataagga

SEQ ID NO: 721976 - DNA, 19 bp, Mus musculus
  siRNA target sequence for 1200008D14Rik (NM_026163.1,1811-1829).
cattgtgataaggatgtat

SEQ ID NO: 721977 - DNA, 19 bp, Mus musculus
  siRNA target sequence for 1200008D14Rik (NM_026163.1,1822-1840).
ggatgtatttgtccttaat

SEQ ID NO: 721978 - DNA, 19 bp, Mus musculus
  siRNA target sequence for 1200008D14Rik (NM_026163.1,1843-1861).
ccaagagtacccgaaacta

SEQ ID NO: 721979 - DNA, 19 bp, Mus musculus
  siRNA target sequence for 1200008D14Rik (NM_026163.1,1844-1862).
caagagtacccgaaactat

SEQ ID NO: 721980 - DNA, 19 bp, Mus musculus
  siRNA target sequence for 1200008D14Rik (NM_026163.1,1933-1951).
ctcgaatggttgtccaaaa

SEQ ID NO: 721981 - DNA, 19 bp, Mus musculus
  siRNA target sequence for 1200008D14Rik (NM_026163.1,1936-1954).
gaatggttgtccaaaagga

SEQ ID NO: 721982 - DNA, 19 bp, Mus musculus
  siRNA target sequence for 1200008D14Rik (NM_026163.1,1940-1958).
ggttgtccaaaaggaaaat

SEQ ID NO: 721983 - DNA, 19 bp, Mus musculus
  siRNA target sequence for 1200008D14Rik (NM_026163.1,1991-2009).
gggtgatcccagtgtgaaa

SEQ ID NO: 721984 - DNA, 19 bp, Mus musculus
  siRNA target sequence for 1200008D14Rik (NM_026163.1,1992-2010).
ggtgatcccagtgtgaaaa

SEQ ID NO: 721985 - DNA, 19 bp, Mus musculus
  siRNA target sequence for 1200008D14Rik (NM_026163.1,1993-2011).
gtgatcccagtgtgaaaaa

SEQ ID NO: 721986 - DNA, 19 bp, Mus musculus
  siRNA target sequence for 1200008D14Rik (NM_026163.1,2019-2037).
gtctccctgctgaggaatt

SEQ ID NO: 721987 - DNA, 19 bp, Mus musculus
  siRNA target sequence for 1200008D14Rik (NM_026163.1,2049-2067).
ctttccctgcagaatgaaa

SEQ ID NO: 721988 - DNA, 19 bp, Mus musculus
  siRNA target sequence for 1200008D14Rik (NM_026163.1,2119-2137).
caagtactgaccttctcat

SEQ ID NO: 721989 - DNA, 19 bp, Mus musculus
  siRNA target sequence for 1200008D14Rik (NM_026163.1,2122-2140).
gtactgaccttctcattga

SEQ ID NO: 721990 - DNA, 19 bp, Mus musculus
  siRNA target sequence for 1200008D14Rik (NM_026163.1,2148-2166).
gcctctgcttgctatacgt

SEQ ID NO: 721991 - DNA, 19 bp, Mus musculus
  siRNA target sequence for 1200008D14Rik (NM_026163.1,2154-2172).
gcttgctatacgttgaaca

SEQ ID NO: 721992 - DNA, 19 bp, Mus musculus
  siRNA target sequence for 1200008D14Rik (NM_026163.1,2155-2173).
cttgctatacgttgaacaa

SEQ ID NO: 721993 - DNA, 19 bp, Mus musculus
  siRNA target sequence for 1200008D14Rik (NM_026163.1,2158-2176).
gctatacgttgaacaattt

SEQ ID NO: 721994 - DNA, 19 bp, Mus musculus
  siRNA target sequence for 1200008D14Rik (NM_026163.1,2164-2182).
cgttgaacaatttaatgca

SEQ ID NO: 721995 - DNA, 19 bp, Mus musculus
  siRNA target sequence for 1200008D14Rik (NM_026163.1,2218-2236).
ccggaggtctgcagaaaat

SEQ ID NO: 721996 - DNA, 19 bp, Mus musculus
  siRNA target sequence for 1200008D14Rik (NM_026163.1,2219-2237).
cggaggtctgcagaaaatt

SEQ ID NO: 721997 - DNA, 19 bp, Mus musculus
  siRNA target sequence for 1200008D14Rik (NM_026163.1,2220-2238).
ggaggtctgcagaaaatta

SEQ ID NO: 721998 - DNA, 19 bp, Mus musculus
  siRNA target sequence for 1200008D14Rik (NM_026163.1,2221-2239).
gaggtctgcagaaaattat

SEQ ID NO: 721999 - DNA, 19 bp, Mus musculus
  siRNA target sequence for 1200008D14Rik (NM_026163.1,2223-2241).
ggtctgcagaaaattatga

SEQ ID NO: 722000 - DNA, 19 bp, Mus musculus
  siRNA target sequence for 1200008D14Rik (NM_026163.1,2328-2346).
ctgcatcacgcctataaga

SEQ ID NO: 722001 - DNA, 19 bp, Mus musculus
  siRNA target sequence for 1200008D14Rik (NM_026163.1,2339-2357).
ctataagaaggctcagttt

SEQ ID NO: 722002 - DNA, 19 bp, Mus musculus
  siRNA target sequence for 1200008D14Rik (NM_026163.1,2345-2363).
gaaggctcagtttaagaaa

SEQ ID NO: 722003 - DNA, 19 bp, Mus musculus
  siRNA target sequence for 1200009F10Rik (NM_026166.1,111-129).
ggagtgatggcaggaaaaa

SEQ ID NO: 722004 - DNA, 19 bp, Mus musculus
  siRNA target sequence for 1200009F10Rik (NM_026166.1,213-231).
cctggcttgtatttcaaca

SEQ ID NO: 722005 - DNA, 19 bp, Mus musculus
  siRNA target sequence for 1200009F10Rik (NM_026166.1,245-263).
gcgaaggtagaaaaacaat

SEQ ID NO: 722006 - DNA, 19 bp, Mus musculus
  siRNA target sequence for 1200009F10Rik (NM_026166.1,299-317).
ggcctccagagtaaaatca

SEQ ID NO: 722007 - DNA, 19 bp, Mus musculus
  siRNA target sequence for 1200009F10Rik (NM_026166.1,307-325).
gagtaaaatcagtttaatt

SEQ ID NO: 722008 - DNA, 19 bp, Mus musculus
  siRNA target sequence for 1200009F10Rik (NM_026166.1,335-353).
cttgagtctactgaaaata

SEQ ID NO: 722009 - DNA, 19 bp, Mus musculus
  siRNA target sequence for 1200009F10Rik (NM_026166.1,369-387).
catcatccatatctttgat

SEQ ID NO: 722010 - DNA, 19 bp, Mus musculus
  siRNA target sequence for 1200009F10Rik (NM_026166.1,423-441).
gatccatacgtgatattga

SEQ ID NO: 722011 - DNA, 19 bp, Mus musculus
  siRNA target sequence for 1200009F10Rik (NM_026166.1,473-491).
caaaaccttaatgagaaat

SEQ ID NO: 722012 - DNA, 19 bp, Mus musculus
  siRNA target sequence for 1200009F10Rik (NM_026166.1,563-581).
gaagtgaaggatacacatt

SEQ ID NO: 722013 - DNA, 19 bp, Mus musculus
  siRNA target sequence for 1200009F10Rik (NM_026166.1,571-589).
ggatacacattctgaagtt

SEQ ID NO: 722014 - DNA, 19 bp, Mus musculus
  siRNA target sequence for 1200009F10Rik (NM_026166.1,587-605).
gttaccctgaagattaact

SEQ ID NO: 722015 - DNA, 19 bp, Mus musculus
  siRNA target sequence for 1200009F10Rik (NM_026166.1,604-622).
ctccgcggatcaagaaata

SEQ ID NO: 722016 - DNA, 19 bp, Mus musculus
  siRNA target sequence for 1200009F10Rik (NM_026166.1,606-624).
ccgcggatcaagaaataaa

SEQ ID NO: 722017 - DNA, 19 bp, Mus musculus
  siRNA target sequence for 1200009F10Rik (NM_026166.1,607-625).
cgcggatcaagaaataaaa

SEQ ID NO: 722018 - DNA, 19 bp, Mus musculus
  siRNA target sequence for 1200009F10Rik (NM_026166.1,608-626).
gcggatcaagaaataaaat

SEQ ID NO: 722019 - DNA, 19 bp, Mus musculus
  siRNA target sequence for 1200009F10Rik (NM_026166.1,627-645).
cgctcactgaacgtctaaa

SEQ ID NO: 722020 - DNA, 19 bp, Mus musculus
  siRNA target sequence for 1200009F10Rik (NM_026166.1,631-649).
cactgaacgtctaaaagat

SEQ ID NO: 722021 - DNA, 19 bp, Mus musculus
  siRNA target sequence for 1200009F10Rik (NM_026166.1,735-753).
ctgataccaaagcagttaa

SEQ ID NO: 722022 - DNA, 19 bp, Mus musculus
  siRNA target sequence for 1200009F10Rik (NM_026166.1,747-765).
cagttaagaagctagaaga

SEQ ID NO: 722023 - DNA, 19 bp, Mus musculus
  siRNA target sequence for 1200009F10Rik (NM_026166.1,793-811).
cgaagatctgaccaacaaa

SEQ ID NO: 722024 - DNA, 19 bp, Mus musculus
  siRNA target sequence for 1200009F10Rik (NM_026166.1,797-815).
gatctgaccaacaaactct

SEQ ID NO: 722025 - DNA, 19 bp, Mus musculus
  siRNA target sequence for 1200009F10Rik (NM_026166.1,819-837).
gctacgaacccaaagtaga

SEQ ID NO: 722026 - DNA, 19 bp, Mus musculus
  siRNA target sequence for 1200009F10Rik (NM_026166.1,891-909).
gagtctctcaggatctgat

SEQ ID NO: 722027 - DNA, 19 bp, Mus musculus
  siRNA target sequence for 1200009F10Rik (NM_026166.1,935-953).
ctgacgatgcagatgttca

SEQ ID NO: 722028 - DNA, 19 bp, Mus musculus
  siRNA target sequence for 1200009F10Rik (NM_026166.1,975-993).
gggctgtgtctgagatcat

SEQ ID NO: 722029 - DNA, 19 bp, Mus musculus
  siRNA target sequence for 1200009F10Rik (NM_026166.1,1013-1031).
gaggggatccagtatgaca

SEQ ID NO: 722030 - DNA, 19 bp, Mus musculus
  siRNA target sequence for 1200009F10Rik (NM_026166.1,1054-1072).
cgagctggtcgttctaaaa

SEQ ID NO: 722031 - DNA, 19 bp, Mus musculus
  siRNA target sequence for 1200009F10Rik (NM_026166.1,1057-1075).
gctggtcgttctaaaagga

SEQ ID NO: 722032 - DNA, 19 bp, Mus musculus
  siRNA target sequence for 1200009F10Rik (NM_026166.1,1117-1135).
ggggactttgggagagtat

SEQ ID NO: 722033 - DNA, 19 bp, Mus musculus
  siRNA target sequence for 1200009F10Rik (NM_026166.1,1128-1146).
gagagtatagcctaggaaa

SEQ ID NO: 722034 - DNA, 19 bp, Mus musculus
  siRNA target sequence for 1200009F10Rik (NM_026166.1,1130-1148).
gagtatagcctaggaaata

SEQ ID NO: 722035 - DNA, 19 bp, Mus musculus
  siRNA target sequence for 1200009B18Rik (NM_026168.1,112-130).
gcgtctgaatcggagaaaa

SEQ ID NO: 722036 - DNA, 19 bp, Mus musculus
  siRNA target sequence for 1200009B18Rik (NM_026168.1,113-131).
cgtctgaatcggagaaaaa

SEQ ID NO: 722037 - DNA, 19 bp, Mus musculus
  siRNA target sequence for 1200009B18Rik (NM_026168.1,116-134).
ctgaatcggagaaaaacct

SEQ ID NO: 722038 - DNA, 19 bp, Mus musculus
  siRNA target sequence for 1200009B18Rik (NM_026168.1,122-140).
cggagaaaaaccttaagtt

SEQ ID NO: 722039 - DNA, 19 bp, Mus musculus
  siRNA target sequence for 1200009B18Rik (NM_026168.1,138-156).
gtttggtgaaagagttaga

SEQ ID NO: 722040 - DNA, 19 bp, Mus musculus
  siRNA target sequence for 1200009B18Rik (NM_026168.1,204-222).
ggggaacagtttctctaat

SEQ ID NO: 722041 - DNA, 19 bp, Mus musculus
  siRNA target sequence for 1200009B18Rik (NM_026168.1,256-274).
ggaattctcagtctatcaa

SEQ ID NO: 722042 - DNA, 19 bp, Mus musculus
  siRNA target sequence for 1200009B18Rik (NM_026168.1,262-280).
ctcagtctatcaagataca

SEQ ID NO: 722043 - DNA, 19 bp, Mus musculus
  siRNA target sequence for 1200009B18Rik (NM_026168.1,272-290).
caagatacatggatgaagt

SEQ ID NO: 722044 - DNA, 19 bp, Mus musculus
  siRNA target sequence for 1200009B18Rik (NM_026168.1,282-300).
ggatgaagtacgaatatga

SEQ ID NO: 722045 - DNA, 19 bp, Mus musculus
  siRNA target sequence for 1200009B18Rik (NM_026168.1,286-304).
gaagtacgaatatgaagta

SEQ ID NO: 722046 - DNA, 19 bp, Mus musculus
  siRNA target sequence for 1200009B18Rik (NM_026168.1,302-320).
gtagacaaggatttttcta

SEQ ID NO: 722047 - DNA, 19 bp, Mus musculus
  siRNA target sequence for 1200009B18Rik (NM_026168.1,321-339).
gcaagttgcgaatcaacat

SEQ ID NO: 722048 - DNA, 19 bp, Mus musculus
  siRNA target sequence for 1200009B18Rik (NM_026168.1,322-340).
caagttgcgaatcaacata

SEQ ID NO: 722049 - DNA, 19 bp, Mus musculus
  siRNA target sequence for 1200009B18Rik (NM_026168.1,328-346).
gcgaatcaacatagacatt

SEQ ID NO: 722050 - DNA, 19 bp, Mus musculus
  siRNA target sequence for 1200009B18Rik (NM_026168.1,329-347).
cgaatcaacatagacatta

SEQ ID NO: 722051 - DNA, 19 bp, Mus musculus
  siRNA target sequence for 1200009B18Rik (NM_026168.1,417-435).
cagatggtctggcttatga

SEQ ID NO: 722052 - DNA, 19 bp, Mus musculus
  siRNA target sequence for 1200009B18Rik (NM_026168.1,522-540).
cccttcaagacgtgatatt

SEQ ID NO: 722053 - DNA, 19 bp, Mus musculus
  siRNA target sequence for 1200009B18Rik (NM_026168.1,524-542).
cttcaagacgtgatattca

SEQ ID NO: 722054 - DNA, 19 bp, Mus musculus
  siRNA target sequence for 1200009B18Rik (NM_026168.1,527-545).
caagacgtgatattcaaga

SEQ ID NO: 722055 - DNA, 19 bp, Mus musculus
  siRNA target sequence for 1200009B18Rik (NM_026168.1,535-553).
gatattcaagagtgctttt

SEQ ID NO: 722056 - DNA, 19 bp, Mus musculus
  siRNA target sequence for 1200009B18Rik (NM_026168.1,623-641).
catggtcatctctatgtca

SEQ ID NO: 722057 - DNA, 19 bp, Mus musculus
  siRNA target sequence for 1200009B18Rik (NM_026168.1,626-644).
ggtcatctctatgtcaata

SEQ ID NO: 722058 - DNA, 19 bp, Mus musculus
  siRNA target sequence for 1200009B18Rik (NM_026168.1,627-645).
gtcatctctatgtcaataa

SEQ ID NO: 722059 - DNA, 19 bp, Mus musculus
  siRNA target sequence for 1200009B18Rik (NM_026168.1,654-672).
ggaattttcacataactgt

SEQ ID NO: 722060 - DNA, 19 bp, Mus musculus
  siRNA target sequence for 1200009B18Rik (NM_026168.1,693-711).
ctcgagggcatgcacattt

SEQ ID NO: 722061 - DNA, 19 bp, Mus musculus
  siRNA target sequence for 1200009B18Rik (NM_026168.1,722-740).
gtcaaccatgattcttaca

SEQ ID NO: 722062 - DNA, 19 bp, Mus musculus
  siRNA target sequence for 1200009B18Rik (NM_026168.1,728-746).
catgattcttacaactttt

SEQ ID NO: 722063 - DNA, 19 bp, Mus musculus
  siRNA target sequence for 1200009B18Rik (NM_026168.1,749-767).
cacagaatagatcatttgt

SEQ ID NO: 722064 - DNA, 19 bp, Mus musculus
  siRNA target sequence for 1200009B18Rik (NM_026168.1,751-769).
cagaatagatcatttgtct

SEQ ID NO: 722065 - DNA, 19 bp, Mus musculus
  siRNA target sequence for 1200009B18Rik (NM_026168.1,776-794).
gagcttgttccgggaatta

SEQ ID NO: 722066 - DNA, 19 bp, Mus musculus
  siRNA target sequence for 1200009B18Rik (NM_026168.1,785-803).
ccgggaattattaatcctt

SEQ ID NO: 722067 - DNA, 19 bp, Mus musculus
  siRNA target sequence for 1200009B18Rik (NM_026168.1,786-804).
cgggaattattaatccttt

SEQ ID NO: 722068 - DNA, 19 bp, Mus musculus
  siRNA target sequence for 1200009B18Rik (NM_026168.1,839-857).
cagatgttccaatatttca

SEQ ID NO: 722069 - DNA, 19 bp, Mus musculus
  siRNA target sequence for 1200009B18Rik (NM_026168.1,878-896).
ctacacacatacaagatct

SEQ ID NO: 722070 - DNA, 19 bp, Mus musculus
  siRNA target sequence for 1200009B18Rik (NM_026168.1,961-979).
ccacggcgtctctggaata

SEQ ID NO: 722071 - DNA, 19 bp, Mus musculus
  siRNA target sequence for 1200009B18Rik (NM_026168.1,962-980).
cacggcgtctctggaatat

SEQ ID NO: 722072 - DNA, 19 bp, Mus musculus
  siRNA target sequence for 1200009B18Rik (NM_026168.1,964-982).
cggcgtctctggaatattt

SEQ ID NO: 722073 - DNA, 19 bp, Mus musculus
  siRNA target sequence for 1200009B18Rik (NM_026168.1,966-984).
gcgtctctggaatatttat

SEQ ID NO: 722074 - DNA, 19 bp, Mus musculus
  siRNA target sequence for 1200009B18Rik (NM_026168.1,972-990).
ctggaatatttatgaaata

SEQ ID NO: 722075 - DNA, 19 bp, Mus musculus
  siRNA target sequence for 1200009B18Rik (NM_026168.1,1041-1059).
ggcagttttttgtaagact

SEQ ID NO: 722076 - DNA, 19 bp, Mus musculus
  siRNA target sequence for 1200009B18Rik (NM_026168.1,1052-1070).
gtaagactctgtggtataa

SEQ ID NO: 722077 - DNA, 19 bp, Mus musculus
  siRNA target sequence for 1200009B18Rik (NM_026168.1,1065-1083).
gtataattggaggaatctt

SEQ ID NO: 722078 - DNA, 19 bp, Mus musculus
  siRNA target sequence for 1200009B18Rik (NM_026168.1,1073-1091).
ggaggaatcttttcaacaa

SEQ ID NO: 722079 - DNA, 19 bp, Mus musculus
  siRNA target sequence for 1200009B18Rik (NM_026168.1,1086-1104).
caacaacaggcatgttaca

SEQ ID NO: 722080 - DNA, 19 bp, Mus musculus
  siRNA target sequence for 1200009B18Rik (NM_026168.1,1092-1110).
caggcatgttacatggaat

SEQ ID NO: 722081 - DNA, 19 bp, Mus musculus
  siRNA target sequence for 1200007D18Rik (NM_026170.2,111-129).
gacttcaggaggtttgaca

SEQ ID NO: 722082 - DNA, 19 bp, Mus musculus
  siRNA target sequence for 1200007D18Rik (NM_026170.2,393-411).
gtgggccacatcgacaatt

SEQ ID NO: 722083 - DNA, 19 bp, Mus musculus
  siRNA target sequence for 1200007D18Rik (NM_026170.2,419-437).
gatcccgctgaataatgga

SEQ ID NO: 722084 - DNA, 19 bp, Mus musculus
  siRNA target sequence for 1200007D18Rik (NM_026170.2,541-559).
cacataccatccataaact

SEQ ID NO: 722085 - DNA, 19 bp, Mus musculus
  siRNA target sequence for 1200007D18Rik (NM_026170.2,543-561).
cataccatccataaactct

SEQ ID NO: 722086 - DNA, 19 bp, Mus musculus
  siRNA target sequence for 1200007D18Rik (NM_026170.2,574-592).
cgctacaggtccagaatgt

SEQ ID NO: 722087 - DNA, 19 bp, Mus musculus
  siRNA target sequence for 1200007D18Rik (NM_026170.2,652-670).
cccatgactacatcttgaa

SEQ ID NO: 722088 - DNA, 19 bp, Mus musculus
  siRNA target sequence for 1200007D18Rik (NM_026170.2,843-861).
cccctgtacaggttcatca

SEQ ID NO: 722089 - DNA, 19 bp, Mus musculus
  siRNA target sequence for 1200007D18Rik (NM_026170.2,854-872).
gttcatcaccacaatctgt

SEQ ID NO: 722090 - DNA, 19 bp, Mus musculus
  siRNA target sequence for 1200007D18Rik (NM_026170.2,954-972).
cagctgggcaaaattcact

SEQ ID NO: 722091 - DNA, 19 bp, Mus musculus
  siRNA target sequence for 1200014M14Rik (NM_026173.2,347-365).
catgtggctcacaatgact

SEQ ID NO: 722092 - DNA, 19 bp, Mus musculus
  siRNA target sequence for 1200014M14Rik (NM_026173.2,409-427).
gctgcttcgctatgctatt

SEQ ID NO: 722093 - DNA, 19 bp, Mus musculus
  siRNA target sequence for 1200014M14Rik (NM_026173.2,413-431).
cttcgctatgctattgtga

SEQ ID NO: 722094 - DNA, 19 bp, Mus musculus
  siRNA target sequence for 1200014M14Rik (NM_026173.2,499-517).
ccctacgctagctggaaat

SEQ ID NO: 722095 - DNA, 19 bp, Mus musculus
  siRNA target sequence for 1200014M14Rik (NM_026173.2,513-531).
gaaataaccctgtaagaga

SEQ ID NO: 722096 - DNA, 19 bp, Mus musculus
  siRNA target sequence for 1200014M14Rik (NM_026173.2,547-565).
gggaaaaggatccgattta

SEQ ID NO: 722097 - DNA, 19 bp, Mus musculus
  siRNA target sequence for 1200014M14Rik (NM_026173.2,554-572).
ggatccgatttaaatattt

SEQ ID NO: 722098 - DNA, 19 bp, Mus musculus
  siRNA target sequence for 1200014M14Rik (NM_026173.2,681-699).
ggacagatgcccatgaaat

SEQ ID NO: 722099 - DNA, 19 bp, Mus musculus
  siRNA target sequence for 1200014M14Rik (NM_026173.2,682-700).
gacagatgcccatgaaata

SEQ ID NO: 722100 - DNA, 19 bp, Mus musculus
  siRNA target sequence for 1200014M14Rik (NM_026173.2,684-702).
cagatgcccatgaaataaa

SEQ ID NO: 722101 - DNA, 19 bp, Mus musculus
  siRNA target sequence for 1200014M14Rik (NM_026173.2,712-730).
gcatctcgtctctgatgaa

SEQ ID NO: 722102 - DNA, 19 bp, Mus musculus
  siRNA target sequence for 1200014M14Rik (NM_026173.2,713-731).
catctcgtctctgatgaaa

SEQ ID NO: 722103 - DNA, 19 bp, Mus musculus
  siRNA target sequence for 1200014M14Rik (NM_026173.2,716-734).
ctcgtctctgatgaaaatt

SEQ ID NO: 722104 - DNA, 19 bp, Mus musculus
  siRNA target sequence for 1200014M14Rik (NM_026173.2,773-791).
ggtcttaagacgaacgttt

SEQ ID NO: 722105 - DNA, 19 bp, Mus musculus
  siRNA target sequence for 1200014M14Rik (NM_026173.2,774-792).
gtcttaagacgaacgtttt

SEQ ID NO: 722106 - DNA, 19 bp, Mus musculus
  siRNA target sequence for 1200014M14Rik (NM_026173.2,776-794).
cttaagacgaacgttttgt

SEQ ID NO: 722107 - DNA, 19 bp, Mus musculus
  siRNA target sequence for 1200014M14Rik (NM_026173.2,810-828).
ggaggctgaactttatcga

SEQ ID NO: 722108 - DNA, 19 bp, Mus musculus
  siRNA target sequence for 1200014M14Rik (NM_026173.2,977-995).
cgtgccatcggcaagcaaa

SEQ ID NO: 722109 - DNA, 19 bp, Mus musculus
  siRNA target sequence for 1200014M14Rik (NM_026173.2,981-999).
ccatcggcaagcaaaagga

SEQ ID NO: 722110 - DNA, 19 bp, Mus musculus
  siRNA target sequence for 1200014M14Rik (NM_026173.2,998-1016).
gagaggatagagttaatga

SEQ ID NO: 722111 - DNA, 19 bp, Mus musculus
  siRNA target sequence for 1200014M14Rik (NM_026173.2,1000-1018).
gaggatagagttaatgaaa

SEQ ID NO: 722112 - DNA, 19 bp, Mus musculus
  siRNA target sequence for 1200014M14Rik (NM_026173.2,1032-1050).
ggaggatcggccatgtcaa

SEQ ID NO: 722113 - DNA, 19 bp, Mus musculus
  siRNA target sequence for 1200014M14Rik (NM_026173.2,1033-1051).
gaggatcggccatgtcaaa

SEQ ID NO: 722114 - DNA, 19 bp, Mus musculus
  siRNA target sequence for 1200014M14Rik (NM_026173.2,1082-1100).
gctgaccagtactttcaga

SEQ ID NO: 722115 - DNA, 19 bp, Mus musculus
  siRNA target sequence for 1200014M14Rik (NM_026173.2,1188-1206).
gggctgaagaagtatgtgt

SEQ ID NO: 722116 - DNA, 19 bp, Mus musculus
  siRNA target sequence for 1200014M14Rik (NM_026173.2,1210-1228).
gatctccaatgattatgaa

SEQ ID NO: 722117 - DNA, 19 bp, Mus musculus
  siRNA target sequence for 1200014M14Rik (NM_026173.2,1243-1261).
gttatctggagctttggaa

SEQ ID NO: 722118 - DNA, 19 bp, Mus musculus
  siRNA target sequence for 1200014M14Rik (NM_026173.2,1294-1312).
ggaaaaagaccatttcgaa

SEQ ID NO: 722119 - DNA, 19 bp, Mus musculus
  siRNA target sequence for 1200014M14Rik (NM_026173.2,1358-1376).
ctggaggccatgaccatat

SEQ ID NO: 722120 - DNA, 19 bp, Mus musculus
  siRNA target sequence for 1200014M14Rik (NM_026173.2,1364-1382).
gccatgaccatatttcaga

SEQ ID NO: 722121 - DNA, 19 bp, Mus musculus
  siRNA target sequence for 1200014M14Rik (NM_026173.2,1365-1383).
ccatgaccatatttcagaa

SEQ ID NO: 722122 - DNA, 19 bp, Mus musculus
  siRNA target sequence for 1200014M14Rik (NM_026173.2,1399-1417).
gatagacttcacaaataat

SEQ ID NO: 722123 - DNA, 19 bp, Mus musculus
  siRNA target sequence for 1200014M14Rik (NM_026173.2,1457-1475).
ccttctgctcacttggata

SEQ ID NO: 722124 - DNA, 19 bp, Mus musculus
  siRNA target sequence for 1200014M14Rik (NM_026173.2,1463-1481).
gctcacttggatacttctt

SEQ ID NO: 722125 - DNA, 19 bp, Mus musculus
  siRNA target sequence for 1200014M14Rik (NM_026173.2,1659-1677).
ctgccccagaggaatcgta

SEQ ID NO: 722126 - DNA, 19 bp, Mus musculus
  siRNA target sequence for 1200014M14Rik (NM_026173.2,1751-1769).
gattttggttccaaagcta

SEQ ID NO: 722127 - DNA, 19 bp, Mus musculus
  siRNA target sequence for 1200014M14Rik (NM_026173.2,1758-1776).
gttccaaagctagaatcaa

SEQ ID NO: 722128 - DNA, 19 bp, Mus musculus
  siRNA target sequence for 1200014M14Rik (NM_026173.2,1818-1836).
cagtcgttgtggagaaaca

SEQ ID NO: 722129 - DNA, 19 bp, Mus musculus
  siRNA target sequence for 1200014M14Rik (NM_026173.2,1822-1840).
cgttgtggagaaacatcat

SEQ ID NO: 722130 - DNA, 19 bp, Mus musculus
  siRNA target sequence for 1200014M14Rik (NM_026173.2,1961-1979).
ctctcagttcagtcgataa

SEQ ID NO: 722131 - DNA, 19 bp, Mus musculus
  siRNA target sequence for 1200014M14Rik (NM_026173.2,1963-1981).
ctcagttcagtcgataaaa

SEQ ID NO: 722132 - DNA, 19 bp, Mus musculus
  siRNA target sequence for 1200014M14Rik (NM_026173.2,1965-1983).
cagttcagtcgataaaagt

SEQ ID NO: 722133 - DNA, 19 bp, Mus musculus
  siRNA target sequence for 1200011I18Rik (NM_026177.2,169-187).
ccagctctgccccctaatt

SEQ ID NO: 722134 - DNA, 19 bp, Mus musculus
  siRNA target sequence for 1200011I18Rik (NM_026177.2,172-190).
gctctgccccctaattaca

SEQ ID NO: 722135 - DNA, 19 bp, Mus musculus
  siRNA target sequence for 1200011I18Rik (NM_026177.2,228-246).
cagtagttctttatctgaa

SEQ ID NO: 722136 - DNA, 19 bp, Mus musculus
  siRNA target sequence for 1200011I18Rik (NM_026177.2,276-294).
cactggtccaaatgcaaaa

SEQ ID NO: 722137 - DNA, 19 bp, Mus musculus
  siRNA target sequence for 1200011I18Rik (NM_026177.2,297-315).
gcagaggcgaaatcaagat

SEQ ID NO: 722138 - DNA, 19 bp, Mus musculus
  siRNA target sequence for 1200011I18Rik (NM_026177.2,300-318).
gaggcgaaatcaagatgat

SEQ ID NO: 722139 - DNA, 19 bp, Mus musculus
  siRNA target sequence for 1200011I18Rik (NM_026177.2,302-320).
ggcgaaatcaagatgatga

SEQ ID NO: 722140 - DNA, 19 bp, Mus musculus
  siRNA target sequence for 1200011I18Rik (NM_026177.2,350-368).
cccttcctcctgggtttaa

SEQ ID NO: 722141 - DNA, 19 bp, Mus musculus
  siRNA target sequence for 1200011I18Rik (NM_026177.2,352-370).
cttcctcctgggtttaaga

SEQ ID NO: 722142 - DNA, 19 bp, Mus musculus
  siRNA target sequence for 1200011I18Rik (NM_026177.2,383-401).
ctcctcccaggcctataat

SEQ ID NO: 722143 - DNA, 19 bp, Mus musculus
  siRNA target sequence for 1200011I18Rik (NM_026177.2,415-433).
ccacctggtttcattaagt

SEQ ID NO: 722144 - DNA, 19 bp, Mus musculus
  siRNA target sequence for 1200011I18Rik (NM_026177.2,466-484).
ccagggcaagtgtcatcat

SEQ ID NO: 722145 - DNA, 19 bp, Mus musculus
  siRNA target sequence for 1200011I18Rik (NM_026177.2,542-560).
ctgcaaaaggaccagttaa

SEQ ID NO: 722146 - DNA, 19 bp, Mus musculus
  siRNA target sequence for 1200011I18Rik (NM_026177.2,566-584).
gcgtcacgacagagtttga

SEQ ID NO: 722147 - DNA, 19 bp, Mus musculus
  siRNA target sequence for 1200011I18Rik (NM_026177.2,567-585).
cgtcacgacagagtttgaa

SEQ ID NO: 722148 - DNA, 19 bp, Mus musculus
  siRNA target sequence for 1200011I18Rik (NM_026177.2,622-640).
ggagatgatgattcatcta

SEQ ID NO: 722149 - DNA, 19 bp, Mus musculus
  siRNA target sequence for 1200011I18Rik (NM_026177.2,703-721).
gggccaagaacctttaaga

SEQ ID NO: 722150 - DNA, 19 bp, Mus musculus
  siRNA target sequence for 1200011I18Rik (NM_026177.2,849-867).
gtcaggaagggataagaga

SEQ ID NO: 722151 - DNA, 19 bp, Mus musculus
  siRNA target sequence for 1200011I18Rik (NM_026177.2,874-892).
gagcaagtatcctcataca

SEQ ID NO: 722152 - DNA, 19 bp, Mus musculus
  siRNA target sequence for 1200011I18Rik (NM_026177.2,884-902).
cctcatacaatgaatcaaa

SEQ ID NO: 722153 - DNA, 19 bp, Mus musculus
  siRNA target sequence for 1200011I18Rik (NM_026177.2,914-932).
ccctcatggacattcatca

SEQ ID NO: 722154 - DNA, 19 bp, Mus musculus
  siRNA target sequence for 1200011I18Rik (NM_026177.2,915-933).
cctcatggacattcatcat

SEQ ID NO: 722155 - DNA, 19 bp, Mus musculus
  siRNA target sequence for 1200011I18Rik (NM_026177.2,916-934).
ctcatggacattcatcata

SEQ ID NO: 722156 - DNA, 19 bp, Mus musculus
  siRNA target sequence for 1200011I18Rik (NM_026177.2,924-942).
cattcatcataagaagtta

SEQ ID NO: 722157 - DNA, 19 bp, Mus musculus
  siRNA target sequence for 1200011I18Rik (NM_026177.2,931-949).
cataagaagttaaagagta

SEQ ID NO: 722158 - DNA, 19 bp, Mus musculus
  siRNA target sequence for 1200011I18Rik (NM_026177.2,989-1007).
catttgaccgtgataaaga

SEQ ID NO: 722159 - DNA, 19 bp, Mus musculus
  siRNA target sequence for 1200011I18Rik (NM_026177.2,1023-1041).
gtttgatgaggctcagaaa

SEQ ID NO: 722160 - DNA, 19 bp, Mus musculus
  siRNA target sequence for 1300003A17Rik (NM_026181.1,58-76).
gatctgatcagctatggaa

SEQ ID NO: 722161 - DNA, 19 bp, Mus musculus
  siRNA target sequence for 1300003A17Rik (NM_026181.1,171-189).
cttccacggagcctttagt

SEQ ID NO: 722162 - DNA, 19 bp, Mus musculus
  siRNA target sequence for 1300003A17Rik (NM_026181.1,270-288).
gaacagggcggacaaatct

SEQ ID NO: 722163 - DNA, 19 bp, Mus musculus
  siRNA target sequence for 1300003A17Rik (NM_026181.1,336-354).
cgggatagcacctaaagca

SEQ ID NO: 722164 - DNA, 19 bp, Mus musculus
  siRNA target sequence for 1300003A17Rik (NM_026181.1,337-355).
gggatagcacctaaagcaa

SEQ ID NO: 722165 - DNA, 19 bp, Mus musculus
  siRNA target sequence for 1300003A17Rik (NM_026181.1,338-356).
ggatagcacctaaagcaat

SEQ ID NO: 722166 - DNA, 19 bp, Mus musculus
  siRNA target sequence for 1300003A17Rik (NM_026181.1,339-357).
gatagcacctaaagcaatt

SEQ ID NO: 722167 - DNA, 19 bp, Mus musculus
  siRNA target sequence for 1300003A17Rik (NM_026181.1,343-361).
gcacctaaagcaattgtta

SEQ ID NO: 722168 - DNA, 19 bp, Mus musculus
  siRNA target sequence for 1300003A17Rik (NM_026181.1,466-484).
ctcatcacaccggcaaaat

SEQ ID NO: 722169 - DNA, 19 bp, Mus musculus
  siRNA target sequence for 1300003A17Rik (NM_026181.1,471-489).
cacaccggcaaaattgtct

SEQ ID NO: 722170 - DNA, 19 bp, Mus musculus
  siRNA target sequence for 1300003A17Rik (NM_026181.1,488-506).
ctgttggctttgaattgtt

SEQ ID NO: 722171 - DNA, 19 bp, Mus musculus
  siRNA target sequence for 1300003A17Rik (NM_026181.1,702-720).
ggattttacacctaaagat

SEQ ID NO: 722172 - DNA, 19 bp, Mus musculus
  siRNA target sequence for 1300003A17Rik (NM_026181.1,703-721).
gattttacacctaaagata

SEQ ID NO: 722173 - DNA, 19 bp, Mus musculus
  siRNA target sequence for 1300003A17Rik (NM_026181.1,710-728).
cacctaaagataatgtaca

SEQ ID NO: 722174 - DNA, 19 bp, Mus musculus
  siRNA target sequence for 1300003A17Rik (NM_026181.1,753-771).
cccccaccaagcattgttt

SEQ ID NO: 722175 - DNA, 19 bp, Mus musculus
  siRNA target sequence for 1300003A17Rik (NM_026181.1,836-854).
gagatgttggactgagtaa

SEQ ID NO: 722176 - DNA, 19 bp, Mus musculus
  siRNA target sequence for 1300003A17Rik (NM_026181.1,841-859).
gttggactgagtaaaggaa

SEQ ID NO: 722177 - DNA, 19 bp, Mus musculus
  siRNA target sequence for 1300003A17Rik (NM_026181.1,924-942).
ctacgccacagaaactcta

SEQ ID NO: 722178 - DNA, 19 bp, Mus musculus
  siRNA target sequence for 1300003A17Rik (NM_026181.1,1003-1021).
gctcccaaacaatacaaaa

SEQ ID NO: 722179 - DNA, 19 bp, Mus musculus
  siRNA target sequence for 1300003A17Rik (NM_026181.1,1034-1052).
ccgagagagatcttcgata

SEQ ID NO: 722180 - DNA, 19 bp, Mus musculus
  siRNA target sequence for 1300003A17Rik (NM_026181.1,1035-1053).
cgagagagatcttcgatat

SEQ ID NO: 722181 - DNA, 19 bp, Mus musculus
  siRNA target sequence for 1300003A17Rik (NM_026181.1,1038-1056).
gagagatcttcgatatgtt

SEQ ID NO: 722182 - DNA, 19 bp, Mus musculus
  siRNA target sequence for 1300003A17Rik (NM_026181.1,1049-1067).
gatatgttggcaaaatttt

SEQ ID NO: 722183 - DNA, 19 bp, Mus musculus
  siRNA target sequence for 1300003A17Rik (NM_026181.1,1058-1076).
gcaaaattttggaaggatt

SEQ ID NO: 722184 - DNA, 19 bp, Mus musculus
  siRNA target sequence for 1300003A17Rik (NM_026181.1,1140-1158).
ctaccgaccggtgcattat

SEQ ID NO: 722185 - DNA, 19 bp, Mus musculus
  siRNA target sequence for 1300003A17Rik (NM_026181.1,1144-1162).
cgaccggtgcattatttca

SEQ ID NO: 722186 - DNA, 19 bp, Mus musculus
  siRNA target sequence for 1300003A17Rik (NM_026181.1,1250-1268).
cacacagtaggcatcaact

SEQ ID NO: 722187 - DNA, 19 bp, Mus musculus
  siRNA target sequence for 1300003A17Rik (NM_026181.1,1568-1586).
gacgatacgaagagttctt

SEQ ID NO: 722188 - DNA, 19 bp, Mus musculus
  siRNA target sequence for 1300003A17Rik (NM_026181.1,1571-1589).
gatacgaagagttcttagt

SEQ ID NO: 722189 - DNA, 19 bp, Mus musculus
  siRNA target sequence for 1300003A17Rik (NM_026181.1,1873-1891).
gacaagcttctgtgtaaga

SEQ ID NO: 722190 - DNA, 19 bp, Mus musculus
  siRNA target sequence for 1300003A17Rik (NM_026181.1,1947-1965).
gaagagggataaatactca

SEQ ID NO: 722191 - DNA, 19 bp, Mus musculus
  siRNA target sequence for 1300003A17Rik (NM_026181.1,2040-2058).
gcaacggggttcagacaaa

SEQ ID NO: 722192 - DNA, 19 bp, Mus musculus
  siRNA target sequence for 1300003A17Rik (NM_026181.1,2041-2059).
caacggggttcagacaaat

SEQ ID NO: 722193 - DNA, 19 bp, Mus musculus
  siRNA target sequence for 1300003A17Rik (NM_026181.1,2044-2062).
cggggttcagacaaatcca

SEQ ID NO: 722194 - DNA, 19 bp, Mus musculus
  siRNA target sequence for 1300003A17Rik (NM_026181.1,2107-2125).
gattccattagcgagtttt

SEQ ID NO: 722195 - DNA, 19 bp, Mus musculus
  siRNA target sequence for 1300003A17Rik (NM_026181.1,2112-2130).
cattagcgagtttttaagt

SEQ ID NO: 722196 - DNA, 19 bp, Mus musculus
  siRNA target sequence for 1300003A17Rik (NM_026181.1,2129-2147).
gtcaagctagatcaaaagt

SEQ ID NO: 722197 - DNA, 19 bp, Mus musculus
  siRNA target sequence for 1300003A17Rik (NM_026181.1,2149-2167).
ggacctccaaaacaagaat

SEQ ID NO: 722198 - DNA, 19 bp, Mus musculus
  siRNA target sequence for 1300003A17Rik (NM_026181.1,2311-2329).
gatgaaaagtcctcatctt

SEQ ID NO: 722199 - DNA, 19 bp, Mus musculus
  siRNA target sequence for 1300002C08Rik (NM_026182.3,220-238).
ctcgaagtatcgtaaggaa

SEQ ID NO: 722200 - DNA, 19 bp, Mus musculus
  siRNA target sequence for 1300002C08Rik (NM_026182.3,222-240).
cgaagtatcgtaaggaaaa

SEQ ID NO: 722201 - DNA, 19 bp, Mus musculus
  siRNA target sequence for 1300002C08Rik (NM_026182.3,266-284).
gtgtccaagagttcaattt

SEQ ID NO: 722202 - DNA, 19 bp, Mus musculus
  siRNA target sequence for 1300002C08Rik (NM_026182.3,341-359).
ggcatcttttgctgatgtt

SEQ ID NO: 722203 - DNA, 19 bp, Mus musculus
  siRNA target sequence for 1300002C08Rik (NM_026182.3,382-400).
gagagtgctcaataagact

SEQ ID NO: 722204 - DNA, 19 bp, Mus musculus
  siRNA target sequence for 1300002C08Rik (NM_026182.3,434-452).
ggatgaccctccttgcttt

SEQ ID NO: 722205 - DNA, 19 bp, Mus musculus
  siRNA target sequence for 1300002C08Rik (NM_026182.3,586-604).
ctcagattgccaagattgt

SEQ ID NO: 722206 - DNA, 19 bp, Mus musculus
  siRNA target sequence for 1300002C08Rik (NM_026182.3,633-651).
gcaggttgcttagattctt

SEQ ID NO: 722207 - DNA, 19 bp, Mus musculus
  siRNA target sequence for 1300002C08Rik (NM_026182.3,727-745).
gtacgtctgctcttgatct

SEQ ID NO: 722208 - DNA, 19 bp, Mus musculus
  siRNA target sequence for 1300002C08Rik (NM_026182.3,731-749).
gtctgctcttgatctgatt

SEQ ID NO: 722209 - DNA, 19 bp, Mus musculus
  siRNA target sequence for 1300002C08Rik (NM_026182.3,736-754).
ctcttgatctgattaaaga

SEQ ID NO: 722210 - DNA, 19 bp, Mus musculus
  siRNA target sequence for 1300002C08Rik (NM_026182.3,793-811).
ctacgggccacccaaagaa

SEQ ID NO: 722211 - DNA, 19 bp, Mus musculus
  siRNA target sequence for 1300002C08Rik (NM_026182.3,831-849).
cttgagatccttaaagaca

SEQ ID NO: 722212 - DNA, 19 bp, Mus musculus
  siRNA target sequence for 1300002C08Rik (NM_026182.3,901-919).
ccaggccagcggatactga

SEQ ID NO: 722213 - DNA, 19 bp, Mus musculus
  siRNA target sequence for 1300002C08Rik (NM_026182.3,1037-1055).
cctgtttggcccacatata

SEQ ID NO: 722214 - DNA, 19 bp, Mus musculus
  siRNA target sequence for 1300002C08Rik (NM_026182.3,1044-1062).
ggcccacatatattgaagt

SEQ ID NO: 722215 - DNA, 19 bp, Mus musculus
  siRNA target sequence for 1300002C08Rik (NM_026182.3,1047-1065).
ccacatatattgaagtcta

SEQ ID NO: 722216 - DNA, 19 bp, Mus musculus
  siRNA target sequence for 1300013B24Rik (NM_026184.2,304-322).
gagttctggatgattgctt

SEQ ID NO: 722217 - DNA, 19 bp, Mus musculus
  siRNA target sequence for 1300013B24Rik (NM_026184.2,350-368).
caacacctacaaaatcttt

SEQ ID NO: 722218 - DNA, 19 bp, Mus musculus
  siRNA target sequence for 1300013B24Rik (NM_026184.2,383-401).
gttacaagaacgagactat

SEQ ID NO: 722219 - DNA, 19 bp, Mus musculus
  siRNA target sequence for 1300013B24Rik (NM_026184.2,396-414).
gactattttcgttattaca

SEQ ID NO: 722220 - DNA, 19 bp, Mus musculus
  siRNA target sequence for 1300013B24Rik (NM_026184.2,406-424).
gttattacaaggttaatct

SEQ ID NO: 722221 - DNA, 19 bp, Mus musculus
  siRNA target sequence for 1300013B24Rik (NM_026184.2,485-503).
ggagccctgtccagaaagt

SEQ ID NO: 722222 - DNA, 19 bp, Mus musculus
  siRNA target sequence for 1300013B24Rik (NM_026184.2,486-504).
gagccctgtccagaaagta

SEQ ID NO: 722223 - DNA, 19 bp, Mus musculus
  siRNA target sequence for 1300013B24Rik (NM_026184.2,614-632).
cagcacgctaagtaacgaa

SEQ ID NO: 722224 - DNA, 19 bp, Mus musculus
  siRNA target sequence for 1300013B24Rik (NM_026184.2,620-638).
gctaagtaacgaaagcaaa

SEQ ID NO: 722225 - DNA, 19 bp, Mus musculus
  siRNA target sequence for 1300013B24Rik (NM_026184.2,653-671).
ctgggcgagatatgatgat

SEQ ID NO: 722226 - DNA, 19 bp, Mus musculus
  siRNA target sequence for 1300013B24Rik (NM_026184.2,674-692).
gcaggaccacttttgtgaa

SEQ ID NO: 722227 - DNA, 19 bp, Mus musculus
  siRNA target sequence for 1300013B24Rik (NM_026184.2,680-698).
ccacttttgtgaacttgat

SEQ ID NO: 722228 - DNA, 19 bp, Mus musculus
  siRNA target sequence for 1300013B24Rik (NM_026184.2,815-833).
cttcaagcctcgatctgtt

SEQ ID NO: 722229 - DNA, 19 bp, Mus musculus
  siRNA target sequence for 1300013B24Rik (NM_026184.2,818-836).
caagcctcgatctgtttat

SEQ ID NO: 722230 - DNA, 19 bp, Mus musculus
  siRNA target sequence for 1300013B24Rik (NM_026184.2,821-839).
gcctcgatctgtttatcgt

SEQ ID NO: 722231 - DNA, 19 bp, Mus musculus
  siRNA target sequence for 1300013B24Rik (NM_026184.2,829-847).
ctgtttatcgtcctttaaa

SEQ ID NO: 722232 - DNA, 19 bp, Mus musculus
  siRNA target sequence for 1300013B24Rik (NM_026184.2,873-891).
gatgatggagaatcattct

SEQ ID NO: 722233 - DNA, 19 bp, Mus musculus
  siRNA target sequence for 1300013B24Rik (NM_026184.2,927-945).
gtcttctataagcttatat

SEQ ID NO: 722234 - DNA, 19 bp, Mus musculus
  siRNA target sequence for 1300013B24Rik (NM_026184.2,929-947).
cttctataagcttatatca

SEQ ID NO: 722235 - DNA, 19 bp, Mus musculus
  siRNA target sequence for 1300013B24Rik (NM_026184.2,1026-1044).
ccaaacatcaaggagttta

SEQ ID NO: 722236 - DNA, 19 bp, Mus musculus
  siRNA target sequence for 1300013B24Rik (NM_026184.2,1081-1099).
gtccaaggaggctaaagaa

SEQ ID NO: 722237 - DNA, 19 bp, Mus musculus
  siRNA target sequence for 1300013B24Rik (NM_026184.2,1101-1119).
ctgtactttttatacttga

SEQ ID NO: 722238 - DNA, 19 bp, Mus musculus
  siRNA target sequence for 1300013B24Rik (NM_026184.2,1138-1156).
caaaggtggccccttactt

SEQ ID NO: 722239 - DNA, 19 bp, Mus musculus
  siRNA target sequence for 1300013B24Rik (NM_026184.2,1154-1172).
ctttgagcgctcgattgtt

SEQ ID NO: 722240 - DNA, 19 bp, Mus musculus
  siRNA target sequence for 1300013B24Rik (NM_026184.2,1162-1180).
gctcgattgttgatctcta

SEQ ID NO: 722241 - DNA, 19 bp, Mus musculus
  siRNA target sequence for 1300013B24Rik (NM_026184.2,1163-1181).
ctcgattgttgatctctat

SEQ ID NO: 722242 - DNA, 19 bp, Mus musculus
  siRNA target sequence for 1300013B24Rik (NM_026184.2,1166-1184).
gattgttgatctctatact

SEQ ID NO: 722243 - DNA, 19 bp, Mus musculus
  siRNA target sequence for 1300013B24Rik (NM_026184.2,1228-1246).
gcatctttcaggatacaaa

SEQ ID NO: 722244 - DNA, 19 bp, Mus musculus
  siRNA target sequence for 1300013B24Rik (NM_026184.2,1260-1278).
cacttcgatgagaaatcca

SEQ ID NO: 722245 - DNA, 19 bp, Mus musculus
  siRNA target sequence for 1300013B24Rik (NM_026184.2,1301-1319).
ggccaagtcattaaaggaa

SEQ ID NO: 722246 - DNA, 19 bp, Mus musculus
  siRNA target sequence for 1300013B24Rik (NM_026184.2,1316-1334).
ggaagaattccggttacat

SEQ ID NO: 722247 - DNA, 19 bp, Mus musculus
  siRNA target sequence for 1300013B24Rik (NM_026184.2,1317-1335).
gaagaattccggttacatt

SEQ ID NO: 722248 - DNA, 19 bp, Mus musculus
  siRNA target sequence for 1300013B24Rik (NM_026184.2,1320-1338).
gaattccggttacatttca

SEQ ID NO: 722249 - DNA, 19 bp, Mus musculus
  siRNA target sequence for 1300013B24Rik (NM_026184.2,1326-1344).
cggttacatttcaagaaca

SEQ ID NO: 722250 - DNA, 19 bp, Mus musculus
  siRNA target sequence for 1300013B24Rik (NM_026184.2,1361-1379).
ctgtgttgggtgcgataaa

SEQ ID NO: 722251 - DNA, 19 bp, Mus musculus
  siRNA target sequence for 1300013B24Rik (NM_026184.2,1365-1383).
gttgggtgcgataaatgca

SEQ ID NO: 722252 - DNA, 19 bp, Mus musculus
  siRNA target sequence for 1300013B24Rik (NM_026184.2,1401-1419).
cagactcagggtttaggaa

SEQ ID NO: 722253 - DNA, 19 bp, Mus musculus
  siRNA target sequence for 1300013B24Rik (NM_026184.2,1496-1514).
cactcggcaggaaatcgtt

SEQ ID NO: 722254 - DNA, 19 bp, Mus musculus
  siRNA target sequence for 1300013B24Rik (NM_026184.2,1505-1523).
ggaaatcgttgctctttta

SEQ ID NO: 722255 - DNA, 19 bp, Mus musculus
  siRNA target sequence for 1300013B24Rik (NM_026184.2,1506-1524).
gaaatcgttgctcttttaa

SEQ ID NO: 722256 - DNA, 19 bp, Mus musculus
  siRNA target sequence for 1300013B24Rik (NM_026184.2,1511-1529).
cgttgctcttttaaatgct

SEQ ID NO: 722257 - DNA, 19 bp, Mus musculus
  siRNA target sequence for 1300007F04Rik (NM_026185.1,521-539).
ctccagtgctgttggtaat

SEQ ID NO: 722258 - DNA, 19 bp, Mus musculus
  siRNA target sequence for 1300007F04Rik (NM_026185.1,557-575).
gcctcactcgcaatgtact

SEQ ID NO: 722259 - DNA, 19 bp, Mus musculus
  siRNA target sequence for 1300007F04Rik (NM_026185.1,876-894).
cttgccttggccctatgaa

SEQ ID NO: 722260 - DNA, 19 bp, Mus musculus
  siRNA target sequence for 1300007F04Rik (NM_026185.1,986-1004).
gctccctgcgagagtttga

SEQ ID NO: 722261 - DNA, 19 bp, Mus musculus
  siRNA target sequence for 1300007F04Rik (NM_026185.1,1037-1055).
ccatcagctgggataccta

SEQ ID NO: 722262 - DNA, 19 bp, Mus musculus
  siRNA target sequence for 1300013D05Rik (NM_026186.2,297-315).
gggctgtcaagaaaaaaga

SEQ ID NO: 722263 - DNA, 19 bp, Mus musculus
  siRNA target sequence for 1300013D05Rik (NM_026186.2,385-403).
ccccattgacaagtatgtt

SEQ ID NO: 722264 - DNA, 19 bp, Mus musculus
  siRNA target sequence for 1300013D05Rik (NM_026186.2,452-470).
ctcctcccaggctcaatct

SEQ ID NO: 722265 - DNA, 19 bp, Mus musculus
  siRNA target sequence for 1300013D05Rik (NM_026186.2,524-542).
gaccctctcttcatcataa

SEQ ID NO: 722266 - DNA, 19 bp, Mus musculus
  siRNA target sequence for 1300013D05Rik (NM_026186.2,527-545).
cctctcttcatcataagga

SEQ ID NO: 722267 - DNA, 19 bp, Mus musculus
  siRNA target sequence for 1300013D05Rik (NM_026186.2,574-592).
gctgaacaatcctgtgaaa

SEQ ID NO: 722268 - DNA, 19 bp, Mus musculus
  siRNA target sequence for 1300013D05Rik (NM_026186.2,616-634).
gcaaatgagccttgagaaa

SEQ ID NO: 722269 - DNA, 19 bp, Mus musculus
  siRNA target sequence for D1Ertd161e (NM_026187.3,355-373).
ggtccccagtgatgcaaat

SEQ ID NO: 722270 - DNA, 19 bp, Mus musculus
  siRNA target sequence for D1Ertd161e (NM_026187.3,388-406).
ggatgaagaaccactcaaa

SEQ ID NO: 722271 - DNA, 19 bp, Mus musculus
  siRNA target sequence for D1Ertd161e (NM_026187.3,446-464).
gagttggagctagtagaat

SEQ ID NO: 722272 - DNA, 19 bp, Mus musculus
  siRNA target sequence for D1Ertd161e (NM_026187.3,477-495).
ccctggatcttcgtgaatt

SEQ ID NO: 722273 - DNA, 19 bp, Mus musculus
  siRNA target sequence for D1Ertd161e (NM_026187.3,478-496).
cctggatcttcgtgaattt

SEQ ID NO: 722274 - DNA, 19 bp, Mus musculus
  siRNA target sequence for D1Ertd161e (NM_026187.3,623-641).
gttgaaaccccattggata

SEQ ID NO: 722275 - DNA, 19 bp, Mus musculus
  siRNA target sequence for D1Ertd161e (NM_026187.3,626-644).
gaaaccccattggatactt

SEQ ID NO: 722276 - DNA, 19 bp, Mus musculus
  siRNA target sequence for D1Ertd161e (NM_026187.3,705-723).
gtcgtgctggggaagttga

SEQ ID NO: 722277 - DNA, 19 bp, Mus musculus
  siRNA target sequence for D1Ertd161e (NM_026187.3,793-811).
gggctccggtggctttact

SEQ ID NO: 722278 - DNA, 19 bp, Mus musculus
  siRNA target sequence for D1Ertd161e (NM_026187.3,834-852).
ctggaagaggcttagtagt

SEQ ID NO: 722279 - DNA, 19 bp, Mus musculus
  siRNA target sequence for D1Ertd161e (NM_026187.3,840-858).
gaggcttagtagttcgttt

SEQ ID NO: 722280 - DNA, 19 bp, Mus musculus
  siRNA target sequence for D1Ertd161e (NM_026187.3,901-919).
ggctcggccaccttatact

SEQ ID NO: 722281 - DNA, 19 bp, Mus musculus
  siRNA target sequence for D1Ertd161e (NM_026187.3,903-921).
ctcggccaccttatactgt

SEQ ID NO: 722282 - DNA, 19 bp, Mus musculus
  siRNA target sequence for D1Ertd161e (NM_026187.3,931-949).
caaatcaacgcgtaatgaa

SEQ ID NO: 722283 - DNA, 19 bp, Mus musculus
  siRNA target sequence for D1Ertd161e (NM_026187.3,1003-1021).
ggtgccagggccattgact

SEQ ID NO: 722284 - DNA, 19 bp, Mus musculus
  siRNA target sequence for D1Ertd161e (NM_026187.3,1010-1028).
gggccattgactcaagaaa

SEQ ID NO: 722285 - DNA, 19 bp, Mus musculus
  siRNA target sequence for D1Ertd161e (NM_026187.3,1011-1029).
ggccattgactcaagaaat

SEQ ID NO: 722286 - DNA, 19 bp, Mus musculus
  siRNA target sequence for D1Ertd161e (NM_026187.3,1014-1032).
cattgactcaagaaatgga

SEQ ID NO: 722287 - DNA, 19 bp, Mus musculus
  siRNA target sequence for D1Ertd161e (NM_026187.3,1038-1056).
ggcaggctacaaggaaaaa

SEQ ID NO: 722288 - DNA, 19 bp, Mus musculus
  siRNA target sequence for D1Ertd161e (NM_026187.3,1039-1057).
gcaggctacaaggaaaaaa

SEQ ID NO: 722289 - DNA, 19 bp, Mus musculus
  siRNA target sequence for D1Ertd161e (NM_026187.3,1289-1307).
ggcctcattccctttcact

SEQ ID NO: 722290 - DNA, 19 bp, Mus musculus
  siRNA target sequence for D1Ertd161e (NM_026187.3,1304-1322).
cactacctcgacttctctt

SEQ ID NO: 722291 - DNA, 19 bp, Mus musculus
  siRNA target sequence for 1700028P14Rik (NM_026188.1,171-189).
gagcgcaaaggctctctaa

SEQ ID NO: 722292 - DNA, 19 bp, Mus musculus
  siRNA target sequence for 1700028P14Rik (NM_026188.1,173-191).
gcgcaaaggctctctaact

SEQ ID NO: 722293 - DNA, 19 bp, Mus musculus
  siRNA target sequence for 1700028P14Rik (NM_026188.1,194-212).
ccgctcacatcacaagaaa

SEQ ID NO: 722294 - DNA, 19 bp, Mus musculus
  siRNA target sequence for 1700028P14Rik (NM_026188.1,195-213).
cgctcacatcacaagaaat

SEQ ID NO: 722295 - DNA, 19 bp, Mus musculus
  siRNA target sequence for 1700028P14Rik (NM_026188.1,263-281).
ccccaaagattatgatata

SEQ ID NO: 722296 - DNA, 19 bp, Mus musculus
  siRNA target sequence for 1700028P14Rik (NM_026188.1,295-313).
cggtgaaaaacctatgtat

SEQ ID NO: 722297 - DNA, 19 bp, Mus musculus
  siRNA target sequence for 1700028P14Rik (NM_026188.1,358-376).
cggaagcacgtgaacagat

SEQ ID NO: 722298 - DNA, 19 bp, Mus musculus
  siRNA target sequence for 1700028P14Rik (NM_026188.1,378-396).
gcccaagttcttgtaaaca

SEQ ID NO: 722299 - DNA, 19 bp, Mus musculus
  siRNA target sequence for 1700028P14Rik (NM_026188.1,380-398).
ccaagttcttgtaaacaaa

SEQ ID NO: 722300 - DNA, 19 bp, Mus musculus
  siRNA target sequence for 1700028P14Rik (NM_026188.1,490-508).
gctttcgggatgttcctat

SEQ ID NO: 722301 - DNA, 19 bp, Mus musculus
  siRNA target sequence for 1700028P14Rik (NM_026188.1,495-513).
cgggatgttcctatggaat

SEQ ID NO: 722302 - DNA, 19 bp, Mus musculus
  siRNA target sequence for 1700028P14Rik (NM_026188.1,525-543).
ccgagaaaaccgtgttttt

SEQ ID NO: 722303 - DNA, 19 bp, Mus musculus
  siRNA target sequence for 1700028P14Rik (NM_026188.1,536-554).
gtgtttttcgacaacgtat

SEQ ID NO: 722304 - DNA, 19 bp, Mus musculus
  siRNA target sequence for 1700028P14Rik (NM_026188.1,547-565).
caacgtattctgaagattt

SEQ ID NO: 722305 - DNA, 19 bp, Mus musculus
  siRNA target sequence for 1700028P14Rik (NM_026188.1,629-647).
caggaagtgccgttctcaa

SEQ ID NO: 722306 - DNA, 19 bp, Mus musculus
  siRNA target sequence for 1700028P14Rik (NM_026188.1,631-649).
ggaagtgccgttctcaatt

SEQ ID NO: 722307 - DNA, 19 bp, Mus musculus
  siRNA target sequence for 1700028P14Rik (NM_026188.1,635-653).
gtgccgttctcaattcaca

SEQ ID NO: 722308 - DNA, 19 bp, Mus musculus
  siRNA target sequence for 1700028P14Rik (NM_026188.1,692-710).
gcacgatgagagtggaatt

SEQ ID NO: 722309 - DNA, 19 bp, Mus musculus
  siRNA target sequence for 1700028P14Rik (NM_026188.1,693-711).
cacgatgagagtggaattt

SEQ ID NO: 722310 - DNA, 19 bp, Mus musculus
  siRNA target sequence for 1700028P14Rik (NM_026188.1,695-713).
cgatgagagtggaatttat

SEQ ID NO: 722311 - DNA, 19 bp, Mus musculus
  siRNA target sequence for 1700028P14Rik (NM_026188.1,699-717).
gagagtggaatttatgcta

SEQ ID NO: 722312 - DNA, 19 bp, Mus musculus
  siRNA target sequence for 1700028P14Rik (NM_026188.1,740-758).
ctacgcattggctagaaat

SEQ ID NO: 722313 - DNA, 19 bp, Mus musculus
  siRNA target sequence for 1700028P14Rik (NM_026188.1,743-761).
cgcattggctagaaatcct

SEQ ID NO: 722314 - DNA, 19 bp, Mus musculus
  siRNA target sequence for 1700028P14Rik (NM_026188.1,744-762).
gcattggctagaaatccta

SEQ ID NO: 722315 - DNA, 19 bp, Mus musculus
  siRNA target sequence for 1700028P14Rik (NM_026188.1,745-763).
cattggctagaaatcctat

SEQ ID NO: 722316 - DNA, 19 bp, Mus musculus
  siRNA target sequence for 1810009B06Rik (NM_026192.1,88-106).
gagtcaacttcctgaatgt

SEQ ID NO: 722317 - DNA, 19 bp, Mus musculus
  siRNA target sequence for 1810009B06Rik (NM_026192.1,135-153).
gtggaatgtcactacactt

SEQ ID NO: 722318 - DNA, 19 bp, Mus musculus
  siRNA target sequence for 1810009B06Rik (NM_026192.1,214-232).
cctgcgttcgagattatca

SEQ ID NO: 722319 - DNA, 19 bp, Mus musculus
  siRNA target sequence for 1810009B06Rik (NM_026192.1,245-263).
gtcctcagtgccagaaagt

SEQ ID NO: 722320 - DNA, 19 bp, Mus musculus
  siRNA target sequence for 1810009B06Rik (NM_026192.1,254-272).
gccagaaagtacaactgat

SEQ ID NO: 722321 - DNA, 19 bp, Mus musculus
  siRNA target sequence for 1810009B06Rik (NM_026192.1,283-301).
cccatgccagtgtccaatt

SEQ ID NO: 722322 - DNA, 19 bp, Mus musculus
  siRNA target sequence for 1810009B06Rik (NM_026192.1,769-787).
gtgacaaagtgctgatgaa

SEQ ID NO: 722323 - DNA, 19 bp, Mus musculus
  siRNA target sequence for 1810009B06Rik (NM_026192.1,890-908).
gagtgaggctgaattacaa

SEQ ID NO: 722324 - DNA, 19 bp, Mus musculus
  siRNA target sequence for 1810009B06Rik (NM_026192.1,920-938).
ggagaactgctgcttaaat

SEQ ID NO: 722325 - DNA, 19 bp, Mus musculus
  siRNA target sequence for 1810009B06Rik (NM_026192.1,921-939).
gagaactgctgcttaaata

SEQ ID NO: 722326 - DNA, 19 bp, Mus musculus
  siRNA target sequence for 1810009B06Rik (NM_026192.1,955-973).
ccaagagccggcaagaaga

SEQ ID NO: 722327 - DNA, 19 bp, Mus musculus
  siRNA target sequence for 1810009B06Rik (NM_026192.1,1169-1187).
ccgaaccatagctgaacta

SEQ ID NO: 722328 - DNA, 19 bp, Mus musculus
  siRNA target sequence for 1810009B06Rik (NM_026192.1,1381-1399).
cccagagtcacgtgttcaa

SEQ ID NO: 722329 - DNA, 19 bp, Mus musculus
  siRNA target sequence for 1810009B06Rik (NM_026192.1,1410-1428).
gcccgagaaaaggattcta

SEQ ID NO: 722330 - DNA, 19 bp, Mus musculus
  siRNA target sequence for 1810009B06Rik (NM_026192.1,1685-1703).
catgcggctcccatcctat

SEQ ID NO: 722331 - DNA, 19 bp, Mus musculus
  siRNA target sequence for 1810009B06Rik (NM_026192.1,1745-1763).
gcctcgggagccttcttct

SEQ ID NO: 722332 - DNA, 19 bp, Mus musculus
  siRNA target sequence for 1810009B06Rik (NM_026192.1,1759-1777).
cttctcttgttgtcatcaa

SEQ ID NO: 722333 - DNA, 19 bp, Mus musculus
  siRNA target sequence for 1810009B06Rik (NM_026192.1,1916-1934).
gctcggcagtgccttctat

SEQ ID NO: 722334 - DNA, 19 bp, Mus musculus
  siRNA target sequence for 1810038H16Rik (NM_026193.1,482-500).
ggccagtgccactgtagat

SEQ ID NO: 722335 - DNA, 19 bp, Mus musculus
  siRNA target sequence for 1810038H16Rik (NM_026193.1,533-551).
gggcacatacgcaccttta

SEQ ID NO: 722336 - DNA, 19 bp, Mus musculus
  siRNA target sequence for 1810038H16Rik (NM_026193.1,534-552).
ggcacatacgcacctttaa

SEQ ID NO: 722337 - DNA, 19 bp, Mus musculus
  siRNA target sequence for 1810038H16Rik (NM_026193.1,564-582).
gcactcttggccatcaata

SEQ ID NO: 722338 - DNA, 19 bp, Mus musculus
  siRNA target sequence for 1810038H16Rik (NM_026193.1,627-645).
ctggcactacggagtatgt

SEQ ID NO: 722339 - DNA, 19 bp, Mus musculus
  siRNA target sequence for 1810038H16Rik (NM_026193.1,629-647).
ggcactacggagtatgtgt

SEQ ID NO: 722340 - DNA, 19 bp, Mus musculus
  siRNA target sequence for 1810038H16Rik (NM_026193.1,630-648).
gcactacggagtatgtgta

SEQ ID NO: 722341 - DNA, 19 bp, Mus musculus
  siRNA target sequence for 1810038H16Rik (NM_026193.1,659-677).
gcctggtgtgcaggaatat

SEQ ID NO: 722342 - DNA, 19 bp, Mus musculus
  siRNA target sequence for 1810038H16Rik (NM_026193.1,660-678).
cctggtgtgcaggaatata

SEQ ID NO: 722343 - DNA, 19 bp, Mus musculus
  siRNA target sequence for 1810038H16Rik (NM_026193.1,661-679).
ctggtgtgcaggaatatat

SEQ ID NO: 722344 - DNA, 19 bp, Mus musculus
  siRNA target sequence for 1810038H16Rik (NM_026193.1,698-716).
cggtctgcgtgataaagct

SEQ ID NO: 722345 - DNA, 19 bp, Mus musculus
  siRNA target sequence for 1810038H16Rik (NM_026193.1,699-717).
ggtctgcgtgataaagctt

SEQ ID NO: 722346 - DNA, 19 bp, Mus musculus
  siRNA target sequence for 1810038H16Rik (NM_026193.1,704-722).
gcgtgataaagcttcatat

SEQ ID NO: 722347 - DNA, 19 bp, Mus musculus
  siRNA target sequence for 1810038H16Rik (NM_026193.1,706-724).
gtgataaagcttcatatgt

SEQ ID NO: 722348 - DNA, 19 bp, Mus musculus
  siRNA target sequence for 1810038H16Rik (NM_026193.1,708-726).
gataaagcttcatatgtca

SEQ ID NO: 722349 - DNA, 19 bp, Mus musculus
  siRNA target sequence for 1810038H16Rik (NM_026193.1,743-761).
cggctgtgccaaaatgcat

SEQ ID NO: 722350 - DNA, 19 bp, Mus musculus
  siRNA target sequence for 1810038H16Rik (NM_026193.1,744-762).
ggctgtgccaaaatgcata

SEQ ID NO: 722351 - DNA, 19 bp, Mus musculus
  siRNA target sequence for 1810038H16Rik (NM_026193.1,745-763).
gctgtgccaaaatgcataa

SEQ ID NO: 722352 - DNA, 19 bp, Mus musculus
  siRNA target sequence for 1810038H16Rik (NM_026193.1,789-807).
ggtgctctcgtcaatgagt

SEQ ID NO: 722353 - DNA, 19 bp, Mus musculus
  siRNA target sequence for 1810038H16Rik (NM_026193.1,790-808).
gtgctctcgtcaatgagtt

SEQ ID NO: 722354 - DNA, 19 bp, Mus musculus
  siRNA target sequence for 1810038H16Rik (NM_026193.1,793-811).
ctctcgtcaatgagttgta

SEQ ID NO: 722355 - DNA, 19 bp, Mus musculus
  siRNA target sequence for 1810038H16Rik (NM_026193.1,795-813).
ctcgtcaatgagttgtaca

SEQ ID NO: 722356 - DNA, 19 bp, Mus musculus
  siRNA target sequence for 1810038H16Rik (NM_026193.1,1000-1018).
gcagtgaggaggaactgtt

SEQ ID NO: 722357 - DNA, 19 bp, Mus musculus
  siRNA target sequence for 1810038H16Rik (NM_026193.1,1076-1094).
gggagccaccaaactcttt

SEQ ID NO: 722358 - DNA, 19 bp, Mus musculus
  siRNA target sequence for 1810038H16Rik (NM_026193.1,1078-1096).
gagccaccaaactctttct

SEQ ID NO: 722359 - DNA, 19 bp, Mus musculus
  siRNA target sequence for 1810038H16Rik (NM_026193.1,1080-1098).
gccaccaaactctttctga

SEQ ID NO: 722360 - DNA, 19 bp, Mus musculus
  siRNA target sequence for 1810038H16Rik (NM_026193.1,1081-1099).
ccaccaaactctttctgat

SEQ ID NO: 722361 - DNA, 19 bp, Mus musculus
  siRNA target sequence for 1810038H16Rik (NM_026193.1,1082-1100).
caccaaactctttctgatt

SEQ ID NO: 722362 - DNA, 19 bp, Mus musculus
  siRNA target sequence for 1810038H16Rik (NM_026193.1,1232-1250).
cagtttgccaggtcacttt

SEQ ID NO: 722363 - DNA, 19 bp, Mus musculus
  siRNA target sequence for 1810038H16Rik (NM_026193.1,1285-1303).
cggaaccccactacatcaa

SEQ ID NO: 722364 - DNA, 19 bp, Mus musculus
  siRNA target sequence for 1810038H16Rik (NM_026193.1,1445-1463).
gacttacacagatcaatgt

SEQ ID NO: 722365 - DNA, 19 bp, Mus musculus
  siRNA target sequence for 1810038H16Rik (NM_026193.1,1533-1551).
cgagacctggtctggttat

SEQ ID NO: 722366 - DNA, 19 bp, Mus musculus
  siRNA target sequence for 1810038H16Rik (NM_026193.1,1619-1637).
ggggaaacaggcacttatt

SEQ ID NO: 722367 - DNA, 19 bp, Mus musculus
  siRNA target sequence for 1810038H16Rik (NM_026193.1,1628-1646).
ggcacttatttggttactt

SEQ ID NO: 722368 - DNA, 19 bp, Mus musculus
  siRNA target sequence for 1810038H16Rik (NM_026193.1,1720-1738).
catttcccgctgttaagat

SEQ ID NO: 722369 - DNA, 19 bp, Mus musculus
  siRNA target sequence for 1810038H16Rik (NM_026193.1,1887-1905).
gttggcattgataaagtta

SEQ ID NO: 722370 - DNA, 19 bp, Mus musculus
  siRNA target sequence for 1810038H16Rik (NM_026193.1,1891-1909).
gcattgataaagttaagca

SEQ ID NO: 722371 - DNA, 19 bp, Mus musculus
  siRNA target sequence for 1810038H16Rik (NM_026193.1,1961-1979).
gccggaacgaccagtaaat

SEQ ID NO: 722372 - DNA, 19 bp, Mus musculus
  siRNA target sequence for 1810038H16Rik (NM_026193.1,1962-1980).
ccggaacgaccagtaaata

SEQ ID NO: 722373 - DNA, 19 bp, Mus musculus
  siRNA target sequence for 1810038H16Rik (NM_026193.1,1965-1983).
gaacgaccagtaaatagct

SEQ ID NO: 722374 - DNA, 19 bp, Mus musculus
  siRNA target sequence for 1810038H16Rik (NM_026193.1,2000-2018).
cacactggcgccagtgtat

SEQ ID NO: 722375 - DNA, 19 bp, Mus musculus
  siRNA target sequence for 1810038H16Rik (NM_026193.1,2023-2041).
gagcccactgggcaactat

SEQ ID NO: 722376 - DNA, 19 bp, Mus musculus
  siRNA target sequence for 1810038H16Rik (NM_026193.1,2101-2119).
ccacatcagggcacttgat

SEQ ID NO: 722377 - DNA, 19 bp, Mus musculus
  siRNA target sequence for 1810038H16Rik (NM_026193.1,2102-2120).
cacatcagggcacttgatt

SEQ ID NO: 722378 - DNA, 19 bp, Mus musculus
  siRNA target sequence for 1810038H16Rik (NM_026193.1,2117-2135).
gatttccgaggagaacaaa

SEQ ID NO: 722379 - DNA, 19 bp, Mus musculus
  siRNA target sequence for 1810038H16Rik (NM_026193.1,2219-2237).
gcttagcctcagagttagt

SEQ ID NO: 722380 - DNA, 19 bp, Mus musculus
  siRNA target sequence for 1810038H16Rik (NM_026193.1,2514-2532).
gttggagacataaaatctt

SEQ ID NO: 722381 - DNA, 19 bp, Mus musculus
  siRNA target sequence for 1810074P20Rik (NM_026194.2,101-119).
gcggaactgcattgagatt

SEQ ID NO: 722382 - DNA, 19 bp, Mus musculus
  siRNA target sequence for 1810074P20Rik (NM_026194.2,114-132).
gagattgtgaataaattga

SEQ ID NO: 722383 - DNA, 19 bp, Mus musculus
  siRNA target sequence for 1810074P20Rik (NM_026194.2,168-186).
gacggcaaggaatatatca

SEQ ID NO: 722384 - DNA, 19 bp, Mus musculus
  siRNA target sequence for 1810074P20Rik (NM_026194.2,170-188).
cggcaaggaatatatcact

SEQ ID NO: 722385 - DNA, 19 bp, Mus musculus
  siRNA target sequence for 1810074P20Rik (NM_026194.2,231-249).
cgaggtggtcgagtaaaca

SEQ ID NO: 722386 - DNA, 19 bp, Mus musculus
  siRNA target sequence for 1810074P20Rik (NM_026194.2,232-250).
gaggtggtcgagtaaacat

SEQ ID NO: 722387 - DNA, 19 bp, Mus musculus
  siRNA target sequence for 1810074P20Rik (NM_026194.2,235-253).
gtggtcgagtaaacattgt

SEQ ID NO: 722388 - DNA, 19 bp, Mus musculus
  siRNA target sequence for 1810074P20Rik (NM_026194.2,238-256).
gtcgagtaaacattgttga

SEQ ID NO: 722389 - DNA, 19 bp, Mus musculus
  siRNA target sequence for 1810074P20Rik (NM_026194.2,296-314).
gagtagagtcagtgatatt

SEQ ID NO: 722390 - DNA, 19 bp, Mus musculus
  siRNA target sequence for 1810074P20Rik (NM_026194.2,307-325).
gtgatattattaaatcaga

SEQ ID NO: 722391 - DNA, 19 bp, Mus musculus
  siRNA target sequence for 1810074P20Rik (NM_026194.2,341-359).
ggtactgggacaactgatt

SEQ ID NO: 722392 - DNA, 19 bp, Mus musculus
  siRNA target sequence for 1810074P20Rik (NM_026194.2,349-367).
gacaactgattgatgagaa

SEQ ID NO: 722393 - DNA, 19 bp, Mus musculus
  siRNA target sequence for 1810074P20Rik (NM_026194.2,365-383).
gaactatctggatcagtta

SEQ ID NO: 722394 - DNA, 19 bp, Mus musculus
  siRNA target sequence for 1810074P20Rik (NM_026194.2,407-425).
gcaagaaagtggtcaagta

SEQ ID NO: 722395 - DNA, 19 bp, Mus musculus
  siRNA target sequence for 1810074P20Rik (NM_026194.2,492-510).
cgacttggccggattatca

SEQ ID NO: 722396 - DNA, 19 bp, Mus musculus
  siRNA target sequence for 1810074P20Rik (NM_026194.2,493-511).
gacttggccggattatcaa

SEQ ID NO: 722397 - DNA, 19 bp, Mus musculus
  siRNA target sequence for 1810074P20Rik (NM_026194.2,513-531).
ggccatctggaccttgata

SEQ ID NO: 722398 - DNA, 19 bp, Mus musculus
  siRNA target sequence for 1810074P20Rik (NM_026194.2,514-532).
gccatctggaccttgataa

SEQ ID NO: 722399 - DNA, 19 bp, Mus musculus
  siRNA target sequence for 1810074P20Rik (NM_026194.2,516-534).
catctggaccttgataaca

SEQ ID NO: 722400 - DNA, 19 bp, Mus musculus
  siRNA target sequence for 1810074P20Rik (NM_026194.2,557-575).
ctttgtagctcgccataaa

SEQ ID NO: 722401 - DNA, 19 bp, Mus musculus
  siRNA target sequence for 1810074P20Rik (NM_026194.2,612-630).
cctacaccagtgaactctt

SEQ ID NO: 722402 - DNA, 19 bp, Mus musculus
  siRNA target sequence for 1810074P20Rik (NM_026194.2,613-631).
ctacaccagtgaactcttt

SEQ ID NO: 722403 - DNA, 19 bp, Mus musculus
  siRNA target sequence for 1810074P20Rik (NM_026194.2,618-636).
ccagtgaactctttggttt

SEQ ID NO: 722404 - DNA, 19 bp, Mus musculus
  siRNA target sequence for 1810074P20Rik (NM_026194.2,778-796).
cttgggtggactccttttt

SEQ ID NO: 722405 - DNA, 19 bp, Mus musculus
  siRNA target sequence for 1810074P20Rik (NM_026194.2,799-817).
ggcagaatggctatctaga

SEQ ID NO: 722406 - DNA, 19 bp, Mus musculus
  siRNA target sequence for 1810074P20Rik (NM_026194.2,800-818).
gcagaatggctatctagaa

SEQ ID NO: 722407 - DNA, 19 bp, Mus musculus
  siRNA target sequence for 1810074P20Rik (NM_026194.2,803-821).
gaatggctatctagaattt

SEQ ID NO: 722408 - DNA, 19 bp, Mus musculus
  siRNA target sequence for 1810074P20Rik (NM_026194.2,813-831).
ctagaatttgacgctttat

SEQ ID NO: 722409 - DNA, 19 bp, Mus musculus
  siRNA target sequence for 1810074P20Rik (NM_026194.2,816-834).
gaatttgacgctttatcca

SEQ ID NO: 722410 - DNA, 19 bp, Mus musculus
  siRNA target sequence for 1810074P20Rik (NM_026194.2,846-864).
ccagatgctgtgaactata

SEQ ID NO: 722411 - DNA, 19 bp, Mus musculus
  siRNA target sequence for 1810074P20Rik (NM_026194.2,860-878).
ctatataaagaaaaggtat

SEQ ID NO: 722412 - DNA, 19 bp, Mus musculus
  siRNA target sequence for 1810074P20Rik (NM_026194.2,886-904).
cccaactcttgtttttgaa

SEQ ID NO: 722413 - DNA, 19 bp, Mus musculus
  siRNA target sequence for 1810074P20Rik (NM_026194.2,896-914).
gtttttgaaggcaacttgt

SEQ ID NO: 722414 - DNA, 19 bp, Mus musculus
  siRNA target sequence for 1810074P20Rik (NM_026194.2,970-988).
cagggacctgggttgacat

SEQ ID NO: 722415 - DNA, 19 bp, Mus musculus
  siRNA target sequence for 1810074P20Rik (NM_026194.2,972-990).
gggacctgggttgacattt

SEQ ID NO: 722416 - DNA, 19 bp, Mus musculus
  siRNA target sequence for 1810074P20Rik (NM_026194.2,1068-1086).
ctcgcttcagctatagtct

SEQ ID NO: 722417 - DNA, 19 bp, Mus musculus
  siRNA target sequence for 1810074P20Rik (NM_026194.2,1070-1088).
cgcttcagctatagtcttt

SEQ ID NO: 722418 - DNA, 19 bp, Mus musculus
  siRNA target sequence for 1810074P20Rik (NM_026194.2,1071-1089).
gcttcagctatagtcttta

SEQ ID NO: 722419 - DNA, 19 bp, Mus musculus
  siRNA target sequence for 1810074P20Rik (NM_026194.2,1075-1093).
cagctatagtctttagtga

SEQ ID NO: 722420 - DNA, 19 bp, Mus musculus
  siRNA target sequence for 1810074P20Rik (NM_026194.2,1098-1116).
gttgtggtgagtgaaaagt

SEQ ID NO: 722421 - DNA, 19 bp, Mus musculus
  siRNA target sequence for 1810074P20Rik (NM_026194.2,1101-1119).
gtggtgagtgaaaagttca

SEQ ID NO: 722422 - DNA, 19 bp, Mus musculus
  siRNA target sequence for 1810074P20Rik (NM_026194.2,1103-1121).
ggtgagtgaaaagttcata

SEQ ID NO: 722423 - DNA, 19 bp, Mus musculus
  siRNA target sequence for 1810074P20Rik (NM_026194.2,1209-1227).
gaagatctgaaacaaattt

SEQ ID NO: 722424 - DNA, 19 bp, Mus musculus
  siRNA target sequence for 1810074P20Rik (NM_026194.2,1295-1313).
gggctctggaagtgtaaga

SEQ ID NO: 722425 - DNA, 19 bp, Mus musculus
  siRNA target sequence for 1810074P20Rik (NM_026194.2,1428-1446).
ccggacatcacattcatgt

SEQ ID NO: 722426 - DNA, 19 bp, Mus musculus
  siRNA target sequence for 1810074P20Rik (NM_026194.2,1491-1509).
gcccctgaggagtttattt

SEQ ID NO: 722427 - DNA, 19 bp, Mus musculus
  siRNA target sequence for 1810074P20Rik (NM_026194.2,1514-1532).
gcttgcagaatacttaata

SEQ ID NO: 722428 - DNA, 19 bp, Mus musculus
  siRNA target sequence for 1810074P20Rik (NM_026194.2,1606-1624).
gcagaaaacgcacaatcaa

SEQ ID NO: 722429 - DNA, 19 bp, Mus musculus
  siRNA target sequence for 1810074P20Rik (NM_026194.2,1635-1653).
gaagaggtttcaaacctat

SEQ ID NO: 722430 - DNA, 19 bp, Mus musculus
  siRNA target sequence for 1810074P20Rik (NM_026194.2,1638-1656).
gaggtttcaaacctataca

SEQ ID NO: 722431 - DNA, 19 bp, Mus musculus
  siRNA target sequence for 1810074P20Rik (NM_026194.2,1640-1658).
ggtttcaaacctatacaat

SEQ ID NO: 722432 - DNA, 19 bp, Mus musculus
  siRNA target sequence for 1810074P20Rik (NM_026194.2,1641-1659).
gtttcaaacctatacaata

SEQ ID NO: 722433 - DNA, 19 bp, Mus musculus
  siRNA target sequence for 1810074P20Rik (NM_026194.2,1740-1758).
gtgtgtaccgatatcacta

SEQ ID NO: 722434 - DNA, 19 bp, Mus musculus
  siRNA target sequence for 1810074P20Rik (NM_026194.2,1756-1774).
ctaacctcatgttcaactt

SEQ ID NO: 722435 - DNA, 19 bp, Mus musculus
  siRNA target sequence for 1810074P20Rik (NM_026194.2,1806-1824).
gagcctgcagccattacaa

SEQ ID NO: 722436 - DNA, 19 bp, Mus musculus
  siRNA target sequence for 1810074P20Rik (NM_026194.2,1812-1830).
gcagccattacaagtgata

SEQ ID NO: 722437 - DNA, 19 bp, Mus musculus
  siRNA target sequence for 1810074P20Rik (NM_026194.2,1813-1831).
cagccattacaagtgatat

SEQ ID NO: 722438 - DNA, 19 bp, Mus musculus
  siRNA target sequence for 1810074P20Rik (NM_026194.2,1867-1885).
ccaaagtagctctcacaaa

SEQ ID NO: 722439 - DNA, 19 bp, Mus musculus
  siRNA target sequence for 1810074P20Rik (NM_026194.2,1868-1886).
caaagtagctctcacaaaa

SEQ ID NO: 722440 - DNA, 19 bp, Mus musculus
  siRNA target sequence for 2810013M15Rik (NM_026197.1,183-201).
cgcatatctggcatctaaa

SEQ ID NO: 722441 - DNA, 19 bp, Mus musculus
  siRNA target sequence for 2810013M15Rik (NM_026197.1,184-202).
gcatatctggcatctaaat

SEQ ID NO: 722442 - DNA, 19 bp, Mus musculus
  siRNA target sequence for 2810013M15Rik (NM_026197.1,185-203).
catatctggcatctaaata

SEQ ID NO: 722443 - DNA, 19 bp, Mus musculus
  siRNA target sequence for 2810013M15Rik (NM_026197.1,242-260).
ggagagtaagtcttaattt

SEQ ID NO: 722444 - DNA, 19 bp, Mus musculus
  siRNA target sequence for 2810013M15Rik (NM_026197.1,277-295).
gtcagagctctgacttgta

SEQ ID NO: 722445 - DNA, 19 bp, Mus musculus
  siRNA target sequence for 2810013M15Rik (NM_026197.1,356-374).
cagtccccttgagacttaa

SEQ ID NO: 722446 - DNA, 19 bp, Mus musculus
  siRNA target sequence for 2810013M15Rik (NM_026197.1,361-379).
cccttgagacttaactata

SEQ ID NO: 722447 - DNA, 19 bp, Mus musculus
  siRNA target sequence for 2810013M15Rik (NM_026197.1,362-380).
ccttgagacttaactatat

SEQ ID NO: 722448 - DNA, 19 bp, Mus musculus
  siRNA target sequence for 2810013M15Rik (NM_026197.1,363-381).
cttgagacttaactatatt

SEQ ID NO: 722449 - DNA, 19 bp, Mus musculus
  siRNA target sequence for 2810013M15Rik (NM_026197.1,382-400).
cactgggtagaagatttga

SEQ ID NO: 722450 - DNA, 19 bp, Mus musculus
  siRNA target sequence for 2810013M15Rik (NM_026197.1,384-402).
ctgggtagaagatttgatt

SEQ ID NO: 722451 - DNA, 19 bp, Mus musculus
  siRNA target sequence for 2810013M15Rik (NM_026197.1,406-424).
caccaggattcggacaaaa

SEQ ID NO: 722452 - DNA, 19 bp, Mus musculus
  siRNA target sequence for 2810013M15Rik (NM_026197.1,408-426).
ccaggattcggacaaaact

SEQ ID NO: 722453 - DNA, 19 bp, Mus musculus
  siRNA target sequence for 2810013M15Rik (NM_026197.1,409-427).
caggattcggacaaaacta

SEQ ID NO: 722454 - DNA, 19 bp, Mus musculus
  siRNA target sequence for 2810013M15Rik (NM_026197.1,411-429).
ggattcggacaaaactact

SEQ ID NO: 722455 - DNA, 19 bp, Mus musculus
  siRNA target sequence for 2810013M15Rik (NM_026197.1,432-450).
ccgaagaggaattgacata

SEQ ID NO: 722456 - DNA, 19 bp, Mus musculus
  siRNA target sequence for 2810013M15Rik (NM_026197.1,477-495).
cttacttggagcaacctta

SEQ ID NO: 722457 - DNA, 19 bp, Mus musculus
  siRNA target sequence for 2810013M15Rik (NM_026197.1,515-533).
caacagaagtggatgatat

SEQ ID NO: 722458 - DNA, 19 bp, Mus musculus
  siRNA target sequence for 2810013M15Rik (NM_026197.1,520-538).
gaagtggatgatatgtgtt

SEQ ID NO: 722459 - DNA, 19 bp, Mus musculus
  siRNA target sequence for 2810013M15Rik (NM_026197.1,559-577).
gtagagcagaataacctat

SEQ ID NO: 722460 - DNA, 19 bp, Mus musculus
  siRNA target sequence for 2810013M15Rik (NM_026197.1,573-591).
cctatctgatctcattaaa

SEQ ID NO: 722461 - DNA, 19 bp, Mus musculus
  siRNA target sequence for 2810013M15Rik (NM_026197.1,737-755).
ctccacctagttctgtaaa

SEQ ID NO: 722462 - DNA, 19 bp, Mus musculus
  siRNA target sequence for 2810013M15Rik (NM_026197.1,739-757).
ccacctagttctgtaaaca

SEQ ID NO: 722463 - DNA, 19 bp, Mus musculus
  siRNA target sequence for 2810013M15Rik (NM_026197.1,784-802).
gaaggaggtgagctagaat

SEQ ID NO: 722464 - DNA, 19 bp, Mus musculus
  siRNA target sequence for 2810013M15Rik (NM_026197.1,911-929).
gaatccaaggggttcctaa

SEQ ID NO: 722465 - DNA, 19 bp, Mus musculus
  siRNA target sequence for 2810013M15Rik (NM_026197.1,916-934).
caaggggttcctaaagtca

SEQ ID NO: 722466 - DNA, 19 bp, Mus musculus
  siRNA target sequence for 2810013M15Rik (NM_026197.1,1022-1040).
gtaaacgaagaaaattaga

SEQ ID NO: 722467 - DNA, 19 bp, Mus musculus
  siRNA target sequence for 2810013M15Rik (NM_026197.1,1075-1093).
gagtctgtgatgaaagaat

SEQ ID NO: 722468 - DNA, 19 bp, Mus musculus
  siRNA target sequence for 2810013M15Rik (NM_026197.1,1135-1153).
ggcatagtggttgtaacaa

SEQ ID NO: 722469 - DNA, 19 bp, Mus musculus
  siRNA target sequence for 2810013M15Rik (NM_026197.1,1147-1165).
gtaacaacatggatagaaa

SEQ ID NO: 722470 - DNA, 19 bp, Mus musculus
  siRNA target sequence for 2810013M15Rik (NM_026197.1,1177-1195).
gatctgaaggtgcaacata

SEQ ID NO: 722471 - DNA, 19 bp, Mus musculus
  siRNA target sequence for 2810013M15Rik (NM_026197.1,1236-1254).
gacagccatagaaaactct

SEQ ID NO: 722472 - DNA, 19 bp, Mus musculus
  siRNA target sequence for 2810013M15Rik (NM_026197.1,1412-1430).
ccctgtgtgggcttgatgt

SEQ ID NO: 722473 - DNA, 19 bp, Mus musculus
  siRNA target sequence for 2810013M15Rik (NM_026197.1,1631-1649).
ccggacgctacctgtttaa

SEQ ID NO: 722474 - DNA, 19 bp, Mus musculus
  siRNA target sequence for 2810013M15Rik (NM_026197.1,1633-1651).
ggacgctacctgtttaagt

SEQ ID NO: 722475 - DNA, 19 bp, Mus musculus
  siRNA target sequence for 2810013M15Rik (NM_026197.1,1678-1696).
ggcgatgccgtggttgaaa

SEQ ID NO: 722476 - DNA, 19 bp, Mus musculus
  siRNA target sequence for 2810013M15Rik (NM_026197.1,1679-1697).
gcgatgccgtggttgaaat

SEQ ID NO: 722477 - DNA, 19 bp, Mus musculus
  siRNA target sequence for 2810013M15Rik (NM_026197.1,1712-1730).
gccagaatagggatttgat

SEQ ID NO: 722478 - DNA, 19 bp, Mus musculus
  siRNA target sequence for 2810013M15Rik (NM_026197.1,1714-1732).
cagaatagggatttgatga

SEQ ID NO: 722479 - DNA, 19 bp, Mus musculus
  siRNA target sequence for 2810013M15Rik (NM_026197.1,1734-1752).
ccagctttgcacttacgta

SEQ ID NO: 722480 - DNA, 19 bp, Mus musculus
  siRNA target sequence for 2810013M15Rik (NM_026197.1,1743-1761).
cacttacgtacgtaaccaa

SEQ ID NO: 722481 - DNA, 19 bp, Mus musculus
  siRNA target sequence for 2810013M15Rik (NM_026197.1,1745-1763).
cttacgtacgtaaccaaat

SEQ ID NO: 722482 - DNA, 19 bp, Mus musculus
  siRNA target sequence for 2810013M15Rik (NM_026197.1,1750-1768).
gtacgtaaccaaattttga

SEQ ID NO: 722483 - DNA, 19 bp, Mus musculus
  siRNA target sequence for 2010200O16Rik (NM_026198.1,174-192).
gaaagtacctcgtctcaaa

SEQ ID NO: 722484 - DNA, 19 bp, Mus musculus
  siRNA target sequence for 2010200O16Rik (NM_026198.1,222-240).
gtggggtgtattctacaaa

SEQ ID NO: 722485 - DNA, 19 bp, Mus musculus
  siRNA target sequence for 2010200O16Rik (NM_026198.1,264-282).
gcatgctgctgttgcaatt

SEQ ID NO: 722486 - DNA, 19 bp, Mus musculus
  siRNA target sequence for 2010200O16Rik (NM_026198.1,298-316).
gccttttacgtcctgttta

SEQ ID NO: 722487 - DNA, 19 bp, Mus musculus
  siRNA target sequence for 2610529H08Rik (NM_026202.1,691-709).
gagcgagaaaagtcatctt

SEQ ID NO: 722488 - DNA, 19 bp, Mus musculus
  siRNA target sequence for 2610529H08Rik (NM_026202.1,727-745).
gaccctgaatgcaagttaa

SEQ ID NO: 722489 - DNA, 19 bp, Mus musculus
  siRNA target sequence for 2610529H08Rik (NM_026202.1,749-767).
caaagtcagcccactcaaa

SEQ ID NO: 722490 - DNA, 19 bp, Mus musculus
  siRNA target sequence for 2610529H08Rik (NM_026202.1,753-771).
gtcagcccactcaaagtca

SEQ ID NO: 722491 - DNA, 19 bp, Mus musculus
  siRNA target sequence for 2610529H08Rik (NM_026202.1,755-773).
cagcccactcaaagtcaaa

SEQ ID NO: 722492 - DNA, 19 bp, Mus musculus
  siRNA target sequence for 2610529H08Rik (NM_026202.1,788-806).
cacaccgctccaagattga

SEQ ID NO: 722493 - DNA, 19 bp, Mus musculus
  siRNA target sequence for 2610529H08Rik (NM_026202.1,790-808).
caccgctccaagattgaca

SEQ ID NO: 722494 - DNA, 19 bp, Mus musculus
  siRNA target sequence for 2610529H08Rik (NM_026202.1,929-947).
ccataacaagcagtaaaat

SEQ ID NO: 722495 - DNA, 19 bp, Mus musculus
  siRNA target sequence for 2610529H08Rik (NM_026202.1,964-982).
gatcggcctcgaaaatgga

SEQ ID NO: 722496 - DNA, 19 bp, Mus musculus
  siRNA target sequence for Ahi1 (NM_026203.1,284-302).
ggattctgcacaagagaaa

SEQ ID NO: 722497 - DNA, 19 bp, Mus musculus
  siRNA target sequence for Ahi1 (NM_026203.1,314-332).
gaccccgacagcagatgat

SEQ ID NO: 722498 - DNA, 19 bp, Mus musculus
  siRNA target sequence for Ahi1 (NM_026203.1,475-493).
ctccagacactctattgca

SEQ ID NO: 722499 - DNA, 19 bp, Mus musculus
  siRNA target sequence for Ahi1 (NM_026203.1,500-518).
caagctggccagtgaaaaa

SEQ ID NO: 722500 - DNA, 19 bp, Mus musculus
  siRNA target sequence for Ahi1 (NM_026203.1,768-786).
gatggtgttcatgagataa

SEQ ID NO: 722501 - DNA, 19 bp, Mus musculus
  siRNA target sequence for Ahi1 (NM_026203.1,771-789).
ggtgttcatgagataacaa

SEQ ID NO: 722502 - DNA, 19 bp, Mus musculus
  siRNA target sequence for Ahi1 (NM_026203.1,791-809).
ccgagacagcccagttcat

SEQ ID NO: 722503 - DNA, 19 bp, Mus musculus
  siRNA target sequence for Ahi1 (NM_026203.1,855-873).
caccgaaccgatagactta

SEQ ID NO: 722504 - DNA, 19 bp, Mus musculus
  siRNA target sequence for Ahi1 (NM_026203.1,858-876).
cgaaccgatagacttaaat

SEQ ID NO: 722505 - DNA, 19 bp, Mus musculus
  siRNA target sequence for Ahi1 (NM_026203.1,862-880).
ccgatagacttaaatctga

SEQ ID NO: 722506 - DNA, 19 bp, Mus musculus
  siRNA target sequence for Ahi1 (NM_026203.1,877-895).
ctgactttatgatttctca

SEQ ID NO: 722507 - DNA, 19 bp, Mus musculus
  siRNA target sequence for Ahi1 (NM_026203.1,934-952).
gccagtacgtcaagaaaga

SEQ ID NO: 722508 - DNA, 19 bp, Mus musculus
  siRNA target sequence for Ahi1 (NM_026203.1,960-978).
gaacgtcctgtttcatctt

SEQ ID NO: 722509 - DNA, 19 bp, Mus musculus
  siRNA target sequence for Ahi1 (NM_026203.1,963-981).
cgtcctgtttcatcttatt

SEQ ID NO: 722510 - DNA, 19 bp, Mus musculus
  siRNA target sequence for Ahi1 (NM_026203.1,964-982).
gtcctgtttcatcttatta

SEQ ID NO: 722511 - DNA, 19 bp, Mus musculus
  siRNA target sequence for Ahi1 (NM_026203.1,967-985).
ctgtttcatcttattatga

SEQ ID NO: 722512 - DNA, 19 bp, Mus musculus
  siRNA target sequence for Ahi1 (NM_026203.1,999-1017).
gactatattctccctatta

SEQ ID NO: 722513 - DNA, 19 bp, Mus musculus
  siRNA target sequence for Ahi1 (NM_026203.1,1023-1041).
cagccatatgactttaaaa

SEQ ID NO: 722514 - DNA, 19 bp, Mus musculus
  siRNA target sequence for Ahi1 (NM_026203.1,1064-1082).
gtgggaggagcaagttatt

SEQ ID NO: 722515 - DNA, 19 bp, Mus musculus
  siRNA target sequence for Ahi1 (NM_026203.1,1066-1084).
gggaggagcaagttatttt

SEQ ID NO: 722516 - DNA, 19 bp, Mus musculus
  siRNA target sequence for Ahi1 (NM_026203.1,1100-1118).
ctatttgcttcgagagttt

SEQ ID NO: 722517 - DNA, 19 bp, Mus musculus
  siRNA target sequence for Ahi1 (NM_026203.1,1211-1229).
gtgtggctttcggaaaatt

SEQ ID NO: 722518 - DNA, 19 bp, Mus musculus
  siRNA target sequence for Ahi1 (NM_026203.1,1319-1337).
gcctcgatcccagctaaat

SEQ ID NO: 722519 - DNA, 19 bp, Mus musculus
  siRNA target sequence for Ahi1 (NM_026203.1,1321-1339).
ctcgatcccagctaaatgt

SEQ ID NO: 722520 - DNA, 19 bp, Mus musculus
  siRNA target sequence for Ahi1 (NM_026203.1,1338-1356).
gtcgtcgaggtttttgaat

SEQ ID NO: 722521 - DNA, 19 bp, Mus musculus
  siRNA target sequence for Ahi1 (NM_026203.1,1367-1385).
gtgtccaagaaatcgttat

SEQ ID NO: 722522 - DNA, 19 bp, Mus musculus
  siRNA target sequence for Ahi1 (NM_026203.1,1381-1399).
gttatccatcaacattgta

SEQ ID NO: 722523 - DNA, 19 bp, Mus musculus
  siRNA target sequence for Ahi1 (NM_026203.1,1405-1423).
ccgtacgaggattgaaagt

SEQ ID NO: 722524 - DNA, 19 bp, Mus musculus
  siRNA target sequence for Ahi1 (NM_026203.1,1418-1436).
gaaagtcccggactgtata

SEQ ID NO: 722525 - DNA, 19 bp, Mus musculus
  siRNA target sequence for Ahi1 (NM_026203.1,1497-1515).
gaacgtcaccgtgaaacaa

SEQ ID NO: 722526 - DNA, 19 bp, Mus musculus
  siRNA target sequence for Ahi1 (NM_026203.1,1588-1606).
cctgtcgtatcccaaacaa

SEQ ID NO: 722527 - DNA, 19 bp, Mus musculus
  siRNA target sequence for Ahi1 (NM_026203.1,1658-1676).
ctctcacaatggaaggata

SEQ ID NO: 722528 - DNA, 19 bp, Mus musculus
  siRNA target sequence for Ahi1 (NM_026203.1,1664-1682).
caatggaaggatattagca

SEQ ID NO: 722529 - DNA, 19 bp, Mus musculus
  siRNA target sequence for Ahi1 (NM_026203.1,1701-1719).
gacggatatccgattatat

SEQ ID NO: 722530 - DNA, 19 bp, Mus musculus
  siRNA target sequence for Ahi1 (NM_026203.1,1703-1721).
cggatatccgattatatta

SEQ ID NO: 722531 - DNA, 19 bp, Mus musculus
  siRNA target sequence for Ahi1 (NM_026203.1,1704-1722).
ggatatccgattatattat

SEQ ID NO: 722532 - DNA, 19 bp, Mus musculus
  siRNA target sequence for Ahi1 (NM_026203.1,1710-1728).
ccgattatattatatgaaa

SEQ ID NO: 722533 - DNA, 19 bp, Mus musculus
  siRNA target sequence for Ahi1 (NM_026203.1,1711-1729).
cgattatattatatgaaat

SEQ ID NO: 722534 - DNA, 19 bp, Mus musculus
  siRNA target sequence for Ahi1 (NM_026203.1,1737-1755).
ggacgttttatgagagaat

SEQ ID NO: 722535 - DNA, 19 bp, Mus musculus
  siRNA target sequence for Ahi1 (NM_026203.1,1738-1756).
gacgttttatgagagaatt

SEQ ID NO: 722536 - DNA, 19 bp, Mus musculus
  siRNA target sequence for Ahi1 (NM_026203.1,1740-1758).
cgttttatgagagaattgt

SEQ ID NO: 722537 - DNA, 19 bp, Mus musculus
  siRNA target sequence for Ahi1 (NM_026203.1,1759-1777).
gtggccacctcaatatcat

SEQ ID NO: 722538 - DNA, 19 bp, Mus musculus
  siRNA target sequence for Ahi1 (NM_026203.1,1761-1779).
ggccacctcaatatcattt

SEQ ID NO: 722539 - DNA, 19 bp, Mus musculus
  siRNA target sequence for Ahi1 (NM_026203.1,1762-1780).
gccacctcaatatcattta

SEQ ID NO: 722540 - DNA, 19 bp, Mus musculus
  siRNA target sequence for Ahi1 (NM_026203.1,1763-1781).
ccacctcaatatcatttat

SEQ ID NO: 722541 - DNA, 19 bp, Mus musculus
  siRNA target sequence for Ahi1 (NM_026203.1,1803-1821).
gatcgctatctcgttactt

SEQ ID NO: 722542 - DNA, 19 bp, Mus musculus
  siRNA target sequence for Ahi1 (NM_026203.1,1806-1824).
cgctatctcgttacttcat

SEQ ID NO: 722543 - DNA, 19 bp, Mus musculus
  siRNA target sequence for Ahi1 (NM_026203.1,1871-1889).
gagcacgttcagagtctta

SEQ ID NO: 722544 - DNA, 19 bp, Mus musculus
  siRNA target sequence for Ahi1 (NM_026203.1,1951-1969).
caggatgctacgactctat

SEQ ID NO: 722545 - DNA, 19 bp, Mus musculus
  siRNA target sequence for Ahi1 (NM_026203.1,1953-1971).
ggatgctacgactctatga

SEQ ID NO: 722546 - DNA, 19 bp, Mus musculus
  siRNA target sequence for Ahi1 (NM_026203.1,1954-1972).
gatgctacgactctatgat

SEQ ID NO: 722547 - DNA, 19 bp, Mus musculus
  siRNA target sequence for Ahi1 (NM_026203.1,1961-1979).
cgactctatgataaggatt

SEQ ID NO: 722548 - DNA, 19 bp, Mus musculus
  siRNA target sequence for Ahi1 (NM_026203.1,1962-1980).
gactctatgataaggattt

SEQ ID NO: 722549 - DNA, 19 bp, Mus musculus
  siRNA target sequence for Ahi1 (NM_026203.1,2070-2088).
gaaggtcaccacatgtact

SEQ ID NO: 722550 - DNA, 19 bp, Mus musculus
  siRNA target sequence for Ahi1 (NM_026203.1,2119-2137).
gggacacgtacgtcaaagt

SEQ ID NO: 722551 - DNA, 19 bp, Mus musculus
  siRNA target sequence for Ahi1 (NM_026203.1,2121-2139).
gacacgtacgtcaaagtga

SEQ ID NO: 722552 - DNA, 19 bp, Mus musculus
  siRNA target sequence for Ahi1 (NM_026203.1,2157-2175).
gtgcgccactggacgataa

SEQ ID NO: 722553 - DNA, 19 bp, Mus musculus
  siRNA target sequence for Ahi1 (NM_026203.1,2159-2177).
gcgccactggacgataaat

SEQ ID NO: 722554 - DNA, 19 bp, Mus musculus
  siRNA target sequence for Ahi1 (NM_026203.1,2160-2178).
cgccactggacgataaata

SEQ ID NO: 722555 - DNA, 19 bp, Mus musculus
  siRNA target sequence for Ahi1 (NM_026203.1,2161-2179).
gccactggacgataaataa

SEQ ID NO: 722556 - DNA, 19 bp, Mus musculus
  siRNA target sequence for Ahi1 (NM_026203.1,2167-2185).
ggacgataaataaggaaat

SEQ ID NO: 722557 - DNA, 19 bp, Mus musculus
  siRNA target sequence for Ahi1 (NM_026203.1,2168-2186).
gacgataaataaggaaatt

SEQ ID NO: 722558 - DNA, 19 bp, Mus musculus
  siRNA target sequence for Ahi1 (NM_026203.1,2170-2188).
cgataaataaggaaattaa

SEQ ID NO: 722559 - DNA, 19 bp, Mus musculus
  siRNA target sequence for Ahi1 (NM_026203.1,2203-2221).
ggggagttccaataagtta

SEQ ID NO: 722560 - DNA, 19 bp, Mus musculus
  siRNA target sequence for Ahi1 (NM_026203.1,2237-2255).
caatggaaagcgtttgcta

SEQ ID NO: 722561 - DNA, 19 bp, Mus musculus
  siRNA target sequence for Ahi1 (NM_026203.1,2242-2260).
gaaagcgtttgctaatcca

SEQ ID NO: 722562 - DNA, 19 bp, Mus musculus
  siRNA target sequence for Ahi1 (NM_026203.1,2329-2347).
caaattaccgtgagaagat

SEQ ID NO: 722563 - DNA, 19 bp, Mus musculus
  siRNA target sequence for Ahi1 (NM_026203.1,2396-2414).
ggatgggatagtatacgtt

SEQ ID NO: 722564 - DNA, 19 bp, Mus musculus
  siRNA target sequence for Ahi1 (NM_026203.1,2397-2415).
gatgggatagtatacgttt

SEQ ID NO: 722565 - DNA, 19 bp, Mus musculus
  siRNA target sequence for Ahi1 (NM_026203.1,2401-2419).
ggatagtatacgtttggaa

SEQ ID NO: 722566 - DNA, 19 bp, Mus musculus
  siRNA target sequence for Ahi1 (NM_026203.1,2473-2491).
caatccgagacatctctta

SEQ ID NO: 722567 - DNA, 19 bp, Mus musculus
  siRNA target sequence for Ahi1 (NM_026203.1,2534-2552).
gagcgagccgattcttctt

SEQ ID NO: 722568 - DNA, 19 bp, Mus musculus
  siRNA target sequence for Ahi1 (NM_026203.1,2536-2554).
gcgagccgattcttcttta

SEQ ID NO: 722569 - DNA, 19 bp, Mus musculus
  siRNA target sequence for Ahi1 (NM_026203.1,2537-2555).
cgagccgattcttctttat

SEQ ID NO: 722570 - DNA, 19 bp, Mus musculus
  siRNA target sequence for Ahi1 (NM_026203.1,2538-2556).
gagccgattcttctttata

SEQ ID NO: 722571 - DNA, 19 bp, Mus musculus
  siRNA target sequence for Ahi1 (NM_026203.1,2618-2636).
cccgttgcctgggatacat

SEQ ID NO: 722572 - DNA, 19 bp, Mus musculus
  siRNA target sequence for Ahi1 (NM_026203.1,2637-2655).
cagagtgaggatgctttat

SEQ ID NO: 722573 - DNA, 19 bp, Mus musculus
  siRNA target sequence for Ahi1 (NM_026203.1,2678-2696).
gcagggctcttttcagatt

SEQ ID NO: 722574 - DNA, 19 bp, Mus musculus
  siRNA target sequence for Ahi1 (NM_026203.1,2681-2699).
gggctcttttcagattgat

SEQ ID NO: 722575 - DNA, 19 bp, Mus musculus
  siRNA target sequence for Ahi1 (NM_026203.1,2683-2701).
gctcttttcagattgatga

SEQ ID NO: 722576 - DNA, 19 bp, Mus musculus
  siRNA target sequence for Ahi1 (NM_026203.1,2706-2724).
gtcaacactgaaaatagtt

SEQ ID NO: 722577 - DNA, 19 bp, Mus musculus
  siRNA target sequence for Ahi1 (NM_026203.1,2708-2726).
caacactgaaaatagttca

SEQ ID NO: 722578 - DNA, 19 bp, Mus musculus
  siRNA target sequence for Ahi1 (NM_026203.1,2728-2746).
caagaaagattcaacttgt

SEQ ID NO: 722579 - DNA, 19 bp, Mus musculus
  siRNA target sequence for Ahi1 (NM_026203.1,2782-2800).
gatcctgtgctgcaaaagt

SEQ ID NO: 722580 - DNA, 19 bp, Mus musculus
  siRNA target sequence for Ahi1 (NM_026203.1,2804-2822).
caaaaatctctcaatgact

SEQ ID NO: 722581 - DNA, 19 bp, Mus musculus
  siRNA target sequence for Ahi1 (NM_026203.1,2876-2894).
gaccactgatgagatcata

SEQ ID NO: 722582 - DNA, 19 bp, Mus musculus
  siRNA target sequence for Ahi1 (NM_026203.1,2879-2897).
cactgatgagatcatacat

SEQ ID NO: 722583 - DNA, 19 bp, Mus musculus
  siRNA target sequence for Ahi1 (NM_026203.1,2910-2928).
ccccagactgcatttatca

SEQ ID NO: 722584 - DNA, 19 bp, Mus musculus
  siRNA target sequence for Ahi1 (NM_026203.1,2996-3014).
cacagccagccgatcagat

SEQ ID NO: 722585 - DNA, 19 bp, Mus musculus
  siRNA target sequence for Ahi1 (NM_026203.1,3001-3019).
ccagccgatcagatgaact

SEQ ID NO: 722586 - DNA, 19 bp, Mus musculus
  siRNA target sequence for Ahi1 (NM_026203.1,3002-3020).
cagccgatcagatgaacta

SEQ ID NO: 722587 - DNA, 19 bp, Mus musculus
  siRNA target sequence for Ahi1 (NM_026203.1,3007-3025).
gatcagatgaactaaccat

SEQ ID NO: 722588 - DNA, 19 bp, Mus musculus
  siRNA target sequence for Ahi1 (NM_026203.1,3036-3054).
gacattatccgagtgtatt

SEQ ID NO: 722589 - DNA, 19 bp, Mus musculus
  siRNA target sequence for Ahi1 (NM_026203.1,3044-3062).
ccgagtgtatttcaaagat

SEQ ID NO: 722590 - DNA, 19 bp, Mus musculus
  siRNA target sequence for Ahi1 (NM_026203.1,3076-3094).
ggtacggcagcgtaagaaa

SEQ ID NO: 722591 - DNA, 19 bp, Mus musculus
  siRNA target sequence for Ahi1 (NM_026203.1,3106-3124).
ggttctttccagctaatca

SEQ ID NO: 722592 - DNA, 19 bp, Mus musculus
  siRNA target sequence for Ahi1 (NM_026203.1,3107-3125).
gttctttccagctaatcat

SEQ ID NO: 722593 - DNA, 19 bp, Mus musculus
  siRNA target sequence for Ahi1 (NM_026203.1,3150-3168).
gactcccctccgaaggtaa

SEQ ID NO: 722594 - DNA, 19 bp, Mus musculus
  siRNA target sequence for Ahi1 (NM_026203.1,3154-3172).
cccctccgaaggtaaagga

SEQ ID NO: 722595 - DNA, 19 bp, Mus musculus
  siRNA target sequence for Ahi1 (NM_026203.1,3170-3188).
ggagcgctcccctccttta

SEQ ID NO: 722596 - DNA, 19 bp, Mus musculus
  siRNA target sequence for Ahi1 (NM_026203.1,3171-3189).
gagcgctcccctcctttaa

SEQ ID NO: 722597 - DNA, 19 bp, Mus musculus
  siRNA target sequence for Ahi1 (NM_026203.1,3173-3191).
gcgctcccctcctttaact

SEQ ID NO: 722598 - DNA, 19 bp, Mus musculus
  siRNA target sequence for Ahi1 (NM_026203.1,3369-3387).
ccggtggtccgcaaagtca

SEQ ID NO: 722599 - DNA, 19 bp, Mus musculus
  siRNA target sequence for 1700001G17Rik (NM_026204.1,348-366).
cagtgcaaacggcaaacat

SEQ ID NO: 722600 - DNA, 19 bp, Mus musculus
  siRNA target sequence for 1700001G17Rik (NM_026204.1,505-523).
ccctcctcgttgttagcaa

SEQ ID NO: 722601 - DNA, 19 bp, Mus musculus
  siRNA target sequence for 1700001G17Rik (NM_026204.1,544-562).
cgagaaaagagctgtaaga

SEQ ID NO: 722602 - DNA, 19 bp, Mus musculus
  siRNA target sequence for 1700001G17Rik (NM_026204.1,608-626).
cgcgagcgagcatagactt

SEQ ID NO: 722603 - DNA, 19 bp, Mus musculus
  siRNA target sequence for 1700019N19Rik (NM_026208.1,28-46).
cagcggagagtaaaatgga

SEQ ID NO: 722604 - DNA, 19 bp, Mus musculus
  siRNA target sequence for 1700019N19Rik (NM_026208.1,171-189).
gagagaacgcagagataca

SEQ ID NO: 722605 - DNA, 19 bp, Mus musculus
  siRNA target sequence for 1700019N19Rik (NM_026208.1,195-213).
gaccagcagggattaaact

SEQ ID NO: 722606 - DNA, 19 bp, Mus musculus
  siRNA target sequence for 1700019N19Rik (NM_026208.1,305-323).
cctgactctggaatgcaaa

SEQ ID NO: 722607 - DNA, 19 bp, Mus musculus
  siRNA target sequence for 1700019N19Rik (NM_026208.1,306-324).
ctgactctggaatgcaaaa

SEQ ID NO: 722608 - DNA, 19 bp, Mus musculus
  siRNA target sequence for 1700019N19Rik (NM_026208.1,310-328).
ctctggaatgcaaaaacga

SEQ ID NO: 722609 - DNA, 19 bp, Mus musculus
  siRNA target sequence for 1700019N19Rik (NM_026208.1,382-400).
gagctagggtcactgaatt

SEQ ID NO: 722610 - DNA, 19 bp, Mus musculus
  siRNA target sequence for 1700019N19Rik (NM_026208.1,402-420).
ggctatgccacaaggtata

SEQ ID NO: 722611 - DNA, 19 bp, Mus musculus
  siRNA target sequence for 1700019N19Rik (NM_026208.1,527-545).
gcctcttagcccttcttca

SEQ ID NO: 722612 - DNA, 19 bp, Mus musculus
  siRNA target sequence for 1700019N19Rik (NM_026208.1,529-547).
ctcttagcccttcttcaaa

SEQ ID NO: 722613 - DNA, 19 bp, Mus musculus
  siRNA target sequence for 1700019N19Rik (NM_026208.1,531-549).
cttagcccttcttcaaaaa

SEQ ID NO: 722614 - DNA, 19 bp, Mus musculus
  siRNA target sequence for 1700019N19Rik (NM_026208.1,571-589).
cacccgcatttccagaatt

SEQ ID NO: 722615 - DNA, 19 bp, Mus musculus
  siRNA target sequence for 1700019N19Rik (NM_026208.1,575-593).
cgcatttccagaattctct

SEQ ID NO: 722616 - DNA, 19 bp, Mus musculus
  siRNA target sequence for 1810036I24Rik (NM_026210.2,104-122).
cgcaggacagtaatgatga

SEQ ID NO: 722617 - DNA, 19 bp, Mus musculus
  siRNA target sequence for 1810036I24Rik (NM_026210.2,233-251).
gtgcggttgtggtctatct

SEQ ID NO: 722618 - DNA, 19 bp, Mus musculus
  siRNA target sequence for 1810036I24Rik (NM_026210.2,282-300).
cgcctgcatggtgacaatt

SEQ ID NO: 722619 - DNA, 19 bp, Mus musculus
  siRNA target sequence for 1810036I24Rik (NM_026210.2,283-301).
gcctgcatggtgacaatta

SEQ ID NO: 722620 - DNA, 19 bp, Mus musculus
  siRNA target sequence for 1810036I24Rik (NM_026210.2,284-302).
cctgcatggtgacaattat

SEQ ID NO: 722621 - DNA, 19 bp, Mus musculus
  siRNA target sequence for 1810036I24Rik (NM_026210.2,336-354).
gaatgtcacaggtagacta

SEQ ID NO: 722622 - DNA, 19 bp, Mus musculus
  siRNA target sequence for 1810036I24Rik (NM_026210.2,363-381).
cctgcgttggtggaatcat

SEQ ID NO: 722623 - DNA, 19 bp, Mus musculus
  siRNA target sequence for 1810036I24Rik (NM_026210.2,364-382).
ctgcgttggtggaatcata

SEQ ID NO: 722624 - DNA, 19 bp, Mus musculus
  siRNA target sequence for 1810036I24Rik (NM_026210.2,366-384).
gcgttggtggaatcatatt

SEQ ID NO: 722625 - DNA, 19 bp, Mus musculus
  siRNA target sequence for 1810036I24Rik (NM_026210.2,368-386).
gttggtggaatcatattga

SEQ ID NO: 722626 - DNA, 19 bp, Mus musculus
  siRNA target sequence for 1810036I24Rik (NM_026210.2,371-389).
ggtggaatcatattgatga

SEQ ID NO: 722627 - DNA, 19 bp, Mus musculus
  siRNA target sequence for 1810036I24Rik (NM_026210.2,428-446).
caacgcctcaagacaacaa

SEQ ID NO: 722628 - DNA, 19 bp, Mus musculus
  siRNA target sequence for 1810036I24Rik (NM_026210.2,459-477).
ggccgagtcaagaatcttt

SEQ ID NO: 722629 - DNA, 19 bp, Mus musculus
  siRNA target sequence for 1810036I24Rik (NM_026210.2,460-478).
gccgagtcaagaatctttt

SEQ ID NO: 722630 - DNA, 19 bp, Mus musculus
  siRNA target sequence for 1810036I24Rik (NM_026210.2,500-518).
ccgtcctgtgggtgatctt

SEQ ID NO: 722631 - DNA, 19 bp, Mus musculus
  siRNA target sequence for 1810036I24Rik (NM_026210.2,501-519).
cgtcctgtgggtgatcttt

SEQ ID NO: 722632 - DNA, 19 bp, Mus musculus
  siRNA target sequence for 1810036I24Rik (NM_026210.2,583-601).
ctgcaaggtgccaacctat

SEQ ID NO: 722633 - DNA, 19 bp, Mus musculus
  siRNA target sequence for 1810036I24Rik (NM_026210.2,585-603).
gcaaggtgccaacctatat

SEQ ID NO: 722634 - DNA, 19 bp, Mus musculus
  siRNA target sequence for 1810036I24Rik (NM_026210.2,589-607).
ggtgccaacctatatggtt

SEQ ID NO: 722635 - DNA, 19 bp, Mus musculus
  siRNA target sequence for 1810036I24Rik (NM_026210.2,590-608).
gtgccaacctatatggtta

SEQ ID NO: 722636 - DNA, 19 bp, Mus musculus
  siRNA target sequence for 1810036I24Rik (NM_026210.2,592-610).
gccaacctatatggttata

SEQ ID NO: 722637 - DNA, 19 bp, Mus musculus
  siRNA target sequence for 1810036I24Rik (NM_026210.2,593-611).
ccaacctatatggttatat

SEQ ID NO: 722638 - DNA, 19 bp, Mus musculus
  siRNA target sequence for 1810036I24Rik (NM_026210.2,605-623).
gttatatccggtgtaaagt

SEQ ID NO: 722639 - DNA, 19 bp, Mus musculus
  siRNA target sequence for 1810036I24Rik (NM_026210.2,648-666).
catggctacgtcgtatctt

SEQ ID NO: 722640 - DNA, 19 bp, Mus musculus
  siRNA target sequence for 1810036I24Rik (NM_026210.2,653-671).
ctacgtcgtatcttggaaa

SEQ ID NO: 722641 - DNA, 19 bp, Mus musculus
  siRNA target sequence for 2900001O04Rik (NM_026213.1,106-124).
ccacgtcccagcagtttga

SEQ ID NO: 722642 - DNA, 19 bp, Mus musculus
  siRNA target sequence for 2900001O04Rik (NM_026213.1,107-125).
cacgtcccagcagtttgaa

SEQ ID NO: 722643 - DNA, 19 bp, Mus musculus
  siRNA target sequence for 2900001O04Rik (NM_026213.1,261-279).
ctggctgaaaacaaacgat

SEQ ID NO: 722644 - DNA, 19 bp, Mus musculus
  siRNA target sequence for 2900001O04Rik (NM_026213.1,277-295).
gatacaaggaggcaattca

SEQ ID NO: 722645 - DNA, 19 bp, Mus musculus
  siRNA target sequence for 2900001O04Rik (NM_026213.1,335-353).
caccctttatgagatgaaa

SEQ ID NO: 722646 - DNA, 19 bp, Mus musculus
  siRNA target sequence for 2900001O04Rik (NM_026213.1,436-454).
gggaggcgtggcaaacttt

SEQ ID NO: 722647 - DNA, 19 bp, Mus musculus
  siRNA target sequence for 2900001O04Rik (NM_026213.1,437-455).
ggaggcgtggcaaacttta

SEQ ID NO: 722648 - DNA, 19 bp, Mus musculus
  siRNA target sequence for 2900001O04Rik (NM_026213.1,440-458).
ggcgtggcaaactttaggt

SEQ ID NO: 722649 - DNA, 19 bp, Mus musculus
  siRNA target sequence for 2900001O04Rik (NM_026213.1,491-509).
ggcaattcgaagctttcaa

SEQ ID NO: 722650 - DNA, 19 bp, Mus musculus
  siRNA target sequence for 2900001O04Rik (NM_026213.1,492-510).
gcaattcgaagctttcaaa

SEQ ID NO: 722651 - DNA, 19 bp, Mus musculus
  siRNA target sequence for 2900001O04Rik (NM_026213.1,493-511).
caattcgaagctttcaaat

SEQ ID NO: 722652 - DNA, 19 bp, Mus musculus
  siRNA target sequence for 2900001O04Rik (NM_026213.1,507-525).
caaatagccctgcacatat

SEQ ID NO: 722653 - DNA, 19 bp, Mus musculus
  siRNA target sequence for 2900001O04Rik (NM_026213.1,594-612).
gtagcccagaggattgaaa

SEQ ID NO: 722654 - DNA, 19 bp, Mus musculus
  siRNA target sequence for 2900001O04Rik (NM_026213.1,652-670).
ggtccatcccggactatga

SEQ ID NO: 722655 - DNA, 19 bp, Mus musculus
  siRNA target sequence for 2900001O04Rik (NM_026213.1,655-673).
ccatcccggactatgactt

SEQ ID NO: 722656 - DNA, 19 bp, Mus musculus
  siRNA target sequence for 2900001O04Rik (NM_026213.1,768-786).
gggactgtagagatcgtaa

SEQ ID NO: 722657 - DNA, 19 bp, Mus musculus
  siRNA target sequence for 2900001O04Rik (NM_026213.1,772-790).
ctgtagagatcgtaaacga

SEQ ID NO: 722658 - DNA, 19 bp, Mus musculus
  siRNA target sequence for 2900001O04Rik (NM_026213.1,816-834).
gatggctccgtctttatca

SEQ ID NO: 722659 - DNA, 19 bp, Mus musculus
  siRNA target sequence for 1700096C12Rik (NM_026216.1,613-631).
ccaaggtcgcactacaaca

SEQ ID NO: 722660 - DNA, 19 bp, Mus musculus
  siRNA target sequence for 1700096C12Rik (NM_026216.1,624-642).
ctacaacactcactaatga

SEQ ID NO: 722661 - DNA, 19 bp, Mus musculus
  siRNA target sequence for 1500031J01Rik (NM_026218.1,412-430).
gtatcaggaggaaatccaa

SEQ ID NO: 722662 - DNA, 19 bp, Mus musculus
  siRNA target sequence for 1500031J01Rik (NM_026218.1,419-437).
gaggaaatccaagaactta

SEQ ID NO: 722663 - DNA, 19 bp, Mus musculus
  siRNA target sequence for 1500031J01Rik (NM_026218.1,457-475).
gccacgatccacactagtt

SEQ ID NO: 722664 - DNA, 19 bp, Mus musculus
  siRNA target sequence for 1500031J01Rik (NM_026218.1,458-476).
ccacgatccacactagtta

SEQ ID NO: 722665 - DNA, 19 bp, Mus musculus
  siRNA target sequence for 1500031J01Rik (NM_026218.1,459-477).
cacgatccacactagttat

SEQ ID NO: 722666 - DNA, 19 bp, Mus musculus
  siRNA target sequence for 1500031J01Rik (NM_026218.1,625-643).
gaaagatgacccaggtata

SEQ ID NO: 722667 - DNA, 19 bp, Mus musculus
  siRNA target sequence for 1500031J01Rik (NM_026218.1,629-647).
gatgacccaggtataataa

SEQ ID NO: 722668 - DNA, 19 bp, Mus musculus
  siRNA target sequence for 1500031J01Rik (NM_026218.1,632-650).
gacccaggtataataatga

SEQ ID NO: 722669 - DNA, 19 bp, Mus musculus
  siRNA target sequence for 1500031J01Rik (NM_026218.1,690-708).
gtaacagctgcgaaggatt

SEQ ID NO: 722670 - DNA, 19 bp, Mus musculus
  siRNA target sequence for 1500031J01Rik (NM_026218.1,880-898).
ggagcggatatttcaactt

SEQ ID NO: 722671 - DNA, 19 bp, Mus musculus
  siRNA target sequence for D3Ertd789e (NM_026222.1,207-225).
gctccgagaggaaaaatca

SEQ ID NO: 722672 - DNA, 19 bp, Mus musculus
  siRNA target sequence for D3Ertd789e (NM_026222.1,259-277).
cgaattaattctatgactt

SEQ ID NO: 722673 - DNA, 19 bp, Mus musculus
  siRNA target sequence for D3Ertd789e (NM_026222.1,269-287).
ctatgacttctcaccttaa

SEQ ID NO: 722674 - DNA, 19 bp, Mus musculus
  siRNA target sequence for D3Ertd789e (NM_026222.1,292-310).
gtgaatcaggaatttttat

SEQ ID NO: 722675 - DNA, 19 bp, Mus musculus
  siRNA target sequence for D3Ertd789e (NM_026222.1,345-363).
gatcgagagcgaagaacat

SEQ ID NO: 722676 - DNA, 19 bp, Mus musculus
  siRNA target sequence for D3Ertd789e (NM_026222.1,348-366).
cgagagcgaagaacatttt

SEQ ID NO: 722677 - DNA, 19 bp, Mus musculus
  siRNA target sequence for D3Ertd789e (NM_026222.1,387-405).
gctgggccgagtcaagaat

SEQ ID NO: 722678 - DNA, 19 bp, Mus musculus
  siRNA target sequence for D3Ertd789e (NM_026222.1,391-409).
ggccgagtcaagaatgaga

SEQ ID NO: 722679 - DNA, 19 bp, Mus musculus
  siRNA target sequence for D3Ertd789e (NM_026222.1,455-473).
gccaaatggaaaacaatat

SEQ ID NO: 722680 - DNA, 19 bp, Mus musculus
  siRNA target sequence for D3Ertd789e (NM_026222.1,549-567).
ggaagaatcggctcacaaa

SEQ ID NO: 722681 - DNA, 19 bp, Mus musculus
  siRNA target sequence for D3Ertd789e (NM_026222.1,553-571).
gaatcggctcacaaagaca

SEQ ID NO: 722682 - DNA, 19 bp, Mus musculus
  siRNA target sequence for D3Ertd789e (NM_026222.1,599-617).
ctcagcaagacgataacaa

SEQ ID NO: 722683 - DNA, 19 bp, Mus musculus
  siRNA target sequence for D3Ertd789e (NM_026222.1,704-722).
cgctaagtgcgcagttaga

SEQ ID NO: 722684 - DNA, 19 bp, Mus musculus
  siRNA target sequence for D3Ertd789e (NM_026222.1,705-723).
gctaagtgcgcagttagaa

SEQ ID NO: 722685 - DNA, 19 bp, Mus musculus
  siRNA target sequence for D3Ertd789e (NM_026222.1,706-724).
ctaagtgcgcagttagaat

SEQ ID NO: 722686 - DNA, 19 bp, Mus musculus
  siRNA target sequence for D3Ertd789e (NM_026222.1,710-728).
gtgcgcagttagaattaga

SEQ ID NO: 722687 - DNA, 19 bp, Mus musculus
  siRNA target sequence for D3Ertd789e (NM_026222.1,712-730).
gcgcagttagaattagata

SEQ ID NO: 722688 - DNA, 19 bp, Mus musculus
  siRNA target sequence for D3Ertd789e (NM_026222.1,713-731).
cgcagttagaattagataa

SEQ ID NO: 722689 - DNA, 19 bp, Mus musculus
  siRNA target sequence for D3Ertd789e (NM_026222.1,742-760).
gatttccggaagattcact

SEQ ID NO: 722690 - DNA, 19 bp, Mus musculus
  siRNA target sequence for D3Ertd789e (NM_026222.1,815-833).
ggcgggatcaggagataga

SEQ ID NO: 722691 - DNA, 19 bp, Mus musculus
  siRNA target sequence for D3Ertd789e (NM_026222.1,817-835).
cgggatcaggagatagaca

SEQ ID NO: 722692 - DNA, 19 bp, Mus musculus
  siRNA target sequence for D3Ertd789e (NM_026222.1,818-836).
gggatcaggagatagacaa

SEQ ID NO: 722693 - DNA, 19 bp, Mus musculus
  siRNA target sequence for D3Ertd789e (NM_026222.1,843-861).
cctggcattatcacgaata

SEQ ID NO: 722694 - DNA, 19 bp, Mus musculus
  siRNA target sequence for D3Ertd789e (NM_026222.1,844-862).
ctggcattatcacgaataa

SEQ ID NO: 722695 - DNA, 19 bp, Mus musculus
  siRNA target sequence for D3Ertd789e (NM_026222.1,848-866).
cattatcacgaataaagca

SEQ ID NO: 722696 - DNA, 19 bp, Mus musculus
  siRNA target sequence for D3Ertd789e (NM_026222.1,887-905).
gcgtggtgaaagagaagat

SEQ ID NO: 722697 - DNA, 19 bp, Mus musculus
  siRNA target sequence for D3Ertd789e (NM_026222.1,936-954).
catagaatacgagagaaaa

SEQ ID NO: 722698 - DNA, 19 bp, Mus musculus
  siRNA target sequence for D3Ertd789e (NM_026222.1,1003-1021).
cgtcacgaaggcaacagaa

SEQ ID NO: 722699 - DNA, 19 bp, Mus musculus
  siRNA target sequence for D3Ertd789e (NM_026222.1,1120-1138).
gacatctttgacgaaacat

SEQ ID NO: 722700 - DNA, 19 bp, Mus musculus
  siRNA target sequence for D3Ertd789e (NM_026222.1,1122-1140).
catctttgacgaaacatta

SEQ ID NO: 722701 - DNA, 19 bp, Mus musculus
  siRNA target sequence for D3Ertd789e (NM_026222.1,1131-1149).
cgaaacattaagattacaa

SEQ ID NO: 722702 - DNA, 19 bp, Mus musculus
  siRNA target sequence for D3Ertd789e (NM_026222.1,1142-1160).
gattacaaaaacttaaaca

SEQ ID NO: 722703 - DNA, 19 bp, Mus musculus
  siRNA target sequence for D3Ertd789e (NM_026222.1,1159-1177).
catcacaatgaggttgtaa

SEQ ID NO: 722704 - DNA, 19 bp, Mus musculus
  siRNA target sequence for D3Ertd789e (NM_026222.1,1203-1221).
gaagaccctatctattgaa

SEQ ID NO: 722705 - DNA, 19 bp, Mus musculus
  siRNA target sequence for D3Ertd789e (NM_026222.1,1208-1226).
ccctatctattgaagagaa

SEQ ID NO: 722706 - DNA, 19 bp, Mus musculus
  siRNA target sequence for D3Ertd789e (NM_026222.1,1209-1227).
cctatctattgaagagaaa

SEQ ID NO: 722707 - DNA, 19 bp, Mus musculus
  siRNA target sequence for D3Ertd789e (NM_026222.1,1284-1302).
ggttcaattgggcatagta

SEQ ID NO: 722708 - DNA, 19 bp, Mus musculus
  siRNA target sequence for D3Ertd789e (NM_026222.1,1300-1318).
gtaaaagacgtgttattta

SEQ ID NO: 722709 - DNA, 19 bp, Mus musculus
  siRNA target sequence for D3Ertd789e (NM_026222.1,1341-1359).
cgagatagcgaaagagaaa

SEQ ID NO: 722710 - DNA, 19 bp, Mus musculus
  siRNA target sequence for D3Ertd789e (NM_026222.1,1385-1403).
cccgttcctccctgaaaca

SEQ ID NO: 722711 - DNA, 19 bp, Mus musculus
  siRNA target sequence for D3Ertd789e (NM_026222.1,1386-1404).
ccgttcctccctgaaacat

SEQ ID NO: 722712 - DNA, 19 bp, Mus musculus
  siRNA target sequence for D3Ertd789e (NM_026222.1,1388-1406).
gttcctccctgaaacatct

SEQ ID NO: 722713 - DNA, 19 bp, Mus musculus
  siRNA target sequence for D3Ertd789e (NM_026222.1,1391-1409).
cctccctgaaacatcttaa

SEQ ID NO: 722714 - DNA, 19 bp, Mus musculus
  siRNA target sequence for D3Ertd789e (NM_026222.1,1394-1412).
ccctgaaacatcttaacaa

SEQ ID NO: 722715 - DNA, 19 bp, Mus musculus
  siRNA target sequence for D3Ertd789e (NM_026222.1,1405-1423).
cttaacaaacagttacaca

SEQ ID NO: 722716 - DNA, 19 bp, Mus musculus
  siRNA target sequence for D3Ertd789e (NM_026222.1,1464-1482).
cagtcaggatttttacatt

SEQ ID NO: 722717 - DNA, 19 bp, Mus musculus
  siRNA target sequence for D3Ertd789e (NM_026222.1,1466-1484).
gtcaggatttttacattca

SEQ ID NO: 722718 - DNA, 19 bp, Mus musculus
  siRNA target sequence for D3Ertd789e (NM_026222.1,1486-1504).
caagtagaacgcagaatgt

SEQ ID NO: 722719 - DNA, 19 bp, Mus musculus
  siRNA target sequence for D3Ertd789e (NM_026222.1,1495-1513).
cgcagaatgtcacgattaa

SEQ ID NO: 722720 - DNA, 19 bp, Mus musculus
  siRNA target sequence for D3Ertd789e (NM_026222.1,1507-1525).
cgattaaaaggagaaatta

SEQ ID NO: 722721 - DNA, 19 bp, Mus musculus
  siRNA target sequence for D3Ertd789e (NM_026222.1,1540-1558).
caagcccttgaagcaaaaa

SEQ ID NO: 722722 - DNA, 19 bp, Mus musculus
  siRNA target sequence for D3Ertd789e (NM_026222.1,1553-1571).
caaaaatccttgaacttaa

SEQ ID NO: 722723 - DNA, 19 bp, Mus musculus
  siRNA target sequence for D3Ertd789e (NM_026222.1,1639-1657).
gacctctacttcattaaga

SEQ ID NO: 722724 - DNA, 19 bp, Mus musculus
  siRNA target sequence for D3Ertd789e (NM_026222.1,1644-1662).
ctacttcattaagaaatca

SEQ ID NO: 722725 - DNA, 19 bp, Mus musculus
  siRNA target sequence for D3Ertd789e (NM_026222.1,1763-1781).
ctgtgaaagaggatatgat

SEQ ID NO: 722726 - DNA, 19 bp, Mus musculus
  siRNA target sequence for D3Ertd789e (NM_026222.1,1779-1797).
gatgatcgaggacaatctt

SEQ ID NO: 722727 - DNA, 19 bp, Mus musculus
  siRNA target sequence for D3Ertd789e (NM_026222.1,1782-1800).
gatcgaggacaatctttta

SEQ ID NO: 722728 - DNA, 19 bp, Mus musculus
  siRNA target sequence for D3Ertd789e (NM_026222.1,1816-1834).
cgtgctcgagaattgcttt

SEQ ID NO: 722729 - DNA, 19 bp, Mus musculus
  siRNA target sequence for D3Ertd789e (NM_026222.1,1817-1835).
gtgctcgagaattgcttta

SEQ ID NO: 722730 - DNA, 19 bp, Mus musculus
  siRNA target sequence for D3Ertd789e (NM_026222.1,1819-1837).
gctcgagaattgctttaca

SEQ ID NO: 722731 - DNA, 19 bp, Mus musculus
  siRNA target sequence for D3Ertd789e (NM_026222.1,1852-1870).
gtcctttctctagagaaaa

SEQ ID NO: 722732 - DNA, 19 bp, Mus musculus
  siRNA target sequence for D3Ertd789e (NM_026222.1,1941-1959).
ctcacagatcagatgtgtt

SEQ ID NO: 722733 - DNA, 19 bp, Mus musculus
  siRNA target sequence for D3Ertd789e (NM_026222.1,1957-1975).
gttgaacagcagcgaaaaa

SEQ ID NO: 722734 - DNA, 19 bp, Mus musculus
  siRNA target sequence for D3Ertd789e (NM_026222.1,1960-1978).
gaacagcagcgaaaaacta

SEQ ID NO: 722735 - DNA, 19 bp, Mus musculus
  siRNA target sequence for D3Ertd789e (NM_026222.1,1963-1981).
cagcagcgaaaaactatga

SEQ ID NO: 722736 - DNA, 19 bp, Mus musculus
  siRNA target sequence for D3Ertd789e (NM_026222.1,1965-1983).
gcagcgaaaaactatgagt

SEQ ID NO: 722737 - DNA, 19 bp, Mus musculus
  siRNA target sequence for D3Ertd789e (NM_026222.1,1966-1984).
cagcgaaaaactatgagtt

SEQ ID NO: 722738 - DNA, 19 bp, Mus musculus
  siRNA target sequence for D3Ertd789e (NM_026222.1,1998-2016).
gcggctaagtaaaattgat

SEQ ID NO: 722739 - DNA, 19 bp, Mus musculus
  siRNA target sequence for D3Ertd789e (NM_026222.1,1999-2017).
cggctaagtaaaattgata

SEQ ID NO: 722740 - DNA, 19 bp, Mus musculus
  siRNA target sequence for D3Ertd789e (NM_026222.1,2000-2018).
ggctaagtaaaattgataa

SEQ ID NO: 722741 - DNA, 19 bp, Mus musculus
  siRNA target sequence for D3Ertd789e (NM_026222.1,2006-2024).
gtaaaattgataagcttaa

SEQ ID NO: 722742 - DNA, 19 bp, Mus musculus
  siRNA target sequence for D3Ertd789e (NM_026222.1,2014-2032).
gataagcttaagaatagat

SEQ ID NO: 722743 - DNA, 19 bp, Mus musculus
  siRNA target sequence for D3Ertd789e (NM_026222.1,2077-2095).
gagaaaacacagtcctatt

SEQ ID NO: 722744 - DNA, 19 bp, Mus musculus
  siRNA target sequence for D3Ertd789e (NM_026222.1,2079-2097).
gaaaacacagtcctattat

SEQ ID NO: 722745 - DNA, 19 bp, Mus musculus
  siRNA target sequence for D3Ertd789e (NM_026222.1,2084-2102).
cacagtcctattatgtaat

SEQ ID NO: 722746 - DNA, 19 bp, Mus musculus
  siRNA target sequence for D3Ertd789e (NM_026222.1,2141-2159).
gtgatagcttggatgctaa

SEQ ID NO: 722747 - DNA, 19 bp, Mus musculus
  siRNA target sequence for D3Ertd789e (NM_026222.1,2219-2237).
gctgcaacagcaattataa

SEQ ID NO: 722748 - DNA, 19 bp, Mus musculus
  siRNA target sequence for D3Ertd789e (NM_026222.1,2222-2240).
gcaacagcaattataagca

SEQ ID NO: 722749 - DNA, 19 bp, Mus musculus
  siRNA target sequence for D3Ertd789e (NM_026222.1,2258-2276).
ctccgtcaagtgatgagta

SEQ ID NO: 722750 - DNA, 19 bp, Mus musculus
  siRNA target sequence for D3Ertd789e (NM_026222.1,2274-2292).
gtatgcattaaaaattcaa

SEQ ID NO: 722751 - DNA, 19 bp, Mus musculus
  siRNA target sequence for D3Ertd789e (NM_026222.1,2322-2340).
gagatacagatgcaaacaa

SEQ ID NO: 722752 - DNA, 19 bp, Mus musculus
  siRNA target sequence for D3Ertd789e (NM_026222.1,2365-2383).
gatatccagagcatggaaa

SEQ ID NO: 722753 - DNA, 19 bp, Mus musculus
  siRNA target sequence for D3Ertd789e (NM_026222.1,2395-2413).
gttataggacacttagcaa

SEQ ID NO: 722754 - DNA, 19 bp, Mus musculus
  siRNA target sequence for D3Ertd789e (NM_026222.1,2410-2428).
gcaaataatgccaaagaga

SEQ ID NO: 722755 - DNA, 19 bp, Mus musculus
  siRNA target sequence for D3Ertd789e (NM_026222.1,2488-2506).
ccgaaattgcagcgaataa

SEQ ID NO: 722756 - DNA, 19 bp, Mus musculus
  siRNA target sequence for D3Ertd789e (NM_026222.1,2490-2508).
gaaattgcagcgaataact

SEQ ID NO: 722757 - DNA, 19 bp, Mus musculus
  siRNA target sequence for D3Ertd789e (NM_026222.1,2528-2546).
gaagagaaatccgcatttt

SEQ ID NO: 722758 - DNA, 19 bp, Mus musculus
  siRNA target sequence for D3Ertd789e (NM_026222.1,2531-2549).
gagaaatccgcattttgaa

SEQ ID NO: 722759 - DNA, 19 bp, Mus musculus
  siRNA target sequence for D3Ertd789e (NM_026222.1,2538-2556).
ccgcattttgaaacaaaca

SEQ ID NO: 722760 - DNA, 19 bp, Mus musculus
  siRNA target sequence for D3Ertd789e (NM_026222.1,2590-2608).
ctccgtgagatcatacagt

SEQ ID NO: 722761 - DNA, 19 bp, Mus musculus
  siRNA target sequence for D3Ertd789e (NM_026222.1,2619-2637).
cattgaccaaatgttagtt

SEQ ID NO: 722762 - DNA, 19 bp, Mus musculus
  siRNA target sequence for D3Ertd789e (NM_026222.1,2688-2706).
gcagaacgggttagaacta

SEQ ID NO: 722763 - DNA, 19 bp, Mus musculus
  siRNA target sequence for D3Ertd789e (NM_026222.1,2719-2737).
ggcccgagctcgagatctt

SEQ ID NO: 722764 - DNA, 19 bp, Mus musculus
  siRNA target sequence for D3Ertd789e (NM_026222.1,2722-2740).
ccgagctcgagatcttctt

SEQ ID NO: 722765 - DNA, 19 bp, Mus musculus
  siRNA target sequence for D3Ertd789e (NM_026222.1,2769-2787).
gtcgctcgaggatgtaact

SEQ ID NO: 722766 - DNA, 19 bp, Mus musculus
  siRNA target sequence for D3Ertd789e (NM_026222.1,2771-2789).
cgctcgaggatgtaactct

SEQ ID NO: 722767 - DNA, 19 bp, Mus musculus
  siRNA target sequence for D3Ertd789e (NM_026222.1,2793-2811).
gtctccccccacagctaaa

SEQ ID NO: 722768 - DNA, 19 bp, Mus musculus
  siRNA target sequence for D3Ertd789e (NM_026222.1,2797-2815).
ccccccacagctaaagtga

SEQ ID NO: 722769 - DNA, 19 bp, Mus musculus
  siRNA target sequence for D3Ertd789e (NM_026222.1,2798-2816).
cccccacagctaaagtgat

SEQ ID NO: 722770 - DNA, 19 bp, Mus musculus
  siRNA target sequence for D3Ertd789e (NM_026222.1,2799-2817).
ccccacagctaaagtgata

SEQ ID NO: 722771 - DNA, 19 bp, Mus musculus
  siRNA target sequence for D3Ertd789e (NM_026222.1,2801-2819).
ccacagctaaagtgataca

SEQ ID NO: 722772 - DNA, 19 bp, Mus musculus
  siRNA target sequence for D3Ertd789e (NM_026222.1,2869-2887).
gctagtagtggcagtaatt

SEQ ID NO: 722773 - DNA, 19 bp, Mus musculus
  siRNA target sequence for D3Ertd789e (NM_026222.1,2873-2891).
gtagtggcagtaattccaa

SEQ ID NO: 722774 - DNA, 19 bp, Mus musculus
  siRNA target sequence for 4933412D19Rik (NM_026229.1,114-132).
ccagatactgttttttgga

SEQ ID NO: 722775 - DNA, 19 bp, Mus musculus
  siRNA target sequence for 4933412D19Rik (NM_026229.1,130-148).
ggattcggatggcttttct

SEQ ID NO: 722776 - DNA, 19 bp, Mus musculus
  siRNA target sequence for 4933412D19Rik (NM_026229.1,131-149).
gattcggatggcttttctt

SEQ ID NO: 722777 - DNA, 19 bp, Mus musculus
  siRNA target sequence for 4933412D19Rik (NM_026229.1,147-165).
cttcatgcgccagttgttt

SEQ ID NO: 722778 - DNA, 19 bp, Mus musculus
  siRNA target sequence for 4933412D19Rik (NM_026229.1,171-189).
ctatgaggtgcgtcagtat

SEQ ID NO: 722779 - DNA, 19 bp, Mus musculus
  siRNA target sequence for 4933412D19Rik (NM_026229.1,237-255).
gtttgagcttatcatcttt

SEQ ID NO: 722780 - DNA, 19 bp, Mus musculus
  siRNA target sequence for 4933412D19Rik (NM_026229.1,241-259).
gagcttatcatctttgaga

SEQ ID NO: 722781 - DNA, 19 bp, Mus musculus
  siRNA target sequence for 4933412D19Rik (NM_026229.1,284-302).
cccgttacttccattggaa

SEQ ID NO: 722782 - DNA, 19 bp, Mus musculus
  siRNA target sequence for 4933412D19Rik (NM_026229.1,285-303).
ccgttacttccattggaaa

SEQ ID NO: 722783 - DNA, 19 bp, Mus musculus
  siRNA target sequence for 4933412D19Rik (NM_026229.1,339-357).
catggtgcccttctacatt

SEQ ID NO: 722784 - DNA, 19 bp, Mus musculus
  siRNA target sequence for 4933412D19Rik (NM_026229.1,347-365).
ccttctacattggttactt

SEQ ID NO: 722785 - DNA, 19 bp, Mus musculus
  siRNA target sequence for 4933412D19Rik (NM_026229.1,348-366).
cttctacattggttacttt

SEQ ID NO: 722786 - DNA, 19 bp, Mus musculus
  siRNA target sequence for 4933412D19Rik (NM_026229.1,359-377).
gttactttatcgtgagtaa

SEQ ID NO: 722787 - DNA, 19 bp, Mus musculus
  siRNA target sequence for 4933412D19Rik (NM_026229.1,418-436).
ctcttatggctgaccttta

SEQ ID NO: 722788 - DNA, 19 bp, Mus musculus
  siRNA target sequence for 4933412D19Rik (NM_026229.1,427-445).
ctgacctttatgtacttct

SEQ ID NO: 722789 - DNA, 19 bp, Mus musculus
  siRNA target sequence for 4933412D19Rik (NM_026229.1,460-478).
gacccattccccatactca

SEQ ID NO: 722790 - DNA, 19 bp, Mus musculus
  siRNA target sequence for 4933412D19Rik (NM_026229.1,481-499).
ccaaagcacgggatcttgt

SEQ ID NO: 722791 - DNA, 19 bp, Mus musculus
  siRNA target sequence for 4933412D19Rik (NM_026229.1,574-592).
gtcaactgtccgtacacat

SEQ ID NO: 722792 - DNA, 19 bp, Mus musculus
  siRNA target sequence for 4933412D19Rik (NM_026229.1,725-743).
gaggggatgtgcagaacaa

SEQ ID NO: 722793 - DNA, 19 bp, Mus musculus
  siRNA target sequence for 4933412D19Rik (NM_026229.1,797-815).
gtgaaaatctgactcttat

SEQ ID NO: 722794 - DNA, 19 bp, Mus musculus
  siRNA target sequence for 4933412D19Rik (NM_026229.1,887-905).
caaaggaaagaattgaata

SEQ ID NO: 722795 - DNA, 19 bp, Mus musculus
  siRNA target sequence for 4933412D19Rik (NM_026229.1,901-919).
gaatactcgaaaacattca

SEQ ID NO: 722796 - DNA, 19 bp, Mus musculus
  siRNA target sequence for 4933412D19Rik (NM_026229.1,984-1002).
ggctaccatcaatattgtt

SEQ ID NO: 722797 - DNA, 19 bp, Mus musculus
  siRNA target sequence for 4933412D19Rik (NM_026229.1,989-1007).
ccatcaatattgttcttga

SEQ ID NO: 722798 - DNA, 19 bp, Mus musculus
  siRNA target sequence for 4933412D19Rik (NM_026229.1,990-1008).
catcaatattgttcttgat

SEQ ID NO: 722799 - DNA, 19 bp, Mus musculus
  siRNA target sequence for 4933412D19Rik (NM_026229.1,1041-1059).
catcgagatcactgtgaat

SEQ ID NO: 722800 - DNA, 19 bp, Mus musculus
  siRNA target sequence for 4933412D19Rik (NM_026229.1,1216-1234).
ctgctgttagcgcagataa

SEQ ID NO: 722801 - DNA, 19 bp, Mus musculus
  siRNA target sequence for 4933412D19Rik (NM_026229.1,1226-1244).
cgcagataatgggtatgta

SEQ ID NO: 722802 - DNA, 19 bp, Mus musculus
  siRNA target sequence for 4933412D19Rik (NM_026229.1,1228-1246).
cagataatgggtatgtact

SEQ ID NO: 722803 - DNA, 19 bp, Mus musculus
  siRNA target sequence for 4933412D19Rik (NM_026229.1,1285-1303).
ccggagtaccgcaccataa

SEQ ID NO: 722804 - DNA, 19 bp, Mus musculus
  siRNA target sequence for 4933412D19Rik (NM_026229.1,1286-1304).
cggagtaccgcaccataat

SEQ ID NO: 722805 - DNA, 19 bp, Mus musculus
  siRNA target sequence for 4933412D19Rik (NM_026229.1,1318-1336).
ggggagcttcagttcaact

SEQ ID NO: 722806 - DNA, 19 bp, Mus musculus
  siRNA target sequence for 4933412D19Rik (NM_026229.1,1319-1337).
gggagcttcagttcaactt

SEQ ID NO: 722807 - DNA, 19 bp, Mus musculus
  siRNA target sequence for 4933412D19Rik (NM_026229.1,1323-1341).
gcttcagttcaacttctat

SEQ ID NO: 722808 - DNA, 19 bp, Mus musculus
  siRNA target sequence for 4933412D19Rik (NM_026229.1,1373-1391).
gtgccctctccagcatatt

SEQ ID NO: 722809 - DNA, 19 bp, Mus musculus
  siRNA target sequence for 4933412D19Rik (NM_026229.1,1375-1393).
gccctctccagcatattgt

SEQ ID NO: 722810 - DNA, 19 bp, Mus musculus
  siRNA target sequence for 4933412D19Rik (NM_026229.1,1376-1394).
ccctctccagcatattgtt

SEQ ID NO: 722811 - DNA, 19 bp, Mus musculus
  siRNA target sequence for 4933412D19Rik (NM_026229.1,1414-1432).
caggcaccagagaagcata

SEQ ID NO: 722812 - DNA, 19 bp, Mus musculus
  siRNA target sequence for Pigm (NM_026234.2,229-247).
cgggtcgccctggttttct

SEQ ID NO: 722813 - DNA, 19 bp, Mus musculus
  siRNA target sequence for Pigm (NM_026234.2,230-248).
gggtcgccctggttttcta

SEQ ID NO: 722814 - DNA, 19 bp, Mus musculus
  siRNA target sequence for Pigm (NM_026234.2,281-299).
ggtacaccgacatagacta

SEQ ID NO: 722815 - DNA, 19 bp, Mus musculus
  siRNA target sequence for Pigm (NM_026234.2,609-627).
ctcgaccctgtacttcata

SEQ ID NO: 722816 - DNA, 19 bp, Mus musculus
  siRNA target sequence for Pigm (NM_026234.2,611-629).
cgaccctgtacttcataga

SEQ ID NO: 722817 - DNA, 19 bp, Mus musculus
  siRNA target sequence for Pigm (NM_026234.2,757-775).
cggcaagcccggttctctt

SEQ ID NO: 722818 - DNA, 19 bp, Mus musculus
  siRNA target sequence for Pigm (NM_026234.2,758-776).
ggcaagcccggttctcttt

SEQ ID NO: 722819 - DNA, 19 bp, Mus musculus
  siRNA target sequence for Pigm (NM_026234.2,773-791).
ctttccaggctcgtttgta

SEQ ID NO: 722820 - DNA, 19 bp, Mus musculus
  siRNA target sequence for Pigm (NM_026234.2,818-836).
gggcagtgctgcttttcgt

SEQ ID NO: 722821 - DNA, 19 bp, Mus musculus
  siRNA target sequence for Pigm (NM_026234.2,865-883).
ctgagcttcggtttttact

SEQ ID NO: 722822 - DNA, 19 bp, Mus musculus
  siRNA target sequence for Pigm (NM_026234.2,867-885).
gagcttcggtttttactat

SEQ ID NO: 722823 - DNA, 19 bp, Mus musculus
  siRNA target sequence for Pigm (NM_026234.2,936-954).
gagggatatccgccataat

SEQ ID NO: 722824 - DNA, 19 bp, Mus musculus
  siRNA target sequence for Pigm (NM_026234.2,938-956).
gggatatccgccataattt

SEQ ID NO: 722825 - DNA, 19 bp, Mus musculus
  siRNA target sequence for Pigm (NM_026234.2,940-958).
gatatccgccataatttct

SEQ ID NO: 722826 - DNA, 19 bp, Mus musculus
  siRNA target sequence for Pigm (NM_026234.2,959-977).
ctccgtacttctatatgct

SEQ ID NO: 722827 - DNA, 19 bp, Mus musculus
  siRNA target sequence for Pigm (NM_026234.2,990-1008).
cgagagcaagtggagtttt

SEQ ID NO: 722828 - DNA, 19 bp, Mus musculus
  siRNA target sequence for Pigm (NM_026234.2,995-1013).
gcaagtggagttttactct

SEQ ID NO: 722829 - DNA, 19 bp, Mus musculus
  siRNA target sequence for Pigm (NM_026234.2,1025-1043).
cgttcctgccacagttcat

SEQ ID NO: 722830 - DNA, 19 bp, Mus musculus
  siRNA target sequence for Pigm (NM_026234.2,1057-1075).
gcatctttcgcctactaca

SEQ ID NO: 722831 - DNA, 19 bp, Mus musculus
  siRNA target sequence for Pigm (NM_026234.2,1098-1116).
ccttcatacgtccattttt

SEQ ID NO: 722832 - DNA, 19 bp, Mus musculus
  siRNA target sequence for Pigm (NM_026234.2,1136-1154).
gcacctctcagtactttct

SEQ ID NO: 722833 - DNA, 19 bp, Mus musculus
  siRNA target sequence for Pigm (NM_026234.2,1137-1155).
cacctctcagtactttctt

SEQ ID NO: 722834 - DNA, 19 bp, Mus musculus
  siRNA target sequence for Pigm (NM_026234.2,1142-1160).
ctcagtactttctttggta

SEQ ID NO: 722835 - DNA, 19 bp, Mus musculus
  siRNA target sequence for Pigm (NM_026234.2,1211-1229).
gagccgtagtcctcttact

SEQ ID NO: 722836 - DNA, 19 bp, Mus musculus
  siRNA target sequence for Pigm (NM_026234.2,1214-1232).
ccgtagtcctcttactgtt

SEQ ID NO: 722837 - DNA, 19 bp, Mus musculus
  siRNA target sequence for Pigm (NM_026234.2,1257-1275).
gctggctcctgcatatgtt

SEQ ID NO: 722838 - DNA, 19 bp, Mus musculus
  siRNA target sequence for Pigm (NM_026234.2,1262-1280).
ctcctgcatatgttctaga

SEQ ID NO: 722839 - DNA, 19 bp, Mus musculus
  siRNA target sequence for Pigm (NM_026234.2,1265-1283).
ctgcatatgttctagagtt

SEQ ID NO: 722840 - DNA, 19 bp, Mus musculus
  siRNA target sequence for Pigm (NM_026234.2,1268-1286).
catatgttctagagtttca

SEQ ID NO: 722841 - DNA, 19 bp, Mus musculus
  siRNA target sequence for Pigm (NM_026234.2,1341-1359).
caactgttccatactgatt

SEQ ID NO: 722842 - DNA, 19 bp, Mus musculus
  siRNA target sequence for Pigm (NM_026234.2,1350-1368).
catactgattcagattatt

SEQ ID NO: 722843 - DNA, 19 bp, Mus musculus
  siRNA target sequence for Pigm (NM_026234.2,1387-1405).
cgcctaacggagagaatca

SEQ ID NO: 722844 - DNA, 19 bp, Mus musculus
  siRNA target sequence for Pigm (NM_026234.2,1388-1406).
gcctaacggagagaatcaa

SEQ ID NO: 722845 - DNA, 19 bp, Mus musculus
  siRNA target sequence for Pigm (NM_026234.2,1389-1407).
cctaacggagagaatcaaa

SEQ ID NO: 722846 - DNA, 19 bp, Mus musculus
  siRNA target sequence for Pigm (NM_026234.2,1390-1408).
ctaacggagagaatcaaat

SEQ ID NO: 722847 - DNA, 19 bp, Mus musculus
  siRNA target sequence for Pigm (NM_026234.2,1394-1412).
cggagagaatcaaatacga

SEQ ID NO: 722848 - DNA, 19 bp, Mus musculus
  siRNA target sequence for 8430408H12Rik (NM_026236.1,65-83).
ggtttcttatgtaattcga

SEQ ID NO: 722849 - DNA, 19 bp, Mus musculus
  siRNA target sequence for 8430408H12Rik (NM_026236.1,162-180).
ggtcgagactccatcataa

SEQ ID NO: 722850 - DNA, 19 bp, Mus musculus
  siRNA target sequence for 8430408H12Rik (NM_026236.1,203-221).
caagcaagatccgtacata

SEQ ID NO: 722851 - DNA, 19 bp, Mus musculus
  siRNA target sequence for 8430408H12Rik (NM_026236.1,207-225).
caagatccgtacatagcat

SEQ ID NO: 722852 - DNA, 19 bp, Mus musculus
  siRNA target sequence for 8430408H12Rik (NM_026236.1,226-244).
ctatggagcaccatacaga

SEQ ID NO: 722853 - DNA, 19 bp, Mus musculus
  siRNA target sequence for 8430408H12Rik (NM_026236.1,236-254).
ccatacagactgggtaaat

SEQ ID NO: 722854 - DNA, 19 bp, Mus musculus
  siRNA target sequence for 8430408H12Rik (NM_026236.1,272-290).
caatgggaaaacgctaatt

SEQ ID NO: 722855 - DNA, 19 bp, Mus musculus
  siRNA target sequence for 8430408H12Rik (NM_026236.1,358-376).
ggacgcataaggactatgt

SEQ ID NO: 722856 - DNA, 19 bp, Mus musculus
  siRNA target sequence for 8430408H12Rik (NM_026236.1,359-377).
gacgcataaggactatgta

SEQ ID NO: 722857 - DNA, 19 bp, Mus musculus
  siRNA target sequence for 8430408H12Rik (NM_026236.1,361-379).
cgcataaggactatgtaaa

SEQ ID NO: 722858 - DNA, 19 bp, Mus musculus
  siRNA target sequence for 8430408H12Rik (NM_026236.1,388-406).
cgtacgccaaggataaaga

SEQ ID NO: 722859 - DNA, 19 bp, Mus musculus
  siRNA target sequence for 8430408H12Rik (NM_026236.1,469-487).
cactgactgcctcaaacaa

SEQ ID NO: 722860 - DNA, 19 bp, Mus musculus
  siRNA target sequence for 8430408H12Rik (NM_026236.1,471-489).
ctgactgcctcaaacaaca

SEQ ID NO: 722861 - DNA, 19 bp, Mus musculus
  siRNA target sequence for 8430408H12Rik (NM_026236.1,515-533).
gaacaaagactccatttat

SEQ ID NO: 722862 - DNA, 19 bp, Mus musculus
  siRNA target sequence for 8430408H12Rik (NM_026236.1,610-628).
gaacctgcgcgaaactcat

SEQ ID NO: 722863 - DNA, 19 bp, Mus musculus
  siRNA target sequence for 8430408H12Rik (NM_026236.1,757-775).
cataccgagtccatgatga

SEQ ID NO: 722864 - DNA, 19 bp, Mus musculus
  siRNA target sequence for 8430408H12Rik (NM_026236.1,797-815).
caacgatgcctttacacat

SEQ ID NO: 722865 - DNA, 19 bp, Mus musculus
  siRNA target sequence for 8430408H12Rik (NM_026236.1,800-818).
cgatgcctttacacatgta

SEQ ID NO: 722866 - DNA, 19 bp, Mus musculus
  siRNA target sequence for 8430408H12Rik (NM_026236.1,806-824).
ctttacacatgtatattct

SEQ ID NO: 722867 - DNA, 19 bp, Mus musculus
  siRNA target sequence for 8430408H12Rik (NM_026236.1,829-847).
gacgagacaggaaaatcta

SEQ ID NO: 722868 - DNA, 19 bp, Mus musculus
  siRNA target sequence for 8430408H12Rik (NM_026236.1,868-886).
ctgacattcgggtactgat

SEQ ID NO: 722869 - DNA, 19 bp, Mus musculus
  siRNA target sequence for 8430408H12Rik (NM_026236.1,872-890).
cattcgggtactgatttgt

SEQ ID NO: 722870 - DNA, 19 bp, Mus musculus
  siRNA target sequence for 8430408H12Rik (NM_026236.1,878-896).
ggtactgatttgtgaagaa

SEQ ID NO: 722871 - DNA, 19 bp, Mus musculus
  siRNA target sequence for 8430408H12Rik (NM_026236.1,967-985).
caaagtccacagtaaataa

SEQ ID NO: 722872 - DNA, 19 bp, Mus musculus
  siRNA target sequence for 8430408H12Rik (NM_026236.1,991-1009).
cactgaagggaattcataa

SEQ ID NO: 722873 - DNA, 19 bp, Mus musculus
  siRNA target sequence for 8430408H12Rik (NM_026236.1,995-1013).
gaagggaattcataatttt

SEQ ID NO: 722874 - DNA, 19 bp, Mus musculus
  siRNA target sequence for 8430408H12Rik (NM_026236.1,998-1016).
gggaattcataattttcga

SEQ ID NO: 722875 - DNA, 19 bp, Mus musculus
  siRNA target sequence for 8430408H12Rik (NM_026236.1,1018-1036).
cctctggtgattatgacaa

SEQ ID NO: 722876 - DNA, 19 bp, Mus musculus
  siRNA target sequence for 8430408H12Rik (NM_026236.1,1019-1037).
ctctggtgattatgacaat

SEQ ID NO: 722877 - DNA, 19 bp, Mus musculus
  siRNA target sequence for 8430408H12Rik (NM_026236.1,1023-1041).
ggtgattatgacaatgatt

SEQ ID NO: 722878 - DNA, 19 bp, Mus musculus
  siRNA target sequence for 8430408H12Rik (NM_026236.1,1026-1044).
gattatgacaatgattgta

SEQ ID NO: 722879 - DNA, 19 bp, Mus musculus
  siRNA target sequence for 8430408H12Rik (NM_026236.1,1069-1087).
cacagcccgaccaagttat

SEQ ID NO: 722880 - DNA, 19 bp, Mus musculus
  siRNA target sequence for 8430408H12Rik (NM_026236.1,1071-1089).
cagcccgaccaagttatta

SEQ ID NO: 722881 - DNA, 19 bp, Mus musculus
  siRNA target sequence for 8430408H12Rik (NM_026236.1,1073-1091).
gcccgaccaagttattaaa

SEQ ID NO: 722882 - DNA, 19 bp, Mus musculus
  siRNA target sequence for 8430408H12Rik (NM_026236.1,1128-1146).
gacaagcgacacatattaa

SEQ ID NO: 722883 - DNA, 19 bp, Mus musculus
  siRNA target sequence for 8430408H12Rik (NM_026236.1,1133-1151).
gcgacacatattaaccaaa

SEQ ID NO: 722884 - DNA, 19 bp, Mus musculus
  siRNA target sequence for 8430408H12Rik (NM_026236.1,1170-1188).
gcgtactgggatgtattga

SEQ ID NO: 722885 - DNA, 19 bp, Mus musculus
  siRNA target sequence for 8430408H12Rik (NM_026236.1,1171-1189).
cgtactgggatgtattgaa

SEQ ID NO: 722886 - DNA, 19 bp, Mus musculus
  siRNA target sequence for 8430408H12Rik (NM_026236.1,1211-1229).
gggcaaagtggactttgaa

SEQ ID NO: 722887 - DNA, 19 bp, Mus musculus
  siRNA target sequence for 8430408H12Rik (NM_026236.1,1257-1275).
gtgtatgttccaaattggt

SEQ ID NO: 722888 - DNA, 19 bp, Mus musculus
  siRNA target sequence for 8430408H12Rik (NM_026236.1,1273-1291).
ggttctcagtagacctaaa

SEQ ID NO: 722889 - DNA, 19 bp, Mus musculus
  siRNA target sequence for 8430408H12Rik (NM_026236.1,1274-1292).
gttctcagtagacctaaaa

SEQ ID NO: 722890 - DNA, 19 bp, Mus musculus
  siRNA target sequence for 8430408H12Rik (NM_026236.1,1340-1358).
ctgggtttctgcgaaagat

SEQ ID NO: 722891 - DNA, 19 bp, Mus musculus
  siRNA target sequence for 8430408H12Rik (NM_026236.1,1380-1398).
gggtcagacccaaaactga

SEQ ID NO: 722892 - DNA, 19 bp, Mus musculus
  siRNA target sequence for 8430408H12Rik (NM_026236.1,1400-1418).
cttaggaggacttctacta

SEQ ID NO: 722893 - DNA, 19 bp, Mus musculus
  siRNA target sequence for 8430408H12Rik (NM_026236.1,1515-1533).
gtccagaagggaaatggtt

SEQ ID NO: 722894 - DNA, 19 bp, Mus musculus
  siRNA target sequence for 8430408H12Rik (NM_026236.1,1549-1567).
cacacaccccggtgatctt

SEQ ID NO: 722895 - DNA, 19 bp, Mus musculus
  siRNA target sequence for 8430408H12Rik (NM_026236.1,1575-1593).
gctggaggtcgcacactat

SEQ ID NO: 722896 - DNA, 19 bp, Mus musculus
  siRNA target sequence for 8430408H12Rik (NM_026236.1,1576-1594).
ctggaggtcgcacactatt

SEQ ID NO: 722897 - DNA, 19 bp, Mus musculus
  siRNA target sequence for 8430408H12Rik (NM_026236.1,1578-1596).
ggaggtcgcacactattca

SEQ ID NO: 722898 - DNA, 19 bp, Mus musculus
  siRNA target sequence for 8430408H12Rik (NM_026236.1,1656-1674).
ccacaatgggtgattgaca

SEQ ID NO: 722899 - DNA, 19 bp, Mus musculus
  siRNA target sequence for 8430408H12Rik (NM_026236.1,1657-1675).
cacaatgggtgattgacat

SEQ ID NO: 722900 - DNA, 19 bp, Mus musculus
  siRNA target sequence for 8430408H12Rik (NM_026236.1,1694-1712).
gcccaaattcaacaaaatt

SEQ ID NO: 722901 - DNA, 19 bp, Mus musculus
  siRNA target sequence for 8430408H12Rik (NM_026236.1,1811-1829).
gcacgtctacgagaagatt

SEQ ID NO: 722902 - DNA, 19 bp, Mus musculus
  siRNA target sequence for 8430408H12Rik (NM_026236.1,1815-1833).
gtctacgagaagattatca

SEQ ID NO: 722903 - DNA, 19 bp, Mus musculus
  siRNA target sequence for 8430408H12Rik (NM_026236.1,1858-1876).
ccagctcttctaataatga

SEQ ID NO: 722904 - DNA, 19 bp, Mus musculus
  siRNA target sequence for 8430408H12Rik (NM_026236.1,1859-1877).
cagctcttctaataatgaa

SEQ ID NO: 722905 - DNA, 19 bp, Mus musculus
  siRNA target sequence for 8430408H12Rik (NM_026236.1,1942-1960).
gccaggaccaggttttgga

SEQ ID NO: 722906 - DNA, 19 bp, Mus musculus
  siRNA target sequence for 8430408H12Rik (NM_026236.1,1978-1996).
ggacagtaaagcacttcat

SEQ ID NO: 722907 - DNA, 19 bp, Mus musculus
  siRNA target sequence for 8430408H12Rik (NM_026236.1,2011-2029).
gggacctcaccctccatta

SEQ ID NO: 722908 - DNA, 19 bp, Mus musculus
  siRNA target sequence for 9030612I22Rik (NM_026238.2,1031-1049).
ggctgaagtcacctatcaa

SEQ ID NO: 722909 - DNA, 19 bp, Mus musculus
  siRNA target sequence for 9030612I22Rik (NM_026238.2,1123-1141).
cctatggtttccgtaatat

SEQ ID NO: 722910 - DNA, 19 bp, Mus musculus
  siRNA target sequence for 9030612I22Rik (NM_026238.2,1170-1188).
ggccgctgtccctaccatt

SEQ ID NO: 722911 - DNA, 19 bp, Mus musculus
  siRNA target sequence for 9030612I22Rik (NM_026238.2,1171-1189).
gccgctgtccctaccatta

SEQ ID NO: 722912 - DNA, 19 bp, Mus musculus
  siRNA target sequence for 9030612I22Rik (NM_026238.2,1174-1192).
gctgtccctaccattacgt

SEQ ID NO: 722913 - DNA, 19 bp, Mus musculus
  siRNA target sequence for 9030612I22Rik (NM_026238.2,1394-1412).
gctgcacacacaataccat

SEQ ID NO: 722914 - DNA, 19 bp, Mus musculus
  siRNA target sequence for 9030603L14Rik (NM_026239.2,288-306).
ggcatccccacgaaccata

SEQ ID NO: 722915 - DNA, 19 bp, Mus musculus
  siRNA target sequence for 9030603L14Rik (NM_026239.2,289-307).
gcatccccacgaaccataa

SEQ ID NO: 722916 - DNA, 19 bp, Mus musculus
  siRNA target sequence for 9030603L14Rik (NM_026239.2,293-311).
ccccacgaaccataactat

SEQ ID NO: 722917 - DNA, 19 bp, Mus musculus
  siRNA target sequence for 9030603L14Rik (NM_026239.2,295-313).
ccacgaaccataactatca

SEQ ID NO: 722918 - DNA, 19 bp, Mus musculus
  siRNA target sequence for 9030603L14Rik (NM_026239.2,296-314).
cacgaaccataactatcat

SEQ ID NO: 722919 - DNA, 19 bp, Mus musculus
  siRNA target sequence for 9030603L14Rik (NM_026239.2,471-489).
cctccttcggaaaagtatt

SEQ ID NO: 722920 - DNA, 19 bp, Mus musculus
  siRNA target sequence for 9030603L14Rik (NM_026239.2,474-492).
ccttcggaaaagtattggt

SEQ ID NO: 722921 - DNA, 19 bp, Mus musculus
  siRNA target sequence for 9030603L14Rik (NM_026239.2,735-753).
ggagcaaccatccttgtat

SEQ ID NO: 722922 - DNA, 19 bp, Mus musculus
  siRNA target sequence for 9130427A09Rik (NM_026240.1,217-235).
gcccaagctccgtgtttct

SEQ ID NO: 722923 - DNA, 19 bp, Mus musculus
  siRNA target sequence for 9130427A09Rik (NM_026240.1,219-237).
ccaagctccgtgtttctca

SEQ ID NO: 722924 - DNA, 19 bp, Mus musculus
  siRNA target sequence for 9130427A09Rik (NM_026240.1,586-604).
cttggcctgtggtcaaaat

SEQ ID NO: 722925 - DNA, 19 bp, Mus musculus
  siRNA target sequence for 9130427A09Rik (NM_026240.1,597-615).
gtcaaaatccagttttgat

SEQ ID NO: 722926 - DNA, 19 bp, Mus musculus
  siRNA target sequence for 9130427A09Rik (NM_026240.1,613-631).
gatggttccagtttgttga

SEQ ID NO: 722927 - DNA, 19 bp, Mus musculus
  siRNA target sequence for 9130427A09Rik (NM_026240.1,620-638).
ccagtttgttgagtgataa

SEQ ID NO: 722928 - DNA, 19 bp, Mus musculus
  siRNA target sequence for 9130427A09Rik (NM_026240.1,639-657).
gaatgactgtaaaactgaa

SEQ ID NO: 722929 - DNA, 19 bp, Mus musculus
  siRNA target sequence for 9130427A09Rik (NM_026240.1,671-689).
ctaagaccgaaagaaaaaa

SEQ ID NO: 722930 - DNA, 19 bp, Mus musculus
  siRNA target sequence for 9130427A09Rik (NM_026240.1,695-713).
catcgtctagtcagtacaa

SEQ ID NO: 722931 - DNA, 19 bp, Mus musculus
  siRNA target sequence for 9130427A09Rik (NM_026240.1,715-733).
gcgaacatgcactttcaca

SEQ ID NO: 722932 - DNA, 19 bp, Mus musculus
  siRNA target sequence for 9130427A09Rik (NM_026240.1,820-838).
ctctttgtgtcggaaaact

SEQ ID NO: 722933 - DNA, 19 bp, Mus musculus
  siRNA target sequence for 9130427A09Rik (NM_026240.1,826-844).
gtgtcggaaaactggattt

SEQ ID NO: 722934 - DNA, 19 bp, Mus musculus
  siRNA target sequence for 9130427A09Rik (NM_026240.1,890-908).
cagctttctcggtaacctt

SEQ ID NO: 722935 - DNA, 19 bp, Mus musculus
  siRNA target sequence for 9130427A09Rik (NM_026240.1,899-917).
cggtaaccttgatcaagaa

SEQ ID NO: 722936 - DNA, 19 bp, Mus musculus
  siRNA target sequence for 9130427A09Rik (NM_026240.1,963-981).
ggtcacagacaggtacata

SEQ ID NO: 722937 - DNA, 19 bp, Mus musculus
  siRNA target sequence for 9130427A09Rik (NM_026240.1,964-982).
gtcacagacaggtacatat

SEQ ID NO: 722938 - DNA, 19 bp, Mus musculus
  siRNA target sequence for 9130427A09Rik (NM_026240.1,968-986).
cagacaggtacatattcgt

SEQ ID NO: 722939 - DNA, 19 bp, Mus musculus
  siRNA target sequence for 9130427A09Rik (NM_026240.1,974-992).
ggtacatattcgtttcctt

SEQ ID NO: 722940 - DNA, 19 bp, Mus musculus
  siRNA target sequence for 9130427A09Rik (NM_026240.1,999-1017).
cagagactcaacctacaaa

SEQ ID NO: 722941 - DNA, 19 bp, Mus musculus
  siRNA target sequence for 9130427A09Rik (NM_026240.1,1001-1019).
gagactcaacctacaaact

SEQ ID NO: 722942 - DNA, 19 bp, Mus musculus
  siRNA target sequence for 9130427A09Rik (NM_026240.1,1030-1048).
gtgtgcggacacttagaga

SEQ ID NO: 722943 - DNA, 19 bp, Mus musculus
  siRNA target sequence for 9130427A09Rik (NM_026240.1,1050-1068).
cacaagtgttggtaacagt

SEQ ID NO: 722944 - DNA, 19 bp, Mus musculus
  siRNA target sequence for 9130427A09Rik (NM_026240.1,1126-1144).
ctggatttcaatgatgaat

SEQ ID NO: 722945 - DNA, 19 bp, Mus musculus
  siRNA target sequence for 9130427A09Rik (NM_026240.1,1178-1196).
ggcaagacttggaaggata

SEQ ID NO: 722946 - DNA, 19 bp, Mus musculus
  siRNA target sequence for 9130427A09Rik (NM_026240.1,1211-1229).
cccagactccggaatctga

SEQ ID NO: 722947 - DNA, 19 bp, Mus musculus
  siRNA target sequence for 9130427A09Rik (NM_026240.1,1353-1371).
gcctgcccatggtcaatca

SEQ ID NO: 722948 - DNA, 19 bp, Mus musculus
  siRNA target sequence for 9130427A09Rik (NM_026240.1,1434-1452).
gatagtctatgcaattatt

SEQ ID NO: 722949 - DNA, 19 bp, Mus musculus
  siRNA target sequence for 9130427A09Rik (NM_026240.1,1485-1503).
gagatacaggattaacact

SEQ ID NO: 722950 - DNA, 19 bp, Mus musculus
  siRNA target sequence for 9130427A09Rik (NM_026240.1,1579-1597).
ggatcacaaatgcagttaa

SEQ ID NO: 722951 - DNA, 19 bp, Mus musculus
  siRNA target sequence for 9130427A09Rik (NM_026240.1,1580-1598).
gatcacaaatgcagttaaa

SEQ ID NO: 722952 - DNA, 19 bp, Mus musculus
  siRNA target sequence for 9130427A09Rik (NM_026240.1,1583-1601).
cacaaatgcagttaaatgt

SEQ ID NO: 722953 - DNA, 19 bp, Mus musculus
  siRNA target sequence for 9130427A09Rik (NM_026240.1,1621-1639).
cttacagctaacatagtga

SEQ ID NO: 722954 - DNA, 19 bp, Mus musculus
  siRNA target sequence for 9130427A09Rik (NM_026240.1,1625-1643).
cagctaacatagtgaaatt

SEQ ID NO: 722955 - DNA, 19 bp, Mus musculus
  siRNA target sequence for 4833425H18Rik (NM_026245.1,429-447).
gagaagatggtgaattaga

SEQ ID NO: 722956 - DNA, 19 bp, Mus musculus
  siRNA target sequence for 4833425H18Rik (NM_026245.1,596-614).
cacgagaaacataagcata

SEQ ID NO: 722957 - DNA, 19 bp, Mus musculus
  siRNA target sequence for 4833425H18Rik (NM_026245.1,659-677).
gatgttgaacgtatgcaaa

SEQ ID NO: 722958 - DNA, 19 bp, Mus musculus
  siRNA target sequence for 4833425H18Rik (NM_026245.1,662-680).
gttgaacgtatgcaaagtt

SEQ ID NO: 722959 - DNA, 19 bp, Mus musculus
  siRNA target sequence for 4833425H18Rik (NM_026245.1,673-691).
gcaaagttcccgtaagaaa

SEQ ID NO: 722960 - DNA, 19 bp, Mus musculus
  siRNA target sequence for 4833425H18Rik (NM_026245.1,702-720).
cctacagggattatgatgt

SEQ ID NO: 722961 - DNA, 19 bp, Mus musculus
  siRNA target sequence for 4833425H18Rik (NM_026245.1,703-721).
ctacagggattatgatgtt

SEQ ID NO: 722962 - DNA, 19 bp, Mus musculus
  siRNA target sequence for 4833425H18Rik (NM_026245.1,741-759).
ccatcactgtggttcatct

SEQ ID NO: 722963 - DNA, 19 bp, Mus musculus
  siRNA target sequence for 4833425H18Rik (NM_026245.1,751-769).
ggttcatctccagaatctt

SEQ ID NO: 722964 - DNA, 19 bp, Mus musculus
  siRNA target sequence for 4833425H18Rik (NM_026245.1,752-770).
gttcatctccagaatctta

SEQ ID NO: 722965 - DNA, 19 bp, Mus musculus
  siRNA target sequence for 4833425H18Rik (NM_026245.1,833-851).
gtcctcactttctgtctat

SEQ ID NO: 722966 - DNA, 19 bp, Mus musculus
  siRNA target sequence for 4833435D08Rik (NM_026247.1,85-103).
ctaacgactgcgttcagat

SEQ ID NO: 722967 - DNA, 19 bp, Mus musculus
  siRNA target sequence for 4930430A15Rik (NM_026248.1,199-217).
cttggttcatggagttaaa

SEQ ID NO: 722968 - DNA, 19 bp, Mus musculus
  siRNA target sequence for 4930430A15Rik (NM_026248.1,240-258).
gcgatgtcccaaggaaaaa

SEQ ID NO: 722969 - DNA, 19 bp, Mus musculus
  siRNA target sequence for 4930430A15Rik (NM_026248.1,259-277).
cctgttggactttttacgt

SEQ ID NO: 722970 - DNA, 19 bp, Mus musculus
  siRNA target sequence for 4930430A15Rik (NM_026248.1,266-284).
gactttttacgtgatatga

SEQ ID NO: 722971 - DNA, 19 bp, Mus musculus
  siRNA target sequence for 4930430A15Rik (NM_026248.1,268-286).
ctttttacgtgatatgaaa

SEQ ID NO: 722972 - DNA, 19 bp, Mus musculus
  siRNA target sequence for 4930430A15Rik (NM_026248.1,288-306).
gtatttctgtcccaaatga

SEQ ID NO: 722973 - DNA, 19 bp, Mus musculus
  siRNA target sequence for 4930430A15Rik (NM_026248.1,300-318).
caaatgaaccgagatacaa

SEQ ID NO: 722974 - DNA, 19 bp, Mus musculus
  siRNA target sequence for 4930430A15Rik (NM_026248.1,312-330).
gatacaaacctctcagaaa

SEQ ID NO: 722975 - DNA, 19 bp, Mus musculus
  siRNA target sequence for 4930430A15Rik (NM_026248.1,364-382).
gagactacagagaatgata

SEQ ID NO: 722976 - DNA, 19 bp, Mus musculus
  siRNA target sequence for 4930430A15Rik (NM_026248.1,401-419).
gtgcatgacagagacttta

SEQ ID NO: 722977 - DNA, 19 bp, Mus musculus
  siRNA target sequence for 4930430A15Rik (NM_026248.1,455-473).
ggccaggtggaagtagtaa

SEQ ID NO: 722978 - DNA, 19 bp, Mus musculus
  siRNA target sequence for 4930430A15Rik (NM_026248.1,463-481).
ggaagtagtaagtattcta

SEQ ID NO: 722979 - DNA, 19 bp, Mus musculus
  siRNA target sequence for 4930430A15Rik (NM_026248.1,464-482).
gaagtagtaagtattctat

SEQ ID NO: 722980 - DNA, 19 bp, Mus musculus
  siRNA target sequence for 4930430A15Rik (NM_026248.1,567-585).
gtgtgtgcatattattgaa

SEQ ID NO: 722981 - DNA, 19 bp, Mus musculus
  siRNA target sequence for 4930430A15Rik (NM_026248.1,621-639).
gcaatacttctcttcacta

SEQ ID NO: 722982 - DNA, 19 bp, Mus musculus
  siRNA target sequence for 4930430A15Rik (NM_026248.1,637-655).
ctacgctgtgtcagaagat

SEQ ID NO: 722983 - DNA, 19 bp, Mus musculus
  siRNA target sequence for 4930430A15Rik (NM_026248.1,668-686).
gccaaatgcttgcttaagt

SEQ ID NO: 722984 - DNA, 19 bp, Mus musculus
  siRNA target sequence for 4930430A15Rik (NM_026248.1,779-797).
gtaaagatgggggcaaata

SEQ ID NO: 722985 - DNA, 19 bp, Mus musculus
  siRNA target sequence for 4930430A15Rik (NM_026248.1,784-802).
gatgggggcaaatatacat

SEQ ID NO: 722986 - DNA, 19 bp, Mus musculus
  siRNA target sequence for 4930430A15Rik (NM_026248.1,787-805).
gggggcaaatatacatgta

SEQ ID NO: 722987 - DNA, 19 bp, Mus musculus
  siRNA target sequence for 4930430A15Rik (NM_026248.1,788-806).
ggggcaaatatacatgtat

SEQ ID NO: 722988 - DNA, 19 bp, Mus musculus
  siRNA target sequence for 4930430A15Rik (NM_026248.1,789-807).
gggcaaatatacatgtatt

SEQ ID NO: 722989 - DNA, 19 bp, Mus musculus
  siRNA target sequence for 4930430A15Rik (NM_026248.1,817-835).
gagaagaaacacactctta

SEQ ID NO: 722990 - DNA, 19 bp, Mus musculus
  siRNA target sequence for 4930430A15Rik (NM_026248.1,819-837).
gaagaaacacactcttata

SEQ ID NO: 722991 - DNA, 19 bp, Mus musculus
  siRNA target sequence for 4930430A15Rik (NM_026248.1,841-859).
cataagatgggactcaaaa

SEQ ID NO: 722992 - DNA, 19 bp, Mus musculus
  siRNA target sequence for 4930430A15Rik (NM_026248.1,860-878).
gatatggtcaacctacttt

SEQ ID NO: 722993 - DNA, 19 bp, Mus musculus
  siRNA target sequence for 4930430A15Rik (NM_026248.1,865-883).
ggtcaacctacttttggat

SEQ ID NO: 722994 - DNA, 19 bp, Mus musculus
  siRNA target sequence for 4930430A15Rik (NM_026248.1,939-957).
ctattgaaggcacaagtaa

SEQ ID NO: 722995 - DNA, 19 bp, Mus musculus
  siRNA target sequence for 4930430A15Rik (NM_026248.1,944-962).
gaaggcacaagtaaaggta

SEQ ID NO: 722996 - DNA, 19 bp, Mus musculus
  siRNA target sequence for 4930430A15Rik (NM_026248.1,959-977).
ggtagtcgagagattctta

SEQ ID NO: 722997 - DNA, 19 bp, Mus musculus
  siRNA target sequence for 4930430A15Rik (NM_026248.1,960-978).
gtagtcgagagattcttat

SEQ ID NO: 722998 - DNA, 19 bp, Mus musculus
  siRNA target sequence for 4930430A15Rik (NM_026248.1,974-992).
cttatgaactatgatgaaa

SEQ ID NO: 722999 - DNA, 19 bp, Mus musculus
  siRNA target sequence for 4930430A15Rik (NM_026248.1,1013-1031).
gatggcattccagaataca

SEQ ID NO: 723000 - DNA, 19 bp, Mus musculus
  siRNA target sequence for 4930430A15Rik (NM_026248.1,1016-1034).
ggcattccagaatacaagt

SEQ ID NO: 723001 - DNA, 19 bp, Mus musculus
  siRNA target sequence for 4930430A15Rik (NM_026248.1,1017-1035).
gcattccagaatacaagtt

SEQ ID NO: 723002 - DNA, 19 bp, Mus musculus
  siRNA target sequence for 4930430A15Rik (NM_026248.1,1040-1058).
gaagacaagtcattagaca

SEQ ID NO: 723003 - DNA, 19 bp, Mus musculus
  siRNA target sequence for 4930430A15Rik (NM_026248.1,1130-1148).
gagctggatatttctaagt

SEQ ID NO: 723004 - DNA, 19 bp, Mus musculus
  siRNA target sequence for 4930430A15Rik (NM_026248.1,1132-1150).
gctggatatttctaagtat

SEQ ID NO: 723005 - DNA, 19 bp, Mus musculus
  siRNA target sequence for 4930430A15Rik (NM_026248.1,1154-1172).
cttggtacgtgtcctaata

SEQ ID NO: 723006 - DNA, 19 bp, Mus musculus
  siRNA target sequence for 4930430A15Rik (NM_026248.1,1158-1176).
gtacgtgtcctaataatat

SEQ ID NO: 723007 - DNA, 19 bp, Mus musculus
  siRNA target sequence for 4930430A15Rik (NM_026248.1,1161-1179).
cgtgtcctaataatataca

SEQ ID NO: 723008 - DNA, 19 bp, Mus musculus
  siRNA target sequence for 4930430A15Rik (NM_026248.1,1162-1180).
gtgtcctaataatatacat

SEQ ID NO: 723009 - DNA, 19 bp, Mus musculus
  siRNA target sequence for 4930430A15Rik (NM_026248.1,1272-1290).
ggaaagtgcccaatctgaa

SEQ ID NO: 723010 - DNA, 19 bp, Mus musculus
  siRNA target sequence for 4930430A15Rik (NM_026248.1,1279-1297).
gcccaatctgaatgaagta

SEQ ID NO: 723011 - DNA, 19 bp, Mus musculus
  siRNA target sequence for 4930430A15Rik (NM_026248.1,1421-1439).
ggaacaacacccaaatggt

SEQ ID NO: 723012 - DNA, 19 bp, Mus musculus
  siRNA target sequence for 4930430A15Rik (NM_026248.1,1428-1446).
cacccaaatggtgtcaaaa

SEQ ID NO: 723013 - DNA, 19 bp, Mus musculus
  siRNA target sequence for 4930430A15Rik (NM_026248.1,1432-1450).
caaatggtgtcaaaatgat

SEQ ID NO: 723014 - DNA, 19 bp, Mus musculus
  siRNA target sequence for 4930430A15Rik (NM_026248.1,1437-1455).
ggtgtcaaaatgatacaaa

SEQ ID NO: 723015 - DNA, 19 bp, Mus musculus
  siRNA target sequence for 4930430A15Rik (NM_026248.1,1547-1565).
gcggaatcagctcatttca

SEQ ID NO: 723016 - DNA, 19 bp, Mus musculus
  siRNA target sequence for 4930430A15Rik (NM_026248.1,1620-1638).
gtgaagataaacaactact

SEQ ID NO: 723017 - DNA, 19 bp, Mus musculus
  siRNA target sequence for 4930429B21Rik (NM_026249.1,187-205).
gcctccgcccaaagacatt

SEQ ID NO: 723018 - DNA, 19 bp, Mus musculus
  siRNA target sequence for 4930429B21Rik (NM_026249.1,191-209).
ccgcccaaagacattggaa

SEQ ID NO: 723019 - DNA, 19 bp, Mus musculus
  siRNA target sequence for 4930429B21Rik (NM_026249.1,192-210).
cgcccaaagacattggaaa

SEQ ID NO: 723020 - DNA, 19 bp, Mus musculus
  siRNA target sequence for 4930429B21Rik (NM_026249.1,321-339).
ctgcatgtgaatacttgta

SEQ ID NO: 723021 - DNA, 19 bp, Mus musculus
  siRNA target sequence for 4930429B21Rik (NM_026249.1,323-341).
gcatgtgaatacttgtata

SEQ ID NO: 723022 - DNA, 19 bp, Mus musculus
  siRNA target sequence for 4930429B21Rik (NM_026249.1,371-389).
gacacgaattttccatatt

SEQ ID NO: 723023 - DNA, 19 bp, Mus musculus
  siRNA target sequence for 4930429B21Rik (NM_026249.1,384-402).
catattaccggcagagtat

SEQ ID NO: 723024 - DNA, 19 bp, Mus musculus
  siRNA target sequence for 4930429B21Rik (NM_026249.1,409-427).
gcagcatcaagtactttca

SEQ ID NO: 723025 - DNA, 19 bp, Mus musculus
  siRNA target sequence for 4930429B21Rik (NM_026249.1,413-431).
catcaagtactttcacatt

SEQ ID NO: 723026 - DNA, 19 bp, Mus musculus
  siRNA target sequence for 4930429B21Rik (NM_026249.1,432-450).
gtgtgtggttattgtgtaa

SEQ ID NO: 723027 - DNA, 19 bp, Mus musculus
  siRNA target sequence for 4930429B21Rik (NM_026249.1,466-484).
gccaagatctaaatatggt

SEQ ID NO: 723028 - DNA, 19 bp, Mus musculus
  siRNA target sequence for 4930424G05Rik (NM_026251.1,543-561).
cctgaagaaggcttagtgt

SEQ ID NO: 723029 - DNA, 19 bp, Mus musculus
  siRNA target sequence for 4930424G05Rik (NM_026251.1,587-605).
ggagaatgaagatgaatgt

SEQ ID NO: 723030 - DNA, 19 bp, Mus musculus
  siRNA target sequence for 4930424G05Rik (NM_026251.1,654-672).
ggggatccagccatagtga

SEQ ID NO: 723031 - DNA, 19 bp, Mus musculus
  siRNA target sequence for 4930424G05Rik (NM_026251.1,669-687).
gtgagcgccttccaaaata

SEQ ID NO: 723032 - DNA, 19 bp, Mus musculus
  siRNA target sequence for 4930424G05Rik (NM_026251.1,1119-1137).
cgcctggatgattactact

SEQ ID NO: 723033 - DNA, 19 bp, Mus musculus
  siRNA target sequence for 4930424G05Rik (NM_026251.1,1289-1307).
gggccaggtagctgtatca

SEQ ID NO: 723034 - DNA, 19 bp, Mus musculus
  siRNA target sequence for 4930424G05Rik (NM_026251.1,1290-1308).
ggccaggtagctgtatcaa

SEQ ID NO: 723035 - DNA, 19 bp, Mus musculus
  siRNA target sequence for 4930424G05Rik (NM_026251.1,1295-1313).
ggtagctgtatcaacatgt

SEQ ID NO: 723036 - DNA, 19 bp, Mus musculus
  siRNA target sequence for 4930424G05Rik (NM_026251.1,1296-1314).
gtagctgtatcaacatgtt

SEQ ID NO: 723037 - DNA, 19 bp, Mus musculus
  siRNA target sequence for 4930424G05Rik (NM_026251.1,1299-1317).
gctgtatcaacatgtttta

SEQ ID NO: 723038 - DNA, 19 bp, Mus musculus
  siRNA target sequence for 4930424G05Rik (NM_026251.1,1330-1348).
ctattgacgctgtatctca

SEQ ID NO: 723039 - DNA, 19 bp, Mus musculus
  siRNA target sequence for 4930424G05Rik (NM_026251.1,1386-1404).
cagaggcttcgggtattgt

SEQ ID NO: 723040 - DNA, 19 bp, Mus musculus
  siRNA target sequence for 4930424G05Rik (NM_026251.1,1511-1529).
gctctttcaggccttaaaa

SEQ ID NO: 723041 - DNA, 19 bp, Mus musculus
  siRNA target sequence for 4930424G05Rik (NM_026251.1,1705-1723).
ctgaccagggtctacacat

SEQ ID NO: 723042 - DNA, 19 bp, Mus musculus
  siRNA target sequence for 4930424G05Rik (NM_026251.1,1710-1728).
cagggtctacacatgctat

SEQ ID NO: 723043 - DNA, 19 bp, Mus musculus
  siRNA target sequence for 4930424G05Rik (NM_026251.1,1836-1854).
gtggtacttcagaatcagt

SEQ ID NO: 723044 - DNA, 19 bp, Mus musculus
  siRNA target sequence for 4930424G05Rik (NM_026251.1,1838-1856).
ggtacttcagaatcagttt

SEQ ID NO: 723045 - DNA, 19 bp, Mus musculus
  siRNA target sequence for 4930442L21Rik (NM_026253.2,362-380).
cccttaatgtggcaaagaa

SEQ ID NO: 723046 - DNA, 19 bp, Mus musculus
  siRNA target sequence for 4930442L21Rik (NM_026253.2,384-402).
catcaaaatcacatttgat

SEQ ID NO: 723047 - DNA, 19 bp, Mus musculus
  siRNA target sequence for 4930442L21Rik (NM_026253.2,462-480).
gcggctcagtgatatagat

SEQ ID NO: 723048 - DNA, 19 bp, Mus musculus
  siRNA target sequence for 4930442L21Rik (NM_026253.2,464-482).
ggctcagtgatatagatga

SEQ ID NO: 723049 - DNA, 19 bp, Mus musculus
  siRNA target sequence for 4930442L21Rik (NM_026253.2,487-505).
gatcttagccggaatatga

SEQ ID NO: 723050 - DNA, 19 bp, Mus musculus
  siRNA target sequence for 4930442L21Rik (NM_026253.2,490-508).
cttagccggaatatgatca

SEQ ID NO: 723051 - DNA, 19 bp, Mus musculus
  siRNA target sequence for 4930442L21Rik (NM_026253.2,494-512).
gccggaatatgatcagaaa

SEQ ID NO: 723052 - DNA, 19 bp, Mus musculus
  siRNA target sequence for 4930442L21Rik (NM_026253.2,495-513).
ccggaatatgatcagaaaa

SEQ ID NO: 723053 - DNA, 19 bp, Mus musculus
  siRNA target sequence for 4930442L21Rik (NM_026253.2,551-569).
ggctcgacctgcacagtaa

SEQ ID NO: 723054 - DNA, 19 bp, Mus musculus
  siRNA target sequence for 4930442L21Rik (NM_026253.2,579-597).
caagctccctgaatccatt

SEQ ID NO: 723055 - DNA, 19 bp, Mus musculus
  siRNA target sequence for 4930442L21Rik (NM_026253.2,622-640).
ctcaatgtgagcaacaaca

SEQ ID NO: 723056 - DNA, 19 bp, Mus musculus
  siRNA target sequence for 4930442L21Rik (NM_026253.2,866-884).
cagatgaatcggagatgtt

SEQ ID NO: 723057 - DNA, 19 bp, Mus musculus
  siRNA target sequence for 4930442L21Rik (NM_026253.2,882-900).
gttcgtagactccatcaaa

SEQ ID NO: 723058 - DNA, 19 bp, Mus musculus
  siRNA target sequence for 4930442L21Rik (NM_026253.2,925-943).
gaagagaaggatatgtgtt

SEQ ID NO: 723059 - DNA, 19 bp, Mus musculus
  siRNA target sequence for 4930442L21Rik (NM_026253.2,928-946).
gagaaggatatgtgttcat

SEQ ID NO: 723060 - DNA, 19 bp, Mus musculus
  siRNA target sequence for 4930442L21Rik (NM_026253.2,974-992).
gggacaagttgaataaaat

SEQ ID NO: 723061 - DNA, 19 bp, Mus musculus
  siRNA target sequence for 4930451A13Rik (NM_026254.2,150-168).
gctgggaaaaagatcttga

SEQ ID NO: 723062 - DNA, 19 bp, Mus musculus
  siRNA target sequence for 4930451A13Rik (NM_026254.2,151-169).
ctgggaaaaagatcttgaa

SEQ ID NO: 723063 - DNA, 19 bp, Mus musculus
  siRNA target sequence for 4930451A13Rik (NM_026254.2,183-201).
caggaggttgtgatcttga

SEQ ID NO: 723064 - DNA, 19 bp, Mus musculus
  siRNA target sequence for 4930451A13Rik (NM_026254.2,185-203).
ggaggttgtgatcttgaaa

SEQ ID NO: 723065 - DNA, 19 bp, Mus musculus
  siRNA target sequence for 4930451A13Rik (NM_026254.2,281-299).
gcagggaaaggtgatagtt

SEQ ID NO: 723066 - DNA, 19 bp, Mus musculus
  siRNA target sequence for 4930451A13Rik (NM_026254.2,301-319).
ggcatcatgggatggtatt

SEQ ID NO: 723067 - DNA, 19 bp, Mus musculus
  siRNA target sequence for 4930451A13Rik (NM_026254.2,302-320).
gcatcatgggatggtattt

SEQ ID NO: 723068 - DNA, 19 bp, Mus musculus
  siRNA target sequence for 4930451A13Rik (NM_026254.2,303-321).
catcatgggatggtatttt

SEQ ID NO: 723069 - DNA, 19 bp, Mus musculus
  siRNA target sequence for 4930451A13Rik (NM_026254.2,306-324).
catgggatggtattttaga

SEQ ID NO: 723070 - DNA, 19 bp, Mus musculus
  siRNA target sequence for 4930451A13Rik (NM_026254.2,309-327).
gggatggtattttagactt

SEQ ID NO: 723071 - DNA, 19 bp, Mus musculus
  siRNA target sequence for 4930451A13Rik (NM_026254.2,328-346).
gcctgagcagaacactatt

SEQ ID NO: 723072 - DNA, 19 bp, Mus musculus
  siRNA target sequence for 4930451A13Rik (NM_026254.2,332-350).
gagcagaacactattcata

SEQ ID NO: 723073 - DNA, 19 bp, Mus musculus
  siRNA target sequence for 4930451A13Rik (NM_026254.2,474-492).
ccctgagctggattcatct

SEQ ID NO: 723074 - DNA, 19 bp, Mus musculus
  siRNA target sequence for 4930451A13Rik (NM_026254.2,475-493).
cctgagctggattcatcta

SEQ ID NO: 723075 - DNA, 19 bp, Mus musculus
  siRNA target sequence for 4930451A13Rik (NM_026254.2,480-498).
gctggattcatctactgaa

SEQ ID NO: 723076 - DNA, 19 bp, Mus musculus
  siRNA target sequence for 4930451A13Rik (NM_026254.2,491-509).
ctactgaaaccattgatct

SEQ ID NO: 723077 - DNA, 19 bp, Mus musculus
  siRNA target sequence for 4930451A13Rik (NM_026254.2,521-539).
cctcgcagcgacctataca

SEQ ID NO: 723078 - DNA, 19 bp, Mus musculus
  siRNA target sequence for 4930451A13Rik (NM_026254.2,522-540).
ctcgcagcgacctatacaa

SEQ ID NO: 723079 - DNA, 19 bp, Mus musculus
  siRNA target sequence for 4930451A13Rik (NM_026254.2,524-542).
cgcagcgacctatacaact

SEQ ID NO: 723080 - DNA, 19 bp, Mus musculus
  siRNA target sequence for 4930451A13Rik (NM_026254.2,551-569).
gccgtcatgaataagtaca

SEQ ID NO: 723081 - DNA, 19 bp, Mus musculus
  siRNA target sequence for 4930451A13Rik (NM_026254.2,552-570).
ccgtcatgaataagtacat

SEQ ID NO: 723082 - DNA, 19 bp, Mus musculus
  siRNA target sequence for 4930451A13Rik (NM_026254.2,553-571).
cgtcatgaataagtacatt

SEQ ID NO: 723083 - DNA, 19 bp, Mus musculus
  siRNA target sequence for 4930451A13Rik (NM_026254.2,648-666).
gttcttttcttgacacaaa

SEQ ID NO: 723084 - DNA, 19 bp, Mus musculus
  siRNA target sequence for 4930451A13Rik (NM_026254.2,697-715).
ctggctcgggagccttttt

SEQ ID NO: 723085 - DNA, 19 bp, Mus musculus
  siRNA target sequence for 4930451A13Rik (NM_026254.2,734-752).
gaggtcacccaggcaatat

SEQ ID NO: 723086 - DNA, 19 bp, Mus musculus
  siRNA target sequence for 4930451A13Rik (NM_026254.2,747-765).
caatatgggacggatatct

SEQ ID NO: 723087 - DNA, 19 bp, Mus musculus
  siRNA target sequence for 4930451A13Rik (NM_026254.2,773-791).
gcggacccgttttttattt

SEQ ID NO: 723088 - DNA, 19 bp, Mus musculus
  siRNA target sequence for 4930451A13Rik (NM_026254.2,774-792).
cggacccgttttttattta

SEQ ID NO: 723089 - DNA, 19 bp, Mus musculus
  siRNA target sequence for 4930451A13Rik (NM_026254.2,866-884).
gttatccgctttttggaaa

SEQ ID NO: 723090 - DNA, 19 bp, Mus musculus
  siRNA target sequence for 4930451A13Rik (NM_026254.2,897-915).
gcctgaatctggaagacat

SEQ ID NO: 723091 - DNA, 19 bp, Mus musculus
  siRNA target sequence for 4930451A13Rik (NM_026254.2,898-916).
cctgaatctggaagacata

SEQ ID NO: 723092 - DNA, 19 bp, Mus musculus
  siRNA target sequence for 4930451A13Rik (NM_026254.2,935-953).
gctcagtattactgtagta

SEQ ID NO: 723093 - DNA, 19 bp, Mus musculus
  siRNA target sequence for 4930451A13Rik (NM_026254.2,936-954).
ctcagtattactgtagtaa

SEQ ID NO: 723094 - DNA, 19 bp, Mus musculus
  siRNA target sequence for 4930451A13Rik (NM_026254.2,963-981).
cttcttttaggaaggataa

SEQ ID NO: 723095 - DNA, 19 bp, Mus musculus
  siRNA target sequence for 4930451A13Rik (NM_026254.2,966-984).
cttttaggaaggataacca

SEQ ID NO: 723096 - DNA, 19 bp, Mus musculus
  siRNA target sequence for 4930451A13Rik (NM_026254.2,1048-1066).
gtgtctggctgtttcagta

SEQ ID NO: 723097 - DNA, 19 bp, Mus musculus
  siRNA target sequence for 4930451A13Rik (NM_026254.2,1068-1086).
cagagatccttcaagctaa

SEQ ID NO: 723098 - DNA, 19 bp, Mus musculus
  siRNA target sequence for 4930451A13Rik (NM_026254.2,1247-1265).
cagaaacagtccattgagt

SEQ ID NO: 723099 - DNA, 19 bp, Mus musculus
  siRNA target sequence for 4930451A13Rik (NM_026254.2,1342-1360).
ggtcctcgcacacttctta

SEQ ID NO: 723100 - DNA, 19 bp, Mus musculus
  siRNA target sequence for 4930451A13Rik (NM_026254.2,1346-1364).
ctcgcacacttcttacaga

SEQ ID NO: 723101 - DNA, 19 bp, Mus musculus
  siRNA target sequence for 4930451A13Rik (NM_026254.2,1415-1433).
cagcacctggcagacataa

SEQ ID NO: 723102 - DNA, 19 bp, Mus musculus
  siRNA target sequence for 4930451A13Rik (NM_026254.2,1510-1528).
cgatggtgaatcctgtaat

SEQ ID NO: 723103 - DNA, 19 bp, Mus musculus
  siRNA target sequence for 4930451A13Rik (NM_026254.2,1717-1735).
cggcgatgaagaggaatat

SEQ ID NO: 723104 - DNA, 19 bp, Mus musculus
  siRNA target sequence for 4930451A13Rik (NM_026254.2,1756-1774).
ctcgtccatgtcagatgat

SEQ ID NO: 723105 - DNA, 19 bp, Mus musculus
  siRNA target sequence for 4930451A13Rik (NM_026254.2,1818-1836).
cggacatcaagcatcactt

SEQ ID NO: 723106 - DNA, 19 bp, Mus musculus
  siRNA target sequence for 4930451A13Rik (NM_026254.2,1819-1837).
ggacatcaagcatcacttt

SEQ ID NO: 723107 - DNA, 19 bp, Mus musculus
  siRNA target sequence for 4930451A13Rik (NM_026254.2,1889-1907).
gttaccgccacccatatgt

SEQ ID NO: 723108 - DNA, 19 bp, Mus musculus
  siRNA target sequence for 4930451A13Rik (NM_026254.2,1932-1950).
ggaaaggcctggcttacat

SEQ ID NO: 723109 - DNA, 19 bp, Mus musculus
  siRNA target sequence for 4930451A13Rik (NM_026254.2,1954-1972).
gtctcggcaagcactaaat

SEQ ID NO: 723110 - DNA, 19 bp, Mus musculus
  siRNA target sequence for 4930451A13Rik (NM_026254.2,1981-1999).
gaaaattacgtccaaaaaa

SEQ ID NO: 723111 - DNA, 19 bp, Mus musculus
  siRNA target sequence for 4930451A13Rik (NM_026254.2,2003-2021).
catcccgagctaattacct

SEQ ID NO: 723112 - DNA, 19 bp, Mus musculus
  siRNA target sequence for 4930451A13Rik (NM_026254.2,2009-2027).
gagctaattaccttcaagt

SEQ ID NO: 723113 - DNA, 19 bp, Mus musculus
  siRNA target sequence for 4930451A13Rik (NM_026254.2,2011-2029).
gctaattaccttcaagtat

SEQ ID NO: 723114 - DNA, 19 bp, Mus musculus
  siRNA target sequence for 4930451A13Rik (NM_026254.2,2042-2060).
gcttccgggatagaaatct

SEQ ID NO: 723115 - DNA, 19 bp, Mus musculus
  siRNA target sequence for 4930451A13Rik (NM_026254.2,2074-2092).
gtatttgattccaaatgca

SEQ ID NO: 723116 - DNA, 19 bp, Mus musculus
  siRNA target sequence for 4930451A13Rik (NM_026254.2,2109-2127).
ccataaaacagcagatcat

SEQ ID NO: 723117 - DNA, 19 bp, Mus musculus
  siRNA target sequence for 4930451A13Rik (NM_026254.2,2117-2135).
cagcagatcatgaaagtgt

SEQ ID NO: 723118 - DNA, 19 bp, Mus musculus
  siRNA target sequence for 4921537P18Rik (NM_026256.1,170-188).
gatctttggggctaaggaa

SEQ ID NO: 723119 - DNA, 19 bp, Mus musculus
  siRNA target sequence for 4921537P18Rik (NM_026256.1,236-254).
gtttttcttcggtgaaaat

SEQ ID NO: 723120 - DNA, 19 bp, Mus musculus
  siRNA target sequence for 4921537P18Rik (NM_026256.1,245-263).
cggtgaaaatccaaactat

SEQ ID NO: 723121 - DNA, 19 bp, Mus musculus
  siRNA target sequence for 4921537P18Rik (NM_026256.1,264-282).
ccgaaataccatacaacat

SEQ ID NO: 723122 - DNA, 19 bp, Mus musculus
  siRNA target sequence for 4921537P18Rik (NM_026256.1,265-283).
cgaaataccatacaacata

SEQ ID NO: 723123 - DNA, 19 bp, Mus musculus
  siRNA target sequence for 4921537P18Rik (NM_026256.1,284-302).
cagaccgttggggcatatt

SEQ ID NO: 723124 - DNA, 19 bp, Mus musculus
  siRNA target sequence for 4921537P18Rik (NM_026256.1,286-304).
gaccgttggggcatattca

SEQ ID NO: 723125 - DNA, 19 bp, Mus musculus
  siRNA target sequence for 4921537P18Rik (NM_026256.1,288-306).
ccgttggggcatattcaca

SEQ ID NO: 723126 - DNA, 19 bp, Mus musculus
  siRNA target sequence for 4921537P18Rik (NM_026256.1,433-451).
cagtagtgaccattctagt

SEQ ID NO: 723127 - DNA, 19 bp, Mus musculus
  siRNA target sequence for 4921537P18Rik (NM_026256.1,557-575).
cggcgctgatccgaacatt

SEQ ID NO: 723128 - DNA, 19 bp, Mus musculus
  siRNA target sequence for 4921537P18Rik (NM_026256.1,558-576).
ggcgctgatccgaacatta

SEQ ID NO: 723129 - DNA, 19 bp, Mus musculus
  siRNA target sequence for 4921537P18Rik (NM_026256.1,560-578).
cgctgatccgaacattaga

SEQ ID NO: 723130 - DNA, 19 bp, Mus musculus
  siRNA target sequence for 4921537P18Rik (NM_026256.1,562-580).
ctgatccgaacattagaga

SEQ ID NO: 723131 - DNA, 19 bp, Mus musculus
  siRNA target sequence for 4921537P18Rik (NM_026256.1,637-655).
cctccctactgcttcagta

SEQ ID NO: 723132 - DNA, 19 bp, Mus musculus
  siRNA target sequence for 4921537P18Rik (NM_026256.1,640-658).
ccctactgcttcagtacaa

SEQ ID NO: 723133 - DNA, 19 bp, Mus musculus
  siRNA target sequence for 4921537P18Rik (NM_026256.1,653-671).
gtacaacgctgatatcgaa

SEQ ID NO: 723134 - DNA, 19 bp, Mus musculus
  siRNA target sequence for 4921537P18Rik (NM_026256.1,735-753).
gcagagtttttagtaagaa

SEQ ID NO: 723135 - DNA, 19 bp, Mus musculus
  siRNA target sequence for 4921537P18Rik (NM_026256.1,736-754).
cagagtttttagtaagaat

SEQ ID NO: 723136 - DNA, 19 bp, Mus musculus
  siRNA target sequence for 4921537P18Rik (NM_026256.1,797-815).
cttgatatacgctataaga

SEQ ID NO: 723137 - DNA, 19 bp, Mus musculus
  siRNA target sequence for 4921537P18Rik (NM_026256.1,800-818).
gatatacgctataagatgt

SEQ ID NO: 723138 - DNA, 19 bp, Mus musculus
  siRNA target sequence for 4921537P18Rik (NM_026256.1,814-832).
gatgtggatcaaaagatct

SEQ ID NO: 723139 - DNA, 19 bp, Mus musculus
  siRNA target sequence for 4921537P18Rik (NM_026256.1,846-864).
cttgagaaaggtattgact

SEQ ID NO: 723140 - DNA, 19 bp, Mus musculus
  siRNA target sequence for 4921537P18Rik (NM_026256.1,855-873).
ggtattgacttcttctata

SEQ ID NO: 723141 - DNA, 19 bp, Mus musculus
  siRNA target sequence for 4921537P18Rik (NM_026256.1,881-899).
cttcggatggacagcatta

SEQ ID NO: 723142 - DNA, 19 bp, Mus musculus
  siRNA target sequence for 4921537P18Rik (NM_026256.1,912-930).
gaaggccactgtactttta

SEQ ID NO: 723143 - DNA, 19 bp, Mus musculus
  siRNA target sequence for 4921537P18Rik (NM_026256.1,951-969).
gaagaaagtctacatagta

SEQ ID NO: 723144 - DNA, 19 bp, Mus musculus
  siRNA target sequence for 4921537P18Rik (NM_026256.1,954-972).
gaaagtctacatagtaaca

SEQ ID NO: 723145 - DNA, 19 bp, Mus musculus
  siRNA target sequence for 4921537P18Rik (NM_026256.1,1006-1024).
ccagtacctcctgcatttt

SEQ ID NO: 723146 - DNA, 19 bp, Mus musculus
  siRNA target sequence for 4921537P18Rik (NM_026256.1,1086-1104).
gagactcctgtgcttacaa

SEQ ID NO: 723147 - DNA, 19 bp, Mus musculus
  siRNA target sequence for D4Bwg1540e (NM_026257.1,154-172).
ggagacgagggataagagt

SEQ ID NO: 723148 - DNA, 19 bp, Mus musculus
  siRNA target sequence for D4Bwg1540e (NM_026257.1,169-187).
gagtctacggaaatgaaga

SEQ ID NO: 723149 - DNA, 19 bp, Mus musculus
  siRNA target sequence for D4Bwg1540e (NM_026257.1,191-209).
ggtggacatgtggaatgat

SEQ ID NO: 723150 - DNA, 19 bp, Mus musculus
  siRNA target sequence for D4Bwg1540e (NM_026257.1,654-672).
cccgaggtggactttgaca

SEQ ID NO: 723151 - DNA, 19 bp, Mus musculus
  siRNA target sequence for D4Bwg1540e (NM_026257.1,789-807).
cggaatggcattatgatgt

SEQ ID NO: 723152 - DNA, 19 bp, Mus musculus
  siRNA target sequence for D4Bwg1540e (NM_026257.1,790-808).
ggaatggcattatgatgtt

SEQ ID NO: 723153 - DNA, 19 bp, Mus musculus
  siRNA target sequence for D4Bwg1540e (NM_026257.1,791-809).
gaatggcattatgatgttt

SEQ ID NO: 723154 - DNA, 19 bp, Mus musculus
  siRNA target sequence for D4Bwg1540e (NM_026257.1,912-930).
ggagtcccctttaaggtaa

SEQ ID NO: 723155 - DNA, 19 bp, Mus musculus
  siRNA target sequence for D4Bwg1540e (NM_026257.1,1172-1190).
ccggatccaggagatcata

SEQ ID NO: 723156 - DNA, 19 bp, Mus musculus
  siRNA target sequence for D4Bwg1540e (NM_026257.1,1335-1353).
ggcgacgtgcggaaactct

SEQ ID NO: 723157 - DNA, 19 bp, Mus musculus
  siRNA target sequence for Rnf41 (NM_026259.2,1101-1119).
cgtcaacgagctgattgaa

SEQ ID NO: 723158 - DNA, 19 bp, Mus musculus
  siRNA target sequence for Rnf41 (NM_026259.2,1102-1120).
gtcaacgagctgattgaaa

SEQ ID NO: 723159 - DNA, 19 bp, Mus musculus
  siRNA target sequence for Rnf41 (NM_026259.2,1104-1122).
caacgagctgattgaaaat

SEQ ID NO: 723160 - DNA, 19 bp, Mus musculus
  siRNA target sequence for Rnf41 (NM_026259.2,1284-1302).
gccagggctcgtcatgata

SEQ ID NO: 723161 - DNA, 19 bp, Mus musculus
  siRNA target sequence for 4930521E07Rik (NM_026260.2,278-296).
cgacccctttccagcttta

SEQ ID NO: 723162 - DNA, 19 bp, Mus musculus
  siRNA target sequence for 4930521E07Rik (NM_026260.2,321-339).
ccgggtacctgcgatttaa

SEQ ID NO: 723163 - DNA, 19 bp, Mus musculus
  siRNA target sequence for 4930521E07Rik (NM_026260.2,322-340).
cgggtacctgcgatttaaa

SEQ ID NO: 723164 - DNA, 19 bp, Mus musculus
  siRNA target sequence for 4930521E07Rik (NM_026260.2,324-342).
ggtacctgcgatttaaact

SEQ ID NO: 723165 - DNA, 19 bp, Mus musculus
  siRNA target sequence for 4930521E07Rik (NM_026260.2,402-420).
cctggtagtgtaagatctt

SEQ ID NO: 723166 - DNA, 19 bp, Mus musculus
  siRNA target sequence for 4930521E07Rik (NM_026260.2,405-423).
ggtagtgtaagatcttcaa

SEQ ID NO: 723167 - DNA, 19 bp, Mus musculus
  siRNA target sequence for 4930521E07Rik (NM_026260.2,418-436).
cttcaagttgggtatgtgt

SEQ ID NO: 723168 - DNA, 19 bp, Mus musculus
  siRNA target sequence for 4930521E07Rik (NM_026260.2,497-515).
cagtggaacgacacagttt

SEQ ID NO: 723169 - DNA, 19 bp, Mus musculus
  siRNA target sequence for 4930521E07Rik (NM_026260.2,521-539).
ccgtgtgaacaactcaaaa

SEQ ID NO: 723170 - DNA, 19 bp, Mus musculus
  siRNA target sequence for 4930521E07Rik (NM_026260.2,554-572).
gaagctccaaacagtcaat

SEQ ID NO: 723171 - DNA, 19 bp, Mus musculus
  siRNA target sequence for 4930521E07Rik (NM_026260.2,642-660).
cagccgccagtactattct

SEQ ID NO: 723172 - DNA, 19 bp, Mus musculus
  siRNA target sequence for 4930521E07Rik (NM_026260.2,645-663).
ccgccagtactattctata

SEQ ID NO: 723173 - DNA, 19 bp, Mus musculus
  siRNA target sequence for 4930521E07Rik (NM_026260.2,772-790).
caggtttcctagagagtaa

SEQ ID NO: 723174 - DNA, 19 bp, Mus musculus
  siRNA target sequence for 4930521E07Rik (NM_026260.2,796-814).
caacgtgtcctcgtttctt

SEQ ID NO: 723175 - DNA, 19 bp, Mus musculus
  siRNA target sequence for 4930521E07Rik (NM_026260.2,858-876).
gctgcctcttactataact

SEQ ID NO: 723176 - DNA, 19 bp, Mus musculus
  siRNA target sequence for 4930521E07Rik (NM_026260.2,861-879).
gcctcttactataacttca

SEQ ID NO: 723177 - DNA, 19 bp, Mus musculus
  siRNA target sequence for 4930521E07Rik (NM_026260.2,983-1001).
cacatgtcagaatatcgtt

SEQ ID NO: 723178 - DNA, 19 bp, Mus musculus
  siRNA target sequence for 4930521E07Rik (NM_026260.2,1008-1026).
gtcgtctacgagatagaga

SEQ ID NO: 723179 - DNA, 19 bp, Mus musculus
  siRNA target sequence for 4930521E07Rik (NM_026260.2,1196-1214).
cactgggaagccactctta

SEQ ID NO: 723180 - DNA, 19 bp, Mus musculus
  siRNA target sequence for 4930521E07Rik (NM_026260.2,1286-1304).
gagacacgcagtacagttt

SEQ ID NO: 723181 - DNA, 19 bp, Mus musculus
  siRNA target sequence for 4930521E07Rik (NM_026260.2,1317-1335).
gtatctgggtgccagttaa

SEQ ID NO: 723182 - DNA, 19 bp, Mus musculus
  siRNA target sequence for 4930521E07Rik (NM_026260.2,1361-1379).
cttgcaggaggaggtttat

SEQ ID NO: 723183 - DNA, 19 bp, Mus musculus
  siRNA target sequence for 4930521E07Rik (NM_026260.2,1365-1383).
caggaggaggtttatcaga

SEQ ID NO: 723184 - DNA, 19 bp, Mus musculus
  siRNA target sequence for 4930521E07Rik (NM_026260.2,1480-1498).
gcagcgtttcagcagttaa

SEQ ID NO: 723185 - DNA, 19 bp, Mus musculus
  siRNA target sequence for 4930521E07Rik (NM_026260.2,1502-1520).
cacttcctgctgtctgata

SEQ ID NO: 723186 - DNA, 19 bp, Mus musculus
  siRNA target sequence for 4930521E07Rik (NM_026260.2,1628-1646).
ggagcaccagagaggaata

SEQ ID NO: 723187 - DNA, 19 bp, Mus musculus
  siRNA target sequence for 4930521E07Rik (NM_026260.2,1635-1653).
cagagaggaatagaagtat

SEQ ID NO: 723188 - DNA, 19 bp, Mus musculus
  siRNA target sequence for 4930521E07Rik (NM_026260.2,1654-1672).
ctttgacgactcttgtgaa

SEQ ID NO: 723189 - DNA, 19 bp, Mus musculus
  siRNA target sequence for 4930521E07Rik (NM_026260.2,1660-1678).
cgactcttgtgaactttgt

SEQ ID NO: 723190 - DNA, 19 bp, Mus musculus
  siRNA target sequence for 4930521E07Rik (NM_026260.2,1710-1728).
gatcaacccagaatagact

SEQ ID NO: 723191 - DNA, 19 bp, Mus musculus
  siRNA target sequence for 4930521E07Rik (NM_026260.2,1727-1745).
ctggaagctgccattcgat

SEQ ID NO: 723192 - DNA, 19 bp, Mus musculus
  siRNA target sequence for 4930521E07Rik (NM_026260.2,1734-1752).
ctgccattcgatttcttct

SEQ ID NO: 723193 - DNA, 19 bp, Mus musculus
  siRNA target sequence for 4930521E07Rik (NM_026260.2,1736-1754).
gccattcgatttcttcttt

SEQ ID NO: 723194 - DNA, 19 bp, Mus musculus
  siRNA target sequence for 4930521E07Rik (NM_026260.2,1814-1832).
cctgtgtgtcttactactt

SEQ ID NO: 723195 - DNA, 19 bp, Mus musculus
  siRNA target sequence for 4930522D07Rik (NM_026261.1,193-211).
gaaagtgtggccacattga

SEQ ID NO: 723196 - DNA, 19 bp, Mus musculus
  siRNA target sequence for 4930522D07Rik (NM_026261.1,318-336).
gcccaacgcttccatcaat

SEQ ID NO: 723197 - DNA, 19 bp, Mus musculus
  siRNA target sequence for 4930522D07Rik (NM_026261.1,367-385).
ctggataagacccatcaaa

SEQ ID NO: 723198 - DNA, 19 bp, Mus musculus
  siRNA target sequence for 4930522D07Rik (NM_026261.1,408-426).
gggccaggttctagacaaa

SEQ ID NO: 723199 - DNA, 19 bp, Mus musculus
  siRNA target sequence for 4930522D07Rik (NM_026261.1,411-429).
ccaggttctagacaaacat

SEQ ID NO: 723200 - DNA, 19 bp, Mus musculus
  siRNA target sequence for 4930522D07Rik (NM_026261.1,593-611).
catcggaactcgagcaaaa

SEQ ID NO: 723201 - DNA, 19 bp, Mus musculus
  siRNA target sequence for 4930522D07Rik (NM_026261.1,597-615).
ggaactcgagcaaaacaat

SEQ ID NO: 723202 - DNA, 19 bp, Mus musculus
  siRNA target sequence for 4930524B15Rik (NM_026262.1,56-74).
cagatgggcctcgcttaat

SEQ ID NO: 723203 - DNA, 19 bp, Mus musculus
  siRNA target sequence for 4930524B15Rik (NM_026262.1,58-76).
gatgggcctcgcttaatct

SEQ ID NO: 723204 - DNA, 19 bp, Mus musculus
  siRNA target sequence for 4930524B15Rik (NM_026262.1,165-183).
ccgctgtgcctcaaagcaa

SEQ ID NO: 723205 - DNA, 19 bp, Mus musculus
  siRNA target sequence for 4930524B15Rik (NM_026262.1,307-325).
gcagcgcaagcaggtttaa

SEQ ID NO: 723206 - DNA, 19 bp, Mus musculus
  siRNA target sequence for 4930524B15Rik (NM_026262.1,308-326).
cagcgcaagcaggtttaaa

SEQ ID NO: 723207 - DNA, 19 bp, Mus musculus
  siRNA target sequence for 4930524B15Rik (NM_026262.1,311-329).
cgcaagcaggtttaaacca

SEQ ID NO: 723208 - DNA, 19 bp, Mus musculus
  siRNA target sequence for 4930524B15Rik (NM_026262.1,337-355).
gcagctaaagagtttgatt

SEQ ID NO: 723209 - DNA, 19 bp, Mus musculus
  siRNA target sequence for 4930524B15Rik (NM_026262.1,424-442).
gtacagcaagtcatttcca

SEQ ID NO: 723210 - DNA, 19 bp, Mus musculus
  siRNA target sequence for 4930524B15Rik (NM_026262.1,480-498).
gcagtgccagcgtgtatct

SEQ ID NO: 723211 - DNA, 19 bp, Mus musculus
  siRNA target sequence for 4930524B15Rik (NM_026262.1,481-499).
cagtgccagcgtgtatcta

SEQ ID NO: 723212 - DNA, 19 bp, Mus musculus
  siRNA target sequence for 4930524B15Rik (NM_026262.1,486-504).
ccagcgtgtatctagtgaa

SEQ ID NO: 723213 - DNA, 19 bp, Mus musculus
  siRNA target sequence for 4930524B15Rik (NM_026262.1,489-507).
gcgtgtatctagtgaaatt

SEQ ID NO: 723214 - DNA, 19 bp, Mus musculus
  siRNA target sequence for 4930519G04Rik (NM_026263.1,449-467).
cactgtcctggtatatcca

SEQ ID NO: 723215 - DNA, 19 bp, Mus musculus
  siRNA target sequence for 4930519G04Rik (NM_026263.1,521-539).
gctgcatcccagatgaaga

SEQ ID NO: 723216 - DNA, 19 bp, Mus musculus
  siRNA target sequence for 4930519G04Rik (NM_026263.1,728-746).
ccttggacaaagagaatgt

SEQ ID NO: 723217 - DNA, 19 bp, Mus musculus
  siRNA target sequence for 4930519G04Rik (NM_026263.1,765-783).
ggatcccttccattgtcat

SEQ ID NO: 723218 - DNA, 19 bp, Mus musculus
  siRNA target sequence for 4930519G04Rik (NM_026263.1,766-784).
gatcccttccattgtcata

SEQ ID NO: 723219 - DNA, 19 bp, Mus musculus
  siRNA target sequence for 4930519G04Rik (NM_026263.1,769-787).
cccttccattgtcatagaa

SEQ ID NO: 723220 - DNA, 19 bp, Mus musculus
  siRNA target sequence for 4930519G04Rik (NM_026263.1,771-789).
cttccattgtcatagaaga

SEQ ID NO: 723221 - DNA, 19 bp, Mus musculus
  siRNA target sequence for 4930519G04Rik (NM_026263.1,804-822).
cgaatacccgagttggatt

SEQ ID NO: 723222 - DNA, 19 bp, Mus musculus
  siRNA target sequence for 4930519G04Rik (NM_026263.1,891-909).
cctagtgcacgctgaaaca

SEQ ID NO: 723223 - DNA, 19 bp, Mus musculus
  siRNA target sequence for 4930519G04Rik (NM_026263.1,943-961).
gcagaagcagccgttagtt

SEQ ID NO: 723224 - DNA, 19 bp, Mus musculus
  siRNA target sequence for 1200016B17Rik (NM_026267.1,16-34).
ggcggcagagctggaatat

SEQ ID NO: 723225 - DNA, 19 bp, Mus musculus
  siRNA target sequence for 1200016B17Rik (NM_026267.1,146-164).
ggtcgcctgcgaatcactt

SEQ ID NO: 723226 - DNA, 19 bp, Mus musculus
  siRNA target sequence for 1200016B17Rik (NM_026267.1,149-167).
cgcctgcgaatcacttcaa

SEQ ID NO: 723227 - DNA, 19 bp, Mus musculus
  siRNA target sequence for 1200016B17Rik (NM_026267.1,151-169).
cctgcgaatcacttcaaaa

SEQ ID NO: 723228 - DNA, 19 bp, Mus musculus
  siRNA target sequence for 1200016B17Rik (NM_026267.1,160-178).
cacttcaaaagggaagatt

SEQ ID NO: 723229 - DNA, 19 bp, Mus musculus
  siRNA target sequence for 1200016B17Rik (NM_026267.1,353-371).
ggagatgccttcgacttta

SEQ ID NO: 723230 - DNA, 19 bp, Mus musculus
  siRNA target sequence for 1200016B17Rik (NM_026267.1,475-493).
ggaaggacagaccatcaaa

SEQ ID NO: 723231 - DNA, 19 bp, Mus musculus
  siRNA target sequence for 1200016B17Rik (NM_026267.1,479-497).
ggacagaccatcaaattga

SEQ ID NO: 723232 - DNA, 19 bp, Mus musculus
  siRNA target sequence for 1200016B17Rik (NM_026267.1,484-502).
gaccatcaaattgagtatt

SEQ ID NO: 723233 - DNA, 19 bp, Mus musculus
  siRNA target sequence for 1200016B17Rik (NM_026267.1,646-664).
cccaccacctattccaaaa

SEQ ID NO: 723234 - DNA, 19 bp, Mus musculus
  siRNA target sequence for 1200016B17Rik (NM_026267.1,647-665).
ccaccacctattccaaaat

SEQ ID NO: 723235 - DNA, 19 bp, Mus musculus
  siRNA target sequence for 1200016B17Rik (NM_026267.1,650-668).
ccacctattccaaaatcta

SEQ ID NO: 723236 - DNA, 19 bp, Mus musculus
  siRNA target sequence for 1200016B17Rik (NM_026267.1,670-688).
ccatggaggtaatgattca

SEQ ID NO: 723237 - DNA, 19 bp, Mus musculus
  siRNA target sequence for 1200016B17Rik (NM_026267.1,678-696).
gtaatgattcagatatcct

SEQ ID NO: 723238 - DNA, 19 bp, Mus musculus
  siRNA target sequence for 1110007L15Rik (NM_026269.1,416-434).
ctaaagtgttcagtttgat

SEQ ID NO: 723239 - DNA, 19 bp, Mus musculus
  siRNA target sequence for 1110007L15Rik (NM_026269.1,446-464).
ctcctgaacgagtagcttt

SEQ ID NO: 723240 - DNA, 19 bp, Mus musculus
  siRNA target sequence for 1110007L15Rik (NM_026269.1,451-469).
gaacgagtagcttttgtgt

SEQ ID NO: 723241 - DNA, 19 bp, Mus musculus
  siRNA target sequence for 1110007L15Rik (NM_026269.1,535-553).
ctggccctcacattatgga

SEQ ID NO: 723242 - DNA, 19 bp, Mus musculus
  siRNA target sequence for 1110007L15Rik (NM_026269.1,537-555).
ggccctcacattatggaaa

SEQ ID NO: 723243 - DNA, 19 bp, Mus musculus
  siRNA target sequence for 1110007L15Rik (NM_026269.1,569-587).
gtgagtctcggtatcactt

SEQ ID NO: 723244 - DNA, 19 bp, Mus musculus
  siRNA target sequence for 1110007L15Rik (NM_026269.1,680-698).
ctcaggctgtgctacagtt

SEQ ID NO: 723245 - DNA, 19 bp, Mus musculus
  siRNA target sequence for 1110007L15Rik (NM_026269.1,691-709).
ctacagtttctctgtttga

SEQ ID NO: 723246 - DNA, 19 bp, Mus musculus
  siRNA target sequence for 1110012J22Rik (NM_026270.1,201-219).
ctggcacagagctggtatt

SEQ ID NO: 723247 - DNA, 19 bp, Mus musculus
  siRNA target sequence for 1110012J22Rik (NM_026270.1,204-222).
gcacagagctggtattact

SEQ ID NO: 723248 - DNA, 19 bp, Mus musculus
  siRNA target sequence for 1110012J22Rik (NM_026270.1,452-470).
gaggacgagcccactgaaa

SEQ ID NO: 723249 - DNA, 19 bp, Mus musculus
  siRNA target sequence for 1110012J22Rik (NM_026270.1,454-472).
ggacgagcccactgaaaca

SEQ ID NO: 723250 - DNA, 19 bp, Mus musculus
  siRNA target sequence for 1110012J22Rik (NM_026270.1,490-508).
gctgggcggtagcgataat

SEQ ID NO: 723251 - DNA, 19 bp, Mus musculus
  siRNA target sequence for 1110012J22Rik (NM_026270.1,493-511).
gggcggtagcgataatgga

SEQ ID NO: 723252 - DNA, 19 bp, Mus musculus
  siRNA target sequence for 1110018M03Rik (NM_026271.1,202-220).
gtgttcccgaagttgatct

SEQ ID NO: 723253 - DNA, 19 bp, Mus musculus
  siRNA target sequence for 1110018M03Rik (NM_026271.1,240-258).
cctgtgtcgaggctacttt

SEQ ID NO: 723254 - DNA, 19 bp, Mus musculus
  siRNA target sequence for 1110018M03Rik (NM_026271.1,243-261).
gtgtcgaggctactttgat

SEQ ID NO: 723255 - DNA, 19 bp, Mus musculus
  siRNA target sequence for 1110018M03Rik (NM_026271.1,268-286).
ctgtacccagaaatgtcta

SEQ ID NO: 723256 - DNA, 19 bp, Mus musculus
  siRNA target sequence for 1110018M03Rik (NM_026271.1,270-288).
gtacccagaaatgtctaat

SEQ ID NO: 723257 - DNA, 19 bp, Mus musculus
  siRNA target sequence for 1110018M03Rik (NM_026271.1,282-300).
gtctaatgggactttgcat

SEQ ID NO: 723258 - DNA, 19 bp, Mus musculus
  siRNA target sequence for 1110018M03Rik (NM_026271.1,289-307).
gggactttgcatcattact

SEQ ID NO: 723259 - DNA, 19 bp, Mus musculus
  siRNA target sequence for 1110018M03Rik (NM_026271.1,743-761).
ggctcagagacaaatacga

SEQ ID NO: 723260 - DNA, 19 bp, Mus musculus
  siRNA target sequence for 1110018M03Rik (NM_026271.1,795-813).
ccgcttaggtcgactgaaa

SEQ ID NO: 723261 - DNA, 19 bp, Mus musculus
  siRNA target sequence for 1110018M03Rik (NM_026271.1,796-814).
cgcttaggtcgactgaaaa

SEQ ID NO: 723262 - DNA, 19 bp, Mus musculus
  siRNA target sequence for 1110018M03Rik (NM_026271.1,806-824).
gactgaaaagcgactatct

SEQ ID NO: 723263 - DNA, 19 bp, Mus musculus
  siRNA target sequence for 4430402O11Rik (NM_026272.2,90-108).
cacacgaaaggaatgtagt

SEQ ID NO: 723264 - DNA, 19 bp, Mus musculus
  siRNA target sequence for 4430402O11Rik (NM_026272.2,92-110).
cacgaaaggaatgtagtaa

SEQ ID NO: 723265 - DNA, 19 bp, Mus musculus
  siRNA target sequence for 4430402O11Rik (NM_026272.2,94-112).
cgaaaggaatgtagtaaaa

SEQ ID NO: 723266 - DNA, 19 bp, Mus musculus
  siRNA target sequence for 4430402O11Rik (NM_026272.2,100-118).
gaatgtagtaaaaaatcaa

SEQ ID NO: 723267 - DNA, 19 bp, Mus musculus
  siRNA target sequence for 4430402O11Rik (NM_026272.2,308-326).
ccaaggacttccttcatgt

SEQ ID NO: 723268 - DNA, 19 bp, Mus musculus
  siRNA target sequence for 4430402O11Rik (NM_026272.2,327-345).
cctgaatcttaataagaga

SEQ ID NO: 723269 - DNA, 19 bp, Mus musculus
  siRNA target sequence for 4430402O11Rik (NM_026272.2,334-352).
cttaataagagatgtgata

SEQ ID NO: 723270 - DNA, 19 bp, Mus musculus
  siRNA target sequence for 4430402O11Rik (NM_026272.2,393-411).
gtctctaccttattttgct

SEQ ID NO: 723271 - DNA, 19 bp, Mus musculus
  siRNA target sequence for 4430402O11Rik (NM_026272.2,430-448).
gtcactgatgcatctagaa

SEQ ID NO: 723272 - DNA, 19 bp, Mus musculus
  siRNA target sequence for 4430402O11Rik (NM_026272.2,470-488).
gtcttggggtgcactatgt

SEQ ID NO: 723273 - DNA, 19 bp, Mus musculus
  siRNA target sequence for 4430402O11Rik (NM_026272.2,472-490).
cttggggtgcactatgtat

SEQ ID NO: 723274 - DNA, 19 bp, Mus musculus
  siRNA target sequence for 4430402O11Rik (NM_026272.2,497-515).
ccacaatcgctgcagattt

SEQ ID NO: 723275 - DNA, 19 bp, Mus musculus
  siRNA target sequence for 4430402O11Rik (NM_026272.2,605-623).
gtcctggttgggtcagata

SEQ ID NO: 723276 - DNA, 19 bp, Mus musculus
  siRNA target sequence for 4430402O11Rik (NM_026272.2,646-664).
cccatcatcccatatctct

SEQ ID NO: 723277 - DNA, 19 bp, Mus musculus
  siRNA target sequence for 4430402O11Rik (NM_026272.2,695-713).
gctccttggtgaaggatta

SEQ ID NO: 723278 - DNA, 19 bp, Mus musculus
  siRNA target sequence for 4430402O11Rik (NM_026272.2,698-716).
ccttggtgaaggattactt

SEQ ID NO: 723279 - DNA, 19 bp, Mus musculus
  siRNA target sequence for 4430402O11Rik (NM_026272.2,762-780).
cgtggctccttgctatgat

SEQ ID NO: 723280 - DNA, 19 bp, Mus musculus
  siRNA target sequence for 4430402O11Rik (NM_026272.2,763-781).
gtggctccttgctatgata

SEQ ID NO: 723281 - DNA, 19 bp, Mus musculus
  siRNA target sequence for 4430402O11Rik (NM_026272.2,766-784).
gctccttgctatgataaga

SEQ ID NO: 723282 - DNA, 19 bp, Mus musculus
  siRNA target sequence for 4430402O11Rik (NM_026272.2,767-785).
ctccttgctatgataagaa

SEQ ID NO: 723283 - DNA, 19 bp, Mus musculus
  siRNA target sequence for 4430402O11Rik (NM_026272.2,802-820).
gagggactttccactactt

SEQ ID NO: 723284 - DNA, 19 bp, Mus musculus
  siRNA target sequence for 4430402O11Rik (NM_026272.2,804-822).
gggactttccactacttta

SEQ ID NO: 723285 - DNA, 19 bp, Mus musculus
  siRNA target sequence for 4430402O11Rik (NM_026272.2,805-823).
ggactttccactactttaa

SEQ ID NO: 723286 - DNA, 19 bp, Mus musculus
  siRNA target sequence for 4430402O11Rik (NM_026272.2,849-867).
gctgacatcaggtgaaatt

SEQ ID NO: 723287 - DNA, 19 bp, Mus musculus
  siRNA target sequence for 4430402O11Rik (NM_026272.2,904-922).
gacattgctgtggatactt

SEQ ID NO: 723288 - DNA, 19 bp, Mus musculus
  siRNA target sequence for 4430402O11Rik (NM_026272.2,945-963).
ggcagtccagcgtcatgat

SEQ ID NO: 723289 - DNA, 19 bp, Mus musculus
  siRNA target sequence for 4430402O11Rik (NM_026272.2,1050-1068).
ccgtgcactcaggaacaaa

SEQ ID NO: 723290 - DNA, 19 bp, Mus musculus
  siRNA target sequence for 4430402O11Rik (NM_026272.2,1128-1146).
gtacggctttcgcaacatt

SEQ ID NO: 723291 - DNA, 19 bp, Mus musculus
  siRNA target sequence for 4430402O11Rik (NM_026272.2,1132-1150).
ggctttcgcaacattcaga

SEQ ID NO: 723292 - DNA, 19 bp, Mus musculus
  siRNA target sequence for 4430402O11Rik (NM_026272.2,1133-1151).
gctttcgcaacattcagaa

SEQ ID NO: 723293 - DNA, 19 bp, Mus musculus
  siRNA target sequence for 4430402O11Rik (NM_026272.2,1209-1227).
gtgtcccagaggttgctta

SEQ ID NO: 723294 - DNA, 19 bp, Mus musculus
  siRNA target sequence for 4430402O11Rik (NM_026272.2,1211-1229).
gtcccagaggttgcttaaa

SEQ ID NO: 723295 - DNA, 19 bp, Mus musculus
  siRNA target sequence for 4430402O11Rik (NM_026272.2,1274-1292).
cactgctgcagcaaatgga

SEQ ID NO: 723296 - DNA, 19 bp, Mus musculus
  siRNA target sequence for 4430402O11Rik (NM_026272.2,1285-1303).
caaatggaagggatctact

SEQ ID NO: 723297 - DNA, 19 bp, Mus musculus
  siRNA target sequence for 4430402O11Rik (NM_026272.2,1365-1383).
gctggagggtactgaatct

SEQ ID NO: 723298 - DNA, 19 bp, Mus musculus
  siRNA target sequence for 4430402O11Rik (NM_026272.2,1436-1454).
cagacggcctggatatcaa

SEQ ID NO: 723299 - DNA, 19 bp, Mus musculus
  siRNA target sequence for 4430402O11Rik (NM_026272.2,1438-1456).
gacggcctggatatcaagt

SEQ ID NO: 723300 - DNA, 19 bp, Mus musculus
  siRNA target sequence for 4930470D19Rik (NM_026274.2,717-735).
gctactatgggtaattcct

SEQ ID NO: 723301 - DNA, 19 bp, Mus musculus
  siRNA target sequence for 4930470D19Rik (NM_026274.2,932-950).
ggtaatacggactcttgta

SEQ ID NO: 723302 - DNA, 19 bp, Mus musculus
  siRNA target sequence for 4930470D19Rik (NM_026274.2,957-975).
gatcaggaacctccttatt

SEQ ID NO: 723303 - DNA, 19 bp, Mus musculus
  siRNA target sequence for 4930470D19Rik (NM_026274.2,960-978).
caggaacctccttattcaa

SEQ ID NO: 723304 - DNA, 19 bp, Mus musculus
  siRNA target sequence for 4930470D19Rik (NM_026274.2,963-981).
gaacctccttattcaatga

SEQ ID NO: 723305 - DNA, 19 bp, Mus musculus
  siRNA target sequence for 4930470D19Rik (NM_026274.2,966-984).
cctccttattcaatgatta

SEQ ID NO: 723306 - DNA, 19 bp, Mus musculus
  siRNA target sequence for 4930470D19Rik (NM_026274.2,969-987).
ccttattcaatgattacat

SEQ ID NO: 723307 - DNA, 19 bp, Mus musculus
  siRNA target sequence for 4930470D19Rik (NM_026274.2,970-988).
cttattcaatgattacatt

SEQ ID NO: 723308 - DNA, 19 bp, Mus musculus
  siRNA target sequence for 4930470D19Rik (NM_026274.2,976-994).
caatgattacattacatga

SEQ ID NO: 723309 - DNA, 19 bp, Mus musculus
  siRNA target sequence for 4930470D19Rik (NM_026274.2,1023-1041).
gatgttgtccagtctttaa

SEQ ID NO: 723310 - DNA, 19 bp, Mus musculus
  siRNA target sequence for 4930470D19Rik (NM_026274.2,1032-1050).
cagtctttaattagagtta

SEQ ID NO: 723311 - DNA, 19 bp, Mus musculus
  siRNA target sequence for 4930470D19Rik (NM_026274.2,1034-1052).
gtctttaattagagttatt

SEQ ID NO: 723312 - DNA, 19 bp, Mus musculus
  siRNA target sequence for 4930470D19Rik (NM_026274.2,1066-1084).
cattgggaccagctgttat

SEQ ID NO: 723313 - DNA, 19 bp, Mus musculus
  siRNA target sequence for 4930470D19Rik (NM_026274.2,1071-1089).
ggaccagctgttataacct

SEQ ID NO: 723314 - DNA, 19 bp, Mus musculus
  siRNA target sequence for 4930470D19Rik (NM_026274.2,1072-1090).
gaccagctgttataacctt

SEQ ID NO: 723315 - DNA, 19 bp, Mus musculus
  siRNA target sequence for 4930470D19Rik (NM_026274.2,1078-1096).
ctgttataaccttgttact

SEQ ID NO: 723316 - DNA, 19 bp, Mus musculus
  siRNA target sequence for 4930470D19Rik (NM_026274.2,1105-1123).
gtccattgcccactaaaga

SEQ ID NO: 723317 - DNA, 19 bp, Mus musculus
  siRNA target sequence for 4930470D19Rik (NM_026274.2,1191-1209).
cctgccaaacataggaata

SEQ ID NO: 723318 - DNA, 19 bp, Mus musculus
  siRNA target sequence for 4930470D19Rik (NM_026274.2,1254-1272).
gcaagcataggtttactta

SEQ ID NO: 723319 - DNA, 19 bp, Mus musculus
  siRNA target sequence for 4930470D19Rik (NM_026274.2,1295-1313).
gctacagtgtctgaagtta

SEQ ID NO: 723320 - DNA, 19 bp, Mus musculus
  siRNA target sequence for 4930470D19Rik (NM_026274.2,1320-1338).
caccccacagtcatgcttt

SEQ ID NO: 723321 - DNA, 19 bp, Mus musculus
  siRNA target sequence for 4930470D19Rik (NM_026274.2,1366-1384).
cccagacaagtgagaataa

SEQ ID NO: 723322 - DNA, 19 bp, Mus musculus
  siRNA target sequence for 4930470D19Rik (NM_026274.2,1367-1385).
ccagacaagtgagaataaa

SEQ ID NO: 723323 - DNA, 19 bp, Mus musculus
  siRNA target sequence for 4930470D19Rik (NM_026274.2,1368-1386).
cagacaagtgagaataaat

SEQ ID NO: 723324 - DNA, 19 bp, Mus musculus
  siRNA target sequence for 4930470D19Rik (NM_026274.2,1375-1393).
gtgagaataaattgactat

SEQ ID NO: 723325 - DNA, 19 bp, Mus musculus
  siRNA target sequence for 4930470D19Rik (NM_026274.2,1443-1461).
gatgatcctgattatctga

SEQ ID NO: 723326 - DNA, 19 bp, Mus musculus
  siRNA target sequence for 4930470D19Rik (NM_026274.2,1484-1502).
ccagtggagcttagacaat

SEQ ID NO: 723327 - DNA, 19 bp, Mus musculus
  siRNA target sequence for 4930470D19Rik (NM_026274.2,1489-1507).
ggagcttagacaatctctt

SEQ ID NO: 723328 - DNA, 19 bp, Mus musculus
  siRNA target sequence for 4930470D19Rik (NM_026274.2,1490-1508).
gagcttagacaatctcttt

SEQ ID NO: 723329 - DNA, 19 bp, Mus musculus
  siRNA target sequence for 4930470D19Rik (NM_026274.2,1535-1553).
cgagaaagtggacttgaat

SEQ ID NO: 723330 - DNA, 19 bp, Mus musculus
  siRNA target sequence for 4930470D19Rik (NM_026274.2,1542-1560).
gtggacttgaataacatta

SEQ ID NO: 723331 - DNA, 19 bp, Mus musculus
  siRNA target sequence for 4930470D19Rik (NM_026274.2,1581-1599).
gatgtcagcgagtacttga

SEQ ID NO: 723332 - DNA, 19 bp, Mus musculus
  siRNA target sequence for 4930470D19Rik (NM_026274.2,1584-1602).
gtcagcgagtacttgaaga

SEQ ID NO: 723333 - DNA, 19 bp, Mus musculus
  siRNA target sequence for 4930470D19Rik (NM_026274.2,1649-1667).
gagtgtacgctgcactttt

SEQ ID NO: 723334 - DNA, 19 bp, Mus musculus
  siRNA target sequence for 4930470D19Rik (NM_026274.2,1676-1694).
cactggggtgtggtactat

SEQ ID NO: 723335 - DNA, 19 bp, Mus musculus
  siRNA target sequence for 4930470D19Rik (NM_026274.2,1682-1700).
ggtgtggtactatgaagta

SEQ ID NO: 723336 - DNA, 19 bp, Mus musculus
  siRNA target sequence for 4930470D19Rik (NM_026274.2,1683-1701).
gtgtggtactatgaagtaa

SEQ ID NO: 723337 - DNA, 19 bp, Mus musculus
  siRNA target sequence for 4930470D19Rik (NM_026274.2,1685-1703).
gtggtactatgaagtaaca

SEQ ID NO: 723338 - DNA, 19 bp, Mus musculus
  siRNA target sequence for 4930470D19Rik (NM_026274.2,1687-1705).
ggtactatgaagtaacagt

SEQ ID NO: 723339 - DNA, 19 bp, Mus musculus
  siRNA target sequence for 4930470D19Rik (NM_026274.2,1777-1795).
gcattggggacgatgagta

SEQ ID NO: 723340 - DNA, 19 bp, Mus musculus
  siRNA target sequence for 4930470D19Rik (NM_026274.2,1816-1834).
gccggcagctgatttggta

SEQ ID NO: 723341 - DNA, 19 bp, Mus musculus
  siRNA target sequence for 4930470D19Rik (NM_026274.2,1887-1905).
gtagggttcctgttagact

SEQ ID NO: 723342 - DNA, 19 bp, Mus musculus
  siRNA target sequence for 4930470D19Rik (NM_026274.2,1891-1909).
ggttcctgttagacttgaa

SEQ ID NO: 723343 - DNA, 19 bp, Mus musculus
  siRNA target sequence for 4930470D19Rik (NM_026274.2,1892-1910).
gttcctgttagacttgaat

SEQ ID NO: 723344 - DNA, 19 bp, Mus musculus
  siRNA target sequence for 4930470D19Rik (NM_026274.2,1895-1913).
cctgttagacttgaatgaa

SEQ ID NO: 723345 - DNA, 19 bp, Mus musculus
  siRNA target sequence for 4930470D19Rik (NM_026274.2,1979-1997).
cgtatctggattttttgct

SEQ ID NO: 723346 - DNA, 19 bp, Mus musculus
  siRNA target sequence for 4930470D19Rik (NM_026274.2,2040-2058).
ggagcaagaccattcaaat

SEQ ID NO: 723347 - DNA, 19 bp, Mus musculus
  siRNA target sequence for 4930470D19Rik (NM_026274.2,2041-2059).
gagcaagaccattcaaata

SEQ ID NO: 723348 - DNA, 19 bp, Mus musculus
  siRNA target sequence for 4930470D19Rik (NM_026274.2,2064-2082).
ccatctatgaaatttagca

SEQ ID NO: 723349 - DNA, 19 bp, Mus musculus
  siRNA target sequence for 4930470D19Rik (NM_026274.2,2153-2171).
gctgaagcaagtcagtatt

SEQ ID NO: 723350 - DNA, 19 bp, Mus musculus
  siRNA target sequence for 4930470D19Rik (NM_026274.2,2270-2288).
ggagacctgcccattgtgt

SEQ ID NO: 723351 - DNA, 19 bp, Mus musculus
  siRNA target sequence for 4930470D19Rik (NM_026274.2,2276-2294).
ctgcccattgtgtcgtaaa

SEQ ID NO: 723352 - DNA, 19 bp, Mus musculus
  siRNA target sequence for 4930470D19Rik (NM_026274.2,2278-2296).
gcccattgtgtcgtaaaga

SEQ ID NO: 723353 - DNA, 19 bp, Mus musculus
  siRNA target sequence for 4930470D19Rik (NM_026274.2,2279-2297).
cccattgtgtcgtaaagaa

SEQ ID NO: 723354 - DNA, 19 bp, Mus musculus
  siRNA target sequence for 4930470D19Rik (NM_026274.2,2303-2321).
gtctagaatcagacagatt

SEQ ID NO: 723355 - DNA, 19 bp, Mus musculus
  siRNA target sequence for 4930470D19Rik (NM_026274.2,2308-2326).
gaatcagacagatttctca

SEQ ID NO: 723356 - DNA, 19 bp, Mus musculus
  siRNA target sequence for 4930470D19Rik (NM_026274.2,2312-2330).
cagacagatttctcatatt

SEQ ID NO: 723357 - DNA, 19 bp, Mus musculus
  siRNA target sequence for Aasdhppt (NM_026276.1,197-215).
ccttggctggtcgtttgat

SEQ ID NO: 723358 - DNA, 19 bp, Mus musculus
  siRNA target sequence for Aasdhppt (NM_026276.1,201-219).
ggctggtcgtttgatgata

SEQ ID NO: 723359 - DNA, 19 bp, Mus musculus
  siRNA target sequence for Aasdhppt (NM_026276.1,202-220).
gctggtcgtttgatgataa

SEQ ID NO: 723360 - DNA, 19 bp, Mus musculus
  siRNA target sequence for Aasdhppt (NM_026276.1,205-223).
ggtcgtttgatgataagga

SEQ ID NO: 723361 - DNA, 19 bp, Mus musculus
  siRNA target sequence for Aasdhppt (NM_026276.1,206-224).
gtcgtttgatgataaggaa

SEQ ID NO: 723362 - DNA, 19 bp, Mus musculus
  siRNA target sequence for Aasdhppt (NM_026276.1,208-226).
cgtttgatgataaggaaat

SEQ ID NO: 723363 - DNA, 19 bp, Mus musculus
  siRNA target sequence for Aasdhppt (NM_026276.1,213-231).
gatgataaggaaattagtt

SEQ ID NO: 723364 - DNA, 19 bp, Mus musculus
  siRNA target sequence for Aasdhppt (NM_026276.1,229-247).
gttgcagagaaattgaata

SEQ ID NO: 723365 - DNA, 19 bp, Mus musculus
  siRNA target sequence for Aasdhppt (NM_026276.1,265-283).
cgtctgcagagaacttcaa

SEQ ID NO: 723366 - DNA, 19 bp, Mus musculus
  siRNA target sequence for Aasdhppt (NM_026276.1,319-337).
ccatatcccaatttcaact

SEQ ID NO: 723367 - DNA, 19 bp, Mus musculus
  siRNA target sequence for Aasdhppt (NM_026276.1,325-343).
cccaatttcaactttaaca

SEQ ID NO: 723368 - DNA, 19 bp, Mus musculus
  siRNA target sequence for Aasdhppt (NM_026276.1,326-344).
ccaatttcaactttaacat

SEQ ID NO: 723369 - DNA, 19 bp, Mus musculus
  siRNA target sequence for Aasdhppt (NM_026276.1,387-405).
ggtacaggttggcattgat

SEQ ID NO: 723370 - DNA, 19 bp, Mus musculus
  siRNA target sequence for Aasdhppt (NM_026276.1,388-406).
gtacaggttggcattgata

SEQ ID NO: 723371 - DNA, 19 bp, Mus musculus
  siRNA target sequence for Aasdhppt (NM_026276.1,403-421).
gatatcatgaagactagtt

SEQ ID NO: 723372 - DNA, 19 bp, Mus musculus
  siRNA target sequence for Aasdhppt (NM_026276.1,431-449).
gtggttcaattccagaatt

SEQ ID NO: 723373 - DNA, 19 bp, Mus musculus
  siRNA target sequence for Aasdhppt (NM_026276.1,433-451).
ggttcaattccagaattct

SEQ ID NO: 723374 - DNA, 19 bp, Mus musculus
  siRNA target sequence for Aasdhppt (NM_026276.1,434-452).
gttcaattccagaattctt

SEQ ID NO: 723375 - DNA, 19 bp, Mus musculus
  siRNA target sequence for Aasdhppt (NM_026276.1,494-512).
caatcagaagttttaatga

SEQ ID NO: 723376 - DNA, 19 bp, Mus musculus
  siRNA target sequence for Aasdhppt (NM_026276.1,519-537).
gactcagctggatatgttt

SEQ ID NO: 723377 - DNA, 19 bp, Mus musculus
  siRNA target sequence for Aasdhppt (NM_026276.1,540-558).
ccggcactgggcactgaaa

SEQ ID NO: 723378 - DNA, 19 bp, Mus musculus
  siRNA target sequence for Aasdhppt (NM_026276.1,542-560).
ggcactgggcactgaaaga

SEQ ID NO: 723379 - DNA, 19 bp, Mus musculus
  siRNA target sequence for Aasdhppt (NM_026276.1,543-561).
gcactgggcactgaaagaa

SEQ ID NO: 723380 - DNA, 19 bp, Mus musculus
  siRNA target sequence for Aasdhppt (NM_026276.1,598-616).
gaaatgcagcggcttgaat

SEQ ID NO: 723381 - DNA, 19 bp, Mus musculus
  siRNA target sequence for Aasdhppt (NM_026276.1,603-621).
gcagcggcttgaatttgat

SEQ ID NO: 723382 - DNA, 19 bp, Mus musculus
  siRNA target sequence for Aasdhppt (NM_026276.1,606-624).
gcggcttgaatttgatgta

SEQ ID NO: 723383 - DNA, 19 bp, Mus musculus
  siRNA target sequence for Aasdhppt (NM_026276.1,607-625).
cggcttgaatttgatgtat

SEQ ID NO: 723384 - DNA, 19 bp, Mus musculus
  siRNA target sequence for Aasdhppt (NM_026276.1,640-658).
gacattggtcaggtttata

SEQ ID NO: 723385 - DNA, 19 bp, Mus musculus
  siRNA target sequence for Aasdhppt (NM_026276.1,646-664).
ggtcaggtttataaggaaa

SEQ ID NO: 723386 - DNA, 19 bp, Mus musculus
  siRNA target sequence for Aasdhppt (NM_026276.1,763-781).
gatggatctagacatcaaa

SEQ ID NO: 723387 - DNA, 19 bp, Mus musculus
  siRNA target sequence for Aasdhppt (NM_026276.1,767-785).
gatctagacatcaaaatgt

SEQ ID NO: 723388 - DNA, 19 bp, Mus musculus
  siRNA target sequence for Aasdhppt (NM_026276.1,773-791).
gacatcaaaatgtttcata

SEQ ID NO: 723389 - DNA, 19 bp, Mus musculus
  siRNA target sequence for Aasdhppt (NM_026276.1,812-830).
cccagaggaagtttaccat

SEQ ID NO: 723390 - DNA, 19 bp, Mus musculus
  siRNA target sequence for Aasdhppt (NM_026276.1,819-837).
gaagtttaccattcttaat

SEQ ID NO: 723391 - DNA, 19 bp, Mus musculus
  siRNA target sequence for Aasdhppt (NM_026276.1,850-868).
gtagcatctgctattccta

SEQ ID NO: 723392 - DNA, 19 bp, Mus musculus
  siRNA target sequence for Aasdhppt (NM_026276.1,928-946).
cgaaatggtaccaagtcat

SEQ ID NO: 723393 - DNA, 19 bp, Mus musculus
  siRNA target sequence for 1700021I09Rik (NM_026277.1,104-122).
ggaggtggtgcgagagatt

SEQ ID NO: 723394 - DNA, 19 bp, Mus musculus
  siRNA target sequence for 1700021I09Rik (NM_026277.1,200-218).
gcggctggtaactgagttt

SEQ ID NO: 723395 - DNA, 19 bp, Mus musculus
  siRNA target sequence for 1700021I09Rik (NM_026277.1,303-321).
gtcggggtgtctcatctaa

SEQ ID NO: 723396 - DNA, 19 bp, Mus musculus
  siRNA target sequence for 1700021I09Rik (NM_026277.1,305-323).
cggggtgtctcatctaaaa

SEQ ID NO: 723397 - DNA, 19 bp, Mus musculus
  siRNA target sequence for 1700021I09Rik (NM_026277.1,339-357).
gctaaagtgagctcttcaa

SEQ ID NO: 723398 - DNA, 19 bp, Mus musculus
  siRNA target sequence for 1700021I09Rik (NM_026277.1,396-414).
catctgccctccaagtcta

SEQ ID NO: 723399 - DNA, 19 bp, Mus musculus
  siRNA target sequence for 1700021I09Rik (NM_026277.1,496-514).
ggaccccgctgcctaacat

SEQ ID NO: 723400 - DNA, 19 bp, Mus musculus
  siRNA target sequence for 1700021I09Rik (NM_026277.1,499-517).
ccccgctgcctaacattga

SEQ ID NO: 723401 - DNA, 19 bp, Mus musculus
  siRNA target sequence for 1700021I09Rik (NM_026277.1,914-932).
ctcccgaaacccgaaagtt

SEQ ID NO: 723402 - DNA, 19 bp, Mus musculus
  siRNA target sequence for 1700021I09Rik (NM_026277.1,916-934).
cccgaaacccgaaagttct

SEQ ID NO: 723403 - DNA, 19 bp, Mus musculus
  siRNA target sequence for 1700021I09Rik (NM_026277.1,1067-1085).
gttcgcccctgactacata

SEQ ID NO: 723404 - DNA, 19 bp, Mus musculus
  siRNA target sequence for 1700021I09Rik (NM_026277.1,1098-1116).
ccctttgcagagaatgaca

SEQ ID NO: 723405 - DNA, 19 bp, Mus musculus
  siRNA target sequence for 1700021I09Rik (NM_026277.1,1165-1183).
ccgggaggagacgcttaaa

SEQ ID NO: 723406 - DNA, 19 bp, Mus musculus
  siRNA target sequence for 1700021I09Rik (NM_026277.1,1166-1184).
cgggaggagacgcttaaat

SEQ ID NO: 723407 - DNA, 19 bp, Mus musculus
  siRNA target sequence for 2310026E23Rik (NM_026279.1,246-264).
cccgctcgcgactggattt

SEQ ID NO: 723408 - DNA, 19 bp, Mus musculus
  siRNA target sequence for 2310026E23Rik (NM_026279.1,247-265).
ccgctcgcgactggatttt

SEQ ID NO: 723409 - DNA, 19 bp, Mus musculus
  siRNA target sequence for 2310026E23Rik (NM_026279.1,249-267).
gctcgcgactggattttga

SEQ ID NO: 723410 - DNA, 19 bp, Mus musculus
  siRNA target sequence for 2310026E23Rik (NM_026279.1,252-270).
cgcgactggattttgacaa

SEQ ID NO: 723411 - DNA, 19 bp, Mus musculus
  siRNA target sequence for 2310026E23Rik (NM_026279.1,385-403).
ggcgctggcagaagacaaa

SEQ ID NO: 723412 - DNA, 19 bp, Mus musculus
  siRNA target sequence for 2310026E23Rik (NM_026279.1,386-404).
gcgctggcagaagacaaat

SEQ ID NO: 723413 - DNA, 19 bp, Mus musculus
  siRNA target sequence for 2310026E23Rik (NM_026279.1,456-474).
ctctcagtcatgtagaaga

SEQ ID NO: 723414 - DNA, 19 bp, Mus musculus
  siRNA target sequence for 2310026E23Rik (NM_026279.1,512-530).
cagcttagacacatcaaga

SEQ ID NO: 723415 - DNA, 19 bp, Mus musculus
  siRNA target sequence for 2310026E23Rik (NM_026279.1,554-572).
gaagcggctcacaagagta

SEQ ID NO: 723416 - DNA, 19 bp, Mus musculus
  siRNA target sequence for 2310026E23Rik (NM_026279.1,833-851).
ggggcattggtgtctgaaa

SEQ ID NO: 723417 - DNA, 19 bp, Mus musculus
  siRNA target sequence for 2310026E23Rik (NM_026279.1,837-855).
cattggtgtctgaaatgaa

SEQ ID NO: 723418 - DNA, 19 bp, Mus musculus
  siRNA target sequence for 2310026E23Rik (NM_026279.1,912-930).
gcggtcccgccattgactt

SEQ ID NO: 723419 - DNA, 19 bp, Mus musculus
  siRNA target sequence for 2310026E23Rik (NM_026279.1,919-937).
cgccattgacttggaaaaa

SEQ ID NO: 723420 - DNA, 19 bp, Mus musculus
  siRNA target sequence for 2310026E23Rik (NM_026279.1,968-986).
gagttacggagcactttca

SEQ ID NO: 723421 - DNA, 19 bp, Mus musculus
  siRNA target sequence for 2310026E23Rik (NM_026279.1,970-988).
gttacggagcactttcagt

SEQ ID NO: 723422 - DNA, 19 bp, Mus musculus
  siRNA target sequence for 2310026E23Rik (NM_026279.1,995-1013).
gcaaatacgtcgtcctatt

SEQ ID NO: 723423 - DNA, 19 bp, Mus musculus
  siRNA target sequence for 2310026E23Rik (NM_026279.1,996-1014).
caaatacgtcgtcctatta

SEQ ID NO: 723424 - DNA, 19 bp, Mus musculus
  siRNA target sequence for 2310026E23Rik (NM_026279.1,1026-1044).
cgcctgtcatggacaagta

SEQ ID NO: 723425 - DNA, 19 bp, Mus musculus
  siRNA target sequence for 2310026E23Rik (NM_026279.1,1028-1046).
cctgtcatggacaagtata

SEQ ID NO: 723426 - DNA, 19 bp, Mus musculus
  siRNA target sequence for 2310026E23Rik (NM_026279.1,1077-1095).
gcgggatttgggttgatga

SEQ ID NO: 723427 - DNA, 19 bp, Mus musculus
  siRNA target sequence for 2310026E23Rik (NM_026279.1,1122-1140).
cccaaggagattctaagta

SEQ ID NO: 723428 - DNA, 19 bp, Mus musculus
  siRNA target sequence for 2310026E23Rik (NM_026279.1,1200-1218).
caggagtcgccacaaaaaa

SEQ ID NO: 723429 - DNA, 19 bp, Mus musculus
  siRNA target sequence for 2310026E23Rik (NM_026279.1,1270-1288).
cgtcagagagtgtttatat

SEQ ID NO: 723430 - DNA, 19 bp, Mus musculus
  siRNA target sequence for 2310026E23Rik (NM_026279.1,1309-1327).
ggtggatgaaacggaaatt

SEQ ID NO: 723431 - DNA, 19 bp, Mus musculus
  siRNA target sequence for 2310026E23Rik (NM_026279.1,1362-1380).
gtgagaaaatcatggatat

SEQ ID NO: 723432 - DNA, 19 bp, Mus musculus
  siRNA target sequence for 2310026E23Rik (NM_026279.1,1372-1390).
catggatatcaacaaatct

SEQ ID NO: 723433 - DNA, 19 bp, Mus musculus
  siRNA target sequence for 2310026E23Rik (NM_026279.1,1403-1421).
gaacgaagggaagcaaaat

SEQ ID NO: 723434 - DNA, 19 bp, Mus musculus
  siRNA target sequence for 2410030K01Rik (NM_026282.2,104-122).
ggagctacgagcagatgat

SEQ ID NO: 723435 - DNA, 19 bp, Mus musculus
  siRNA target sequence for 2410030K01Rik (NM_026282.2,208-226).
cttgaactgaaagaatgta

SEQ ID NO: 723436 - DNA, 19 bp, Mus musculus
  siRNA target sequence for 2410030K01Rik (NM_026282.2,420-438).
gtatgtggctcatctctat

SEQ ID NO: 723437 - DNA, 19 bp, Mus musculus
  siRNA target sequence for 2410030K01Rik (NM_026282.2,435-453).
ctatcaccaaattagtaaa

SEQ ID NO: 723438 - DNA, 19 bp, Mus musculus
  siRNA target sequence for 2410030K01Rik (NM_026282.2,473-491).
gcgagccagggatgatcaa

SEQ ID NO: 723439 - DNA, 19 bp, Mus musculus
  siRNA target sequence for 2410030K01Rik (NM_026282.2,544-562).
cagctctcgccgaagttca

SEQ ID NO: 723440 - DNA, 19 bp, Mus musculus
  siRNA target sequence for 2410030K01Rik (NM_026282.2,547-565).
ctctcgccgaagttcatca

SEQ ID NO: 723441 - DNA, 19 bp, Mus musculus
  siRNA target sequence for Samd8 (NM_026283.1,244-262).
ccgcggaggaagtagagaa

SEQ ID NO: 723442 - DNA, 19 bp, Mus musculus
  siRNA target sequence for Samd8 (NM_026283.1,245-263).
cgcggaggaagtagagaaa

SEQ ID NO: 723443 - DNA, 19 bp, Mus musculus
  siRNA target sequence for Samd8 (NM_026283.1,329-347).
gaaggacgaaggtttcttt

SEQ ID NO: 723444 - DNA, 19 bp, Mus musculus
  siRNA target sequence for Samd8 (NM_026283.1,348-366).
gagtatgtggacattttat

SEQ ID NO: 723445 - DNA, 19 bp, Mus musculus
  siRNA target sequence for Samd8 (NM_026283.1,377-395).
ccgccttgatggaatcaca

SEQ ID NO: 723446 - DNA, 19 bp, Mus musculus
  siRNA target sequence for Samd8 (NM_026283.1,378-396).
cgccttgatggaatcacat

SEQ ID NO: 723447 - DNA, 19 bp, Mus musculus
  siRNA target sequence for Samd8 (NM_026283.1,379-397).
gccttgatggaatcacatt

SEQ ID NO: 723448 - DNA, 19 bp, Mus musculus
  siRNA target sequence for Samd8 (NM_026283.1,398-416).
gctcacgctgactgaatat

SEQ ID NO: 723449 - DNA, 19 bp, Mus musculus
  siRNA target sequence for Samd8 (NM_026283.1,401-419).
cacgctgactgaatatgat

SEQ ID NO: 723450 - DNA, 19 bp, Mus musculus
  siRNA target sequence for Samd8 (NM_026283.1,403-421).
cgctgactgaatatgatct

SEQ ID NO: 723451 - DNA, 19 bp, Mus musculus
  siRNA target sequence for Samd8 (NM_026283.1,494-512).
gaaaatacatactgatgtt

SEQ ID NO: 723452 - DNA, 19 bp, Mus musculus
  siRNA target sequence for Samd8 (NM_026283.1,635-653).
ccctgacttgagttctgat

SEQ ID NO: 723453 - DNA, 19 bp, Mus musculus
  siRNA target sequence for Samd8 (NM_026283.1,756-774).
gggtttacgtctttcatta

SEQ ID NO: 723454 - DNA, 19 bp, Mus musculus
  siRNA target sequence for Samd8 (NM_026283.1,764-782).
gtctttcattatggttatt

SEQ ID NO: 723455 - DNA, 19 bp, Mus musculus
  siRNA target sequence for Samd8 (NM_026283.1,815-833).
cccaccactcccagatata

SEQ ID NO: 723456 - DNA, 19 bp, Mus musculus
  siRNA target sequence for Samd8 (NM_026283.1,817-835).
caccactcccagatatatt

SEQ ID NO: 723457 - DNA, 19 bp, Mus musculus
  siRNA target sequence for Samd8 (NM_026283.1,994-1012).
gctgctttaccatgtttgt

SEQ ID NO: 723458 - DNA, 19 bp, Mus musculus
  siRNA target sequence for Samd8 (NM_026283.1,1044-1062).
cagtgtactggaaagatat

SEQ ID NO: 723459 - DNA, 19 bp, Mus musculus
  siRNA target sequence for Samd8 (NM_026283.1,1046-1064).
gtgtactggaaagatatat

SEQ ID NO: 723460 - DNA, 19 bp, Mus musculus
  siRNA target sequence for Samd8 (NM_026283.1,1106-1124).
gagcggctttggaatgact

SEQ ID NO: 723461 - DNA, 19 bp, Mus musculus
  siRNA target sequence for Samd8 (NM_026283.1,1176-1194).
gttctaaccatgctgaatt

SEQ ID NO: 723462 - DNA, 19 bp, Mus musculus
  siRNA target sequence for Samd8 (NM_026283.1,1179-1197).
ctaaccatgctgaatttct

SEQ ID NO: 723463 - DNA, 19 bp, Mus musculus
  siRNA target sequence for Samd8 (NM_026283.1,1213-1231).
caccaagaagctggaattt

SEQ ID NO: 723464 - DNA, 19 bp, Mus musculus
  siRNA target sequence for Samd8 (NM_026283.1,1240-1258).
ctctatcctgggttctcaa

SEQ ID NO: 723465 - DNA, 19 bp, Mus musculus
  siRNA target sequence for Samd8 (NM_026283.1,1283-1301).
ggctgcccatgaacattat

SEQ ID NO: 723466 - DNA, 19 bp, Mus musculus
  siRNA target sequence for Samd8 (NM_026283.1,1284-1302).
gctgcccatgaacattatt

SEQ ID NO: 723467 - DNA, 19 bp, Mus musculus
  siRNA target sequence for Samd8 (NM_026283.1,1287-1305).
gcccatgaacattattcca

SEQ ID NO: 723468 - DNA, 19 bp, Mus musculus
  siRNA target sequence for Samd8 (NM_026283.1,1288-1306).
cccatgaacattattccat

SEQ ID NO: 723469 - DNA, 19 bp, Mus musculus
  siRNA target sequence for Samd8 (NM_026283.1,1289-1307).
ccatgaacattattccatt

SEQ ID NO: 723470 - DNA, 19 bp, Mus musculus
  siRNA target sequence for Samd8 (NM_026283.1,1322-1340).
cttttatatcacaacaaga

SEQ ID NO: 723471 - DNA, 19 bp, Mus musculus
  siRNA target sequence for Samd8 (NM_026283.1,1403-1421).
gatttggttccctatgttt

SEQ ID NO: 723472 - DNA, 19 bp, Mus musculus
  siRNA target sequence for Samd8 (NM_026283.1,1446-1464).
ggcacagtacctaatgaat

SEQ ID NO: 723473 - DNA, 19 bp, Mus musculus
  siRNA target sequence for Samd8 (NM_026283.1,1452-1470).
gtacctaatgaatattgtt

SEQ ID NO: 723474 - DNA, 19 bp, Mus musculus
  siRNA target sequence for 4930470P17Rik (NM_026287.1,1023-1041).
cggcttgtctgcatgaact

SEQ ID NO: 723475 - DNA, 19 bp, Mus musculus
  siRNA target sequence for 4930470P17Rik (NM_026287.1,1054-1072).
gctcggaagcgggaataca

SEQ ID NO: 723476 - DNA, 19 bp, Mus musculus
  siRNA target sequence for 4930470P17Rik (NM_026287.1,1083-1101).
gggcccacgccaaagcttt

SEQ ID NO: 723477 - DNA, 19 bp, Mus musculus
  siRNA target sequence for 4930470P17Rik (NM_026287.1,1086-1104).
cccacgccaaagcttttct

SEQ ID NO: 723478 - DNA, 19 bp, Mus musculus
  siRNA target sequence for 4930470P17Rik (NM_026287.1,1175-1193).
gcaagacacaaggattctt

SEQ ID NO: 723479 - DNA, 19 bp, Mus musculus
  siRNA target sequence for 4930470P17Rik (NM_026287.1,1186-1204).
ggattcttcatccctaaat

SEQ ID NO: 723480 - DNA, 19 bp, Mus musculus
  siRNA target sequence for 4930470P17Rik (NM_026287.1,1234-1252).
gtggatactgaccaattct

SEQ ID NO: 723481 - DNA, 19 bp, Mus musculus
  siRNA target sequence for 4930470P17Rik (NM_026287.1,1277-1295).
gcactcgagaaaccatata

SEQ ID NO: 723482 - DNA, 19 bp, Mus musculus
  siRNA target sequence for 4930470P17Rik (NM_026287.1,1280-1298).
ctcgagaaaccatatagat

SEQ ID NO: 723483 - DNA, 19 bp, Mus musculus
  siRNA target sequence for 4930470P17Rik (NM_026287.1,1282-1300).
cgagaaaccatatagatca

SEQ ID NO: 723484 - DNA, 19 bp, Mus musculus
  siRNA target sequence for 4930470P17Rik (NM_026287.1,1283-1301).
gagaaaccatatagatcat

SEQ ID NO: 723485 - DNA, 19 bp, Mus musculus
  siRNA target sequence for 4930470P17Rik (NM_026287.1,1296-1314).
gatcatctgttcttttgaa

SEQ ID NO: 723486 - DNA, 19 bp, Mus musculus
  siRNA target sequence for 4930483J18Rik (NM_026288.1,541-559).
gaggggctcttgcaagata

SEQ ID NO: 723487 - DNA, 19 bp, Mus musculus
  siRNA target sequence for 4930483J18Rik (NM_026288.1,715-733).
ggaggtaacgcatgttaca

SEQ ID NO: 723488 - DNA, 19 bp, Mus musculus
  siRNA target sequence for 4930483J18Rik (NM_026288.1,716-734).
gaggtaacgcatgttacat

SEQ ID NO: 723489 - DNA, 19 bp, Mus musculus
  siRNA target sequence for 4930483J18Rik (NM_026288.1,718-736).
ggtaacgcatgttacatct

SEQ ID NO: 723490 - DNA, 19 bp, Mus musculus
  siRNA target sequence for 4930483J18Rik (NM_026288.1,732-750).
catctctgagtgagttact

SEQ ID NO: 723491 - DNA, 19 bp, Mus musculus
  siRNA target sequence for 4930465K10Rik (NM_026289.1,151-169).
gcaaggtgtccaatctctt

SEQ ID NO: 723492 - DNA, 19 bp, Mus musculus
  siRNA target sequence for 4930465K10Rik (NM_026289.1,152-170).
caaggtgtccaatctcttt

SEQ ID NO: 723493 - DNA, 19 bp, Mus musculus
  siRNA target sequence for 4930465K10Rik (NM_026289.1,238-256).
gcactaacgtcctgttcaa

SEQ ID NO: 723494 - DNA, 19 bp, Mus musculus
  siRNA target sequence for 4930465K10Rik (NM_026289.1,356-374).
ccagacgctcagaattcca

SEQ ID NO: 723495 - DNA, 19 bp, Mus musculus
  siRNA target sequence for 4930511I11Rik (NM_026290.1,125-143).
cgtcaggactggcttaaaa

SEQ ID NO: 723496 - DNA, 19 bp, Mus musculus
  siRNA target sequence for 4930511I11Rik (NM_026290.1,128-146).
caggactggcttaaaatgt

SEQ ID NO: 723497 - DNA, 19 bp, Mus musculus
  siRNA target sequence for 4930511I11Rik (NM_026290.1,219-237).
gactccggtgagattcgaa

SEQ ID NO: 723498 - DNA, 19 bp, Mus musculus
  siRNA target sequence for 4930511I11Rik (NM_026290.1,224-242).
cggtgagattcgaagactt

SEQ ID NO: 723499 - DNA, 19 bp, Mus musculus
  siRNA target sequence for 4930511I11Rik (NM_026290.1,257-275).
ctgcaaacaggatgagtat

SEQ ID NO: 723500 - DNA, 19 bp, Mus musculus
  siRNA target sequence for 4930511I11Rik (NM_026290.1,280-298).
ggagcatgatccttcataa

SEQ ID NO: 723501 - DNA, 19 bp, Mus musculus
  siRNA target sequence for 4930511I11Rik (NM_026290.1,283-301).
gcatgatccttcataacat

SEQ ID NO: 723502 - DNA, 19 bp, Mus musculus
  siRNA target sequence for 4930511I11Rik (NM_026290.1,370-388).
ctgacatgctagatgagaa

SEQ ID NO: 723503 - DNA, 19 bp, Mus musculus
  siRNA target sequence for 4930511I11Rik (NM_026290.1,414-432).
ctgaatgcacttaaagctt

SEQ ID NO: 723504 - DNA, 19 bp, Mus musculus
  siRNA target sequence for 4930511I11Rik (NM_026290.1,479-497).
caaggtactggaactgatt

SEQ ID NO: 723505 - DNA, 19 bp, Mus musculus
  siRNA target sequence for 4930511I11Rik (NM_026290.1,483-501).
gtactggaactgatttcca

SEQ ID NO: 723506 - DNA, 19 bp, Mus musculus
  siRNA target sequence for 4930511I11Rik (NM_026290.1,532-550).
gtctccgattgctcaacaa

SEQ ID NO: 723507 - DNA, 19 bp, Mus musculus
  siRNA target sequence for 4930511I11Rik (NM_026290.1,551-569).
cctcccgctacctgactat

SEQ ID NO: 723508 - DNA, 19 bp, Mus musculus
  siRNA target sequence for 4930511I11Rik (NM_026290.1,649-667).
ctgtccgcctcctgagtta

SEQ ID NO: 723509 - DNA, 19 bp, Mus musculus
  siRNA target sequence for 4930511I11Rik (NM_026290.1,675-693).
cagaagaacgaccttcttt

SEQ ID NO: 723510 - DNA, 19 bp, Mus musculus
  siRNA target sequence for 4930511I11Rik (NM_026290.1,683-701).
cgaccttctttatgacatt

SEQ ID NO: 723511 - DNA, 19 bp, Mus musculus
  siRNA target sequence for 4930511I11Rik (NM_026290.1,819-837).
cactaccgagcggtcaaat

SEQ ID NO: 723512 - DNA, 19 bp, Mus musculus
  siRNA target sequence for 4930511I11Rik (NM_026290.1,828-846).
gcggtcaaatggcattaca

SEQ ID NO: 723513 - DNA, 19 bp, Mus musculus
  siRNA target sequence for 4930511I11Rik (NM_026290.1,829-847).
cggtcaaatggcattacaa

SEQ ID NO: 723514 - DNA, 19 bp, Mus musculus
  siRNA target sequence for 4930522H14Rik (NM_026291.1,185-203).
caaacgaagagaactattt

SEQ ID NO: 723515 - DNA, 19 bp, Mus musculus
  siRNA target sequence for 4930522H14Rik (NM_026291.1,206-224).
ggagtccaagtttaaggaa

SEQ ID NO: 723516 - DNA, 19 bp, Mus musculus
  siRNA target sequence for 4930522H14Rik (NM_026291.1,207-225).
gagtccaagtttaaggaat

SEQ ID NO: 723517 - DNA, 19 bp, Mus musculus
  siRNA target sequence for 4930522H14Rik (NM_026291.1,254-272).
caaaccaaagcttaaagct

SEQ ID NO: 723518 - DNA, 19 bp, Mus musculus
  siRNA target sequence for 4930522H14Rik (NM_026291.1,273-291).
caccctcagtgtgttttca

SEQ ID NO: 723519 - DNA, 19 bp, Mus musculus
  siRNA target sequence for 4930522H14Rik (NM_026291.1,275-293).
ccctcagtgtgttttcatt

SEQ ID NO: 723520 - DNA, 19 bp, Mus musculus
  siRNA target sequence for 4930522H14Rik (NM_026291.1,306-324).
catgctggctatttacaat

SEQ ID NO: 723521 - DNA, 19 bp, Mus musculus
  siRNA target sequence for 4930522H14Rik (NM_026291.1,310-328).
ctggctatttacaatcaca

SEQ ID NO: 723522 - DNA, 19 bp, Mus musculus
  siRNA target sequence for 4930522H14Rik (NM_026291.1,376-394).
gtcactctaaagttgaatt

SEQ ID NO: 723523 - DNA, 19 bp, Mus musculus
  siRNA target sequence for 4930522H14Rik (NM_026291.1,378-396).
cactctaaagttgaattct

SEQ ID NO: 723524 - DNA, 19 bp, Mus musculus
  siRNA target sequence for 4930522H14Rik (NM_026291.1,459-477).
gtgtcaacattgagcttat

SEQ ID NO: 723525 - DNA, 19 bp, Mus musculus
  siRNA target sequence for 4930522H14Rik (NM_026291.1,473-491).
cttatcaacatcaatctct

SEQ ID NO: 723526 - DNA, 19 bp, Mus musculus
  siRNA target sequence for 4930522H14Rik (NM_026291.1,481-499).
catcaatctctagttctta

SEQ ID NO: 723527 - DNA, 19 bp, Mus musculus
  siRNA target sequence for 4930522H14Rik (NM_026291.1,502-520).
gctgccagaccgtagaaga

SEQ ID NO: 723528 - DNA, 19 bp, Mus musculus
  siRNA target sequence for 4930522H14Rik (NM_026291.1,503-521).
ctgccagaccgtagaagaa

SEQ ID NO: 723529 - DNA, 19 bp, Mus musculus
  siRNA target sequence for 4930522H14Rik (NM_026291.1,523-541).
ccgaagactggcttactga

SEQ ID NO: 723530 - DNA, 19 bp, Mus musculus
  siRNA target sequence for 4930522H14Rik (NM_026291.1,528-546).
gactggcttactgatgatt

SEQ ID NO: 723531 - DNA, 19 bp, Mus musculus
  siRNA target sequence for 4930522H14Rik (NM_026291.1,532-550).
ggcttactgatgattgtct

SEQ ID NO: 723532 - DNA, 19 bp, Mus musculus
  siRNA target sequence for 4930522H14Rik (NM_026291.1,557-575).
caggattcccttaaagaat

SEQ ID NO: 723533 - DNA, 19 bp, Mus musculus
  siRNA target sequence for 4930522H14Rik (NM_026291.1,617-635).
cctgtcatccatttcatta

SEQ ID NO: 723534 - DNA, 19 bp, Mus musculus
  siRNA target sequence for 4930522H14Rik (NM_026291.1,653-671).
cacagtgagcaacacattt

SEQ ID NO: 723535 - DNA, 19 bp, Mus musculus
  siRNA target sequence for 4930522H14Rik (NM_026291.1,702-720).
gaactgttggtactgaaaa

SEQ ID NO: 723536 - DNA, 19 bp, Mus musculus
  siRNA target sequence for 4930522H14Rik (NM_026291.1,707-725).
gttggtactgaaaaacaca

SEQ ID NO: 723537 - DNA, 19 bp, Mus musculus
  siRNA target sequence for 4930522H14Rik (NM_026291.1,733-751).
gcaaacacaaccttcaatt

SEQ ID NO: 723538 - DNA, 19 bp, Mus musculus
  siRNA target sequence for 4930522H14Rik (NM_026291.1,738-756).
cacaaccttcaatttgata

SEQ ID NO: 723539 - DNA, 19 bp, Mus musculus
  siRNA target sequence for 4930542C12Rik (NM_026292.1,261-279).
cgggttcccgcctagacat

SEQ ID NO: 723540 - DNA, 19 bp, Mus musculus
  siRNA target sequence for 4930542C12Rik (NM_026292.1,544-562).
cccaaccgtgcctcgaaat

SEQ ID NO: 723541 - DNA, 19 bp, Mus musculus
  siRNA target sequence for 4930542C12Rik (NM_026292.1,545-563).
ccaaccgtgcctcgaaatt

SEQ ID NO: 723542 - DNA, 19 bp, Mus musculus
  siRNA target sequence for 4930540L03Rik (NM_026293.1,144-162).
ggcctcgcaggcatcgaat

SEQ ID NO: 723543 - DNA, 19 bp, Mus musculus
  siRNA target sequence for 4930540L03Rik (NM_026293.1,318-336).
cagaacaatagtcaaagaa

SEQ ID NO: 723544 - DNA, 19 bp, Mus musculus
  siRNA target sequence for 4930540L03Rik (NM_026293.1,320-338).
gaacaatagtcaaagaagt

SEQ ID NO: 723545 - DNA, 19 bp, Mus musculus
  siRNA target sequence for 4930540L03Rik (NM_026293.1,323-341).
caatagtcaaagaagtaga

SEQ ID NO: 723546 - DNA, 19 bp, Mus musculus
  siRNA target sequence for 4930540L03Rik (NM_026293.1,373-391).
ggtatcagagaagtaattt

SEQ ID NO: 723547 - DNA, 19 bp, Mus musculus
  siRNA target sequence for 4930540L03Rik (NM_026293.1,385-403).
gtaattttaaccaatggat

SEQ ID NO: 723548 - DNA, 19 bp, Mus musculus
  siRNA target sequence for 4930540L03Rik (NM_026293.1,404-422).
gccctggaggtgaatccaa

SEQ ID NO: 723549 - DNA, 19 bp, Mus musculus
  siRNA target sequence for 4930540L03Rik (NM_026293.1,427-445).
gttgttcgtgtggaagaat

SEQ ID NO: 723550 - DNA, 19 bp, Mus musculus
  siRNA target sequence for 4930540L03Rik (NM_026293.1,464-482).
gtggctggggtaaaccaat

SEQ ID NO: 723551 - DNA, 19 bp, Mus musculus
  siRNA target sequence for 4930540L03Rik (NM_026293.1,466-484).
ggctggggtaaaccaattt

SEQ ID NO: 723552 - DNA, 19 bp, Mus musculus
  siRNA target sequence for 4930540L03Rik (NM_026293.1,470-488).
ggggtaaaccaatttctga

SEQ ID NO: 723553 - DNA, 19 bp, Mus musculus
  siRNA target sequence for 4930540L03Rik (NM_026293.1,471-489).
gggtaaaccaatttctgaa

SEQ ID NO: 723554 - DNA, 19 bp, Mus musculus
  siRNA target sequence for 4930540L03Rik (NM_026293.1,472-490).
ggtaaaccaatttctgaaa

SEQ ID NO: 723555 - DNA, 19 bp, Mus musculus
  siRNA target sequence for 4930540L03Rik (NM_026293.1,493-511).
cttgatagtgctagactat

SEQ ID NO: 723556 - DNA, 19 bp, Mus musculus
  siRNA target sequence for 4930540L03Rik (NM_026293.1,569-587).
cagaccaacaacctgttat

SEQ ID NO: 723557 - DNA, 19 bp, Mus musculus
  siRNA target sequence for 4930540L03Rik (NM_026293.1,598-616).
gactcagcagtcttggaaa

SEQ ID NO: 723558 - DNA, 19 bp, Mus musculus
  siRNA target sequence for 4930540L03Rik (NM_026293.1,604-622).
gcagtcttggaaataacga

SEQ ID NO: 723559 - DNA, 19 bp, Mus musculus
  siRNA target sequence for 4930540L03Rik (NM_026293.1,646-664).
gaatgtgacaccttggata

SEQ ID NO: 723560 - DNA, 19 bp, Mus musculus
  siRNA target sequence for 4930540L03Rik (NM_026293.1,685-703).
gttaaattcaccgtctata

SEQ ID NO: 723561 - DNA, 19 bp, Mus musculus
  siRNA target sequence for 4930540L03Rik (NM_026293.1,695-713).
ccgtctatacaacaaatga

SEQ ID NO: 723562 - DNA, 19 bp, Mus musculus
  siRNA target sequence for 4930540L03Rik (NM_026293.1,696-714).
cgtctatacaacaaatgaa

SEQ ID NO: 723563 - DNA, 19 bp, Mus musculus
  siRNA target sequence for 4930540L03Rik (NM_026293.1,744-762).
cactgatgcagtcttagtt

SEQ ID NO: 723564 - DNA, 19 bp, Mus musculus
  siRNA target sequence for 4930540L03Rik (NM_026293.1,746-764).
ctgatgcagtcttagtttt

SEQ ID NO: 723565 - DNA, 19 bp, Mus musculus
  siRNA target sequence for 4930540L03Rik (NM_026293.1,769-787).
ctgaccataggagtcatta

SEQ ID NO: 723566 - DNA, 19 bp, Mus musculus
  siRNA target sequence for 4930540L03Rik (NM_026293.1,778-796).
ggagtcattatctgcatat

SEQ ID NO: 723567 - DNA, 19 bp, Mus musculus
  siRNA target sequence for 4930540L03Rik (NM_026293.1,799-817).
gtgatcttcgtattgattt

SEQ ID NO: 723568 - DNA, 19 bp, Mus musculus
  siRNA target sequence for 4930540L03Rik (NM_026293.1,813-831).
gattttcatcatcataaat

SEQ ID NO: 723569 - DNA, 19 bp, Mus musculus
  siRNA target sequence for 4930540L03Rik (NM_026293.1,892-910).
ctgagctctatgaggtata

SEQ ID NO: 723570 - DNA, 19 bp, Mus musculus
  siRNA target sequence for 4930540L03Rik (NM_026293.1,894-912).
gagctctatgaggtataaa

SEQ ID NO: 723571 - DNA, 19 bp, Mus musculus
  siRNA target sequence for 4930540L03Rik (NM_026293.1,897-915).
ctctatgaggtataaagat

SEQ ID NO: 723572 - DNA, 19 bp, Mus musculus
  siRNA target sequence for 4930540L03Rik (NM_026293.1,927-945).
cgaccagtcaccaacagat

SEQ ID NO: 723573 - DNA, 19 bp, Mus musculus
  siRNA target sequence for 4930540L03Rik (NM_026293.1,933-951).
gtcaccaacagatatacct

SEQ ID NO: 723574 - DNA, 19 bp, Mus musculus
  siRNA target sequence for 4930540L03Rik (NM_026293.1,961-979).
gatgacgctttaagtgaat

SEQ ID NO: 723575 - DNA, 19 bp, Mus musculus
  siRNA target sequence for 4930540L03Rik (NM_026293.1,966-984).
cgctttaagtgaatggaat

SEQ ID NO: 723576 - DNA, 19 bp, Mus musculus
  siRNA target sequence for 4930563P03Rik (NM_026295.2,462-480).
gcagccatcctgttgtcat

SEQ ID NO: 723577 - DNA, 19 bp, Mus musculus
  siRNA target sequence for 4930563P03Rik (NM_026295.2,465-483).
gccatcctgttgtcatgaa

SEQ ID NO: 723578 - DNA, 19 bp, Mus musculus
  siRNA target sequence for 4930563P03Rik (NM_026295.2,558-576).
ccacagcgacggtttccat

SEQ ID NO: 723579 - DNA, 19 bp, Mus musculus
  siRNA target sequence for 4930563P03Rik (NM_026295.2,637-655).
ggatcagcagcgactacat

SEQ ID NO: 723580 - DNA, 19 bp, Mus musculus
  siRNA target sequence for 4930563P03Rik (NM_026295.2,646-664).
gcgactacatcgaaacaga

SEQ ID NO: 723581 - DNA, 19 bp, Mus musculus
  siRNA target sequence for 4930563P03Rik (NM_026295.2,798-816).
ggcctcactgcaaggattt

SEQ ID NO: 723582 - DNA, 19 bp, Mus musculus
  siRNA target sequence for 4930563P03Rik (NM_026295.2,859-877).
cttcggcagccgtctgtat

SEQ ID NO: 723583 - DNA, 19 bp, Mus musculus
  siRNA target sequence for 4930563P03Rik (NM_026295.2,902-920).
gaccccgagaagaagcttt

SEQ ID NO: 723584 - DNA, 19 bp, Mus musculus
  siRNA target sequence for 4930563P03Rik (NM_026295.2,904-922).
ccccgagaagaagcttttt

SEQ ID NO: 723585 - DNA, 19 bp, Mus musculus
  siRNA target sequence for 4930563P03Rik (NM_026295.2,905-923).
cccgagaagaagctttttt

SEQ ID NO: 723586 - DNA, 19 bp, Mus musculus
  siRNA target sequence for 4930563P03Rik (NM_026295.2,907-925).
cgagaagaagcttttttct

SEQ ID NO: 723587 - DNA, 19 bp, Mus musculus
  siRNA target sequence for 4930563P03Rik (NM_026295.2,910-928).
gaagaagcttttttctcat

SEQ ID NO: 723588 - DNA, 19 bp, Mus musculus
  siRNA target sequence for 4930563P03Rik (NM_026295.2,916-934).
gcttttttctcatcgaata

SEQ ID NO: 723589 - DNA, 19 bp, Mus musculus
  siRNA target sequence for 4930563P03Rik (NM_026295.2,917-935).
cttttttctcatcgaatat

SEQ ID NO: 723590 - DNA, 19 bp, Mus musculus
  siRNA target sequence for 4930563P03Rik (NM_026295.2,951-969).
gtattgacccgttttctaa

SEQ ID NO: 723591 - DNA, 19 bp, Mus musculus
  siRNA target sequence for 4930563P03Rik (NM_026295.2,1051-1069).
cgcccctaacctcataact

SEQ ID NO: 723592 - DNA, 19 bp, Mus musculus
  siRNA target sequence for 4930563P03Rik (NM_026295.2,1053-1071).
cccctaacctcataactgt

SEQ ID NO: 723593 - DNA, 19 bp, Mus musculus
  siRNA target sequence for 4930563P03Rik (NM_026295.2,1464-1482).
ccgccacccaggatttgga

SEQ ID NO: 723594 - DNA, 19 bp, Mus musculus
  siRNA target sequence for 4930563P03Rik (NM_026295.2,1470-1488).
cccaggatttggactttga

SEQ ID NO: 723595 - DNA, 19 bp, Mus musculus
  siRNA target sequence for 4930563P03Rik (NM_026295.2,1794-1812).
caggcgagtccctagatca

SEQ ID NO: 723596 - DNA, 19 bp, Mus musculus
  siRNA target sequence for 4930563P03Rik (NM_026295.2,1846-1864).
cgacgatgaccacttgata

SEQ ID NO: 723597 - DNA, 19 bp, Mus musculus
  siRNA target sequence for 4930563P03Rik (NM_026295.2,1892-1910).
cacactgactattacacaa

SEQ ID NO: 723598 - DNA, 19 bp, Mus musculus
  siRNA target sequence for 4930563P03Rik (NM_026295.2,1896-1914).
ctgactattacacaaagta

SEQ ID NO: 723599 - DNA, 19 bp, Mus musculus
  siRNA target sequence for 4930563P03Rik (NM_026295.2,1947-1965).
ctccagatatacggaaaat

SEQ ID NO: 723600 - DNA, 19 bp, Mus musculus
  siRNA target sequence for 4930563P03Rik (NM_026295.2,1950-1968).
cagatatacggaaaattgt

SEQ ID NO: 723601 - DNA, 19 bp, Mus musculus
  siRNA target sequence for 4930563P03Rik (NM_026295.2,1993-2011).
cgcagatgtggctgtgata

SEQ ID NO: 723602 - DNA, 19 bp, Mus musculus
  siRNA target sequence for 4930563P03Rik (NM_026295.2,1994-2012).
gcagatgtggctgtgatat

SEQ ID NO: 723603 - DNA, 19 bp, Mus musculus
  siRNA target sequence for 4930563P03Rik (NM_026295.2,2016-2034).
gtgggctgcacccaacaaa

SEQ ID NO: 723604 - DNA, 19 bp, Mus musculus
  siRNA target sequence for 4930563P03Rik (NM_026295.2,2020-2038).
gctgcacccaacaaacttt

SEQ ID NO: 723605 - DNA, 19 bp, Mus musculus
  siRNA target sequence for 4930563P03Rik (NM_026295.2,2263-2281).
gctcttcccactcatagat

SEQ ID NO: 723606 - DNA, 19 bp, Mus musculus
  siRNA target sequence for 4930563P03Rik (NM_026295.2,2282-2300).
gacgatacccgcacacata

SEQ ID NO: 723607 - DNA, 19 bp, Mus musculus
  siRNA target sequence for 4930563P03Rik (NM_026295.2,2291-2309).
cgcacacatagggataaca

SEQ ID NO: 723608 - DNA, 19 bp, Mus musculus
  siRNA target sequence for 4930563P03Rik (NM_026295.2,2360-2378).
catccaacacccatccatt

SEQ ID NO: 723609 - DNA, 19 bp, Mus musculus
  siRNA target sequence for 4930563P03Rik (NM_026295.2,2397-2415).
ccgaggttcggatctatga

SEQ ID NO: 723610 - DNA, 19 bp, Mus musculus
  siRNA target sequence for 4930563P03Rik (NM_026295.2,2399-2417).
gaggttcggatctatgact

SEQ ID NO: 723611 - DNA, 19 bp, Mus musculus
  siRNA target sequence for 4930563P03Rik (NM_026295.2,2405-2423).
cggatctatgactctaaca

SEQ ID NO: 723612 - DNA, 19 bp, Mus musculus
  siRNA target sequence for 4930563P03Rik (NM_026295.2,2407-2425).
gatctatgactctaacaca

SEQ ID NO: 723613 - DNA, 19 bp, Mus musculus
  siRNA target sequence for 4930563P03Rik (NM_026295.2,2469-2487).
cctccagtgccccacttaa

SEQ ID NO: 723614 - DNA, 19 bp, Mus musculus
  siRNA target sequence for 4930563P03Rik (NM_026295.2,2628-2646).
cgctgtacactctctgtaa

SEQ ID NO: 723615 - DNA, 19 bp, Mus musculus
  siRNA target sequence for 4930563P03Rik (NM_026295.2,2864-2882).
ggccacaagaggaaactaa

SEQ ID NO: 723616 - DNA, 19 bp, Mus musculus
  siRNA target sequence for 4930563P03Rik (NM_026295.2,2973-2991).
ctctggaggcggagcttaa

SEQ ID NO: 723617 - DNA, 19 bp, Mus musculus
  siRNA target sequence for 4930548H24Rik (NM_026296.1,242-260).
cgacctgctaggactaagt

SEQ ID NO: 723618 - DNA, 19 bp, Mus musculus
  siRNA target sequence for 4930548H24Rik (NM_026296.1,243-261).
gacctgctaggactaagtt

SEQ ID NO: 723619 - DNA, 19 bp, Mus musculus
  siRNA target sequence for 4930548H24Rik (NM_026296.1,246-264).
ctgctaggactaagttagt

SEQ ID NO: 723620 - DNA, 19 bp, Mus musculus
  siRNA target sequence for 4930548H24Rik (NM_026296.1,252-270).
ggactaagttagtagctaa

SEQ ID NO: 723621 - DNA, 19 bp, Mus musculus
  siRNA target sequence for 4930548H24Rik (NM_026296.1,273-291).
ctaagaaattatatgtcaa

SEQ ID NO: 723622 - DNA, 19 bp, Mus musculus
  siRNA target sequence for 4930548H24Rik (NM_026296.1,476-494).
cagccatcaacgtatctta

SEQ ID NO: 723623 - DNA, 19 bp, Mus musculus
  siRNA target sequence for 4930548H24Rik (NM_026296.1,478-496).
gccatcaacgtatcttact

SEQ ID NO: 723624 - DNA, 19 bp, Mus musculus
  siRNA target sequence for 4930548H24Rik (NM_026296.1,479-497).
ccatcaacgtatcttacta

SEQ ID NO: 723625 - DNA, 19 bp, Mus musculus
  siRNA target sequence for 4930548H24Rik (NM_026296.1,480-498).
catcaacgtatcttactat

SEQ ID NO: 723626 - DNA, 19 bp, Mus musculus
  siRNA target sequence for 4930548H24Rik (NM_026296.1,483-501).
caacgtatcttactattct

SEQ ID NO: 723627 - DNA, 19 bp, Mus musculus
  siRNA target sequence for 4930548H24Rik (NM_026296.1,486-504).
cgtatcttactattctaaa

SEQ ID NO: 723628 - DNA, 19 bp, Mus musculus
  siRNA target sequence for 4930548H24Rik (NM_026296.1,575-593).
gagagcctgagcagaaaaa

SEQ ID NO: 723629 - DNA, 19 bp, Mus musculus
  siRNA target sequence for 4930548H24Rik (NM_026296.1,579-597).
gcctgagcagaaaaataga

SEQ ID NO: 723630 - DNA, 19 bp, Mus musculus
  siRNA target sequence for 4930548H24Rik (NM_026296.1,580-598).
cctgagcagaaaaatagaa

SEQ ID NO: 723631 - DNA, 19 bp, Mus musculus
  siRNA target sequence for 4930548H24Rik (NM_026296.1,682-700).
ctgctttttgagagtctta

SEQ ID NO: 723632 - DNA, 19 bp, Mus musculus
  siRNA target sequence for 4930548H24Rik (NM_026296.1,763-781).
ccttggggagattattcga

SEQ ID NO: 723633 - DNA, 19 bp, Mus musculus
  siRNA target sequence for 4930548H24Rik (NM_026296.1,764-782).
cttggggagattattcgaa

SEQ ID NO: 723634 - DNA, 19 bp, Mus musculus
  siRNA target sequence for 4930548H24Rik (NM_026296.1,772-790).
gattattcgaaggaaacaa

SEQ ID NO: 723635 - DNA, 19 bp, Mus musculus
  siRNA target sequence for 4930548H24Rik (NM_026296.1,800-818).
ctcaggttcgccaagcaaa

SEQ ID NO: 723636 - DNA, 19 bp, Mus musculus
  siRNA target sequence for 4930548H24Rik (NM_026296.1,804-822).
ggttcgccaagcaaactga

SEQ ID NO: 723637 - DNA, 19 bp, Mus musculus
  siRNA target sequence for 4930548H24Rik (NM_026296.1,1006-1024).
gttcttgcagcgaaagaca

SEQ ID NO: 723638 - DNA, 19 bp, Mus musculus
  siRNA target sequence for 4930548H24Rik (NM_026296.1,1016-1034).
cgaaagacacacctaatga

SEQ ID NO: 723639 - DNA, 19 bp, Mus musculus
  siRNA target sequence for 4930548H24Rik (NM_026296.1,1161-1179).
gagagaaccaggagttaca

SEQ ID NO: 723640 - DNA, 19 bp, Mus musculus
  siRNA target sequence for 4930548H24Rik (NM_026296.1,1201-1219).
ccaggagtactacaaacta

SEQ ID NO: 723641 - DNA, 19 bp, Mus musculus
  siRNA target sequence for 4930548H24Rik (NM_026296.1,1233-1251).
ggaagcttgagatgtgtaa

SEQ ID NO: 723642 - DNA, 19 bp, Mus musculus
  siRNA target sequence for 4930548H24Rik (NM_026296.1,1234-1252).
gaagcttgagatgtgtaaa

SEQ ID NO: 723643 - DNA, 19 bp, Mus musculus
  siRNA target sequence for 4930548H24Rik (NM_026296.1,1248-1266).
gtaaagagcggctgaaaga

SEQ ID NO: 723644 - DNA, 19 bp, Mus musculus
  siRNA target sequence for 4930548H24Rik (NM_026296.1,1276-1294).
ctatcaagaagccttagtt

SEQ ID NO: 723645 - DNA, 19 bp, Mus musculus
  siRNA target sequence for Wim (NM_026298.3,149-167).
ccgagtggtacttctgtat

SEQ ID NO: 723646 - DNA, 19 bp, Mus musculus
  siRNA target sequence for Wim (NM_026298.3,151-169).
gagtggtacttctgtatga

SEQ ID NO: 723647 - DNA, 19 bp, Mus musculus
  siRNA target sequence for Wim (NM_026298.3,178-196).
gggagcggagagacaagtt

SEQ ID NO: 723648 - DNA, 19 bp, Mus musculus
  siRNA target sequence for Wim (NM_026298.3,260-278).
ctctcccgattccacaaaa

SEQ ID NO: 723649 - DNA, 19 bp, Mus musculus
  siRNA target sequence for Wim (NM_026298.3,297-315).
gacaacatcatctatgtct

SEQ ID NO: 723650 - DNA, 19 bp, Mus musculus
  siRNA target sequence for Wim (NM_026298.3,305-323).
catctatgtctacaagatt

SEQ ID NO: 723651 - DNA, 19 bp, Mus musculus
  siRNA target sequence for Wim (NM_026298.3,400-418).
ctgcggaatacgtcattgt

SEQ ID NO: 723652 - DNA, 19 bp, Mus musculus
  siRNA target sequence for Wim (NM_026298.3,402-420).
gcggaatacgtcattgtct

SEQ ID NO: 723653 - DNA, 19 bp, Mus musculus
  siRNA target sequence for Wim (NM_026298.3,403-421).
cggaatacgtcattgtctt

SEQ ID NO: 723654 - DNA, 19 bp, Mus musculus
  siRNA target sequence for Wim (NM_026298.3,404-422).
ggaatacgtcattgtcttt

SEQ ID NO: 723655 - DNA, 19 bp, Mus musculus
  siRNA target sequence for Wim (NM_026298.3,435-453).
ggcaaggttcgcttagcaa

SEQ ID NO: 723656 - DNA, 19 bp, Mus musculus
  siRNA target sequence for Wim (NM_026298.3,436-454).
gcaaggttcgcttagcaaa

SEQ ID NO: 723657 - DNA, 19 bp, Mus musculus
  siRNA target sequence for Wim (NM_026298.3,440-458).
ggttcgcttagcaaacact

SEQ ID NO: 723658 - DNA, 19 bp, Mus musculus
  siRNA target sequence for Wim (NM_026298.3,441-459).
gttcgcttagcaaacacta

SEQ ID NO: 723659 - DNA, 19 bp, Mus musculus
  siRNA target sequence for Wim (NM_026298.3,444-462).
cgcttagcaaacactaaaa

SEQ ID NO: 723660 - DNA, 19 bp, Mus musculus
  siRNA target sequence for Wim (NM_026298.3,463-481).
ctaacaagtcatctactat

SEQ ID NO: 723661 - DNA, 19 bp, Mus musculus
  siRNA target sequence for Wim (NM_026298.3,562-580).
ccatcgtcaggtacttctt

SEQ ID NO: 723662 - DNA, 19 bp, Mus musculus
  siRNA target sequence for Wim (NM_026298.3,571-589).
ggtacttcttcgatgatga

SEQ ID NO: 723663 - DNA, 19 bp, Mus musculus
  siRNA target sequence for Wim (NM_026298.3,572-590).
gtacttcttcgatgatgaa

SEQ ID NO: 723664 - DNA, 19 bp, Mus musculus
  siRNA target sequence for Wim (NM_026298.3,604-622).
cacagggaaagttggttaa

SEQ ID NO: 723665 - DNA, 19 bp, Mus musculus
  siRNA target sequence for Wim (NM_026298.3,723-741).
ctgcagacttttgactata

SEQ ID NO: 723666 - DNA, 19 bp, Mus musculus
  siRNA target sequence for Wim (NM_026298.3,804-822).
gtgctgggaagttatgaca

SEQ ID NO: 723667 - DNA, 19 bp, Mus musculus
  siRNA target sequence for Wim (NM_026298.3,961-979).
gtggggtggaacagtttga

SEQ ID NO: 723668 - DNA, 19 bp, Mus musculus
  siRNA target sequence for Wim (NM_026298.3,963-981).
ggggtggaacagtttgact

SEQ ID NO: 723669 - DNA, 19 bp, Mus musculus
  siRNA target sequence for Wim (NM_026298.3,985-1003).
gcctccgaaggagcattta

SEQ ID NO: 723670 - DNA, 19 bp, Mus musculus
  siRNA target sequence for Wim (NM_026298.3,987-1005).
ctccgaaggagcatttaca

SEQ ID NO: 723671 - DNA, 19 bp, Mus musculus
  siRNA target sequence for Wim (NM_026298.3,994-1012).
ggagcatttacaagaacaa

SEQ ID NO: 723672 - DNA, 19 bp, Mus musculus
  siRNA target sequence for Wim (NM_026298.3,1036-1054).
ctagccaggtgattgtgaa

SEQ ID NO: 723673 - DNA, 19 bp, Mus musculus
  siRNA target sequence for Wim (NM_026298.3,1218-1236).
ggatctgggggcaatgaga

SEQ ID NO: 723674 - DNA, 19 bp, Mus musculus
  siRNA target sequence for Wim (NM_026298.3,1219-1237).
gatctgggggcaatgagaa

SEQ ID NO: 723675 - DNA, 19 bp, Mus musculus
  siRNA target sequence for Wim (NM_026298.3,1222-1240).
ctgggggcaatgagaaata

SEQ ID NO: 723676 - DNA, 19 bp, Mus musculus
  siRNA target sequence for Wim (NM_026298.3,1224-1242).
gggggcaatgagaaatatt

SEQ ID NO: 723677 - DNA, 19 bp, Mus musculus
  siRNA target sequence for Wim (NM_026298.3,1286-1304).
gctgaccctggtggaatat

SEQ ID NO: 723678 - DNA, 19 bp, Mus musculus
  siRNA target sequence for Wim (NM_026298.3,1327-1345).
ctgtgcgcaccgaattcat

SEQ ID NO: 723679 - DNA, 19 bp, Mus musculus
  siRNA target sequence for Wim (NM_026298.3,1329-1347).
gtgcgcaccgaattcatga

SEQ ID NO: 723680 - DNA, 19 bp, Mus musculus
  siRNA target sequence for Wim (NM_026298.3,1358-1376).
catcagcgtccgtatcaat

SEQ ID NO: 723681 - DNA, 19 bp, Mus musculus
  siRNA target sequence for Wim (NM_026298.3,1382-1400).
ctgccagcgaggaatggaa

SEQ ID NO: 723682 - DNA, 19 bp, Mus musculus
  siRNA target sequence for Wim (NM_026298.3,1388-1406).
gcgaggaatggaagataat

SEQ ID NO: 723683 - DNA, 19 bp, Mus musculus
  siRNA target sequence for Wim (NM_026298.3,1389-1407).
cgaggaatggaagataata

SEQ ID NO: 723684 - DNA, 19 bp, Mus musculus
  siRNA target sequence for Wim (NM_026298.3,1457-1475).
gattggtggctacaacatt

SEQ ID NO: 723685 - DNA, 19 bp, Mus musculus
  siRNA target sequence for Wim (NM_026298.3,1465-1483).
gctacaacattggtactat

SEQ ID NO: 723686 - DNA, 19 bp, Mus musculus
  siRNA target sequence for Wim (NM_026298.3,1500-1518).
gtggattggctagaactta

SEQ ID NO: 723687 - DNA, 19 bp, Mus musculus
  siRNA target sequence for Wim (NM_026298.3,1541-1559).
ctttagagaccggaaactt

SEQ ID NO: 723688 - DNA, 19 bp, Mus musculus
  siRNA target sequence for Wim (NM_026298.3,1560-1578).
cggctgcatctatatgata

SEQ ID NO: 723689 - DNA, 19 bp, Mus musculus
  siRNA target sequence for Wim (NM_026298.3,1561-1579).
ggctgcatctatatgatat

SEQ ID NO: 723690 - DNA, 19 bp, Mus musculus
  siRNA target sequence for Wim (NM_026298.3,1565-1583).
gcatctatatgatattgaa

SEQ ID NO: 723691 - DNA, 19 bp, Mus musculus
  siRNA target sequence for Wim (NM_026298.3,1585-1603).
gctgctctaagacaatgat

SEQ ID NO: 723692 - DNA, 19 bp, Mus musculus
  siRNA target sequence for Wim (NM_026298.3,1661-1679).
gaaccgaaacagcttatgt

SEQ ID NO: 723693 - DNA, 19 bp, Mus musculus
  siRNA target sequence for Wim (NM_026298.3,1664-1682).
ccgaaacagcttatgtgta

SEQ ID NO: 723694 - DNA, 19 bp, Mus musculus
  siRNA target sequence for Wim (NM_026298.3,1678-1696).
gtgtatggtacaatattga

SEQ ID NO: 723695 - DNA, 19 bp, Mus musculus
  siRNA target sequence for Wim (NM_026298.3,1710-1728).
gtcaccatgtcctctatca

SEQ ID NO: 723696 - DNA, 19 bp, Mus musculus
  siRNA target sequence for Wim (NM_026298.3,1721-1739).
ctctatcaggggtgatgtt

SEQ ID NO: 723697 - DNA, 19 bp, Mus musculus
  siRNA target sequence for Wim (NM_026298.3,1723-1741).
ctatcaggggtgatgttgt

SEQ ID NO: 723698 - DNA, 19 bp, Mus musculus
  siRNA target sequence for Wim (NM_026298.3,1815-1833).
gacgagggcctgattgagt

SEQ ID NO: 723699 - DNA, 19 bp, Mus musculus
  siRNA target sequence for Wim (NM_026298.3,2018-2036).
gcatgagaccaatgagatt

SEQ ID NO: 723700 - DNA, 19 bp, Mus musculus
  siRNA target sequence for Wim (NM_026298.3,2138-2156).
gatcttcttggaacagaat

SEQ ID NO: 723701 - DNA, 19 bp, Mus musculus
  siRNA target sequence for Wim (NM_026298.3,2195-2213).
ccgctgggaggaatgcatt

SEQ ID NO: 723702 - DNA, 19 bp, Mus musculus
  siRNA target sequence for Wim (NM_026298.3,2252-2270).
gctgcgcagagactactat

SEQ ID NO: 723703 - DNA, 19 bp, Mus musculus
  siRNA target sequence for Wim (NM_026298.3,2260-2278).
gagactactatcaatggtt

SEQ ID NO: 723704 - DNA, 19 bp, Mus musculus
  siRNA target sequence for Wim (NM_026298.3,2262-2280).
gactactatcaatggttaa

SEQ ID NO: 723705 - DNA, 19 bp, Mus musculus
  siRNA target sequence for Wim (NM_026298.3,2417-2435).
ggccaacacagaactagta

SEQ ID NO: 723706 - DNA, 19 bp, Mus musculus
  siRNA target sequence for Wim (NM_026298.3,2420-2438).
caacacagaactagtagaa

SEQ ID NO: 723707 - DNA, 19 bp, Mus musculus
  siRNA target sequence for Wim (NM_026298.3,2423-2441).
cacagaactagtagaacat

SEQ ID NO: 723708 - DNA, 19 bp, Mus musculus
  siRNA target sequence for Wim (NM_026298.3,2425-2443).
cagaactagtagaacatat

SEQ ID NO: 723709 - DNA, 19 bp, Mus musculus
  siRNA target sequence for Wim (NM_026298.3,2459-2477).
caagggagagctctatgaa

SEQ ID NO: 723710 - DNA, 19 bp, Mus musculus
  siRNA target sequence for Wim (NM_026298.3,2485-2503).
gtgatctctttgagaagat

SEQ ID NO: 723711 - DNA, 19 bp, Mus musculus
  siRNA target sequence for Wim (NM_026298.3,2490-2508).
ctctttgagaagattcgaa

SEQ ID NO: 723712 - DNA, 19 bp, Mus musculus
  siRNA target sequence for Wim (NM_026298.3,2536-2554).
gtaaaggcaatgcattcat

SEQ ID NO: 723713 - DNA, 19 bp, Mus musculus
  siRNA target sequence for Wim (NM_026298.3,2652-2670).
gcggccatcaaccactata

SEQ ID NO: 723714 - DNA, 19 bp, Mus musculus
  siRNA target sequence for Wim (NM_026298.3,2653-2671).
cggccatcaaccactatat

SEQ ID NO: 723715 - DNA, 19 bp, Mus musculus
  siRNA target sequence for Wim (NM_026298.3,2656-2674).
ccatcaaccactatattga

SEQ ID NO: 723716 - DNA, 19 bp, Mus musculus
  siRNA target sequence for Wim (NM_026298.3,2681-2699).
gtgctccatcaaagcaatt

SEQ ID NO: 723717 - DNA, 19 bp, Mus musculus
  siRNA target sequence for Wim (NM_026298.3,2683-2701).
gctccatcaaagcaattga

SEQ ID NO: 723718 - DNA, 19 bp, Mus musculus
  siRNA target sequence for Wim (NM_026298.3,2725-2743).
ggaagaaggcaatttatat

SEQ ID NO: 723719 - DNA, 19 bp, Mus musculus
  siRNA target sequence for Wim (NM_026298.3,2729-2747).
gaaggcaatttatatatta

SEQ ID NO: 723720 - DNA, 19 bp, Mus musculus
  siRNA target sequence for Wim (NM_026298.3,2760-2778).
cgcaacactgcatctaaat

SEQ ID NO: 723721 - DNA, 19 bp, Mus musculus
  siRNA target sequence for Wim (NM_026298.3,2761-2779).
gcaacactgcatctaaata

SEQ ID NO: 723722 - DNA, 19 bp, Mus musculus
  siRNA target sequence for Wim (NM_026298.3,2765-2783).
cactgcatctaaatactat

SEQ ID NO: 723723 - DNA, 19 bp, Mus musculus
  siRNA target sequence for Wim (NM_026298.3,2785-2803).
ctcgtgtggctcaacacta

SEQ ID NO: 723724 - DNA, 19 bp, Mus musculus
  siRNA target sequence for Wim (NM_026298.3,2860-2878).
ccaaagacgccatagacat

SEQ ID NO: 723725 - DNA, 19 bp, Mus musculus
  siRNA target sequence for Wim (NM_026298.3,2865-2883).
gacgccatagacatgtaca

SEQ ID NO: 723726 - DNA, 19 bp, Mus musculus
  siRNA target sequence for Wim (NM_026298.3,2943-2961).
gacgtgtccgtgctttaca

SEQ ID NO: 723727 - DNA, 19 bp, Mus musculus
  siRNA target sequence for Wim (NM_026298.3,3071-3089).
gttgtatgacgacatgatt

SEQ ID NO: 723728 - DNA, 19 bp, Mus musculus
  siRNA target sequence for Wim (NM_026298.3,3286-3304).
gagccaatgcccacaaaca

SEQ ID NO: 723729 - DNA, 19 bp, Mus musculus
  siRNA target sequence for Wim (NM_026298.3,3341-3359).
ggctgcagttagactactt

SEQ ID NO: 723730 - DNA, 19 bp, Mus musculus
  siRNA target sequence for Wim (NM_026298.3,3342-3360).
gctgcagttagactactta

SEQ ID NO: 723731 - DNA, 19 bp, Mus musculus
  siRNA target sequence for Wim (NM_026298.3,3343-3361).
ctgcagttagactacttaa

SEQ ID NO: 723732 - DNA, 19 bp, Mus musculus
  siRNA target sequence for Wim (NM_026298.3,3345-3363).
gcagttagactacttaaca

SEQ ID NO: 723733 - DNA, 19 bp, Mus musculus
  siRNA target sequence for Wim (NM_026298.3,3346-3364).
cagttagactacttaacaa

SEQ ID NO: 723734 - DNA, 19 bp, Mus musculus
  siRNA target sequence for Wim (NM_026298.3,3404-3422).
caactgctcctttgagttt

SEQ ID NO: 723735 - DNA, 19 bp, Mus musculus
  siRNA target sequence for Wim (NM_026298.3,3993-4011).
gctgaactgtccatcaagt

SEQ ID NO: 723736 - DNA, 19 bp, Mus musculus
  siRNA target sequence for Wim (NM_026298.3,4084-4102).
gtgctgctgcagaactcta

SEQ ID NO: 723737 - DNA, 19 bp, Mus musculus
  siRNA target sequence for Wim (NM_026298.3,4129-4147).
caatcgatgctttcattga

SEQ ID NO: 723738 - DNA, 19 bp, Mus musculus
  siRNA target sequence for Wim (NM_026298.3,4195-4213).
cccggtatgaggactatgt

SEQ ID NO: 723739 - DNA, 19 bp, Mus musculus
  siRNA target sequence for Wim (NM_026298.3,4308-4326).
cagggccagtgggataaat

SEQ ID NO: 723740 - DNA, 19 bp, Mus musculus
  siRNA target sequence for Wim (NM_026298.3,4313-4331).
ccagtgggataaatgcatt

SEQ ID NO: 723741 - DNA, 19 bp, Mus musculus
  siRNA target sequence for Wim (NM_026298.3,4319-4337).
ggataaatgcattgaaaca

SEQ ID NO: 723742 - DNA, 19 bp, Mus musculus
  siRNA target sequence for Wim (NM_026298.3,4338-4356).
gctaccaagcagaactaca

SEQ ID NO: 723743 - DNA, 19 bp, Mus musculus
  siRNA target sequence for Wim (NM_026298.3,4355-4373).
caagattctgcacaagtat

SEQ ID NO: 723744 - DNA, 19 bp, Mus musculus
  siRNA target sequence for 4930549C01Rik (NM_026300.1,71-89).
gggaactaatctttcttct

SEQ ID NO: 723745 - DNA, 19 bp, Mus musculus
  siRNA target sequence for 4930549C01Rik (NM_026300.1,136-154).
gccttggcttggttgataa

SEQ ID NO: 723746 - DNA, 19 bp, Mus musculus
  siRNA target sequence for 4930549C01Rik (NM_026300.1,141-159).
ggcttggttgataagcttt

SEQ ID NO: 723747 - DNA, 19 bp, Mus musculus
  siRNA target sequence for 4930549C01Rik (NM_026300.1,142-160).
gcttggttgataagcttta

SEQ ID NO: 723748 - DNA, 19 bp, Mus musculus
  siRNA target sequence for 4930549C01Rik (NM_026300.1,214-232).
gtcaaacaagaacacaatt

SEQ ID NO: 723749 - DNA, 19 bp, Mus musculus
  siRNA target sequence for 4930549C01Rik (NM_026300.1,338-356).
gcttcgccctccaggataa

SEQ ID NO: 723750 - DNA, 19 bp, Mus musculus
  siRNA target sequence for 4930549C01Rik (NM_026300.1,411-429).
ggtgttcgtcatatggaat

SEQ ID NO: 723751 - DNA, 19 bp, Mus musculus
  siRNA target sequence for 4930549C01Rik (NM_026300.1,417-435).
cgtcatatggaataaaata

SEQ ID NO: 723752 - DNA, 19 bp, Mus musculus
  siRNA target sequence for 4930549C01Rik (NM_026300.1,509-527).
cattctccaccttatctaa

SEQ ID NO: 723753 - DNA, 19 bp, Mus musculus
  siRNA target sequence for 4930549C01Rik (NM_026300.1,513-531).
ctccaccttatctaaatgt

SEQ ID NO: 723754 - DNA, 19 bp, Mus musculus
  siRNA target sequence for 4930549C01Rik (NM_026300.1,516-534).
caccttatctaaatgtact

SEQ ID NO: 723755 - DNA, 19 bp, Mus musculus
  siRNA target sequence for 4930553F04Rik (NM_026301.1,304-322).
gacatgagggcgcacataa

SEQ ID NO: 723756 - DNA, 19 bp, Mus musculus
  siRNA target sequence for 4930553F04Rik (NM_026301.1,323-341).
ggacctgtgagaagtacat

SEQ ID NO: 723757 - DNA, 19 bp, Mus musculus
  siRNA target sequence for 4930553F04Rik (NM_026301.1,329-347).
gtgagaagtacatcgataa

SEQ ID NO: 723758 - DNA, 19 bp, Mus musculus
  siRNA target sequence for 4930553F04Rik (NM_026301.1,331-349).
gagaagtacatcgataaat

SEQ ID NO: 723759 - DNA, 19 bp, Mus musculus
  siRNA target sequence for 4930553F04Rik (NM_026301.1,333-351).
gaagtacatcgataaatat

SEQ ID NO: 723760 - DNA, 19 bp, Mus musculus
  siRNA target sequence for 4930553F04Rik (NM_026301.1,372-390).
cgacaccacagcaagatgt

SEQ ID NO: 723761 - DNA, 19 bp, Mus musculus
  siRNA target sequence for 4930553F04Rik (NM_026301.1,389-407).
gtgtatgtccattttgtca

SEQ ID NO: 723762 - DNA, 19 bp, Mus musculus
  siRNA target sequence for 4930553F04Rik (NM_026301.1,492-510).
ccattcacgacctgatgaa

SEQ ID NO: 723763 - DNA, 19 bp, Mus musculus
  siRNA target sequence for 4930553F04Rik (NM_026301.1,493-511).
cattcacgacctgatgaaa

SEQ ID NO: 723764 - DNA, 19 bp, Mus musculus
  siRNA target sequence for 4930553F04Rik (NM_026301.1,521-539).
ccttcaatggcagtttaat

SEQ ID NO: 723765 - DNA, 19 bp, Mus musculus
  siRNA target sequence for 4930553F04Rik (NM_026301.1,533-551).
gtttaattagacatttgca

SEQ ID NO: 723766 - DNA, 19 bp, Mus musculus
  siRNA target sequence for 4930553F04Rik (NM_026301.1,555-573).
cagtcacactttgttttat

SEQ ID NO: 723767 - DNA, 19 bp, Mus musculus
  siRNA target sequence for 4930553F04Rik (NM_026301.1,557-575).
gtcacactttgttttatga

SEQ ID NO: 723768 - DNA, 19 bp, Mus musculus
  siRNA target sequence for 4930553F04Rik (NM_026301.1,624-642).
gctagaccgctcacttctt

SEQ ID NO: 723769 - DNA, 19 bp, Mus musculus
  siRNA target sequence for 4930553F04Rik (NM_026301.1,630-648).
ccgctcacttcttgaatat

SEQ ID NO: 723770 - DNA, 19 bp, Mus musculus
  siRNA target sequence for 4930553F04Rik (NM_026301.1,632-650).
gctcacttcttgaatatgt

SEQ ID NO: 723771 - DNA, 19 bp, Mus musculus
  siRNA target sequence for Dctn4 (NM_026302.2,28-46).
gtcggagcgggttctctat

SEQ ID NO: 723772 - DNA, 19 bp, Mus musculus
  siRNA target sequence for Dctn4 (NM_026302.2,30-48).
cggagcgggttctctatct

SEQ ID NO: 723773 - DNA, 19 bp, Mus musculus
  siRNA target sequence for Dctn4 (NM_026302.2,140-158).
cacgaggtggactcacatt

SEQ ID NO: 723774 - DNA, 19 bp, Mus musculus
  siRNA target sequence for Dctn4 (NM_026302.2,142-160).
cgaggtggactcacattat

SEQ ID NO: 723775 - DNA, 19 bp, Mus musculus
  siRNA target sequence for Dctn4 (NM_026302.2,186-204).
cgtcagctgaagccaaatt

SEQ ID NO: 723776 - DNA, 19 bp, Mus musculus
  siRNA target sequence for Dctn4 (NM_026302.2,187-205).
gtcagctgaagccaaatta

SEQ ID NO: 723777 - DNA, 19 bp, Mus musculus
  siRNA target sequence for Dctn4 (NM_026302.2,296-314).
gatgacccagccaaaacca

SEQ ID NO: 723778 - DNA, 19 bp, Mus musculus
  siRNA target sequence for Dctn4 (NM_026302.2,432-450).
cacaacggatgaacaagtt

SEQ ID NO: 723779 - DNA, 19 bp, Mus musculus
  siRNA target sequence for Dctn4 (NM_026302.2,434-452).
caacggatgaacaagttga

SEQ ID NO: 723780 - DNA, 19 bp, Mus musculus
  siRNA target sequence for Dctn4 (NM_026302.2,442-460).
gaacaagttgattgagtat

SEQ ID NO: 723781 - DNA, 19 bp, Mus musculus
  siRNA target sequence for Dctn4 (NM_026302.2,508-526).
gctggcacggcgaagaaat

SEQ ID NO: 723782 - DNA, 19 bp, Mus musculus
  siRNA target sequence for Dctn4 (NM_026302.2,512-530).
gcacggcgaagaaattaca

SEQ ID NO: 723783 - DNA, 19 bp, Mus musculus
  siRNA target sequence for Dctn4 (NM_026302.2,513-531).
cacggcgaagaaattacat

SEQ ID NO: 723784 - DNA, 19 bp, Mus musculus
  siRNA target sequence for Dctn4 (NM_026302.2,688-706).
gcctctgcctgaagactat

SEQ ID NO: 723785 - DNA, 19 bp, Mus musculus
  siRNA target sequence for Dctn4 (NM_026302.2,804-822).
gacacaagcaccttctgat

SEQ ID NO: 723786 - DNA, 19 bp, Mus musculus
  siRNA target sequence for Dctn4 (NM_026302.2,862-880).
gagcaagccagaatttaat

SEQ ID NO: 723787 - DNA, 19 bp, Mus musculus
  siRNA target sequence for Dctn4 (NM_026302.2,872-890).
gaatttaatccaacatcta

SEQ ID NO: 723788 - DNA, 19 bp, Mus musculus
  siRNA target sequence for Dctn4 (NM_026302.2,904-922).
ccagttggttgctgtcaat

SEQ ID NO: 723789 - DNA, 19 bp, Mus musculus
  siRNA target sequence for Dctn4 (NM_026302.2,907-925).
gttggttgctgtcaattat

SEQ ID NO: 723790 - DNA, 19 bp, Mus musculus
  siRNA target sequence for Dctn4 (NM_026302.2,910-928).
ggttgctgtcaattatatt

SEQ ID NO: 723791 - DNA, 19 bp, Mus musculus
  siRNA target sequence for Dctn4 (NM_026302.2,932-950).
gaagtgagaatcatgtcaa

SEQ ID NO: 723792 - DNA, 19 bp, Mus musculus
  siRNA target sequence for Dctn4 (NM_026302.2,953-971).
cccaaccttcgctacatga

SEQ ID NO: 723793 - DNA, 19 bp, Mus musculus
  siRNA target sequence for Dctn4 (NM_026302.2,980-998).
caggtcctcttgactctta

SEQ ID NO: 723794 - DNA, 19 bp, Mus musculus
  siRNA target sequence for Dctn4 (NM_026302.2,983-1001).
gtcctcttgactcttacaa

SEQ ID NO: 723795 - DNA, 19 bp, Mus musculus
  siRNA target sequence for Dctn4 (NM_026302.2,1045-1063).
cgagggggaccctgataat

SEQ ID NO: 723796 - DNA, 19 bp, Mus musculus
  siRNA target sequence for Dctn4 (NM_026302.2,1120-1138).
ggatgcagcagcagaatat

SEQ ID NO: 723797 - DNA, 19 bp, Mus musculus
  siRNA target sequence for Dctn4 (NM_026302.2,1178-1196).
gacatcgtagctttcagaa

SEQ ID NO: 723798 - DNA, 19 bp, Mus musculus
  siRNA target sequence for Dctn4 (NM_026302.2,1180-1198).
catcgtagctttcagaaaa

SEQ ID NO: 723799 - DNA, 19 bp, Mus musculus
  siRNA target sequence for Dctn4 (NM_026302.2,1258-1276).
cgtgtgcttcaagatgaaa

SEQ ID NO: 723800 - DNA, 19 bp, Mus musculus
  siRNA target sequence for Dctn4 (NM_026302.2,1267-1285).
caagatgaaacacgatttt

SEQ ID NO: 723801 - DNA, 19 bp, Mus musculus
  siRNA target sequence for Dctn4 (NM_026302.2,1270-1288).
gatgaaacacgattttaaa

SEQ ID NO: 723802 - DNA, 19 bp, Mus musculus
  siRNA target sequence for 0610037N01Rik (NM_026308.1,101-119).
ccaggcgctggctaggttt

SEQ ID NO: 723803 - DNA, 19 bp, Mus musculus
  siRNA target sequence for 0610037N01Rik (NM_026308.1,102-120).
caggcgctggctaggtttt

SEQ ID NO: 723804 - DNA, 19 bp, Mus musculus
  siRNA target sequence for 0610037N01Rik (NM_026308.1,105-123).
gcgctggctaggttttact

SEQ ID NO: 723805 - DNA, 19 bp, Mus musculus
  siRNA target sequence for 0610037N01Rik (NM_026308.1,292-310).
gccagcggagccagagatt

SEQ ID NO: 723806 - DNA, 19 bp, Mus musculus
  siRNA target sequence for 0610037N01Rik (NM_026308.1,311-329).
cctcaacgaccctaagcat

SEQ ID NO: 723807 - DNA, 19 bp, Mus musculus
  siRNA target sequence for Mrpl18 (NM_026310.1,196-214).
cgacgtggagagtaaggaa

SEQ ID NO: 723808 - DNA, 19 bp, Mus musculus
  siRNA target sequence for 2610029G23Rik (NM_026312.2,108-126).
ctcaccctccggagtcata

SEQ ID NO: 723809 - DNA, 19 bp, Mus musculus
  siRNA target sequence for 2610029G23Rik (NM_026312.2,129-147).
gcaacgaccctgatattga

SEQ ID NO: 723810 - DNA, 19 bp, Mus musculus
  siRNA target sequence for 2610029G23Rik (NM_026312.2,130-148).
caacgaccctgatattgaa

SEQ ID NO: 723811 - DNA, 19 bp, Mus musculus
  siRNA target sequence for 2610029G23Rik (NM_026312.2,175-193).
gcatgctgaagtctattat

SEQ ID NO: 723812 - DNA, 19 bp, Mus musculus
  siRNA target sequence for 2610029G23Rik (NM_026312.2,176-194).
catgctgaagtctattata

SEQ ID NO: 723813 - DNA, 19 bp, Mus musculus
  siRNA target sequence for 2610029G23Rik (NM_026312.2,207-225).
cagttgacccacagtttct

SEQ ID NO: 723814 - DNA, 19 bp, Mus musculus
  siRNA target sequence for 2610029G23Rik (NM_026312.2,226-244).
gaaactcaccaaagtagat

SEQ ID NO: 723815 - DNA, 19 bp, Mus musculus
  siRNA target sequence for 2610029G23Rik (NM_026312.2,256-274).
ctctgagttccgtgagatt

SEQ ID NO: 723816 - DNA, 19 bp, Mus musculus
  siRNA target sequence for 2610029G23Rik (NM_026312.2,280-298).
gacactcagggtagatgta

SEQ ID NO: 723817 - DNA, 19 bp, Mus musculus
  siRNA target sequence for 2610029G23Rik (NM_026312.2,342-360).
ggagaccattctgcttaaa

SEQ ID NO: 723818 - DNA, 19 bp, Mus musculus
  siRNA target sequence for 2610029G23Rik (NM_026312.2,368-386).
gggatcgtagaagattata

SEQ ID NO: 723819 - DNA, 19 bp, Mus musculus
  siRNA target sequence for 2610029G23Rik (NM_026312.2,369-387).
ggatcgtagaagattataa

SEQ ID NO: 723820 - DNA, 19 bp, Mus musculus
  siRNA target sequence for 2610029G23Rik (NM_026312.2,449-467).
gcacccaggattcaatttt

SEQ ID NO: 723821 - DNA, 19 bp, Mus musculus
  siRNA target sequence for 2610029G23Rik (NM_026312.2,450-468).
cacccaggattcaattttt

SEQ ID NO: 723822 - DNA, 19 bp, Mus musculus
  siRNA target sequence for 2610029G23Rik (NM_026312.2,487-505).
gaaccgggaaggctataat

SEQ ID NO: 723823 - DNA, 19 bp, Mus musculus
  siRNA target sequence for 2610029G23Rik (NM_026312.2,490-508).
ccgggaaggctataataaa

SEQ ID NO: 723824 - DNA, 19 bp, Mus musculus
  siRNA target sequence for 2610029G23Rik (NM_026312.2,510-528).
cagtttccgtcagtattca

SEQ ID NO: 723825 - DNA, 19 bp, Mus musculus
  siRNA target sequence for 3300001P08Rik (NM_026313.1,211-229).
gaccacgagagcgtttgta

SEQ ID NO: 723826 - DNA, 19 bp, Mus musculus
  siRNA target sequence for 3300001P08Rik (NM_026313.1,213-231).
ccacgagagcgtttgtaaa

SEQ ID NO: 723827 - DNA, 19 bp, Mus musculus
  siRNA target sequence for 3300001P08Rik (NM_026313.1,214-232).
cacgagagcgtttgtaaat

SEQ ID NO: 723828 - DNA, 19 bp, Mus musculus
  siRNA target sequence for 3300001P08Rik (NM_026313.1,216-234).
cgagagcgtttgtaaatat

SEQ ID NO: 723829 - DNA, 19 bp, Mus musculus
  siRNA target sequence for 3300001P08Rik (NM_026313.1,217-235).
gagagcgtttgtaaatatt

SEQ ID NO: 723830 - DNA, 19 bp, Mus musculus
  siRNA target sequence for 3300001P08Rik (NM_026313.1,219-237).
gagcgtttgtaaatattat

SEQ ID NO: 723831 - DNA, 19 bp, Mus musculus
  siRNA target sequence for 3300001P08Rik (NM_026313.1,253-271).
cctgcggaattgttcacaa

SEQ ID NO: 723832 - DNA, 19 bp, Mus musculus
  siRNA target sequence for 3300001P08Rik (NM_026313.1,254-272).
ctgcggaattgttcacaaa

SEQ ID NO: 723833 - DNA, 19 bp, Mus musculus
  siRNA target sequence for 3300001P08Rik (NM_026313.1,267-285).
cacaaatacccgttctgat

SEQ ID NO: 723834 - DNA, 19 bp, Mus musculus
  siRNA target sequence for 3300001P08Rik (NM_026313.1,339-357).
gagttctcgctttatgaaa

SEQ ID NO: 723835 - DNA, 19 bp, Mus musculus
  siRNA target sequence for 3300001P08Rik (NM_026313.1,361-379).
ggctatgagagagattttt

SEQ ID NO: 723836 - DNA, 19 bp, Mus musculus
  siRNA target sequence for 3300001P08Rik (NM_026313.1,381-399).
gcgatacttacagagttta

SEQ ID NO: 723837 - DNA, 19 bp, Mus musculus
  siRNA target sequence for 3300001P08Rik (NM_026313.1,405-423).
cgaggtagagcgcagaatt

SEQ ID NO: 723838 - DNA, 19 bp, Mus musculus
  siRNA target sequence for 3300001P08Rik (NM_026313.1,406-424).
gaggtagagcgcagaatta

SEQ ID NO: 723839 - DNA, 19 bp, Mus musculus
  siRNA target sequence for 3300001P08Rik (NM_026313.1,408-426).
ggtagagcgcagaattaga

SEQ ID NO: 723840 - DNA, 19 bp, Mus musculus
  siRNA target sequence for 3300001P08Rik (NM_026313.1,433-451).
catgctcgtttggcattat

SEQ ID NO: 723841 - DNA, 19 bp, Mus musculus
  siRNA target sequence for 3300001P08Rik (NM_026313.1,513-531).
ggttctgacagacaaaatt

SEQ ID NO: 723842 - DNA, 19 bp, Mus musculus
  siRNA target sequence for 3300001P08Rik (NM_026313.1,606-624).
ggttgaacagttaaaggaa

SEQ ID NO: 723843 - DNA, 19 bp, Mus musculus
  siRNA target sequence for 3300001P08Rik (NM_026313.1,625-643).
gagagagaattactaagat

SEQ ID NO: 723844 - DNA, 19 bp, Mus musculus
  siRNA target sequence for 3300001P08Rik (NM_026313.1,644-662).
ctacaacctcgactataga

SEQ ID NO: 723845 - DNA, 19 bp, Mus musculus
  siRNA target sequence for 3300001P08Rik (NM_026313.1,654-672).
gactatagaaagttttgct

SEQ ID NO: 723846 - DNA, 19 bp, Mus musculus
  siRNA target sequence for 3300001P08Rik (NM_026313.1,707-725).
gtggagcctttttgatagt

SEQ ID NO: 723847 - DNA, 19 bp, Mus musculus
  siRNA target sequence for 3300001P08Rik (NM_026313.1,732-750).
cgcccagtcccgagtagat

SEQ ID NO: 723848 - DNA, 19 bp, Mus musculus
  siRNA target sequence for 3300001P08Rik (NM_026313.1,734-752).
cccagtcccgagtagatga

SEQ ID NO: 723849 - DNA, 19 bp, Mus musculus
  siRNA target sequence for 3300001P08Rik (NM_026313.1,743-761).
gagtagatgaccatctgat

SEQ ID NO: 723850 - DNA, 19 bp, Mus musculus
  siRNA target sequence for 3300001P08Rik (NM_026313.1,774-792).
catgggctatgccaaaatt

SEQ ID NO: 723851 - DNA, 19 bp, Mus musculus
  siRNA target sequence for 3300001P08Rik (NM_026313.1,777-795).
gggctatgccaaaattaaa

SEQ ID NO: 723852 - DNA, 19 bp, Mus musculus
  siRNA target sequence for 3300001P08Rik (NM_026313.1,850-868).
cgggatgaacgtctcaaaa

SEQ ID NO: 723853 - DNA, 19 bp, Mus musculus
  siRNA target sequence for 3300001P08Rik (NM_026313.1,851-869).
gggatgaacgtctcaaaaa

SEQ ID NO: 723854 - DNA, 19 bp, Mus musculus
  siRNA target sequence for 3300001P08Rik (NM_026313.1,1167-1185).
ggatcgaagacggtcaaaa

SEQ ID NO: 723855 - DNA, 19 bp, Mus musculus
  siRNA target sequence for 3300001P08Rik (NM_026313.1,1168-1186).
gatcgaagacggtcaaaaa

SEQ ID NO: 723856 - DNA, 19 bp, Mus musculus
  siRNA target sequence for 3300001P08Rik (NM_026313.1,1187-1205).
gccgagatcgaaagtcata

SEQ ID NO: 723857 - DNA, 19 bp, Mus musculus
  siRNA target sequence for 3300001P08Rik (NM_026313.1,1188-1206).
ccgagatcgaaagtcatat

SEQ ID NO: 723858 - DNA, 19 bp, Mus musculus
  siRNA target sequence for 3300001P08Rik (NM_026313.1,1189-1207).
cgagatcgaaagtcatata

SEQ ID NO: 723859 - DNA, 19 bp, Mus musculus
  siRNA target sequence for 3300001P08Rik (NM_026313.1,1190-1208).
gagatcgaaagtcatataa

SEQ ID NO: 723860 - DNA, 19 bp, Mus musculus
  siRNA target sequence for 3300001P08Rik (NM_026313.1,1223-1241).
gtcgggacagagaacaaga

SEQ ID NO: 723861 - DNA, 19 bp, Mus musculus
  siRNA target sequence for 3300001P08Rik (NM_026313.1,1225-1243).
cgggacagagaacaagata

SEQ ID NO: 723862 - DNA, 19 bp, Mus musculus
  siRNA target sequence for 3300001P08Rik (NM_026313.1,1266-1284).
gaagggatctgatgataaa

SEQ ID NO: 723863 - DNA, 19 bp, Mus musculus
  siRNA target sequence for 3300001P08Rik (NM_026313.1,1270-1288).
ggatctgatgataaaaaga

SEQ ID NO: 723864 - DNA, 19 bp, Mus musculus
  siRNA target sequence for 3300001P08Rik (NM_026313.1,1301-1319).
ccagtagtcgagaaaagca

SEQ ID NO: 723865 - DNA, 19 bp, Mus musculus
  siRNA target sequence for 3300001P08Rik (NM_026313.1,1343-1361).
cgaaggaaagtgacactaa

SEQ ID NO: 723866 - DNA, 19 bp, Mus musculus
  siRNA target sequence for 3300001P08Rik (NM_026313.1,1375-1393).
gggaccagtgaagacatta

SEQ ID NO: 723867 - DNA, 19 bp, Mus musculus
  siRNA target sequence for 3300001P08Rik (NM_026313.1,1376-1394).
ggaccagtgaagacattaa

SEQ ID NO: 723868 - DNA, 19 bp, Mus musculus
  siRNA target sequence for 3300001P08Rik (NM_026313.1,1377-1395).
gaccagtgaagacattaaa

SEQ ID NO: 723869 - DNA, 19 bp, Mus musculus
  siRNA target sequence for 3300001P08Rik (NM_026313.1,1397-1415).
ctgaagtgcagcgtaagta

SEQ ID NO: 723870 - DNA, 19 bp, Mus musculus
  siRNA target sequence for 3300001P08Rik (NM_026313.1,1431-1449).
ggagctaagccgagtaaga

SEQ ID NO: 723871 - DNA, 19 bp, Mus musculus
  siRNA target sequence for 3300001P08Rik (NM_026313.1,1432-1450).
gagctaagccgagtaagaa

SEQ ID NO: 723872 - DNA, 19 bp, Mus musculus
  siRNA target sequence for 3300001P08Rik (NM_026313.1,1434-1452).
gctaagccgagtaagaaga

SEQ ID NO: 723873 - DNA, 19 bp, Mus musculus
  siRNA target sequence for 3300001P08Rik (NM_026313.1,1440-1458).
ccgagtaagaagacataca

SEQ ID NO: 723874 - DNA, 19 bp, Mus musculus
  siRNA target sequence for 3300001P08Rik (NM_026313.1,1484-1502).
gtgtagtcctgcaaaacat

SEQ ID NO: 723875 - DNA, 19 bp, Mus musculus
  siRNA target sequence for 3300001P08Rik (NM_026313.1,1486-1504).
gtagtcctgcaaaacattt

SEQ ID NO: 723876 - DNA, 19 bp, Mus musculus
  siRNA target sequence for Dyx1c1 (NM_026314.2,132-150).
cgcgatgctgacgtattct

SEQ ID NO: 723877 - DNA, 19 bp, Mus musculus
  siRNA target sequence for Dyx1c1 (NM_026314.2,134-152).
cgatgctgacgtattctgt

SEQ ID NO: 723878 - DNA, 19 bp, Mus musculus
  siRNA target sequence for Dyx1c1 (NM_026314.2,160-178).
gttacctgaaggttaactt

SEQ ID NO: 723879 - DNA, 19 bp, Mus musculus
  siRNA target sequence for Dyx1c1 (NM_026314.2,252-270).
gacacgattcttttcacat

SEQ ID NO: 723880 - DNA, 19 bp, Mus musculus
  siRNA target sequence for Dyx1c1 (NM_026314.2,256-274).
cgattcttttcacattgta

SEQ ID NO: 723881 - DNA, 19 bp, Mus musculus
  siRNA target sequence for Dyx1c1 (NM_026314.2,312-330).
ccgggtgttgataaagaga

SEQ ID NO: 723882 - DNA, 19 bp, Mus musculus
  siRNA target sequence for Dyx1c1 (NM_026314.2,313-331).
cgggtgttgataaagagat

SEQ ID NO: 723883 - DNA, 19 bp, Mus musculus
  siRNA target sequence for Dyx1c1 (NM_026314.2,316-334).
gtgttgataaagagatgat

SEQ ID NO: 723884 - DNA, 19 bp, Mus musculus
  siRNA target sequence for Dyx1c1 (NM_026314.2,432-450).
gcactaggcgagatgatga

SEQ ID NO: 723885 - DNA, 19 bp, Mus musculus
  siRNA target sequence for Dyx1c1 (NM_026314.2,433-451).
cactaggcgagatgatgaa

SEQ ID NO: 723886 - DNA, 19 bp, Mus musculus
  siRNA target sequence for Dyx1c1 (NM_026314.2,435-453).
ctaggcgagatgatgaaga

SEQ ID NO: 723887 - DNA, 19 bp, Mus musculus
  siRNA target sequence for Dyx1c1 (NM_026314.2,439-457).
gcgagatgatgaagattga

SEQ ID NO: 723888 - DNA, 19 bp, Mus musculus
  siRNA target sequence for Dyx1c1 (NM_026314.2,440-458).
cgagatgatgaagattgaa

SEQ ID NO: 723889 - DNA, 19 bp, Mus musculus
  siRNA target sequence for Dyx1c1 (NM_026314.2,509-527).
ggcaactagcgaattagaa

SEQ ID NO: 723890 - DNA, 19 bp, Mus musculus
  siRNA target sequence for Dyx1c1 (NM_026314.2,553-571).
ctgacggacaaaaaagagt

SEQ ID NO: 723891 - DNA, 19 bp, Mus musculus
  siRNA target sequence for Dyx1c1 (NM_026314.2,669-687).
cccacaagagggaggaatt

SEQ ID NO: 723892 - DNA, 19 bp, Mus musculus
  siRNA target sequence for Dyx1c1 (NM_026314.2,678-696).
gggaggaattgggaaaaca

SEQ ID NO: 723893 - DNA, 19 bp, Mus musculus
  siRNA target sequence for Dyx1c1 (NM_026314.2,680-698).
gaggaattgggaaaacata

SEQ ID NO: 723894 - DNA, 19 bp, Mus musculus
  siRNA target sequence for Dyx1c1 (NM_026314.2,739-757).
gctccgctggcagtattca

SEQ ID NO: 723895 - DNA, 19 bp, Mus musculus
  siRNA target sequence for Dyx1c1 (NM_026314.2,740-758).
ctccgctggcagtattcaa

SEQ ID NO: 723896 - DNA, 19 bp, Mus musculus
  siRNA target sequence for Dyx1c1 (NM_026314.2,742-760).
ccgctggcagtattcaaat

SEQ ID NO: 723897 - DNA, 19 bp, Mus musculus
  siRNA target sequence for Dyx1c1 (NM_026314.2,744-762).
gctggcagtattcaaatca

SEQ ID NO: 723898 - DNA, 19 bp, Mus musculus
  siRNA target sequence for Dyx1c1 (NM_026314.2,818-836).
ggaggagtggctgcataaa

SEQ ID NO: 723899 - DNA, 19 bp, Mus musculus
  siRNA target sequence for Dyx1c1 (NM_026314.2,821-839).
ggagtggctgcataaacaa

SEQ ID NO: 723900 - DNA, 19 bp, Mus musculus
  siRNA target sequence for Dyx1c1 (NM_026314.2,924-942).
gacaagggaaacaaattgt

SEQ ID NO: 723901 - DNA, 19 bp, Mus musculus
  siRNA target sequence for Dyx1c1 (NM_026314.2,935-953).
caaattgtttgcaacagaa

SEQ ID NO: 723902 - DNA, 19 bp, Mus musculus
  siRNA target sequence for Dyx1c1 (NM_026314.2,962-980).
ggcagcggttgatgcatat

SEQ ID NO: 723903 - DNA, 19 bp, Mus musculus
  siRNA target sequence for Dyx1c1 (NM_026314.2,963-981).
gcagcggttgatgcatata

SEQ ID NO: 723904 - DNA, 19 bp, Mus musculus
  siRNA target sequence for Dyx1c1 (NM_026314.2,964-982).
cagcggttgatgcatataa

SEQ ID NO: 723905 - DNA, 19 bp, Mus musculus
  siRNA target sequence for Dyx1c1 (NM_026314.2,966-984).
gcggttgatgcatataatt

SEQ ID NO: 723906 - DNA, 19 bp, Mus musculus
  siRNA target sequence for Dyx1c1 (NM_026314.2,967-985).
cggttgatgcatataattt

SEQ ID NO: 723907 - DNA, 19 bp, Mus musculus
  siRNA target sequence for Dyx1c1 (NM_026314.2,987-1005).
gccatacgactgaactgta

SEQ ID NO: 723908 - DNA, 19 bp, Mus musculus
  siRNA target sequence for Dyx1c1 (NM_026314.2,988-1006).
ccatacgactgaactgtaa

SEQ ID NO: 723909 - DNA, 19 bp, Mus musculus
  siRNA target sequence for Dyx1c1 (NM_026314.2,1003-1021).
gtaagatcccattattgta

SEQ ID NO: 723910 - DNA, 19 bp, Mus musculus
  siRNA target sequence for Dyx1c1 (NM_026314.2,1010-1028).
cccattattgtatttgaat

SEQ ID NO: 723911 - DNA, 19 bp, Mus musculus
  siRNA target sequence for Dyx1c1 (NM_026314.2,1035-1053).
gcttgccacctcaaattaa

SEQ ID NO: 723912 - DNA, 19 bp, Mus musculus
  siRNA target sequence for Dyx1c1 (NM_026314.2,1043-1061).
cctcaaattaaaaaaccta

SEQ ID NO: 723913 - DNA, 19 bp, Mus musculus
  siRNA target sequence for Dyx1c1 (NM_026314.2,1069-1087).
ccatcgaggactcttctaa

SEQ ID NO: 723914 - DNA, 19 bp, Mus musculus
  siRNA target sequence for Dyx1c1 (NM_026314.2,1164-1182).
gcgttctgtcaactagaat

SEQ ID NO: 723915 - DNA, 19 bp, Mus musculus
  siRNA target sequence for Dyx1c1 (NM_026314.2,1165-1183).
cgttctgtcaactagaatt

SEQ ID NO: 723916 - DNA, 19 bp, Mus musculus
  siRNA target sequence for Dyx1c1 (NM_026314.2,1169-1187).
ctgtcaactagaattgtat

SEQ ID NO: 723917 - DNA, 19 bp, Mus musculus
  siRNA target sequence for Dyx1c1 (NM_026314.2,1260-1278).
gagaagattcggaatataa

SEQ ID NO: 723918 - DNA, 19 bp, Mus musculus
  siRNA target sequence for 2310003F16Rik (NM_026318.1,165-183).
ggagatccagagttcgaat

SEQ ID NO: 723919 - DNA, 19 bp, Mus musculus
  siRNA target sequence for 2310003F16Rik (NM_026318.1,259-277).
ctggcgaaggtcactatca

SEQ ID NO: 723920 - DNA, 19 bp, Mus musculus
  siRNA target sequence for 2310003F16Rik (NM_026318.1,262-280).
gcgaaggtcactatcaaga

SEQ ID NO: 723921 - DNA, 19 bp, Mus musculus
  siRNA target sequence for 2310003F16Rik (NM_026318.1,263-281).
cgaaggtcactatcaagaa

SEQ ID NO: 723922 - DNA, 19 bp, Mus musculus
  siRNA target sequence for 2310003F16Rik (NM_026318.1,283-301).
gaagatctggagttgataa

SEQ ID NO: 723923 - DNA, 19 bp, Mus musculus
  siRNA target sequence for Ccdc2 (NM_026319.1,57-75).
ggagagcctagaaactgaa

SEQ ID NO: 723924 - DNA, 19 bp, Mus musculus
  siRNA target sequence for Ccdc2 (NM_026319.1,63-81).
cctagaaactgaaatagca

SEQ ID NO: 723925 - DNA, 19 bp, Mus musculus
  siRNA target sequence for Ccdc2 (NM_026319.1,80-98).
cacactcccaagtaaaaca

SEQ ID NO: 723926 - DNA, 19 bp, Mus musculus
  siRNA target sequence for Ccdc2 (NM_026319.1,136-154).
gagtcccatcgagatcaaa

SEQ ID NO: 723927 - DNA, 19 bp, Mus musculus
  siRNA target sequence for Ccdc2 (NM_026319.1,140-158).
cccatcgagatcaaatgat

SEQ ID NO: 723928 - DNA, 19 bp, Mus musculus
  siRNA target sequence for Ccdc2 (NM_026319.1,141-159).
ccatcgagatcaaatgatt

SEQ ID NO: 723929 - DNA, 19 bp, Mus musculus
  siRNA target sequence for Ccdc2 (NM_026319.1,203-221).
gattgcttaagcaggttaa

SEQ ID NO: 723930 - DNA, 19 bp, Mus musculus
  siRNA target sequence for Ccdc2 (NM_026319.1,246-264).
catggagagacagttaaca

SEQ ID NO: 723931 - DNA, 19 bp, Mus musculus
  siRNA target sequence for Ccdc2 (NM_026319.1,305-323).
gacaacttgacatggattt

SEQ ID NO: 723932 - DNA, 19 bp, Mus musculus
  siRNA target sequence for Ccdc2 (NM_026319.1,328-346).
gagcaccaaggtgaaatga

SEQ ID NO: 723933 - DNA, 19 bp, Mus musculus
  siRNA target sequence for Ccdc2 (NM_026319.1,330-348).
gcaccaaggtgaaatgaat

SEQ ID NO: 723934 - DNA, 19 bp, Mus musculus
  siRNA target sequence for Ccdc2 (NM_026319.1,333-351).
ccaaggtgaaatgaatcaa

SEQ ID NO: 723935 - DNA, 19 bp, Mus musculus
  siRNA target sequence for Ccdc2 (NM_026319.1,334-352).
caaggtgaaatgaatcaaa

SEQ ID NO: 723936 - DNA, 19 bp, Mus musculus
  siRNA target sequence for Ccdc2 (NM_026319.1,392-410).
cttttatagagacttttga

SEQ ID NO: 723937 - DNA, 19 bp, Mus musculus
  siRNA target sequence for Ccdc2 (NM_026319.1,477-495).
gcattgcagtcggaatata

SEQ ID NO: 723938 - DNA, 19 bp, Mus musculus
  siRNA target sequence for Ccdc2 (NM_026319.1,478-496).
cattgcagtcggaatataa

SEQ ID NO: 723939 - DNA, 19 bp, Mus musculus
  siRNA target sequence for Ccdc2 (NM_026319.1,483-501).
cagtcggaatataaatcgt

SEQ ID NO: 723940 - DNA, 19 bp, Mus musculus
  siRNA target sequence for Ccdc2 (NM_026319.1,485-503).
gtcggaatataaatcgtat

SEQ ID NO: 723941 - DNA, 19 bp, Mus musculus
  siRNA target sequence for Ccdc2 (NM_026319.1,488-506).
ggaatataaatcgtatgaa

SEQ ID NO: 723942 - DNA, 19 bp, Mus musculus
  siRNA target sequence for Ccdc2 (NM_026319.1,553-571).
gacctcagctttaaatcaa

SEQ ID NO: 723943 - DNA, 19 bp, Mus musculus
  siRNA target sequence for Ccdc2 (NM_026319.1,555-573).
cctcagctttaaatcaact

SEQ ID NO: 723944 - DNA, 19 bp, Mus musculus
  siRNA target sequence for Ccdc2 (NM_026319.1,682-700).
caacagtctctgaaaaaca

SEQ ID NO: 723945 - DNA, 19 bp, Mus musculus
  siRNA target sequence for Ccdc2 (NM_026319.1,739-757).
gacctggcagctttaaaat

SEQ ID NO: 723946 - DNA, 19 bp, Mus musculus
  siRNA target sequence for Ccdc2 (NM_026319.1,787-805).
catcaagaaagaacagtat

SEQ ID NO: 723947 - DNA, 19 bp, Mus musculus
  siRNA target sequence for Ccdc2 (NM_026319.1,846-864).
gctgacctcagattatgat

SEQ ID NO: 723948 - DNA, 19 bp, Mus musculus
  siRNA target sequence for Ccdc2 (NM_026319.1,847-865).
ctgacctcagattatgata

SEQ ID NO: 723949 - DNA, 19 bp, Mus musculus
  siRNA target sequence for Ccdc2 (NM_026319.1,856-874).
gattatgatacccttaaaa

SEQ ID NO: 723950 - DNA, 19 bp, Mus musculus
  siRNA target sequence for Ccdc2 (NM_026319.1,875-893).
ggcaacttcaagacaatga

SEQ ID NO: 723951 - DNA, 19 bp, Mus musculus
  siRNA target sequence for Ccdc2 (NM_026319.1,896-914).
cacatgctcagcttacaaa

SEQ ID NO: 723952 - DNA, 19 bp, Mus musculus
  siRNA target sequence for Ccdc2 (NM_026319.1,943-961).
caaaataacttcgtaatga

SEQ ID NO: 723953 - DNA, 19 bp, Mus musculus
  siRNA target sequence for Ccdc2 (NM_026319.1,954-972).
cgtaatgaaagagttcata

SEQ ID NO: 723954 - DNA, 19 bp, Mus musculus
  siRNA target sequence for Ccdc2 (NM_026319.1,983-1001).
gtcaagagagtgattacca

SEQ ID NO: 723955 - DNA, 19 bp, Mus musculus
  siRNA target sequence for Ccdc2 (NM_026319.1,994-1012).
gattaccagccggtgatta

SEQ ID NO: 723956 - DNA, 19 bp, Mus musculus
  siRNA target sequence for Ccdc2 (NM_026319.1,999-1017).
ccagccggtgattaaaaat

SEQ ID NO: 723957 - DNA, 19 bp, Mus musculus
  siRNA target sequence for Ccdc2 (NM_026319.1,1004-1022).
cggtgattaaaaatgtgat

SEQ ID NO: 723958 - DNA, 19 bp, Mus musculus
  siRNA target sequence for Ccdc2 (NM_026319.1,1029-1047).
gattgcagagtataataaa

SEQ ID NO: 723959 - DNA, 19 bp, Mus musculus
  siRNA target sequence for 2310044D20Rik (NM_026321.2,503-521).
cgtcaggatgagaagaaga

SEQ ID NO: 723960 - DNA, 19 bp, Mus musculus
  siRNA target sequence for 2310044D20Rik (NM_026321.2,532-550).
ctaggaggtacggtgtttt

SEQ ID NO: 723961 - DNA, 19 bp, Mus musculus
  siRNA target sequence for 2310044D20Rik (NM_026321.2,535-553).
ggaggtacggtgttttgga

SEQ ID NO: 723962 - DNA, 19 bp, Mus musculus
  siRNA target sequence for 2310044D20Rik (NM_026321.2,536-554).
gaggtacggtgttttggat

SEQ ID NO: 723963 - DNA, 19 bp, Mus musculus
  siRNA target sequence for 2310044D20Rik (NM_026321.2,627-645).
gccaatcatcctagaagat

SEQ ID NO: 723964 - DNA, 19 bp, Mus musculus
  siRNA target sequence for Kirrel3 (NM_026324.1,484-502).
caagtttcggagaatgaat

SEQ ID NO: 723965 - DNA, 19 bp, Mus musculus
  siRNA target sequence for Kirrel3 (NM_026324.1,487-505).
gtttcggagaatgaatgaa

SEQ ID NO: 723966 - DNA, 19 bp, Mus musculus
  siRNA target sequence for Kirrel3 (NM_026324.1,577-595).
gtgtgccatccctgaatat

SEQ ID NO: 723967 - DNA, 19 bp, Mus musculus
  siRNA target sequence for Kirrel3 (NM_026324.1,579-597).
gtgccatccctgaatatga

SEQ ID NO: 723968 - DNA, 19 bp, Mus musculus
  siRNA target sequence for Kirrel3 (NM_026324.1,604-622).
cgtcctgtggatcaaagat

SEQ ID NO: 723969 - DNA, 19 bp, Mus musculus
  siRNA target sequence for Kirrel3 (NM_026324.1,641-659).
ggcagagacctctcaagtt

SEQ ID NO: 723970 - DNA, 19 bp, Mus musculus
  siRNA target sequence for Kirrel3 (NM_026324.1,642-660).
gcagagacctctcaagtta

SEQ ID NO: 723971 - DNA, 19 bp, Mus musculus
  siRNA target sequence for Kirrel3 (NM_026324.1,979-997).
cggcaaacgagaaagcatt

SEQ ID NO: 723972 - DNA, 19 bp, Mus musculus
  siRNA target sequence for Kirrel3 (NM_026324.1,1092-1110).
cctctgtcaccatagacat

SEQ ID NO: 723973 - DNA, 19 bp, Mus musculus
  siRNA target sequence for Kirrel3 (NM_026324.1,1152-1170).
cggtattggaggacaacat

SEQ ID NO: 723974 - DNA, 19 bp, Mus musculus
  siRNA target sequence for Kirrel3 (NM_026324.1,1227-1245).
ccaaacggggtcacatcat

SEQ ID NO: 723975 - DNA, 19 bp, Mus musculus
  siRNA target sequence for Kirrel3 (NM_026324.1,1275-1293).
ccacggtggactacacata

SEQ ID NO: 723976 - DNA, 19 bp, Mus musculus
  siRNA target sequence for Kirrel3 (NM_026324.1,1278-1296).
cggtggactacacatactt

SEQ ID NO: 723977 - DNA, 19 bp, Mus musculus
  siRNA target sequence for Kirrel3 (NM_026324.1,1303-1321).
gcctgtatcctgtgaagta

SEQ ID NO: 723978 - DNA, 19 bp, Mus musculus
  siRNA target sequence for Kirrel3 (NM_026324.1,1465-1483).
gaccatcgtgtggatgaaa

SEQ ID NO: 723979 - DNA, 19 bp, Mus musculus
  siRNA target sequence for Kirrel3 (NM_026324.1,1815-1833).
ccacattgaccattagcaa

SEQ ID NO: 723980 - DNA, 19 bp, Mus musculus
  siRNA target sequence for Kirrel3 (NM_026324.1,1984-2002).
cgtcctaatggcaaccatt

SEQ ID NO: 723981 - DNA, 19 bp, Mus musculus
  siRNA target sequence for Kirrel3 (NM_026324.1,2019-2037).
cccgttcccagagaaatct

SEQ ID NO: 723982 - DNA, 19 bp, Mus musculus
  siRNA target sequence for Kirrel3 (NM_026324.1,2021-2039).
cgttcccagagaaatctca

SEQ ID NO: 723983 - DNA, 19 bp, Mus musculus
  siRNA target sequence for Kirrel3 (NM_026324.1,2048-2066).
gtatcagccaaaaatgata

SEQ ID NO: 723984 - DNA, 19 bp, Mus musculus
  siRNA target sequence for Kirrel3 (NM_026324.1,2114-2132).
gaggaccacaccaccataa

SEQ ID NO: 723985 - DNA, 19 bp, Mus musculus
  siRNA target sequence for Kirrel3 (NM_026324.1,2146-2164).
ggaccggggtgaattccaa

SEQ ID NO: 723986 - DNA, 19 bp, Mus musculus
  siRNA target sequence for Kirrel3 (NM_026324.1,2251-2269).
cagcgtcaacaccttcaaa

SEQ ID NO: 723987 - DNA, 19 bp, Mus musculus
  siRNA target sequence for Kirrel3 (NM_026324.1,2253-2271).
gcgtcaacaccttcaaaga

SEQ ID NO: 723988 - DNA, 19 bp, Mus musculus
  siRNA target sequence for Kirrel3 (NM_026324.1,2254-2272).
cgtcaacaccttcaaagaa

SEQ ID NO: 723989 - DNA, 19 bp, Mus musculus
  siRNA target sequence for Kirrel3 (NM_026324.1,2552-2570).
ggctacgtgcagtttgaca

SEQ ID NO: 723990 - DNA, 19 bp, Mus musculus
  siRNA target sequence for Kirrel3 (NM_026324.1,2553-2571).
gctacgtgcagtttgacaa

SEQ ID NO: 723991 - DNA, 19 bp, Mus musculus
  siRNA target sequence for 1810059G22Rik (NM_026325.1,289-307).
ctcccacagaggttctata

SEQ ID NO: 723992 - DNA, 19 bp, Mus musculus
  siRNA target sequence for 1810059G22Rik (NM_026325.1,355-373).
cttagtgtctgcctgtata

SEQ ID NO: 723993 - DNA, 19 bp, Mus musculus
  siRNA target sequence for 1810059G22Rik (NM_026325.1,363-381).
ctgcctgtatacttcgatt

SEQ ID NO: 723994 - DNA, 19 bp, Mus musculus
  siRNA target sequence for 1810059G22Rik (NM_026325.1,374-392).
cttcgatttggcaccaatt

SEQ ID NO: 723995 - DNA, 19 bp, Mus musculus
  siRNA target sequence for 1810059G22Rik (NM_026325.1,377-395).
cgatttggcaccaattctt

SEQ ID NO: 723996 - DNA, 19 bp, Mus musculus
  siRNA target sequence for 1810059G22Rik (NM_026325.1,412-430).
ctccttgaaccttacaatt

SEQ ID NO: 723997 - DNA, 19 bp, Mus musculus
  siRNA target sequence for 1810059G22Rik (NM_026325.1,562-580).
ggccatgcagtgcaagttt

SEQ ID NO: 723998 - DNA, 19 bp, Mus musculus
  siRNA target sequence for 1810059G22Rik (NM_026325.1,563-581).
gccatgcagtgcaagttta

SEQ ID NO: 723999 - DNA, 19 bp, Mus musculus
  siRNA target sequence for 1810059G22Rik (NM_026325.1,564-582).
ccatgcagtgcaagtttaa

SEQ ID NO: 724000 - DNA, 19 bp, Mus musculus
  siRNA target sequence for 1810059G22Rik (NM_026325.1,565-583).
catgcagtgcaagtttaaa

SEQ ID NO: 724001 - DNA, 19 bp, Mus musculus
  siRNA target sequence for 1810048J11Rik (NM_026327.2,175-193).
gggaagtatgagttcagat

SEQ ID NO: 724002 - DNA, 19 bp, Mus musculus
  siRNA target sequence for 1810048J11Rik (NM_026327.2,258-276).
gaggccctcgactcaaact

SEQ ID NO: 724003 - DNA, 19 bp, Mus musculus
  siRNA target sequence for 1810048J11Rik (NM_026327.2,288-306).
cccctccttacatatatgt

SEQ ID NO: 724004 - DNA, 19 bp, Mus musculus
  siRNA target sequence for 1810048J11Rik (NM_026327.2,289-307).
ccctccttacatatatgtt

SEQ ID NO: 724005 - DNA, 19 bp, Mus musculus
  siRNA target sequence for 1810048J11Rik (NM_026327.2,347-365).
ggaacgggaacgcttctat

SEQ ID NO: 724006 - DNA, 19 bp, Mus musculus
  siRNA target sequence for 1810048J11Rik (NM_026327.2,348-366).
gaacgggaacgcttctata

SEQ ID NO: 724007 - DNA, 19 bp, Mus musculus
  siRNA target sequence for 1810048J11Rik (NM_026327.2,351-369).
cgggaacgcttctatacca

SEQ ID NO: 724008 - DNA, 19 bp, Mus musculus
  siRNA target sequence for 1810048J11Rik (NM_026327.2,352-370).
gggaacgcttctataccaa

SEQ ID NO: 724009 - DNA, 19 bp, Mus musculus
  siRNA target sequence for 1810048J11Rik (NM_026327.2,373-391).
ggatatcctgagagactat

SEQ ID NO: 724010 - DNA, 19 bp, Mus musculus
  siRNA target sequence for 1810048J11Rik (NM_026327.2,493-511).
gcgaaccagggatatctta

SEQ ID NO: 724011 - DNA, 19 bp, Mus musculus
  siRNA target sequence for 1810048J11Rik (NM_026327.2,517-535).
ggaagaccagcacgaattt

SEQ ID NO: 724012 - DNA, 19 bp, Mus musculus
  siRNA target sequence for 1810048J11Rik (NM_026327.2,518-536).
gaagaccagcacgaattta

SEQ ID NO: 724013 - DNA, 19 bp, Mus musculus
  siRNA target sequence for 1810048J11Rik (NM_026327.2,523-541).
ccagcacgaatttacaagt

SEQ ID NO: 724014 - DNA, 19 bp, Mus musculus
  siRNA target sequence for 1810048J11Rik (NM_026327.2,524-542).
cagcacgaatttacaagtt

SEQ ID NO: 724015 - DNA, 19 bp, Mus musculus
  siRNA target sequence for 1810048J11Rik (NM_026327.2,526-544).
gcacgaatttacaagttgt

SEQ ID NO: 724016 - DNA, 19 bp, Mus musculus
  siRNA target sequence for 1810048J11Rik (NM_026327.2,548-566).
ggtgctgagaccgtcaaat

SEQ ID NO: 724017 - DNA, 19 bp, Mus musculus
  siRNA target sequence for 1810048J11Rik (NM_026327.2,635-653).
ggtcttggaacatggtatt

SEQ ID NO: 724018 - DNA, 19 bp, Mus musculus
  siRNA target sequence for 1810048J11Rik (NM_026327.2,636-654).
gtcttggaacatggtattt

SEQ ID NO: 724019 - DNA, 19 bp, Mus musculus
  siRNA target sequence for 1810048J11Rik (NM_026327.2,741-759).
gagaatactcactcattgt

SEQ ID NO: 724020 - DNA, 19 bp, Mus musculus
  siRNA target sequence for 1810048J11Rik (NM_026327.2,743-761).
gaatactcactcattgtaa

SEQ ID NO: 724021 - DNA, 19 bp, Mus musculus
  siRNA target sequence for 1810048J11Rik (NM_026327.2,790-808).
gacccaggatacttacgaa

SEQ ID NO: 724022 - DNA, 19 bp, Mus musculus
  siRNA target sequence for 1810048J11Rik (NM_026327.2,792-810).
cccaggatacttacgaaat

SEQ ID NO: 724023 - DNA, 19 bp, Mus musculus
  siRNA target sequence for 1810048J11Rik (NM_026327.2,794-812).
caggatacttacgaaatca

SEQ ID NO: 724024 - DNA, 19 bp, Mus musculus
  siRNA target sequence for 1810048J11Rik (NM_026327.2,796-814).
ggatacttacgaaatcact

SEQ ID NO: 724025 - DNA, 19 bp, Mus musculus
  siRNA target sequence for 1810048J11Rik (NM_026327.2,816-834).
ctctcatgagaccacttta

SEQ ID NO: 724026 - DNA, 19 bp, Mus musculus
  siRNA target sequence for 1810048J11Rik (NM_026327.2,818-836).
ctcatgagaccactttata

SEQ ID NO: 724027 - DNA, 19 bp, Mus musculus
  siRNA target sequence for 1700020E22Rik (NM_026331.2,353-371).
cccaaagcccggtatacaa

SEQ ID NO: 724028 - DNA, 19 bp, Mus musculus
  siRNA target sequence for 1700020E22Rik (NM_026331.2,361-379).
ccggtatacaagcatctat

SEQ ID NO: 724029 - DNA, 19 bp, Mus musculus
  siRNA target sequence for 1700020E22Rik (NM_026331.2,432-450).
gcctgaacgtgatgatgat

SEQ ID NO: 724030 - DNA, 19 bp, Mus musculus
  siRNA target sequence for 1700020E22Rik (NM_026331.2,504-522).
ggactttaaatgacgtttt

SEQ ID NO: 724031 - DNA, 19 bp, Mus musculus
  siRNA target sequence for 1700020E22Rik (NM_026331.2,534-552).
gaaacagccatctagctaa

SEQ ID NO: 724032 - DNA, 19 bp, Mus musculus
  siRNA target sequence for 1700020E22Rik (NM_026331.2,581-599).
ctccacgatgcagtaatga

SEQ ID NO: 724033 - DNA, 19 bp, Mus musculus
  siRNA target sequence for 1700020E22Rik (NM_026331.2,583-601).
ccacgatgcagtaatgaat

SEQ ID NO: 724034 - DNA, 19 bp, Mus musculus
  siRNA target sequence for 1700020E22Rik (NM_026331.2,614-632).
gtgaaacagcgcttacaga

SEQ ID NO: 724035 - DNA, 19 bp, Mus musculus
  siRNA target sequence for 1700020E22Rik (NM_026331.2,620-638).
cagcgcttacagatgtaca

SEQ ID NO: 724036 - DNA, 19 bp, Mus musculus
  siRNA target sequence for 1700020E22Rik (NM_026331.2,623-641).
cgcttacagatgtacaact

SEQ ID NO: 724037 - DNA, 19 bp, Mus musculus
  siRNA target sequence for 1700020E22Rik (NM_026331.2,743-761).
cccttccagtcaattcact

SEQ ID NO: 724038 - DNA, 19 bp, Mus musculus
  siRNA target sequence for 1700020E22Rik (NM_026331.2,744-762).
ccttccagtcaattcactt

SEQ ID NO: 724039 - DNA, 19 bp, Mus musculus
  siRNA target sequence for 1700020E22Rik (NM_026331.2,749-767).
cagtcaattcacttcatca

SEQ ID NO: 724040 - DNA, 19 bp, Mus musculus
  siRNA target sequence for 1700020E22Rik (NM_026331.2,815-833).
ccacagtctcacatcatct

SEQ ID NO: 724041 - DNA, 19 bp, Mus musculus
  siRNA target sequence for 1700020E22Rik (NM_026331.2,875-893).
ccgctggacgtctgcaaaa

SEQ ID NO: 724042 - DNA, 19 bp, Mus musculus
  siRNA target sequence for 1700020E22Rik (NM_026331.2,995-1013).
ggccttgccggctatttca

SEQ ID NO: 724043 - DNA, 19 bp, Mus musculus
  siRNA target sequence for 1700020E22Rik (NM_026331.2,1057-1075).
catctcctggtccgtttat

SEQ ID NO: 724044 - DNA, 19 bp, Mus musculus
  siRNA target sequence for 1700020E22Rik (NM_026331.2,1062-1080).
cctggtccgtttatgagtt

SEQ ID NO: 724045 - DNA, 19 bp, Mus musculus
  siRNA target sequence for 1700020E22Rik (NM_026331.2,1065-1083).
ggtccgtttatgagttctt

SEQ ID NO: 724046 - DNA, 19 bp, Mus musculus
  siRNA target sequence for 1700020E22Rik (NM_026331.2,1068-1086).
ccgtttatgagttcttcaa

SEQ ID NO: 724047 - DNA, 19 bp, Mus musculus
  siRNA target sequence for 1810055D05Rik (NM_026332.2,121-139).
gatttgcaggccgttatgt

SEQ ID NO: 724048 - DNA, 19 bp, Mus musculus
  siRNA target sequence for 1810055D05Rik (NM_026332.2,127-145).
caggccgttatgttttaca

SEQ ID NO: 724049 - DNA, 19 bp, Mus musculus
  siRNA target sequence for 1810055D05Rik (NM_026332.2,350-368).
caagggtaagcaactttta

SEQ ID NO: 724050 - DNA, 19 bp, Mus musculus
  siRNA target sequence for 1810055D05Rik (NM_026332.2,353-371).
gggtaagcaacttttatta

SEQ ID NO: 724051 - DNA, 19 bp, Mus musculus
  siRNA target sequence for 1810055D05Rik (NM_026332.2,360-378).
caacttttattactatact

SEQ ID NO: 724052 - DNA, 19 bp, Mus musculus
  siRNA target sequence for 1810055D05Rik (NM_026332.2,380-398).
gactgttaatggaatagct

SEQ ID NO: 724053 - DNA, 19 bp, Mus musculus
  siRNA target sequence for 1810055D05Rik (NM_026332.2,382-400).
ctgttaatggaatagctaa

SEQ ID NO: 724054 - DNA, 19 bp, Mus musculus
  siRNA target sequence for 1810055D05Rik (NM_026332.2,384-402).
gttaatggaatagctaatt

SEQ ID NO: 724055 - DNA, 19 bp, Mus musculus
  siRNA target sequence for 1810055D05Rik (NM_026332.2,437-455).
cccagttgtggatcacatt

SEQ ID NO: 724056 - DNA, 19 bp, Mus musculus
  siRNA target sequence for 2010106E10Rik (NM_026333.2,80-98).
cagattgcacatttatgct

SEQ ID NO: 724057 - DNA, 19 bp, Mus musculus
  siRNA target sequence for 2010106E10Rik (NM_026333.2,200-218).
gtttctgcccagagtctat

SEQ ID NO: 724058 - DNA, 19 bp, Mus musculus
  siRNA target sequence for 2010106E10Rik (NM_026333.2,294-312).
catgggggagaaatgtgat

SEQ ID NO: 724059 - DNA, 19 bp, Mus musculus
  siRNA target sequence for 2010106E10Rik (NM_026333.2,383-401).
gtgtggcaatccagattat

SEQ ID NO: 724060 - DNA, 19 bp, Mus musculus
  siRNA target sequence for 2010106E10Rik (NM_026333.2,387-405).
ggcaatccagattatccat

SEQ ID NO: 724061 - DNA, 19 bp, Mus musculus
  siRNA target sequence for 2010106E10Rik (NM_026333.2,393-411).
ccagattatccattactgt

SEQ ID NO: 724062 - DNA, 19 bp, Mus musculus
  siRNA target sequence for 2010106E10Rik (NM_026333.2,466-484).
gaacttcgacctcaacata

SEQ ID NO: 724063 - DNA, 19 bp, Mus musculus
  siRNA target sequence for 2010106E10Rik (NM_026333.2,469-487).
cttcgacctcaacataatt

SEQ ID NO: 724064 - DNA, 19 bp, Mus musculus
  siRNA target sequence for 2010106E10Rik (NM_026333.2,497-515).
gtttgggtactgataggaa

SEQ ID NO: 724065 - DNA, 19 bp, Mus musculus
  siRNA target sequence for 2010106E10Rik (NM_026333.2,501-519).
gggtactgataggaatctt

SEQ ID NO: 724066 - DNA, 19 bp, Mus musculus
  siRNA target sequence for 2010106E10Rik (NM_026333.2,521-539).
ctcaacctaatcaaagaga

SEQ ID NO: 724067 - DNA, 19 bp, Mus musculus
  siRNA target sequence for 2010106E10Rik (NM_026333.2,698-716).
caagtaatcccgcagtaaa

SEQ ID NO: 724068 - DNA, 19 bp, Mus musculus
  siRNA target sequence for 2010106E10Rik (NM_026333.2,701-719).
gtaatcccgcagtaaacta

SEQ ID NO: 724069 - DNA, 19 bp, Mus musculus
  siRNA target sequence for 2010106E10Rik (NM_026333.2,706-724).
cccgcagtaaactatggaa

SEQ ID NO: 724070 - DNA, 19 bp, Mus musculus
  siRNA target sequence for 2010106E10Rik (NM_026333.2,707-725).
ccgcagtaaactatggaaa

SEQ ID NO: 724071 - DNA, 19 bp, Mus musculus
  siRNA target sequence for 2010106E10Rik (NM_026333.2,748-766).
gcaaagccaaactttgatt

SEQ ID NO: 724072 - DNA, 19 bp, Mus musculus
  siRNA target sequence for 2010106E10Rik (NM_026333.2,780-798).
ggtcccacgagcagcatat

SEQ ID NO: 724073 - DNA, 19 bp, Mus musculus
  siRNA target sequence for 2010106E10Rik (NM_026333.2,791-809).
cagcatatcctccaaaaga

SEQ ID NO: 724074 - DNA, 19 bp, Mus musculus
  siRNA target sequence for 2010106E10Rik (NM_026333.2,829-847).
gaagagtcagaaatcactt

SEQ ID NO: 724075 - DNA, 19 bp, Mus musculus
  siRNA target sequence for 2010106E10Rik (NM_026333.2,832-850).
gagtcagaaatcacttaca

SEQ ID NO: 724076 - DNA, 19 bp, Mus musculus
  siRNA target sequence for 2310057J18Rik (NM_026336.1,67-85).
gtagcagaggtttctgata

SEQ ID NO: 724077 - DNA, 19 bp, Mus musculus
  siRNA target sequence for 2310057J18Rik (NM_026336.1,80-98).
ctgatagctcagatccata

SEQ ID NO: 724078 - DNA, 19 bp, Mus musculus
  siRNA target sequence for 2310057J18Rik (NM_026336.1,91-109).
gatccatatcctcctttat

SEQ ID NO: 724079 - DNA, 19 bp, Mus musculus
  siRNA target sequence for 2310057J18Rik (NM_026336.1,156-174).
gaactacataattaatcct

SEQ ID NO: 724080 - DNA, 19 bp, Mus musculus
  siRNA target sequence for 2310057J18Rik (NM_026336.1,176-194).
gggtatacactgacagaat

SEQ ID NO: 724081 - DNA, 19 bp, Mus musculus
  siRNA target sequence for 2310057J18Rik (NM_026336.1,187-205).
gacagaatggggatgtaca

SEQ ID NO: 724082 - DNA, 19 bp, Mus musculus
  siRNA target sequence for 2310057J18Rik (NM_026336.1,195-213).
ggggatgtacagaatctta

SEQ ID NO: 724083 - DNA, 19 bp, Mus musculus
  siRNA target sequence for 2310057J18Rik (NM_026336.1,197-215).
ggatgtacagaatcttact

SEQ ID NO: 724084 - DNA, 19 bp, Mus musculus
  siRNA target sequence for 2310057J18Rik (NM_026336.1,217-235).
gaagagacagctatgtatt

SEQ ID NO: 724085 - DNA, 19 bp, Mus musculus
  siRNA target sequence for 2310057J18Rik (NM_026336.1,291-309).
gtttggctggcagtatcaa

SEQ ID NO: 724086 - DNA, 19 bp, Mus musculus
  siRNA target sequence for 2310057J18Rik (NM_026336.1,343-361).
gactgtggcaatgaactta

SEQ ID NO: 724087 - DNA, 19 bp, Mus musculus
  siRNA target sequence for 2310057J18Rik (NM_026336.1,345-363).
ctgtggcaatgaacttaat

SEQ ID NO: 724088 - DNA, 19 bp, Mus musculus
  siRNA target sequence for 2310057J18Rik (NM_026336.1,395-413).
gggcagatataaattatta

SEQ ID NO: 724089 - DNA, 19 bp, Mus musculus
  siRNA target sequence for 2310057J18Rik (NM_026336.1,417-435).
gagtgtgatacctttcctt

SEQ ID NO: 724090 - DNA, 19 bp, Mus musculus
  siRNA target sequence for 2310057J18Rik (NM_026336.1,439-457).
gctgttgattctggaataa

SEQ ID NO: 724091 - DNA, 19 bp, Mus musculus
  siRNA target sequence for 2310057J18Rik (NM_026336.1,507-525).
gatgaggttttgttataat

SEQ ID NO: 724092 - DNA, 19 bp, Mus musculus
  siRNA target sequence for 2310057J18Rik (NM_026336.1,510-528).
gaggttttgttataatgtt

SEQ ID NO: 724093 - DNA, 19 bp, Mus musculus
  siRNA target sequence for 2310057J18Rik (NM_026336.1,544-562).
gccgtccctggaacaatga

SEQ ID NO: 724094 - DNA, 19 bp, Mus musculus
  siRNA target sequence for 2310057J18Rik (NM_026336.1,545-563).
ccgtccctggaacaatgaa

SEQ ID NO: 724095 - DNA, 19 bp, Mus musculus
  siRNA target sequence for 2310057J18Rik (NM_026336.1,547-565).
gtccctggaacaatgaaca

SEQ ID NO: 724096 - DNA, 19 bp, Mus musculus
  siRNA target sequence for 2310057J18Rik (NM_026336.1,550-568).
cctggaacaatgaacagat

SEQ ID NO: 724097 - DNA, 19 bp, Mus musculus
  siRNA target sequence for 2310057J18Rik (NM_026336.1,583-601).
cagtacatgcagttgaatt

SEQ ID NO: 724098 - DNA, 19 bp, Mus musculus
  siRNA target sequence for 2310057J18Rik (NM_026336.1,616-634).
ggccttcttaactacttat

SEQ ID NO: 724099 - DNA, 19 bp, Mus musculus
  siRNA target sequence for 2310057J18Rik (NM_026336.1,682-700).
gacagatataatttctatt

SEQ ID NO: 724100 - DNA, 19 bp, Mus musculus
  siRNA target sequence for 2310057J18Rik (NM_026336.1,723-741).
ggaaaactgggctattgct

SEQ ID NO: 724101 - DNA, 19 bp, Mus musculus
  siRNA target sequence for 2310057J18Rik (NM_026336.1,731-749).
gggctattgctgtgaacta

SEQ ID NO: 724102 - DNA, 19 bp, Mus musculus
  siRNA target sequence for 2310057J18Rik (NM_026336.1,733-751).
gctattgctgtgaactatt

SEQ ID NO: 724103 - DNA, 19 bp, Mus musculus
  siRNA target sequence for 2310057J18Rik (NM_026336.1,812-830).
ccccacgagtccttgttga

SEQ ID NO: 724104 - DNA, 19 bp, Mus musculus
  siRNA target sequence for 2310057J18Rik (NM_026336.1,813-831).
cccacgagtccttgttgat

SEQ ID NO: 724105 - DNA, 19 bp, Mus musculus
  siRNA target sequence for 2310057J18Rik (NM_026336.1,814-832).
ccacgagtccttgttgata

SEQ ID NO: 724106 - DNA, 19 bp, Mus musculus
  siRNA target sequence for 2310057J18Rik (NM_026336.1,833-851).
ctgacatagccccttttat

SEQ ID NO: 724107 - DNA, 19 bp, Mus musculus
  siRNA target sequence for 2310057J18Rik (NM_026336.1,882-900).
cctggtatcactcaaactt

SEQ ID NO: 724108 - DNA, 19 bp, Mus musculus
  siRNA target sequence for 2310057J18Rik (NM_026336.1,885-903).
ggtatcactcaaacttctt

SEQ ID NO: 724109 - DNA, 19 bp, Mus musculus
  siRNA target sequence for 2310057J18Rik (NM_026336.1,973-991).
gcaagaacattatttctaa

SEQ ID NO: 724110 - DNA, 19 bp, Mus musculus
  siRNA target sequence for 4932415G12Rik (NM_026339.1,1681-1699).
gttctatgtcccttaggtt

SEQ ID NO: 724111 - DNA, 19 bp, Mus musculus
  siRNA target sequence for 4932415G12Rik (NM_026339.1,1688-1706).
gtcccttaggttgtttctt

SEQ ID NO: 724112 - DNA, 19 bp, Mus musculus
  siRNA target sequence for 4932415G12Rik (NM_026339.1,1715-1733).
ctaagggctttgcttgtat

SEQ ID NO: 724113 - DNA, 19 bp, Mus musculus
  siRNA target sequence for 4932415G12Rik (NM_026339.1,1809-1827).
ctgcacatatccttccaaa

SEQ ID NO: 724114 - DNA, 19 bp, Mus musculus
  siRNA target sequence for 4932415G12Rik (NM_026339.1,1811-1829).
gcacatatccttccaaatt

SEQ ID NO: 724115 - DNA, 19 bp, Mus musculus
  siRNA target sequence for 4932415G12Rik (NM_026339.1,1812-1830).
cacatatccttccaaatta

SEQ ID NO: 724116 - DNA, 19 bp, Mus musculus
  siRNA target sequence for 4932415G12Rik (NM_026339.1,1814-1832).
catatccttccaaattaca

SEQ ID NO: 724117 - DNA, 19 bp, Mus musculus
  siRNA target sequence for 4932415G12Rik (NM_026339.1,1823-1841).
ccaaattacaatttggaat

SEQ ID NO: 724118 - DNA, 19 bp, Mus musculus
  siRNA target sequence for 4932415G12Rik (NM_026339.1,1851-1869).
cccagatcagttacctata

SEQ ID NO: 724119 - DNA, 19 bp, Mus musculus
  siRNA target sequence for 4932415G12Rik (NM_026339.1,1858-1876).
cagttacctatatgttttt

SEQ ID NO: 724120 - DNA, 19 bp, Mus musculus
  siRNA target sequence for 4932415G12Rik (NM_026339.1,1860-1878).
gttacctatatgtttttct

SEQ ID NO: 724121 - DNA, 19 bp, Mus musculus
  siRNA target sequence for 4932434G09Rik (NM_026340.1,214-232).
gccgtcccaatctcagaaa

SEQ ID NO: 724122 - DNA, 19 bp, Mus musculus
  siRNA target sequence for 4932434G09Rik (NM_026340.1,258-276).
ggcagtggcaaatcaagat

SEQ ID NO: 724123 - DNA, 19 bp, Mus musculus
  siRNA target sequence for 4932434G09Rik (NM_026340.1,302-320).
gatgtgaatgagcaatctt

SEQ ID NO: 724124 - DNA, 19 bp, Mus musculus
  siRNA target sequence for 4932434G09Rik (NM_026340.1,380-398).
caggagatccccaagtata

SEQ ID NO: 724125 - DNA, 19 bp, Mus musculus
  siRNA target sequence for 4932434G09Rik (NM_026340.1,383-401).
gagatccccaagtatataa

SEQ ID NO: 724126 - DNA, 19 bp, Mus musculus
  siRNA target sequence for 4932434G09Rik (NM_026340.1,394-412).
gtatataactgcttctact

SEQ ID NO: 724127 - DNA, 19 bp, Mus musculus
  siRNA target sequence for 4932434G09Rik (NM_026340.1,422-440).
gcacgagccgctgaaatca

SEQ ID NO: 724128 - DNA, 19 bp, Mus musculus
  siRNA target sequence for 4932434G09Rik (NM_026340.1,434-452).
gaaatcagtgccatgttaa

SEQ ID NO: 724129 - DNA, 19 bp, Mus musculus
  siRNA target sequence for 4932434G09Rik (NM_026340.1,463-481).
ccagaagtcatctaactca

SEQ ID NO: 724130 - DNA, 19 bp, Mus musculus
  siRNA target sequence for 4932434G09Rik (NM_026340.1,471-489).
catctaactcactggtttt

SEQ ID NO: 724131 - DNA, 19 bp, Mus musculus
  siRNA target sequence for 4932434G09Rik (NM_026340.1,474-492).
ctaactcactggttttcca

SEQ ID NO: 724132 - DNA, 19 bp, Mus musculus
  siRNA target sequence for 4932434G09Rik (NM_026340.1,635-653).
gcccgaagatgtcacataa

SEQ ID NO: 724133 - DNA, 19 bp, Mus musculus
  siRNA target sequence for 4932434G09Rik (NM_026340.1,636-654).
cccgaagatgtcacataaa

SEQ ID NO: 724134 - DNA, 19 bp, Mus musculus
  siRNA target sequence for 4932434G09Rik (NM_026340.1,674-692).
cgcagacaacagaagaaca

SEQ ID NO: 724135 - DNA, 19 bp, Mus musculus
  siRNA target sequence for 4932434G09Rik (NM_026340.1,680-698).
caacagaagaacatatggt

SEQ ID NO: 724136 - DNA, 19 bp, Mus musculus
  siRNA target sequence for 4932434G09Rik (NM_026340.1,715-733).
gcacgccaaacggtttcat

SEQ ID NO: 724137 - DNA, 19 bp, Mus musculus
  siRNA target sequence for 4932434G09Rik (NM_026340.1,716-734).
cacgccaaacggtttcata

SEQ ID NO: 724138 - DNA, 19 bp, Mus musculus
  siRNA target sequence for 4932434G09Rik (NM_026340.1,720-738).
ccaaacggtttcatatggt

SEQ ID NO: 724139 - DNA, 19 bp, Mus musculus
  siRNA target sequence for 4932434G09Rik (NM_026340.1,726-744).
ggtttcatatggtgaagaa

SEQ ID NO: 724140 - DNA, 19 bp, Mus musculus
  siRNA target sequence for 4932434G09Rik (NM_026340.1,795-813).
gctatcgagccatgacaaa

SEQ ID NO: 724141 - DNA, 19 bp, Mus musculus
  siRNA target sequence for 4932434G09Rik (NM_026340.1,817-835).
ctgcctcctgcaggattta

SEQ ID NO: 724142 - DNA, 19 bp, Mus musculus
  siRNA target sequence for 4932434G09Rik (NM_026340.1,821-839).
ctcctgcaggatttatcat

SEQ ID NO: 724143 - DNA, 19 bp, Mus musculus
  siRNA target sequence for 4932434G09Rik (NM_026340.1,913-931).
cgcaggcctgacttttgct

SEQ ID NO: 724144 - DNA, 19 bp, Mus musculus
  siRNA target sequence for 4932434G09Rik (NM_026340.1,974-992).
ctttaccgggcaaataagt

SEQ ID NO: 724145 - DNA, 19 bp, Mus musculus
  siRNA target sequence for 4932434G09Rik (NM_026340.1,1143-1161).
cagaacccgtcaagtcaaa

SEQ ID NO: 724146 - DNA, 19 bp, Mus musculus
  siRNA target sequence for 4932434G09Rik (NM_026340.1,1145-1163).
gaacccgtcaagtcaaata

SEQ ID NO: 724147 - DNA, 19 bp, Mus musculus
  siRNA target sequence for 4932434G09Rik (NM_026340.1,1256-1274).
gacgatggggagagtgtta

SEQ ID NO: 724148 - DNA, 19 bp, Mus musculus
  siRNA target sequence for 4932434G09Rik (NM_026340.1,1269-1287).
gtgttagccgagctaagaa

SEQ ID NO: 724149 - DNA, 19 bp, Mus musculus
  siRNA target sequence for 4932434G09Rik (NM_026340.1,1513-1531).
ctctgatggtcgttctctt

SEQ ID NO: 724150 - DNA, 19 bp, Mus musculus
  siRNA target sequence for 4932434G09Rik (NM_026340.1,1674-1692).
cagaaagataccaagctaa

SEQ ID NO: 724151 - DNA, 19 bp, Mus musculus
  siRNA target sequence for 4932434G09Rik (NM_026340.1,1753-1771).
ctgggaccaggatatctgt

SEQ ID NO: 724152 - DNA, 19 bp, Mus musculus
  siRNA target sequence for 4932434G09Rik (NM_026340.1,1773-1791).
ggagtgtcaccgagaataa

SEQ ID NO: 724153 - DNA, 19 bp, Mus musculus
  siRNA target sequence for 4932434G09Rik (NM_026340.1,1776-1794).
gtgtcaccgagaataaact

SEQ ID NO: 724154 - DNA, 19 bp, Mus musculus
  siRNA target sequence for 4932434G09Rik (NM_026340.1,1778-1796).
gtcaccgagaataaactct

SEQ ID NO: 724155 - DNA, 19 bp, Mus musculus
  siRNA target sequence for 4932434G09Rik (NM_026340.1,1837-1855).
gcccggatcgcaacttgat

SEQ ID NO: 724156 - DNA, 19 bp, Mus musculus
  siRNA target sequence for 4932434G09Rik (NM_026340.1,1838-1856).
cccggatcgcaacttgatt

SEQ ID NO: 724157 - DNA, 19 bp, Mus musculus
  siRNA target sequence for 4932434G09Rik (NM_026340.1,1839-1857).
ccggatcgcaacttgattt

SEQ ID NO: 724158 - DNA, 19 bp, Mus musculus
  siRNA target sequence for 4932434G09Rik (NM_026340.1,1840-1858).
cggatcgcaacttgattta

SEQ ID NO: 724159 - DNA, 19 bp, Mus musculus
  siRNA target sequence for 4932434G09Rik (NM_026340.1,1861-1879).
ggctcgtgaatctaagata

SEQ ID NO: 724160 - DNA, 19 bp, Mus musculus
  siRNA target sequence for 4932434G09Rik (NM_026340.1,1972-1990).
gggcatggctttttggatt

SEQ ID NO: 724161 - DNA, 19 bp, Mus musculus
  siRNA target sequence for 4932434G09Rik (NM_026340.1,2010-2028).
cacgagttggtggactaaa

SEQ ID NO: 724162 - DNA, 19 bp, Mus musculus
  siRNA target sequence for 4932434G09Rik (NM_026340.1,2129-2147).
gatcttctagagaagtaca

SEQ ID NO: 724163 - DNA, 19 bp, Mus musculus
  siRNA target sequence for 4932434G09Rik (NM_026340.1,2150-2168).
cgacgccctcctgctaaaa

SEQ ID NO: 724164 - DNA, 19 bp, Mus musculus
  siRNA target sequence for 4932434G09Rik (NM_026340.1,2163-2181).
ctaaaaggcccaactatgt

SEQ ID NO: 724165 - DNA, 19 bp, Mus musculus
  siRNA target sequence for 4932434G09Rik (NM_026340.1,2169-2187).
ggcccaactatgttaagct

SEQ ID NO: 724166 - DNA, 19 bp, Mus musculus
  siRNA target sequence for 4932434G09Rik (NM_026340.1,2255-2273).
gcccaagaggcagctatta

SEQ ID NO: 724167 - DNA, 19 bp, Mus musculus
  siRNA target sequence for 4932434G09Rik (NM_026340.1,2256-2274).
cccaagaggcagctattat

SEQ ID NO: 724168 - DNA, 19 bp, Mus musculus
  siRNA target sequence for 4932434G09Rik (NM_026340.1,2257-2275).
ccaagaggcagctattata

SEQ ID NO: 724169 - DNA, 19 bp, Mus musculus
  siRNA target sequence for 4932434G09Rik (NM_026340.1,2261-2279).
gaggcagctattatagctt

SEQ ID NO: 724170 - DNA, 19 bp, Mus musculus
  siRNA target sequence for 4932434G09Rik (NM_026340.1,2339-2357).
gagatctgccaactatcta

SEQ ID NO: 724171 - DNA, 19 bp, Mus musculus
  siRNA target sequence for 4932434G09Rik (NM_026340.1,2576-2594).
cagcaagaactgactagta

SEQ ID NO: 724172 - DNA, 19 bp, Mus musculus
  siRNA target sequence for 4932434G09Rik (NM_026340.1,2763-2781).
gacacagcgacccatttaa

SEQ ID NO: 724173 - DNA, 19 bp, Mus musculus
  siRNA target sequence for 4932434G09Rik (NM_026340.1,2765-2783).
cacagcgacccatttaaaa

SEQ ID NO: 724174 - DNA, 19 bp, Mus musculus
  siRNA target sequence for 4932434G09Rik (NM_026340.1,2951-2969).
ctcctcctaggctttgtca

SEQ ID NO: 724175 - DNA, 19 bp, Mus musculus
  siRNA target sequence for 4932434G09Rik (NM_026340.1,3008-3026).
gccttagggtttgttagta

SEQ ID NO: 724176 - DNA, 19 bp, Mus musculus
  siRNA target sequence for 4932434G09Rik (NM_026340.1,3030-3048).
ccggcttgctggaaatgtt

SEQ ID NO: 724177 - DNA, 19 bp, Mus musculus
  siRNA target sequence for 4932434G09Rik (NM_026340.1,3032-3050).
ggcttgctggaaatgttgt

SEQ ID NO: 724178 - DNA, 19 bp, Mus musculus
  siRNA target sequence for 4932434G09Rik (NM_026340.1,3104-3122).
ctgcagtatcggtttgcaa

SEQ ID NO: 724179 - DNA, 19 bp, Mus musculus
  siRNA target sequence for 4932434G09Rik (NM_026340.1,3109-3127).
gtatcggtttgcaagaatt

SEQ ID NO: 724180 - DNA, 19 bp, Mus musculus
  siRNA target sequence for 4932434G09Rik (NM_026340.1,3113-3131).
cggtttgcaagaattacca

SEQ ID NO: 724181 - DNA, 19 bp, Mus musculus
  siRNA target sequence for 1810073G14Rik (NM_026342.1,242-260).
ggagactgcttctaaagat

SEQ ID NO: 724182 - DNA, 19 bp, Mus musculus
  siRNA target sequence for 1810073G14Rik (NM_026342.1,339-357).
gtaggacaaggtatttcaa

SEQ ID NO: 724183 - DNA, 19 bp, Mus musculus
  siRNA target sequence for 1810073G14Rik (NM_026342.1,524-542).
gggcaagagcgttatcagt

SEQ ID NO: 724184 - DNA, 19 bp, Mus musculus
  siRNA target sequence for 1810073G14Rik (NM_026342.1,619-637).
gaaccaagggcctgatgaa

SEQ ID NO: 724185 - DNA, 19 bp, Mus musculus
  siRNA target sequence for 1810073G14Rik (NM_026342.1,630-648).
ctgatgaatcggacttcta

SEQ ID NO: 724186 - DNA, 19 bp, Mus musculus
  siRNA target sequence for 1810073G14Rik (NM_026342.1,646-664).
ctacgctgtctcaggtttt

SEQ ID NO: 724187 - DNA, 19 bp, Mus musculus
  siRNA target sequence for 1810073G14Rik (NM_026342.1,650-668).
gctgtctcaggttttacga

SEQ ID NO: 724188 - DNA, 19 bp, Mus musculus
  siRNA target sequence for 1810073G14Rik (NM_026342.1,692-710).
gcggccttccaatgaagta

SEQ ID NO: 724189 - DNA, 19 bp, Mus musculus
  siRNA target sequence for 1810073G14Rik (NM_026342.1,721-739).
cagacaagaaaactcatta

SEQ ID NO: 724190 - DNA, 19 bp, Mus musculus
  siRNA target sequence for 1810073G14Rik (NM_026342.1,733-751).
ctcattatgggctactctt

SEQ ID NO: 724191 - DNA, 19 bp, Mus musculus
  siRNA target sequence for 1810073G14Rik (NM_026342.1,742-760).
ggctactctttgatgagtt

SEQ ID NO: 724192 - DNA, 19 bp, Mus musculus
  siRNA target sequence for 1810073G14Rik (NM_026342.1,810-828).
gagataaaggtgaaatcta

SEQ ID NO: 724193 - DNA, 19 bp, Mus musculus
  siRNA target sequence for 1810073G14Rik (NM_026342.1,818-836).
ggtgaaatctattcttagt

SEQ ID NO: 724194 - DNA, 19 bp, Mus musculus
  siRNA target sequence for 1810073G14Rik (NM_026342.1,819-837).
gtgaaatctattcttagtt

SEQ ID NO: 724195 - DNA, 19 bp, Mus musculus
  siRNA target sequence for 1810073G14Rik (NM_026342.1,962-980).
ggagataacagatctgttt

SEQ ID NO: 724196 - DNA, 19 bp, Mus musculus
  siRNA target sequence for 1810073G14Rik (NM_026342.1,1040-1058).
caaatggatcagaacatct

SEQ ID NO: 724197 - DNA, 19 bp, Mus musculus
  siRNA target sequence for 1810073G14Rik (NM_026342.1,1146-1164).
gatatccatgcatttgcaa

SEQ ID NO: 724198 - DNA, 19 bp, Mus musculus
  siRNA target sequence for 1810073G14Rik (NM_026342.1,1181-1199).
gttgactgcctgctcaata

SEQ ID NO: 724199 - DNA, 19 bp, Mus musculus
  siRNA target sequence for 1810073G14Rik (NM_026342.1,1186-1204).
ctgcctgctcaatagaatt

SEQ ID NO: 724200 - DNA, 19 bp, Mus musculus
  siRNA target sequence for 1810073G14Rik (NM_026342.1,1188-1206).
gcctgctcaatagaattgt

SEQ ID NO: 724201 - DNA, 19 bp, Mus musculus
  siRNA target sequence for 1810073G14Rik (NM_026342.1,1189-1207).
cctgctcaatagaattgtt

SEQ ID NO: 724202 - DNA, 19 bp, Mus musculus
  siRNA target sequence for 1810073G14Rik (NM_026342.1,1211-1229).
caaaacagcagcattggtt

SEQ ID NO: 724203 - DNA, 19 bp, Mus musculus
  siRNA target sequence for 1810073G14Rik (NM_026342.1,1216-1234).
cagcagcattggttttgca

SEQ ID NO: 724204 - DNA, 19 bp, Mus musculus
  siRNA target sequence for 1810073G14Rik (NM_026342.1,1289-1307).
gacagtcatgctgtgtaaa

SEQ ID NO: 724205 - DNA, 19 bp, Mus musculus
  siRNA target sequence for 1810073G14Rik (NM_026342.1,1310-1328).
cctggcctcgctgtctaaa

SEQ ID NO: 724206 - DNA, 19 bp, Mus musculus
  siRNA target sequence for 1810073G14Rik (NM_026342.1,1314-1332).
gcctcgctgtctaaagagt

SEQ ID NO: 724207 - DNA, 19 bp, Mus musculus
  siRNA target sequence for 1810073G14Rik (NM_026342.1,1315-1333).
cctcgctgtctaaagagtt

SEQ ID NO: 724208 - DNA, 19 bp, Mus musculus
  siRNA target sequence for 1810073G14Rik (NM_026342.1,1365-1383).
gagaaggcagatgttctta

SEQ ID NO: 724209 - DNA, 19 bp, Mus musculus
  siRNA target sequence for 1810073G14Rik (NM_026342.1,1367-1385).
gaaggcagatgttcttaat

SEQ ID NO: 724210 - DNA, 19 bp, Mus musculus
  siRNA target sequence for 1810073G14Rik (NM_026342.1,1417-1435).
caaacagcgcctcttacat

SEQ ID NO: 724211 - DNA, 19 bp, Mus musculus
  siRNA target sequence for 9030425C21Rik (NM_026343.1,132-150).
gagccagcgatacagaaat

SEQ ID NO: 724212 - DNA, 19 bp, Mus musculus
  siRNA target sequence for 9030425C21Rik (NM_026343.1,135-153).
ccagcgatacagaaattca

SEQ ID NO: 724213 - DNA, 19 bp, Mus musculus
  siRNA target sequence for 9030425C21Rik (NM_026343.1,139-157).
cgatacagaaattcactaa

SEQ ID NO: 724214 - DNA, 19 bp, Mus musculus
  siRNA target sequence for 9030425C21Rik (NM_026343.1,200-218).
gataaacatcgagaagtat

SEQ ID NO: 724215 - DNA, 19 bp, Mus musculus
  siRNA target sequence for 9030425C21Rik (NM_026343.1,215-233).
gtatcagcggtgcagaatt

SEQ ID NO: 724216 - DNA, 19 bp, Mus musculus
  siRNA target sequence for 9030425C21Rik (NM_026343.1,226-244).
gcagaatttgggacaagtt

SEQ ID NO: 724217 - DNA, 19 bp, Mus musculus
  siRNA target sequence for 9030425C21Rik (NM_026343.1,279-297).
cagcaactgcgctccaata

SEQ ID NO: 724218 - DNA, 19 bp, Mus musculus
  siRNA target sequence for 9030425C21Rik (NM_026343.1,289-307).
gctccaatatccgagaaat

SEQ ID NO: 724219 - DNA, 19 bp, Mus musculus
  siRNA target sequence for 9030425C21Rik (NM_026343.1,336-354).
gatgatctggtccttttga

SEQ ID NO: 724220 - DNA, 19 bp, Mus musculus
  siRNA target sequence for 9030425C21Rik (NM_026343.1,452-470).
caacgatgaagaattactt

SEQ ID NO: 724221 - DNA, 19 bp, Mus musculus
  siRNA target sequence for 9030425C21Rik (NM_026343.1,485-503).
cagatccacaactgttgat

SEQ ID NO: 724222 - DNA, 19 bp, Mus musculus
  siRNA target sequence for 9030425C21Rik (NM_026343.1,610-628).
ccttagaagcggacttaat

SEQ ID NO: 724223 - DNA, 19 bp, Mus musculus
  siRNA target sequence for 9030425C21Rik (NM_026343.1,611-629).
cttagaagcggacttaatt

SEQ ID NO: 724224 - DNA, 19 bp, Mus musculus
  siRNA target sequence for 9030425C21Rik (NM_026343.1,694-712).
gcattgcagaccatgtcaa

SEQ ID NO: 724225 - DNA, 19 bp, Mus musculus
  siRNA target sequence for 9030425C21Rik (NM_026343.1,710-728).
caacagtgccgctgtgaat

SEQ ID NO: 724226 - DNA, 19 bp, Mus musculus
  siRNA target sequence for 9030425C21Rik (NM_026343.1,715-733).
gtgccgctgtgaatgttga

SEQ ID NO: 724227 - DNA, 19 bp, Mus musculus
  siRNA target sequence for 9030425C21Rik (NM_026343.1,718-736).
ccgctgtgaatgttgaaga

SEQ ID NO: 724228 - DNA, 19 bp, Mus musculus
  siRNA target sequence for 9030425C21Rik (NM_026343.1,845-863).
cttcaaagtggcaggaatt

SEQ ID NO: 724229 - DNA, 19 bp, Mus musculus
  siRNA target sequence for 9030425C21Rik (NM_026343.1,848-866).
caaagtggcaggaattgca

SEQ ID NO: 724230 - DNA, 19 bp, Mus musculus
  siRNA target sequence for 9030425C21Rik (NM_026343.1,892-910).
gcttcacaggtggaaaatt

SEQ ID NO: 724231 - DNA, 19 bp, Mus musculus
  siRNA target sequence for 9030425C21Rik (NM_026343.1,896-914).
cacaggtggaaaattgata

SEQ ID NO: 724232 - DNA, 19 bp, Mus musculus
  siRNA target sequence for 9030425C21Rik (NM_026343.1,898-916).
caggtggaaaattgataca

SEQ ID NO: 724233 - DNA, 19 bp, Mus musculus
  siRNA target sequence for Dph2l2 (NM_026344.2,522-540).
gtcagcgacccgttgcttt

SEQ ID NO: 724234 - DNA, 19 bp, Mus musculus
  siRNA target sequence for Dph2l2 (NM_026344.2,771-789).
ggagacgtctggaagaata

SEQ ID NO: 724235 - DNA, 19 bp, Mus musculus
  siRNA target sequence for Dph2l2 (NM_026344.2,772-790).
gagacgtctggaagaatat

SEQ ID NO: 724236 - DNA, 19 bp, Mus musculus
  siRNA target sequence for Dph2l2 (NM_026344.2,799-817).
ctatgtaggggcttctcaa

SEQ ID NO: 724237 - DNA, 19 bp, Mus musculus
  siRNA target sequence for Dph2l2 (NM_026344.2,953-971).
gcacgaagactgtatctca

SEQ ID NO: 724238 - DNA, 19 bp, Mus musculus
  siRNA target sequence for Dph2l2 (NM_026344.2,1003-1021).
gctgctggcaggcacatta

SEQ ID NO: 724239 - DNA, 19 bp, Mus musculus
  siRNA target sequence for Dph2l2 (NM_026344.2,1079-1097).
ggaaaacgtagctatgtgt

SEQ ID NO: 724240 - DNA, 19 bp, Mus musculus
  siRNA target sequence for Dph2l2 (NM_026344.2,1140-1158).
ctgagatggacgtctttgt

SEQ ID NO: 724241 - DNA, 19 bp, Mus musculus
  siRNA target sequence for Dph2l2 (NM_026344.2,1195-1213).
gccttcgggtggcttcttt

SEQ ID NO: 724242 - DNA, 19 bp, Mus musculus
  siRNA target sequence for Dph2l2 (NM_026344.2,1220-1238).
gtattgacgccatgtgaat

SEQ ID NO: 724243 - DNA, 19 bp, Mus musculus
  siRNA target sequence for Dph2l2 (NM_026344.2,1370-1388).
ccagatgtgtcactcattt

SEQ ID NO: 724244 - DNA, 19 bp, Mus musculus
  siRNA target sequence for Dph2l2 (NM_026344.2,1434-1452).
ctagatgttcggccttaat

SEQ ID NO: 724245 - DNA, 19 bp, Mus musculus
  siRNA target sequence for 9130403P13Rik (NM_026345.2,455-473).
cctcaccaagagtctagaa

SEQ ID NO: 724246 - DNA, 19 bp, Mus musculus
  siRNA target sequence for 9130403P13Rik (NM_026345.2,466-484).
gtctagaagacgttgtcat

SEQ ID NO: 724247 - DNA, 19 bp, Mus musculus
  siRNA target sequence for 9130403P13Rik (NM_026345.2,491-509).
ccaatcgtcgctttcaaaa

SEQ ID NO: 724248 - DNA, 19 bp, Mus musculus
  siRNA target sequence for 9130403P13Rik (NM_026345.2,519-537).
ggcaatgagcccatacact

SEQ ID NO: 724249 - DNA, 19 bp, Mus musculus
  siRNA target sequence for 9130403P13Rik (NM_026345.2,520-538).
gcaatgagcccatacactt

SEQ ID NO: 724250 - DNA, 19 bp, Mus musculus
  siRNA target sequence for 9130403P13Rik (NM_026345.2,569-587).
ctgttcaacaaaagacata

SEQ ID NO: 724251 - DNA, 19 bp, Mus musculus
  siRNA target sequence for 9130403P13Rik (NM_026345.2,600-618).
gcatgtaatttgatgatct

SEQ ID NO: 724252 - DNA, 19 bp, Mus musculus
  siRNA target sequence for 9130403P13Rik (NM_026345.2,740-758).
gctgaccagcgctaattca

SEQ ID NO: 724253 - DNA, 19 bp, Mus musculus
  siRNA target sequence for 9130403P13Rik (NM_026345.2,741-759).
ctgaccagcgctaattcat

SEQ ID NO: 724254 - DNA, 19 bp, Mus musculus
  siRNA target sequence for 9130403P13Rik (NM_026345.2,743-761).
gaccagcgctaattcatca

SEQ ID NO: 724255 - DNA, 19 bp, Mus musculus
  siRNA target sequence for 9130403P13Rik (NM_026345.2,775-793).
cacaaggagagtttctctt

SEQ ID NO: 724256 - DNA, 19 bp, Mus musculus
  siRNA target sequence for 9130403P13Rik (NM_026345.2,816-834).
gccacccctgggtttcgta

SEQ ID NO: 724257 - DNA, 19 bp, Mus musculus
  siRNA target sequence for 9130403P13Rik (NM_026345.2,984-1002).
cagcttccctcagaactaa

SEQ ID NO: 724258 - DNA, 19 bp, Mus musculus
  siRNA target sequence for 9130403P13Rik (NM_026345.2,986-1004).
gcttccctcagaactaaaa

SEQ ID NO: 724259 - DNA, 19 bp, Mus musculus
  siRNA target sequence for 9130403P13Rik (NM_026345.2,1197-1215).
gtcccagggtctacaagtt

SEQ ID NO: 724260 - DNA, 19 bp, Mus musculus
  siRNA target sequence for 9130403P13Rik (NM_026345.2,1199-1217).
cccagggtctacaagtttt

SEQ ID NO: 724261 - DNA, 19 bp, Mus musculus
  siRNA target sequence for 9130403P13Rik (NM_026345.2,1200-1218).
ccagggtctacaagtttta

SEQ ID NO: 724262 - DNA, 19 bp, Mus musculus
  siRNA target sequence for 9130403P13Rik (NM_026345.2,1236-1254).
caggcagctttgactaaca

SEQ ID NO: 724263 - DNA, 19 bp, Mus musculus
  siRNA target sequence for 9130403P13Rik (NM_026345.2,1255-1273).
cctttcaggcacatacaga

SEQ ID NO: 724264 - DNA, 19 bp, Mus musculus
  siRNA target sequence for 9130403P13Rik (NM_026345.2,1357-1375).
cagagtcttccattacaaa

SEQ ID NO: 724265 - DNA, 19 bp, Mus musculus
  siRNA target sequence for 9130403P13Rik (NM_026345.2,1359-1377).
gagtcttccattacaaaca

SEQ ID NO: 724266 - DNA, 19 bp, Mus musculus
  siRNA target sequence for 9130403P13Rik (NM_026345.2,1556-1574).
ccgtaggaaacggtattca

SEQ ID NO: 724267 - DNA, 19 bp, Mus musculus
  siRNA target sequence for 9130403P13Rik (NM_026345.2,1557-1575).
cgtaggaaacggtattcaa

SEQ ID NO: 724268 - DNA, 19 bp, Mus musculus
  siRNA target sequence for 9130403P13Rik (NM_026345.2,1562-1580).
gaaacggtattcaagactt

SEQ ID NO: 724269 - DNA, 19 bp, Mus musculus
  siRNA target sequence for 9130403P13Rik (NM_026345.2,1586-1604).
cttgatcaacgggatctat

SEQ ID NO: 724270 - DNA, 19 bp, Mus musculus
  siRNA target sequence for 9130403P13Rik (NM_026345.2,1589-1607).
gatcaacgggatctatgtt

SEQ ID NO: 724271 - DNA, 19 bp, Mus musculus
  siRNA target sequence for 4930471O16Rik (NM_026348.2,53-71).
gaaactggatgatcagttt

SEQ ID NO: 724272 - DNA, 19 bp, Mus musculus
  siRNA target sequence for 4930471O16Rik (NM_026348.2,82-100).
catttagtccttcaaaaat

SEQ ID NO: 724273 - DNA, 19 bp, Mus musculus
  siRNA target sequence for 4930471O16Rik (NM_026348.2,133-151).
ctactactggaacttatca

SEQ ID NO: 724274 - DNA, 19 bp, Mus musculus
  siRNA target sequence for 4930471O16Rik (NM_026348.2,172-190).
ccgcaacccccaaagaaca

SEQ ID NO: 724275 - DNA, 19 bp, Mus musculus
  siRNA target sequence for 4930471O16Rik (NM_026348.2,197-215).
cagaaacggaccatcaaat

SEQ ID NO: 724276 - DNA, 19 bp, Mus musculus
  siRNA target sequence for 4930471O16Rik (NM_026348.2,203-221).
cggaccatcaaatgaaaca

SEQ ID NO: 724277 - DNA, 19 bp, Mus musculus
  siRNA target sequence for 4930471O16Rik (NM_026348.2,282-300).
ggattcatggtgttgctat

SEQ ID NO: 724278 - DNA, 19 bp, Mus musculus
  siRNA target sequence for 4930471O16Rik (NM_026348.2,290-308).
ggtgttgctatctaaaatt

SEQ ID NO: 724279 - DNA, 19 bp, Mus musculus
  siRNA target sequence for 4930471O16Rik (NM_026348.2,371-389).
gggcaacagacaacttgaa

SEQ ID NO: 724280 - DNA, 19 bp, Mus musculus
  siRNA target sequence for 4930471O16Rik (NM_026348.2,373-391).
gcaacagacaacttgaaga

SEQ ID NO: 724281 - DNA, 19 bp, Mus musculus
  siRNA target sequence for 4930471O16Rik (NM_026348.2,374-392).
caacagacaacttgaagat

SEQ ID NO: 724282 - DNA, 19 bp, Mus musculus
  siRNA target sequence for 4930471O16Rik (NM_026348.2,408-426).
ctagtaccatgctccttaa

SEQ ID NO: 724283 - DNA, 19 bp, Mus musculus
  siRNA target sequence for 4930471O16Rik (NM_026348.2,502-520).
gaattactcccaaagatca

SEQ ID NO: 724284 - DNA, 19 bp, Mus musculus
  siRNA target sequence for 4930471O16Rik (NM_026348.2,511-529).
ccaaagatcatcatcttga

SEQ ID NO: 724285 - DNA, 19 bp, Mus musculus
  siRNA target sequence for 4930527D15Rik (NM_026350.1,298-316).
cttcaaccccgaaaagcat

SEQ ID NO: 724286 - DNA, 19 bp, Mus musculus
  siRNA target sequence for 4930527D15Rik (NM_026350.1,375-393).
cacaaggcatccttgttat

SEQ ID NO: 724287 - DNA, 19 bp, Mus musculus
  siRNA target sequence for 4930527D15Rik (NM_026350.1,385-403).
ccttgttatccgatttgaa

SEQ ID NO: 724288 - DNA, 19 bp, Mus musculus
  siRNA target sequence for 4930527D15Rik (NM_026350.1,386-404).
cttgttatccgatttgaaa

SEQ ID NO: 724289 - DNA, 19 bp, Mus musculus
  siRNA target sequence for 4930527D15Rik (NM_026350.1,420-438).
ggtgtgacggctgtaagaa

SEQ ID NO: 724290 - DNA, 19 bp, Mus musculus
  siRNA target sequence for 4930527D15Rik (NM_026350.1,508-526).
ctacaggttcaggatgaaa

SEQ ID NO: 724291 - DNA, 19 bp, Mus musculus
  siRNA target sequence for 4930527D15Rik (NM_026350.1,528-546).
gccacctctgtgtcaacta

SEQ ID NO: 724292 - DNA, 19 bp, Mus musculus
  siRNA target sequence for 4930527D15Rik (NM_026350.1,788-806).
gatgacttcgctctgaata

SEQ ID NO: 724293 - DNA, 19 bp, Mus musculus
  siRNA target sequence for 4930527D15Rik (NM_026350.1,1046-1064).
gctagcagcagcaaagcta

SEQ ID NO: 724294 - DNA, 19 bp, Mus musculus
  siRNA target sequence for 4930527D15Rik (NM_026350.1,1062-1080).
ctagcagcgtcctgaagaa

SEQ ID NO: 724295 - DNA, 19 bp, Mus musculus
  siRNA target sequence for 4930527D15Rik (NM_026350.1,1192-1210).
caactccttgtcagaagaa

SEQ ID NO: 724296 - DNA, 19 bp, Mus musculus
  siRNA target sequence for 4930527D15Rik (NM_026350.1,1239-1257).
gtagcaagacacttgaaga

SEQ ID NO: 724297 - DNA, 19 bp, Mus musculus
  siRNA target sequence for 4930527D15Rik (NM_026350.1,1276-1294).
gaccagcaagacatcagaa

SEQ ID NO: 724298 - DNA, 19 bp, Mus musculus
  siRNA target sequence for 4930527D15Rik (NM_026350.1,1281-1299).
gcaagacatcagaatccaa

SEQ ID NO: 724299 - DNA, 19 bp, Mus musculus
  siRNA target sequence for 4930570C03Rik (NM_026353.2,277-295).
gtgactcacgtgatgtaca

SEQ ID NO: 724300 - DNA, 19 bp, Mus musculus
  siRNA target sequence for 4930570C03Rik (NM_026353.2,457-475).
gtctggagcttcatttcct

SEQ ID NO: 724301 - DNA, 19 bp, Mus musculus
  siRNA target sequence for 4930570C03Rik (NM_026353.2,510-528).
ccgctaccgggctgacttt

SEQ ID NO: 724302 - DNA, 19 bp, Mus musculus
  siRNA target sequence for 4930570C03Rik (NM_026353.2,534-552).
catcagcatccttagtgat

SEQ ID NO: 724303 - DNA, 19 bp, Mus musculus
  siRNA target sequence for 4930583H14Rik (NM_026358.1,109-127).
gaaattccctggaacatct

SEQ ID NO: 724304 - DNA, 19 bp, Mus musculus
  siRNA target sequence for 4930583H14Rik (NM_026358.1,119-137).
ggaacatctggctccaata

SEQ ID NO: 724305 - DNA, 19 bp, Mus musculus
  siRNA target sequence for 4930583H14Rik (NM_026358.1,120-138).
gaacatctggctccaatat

SEQ ID NO: 724306 - DNA, 19 bp, Mus musculus
  siRNA target sequence for 4930583H14Rik (NM_026358.1,123-141).
catctggctccaatatgat

SEQ ID NO: 724307 - DNA, 19 bp, Mus musculus
  siRNA target sequence for 4930583H14Rik (NM_026358.1,126-144).
ctggctccaatatgatcta

SEQ ID NO: 724308 - DNA, 19 bp, Mus musculus
  siRNA target sequence for 4930583H14Rik (NM_026358.1,167-185).
gtcagtgctggtggatatt

SEQ ID NO: 724309 - DNA, 19 bp, Mus musculus
  siRNA target sequence for 4930583H14Rik (NM_026358.1,173-191).
gctggtggatattacactt

SEQ ID NO: 724310 - DNA, 19 bp, Mus musculus
  siRNA target sequence for 4930583H14Rik (NM_026358.1,174-192).
ctggtggatattacactta

SEQ ID NO: 724311 - DNA, 19 bp, Mus musculus
  siRNA target sequence for 4930583H14Rik (NM_026358.1,176-194).
ggtggatattacacttaca

SEQ ID NO: 724312 - DNA, 19 bp, Mus musculus
  siRNA target sequence for 4930583H14Rik (NM_026358.1,177-195).
gtggatattacacttacaa

SEQ ID NO: 724313 - DNA, 19 bp, Mus musculus
  siRNA target sequence for 4930583H14Rik (NM_026358.1,211-229).
gcaagtgagacgtacagaa

SEQ ID NO: 724314 - DNA, 19 bp, Mus musculus
  siRNA target sequence for 4930583H14Rik (NM_026358.1,217-235).
gagacgtacagaacatgta

SEQ ID NO: 724315 - DNA, 19 bp, Mus musculus
  siRNA target sequence for 4930583H14Rik (NM_026358.1,451-469).
cgtggtggaggcatcctta

SEQ ID NO: 724316 - DNA, 19 bp, Mus musculus
  siRNA target sequence for 4930583H14Rik (NM_026358.1,455-473).
gtggaggcatccttatcga

SEQ ID NO: 724317 - DNA, 19 bp, Mus musculus
  siRNA target sequence for 4930583H14Rik (NM_026358.1,571-589).
ccaggatgacgtttgcaat

SEQ ID NO: 724318 - DNA, 19 bp, Mus musculus
  siRNA target sequence for 5033414D02Rik (NM_026362.1,199-217).
gtttatattctcgaaatct

SEQ ID NO: 724319 - DNA, 19 bp, Mus musculus
  siRNA target sequence for 5033414D02Rik (NM_026362.1,210-228).
cgaaatctatgaacgaaaa

SEQ ID NO: 724320 - DNA, 19 bp, Mus musculus
  siRNA target sequence for 5033414D02Rik (NM_026362.1,342-360).
ctcgggaattcctcaaata

SEQ ID NO: 724321 - DNA, 19 bp, Mus musculus
  siRNA target sequence for 5033414D02Rik (NM_026362.1,344-362).
cgggaattcctcaaatatt

SEQ ID NO: 724322 - DNA, 19 bp, Mus musculus
  siRNA target sequence for 5033414D02Rik (NM_026362.1,355-373).
caaatattttggaacgttt

SEQ ID NO: 724323 - DNA, 19 bp, Mus musculus
  siRNA target sequence for 5033414D02Rik (NM_026362.1,405-423).
gagcactaaagcgaaagaa

SEQ ID NO: 724324 - DNA, 19 bp, Mus musculus
  siRNA target sequence for 5033414D02Rik (NM_026362.1,441-459).
ctatagtcccgctaagctt

SEQ ID NO: 724325 - DNA, 19 bp, Mus musculus
  siRNA target sequence for 5033414D02Rik (NM_026362.1,446-464).
gtcccgctaagcttcatct

SEQ ID NO: 724326 - DNA, 19 bp, Mus musculus
  siRNA target sequence for 5033414D02Rik (NM_026362.1,449-467).
ccgctaagcttcatcttca

SEQ ID NO: 724327 - DNA, 19 bp, Mus musculus
  siRNA target sequence for 5033414D02Rik (NM_026362.1,492-510).
gaactctcctacagagaat

SEQ ID NO: 724328 - DNA, 19 bp, Mus musculus
  siRNA target sequence for 5033414D02Rik (NM_026362.1,516-534).
gtgaagctgaggacatatt

SEQ ID NO: 724329 - DNA, 19 bp, Mus musculus
  siRNA target sequence for 5830427H10Rik (NM_026365.1,166-184).
gtgaccctcaagtacgaaa

SEQ ID NO: 724330 - DNA, 19 bp, Mus musculus
  siRNA target sequence for 5830427H10Rik (NM_026365.1,277-295).
gtggccatgccctatcagt

SEQ ID NO: 724331 - DNA, 19 bp, Mus musculus
  siRNA target sequence for 5830427H10Rik (NM_026365.1,285-303).
gccctatcagtgggaatat

SEQ ID NO: 724332 - DNA, 19 bp, Mus musculus
  siRNA target sequence for 5830427H10Rik (NM_026365.1,296-314).
gggaatatccgtatttgtt

SEQ ID NO: 724333 - DNA, 19 bp, Mus musculus
  siRNA target sequence for 5830427H10Rik (NM_026365.1,298-316).
gaatatccgtatttgttga

SEQ ID NO: 724334 - DNA, 19 bp, Mus musculus
  siRNA target sequence for 5830427H10Rik (NM_026365.1,352-370).
cctcggaacaacattagct

SEQ ID NO: 724335 - DNA, 19 bp, Mus musculus
  siRNA target sequence for 5830427H10Rik (NM_026365.1,408-426).
catcgctcccctcatttat

SEQ ID NO: 724336 - DNA, 19 bp, Mus musculus
  siRNA target sequence for 5830427H10Rik (NM_026365.1,553-571).
gcctggcaactgtactaca

SEQ ID NO: 724337 - DNA, 19 bp, Mus musculus
  siRNA target sequence for 5830445C04Rik (NM_026366.1,194-212).
gctagcaggagtggaaata

SEQ ID NO: 724338 - DNA, 19 bp, Mus musculus
  siRNA target sequence for 5830445C04Rik (NM_026366.1,270-288).
ggtcctcgggccttataca

SEQ ID NO: 724339 - DNA, 19 bp, Mus musculus
  siRNA target sequence for 5830445C04Rik (NM_026366.1,271-289).
gtcctcgggccttatacat

SEQ ID NO: 724340 - DNA, 19 bp, Mus musculus
  siRNA target sequence for 5830445C04Rik (NM_026366.1,273-291).
cctcgggccttatacatgt

SEQ ID NO: 724341 - DNA, 19 bp, Mus musculus
  siRNA target sequence for 5830445C04Rik (NM_026366.1,315-333).
gccgcatgtaccttggaaa

SEQ ID NO: 724342 - DNA, 19 bp, Mus musculus
  siRNA target sequence for 5830445C04Rik (NM_026366.1,330-348).
gaaacagcacgctgtaaca

SEQ ID NO: 724343 - DNA, 19 bp, Mus musculus
  siRNA target sequence for 5830445C04Rik (NM_026366.1,343-361).
gtaacagagtccatgttca

SEQ ID NO: 724344 - DNA, 19 bp, Mus musculus
  siRNA target sequence for 5830445C04Rik (NM_026366.1,559-577).
ccccaagagggctgttcta

SEQ ID NO: 724345 - DNA, 19 bp, Mus musculus
  siRNA target sequence for 5830445C04Rik (NM_026366.1,561-579).
ccaagagggctgttctact

SEQ ID NO: 724346 - DNA, 19 bp, Mus musculus
  siRNA target sequence for 5830445C04Rik (NM_026366.1,562-580).
caagagggctgttctactt

SEQ ID NO: 724347 - DNA, 19 bp, Mus musculus
  siRNA target sequence for 5830445C04Rik (NM_026366.1,567-585).
gggctgttctacttagtta

SEQ ID NO: 724348 - DNA, 19 bp, Mus musculus
  siRNA target sequence for 5830433M19Rik (NM_026368.1,348-366).
ctggaaaaagaattattct

SEQ ID NO: 724349 - DNA, 19 bp, Mus musculus
  siRNA target sequence for 5830433M19Rik (NM_026368.1,396-414).
ggactggatctgaatgtct

SEQ ID NO: 724350 - DNA, 19 bp, Mus musculus
  siRNA target sequence for 5830433M19Rik (NM_026368.1,413-431).
ctccttaaaacctgttagt

SEQ ID NO: 724351 - DNA, 19 bp, Mus musculus
  siRNA target sequence for 5830433M19Rik (NM_026368.1,415-433).
ccttaaaacctgttagttt

SEQ ID NO: 724352 - DNA, 19 bp, Mus musculus
  siRNA target sequence for 5830433M19Rik (NM_026368.1,500-518).
gaagatgctccctgatgta

SEQ ID NO: 724353 - DNA, 19 bp, Mus musculus
  siRNA target sequence for 5830433M19Rik (NM_026368.1,524-542).
gaactgttcagtagaagaa

SEQ ID NO: 724354 - DNA, 19 bp, Mus musculus
  siRNA target sequence for 5830433M19Rik (NM_026368.1,663-681).
gtggcacctgatttaatca

SEQ ID NO: 724355 - DNA, 19 bp, Mus musculus
  siRNA target sequence for 5830433M19Rik (NM_026368.1,665-683).
ggcacctgatttaatcagt

SEQ ID NO: 724356 - DNA, 19 bp, Mus musculus
  siRNA target sequence for 5830433M19Rik (NM_026368.1,760-778).
gcaaaggggaagatagtga

SEQ ID NO: 724357 - DNA, 19 bp, Mus musculus
  siRNA target sequence for 5830433M19Rik (NM_026368.1,802-820).
cttatgacagcgatataga

SEQ ID NO: 724358 - DNA, 19 bp, Mus musculus
  siRNA target sequence for 5830433M19Rik (NM_026368.1,896-914).
cgaggtcccagaaaataca

SEQ ID NO: 724359 - DNA, 19 bp, Mus musculus
  siRNA target sequence for 5830433M19Rik (NM_026368.1,944-962).
cctggagagagatattgaa

SEQ ID NO: 724360 - DNA, 19 bp, Mus musculus
  siRNA target sequence for 5830433M19Rik (NM_026368.1,1067-1085).
gcaactggagcttctagaa

SEQ ID NO: 724361 - DNA, 19 bp, Mus musculus
  siRNA target sequence for 5830433M19Rik (NM_026368.1,1105-1123).
caattaaggctctcatgaa

SEQ ID NO: 724362 - DNA, 19 bp, Mus musculus
  siRNA target sequence for 5830457J20Rik (NM_026371.2,536-554).
cagtggctttcgatcagaa

SEQ ID NO: 724363 - DNA, 19 bp, Mus musculus
  siRNA target sequence for 5830457J20Rik (NM_026371.2,562-580).
gtcaagcgaatcaaagaga

SEQ ID NO: 724364 - DNA, 19 bp, Mus musculus
  siRNA target sequence for 5830457J20Rik (NM_026371.2,627-645).
gaaaagatacgccaagtat

SEQ ID NO: 724365 - DNA, 19 bp, Mus musculus
  siRNA target sequence for D19Ertd144e (NM_026373.1,205-223).
cctttcagaccgctgttta

SEQ ID NO: 724366 - DNA, 19 bp, Mus musculus
  siRNA target sequence for D19Ertd144e (NM_026373.1,237-255).
gccctccatggggtatgta

SEQ ID NO: 724367 - DNA, 19 bp, Mus musculus
  siRNA target sequence for D19Ertd144e (NM_026373.1,303-321).
ggacctgctgtctgtcata

SEQ ID NO: 724368 - DNA, 19 bp, Mus musculus
  siRNA target sequence for 6230412P20Rik (NM_026375.1,422-440).
cgtgcttcgtggaaagttt

SEQ ID NO: 724369 - DNA, 19 bp, Mus musculus
  siRNA target sequence for 6230412P20Rik (NM_026375.1,475-493).
gtggtccacaacttgaagt

SEQ ID NO: 724370 - DNA, 19 bp, Mus musculus
  siRNA target sequence for 6230412P20Rik (NM_026375.1,478-496).
gtccacaacttgaagttgt

SEQ ID NO: 724371 - DNA, 19 bp, Mus musculus
  siRNA target sequence for 6230412P20Rik (NM_026375.1,483-501).
caacttgaagttgtaaact

SEQ ID NO: 724372 - DNA, 19 bp, Mus musculus
  siRNA target sequence for 6230412P20Rik (NM_026375.1,515-533).
gcggttatctgcatataga

SEQ ID NO: 724373 - DNA, 19 bp, Mus musculus
  siRNA target sequence for 6230412P20Rik (NM_026375.1,516-534).
cggttatctgcatatagat

SEQ ID NO: 724374 - DNA, 19 bp, Mus musculus
  siRNA target sequence for 6230412P20Rik (NM_026375.1,517-535).
ggttatctgcatatagatt

SEQ ID NO: 724375 - DNA, 19 bp, Mus musculus
  siRNA target sequence for 6230412P20Rik (NM_026375.1,564-582).
gtccttgcagtgaaagaat

SEQ ID NO: 724376 - DNA, 19 bp, Mus musculus
  siRNA target sequence for 6230412P20Rik (NM_026375.1,599-617).
gactggattgttaatagga

SEQ ID NO: 724377 - DNA, 19 bp, Mus musculus
  siRNA target sequence for 6230412P20Rik (NM_026375.1,601-619).
ctggattgttaataggatt

SEQ ID NO: 724378 - DNA, 19 bp, Mus musculus
  siRNA target sequence for 6230412P20Rik (NM_026375.1,633-651).
gggagtgttctttgtcttt

SEQ ID NO: 724379 - DNA, 19 bp, Mus musculus
  siRNA target sequence for 6230412P20Rik (NM_026375.1,648-666).
ctttatgaccttggtatat

SEQ ID NO: 724380 - DNA, 19 bp, Mus musculus
  siRNA target sequence for 6230412P20Rik (NM_026375.1,706-724).
cagctatcgagcctataat

SEQ ID NO: 724381 - DNA, 19 bp, Mus musculus
  siRNA target sequence for 6230412P20Rik (NM_026375.1,708-726).
gctatcgagcctataatta

SEQ ID NO: 724382 - DNA, 19 bp, Mus musculus
  siRNA target sequence for 6230412P20Rik (NM_026375.1,709-727).
ctatcgagcctataattaa

SEQ ID NO: 724383 - DNA, 19 bp, Mus musculus
  siRNA target sequence for 6230412P20Rik (NM_026375.1,713-731).
cgagcctataattaaccat

SEQ ID NO: 724384 - DNA, 19 bp, Mus musculus
  siRNA target sequence for 6230412P20Rik (NM_026375.1,742-760).
gtgcgagtacccagcattt

SEQ ID NO: 724385 - DNA, 19 bp, Mus musculus
  siRNA target sequence for 6230412P20Rik (NM_026375.1,745-763).
cgagtacccagcatttaca

SEQ ID NO: 724386 - DNA, 19 bp, Mus musculus
  siRNA target sequence for 6230412P20Rik (NM_026375.1,746-764).
gagtacccagcatttacat

SEQ ID NO: 724387 - DNA, 19 bp, Mus musculus
  siRNA target sequence for 6230412P20Rik (NM_026375.1,814-832).
gacagatccttcttattga

SEQ ID NO: 724388 - DNA, 19 bp, Mus musculus
  siRNA target sequence for 6230412P20Rik (NM_026375.1,856-874).
gcagtcagaatgaagttga

SEQ ID NO: 724389 - DNA, 19 bp, Mus musculus
  siRNA target sequence for 6230412P20Rik (NM_026375.1,983-1001).
gggagtagccatttctact

SEQ ID NO: 724390 - DNA, 19 bp, Mus musculus
  siRNA target sequence for 6230412P20Rik (NM_026375.1,1059-1077).
gcactttggaacatgaaaa

SEQ ID NO: 724391 - DNA, 19 bp, Mus musculus
  siRNA target sequence for 6230412P20Rik (NM_026375.1,1062-1080).
ctttggaacatgaaaagca

SEQ ID NO: 724392 - DNA, 19 bp, Mus musculus
  siRNA target sequence for 6230412P20Rik (NM_026375.1,1082-1100).
gaaaagagaatactataca

SEQ ID NO: 724393 - DNA, 19 bp, Mus musculus
  siRNA target sequence for 6230412P20Rik (NM_026375.1,1188-1206).
gttcagtccacacaagata

SEQ ID NO: 724394 - DNA, 19 bp, Mus musculus
  siRNA target sequence for 6230412P20Rik (NM_026375.1,1203-1221).
gatagtgaaggggatgttt

SEQ ID NO: 724395 - DNA, 19 bp, Mus musculus
  siRNA target sequence for 6230412P20Rik (NM_026375.1,1241-1259).
gctggcttttggtgataga

SEQ ID NO: 724396 - DNA, 19 bp, Mus musculus
  siRNA target sequence for 6230412P20Rik (NM_026375.1,1244-1262).
ggcttttggtgatagaaaa

SEQ ID NO: 724397 - DNA, 19 bp, Mus musculus
  siRNA target sequence for 6230412P20Rik (NM_026375.1,1245-1263).
gcttttggtgatagaaaat

SEQ ID NO: 724398 - DNA, 19 bp, Mus musculus
  siRNA target sequence for 6230412P20Rik (NM_026375.1,1268-1286).
ggcatcagggcaaatttta

SEQ ID NO: 724399 - DNA, 19 bp, Mus musculus
  siRNA target sequence for 6230412P20Rik (NM_026375.1,1304-1322).
ctgcgaagaaagatataca

SEQ ID NO: 724400 - DNA, 19 bp, Mus musculus
  siRNA target sequence for 6230412P20Rik (NM_026375.1,1306-1324).
gcgaagaaagatatacact

SEQ ID NO: 724401 - DNA, 19 bp, Mus musculus
  siRNA target sequence for 6230412P20Rik (NM_026375.1,1347-1365).
cccttaaggggacaaacta

SEQ ID NO: 724402 - DNA, 19 bp, Mus musculus
  siRNA target sequence for 6230412P20Rik (NM_026375.1,1349-1367).
cttaaggggacaaactagt

SEQ ID NO: 724403 - DNA, 19 bp, Mus musculus
  siRNA target sequence for 6230412P20Rik (NM_026375.1,1356-1374).
ggacaaactagtaatacca

SEQ ID NO: 724404 - DNA, 19 bp, Mus musculus
  siRNA target sequence for 6230412P20Rik (NM_026375.1,1359-1377).
caaactagtaataccaaat

SEQ ID NO: 724405 - DNA, 19 bp, Mus musculus
  siRNA target sequence for 6230412P20Rik (NM_026375.1,1379-1397).
gttgggatgccagagtata

SEQ ID NO: 724406 - DNA, 19 bp, Mus musculus
  siRNA target sequence for 6230412P20Rik (NM_026375.1,1383-1401).
ggatgccagagtatagaga

SEQ ID NO: 724407 - DNA, 19 bp, Mus musculus
  siRNA target sequence for 6230412P20Rik (NM_026375.1,1387-1405).
gccagagtatagagagatt

SEQ ID NO: 724408 - DNA, 19 bp, Mus musculus
  siRNA target sequence for 6230412P20Rik (NM_026375.1,1535-1553).
cataaatcgttggtatcat

SEQ ID NO: 724409 - DNA, 19 bp, Mus musculus
  siRNA target sequence for 6230412P20Rik (NM_026375.1,1543-1561).
gttggtatcatgcacaaat

SEQ ID NO: 724410 - DNA, 19 bp, Mus musculus
  siRNA target sequence for 6230412P20Rik (NM_026375.1,1554-1572).
gcacaaatgcccgattctt

SEQ ID NO: 724411 - DNA, 19 bp, Mus musculus
  siRNA target sequence for 6230412P20Rik (NM_026375.1,1555-1573).
cacaaatgcccgattcttt

SEQ ID NO: 724412 - DNA, 19 bp, Mus musculus
  siRNA target sequence for 6230412P20Rik (NM_026375.1,1562-1580).
gcccgattctttaagatca

SEQ ID NO: 724413 - DNA, 19 bp, Mus musculus
  siRNA target sequence for 6230412P20Rik (NM_026375.1,1584-1602).
gaatctctgcataattgct

SEQ ID NO: 724414 - DNA, 19 bp, Mus musculus
  siRNA target sequence for 6230412P20Rik (NM_026375.1,1590-1608).
ctgcataattgctcttatt

SEQ ID NO: 724415 - DNA, 19 bp, Mus musculus
  siRNA target sequence for 6230412P20Rik (NM_026375.1,1645-1663).
cttctccacatcacatctt

SEQ ID NO: 724416 - DNA, 19 bp, Mus musculus
  siRNA target sequence for 6230412P20Rik (NM_026375.1,1658-1676).
catcttggacatactagta

SEQ ID NO: 724417 - DNA, 19 bp, Mus musculus
  siRNA target sequence for 6230412P20Rik (NM_026375.1,1661-1679).
cttggacatactagtacat

SEQ ID NO: 724418 - DNA, 19 bp, Mus musculus
  siRNA target sequence for 6230412P20Rik (NM_026375.1,1674-1692).
gtacatgagaggagtttaa

SEQ ID NO: 724419 - DNA, 19 bp, Mus musculus
  siRNA target sequence for 6230412P20Rik (NM_026375.1,1717-1735).
cacctccagagcaattttt

SEQ ID NO: 724420 - DNA, 19 bp, Mus musculus
  siRNA target sequence for 6230412P20Rik (NM_026375.1,1719-1737).
cctccagagcaatttttta

SEQ ID NO: 724421 - DNA, 19 bp, Mus musculus
  siRNA target sequence for 6230412P20Rik (NM_026375.1,1761-1779).
gccacttgtttgttagact

SEQ ID NO: 724422 - DNA, 19 bp, Mus musculus
  siRNA target sequence for 6230412P20Rik (NM_026375.1,1782-1800).
ggagttatccatgtaactt

SEQ ID NO: 724423 - DNA, 19 bp, Mus musculus
  siRNA target sequence for 6230412P20Rik (NM_026375.1,1838-1856).
gaaatcaggaccaactctt

SEQ ID NO: 724424 - DNA, 19 bp, Mus musculus
  siRNA target sequence for 6230412P20Rik (NM_026375.1,1843-1861).
caggaccaactcttaatga

SEQ ID NO: 724425 - DNA, 19 bp, Mus musculus
  siRNA target sequence for 6230412P20Rik (NM_026375.1,1846-1864).
gaccaactcttaatgaagt

SEQ ID NO: 724426 - DNA, 19 bp, Mus musculus
  siRNA target sequence for 6230412P20Rik (NM_026375.1,1860-1878).
gaagtcattcctgatagtt

SEQ ID NO: 724427 - DNA, 19 bp, Mus musculus
  siRNA target sequence for 6230412P20Rik (NM_026375.1,1863-1881).
gtcattcctgatagttata

SEQ ID NO: 724428 - DNA, 19 bp, Mus musculus
  siRNA target sequence for 6230412P20Rik (NM_026375.1,1865-1883).
cattcctgatagttataat

SEQ ID NO: 724429 - DNA, 19 bp, Mus musculus
  siRNA target sequence for 6230412P20Rik (NM_026375.1,1869-1887).
cctgatagttataatcgat

SEQ ID NO: 724430 - DNA, 19 bp, Mus musculus
  siRNA target sequence for 6230412P20Rik (NM_026375.1,1904-1922).
cctctcaccaagacttatt

SEQ ID NO: 724431 - DNA, 19 bp, Mus musculus
  siRNA target sequence for 6230412P20Rik (NM_026375.1,1907-1925).
ctcaccaagacttattgat

SEQ ID NO: 724432 - DNA, 19 bp, Mus musculus
  siRNA target sequence for 6230412P20Rik (NM_026375.1,1909-1927).
caccaagacttattgatat

SEQ ID NO: 724433 - DNA, 19 bp, Mus musculus
  siRNA target sequence for 6230412P20Rik (NM_026375.1,1912-1930).
caagacttattgatattca

SEQ ID NO: 724434 - DNA, 19 bp, Mus musculus
  siRNA target sequence for 6230412P20Rik (NM_026375.1,1931-1949).
gccttccagtttaagtcaa

SEQ ID NO: 724435 - DNA, 19 bp, Mus musculus
  siRNA target sequence for 6230412P20Rik (NM_026375.1,1956-1974).
caattagaagctatattgt

SEQ ID NO: 724436 - DNA, 19 bp, Mus musculus
  siRNA target sequence for 6230412P20Rik (NM_026375.1,2002-2020).
gacttttgactggttacat

SEQ ID NO: 724437 - DNA, 19 bp, Mus musculus
  siRNA target sequence for 6230412P20Rik (NM_026375.1,2004-2022).
cttttgactggttacatca

SEQ ID NO: 724438 - DNA, 19 bp, Mus musculus
  siRNA target sequence for 6230412P20Rik (NM_026375.1,2047-2065).
caaattctgctgctaatct

SEQ ID NO: 724439 - DNA, 19 bp, Mus musculus
  siRNA target sequence for 6230412P20Rik (NM_026375.1,2053-2071).
ctgctgctaatctacgatt

SEQ ID NO: 724440 - DNA, 19 bp, Mus musculus
  siRNA target sequence for 6230412P20Rik (NM_026375.1,2056-2074).
ctgctaatctacgatttgt

SEQ ID NO: 724441 - DNA, 19 bp, Mus musculus
  siRNA target sequence for 6230412P20Rik (NM_026375.1,2145-2163).
gacggttcgtgtcgtttta

SEQ ID NO: 724442 - DNA, 19 bp, Mus musculus
  siRNA target sequence for 6230412P20Rik (NM_026375.1,2147-2165).
cggttcgtgtcgttttatt

SEQ ID NO: 724443 - DNA, 19 bp, Mus musculus
  siRNA target sequence for 6230412P20Rik (NM_026375.1,2149-2167).
gttcgtgtcgttttattga

SEQ ID NO: 724444 - DNA, 19 bp, Mus musculus
  siRNA target sequence for 6230412P20Rik (NM_026375.1,2166-2184).
gacccacagactattcagt

SEQ ID NO: 724445 - DNA, 19 bp, Mus musculus
  siRNA target sequence for 6230412P20Rik (NM_026375.1,2170-2188).
cacagactattcagtctat

SEQ ID NO: 724446 - DNA, 19 bp, Mus musculus
  siRNA target sequence for 6230412P20Rik (NM_026375.1,2207-2225).
gcttagcaaccttagtaca

SEQ ID NO: 724447 - DNA, 19 bp, Mus musculus
  siRNA target sequence for 6230412P20Rik (NM_026375.1,2213-2231).
caaccttagtacagtctta

SEQ ID NO: 724448 - DNA, 19 bp, Mus musculus
  siRNA target sequence for 6230412P20Rik (NM_026375.1,2217-2235).
cttagtacagtcttaagct

SEQ ID NO: 724449 - DNA, 19 bp, Mus musculus
  siRNA target sequence for 6230412P20Rik (NM_026375.1,2363-2381).
gcccgaaggcttagatgat

SEQ ID NO: 724450 - DNA, 19 bp, Mus musculus
  siRNA target sequence for 6230412P20Rik (NM_026375.1,2395-2413).
caagactacgctacaacta

SEQ ID NO: 724451 - DNA, 19 bp, Mus musculus
  siRNA target sequence for 6230412P20Rik (NM_026375.1,2404-2422).
gctacaactaccctgtaat

SEQ ID NO: 724452 - DNA, 19 bp, Mus musculus
  siRNA target sequence for 6230412P20Rik (NM_026375.1,2405-2423).
ctacaactaccctgtaatt

SEQ ID NO: 724453 - DNA, 19 bp, Mus musculus
  siRNA target sequence for 6230412P20Rik (NM_026375.1,2415-2433).
cctgtaattcagaactact

SEQ ID NO: 724454 - DNA, 19 bp, Mus musculus
  siRNA target sequence for 6230412P20Rik (NM_026375.1,2483-2501).
ccacgactgcttgatgatt

SEQ ID NO: 724455 - DNA, 19 bp, Mus musculus
  siRNA target sequence for 6230412P20Rik (NM_026375.1,2486-2504).
cgactgcttgatgattgat

SEQ ID NO: 724456 - DNA, 19 bp, Mus musculus
  siRNA target sequence for 6230412P20Rik (NM_026375.1,2584-2602).
ctagcatccacgcattact

SEQ ID NO: 724457 - DNA, 19 bp, Mus musculus
  siRNA target sequence for 6230412P20Rik (NM_026375.1,2587-2605).
gcatccacgcattacttga

SEQ ID NO: 724458 - DNA, 19 bp, Mus musculus
  siRNA target sequence for 6230412P20Rik (NM_026375.1,2588-2606).
catccacgcattacttgat

SEQ ID NO: 724459 - DNA, 19 bp, Mus musculus
  siRNA target sequence for 6230412P20Rik (NM_026375.1,2591-2609).
ccacgcattacttgatata

SEQ ID NO: 724460 - DNA, 19 bp, Mus musculus
  siRNA target sequence for 6230412P20Rik (NM_026375.1,2594-2612).
cgcattacttgatatatat

SEQ ID NO: 724461 - DNA, 19 bp, Mus musculus
  siRNA target sequence for 6230412P20Rik (NM_026375.1,2624-2642).
cattaccgaagcaagcaaa

SEQ ID NO: 724462 - DNA, 19 bp, Mus musculus
  siRNA target sequence for 6230412P20Rik (NM_026375.1,2634-2652).
gcaagcaaacatgctatta

SEQ ID NO: 724463 - DNA, 19 bp, Mus musculus
  siRNA target sequence for 6230412P20Rik (NM_026375.1,2638-2656).
gcaaacatgctattaccat

SEQ ID NO: 724464 - DNA, 19 bp, Mus musculus
  siRNA target sequence for 6230412P20Rik (NM_026375.1,2643-2661).
catgctattaccatttatt

SEQ ID NO: 724465 - DNA, 19 bp, Mus musculus
  siRNA target sequence for 6230412P20Rik (NM_026375.1,2664-2682).
ctgcttgatattatgtatt

SEQ ID NO: 724466 - DNA, 19 bp, Mus musculus
  siRNA target sequence for 6230412P20Rik (NM_026375.1,2699-2717).
ggatacccccattgaatct

SEQ ID NO: 724467 - DNA, 19 bp, Mus musculus
  siRNA target sequence for 6230412P20Rik (NM_026375.1,2740-2758).
cttggggccaagttaagct

SEQ ID NO: 724468 - DNA, 19 bp, Mus musculus
  siRNA target sequence for 6230412P20Rik (NM_026375.1,2746-2764).
gccaagttaagctagttca

SEQ ID NO: 724469 - DNA, 19 bp, Mus musculus
  siRNA target sequence for 6230412P20Rik (NM_026375.1,2747-2765).
ccaagttaagctagttcaa

SEQ ID NO: 724470 - DNA, 19 bp, Mus musculus
  siRNA target sequence for 6230412P20Rik (NM_026375.1,2838-2856).
cctgcatcgtggcaacatt

SEQ ID NO: 724471 - DNA, 19 bp, Mus musculus
  siRNA target sequence for 6230412P20Rik (NM_026375.1,2841-2859).
gcatcgtggcaacattcaa

SEQ ID NO: 724472 - DNA, 19 bp, Mus musculus
  siRNA target sequence for 6230412P20Rik (NM_026375.1,2842-2860).
catcgtggcaacattcaaa

SEQ ID NO: 724473 - DNA, 19 bp, Mus musculus
  siRNA target sequence for 6230412P20Rik (NM_026375.1,2845-2863).
cgtggcaacattcaaagat

SEQ ID NO: 724474 - DNA, 19 bp, Mus musculus
  siRNA target sequence for 6230412P20Rik (NM_026375.1,2846-2864).
gtggcaacattcaaagata

SEQ ID NO: 724475 - DNA, 19 bp, Mus musculus
  siRNA target sequence for 6230412P20Rik (NM_026375.1,2849-2867).
gcaacattcaaagataatt

SEQ ID NO: 724476 - DNA, 19 bp, Mus musculus
  siRNA target sequence for 6230412P20Rik (NM_026375.1,2963-2981).
cctcactgttctacttttt

SEQ ID NO: 724477 - DNA, 19 bp, Mus musculus
  siRNA target sequence for 6230412P20Rik (NM_026375.1,3005-3023).
gaacttactgcgacagaat

SEQ ID NO: 724478 - DNA, 19 bp, Mus musculus
  siRNA target sequence for 6230412P20Rik (NM_026375.1,3008-3026).
cttactgcgacagaattca

SEQ ID NO: 724479 - DNA, 19 bp, Mus musculus
  siRNA target sequence for 6230412P20Rik (NM_026375.1,3012-3030).
ctgcgacagaattcaaaca

SEQ ID NO: 724480 - DNA, 19 bp, Mus musculus
  siRNA target sequence for 6230412P20Rik (NM_026375.1,3014-3032).
gcgacagaattcaaacaga

SEQ ID NO: 724481 - DNA, 19 bp, Mus musculus
  siRNA target sequence for 6230412P20Rik (NM_026375.1,3031-3049).
gagtaaatatagaggaatt

SEQ ID NO: 724482 - DNA, 19 bp, Mus musculus
  siRNA target sequence for 6230412P20Rik (NM_026375.1,3056-3074).
gcacgcttatgaagtttgt

SEQ ID NO: 724483 - DNA, 19 bp, Mus musculus
  siRNA target sequence for 6230412P20Rik (NM_026375.1,3073-3091).
gtcaggagatgggcttaat

SEQ ID NO: 724484 - DNA, 19 bp, Mus musculus
  siRNA target sequence for 6230412P20Rik (NM_026375.1,3085-3103).
gcttaatggaggatttact

SEQ ID NO: 724485 - DNA, 19 bp, Mus musculus
  siRNA target sequence for 6230412P20Rik (NM_026375.1,3122-3140).
cactgagcaggaatgctta

SEQ ID NO: 724486 - DNA, 19 bp, Mus musculus
  siRNA target sequence for 6230412P20Rik (NM_026375.1,3128-3146).
gcaggaatgcttagtgaaa

SEQ ID NO: 724487 - DNA, 19 bp, Mus musculus
  siRNA target sequence for 6230412P20Rik (NM_026375.1,3132-3150).
gaatgcttagtgaaatttt

SEQ ID NO: 724488 - DNA, 19 bp, Mus musculus
  siRNA target sequence for 6230412P20Rik (NM_026375.1,3136-3154).
gcttagtgaaatttttaca

SEQ ID NO: 724489 - DNA, 19 bp, Mus musculus
  siRNA target sequence for 6230412P20Rik (NM_026375.1,3160-3178).
gtaccagtgttgagaatca

SEQ ID NO: 724490 - DNA, 19 bp, Mus musculus
  siRNA target sequence for 6230412P20Rik (NM_026375.1,3163-3181).
ccagtgttgagaatcatga

SEQ ID NO: 724491 - DNA, 19 bp, Mus musculus
  siRNA target sequence for 6230412P20Rik (NM_026375.1,3166-3184).
gtgttgagaatcatgaatt

SEQ ID NO: 724492 - DNA, 19 bp, Mus musculus
  siRNA target sequence for 6230412P20Rik (NM_026375.1,3204-3222).
cagcgtgccaattatattt

SEQ ID NO: 724493 - DNA, 19 bp, Mus musculus
  siRNA target sequence for 6230412P20Rik (NM_026375.1,3206-3224).
gcgtgccaattatatttct

SEQ ID NO: 724494 - DNA, 19 bp, Mus musculus
  siRNA target sequence for 6230412P20Rik (NM_026375.1,3223-3241).
ctgccttgaaactaaacca

SEQ ID NO: 724495 - DNA, 19 bp, Mus musculus
  siRNA target sequence for 6230412P20Rik (NM_026375.1,3276-3294).
cctcgattgcgggaaagat

SEQ ID NO: 724496 - DNA, 19 bp, Mus musculus
  siRNA target sequence for 6230412P20Rik (NM_026375.1,3295-3313).
cggtgactcgaaattctat

SEQ ID NO: 724497 - DNA, 19 bp, Mus musculus
  siRNA target sequence for 6230412P20Rik (NM_026375.1,3296-3314).
ggtgactcgaaattctata

SEQ ID NO: 724498 - DNA, 19 bp, Mus musculus
  siRNA target sequence for 6230412P20Rik (NM_026375.1,3297-3315).
gtgactcgaaattctatat

SEQ ID NO: 724499 - DNA, 19 bp, Mus musculus
  siRNA target sequence for 6230412P20Rik (NM_026375.1,3299-3317).
gactcgaaattctatatta

SEQ ID NO: 724500 - DNA, 19 bp, Mus musculus
  siRNA target sequence for 6230412P20Rik (NM_026375.1,3340-3358).
ctagagtccagagaaagtt

SEQ ID NO: 724501 - DNA, 19 bp, Mus musculus
  siRNA target sequence for 6230412P20Rik (NM_026375.1,3387-3405).
ctgtcgacatcctcagttt

SEQ ID NO: 724502 - DNA, 19 bp, Mus musculus
  siRNA target sequence for 6230412P20Rik (NM_026375.1,3389-3407).
gtcgacatcctcagttttt

SEQ ID NO: 724503 - DNA, 19 bp, Mus musculus
  siRNA target sequence for 6230412P20Rik (NM_026375.1,3429-3447).
ccgttatcggcatttccaa

SEQ ID NO: 724504 - DNA, 19 bp, Mus musculus
  siRNA target sequence for 6230412P20Rik (NM_026375.1,3430-3448).
cgttatcggcatttccaaa

SEQ ID NO: 724505 - DNA, 19 bp, Mus musculus
  siRNA target sequence for 6230412P20Rik (NM_026375.1,3485-3503).
gttcatcagcaatgtttta

SEQ ID NO: 724506 - DNA, 19 bp, Mus musculus
  siRNA target sequence for 6230412P20Rik (NM_026375.1,3526-3544).
caagtcatgagcctagaaa

SEQ ID NO: 724507 - DNA, 19 bp, Mus musculus
  siRNA target sequence for 6230412P20Rik (NM_026375.1,3541-3559).
gaaatggcgtctcactttt

SEQ ID NO: 724508 - DNA, 19 bp, Mus musculus
  siRNA target sequence for 6230412P20Rik (NM_026375.1,3546-3564).
ggcgtctcactttttaaca

SEQ ID NO: 724509 - DNA, 19 bp, Mus musculus
  siRNA target sequence for 6230412P20Rik (NM_026375.1,3586-3604).
ctcctgtagtacactcttt

SEQ ID NO: 724510 - DNA, 19 bp, Mus musculus
  siRNA target sequence for 6230412P20Rik (NM_026375.1,3617-3635).
gcttcctgaggcgtttgtt

SEQ ID NO: 724511 - DNA, 19 bp, Mus musculus
  siRNA target sequence for 6230412P20Rik (NM_026375.1,3633-3651).
gttggaactccaatttcaa

SEQ ID NO: 724512 - DNA, 19 bp, Mus musculus
  siRNA target sequence for 6230412P20Rik (NM_026375.1,3765-3783).
ctgtccagttcgttaccat

SEQ ID NO: 724513 - DNA, 19 bp, Mus musculus
  siRNA target sequence for 6230412P20Rik (NM_026375.1,3767-3785).
gtccagttcgttaccatta

SEQ ID NO: 724514 - DNA, 19 bp, Mus musculus
  siRNA target sequence for 6230412P20Rik (NM_026375.1,3770-3788).
cagttcgttaccattaagt

SEQ ID NO: 724515 - DNA, 19 bp, Mus musculus
  siRNA target sequence for 6230412P20Rik (NM_026375.1,3780-3798).
ccattaagttcacagttta

SEQ ID NO: 724516 - DNA, 19 bp, Mus musculus
  siRNA target sequence for 6230412P20Rik (NM_026375.1,3781-3799).
cattaagttcacagtttaa

SEQ ID NO: 724517 - DNA, 19 bp, Mus musculus
  siRNA target sequence for 6230412P20Rik (NM_026375.1,3829-3847).
cagagttgcttttacttga

SEQ ID NO: 724518 - DNA, 19 bp, Mus musculus
  siRNA target sequence for 6230412P20Rik (NM_026375.1,3846-3864).
gagactcctctcatagtta

SEQ ID NO: 724519 - DNA, 19 bp, Mus musculus
  siRNA target sequence for 6230412P20Rik (NM_026375.1,3850-3868).
ctcctctcatagttaagaa

SEQ ID NO: 724520 - DNA, 19 bp, Mus musculus
  siRNA target sequence for 6230412P20Rik (NM_026375.1,3861-3879).
gttaagaaagctaaatctt

SEQ ID NO: 724521 - DNA, 19 bp, Mus musculus
  siRNA target sequence for 6230412P20Rik (NM_026375.1,3948-3966).
cgaacaacacctttagcat

SEQ ID NO: 724522 - DNA, 19 bp, Mus musculus
  siRNA target sequence for 6230412P20Rik (NM_026375.1,4061-4079).
gactgatagagctacagat

SEQ ID NO: 724523 - DNA, 19 bp, Mus musculus
  siRNA target sequence for 6230412P20Rik (NM_026375.1,4095-4113).
gcgtttgttagcacatctt

SEQ ID NO: 724524 - DNA, 19 bp, Mus musculus
  siRNA target sequence for 6230412P20Rik (NM_026375.1,4096-4114).
cgtttgttagcacatcttt

SEQ ID NO: 724525 - DNA, 19 bp, Mus musculus
  siRNA target sequence for 6230412P20Rik (NM_026375.1,4106-4124).
cacatctttccataaatgt

SEQ ID NO: 724526 - DNA, 19 bp, Mus musculus
  siRNA target sequence for 6230412P20Rik (NM_026375.1,4147-4165).
ggatgaagaccagtgataa

SEQ ID NO: 724527 - DNA, 19 bp, Mus musculus
  siRNA target sequence for 6230412P20Rik (NM_026375.1,4154-4172).
gaccagtgataagaataca

SEQ ID NO: 724528 - DNA, 19 bp, Mus musculus
  siRNA target sequence for 6230412P20Rik (NM_026375.1,4195-4213).
caaagggccctcagaaagt

SEQ ID NO: 724529 - DNA, 19 bp, Mus musculus
  siRNA target sequence for 6230412P20Rik (NM_026375.1,4301-4319).
ccagacctccttagagtat

SEQ ID NO: 724530 - DNA, 19 bp, Mus musculus
  siRNA target sequence for 6230412P20Rik (NM_026375.1,4385-4403).
ctccactgaactaactact

SEQ ID NO: 724531 - DNA, 19 bp, Mus musculus
  siRNA target sequence for 6230412P20Rik (NM_026375.1,4387-4405).
ccactgaactaactactaa

SEQ ID NO: 724532 - DNA, 19 bp, Mus musculus
  siRNA target sequence for 6230412P20Rik (NM_026375.1,4500-4518).
gctgcagtggaagcatttt

SEQ ID NO: 724533 - DNA, 19 bp, Mus musculus
  siRNA target sequence for 6230412P20Rik (NM_026375.1,4590-4608).
gaaacctccacttcaaact

SEQ ID NO: 724534 - DNA, 19 bp, Mus musculus
  siRNA target sequence for 6230412P20Rik (NM_026375.1,4615-4633).
cgtcagttctggatggaat

SEQ ID NO: 724535 - DNA, 19 bp, Mus musculus
  siRNA target sequence for 6230412P20Rik (NM_026375.1,4646-4664).
gagccgaacctccatactt

SEQ ID NO: 724536 - DNA, 19 bp, Mus musculus
  siRNA target sequence for 6230412P20Rik (NM_026375.1,4649-4667).
ccgaacctccatacttaca

SEQ ID NO: 724537 - DNA, 19 bp, Mus musculus
  siRNA target sequence for 6230412P20Rik (NM_026375.1,4757-4775).
cagcctcggccaaaaacta

SEQ ID NO: 724538 - DNA, 19 bp, Mus musculus
  siRNA target sequence for 6230412P20Rik (NM_026375.1,4760-4778).
cctcggccaaaaactaaca

SEQ ID NO: 724539 - DNA, 19 bp, Mus musculus
  siRNA target sequence for 6230412P20Rik (NM_026375.1,4761-4779).
ctcggccaaaaactaacat

SEQ ID NO: 724540 - DNA, 19 bp, Mus musculus
  siRNA target sequence for 6230412P20Rik (NM_026375.1,4763-4781).
cggccaaaaactaacatta

SEQ ID NO: 724541 - DNA, 19 bp, Mus musculus
  siRNA target sequence for 6230412P20Rik (NM_026375.1,4820-4838).
ggagaacgttggtttacca

SEQ ID NO: 724542 - DNA, 19 bp, Mus musculus
  siRNA target sequence for 6230412P20Rik (NM_026375.1,4880-4898).
cgagattcatctaattgga

SEQ ID NO: 724543 - DNA, 19 bp, Mus musculus
  siRNA target sequence for 6230412P20Rik (NM_026375.1,4881-4899).
gagattcatctaattggat

SEQ ID NO: 724544 - DNA, 19 bp, Mus musculus
  siRNA target sequence for 6230412P20Rik (NM_026375.1,4936-4954).
ccaagaatctttcatttga

SEQ ID NO: 724545 - DNA, 19 bp, Mus musculus
  siRNA target sequence for 6230412P20Rik (NM_026375.1,4937-4955).
caagaatctttcatttgat

SEQ ID NO: 724546 - DNA, 19 bp, Mus musculus
  siRNA target sequence for 6230412P20Rik (NM_026375.1,4967-4985).
cttaggggcagagaaactt

SEQ ID NO: 724547 - DNA, 19 bp, Mus musculus
  siRNA target sequence for 6230412P20Rik (NM_026375.1,5020-5038).
gtgacttgcctgatgacaa

SEQ ID NO: 724548 - DNA, 19 bp, Mus musculus
  siRNA target sequence for 6230412P20Rik (NM_026375.1,5064-5082).
gaagtagacggggaacttt

SEQ ID NO: 724549 - DNA, 19 bp, Mus musculus
  siRNA target sequence for 6230412P20Rik (NM_026375.1,5096-5114).
caactttaccctgatttta

SEQ ID NO: 724550 - DNA, 19 bp, Mus musculus
  siRNA target sequence for 6230412P20Rik (NM_026375.1,5145-5163).
gactctgcagcacctaata

SEQ ID NO: 724551 - DNA, 19 bp, Mus musculus
  siRNA target sequence for 6230412P20Rik (NM_026375.1,5266-5284).
cccacaaggtagagacttt

SEQ ID NO: 724552 - DNA, 19 bp, Mus musculus
  siRNA target sequence for 6230412P20Rik (NM_026375.1,5303-5321).
ggttaaagtggcaattgca

SEQ ID NO: 724553 - DNA, 19 bp, Mus musculus
  siRNA target sequence for 6230412P20Rik (NM_026375.1,5313-5331).
gcaattgcagaaaatctgt

SEQ ID NO: 724554 - DNA, 19 bp, Mus musculus
  siRNA target sequence for 6230412P20Rik (NM_026375.1,5322-5340).
gaaaatctgttggatgtaa

SEQ ID NO: 724555 - DNA, 19 bp, Mus musculus
  siRNA target sequence for 6230412P20Rik (NM_026375.1,5400-5418).
gacggagcagtgatagtct

SEQ ID NO: 724556 - DNA, 19 bp, Mus musculus
  siRNA target sequence for 6230412P20Rik (NM_026375.1,5452-5470).
ctacaccgaagactgttaa

SEQ ID NO: 724557 - DNA, 19 bp, Mus musculus
  siRNA target sequence for 6230412P20Rik (NM_026375.1,5550-5568).
gccctaagcctgaatgtca

SEQ ID NO: 724558 - DNA, 19 bp, Mus musculus
  siRNA target sequence for 6230412P20Rik (NM_026375.1,5558-5576).
cctgaatgtcacatcagaa

SEQ ID NO: 724559 - DNA, 19 bp, Mus musculus
  siRNA target sequence for 6230412P20Rik (NM_026375.1,5651-5669).
gacctgttctgacctaaaa

SEQ ID NO: 724560 - DNA, 19 bp, Mus musculus
  siRNA target sequence for 6230412P20Rik (NM_026375.1,5653-5671).
cctgttctgacctaaaagt

SEQ ID NO: 724561 - DNA, 19 bp, Mus musculus
  siRNA target sequence for 6230412P20Rik (NM_026375.1,5654-5672).
ctgttctgacctaaaagta

SEQ ID NO: 724562 - DNA, 19 bp, Mus musculus
  siRNA target sequence for 6230412P20Rik (NM_026375.1,5847-5865).
gaaactccttctagaacaa

SEQ ID NO: 724563 - DNA, 19 bp, Mus musculus
  siRNA target sequence for 6230412P20Rik (NM_026375.1,5893-5911).
gaacccctagaagacttaa

SEQ ID NO: 724564 - DNA, 19 bp, Mus musculus
  siRNA target sequence for 6230412P20Rik (NM_026375.1,5896-5914).
cccctagaagacttaagaa

SEQ ID NO: 724565 - DNA, 19 bp, Mus musculus
  siRNA target sequence for 6230412P20Rik (NM_026375.1,5898-5916).
cctagaagacttaagaagt

SEQ ID NO: 724566 - DNA, 19 bp, Mus musculus
  siRNA target sequence for 6230412P20Rik (NM_026375.1,5935-5953).
gtacagaaattctagatga

SEQ ID NO: 724567 - DNA, 19 bp, Mus musculus
  siRNA target sequence for 6230412P20Rik (NM_026375.1,5999-6017).
gctgaggaatgccaattta

SEQ ID NO: 724568 - DNA, 19 bp, Mus musculus
  siRNA target sequence for 6230412P20Rik (NM_026375.1,6002-6020).
gaggaatgccaatttagaa

SEQ ID NO: 724569 - DNA, 19 bp, Mus musculus
  siRNA target sequence for 6230412P20Rik (NM_026375.1,6004-6022).
ggaatgccaatttagaaga

SEQ ID NO: 724570 - DNA, 19 bp, Mus musculus
  siRNA target sequence for 6230412P20Rik (NM_026375.1,6010-6028).
ccaatttagaagatactca

SEQ ID NO: 724571 - DNA, 19 bp, Mus musculus
  siRNA target sequence for 6230412P20Rik (NM_026375.1,6062-6080).
ccagcaactgcctctaaaa

SEQ ID NO: 724572 - DNA, 19 bp, Mus musculus
  siRNA target sequence for 6230412P20Rik (NM_026375.1,6212-6230).
gaaggtagttcccttagaa

SEQ ID NO: 724573 - DNA, 19 bp, Mus musculus
  siRNA target sequence for 6230412P20Rik (NM_026375.1,6285-6303).
ccggttgtccggagatcta

SEQ ID NO: 724574 - DNA, 19 bp, Mus musculus
  siRNA target sequence for 6230412P20Rik (NM_026375.1,6287-6305).
ggttgtccggagatctaca

SEQ ID NO: 724575 - DNA, 19 bp, Mus musculus
  siRNA target sequence for 6230412P20Rik (NM_026375.1,6308-6326).
gaacaccccagctagaaat

SEQ ID NO: 724576 - DNA, 19 bp, Mus musculus
  siRNA target sequence for 6230412P20Rik (NM_026375.1,6319-6337).
ctagaaatgtgagtacttt

SEQ ID NO: 724577 - DNA, 19 bp, Mus musculus
  siRNA target sequence for 6230412P20Rik (NM_026375.1,6322-6340).
gaaatgtgagtactttaga

SEQ ID NO: 724578 - DNA, 19 bp, Mus musculus
  siRNA target sequence for 6230412P20Rik (NM_026375.1,6624-6642).
gtgaaggttccaaagaaaa

SEQ ID NO: 724579 - DNA, 19 bp, Mus musculus
  siRNA target sequence for 6230412P20Rik (NM_026375.1,6629-6647).
ggttccaaagaaaaaatca

SEQ ID NO: 724580 - DNA, 19 bp, Mus musculus
  siRNA target sequence for 6230412P20Rik (NM_026375.1,6668-6686).
cgcagcccagctgaaagaa

SEQ ID NO: 724581 - DNA, 19 bp, Mus musculus
  siRNA target sequence for 6230412P20Rik (NM_026375.1,6786-6804).
gagagtgaccctaaaccat

SEQ ID NO: 724582 - DNA, 19 bp, Mus musculus
  siRNA target sequence for 6230412P20Rik (NM_026375.1,6788-6806).
gagtgaccctaaaccatta

SEQ ID NO: 724583 - DNA, 19 bp, Mus musculus
  siRNA target sequence for 6230412P20Rik (NM_026375.1,6790-6808).
gtgaccctaaaccattaga

SEQ ID NO: 724584 - DNA, 19 bp, Mus musculus
  siRNA target sequence for 6230412P20Rik (NM_026375.1,6928-6946).
cgagtccagtggatgaaat

SEQ ID NO: 724585 - DNA, 19 bp, Mus musculus
  siRNA target sequence for 6230412P20Rik (NM_026375.1,6929-6947).
gagtccagtggatgaaata

SEQ ID NO: 724586 - DNA, 19 bp, Mus musculus
  siRNA target sequence for 6230412P20Rik (NM_026375.1,6931-6949).
gtccagtggatgaaataaa

SEQ ID NO: 724587 - DNA, 19 bp, Mus musculus
  siRNA target sequence for 6330577E15Rik (NM_026377.1,388-406).
caccatcaccccattcgaa

SEQ ID NO: 724588 - DNA, 19 bp, Mus musculus
  siRNA target sequence for 6330577E15Rik (NM_026377.1,390-408).
ccatcaccccattcgaata

SEQ ID NO: 724589 - DNA, 19 bp, Mus musculus
  siRNA target sequence for 6330577E15Rik (NM_026377.1,403-421).
cgaatagttcaggaaaaca

SEQ ID NO: 724590 - DNA, 19 bp, Mus musculus
  siRNA target sequence for 6330577E15Rik (NM_026377.1,404-422).
gaatagttcaggaaaacaa

SEQ ID NO: 724591 - DNA, 19 bp, Mus musculus
  siRNA target sequence for 6330577E15Rik (NM_026377.1,438-456).
cctaaagaaaggttaaaga

SEQ ID NO: 724592 - DNA, 19 bp, Mus musculus
  siRNA target sequence for 6330577E15Rik (NM_026377.1,487-505).
gtgtggtgaagcgtatgaa

SEQ ID NO: 724593 - DNA, 19 bp, Mus musculus
  siRNA target sequence for 6330577E15Rik (NM_026377.1,506-524).
ggtagagaatgacgaaaat

SEQ ID NO: 724594 - DNA, 19 bp, Mus musculus
  siRNA target sequence for 6330577E15Rik (NM_026377.1,661-679).
cggatactgggtcatctaa

SEQ ID NO: 724595 - DNA, 19 bp, Mus musculus
  siRNA target sequence for 6330577E15Rik (NM_026377.1,662-680).
ggatactgggtcatctaat

SEQ ID NO: 724596 - DNA, 19 bp, Mus musculus
  siRNA target sequence for 6330577E15Rik (NM_026377.1,701-719).
gaatgcgatcattagagaa

SEQ ID NO: 724597 - DNA, 19 bp, Mus musculus
  siRNA target sequence for 6330577E15Rik (NM_026377.1,705-723).
gcgatcattagagaaaaat

SEQ ID NO: 724598 - DNA, 19 bp, Mus musculus
  siRNA target sequence for 6330577E15Rik (NM_026377.1,707-725).
gatcattagagaaaaatta

SEQ ID NO: 724599 - DNA, 19 bp, Mus musculus
  siRNA target sequence for 6330577E15Rik (NM_026377.1,774-792).
cttcttcggaggttaaagt

SEQ ID NO: 724600 - DNA, 19 bp, Mus musculus
  siRNA target sequence for 6330577E15Rik (NM_026377.1,780-798).
cggaggttaaagttagtca

SEQ ID NO: 724601 - DNA, 19 bp, Mus musculus
  siRNA target sequence for 6330577E15Rik (NM_026377.1,781-799).
ggaggttaaagttagtcaa

SEQ ID NO: 724602 - DNA, 19 bp, Mus musculus
  siRNA target sequence for 6330577E15Rik (NM_026377.1,815-833).
gaacgacgtgactgagtta

SEQ ID NO: 724603 - DNA, 19 bp, Mus musculus
  siRNA target sequence for 6330577E15Rik (NM_026377.1,824-842).
gactgagttagagaatcta

SEQ ID NO: 724604 - DNA, 19 bp, Mus musculus
  siRNA target sequence for 6330577E15Rik (NM_026377.1,828-846).
gagttagagaatctaataa

SEQ ID NO: 724605 - DNA, 19 bp, Mus musculus
  siRNA target sequence for 6330577E15Rik (NM_026377.1,942-960).
cgacttctacgggatagat

SEQ ID NO: 724606 - DNA, 19 bp, Mus musculus
  siRNA target sequence for 6530413N01Rik (NM_026380.2,487-505).
ggggtgcctgtcacacaaa

SEQ ID NO: 724607 - DNA, 19 bp, Mus musculus
  siRNA target sequence for 6530413N01Rik (NM_026380.2,588-606).
cgaggtgggcggagtcttt

SEQ ID NO: 724608 - DNA, 19 bp, Mus musculus
  siRNA target sequence for 6530413N01Rik (NM_026380.2,791-809).
cgggaggtgaatatcgatt

SEQ ID NO: 724609 - DNA, 19 bp, Mus musculus
  siRNA target sequence for 6530413N01Rik (NM_026380.2,792-810).
gggaggtgaatatcgattt

SEQ ID NO: 724610 - DNA, 19 bp, Mus musculus
  siRNA target sequence for 6530403A03Rik (NM_026382.1,185-203).
ggatgaaatcgccatatgt

SEQ ID NO: 724611 - DNA, 19 bp, Mus musculus
  siRNA target sequence for 6530403A03Rik (NM_026382.1,194-212).
cgccatatgtccttatgat

SEQ ID NO: 724612 - DNA, 19 bp, Mus musculus
  siRNA target sequence for 6530403A03Rik (NM_026382.1,219-237).
catcgcatgcccaaatcat

SEQ ID NO: 724613 - DNA, 19 bp, Mus musculus
  siRNA target sequence for 6530403A03Rik (NM_026382.1,227-245).
gcccaaatcatcactaaca

SEQ ID NO: 724614 - DNA, 19 bp, Mus musculus
  siRNA target sequence for 6530403A03Rik (NM_026382.1,229-247).
ccaaatcatcactaacaaa

SEQ ID NO: 724615 - DNA, 19 bp, Mus musculus
  siRNA target sequence for 6530403A03Rik (NM_026382.1,272-290).
gaaactgggatataccaaa

SEQ ID NO: 724616 - DNA, 19 bp, Mus musculus
  siRNA target sequence for 6530403A03Rik (NM_026382.1,311-329).
caatcctacttttttctat

SEQ ID NO: 724617 - DNA, 19 bp, Mus musculus
  siRNA target sequence for 6530403A03Rik (NM_026382.1,351-369).
gttactttgaataaggatt

SEQ ID NO: 724618 - DNA, 19 bp, Mus musculus
  siRNA target sequence for 6530403A03Rik (NM_026382.1,398-416).
gactacagctgggaaagat

SEQ ID NO: 724619 - DNA, 19 bp, Mus musculus
  siRNA target sequence for 6530403A03Rik (NM_026382.1,409-427).
ggaaagatggtgattgtta

SEQ ID NO: 724620 - DNA, 19 bp, Mus musculus
  siRNA target sequence for 6530403A03Rik (NM_026382.1,424-442).
gttatagccagagaatgta

SEQ ID NO: 724621 - DNA, 19 bp, Mus musculus
  siRNA target sequence for 6530403A03Rik (NM_026382.1,465-483).
cctctgaatcacaaacgat

SEQ ID NO: 724622 - DNA, 19 bp, Mus musculus
  siRNA target sequence for 6530403A03Rik (NM_026382.1,470-488).
gaatcacaaacgatctgtt

SEQ ID NO: 724623 - DNA, 19 bp, Mus musculus
  siRNA target sequence for 6530403A03Rik (NM_026382.1,510-528).
cgccttgccctgtatgatt

SEQ ID NO: 724624 - DNA, 19 bp, Mus musculus
  siRNA target sequence for 6530403A03Rik (NM_026382.1,511-529).
gccttgccctgtatgattt

SEQ ID NO: 724625 - DNA, 19 bp, Mus musculus
  siRNA target sequence for 6530403A03Rik (NM_026382.1,556-574).
gctctggtcctcaagtcat

SEQ ID NO: 724626 - DNA, 19 bp, Mus musculus
  siRNA target sequence for 6530403A03Rik (NM_026382.1,557-575).
ctctggtcctcaagtcatt

SEQ ID NO: 724627 - DNA, 19 bp, Mus musculus
  siRNA target sequence for 6530403A03Rik (NM_026382.1,559-577).
ctggtcctcaagtcattga

SEQ ID NO: 724628 - DNA, 19 bp, Mus musculus
  siRNA target sequence for 6530403A03Rik (NM_026382.1,561-579).
ggtcctcaagtcattgaaa

SEQ ID NO: 724629 - DNA, 19 bp, Mus musculus
  siRNA target sequence for 6530403A03Rik (NM_026382.1,562-580).
gtcctcaagtcattgaaaa

SEQ ID NO: 724630 - DNA, 19 bp, Mus musculus
  siRNA target sequence for 6530403A03Rik (NM_026382.1,586-604).
gtgacctgtttgtagactt

SEQ ID NO: 724631 - DNA, 19 bp, Mus musculus
  siRNA target sequence for 6530403A03Rik (NM_026382.1,602-620).
cttggctgctaaagtcaat

SEQ ID NO: 724632 - DNA, 19 bp, Mus musculus
  siRNA target sequence for 6530403A03Rik (NM_026382.1,605-623).
ggctgctaaagtcaatcaa

SEQ ID NO: 724633 - DNA, 19 bp, Mus musculus
  siRNA target sequence for 6530403A03Rik (NM_026382.1,632-650).
ccgaaaaagtccaaaatct

SEQ ID NO: 724634 - DNA, 19 bp, Mus musculus
  siRNA target sequence for 6530403A03Rik (NM_026382.1,633-651).
cgaaaaagtccaaaatctt

SEQ ID NO: 724635 - DNA, 19 bp, Mus musculus
  siRNA target sequence for 6530403A03Rik (NM_026382.1,669-687).
gaagtgagagattataaaa

SEQ ID NO: 724636 - DNA, 19 bp, Mus musculus
  siRNA target sequence for 6530403A03Rik (NM_026382.1,848-866).
gcggtcagcttcagtagat

SEQ ID NO: 724637 - DNA, 19 bp, Mus musculus
  siRNA target sequence for 6530403A03Rik (NM_026382.1,849-867).
cggtcagcttcagtagatt

SEQ ID NO: 724638 - DNA, 19 bp, Mus musculus
  siRNA target sequence for 6530403A03Rik (NM_026382.1,871-889).
ggcagtctggtggaagtta

SEQ ID NO: 724639 - DNA, 19 bp, Mus musculus
  siRNA target sequence for 6530403A03Rik (NM_026382.1,872-890).
gcagtctggtggaagttat

SEQ ID NO: 724640 - DNA, 19 bp, Mus musculus
  siRNA target sequence for 6530403A03Rik (NM_026382.1,873-891).
cagtctggtggaagttatt

SEQ ID NO: 724641 - DNA, 19 bp, Mus musculus
  siRNA target sequence for 6530403A03Rik (NM_026382.1,900-918).
gaaagttcacgacatagaa

SEQ ID NO: 724642 - DNA, 19 bp, Mus musculus
  siRNA target sequence for 6530403A03Rik (NM_026382.1,931-949).
ggagcccacacaaacgaaa

SEQ ID NO: 724643 - DNA, 19 bp, Mus musculus
  siRNA target sequence for 6530403A03Rik (NM_026382.1,1000-1018).
gagaaagacatcatagtca

SEQ ID NO: 724644 - DNA, 19 bp, Mus musculus
  siRNA target sequence for Pnrc2 (NM_026383.1,384-402).
ggtggcggagagaggtata

SEQ ID NO: 724645 - DNA, 19 bp, Mus musculus
  siRNA target sequence for Pnrc2 (NM_026383.1,385-403).
gtggcggagagaggtataa

SEQ ID NO: 724646 - DNA, 19 bp, Mus musculus
  siRNA target sequence for Pnrc2 (NM_026383.1,387-405).
ggcggagagaggtataaca

SEQ ID NO: 724647 - DNA, 19 bp, Mus musculus
  siRNA target sequence for Pnrc2 (NM_026383.1,388-406).
gcggagagaggtataacat

SEQ ID NO: 724648 - DNA, 19 bp, Mus musculus
  siRNA target sequence for Pnrc2 (NM_026383.1,404-422).
cattccagaccctcaatct

SEQ ID NO: 724649 - DNA, 19 bp, Mus musculus
  siRNA target sequence for Pnrc2 (NM_026383.1,409-427).
cagaccctcaatctagaaa

SEQ ID NO: 724650 - DNA, 19 bp, Mus musculus
  siRNA target sequence for Pnrc2 (NM_026383.1,413-431).
ccctcaatctagaaatgct

SEQ ID NO: 724651 - DNA, 19 bp, Mus musculus
  siRNA target sequence for Pnrc2 (NM_026383.1,414-432).
cctcaatctagaaatgcta

SEQ ID NO: 724652 - DNA, 19 bp, Mus musculus
  siRNA target sequence for Pnrc2 (NM_026383.1,440-458).
ccaagaacagcaaaataga

SEQ ID NO: 724653 - DNA, 19 bp, Mus musculus
  siRNA target sequence for Pnrc2 (NM_026383.1,461-479).
gaagagcaaggatcagaat

SEQ ID NO: 724654 - DNA, 19 bp, Mus musculus
  siRNA target sequence for Pnrc2 (NM_026383.1,490-508).
cgaagattgctcataagaa

SEQ ID NO: 724655 - DNA, 19 bp, Mus musculus
  siRNA target sequence for Pnrc2 (NM_026383.1,602-620).
ctggaatgctggtttatca

SEQ ID NO: 724656 - DNA, 19 bp, Mus musculus
  siRNA target sequence for Pnrc2 (NM_026383.1,619-637).
caagtcctagcttgctttt

SEQ ID NO: 724657 - DNA, 19 bp, Mus musculus
  siRNA target sequence for Pnrc2 (NM_026383.1,624-642).
cctagcttgctttttaagt

SEQ ID NO: 724658 - DNA, 19 bp, Mus musculus
  siRNA target sequence for Pnrc2 (NM_026383.1,643-661).
ctcaagctagtcagaacta

SEQ ID NO: 724659 - DNA, 19 bp, Mus musculus
  siRNA target sequence for Pnrc2 (NM_026383.1,664-682).
ctggagccaaatttagtga

SEQ ID NO: 724660 - DNA, 19 bp, Mus musculus
  siRNA target sequence for Pnrc2 (NM_026383.1,766-784).
catttcaacttaaaacctt

SEQ ID NO: 724661 - DNA, 19 bp, Mus musculus
  siRNA target sequence for 1300003F06Rik (NM_026389.2,309-327).
ggcaggccagactgtatga

SEQ ID NO: 724662 - DNA, 19 bp, Mus musculus
  siRNA target sequence for 1300003F06Rik (NM_026389.2,399-417).
gcaaaactcacacttacta

SEQ ID NO: 724663 - DNA, 19 bp, Mus musculus
  siRNA target sequence for 1300003F06Rik (NM_026389.2,435-453).
cccgtgactgcccacatat

SEQ ID NO: 724664 - DNA, 19 bp, Mus musculus
  siRNA target sequence for 1300003F06Rik (NM_026389.2,436-454).
ccgtgactgcccacatata

SEQ ID NO: 724665 - DNA, 19 bp, Mus musculus
  siRNA target sequence for 1300003F06Rik (NM_026389.2,437-455).
cgtgactgcccacatatat

SEQ ID NO: 724666 - DNA, 19 bp, Mus musculus
  siRNA target sequence for 1300003F06Rik (NM_026389.2,577-595).
ggatcaggttcccattcaa

SEQ ID NO: 724667 - DNA, 19 bp, Mus musculus
  siRNA target sequence for 1300003F06Rik (NM_026389.2,596-614).
cacgagctctttgaaagat

SEQ ID NO: 724668 - DNA, 19 bp, Mus musculus
  siRNA target sequence for 1300003F06Rik (NM_026389.2,747-765).
cagtcatccctttctacat

SEQ ID NO: 724669 - DNA, 19 bp, Mus musculus
  siRNA target sequence for 1300003F06Rik (NM_026389.2,796-814).
ctactggtggcgctattgt

SEQ ID NO: 724670 - DNA, 19 bp, Mus musculus
  siRNA target sequence for 1300003F06Rik (NM_026389.2,799-817).
ctggtggcgctattgtata

SEQ ID NO: 724671 - DNA, 19 bp, Mus musculus
  siRNA target sequence for 1300003F06Rik (NM_026389.2,813-831).
gtatacgcttggaaaactt

SEQ ID NO: 724672 - DNA, 19 bp, Mus musculus
  siRNA target sequence for 1300003F06Rik (NM_026389.2,860-878).
cggcactggcggatattca

SEQ ID NO: 724673 - DNA, 19 bp, Mus musculus
  siRNA target sequence for 1300003F06Rik (NM_026389.2,862-880).
gcactggcggatattcagt

SEQ ID NO: 724674 - DNA, 19 bp, Mus musculus
  siRNA target sequence for 1300003F06Rik (NM_026389.2,1003-1021).
catgtggggcacatttcgt

SEQ ID NO: 724675 - DNA, 19 bp, Mus musculus
  siRNA target sequence for 1300003F06Rik (NM_026389.2,1008-1026).
ggggcacatttcgttttga

SEQ ID NO: 724676 - DNA, 19 bp, Mus musculus
  siRNA target sequence for 1300003F06Rik (NM_026389.2,1010-1028).
ggcacatttcgttttgaga

SEQ ID NO: 724677 - DNA, 19 bp, Mus musculus
  siRNA target sequence for 1300003F06Rik (NM_026389.2,1032-1050).
cggatggctcccactttga

SEQ ID NO: 724678 - DNA, 19 bp, Mus musculus
  siRNA target sequence for 1300003F06Rik (NM_026389.2,1033-1051).
ggatggctcccactttgat

SEQ ID NO: 724679 - DNA, 19 bp, Mus musculus
  siRNA target sequence for 1300003F06Rik (NM_026389.2,1065-1083).
cattctccttggaaagcaa

SEQ ID NO: 724680 - DNA, 19 bp, Mus musculus
  siRNA target sequence for 1300003F06Rik (NM_026389.2,1069-1087).
ctccttggaaagcaataaa

SEQ ID NO: 724681 - DNA, 19 bp, Mus musculus
  siRNA target sequence for 1300013G12Rik (NM_026390.1,393-411).
ggatgatgagcaatctata

SEQ ID NO: 724682 - DNA, 19 bp, Mus musculus
  siRNA target sequence for 1300013G12Rik (NM_026390.1,500-518).
cctgtctgcagttttcaca

SEQ ID NO: 724683 - DNA, 19 bp, Mus musculus
  siRNA target sequence for 1300013G12Rik (NM_026390.1,501-519).
ctgtctgcagttttcacaa

SEQ ID NO: 724684 - DNA, 19 bp, Mus musculus
  siRNA target sequence for 1300013G12Rik (NM_026390.1,505-523).
ctgcagttttcacaaattt

SEQ ID NO: 724685 - DNA, 19 bp, Mus musculus
  siRNA target sequence for 1300013G12Rik (NM_026390.1,507-525).
gcagttttcacaaatttat

SEQ ID NO: 724686 - DNA, 19 bp, Mus musculus
  siRNA target sequence for 1300013G12Rik (NM_026390.1,569-587).
gaatccctttggaagtaat

SEQ ID NO: 724687 - DNA, 19 bp, Mus musculus
  siRNA target sequence for 1300013G12Rik (NM_026390.1,583-601).
gtaatagcggggagtgttt

SEQ ID NO: 724688 - DNA, 19 bp, Mus musculus
  siRNA target sequence for 1300013G12Rik (NM_026390.1,604-622).
gcagatgagcttgttacaa

SEQ ID NO: 724689 - DNA, 19 bp, Mus musculus
  siRNA target sequence for 1300013G12Rik (NM_026390.1,612-630).
gcttgttacaagaattcat

SEQ ID NO: 724690 - DNA, 19 bp, Mus musculus
  siRNA target sequence for 1300013G12Rik (NM_026390.1,613-631).
cttgttacaagaattcata

SEQ ID NO: 724691 - DNA, 19 bp, Mus musculus
  siRNA target sequence for 1300013G12Rik (NM_026390.1,664-682).
gcatcagtgacaaatgaca

SEQ ID NO: 724692 - DNA, 19 bp, Mus musculus
  siRNA target sequence for 1300013G12Rik (NM_026390.1,679-697).
gacaaccagtcagaaagtt

SEQ ID NO: 724693 - DNA, 19 bp, Mus musculus
  siRNA target sequence for 1300013G12Rik (NM_026390.1,717-735).
ctcatttgaacctgatgta

SEQ ID NO: 724694 - DNA, 19 bp, Mus musculus
  siRNA target sequence for 1300013G12Rik (NM_026390.1,724-742).
gaacctgatgtatgtgaaa

SEQ ID NO: 724695 - DNA, 19 bp, Mus musculus
  siRNA target sequence for 1300013G12Rik (NM_026390.1,739-757).
gaaaatcccgagtccaaaa

SEQ ID NO: 724696 - DNA, 19 bp, Mus musculus
  siRNA target sequence for 1300013G12Rik (NM_026390.1,850-868).
gagcctcatggatgttcaa

SEQ ID NO: 724697 - DNA, 19 bp, Mus musculus
  siRNA target sequence for 1300013G12Rik (NM_026390.1,889-907).
ctcaccgtcagagtagaaa

SEQ ID NO: 724698 - DNA, 19 bp, Mus musculus
  siRNA target sequence for 1300013G12Rik (NM_026390.1,891-909).
caccgtcagagtagaaaga

SEQ ID NO: 724699 - DNA, 19 bp, Mus musculus
  siRNA target sequence for 1300013G12Rik (NM_026390.1,893-911).
ccgtcagagtagaaagact

SEQ ID NO: 724700 - DNA, 19 bp, Mus musculus
  siRNA target sequence for 1300013G12Rik (NM_026390.1,1125-1143).
cctggatcgtgcagaaaga

SEQ ID NO: 724701 - DNA, 19 bp, Mus musculus
  siRNA target sequence for 1300013G12Rik (NM_026390.1,1253-1271).
gcaccattgcaagaattca

SEQ ID NO: 724702 - DNA, 19 bp, Mus musculus
  siRNA target sequence for 1300013G12Rik (NM_026390.1,1285-1303).
gatggttcttcctttacaa

SEQ ID NO: 724703 - DNA, 19 bp, Mus musculus
  siRNA target sequence for 1300013G12Rik (NM_026390.1,1316-1334).
ctgatgctcctctagaaga

SEQ ID NO: 724704 - DNA, 19 bp, Mus musculus
  siRNA target sequence for 1300013G12Rik (NM_026390.1,1364-1382).
gcaacacctatggcaattt

SEQ ID NO: 724705 - DNA, 19 bp, Mus musculus
  siRNA target sequence for 1300013G12Rik (NM_026390.1,1365-1383).
caacacctatggcaatttt

SEQ ID NO: 724706 - DNA, 19 bp, Mus musculus
  siRNA target sequence for 1300013G12Rik (NM_026390.1,1518-1536).
ctcttctagtggagacatt

SEQ ID NO: 724707 - DNA, 19 bp, Mus musculus
  siRNA target sequence for 1300013G12Rik (NM_026390.1,1548-1566).
ggggacggtgctttatcca

SEQ ID NO: 724708 - DNA, 19 bp, Mus musculus
  siRNA target sequence for 1300013G12Rik (NM_026390.1,1549-1567).
gggacggtgctttatccat

SEQ ID NO: 724709 - DNA, 19 bp, Mus musculus
  siRNA target sequence for 1300013G12Rik (NM_026390.1,1550-1568).
ggacggtgctttatccatt

SEQ ID NO: 724710 - DNA, 19 bp, Mus musculus
  siRNA target sequence for 1300013G12Rik (NM_026390.1,1564-1582).
ccattcctggccatatgga

SEQ ID NO: 724711 - DNA, 19 bp, Mus musculus
  siRNA target sequence for 1300013G12Rik (NM_026390.1,1569-1587).
cctggccatatggagatta

SEQ ID NO: 724712 - DNA, 19 bp, Mus musculus
  siRNA target sequence for 1300013G12Rik (NM_026390.1,1570-1588).
ctggccatatggagattaa

SEQ ID NO: 724713 - DNA, 19 bp, Mus musculus
  siRNA target sequence for 1300013G12Rik (NM_026390.1,1572-1590).
ggccatatggagattaatt

SEQ ID NO: 724714 - DNA, 19 bp, Mus musculus
  siRNA target sequence for 1300013G12Rik (NM_026390.1,1647-1665).
cacagagccttcaaactct

SEQ ID NO: 724715 - DNA, 19 bp, Mus musculus
  siRNA target sequence for 1300013G12Rik (NM_026390.1,1723-1741).
cgaggggaagactttaaaa

SEQ ID NO: 724716 - DNA, 19 bp, Mus musculus
  siRNA target sequence for 1300013G12Rik (NM_026390.1,1788-1806).
cgagaacaacacttggaat

SEQ ID NO: 724717 - DNA, 19 bp, Mus musculus
  siRNA target sequence for 1110025F24Rik (NM_026393.1,188-206).
ccgtgcattgctagaagat

SEQ ID NO: 724718 - DNA, 19 bp, Mus musculus
  siRNA target sequence for 1110025F24Rik (NM_026393.1,340-358).
cccatgccaccttcattgt

SEQ ID NO: 724719 - DNA, 19 bp, Mus musculus
  siRNA target sequence for 1110025F24Rik (NM_026393.1,342-360).
catgccaccttcattgtga

SEQ ID NO: 724720 - DNA, 19 bp, Mus musculus
  siRNA target sequence for 1110025F24Rik (NM_026393.1,408-426).
caccagtgggaccaagtat

SEQ ID NO: 724721 - DNA, 19 bp, Mus musculus
  siRNA target sequence for 1110025F24Rik (NM_026393.1,469-487).
gcctccattatgtagtgta

SEQ ID NO: 724722 - DNA, 19 bp, Mus musculus
  siRNA target sequence for 1110025F24Rik (NM_026393.1,527-545).
gctggccgcaggacacttt

SEQ ID NO: 724723 - DNA, 19 bp, Mus musculus
  siRNA target sequence for 1110025F24Rik (NM_026393.1,530-548).
ggccgcaggacactttgat

SEQ ID NO: 724724 - DNA, 19 bp, Mus musculus
  siRNA target sequence for 1110025F24Rik (NM_026393.1,555-573).
ggggaggtggaggaatact

SEQ ID NO: 724725 - DNA, 19 bp, Mus musculus
  siRNA target sequence for 1110025F24Rik (NM_026393.1,607-625).
ggctgccttgctatttcga

SEQ ID NO: 724726 - DNA, 19 bp, Mus musculus
  siRNA target sequence for 1110025F24Rik (NM_026393.1,623-641).
cgagaatctcctttcctat

SEQ ID NO: 724727 - DNA, 19 bp, Mus musculus
  siRNA target sequence for 1110025F24Rik (NM_026393.1,624-642).
gagaatctcctttcctatt

SEQ ID NO: 724728 - DNA, 19 bp, Mus musculus
  siRNA target sequence for 1110025F24Rik (NM_026393.1,704-722).
ccccatggatggaatgtct

SEQ ID NO: 724729 - DNA, 19 bp, Mus musculus
  siRNA target sequence for 1110025F24Rik (NM_026393.1,822-840).
gagtatgctgccttgctta

SEQ ID NO: 724730 - DNA, 19 bp, Mus musculus
  siRNA target sequence for 1110025F24Rik (NM_026393.1,928-946).
ccaacatgttccgtttcta

SEQ ID NO: 724731 - DNA, 19 bp, Mus musculus
  siRNA target sequence for 1110025F24Rik (NM_026393.1,953-971).
gaaacctgatcggaacatt

SEQ ID NO: 724732 - DNA, 19 bp, Mus musculus
  siRNA target sequence for 1500041N16Rik (NM_026399.1,520-538).
ctgagccggtgcaaacact

SEQ ID NO: 724733 - DNA, 19 bp, Mus musculus
  siRNA target sequence for 2610016C12Rik (NM_026402.1,333-351).
ccggtcctcaaggaatcaa

SEQ ID NO: 724734 - DNA, 19 bp, Mus musculus
  siRNA target sequence for 2610016C12Rik (NM_026402.1,334-352).
cggtcctcaaggaatcaaa

SEQ ID NO: 724735 - DNA, 19 bp, Mus musculus
  siRNA target sequence for 2610016C12Rik (NM_026402.1,438-456).
gctacaggggaagaattga

SEQ ID NO: 724736 - DNA, 19 bp, Mus musculus
  siRNA target sequence for 2610016C12Rik (NM_026402.1,455-473).
gaaagtgaaggcatatctt

SEQ ID NO: 724737 - DNA, 19 bp, Mus musculus
  siRNA target sequence for 2610016C12Rik (NM_026402.1,471-489).
cttccgacagacaaacaat

SEQ ID NO: 724738 - DNA, 19 bp, Mus musculus
  siRNA target sequence for 2610016C12Rik (NM_026402.1,514-532).
gctacaagcggtgtaaaca

SEQ ID NO: 724739 - DNA, 19 bp, Mus musculus
  siRNA target sequence for 2610016C12Rik (NM_026402.1,539-557).
gtattcggatgaattggaa

SEQ ID NO: 724740 - DNA, 19 bp, Mus musculus
  siRNA target sequence for 2610016C12Rik (NM_026402.1,544-562).
cggatgaattggaagctat

SEQ ID NO: 724741 - DNA, 19 bp, Mus musculus
  siRNA target sequence for 2610016C12Rik (NM_026402.1,586-604).
ggggatgggtagatacata

SEQ ID NO: 724742 - DNA, 19 bp, Mus musculus
  siRNA target sequence for 2610016C12Rik (NM_026402.1,589-607).
gatgggtagatacatatca

SEQ ID NO: 724743 - DNA, 19 bp, Mus musculus
  siRNA target sequence for 2610016C12Rik (NM_026402.1,592-610).
gggtagatacatatcacaa

SEQ ID NO: 724744 - DNA, 19 bp, Mus musculus
  siRNA target sequence for 2610016C12Rik (NM_026402.1,611-629).
cacaggtattacaggaatt

SEQ ID NO: 724745 - DNA, 19 bp, Mus musculus
  siRNA target sequence for 2610016C12Rik (NM_026402.1,661-679).
gcaaggacagtataaaact

SEQ ID NO: 724746 - DNA, 19 bp, Mus musculus
  siRNA target sequence for 2610016C12Rik (NM_026402.1,760-778).
gtggattgttggaaacaga

SEQ ID NO: 724747 - DNA, 19 bp, Mus musculus
  siRNA target sequence for 2610016C12Rik (NM_026402.1,841-859).
gtgaagatgctattttaca

SEQ ID NO: 724748 - DNA, 19 bp, Mus musculus
  siRNA target sequence for 2610016C12Rik (NM_026402.1,865-883).
gaacatacgacctgtacat

SEQ ID NO: 724749 - DNA, 19 bp, Mus musculus
  siRNA target sequence for 2610016C12Rik (NM_026402.1,881-899).
catcacttacgacaaatat

SEQ ID NO: 724750 - DNA, 19 bp, Mus musculus
  siRNA target sequence for 2610016C12Rik (NM_026402.1,886-904).
cttacgacaaatattacca

SEQ ID NO: 724751 - DNA, 19 bp, Mus musculus
  siRNA target sequence for 2610016C12Rik (NM_026402.1,936-954).
gagcaacggcagcctttaa

SEQ ID NO: 724752 - DNA, 19 bp, Mus musculus
  siRNA target sequence for 2610016C12Rik (NM_026402.1,982-1000).
gtcaagatcatgtgaagaa

SEQ ID NO: 724753 - DNA, 19 bp, Mus musculus
  siRNA target sequence for 2610016C12Rik (NM_026402.1,1116-1134).
ggagagcttggtgttcata

SEQ ID NO: 724754 - DNA, 19 bp, Mus musculus
  siRNA target sequence for 2610016C12Rik (NM_026402.1,1117-1135).
gagagcttggtgttcatat

SEQ ID NO: 724755 - DNA, 19 bp, Mus musculus
  siRNA target sequence for 2610016C12Rik (NM_026402.1,1161-1179).
gttcaagctgtcattccaa

SEQ ID NO: 724756 - DNA, 19 bp, Mus musculus
  siRNA target sequence for 2610016C12Rik (NM_026402.1,1170-1188).
gtcattccaacaatagaat

SEQ ID NO: 724757 - DNA, 19 bp, Mus musculus
  siRNA target sequence for 2610016C12Rik (NM_026402.1,1172-1190).
cattccaacaatagaatat

SEQ ID NO: 724758 - DNA, 19 bp, Mus musculus
  siRNA target sequence for Slc35a4 (NM_026404.1,1006-1024).
ctctatggcgccaacaaca

SEQ ID NO: 724759 - DNA, 19 bp, Mus musculus
  siRNA target sequence for Slc35a4 (NM_026404.1,1074-1092).
gctgagcaatctcaagatt

SEQ ID NO: 724760 - DNA, 19 bp, Mus musculus
  siRNA target sequence for Slc35a4 (NM_026404.1,1255-1273).
catcccatgcccttgcata

SEQ ID NO: 724761 - DNA, 19 bp, Mus musculus
  siRNA target sequence for Slc35a4 (NM_026404.1,1413-1431).
cctgaactttggactgtat

SEQ ID NO: 724762 - DNA, 19 bp, Mus musculus
  siRNA target sequence for Slc35a4 (NM_026404.1,1550-1568).
gcatcacacgcctcttcat

SEQ ID NO: 724763 - DNA, 19 bp, Mus musculus
  siRNA target sequence for Zfp364 (NM_026406.2,226-244).
cgaggtcaatcccaaacta

SEQ ID NO: 724764 - DNA, 19 bp, Mus musculus
  siRNA target sequence for Zfp364 (NM_026406.2,236-254).
cccaaactaccggaatata

SEQ ID NO: 724765 - DNA, 19 bp, Mus musculus
  siRNA target sequence for Zfp364 (NM_026406.2,237-255).
ccaaactaccggaatatat

SEQ ID NO: 724766 - DNA, 19 bp, Mus musculus
  siRNA target sequence for Zfp364 (NM_026406.2,238-256).
caaactaccggaatatata

SEQ ID NO: 724767 - DNA, 19 bp, Mus musculus
  siRNA target sequence for Zfp364 (NM_026406.2,379-397).
ggatcacacaatgttttta

SEQ ID NO: 724768 - DNA, 19 bp, Mus musculus
  siRNA target sequence for Zfp364 (NM_026406.2,512-530).
ccaatgacaagaagataca

SEQ ID NO: 724769 - DNA, 19 bp, Mus musculus
  siRNA target sequence for Zfp364 (NM_026406.2,529-547).
caggtctcgcggaagtact

SEQ ID NO: 724770 - DNA, 19 bp, Mus musculus
  siRNA target sequence for Zfp364 (NM_026406.2,556-574).
caggtcgccagctatcgaa

SEQ ID NO: 724771 - DNA, 19 bp, Mus musculus
  siRNA target sequence for Zfp364 (NM_026406.2,561-579).
cgccagctatcgaaggaat

SEQ ID NO: 724772 - DNA, 19 bp, Mus musculus
  siRNA target sequence for Zfp364 (NM_026406.2,562-580).
gccagctatcgaaggaata

SEQ ID NO: 724773 - DNA, 19 bp, Mus musculus
  siRNA target sequence for Zfp364 (NM_026406.2,563-581).
ccagctatcgaaggaataa

SEQ ID NO: 724774 - DNA, 19 bp, Mus musculus
  siRNA target sequence for Zfp364 (NM_026406.2,567-585).
ctatcgaaggaataataca

SEQ ID NO: 724775 - DNA, 19 bp, Mus musculus
  siRNA target sequence for Zfp364 (NM_026406.2,589-607).
gatctttgcaggattcttt

SEQ ID NO: 724776 - DNA, 19 bp, Mus musculus
  siRNA target sequence for Zfp364 (NM_026406.2,725-743).
ctaggacagctggaaaaca

SEQ ID NO: 724777 - DNA, 19 bp, Mus musculus
  siRNA target sequence for Zfp364 (NM_026406.2,780-798).
ctctcccaacagttacagt

SEQ ID NO: 724778 - DNA, 19 bp, Mus musculus
  siRNA target sequence for Zfp364 (NM_026406.2,782-800).
ctcccaacagttacagtaa

SEQ ID NO: 724779 - DNA, 19 bp, Mus musculus
  siRNA target sequence for Zfp364 (NM_026406.2,814-832).
caatacgggtttagaatgt

SEQ ID NO: 724780 - DNA, 19 bp, Mus musculus
  siRNA target sequence for Zfp364 (NM_026406.2,935-953).
gacacatgcccagtatgta

SEQ ID NO: 724781 - DNA, 19 bp, Mus musculus
  siRNA target sequence for Zfp364 (NM_026406.2,947-965).
gtatgtaggaagagcttaa

SEQ ID NO: 724782 - DNA, 19 bp, Mus musculus
  siRNA target sequence for Zfp364 (NM_026406.2,1004-1022).
gcctctgcaagcaacagat

SEQ ID NO: 724783 - DNA, 19 bp, Mus musculus
  siRNA target sequence for Zfp364 (NM_026406.2,1006-1024).
ctctgcaagcaacagattt

SEQ ID NO: 724784 - DNA, 19 bp, Mus musculus
  siRNA target sequence for Zfp364 (NM_026406.2,1043-1061).
catgaccgatggactttct

SEQ ID NO: 724785 - DNA, 19 bp, Mus musculus
  siRNA target sequence for 2610033C09Rik (NM_026407.2,395-413).
gctttaccttccatacaga

SEQ ID NO: 724786 - DNA, 19 bp, Mus musculus
  siRNA target sequence for 2610033C09Rik (NM_026407.2,451-469).
gaggaacaggaatggtaat

SEQ ID NO: 724787 - DNA, 19 bp, Mus musculus
  siRNA target sequence for 2610033C09Rik (NM_026407.2,557-575).
gggagcctgttctttgaat

SEQ ID NO: 724788 - DNA, 19 bp, Mus musculus
  siRNA target sequence for 2610033C09Rik (NM_026407.2,643-661).
gtggtatccgtacaatcat

SEQ ID NO: 724789 - DNA, 19 bp, Mus musculus
  siRNA target sequence for 2610033C09Rik (NM_026407.2,672-690).
gtacttcactgaattttca

SEQ ID NO: 724790 - DNA, 19 bp, Mus musculus
  siRNA target sequence for 2610033C09Rik (NM_026407.2,743-761).
cttgtatgggccctcattt

SEQ ID NO: 724791 - DNA, 19 bp, Mus musculus
  siRNA target sequence for 2610033C09Rik (NM_026407.2,757-775).
catttccgaggctactaaa

SEQ ID NO: 724792 - DNA, 19 bp, Mus musculus
  siRNA target sequence for 2610033C09Rik (NM_026407.2,783-801).
ctgcgtctacggttcacta

SEQ ID NO: 724793 - DNA, 19 bp, Mus musculus
  siRNA target sequence for 2610033C09Rik (NM_026407.2,858-876).
gctggaccctggtcaatct

SEQ ID NO: 724794 - DNA, 19 bp, Mus musculus
  siRNA target sequence for 2610033C09Rik (NM_026407.2,861-879).
ggaccctggtcaatctttt

SEQ ID NO: 724795 - DNA, 19 bp, Mus musculus
  siRNA target sequence for 2610033C09Rik (NM_026407.2,885-903).
gccattcagtcctcaatct

SEQ ID NO: 724796 - DNA, 19 bp, Mus musculus
  siRNA target sequence for 2610033C09Rik (NM_026407.2,915-933).
gctatccgtttggtgttta

SEQ ID NO: 724797 - DNA, 19 bp, Mus musculus
  siRNA target sequence for 2610033C09Rik (NM_026407.2,1036-1054).
cagtttggccagatccaaa

SEQ ID NO: 724798 - DNA, 19 bp, Mus musculus
  siRNA target sequence for 2610033C09Rik (NM_026407.2,1191-1209).
gaatcaaggaagttctctt

SEQ ID NO: 724799 - DNA, 19 bp, Mus musculus
  siRNA target sequence for 2610033C09Rik (NM_026407.2,1224-1242).
gtgcctactacgttgcatt

SEQ ID NO: 724800 - DNA, 19 bp, Mus musculus
  siRNA target sequence for 2610033C09Rik (NM_026407.2,1227-1245).
cctactacgttgcatttct

SEQ ID NO: 724801 - DNA, 19 bp, Mus musculus
  siRNA target sequence for 2610033C09Rik (NM_026407.2,1259-1277).
gtgaagagtacccagtatt

SEQ ID NO: 724802 - DNA, 19 bp, Mus musculus
  siRNA target sequence for 2610033C09Rik (NM_026407.2,1296-1314).
gtgagcacctcattatggt

SEQ ID NO: 724803 - DNA, 19 bp, Mus musculus
  siRNA target sequence for 2610033C09Rik (NM_026407.2,1317-1335).
ggatcaatgcttttgtcat

SEQ ID NO: 724804 - DNA, 19 bp, Mus musculus
  siRNA target sequence for 2610033C09Rik (NM_026407.2,1345-1363).
gcaactgctgccatccaaa

SEQ ID NO: 724805 - DNA, 19 bp, Mus musculus
  siRNA target sequence for 2610033C09Rik (NM_026407.2,1346-1364).
caactgctgccatccaaat

SEQ ID NO: 724806 - DNA, 19 bp, Mus musculus
  siRNA target sequence for 2610033C09Rik (NM_026407.2,1439-1457).
gctccacagcacatttggt

SEQ ID NO: 724807 - DNA, 19 bp, Mus musculus
  siRNA target sequence for 2610033C09Rik (NM_026407.2,1445-1463).
cagcacatttggtcagaaa

SEQ ID NO: 724808 - DNA, 19 bp, Mus musculus
  siRNA target sequence for 2610033C09Rik (NM_026407.2,1490-1508).
gtgcggcacagcagatgtt

SEQ ID NO: 724809 - DNA, 19 bp, Mus musculus
  siRNA target sequence for 2610033C09Rik (NM_026407.2,1493-1511).
cggcacagcagatgtttat

SEQ ID NO: 724810 - DNA, 19 bp, Mus musculus
  siRNA target sequence for 2610033C09Rik (NM_026407.2,1498-1516).
cagcagatgtttatatcga

SEQ ID NO: 724811 - DNA, 19 bp, Mus musculus
  siRNA target sequence for 2610033C09Rik (NM_026407.2,1515-1533).
gagccatgggaccttacaa

SEQ ID NO: 724812 - DNA, 19 bp, Mus musculus
  siRNA target sequence for 2610033C09Rik (NM_026407.2,1518-1536).
ccatgggaccttacaatgt

SEQ ID NO: 724813 - DNA, 19 bp, Mus musculus
  siRNA target sequence for 2610033C09Rik (NM_026407.2,1557-1575).
cccatgcccgcttttattt

SEQ ID NO: 724814 - DNA, 19 bp, Mus musculus
  siRNA target sequence for 2610033C09Rik (NM_026407.2,1579-1597).
gtttcaccgcccattacga

SEQ ID NO: 724815 - DNA, 19 bp, Mus musculus
  siRNA target sequence for 2610033C09Rik (NM_026407.2,1708-1726).
ctgcaactactatgtttta

SEQ ID NO: 724816 - DNA, 19 bp, Mus musculus
  siRNA target sequence for 2610033C09Rik (NM_026407.2,1732-1750).
gctcctccgggacagaata

SEQ ID NO: 724817 - DNA, 19 bp, Mus musculus
  siRNA target sequence for 2610033C09Rik (NM_026407.2,1736-1754).
ctccgggacagaatagtct

SEQ ID NO: 724818 - DNA, 19 bp, Mus musculus
  siRNA target sequence for 2610033C09Rik (NM_026407.2,1738-1756).
ccgggacagaatagtctta

SEQ ID NO: 724819 - DNA, 19 bp, Mus musculus
  siRNA target sequence for 2610033C09Rik (NM_026407.2,1770-1788).
cctaccccctcaacagtta

SEQ ID NO: 724820 - DNA, 19 bp, Mus musculus
  siRNA target sequence for Sncaip (NM_026408.2,121-139).
gcccctgaataccttgatt

SEQ ID NO: 724821 - DNA, 19 bp, Mus musculus
  siRNA target sequence for Sncaip (NM_026408.2,122-140).
cccctgaataccttgattt

SEQ ID NO: 724822 - DNA, 19 bp, Mus musculus
  siRNA target sequence for Sncaip (NM_026408.2,150-168).
cgactttagtgatgacatt

SEQ ID NO: 724823 - DNA, 19 bp, Mus musculus
  siRNA target sequence for Sncaip (NM_026408.2,215-233).
gatgtgactcacaaaacga

SEQ ID NO: 724824 - DNA, 19 bp, Mus musculus
  siRNA target sequence for Sncaip (NM_026408.2,231-249).
cgaagacagatcagtttct

SEQ ID NO: 724825 - DNA, 19 bp, Mus musculus
  siRNA target sequence for Sncaip (NM_026408.2,268-286).
ggtgtctcaactctcatta

SEQ ID NO: 724826 - DNA, 19 bp, Mus musculus
  siRNA target sequence for Sncaip (NM_026408.2,271-289).
gtctcaactctcattacaa

SEQ ID NO: 724827 - DNA, 19 bp, Mus musculus
  siRNA target sequence for Sncaip (NM_026408.2,303-321).
cactggaatcgctgatgta

SEQ ID NO: 724828 - DNA, 19 bp, Mus musculus
  siRNA target sequence for Sncaip (NM_026408.2,305-323).
ctggaatcgctgatgtata

SEQ ID NO: 724829 - DNA, 19 bp, Mus musculus
  siRNA target sequence for Sncaip (NM_026408.2,307-325).
ggaatcgctgatgtataca

SEQ ID NO: 724830 - DNA, 19 bp, Mus musculus
  siRNA target sequence for Sncaip (NM_026408.2,313-331).
gctgatgtatacagtaagt

SEQ ID NO: 724831 - DNA, 19 bp, Mus musculus
  siRNA target sequence for Sncaip (NM_026408.2,336-354).
cccagtgaagcgagtttct

SEQ ID NO: 724832 - DNA, 19 bp, Mus musculus
  siRNA target sequence for Sncaip (NM_026408.2,371-389).
cggagactctggagaacaa

SEQ ID NO: 724833 - DNA, 19 bp, Mus musculus
  siRNA target sequence for Sncaip (NM_026408.2,571-589).
ctcgatgtgccttacatta

SEQ ID NO: 724834 - DNA, 19 bp, Mus musculus
  siRNA target sequence for Sncaip (NM_026408.2,573-591).
cgatgtgccttacattaaa

SEQ ID NO: 724835 - DNA, 19 bp, Mus musculus
  siRNA target sequence for Sncaip (NM_026408.2,624-642).
gacttcggagaaaaggatt

SEQ ID NO: 724836 - DNA, 19 bp, Mus musculus
  siRNA target sequence for Sncaip (NM_026408.2,678-696).
caaaacctgccctattgca

SEQ ID NO: 724837 - DNA, 19 bp, Mus musculus
  siRNA target sequence for Sncaip (NM_026408.2,795-813).
gcacaagctctctacagaa

SEQ ID NO: 724838 - DNA, 19 bp, Mus musculus
  siRNA target sequence for Sncaip (NM_026408.2,848-866).
gccctgcatatgaatcaga

SEQ ID NO: 724839 - DNA, 19 bp, Mus musculus
  siRNA target sequence for Sncaip (NM_026408.2,854-872).
catatgaatcagaaaacca

SEQ ID NO: 724840 - DNA, 19 bp, Mus musculus
  siRNA target sequence for Sncaip (NM_026408.2,880-898).
gacttcttaaacaaggttt

SEQ ID NO: 724841 - DNA, 19 bp, Mus musculus
  siRNA target sequence for Sncaip (NM_026408.2,908-926).
cccatagtcggaaaattga

SEQ ID NO: 724842 - DNA, 19 bp, Mus musculus
  siRNA target sequence for Sncaip (NM_026408.2,910-928).
catagtcggaaaattgaga

SEQ ID NO: 724843 - DNA, 19 bp, Mus musculus
  siRNA target sequence for Sncaip (NM_026408.2,1087-1105).
gtcaacgaaggacagatat

SEQ ID NO: 724844 - DNA, 19 bp, Mus musculus
  siRNA target sequence for Sncaip (NM_026408.2,1149-1167).
cgatgagaacggaaacaat

SEQ ID NO: 724845 - DNA, 19 bp, Mus musculus
  siRNA target sequence for Sncaip (NM_026408.2,1155-1173).
gaacggaaacaatctgtta

SEQ ID NO: 724846 - DNA, 19 bp, Mus musculus
  siRNA target sequence for Sncaip (NM_026408.2,1159-1177).
ggaaacaatctgttacaca

SEQ ID NO: 724847 - DNA, 19 bp, Mus musculus
  siRNA target sequence for Sncaip (NM_026408.2,1230-1248).
gggcgaagactgtctgaat

SEQ ID NO: 724848 - DNA, 19 bp, Mus musculus
  siRNA target sequence for Sncaip (NM_026408.2,1232-1250).
gcgaagactgtctgaatga

SEQ ID NO: 724849 - DNA, 19 bp, Mus musculus
  siRNA target sequence for Sncaip (NM_026408.2,1365-1383).
ggatttcccaagccttatt

SEQ ID NO: 724850 - DNA, 19 bp, Mus musculus
  siRNA target sequence for Sncaip (NM_026408.2,1827-1845).
ccagtggaaagctctagat

SEQ ID NO: 724851 - DNA, 19 bp, Mus musculus
  siRNA target sequence for Sncaip (NM_026408.2,1828-1846).
cagtggaaagctctagata

SEQ ID NO: 724852 - DNA, 19 bp, Mus musculus
  siRNA target sequence for Sncaip (NM_026408.2,1887-1905).
ggagggaatacaagttctt

SEQ ID NO: 724853 - DNA, 19 bp, Mus musculus
  siRNA target sequence for Sncaip (NM_026408.2,2047-2065).
caggcatcctctaggaatt

SEQ ID NO: 724854 - DNA, 19 bp, Mus musculus
  siRNA target sequence for Sncaip (NM_026408.2,2050-2068).
gcatcctctaggaattcga

SEQ ID NO: 724855 - DNA, 19 bp, Mus musculus
  siRNA target sequence for Sncaip (NM_026408.2,2051-2069).
catcctctaggaattcgaa

SEQ ID NO: 724856 - DNA, 19 bp, Mus musculus
  siRNA target sequence for Sncaip (NM_026408.2,2055-2073).
ctctaggaattcgaaaaaa

SEQ ID NO: 724857 - DNA, 19 bp, Mus musculus
  siRNA target sequence for Sncaip (NM_026408.2,2057-2075).
ctaggaattcgaaaaaaat

SEQ ID NO: 724858 - DNA, 19 bp, Mus musculus
  siRNA target sequence for Sncaip (NM_026408.2,2125-2143).
cagagatcgttgagtgaat

SEQ ID NO: 724859 - DNA, 19 bp, Mus musculus
  siRNA target sequence for Sncaip (NM_026408.2,2127-2145).
gagatcgttgagtgaatct

SEQ ID NO: 724860 - DNA, 19 bp, Mus musculus
  siRNA target sequence for Sncaip (NM_026408.2,2129-2147).
gatcgttgagtgaatctga

SEQ ID NO: 724861 - DNA, 19 bp, Mus musculus
  siRNA target sequence for Sncaip (NM_026408.2,2144-2162).
ctgacacggactcaaacaa

SEQ ID NO: 724862 - DNA, 19 bp, Mus musculus
  siRNA target sequence for Sncaip (NM_026408.2,2146-2164).
gacacggactcaaacaact

SEQ ID NO: 724863 - DNA, 19 bp, Mus musculus
  siRNA target sequence for Sncaip (NM_026408.2,2258-2276).
gcttacacctgatgataaa

SEQ ID NO: 724864 - DNA, 19 bp, Mus musculus
  siRNA target sequence for Sncaip (NM_026408.2,2294-2312).
caggacgcaggtttccttt

SEQ ID NO: 724865 - DNA, 19 bp, Mus musculus
  siRNA target sequence for Sncaip (NM_026408.2,2299-2317).
cgcaggtttccttttggta

SEQ ID NO: 724866 - DNA, 19 bp, Mus musculus
  siRNA target sequence for Sncaip (NM_026408.2,2314-2332).
ggtatgaaagcctccaaat

SEQ ID NO: 724867 - DNA, 19 bp, Mus musculus
  siRNA target sequence for Sncaip (NM_026408.2,2563-2581).
gaggaacctgtcgtacaaa

SEQ ID NO: 724868 - DNA, 19 bp, Mus musculus
  siRNA target sequence for Sncaip (NM_026408.2,2572-2590).
gtcgtacaaatggaacaaa

SEQ ID NO: 724869 - DNA, 19 bp, Mus musculus
  siRNA target sequence for Sncaip (NM_026408.2,2574-2592).
cgtacaaatggaacaaact

SEQ ID NO: 724870 - DNA, 19 bp, Mus musculus
  siRNA target sequence for Sncaip (NM_026408.2,2638-2656).
ccccagaggactagtgaat

SEQ ID NO: 724871 - DNA, 19 bp, Mus musculus
  siRNA target sequence for Sncaip (NM_026408.2,2703-2721).
ggagagtttaagtggtaat

SEQ ID NO: 724872 - DNA, 19 bp, Mus musculus
  siRNA target sequence for 2610036L13Rik (NM_026410.1,114-132).
gcccaggacttcacttact

SEQ ID NO: 724873 - DNA, 19 bp, Mus musculus
  siRNA target sequence for 2610036L13Rik (NM_026410.1,175-193).
ccgaactcgttctctgaaa

SEQ ID NO: 724874 - DNA, 19 bp, Mus musculus
  siRNA target sequence for 2610036L13Rik (NM_026410.1,176-194).
cgaactcgttctctgaaat

SEQ ID NO: 724875 - DNA, 19 bp, Mus musculus
  siRNA target sequence for 2610036L13Rik (NM_026410.1,233-251).
ccatcgtcttgaagaagat

SEQ ID NO: 724876 - DNA, 19 bp, Mus musculus
  siRNA target sequence for 2610036L13Rik (NM_026410.1,282-300).
ccacacggttcgaagaagt

SEQ ID NO: 724877 - DNA, 19 bp, Mus musculus
  siRNA target sequence for 2610036L13Rik (NM_026410.1,301-319).
cctaggatctcttttattt

SEQ ID NO: 724878 - DNA, 19 bp, Mus musculus
  siRNA target sequence for 2610036L13Rik (NM_026410.1,361-379).
gaagacctcttcaagactt

SEQ ID NO: 724879 - DNA, 19 bp, Mus musculus
  siRNA target sequence for 2610036L13Rik (NM_026410.1,364-382).
gacctcttcaagacttgta

SEQ ID NO: 724880 - DNA, 19 bp, Mus musculus
  siRNA target sequence for 2610036L13Rik (NM_026410.1,411-429).
cgtgctgtacactcagaat

SEQ ID NO: 724881 - DNA, 19 bp, Mus musculus
  siRNA target sequence for 2610036L13Rik (NM_026410.1,414-432).
gctgtacactcagaatgtt

SEQ ID NO: 724882 - DNA, 19 bp, Mus musculus
  siRNA target sequence for 2610036L13Rik (NM_026410.1,599-617).
cacctgtcgtgtgttcaaa

SEQ ID NO: 724883 - DNA, 19 bp, Mus musculus
  siRNA target sequence for 2610036L13Rik (NM_026410.1,604-622).
gtcgtgtgttcaaagttaa

SEQ ID NO: 724884 - DNA, 19 bp, Mus musculus
  siRNA target sequence for 2610036L13Rik (NM_026410.1,673-691).
gacttggttccagatagta

SEQ ID NO: 724885 - DNA, 19 bp, Mus musculus
  siRNA target sequence for 2610036L13Rik (NM_026410.1,729-747).
ctctcccccagttgtgaaa

SEQ ID NO: 724886 - DNA, 19 bp, Mus musculus
  siRNA target sequence for 2610036L13Rik (NM_026410.1,766-784).
gttcctgaaatcctgaaat

SEQ ID NO: 724887 - DNA, 19 bp, Mus musculus
  siRNA target sequence for 1700021F05Rik (NM_026411.1,148-166).
ggggacatcgtcacacaaa

SEQ ID NO: 724888 - DNA, 19 bp, Mus musculus
  siRNA target sequence for 1700021F05Rik (NM_026411.1,150-168).
ggacatcgtcacacaaact

SEQ ID NO: 724889 - DNA, 19 bp, Mus musculus
  siRNA target sequence for 1700021F05Rik (NM_026411.1,151-169).
gacatcgtcacacaaactt

SEQ ID NO: 724890 - DNA, 19 bp, Mus musculus
  siRNA target sequence for 1700021F05Rik (NM_026411.1,174-192).
cttcctggaaccgatactt

SEQ ID NO: 724891 - DNA, 19 bp, Mus musculus
  siRNA target sequence for 1700021F05Rik (NM_026411.1,177-195).
cctggaaccgatacttgta

SEQ ID NO: 724892 - DNA, 19 bp, Mus musculus
  siRNA target sequence for 1700021F05Rik (NM_026411.1,178-196).
ctggaaccgatacttgtat

SEQ ID NO: 724893 - DNA, 19 bp, Mus musculus
  siRNA target sequence for 1700021F05Rik (NM_026411.1,180-198).
ggaaccgatacttgtattt

SEQ ID NO: 724894 - DNA, 19 bp, Mus musculus
  siRNA target sequence for 1700021F05Rik (NM_026411.1,234-252).
cacttttccgtaacatttt

SEQ ID NO: 724895 - DNA, 19 bp, Mus musculus
  siRNA target sequence for 1700021F05Rik (NM_026411.1,261-279).
gactcccagagcttttagt

SEQ ID NO: 724896 - DNA, 19 bp, Mus musculus
  siRNA target sequence for 1700021F05Rik (NM_026411.1,263-281).
ctcccagagcttttagtat

SEQ ID NO: 724897 - DNA, 19 bp, Mus musculus
  siRNA target sequence for 1700021F05Rik (NM_026411.1,265-283).
cccagagcttttagtatct

SEQ ID NO: 724898 - DNA, 19 bp, Mus musculus
  siRNA target sequence for 1700021F05Rik (NM_026411.1,331-349).
ctccaaaaaatctacgaaa

SEQ ID NO: 724899 - DNA, 19 bp, Mus musculus
  siRNA target sequence for 1700021F05Rik (NM_026411.1,447-465).
gtgtggcgaaggactacaa

SEQ ID NO: 724900 - DNA, 19 bp, Mus musculus
  siRNA target sequence for 1700021F05Rik (NM_026411.1,542-560).
gtagaagatgcattctaca

SEQ ID NO: 724901 - DNA, 19 bp, Mus musculus
  siRNA target sequence for 1700021F05Rik (NM_026411.1,621-639).
gagataccttggatctcat

SEQ ID NO: 724902 - DNA, 19 bp, Mus musculus
  siRNA target sequence for 1700021F05Rik (NM_026411.1,743-761).
cgccgatggaagagcttaa

SEQ ID NO: 724903 - DNA, 19 bp, Mus musculus
  siRNA target sequence for 1700021F05Rik (NM_026411.1,744-762).
gccgatggaagagcttaaa

SEQ ID NO: 724904 - DNA, 19 bp, Mus musculus
  siRNA target sequence for 1700021F05Rik (NM_026411.1,756-774).
gcttaaagctgcctaaaaa

SEQ ID NO: 724905 - DNA, 19 bp, Mus musculus
  siRNA target sequence for D2Ertd750e (NM_026412.1,244-262).
gttgctgcggagcattatt

SEQ ID NO: 724906 - DNA, 19 bp, Mus musculus
  siRNA target sequence for D2Ertd750e (NM_026412.1,247-265).
gctgcggagcattatttga

SEQ ID NO: 724907 - DNA, 19 bp, Mus musculus
  siRNA target sequence for D2Ertd750e (NM_026412.1,248-266).
ctgcggagcattatttgaa

SEQ ID NO: 724908 - DNA, 19 bp, Mus musculus
  siRNA target sequence for D2Ertd750e (NM_026412.1,387-405).
cggcttgcccgcagataca

SEQ ID NO: 724909 - DNA, 19 bp, Mus musculus
  siRNA target sequence for D2Ertd750e (NM_026412.1,389-407).
gcttgcccgcagatacaca

SEQ ID NO: 724910 - DNA, 19 bp, Mus musculus
  siRNA target sequence for D2Ertd750e (NM_026412.1,390-408).
cttgcccgcagatacacaa

SEQ ID NO: 724911 - DNA, 19 bp, Mus musculus
  siRNA target sequence for D2Ertd750e (NM_026412.1,406-424).
caaactcgagctacttcta

SEQ ID NO: 724912 - DNA, 19 bp, Mus musculus
  siRNA target sequence for D2Ertd750e (NM_026412.1,410-428).
ctcgagctacttctaaact

SEQ ID NO: 724913 - DNA, 19 bp, Mus musculus
  siRNA target sequence for D2Ertd750e (NM_026412.1,440-458).
ccaaagaagcggatttgct

SEQ ID NO: 724914 - DNA, 19 bp, Mus musculus
  siRNA target sequence for D2Ertd750e (NM_026412.1,450-468).
ggatttgcttagacatctt

SEQ ID NO: 724915 - DNA, 19 bp, Mus musculus
  siRNA target sequence for D2Ertd750e (NM_026412.1,478-496).
gggccagagcctgatgtta

SEQ ID NO: 724916 - DNA, 19 bp, Mus musculus
  siRNA target sequence for D2Ertd750e (NM_026412.1,480-498).
gccagagcctgatgttaca

SEQ ID NO: 724917 - DNA, 19 bp, Mus musculus
  siRNA target sequence for D2Ertd750e (NM_026412.1,481-499).
ccagagcctgatgttacaa

SEQ ID NO: 724918 - DNA, 19 bp, Mus musculus
  siRNA target sequence for D2Ertd750e (NM_026412.1,482-500).
cagagcctgatgttacaaa

SEQ ID NO: 724919 - DNA, 19 bp, Mus musculus
  siRNA target sequence for D2Ertd750e (NM_026412.1,487-505).
cctgatgttacaaaagtca

SEQ ID NO: 724920 - DNA, 19 bp, Mus musculus
  siRNA target sequence for D2Ertd750e (NM_026412.1,507-525).
caaatcgagacgagagaat

SEQ ID NO: 724921 - DNA, 19 bp, Mus musculus
  siRNA target sequence for D2Ertd750e (NM_026412.1,573-591).
cagctacaaaccgtttaat

SEQ ID NO: 724922 - DNA, 19 bp, Mus musculus
  siRNA target sequence for D2Ertd750e (NM_026412.1,641-659).
ctgtcaacaagcagttaca

SEQ ID NO: 724923 - DNA, 19 bp, Mus musculus
  siRNA target sequence for D2Ertd750e (NM_026412.1,690-708).
gaaggacctgacacagaaa

SEQ ID NO: 724924 - DNA, 19 bp, Mus musculus
  siRNA target sequence for D2Ertd750e (NM_026412.1,832-850).
ctgctgctcgaaactttga

SEQ ID NO: 724925 - DNA, 19 bp, Mus musculus
  siRNA target sequence for D2Ertd750e (NM_026412.1,834-852).
gctgctcgaaactttgaaa

SEQ ID NO: 724926 - DNA, 19 bp, Mus musculus
  siRNA target sequence for D2Ertd750e (NM_026412.1,853-871).
gacgaactgaaggttttca

SEQ ID NO: 724927 - DNA, 19 bp, Mus musculus
  siRNA target sequence for D2Ertd750e (NM_026412.1,855-873).
cgaactgaaggttttcaat

SEQ ID NO: 724928 - DNA, 19 bp, Mus musculus
  siRNA target sequence for D2Ertd750e (NM_026412.1,986-1004).
ccagtgacttcacaataat

SEQ ID NO: 724929 - DNA, 19 bp, Mus musculus
  siRNA target sequence for D2Ertd750e (NM_026412.1,989-1007).
gtgacttcacaataatcct

SEQ ID NO: 724930 - DNA, 19 bp, Mus musculus
  siRNA target sequence for 2310002J15Rik (NM_026415.1,268-286).
gggcctcttacaaactact

SEQ ID NO: 724931 - DNA, 19 bp, Mus musculus
  siRNA target sequence for 2310002J15Rik (NM_026415.1,390-408).
gtccatcgggactgactta

SEQ ID NO: 724932 - DNA, 19 bp, Mus musculus
  siRNA target sequence for 2310034L04Rik (NM_026417.2,268-286).
cggcggacgcggaagatct

SEQ ID NO: 724933 - DNA, 19 bp, Mus musculus
  siRNA target sequence for 2310034L04Rik (NM_026417.2,303-321).
gctccagatgtcaaattaa

SEQ ID NO: 724934 - DNA, 19 bp, Mus musculus
  siRNA target sequence for 2310034L04Rik (NM_026417.2,307-325).
cagatgtcaaattaaacct

SEQ ID NO: 724935 - DNA, 19 bp, Mus musculus
  siRNA target sequence for 2310034L04Rik (NM_026417.2,327-345).
ggtgtaagcggagatttca

SEQ ID NO: 724936 - DNA, 19 bp, Mus musculus
  siRNA target sequence for 2310034L04Rik (NM_026417.2,328-346).
gtgtaagcggagatttcat

SEQ ID NO: 724937 - DNA, 19 bp, Mus musculus
  siRNA target sequence for 2310034L04Rik (NM_026417.2,330-348).
gtaagcggagatttcatca

SEQ ID NO: 724938 - DNA, 19 bp, Mus musculus
  siRNA target sequence for 2310034L04Rik (NM_026417.2,392-410).
ctggcttttggaagttgaa

SEQ ID NO: 724939 - DNA, 19 bp, Mus musculus
  siRNA target sequence for 2310034L04Rik (NM_026417.2,394-412).
ggcttttggaagttgaaga

SEQ ID NO: 724940 - DNA, 19 bp, Mus musculus
  siRNA target sequence for 2310034L04Rik (NM_026417.2,447-465).
gaattggacatcgatctaa

SEQ ID NO: 724941 - DNA, 19 bp, Mus musculus
  siRNA target sequence for 2310034L04Rik (NM_026417.2,459-477).
gatctaaaggacatttact

SEQ ID NO: 724942 - DNA, 19 bp, Mus musculus
  siRNA target sequence for 2310034L04Rik (NM_026417.2,511-529).
cgctgggttttaatagaca

SEQ ID NO: 724943 - DNA, 19 bp, Mus musculus
  siRNA target sequence for 2310034L04Rik (NM_026417.2,557-575).
gggtccactggctgttgtt

SEQ ID NO: 724944 - DNA, 19 bp, Mus musculus
  siRNA target sequence for 2310034L04Rik (NM_026417.2,581-599).
cttttccatgatatcatta

SEQ ID NO: 724945 - DNA, 19 bp, Mus musculus
  siRNA target sequence for 2310034L04Rik (NM_026417.2,618-636).
gtctcatggattataacca

SEQ ID NO: 724946 - DNA, 19 bp, Mus musculus
  siRNA target sequence for 2310034L04Rik (NM_026417.2,665-683).
cttactggctagagttctt

SEQ ID NO: 724947 - DNA, 19 bp, Mus musculus
  siRNA target sequence for 2310034L04Rik (NM_026417.2,788-806).
ggtatctacacttataaaa

SEQ ID NO: 724948 - DNA, 19 bp, Mus musculus
  siRNA target sequence for 2310034L04Rik (NM_026417.2,849-867).
ctcgtaggtgaagaattca

SEQ ID NO: 724949 - DNA, 19 bp, Mus musculus
  siRNA target sequence for 2310034L04Rik (NM_026417.2,885-903).
ctcatttaccccatctttt

SEQ ID NO: 724950 - DNA, 19 bp, Mus musculus
  siRNA target sequence for 2310034L04Rik (NM_026417.2,887-905).
catttaccccatcttttta

SEQ ID NO: 724951 - DNA, 19 bp, Mus musculus
  siRNA target sequence for Paip2 (NM_026420.1,149-167).
gcccaagcatcatcaatga

SEQ ID NO: 724952 - DNA, 19 bp, Mus musculus
  siRNA target sequence for Paip2 (NM_026420.1,159-177).
catcaatgacgatgtgatt

SEQ ID NO: 724953 - DNA, 19 bp, Mus musculus
  siRNA target sequence for Paip2 (NM_026420.1,162-180).
caatgacgatgtgattatt

SEQ ID NO: 724954 - DNA, 19 bp, Mus musculus
  siRNA target sequence for Paip2 (NM_026420.1,174-192).
gattattaacggtcattct

SEQ ID NO: 724955 - DNA, 19 bp, Mus musculus
  siRNA target sequence for Paip2 (NM_026420.1,193-211).
catgaagaggataatccat

SEQ ID NO: 724956 - DNA, 19 bp, Mus musculus
  siRNA target sequence for Paip2 (NM_026420.1,243-261).
ggaattcaacagacaaata

SEQ ID NO: 724957 - DNA, 19 bp, Mus musculus
  siRNA target sequence for Tpbpb (NM_026429.1,206-224).
caacgtggaatgagtttgt

SEQ ID NO: 724958 - DNA, 19 bp, Mus musculus
  siRNA target sequence for Tpbpb (NM_026429.1,209-227).
cgtggaatgagtttgtcat

SEQ ID NO: 724959 - DNA, 19 bp, Mus musculus
  siRNA target sequence for Tpbpb (NM_026429.1,262-280).
gatggcatcgacatagaat

SEQ ID NO: 724960 - DNA, 19 bp, Mus musculus
  siRNA target sequence for Tpbpb (NM_026429.1,265-283).
ggcatcgacatagaattga

SEQ ID NO: 724961 - DNA, 19 bp, Mus musculus
  siRNA target sequence for Tpbpb (NM_026429.1,267-285).
catcgacatagaattgaga

SEQ ID NO: 724962 - DNA, 19 bp, Mus musculus
  siRNA target sequence for 1810043G02Rik (NM_026431.1,144-162).
gctcacagatatttccata

SEQ ID NO: 724963 - DNA, 19 bp, Mus musculus
  siRNA target sequence for 1810043G02Rik (NM_026431.1,175-193).
cccagcctagaggtaatca

SEQ ID NO: 724964 - DNA, 19 bp, Mus musculus
  siRNA target sequence for 1810043G02Rik (NM_026431.1,284-302).
gtctgaacgagctgttcta

SEQ ID NO: 724965 - DNA, 19 bp, Mus musculus
  siRNA target sequence for 1810043G02Rik (NM_026431.1,656-674).
cgatgaggagtcacaagaa

SEQ ID NO: 724966 - DNA, 19 bp, Mus musculus
  siRNA target sequence for 1810043G02Rik (NM_026431.1,684-702).
cctgactgccatattgcta

SEQ ID NO: 724967 - DNA, 19 bp, Mus musculus
  siRNA target sequence for 1810043G02Rik (NM_026431.1,795-813).
gacatggagtgatttcaga

SEQ ID NO: 724968 - DNA, 19 bp, Mus musculus
  siRNA target sequence for 1810043G02Rik (NM_026431.1,819-837).
cagtatctggaccctttta

SEQ ID NO: 724969 - DNA, 19 bp, Mus musculus
  siRNA target sequence for 1810045K07Rik (NM_026432.2,409-427).
gggatggctacgatgtaca

SEQ ID NO: 724970 - DNA, 19 bp, Mus musculus
  siRNA target sequence for 1810045K07Rik (NM_026432.2,423-441).
gtacagtgggaatgtaaga

SEQ ID NO: 724971 - DNA, 19 bp, Mus musculus
  siRNA target sequence for 1810045K07Rik (NM_026432.2,436-454).
gtaagaccgacttggatat

SEQ ID NO: 724972 - DNA, 19 bp, Mus musculus
  siRNA target sequence for 1810045K07Rik (NM_026432.2,442-460).
ccgacttggatattgcata

SEQ ID NO: 724973 - DNA, 19 bp, Mus musculus
  siRNA target sequence for 1810045K07Rik (NM_026432.2,446-464).
cttggatattgcatacaaa

SEQ ID NO: 724974 - DNA, 19 bp, Mus musculus
  siRNA target sequence for 1810045K07Rik (NM_026432.2,449-467).
ggatattgcatacaaattt

SEQ ID NO: 724975 - DNA, 19 bp, Mus musculus
  siRNA target sequence for 1810045K07Rik (NM_026432.2,502-520).
cctctgaagaccagtatgt

SEQ ID NO: 724976 - DNA, 19 bp, Mus musculus
  siRNA target sequence for 1810045K07Rik (NM_026432.2,536-554).
cggcttggagtacaactta

SEQ ID NO: 724977 - DNA, 19 bp, Mus musculus
  siRNA target sequence for 1810045K07Rik (NM_026432.2,538-556).
gcttggagtacaacttaga

SEQ ID NO: 724978 - DNA, 19 bp, Mus musculus
  siRNA target sequence for 1810045K07Rik (NM_026432.2,539-557).
cttggagtacaacttagat

SEQ ID NO: 724979 - DNA, 19 bp, Mus musculus
  siRNA target sequence for 1810045K07Rik (NM_026432.2,545-563).
gtacaacttagattacaca

SEQ ID NO: 724980 - DNA, 19 bp, Mus musculus
  siRNA target sequence for 1810045K07Rik (NM_026432.2,642-660).
gattcctgtggctttatta

SEQ ID NO: 724981 - DNA, 19 bp, Mus musculus
  siRNA target sequence for 1810045K07Rik (NM_026432.2,681-699).
ctcgcctttgcggtttaca

SEQ ID NO: 724982 - DNA, 19 bp, Mus musculus
  siRNA target sequence for 1810045K07Rik (NM_026432.2,725-743).
gtcgcctccgccgtattct

SEQ ID NO: 724983 - DNA, 19 bp, Mus musculus
  siRNA target sequence for 1810045K07Rik (NM_026432.2,727-745).
cgcctccgccgtattctga

SEQ ID NO: 724984 - DNA, 19 bp, Mus musculus
  siRNA target sequence for 1810045K07Rik (NM_026432.2,796-814).
cgcctcctccgggctttaa

SEQ ID NO: 724985 - DNA, 19 bp, Mus musculus
  siRNA target sequence for 1810045K07Rik (NM_026432.2,798-816).
cctcctccgggctttaagt

SEQ ID NO: 724986 - DNA, 19 bp, Mus musculus
  siRNA target sequence for 1810045K07Rik (NM_026432.2,863-881).
cttcgggagtgcttttgga

SEQ ID NO: 724987 - DNA, 19 bp, Mus musculus
  siRNA target sequence for 1810045K07Rik (NM_026432.2,1076-1094).
ctattgtgcatcctctaat

SEQ ID NO: 724988 - DNA, 19 bp, Mus musculus
  siRNA target sequence for 1810057C19Rik (NM_026433.1,611-629).
gaccgaagaatccacaaaa

SEQ ID NO: 724989 - DNA, 19 bp, Mus musculus
  siRNA target sequence for 1810057C19Rik (NM_026433.1,789-807).
gccgtggtggtcttcatca

SEQ ID NO: 724990 - DNA, 19 bp, Mus musculus
  siRNA target sequence for 1810057C19Rik (NM_026433.1,885-903).
ctgtcctccggactgtttt

SEQ ID NO: 724991 - DNA, 19 bp, Mus musculus
  siRNA target sequence for 1810057C19Rik (NM_026433.1,887-905).
gtcctccggactgttttta

SEQ ID NO: 724992 - DNA, 19 bp, Mus musculus
  siRNA target sequence for 1810057C19Rik (NM_026433.1,889-907).
cctccggactgtttttact

SEQ ID NO: 724993 - DNA, 19 bp, Mus musculus
  siRNA target sequence for 1810057C19Rik (NM_026433.1,890-908).
ctccggactgtttttacta

SEQ ID NO: 724994 - DNA, 19 bp, Mus musculus
  siRNA target sequence for 1810057C19Rik (NM_026433.1,974-992).
gaccgctcttgtggtaaat

SEQ ID NO: 724995 - DNA, 19 bp, Mus musculus
  siRNA target sequence for 1810054O13Rik (NM_026436.1,252-270).
gggtcagcgcccttatcaa

SEQ ID NO: 724996 - DNA, 19 bp, Mus musculus
  siRNA target sequence for 1810054O13Rik (NM_026436.1,254-272).
gtcagcgcccttatcaagt

SEQ ID NO: 724997 - DNA, 19 bp, Mus musculus
  siRNA target sequence for 1810054O13Rik (NM_026436.1,355-373).
cttcgtgggacttgtcttt

SEQ ID NO: 724998 - DNA, 19 bp, Mus musculus
  siRNA target sequence for 1810054O13Rik (NM_026436.1,403-421).
gcaggaccacggatacttt

SEQ ID NO: 724999 - DNA, 19 bp, Mus musculus
  siRNA target sequence for 1810054O13Rik (NM_026436.1,409-427).
ccacggatactttgaacat

SEQ ID NO: 725000 - DNA, 19 bp, Mus musculus
  siRNA target sequence for 1810054O13Rik (NM_026436.1,766-784).
gatcatgtctacctactat

SEQ ID NO: 725001 - DNA, 19 bp, Mus musculus
  siRNA target sequence for 1810055E12Rik (NM_026437.1,60-78).
gatcgaaaaggactctaat

SEQ ID NO: 725002 - DNA, 19 bp, Mus musculus
  siRNA target sequence for 1810055E12Rik (NM_026437.1,63-81).
cgaaaaggactctaatgga

SEQ ID NO: 725003 - DNA, 19 bp, Mus musculus
  siRNA target sequence for 1810055E12Rik (NM_026437.1,143-161).
gaaaatgctgcctaactga

SEQ ID NO: 725004 - DNA, 19 bp, Mus musculus
  siRNA target sequence for 1810055E12Rik (NM_026437.1,261-279).
ggtgactcatttttctatt

SEQ ID NO: 725005 - DNA, 19 bp, Mus musculus
  siRNA target sequence for 1810055E12Rik (NM_026437.1,321-339).
cttcactaggatattgtgt

SEQ ID NO: 725006 - DNA, 19 bp, Mus musculus
  siRNA target sequence for 1810055E12Rik (NM_026437.1,329-347).
ggatattgtgtagaatata

SEQ ID NO: 725007 - DNA, 19 bp, Mus musculus
  siRNA target sequence for 1810055E12Rik (NM_026437.1,358-376).
ggaagtccggttaaaatga

SEQ ID NO: 725008 - DNA, 19 bp, Mus musculus
  siRNA target sequence for 1810055E12Rik (NM_026437.1,359-377).
gaagtccggttaaaatgat

SEQ ID NO: 725009 - DNA, 19 bp, Mus musculus
  siRNA target sequence for 1810055E12Rik (NM_026437.1,438-456).
ccttagtagagactttgat

SEQ ID NO: 725010 - DNA, 19 bp, Mus musculus
  siRNA target sequence for 1810055E12Rik (NM_026437.1,471-489).
ccttgctggctccatcaaa

SEQ ID NO: 725011 - DNA, 19 bp, Mus musculus
  siRNA target sequence for 1810055E12Rik (NM_026437.1,492-510).
cattgtatctcaatttgga

SEQ ID NO: 725012 - DNA, 19 bp, Mus musculus
  siRNA target sequence for 1810055E12Rik (NM_026437.1,693-711).
gatgtgcacaggctacatt

SEQ ID NO: 725013 - DNA, 19 bp, Mus musculus
  siRNA target sequence for 1810055E12Rik (NM_026437.1,705-723).
ctacattgctggctttgta

SEQ ID NO: 725014 - DNA, 19 bp, Mus musculus
  siRNA target sequence for 1810055E12Rik (NM_026437.1,791-809).
ccatcgctccacttgcaaa

SEQ ID NO: 725015 - DNA, 19 bp, Mus musculus
  siRNA target sequence for 1810055E12Rik (NM_026437.1,821-839).
cgatgggcaaactgcataa

SEQ ID NO: 725016 - DNA, 19 bp, Mus musculus
  siRNA target sequence for 1810055E12Rik (NM_026437.1,822-840).
gatgggcaaactgcataaa

SEQ ID NO: 725017 - DNA, 19 bp, Mus musculus
  siRNA target sequence for 1810055E12Rik (NM_026437.1,826-844).
ggcaaactgcataaagaga

SEQ ID NO: 725018 - DNA, 19 bp, Mus musculus
  siRNA target sequence for 1810055E12Rik (NM_026437.1,827-845).
gcaaactgcataaagagat

SEQ ID NO: 725019 - DNA, 19 bp, Mus musculus
  siRNA target sequence for 1810055E12Rik (NM_026437.1,906-924).
ggacattgccctaaaaaca

SEQ ID NO: 725020 - DNA, 19 bp, Mus musculus
  siRNA target sequence for 1810055E12Rik (NM_026437.1,907-925).
gacattgccctaaaaacaa

SEQ ID NO: 725021 - DNA, 19 bp, Mus musculus
  siRNA target sequence for 1810055E12Rik (NM_026437.1,967-985).
gatgatgggggaaaagtca

SEQ ID NO: 725022 - DNA, 19 bp, Mus musculus
  siRNA target sequence for 1810055E12Rik (NM_026437.1,977-995).
gaaaagtcatcctcaatgt

SEQ ID NO: 725023 - DNA, 19 bp, Mus musculus
  siRNA target sequence for 1810055E12Rik (NM_026437.1,1021-1039).
ccacccgcaacagaaaact

SEQ ID NO: 725024 - DNA, 19 bp, Mus musculus
  siRNA target sequence for 1810055E12Rik (NM_026437.1,1022-1040).
cacccgcaacagaaaactt

SEQ ID NO: 725025 - DNA, 19 bp, Mus musculus
  siRNA target sequence for 2010317E03Rik (NM_026438.2,180-198).
gaaagggcagtacatttct

SEQ ID NO: 725026 - DNA, 19 bp, Mus musculus
  siRNA target sequence for 2010317E03Rik (NM_026438.2,263-281).
gctggtccaacgccaaaat

SEQ ID NO: 725027 - DNA, 19 bp, Mus musculus
  siRNA target sequence for 2010317E03Rik (NM_026438.2,266-284).
ggtccaacgccaaaatgga

SEQ ID NO: 725028 - DNA, 19 bp, Mus musculus
  siRNA target sequence for 2010317E03Rik (NM_026438.2,289-307).
gctacaaaggaccctttaa

SEQ ID NO: 725029 - DNA, 19 bp, Mus musculus
  siRNA target sequence for 2010317E03Rik (NM_026438.2,290-308).
ctacaaaggaccctttaaa

SEQ ID NO: 725030 - DNA, 19 bp, Mus musculus
  siRNA target sequence for 2010317E03Rik (NM_026438.2,311-329).
caatcaagcaagatgtgaa

SEQ ID NO: 725031 - DNA, 19 bp, Mus musculus
  siRNA target sequence for 2010317E03Rik (NM_026438.2,343-361).
cgctatgtggcgaatctgt

SEQ ID NO: 725032 - DNA, 19 bp, Mus musculus
  siRNA target sequence for 2010317E03Rik (NM_026438.2,344-362).
gctatgtggcgaatctgtt

SEQ ID NO: 725033 - DNA, 19 bp, Mus musculus
  siRNA target sequence for 2010317E03Rik (NM_026438.2,352-370).
gcgaatctgttcccttata

SEQ ID NO: 725034 - DNA, 19 bp, Mus musculus
  siRNA target sequence for 2010317E03Rik (NM_026438.2,353-371).
cgaatctgttcccttataa

SEQ ID NO: 725035 - DNA, 19 bp, Mus musculus
  siRNA target sequence for 2010317E03Rik (NM_026438.2,497-515).
gtgccagaggtgagataat

SEQ ID NO: 725036 - DNA, 19 bp, Mus musculus
  siRNA target sequence for 2010317E03Rik (NM_026438.2,569-587).
ggaaggtcattgccattaa

SEQ ID NO: 725037 - DNA, 19 bp, Mus musculus
  siRNA target sequence for 2010317E03Rik (NM_026438.2,598-616).
ccggacgcagccaattata

SEQ ID NO: 725038 - DNA, 19 bp, Mus musculus
  siRNA target sequence for 2010317E03Rik (NM_026438.2,599-617).
cggacgcagccaattataa

SEQ ID NO: 725039 - DNA, 19 bp, Mus musculus
  siRNA target sequence for 2010317E03Rik (NM_026438.2,600-618).
ggacgcagccaattataaa

SEQ ID NO: 725040 - DNA, 19 bp, Mus musculus
  siRNA target sequence for 2010317E03Rik (NM_026438.2,604-622).
gcagccaattataaagata

SEQ ID NO: 725041 - DNA, 19 bp, Mus musculus
  siRNA target sequence for 2010317E03Rik (NM_026438.2,605-623).
cagccaattataaagatat

SEQ ID NO: 725042 - DNA, 19 bp, Mus musculus
  siRNA target sequence for 2010317E03Rik (NM_026438.2,607-625).
gccaattataaagatattt

SEQ ID NO: 725043 - DNA, 19 bp, Mus musculus
  siRNA target sequence for 2010317E03Rik (NM_026438.2,638-656).
ggctaaaacccggctattt

SEQ ID NO: 725044 - DNA, 19 bp, Mus musculus
  siRNA target sequence for 2010317E03Rik (NM_026438.2,639-657).
gctaaaacccggctattta

SEQ ID NO: 725045 - DNA, 19 bp, Mus musculus
  siRNA target sequence for 2010317E03Rik (NM_026438.2,651-669).
ctatttagaagctactgtt

SEQ ID NO: 725046 - DNA, 19 bp, Mus musculus
  siRNA target sequence for 2010317E03Rik (NM_026438.2,721-739).
gcattcaatgcagaattta

SEQ ID NO: 725047 - DNA, 19 bp, Mus musculus
  siRNA target sequence for 2010317E03Rik (NM_026438.2,750-768).
ctttgcagttgacattatt

SEQ ID NO: 725048 - DNA, 19 bp, Mus musculus
  siRNA target sequence for 2010317E03Rik (NM_026438.2,754-772).
gcagttgacattattaaaa

SEQ ID NO: 725049 - DNA, 19 bp, Mus musculus
  siRNA target sequence for 2010317E03Rik (NM_026438.2,773-791).
gcacccacgattattggaa

SEQ ID NO: 725050 - DNA, 19 bp, Mus musculus
  siRNA target sequence for 2010317E03Rik (NM_026438.2,778-796).
cacgattattggaaagcat

SEQ ID NO: 725051 - DNA, 19 bp, Mus musculus
  siRNA target sequence for 2010317E03Rik (NM_026438.2,793-811).
gcattagtgactaagaaaa

SEQ ID NO: 725052 - DNA, 19 bp, Mus musculus
  siRNA target sequence for 2010317E03Rik (NM_026438.2,823-841).
ggaatcagttgcatgaaca

SEQ ID NO: 725053 - DNA, 19 bp, Mus musculus
  siRNA target sequence for 2010317E03Rik (NM_026438.2,906-924).
gccaccaccatgtgaatct

SEQ ID NO: 725054 - DNA, 19 bp, Mus musculus
  siRNA target sequence for 2010317E03Rik (NM_026438.2,941-959).
cagatgtggataaatggtt

SEQ ID NO: 725055 - DNA, 19 bp, Mus musculus
  siRNA target sequence for 2610001E17Rik (NM_026439.1,369-387).
ccacactggacggaaagta

SEQ ID NO: 725056 - DNA, 19 bp, Mus musculus
  siRNA target sequence for 2610001E17Rik (NM_026439.1,374-392).
ctggacggaaagtaccttt

SEQ ID NO: 725057 - DNA, 19 bp, Mus musculus
  siRNA target sequence for 2610001E17Rik (NM_026439.1,379-397).
cggaaagtacctttggttt

SEQ ID NO: 725058 - DNA, 19 bp, Mus musculus
  siRNA target sequence for 2610001E17Rik (NM_026439.1,444-462).
gtctggtggagttgagaaa

SEQ ID NO: 725059 - DNA, 19 bp, Mus musculus
  siRNA target sequence for 2610001E17Rik (NM_026439.1,509-527).
gtgtaccagtgttgagatt

SEQ ID NO: 725060 - DNA, 19 bp, Mus musculus
  siRNA target sequence for 2610001E17Rik (NM_026439.1,680-698).
ctagctctcccaatatcct

SEQ ID NO: 725061 - DNA, 19 bp, Mus musculus
  siRNA target sequence for 2610001E17Rik (NM_026439.1,758-776).
gctactaccgcctcatgat

SEQ ID NO: 725062 - DNA, 19 bp, Mus musculus
  siRNA target sequence for 2610001E17Rik (NM_026439.1,818-836).
ggcacatccaacagattgt

SEQ ID NO: 725063 - DNA, 19 bp, Mus musculus
  siRNA target sequence for 2610001E17Rik (NM_026439.1,1041-1059).
catgtatgaggtcattgat

SEQ ID NO: 725064 - DNA, 19 bp, Mus musculus
  siRNA target sequence for 2610001E17Rik (NM_026439.1,1072-1090).
cgcaggatcgagaaaatca

SEQ ID NO: 725065 - DNA, 19 bp, Mus musculus
  siRNA target sequence for 2610001E17Rik (NM_026439.1,1127-1145).
gcatagagggccatgtagt

SEQ ID NO: 725066 - DNA, 19 bp, Mus musculus
  siRNA target sequence for 2610001E17Rik (NM_026439.1,1186-1204).
ggcctgggcggtgataaga

SEQ ID NO: 725067 - DNA, 19 bp, Mus musculus
  siRNA target sequence for 2610001E17Rik (NM_026439.1,1355-1373).
catcccgggtagtgacaat

SEQ ID NO: 725068 - DNA, 19 bp, Mus musculus
  siRNA target sequence for 2610001E17Rik (NM_026439.1,1502-1520).
ccgtctcagagcagctata

SEQ ID NO: 725069 - DNA, 19 bp, Mus musculus
  siRNA target sequence for 2610001E17Rik (NM_026439.1,1744-1762).
gggaagctgcccaaaaaga

SEQ ID NO: 725070 - DNA, 19 bp, Mus musculus
  siRNA target sequence for 2610001E17Rik (NM_026439.1,1769-1787).
gaattctcagcaacgaata

SEQ ID NO: 725071 - DNA, 19 bp, Mus musculus
  siRNA target sequence for 2610001E17Rik (NM_026439.1,1871-1889).
ccaaggagtcgaaaaagct

SEQ ID NO: 725072 - DNA, 19 bp, Mus musculus
  siRNA target sequence for 2610001E17Rik (NM_026439.1,1872-1890).
caaggagtcgaaaaagctt

SEQ ID NO: 725073 - DNA, 19 bp, Mus musculus
  siRNA target sequence for 2610001E17Rik (NM_026439.1,1876-1894).
gagtcgaaaaagcttgaaa

SEQ ID NO: 725074 - DNA, 19 bp, Mus musculus
  siRNA target sequence for 2610001E17Rik (NM_026439.1,1880-1898).
cgaaaaagcttgaaaagct

SEQ ID NO: 725075 - DNA, 19 bp, Mus musculus
  siRNA target sequence for 2610001E17Rik (NM_026439.1,1940-1958).
caaaacaagacaagttact

SEQ ID NO: 725076 - DNA, 19 bp, Mus musculus
  siRNA target sequence for 2610001E17Rik (NM_026439.1,2061-2079).
gaagcccaccgcaaaacat

SEQ ID NO: 725077 - DNA, 19 bp, Mus musculus
  siRNA target sequence for 2610001E17Rik (NM_026439.1,2276-2294).
gctccatgaaaattgatca

SEQ ID NO: 725078 - DNA, 19 bp, Mus musculus
  siRNA target sequence for 2610001E17Rik (NM_026439.1,2290-2308).
gatcacttccagctagata

SEQ ID NO: 725079 - DNA, 19 bp, Mus musculus
  siRNA target sequence for 2610001E17Rik (NM_026439.1,2322-2340).
gcgtgtggtggatgatgat

SEQ ID NO: 725080 - DNA, 19 bp, Mus musculus
  siRNA target sequence for 2610001E17Rik (NM_026439.1,2387-2405).
gaatgacctacgatgactt

SEQ ID NO: 725081 - DNA, 19 bp, Mus musculus
  siRNA target sequence for 2610001E17Rik (NM_026439.1,2428-2446).
gatctgagagtcaagcaat

SEQ ID NO: 725082 - DNA, 19 bp, Mus musculus
  siRNA target sequence for 2610001E17Rik (NM_026439.1,2448-2466).
ctacgaagtgccaatagca

SEQ ID NO: 725083 - DNA, 19 bp, Mus musculus
  siRNA target sequence for 2610001E17Rik (NM_026439.1,2472-2490).
gtccgtgtttgatcttatt

SEQ ID NO: 725084 - DNA, 19 bp, Mus musculus
  siRNA target sequence for 2610001E17Rik (NM_026439.1,2474-2492).
ccgtgtttgatcttattga

SEQ ID NO: 725085 - DNA, 19 bp, Mus musculus
  siRNA target sequence for 2610001E17Rik (NM_026439.1,2495-2513).
ctttccaatcccgaatcaa

SEQ ID NO: 725086 - DNA, 19 bp, Mus musculus
  siRNA target sequence for 2610001E17Rik (NM_026439.1,2500-2518).
caatcccgaatcaaagata

SEQ ID NO: 725087 - DNA, 19 bp, Mus musculus
  siRNA target sequence for 2610001E17Rik (NM_026439.1,2504-2522).
cccgaatcaaagatatgga

SEQ ID NO: 725088 - DNA, 19 bp, Mus musculus
  siRNA target sequence for 2610001E17Rik (NM_026439.1,2673-2691).
caacggtcaggcatgcaat

SEQ ID NO: 725089 - DNA, 19 bp, Mus musculus
  siRNA target sequence for 2610001E17Rik (NM_026439.1,2676-2694).
cggtcaggcatgcaatttt

SEQ ID NO: 725090 - DNA, 19 bp, Mus musculus
  siRNA target sequence for 2610001E17Rik (NM_026439.1,2695-2713).
ggtctgcgacatataacca

SEQ ID NO: 725091 - DNA, 19 bp, Mus musculus
  siRNA target sequence for 2610001E17Rik (NM_026439.1,2701-2719).
cgacatataaccattctga

SEQ ID NO: 725092 - DNA, 19 bp, Mus musculus
  siRNA target sequence for 2610001E17Rik (NM_026439.1,2809-2827).
gcccacttggtcaaagata

SEQ ID NO: 725093 - DNA, 19 bp, Mus musculus
  siRNA target sequence for 2610001E17Rik (NM_026439.1,2810-2828).
cccacttggtcaaagatat

SEQ ID NO: 725094 - DNA, 19 bp, Mus musculus
  siRNA target sequence for 2610001E17Rik (NM_026439.1,2820-2838).
caaagatatccgcaactat

SEQ ID NO: 725095 - DNA, 19 bp, Mus musculus
  siRNA target sequence for 2610001E17Rik (NM_026439.1,2845-2863).
gtgagcccagagtacttct

SEQ ID NO: 725096 - DNA, 19 bp, Mus musculus
  siRNA target sequence for 2610001E17Rik (NM_026439.1,2924-2942).
cgatggtcatcgtgtatga

SEQ ID NO: 725097 - DNA, 19 bp, Mus musculus
  siRNA target sequence for 2610001E17Rik (NM_026439.1,2929-2947).
gtcatcgtgtatgacttaa

SEQ ID NO: 725098 - DNA, 19 bp, Mus musculus
  siRNA target sequence for 2610001E17Rik (NM_026439.1,2931-2949).
catcgtgtatgacttaatt

SEQ ID NO: 725099 - DNA, 19 bp, Mus musculus
  siRNA target sequence for 2610001E17Rik (NM_026439.1,2934-2952).
cgtgtatgacttaattgat

SEQ ID NO: 725100 - DNA, 19 bp, Mus musculus
  siRNA target sequence for 2610001E17Rik (NM_026439.1,2935-2953).
gtgtatgacttaattgatt

SEQ ID NO: 725101 - DNA, 19 bp, Mus musculus
  siRNA target sequence for 2610001E17Rik (NM_026439.1,3000-3018).
gatgcgctgcccagaagat

SEQ ID NO: 725102 - DNA, 19 bp, Mus musculus
  siRNA target sequence for 2610001E17Rik (NM_026439.1,3029-3047).
gatatggttaccatagtta

SEQ ID NO: 725103 - DNA, 19 bp, Mus musculus
  siRNA target sequence for 2610001E17Rik (NM_026439.1,3075-3093).
ggatgactaccgtcatcat

SEQ ID NO: 725104 - DNA, 19 bp, Mus musculus
  siRNA target sequence for 2610001E17Rik (NM_026439.1,3079-3097).
gactaccgtcatcatgaaa

SEQ ID NO: 725105 - DNA, 19 bp, Mus musculus
  siRNA target sequence for 2610001E17Rik (NM_026439.1,3081-3099).
ctaccgtcatcatgaaagt

SEQ ID NO: 725106 - DNA, 19 bp, Mus musculus
  siRNA target sequence for 2010110K16Rik (NM_026442.2,75-93).
gagacacgtcgagaaagat

SEQ ID NO: 725107 - DNA, 19 bp, Mus musculus
  siRNA target sequence for 2010110K16Rik (NM_026442.2,77-95).
gacacgtcgagaaagatgt

SEQ ID NO: 725108 - DNA, 19 bp, Mus musculus
  siRNA target sequence for 2010110K16Rik (NM_026442.2,94-112).
gttctgatcccaaagataa

SEQ ID NO: 725109 - DNA, 19 bp, Mus musculus
  siRNA target sequence for 2010110K16Rik (NM_026442.2,134-152).
ggtgctccgaacaagttga

SEQ ID NO: 725110 - DNA, 19 bp, Mus musculus
  siRNA target sequence for 2010110K16Rik (NM_026442.2,135-153).
gtgctccgaacaagttgaa

SEQ ID NO: 725111 - DNA, 19 bp, Mus musculus
  siRNA target sequence for 2010110K16Rik (NM_026442.2,137-155).
gctccgaacaagttgaaga

SEQ ID NO: 725112 - DNA, 19 bp, Mus musculus
  siRNA target sequence for 2010110K16Rik (NM_026442.2,140-158).
ccgaacaagttgaagattt

SEQ ID NO: 725113 - DNA, 19 bp, Mus musculus
  siRNA target sequence for 2010110K16Rik (NM_026442.2,179-197).
ctgggatccttatggtatt

SEQ ID NO: 725114 - DNA, 19 bp, Mus musculus
  siRNA target sequence for 2010110K16Rik (NM_026442.2,181-199).
gggatccttatggtattaa

SEQ ID NO: 725115 - DNA, 19 bp, Mus musculus
  siRNA target sequence for 2010110K16Rik (NM_026442.2,275-293).
gcaaactggagtatctcaa

SEQ ID NO: 725116 - DNA, 19 bp, Mus musculus
  siRNA target sequence for 1700020C11Rik (NM_026443.2,316-334).
ctggccgatgccatagaca

SEQ ID NO: 725117 - DNA, 19 bp, Mus musculus
  siRNA target sequence for 1700020C11Rik (NM_026443.2,318-336).
ggccgatgccatagacaaa

SEQ ID NO: 725118 - DNA, 19 bp, Mus musculus
  siRNA target sequence for 1700020C11Rik (NM_026443.2,470-488).
gtgctgcctctctctatgt

SEQ ID NO: 725119 - DNA, 19 bp, Mus musculus
  siRNA target sequence for 1700020C11Rik (NM_026443.2,514-532).
ccgactgtccgcaaatgga

SEQ ID NO: 725120 - DNA, 19 bp, Mus musculus
  siRNA target sequence for 1700020C11Rik (NM_026443.2,553-571).
ctggccatccccgtcataa

SEQ ID NO: 725121 - DNA, 19 bp, Mus musculus
  siRNA target sequence for 1700020C11Rik (NM_026443.2,557-575).
ccatccccgtcataatcca

SEQ ID NO: 725122 - DNA, 19 bp, Mus musculus
  siRNA target sequence for Galnt15 (NM_026449.1,207-225).
gtcataattcagggtttat

SEQ ID NO: 725123 - DNA, 19 bp, Mus musculus
  siRNA target sequence for Galnt15 (NM_026449.1,272-290).
gtttttgcaccttgaacaa

SEQ ID NO: 725124 - DNA, 19 bp, Mus musculus
  siRNA target sequence for Galnt15 (NM_026449.1,332-350).
gaggtcactcggaaaaaat

SEQ ID NO: 725125 - DNA, 19 bp, Mus musculus
  siRNA target sequence for Galnt15 (NM_026449.1,387-405).
catgatgaggttaactttt

SEQ ID NO: 725126 - DNA, 19 bp, Mus musculus
  siRNA target sequence for Galnt15 (NM_026449.1,426-444).
ggattgaggcgatatggat

SEQ ID NO: 725127 - DNA, 19 bp, Mus musculus
  siRNA target sequence for Galnt15 (NM_026449.1,427-445).
gattgaggcgatatggatt

SEQ ID NO: 725128 - DNA, 19 bp, Mus musculus
  siRNA target sequence for Galnt15 (NM_026449.1,431-449).
gaggcgatatggattaaat

SEQ ID NO: 725129 - DNA, 19 bp, Mus musculus
  siRNA target sequence for Galnt15 (NM_026449.1,488-506).
gccagattccagggataaa

SEQ ID NO: 725130 - DNA, 19 bp, Mus musculus
  siRNA target sequence for Galnt15 (NM_026449.1,654-672).
gtggatgacatgagtgaat

SEQ ID NO: 725131 - DNA, 19 bp, Mus musculus
  siRNA target sequence for Galnt15 (NM_026449.1,686-704).
ggacaaactggactattat

SEQ ID NO: 725132 - DNA, 19 bp, Mus musculus
  siRNA target sequence for Galnt15 (NM_026449.1,753-771).
gagggtcttatcagatcaa

SEQ ID NO: 725133 - DNA, 19 bp, Mus musculus
  siRNA target sequence for Galnt15 (NM_026449.1,757-775).
gtcttatcagatcaaagat

SEQ ID NO: 725134 - DNA, 19 bp, Mus musculus
  siRNA target sequence for Galnt15 (NM_026449.1,874-892).
ctaaggatcacaaaatggt

SEQ ID NO: 725135 - DNA, 19 bp, Mus musculus
  siRNA target sequence for Galnt15 (NM_026449.1,893-911).
ggtatgccctattatcgat

SEQ ID NO: 725136 - DNA, 19 bp, Mus musculus
  siRNA target sequence for Galnt15 (NM_026449.1,908-926).
cgatgtcatcaatgaatta

SEQ ID NO: 725137 - DNA, 19 bp, Mus musculus
  siRNA target sequence for Galnt15 (NM_026449.1,912-930).
gtcatcaatgaattaacct

SEQ ID NO: 725138 - DNA, 19 bp, Mus musculus
  siRNA target sequence for Galnt15 (NM_026449.1,1046-1064).
ccggtcacctgcaatgaca

SEQ ID NO: 725139 - DNA, 19 bp, Mus musculus
  siRNA target sequence for Galnt15 (NM_026449.1,1065-1083).
ggaggaatttttgctataa

SEQ ID NO: 725140 - DNA, 19 bp, Mus musculus
  siRNA target sequence for Galnt15 (NM_026449.1,1077-1095).
gctataaacagacattatt

SEQ ID NO: 725141 - DNA, 19 bp, Mus musculus
  siRNA target sequence for Galnt15 (NM_026449.1,1118-1136).
caacggcatggatatttgt

SEQ ID NO: 725142 - DNA, 19 bp, Mus musculus
  siRNA target sequence for Galnt15 (NM_026449.1,1149-1167).
gtggaactttcgctaagaa

SEQ ID NO: 725143 - DNA, 19 bp, Mus musculus
  siRNA target sequence for Galnt15 (NM_026449.1,1152-1170).
gaactttcgctaagaatct

SEQ ID NO: 725144 - DNA, 19 bp, Mus musculus
  siRNA target sequence for Galnt15 (NM_026449.1,1201-1219).
cttgctctcgggttggata

SEQ ID NO: 725145 - DNA, 19 bp, Mus musculus
  siRNA target sequence for Galnt15 (NM_026449.1,1204-1222).
gctctcgggttggatataa

SEQ ID NO: 725146 - DNA, 19 bp, Mus musculus
  siRNA target sequence for Galnt15 (NM_026449.1,1209-1227).
cgggttggatataacagta

SEQ ID NO: 725147 - DNA, 19 bp, Mus musculus
  siRNA target sequence for Galnt15 (NM_026449.1,1210-1228).
gggttggatataacagtaa

SEQ ID NO: 725148 - DNA, 19 bp, Mus musculus
  siRNA target sequence for Galnt15 (NM_026449.1,1259-1277).
gagtgccttgtcaaggaat

SEQ ID NO: 725149 - DNA, 19 bp, Mus musculus
  siRNA target sequence for Galnt15 (NM_026449.1,1261-1279).
gtgccttgtcaaggaattt

SEQ ID NO: 725150 - DNA, 19 bp, Mus musculus
  siRNA target sequence for Galnt15 (NM_026449.1,1264-1282).
ccttgtcaaggaatttact

SEQ ID NO: 725151 - DNA, 19 bp, Mus musculus
  siRNA target sequence for Galnt15 (NM_026449.1,1293-1311).
cacgtctggctagatgaat

SEQ ID NO: 725152 - DNA, 19 bp, Mus musculus
  siRNA target sequence for Galnt15 (NM_026449.1,1332-1350).
caaagaccttctttgacat

SEQ ID NO: 725153 - DNA, 19 bp, Mus musculus
  siRNA target sequence for Galnt15 (NM_026449.1,1374-1392).
gagcgcgtggaattaagga

SEQ ID NO: 725154 - DNA, 19 bp, Mus musculus
  siRNA target sequence for Galnt15 (NM_026449.1,1376-1394).
gcgcgtggaattaaggaaa

SEQ ID NO: 725155 - DNA, 19 bp, Mus musculus
  siRNA target sequence for Galnt15 (NM_026449.1,1395-1413).
cgcctgggttgcaagtcat

SEQ ID NO: 725156 - DNA, 19 bp, Mus musculus
  siRNA target sequence for Galnt15 (NM_026449.1,1396-1414).
gcctgggttgcaagtcatt

SEQ ID NO: 725157 - DNA, 19 bp, Mus musculus
  siRNA target sequence for Galnt15 (NM_026449.1,1445-1463).
gttggagccatttaacaca

SEQ ID NO: 725158 - DNA, 19 bp, Mus musculus
  siRNA target sequence for 1700025J14Rik (NM_026450.2,422-440).
gaattagagccctctcttt

SEQ ID NO: 725159 - DNA, 19 bp, Mus musculus
  siRNA target sequence for 1700025J14Rik (NM_026450.2,616-634).
gacaagtccaacgagaatt

SEQ ID NO: 725160 - DNA, 19 bp, Mus musculus
  siRNA target sequence for 1700025J14Rik (NM_026450.2,621-639).
gtccaacgagaattctgaa

SEQ ID NO: 725161 - DNA, 19 bp, Mus musculus
  siRNA target sequence for 1700025J14Rik (NM_026450.2,687-705).
gcgacagtaaacaaacaga

SEQ ID NO: 725162 - DNA, 19 bp, Mus musculus
  siRNA target sequence for 1700025J14Rik (NM_026450.2,792-810).
cgctagggcttgatgatgt

SEQ ID NO: 725163 - DNA, 19 bp, Mus musculus
  siRNA target sequence for 1700025J14Rik (NM_026450.2,798-816).
ggcttgatgatgtcacaaa

SEQ ID NO: 725164 - DNA, 19 bp, Mus musculus
  siRNA target sequence for 1700025J14Rik (NM_026450.2,974-992).
gtccatcagaggaaacact

SEQ ID NO: 725165 - DNA, 19 bp, Mus musculus
  siRNA target sequence for 1700025J14Rik (NM_026450.2,1023-1041).
gtgggcgaggcttcatgta

SEQ ID NO: 725166 - DNA, 19 bp, Mus musculus
  siRNA target sequence for 1700025J14Rik (NM_026450.2,1082-1100).
ggagagagcccccttgttt

SEQ ID NO: 725167 - DNA, 19 bp, Mus musculus
  siRNA target sequence for 1700025J14Rik (NM_026450.2,1153-1171).
gcggactcacctggataaa

SEQ ID NO: 725168 - DNA, 19 bp, Mus musculus
  siRNA target sequence for 1700025J14Rik (NM_026450.2,1154-1172).
cggactcacctggataaaa

SEQ ID NO: 725169 - DNA, 19 bp, Mus musculus
  siRNA target sequence for 1700025J14Rik (NM_026450.2,1155-1173).
ggactcacctggataaaaa

SEQ ID NO: 725170 - DNA, 19 bp, Mus musculus
  siRNA target sequence for 1700025J14Rik (NM_026450.2,1463-1481).
cagaaggttaacctcatta

SEQ ID NO: 725171 - DNA, 19 bp, Mus musculus
  siRNA target sequence for 1700025J14Rik (NM_026450.2,1668-1686).
caggggagttaccttttct

SEQ ID NO: 725172 - DNA, 19 bp, Mus musculus
  siRNA target sequence for 1700025J14Rik (NM_026450.2,1670-1688).
ggggagttaccttttctgt

SEQ ID NO: 725173 - DNA, 19 bp, Mus musculus
  siRNA target sequence for 1700025J14Rik (NM_026450.2,1698-1716).
gtgggcgtgcgtttgtaaa

SEQ ID NO: 725174 - DNA, 19 bp, Mus musculus
  siRNA target sequence for 1700025J14Rik (NM_026450.2,1701-1719).
ggcgtgcgtttgtaaagca

SEQ ID NO: 725175 - DNA, 19 bp, Mus musculus
  siRNA target sequence for 1700025J14Rik (NM_026450.2,1752-1770).
cagggtgggagaaacctta

SEQ ID NO: 725176 - DNA, 19 bp, Mus musculus
  siRNA target sequence for 1700025J14Rik (NM_026450.2,1961-1979).
cgcttcaggcagaagttca

SEQ ID NO: 725177 - DNA, 19 bp, Mus musculus
  siRNA target sequence for 1700025J14Rik (NM_026450.2,2037-2055).
gtgggcgagcatttggaaa

SEQ ID NO: 725178 - DNA, 19 bp, Mus musculus
  siRNA target sequence for 1700025J14Rik (NM_026450.2,2056-2074).
gaaggtctctctcattaga

SEQ ID NO: 725179 - DNA, 19 bp, Mus musculus
  siRNA target sequence for 1700025J14Rik (NM_026450.2,2213-2231).
gcatttagccaaaagttca

SEQ ID NO: 725180 - DNA, 19 bp, Mus musculus
  siRNA target sequence for 1600012H06Rik (NM_026451.1,234-252).
ggtgaccctggtaaaatgt

SEQ ID NO: 725181 - DNA, 19 bp, Mus musculus
  siRNA target sequence for 1600012H06Rik (NM_026451.1,235-253).
gtgaccctggtaaaatgtt

SEQ ID NO: 725182 - DNA, 19 bp, Mus musculus
  siRNA target sequence for 1600012H06Rik (NM_026451.1,342-360).
gaaccatgagggtaaaatt

SEQ ID NO: 725183 - DNA, 19 bp, Mus musculus
  siRNA target sequence for 1600012H06Rik (NM_026451.1,464-482).
gccaggatgtggtctctat

SEQ ID NO: 725184 - DNA, 19 bp, Mus musculus
  siRNA target sequence for 1600012H06Rik (NM_026451.1,465-483).
ccaggatgtggtctctata

SEQ ID NO: 725185 - DNA, 19 bp, Mus musculus
  siRNA target sequence for 1600012H06Rik (NM_026451.1,499-517).
cgaccggtcgggataggaa

SEQ ID NO: 725186 - DNA, 19 bp, Mus musculus
  siRNA target sequence for 1600012H06Rik (NM_026451.1,500-518).
gaccggtcgggataggaat

SEQ ID NO: 725187 - DNA, 19 bp, Mus musculus
  siRNA target sequence for 1600012H06Rik (NM_026451.1,502-520).
ccggtcgggataggaattt

SEQ ID NO: 725188 - DNA, 19 bp, Mus musculus
  siRNA target sequence for 1600012H06Rik (NM_026451.1,503-521).
cggtcgggataggaattta

SEQ ID NO: 725189 - DNA, 19 bp, Mus musculus
  siRNA target sequence for 1600012H06Rik (NM_026451.1,504-522).
ggtcgggataggaatttat

SEQ ID NO: 725190 - DNA, 19 bp, Mus musculus
  siRNA target sequence for 1600012H06Rik (NM_026451.1,507-525).
cgggataggaatttatgga

SEQ ID NO: 725191 - DNA, 19 bp, Mus musculus
  siRNA target sequence for 1600012H06Rik (NM_026451.1,598-616).
ggagaggctgcctatttca

SEQ ID NO: 725192 - DNA, 19 bp, Mus musculus
  siRNA target sequence for 1600012H06Rik (NM_026451.1,685-703).
gttctctggacgatattga

SEQ ID NO: 725193 - DNA, 19 bp, Mus musculus
  siRNA target sequence for 1600012H06Rik (NM_026451.1,692-710).
ggacgatattgattagcat

SEQ ID NO: 725194 - DNA, 19 bp, Mus musculus
  siRNA target sequence for 1600012H06Rik (NM_026451.1,693-711).
gacgatattgattagcatt

SEQ ID NO: 725195 - DNA, 19 bp, Mus musculus
  siRNA target sequence for 2310005O14Rik (NM_026452.1,131-149).
ggggttccggtcttcagaa

SEQ ID NO: 725196 - DNA, 19 bp, Mus musculus
  siRNA target sequence for 2310005O14Rik (NM_026452.1,687-705).
gaccagtccactgacttta

SEQ ID NO: 725197 - DNA, 19 bp, Mus musculus
  siRNA target sequence for 2310005O14Rik (NM_026452.1,806-824).
cctggaaaaccggattaat

SEQ ID NO: 725198 - DNA, 19 bp, Mus musculus
  siRNA target sequence for 2310005O14Rik (NM_026452.1,901-919).
cagcggtcacgctcaagaa

SEQ ID NO: 725199 - DNA, 19 bp, Mus musculus
  siRNA target sequence for 2510049I19Rik (NM_026455.2,111-129).
cagagctcggcgtgacaaa

SEQ ID NO: 725200 - DNA, 19 bp, Mus musculus
  siRNA target sequence for 1700110B15Rik (NM_026458.1,249-267).
gtacgcagaatttcaaaga

SEQ ID NO: 725201 - DNA, 19 bp, Mus musculus
  siRNA target sequence for 1700110B15Rik (NM_026458.1,282-300).
gatgtgattttcaatccta

SEQ ID NO: 725202 - DNA, 19 bp, Mus musculus
  siRNA target sequence for 1700110B15Rik (NM_026458.1,310-328).
cattgcctaaattccttaa

SEQ ID NO: 725203 - DNA, 19 bp, Mus musculus
  siRNA target sequence for 1700110B15Rik (NM_026458.1,314-332).
gcctaaattccttaatgaa

SEQ ID NO: 725204 - DNA, 19 bp, Mus musculus
  siRNA target sequence for 1700110B15Rik (NM_026458.1,315-333).
cctaaattccttaatgaaa

SEQ ID NO: 725205 - DNA, 19 bp, Mus musculus
  siRNA target sequence for 1700110B15Rik (NM_026458.1,368-386).
gagtaatgcagcaagaaat

SEQ ID NO: 725206 - DNA, 19 bp, Mus musculus
  siRNA target sequence for 1700110B15Rik (NM_026458.1,376-394).
cagcaagaaatattactga

SEQ ID NO: 725207 - DNA, 19 bp, Mus musculus
  siRNA target sequence for 1700110B15Rik (NM_026458.1,395-413).
gatggtgaaaaaggattta

SEQ ID NO: 725208 - DNA, 19 bp, Mus musculus
  siRNA target sequence for 1700110B15Rik (NM_026458.1,435-453).
ggctttccttcggaagaat

SEQ ID NO: 725209 - DNA, 19 bp, Mus musculus
  siRNA target sequence for 1700110B15Rik (NM_026458.1,437-455).
ctttccttcggaagaatct

SEQ ID NO: 725210 - DNA, 19 bp, Mus musculus
  siRNA target sequence for 1700110B15Rik (NM_026458.1,442-460).
cttcggaagaatcttttga

SEQ ID NO: 725211 - DNA, 19 bp, Mus musculus
  siRNA target sequence for 1700110B15Rik (NM_026458.1,524-542).
gttcaaaaccagcaatgaa

SEQ ID NO: 725212 - DNA, 19 bp, Mus musculus
  siRNA target sequence for 1700110B15Rik (NM_026458.1,544-562).
gcttgccacttcaggtaaa

SEQ ID NO: 725213 - DNA, 19 bp, Mus musculus
  siRNA target sequence for 1700110B15Rik (NM_026458.1,552-570).
cttcaggtaaaatatagtt

SEQ ID NO: 725214 - DNA, 19 bp, Mus musculus
  siRNA target sequence for 1700110B15Rik (NM_026458.1,572-590).
gcgcttcggtcgtatctat

SEQ ID NO: 725215 - DNA, 19 bp, Mus musculus
  siRNA target sequence for 1700110B15Rik (NM_026458.1,605-623).
gtttcagccgtctaagtat

SEQ ID NO: 725216 - DNA, 19 bp, Mus musculus
  siRNA target sequence for 1700110B15Rik (NM_026458.1,609-627).
cagccgtctaagtatcaga

SEQ ID NO: 725217 - DNA, 19 bp, Mus musculus
  siRNA target sequence for 1700110B15Rik (NM_026458.1,675-693).
ctaggaccccggaacttct

SEQ ID NO: 725218 - DNA, 19 bp, Mus musculus
  siRNA target sequence for 1700112P19Rik (NM_026459.2,276-294).
ccagtatccgtcagaagaa

SEQ ID NO: 725219 - DNA, 19 bp, Mus musculus
  siRNA target sequence for 1700112P19Rik (NM_026459.2,277-295).
cagtatccgtcagaagaaa

SEQ ID NO: 725220 - DNA, 19 bp, Mus musculus
  siRNA target sequence for 1700112P19Rik (NM_026459.2,329-347).
cgagaagagatgaaaattt

SEQ ID NO: 725221 - DNA, 19 bp, Mus musculus
  siRNA target sequence for 1700112P19Rik (NM_026459.2,576-594).
cattctggagagaggataa

SEQ ID NO: 725222 - DNA, 19 bp, Mus musculus
  siRNA target sequence for 1700112P19Rik (NM_026459.2,580-598).
ctggagagaggataatgct

SEQ ID NO: 725223 - DNA, 19 bp, Mus musculus
  siRNA target sequence for 1700112P19Rik (NM_026459.2,825-843).
cctacaatgccaatgaaga

SEQ ID NO: 725224 - DNA, 19 bp, Mus musculus
  siRNA target sequence for 1700129C05Rik (NM_026461.1,95-113).
gttccccctaaggatcttt

SEQ ID NO: 725225 - DNA, 19 bp, Mus musculus
  siRNA target sequence for 1700129C05Rik (NM_026461.1,118-136).
gccctctgatcaaccaaaa

SEQ ID NO: 725226 - DNA, 19 bp, Mus musculus
  siRNA target sequence for 1700129C05Rik (NM_026461.1,186-204).
gtaccaaccctcttttcgt

SEQ ID NO: 725227 - DNA, 19 bp, Mus musculus
  siRNA target sequence for 1700129C05Rik (NM_026461.1,247-265).
cttccccaccttaatgatt

SEQ ID NO: 725228 - DNA, 19 bp, Mus musculus
  siRNA target sequence for 1700129C05Rik (NM_026461.1,252-270).
ccaccttaatgattgctat

SEQ ID NO: 725229 - DNA, 19 bp, Mus musculus
  siRNA target sequence for 1700129C05Rik (NM_026461.1,276-294).
gctcctcctgtgtaaacaa

SEQ ID NO: 725230 - DNA, 19 bp, Mus musculus
  siRNA target sequence for 1700129C05Rik (NM_026461.1,279-297).
cctcctgtgtaaacaaact

SEQ ID NO: 725231 - DNA, 19 bp, Mus musculus
  siRNA target sequence for 1700129C05Rik (NM_026461.1,280-298).
ctcctgtgtaaacaaactt

SEQ ID NO: 725232 - DNA, 19 bp, Mus musculus
  siRNA target sequence for 1700129C05Rik (NM_026461.1,398-416).
ctttcccatctggaaacta

SEQ ID NO: 725233 - DNA, 19 bp, Mus musculus
  siRNA target sequence for 1700129C05Rik (NM_026461.1,467-485).
ctagacccagagcttaaaa

SEQ ID NO: 725234 - DNA, 19 bp, Mus musculus
  siRNA target sequence for 1700129C05Rik (NM_026461.1,472-490).
cccagagcttaaaattgga

SEQ ID NO: 725235 - DNA, 19 bp, Mus musculus
  siRNA target sequence for 1700129C05Rik (NM_026461.1,636-654).
ggtcaagaacgcaagtttt

SEQ ID NO: 725236 - DNA, 19 bp, Mus musculus
  siRNA target sequence for 1700129C05Rik (NM_026461.1,637-655).
gtcaagaacgcaagtttta

SEQ ID NO: 725237 - DNA, 19 bp, Mus musculus
  siRNA target sequence for 1700129C05Rik (NM_026461.1,647-665).
caagttttaccaaataaca

SEQ ID NO: 725238 - DNA, 19 bp, Mus musculus
  siRNA target sequence for 2410080P20Rik (NM_026464.2,401-419).
caattggaaaggcgaattt

SEQ ID NO: 725239 - DNA, 19 bp, Mus musculus
  siRNA target sequence for 2410080P20Rik (NM_026464.2,621-639).
gctgccttggtgtcttcaa

SEQ ID NO: 725240 - DNA, 19 bp, Mus musculus
  siRNA target sequence for 2410080P20Rik (NM_026464.2,626-644).
cttggtgtcttcaacatca

SEQ ID NO: 725241 - DNA, 19 bp, Mus musculus
  siRNA target sequence for 2410080P20Rik (NM_026464.2,674-692).
cctcagtcaggagatctaa

SEQ ID NO: 725242 - DNA, 19 bp, Mus musculus
  siRNA target sequence for 2410080P20Rik (NM_026464.2,693-711).
cctccgtcgccctcatgaa

SEQ ID NO: 725243 - DNA, 19 bp, Mus musculus
  siRNA target sequence for 2410080P20Rik (NM_026464.2,1038-1056).
ccgtggttgtggatgacta

SEQ ID NO: 725244 - DNA, 19 bp, Mus musculus
  siRNA target sequence for 2410080P20Rik (NM_026464.2,1039-1057).
cgtggttgtggatgactat

SEQ ID NO: 725245 - DNA, 19 bp, Mus musculus
  siRNA target sequence for 2410080P20Rik (NM_026464.2,1054-1072).
ctatcggcgacgcaagaaa

SEQ ID NO: 725246 - DNA, 19 bp, Mus musculus
  siRNA target sequence for 2010316F05Rik (NM_026465.1,144-162).
ctcatattcaacatctgaa

SEQ ID NO: 725247 - DNA, 19 bp, Mus musculus
  siRNA target sequence for 2010316F05Rik (NM_026465.1,168-186).
cacatagtaagaacttatt

SEQ ID NO: 725248 - DNA, 19 bp, Mus musculus
  siRNA target sequence for 2010316F05Rik (NM_026465.1,202-220).
gaagaaaaactattggtta

SEQ ID NO: 725249 - DNA, 19 bp, Mus musculus
  siRNA target sequence for 2010316F05Rik (NM_026465.1,216-234).
ggttagtcacagttcttca

SEQ ID NO: 725250 - DNA, 19 bp, Mus musculus
  siRNA target sequence for 2010316F05Rik (NM_026465.1,420-438).
gtggacatgagaaagtgta

SEQ ID NO: 725251 - DNA, 19 bp, Mus musculus
  siRNA target sequence for 2010316F05Rik (NM_026465.1,423-441).
gacatgagaaagtgtactt

SEQ ID NO: 725252 - DNA, 19 bp, Mus musculus
  siRNA target sequence for 2010316F05Rik (NM_026465.1,439-457).
ctttcacccaatgactaat

SEQ ID NO: 725253 - DNA, 19 bp, Mus musculus
  siRNA target sequence for 2010316F05Rik (NM_026465.1,471-489).
ggttaagtcctgaagactt

SEQ ID NO: 725254 - DNA, 19 bp, Mus musculus
  siRNA target sequence for 2010316F05Rik (NM_026465.1,479-497).
cctgaagactttctcatat

SEQ ID NO: 725255 - DNA, 19 bp, Mus musculus
  siRNA target sequence for 2010316F05Rik (NM_026465.1,510-528).
caggacatgatcccataat

SEQ ID NO: 725256 - DNA, 19 bp, Mus musculus
  siRNA target sequence for 2010316F05Rik (NM_026465.1,523-541).
cataattctaaactttgat

SEQ ID NO: 725257 - DNA, 19 bp, Mus musculus
  siRNA target sequence for Rps27l (NM_026467.1,131-149).
gttcagagcccaaattctt

SEQ ID NO: 725258 - DNA, 19 bp, Mus musculus
  siRNA target sequence for Rps27l (NM_026467.1,138-156).
gcccaaattcttacttcat

SEQ ID NO: 725259 - DNA, 19 bp, Mus musculus
  siRNA target sequence for Rps27l (NM_026467.1,173-191).
ggttgctacaagattacta

SEQ ID NO: 725260 - DNA, 19 bp, Mus musculus
  siRNA target sequence for Rps27l (NM_026467.1,281-299).
gaaggctgttcatttagaa

SEQ ID NO: 725261 - DNA, 19 bp, Mus musculus
  siRNA target sequence for 1700025D03Rik (NM_026469.1,31-49).
ccgaatgagagggcaaata

SEQ ID NO: 725262 - DNA, 19 bp, Mus musculus
  siRNA target sequence for 1700025D03Rik (NM_026469.1,32-50).
cgaatgagagggcaaatat

SEQ ID NO: 725263 - DNA, 19 bp, Mus musculus
  siRNA target sequence for 1700025D03Rik (NM_026469.1,127-145).
cttctaggagtcatgaagt

SEQ ID NO: 725264 - DNA, 19 bp, Mus musculus
  siRNA target sequence for 1700025D03Rik (NM_026469.1,133-151).
ggagtcatgaagtgcaaaa

SEQ ID NO: 725265 - DNA, 19 bp, Mus musculus
  siRNA target sequence for 1700025D03Rik (NM_026469.1,134-152).
gagtcatgaagtgcaaaaa

SEQ ID NO: 725266 - DNA, 19 bp, Mus musculus
  siRNA target sequence for 1700025D03Rik (NM_026469.1,159-177).
cctgaaaaggcagagatta

SEQ ID NO: 725267 - DNA, 19 bp, Mus musculus
  siRNA target sequence for 1700025D03Rik (NM_026469.1,196-214).
gcatccatgtgctctttct

SEQ ID NO: 725268 - DNA, 19 bp, Mus musculus
  siRNA target sequence for 1700025D03Rik (NM_026469.1,243-261).
gtcctctgagccctttatt

SEQ ID NO: 725269 - DNA, 19 bp, Mus musculus
  siRNA target sequence for 1700025D03Rik (NM_026469.1,265-283).
caactcccagcctcattca

SEQ ID NO: 725270 - DNA, 19 bp, Mus musculus
  siRNA target sequence for 1700025D03Rik (NM_026469.1,355-373).
catgtgtatccctattcta

SEQ ID NO: 725271 - DNA, 19 bp, Mus musculus
  siRNA target sequence for 1700025D03Rik (NM_026469.1,375-393).
ggcctctgatataagtcat

SEQ ID NO: 725272 - DNA, 19 bp, Mus musculus
  siRNA target sequence for 1700025D03Rik (NM_026469.1,480-498).
ggactgtccttggtgtaaa

SEQ ID NO: 725273 - DNA, 19 bp, Mus musculus
  siRNA target sequence for 1700025D03Rik (NM_026469.1,483-501).
ctgtccttggtgtaaagct

SEQ ID NO: 725274 - DNA, 19 bp, Mus musculus
  siRNA target sequence for Spata6 (NM_026470.2,1365-1383).
ggtcgcacagcttgagtat

SEQ ID NO: 725275 - DNA, 19 bp, Mus musculus
  siRNA target sequence for Spata6 (NM_026470.2,1380-1398).
gtatgatacagcagtgttt

SEQ ID NO: 725276 - DNA, 19 bp, Mus musculus
  siRNA target sequence for Spata6 (NM_026470.2,1391-1409).
cagtgtttgagttgataca

SEQ ID NO: 725277 - DNA, 19 bp, Mus musculus
  siRNA target sequence for Spata6 (NM_026470.2,1433-1451).
cactgtctacctatgatga

SEQ ID NO: 725278 - DNA, 19 bp, Mus musculus
  siRNA target sequence for Spata6 (NM_026470.2,1474-1492).
ccgggtccaaaccaaatgt

SEQ ID NO: 725279 - DNA, 19 bp, Mus musculus
  siRNA target sequence for Spata6 (NM_026470.2,1508-1526).
caaaccgccaggttaccat

SEQ ID NO: 725280 - DNA, 19 bp, Mus musculus
  siRNA target sequence for Spata6 (NM_026470.2,1519-1537).
gttaccatgaggaggattt

SEQ ID NO: 725281 - DNA, 19 bp, Mus musculus
  siRNA target sequence for Spata6 (NM_026470.2,1555-1573).
gctccaaagctggaatttt

SEQ ID NO: 725282 - DNA, 19 bp, Mus musculus
  siRNA target sequence for Spata6 (NM_026470.2,1563-1581).
gctggaattttctacaact

SEQ ID NO: 725283 - DNA, 19 bp, Mus musculus
  siRNA target sequence for Spata6 (NM_026470.2,1564-1582).
ctggaattttctacaactt

SEQ ID NO: 725284 - DNA, 19 bp, Mus musculus
  siRNA target sequence for Spata6 (NM_026470.2,1566-1584).
ggaattttctacaacttca

SEQ ID NO: 725285 - DNA, 19 bp, Mus musculus
  siRNA target sequence for Spata6 (NM_026470.2,1587-1605).
gatcactgaatgtctgata

SEQ ID NO: 725286 - DNA, 19 bp, Mus musculus
  siRNA target sequence for Spata6 (NM_026470.2,1617-1635).
gtgccgcactcaggataaa

SEQ ID NO: 725287 - DNA, 19 bp, Mus musculus
  siRNA target sequence for Spata6 (NM_026470.2,1619-1637).
gccgcactcaggataaatt

SEQ ID NO: 725288 - DNA, 19 bp, Mus musculus
  siRNA target sequence for Spata6 (NM_026470.2,1621-1639).
cgcactcaggataaattta

SEQ ID NO: 725289 - DNA, 19 bp, Mus musculus
  siRNA target sequence for Spata6 (NM_026470.2,1623-1641).
cactcaggataaatttact

SEQ ID NO: 725290 - DNA, 19 bp, Mus musculus
  siRNA target sequence for Spata6 (NM_026470.2,1625-1643).
ctcaggataaatttactta

SEQ ID NO: 725291 - DNA, 19 bp, Mus musculus
  siRNA target sequence for Spata6 (NM_026470.2,1629-1647).
ggataaatttacttaccat

SEQ ID NO: 725292 - DNA, 19 bp, Mus musculus
  siRNA target sequence for Spata6 (NM_026470.2,1681-1699).
caatgcagaacatcaagat

SEQ ID NO: 725293 - DNA, 19 bp, Mus musculus
  siRNA target sequence for Spata6 (NM_026470.2,1719-1737).
gtcacccgagaggagtaaa

SEQ ID NO: 725294 - DNA, 19 bp, Mus musculus
  siRNA target sequence for Spata6 (NM_026470.2,1721-1739).
cacccgagaggagtaaata

SEQ ID NO: 725295 - DNA, 19 bp, Mus musculus
  siRNA target sequence for Spata6 (NM_026470.2,1723-1741).
cccgagaggagtaaatatt

SEQ ID NO: 725296 - DNA, 19 bp, Mus musculus
  siRNA target sequence for Spata6 (NM_026470.2,1742-1760).
gcataaacaccaagaacta

SEQ ID NO: 725297 - DNA, 19 bp, Mus musculus
  siRNA target sequence for Spata6 (NM_026470.2,1758-1776).
ctacgaacagcctacgatt

SEQ ID NO: 725298 - DNA, 19 bp, Mus musculus
  siRNA target sequence for Spata6 (NM_026470.2,1762-1780).
gaacagcctacgatttcct

SEQ ID NO: 725299 - DNA, 19 bp, Mus musculus
  siRNA target sequence for Spata6 (NM_026470.2,1793-1811).
ctccatctccctacacaaa

SEQ ID NO: 725300 - DNA, 19 bp, Mus musculus
  siRNA target sequence for Spata6 (NM_026470.2,1869-1887).
gggaccctatgaattcaaa

SEQ ID NO: 725301 - DNA, 19 bp, Mus musculus
  siRNA target sequence for Spata6 (NM_026470.2,1870-1888).
ggaccctatgaattcaaaa

SEQ ID NO: 725302 - DNA, 19 bp, Mus musculus
  siRNA target sequence for Spata6 (NM_026470.2,1874-1892).
cctatgaattcaaaaagga

SEQ ID NO: 725303 - DNA, 19 bp, Mus musculus
  siRNA target sequence for Spata6 (NM_026470.2,1875-1893).
ctatgaattcaaaaaggaa

SEQ ID NO: 725304 - DNA, 19 bp, Mus musculus
  siRNA target sequence for Spata6 (NM_026470.2,1897-1915).
gataagcctccatttgtga

SEQ ID NO: 725305 - DNA, 19 bp, Mus musculus
  siRNA target sequence for Spata6 (NM_026470.2,2033-2051).
gcagatccaaggactacaa

SEQ ID NO: 725306 - DNA, 19 bp, Mus musculus
  siRNA target sequence for Spata6 (NM_026470.2,2147-2165).
ctgcaaggaccttactagt

SEQ ID NO: 725307 - DNA, 19 bp, Mus musculus
  siRNA target sequence for Spata6 (NM_026470.2,2200-2218).
gcaagccctgtgctaaata

SEQ ID NO: 725308 - DNA, 19 bp, Mus musculus
  siRNA target sequence for Spata6 (NM_026470.2,2222-2240).
cctctctcagggaaagatt

SEQ ID NO: 725309 - DNA, 19 bp, Mus musculus
  siRNA target sequence for Spata6 (NM_026470.2,2233-2251).
gaaagattccactctgatt

SEQ ID NO: 725310 - DNA, 19 bp, Mus musculus
  siRNA target sequence for Spata6 (NM_026470.2,2277-2295).
gatccatgaccgggtaaaa

SEQ ID NO: 725311 - DNA, 19 bp, Mus musculus
  siRNA target sequence for Spata6 (NM_026470.2,2317-2335).
gctcatgcaagacatttat

SEQ ID NO: 725312 - DNA, 19 bp, Mus musculus
  siRNA target sequence for Spata6 (NM_026470.2,2364-2382).
cgaactggaactgaaaaga

SEQ ID NO: 725313 - DNA, 19 bp, Mus musculus
  siRNA target sequence for Spata6 (NM_026470.2,2410-2428).
gacagtgaccctgaatata

SEQ ID NO: 725314 - DNA, 19 bp, Mus musculus
  siRNA target sequence for Spata6 (NM_026470.2,2444-2462).
cgcgtggctctttccattt

SEQ ID NO: 725315 - DNA, 19 bp, Mus musculus
  siRNA target sequence for Spata6 (NM_026470.2,2513-2531).
cccaccgacccgtctttga

SEQ ID NO: 725316 - DNA, 19 bp, Mus musculus
  siRNA target sequence for Spata6 (NM_026470.2,2515-2533).
caccgacccgtctttgaga

SEQ ID NO: 725317 - DNA, 19 bp, Mus musculus
  siRNA target sequence for Spata6 (NM_026470.2,2544-2562).
caagatgtacaggaactta

SEQ ID NO: 725318 - DNA, 19 bp, Mus musculus
  siRNA target sequence for Spata6 (NM_026470.2,2550-2568).
gtacaggaacttatacaaa

SEQ ID NO: 725319 - DNA, 19 bp, Mus musculus
  siRNA target sequence for 2410174K12Rik (NM_026474.2,245-263).
caaggccttggaacagaat

SEQ ID NO: 725320 - DNA, 19 bp, Mus musculus
  siRNA target sequence for 2410174K12Rik (NM_026474.2,264-282).
ccggatgacgcacagtatt

SEQ ID NO: 725321 - DNA, 19 bp, Mus musculus
  siRNA target sequence for 2410174K12Rik (NM_026474.2,327-345).
gatggtattgccgatgtaa

SEQ ID NO: 725322 - DNA, 19 bp, Mus musculus
  siRNA target sequence for 2410174K12Rik (NM_026474.2,330-348).
ggtattgccgatgtaaaga

SEQ ID NO: 725323 - DNA, 19 bp, Mus musculus
  siRNA target sequence for 2410174K12Rik (NM_026474.2,331-349).
gtattgccgatgtaaagaa

SEQ ID NO: 725324 - DNA, 19 bp, Mus musculus
  siRNA target sequence for 2410174K12Rik (NM_026474.2,360-378).
ctcaatccaaataattgta

SEQ ID NO: 725325 - DNA, 19 bp, Mus musculus
  siRNA target sequence for 2410174K12Rik (NM_026474.2,391-409).
ggaaagggatatgtgaata

SEQ ID NO: 725326 - DNA, 19 bp, Mus musculus
  siRNA target sequence for 2410174K12Rik (NM_026474.2,403-421).
gtgaataccatgaaaaaga

SEQ ID NO: 725327 - DNA, 19 bp, Mus musculus
  siRNA target sequence for 2410174K12Rik (NM_026474.2,422-440).
ctacgcttctgccttagaa

SEQ ID NO: 725328 - DNA, 19 bp, Mus musculus
  siRNA target sequence for 2410174K12Rik (NM_026474.2,450-468).
gagggacagaaattagata

SEQ ID NO: 725329 - DNA, 19 bp, Mus musculus
  siRNA target sequence for 2410174K12Rik (NM_026474.2,465-483).
gatagtacagataccaatt

SEQ ID NO: 725330 - DNA, 19 bp, Mus musculus
  siRNA target sequence for 2410174K12Rik (NM_026474.2,589-607).
ccgagtctcacgtaatcat

SEQ ID NO: 725331 - DNA, 19 bp, Mus musculus
  siRNA target sequence for 2410174K12Rik (NM_026474.2,591-609).
gagtctcacgtaatcatca

SEQ ID NO: 725332 - DNA, 19 bp, Mus musculus
  siRNA target sequence for 2410174K12Rik (NM_026474.2,625-643).
gcgttcagaagaatgatgt

SEQ ID NO: 725333 - DNA, 19 bp, Mus musculus
  siRNA target sequence for 2410174K12Rik (NM_026474.2,721-739).
ggctgctccaccctataat

SEQ ID NO: 725334 - DNA, 19 bp, Mus musculus
  siRNA target sequence for 2410174K12Rik (NM_026474.2,722-740).
gctgctccaccctataata

SEQ ID NO: 725335 - DNA, 19 bp, Mus musculus
  siRNA target sequence for 2410174K12Rik (NM_026474.2,725-743).
gctccaccctataatacca

SEQ ID NO: 725336 - DNA, 19 bp, Mus musculus
  siRNA target sequence for 2410174K12Rik (NM_026474.2,742-760).
cagaacagagtacattcaa

SEQ ID NO: 725337 - DNA, 19 bp, Mus musculus
  siRNA target sequence for 2410174K12Rik (NM_026474.2,840-858).
gagcccacaccgaaacagt

SEQ ID NO: 725338 - DNA, 19 bp, Mus musculus
  siRNA target sequence for 2410174K12Rik (NM_026474.2,855-873).
cagttcacagcagatgtaa

SEQ ID NO: 725339 - DNA, 19 bp, Mus musculus
  siRNA target sequence for 2410174K12Rik (NM_026474.2,864-882).
gcagatgtaaagaacatgt

SEQ ID NO: 725340 - DNA, 19 bp, Mus musculus
  siRNA target sequence for 2410174K12Rik (NM_026474.2,865-883).
cagatgtaaagaacatgta

SEQ ID NO: 725341 - DNA, 19 bp, Mus musculus
  siRNA target sequence for 2410174K12Rik (NM_026474.2,885-903).
ccgtcctcatctcactata

SEQ ID NO: 725342 - DNA, 19 bp, Mus musculus
  siRNA target sequence for 2410174K12Rik (NM_026474.2,904-922).
cccggaactgggataagtt

SEQ ID NO: 725343 - DNA, 19 bp, Mus musculus
  siRNA target sequence for 2410174K12Rik (NM_026474.2,923-941).
ggttggcgaaatcaaagaa

SEQ ID NO: 725344 - DNA, 19 bp, Mus musculus
  siRNA target sequence for 2410174K12Rik (NM_026474.2,962-980).
ggagggcgacgcagcttta

SEQ ID NO: 725345 - DNA, 19 bp, Mus musculus
  siRNA target sequence for 2410174K12Rik (NM_026474.2,963-981).
gagggcgacgcagctttaa

SEQ ID NO: 725346 - DNA, 19 bp, Mus musculus
  siRNA target sequence for 2410174K12Rik (NM_026474.2,966-984).
ggcgacgcagctttaaaca

SEQ ID NO: 725347 - DNA, 19 bp, Mus musculus
  siRNA target sequence for 2410174K12Rik (NM_026474.2,967-985).
gcgacgcagctttaaacaa

SEQ ID NO: 725348 - DNA, 19 bp, Mus musculus
  siRNA target sequence for 2410174K12Rik (NM_026474.2,1010-1028).
cggttccgatgaagtgaaa

SEQ ID NO: 725349 - DNA, 19 bp, Mus musculus
  siRNA target sequence for 2410174K12Rik (NM_026474.2,1082-1100).
ctggtctgatgtaggtaaa

SEQ ID NO: 725350 - DNA, 19 bp, Mus musculus
  siRNA target sequence for 2410174K12Rik (NM_026474.2,1118-1136).
ccctcccgatgatatggaa

SEQ ID NO: 725351 - DNA, 19 bp, Mus musculus
  siRNA target sequence for 2410174K12Rik (NM_026474.2,1119-1137).
cctcccgatgatatggaat

SEQ ID NO: 725352 - DNA, 19 bp, Mus musculus
  siRNA target sequence for 2410174K12Rik (NM_026474.2,1128-1146).
gatatggaatggaaacagt

SEQ ID NO: 725353 - DNA, 19 bp, Mus musculus
  siRNA target sequence for 2410146L05Rik (NM_026480.1,311-329).
gggaacctagctgaaatca

SEQ ID NO: 725354 - DNA, 19 bp, Mus musculus
  siRNA target sequence for 2410146L05Rik (NM_026480.1,348-366).
gtgcacagacgcgaatgaa

SEQ ID NO: 725355 - DNA, 19 bp, Mus musculus
  siRNA target sequence for 2410146L05Rik (NM_026480.1,350-368).
gcacagacgcgaatgaaaa

SEQ ID NO: 725356 - DNA, 19 bp, Mus musculus
  siRNA target sequence for 2410146L05Rik (NM_026480.1,351-369).
cacagacgcgaatgaaaaa

SEQ ID NO: 725357 - DNA, 19 bp, Mus musculus
  siRNA target sequence for 2410146L05Rik (NM_026480.1,353-371).
cagacgcgaatgaaaaata

SEQ ID NO: 725358 - DNA, 19 bp, Mus musculus
  siRNA target sequence for 2410146L05Rik (NM_026480.1,355-373).
gacgcgaatgaaaaatatt

SEQ ID NO: 725359 - DNA, 19 bp, Mus musculus
  siRNA target sequence for 2410146L05Rik (NM_026480.1,357-375).
cgcgaatgaaaaatattct

SEQ ID NO: 725360 - DNA, 19 bp, Mus musculus
  siRNA target sequence for 2410146L05Rik (NM_026480.1,458-476).
cgtgcctcctcaatcctaa

SEQ ID NO: 725361 - DNA, 19 bp, Mus musculus
  siRNA target sequence for 2410146L05Rik (NM_026480.1,466-484).
ctcaatcctaagcaagtta

SEQ ID NO: 725362 - DNA, 19 bp, Mus musculus
  siRNA target sequence for 2410146L05Rik (NM_026480.1,473-491).
ctaagcaagttaagtaaga

SEQ ID NO: 725363 - DNA, 19 bp, Mus musculus
  siRNA target sequence for 2410146L05Rik (NM_026480.1,486-504).
gtaagaaagggctaaaact

SEQ ID NO: 725364 - DNA, 19 bp, Mus musculus
  siRNA target sequence for 2810453H10Rik (NM_026483.1,81-99).
gaaaatcgcatctttggaa

SEQ ID NO: 725365 - DNA, 19 bp, Mus musculus
  siRNA target sequence for 2810453H10Rik (NM_026483.1,235-253).
gaccaccctccatctagaa

SEQ ID NO: 725366 - DNA, 19 bp, Mus musculus
  siRNA target sequence for 2810453H10Rik (NM_026483.1,240-258).
ccctccatctagaagatat

SEQ ID NO: 725367 - DNA, 19 bp, Mus musculus
  siRNA target sequence for 2810453H10Rik (NM_026483.1,293-311).
gacgtagaacgaaaagaaa

SEQ ID NO: 725368 - DNA, 19 bp, Mus musculus
  siRNA target sequence for 2810453H10Rik (NM_026483.1,295-313).
cgtagaacgaaaagaaaaa

SEQ ID NO: 725369 - DNA, 19 bp, Mus musculus
  siRNA target sequence for 2810453H10Rik (NM_026483.1,320-338).
gaggatgcgtatgaatata

SEQ ID NO: 725370 - DNA, 19 bp, Mus musculus
  siRNA target sequence for 2810453H10Rik (NM_026483.1,322-340).
ggatgcgtatgaatataaa

SEQ ID NO: 725371 - DNA, 19 bp, Mus musculus
  siRNA target sequence for 2810453H10Rik (NM_026483.1,358-376).
ccatgagaagagtaagcta

SEQ ID NO: 725372 - DNA, 19 bp, Mus musculus
  siRNA target sequence for 2810453H10Rik (NM_026483.1,359-377).
catgagaagagtaagctaa

SEQ ID NO: 725373 - DNA, 19 bp, Mus musculus
  siRNA target sequence for 2810453H10Rik (NM_026483.1,373-391).
gctaagccttgctgagatt

SEQ ID NO: 725374 - DNA, 19 bp, Mus musculus
  siRNA target sequence for 2810453H10Rik (NM_026483.1,378-396).
gccttgctgagatttatga

SEQ ID NO: 725375 - DNA, 19 bp, Mus musculus
  siRNA target sequence for 2810453H10Rik (NM_026483.1,475-493).
ggattctctcttcctaaaa

SEQ ID NO: 725376 - DNA, 19 bp, Mus musculus
  siRNA target sequence for 2810453H10Rik (NM_026483.1,530-548).
ccgcctgtacctgaaatta

SEQ ID NO: 725377 - DNA, 19 bp, Mus musculus
  siRNA target sequence for 2810453H10Rik (NM_026483.1,531-549).
cgcctgtacctgaaattaa

SEQ ID NO: 725378 - DNA, 19 bp, Mus musculus
  siRNA target sequence for 2810453H10Rik (NM_026483.1,847-865).
gggcaaggtgtccttgtta

SEQ ID NO: 725379 - DNA, 19 bp, Mus musculus
  siRNA target sequence for 2810453H10Rik (NM_026483.1,848-866).
ggcaaggtgtccttgttaa

SEQ ID NO: 725380 - DNA, 19 bp, Mus musculus
  siRNA target sequence for 2810453H10Rik (NM_026483.1,849-867).
gcaaggtgtccttgttaaa

SEQ ID NO: 725381 - DNA, 19 bp, Mus musculus
  siRNA target sequence for 2810453H10Rik (NM_026483.1,853-871).
ggtgtccttgttaaaggat

SEQ ID NO: 725382 - DNA, 19 bp, Mus musculus
  siRNA target sequence for 2810453H10Rik (NM_026483.1,876-894).
gaaaagataagcccttaaa

SEQ ID NO: 725383 - DNA, 19 bp, Mus musculus
  siRNA target sequence for 2810453H10Rik (NM_026483.1,881-899).
gataagcccttaaagtcat

SEQ ID NO: 725384 - DNA, 19 bp, Mus musculus
  siRNA target sequence for 2810453H10Rik (NM_026483.1,895-913).
gtcatctcaggcattcttt

SEQ ID NO: 725385 - DNA, 19 bp, Mus musculus
  siRNA target sequence for 2810453H10Rik (NM_026483.1,991-1009).
catttctgttcataaatta

SEQ ID NO: 725386 - DNA, 19 bp, Mus musculus
  siRNA target sequence for 5730502D15Rik (NM_026485.1,345-363).
gctcacttcagtgatgata

SEQ ID NO: 725387 - DNA, 19 bp, Mus musculus
  siRNA target sequence for 5730502D15Rik (NM_026485.1,368-386).
gagagatgtagtaaagact

SEQ ID NO: 725388 - DNA, 19 bp, Mus musculus
  siRNA target sequence for 5730502D15Rik (NM_026485.1,370-388).
gagatgtagtaaagactat

SEQ ID NO: 725389 - DNA, 19 bp, Mus musculus
  siRNA target sequence for 5730502D15Rik (NM_026485.1,614-632).
gttcagggaggccttcaaa

SEQ ID NO: 725390 - DNA, 19 bp, Mus musculus
  siRNA target sequence for 5730502D15Rik (NM_026485.1,678-696).
ccaatcccagtcaccttta

SEQ ID NO: 725391 - DNA, 19 bp, Mus musculus
  siRNA target sequence for 5730502D15Rik (NM_026485.1,679-697).
caatcccagtcacctttaa

SEQ ID NO: 725392 - DNA, 19 bp, Mus musculus
  siRNA target sequence for 5730502D15Rik (NM_026485.1,786-804).
gtggagcgctgcaaacaga

SEQ ID NO: 725393 - DNA, 19 bp, Mus musculus
  siRNA target sequence for 5730502D15Rik (NM_026485.1,855-873).
ctgcatcgcaccattgtct

SEQ ID NO: 725394 - DNA, 19 bp, Mus musculus
  siRNA target sequence for 5730502D15Rik (NM_026485.1,874-892).
cagagcgtgacgtctatct

SEQ ID NO: 725395 - DNA, 19 bp, Mus musculus
  siRNA target sequence for 5730502D15Rik (NM_026485.1,876-894).
gagcgtgacgtctatctga

SEQ ID NO: 725396 - DNA, 19 bp, Mus musculus
  siRNA target sequence for 5730502D15Rik (NM_026485.1,882-900).
gacgtctatctgacctata

SEQ ID NO: 725397 - DNA, 19 bp, Mus musculus
  siRNA target sequence for 5730502D15Rik (NM_026485.1,1027-1045).
ggagtaccgacctcaacat

SEQ ID NO: 725398 - DNA, 19 bp, Mus musculus
  siRNA target sequence for 4432405B04Rik (NM_026486.1,287-305).
gttgccagttcctacttgt

SEQ ID NO: 725399 - DNA, 19 bp, Mus musculus
  siRNA target sequence for 4432405B04Rik (NM_026486.1,366-384).
ctggaagtgaccataaggt

SEQ ID NO: 725400 - DNA, 19 bp, Mus musculus
  siRNA target sequence for 4432405B04Rik (NM_026486.1,452-470).
gcagatgctgctagtttca

SEQ ID NO: 725401 - DNA, 19 bp, Mus musculus
  siRNA target sequence for 4432405B04Rik (NM_026486.1,504-522).
ctcatccaggtggagattt

SEQ ID NO: 725402 - DNA, 19 bp, Mus musculus
  siRNA target sequence for 4432405B04Rik (NM_026486.1,516-534).
gagatttatcccaacacat

SEQ ID NO: 725403 - DNA, 19 bp, Mus musculus
  siRNA target sequence for 4432405B04Rik (NM_026486.1,600-618).
ccctgcccgtgtgacttaa

SEQ ID NO: 725404 - DNA, 19 bp, Mus musculus
  siRNA target sequence for 4432405B04Rik (NM_026486.1,602-620).
ctgcccgtgtgacttaaca

SEQ ID NO: 725405 - DNA, 19 bp, Mus musculus
  siRNA target sequence for 4432405B04Rik (NM_026486.1,657-675).
gactgtcagccagaagtaa

SEQ ID NO: 725406 - DNA, 19 bp, Mus musculus
  siRNA target sequence for 4432405B04Rik (NM_026486.1,659-677).
ctgtcagccagaagtaaga

SEQ ID NO: 725407 - DNA, 19 bp, Mus musculus
  siRNA target sequence for 4432405B04Rik (NM_026486.1,661-679).
gtcagccagaagtaagaga

SEQ ID NO: 725408 - DNA, 19 bp, Mus musculus
  siRNA target sequence for 4432405B04Rik (NM_026486.1,823-841).
cgttccttggtcacttcta

SEQ ID NO: 725409 - DNA, 19 bp, Mus musculus
  siRNA target sequence for 4432405B04Rik (NM_026486.1,849-867).
gccacttcccccagacatt

SEQ ID NO: 725410 - DNA, 19 bp, Mus musculus
  siRNA target sequence for 4432405B04Rik (NM_026486.1,947-965).
gaccacggaggggtatttt

SEQ ID NO: 725411 - DNA, 19 bp, Mus musculus
  siRNA target sequence for 4432405B04Rik (NM_026486.1,1065-1083).
caccaaggacgagatgaaa

SEQ ID NO: 725412 - DNA, 19 bp, Mus musculus
  siRNA target sequence for 4432405B04Rik (NM_026486.1,1122-1140).
ccggtcacaccaacagtaa

SEQ ID NO: 725413 - DNA, 19 bp, Mus musculus
  siRNA target sequence for 4432405B04Rik (NM_026486.1,1181-1199).
cccggacacagttttaagt

SEQ ID NO: 725414 - DNA, 19 bp, Mus musculus
  siRNA target sequence for 4432405B04Rik (NM_026486.1,1183-1201).
cggacacagttttaagtgt

SEQ ID NO: 725415 - DNA, 19 bp, Mus musculus
  siRNA target sequence for 4432405B04Rik (NM_026486.1,1249-1267).
gatggcaaaataattccat

SEQ ID NO: 725416 - DNA, 19 bp, Mus musculus
  siRNA target sequence for 4432405B04Rik (NM_026486.1,1264-1282).
ccatcagcggcctagacat

SEQ ID NO: 725417 - DNA, 19 bp, Mus musculus
  siRNA target sequence for 4432405B04Rik (NM_026486.1,1321-1339).
gaatgatgacccagagatt

SEQ ID NO: 725418 - DNA, 19 bp, Mus musculus
  siRNA target sequence for 4432405B04Rik (NM_026486.1,1325-1343).
gatgacccagagattcaca

SEQ ID NO: 725419 - DNA, 19 bp, Mus musculus
  siRNA target sequence for 4432405B04Rik (NM_026486.1,1366-1384).
gtggtggtgagaaggaatt

SEQ ID NO: 725420 - DNA, 19 bp, Mus musculus
  siRNA target sequence for 4432405B04Rik (NM_026486.1,1501-1519).
ccgctctcagacccatttt

SEQ ID NO: 725421 - DNA, 19 bp, Mus musculus
  siRNA target sequence for 4432405B04Rik (NM_026486.1,1560-1578).
gggattaaggagaactgta

SEQ ID NO: 725422 - DNA, 19 bp, Mus musculus
  siRNA target sequence for 4432405B04Rik (NM_026486.1,1773-1791).
ctctccatccgcattctca

SEQ ID NO: 725423 - DNA, 19 bp, Mus musculus
  siRNA target sequence for 4432405B04Rik (NM_026486.1,1842-1860).
gtggagacaaggttttcca

SEQ ID NO: 725424 - DNA, 19 bp, Mus musculus
  siRNA target sequence for 4432405B04Rik (NM_026486.1,1924-1942).
gtgcctctgttgagttcat

SEQ ID NO: 725425 - DNA, 19 bp, Mus musculus
  siRNA target sequence for 4432405B04Rik (NM_026486.1,1975-1993).
cgagattccagatcaactt

SEQ ID NO: 725426 - DNA, 19 bp, Mus musculus
  siRNA target sequence for 4432405B04Rik (NM_026486.1,2045-2063).
ccctctgacccagtattat

SEQ ID NO: 725427 - DNA, 19 bp, Mus musculus
  siRNA target sequence for 4432405B04Rik (NM_026486.1,2047-2065).
ctctgacccagtattatca

SEQ ID NO: 725428 - DNA, 19 bp, Mus musculus
  siRNA target sequence for 4930413O22Rik (NM_026493.2,121-139).
gcagatagcttggatgaat

SEQ ID NO: 725429 - DNA, 19 bp, Mus musculus
  siRNA target sequence for 4930413O22Rik (NM_026493.2,122-140).
cagatagcttggatgaatt

SEQ ID NO: 725430 - DNA, 19 bp, Mus musculus
  siRNA target sequence for 4930413O22Rik (NM_026493.2,129-147).
cttggatgaatttattgaa

SEQ ID NO: 725431 - DNA, 19 bp, Mus musculus
  siRNA target sequence for 4930413O22Rik (NM_026493.2,157-175).
gcgaaactggccaaagaca

SEQ ID NO: 725432 - DNA, 19 bp, Mus musculus
  siRNA target sequence for 4930413O22Rik (NM_026493.2,158-176).
cgaaactggccaaagacaa

SEQ ID NO: 725433 - DNA, 19 bp, Mus musculus
  siRNA target sequence for 4930413O22Rik (NM_026493.2,159-177).
gaaactggccaaagacaaa

SEQ ID NO: 725434 - DNA, 19 bp, Mus musculus
  siRNA target sequence for 4930413O22Rik (NM_026493.2,306-324).
caagggacccttaggaatt

SEQ ID NO: 725435 - DNA, 19 bp, Mus musculus
  siRNA target sequence for 4930413O22Rik (NM_026493.2,310-328).
ggacccttaggaattgaat

SEQ ID NO: 725436 - DNA, 19 bp, Mus musculus
  siRNA target sequence for 4930413O22Rik (NM_026493.2,311-329).
gacccttaggaattgaata

SEQ ID NO: 725437 - DNA, 19 bp, Mus musculus
  siRNA target sequence for 4930413O22Rik (NM_026493.2,344-362).
cgcttggagaagattatga

SEQ ID NO: 725438 - DNA, 19 bp, Mus musculus
  siRNA target sequence for 4930413O22Rik (NM_026493.2,388-406).
gaattgaggcaagattata

SEQ ID NO: 725439 - DNA, 19 bp, Mus musculus
  siRNA target sequence for 4930413O22Rik (NM_026493.2,396-414).
gcaagattatagacgatat

SEQ ID NO: 725440 - DNA, 19 bp, Mus musculus
  siRNA target sequence for 4930413O22Rik (NM_026493.2,400-418).
gattatagacgatatctta

SEQ ID NO: 725441 - DNA, 19 bp, Mus musculus
  siRNA target sequence for 4930413O22Rik (NM_026493.2,447-465).
gaaaaatttcctatctact

SEQ ID NO: 725442 - DNA, 19 bp, Mus musculus
  siRNA target sequence for 4930413O22Rik (NM_026493.2,456-474).
cctatctactggtgaaaca

SEQ ID NO: 725443 - DNA, 19 bp, Mus musculus
  siRNA target sequence for 4930413O22Rik (NM_026493.2,504-522).
cattgatgagcggttatct

SEQ ID NO: 725444 - DNA, 19 bp, Mus musculus
  siRNA target sequence for 4930413O22Rik (NM_026493.2,514-532).
cggttatctgccaaggaaa

SEQ ID NO: 725445 - DNA, 19 bp, Mus musculus
  siRNA target sequence for 4930413O22Rik (NM_026493.2,521-539).
ctgccaaggaaagattgaa

SEQ ID NO: 725446 - DNA, 19 bp, Mus musculus
  siRNA target sequence for 4930413O22Rik (NM_026493.2,552-570).
ccgagaatacaatcagttt

SEQ ID NO: 725447 - DNA, 19 bp, Mus musculus
  siRNA target sequence for 4930413O22Rik (NM_026493.2,556-574).
gaatacaatcagtttctca

SEQ ID NO: 725448 - DNA, 19 bp, Mus musculus
  siRNA target sequence for 4930413O22Rik (NM_026493.2,605-623).
gacaggtagaaaagaatat

SEQ ID NO: 725449 - DNA, 19 bp, Mus musculus
  siRNA target sequence for 4930413O22Rik (NM_026493.2,618-636).
gaatattgagcctaagagt

SEQ ID NO: 725450 - DNA, 19 bp, Mus musculus
  siRNA target sequence for 4930413O22Rik (NM_026493.2,625-643).
gagcctaagagtcaaagaa

SEQ ID NO: 725451 - DNA, 19 bp, Mus musculus
  siRNA target sequence for 4930413O22Rik (NM_026493.2,628-646).
cctaagagtcaaagaaata

SEQ ID NO: 725452 - DNA, 19 bp, Mus musculus
  siRNA target sequence for 4930413O22Rik (NM_026493.2,665-683).
gtaaatctgatctaccttt

SEQ ID NO: 725453 - DNA, 19 bp, Mus musculus
  siRNA target sequence for 4930413O22Rik (NM_026493.2,671-689).
ctgatctacctttacaaat

SEQ ID NO: 725454 - DNA, 19 bp, Mus musculus
  siRNA target sequence for 4930413O22Rik (NM_026493.2,676-694).
ctacctttacaaatacaga

SEQ ID NO: 725455 - DNA, 19 bp, Mus musculus
  siRNA target sequence for 4930413O22Rik (NM_026493.2,760-778).
gatggtgaaattgaattaa

SEQ ID NO: 725456 - DNA, 19 bp, Mus musculus
  siRNA target sequence for 4930413O22Rik (NM_026493.2,783-801).
cagaagaccgcttaaacaa

SEQ ID NO: 725457 - DNA, 19 bp, Mus musculus
  siRNA target sequence for 4930413O22Rik (NM_026493.2,788-806).
gaccgcttaaacaaacaaa

SEQ ID NO: 725458 - DNA, 19 bp, Mus musculus
  siRNA target sequence for 4930413O22Rik (NM_026493.2,952-970).
gacatggacgagaggttta

SEQ ID NO: 725459 - DNA, 19 bp, Mus musculus
  siRNA target sequence for 4930413O22Rik (NM_026493.2,954-972).
catggacgagaggtttaga

SEQ ID NO: 725460 - DNA, 19 bp, Mus musculus
  siRNA target sequence for 4930413O22Rik (NM_026493.2,957-975).
ggacgagaggtttagattt

SEQ ID NO: 725461 - DNA, 19 bp, Mus musculus
  siRNA target sequence for 4930413O22Rik (NM_026493.2,965-983).
ggtttagatttgaaagtga

SEQ ID NO: 725462 - DNA, 19 bp, Mus musculus
  siRNA target sequence for 4930413O22Rik (NM_026493.2,976-994).
gaaagtgattttgatagaa

SEQ ID NO: 725463 - DNA, 19 bp, Mus musculus
  siRNA target sequence for 4930413O22Rik (NM_026493.2,1013-1031).
caaatggcaggtatttaca

SEQ ID NO: 725464 - DNA, 19 bp, Mus musculus
  siRNA target sequence for 6330579B17Rik (NM_026494.1,89-107).
cgcgctgggccgaggttat

SEQ ID NO: 725465 - DNA, 19 bp, Mus musculus
  siRNA target sequence for 6330579B17Rik (NM_026494.1,202-220).
cgctttctggacaacttca

SEQ ID NO: 725466 - DNA, 19 bp, Mus musculus
  siRNA target sequence for 6330579B17Rik (NM_026494.1,488-506).
ccactttggcggattatct

SEQ ID NO: 725467 - DNA, 19 bp, Mus musculus
  siRNA target sequence for 6330579B17Rik (NM_026494.1,528-546).
cctggctctcagtccatta

SEQ ID NO: 725468 - DNA, 19 bp, Mus musculus
  siRNA target sequence for 6330579B17Rik (NM_026494.1,548-566).
gctcttctgcgatgtttta

SEQ ID NO: 725469 - DNA, 19 bp, Mus musculus
  siRNA target sequence for 6330579B17Rik (NM_026494.1,575-593).
cggcagtgtcagatttcta

SEQ ID NO: 725470 - DNA, 19 bp, Mus musculus
  siRNA target sequence for 6330579B17Rik (NM_026494.1,578-596).
cagtgtcagatttctatat

SEQ ID NO: 725471 - DNA, 19 bp, Mus musculus
  siRNA target sequence for 6330579B17Rik (NM_026494.1,693-711).
caaagactgggctcctaaa

SEQ ID NO: 725472 - DNA, 19 bp, Mus musculus
  siRNA target sequence for 6330579B17Rik (NM_026494.1,702-720).
ggctcctaaagcgtttgta

SEQ ID NO: 725473 - DNA, 19 bp, Mus musculus
  siRNA target sequence for 6330579B17Rik (NM_026494.1,740-758).
cagacccggacatcataat

SEQ ID NO: 725474 - DNA, 19 bp, Mus musculus
  siRNA target sequence for 6330579B17Rik (NM_026494.1,742-760).
gacccggacatcataatca

SEQ ID NO: 725475 - DNA, 19 bp, Mus musculus
  siRNA target sequence for 6330579B17Rik (NM_026494.1,744-762).
cccggacatcataatcagt

SEQ ID NO: 725476 - DNA, 19 bp, Mus musculus
  siRNA target sequence for 6330579B17Rik (NM_026494.1,761-779).
gtcgggctcggaatgcttt

SEQ ID NO: 725477 - DNA, 19 bp, Mus musculus
  siRNA target sequence for 6330579B17Rik (NM_026494.1,769-787).
cggaatgctttggaagttt

SEQ ID NO: 725478 - DNA, 19 bp, Mus musculus
  siRNA target sequence for 6330579B17Rik (NM_026494.1,770-788).
ggaatgctttggaagttta

SEQ ID NO: 725479 - DNA, 19 bp, Mus musculus
  siRNA target sequence for 6330579B17Rik (NM_026494.1,810-828).
caacatcctggagtcaata

SEQ ID NO: 725480 - DNA, 19 bp, Mus musculus
  siRNA target sequence for 6330579B17Rik (NM_026494.1,896-914).
caaaaggcttggtgataga

SEQ ID NO: 725481 - DNA, 19 bp, Mus musculus
  siRNA target sequence for 6330579B17Rik (NM_026494.1,940-958).
ctcgacacacagcttttat

SEQ ID NO: 725482 - DNA, 19 bp, Mus musculus
  siRNA target sequence for 6330579B17Rik (NM_026494.1,982-1000).
gctcctctaggatcaaaca

SEQ ID NO: 725483 - DNA, 19 bp, Mus musculus
  siRNA target sequence for 6330579B17Rik (NM_026494.1,1007-1025).
ctcttaccactgataggaa

SEQ ID NO: 725484 - DNA, 19 bp, Mus musculus
  siRNA target sequence for Grhl2 (NM_026496.1,357-375).
cacaagagtcggacaataa

SEQ ID NO: 725485 - DNA, 19 bp, Mus musculus
  siRNA target sequence for Grhl2 (NM_026496.1,364-382).
gtcggacaataataaaaga

SEQ ID NO: 725486 - DNA, 19 bp, Mus musculus
  siRNA target sequence for Grhl2 (NM_026496.1,366-384).
cggacaataataaaagact

SEQ ID NO: 725487 - DNA, 19 bp, Mus musculus
  siRNA target sequence for Grhl2 (NM_026496.1,546-564).
gcctgctctatgactacta

SEQ ID NO: 725488 - DNA, 19 bp, Mus musculus
  siRNA target sequence for Grhl2 (NM_026496.1,623-641).
gaccaggataaaagaaact

SEQ ID NO: 725489 - DNA, 19 bp, Mus musculus
  siRNA target sequence for Grhl2 (NM_026496.1,654-672).
gtgaagcccagatcaattt

SEQ ID NO: 725490 - DNA, 19 bp, Mus musculus
  siRNA target sequence for Grhl2 (NM_026496.1,656-674).
gaagcccagatcaatttga

SEQ ID NO: 725491 - DNA, 19 bp, Mus musculus
  siRNA target sequence for Grhl2 (NM_026496.1,713-731).
ccggtgaacctctgtctaa

SEQ ID NO: 725492 - DNA, 19 bp, Mus musculus
  siRNA target sequence for Grhl2 (NM_026496.1,715-733).
ggtgaacctctgtctaagt

SEQ ID NO: 725493 - DNA, 19 bp, Mus musculus
  siRNA target sequence for Grhl2 (NM_026496.1,718-736).
gaacctctgtctaagtcaa

SEQ ID NO: 725494 - DNA, 19 bp, Mus musculus
  siRNA target sequence for Grhl2 (NM_026496.1,737-755).
gaccacatggagaattcga

SEQ ID NO: 725495 - DNA, 19 bp, Mus musculus
  siRNA target sequence for Grhl2 (NM_026496.1,758-776).
cgcgagcagtacagtgtat

SEQ ID NO: 725496 - DNA, 19 bp, Mus musculus
  siRNA target sequence for Grhl2 (NM_026496.1,826-844).
gaaagccgaggatttcaca

SEQ ID NO: 725497 - DNA, 19 bp, Mus musculus
  siRNA target sequence for Grhl2 (NM_026496.1,895-913).
gcagcgcgtggttatcttt

SEQ ID NO: 725498 - DNA, 19 bp, Mus musculus
  siRNA target sequence for Grhl2 (NM_026496.1,898-916).
gcgcgtggttatctttgaa

SEQ ID NO: 725499 - DNA, 19 bp, Mus musculus
  siRNA target sequence for Grhl2 (NM_026496.1,996-1014).
cctacagcgagagctttaa

SEQ ID NO: 725500 - DNA, 19 bp, Mus musculus
  siRNA target sequence for Grhl2 (NM_026496.1,1028-1046).
gagaaatttcggagtactt

SEQ ID NO: 725501 - DNA, 19 bp, Mus musculus
  siRNA target sequence for Grhl2 (NM_026496.1,1052-1070).
ggtgctgacgagtatacat

SEQ ID NO: 725502 - DNA, 19 bp, Mus musculus
  siRNA target sequence for Grhl2 (NM_026496.1,1053-1071).
gtgctgacgagtatacata

SEQ ID NO: 725503 - DNA, 19 bp, Mus musculus
  siRNA target sequence for Grhl2 (NM_026496.1,1056-1074).
ctgacgagtatacatatga

SEQ ID NO: 725504 - DNA, 19 bp, Mus musculus
  siRNA target sequence for Grhl2 (NM_026496.1,1080-1098).
cgggaagtggtacatttca

SEQ ID NO: 725505 - DNA, 19 bp, Mus musculus
  siRNA target sequence for Grhl2 (NM_026496.1,1160-1178).
ctcaacaaaggacaattct

SEQ ID NO: 725506 - DNA, 19 bp, Mus musculus
  siRNA target sequence for Grhl2 (NM_026496.1,1281-1299).
gagatgagcagctgaaata

SEQ ID NO: 725507 - DNA, 19 bp, Mus musculus
  siRNA target sequence for Grhl2 (NM_026496.1,1336-1354).
gcagagggtccttgacatt

SEQ ID NO: 725508 - DNA, 19 bp, Mus musculus
  siRNA target sequence for Grhl2 (NM_026496.1,1375-1393).
caacaccatcgggaacatt

SEQ ID NO: 725509 - DNA, 19 bp, Mus musculus
  siRNA target sequence for Grhl2 (NM_026496.1,1404-1422).
catacaatgctgtttcctt

SEQ ID NO: 725510 - DNA, 19 bp, Mus musculus
  siRNA target sequence for Grhl2 (NM_026496.1,1435-1453).
gaacgaggaggcaaagatt

SEQ ID NO: 725511 - DNA, 19 bp, Mus musculus
  siRNA target sequence for Grhl2 (NM_026496.1,1442-1460).
gaggcaaagatttttatca

SEQ ID NO: 725512 - DNA, 19 bp, Mus musculus
  siRNA target sequence for Grhl2 (NM_026496.1,1465-1483).
gaattgcctgagtacagat

SEQ ID NO: 725513 - DNA, 19 bp, Mus musculus
  siRNA target sequence for 0610016O18Rik (NM_026497.1,168-186).
cagccgcagagggaaatgt

SEQ ID NO: 725514 - DNA, 19 bp, Mus musculus
  siRNA target sequence for 0610016O18Rik (NM_026497.1,178-196).
gggaaatgtcgcaaagtta

SEQ ID NO: 725515 - DNA, 19 bp, Mus musculus
  siRNA target sequence for 0610016O18Rik (NM_026497.1,187-205).
cgcaaagttagcaggaata

SEQ ID NO: 725516 - DNA, 19 bp, Mus musculus
  siRNA target sequence for 0610016O18Rik (NM_026497.1,248-266).
ggatggactgctttaatgt

SEQ ID NO: 725517 - DNA, 19 bp, Mus musculus
  siRNA target sequence for 0610016O18Rik (NM_026497.1,249-267).
gatggactgctttaatgta

SEQ ID NO: 725518 - DNA, 19 bp, Mus musculus
  siRNA target sequence for 0610016O18Rik (NM_026497.1,323-341).
gacagatcacttgtcaata

SEQ ID NO: 725519 - DNA, 19 bp, Mus musculus
  siRNA target sequence for 0610016O18Rik (NM_026497.1,348-366).
ggcaaaccgccctggatat

SEQ ID NO: 725520 - DNA, 19 bp, Mus musculus
  siRNA target sequence for 0610016O18Rik (NM_026497.1,349-367).
gcaaaccgccctggatatt

SEQ ID NO: 725521 - DNA, 19 bp, Mus musculus
  siRNA target sequence for 0610016O18Rik (NM_026497.1,368-386).
gctgcattttggggttata

SEQ ID NO: 725522 - DNA, 19 bp, Mus musculus
  siRNA target sequence for 0610016O18Rik (NM_026497.1,379-397).
gggttataggcatatagct

SEQ ID NO: 725523 - DNA, 19 bp, Mus musculus
  siRNA target sequence for 0610016O18Rik (NM_026497.1,380-398).
ggttataggcatatagcta

SEQ ID NO: 725524 - DNA, 19 bp, Mus musculus
  siRNA target sequence for 0610016O18Rik (NM_026497.1,381-399).
gttataggcatatagctaa

SEQ ID NO: 725525 - DNA, 19 bp, Mus musculus
  siRNA target sequence for 0610016O18Rik (NM_026497.1,387-405).
ggcatatagctaacttgtt

SEQ ID NO: 725526 - DNA, 19 bp, Mus musculus
  siRNA target sequence for 0610016O18Rik (NM_026497.1,388-406).
gcatatagctaacttgtta

SEQ ID NO: 725527 - DNA, 19 bp, Mus musculus
  siRNA target sequence for 0610016O18Rik (NM_026497.1,430-448).
gccctggttcctaaccaat

SEQ ID NO: 725528 - DNA, 19 bp, Mus musculus
  siRNA target sequence for 0610016O18Rik (NM_026497.1,457-475).
cgagtgtgagaattatttt

SEQ ID NO: 725529 - DNA, 19 bp, Mus musculus
  siRNA target sequence for 0610016O18Rik (NM_026497.1,490-508).
ggaccggaggagtgacaaa

SEQ ID NO: 725530 - DNA, 19 bp, Mus musculus
  siRNA target sequence for 0610016O18Rik (NM_026497.1,491-509).
gaccggaggagtgacaaaa

SEQ ID NO: 725531 - DNA, 19 bp, Mus musculus
  siRNA target sequence for 0610016O18Rik (NM_026497.1,493-511).
ccggaggagtgacaaaaga

SEQ ID NO: 725532 - DNA, 19 bp, Mus musculus
  siRNA target sequence for 0610016O18Rik (NM_026497.1,494-512).
cggaggagtgacaaaagaa

SEQ ID NO: 725533 - DNA, 19 bp, Mus musculus
  siRNA target sequence for 0610016O18Rik (NM_026497.1,519-537).
ctgactggctgcaagctaa

SEQ ID NO: 725534 - DNA, 19 bp, Mus musculus
  siRNA target sequence for 0610016O18Rik (NM_026497.1,543-561).
gccaccccaccacagttta

SEQ ID NO: 725535 - DNA, 19 bp, Mus musculus
  siRNA target sequence for 0610016O18Rik (NM_026497.1,552-570).
ccacagtttatctcctttt

SEQ ID NO: 725536 - DNA, 19 bp, Mus musculus
  siRNA target sequence for 0610016O18Rik (NM_026497.1,589-607).
ggttaccctaggtggtaat

SEQ ID NO: 725537 - DNA, 19 bp, Mus musculus
  siRNA target sequence for 0610016O18Rik (NM_026497.1,590-608).
gttaccctaggtggtaata

SEQ ID NO: 725538 - DNA, 19 bp, Mus musculus
  siRNA target sequence for 0610016O18Rik (NM_026497.1,647-665).
ctgaactacccggatgtaa

SEQ ID NO: 725539 - DNA, 19 bp, Mus musculus
  siRNA target sequence for 0610016O18Rik (NM_026497.1,657-675).
cggatgtaaagggttactt

SEQ ID NO: 725540 - DNA, 19 bp, Mus musculus
  siRNA target sequence for 0610016O18Rik (NM_026497.1,792-810).
ggtttgccctcggtattga

SEQ ID NO: 725541 - DNA, 19 bp, Mus musculus
  siRNA target sequence for 0610016O18Rik (NM_026497.1,793-811).
gtttgccctcggtattgaa

SEQ ID NO: 725542 - DNA, 19 bp, Mus musculus
  siRNA target sequence for 0610016O18Rik (NM_026497.1,826-844).
ggagtttaagcaaagacat

SEQ ID NO: 725543 - DNA, 19 bp, Mus musculus
  siRNA target sequence for 0610016O18Rik (NM_026497.1,829-847).
gtttaagcaaagacatgaa

SEQ ID NO: 725544 - DNA, 19 bp, Mus musculus
  siRNA target sequence for 0610016O18Rik (NM_026497.1,879-897).
ctcttctgcagttgaaaga

SEQ ID NO: 725545 - DNA, 19 bp, Mus musculus
  siRNA target sequence for 0610016O18Rik (NM_026497.1,913-931).
ggtagctcaagcaagatca

SEQ ID NO: 725546 - DNA, 19 bp, Mus musculus
  siRNA target sequence for 0610016O18Rik (NM_026497.1,939-957).
cctggcatagtcgatacaa

SEQ ID NO: 725547 - DNA, 19 bp, Mus musculus
  siRNA target sequence for 0610016O18Rik (NM_026497.1,942-960).
ggcatagtcgatacaagtt

SEQ ID NO: 725548 - DNA, 19 bp, Mus musculus
  siRNA target sequence for 0610016O18Rik (NM_026497.1,972-990).
gtggcagtgcgactaaaat

SEQ ID NO: 725549 - DNA, 19 bp, Mus musculus
  siRNA target sequence for 0610016O18Rik (NM_026497.1,994-1012).
ggaaggaggctacaaaaga

SEQ ID NO: 725550 - DNA, 19 bp, Mus musculus
  siRNA target sequence for 0610016O18Rik (NM_026497.1,1043-1061).
caaggcgtccacaacacat

SEQ ID NO: 725551 - DNA, 19 bp, Mus musculus
  siRNA target sequence for 0610016O18Rik (NM_026497.1,1046-1064).
ggcgtccacaacacatctt

SEQ ID NO: 725552 - DNA, 19 bp, Mus musculus
  siRNA target sequence for 0610016O18Rik (NM_026497.1,1047-1065).
gcgtccacaacacatctta

SEQ ID NO: 725553 - DNA, 19 bp, Mus musculus
  siRNA target sequence for 0610016O18Rik (NM_026497.1,1071-1089).
gagttgatccagtcgtaat

SEQ ID NO: 725554 - DNA, 19 bp, Mus musculus
  siRNA target sequence for 0610016O18Rik (NM_026497.1,1073-1091).
gttgatccagtcgtaatta

SEQ ID NO: 725555 - DNA, 19 bp, Mus musculus
  siRNA target sequence for 0610016O18Rik (NM_026497.1,1102-1120).
ccatccagatggaaccaaa

SEQ ID NO: 725556 - DNA, 19 bp, Mus musculus
  siRNA target sequence for 0610016O18Rik (NM_026497.1,1167-1185).
gtcttgctggatttataga

SEQ ID NO: 725557 - DNA, 19 bp, Mus musculus
  siRNA target sequence for 0610016O18Rik (NM_026497.1,1283-1301).
ccaatgccctcctcgttaa

SEQ ID NO: 725558 - DNA, 19 bp, Mus musculus
  siRNA target sequence for 0610016O18Rik (NM_026497.1,1284-1302).
caatgccctcctcgttaat

SEQ ID NO: 725559 - DNA, 19 bp, Mus musculus
  siRNA target sequence for 0610016O18Rik (NM_026497.1,1288-1306).
gccctcctcgttaatgatt

SEQ ID NO: 725560 - DNA, 19 bp, Mus musculus
  siRNA target sequence for 0610016O18Rik (NM_026497.1,1297-1315).
gttaatgattggctgttta

SEQ ID NO: 725561 - DNA, 19 bp, Mus musculus
  siRNA target sequence for 0610016O18Rik (NM_026497.1,1329-1347).
ctacagaaattaaagttga

SEQ ID NO: 725562 - DNA, 19 bp, Mus musculus
  siRNA target sequence for 0610016O18Rik (NM_026497.1,1332-1350).
cagaaattaaagttgacaa

SEQ ID NO: 725563 - DNA, 19 bp, Mus musculus
  siRNA target sequence for 0610016O18Rik (NM_026497.1,1369-1387).
ccgatggttcactagagaa

SEQ ID NO: 725564 - DNA, 19 bp, Mus musculus
  siRNA target sequence for 0610016O18Rik (NM_026497.1,1388-1406).
caggttgtggacgttctta

SEQ ID NO: 725565 - DNA, 19 bp, Mus musculus
  siRNA target sequence for 0610016O18Rik (NM_026497.1,1446-1464).
gagctatcgcacatcagtt

SEQ ID NO: 725566 - DNA, 19 bp, Mus musculus
  siRNA target sequence for 0610016O18Rik (NM_026497.1,1448-1466).
gctatcgcacatcagttaa

SEQ ID NO: 725567 - DNA, 19 bp, Mus musculus
  siRNA target sequence for 0610016O18Rik (NM_026497.1,1453-1471).
cgcacatcagttaatcaaa

SEQ ID NO: 725568 - DNA, 19 bp, Mus musculus
  siRNA target sequence for 0610016O18Rik (NM_026497.1,1481-1499).
ggaatgaaccccaatctct

SEQ ID NO: 725569 - DNA, 19 bp, Mus musculus
  siRNA target sequence for 1300010M03Rik (NM_026501.1,279-297).
ggcgttctggttttttgca

SEQ ID NO: 725570 - DNA, 19 bp, Mus musculus
  siRNA target sequence for 1300010M03Rik (NM_026501.1,280-298).
gcgttctggttttttgcat

SEQ ID NO: 725571 - DNA, 19 bp, Mus musculus
  siRNA target sequence for 1300010M03Rik (NM_026501.1,285-303).
ctggttttttgcattgaca

SEQ ID NO: 725572 - DNA, 19 bp, Mus musculus
  siRNA target sequence for 1300010M03Rik (NM_026501.1,296-314).
cattgacatcacttcgttt

SEQ ID NO: 725573 - DNA, 19 bp, Mus musculus
  siRNA target sequence for 1300010M03Rik (NM_026501.1,302-320).
catcacttcgttttgtgtt

SEQ ID NO: 725574 - DNA, 19 bp, Mus musculus
  siRNA target sequence for 1300010M03Rik (NM_026501.1,339-357).
gatgatcattgtctgtatt

SEQ ID NO: 725575 - DNA, 19 bp, Mus musculus
  siRNA target sequence for 1300010M03Rik (NM_026501.1,372-390).
caaaatttggcctgagata

SEQ ID NO: 725576 - DNA, 19 bp, Mus musculus
  siRNA target sequence for 1300010M03Rik (NM_026501.1,491-509).
gggttagtgggaccatttt

SEQ ID NO: 725577 - DNA, 19 bp, Mus musculus
  siRNA target sequence for 1300010M03Rik (NM_026501.1,493-511).
gttagtgggaccattttca

SEQ ID NO: 725578 - DNA, 19 bp, Mus musculus
  siRNA target sequence for 1300010M03Rik (NM_026501.1,501-519).
gaccattttcataaggaat

SEQ ID NO: 725579 - DNA, 19 bp, Mus musculus
  siRNA target sequence for 1300010M03Rik (NM_026501.1,538-556).
caaaacccaggcaagttct

SEQ ID NO: 725580 - DNA, 19 bp, Mus musculus
  siRNA target sequence for 1300010M03Rik (NM_026501.1,569-587).
gtggggtactgaccttttt

SEQ ID NO: 725581 - DNA, 19 bp, Mus musculus
  siRNA target sequence for 1300010M03Rik (NM_026501.1,734-752).
gtgtccgtggctacatgat

SEQ ID NO: 725582 - DNA, 19 bp, Mus musculus
  siRNA target sequence for 1300010M03Rik (NM_026501.1,736-754).
gtccgtggctacatgatgt

SEQ ID NO: 725583 - DNA, 19 bp, Mus musculus
  siRNA target sequence for 1300010M03Rik (NM_026501.1,858-876).
gctggatgattctactgtt

SEQ ID NO: 725584 - DNA, 19 bp, Mus musculus
  siRNA target sequence for 1300010M03Rik (NM_026501.1,879-897).
cagggaattggctatcaca

SEQ ID NO: 725585 - DNA, 19 bp, Mus musculus
  siRNA target sequence for 1300010M03Rik (NM_026501.1,932-950).
cagaaaatggcacatttaa

SEQ ID NO: 725586 - DNA, 19 bp, Mus musculus
  siRNA target sequence for 1300010M03Rik (NM_026501.1,1102-1120).
gggatgcccagcttgatgt

SEQ ID NO: 725587 - DNA, 19 bp, Mus musculus
  siRNA target sequence for 1300010M03Rik (NM_026501.1,1205-1223).
cccttcctggaggatctaa

SEQ ID NO: 725588 - DNA, 19 bp, Mus musculus
  siRNA target sequence for 1300010M03Rik (NM_026501.1,1210-1228).
cctggaggatctaacctta

SEQ ID NO: 725589 - DNA, 19 bp, Mus musculus
  siRNA target sequence for 1300010M03Rik (NM_026501.1,1420-1438).
ctagaccctgccagttcta

SEQ ID NO: 725590 - DNA, 19 bp, Mus musculus
  siRNA target sequence for 1110004E09Rik (NM_026502.1,119-137).
gcgacgagagccagttctt

SEQ ID NO: 725591 - DNA, 19 bp, Mus musculus
  siRNA target sequence for 1110004E09Rik (NM_026502.1,120-138).
cgacgagagccagttctta

SEQ ID NO: 725592 - DNA, 19 bp, Mus musculus
  siRNA target sequence for 1110004E09Rik (NM_026502.1,353-371).
gagggtctgtttttacgaa

SEQ ID NO: 725593 - DNA, 19 bp, Mus musculus
  siRNA target sequence for 1110004E09Rik (NM_026502.1,390-408).
gaacgggcaagctccaaat

SEQ ID NO: 725594 - DNA, 19 bp, Mus musculus
  siRNA target sequence for 1110004E09Rik (NM_026502.1,449-467).
ccaaggcgatagtgtctaa

SEQ ID NO: 725595 - DNA, 19 bp, Mus musculus
  siRNA target sequence for 1110004E09Rik (NM_026502.1,453-471).
ggcgatagtgtctaagaaa

SEQ ID NO: 725596 - DNA, 19 bp, Mus musculus
  siRNA target sequence for 1110004E09Rik (NM_026502.1,455-473).
cgatagtgtctaagaaaca

SEQ ID NO: 725597 - DNA, 19 bp, Mus musculus
  siRNA target sequence for 1110004E09Rik (NM_026502.1,456-474).
gatagtgtctaagaaacaa

SEQ ID NO: 725598 - DNA, 19 bp, Mus musculus
  siRNA target sequence for 1110004E09Rik (NM_026502.1,462-480).
gtctaagaaacaagtagaa

SEQ ID NO: 725599 - DNA, 19 bp, Mus musculus
  siRNA target sequence for 1110004E09Rik (NM_026502.1,535-553).
ggtgcggtcatgatcgttt

SEQ ID NO: 725600 - DNA, 19 bp, Mus musculus
  siRNA target sequence for 1110004E09Rik (NM_026502.1,536-554).
gtgcggtcatgatcgttta

SEQ ID NO: 725601 - DNA, 19 bp, Mus musculus
  siRNA target sequence for 1110004E09Rik (NM_026502.1,561-579).
ggggctgccaccatacgat

SEQ ID NO: 725602 - DNA, 19 bp, Mus musculus
  siRNA target sequence for 1110004E09Rik (NM_026502.1,902-920).
ctgacaacacggctttgaa

SEQ ID NO: 725603 - DNA, 19 bp, Mus musculus
  siRNA target sequence for 1110004E09Rik (NM_026502.1,909-927).
cacggctttgaaaagacat

SEQ ID NO: 725604 - DNA, 19 bp, Mus musculus
  siRNA target sequence for 1110004E09Rik (NM_026502.1,931-949).
catggcgtaaaagacataa

SEQ ID NO: 725605 - DNA, 19 bp, Mus musculus
  siRNA target sequence for 1110004E09Rik (NM_026502.1,934-952).
ggcgtaaaagacataaagt

SEQ ID NO: 725606 - DNA, 19 bp, Mus musculus
  siRNA target sequence for 1110058L19Rik (NM_026503.1,61-79).
ccgtttcacggatgacttt

SEQ ID NO: 725607 - DNA, 19 bp, Mus musculus
  siRNA target sequence for 1110058L19Rik (NM_026503.1,97-115).
gaccatctcttctgaatca

SEQ ID NO: 725608 - DNA, 19 bp, Mus musculus
  siRNA target sequence for 1110058L19Rik (NM_026503.1,99-117).
ccatctcttctgaatcatt

SEQ ID NO: 725609 - DNA, 19 bp, Mus musculus
  siRNA target sequence for 1110058L19Rik (NM_026503.1,165-183).
caagcccttaagaagtcaa

SEQ ID NO: 725610 - DNA, 19 bp, Mus musculus
  siRNA target sequence for 1110058L19Rik (NM_026503.1,189-207).
ccactcggtcgttttgact

SEQ ID NO: 725611 - DNA, 19 bp, Mus musculus
  siRNA target sequence for 1110058L19Rik (NM_026503.1,232-250).
gagagccactgcagaagtt

SEQ ID NO: 725612 - DNA, 19 bp, Mus musculus
  siRNA target sequence for 1110058L19Rik (NM_026503.1,245-263).
gaagtttccggatgatgta

SEQ ID NO: 725613 - DNA, 19 bp, Mus musculus
  siRNA target sequence for 1110058L19Rik (NM_026503.1,248-266).
gtttccggatgatgtaaat

SEQ ID NO: 725614 - DNA, 19 bp, Mus musculus
  siRNA target sequence for 1110058L19Rik (NM_026503.1,302-320).
ggagcctacacgatatgga

SEQ ID NO: 725615 - DNA, 19 bp, Mus musculus
  siRNA target sequence for 1110058L19Rik (NM_026503.1,335-353).
gggacgctgcattgacttt

SEQ ID NO: 725616 - DNA, 19 bp, Mus musculus
  siRNA target sequence for Bambi (NM_026505.1,553-571).
cgaagacatgtgcaattat

SEQ ID NO: 725617 - DNA, 19 bp, Mus musculus
  siRNA target sequence for Bambi (NM_026505.1,700-718).
gttccgcgcagctgtgata

SEQ ID NO: 725618 - DNA, 19 bp, Mus musculus
  siRNA target sequence for Bambi (NM_026505.1,952-970).
gcaagcagagctcagtaat

SEQ ID NO: 725619 - DNA, 19 bp, Mus musculus
  siRNA target sequence for Bambi (NM_026505.1,1013-1031).
catggaaagctggaattca

SEQ ID NO: 725620 - DNA, 19 bp, Mus musculus
  siRNA target sequence for 2310031L18Rik (NM_026507.2,50-68).
ctcgtctccggcaggaatt

SEQ ID NO: 725621 - DNA, 19 bp, Mus musculus
  siRNA target sequence for 2310031L18Rik (NM_026507.2,52-70).
cgtctccggcaggaattta

SEQ ID NO: 725622 - DNA, 19 bp, Mus musculus
  siRNA target sequence for 2310031L18Rik (NM_026507.2,53-71).
gtctccggcaggaatttaa

SEQ ID NO: 725623 - DNA, 19 bp, Mus musculus
  siRNA target sequence for 2310031L18Rik (NM_026507.2,57-75).
ccggcaggaatttaatgaa

SEQ ID NO: 725624 - DNA, 19 bp, Mus musculus
  siRNA target sequence for 2310031L18Rik (NM_026507.2,89-107).
cctctaaagacccattcat

SEQ ID NO: 725625 - DNA, 19 bp, Mus musculus
  siRNA target sequence for 2310031L18Rik (NM_026507.2,105-123).
catctatgaggctgatgta

SEQ ID NO: 725626 - DNA, 19 bp, Mus musculus
  siRNA target sequence for 2310031L18Rik (NM_026507.2,108-126).
ctatgaggctgatgtacaa

SEQ ID NO: 725627 - DNA, 19 bp, Mus musculus
  siRNA target sequence for 2310031L18Rik (NM_026507.2,146-164).
gccaaccaagtcttctgaa

SEQ ID NO: 725628 - DNA, 19 bp, Mus musculus
  siRNA target sequence for 2310031L18Rik (NM_026507.2,230-248).
caagtcaagttgaagaact

SEQ ID NO: 725629 - DNA, 19 bp, Mus musculus
  siRNA target sequence for 2310031L18Rik (NM_026507.2,252-270).
gtctgaagaaactgctatt

SEQ ID NO: 725630 - DNA, 19 bp, Mus musculus
  siRNA target sequence for 2310031L18Rik (NM_026507.2,350-368).
ccatggctcacaatcctaa

SEQ ID NO: 725631 - DNA, 19 bp, Mus musculus
  siRNA target sequence for 2310031L18Rik (NM_026507.2,365-383).
ctaatatgactcatctgaa

SEQ ID NO: 725632 - DNA, 19 bp, Mus musculus
  siRNA target sequence for 2310031L18Rik (NM_026507.2,374-392).
ctcatctgaagattaagca

SEQ ID NO: 725633 - DNA, 19 bp, Mus musculus
  siRNA target sequence for 2310031L18Rik (NM_026507.2,423-441).
gagatgtgacggttcagat

SEQ ID NO: 725634 - DNA, 19 bp, Mus musculus
  siRNA target sequence for 2310031L18Rik (NM_026507.2,460-478).
ctaggagctgagcttatca

SEQ ID NO: 725635 - DNA, 19 bp, Mus musculus
  siRNA target sequence for 2310031L18Rik (NM_026507.2,467-485).
ctgagcttatcacaacaaa

SEQ ID NO: 725636 - DNA, 19 bp, Mus musculus
  siRNA target sequence for 2310031L18Rik (NM_026507.2,472-490).
cttatcacaacaaatgaca

SEQ ID NO: 725637 - DNA, 19 bp, Mus musculus
  siRNA target sequence for 2310031L18Rik (NM_026507.2,508-526).
ctgtatgtgctcacttgta

SEQ ID NO: 725638 - DNA, 19 bp, Mus musculus
  siRNA target sequence for 2310031L18Rik (NM_026507.2,510-528).
gtatgtgctcacttgtaaa

SEQ ID NO: 725639 - DNA, 19 bp, Mus musculus
  siRNA target sequence for 2310031L18Rik (NM_026507.2,619-637).
gcccagtatgagctcttta

SEQ ID NO: 725640 - DNA, 19 bp, Mus musculus
  siRNA target sequence for 2310031L18Rik (NM_026507.2,661-679).
gttgccccatcacaaacta

SEQ ID NO: 725641 - DNA, 19 bp, Mus musculus
  siRNA target sequence for 2310031L18Rik (NM_026507.2,756-774).
gaatatcagagtacaatca

SEQ ID NO: 725642 - DNA, 19 bp, Mus musculus
  siRNA target sequence for 2310031L18Rik (NM_026507.2,788-806).
gttgtctgagtcatcttca

SEQ ID NO: 725643 - DNA, 19 bp, Mus musculus
  siRNA target sequence for 2310031L18Rik (NM_026507.2,884-902).
caaaatctgctcttgaatt

SEQ ID NO: 725644 - DNA, 19 bp, Mus musculus
  siRNA target sequence for 2310031L18Rik (NM_026507.2,1074-1092).
cagcagtgtggtttcctat

SEQ ID NO: 725645 - DNA, 19 bp, Mus musculus
  siRNA target sequence for 2310031L18Rik (NM_026507.2,1157-1175).
ggttgcacagtggaagtaa

SEQ ID NO: 725646 - DNA, 19 bp, Mus musculus
  siRNA target sequence for 2310031L18Rik (NM_026507.2,1161-1179).
gcacagtggaagtaacagt

SEQ ID NO: 725647 - DNA, 19 bp, Mus musculus
  siRNA target sequence for 2310031L18Rik (NM_026507.2,1168-1186).
ggaagtaacagtttactaa

SEQ ID NO: 725648 - DNA, 19 bp, Mus musculus
  siRNA target sequence for 2310031L18Rik (NM_026507.2,1328-1346).
catctttgaatcatttgga

SEQ ID NO: 725649 - DNA, 19 bp, Mus musculus
  siRNA target sequence for 2310031L18Rik (NM_026507.2,1402-1420).
ctccatcatattcttgaaa

SEQ ID NO: 725650 - DNA, 19 bp, Mus musculus
  siRNA target sequence for 2310031L18Rik (NM_026507.2,1405-1423).
catcatattcttgaaatct

SEQ ID NO: 725651 - DNA, 19 bp, Mus musculus
  siRNA target sequence for 2310031L18Rik (NM_026507.2,1699-1717).
gagctgacactgaatggta

SEQ ID NO: 725652 - DNA, 19 bp, Mus musculus
  siRNA target sequence for 2310031L18Rik (NM_026507.2,1730-1748).
ggacagccttcgttaacat

SEQ ID NO: 725653 - DNA, 19 bp, Mus musculus
  siRNA target sequence for 2310031L18Rik (NM_026507.2,1735-1753).
gccttcgttaacatgctta

SEQ ID NO: 725654 - DNA, 19 bp, Mus musculus
  siRNA target sequence for 2310039E09Rik (NM_026509.1,248-266).
gggtaacgcgataaagtct

SEQ ID NO: 725655 - DNA, 19 bp, Mus musculus
  siRNA target sequence for 2310039E09Rik (NM_026509.1,256-274).
cgataaagtctgtccaaat

SEQ ID NO: 725656 - DNA, 19 bp, Mus musculus
  siRNA target sequence for 2310039E09Rik (NM_026509.1,310-328).
cgggctacgttgtcaacaa

SEQ ID NO: 725657 - DNA, 19 bp, Mus musculus
  siRNA target sequence for 2310039E09Rik (NM_026509.1,358-376).
ctcacattaaggatgtcaa

SEQ ID NO: 725658 - DNA, 19 bp, Mus musculus
  siRNA target sequence for 2310039E09Rik (NM_026509.1,416-434).
cgaaaccaagcaagaagaa

SEQ ID NO: 725659 - DNA, 19 bp, Mus musculus
  siRNA target sequence for 2310039E09Rik (NM_026509.1,491-509).
cgcatccctgtctgttgtt

SEQ ID NO: 725660 - DNA, 19 bp, Mus musculus
  siRNA target sequence for 2310039E09Rik (NM_026509.1,492-510).
gcatccctgtctgttgtta

SEQ ID NO: 725661 - DNA, 19 bp, Mus musculus
  siRNA target sequence for 2310039E09Rik (NM_026509.1,493-511).
catccctgtctgttgttaa

SEQ ID NO: 725662 - DNA, 19 bp, Mus musculus
  siRNA target sequence for 2310039E09Rik (NM_026509.1,580-598).
cggatgaggagtattatgt

SEQ ID NO: 725663 - DNA, 19 bp, Mus musculus
  siRNA target sequence for 2310039E09Rik (NM_026509.1,581-599).
ggatgaggagtattatgtt

SEQ ID NO: 725664 - DNA, 19 bp, Mus musculus
  siRNA target sequence for 2310039E09Rik (NM_026509.1,710-728).
gaaagtgagtgggattaga

SEQ ID NO: 725665 - DNA, 19 bp, Mus musculus
  siRNA target sequence for 2310039E09Rik (NM_026509.1,714-732).
gtgagtgggattagaacta

SEQ ID NO: 725666 - DNA, 19 bp, Mus musculus
  siRNA target sequence for 2310039E09Rik (NM_026509.1,816-834).
ggggaaagatttaagaaat

SEQ ID NO: 725667 - DNA, 19 bp, Mus musculus
  siRNA target sequence for 2310039E09Rik (NM_026509.1,852-870).
ccctcaaaggaagctttta

SEQ ID NO: 725668 - DNA, 19 bp, Mus musculus
  siRNA target sequence for 2310039E09Rik (NM_026509.1,872-890).
gattcggagccttaggaaa

SEQ ID NO: 725669 - DNA, 19 bp, Mus musculus
  siRNA target sequence for 2310039E09Rik (NM_026509.1,931-949).
ggatgggcgtggacatcat

SEQ ID NO: 725670 - DNA, 19 bp, Mus musculus
  siRNA target sequence for 2310037B18Rik (NM_026510.1,367-385).
gggtcgatctccttcacat

SEQ ID NO: 725671 - DNA, 19 bp, Mus musculus
  siRNA target sequence for 2310037B18Rik (NM_026510.1,368-386).
ggtcgatctccttcacata

SEQ ID NO: 725672 - DNA, 19 bp, Mus musculus
  siRNA target sequence for 2310037B18Rik (NM_026510.1,369-387).
gtcgatctccttcacatat

SEQ ID NO: 725673 - DNA, 19 bp, Mus musculus
  siRNA target sequence for 2310037B18Rik (NM_026510.1,391-409).
ctttggcgggagcaacttt

SEQ ID NO: 725674 - DNA, 19 bp, Mus musculus
  siRNA target sequence for 2310037B18Rik (NM_026510.1,395-413).
ggcgggagcaacttttcta

SEQ ID NO: 725675 - DNA, 19 bp, Mus musculus
  siRNA target sequence for 2310037B18Rik (NM_026510.1,396-414).
gcgggagcaacttttctat

SEQ ID NO: 725676 - DNA, 19 bp, Mus musculus
  siRNA target sequence for 2310037B18Rik (NM_026510.1,472-490).
gcaggagagcagatgtgat

SEQ ID NO: 725677 - DNA, 19 bp, Mus musculus
  siRNA target sequence for 2310037B18Rik (NM_026510.1,526-544).
gagacctcgatcacgataa

SEQ ID NO: 725678 - DNA, 19 bp, Mus musculus
  siRNA target sequence for 2310037B18Rik (NM_026510.1,601-619).
gagggacactgctgtgtaa

SEQ ID NO: 725679 - DNA, 19 bp, Mus musculus
  siRNA target sequence for 2810002N01Rik (NM_026511.1,175-193).
gtcttgccatgattggata

SEQ ID NO: 725680 - DNA, 19 bp, Mus musculus
  siRNA target sequence for 2810002N01Rik (NM_026511.1,217-235).
ccttcgtcccgttcatttt

SEQ ID NO: 725681 - DNA, 19 bp, Mus musculus
  siRNA target sequence for 2810002N01Rik (NM_026511.1,436-454).
ggagatggccgacttctat

SEQ ID NO: 725682 - DNA, 19 bp, Mus musculus
  siRNA target sequence for 2810002N01Rik (NM_026511.1,515-533).
cgtaattttgccatcactt

SEQ ID NO: 725683 - DNA, 19 bp, Mus musculus
  siRNA target sequence for 2810417H13Rik (NM_026515.1,160-178).
gtcaccaattcttcaagtt

SEQ ID NO: 725684 - DNA, 19 bp, Mus musculus
  siRNA target sequence for 2810417H13Rik (NM_026515.1,329-347).
gtggcttaggaaaagcaaa

SEQ ID NO: 725685 - DNA, 19 bp, Mus musculus
  siRNA target sequence for 2810417M05Rik (NM_026516.1,444-462).
ccctcatcctgaaaggtat

SEQ ID NO: 725686 - DNA, 19 bp, Mus musculus
  siRNA target sequence for 2810417M05Rik (NM_026516.1,448-466).
catcctgaaaggtattgca

SEQ ID NO: 725687 - DNA, 19 bp, Mus musculus
  siRNA target sequence for 2810417M05Rik (NM_026516.1,470-488).
cgatgcacagcaatcaagt

SEQ ID NO: 725688 - DNA, 19 bp, Mus musculus
  siRNA target sequence for 2810417M05Rik (NM_026516.1,471-489).
gatgcacagcaatcaagta

SEQ ID NO: 725689 - DNA, 19 bp, Mus musculus
  siRNA target sequence for 2810417M05Rik (NM_026516.1,479-497).
gcaatcaagtaccactttt

SEQ ID NO: 725690 - DNA, 19 bp, Mus musculus
  siRNA target sequence for 2810417M05Rik (NM_026516.1,500-518).
cagccaatccgcttaagaa

SEQ ID NO: 725691 - DNA, 19 bp, Mus musculus
  siRNA target sequence for 2810417M05Rik (NM_026516.1,503-521).
ccaatccgcttaagaaaca

SEQ ID NO: 725692 - DNA, 19 bp, Mus musculus
  siRNA target sequence for 2810417M05Rik (NM_026516.1,504-522).
caatccgcttaagaaacat

SEQ ID NO: 725693 - DNA, 19 bp, Mus musculus
  siRNA target sequence for 2810417M05Rik (NM_026516.1,562-580).
gcacctgcttcatctaaga

SEQ ID NO: 725694 - DNA, 19 bp, Mus musculus
  siRNA target sequence for 2810417M05Rik (NM_026516.1,563-581).
cacctgcttcatctaagaa

SEQ ID NO: 725695 - DNA, 19 bp, Mus musculus
  siRNA target sequence for 2810417M05Rik (NM_026516.1,701-719).
ctcatgacagggatatttt

SEQ ID NO: 725696 - DNA, 19 bp, Mus musculus
  siRNA target sequence for 2610509H23Rik (NM_026518.2,622-640).
cggctgtggtgaaattgat

SEQ ID NO: 725697 - DNA, 19 bp, Mus musculus
  siRNA target sequence for 2610509H23Rik (NM_026518.2,725-743).
gccatttgtctacaaacat

SEQ ID NO: 725698 - DNA, 19 bp, Mus musculus
  siRNA target sequence for 2610509H23Rik (NM_026518.2,727-745).
catttgtctacaaacatgt

SEQ ID NO: 725699 - DNA, 19 bp, Mus musculus
  siRNA target sequence for 2610509H23Rik (NM_026518.2,863-881).
gacaagccaaccttgttgt

SEQ ID NO: 725700 - DNA, 19 bp, Mus musculus
  siRNA target sequence for 2610509H23Rik (NM_026518.2,874-892).
cttgttgtcaccagaagaa

SEQ ID NO: 725701 - DNA, 19 bp, Mus musculus
  siRNA target sequence for 2610509H23Rik (NM_026518.2,898-916).
ggctgcaagcagaggaaat

SEQ ID NO: 725702 - DNA, 19 bp, Mus musculus
  siRNA target sequence for 2610509H23Rik (NM_026518.2,917-935).
ggtgaatatgcgtggtatt

SEQ ID NO: 725703 - DNA, 19 bp, Mus musculus
  siRNA target sequence for 2610509H23Rik (NM_026518.2,951-969).
ggtggtggcagtatgatga

SEQ ID NO: 725704 - DNA, 19 bp, Mus musculus
  siRNA target sequence for 2610509H23Rik (NM_026518.2,981-999).
gggagctagaagatgcttt

SEQ ID NO: 725705 - DNA, 19 bp, Mus musculus
  siRNA target sequence for 2610509H23Rik (NM_026518.2,992-1010).
gatgctttttccaaaggta

SEQ ID NO: 725706 - DNA, 19 bp, Mus musculus
  siRNA target sequence for 2610509H23Rik (NM_026518.2,1018-1036).
cacggaaatgttaattgct

SEQ ID NO: 725707 - DNA, 19 bp, Mus musculus
  siRNA target sequence for 2610509H23Rik (NM_026518.2,1045-1063).
gtatgttgctgatcttgaa

SEQ ID NO: 725708 - DNA, 19 bp, Mus musculus
  siRNA target sequence for 2610509H23Rik (NM_026518.2,1094-1112).
ggacgtcgcaggaagatta

SEQ ID NO: 725709 - DNA, 19 bp, Mus musculus
  siRNA target sequence for 2610509H23Rik (NM_026518.2,1095-1113).
gacgtcgcaggaagattaa

SEQ ID NO: 725710 - DNA, 19 bp, Mus musculus
  siRNA target sequence for 2610509H23Rik (NM_026518.2,1105-1123).
gaagattaagcgagatata

SEQ ID NO: 725711 - DNA, 19 bp, Mus musculus
  siRNA target sequence for 2610509H23Rik (NM_026518.2,1108-1126).
gattaagcgagatataata

SEQ ID NO: 725712 - DNA, 19 bp, Mus musculus
  siRNA target sequence for 2610509H23Rik (NM_026518.2,1114-1132).
gcgagatataatagatata

SEQ ID NO: 725713 - DNA, 19 bp, Mus musculus
  siRNA target sequence for 2610509H23Rik (NM_026518.2,1162-1180).
ggactgtgacaccaatact

SEQ ID NO: 725714 - DNA, 19 bp, Mus musculus
  siRNA target sequence for 2610509H23Rik (NM_026518.2,1276-1294).
gcccctgacatcagttgat

SEQ ID NO: 725715 - DNA, 19 bp, Mus musculus
  siRNA target sequence for 2610509H23Rik (NM_026518.2,1289-1307).
gttgatggtcagttaacca

SEQ ID NO: 725716 - DNA, 19 bp, Mus musculus
  siRNA target sequence for 2610509H23Rik (NM_026518.2,1300-1318).
gttaaccagccctgtaaca

SEQ ID NO: 725717 - DNA, 19 bp, Mus musculus
  siRNA target sequence for 2610509H23Rik (NM_026518.2,1353-1371).
cttttgctcatttacaact

SEQ ID NO: 725718 - DNA, 19 bp, Mus musculus
  siRNA target sequence for 2610509H23Rik (NM_026518.2,1454-1472).
gatacctccgttgaagaaa

SEQ ID NO: 725719 - DNA, 19 bp, Mus musculus
  siRNA target sequence for 2610509H23Rik (NM_026518.2,1459-1477).
ctccgttgaagaaacagaa

SEQ ID NO: 725720 - DNA, 19 bp, Mus musculus
  siRNA target sequence for 2610509H23Rik (NM_026518.2,1517-1535).
gttgcacagcactctttga

SEQ ID NO: 725721 - DNA, 19 bp, Mus musculus
  siRNA target sequence for 2610318K02Rik (NM_026519.1,408-426).
ccatcttccctactatgat

SEQ ID NO: 725722 - DNA, 19 bp, Mus musculus
  siRNA target sequence for 2610318K02Rik (NM_026519.1,439-457).
ggcctggcgacccattcaa

SEQ ID NO: 725723 - DNA, 19 bp, Mus musculus
  siRNA target sequence for 2610318K02Rik (NM_026519.1,468-486).
ccatttcagccactttcaa

SEQ ID NO: 725724 - DNA, 19 bp, Mus musculus
  siRNA target sequence for 2610318K02Rik (NM_026519.1,518-536).
caaggcttggtctatctca

SEQ ID NO: 725725 - DNA, 19 bp, Mus musculus
  siRNA target sequence for 2610318K02Rik (NM_026519.1,552-570).
gtttggcattggcagttta

SEQ ID NO: 725726 - DNA, 19 bp, Mus musculus
  siRNA target sequence for 2610318K02Rik (NM_026519.1,557-575).
gcattggcagtttacaagt

SEQ ID NO: 725727 - DNA, 19 bp, Mus musculus
  siRNA target sequence for 2610318K02Rik (NM_026519.1,609-627).
cagactggctagcctttat

SEQ ID NO: 725728 - DNA, 19 bp, Mus musculus
  siRNA target sequence for 2610318K02Rik (NM_026519.1,652-670).
cagtggaggaggcttactt

SEQ ID NO: 725729 - DNA, 19 bp, Mus musculus
  siRNA target sequence for 2610318K02Rik (NM_026519.1,654-672).
gtggaggaggcttacttct

SEQ ID NO: 725730 - DNA, 19 bp, Mus musculus
  siRNA target sequence for 2900009I07Rik (NM_026520.2,358-376).
ccgcctgcaccagatcaaa

SEQ ID NO: 725731 - DNA, 19 bp, Mus musculus
  siRNA target sequence for 2900009I07Rik (NM_026520.2,507-525).
ccccgaagcgcatcgattt

SEQ ID NO: 725732 - DNA, 19 bp, Mus musculus
  siRNA target sequence for 2900009I07Rik (NM_026520.2,509-527).
ccgaagcgcatcgatttca

SEQ ID NO: 725733 - DNA, 19 bp, Mus musculus
  siRNA target sequence for 2900009I07Rik (NM_026520.2,510-528).
cgaagcgcatcgatttcat

SEQ ID NO: 725734 - DNA, 19 bp, Mus musculus
  siRNA target sequence for 2900009I07Rik (NM_026520.2,582-600).
caccgtccttgcaaagttt

SEQ ID NO: 725735 - DNA, 19 bp, Mus musculus
  siRNA target sequence for 2900009I07Rik (NM_026520.2,812-830).
cccggtgtgtgcgtatctt

SEQ ID NO: 725736 - DNA, 19 bp, Mus musculus
  siRNA target sequence for 2900009I07Rik (NM_026520.2,831-849).
ccgataccctggatggaaa

SEQ ID NO: 725737 - DNA, 19 bp, Mus musculus
  siRNA target sequence for 2900009I07Rik (NM_026520.2,862-880).
cggatcttcctgtaactca

SEQ ID NO: 725738 - DNA, 19 bp, Mus musculus
  siRNA target sequence for 2900009I07Rik (NM_026520.2,939-957).
cctttattccagtagatga

SEQ ID NO: 725739 - DNA, 19 bp, Mus musculus
  siRNA target sequence for 2900009I07Rik (NM_026520.2,953-971).
gatgaactttcctcaaagt

SEQ ID NO: 725740 - DNA, 19 bp, Mus musculus
  siRNA target sequence for 3110038L01Rik (NM_026524.2,473-491).
caaatctgcgacacatata

SEQ ID NO: 725741 - DNA, 19 bp, Mus musculus
  siRNA target sequence for 3110038L01Rik (NM_026524.2,514-532).
cgccatgaatcgcttcatt

SEQ ID NO: 725742 - DNA, 19 bp, Mus musculus
  siRNA target sequence for 3110038L01Rik (NM_026524.2,710-728).
ccctcccgggacatgtaca

SEQ ID NO: 725743 - DNA, 19 bp, Mus musculus
  siRNA target sequence for 3110038L01Rik (NM_026524.2,750-768).
ccatccgcaatgatatcga

SEQ ID NO: 725744 - DNA, 19 bp, Mus musculus
  siRNA target sequence for 3110038L01Rik (NM_026524.2,983-1001).
caggagatcggcttcagta

SEQ ID NO: 725745 - DNA, 19 bp, Mus musculus
  siRNA target sequence for 3110038L01Rik (NM_026524.2,986-1004).
gagatcggcttcagtaatt

SEQ ID NO: 725746 - DNA, 19 bp, Mus musculus
  siRNA target sequence for 2510006C20Rik (NM_026527.1,150-168).
ctggttggttacatcacaa

SEQ ID NO: 725747 - DNA, 19 bp, Mus musculus
  siRNA target sequence for 2510006C20Rik (NM_026527.1,153-171).
gttggttacatcacaaact

SEQ ID NO: 725748 - DNA, 19 bp, Mus musculus
  siRNA target sequence for 2510006C20Rik (NM_026527.1,232-250).
gagttgtgacccttgttga

SEQ ID NO: 725749 - DNA, 19 bp, Mus musculus
  siRNA target sequence for 2510006C20Rik (NM_026527.1,271-289).
ggggtgttgcttacaaact

SEQ ID NO: 725750 - DNA, 19 bp, Mus musculus
  siRNA target sequence for 2510006C20Rik (NM_026527.1,272-290).
gggtgttgcttacaaacta

SEQ ID NO: 725751 - DNA, 19 bp, Mus musculus
  siRNA target sequence for 2510006C20Rik (NM_026527.1,359-377).
gacagtcattttttatcca

SEQ ID NO: 725752 - DNA, 19 bp, Mus musculus
  siRNA target sequence for 2510006C20Rik (NM_026527.1,381-399).
gattccacaacaaaaccat

SEQ ID NO: 725753 - DNA, 19 bp, Mus musculus
  siRNA target sequence for 2510006C20Rik (NM_026527.1,405-423).
gttttgctctacattggaa

SEQ ID NO: 725754 - DNA, 19 bp, Mus musculus
  siRNA target sequence for 2510006C20Rik (NM_026527.1,416-434).
cattggaacatgtgataat

SEQ ID NO: 725755 - DNA, 19 bp, Mus musculus
  siRNA target sequence for 2510006C20Rik (NM_026527.1,420-438).
ggaacatgtgataatccta

SEQ ID NO: 725756 - DNA, 19 bp, Mus musculus
  siRNA target sequence for 2510006C20Rik (NM_026527.1,421-439).
gaacatgtgataatcctaa

SEQ ID NO: 725757 - DNA, 19 bp, Mus musculus
  siRNA target sequence for 2510006C20Rik (NM_026527.1,424-442).
catgtgataatcctaacta

SEQ ID NO: 725758 - DNA, 19 bp, Mus musculus
  siRNA target sequence for 2510006C20Rik (NM_026527.1,427-445).
gtgataatcctaactatct

SEQ ID NO: 725759 - DNA, 19 bp, Mus musculus
  siRNA target sequence for 2510006C20Rik (NM_026527.1,548-566).
gaaacttgtaccagaagat

SEQ ID NO: 725760 - DNA, 19 bp, Mus musculus
  siRNA target sequence for 2510006C20Rik (NM_026527.1,605-623).
ggaacgcttagaaggaaaa

SEQ ID NO: 725761 - DNA, 19 bp, Mus musculus
  siRNA target sequence for 2510006C20Rik (NM_026527.1,606-624).
gaacgcttagaaggaaaat

SEQ ID NO: 725762 - DNA, 19 bp, Mus musculus
  siRNA target sequence for E130307M08Rik (NM_026530.2,234-252).
gtgagggggtgctatccat

SEQ ID NO: 725763 - DNA, 19 bp, Mus musculus
  siRNA target sequence for E130307M08Rik (NM_026530.2,256-274).
ctacctgggcaggaagttt

SEQ ID NO: 725764 - DNA, 19 bp, Mus musculus
  siRNA target sequence for E130307M08Rik (NM_026530.2,711-729).
cccacactctggtagaagt

SEQ ID NO: 725765 - DNA, 19 bp, Mus musculus
  siRNA target sequence for E130307M08Rik (NM_026530.2,713-731).
cacactctggtagaagtaa

SEQ ID NO: 725766 - DNA, 19 bp, Mus musculus
  siRNA target sequence for E130307M08Rik (NM_026530.2,715-733).
cactctggtagaagtaaca

SEQ ID NO: 725767 - DNA, 19 bp, Mus musculus
  siRNA target sequence for E130307M08Rik (NM_026530.2,849-867).
gtggtcgctgggacatcaa

SEQ ID NO: 725768 - DNA, 19 bp, Mus musculus
  siRNA target sequence for E130307M08Rik (NM_026530.2,852-870).
gtcgctgggacatcaacaa

SEQ ID NO: 725769 - DNA, 19 bp, Mus musculus
  siRNA target sequence for E130307M08Rik (NM_026530.2,939-957).
cggttgaggaggagatcta

SEQ ID NO: 725770 - DNA, 19 bp, Mus musculus
  siRNA target sequence for E130307M08Rik (NM_026530.2,1236-1254).
cgtatgtccaagatagctt

SEQ ID NO: 725771 - DNA, 19 bp, Mus musculus
  siRNA target sequence for E130307M08Rik (NM_026530.2,1255-1273).
cttgaccaacgatgttctt

SEQ ID NO: 725772 - DNA, 19 bp, Mus musculus
  siRNA target sequence for E130307M08Rik (NM_026530.2,1311-1329).
cccctgacctggtgaagtt

SEQ ID NO: 725773 - DNA, 19 bp, Mus musculus
  siRNA target sequence for 3110003A22Rik (NM_026534.1,111-129).
ggccttggcagaattatat

SEQ ID NO: 725774 - DNA, 19 bp, Mus musculus
  siRNA target sequence for 3110003A22Rik (NM_026534.1,113-131).
ccttggcagaattatatga

SEQ ID NO: 725775 - DNA, 19 bp, Mus musculus
  siRNA target sequence for 3110003A22Rik (NM_026534.1,202-220).
ccgccacatcggctttatt

SEQ ID NO: 725776 - DNA, 19 bp, Mus musculus
  siRNA target sequence for 3110003A22Rik (NM_026534.1,260-278).
ctccaactgggaaaattgt

SEQ ID NO: 725777 - DNA, 19 bp, Mus musculus
  siRNA target sequence for 3110003A22Rik (NM_026534.1,262-280).
ccaactgggaaaattgtga

SEQ ID NO: 725778 - DNA, 19 bp, Mus musculus
  siRNA target sequence for 3110003A22Rik (NM_026534.1,311-329).
gagctgtccctctaaacga

SEQ ID NO: 725779 - DNA, 19 bp, Mus musculus
  siRNA target sequence for 3110003A22Rik (NM_026534.1,327-345).
cgaagccacaagatcttca

SEQ ID NO: 725780 - DNA, 19 bp, Mus musculus
  siRNA target sequence for 3110003A22Rik (NM_026534.1,349-367).
gaagacaaaactaagtcat

SEQ ID NO: 725781 - DNA, 19 bp, Mus musculus
  siRNA target sequence for 3110003A22Rik (NM_026534.1,402-420).
ctacaagcgatcagagtat

SEQ ID NO: 725782 - DNA, 19 bp, Mus musculus
  siRNA target sequence for 3110003A22Rik (NM_026534.1,468-486).
gtggcgcaatggtttcagt

SEQ ID NO: 725783 - DNA, 19 bp, Mus musculus
  siRNA target sequence for 3110003A22Rik (NM_026534.1,470-488).
ggcgcaatggtttcagttt

SEQ ID NO: 725784 - DNA, 19 bp, Mus musculus
  siRNA target sequence for 3110003A22Rik (NM_026534.1,471-489).
gcgcaatggtttcagttta

SEQ ID NO: 725785 - DNA, 19 bp, Mus musculus
  siRNA target sequence for 3110003A22Rik (NM_026534.1,521-539).
caacaaatgctcagttttt

SEQ ID NO: 725786 - DNA, 19 bp, Mus musculus
  siRNA target sequence for 3110003A22Rik (NM_026534.1,530-548).
ctcagtttttggaatctgt

SEQ ID NO: 725787 - DNA, 19 bp, Mus musculus
  siRNA target sequence for 3110003A22Rik (NM_026534.1,596-614).
cccaagtgaacctggatat

SEQ ID NO: 725788 - DNA, 19 bp, Mus musculus
  siRNA target sequence for 3110003A22Rik (NM_026534.1,654-672).
gcgattcaaggcttttagt

SEQ ID NO: 725789 - DNA, 19 bp, Mus musculus
  siRNA target sequence for 3110003A22Rik (NM_026534.1,695-713).
gccttacacctgaaatcgt

SEQ ID NO: 725790 - DNA, 19 bp, Mus musculus
  siRNA target sequence for 3110003A22Rik (NM_026534.1,754-772).
ctgaatgcagctgttctta

SEQ ID NO: 725791 - DNA, 19 bp, Mus musculus
  siRNA target sequence for 3110003A22Rik (NM_026534.1,787-805).
cccaccacaaaaattcaga

SEQ ID NO: 725792 - DNA, 19 bp, Mus musculus
  siRNA target sequence for 3110003A22Rik (NM_026534.1,788-806).
ccaccacaaaaattcagat

SEQ ID NO: 725793 - DNA, 19 bp, Mus musculus
  siRNA target sequence for 3110003A22Rik (NM_026534.1,824-842).
gtcgtctcgtacagagatt

SEQ ID NO: 725794 - DNA, 19 bp, Mus musculus
  siRNA target sequence for 3110003A22Rik (NM_026534.1,826-844).
cgtctcgtacagagattca

SEQ ID NO: 725795 - DNA, 19 bp, Mus musculus
  siRNA target sequence for 3110003A22Rik (NM_026534.1,827-845).
gtctcgtacagagattcaa

SEQ ID NO: 725796 - DNA, 19 bp, Mus musculus
  siRNA target sequence for 3110003A22Rik (NM_026534.1,829-847).
ctcgtacagagattcaata

SEQ ID NO: 725797 - DNA, 19 bp, Mus musculus
  siRNA target sequence for 3110003A22Rik (NM_026534.1,862-880).
ctggatgtacgagacttta

SEQ ID NO: 725798 - DNA, 19 bp, Mus musculus
  siRNA target sequence for 3110003A22Rik (NM_026534.1,864-882).
ggatgtacgagactttata

SEQ ID NO: 725799 - DNA, 19 bp, Mus musculus
  siRNA target sequence for 3110003A22Rik (NM_026534.1,905-923).
cgactactgactttattct

SEQ ID NO: 725800 - DNA, 19 bp, Mus musculus
  siRNA target sequence for 3110003A22Rik (NM_026534.1,906-924).
gactactgactttattctt

SEQ ID NO: 725801 - DNA, 19 bp, Mus musculus
  siRNA target sequence for 3110003A22Rik (NM_026534.1,976-994).
gaagcggacattcttaaca

SEQ ID NO: 725802 - DNA, 19 bp, Mus musculus
  siRNA target sequence for 3010026O09Rik (NM_026543.1,196-214).
cgccatgtccaaaagctaa

SEQ ID NO: 725803 - DNA, 19 bp, Mus musculus
  siRNA target sequence for 3010026O09Rik (NM_026543.1,346-364).
gagtcccgttggttgaagt

SEQ ID NO: 725804 - DNA, 19 bp, Mus musculus
  siRNA target sequence for 3010026O09Rik (NM_026543.1,348-366).
gtcccgttggttgaagtat

SEQ ID NO: 725805 - DNA, 19 bp, Mus musculus
  siRNA target sequence for 3010026O09Rik (NM_026543.1,350-368).
cccgttggttgaagtatct

SEQ ID NO: 725806 - DNA, 19 bp, Mus musculus
  siRNA target sequence for 3010026O09Rik (NM_026543.1,403-421).
gggagaccagctcttaaga

SEQ ID NO: 725807 - DNA, 19 bp, Mus musculus
  siRNA target sequence for 3010026O09Rik (NM_026543.1,463-481).
caacccaggaagaggaaat

SEQ ID NO: 725808 - DNA, 19 bp, Mus musculus
  siRNA target sequence for 3010026O09Rik (NM_026543.1,796-814).
gggactgttgagaacaaga

SEQ ID NO: 725809 - DNA, 19 bp, Mus musculus
  siRNA target sequence for 3010026O09Rik (NM_026543.1,1013-1031).
caaccggagaggactttga

SEQ ID NO: 725810 - DNA, 19 bp, Mus musculus
  siRNA target sequence for 6720467C03Rik (NM_026558.2,165-183).
ctcagctcccggtagaagt

SEQ ID NO: 725811 - DNA, 19 bp, Mus musculus
  siRNA target sequence for 6720467C03Rik (NM_026558.2,421-439).
ctcctagtgaacgaaatca

SEQ ID NO: 725812 - DNA, 19 bp, Mus musculus
  siRNA target sequence for 6720467C03Rik (NM_026558.2,450-468).
ctctaccgagacaccaaat

SEQ ID NO: 725813 - DNA, 19 bp, Mus musculus
  siRNA target sequence for 6720467C03Rik (NM_026558.2,452-470).
ctaccgagacaccaaattt

SEQ ID NO: 725814 - DNA, 19 bp, Mus musculus
  siRNA target sequence for 6720467C03Rik (NM_026558.2,455-473).
ccgagacaccaaatttaaa

SEQ ID NO: 725815 - DNA, 19 bp, Mus musculus
  siRNA target sequence for 6720467C03Rik (NM_026558.2,528-546).
ggcagaggttgaaagactt

SEQ ID NO: 725816 - DNA, 19 bp, Mus musculus
  siRNA target sequence for 6720467C03Rik (NM_026558.2,542-560).
gacttgaagccaaagtagt

SEQ ID NO: 725817 - DNA, 19 bp, Mus musculus
  siRNA target sequence for 6720467C03Rik (NM_026558.2,551-569).
ccaaagtagttgaaccttt

SEQ ID NO: 725818 - DNA, 19 bp, Mus musculus
  siRNA target sequence for 6720467C03Rik (NM_026558.2,581-599).
ggaccattgtaaagatgaa

SEQ ID NO: 725819 - DNA, 19 bp, Mus musculus
  siRNA target sequence for 6720467C03Rik (NM_026558.2,597-615).
gaagcgagatgatctcaaa

SEQ ID NO: 725820 - DNA, 19 bp, Mus musculus
  siRNA target sequence for 6720467C03Rik (NM_026558.2,601-619).
cgagatgatctcaaagcaa

SEQ ID NO: 725821 - DNA, 19 bp, Mus musculus
  siRNA target sequence for 6720467C03Rik (NM_026558.2,675-693).
ccagcgaaacccatctgat

SEQ ID NO: 725822 - DNA, 19 bp, Mus musculus
  siRNA target sequence for 6720467C03Rik (NM_026558.2,686-704).
catctgatcgacatgtaat

SEQ ID NO: 725823 - DNA, 19 bp, Mus musculus
  siRNA target sequence for 6720467C03Rik (NM_026558.2,749-767).
cccgcacaagtcgtcattt

SEQ ID NO: 725824 - DNA, 19 bp, Mus musculus
  siRNA target sequence for 6720467C03Rik (NM_026558.2,752-770).
gcacaagtcgtcatttgga

SEQ ID NO: 725825 - DNA, 19 bp, Mus musculus
  siRNA target sequence for 6720467C03Rik (NM_026558.2,760-778).
cgtcatttggaggaaacta

SEQ ID NO: 725826 - DNA, 19 bp, Mus musculus
  siRNA target sequence for 6720467C03Rik (NM_026558.2,761-779).
gtcatttggaggaaactat

SEQ ID NO: 725827 - DNA, 19 bp, Mus musculus
  siRNA target sequence for 6720467C03Rik (NM_026558.2,768-786).
ggaggaaactattgacaat

SEQ ID NO: 725828 - DNA, 19 bp, Mus musculus
  siRNA target sequence for 6720467C03Rik (NM_026558.2,769-787).
gaggaaactattgacaatt

SEQ ID NO: 725829 - DNA, 19 bp, Mus musculus
  siRNA target sequence for 6720467C03Rik (NM_026558.2,827-845).
ctgagttcatcacaattga

SEQ ID NO: 725830 - DNA, 19 bp, Mus musculus
  siRNA target sequence for 6720467C03Rik (NM_026558.2,829-847).
gagttcatcacaattgaaa

SEQ ID NO: 725831 - DNA, 19 bp, Mus musculus
  siRNA target sequence for 6720467C03Rik (NM_026558.2,834-852).
catcacaattgaaatgtta

SEQ ID NO: 725832 - DNA, 19 bp, Mus musculus
  siRNA target sequence for 6720467C03Rik (NM_026558.2,884-902).
ctgcctaccaaaatataca

SEQ ID NO: 725833 - DNA, 19 bp, Mus musculus
  siRNA target sequence for 6720467C03Rik (NM_026558.2,925-943).
ctagaggttttccgaaatt

SEQ ID NO: 725834 - DNA, 19 bp, Mus musculus
  siRNA target sequence for 6720467C03Rik (NM_026558.2,936-954).
ccgaaattctctgtatcta

SEQ ID NO: 725835 - DNA, 19 bp, Mus musculus
  siRNA target sequence for 6720467C03Rik (NM_026558.2,948-966).
gtatctatcagattatcca

SEQ ID NO: 725836 - DNA, 19 bp, Mus musculus
  siRNA target sequence for 6720467C03Rik (NM_026558.2,965-983).
catctcgcttagatattgt

SEQ ID NO: 725837 - DNA, 19 bp, Mus musculus
  siRNA target sequence for 6720467C03Rik (NM_026558.2,1006-1024).
cttcagagatcattgtcaa

SEQ ID NO: 725838 - DNA, 19 bp, Mus musculus
  siRNA target sequence for D4Ertd421e (NM_026560.1,266-284).
cgaaccaagcaaattgagt

SEQ ID NO: 725839 - DNA, 19 bp, Mus musculus
  siRNA target sequence for D4Ertd421e (NM_026560.1,363-381).
ggatgaagtggcttgacta

SEQ ID NO: 725840 - DNA, 19 bp, Mus musculus
  siRNA target sequence for D4Ertd421e (NM_026560.1,434-452).
cgagacatcacagaaataa

SEQ ID NO: 725841 - DNA, 19 bp, Mus musculus
  siRNA target sequence for D4Ertd421e (NM_026560.1,471-489).
ctattcagacacctttgaa

SEQ ID NO: 725842 - DNA, 19 bp, Mus musculus
  siRNA target sequence for C330027I04Rik (NM_026561.2,154-172).
ccctgagcagatttgctta

SEQ ID NO: 725843 - DNA, 19 bp, Mus musculus
  siRNA target sequence for C330027I04Rik (NM_026561.2,158-176).
gagcagatttgcttacaat

SEQ ID NO: 725844 - DNA, 19 bp, Mus musculus
  siRNA target sequence for C330027I04Rik (NM_026561.2,190-208).
cttcttcccacaatattct

SEQ ID NO: 725845 - DNA, 19 bp, Mus musculus
  siRNA target sequence for C330027I04Rik (NM_026561.2,196-214).
cccacaatattctggataa

SEQ ID NO: 725846 - DNA, 19 bp, Mus musculus
  siRNA target sequence for C330027I04Rik (NM_026561.2,257-275).
gctctttcaccactattat

SEQ ID NO: 725847 - DNA, 19 bp, Mus musculus
  siRNA target sequence for C330027I04Rik (NM_026561.2,267-285).
cactattatcccattgaga

SEQ ID NO: 725848 - DNA, 19 bp, Mus musculus
  siRNA target sequence for C330027I04Rik (NM_026561.2,290-308).
cccacaccggaccatcaaa

SEQ ID NO: 725849 - DNA, 19 bp, Mus musculus
  siRNA target sequence for C330027I04Rik (NM_026561.2,292-310).
cacaccggaccatcaaaga

SEQ ID NO: 725850 - DNA, 19 bp, Mus musculus
  siRNA target sequence for C330027I04Rik (NM_026561.2,420-438).
ctcagggagggctataaga

SEQ ID NO: 725851 - DNA, 19 bp, Mus musculus
  siRNA target sequence for C330027I04Rik (NM_026561.2,501-519).
gacatcctggaagaaatta

SEQ ID NO: 725852 - DNA, 19 bp, Mus musculus
  siRNA target sequence for C330016H24Rik (NM_026563.1,346-364).
gcgctttggaggtgacaaa

SEQ ID NO: 725853 - DNA, 19 bp, Mus musculus
  siRNA target sequence for C330016H24Rik (NM_026563.1,421-439).
gaacctcagcctgtcaaaa

SEQ ID NO: 725854 - DNA, 19 bp, Mus musculus
  siRNA target sequence for C330016H24Rik (NM_026563.1,447-465).
cgaccaccagccgaattta

SEQ ID NO: 725855 - DNA, 19 bp, Mus musculus
  siRNA target sequence for C330016H24Rik (NM_026563.1,531-549).
gatatggcctggaatctca

SEQ ID NO: 725856 - DNA, 19 bp, Mus musculus
  siRNA target sequence for C330016H24Rik (NM_026563.1,635-653).
gccgtggatcagactcatt

SEQ ID NO: 725857 - DNA, 19 bp, Mus musculus
  siRNA target sequence for C330016H24Rik (NM_026563.1,684-702).
gtgacacctacctttcctt

SEQ ID NO: 725858 - DNA, 19 bp, Mus musculus
  siRNA target sequence for C330016H24Rik (NM_026563.1,799-817).
gagtcctaatgcagacttt

SEQ ID NO: 725859 - DNA, 19 bp, Mus musculus
  siRNA target sequence for C330016H24Rik (NM_026563.1,856-874).
gacgctgcagataagttat

SEQ ID NO: 725860 - DNA, 19 bp, Mus musculus
  siRNA target sequence for C330016H24Rik (NM_026563.1,858-876).
cgctgcagataagttatga

SEQ ID NO: 725861 - DNA, 19 bp, Mus musculus
  siRNA target sequence for C330016H24Rik (NM_026563.1,859-877).
gctgcagataagttatgaa

SEQ ID NO: 725862 - DNA, 19 bp, Mus musculus
  siRNA target sequence for C330016H24Rik (NM_026563.1,1140-1158).
caaacttgaggcgagaaaa

SEQ ID NO: 725863 - DNA, 19 bp, Mus musculus
  siRNA target sequence for C330016H24Rik (NM_026563.1,1251-1269).
gtgcacacgcatccataaa

SEQ ID NO: 725864 - DNA, 19 bp, Mus musculus
  siRNA target sequence for 9430083G14Rik (NM_026565.2,32-50).
gggaaagttgacaaccata

SEQ ID NO: 725865 - DNA, 19 bp, Mus musculus
  siRNA target sequence for 9430083G14Rik (NM_026565.2,47-65).
catacctgcaggtctgata

SEQ ID NO: 725866 - DNA, 19 bp, Mus musculus
  siRNA target sequence for 9430083G14Rik (NM_026565.2,127-145).
cggaccagctccccatata

SEQ ID NO: 725867 - DNA, 19 bp, Mus musculus
  siRNA target sequence for 9430083G14Rik (NM_026565.2,128-146).
ggaccagctccccatatat

SEQ ID NO: 725868 - DNA, 19 bp, Mus musculus
  siRNA target sequence for 9430083G14Rik (NM_026565.2,129-147).
gaccagctccccatatata

SEQ ID NO: 725869 - DNA, 19 bp, Mus musculus
  siRNA target sequence for 9430083G14Rik (NM_026565.2,131-149).
ccagctccccatatatact

SEQ ID NO: 725870 - DNA, 19 bp, Mus musculus
  siRNA target sequence for 9430083G14Rik (NM_026565.2,154-172).
cacccctccattctaaata

SEQ ID NO: 725871 - DNA, 19 bp, Mus musculus
  siRNA target sequence for 9430083G14Rik (NM_026565.2,177-195).
gaagaacagcctggtaatt

SEQ ID NO: 725872 - DNA, 19 bp, Mus musculus
  siRNA target sequence for 9430083G14Rik (NM_026565.2,210-228).
gcatccatccgtactacaa

SEQ ID NO: 725873 - DNA, 19 bp, Mus musculus
  siRNA target sequence for 9430083G14Rik (NM_026565.2,219-237).
cgtactacaaccgtgtatt

SEQ ID NO: 725874 - DNA, 19 bp, Mus musculus
  siRNA target sequence for 9430083G14Rik (NM_026565.2,220-238).
gtactacaaccgtgtatta

SEQ ID NO: 725875 - DNA, 19 bp, Mus musculus
  siRNA target sequence for 9430083G14Rik (NM_026565.2,223-241).
ctacaaccgtgtattatat

SEQ ID NO: 725876 - DNA, 19 bp, Mus musculus
  siRNA target sequence for 9430083G14Rik (NM_026565.2,244-262).
gctggtgcaagagcattta

SEQ ID NO: 725877 - DNA, 19 bp, Mus musculus
  siRNA target sequence for 9430083G14Rik (NM_026565.2,247-265).
ggtgcaagagcatttatct

SEQ ID NO: 725878 - DNA, 19 bp, Mus musculus
  siRNA target sequence for 9430083G14Rik (NM_026565.2,299-317).
gtttggaaaagatgcatat

SEQ ID NO: 725879 - DNA, 19 bp, Mus musculus
  siRNA target sequence for 9430083G14Rik (NM_026565.2,303-321).
ggaaaagatgcatatgtct

SEQ ID NO: 725880 - DNA, 19 bp, Mus musculus
  siRNA target sequence for 9430083G14Rik (NM_026565.2,304-322).
gaaaagatgcatatgtcta

SEQ ID NO: 725881 - DNA, 19 bp, Mus musculus
  siRNA target sequence for 9430083G14Rik (NM_026565.2,309-327).
gatgcatatgtctatctga

SEQ ID NO: 725882 - DNA, 19 bp, Mus musculus
  siRNA target sequence for 9430083G14Rik (NM_026565.2,329-347).
gaatcctccgcaagatttt

SEQ ID NO: 725883 - DNA, 19 bp, Mus musculus
  siRNA target sequence for 9430083G14Rik (NM_026565.2,350-368).
ccccaaaatgggagtgatt

SEQ ID NO: 725884 - DNA, 19 bp, Mus musculus
  siRNA target sequence for 9430083G14Rik (NM_026565.2,351-369).
cccaaaatgggagtgatta

SEQ ID NO: 725885 - DNA, 19 bp, Mus musculus
  siRNA target sequence for 9430083G14Rik (NM_026565.2,353-371).
caaaatgggagtgattaca

SEQ ID NO: 725886 - DNA, 19 bp, Mus musculus
  siRNA target sequence for 9430083G14Rik (NM_026565.2,415-433).
ggtttaagaagattgctta

SEQ ID NO: 725887 - DNA, 19 bp, Mus musculus
  siRNA target sequence for 9430083G14Rik (NM_026565.2,416-434).
gtttaagaagattgcttat

SEQ ID NO: 725888 - DNA, 19 bp, Mus musculus
  siRNA target sequence for 9430083G14Rik (NM_026565.2,486-504).
gtaataattgcaaagataa

SEQ ID NO: 725889 - DNA, 19 bp, Mus musculus
  siRNA target sequence for 9430083G14Rik (NM_026565.2,560-578).
gtggacacaaaaaagtgaa

SEQ ID NO: 725890 - DNA, 19 bp, Mus musculus
  siRNA target sequence for 9430083G14Rik (NM_026565.2,619-637).
gaaggtctgatgaaatcca

SEQ ID NO: 725891 - DNA, 19 bp, Mus musculus
  siRNA target sequence for 9430083G14Rik (NM_026565.2,649-667).
ctgacctgaaacattcagt

SEQ ID NO: 725892 - DNA, 19 bp, Mus musculus
  siRNA target sequence for 9430083G14Rik (NM_026565.2,687-705).
gcctctgcaacagtgatta

SEQ ID NO: 725893 - DNA, 19 bp, Mus musculus
  siRNA target sequence for 9430083G14Rik (NM_026565.2,689-707).
ctctgcaacagtgattaaa

SEQ ID NO: 725894 - DNA, 19 bp, Mus musculus
  siRNA target sequence for 9430083G14Rik (NM_026565.2,694-712).
caacagtgattaaatcaga

SEQ ID NO: 725895 - DNA, 19 bp, Mus musculus
  siRNA target sequence for 9430083G14Rik (NM_026565.2,770-788).
gtctcatccagatgataaa

SEQ ID NO: 725896 - DNA, 19 bp, Mus musculus
  siRNA target sequence for 9430083G14Rik (NM_026565.2,789-807).
gatatgtacagcactagaa

SEQ ID NO: 725897 - DNA, 19 bp, Mus musculus
  siRNA target sequence for 9430023L20Rik (NM_026566.1,405-423).
ccgcagcacgggcaagttt

SEQ ID NO: 725898 - DNA, 19 bp, Mus musculus
  siRNA target sequence for 9430023L20Rik (NM_026566.1,407-425).
gcagcacgggcaagtttca

SEQ ID NO: 725899 - DNA, 19 bp, Mus musculus
  siRNA target sequence for 9430023L20Rik (NM_026566.1,415-433).
ggcaagtttcactacaaga

SEQ ID NO: 725900 - DNA, 19 bp, Mus musculus
  siRNA target sequence for 9430023L20Rik (NM_026566.1,416-434).
gcaagtttcactacaagaa

SEQ ID NO: 725901 - DNA, 19 bp, Mus musculus
  siRNA target sequence for 9430023L20Rik (NM_026566.1,598-616).
ggccagatgtccttggaat

SEQ ID NO: 725902 - DNA, 19 bp, Mus musculus
  siRNA target sequence for 9430023L20Rik (NM_026566.1,603-621).
gatgtccttggaattctat

SEQ ID NO: 725903 - DNA, 19 bp, Mus musculus
  siRNA target sequence for 9430023L20Rik (NM_026566.1,715-733).
caggagcggcagatatgca

SEQ ID NO: 725904 - DNA, 19 bp, Mus musculus
  siRNA target sequence for 9430023L20Rik (NM_026566.1,758-776).
gcgagaagatcattaacat

SEQ ID NO: 725905 - DNA, 19 bp, Mus musculus
  siRNA target sequence for 9430023L20Rik (NM_026566.1,832-850).
gtggacaacgtgtttgaca

SEQ ID NO: 725906 - DNA, 19 bp, Mus musculus
  siRNA target sequence for 9430023L20Rik (NM_026566.1,871-889).
ccctacctctacaagatct

SEQ ID NO: 725907 - DNA, 19 bp, Mus musculus
  siRNA target sequence for 9430023L20Rik (NM_026566.1,932-950).
ccatgcgcaggctcatcaa

SEQ ID NO: 725908 - DNA, 19 bp, Mus musculus
  siRNA target sequence for 9430023L20Rik (NM_026566.1,937-955).
cgcaggctcatcaaagaca

SEQ ID NO: 725909 - DNA, 19 bp, Mus musculus
  siRNA target sequence for B230215M10Rik (NM_026570.1,209-227).
gagtgaagggggttaccat

SEQ ID NO: 725910 - DNA, 19 bp, Mus musculus
  siRNA target sequence for B230215M10Rik (NM_026570.1,225-243).
catcgttaagccaatcgtt

SEQ ID NO: 725911 - DNA, 19 bp, Mus musculus
  siRNA target sequence for B230215M10Rik (NM_026570.1,228-246).
cgttaagccaatcgtttat

SEQ ID NO: 725912 - DNA, 19 bp, Mus musculus
  siRNA target sequence for B230215M10Rik (NM_026570.1,253-271).
gttgccaggtactttggaa

SEQ ID NO: 725913 - DNA, 19 bp, Mus musculus
  siRNA target sequence for B230215M10Rik (NM_026570.1,323-341).
cctacagaaacgaggatat

SEQ ID NO: 725914 - DNA, 19 bp, Mus musculus
  siRNA target sequence for B230215M10Rik (NM_026570.1,333-351).
cgaggatatgtcagcatat

SEQ ID NO: 725915 - DNA, 19 bp, Mus musculus
  siRNA target sequence for B230215M10Rik (NM_026570.1,384-402).
ctacggcaatcctctaaga

SEQ ID NO: 725916 - DNA, 19 bp, Mus musculus
  siRNA target sequence for B230215M10Rik (NM_026570.1,405-423).
cgtcaccaagcctccatat

SEQ ID NO: 725917 - DNA, 19 bp, Mus musculus
  siRNA target sequence for B230215M10Rik (NM_026570.1,410-428).
ccaagcctccatatgaaat

SEQ ID NO: 725918 - DNA, 19 bp, Mus musculus
  siRNA target sequence for B230215M10Rik (NM_026570.1,414-432).
gcctccatatgaaatcaca

SEQ ID NO: 725919 - DNA, 19 bp, Mus musculus
  siRNA target sequence for B230215M10Rik (NM_026570.1,437-455).
caggatggggtgaatttga

SEQ ID NO: 725920 - DNA, 19 bp, Mus musculus
  siRNA target sequence for B230215M10Rik (NM_026570.1,440-458).
gatggggtgaatttgaaat

SEQ ID NO: 725921 - DNA, 19 bp, Mus musculus
  siRNA target sequence for B230215M10Rik (NM_026570.1,443-461).
ggggtgaatttgaaatcat

SEQ ID NO: 725922 - DNA, 19 bp, Mus musculus
  siRNA target sequence for B230215M10Rik (NM_026570.1,563-581).
cagtggtttcagagttcta

SEQ ID NO: 725923 - DNA, 19 bp, Mus musculus
  siRNA target sequence for B230215M10Rik (NM_026570.1,574-592).
gagttctatgacgaaatga

SEQ ID NO: 725924 - DNA, 19 bp, Mus musculus
  siRNA target sequence for B230215M10Rik (NM_026570.1,635-653).
cgtctcgccagctgacatt

SEQ ID NO: 725925 - DNA, 19 bp, Mus musculus
  siRNA target sequence for B230215M10Rik (NM_026570.1,650-668).
cattgggagcctataagca

SEQ ID NO: 725926 - DNA, 19 bp, Mus musculus
  siRNA target sequence for B230215M10Rik (NM_026570.1,659-677).
cctataagcacgaaacaga

SEQ ID NO: 725927 - DNA, 19 bp, Mus musculus
  siRNA target sequence for B230215M10Rik (NM_026570.1,773-791).
caagtcgtgaaactataaa

SEQ ID NO: 725928 - DNA, 19 bp, Mus musculus
  siRNA target sequence for B230215M10Rik (NM_026570.1,778-796).
cgtgaaactataaactgtt

SEQ ID NO: 725929 - DNA, 19 bp, Mus musculus
  siRNA target sequence for B230215M10Rik (NM_026570.1,779-797).
gtgaaactataaactgttt

SEQ ID NO: 725930 - DNA, 19 bp, Mus musculus
  siRNA target sequence for B230215M10Rik (NM_026570.1,781-799).
gaaactataaactgtttaa

SEQ ID NO: 725931 - DNA, 19 bp, Mus musculus
  siRNA target sequence for B230215M10Rik (NM_026570.1,826-844).
gacgatcagacgaaagaca

SEQ ID NO: 725932 - DNA, 19 bp, Mus musculus
  siRNA target sequence for B230215M10Rik (NM_026570.1,828-846).
cgatcagacgaaagacatt

SEQ ID NO: 725933 - DNA, 19 bp, Mus musculus
  siRNA target sequence for B230215M10Rik (NM_026570.1,829-847).
gatcagacgaaagacattt

SEQ ID NO: 725934 - DNA, 19 bp, Mus musculus
  siRNA target sequence for 5730466H23Rik (NM_026576.1,91-109).
cggtggcacgggaatgagt

SEQ ID NO: 725935 - DNA, 19 bp, Mus musculus
  siRNA target sequence for 5730466H23Rik (NM_026576.1,320-338).
ccagtacaaatcgtgaaaa

SEQ ID NO: 725936 - DNA, 19 bp, Mus musculus
  siRNA target sequence for 5730466H23Rik (NM_026576.1,321-339).
cagtacaaatcgtgaaaat

SEQ ID NO: 725937 - DNA, 19 bp, Mus musculus
  siRNA target sequence for 5730466H23Rik (NM_026576.1,326-344).
caaatcgtgaaaatggatt

SEQ ID NO: 725938 - DNA, 19 bp, Mus musculus
  siRNA target sequence for 5730466H23Rik (NM_026576.1,383-401).
ggacaaactgatatcttct

SEQ ID NO: 725939 - DNA, 19 bp, Mus musculus
  siRNA target sequence for 5730466H23Rik (NM_026576.1,514-532).
cgagaaaccagtgacaaat

SEQ ID NO: 725940 - DNA, 19 bp, Mus musculus
  siRNA target sequence for 5730466H23Rik (NM_026576.1,534-552).
ccatgctgggagtatggat

SEQ ID NO: 725941 - DNA, 19 bp, Mus musculus
  siRNA target sequence for 5730466H23Rik (NM_026576.1,550-568).
gattggtgaaactgctatt

SEQ ID NO: 725942 - DNA, 19 bp, Mus musculus
  siRNA target sequence for 5730466H23Rik (NM_026576.1,554-572).
ggtgaaactgctattcctt

SEQ ID NO: 725943 - DNA, 19 bp, Mus musculus
  siRNA target sequence for 5730466H23Rik (NM_026576.1,573-591).
gtactcctggcgtagcaaa

SEQ ID NO: 725944 - DNA, 19 bp, Mus musculus
  siRNA target sequence for 5730466H23Rik (NM_026576.1,576-594).
ctcctggcgtagcaaaaga

SEQ ID NO: 725945 - DNA, 19 bp, Mus musculus
  siRNA target sequence for 5730466H23Rik (NM_026576.1,641-659).
cgagaaaaagaacttatga

SEQ ID NO: 725946 - DNA, 19 bp, Mus musculus
  siRNA target sequence for 5730466H23Rik (NM_026576.1,664-682).
ggcccaacagtttgataaa

SEQ ID NO: 725947 - DNA, 19 bp, Mus musculus
  siRNA target sequence for 5730466H23Rik (NM_026576.1,665-683).
gcccaacagtttgataaaa

SEQ ID NO: 725948 - DNA, 19 bp, Mus musculus
  siRNA target sequence for 5730466H23Rik (NM_026576.1,731-749).
gattttatccagatgactt

SEQ ID NO: 725949 - DNA, 19 bp, Mus musculus
  siRNA target sequence for 5730466H23Rik (NM_026576.1,757-775).
gggacatttagataaccat

SEQ ID NO: 725950 - DNA, 19 bp, Mus musculus
  siRNA target sequence for 5730466H23Rik (NM_026576.1,758-776).
ggacatttagataaccata

SEQ ID NO: 725951 - DNA, 19 bp, Mus musculus
  siRNA target sequence for 5730466H23Rik (NM_026576.1,790-808).
gaagccgtcaggtgatgta

SEQ ID NO: 725952 - DNA, 19 bp, Mus musculus
  siRNA target sequence for 5730466H23Rik (NM_026576.1,793-811).
gccgtcaggtgatgtagtt

SEQ ID NO: 725953 - DNA, 19 bp, Mus musculus
  siRNA target sequence for 5730466H23Rik (NM_026576.1,822-840).
cttgtactcctgtgaagaa

SEQ ID NO: 725954 - DNA, 19 bp, Mus musculus
  siRNA target sequence for 5730466H23Rik (NM_026576.1,828-846).
ctcctgtgaagaagcaaat

SEQ ID NO: 725955 - DNA, 19 bp, Mus musculus
  siRNA target sequence for 5730466H23Rik (NM_026576.1,852-870).
gagacagtagaatatcctt

SEQ ID NO: 725956 - DNA, 19 bp, Mus musculus
  siRNA target sequence for 5730466H23Rik (NM_026576.1,901-919).
ctttgaccaaaatgttgaa

SEQ ID NO: 725957 - DNA, 19 bp, Mus musculus
  siRNA target sequence for 5730466H23Rik (NM_026576.1,920-938).
gcagcctttaatgctatat

SEQ ID NO: 725958 - DNA, 19 bp, Mus musculus
  siRNA target sequence for 5730466H23Rik (NM_026576.1,966-984).
gacagctaagccaagatct

SEQ ID NO: 725959 - DNA, 19 bp, Mus musculus
  siRNA target sequence for 5730466H23Rik (NM_026576.1,992-1010).
gcttttttgaacaatagta

SEQ ID NO: 725960 - DNA, 19 bp, Mus musculus
  siRNA target sequence for 5730466H23Rik (NM_026576.1,993-1011).
cttttttgaacaatagtaa

SEQ ID NO: 725961 - DNA, 19 bp, Mus musculus
  siRNA target sequence for 5730466H23Rik (NM_026576.1,1087-1105).
gctaaataaaactccaata

SEQ ID NO: 725962 - DNA, 19 bp, Mus musculus
  siRNA target sequence for 5730466H23Rik (NM_026576.1,1107-1125).
cactttcccctcaaataga

SEQ ID NO: 725963 - DNA, 19 bp, Mus musculus
  siRNA target sequence for 5730466H23Rik (NM_026576.1,1109-1127).
ctttcccctcaaatagata

SEQ ID NO: 725964 - DNA, 19 bp, Mus musculus
  siRNA target sequence for 5730466H23Rik (NM_026576.1,1124-1142).
gatactaccgtaatactaa

SEQ ID NO: 725965 - DNA, 19 bp, Mus musculus
  siRNA target sequence for 5730466H23Rik (NM_026576.1,1153-1171).
gactccctgtcctaagaca

SEQ ID NO: 725966 - DNA, 19 bp, Mus musculus
  siRNA target sequence for 5730466H23Rik (NM_026576.1,1173-1191).
cagcagcacctgatacaca

SEQ ID NO: 725967 - DNA, 19 bp, Mus musculus
  siRNA target sequence for 5730466H23Rik (NM_026576.1,1199-1217).
gagttgaccgctaatgatt

SEQ ID NO: 725968 - DNA, 19 bp, Mus musculus
  siRNA target sequence for 5730466H23Rik (NM_026576.1,1244-1262).
ggcagtgaacccttcctta

SEQ ID NO: 725969 - DNA, 19 bp, Mus musculus
  siRNA target sequence for 5730466H23Rik (NM_026576.1,1264-1282).
ggaaaatgctgaaatgctt

SEQ ID NO: 725970 - DNA, 19 bp, Mus musculus
  siRNA target sequence for 5730466H23Rik (NM_026576.1,1272-1290).
ctgaaatgcttgaattcgt

SEQ ID NO: 725971 - DNA, 19 bp, Mus musculus
  siRNA target sequence for 5730466H23Rik (NM_026576.1,1332-1350).
gtacctcagttggtgaaaa

SEQ ID NO: 725972 - DNA, 19 bp, Mus musculus
  siRNA target sequence for 5730466H23Rik (NM_026576.1,1335-1353).
cctcagttggtgaaaatga

SEQ ID NO: 725973 - DNA, 19 bp, Mus musculus
  siRNA target sequence for 5730466H23Rik (NM_026576.1,1388-1406).
ggaaggttaagagattcaa

SEQ ID NO: 725974 - DNA, 19 bp, Mus musculus
  siRNA target sequence for 5730466H23Rik (NM_026576.1,1389-1407).
gaaggttaagagattcaaa

SEQ ID NO: 725975 - DNA, 19 bp, Mus musculus
  siRNA target sequence for 5730466H23Rik (NM_026576.1,1415-1433).
ctggatcttccctcaaaga

SEQ ID NO: 725976 - DNA, 19 bp, Mus musculus
  siRNA target sequence for 5730466H23Rik (NM_026576.1,1437-1455).
gaaacggagagctaagaaa

SEQ ID NO: 725977 - DNA, 19 bp, Mus musculus
  siRNA target sequence for 5730466H23Rik (NM_026576.1,1441-1459).
cggagagctaagaaatgct

SEQ ID NO: 725978 - DNA, 19 bp, Mus musculus
  siRNA target sequence for 5730466H23Rik (NM_026576.1,1460-1478).
ggagaacataggttttcat

SEQ ID NO: 725979 - DNA, 19 bp, Mus musculus
  siRNA target sequence for 5730466H23Rik (NM_026576.1,1481-1499).
catccaggtgatgaatcaa

SEQ ID NO: 725980 - DNA, 19 bp, Mus musculus
  siRNA target sequence for 5730466H23Rik (NM_026576.1,1546-1564).
cactagcatagttagtaaa

SEQ ID NO: 725981 - DNA, 19 bp, Mus musculus
  siRNA target sequence for 5730466H23Rik (NM_026576.1,1551-1569).
gcatagttagtaaagatga

SEQ ID NO: 725982 - DNA, 19 bp, Mus musculus
  siRNA target sequence for 5730466H23Rik (NM_026576.1,1552-1570).
catagttagtaaagatgaa

SEQ ID NO: 725983 - DNA, 19 bp, Mus musculus
  siRNA target sequence for 5730466H23Rik (NM_026576.1,1580-1598).
gctgtctctaatcttgaaa

SEQ ID NO: 725984 - DNA, 19 bp, Mus musculus
  siRNA target sequence for 5730466H23Rik (NM_026576.1,1581-1599).
ctgtctctaatcttgaaaa

SEQ ID NO: 725985 - DNA, 19 bp, Mus musculus
  siRNA target sequence for 5730466H23Rik (NM_026576.1,1616-1634).
cgcaataagtgcatactta

SEQ ID NO: 725986 - DNA, 19 bp, Mus musculus
  siRNA target sequence for 5730466H23Rik (NM_026576.1,1617-1635).
gcaataagtgcatacttaa

SEQ ID NO: 725987 - DNA, 19 bp, Mus musculus
  siRNA target sequence for 5730466H23Rik (NM_026576.1,1618-1636).
caataagtgcatacttaat

SEQ ID NO: 725988 - DNA, 19 bp, Mus musculus
  siRNA target sequence for 5730466H23Rik (NM_026576.1,1666-1684).
cacaaggtatcctagtaaa

SEQ ID NO: 725989 - DNA, 19 bp, Mus musculus
  siRNA target sequence for 5730466H23Rik (NM_026576.1,1668-1686).
caaggtatcctagtaaaca

SEQ ID NO: 725990 - DNA, 19 bp, Mus musculus
  siRNA target sequence for 5730466H23Rik (NM_026576.1,1689-1707).
gttccgagcttggtgttaa

SEQ ID NO: 725991 - DNA, 19 bp, Mus musculus
  siRNA target sequence for 5730466H23Rik (NM_026576.1,1692-1710).
ccgagcttggtgttaatct

SEQ ID NO: 725992 - DNA, 19 bp, Mus musculus
  siRNA target sequence for 5730466H23Rik (NM_026576.1,1772-1790).
gtgtgtagcacaaatcagt

SEQ ID NO: 725993 - DNA, 19 bp, Mus musculus
  siRNA target sequence for 5730466H23Rik (NM_026576.1,1787-1805).
cagtctcatggatcaaagt

SEQ ID NO: 725994 - DNA, 19 bp, Mus musculus
  siRNA target sequence for 5730466H23Rik (NM_026576.1,1791-1809).
ctcatggatcaaagttgaa

SEQ ID NO: 725995 - DNA, 19 bp, Mus musculus
  siRNA target sequence for 5730466H23Rik (NM_026576.1,1816-1834).
ctttgacgactggaatgat

SEQ ID NO: 725996 - DNA, 19 bp, Mus musculus
  siRNA target sequence for 5730466H23Rik (NM_026576.1,1835-1853).
ccgctgttggccagtgaaa

SEQ ID NO: 725997 - DNA, 19 bp, Mus musculus
  siRNA target sequence for 5730466H23Rik (NM_026576.1,1893-1911).
caggcgaggtagatgatga

SEQ ID NO: 725998 - DNA, 19 bp, Mus musculus
  siRNA target sequence for 5730466H23Rik (NM_026576.1,1895-1913).
ggcgaggtagatgatgatt

SEQ ID NO: 725999 - DNA, 19 bp, Mus musculus
  siRNA target sequence for 5730466H23Rik (NM_026576.1,1896-1914).
gcgaggtagatgatgattt

SEQ ID NO: 726000 - DNA, 19 bp, Mus musculus
  siRNA target sequence for 5730466H23Rik (NM_026576.1,1901-1919).
gtagatgatgatttgttct

SEQ ID NO: 726001 - DNA, 19 bp, Mus musculus
  siRNA target sequence for 5730466H23Rik (NM_026576.1,1915-1933).
gttctgtcaggcttgtgat

SEQ ID NO: 726002 - DNA, 19 bp, Mus musculus
  siRNA target sequence for 5730466H23Rik (NM_026576.1,2019-2037).
gtagctctactgcatctaa

SEQ ID NO: 726003 - DNA, 19 bp, Mus musculus
  siRNA target sequence for 5730466H23Rik (NM_026576.1,2022-2040).
gctctactgcatctaaaca

SEQ ID NO: 726004 - DNA, 19 bp, Mus musculus
  siRNA target sequence for 5730466H23Rik (NM_026576.1,2055-2073).
cgccatctaaacattggaa

SEQ ID NO: 726005 - DNA, 19 bp, Mus musculus
  siRNA target sequence for 5730466H23Rik (NM_026576.1,2056-2074).
gccatctaaacattggaat

SEQ ID NO: 726006 - DNA, 19 bp, Mus musculus
  siRNA target sequence for 5730466H23Rik (NM_026576.1,2061-2079).
ctaaacattggaatgttgt

SEQ ID NO: 726007 - DNA, 19 bp, Mus musculus
  siRNA target sequence for 5730466H23Rik (NM_026576.1,2090-2108).
gtgccattgtctttagcaa

SEQ ID NO: 726008 - DNA, 19 bp, Mus musculus
  siRNA target sequence for 5730466H23Rik (NM_026576.1,2098-2116).
gtctttagcaaataaatca

SEQ ID NO: 726009 - DNA, 19 bp, Mus musculus
  siRNA target sequence for 5730466H23Rik (NM_026576.1,2157-2175).
gtggagatgggcccaatat

SEQ ID NO: 726010 - DNA, 19 bp, Mus musculus
  siRNA target sequence for 5730466H23Rik (NM_026576.1,2159-2177).
ggagatgggcccaatattt

SEQ ID NO: 726011 - DNA, 19 bp, Mus musculus
  siRNA target sequence for 5730466H23Rik (NM_026576.1,2231-2249).
ggaccagtacaagtgaata

SEQ ID NO: 726012 - DNA, 19 bp, Mus musculus
  siRNA target sequence for 5730466H23Rik (NM_026576.1,2245-2263).
gaatagctcaaaatttgtt

SEQ ID NO: 726013 - DNA, 19 bp, Mus musculus
  siRNA target sequence for 5730466H23Rik (NM_026576.1,2264-2282).
cttggaggaagttcaaatt

SEQ ID NO: 726014 - DNA, 19 bp, Mus musculus
  siRNA target sequence for 5730466H23Rik (NM_026576.1,2288-2306).
gtaaatttaggtcttatga

SEQ ID NO: 726015 - DNA, 19 bp, Mus musculus
  siRNA target sequence for 5730466H23Rik (NM_026576.1,2307-2325).
gcacaaaaattgctactaa

SEQ ID NO: 726016 - DNA, 19 bp, Mus musculus
  siRNA target sequence for 5730466H23Rik (NM_026576.1,2308-2326).
cacaaaaattgctactaat

SEQ ID NO: 726017 - DNA, 19 bp, Mus musculus
  siRNA target sequence for 5730466H23Rik (NM_026576.1,2433-2451).
ctcagttaaatcaaaatca

SEQ ID NO: 726018 - DNA, 19 bp, Mus musculus
  siRNA target sequence for 5730466H23Rik (NM_026576.1,2467-2485).
gcctgttggcaaaatctca

SEQ ID NO: 726019 - DNA, 19 bp, Mus musculus
  siRNA target sequence for 5730466H23Rik (NM_026576.1,2482-2500).
ctcagaggatttaggaaaa

SEQ ID NO: 726020 - DNA, 19 bp, Mus musculus
  siRNA target sequence for 5730466H23Rik (NM_026576.1,2537-2555).
cagcaatcttcaataaact

SEQ ID NO: 726021 - DNA, 19 bp, Mus musculus
  siRNA target sequence for 5730466H23Rik (NM_026576.1,2608-2626).
gtattctcctgaagaaatt

SEQ ID NO: 726022 - DNA, 19 bp, Mus musculus
  siRNA target sequence for 5730466H23Rik (NM_026576.1,2654-2672).
cgaagaaaggccaaagctt

SEQ ID NO: 726023 - DNA, 19 bp, Mus musculus
  siRNA target sequence for 5730466H23Rik (NM_026576.1,2683-2701).
gcagtcagctcccatttca

SEQ ID NO: 726024 - DNA, 19 bp, Mus musculus
  siRNA target sequence for C530009C10Rik (NM_026577.1,255-273).
ccaactgctgcaacttgtt

SEQ ID NO: 726025 - DNA, 19 bp, Mus musculus
  siRNA target sequence for C530009C10Rik (NM_026577.1,297-315).
gaaaggtgacacttgtgat

SEQ ID NO: 726026 - DNA, 19 bp, Mus musculus
  siRNA target sequence for C530009C10Rik (NM_026577.1,316-334).
ggtcggccttgataatgct

SEQ ID NO: 726027 - DNA, 19 bp, Mus musculus
  siRNA target sequence for C530009C10Rik (NM_026577.1,422-440).
caaggaaagttccaagtta

SEQ ID NO: 726028 - DNA, 19 bp, Mus musculus
  siRNA target sequence for C530009C10Rik (NM_026577.1,434-452).
caagttaccatctttgact

SEQ ID NO: 726029 - DNA, 19 bp, Mus musculus
  siRNA target sequence for C530009C10Rik (NM_026577.1,581-599).
ctaagacacccgaggatat

SEQ ID NO: 726030 - DNA, 19 bp, Mus musculus
  siRNA target sequence for C530009C10Rik (NM_026577.1,585-603).
gacacccgaggatatcaga

SEQ ID NO: 726031 - DNA, 19 bp, Mus musculus
  siRNA target sequence for C530009C10Rik (NM_026577.1,694-712).
gcaggggtggccttcagaa

SEQ ID NO: 726032 - DNA, 19 bp, Mus musculus
  siRNA target sequence for Nola1 (NM_026578.1,246-264).
gtcgtggaggctttaataa

SEQ ID NO: 726033 - DNA, 19 bp, Mus musculus
  siRNA target sequence for Nola1 (NM_026578.1,252-270).
gaggctttaataaatttca

SEQ ID NO: 726034 - DNA, 19 bp, Mus musculus
  siRNA target sequence for Nola1 (NM_026578.1,332-350).
gacatcgtgtgtaaatgta

SEQ ID NO: 726035 - DNA, 19 bp, Mus musculus
  siRNA target sequence for Nola1 (NM_026578.1,379-397).
caacgcccctgtttactta

SEQ ID NO: 726036 - DNA, 19 bp, Mus musculus
  siRNA target sequence for Nola1 (NM_026578.1,415-433).
cgggaaagtggatgagata

SEQ ID NO: 726037 - DNA, 19 bp, Mus musculus
  siRNA target sequence for Nola1 (NM_026578.1,416-434).
gggaaagtggatgagatat

SEQ ID NO: 726038 - DNA, 19 bp, Mus musculus
  siRNA target sequence for Nola1 (NM_026578.1,417-435).
ggaaagtggatgagatatt

SEQ ID NO: 726039 - DNA, 19 bp, Mus musculus
  siRNA target sequence for Nola1 (NM_026578.1,418-436).
gaaagtggatgagatattt

SEQ ID NO: 726040 - DNA, 19 bp, Mus musculus
  siRNA target sequence for Nola1 (NM_026578.1,438-456).
gacagcttagagattttta

SEQ ID NO: 726041 - DNA, 19 bp, Mus musculus
  siRNA target sequence for Nola1 (NM_026578.1,464-482).
gttaagttgtcagaaaaca

SEQ ID NO: 726042 - DNA, 19 bp, Mus musculus
  siRNA target sequence for Nola1 (NM_026578.1,484-502).
gaaggcatcttcctttaaa

SEQ ID NO: 726043 - DNA, 19 bp, Mus musculus
  siRNA target sequence for 4930586I02Rik (NM_026580.1,188-206).
cctaatatcagaaaaatgt

SEQ ID NO: 726044 - DNA, 19 bp, Mus musculus
  siRNA target sequence for 4930586I02Rik (NM_026580.1,433-451).
gctttgaggaacacaagtt

SEQ ID NO: 726045 - DNA, 19 bp, Mus musculus
  siRNA target sequence for 4930586I02Rik (NM_026580.1,579-597).
ctcacgtcggccttcatca

SEQ ID NO: 726046 - DNA, 19 bp, Mus musculus
  siRNA target sequence for 4930586I02Rik (NM_026580.1,611-629).
cttcttccgacatttcatt

SEQ ID NO: 726047 - DNA, 19 bp, Mus musculus
  siRNA target sequence for 4930586I02Rik (NM_026580.1,614-632).
cttccgacatttcattgat

SEQ ID NO: 726048 - DNA, 19 bp, Mus musculus
  siRNA target sequence for 4930586I02Rik (NM_026580.1,716-734).
gtcgcaggcactcaacatt

SEQ ID NO: 726049 - DNA, 19 bp, Mus musculus
  siRNA target sequence for 4930586I02Rik (NM_026580.1,835-853).
cccactacaacatccttta

SEQ ID NO: 726050 - DNA, 19 bp, Mus musculus
  siRNA target sequence for 5031439A09Rik (NM_026582.2,517-535).
gtccatggttccagtttat

SEQ ID NO: 726051 - DNA, 19 bp, Mus musculus
  siRNA target sequence for 5031439A09Rik (NM_026582.2,520-538).
catggttccagtttatgct

SEQ ID NO: 726052 - DNA, 19 bp, Mus musculus
  siRNA target sequence for 5031439A09Rik (NM_026582.2,575-593).
caaccaaatcagagaaaat

SEQ ID NO: 726053 - DNA, 19 bp, Mus musculus
  siRNA target sequence for 5031439A09Rik (NM_026582.2,617-635).
cctgggttaccgtgatgat

SEQ ID NO: 726054 - DNA, 19 bp, Mus musculus
  siRNA target sequence for 5031439A09Rik (NM_026582.2,618-636).
ctgggttaccgtgatgata

SEQ ID NO: 726055 - DNA, 19 bp, Mus musculus
  siRNA target sequence for 5031439A09Rik (NM_026582.2,621-639).
ggttaccgtgatgatatgt

SEQ ID NO: 726056 - DNA, 19 bp, Mus musculus
  siRNA target sequence for 5031439A09Rik (NM_026582.2,622-640).
gttaccgtgatgatatgtt

SEQ ID NO: 726057 - DNA, 19 bp, Mus musculus
  siRNA target sequence for 5031439A09Rik (NM_026582.2,670-688).
gagtaccacgtaaactcaa

SEQ ID NO: 726058 - DNA, 19 bp, Mus musculus
  siRNA target sequence for 5031439A09Rik (NM_026582.2,672-690).
gtaccacgtaaactcaaat

SEQ ID NO: 726059 - DNA, 19 bp, Mus musculus
  siRNA target sequence for 5031439A09Rik (NM_026582.2,675-693).
ccacgtaaactcaaatgta

SEQ ID NO: 726060 - DNA, 19 bp, Mus musculus
  siRNA target sequence for 5031439A09Rik (NM_026582.2,678-696).
cgtaaactcaaatgtactt

SEQ ID NO: 726061 - DNA, 19 bp, Mus musculus
  siRNA target sequence for 5031439A09Rik (NM_026582.2,717-735).
gagcacgaaggtcgttatt

SEQ ID NO: 726062 - DNA, 19 bp, Mus musculus
  siRNA target sequence for 5031439A09Rik (NM_026582.2,719-737).
gcacgaaggtcgttattat

SEQ ID NO: 726063 - DNA, 19 bp, Mus musculus
  siRNA target sequence for 5031439A09Rik (NM_026582.2,720-738).
cacgaaggtcgttattata

SEQ ID NO: 726064 - DNA, 19 bp, Mus musculus
  siRNA target sequence for 5031439A09Rik (NM_026582.2,722-740).
cgaaggtcgttattataat

SEQ ID NO: 726065 - DNA, 19 bp, Mus musculus
  siRNA target sequence for 5031439A09Rik (NM_026582.2,723-741).
gaaggtcgttattataatt

SEQ ID NO: 726066 - DNA, 19 bp, Mus musculus
  siRNA target sequence for 5031439A09Rik (NM_026582.2,727-745).
gtcgttattataattgtga

SEQ ID NO: 726067 - DNA, 19 bp, Mus musculus
  siRNA target sequence for 5031439A09Rik (NM_026582.2,749-767).
ccttcctttcatggaaatt

SEQ ID NO: 726068 - DNA, 19 bp, Mus musculus
  siRNA target sequence for 5031439A09Rik (NM_026582.2,768-786).
gggtcagtggctcataagt

SEQ ID NO: 726069 - DNA, 19 bp, Mus musculus
  siRNA target sequence for 5031439A09Rik (NM_026582.2,769-787).
ggtcagtggctcataagta

SEQ ID NO: 726070 - DNA, 19 bp, Mus musculus
  siRNA target sequence for 5031439A09Rik (NM_026582.2,776-794).
ggctcataagtattacctt

SEQ ID NO: 726071 - DNA, 19 bp, Mus musculus
  siRNA target sequence for 5031439A09Rik (NM_026582.2,780-798).
cataagtattaccttctaa

SEQ ID NO: 726072 - DNA, 19 bp, Mus musculus
  siRNA target sequence for 5031439A09Rik (NM_026582.2,804-822).
cggctacctgtaaatgaga

SEQ ID NO: 726073 - DNA, 19 bp, Mus musculus
  siRNA target sequence for 5031439A09Rik (NM_026582.2,837-855).
gttggaattggggagataa

SEQ ID NO: 726074 - DNA, 19 bp, Mus musculus
  siRNA target sequence for 5031439A09Rik (NM_026582.2,841-859).
gaattggggagataaagga

SEQ ID NO: 726075 - DNA, 19 bp, Mus musculus
  siRNA target sequence for 5031439A09Rik (NM_026582.2,881-899).
ccaaaacggaggtttcact

SEQ ID NO: 726076 - DNA, 19 bp, Mus musculus
  siRNA target sequence for 5031439A09Rik (NM_026582.2,882-900).
caaaacggaggtttcacta

SEQ ID NO: 726077 - DNA, 19 bp, Mus musculus
  siRNA target sequence for 5031439A09Rik (NM_026582.2,887-905).
cggaggtttcactaaggta

SEQ ID NO: 726078 - DNA, 19 bp, Mus musculus
  siRNA target sequence for 5031439A09Rik (NM_026582.2,888-906).
ggaggtttcactaaggtat

SEQ ID NO: 726079 - DNA, 19 bp, Mus musculus
  siRNA target sequence for 5031439A09Rik (NM_026582.2,898-916).
ctaaggtatggtttgctat

SEQ ID NO: 726080 - DNA, 19 bp, Mus musculus
  siRNA target sequence for 5031439A09Rik (NM_026582.2,903-921).
gtatggtttgctatgaaga

SEQ ID NO: 726081 - DNA, 19 bp, Mus musculus
  siRNA target sequence for 5031439A09Rik (NM_026582.2,1026-1044).
gggatttccatgaccttta

SEQ ID NO: 726082 - DNA, 19 bp, Mus musculus
  siRNA target sequence for 5031439A09Rik (NM_026582.2,1053-1071).
cctgtggaatggttttcta

SEQ ID NO: 726083 - DNA, 19 bp, Mus musculus
  siRNA target sequence for 5031439A09Rik (NM_026582.2,1112-1130).
ccgacagggcatcttctat

SEQ ID NO: 726084 - DNA, 19 bp, Mus musculus
  siRNA target sequence for 5031439A09Rik (NM_026582.2,1121-1139).
catcttctatgcaatgctt

SEQ ID NO: 726085 - DNA, 19 bp, Mus musculus
  siRNA target sequence for 5031439A09Rik (NM_026582.2,1169-1187).
gcacatgatggatcaacat

SEQ ID NO: 726086 - DNA, 19 bp, Mus musculus
  siRNA target sequence for 5031439A09Rik (NM_026582.2,1172-1190).
catgatggatcaacatgaa

SEQ ID NO: 726087 - DNA, 19 bp, Mus musculus
  siRNA target sequence for 5031439A09Rik (NM_026582.2,1182-1200).
caacatgaacggaatcaca

SEQ ID NO: 726088 - DNA, 19 bp, Mus musculus
  siRNA target sequence for 5031439A09Rik (NM_026582.2,1400-1418).
catggtatttcaggtattt

SEQ ID NO: 726089 - DNA, 19 bp, Mus musculus
  siRNA target sequence for 5031439A09Rik (NM_026582.2,1403-1421).
ggtatttcaggtatttaga

SEQ ID NO: 726090 - DNA, 19 bp, Mus musculus
  siRNA target sequence for 5031439A09Rik (NM_026582.2,1488-1506).
ctgatcttcaggttcaagt

SEQ ID NO: 726091 - DNA, 19 bp, Mus musculus
  siRNA target sequence for 5031439A09Rik (NM_026582.2,1531-1549).
gtgctgccatgactgttat

SEQ ID NO: 726092 - DNA, 19 bp, Mus musculus
  siRNA target sequence for 5031439A09Rik (NM_026582.2,1545-1563).
gttatcttcttcatcgtta

SEQ ID NO: 726093 - DNA, 19 bp, Mus musculus
  siRNA target sequence for 5031439A09Rik (NM_026582.2,1683-1701).
gcaccatcccataagaact

SEQ ID NO: 726094 - DNA, 19 bp, Mus musculus
  siRNA target sequence for 5031439A09Rik (NM_026582.2,1754-1772).
gcagcttactaccactata

SEQ ID NO: 726095 - DNA, 19 bp, Mus musculus
  siRNA target sequence for 5031439A09Rik (NM_026582.2,1755-1773).
cagcttactaccactataa

SEQ ID NO: 726096 - DNA, 19 bp, Mus musculus
  siRNA target sequence for 5031439A09Rik (NM_026582.2,1788-1806).
ccaactgagatctacaagt

SEQ ID NO: 726097 - DNA, 19 bp, Mus musculus
  siRNA target sequence for 5031439A09Rik (NM_026582.2,1789-1807).
caactgagatctacaagtt

SEQ ID NO: 726098 - DNA, 19 bp, Mus musculus
  siRNA target sequence for 5031439A09Rik (NM_026582.2,1802-1820).
caagttgacccgtaaagaa

SEQ ID NO: 726099 - DNA, 19 bp, Mus musculus
  siRNA target sequence for 5830415L20Rik (NM_026583.2,102-120).
gtggcctacatgaatccaa

SEQ ID NO: 726100 - DNA, 19 bp, Mus musculus
  siRNA target sequence for 5830415L20Rik (NM_026583.2,104-122).
ggcctacatgaatccaata

SEQ ID NO: 726101 - DNA, 19 bp, Mus musculus
  siRNA target sequence for 5830415L20Rik (NM_026583.2,107-125).
ctacatgaatccaatagca

SEQ ID NO: 726102 - DNA, 19 bp, Mus musculus
  siRNA target sequence for 5830415L20Rik (NM_026583.2,196-214).
ctacctgggaggaagtcaa

SEQ ID NO: 726103 - DNA, 19 bp, Mus musculus
  siRNA target sequence for 5830415L20Rik (NM_026583.2,385-403).
gtagggtgagcaaaagttt

SEQ ID NO: 726104 - DNA, 19 bp, Mus musculus
  siRNA target sequence for 5830415L20Rik (NM_026583.2,389-407).
ggtgagcaaaagttttcta

SEQ ID NO: 726105 - DNA, 19 bp, Mus musculus
  siRNA target sequence for B230118H07Rik (NM_026592.2,160-178).
gatgaagatcagttaatga

SEQ ID NO: 726106 - DNA, 19 bp, Mus musculus
  siRNA target sequence for B230118H07Rik (NM_026592.2,184-202).
gtcttggataagtttgtca

SEQ ID NO: 726107 - DNA, 19 bp, Mus musculus
  siRNA target sequence for B230118H07Rik (NM_026592.2,204-222).
ctgccatgagcaaacctat

SEQ ID NO: 726108 - DNA, 19 bp, Mus musculus
  siRNA target sequence for B230118H07Rik (NM_026592.2,207-225).
ccatgagcaaacctatgaa

SEQ ID NO: 726109 - DNA, 19 bp, Mus musculus
  siRNA target sequence for B230118H07Rik (NM_026592.2,283-301).
gcacatggaactgattcat

SEQ ID NO: 726110 - DNA, 19 bp, Mus musculus
  siRNA target sequence for B230118H07Rik (NM_026592.2,352-370).
ggtcgtcattttagaaata

SEQ ID NO: 726111 - DNA, 19 bp, Mus musculus
  siRNA target sequence for B230118H07Rik (NM_026592.2,495-513).
caacttcctagacttagaa

SEQ ID NO: 726112 - DNA, 19 bp, Mus musculus
  siRNA target sequence for B230118H07Rik (NM_026592.2,536-554).
gtaagccccagatgaacaa

SEQ ID NO: 726113 - DNA, 19 bp, Mus musculus
  siRNA target sequence for B230118H07Rik (NM_026592.2,575-593).
gtgaggtggaacaggatat

SEQ ID NO: 726114 - DNA, 19 bp, Mus musculus
  siRNA target sequence for B230118H07Rik (NM_026592.2,596-614).
gcaccagcgttccatctta

SEQ ID NO: 726115 - DNA, 19 bp, Mus musculus
  siRNA target sequence for B230118H07Rik (NM_026592.2,802-820).
gagctatctaagcaaaaga

SEQ ID NO: 726116 - DNA, 19 bp, Mus musculus
  siRNA target sequence for B230118H07Rik (NM_026592.2,821-839).
gagtgggttccggtacaaa

SEQ ID NO: 726117 - DNA, 19 bp, Mus musculus
  siRNA target sequence for D730048I06Rik (NM_026593.2,162-180).
gtgtgcagtgtcagtctta

SEQ ID NO: 726118 - DNA, 19 bp, Mus musculus
  siRNA target sequence for D730048I06Rik (NM_026593.2,166-184).
gcagtgtcagtcttacaaa

SEQ ID NO: 726119 - DNA, 19 bp, Mus musculus
  siRNA target sequence for D730048I06Rik (NM_026593.2,188-206).
ggggagtgtgccacaaaaa

SEQ ID NO: 726120 - DNA, 19 bp, Mus musculus
  siRNA target sequence for D730048I06Rik (NM_026593.2,189-207).
gggagtgtgccacaaaaaa

SEQ ID NO: 726121 - DNA, 19 bp, Mus musculus
  siRNA target sequence for D730048I06Rik (NM_026593.2,248-266).
cgcagaacctggtatgcaa

SEQ ID NO: 726122 - DNA, 19 bp, Mus musculus
  siRNA target sequence for D730048I06Rik (NM_026593.2,252-270).
gaacctggtatgcaaatga

SEQ ID NO: 726123 - DNA, 19 bp, Mus musculus
  siRNA target sequence for D730048I06Rik (NM_026593.2,258-276).
ggtatgcaaatgaaattca

SEQ ID NO: 726124 - DNA, 19 bp, Mus musculus
  siRNA target sequence for D730048I06Rik (NM_026593.2,293-311).
gagactaagtgcacgaatt

SEQ ID NO: 726125 - DNA, 19 bp, Mus musculus
  siRNA target sequence for D730048I06Rik (NM_026593.2,295-313).
gactaagtgcacgaattct

SEQ ID NO: 726126 - DNA, 19 bp, Mus musculus
  siRNA target sequence for D730048I06Rik (NM_026593.2,301-319).
gtgcacgaattcttgtaaa

SEQ ID NO: 726127 - DNA, 19 bp, Mus musculus
  siRNA target sequence for D730048I06Rik (NM_026593.2,303-321).
gcacgaattcttgtaaatt

SEQ ID NO: 726128 - DNA, 19 bp, Mus musculus
  siRNA target sequence for D730048I06Rik (NM_026593.2,304-322).
cacgaattcttgtaaattt

SEQ ID NO: 726129 - DNA, 19 bp, Mus musculus
  siRNA target sequence for D730048I06Rik (NM_026593.2,363-381).
gctgtagtcatggagattt

SEQ ID NO: 726130 - DNA, 19 bp, Mus musculus
  siRNA target sequence for 4930591A17Rik (NM_026596.1,356-374).
ggctagccttacatgttca

SEQ ID NO: 726131 - DNA, 19 bp, Mus musculus
  siRNA target sequence for 4930591A17Rik (NM_026596.1,391-409).
gctcttttgtgctactcat

SEQ ID NO: 726132 - DNA, 19 bp, Mus musculus
  siRNA target sequence for 4930591A17Rik (NM_026596.1,410-428).
ggtcaccgagagaacatca

SEQ ID NO: 726133 - DNA, 19 bp, Mus musculus
  siRNA target sequence for 4930591A17Rik (NM_026596.1,439-457).
ctgttccagccagactttt

SEQ ID NO: 726134 - DNA, 19 bp, Mus musculus
  siRNA target sequence for 4930591A17Rik (NM_026596.1,517-535).
cagcccaaggcttgttaca

SEQ ID NO: 726135 - DNA, 19 bp, Mus musculus
  siRNA target sequence for 4930591A17Rik (NM_026596.1,566-584).
caaagtgcgtcctcttcaa

SEQ ID NO: 726136 - DNA, 19 bp, Mus musculus
  siRNA target sequence for 4933421H10Rik (NM_026599.3,144-162).
gaccgactggaaagttcta

SEQ ID NO: 726137 - DNA, 19 bp, Mus musculus
  siRNA target sequence for 4933421H10Rik (NM_026599.3,147-165).
cgactggaaagttctaaga

SEQ ID NO: 726138 - DNA, 19 bp, Mus musculus
  siRNA target sequence for 4933421H10Rik (NM_026599.3,242-260).
gggcttaaggcttaagaca

SEQ ID NO: 726139 - DNA, 19 bp, Mus musculus
  siRNA target sequence for 4933421H10Rik (NM_026599.3,252-270).
cttaagacactgtctagta

SEQ ID NO: 726140 - DNA, 19 bp, Mus musculus
  siRNA target sequence for Bcas2 (NM_026602.1,65-83).
ggtagatgcgctaccatat

SEQ ID NO: 726141 - DNA, 19 bp, Mus musculus
  siRNA target sequence for Bcas2 (NM_026602.1,66-84).
gtagatgcgctaccatatt

SEQ ID NO: 726142 - DNA, 19 bp, Mus musculus
  siRNA target sequence for Bcas2 (NM_026602.1,213-231).
gaaacagacataatgagaa

SEQ ID NO: 726143 - DNA, 19 bp, Mus musculus
  siRNA target sequence for Bcas2 (NM_026602.1,217-235).
cagacataatgagaaatga

SEQ ID NO: 726144 - DNA, 19 bp, Mus musculus
  siRNA target sequence for Bcas2 (NM_026602.1,256-274).
gacaaccgattgaattact

SEQ ID NO: 726145 - DNA, 19 bp, Mus musculus
  siRNA target sequence for Bcas2 (NM_026602.1,258-276).
caaccgattgaattactca

SEQ ID NO: 726146 - DNA, 19 bp, Mus musculus
  siRNA target sequence for Bcas2 (NM_026602.1,275-293).
cagcatgaaacgatatgaa

SEQ ID NO: 726147 - DNA, 19 bp, Mus musculus
  siRNA target sequence for Bcas2 (NM_026602.1,307-325).
cctcaggtcaaaaaaatga

SEQ ID NO: 726148 - DNA, 19 bp, Mus musculus
  siRNA target sequence for Bcas2 (NM_026602.1,333-351).
gcatggcaagaatgtgtaa

SEQ ID NO: 726149 - DNA, 19 bp, Mus musculus
  siRNA target sequence for Bcas2 (NM_026602.1,382-400).
cggtccggatcgagaatct

SEQ ID NO: 726150 - DNA, 19 bp, Mus musculus
  siRNA target sequence for Bcas2 (NM_026602.1,475-493).
cacagaaagagcttcagaa

SEQ ID NO: 726151 - DNA, 19 bp, Mus musculus
  siRNA target sequence for Bcas2 (NM_026602.1,489-507).
cagaagttaaggaaacata

SEQ ID NO: 726152 - DNA, 19 bp, Mus musculus
  siRNA target sequence for Bcas2 (NM_026602.1,491-509).
gaagttaaggaaacatatt

SEQ ID NO: 726153 - DNA, 19 bp, Mus musculus
  siRNA target sequence for Bcas2 (NM_026602.1,552-570).
ggatctaagctgagagaaa

SEQ ID NO: 726154 - DNA, 19 bp, Mus musculus
  siRNA target sequence for Bcas2 (NM_026602.1,553-571).
gatctaagctgagagaaat

SEQ ID NO: 726155 - DNA, 19 bp, Mus musculus
  siRNA target sequence for Bcas2 (NM_026602.1,598-616).
gtaagaactatgagattga

SEQ ID NO: 726156 - DNA, 19 bp, Mus musculus
  siRNA target sequence for Bcas2 (NM_026602.1,636-654).
gagaacgagatctatcaga

SEQ ID NO: 726157 - DNA, 19 bp, Mus musculus
  siRNA target sequence for 5330431K02Rik (NM_026606.1,1489-1507).
gcctgggaaagagttattt

SEQ ID NO: 726158 - DNA, 19 bp, Mus musculus
  siRNA target sequence for 5330431K02Rik (NM_026606.1,1585-1603).
ccctcccttggccatattt

SEQ ID NO: 726159 - DNA, 19 bp, Mus musculus
  siRNA target sequence for 5330431K02Rik (NM_026606.1,1656-1674).
gcctgccattgtcaaaaca

SEQ ID NO: 726160 - DNA, 19 bp, Mus musculus
  siRNA target sequence for 5330431K02Rik (NM_026606.1,1746-1764).
catgcctcttggctttcaa

SEQ ID NO: 726161 - DNA, 19 bp, Mus musculus
  siRNA target sequence for 5330431K02Rik (NM_026606.1,1765-1783).
gtgtcaggggttctttata

SEQ ID NO: 726162 - DNA, 19 bp, Mus musculus
  siRNA target sequence for Leprotl1 (NM_026609.2,46-64).
ggcatcaaagctttaatta

SEQ ID NO: 726163 - DNA, 19 bp, Mus musculus
  siRNA target sequence for Leprotl1 (NM_026609.2,80-98).
gagcgatcgggctgatgtt

SEQ ID NO: 726164 - DNA, 19 bp, Mus musculus
  siRNA target sequence for Leprotl1 (NM_026609.2,110-128).
gatgtgcccttccgatata

SEQ ID NO: 726165 - DNA, 19 bp, Mus musculus
  siRNA target sequence for Leprotl1 (NM_026609.2,113-131).
gtgcccttccgatatacaa

SEQ ID NO: 726166 - DNA, 19 bp, Mus musculus
  siRNA target sequence for Leprotl1 (NM_026609.2,121-139).
ccgatatacaaccaatact

SEQ ID NO: 726167 - DNA, 19 bp, Mus musculus
  siRNA target sequence for Leprotl1 (NM_026609.2,188-206).
gcatagccagaagattagt

SEQ ID NO: 726168 - DNA, 19 bp, Mus musculus
  siRNA target sequence for Leprotl1 (NM_026609.2,236-254).
gtaaggagcttgccatatt

SEQ ID NO: 726169 - DNA, 19 bp, Mus musculus
  siRNA target sequence for Leprotl1 (NM_026609.2,270-288).
cgtcgtctcggcttttgga

SEQ ID NO: 726170 - DNA, 19 bp, Mus musculus
  siRNA target sequence for Leprotl1 (NM_026609.2,327-345).
gggagcttgcgcacttgtt

SEQ ID NO: 726171 - DNA, 19 bp, Mus musculus
  siRNA target sequence for Leprotl1 (NM_026609.2,329-347).
gagcttgcgcacttgttct

SEQ ID NO: 726172 - DNA, 19 bp, Mus musculus
  siRNA target sequence for Leprotl1 (NM_026609.2,350-368).
cgggaaacacagtcatctt

SEQ ID NO: 726173 - DNA, 19 bp, Mus musculus
  siRNA target sequence for Leprotl1 (NM_026609.2,363-381).
catcttcgcgactattcta

SEQ ID NO: 726174 - DNA, 19 bp, Mus musculus
  siRNA target sequence for Ndufb2 (NM_026612.1,137-155).
gctggcggtggtgtacata

SEQ ID NO: 726175 - DNA, 19 bp, Mus musculus
  siRNA target sequence for Ndufb2 (NM_026612.1,138-156).
ctggcggtggtgtacatat

SEQ ID NO: 726176 - DNA, 19 bp, Mus musculus
  siRNA target sequence for Ndufb2 (NM_026612.1,141-159).
gcggtggtgtacatattca

SEQ ID NO: 726177 - DNA, 19 bp, Mus musculus
  siRNA target sequence for Ndufb2 (NM_026612.1,272-290).
gctgtgctgggtcactttt

SEQ ID NO: 726178 - DNA, 19 bp, Mus musculus
  siRNA target sequence for 2810027O19Rik (NM_026613.2,553-571).
cgtgaaaaaaggaagataa

SEQ ID NO: 726179 - DNA, 19 bp, Mus musculus
  siRNA target sequence for 2810027O19Rik (NM_026613.2,789-807).
gcaacggcaagcagaatta

SEQ ID NO: 726180 - DNA, 19 bp, Mus musculus
  siRNA target sequence for 2810027O19Rik (NM_026613.2,880-898).
gctgcaaagagctatggtt

SEQ ID NO: 726181 - DNA, 19 bp, Mus musculus
  siRNA target sequence for 2810027O19Rik (NM_026613.2,907-925).
ggaaagcttacaggttttt

SEQ ID NO: 726182 - DNA, 19 bp, Mus musculus
  siRNA target sequence for 2810027O19Rik (NM_026613.2,908-926).
gaaagcttacaggttttta

SEQ ID NO: 726183 - DNA, 19 bp, Mus musculus
  siRNA target sequence for 2810027O19Rik (NM_026613.2,912-930).
gcttacaggtttttacagt

SEQ ID NO: 726184 - DNA, 19 bp, Mus musculus
  siRNA target sequence for 2810027O19Rik (NM_026613.2,938-956).
cctacccagaaccaacttt

SEQ ID NO: 726185 - DNA, 19 bp, Mus musculus
  siRNA target sequence for 2810027O19Rik (NM_026613.2,992-1010).
cccctcctaaggaagctaa

SEQ ID NO: 726186 - DNA, 19 bp, Mus musculus
  siRNA target sequence for 2810027O19Rik (NM_026613.2,1015-1033).
ggacccggaaagaagagta

SEQ ID NO: 726187 - DNA, 19 bp, Mus musculus
  siRNA target sequence for 2810027O19Rik (NM_026613.2,1020-1038).
cggaaagaagagtaaacga

SEQ ID NO: 726188 - DNA, 19 bp, Mus musculus
  siRNA target sequence for 2900073H19Rik (NM_026615.2,64-82).
cctgtttgatggggtaaaa

SEQ ID NO: 726189 - DNA, 19 bp, Mus musculus
  siRNA target sequence for 2900073H19Rik (NM_026615.2,75-93).
gggtaaaaaagcatcaagt

SEQ ID NO: 726190 - DNA, 19 bp, Mus musculus
  siRNA target sequence for 2900073H19Rik (NM_026615.2,109-127).
ggaggaaccctgggatata

SEQ ID NO: 726191 - DNA, 19 bp, Mus musculus
  siRNA target sequence for 2900073H19Rik (NM_026615.2,140-158).
gtctggatcaagaagaatt

SEQ ID NO: 726192 - DNA, 19 bp, Mus musculus
  siRNA target sequence for 2900073H19Rik (NM_026615.2,209-227).
ggaatcctggtgctgatta

SEQ ID NO: 726193 - DNA, 19 bp, Mus musculus
  siRNA target sequence for 1500026D16Rik (NM_026616.1,152-170).
ccggtagatcgcttcttca

SEQ ID NO: 726194 - DNA, 19 bp, Mus musculus
  siRNA target sequence for D11Ertd99e (NM_026618.1,42-60).
ggtgaccctctgaatgcta

SEQ ID NO: 726195 - DNA, 19 bp, Mus musculus
  siRNA target sequence for D11Ertd99e (NM_026618.1,43-61).
gtgaccctctgaatgctaa

SEQ ID NO: 726196 - DNA, 19 bp, Mus musculus
  siRNA target sequence for D11Ertd99e (NM_026618.1,96-114).
ccgtcgcgggagaaattga

SEQ ID NO: 726197 - DNA, 19 bp, Mus musculus
  siRNA target sequence for D11Ertd99e (NM_026618.1,117-135).
ccagcgcagttgcagttta

SEQ ID NO: 726198 - DNA, 19 bp, Mus musculus
  siRNA target sequence for D11Ertd99e (NM_026618.1,118-136).
cagcgcagttgcagtttat

SEQ ID NO: 726199 - DNA, 19 bp, Mus musculus
  siRNA target sequence for D11Ertd99e (NM_026618.1,154-172).
cccagtggcagaaaacact

SEQ ID NO: 726200 - DNA, 19 bp, Mus musculus
  siRNA target sequence for D11Ertd99e (NM_026618.1,183-201).
cggacccggaacatcatga

SEQ ID NO: 726201 - DNA, 19 bp, Mus musculus
  siRNA target sequence for D11Ertd99e (NM_026618.1,225-243).
gtgttagctatttatggtt

SEQ ID NO: 726202 - DNA, 19 bp, Mus musculus
  siRNA target sequence for 2810046M22Rik (NM_026621.1,185-203).
ctctcacgcctctttagca

SEQ ID NO: 726203 - DNA, 19 bp, Mus musculus
  siRNA target sequence for 2810046M22Rik (NM_026621.1,369-387).
gctacttgggatacttcta

SEQ ID NO: 726204 - DNA, 19 bp, Mus musculus
  siRNA target sequence for 2810046M22Rik (NM_026621.1,397-415).
gggcctccagctctgatat

SEQ ID NO: 726205 - DNA, 19 bp, Mus musculus
  siRNA target sequence for 3110057O12Rik (NM_026622.1,824-842).
gacacgagttcatgaatca

SEQ ID NO: 726206 - DNA, 19 bp, Mus musculus
  siRNA target sequence for 3110057O12Rik (NM_026622.1,826-844).
cacgagttcatgaatcact

SEQ ID NO: 726207 - DNA, 19 bp, Mus musculus
  siRNA target sequence for 3110057O12Rik (NM_026622.1,837-855).
gaatcacttgcctagcaat

SEQ ID NO: 726208 - DNA, 19 bp, Mus musculus
  siRNA target sequence for 3110057O12Rik (NM_026622.1,887-905).
ccagaactttaaatttaga

SEQ ID NO: 726209 - DNA, 19 bp, Mus musculus
  siRNA target sequence for 3110057O12Rik (NM_026622.1,934-952).
gatgccaagtgccataagt

SEQ ID NO: 726210 - DNA, 19 bp, Mus musculus
  siRNA target sequence for 3110057O12Rik (NM_026622.1,942-960).
gtgccataagtctggtaaa

SEQ ID NO: 726211 - DNA, 19 bp, Mus musculus
  siRNA target sequence for 3110057O12Rik (NM_026622.1,945-963).
ccataagtctggtaaaaca

SEQ ID NO: 726212 - DNA, 19 bp, Mus musculus
  siRNA target sequence for 3110057O12Rik (NM_026622.1,946-964).
cataagtctggtaaaacat

SEQ ID NO: 726213 - DNA, 19 bp, Mus musculus
  siRNA target sequence for 3110057O12Rik (NM_026622.1,965-983).
ctatcagtgctccttcaaa

SEQ ID NO: 726214 - DNA, 19 bp, Mus musculus
  siRNA target sequence for 3110057O12Rik (NM_026622.1,1000-1018).
gatacagctaagatggaat

SEQ ID NO: 726215 - DNA, 19 bp, Mus musculus
  siRNA target sequence for 3110057O12Rik (NM_026622.1,1011-1029).
gatggaatgcttgaatcaa

SEQ ID NO: 726216 - DNA, 19 bp, Mus musculus
  siRNA target sequence for 3110057O12Rik (NM_026622.1,1027-1045).
caaacgctctcgactaaca

SEQ ID NO: 726217 - DNA, 19 bp, Mus musculus
  siRNA target sequence for 3110057O12Rik (NM_026622.1,1032-1050).
gctctcgactaacaaaagt

SEQ ID NO: 726218 - DNA, 19 bp, Mus musculus
  siRNA target sequence for 3110057O12Rik (NM_026622.1,1033-1051).
ctctcgactaacaaaagtt

SEQ ID NO: 726219 - DNA, 19 bp, Mus musculus
  siRNA target sequence for 3110057O12Rik (NM_026622.1,1049-1067).
gttggtttgcaagttacaa

SEQ ID NO: 726220 - DNA, 19 bp, Mus musculus
  siRNA target sequence for 3110057O12Rik (NM_026622.1,1110-1128).
caatcgtcaaaaagaatct

SEQ ID NO: 726221 - DNA, 19 bp, Mus musculus
  siRNA target sequence for 3110057O12Rik (NM_026622.1,1114-1132).
cgtcaaaaagaatctttaa

SEQ ID NO: 726222 - DNA, 19 bp, Mus musculus
  siRNA target sequence for 3110057O12Rik (NM_026622.1,1160-1178).
gtactcacgtagcaaactt

SEQ ID NO: 726223 - DNA, 19 bp, Mus musculus
  siRNA target sequence for 3110057O12Rik (NM_026622.1,1189-1207).
gttgatccaagcctcatta

SEQ ID NO: 726224 - DNA, 19 bp, Mus musculus
  siRNA target sequence for 3110057O12Rik (NM_026622.1,1221-1239).
caaagaggatgcctatatt

SEQ ID NO: 726225 - DNA, 19 bp, Mus musculus
  siRNA target sequence for 3110057O12Rik (NM_026622.1,1252-1270).
gttcgaagcttgcaagaaa

SEQ ID NO: 726226 - DNA, 19 bp, Mus musculus
  siRNA target sequence for 3110057O12Rik (NM_026622.1,1283-1301).
gtgaaatccggtatctaga

SEQ ID NO: 726227 - DNA, 19 bp, Mus musculus
  siRNA target sequence for 3110057O12Rik (NM_026622.1,1305-1323).
gggtcatatcagtgcttat

SEQ ID NO: 726228 - DNA, 19 bp, Mus musculus
  siRNA target sequence for 3110057O12Rik (NM_026622.1,1307-1325).
gtcatatcagtgcttatct

SEQ ID NO: 726229 - DNA, 19 bp, Mus musculus
  siRNA target sequence for 3110057O12Rik (NM_026622.1,1309-1327).
catatcagtgcttatctct

SEQ ID NO: 726230 - DNA, 19 bp, Mus musculus
  siRNA target sequence for 3110057O12Rik (NM_026622.1,1316-1334).
gtgcttatctctttaaaca

SEQ ID NO: 726231 - DNA, 19 bp, Mus musculus
  siRNA target sequence for 3110057O12Rik (NM_026622.1,1353-1371).
catctacgatgcctttgaa

SEQ ID NO: 726232 - DNA, 19 bp, Mus musculus
  siRNA target sequence for 3110057O12Rik (NM_026622.1,1369-1387).
gaacgtttccttcataaat

SEQ ID NO: 726233 - DNA, 19 bp, Mus musculus
  siRNA target sequence for Cpsf5 (NM_026623.1,724-742).
gtttgagctgtatgacaat

SEQ ID NO: 726234 - DNA, 19 bp, Mus musculus
  siRNA target sequence for Cpsf5 (NM_026623.1,751-769).
gtatggacccatcatttct

SEQ ID NO: 726235 - DNA, 19 bp, Mus musculus
  siRNA target sequence for Cpsf5 (NM_026623.1,785-803).
ctgagcaggttcaatttta

SEQ ID NO: 726236 - DNA, 19 bp, Mus musculus
  siRNA target sequence for 4931415M17 (NM_026624.1,100-118).
ccactacatccctggttat

SEQ ID NO: 726237 - DNA, 19 bp, Mus musculus
  siRNA target sequence for 4931415M17 (NM_026624.1,103-121).
ctacatccctggttatgct

SEQ ID NO: 726238 - DNA, 19 bp, Mus musculus
  siRNA target sequence for 4931415M17 (NM_026624.1,111-129).
ctggttatgctggtttcta

SEQ ID NO: 726239 - DNA, 19 bp, Mus musculus
  siRNA target sequence for 4931415M17 (NM_026624.1,338-356).
ccctacaagaattttgaga

SEQ ID NO: 726240 - DNA, 19 bp, Mus musculus
  siRNA target sequence for 4931415M17 (NM_026624.1,633-651).
cacaggagacactagatgt

SEQ ID NO: 726241 - DNA, 19 bp, Mus musculus
  siRNA target sequence for 4931415M17 (NM_026624.1,868-886).
gccaaacaccaccatctat

SEQ ID NO: 726242 - DNA, 19 bp, Mus musculus
  siRNA target sequence for 4931415M17 (NM_026624.1,975-993).
gagcctatcagaaggaatt

SEQ ID NO: 726243 - DNA, 19 bp, Mus musculus
  siRNA target sequence for 1700067P10Rik (NM_026625.1,97-115).
ggaaagcccgactctacaa

SEQ ID NO: 726244 - DNA, 19 bp, Mus musculus
  siRNA target sequence for 1700067P10Rik (NM_026625.1,221-239).
ctgcagcttgcggacaaaa

SEQ ID NO: 726245 - DNA, 19 bp, Mus musculus
  siRNA target sequence for 1700067P10Rik (NM_026625.1,260-278).
ggatccagtccctcttcta

SEQ ID NO: 726246 - DNA, 19 bp, Mus musculus
  siRNA target sequence for 1700067P10Rik (NM_026625.1,365-383).
ctctccgaaggaaaaagct

SEQ ID NO: 726247 - DNA, 19 bp, Mus musculus
  siRNA target sequence for 1700067P10Rik (NM_026625.1,452-470).
gtggcccaagggctttatt

SEQ ID NO: 726248 - DNA, 19 bp, Mus musculus
  siRNA target sequence for 1700067P10Rik (NM_026625.1,508-526).
gcacctttatccatgttga

SEQ ID NO: 726249 - DNA, 19 bp, Mus musculus
  siRNA target sequence for 1700067P10Rik (NM_026625.1,509-527).
cacctttatccatgttgaa

SEQ ID NO: 726250 - DNA, 19 bp, Mus musculus
  siRNA target sequence for 1700067P10Rik (NM_026625.1,565-583).
cactggtggaagataacaa

SEQ ID NO: 726251 - DNA, 19 bp, Mus musculus
  siRNA target sequence for 1700067P10Rik (NM_026625.1,589-607).
ctatgccacctttactaaa

SEQ ID NO: 726252 - DNA, 19 bp, Mus musculus
  siRNA target sequence for 1700120K04Rik (NM_026628.1,168-186).
cactgcggcgtcacagaaa

SEQ ID NO: 726253 - DNA, 19 bp, Mus musculus
  siRNA target sequence for 1700120K04Rik (NM_026628.1,170-188).
ctgcggcgtcacagaaact

SEQ ID NO: 726254 - DNA, 19 bp, Mus musculus
  siRNA target sequence for 2410066E13Rik (NM_026629.2,243-261).
ctccatgaagtcttggaaa

SEQ ID NO: 726255 - DNA, 19 bp, Mus musculus
  siRNA target sequence for 2410066E13Rik (NM_026629.2,245-263).
ccatgaagtcttggaaaaa

SEQ ID NO: 726256 - DNA, 19 bp, Mus musculus
  siRNA target sequence for 2410066E13Rik (NM_026629.2,378-396).
ggggtcagtcagcagtaaa

SEQ ID NO: 726257 - DNA, 19 bp, Mus musculus
  siRNA target sequence for 2410066E13Rik (NM_026629.2,380-398).
ggtcagtcagcagtaaact

SEQ ID NO: 726258 - DNA, 19 bp, Mus musculus
  siRNA target sequence for 2410116G06Rik (NM_026630.1,681-699).
ccaatgttcgtccttaaga

SEQ ID NO: 726259 - DNA, 19 bp, Mus musculus
  siRNA target sequence for 2410116G06Rik (NM_026630.1,686-704).
gttcgtccttaagagtttt

SEQ ID NO: 726260 - DNA, 19 bp, Mus musculus
  siRNA target sequence for 2410116G06Rik (NM_026630.1,689-707).
cgtccttaagagttttgtt

SEQ ID NO: 726261 - DNA, 19 bp, Mus musculus
  siRNA target sequence for Rpa3 (NM_026632.1,49-67).
cgtcaacgccagcatgtta

SEQ ID NO: 726262 - DNA, 19 bp, Mus musculus
  siRNA target sequence for Rpa3 (NM_026632.1,58-76).
cagcatgttaccacagtat

SEQ ID NO: 726263 - DNA, 19 bp, Mus musculus
  siRNA target sequence for Rpa3 (NM_026632.1,60-78).
gcatgttaccacagtatat

SEQ ID NO: 726264 - DNA, 19 bp, Mus musculus
  siRNA target sequence for Rpa3 (NM_026632.1,115-133).
gattcatcccactggaaaa

SEQ ID NO: 726265 - DNA, 19 bp, Mus musculus
  siRNA target sequence for Rpa3 (NM_026632.1,188-206).
ccacttgacgaggaaatct

SEQ ID NO: 726266 - DNA, 19 bp, Mus musculus
  siRNA target sequence for Rpa3 (NM_026632.1,260-278).
gcatcttataccctgttta

SEQ ID NO: 726267 - DNA, 19 bp, Mus musculus
  siRNA target sequence for Rpa3 (NM_026632.1,261-279).
catcttataccctgtttaa

SEQ ID NO: 726268 - DNA, 19 bp, Mus musculus
  siRNA target sequence for Rpa3 (NM_026632.1,264-282).
cttataccctgtttaagga

SEQ ID NO: 726269 - DNA, 19 bp, Mus musculus
  siRNA target sequence for Rpa3 (NM_026632.1,288-306).
ctaatcgctttgatcttga

SEQ ID NO: 726270 - DNA, 19 bp, Mus musculus
  siRNA target sequence for Rpa3 (NM_026632.1,293-311).
cgctttgatcttgaacttt

SEQ ID NO: 726271 - DNA, 19 bp, Mus musculus
  siRNA target sequence for Rpa3 (NM_026632.1,321-339).
ctgtgaaaattatcaatga

SEQ ID NO: 726272 - DNA, 19 bp, Mus musculus
  siRNA target sequence for Rpa3 (NM_026632.1,362-380).
gggcttccacaacatgaat

SEQ ID NO: 726273 - DNA, 19 bp, Mus musculus
  siRNA target sequence for 9530058B02Rik (NM_026633.1,249-267).
ctgggccaagacttgtatt

SEQ ID NO: 726274 - DNA, 19 bp, Mus musculus
  siRNA target sequence for 9530058B02Rik (NM_026633.1,251-269).
gggccaagacttgtattca

SEQ ID NO: 726275 - DNA, 19 bp, Mus musculus
  siRNA target sequence for 9530058B02Rik (NM_026633.1,253-271).
gccaagacttgtattcaat

SEQ ID NO: 726276 - DNA, 19 bp, Mus musculus
  siRNA target sequence for 9530058B02Rik (NM_026633.1,512-530).
cagcagtttctggctaaaa

SEQ ID NO: 726277 - DNA, 19 bp, Mus musculus
  siRNA target sequence for A930018P22Rik (NM_026634.1,162-180).
gtctccgctgagcgatttt

SEQ ID NO: 726278 - DNA, 19 bp, Mus musculus
  siRNA target sequence for A930018P22Rik (NM_026634.1,164-182).
ctccgctgagcgattttaa

SEQ ID NO: 726279 - DNA, 19 bp, Mus musculus
  siRNA target sequence for A930018P22Rik (NM_026634.1,167-185).
cgctgagcgattttaacat

SEQ ID NO: 726280 - DNA, 19 bp, Mus musculus
  siRNA target sequence for A930018P22Rik (NM_026634.1,169-187).
ctgagcgattttaacatct

SEQ ID NO: 726281 - DNA, 19 bp, Mus musculus
  siRNA target sequence for A930018P22Rik (NM_026634.1,350-368).
cgtccggcctggcttctat

SEQ ID NO: 726282 - DNA, 19 bp, Mus musculus
  siRNA target sequence for A930018P22Rik (NM_026634.1,351-369).
gtccggcctggcttctatt

SEQ ID NO: 726283 - DNA, 19 bp, Mus musculus
  siRNA target sequence for A930018P22Rik (NM_026634.1,554-572).
cccagcgctataaattcct

SEQ ID NO: 726284 - DNA, 19 bp, Mus musculus
  siRNA target sequence for A930018P22Rik (NM_026634.1,570-588).
cctgaaggcgctgaaagat

SEQ ID NO: 726285 - DNA, 19 bp, Mus musculus
  siRNA target sequence for A930018P22Rik (NM_026634.1,576-594).
ggcgctgaaagatgaaaaa

SEQ ID NO: 726286 - DNA, 19 bp, Mus musculus
  siRNA target sequence for A930018P22Rik (NM_026634.1,578-596).
cgctgaaagatgaaaaatt

SEQ ID NO: 726287 - DNA, 19 bp, Mus musculus
  siRNA target sequence for 5730536A07Rik (NM_026635.2,340-358).
gagaaagcgctagaagttt

SEQ ID NO: 726288 - DNA, 19 bp, Mus musculus
  siRNA target sequence for 5730536A07Rik (NM_026635.2,346-364).
gcgctagaagtttatgatt

SEQ ID NO: 726289 - DNA, 19 bp, Mus musculus
  siRNA target sequence for 5730536A07Rik (NM_026635.2,347-365).
cgctagaagtttatgattt

SEQ ID NO: 726290 - DNA, 19 bp, Mus musculus
  siRNA target sequence for 5730536A07Rik (NM_026635.2,349-367).
ctagaagtttatgatttga

SEQ ID NO: 726291 - DNA, 19 bp, Mus musculus
  siRNA target sequence for 5730536A07Rik (NM_026635.2,374-392).
ctatccgggacccagaaaa

SEQ ID NO: 726292 - DNA, 19 bp, Mus musculus
  siRNA target sequence for 5730536A07Rik (NM_026635.2,480-498).
caagttcacaccaacagta

SEQ ID NO: 726293 - DNA, 19 bp, Mus musculus
  siRNA target sequence for 5730536A07Rik (NM_026635.2,531-549).
gtgcctaagagtaaagctt

SEQ ID NO: 726294 - DNA, 19 bp, Mus musculus
  siRNA target sequence for 5730536A07Rik (NM_026635.2,552-570).
gcggtgtctgccgttcaaa

SEQ ID NO: 726295 - DNA, 19 bp, Mus musculus
  siRNA target sequence for 5730536A07Rik (NM_026635.2,571-589).
cacaagttggaaatctaca

SEQ ID NO: 726296 - DNA, 19 bp, Mus musculus
  siRNA target sequence for 5730536A07Rik (NM_026635.2,576-594).
gttggaaatctacatttct

SEQ ID NO: 726297 - DNA, 19 bp, Mus musculus
  siRNA target sequence for 5730536A07Rik (NM_026635.2,579-597).
ggaaatctacatttctgaa

SEQ ID NO: 726298 - DNA, 19 bp, Mus musculus
  siRNA target sequence for 5730536A07Rik (NM_026635.2,674-692).
ccaaccttcgggaaatcgt

SEQ ID NO: 726299 - DNA, 19 bp, Mus musculus
  siRNA target sequence for 5430437P03Rik (NM_026636.1,287-305).
gcctcacactcgatccaat

SEQ ID NO: 726300 - DNA, 19 bp, Mus musculus
  siRNA target sequence for 5430437P03Rik (NM_026636.1,487-505).
gtccagagaaggtgatcat

SEQ ID NO: 726301 - DNA, 19 bp, Mus musculus
  siRNA target sequence for 5430437P03Rik (NM_026636.1,489-507).
ccagagaaggtgatcatct

SEQ ID NO: 726302 - DNA, 19 bp, Mus musculus
  siRNA target sequence for 5430437P03Rik (NM_026636.1,632-650).
caagagccacgaatttgca

SEQ ID NO: 726303 - DNA, 19 bp, Mus musculus
  siRNA target sequence for 5430437P03Rik (NM_026636.1,827-845).
catcccacccccctatgtt

SEQ ID NO: 726304 - DNA, 19 bp, Mus musculus
  siRNA target sequence for A030007L17Rik (NM_026637.2,66-84).
gccaggagggggagacatt

SEQ ID NO: 726305 - DNA, 19 bp, Mus musculus
  siRNA target sequence for A030007L17Rik (NM_026637.2,187-205).
cgacttcggcaatttccaa

SEQ ID NO: 726306 - DNA, 19 bp, Mus musculus
  siRNA target sequence for A030007L17Rik (NM_026637.2,220-238).
gaggtggcacggaggtata

SEQ ID NO: 726307 - DNA, 19 bp, Mus musculus
  siRNA target sequence for A030007L17Rik (NM_026637.2,229-247).
cggaggtatagctaccatt

SEQ ID NO: 726308 - DNA, 19 bp, Mus musculus
  siRNA target sequence for A030007L17Rik (NM_026637.2,230-248).
ggaggtatagctaccattt

SEQ ID NO: 726309 - DNA, 19 bp, Mus musculus
  siRNA target sequence for A030007L17Rik (NM_026637.2,231-249).
gaggtatagctaccatttt

SEQ ID NO: 726310 - DNA, 19 bp, Mus musculus
  siRNA target sequence for A030007L17Rik (NM_026637.2,292-310).
gaacaaaagcaatataagt

SEQ ID NO: 726311 - DNA, 19 bp, Mus musculus
  siRNA target sequence for A030007L17Rik (NM_026637.2,339-357).
gtggagtctatgttgtaat

SEQ ID NO: 726312 - DNA, 19 bp, Mus musculus
  siRNA target sequence for A030007L17Rik (NM_026637.2,380-398).
gaagggaaggaaataacct

SEQ ID NO: 726313 - DNA, 19 bp, Mus musculus
  siRNA target sequence for A030007L17Rik (NM_026637.2,443-461).
ccacagtataagaaggtta

SEQ ID NO: 726314 - DNA, 19 bp, Mus musculus
  siRNA target sequence for A030007L17Rik (NM_026637.2,444-462).
cacagtataagaaggttat

SEQ ID NO: 726315 - DNA, 19 bp, Mus musculus
  siRNA target sequence for A030007L17Rik (NM_026637.2,446-464).
cagtataagaaggttatct

SEQ ID NO: 726316 - DNA, 19 bp, Mus musculus
  siRNA target sequence for A030007L17Rik (NM_026637.2,492-510).
cacaggaatatcaagagaa

SEQ ID NO: 726317 - DNA, 19 bp, Mus musculus
  siRNA target sequence for A030007L17Rik (NM_026637.2,519-537).
caatagaaccaaatgagta

SEQ ID NO: 726318 - DNA, 19 bp, Mus musculus
  siRNA target sequence for A030007L17Rik (NM_026637.2,527-545).
ccaaatgagtataaaggaa

SEQ ID NO: 726319 - DNA, 19 bp, Mus musculus
  siRNA target sequence for A030007L17Rik (NM_026637.2,543-561).
gaaagatctccgacgaaat

SEQ ID NO: 726320 - DNA, 19 bp, Mus musculus
  siRNA target sequence for A030007L17Rik (NM_026637.2,547-565).
gatctccgacgaaatggaa

SEQ ID NO: 726321 - DNA, 19 bp, Mus musculus
  siRNA target sequence for AW413625 (NM_026640.1,266-284).
ctgtaagaagcggaaatca

SEQ ID NO: 726322 - DNA, 19 bp, Mus musculus
  siRNA target sequence for AW413625 (NM_026640.1,268-286).
gtaagaagcggaaatcaca

SEQ ID NO: 726323 - DNA, 19 bp, Mus musculus
  siRNA target sequence for AW413625 (NM_026640.1,276-294).
cggaaatcacagatctcat

SEQ ID NO: 726324 - DNA, 19 bp, Mus musculus
  siRNA target sequence for AW413625 (NM_026640.1,285-303).
cagatctcatttaatccaa

SEQ ID NO: 726325 - DNA, 19 bp, Mus musculus
  siRNA target sequence for AW413625 (NM_026640.1,290-308).
ctcatttaatccaaggaaa

SEQ ID NO: 726326 - DNA, 19 bp, Mus musculus
  siRNA target sequence for AW413625 (NM_026640.1,292-310).
catttaatccaaggaaaaa

SEQ ID NO: 726327 - DNA, 19 bp, Mus musculus
  siRNA target sequence for AW413625 (NM_026640.1,372-390).
gtaaaagtggactctaaaa

SEQ ID NO: 726328 - DNA, 19 bp, Mus musculus
  siRNA target sequence for AW413625 (NM_026640.1,465-483).
cctcccctaaataagaaaa

SEQ ID NO: 726329 - DNA, 19 bp, Mus musculus
  siRNA target sequence for AW413625 (NM_026640.1,470-488).
cctaaataagaaaatcaca

SEQ ID NO: 726330 - DNA, 19 bp, Mus musculus
  siRNA target sequence for AW413625 (NM_026640.1,508-526).
ctaggaaacacaaaaacat

SEQ ID NO: 726331 - DNA, 19 bp, Mus musculus
  siRNA target sequence for AW413625 (NM_026640.1,548-566).
ggagacaagcagcttgtat

SEQ ID NO: 726332 - DNA, 19 bp, Mus musculus
  siRNA target sequence for AW413625 (NM_026640.1,635-653).
gtgtggcaaagaaggaatt

SEQ ID NO: 726333 - DNA, 19 bp, Mus musculus
  siRNA target sequence for AW413625 (NM_026640.1,648-666).
ggaattgaagggtacttaa

SEQ ID NO: 726334 - DNA, 19 bp, Mus musculus
  siRNA target sequence for AW413625 (NM_026640.1,677-695).
gcccgtctgctgtatacca

SEQ ID NO: 726335 - DNA, 19 bp, Mus musculus
  siRNA target sequence for AW413625 (NM_026640.1,703-721).
gccatgtcgtcattacatt

SEQ ID NO: 726336 - DNA, 19 bp, Mus musculus
  siRNA target sequence for AW413625 (NM_026640.1,704-722).
ccatgtcgtcattacattt

SEQ ID NO: 726337 - DNA, 19 bp, Mus musculus
  siRNA target sequence for AW413625 (NM_026640.1,705-723).
catgtcgtcattacatttt

SEQ ID NO: 726338 - DNA, 19 bp, Mus musculus
  siRNA target sequence for AW413625 (NM_026640.1,713-731).
cattacattttgtcaatgt

SEQ ID NO: 726339 - DNA, 19 bp, Mus musculus
  siRNA target sequence for AW413625 (NM_026640.1,744-762).
caggaaaataaacaattct

SEQ ID NO: 726340 - DNA, 19 bp, Mus musculus
  siRNA target sequence for AW413625 (NM_026640.1,773-791).
ggaccaagcatctaccaat

SEQ ID NO: 726341 - DNA, 19 bp, Mus musculus
  siRNA target sequence for AW413625 (NM_026640.1,774-792).
gaccaagcatctaccaatt

SEQ ID NO: 726342 - DNA, 19 bp, Mus musculus
  siRNA target sequence for AW413625 (NM_026640.1,794-812).
cgtccgattttgcattcat

SEQ ID NO: 726343 - DNA, 19 bp, Mus musculus
  siRNA target sequence for AW413625 (NM_026640.1,869-887).
gaacaaactctgtgtctat

SEQ ID NO: 726344 - DNA, 19 bp, Mus musculus
  siRNA target sequence for AW413625 (NM_026640.1,923-941).
gaaggatggcaggttttgt

SEQ ID NO: 726345 - DNA, 19 bp, Mus musculus
  siRNA target sequence for AW413625 (NM_026640.1,926-944).
ggatggcaggttttgtact

SEQ ID NO: 726346 - DNA, 19 bp, Mus musculus
  siRNA target sequence for AW413625 (NM_026640.1,927-945).
gatggcaggttttgtactt

SEQ ID NO: 726347 - DNA, 19 bp, Mus musculus
  siRNA target sequence for AW413625 (NM_026640.1,955-973).
gtgacgattggaaactcat

SEQ ID NO: 726348 - DNA, 19 bp, Mus musculus
  siRNA target sequence for AW413625 (NM_026640.1,957-975).
gacgattggaaactcatta

SEQ ID NO: 726349 - DNA, 19 bp, Mus musculus
  siRNA target sequence for AW413625 (NM_026640.1,1017-1035).
gagttagagggcaagcttt

SEQ ID NO: 726350 - DNA, 19 bp, Mus musculus
  siRNA target sequence for AW413625 (NM_026640.1,1019-1037).
gttagagggcaagcttttt

SEQ ID NO: 726351 - DNA, 19 bp, Mus musculus
  siRNA target sequence for AW413625 (NM_026640.1,1106-1124).
cagaaactttcataagcta

SEQ ID NO: 726352 - DNA, 19 bp, Mus musculus
  siRNA target sequence for AW413625 (NM_026640.1,1122-1140).
ctagaagagtacattgtga

SEQ ID NO: 726353 - DNA, 19 bp, Mus musculus
  siRNA target sequence for AW413625 (NM_026640.1,1137-1155).
gtgaatgagtacactacat

SEQ ID NO: 726354 - DNA, 19 bp, Mus musculus
  siRNA target sequence for AW413625 (NM_026640.1,1225-1243).
ccttattcaaagtgcataa

SEQ ID NO: 726355 - DNA, 19 bp, Mus musculus
  siRNA target sequence for AW413625 (NM_026640.1,1383-1401).
gagttgtacattttgactt

SEQ ID NO: 726356 - DNA, 19 bp, Mus musculus
  siRNA target sequence for AW413625 (NM_026640.1,1406-1424).
gcatgtgatagctagcatt

SEQ ID NO: 726357 - DNA, 19 bp, Mus musculus
  siRNA target sequence for AW413625 (NM_026640.1,1427-1445).
gggtgaaggcatagattca

SEQ ID NO: 726358 - DNA, 19 bp, Mus musculus
  siRNA target sequence for AW413625 (NM_026640.1,1447-1465).
gtgagtgggcaaacataat

SEQ ID NO: 726359 - DNA, 19 bp, Mus musculus
  siRNA target sequence for AW413625 (NM_026640.1,1476-1494).
gtaaaggtgacctttgatt

SEQ ID NO: 726360 - DNA, 19 bp, Mus musculus
  siRNA target sequence for AW413625 (NM_026640.1,1513-1531).
caggagacaagttttttat

SEQ ID NO: 726361 - DNA, 19 bp, Mus musculus
  siRNA target sequence for AW413625 (NM_026640.1,1544-1562).
gtttgaaatatctgataaa

SEQ ID NO: 726362 - DNA, 19 bp, Mus musculus
  siRNA target sequence for AW413625 (NM_026640.1,1614-1632).
gctgggctgtatcatagaa

SEQ ID NO: 726363 - DNA, 19 bp, Mus musculus
  siRNA target sequence for AW413625 (NM_026640.1,1615-1633).
ctgggctgtatcatagaat

SEQ ID NO: 726364 - DNA, 19 bp, Mus musculus
  siRNA target sequence for AW413625 (NM_026640.1,1647-1665).
catagtgggttgatttata

SEQ ID NO: 726365 - DNA, 19 bp, Mus musculus
  siRNA target sequence for AW413625 (NM_026640.1,1651-1669).
gtgggttgatttatatcat

SEQ ID NO: 726366 - DNA, 19 bp, Mus musculus
  siRNA target sequence for AW413625 (NM_026640.1,1680-1698).
gagggagaaaagaagtcta

SEQ ID NO: 726367 - DNA, 19 bp, Mus musculus
  siRNA target sequence for AW413625 (NM_026640.1,1715-1733).
ggtccctcaaagtagtaga

SEQ ID NO: 726368 - DNA, 19 bp, Mus musculus
  siRNA target sequence for AW413625 (NM_026640.1,1844-1862).
ctctgatgtggttacttat

SEQ ID NO: 726369 - DNA, 19 bp, Mus musculus
  siRNA target sequence for AW413625 (NM_026640.1,1858-1876).
cttatgacaccagtttttt

SEQ ID NO: 726370 - DNA, 19 bp, Mus musculus
  siRNA target sequence for AW413625 (NM_026640.1,1895-1913).
cccagtatttgattctaat

SEQ ID NO: 726371 - DNA, 19 bp, Mus musculus
  siRNA target sequence for AW413625 (NM_026640.1,1899-1917).
gtatttgattctaatggtt

SEQ ID NO: 726372 - DNA, 19 bp, Mus musculus
  siRNA target sequence for AW413625 (NM_026640.1,1938-1956).
gctggcatcacttgtacat

SEQ ID NO: 726373 - DNA, 19 bp, Mus musculus
  siRNA target sequence for AW413625 (NM_026640.1,2005-2023).
ccattgatgatcatatgaa

SEQ ID NO: 726374 - DNA, 19 bp, Mus musculus
  siRNA target sequence for AW413625 (NM_026640.1,2079-2097).
gaaatgctgagcatagatt

SEQ ID NO: 726375 - DNA, 19 bp, Mus musculus
  siRNA target sequence for 4921524P20Rik (NM_026641.1,91-109).
gatatctctctcaaaggaa

SEQ ID NO: 726376 - DNA, 19 bp, Mus musculus
  siRNA target sequence for 4921524P20Rik (NM_026641.1,107-125).
gaaccaaagcatcaagaat

SEQ ID NO: 726377 - DNA, 19 bp, Mus musculus
  siRNA target sequence for 4921524P20Rik (NM_026641.1,111-129).
caaagcatcaagaattagt

SEQ ID NO: 726378 - DNA, 19 bp, Mus musculus
  siRNA target sequence for 4921524P20Rik (NM_026641.1,152-170).
gcggaggagctgtactcat

SEQ ID NO: 726379 - DNA, 19 bp, Mus musculus
  siRNA target sequence for 4921524P20Rik (NM_026641.1,211-229).
cagtgaaaccagcctaata

SEQ ID NO: 726380 - DNA, 19 bp, Mus musculus
  siRNA target sequence for 4921524P20Rik (NM_026641.1,260-278).
gaccttcactggtttccaa

SEQ ID NO: 726381 - DNA, 19 bp, Mus musculus
  siRNA target sequence for 4921524P20Rik (NM_026641.1,280-298).
gagtttaggcataaagaaa

SEQ ID NO: 726382 - DNA, 19 bp, Mus musculus
  siRNA target sequence for 4921524P20Rik (NM_026641.1,327-345).
caagctctgatggtaagtt

SEQ ID NO: 726383 - DNA, 19 bp, Mus musculus
  siRNA target sequence for 4921524P20Rik (NM_026641.1,338-356).
ggtaagtttcatctgattt

SEQ ID NO: 726384 - DNA, 19 bp, Mus musculus
  siRNA target sequence for 4921524P20Rik (NM_026641.1,406-424).
gctcgcaggacgatggaat

SEQ ID NO: 726385 - DNA, 19 bp, Mus musculus
  siRNA target sequence for 4921524P20Rik (NM_026641.1,407-425).
ctcgcaggacgatggaatt

SEQ ID NO: 726386 - DNA, 19 bp, Mus musculus
  siRNA target sequence for 4921524P20Rik (NM_026641.1,409-427).
cgcaggacgatggaattat

SEQ ID NO: 726387 - DNA, 19 bp, Mus musculus
  siRNA target sequence for 4921524P20Rik (NM_026641.1,411-429).
caggacgatggaattatga

SEQ ID NO: 726388 - DNA, 19 bp, Mus musculus
  siRNA target sequence for 4921524P20Rik (NM_026641.1,428-446).
gaggggactgcattagtga

SEQ ID NO: 726389 - DNA, 19 bp, Mus musculus
  siRNA target sequence for 4921524P20Rik (NM_026641.1,578-596).
ggcaaacagctcatcatta

SEQ ID NO: 726390 - DNA, 19 bp, Mus musculus
  siRNA target sequence for 4921524P20Rik (NM_026641.1,636-654).
cccatgatggcatcatttt

SEQ ID NO: 726391 - DNA, 19 bp, Mus musculus
  siRNA target sequence for 4921524P20Rik (NM_026641.1,661-679).
cgactggaactcagtgaat

SEQ ID NO: 726392 - DNA, 19 bp, Mus musculus
  siRNA target sequence for 4921524P20Rik (NM_026641.1,672-690).
cagtgaatgaccttatttt

SEQ ID NO: 726393 - DNA, 19 bp, Mus musculus
  siRNA target sequence for 4921524P20Rik (NM_026641.1,674-692).
gtgaatgaccttattttat

SEQ ID NO: 726394 - DNA, 19 bp, Mus musculus
  siRNA target sequence for 4921524P20Rik (NM_026641.1,693-711).
ctgcgggtgaagactgtaa

SEQ ID NO: 726395 - DNA, 19 bp, Mus musculus
  siRNA target sequence for 4921524P20Rik (NM_026641.1,697-715).
gggtgaagactgtaagtat

SEQ ID NO: 726396 - DNA, 19 bp, Mus musculus
  siRNA target sequence for 4921524P20Rik (NM_026641.1,698-716).
ggtgaagactgtaagtata

SEQ ID NO: 726397 - DNA, 19 bp, Mus musculus
  siRNA target sequence for 4921524P20Rik (NM_026641.1,791-809).
gctccagatggggagttat

SEQ ID NO: 726398 - DNA, 19 bp, Mus musculus
  siRNA target sequence for 4921524P20Rik (NM_026641.1,792-810).
ctccagatggggagttatt

SEQ ID NO: 726399 - DNA, 19 bp, Mus musculus
  siRNA target sequence for 4921524P20Rik (NM_026641.1,812-830).
gccgttggatcgtttcata

SEQ ID NO: 726400 - DNA, 19 bp, Mus musculus
  siRNA target sequence for 4921524P20Rik (NM_026641.1,831-849).
cgttacgcttgtgtgataa

SEQ ID NO: 726401 - DNA, 19 bp, Mus musculus
  siRNA target sequence for 4921524P20Rik (NM_026641.1,832-850).
gttacgcttgtgtgataaa

SEQ ID NO: 726402 - DNA, 19 bp, Mus musculus
  siRNA target sequence for 4921524P20Rik (NM_026641.1,855-873).
ggtggtcatatgctttaga

SEQ ID NO: 726403 - DNA, 19 bp, Mus musculus
  siRNA target sequence for 4921524P20Rik (NM_026641.1,885-903).
ctggcagcatatttaacat

SEQ ID NO: 726404 - DNA, 19 bp, Mus musculus
  siRNA target sequence for 4921524P20Rik (NM_026641.1,901-919).
cattgcgtggtctattgat

SEQ ID NO: 726405 - DNA, 19 bp, Mus musculus
  siRNA target sequence for 4921524P20Rik (NM_026641.1,942-960).
gtgggaacgggcatgttgt

SEQ ID NO: 726406 - DNA, 19 bp, Mus musculus
  siRNA target sequence for 4921524P20Rik (NM_026641.1,946-964).
gaacgggcatgttgtcttt

SEQ ID NO: 726407 - DNA, 19 bp, Mus musculus
  siRNA target sequence for 4921524P20Rik (NM_026641.1,982-1000).
gcgctgggagtggaaaaat

SEQ ID NO: 726408 - DNA, 19 bp, Mus musculus
  siRNA target sequence for 4921524P20Rik (NM_026641.1,983-1001).
cgctgggagtggaaaaatt

SEQ ID NO: 726409 - DNA, 19 bp, Mus musculus
  siRNA target sequence for 4921524P20Rik (NM_026641.1,988-1006).
ggagtggaaaaattttcaa

SEQ ID NO: 726410 - DNA, 19 bp, Mus musculus
  siRNA target sequence for 4921524P20Rik (NM_026641.1,991-1009).
gtggaaaaattttcaagta

SEQ ID NO: 726411 - DNA, 19 bp, Mus musculus
  siRNA target sequence for 4921524P20Rik (NM_026641.1,1007-1025).
gtaacgctaacgaagagaa

SEQ ID NO: 726412 - DNA, 19 bp, Mus musculus
  siRNA target sequence for 4921524P20Rik (NM_026641.1,1036-1054).
ggttcgcaacgttctcaat

SEQ ID NO: 726413 - DNA, 19 bp, Mus musculus
  siRNA target sequence for 4921524P20Rik (NM_026641.1,1075-1093).
gttccgggacagagtcatt

SEQ ID NO: 726414 - DNA, 19 bp, Mus musculus
  siRNA target sequence for 4921524P20Rik (NM_026641.1,1078-1096).
ccgggacagagtcattaaa

SEQ ID NO: 726415 - DNA, 19 bp, Mus musculus
  siRNA target sequence for 4921524P20Rik (NM_026641.1,1167-1185).
ggaatacaccacttatatt

SEQ ID NO: 726416 - DNA, 19 bp, Mus musculus
  siRNA target sequence for 4921524P20Rik (NM_026641.1,1168-1186).
gaatacaccacttatattt

SEQ ID NO: 726417 - DNA, 19 bp, Mus musculus
  siRNA target sequence for 4921524P20Rik (NM_026641.1,1196-1214).
gaaggaactgttagtttaa

SEQ ID NO: 726418 - DNA, 19 bp, Mus musculus
  siRNA target sequence for 4921524P20Rik (NM_026641.1,1277-1295).
gaagggcgcttcatttctt

SEQ ID NO: 726419 - DNA, 19 bp, Mus musculus
  siRNA target sequence for 4921524P20Rik (NM_026641.1,1353-1371).
gcaatgacacgatagcaat

SEQ ID NO: 726420 - DNA, 19 bp, Mus musculus
  siRNA target sequence for 4921524P20Rik (NM_026641.1,1354-1372).
caatgacacgatagcaata

SEQ ID NO: 726421 - DNA, 19 bp, Mus musculus
  siRNA target sequence for 4921524P20Rik (NM_026641.1,1382-1400).
gctgacgagaagataatct

SEQ ID NO: 726422 - DNA, 19 bp, Mus musculus
  siRNA target sequence for 4921524P20Rik (NM_026641.1,1383-1401).
ctgacgagaagataatctt

SEQ ID NO: 726423 - DNA, 19 bp, Mus musculus
  siRNA target sequence for 4921524P20Rik (NM_026641.1,1439-1457).
gggaaacttctttctcata

SEQ ID NO: 726424 - DNA, 19 bp, Mus musculus
  siRNA target sequence for 4921524P20Rik (NM_026641.1,1496-1514).
cttaccaatgacagaaaaa

SEQ ID NO: 726425 - DNA, 19 bp, Mus musculus
  siRNA target sequence for 4921524P20Rik (NM_026641.1,1543-1561).
ctacatcacctctgtgaaa

SEQ ID NO: 726426 - DNA, 19 bp, Mus musculus
  siRNA target sequence for 4921524P20Rik (NM_026641.1,1549-1567).
cacctctgtgaaacgattt

SEQ ID NO: 726427 - DNA, 19 bp, Mus musculus
  siRNA target sequence for 4921524P20Rik (NM_026641.1,1592-1610).
cttggaaccatggtacata

SEQ ID NO: 726428 - DNA, 19 bp, Mus musculus
  siRNA target sequence for 4921524P20Rik (NM_026641.1,1595-1613).
ggaaccatggtacatactt

SEQ ID NO: 726429 - DNA, 19 bp, Mus musculus
  siRNA target sequence for 4921524P20Rik (NM_026641.1,1655-1673).
gatactcgattcacagtat

SEQ ID NO: 726430 - DNA, 19 bp, Mus musculus
  siRNA target sequence for 4921524P20Rik (NM_026641.1,1659-1677).
ctcgattcacagtatggta

SEQ ID NO: 726431 - DNA, 19 bp, Mus musculus
  siRNA target sequence for 4921524P20Rik (NM_026641.1,1661-1679).
cgattcacagtatggtatt

SEQ ID NO: 726432 - DNA, 19 bp, Mus musculus
  siRNA target sequence for 4921524P20Rik (NM_026641.1,1670-1688).
gtatggtattaccctaata

SEQ ID NO: 726433 - DNA, 19 bp, Mus musculus
  siRNA target sequence for 4921524P20Rik (NM_026641.1,1674-1692).
ggtattaccctaataccat

SEQ ID NO: 726434 - DNA, 19 bp, Mus musculus
  siRNA target sequence for 4921524P20Rik (NM_026641.1,1675-1693).
gtattaccctaataccatt

SEQ ID NO: 726435 - DNA, 19 bp, Mus musculus
  siRNA target sequence for 4921524P20Rik (NM_026641.1,1706-1724).
gacattctgcctaaaacat

SEQ ID NO: 726436 - DNA, 19 bp, Mus musculus
  siRNA target sequence for 4921524P20Rik (NM_026641.1,1715-1733).
cctaaaacattgtacgaaa

SEQ ID NO: 726437 - DNA, 19 bp, Mus musculus
  siRNA target sequence for 4921524P20Rik (NM_026641.1,1736-1754).
gatgcaagtgaatatagta

SEQ ID NO: 726438 - DNA, 19 bp, Mus musculus
  siRNA target sequence for 4921524P20Rik (NM_026641.1,1740-1758).
caagtgaatatagtaaaaa

SEQ ID NO: 726439 - DNA, 19 bp, Mus musculus
  siRNA target sequence for 4921524P20Rik (NM_026641.1,1752-1770).
gtaaaaacccgcatatagt

SEQ ID NO: 726440 - DNA, 19 bp, Mus musculus
  siRNA target sequence for 4921524P20Rik (NM_026641.1,1759-1777).
cccgcatatagtgagtttt

SEQ ID NO: 726441 - DNA, 19 bp, Mus musculus
  siRNA target sequence for 4921524P20Rik (NM_026641.1,1761-1779).
cgcatatagtgagttttgt

SEQ ID NO: 726442 - DNA, 19 bp, Mus musculus
  siRNA target sequence for 4921524P20Rik (NM_026641.1,1762-1780).
gcatatagtgagttttgtt

SEQ ID NO: 726443 - DNA, 19 bp, Mus musculus
  siRNA target sequence for 4921524P20Rik (NM_026641.1,1778-1796).
gttggaaatcaggtaacta

SEQ ID NO: 726444 - DNA, 19 bp, Mus musculus
  siRNA target sequence for 4921524P20Rik (NM_026641.1,1819-1837).
ggtgcacatcagcatatca

SEQ ID NO: 726445 - DNA, 19 bp, Mus musculus
  siRNA target sequence for 4921524P20Rik (NM_026641.1,1950-1968).
ctgttgctaatcgagatat

SEQ ID NO: 726446 - DNA, 19 bp, Mus musculus
  siRNA target sequence for 4921524P20Rik (NM_026641.1,2009-2027).
gataaagttcggtacatca

SEQ ID NO: 726447 - DNA, 19 bp, Mus musculus
  siRNA target sequence for 4921524P20Rik (NM_026641.1,2015-2033).
gttcggtacatcaatgcta

SEQ ID NO: 726448 - DNA, 19 bp, Mus musculus
  siRNA target sequence for 4921524P20Rik (NM_026641.1,2018-2036).
cggtacatcaatgctataa

SEQ ID NO: 726449 - DNA, 19 bp, Mus musculus
  siRNA target sequence for 4921524P20Rik (NM_026641.1,2019-2037).
ggtacatcaatgctataaa

SEQ ID NO: 726450 - DNA, 19 bp, Mus musculus
  siRNA target sequence for 4921524P20Rik (NM_026641.1,2122-2140).
ggctggccttgtttatcaa

SEQ ID NO: 726451 - DNA, 19 bp, Mus musculus
  siRNA target sequence for 4921524P20Rik (NM_026641.1,2132-2150).
gtttatcaagccatacaga

SEQ ID NO: 726452 - DNA, 19 bp, Mus musculus
  siRNA target sequence for 4921524P20Rik (NM_026641.1,2138-2156).
caagccatacagatcaaca

SEQ ID NO: 726453 - DNA, 19 bp, Mus musculus
  siRNA target sequence for 4921524P20Rik (NM_026641.1,2141-2159).
gccatacagatcaacatta

SEQ ID NO: 726454 - DNA, 19 bp, Mus musculus
  siRNA target sequence for 4921524P20Rik (NM_026641.1,2142-2160).
ccatacagatcaacattaa

SEQ ID NO: 726455 - DNA, 19 bp, Mus musculus
  siRNA target sequence for 4921524P20Rik (NM_026641.1,2147-2165).
cagatcaacattaatctct

SEQ ID NO: 726456 - DNA, 19 bp, Mus musculus
  siRNA target sequence for 4921524P20Rik (NM_026641.1,2186-2204).
gagttggctgtaaaataca

SEQ ID NO: 726457 - DNA, 19 bp, Mus musculus
  siRNA target sequence for 4921524P20Rik (NM_026641.1,2228-2246).
gcttatcgtcagaagttct

SEQ ID NO: 726458 - DNA, 19 bp, Mus musculus
  siRNA target sequence for 4921524P20Rik (NM_026641.1,2229-2247).
cttatcgtcagaagttctt

SEQ ID NO: 726459 - DNA, 19 bp, Mus musculus
  siRNA target sequence for 4921524P20Rik (NM_026641.1,2264-2282).
caggaaactaataaacgat

SEQ ID NO: 726460 - DNA, 19 bp, Mus musculus
  siRNA target sequence for 4921524P20Rik (NM_026641.1,2266-2284).
ggaaactaataaacgatat

SEQ ID NO: 726461 - DNA, 19 bp, Mus musculus
  siRNA target sequence for 4921524P20Rik (NM_026641.1,2295-2313).
cagagggcctccaaataga

SEQ ID NO: 726462 - DNA, 19 bp, Mus musculus
  siRNA target sequence for 4921524P20Rik (NM_026641.1,2330-2348).
gccaaaattgagatggaaa

SEQ ID NO: 726463 - DNA, 19 bp, Mus musculus
  siRNA target sequence for 4632406N01Rik (NM_026642.1,94-112).
gtgtgaggagtctgtagtt

SEQ ID NO: 726464 - DNA, 19 bp, Mus musculus
  siRNA target sequence for 4632406N01Rik (NM_026642.1,96-114).
gtgaggagtctgtagttgt

SEQ ID NO: 726465 - DNA, 19 bp, Mus musculus
  siRNA target sequence for 4632406N01Rik (NM_026642.1,323-341).
gatcctcttccttccaaaa

SEQ ID NO: 726466 - DNA, 19 bp, Mus musculus
  siRNA target sequence for 4632406N01Rik (NM_026642.1,354-372).
gttcacctgctcagatact

SEQ ID NO: 726467 - DNA, 19 bp, Mus musculus
  siRNA target sequence for 4632406N01Rik (NM_026642.1,469-487).
cctaatgctgcttagtgaa

SEQ ID NO: 726468 - DNA, 19 bp, Mus musculus
  siRNA target sequence for 4632406N01Rik (NM_026642.1,547-565).
ctcggccctgggagttcaa

SEQ ID NO: 726469 - DNA, 19 bp, Mus musculus
  siRNA target sequence for 4632406N01Rik (NM_026642.1,643-661).
ctgggtagagcatatggat

SEQ ID NO: 726470 - DNA, 19 bp, Mus musculus
  siRNA target sequence for 4632406N01Rik (NM_026642.1,667-685).
catccggtataagtttgat

SEQ ID NO: 726471 - DNA, 19 bp, Mus musculus
  siRNA target sequence for 4632406N01Rik (NM_026642.1,773-791).
ctctacgcagggattggtt

SEQ ID NO: 726472 - DNA, 19 bp, Mus musculus
  siRNA target sequence for 4632406N01Rik (NM_026642.1,775-793).
ctacgcagggattggttat

SEQ ID NO: 726473 - DNA, 19 bp, Mus musculus
  siRNA target sequence for 4632406N01Rik (NM_026642.1,783-801).
ggattggttattttacatt

SEQ ID NO: 726474 - DNA, 19 bp, Mus musculus
  siRNA target sequence for 4632406N01Rik (NM_026642.1,798-816).
cattgcccttcctagttca

SEQ ID NO: 726475 - DNA, 19 bp, Mus musculus
  siRNA target sequence for 4632406N01Rik (NM_026642.1,855-873).
ctcatgctgtagttgcttt

SEQ ID NO: 726476 - DNA, 19 bp, Mus musculus
  siRNA target sequence for 4632406N01Rik (NM_026642.1,901-919).
ggcagaccggtgccaaata

SEQ ID NO: 726477 - DNA, 19 bp, Mus musculus
  siRNA target sequence for 4632406N01Rik (NM_026642.1,903-921).
cagaccggtgccaaataca

SEQ ID NO: 726478 - DNA, 19 bp, Mus musculus
  siRNA target sequence for 4632406N01Rik (NM_026642.1,905-923).
gaccggtgccaaatacatt

SEQ ID NO: 726479 - DNA, 19 bp, Mus musculus
  siRNA target sequence for 4632406N01Rik (NM_026642.1,907-925).
ccggtgccaaatacatttt

SEQ ID NO: 726480 - DNA, 19 bp, Mus musculus
  siRNA target sequence for 4632406N01Rik (NM_026642.1,978-996).
ggctcattcccagttctaa

SEQ ID NO: 726481 - DNA, 19 bp, Mus musculus
  siRNA target sequence for 4632406N01Rik (NM_026642.1,979-997).
gctcattcccagttctaaa

SEQ ID NO: 726482 - DNA, 19 bp, Mus musculus
  siRNA target sequence for 4632406N01Rik (NM_026642.1,1098-1116).
cacctggaagcaataacgt

SEQ ID NO: 726483 - DNA, 19 bp, Mus musculus
  siRNA target sequence for 4632406N01Rik (NM_026642.1,1104-1122).
gaagcaataacgtggaaaa

SEQ ID NO: 726484 - DNA, 19 bp, Mus musculus
  siRNA target sequence for 4632406N01Rik (NM_026642.1,1107-1125).
gcaataacgtggaaaaaga

SEQ ID NO: 726485 - DNA, 19 bp, Mus musculus
  siRNA target sequence for 4632406N01Rik (NM_026642.1,1131-1149).
ggcctcgtccccagaaaat

SEQ ID NO: 726486 - DNA, 19 bp, Mus musculus
  siRNA target sequence for 4632406N01Rik (NM_026642.1,1133-1151).
cctcgtccccagaaaatca

SEQ ID NO: 726487 - DNA, 19 bp, Mus musculus
  siRNA target sequence for 4632406N01Rik (NM_026642.1,1255-1273).
gatcgcctctcttcttcat

SEQ ID NO: 726488 - DNA, 19 bp, Mus musculus
  siRNA target sequence for 4632406N01Rik (NM_026642.1,1260-1278).
cctctcttcttcatcaagt

SEQ ID NO: 726489 - DNA, 19 bp, Mus musculus
  siRNA target sequence for 4632406N01Rik (NM_026642.1,1313-1331).
gtccacccagtgaaatctt

SEQ ID NO: 726490 - DNA, 19 bp, Mus musculus
  siRNA target sequence for 2410017P07Rik (NM_026643.2,241-259).
gaatgcatcttccatcatt

SEQ ID NO: 726491 - DNA, 19 bp, Mus musculus
  siRNA target sequence for 2410017P07Rik (NM_026643.2,292-310).
ctgggacccctcctaaaat

SEQ ID NO: 726492 - DNA, 19 bp, Mus musculus
  siRNA target sequence for 2410017P07Rik (NM_026643.2,294-312).
gggacccctcctaaaatgt

SEQ ID NO: 726493 - DNA, 19 bp, Mus musculus
  siRNA target sequence for 2410017P07Rik (NM_026643.2,295-313).
ggacccctcctaaaatgtt

SEQ ID NO: 726494 - DNA, 19 bp, Mus musculus
  siRNA target sequence for 2410017P07Rik (NM_026643.2,296-314).
gacccctcctaaaatgttt

SEQ ID NO: 726495 - DNA, 19 bp, Mus musculus
  siRNA target sequence for 2410017P07Rik (NM_026643.2,298-316).
cccctcctaaaatgtttaa

SEQ ID NO: 726496 - DNA, 19 bp, Mus musculus
  siRNA target sequence for 2410017P07Rik (NM_026643.2,299-317).
ccctcctaaaatgtttaat

SEQ ID NO: 726497 - DNA, 19 bp, Mus musculus
  siRNA target sequence for 2410017P07Rik (NM_026643.2,429-447).
gaagcagcgcagtataaga

SEQ ID NO: 726498 - DNA, 19 bp, Mus musculus
  siRNA target sequence for 2410017P07Rik (NM_026643.2,535-553).
cagcccagtctcgttgtat

SEQ ID NO: 726499 - DNA, 19 bp, Mus musculus
  siRNA target sequence for 2410017P07Rik (NM_026643.2,539-557).
ccagtctcgttgtattctt

SEQ ID NO: 726500 - DNA, 19 bp, Mus musculus
  siRNA target sequence for 2410017P07Rik (NM_026643.2,580-598).
caaaaagaatggttctcaa

SEQ ID NO: 726501 - DNA, 19 bp, Mus musculus
  siRNA target sequence for 2410017P07Rik (NM_026643.2,600-618).
gtagaacgagaaaagacta

SEQ ID NO: 726502 - DNA, 19 bp, Mus musculus
  siRNA target sequence for 2410017P07Rik (NM_026643.2,614-632).
gactatgatcctagaacaa

SEQ ID NO: 726503 - DNA, 19 bp, Mus musculus
  siRNA target sequence for 2410017P07Rik (NM_026643.2,671-689).
gaagctgcacgctaaactt

SEQ ID NO: 726504 - DNA, 19 bp, Mus musculus
  siRNA target sequence for 2410017P07Rik (NM_026643.2,674-692).
gctgcacgctaaacttgaa

SEQ ID NO: 726505 - DNA, 19 bp, Mus musculus
  siRNA target sequence for 2410017P07Rik (NM_026643.2,675-693).
ctgcacgctaaacttgaaa

SEQ ID NO: 726506 - DNA, 19 bp, Mus musculus
  siRNA target sequence for 2410017P07Rik (NM_026643.2,749-767).
ggaggacaagattaaatgt

SEQ ID NO: 726507 - DNA, 19 bp, Mus musculus
  siRNA target sequence for 2410017P07Rik (NM_026643.2,752-770).
ggacaagattaaatgtcta

SEQ ID NO: 726508 - DNA, 19 bp, Mus musculus
  siRNA target sequence for 2410017P07Rik (NM_026643.2,830-848).
gaaaactaactgcttaaaa

SEQ ID NO: 726509 - DNA, 19 bp, Mus musculus
  siRNA target sequence for 2410017P07Rik (NM_026643.2,869-887).
ggaccacaagtttagaaca

SEQ ID NO: 726510 - DNA, 19 bp, Mus musculus
  siRNA target sequence for 2410017P07Rik (NM_026643.2,1237-1255).
gcaaccctaaaggatctaa

SEQ ID NO: 726511 - DNA, 19 bp, Mus musculus
  siRNA target sequence for 2410017P07Rik (NM_026643.2,1242-1260).
cctaaaggatctaagaact

SEQ ID NO: 726512 - DNA, 19 bp, Mus musculus
  siRNA target sequence for 2410017P07Rik (NM_026643.2,1243-1261).
ctaaaggatctaagaactt

SEQ ID NO: 726513 - DNA, 19 bp, Mus musculus
  siRNA target sequence for 2410017P07Rik (NM_026643.2,1275-1293).
cggaaatgtgtgagtgaaa

SEQ ID NO: 726514 - DNA, 19 bp, Mus musculus
  siRNA target sequence for 2410017P07Rik (NM_026643.2,1288-1306).
gtgaaaccagctcttttca

SEQ ID NO: 726515 - DNA, 19 bp, Mus musculus
  siRNA target sequence for 1700012F17Rik (NM_026645.1,625-643).
ccatcagcaagcgaaaaca

SEQ ID NO: 726516 - DNA, 19 bp, Mus musculus
  siRNA target sequence for 1700012F17Rik (NM_026645.1,626-644).
catcagcaagcgaaaacaa

SEQ ID NO: 726517 - DNA, 19 bp, Mus musculus
  siRNA target sequence for Zdhhc21 (NM_026647.2,211-229).
gggtcttcggattcacttt

SEQ ID NO: 726518 - DNA, 19 bp, Mus musculus
  siRNA target sequence for Zdhhc21 (NM_026647.2,219-237).
ggattcactttgttgttga

SEQ ID NO: 726519 - DNA, 19 bp, Mus musculus
  siRNA target sequence for Zdhhc21 (NM_026647.2,277-295).
ctggttatacaatattgtt

SEQ ID NO: 726520 - DNA, 19 bp, Mus musculus
  siRNA target sequence for Zdhhc21 (NM_026647.2,279-297).
ggttatacaatattgttat

SEQ ID NO: 726521 - DNA, 19 bp, Mus musculus
  siRNA target sequence for Zdhhc21 (NM_026647.2,280-298).
gttatacaatattgttata

SEQ ID NO: 726522 - DNA, 19 bp, Mus musculus
  siRNA target sequence for Zdhhc21 (NM_026647.2,325-343).
ctatgaagaaggacatatt

SEQ ID NO: 726523 - DNA, 19 bp, Mus musculus
  siRNA target sequence for Zdhhc21 (NM_026647.2,403-421).
gagggcctccttaactgat

SEQ ID NO: 726524 - DNA, 19 bp, Mus musculus
  siRNA target sequence for Zdhhc21 (NM_026647.2,587-605).
gtgggtgaagacaaccatt

SEQ ID NO: 726525 - DNA, 19 bp, Mus musculus
  siRNA target sequence for Zdhhc21 (NM_026647.2,645-663).
cttgctacgcactgatgtt

SEQ ID NO: 726526 - DNA, 19 bp, Mus musculus
  siRNA target sequence for Zdhhc21 (NM_026647.2,649-667).
ctacgcactgatgttttct

SEQ ID NO: 726527 - DNA, 19 bp, Mus musculus
  siRNA target sequence for Zdhhc21 (NM_026647.2,693-711).
cactaaaaaagcgtaactt

SEQ ID NO: 726528 - DNA, 19 bp, Mus musculus
  siRNA target sequence for Zdhhc21 (NM_026647.2,703-721).
gcgtaacttggatctcttt

SEQ ID NO: 726529 - DNA, 19 bp, Mus musculus
  siRNA target sequence for Zdhhc21 (NM_026647.2,709-727).
cttggatctctttgttgtt

SEQ ID NO: 726530 - DNA, 19 bp, Mus musculus
  siRNA target sequence for Zdhhc21 (NM_026647.2,729-747).
gccatgagctggctatcat

SEQ ID NO: 726531 - DNA, 19 bp, Mus musculus
  siRNA target sequence for Zdhhc21 (NM_026647.2,766-784).
gggcatcactatgttagtt

SEQ ID NO: 726532 - DNA, 19 bp, Mus musculus
  siRNA target sequence for Zdhhc21 (NM_026647.2,772-790).
cactatgttagttggaata

SEQ ID NO: 726533 - DNA, 19 bp, Mus musculus
  siRNA target sequence for Zdhhc21 (NM_026647.2,786-804).
gaataactggactcttcta

SEQ ID NO: 726534 - DNA, 19 bp, Mus musculus
  siRNA target sequence for Zdhhc21 (NM_026647.2,792-810).
ctggactcttctatacaca

SEQ ID NO: 726535 - DNA, 19 bp, Mus musculus
  siRNA target sequence for Zdhhc21 (NM_026647.2,799-817).
cttctatacacaactgatt

SEQ ID NO: 726536 - DNA, 19 bp, Mus musculus
  siRNA target sequence for Zdhhc21 (NM_026647.2,826-844).
cacagatacaacatctatt

SEQ ID NO: 726537 - DNA, 19 bp, Mus musculus
  siRNA target sequence for Zdhhc21 (NM_026647.2,828-846).
cagatacaacatctattga

SEQ ID NO: 726538 - DNA, 19 bp, Mus musculus
  siRNA target sequence for Zdhhc21 (NM_026647.2,853-871).
gtcaaattgttgtgaagaa

SEQ ID NO: 726539 - DNA, 19 bp, Mus musculus
  siRNA target sequence for Zdhhc21 (NM_026647.2,901-919).
gaccttctcagaagttttt

SEQ ID NO: 726540 - DNA, 19 bp, Mus musculus
  siRNA target sequence for 4930441O14Rik (NM_026649.1,538-556).
gagtcctgggcctgtcata

SEQ ID NO: 726541 - DNA, 19 bp, Mus musculus
  siRNA target sequence for 4930441O14Rik (NM_026649.1,542-560).
cctgggcctgtcatagaat

SEQ ID NO: 726542 - DNA, 19 bp, Mus musculus
  siRNA target sequence for 4930441O14Rik (NM_026649.1,582-600).
cacttgctctagatttcct

SEQ ID NO: 726543 - DNA, 19 bp, Mus musculus
  siRNA target sequence for 4930441O14Rik (NM_026649.1,617-635).
gcaatgtgaaagctagtaa

SEQ ID NO: 726544 - DNA, 19 bp, Mus musculus
  siRNA target sequence for 4930441O14Rik (NM_026649.1,707-725).
cacccctaagcctagatct

SEQ ID NO: 726545 - DNA, 19 bp, Mus musculus
  siRNA target sequence for 4930547C10Rik (NM_026652.1,408-426).
gagtctgactggaattact

SEQ ID NO: 726546 - DNA, 19 bp, Mus musculus
  siRNA target sequence for 4930547C10Rik (NM_026652.1,410-428).
gtctgactggaattactct

SEQ ID NO: 726547 - DNA, 19 bp, Mus musculus
  siRNA target sequence for 4930547C10Rik (NM_026652.1,439-457).
gaggggatggcgcttcata

SEQ ID NO: 726548 - DNA, 19 bp, Mus musculus
  siRNA target sequence for 4930547C10Rik (NM_026652.1,444-462).
gatggcgcttcatactcaa

SEQ ID NO: 726549 - DNA, 19 bp, Mus musculus
  siRNA target sequence for 4930547C10Rik (NM_026652.1,449-467).
cgcttcatactcaaggtta

SEQ ID NO: 726550 - DNA, 19 bp, Mus musculus
  siRNA target sequence for 4930547C10Rik (NM_026652.1,454-472).
catactcaaggttaactaa

SEQ ID NO: 726551 - DNA, 19 bp, Mus musculus
  siRNA target sequence for 4930547C10Rik (NM_026652.1,458-476).
ctcaaggttaactaagaaa

SEQ ID NO: 726552 - DNA, 19 bp, Mus musculus
  siRNA target sequence for 4930547C10Rik (NM_026652.1,625-643).
caaagaagaccagatcatt

SEQ ID NO: 726553 - DNA, 19 bp, Mus musculus
  siRNA target sequence for 4930547C10Rik (NM_026652.1,640-658).
cattgagagaactgactat

SEQ ID NO: 726554 - DNA, 19 bp, Mus musculus
  siRNA target sequence for 4930547C10Rik (NM_026652.1,671-689).
gagcaagtttggagacaat

SEQ ID NO: 726555 - DNA, 19 bp, Mus musculus
  siRNA target sequence for 4930547C10Rik (NM_026652.1,711-729).
gtgtccttgagccatttta

SEQ ID NO: 726556 - DNA, 19 bp, Mus musculus
  siRNA target sequence for 4930547C10Rik (NM_026652.1,740-758).
ggttgtgaagtttagaaga

SEQ ID NO: 726557 - DNA, 19 bp, Mus musculus
  siRNA target sequence for 4930547C10Rik (NM_026652.1,804-822).
ggactgaaaaggttctttt

SEQ ID NO: 726558 - DNA, 19 bp, Mus musculus
  siRNA target sequence for 4930547C10Rik (NM_026652.1,814-832).
ggttcttttcagctcatta

SEQ ID NO: 726559 - DNA, 19 bp, Mus musculus
  siRNA target sequence for 4930547C10Rik (NM_026652.1,815-833).
gttcttttcagctcattat

SEQ ID NO: 726560 - DNA, 19 bp, Mus musculus
  siRNA target sequence for 4930547C10Rik (NM_026652.1,945-963).
ctccatcacatgacgaaat

SEQ ID NO: 726561 - DNA, 19 bp, Mus musculus
  siRNA target sequence for 4930547C10Rik (NM_026652.1,947-965).
ccatcacatgacgaaattt

SEQ ID NO: 726562 - DNA, 19 bp, Mus musculus
  siRNA target sequence for 4930547C10Rik (NM_026652.1,948-966).
catcacatgacgaaattta

SEQ ID NO: 726563 - DNA, 19 bp, Mus musculus
  siRNA target sequence for 4930547C10Rik (NM_026652.1,1026-1044).
cactttcttcatgagttta

SEQ ID NO: 726564 - DNA, 19 bp, Mus musculus
  siRNA target sequence for 4930547C10Rik (NM_026652.1,1110-1128).
gtttcaaagagttcgaaaa

SEQ ID NO: 726565 - DNA, 19 bp, Mus musculus
  siRNA target sequence for 4930547C10Rik (NM_026652.1,1189-1207).
ctcaacgaggcataaagca

SEQ ID NO: 726566 - DNA, 19 bp, Mus musculus
  siRNA target sequence for 4930547C10Rik (NM_026652.1,1245-1263).
gactctggcttgaaacagt

SEQ ID NO: 726567 - DNA, 19 bp, Mus musculus
  siRNA target sequence for 4930547C10Rik (NM_026652.1,1271-1289).
gggtcattcctcaaaaaat

SEQ ID NO: 726568 - DNA, 19 bp, Mus musculus
  siRNA target sequence for 4930547C10Rik (NM_026652.1,1331-1349).
ccatgtttggaccaaagat

SEQ ID NO: 726569 - DNA, 19 bp, Mus musculus
  siRNA target sequence for 4930547C10Rik (NM_026652.1,1377-1395).
gtggtgtgtactactaatt

SEQ ID NO: 726570 - DNA, 19 bp, Mus musculus
  siRNA target sequence for 4930547C10Rik (NM_026652.1,1423-1441).
gaaggctagacaaagagta

SEQ ID NO: 726571 - DNA, 19 bp, Mus musculus
  siRNA target sequence for 4930547C10Rik (NM_026652.1,1426-1444).
ggctagacaaagagtatta

SEQ ID NO: 726572 - DNA, 19 bp, Mus musculus
  siRNA target sequence for 4930547C10Rik (NM_026652.1,1427-1445).
gctagacaaagagtattat

SEQ ID NO: 726573 - DNA, 19 bp, Mus musculus
  siRNA target sequence for 4930547C10Rik (NM_026652.1,1428-1446).
ctagacaaagagtattata

SEQ ID NO: 726574 - DNA, 19 bp, Mus musculus
  siRNA target sequence for 4930547C10Rik (NM_026652.1,1543-1561).
gagcattggtagattctaa

SEQ ID NO: 726575 - DNA, 19 bp, Mus musculus
  siRNA target sequence for 4930547C10Rik (NM_026652.1,1591-1609).
gggaaacaaatgttttgga

SEQ ID NO: 726576 - DNA, 19 bp, Mus musculus
  siRNA target sequence for 4930547C10Rik (NM_026652.1,1615-1633).
gccaacaggtacattatca

SEQ ID NO: 726577 - DNA, 19 bp, Mus musculus
  siRNA target sequence for 4930547C10Rik (NM_026652.1,1617-1635).
caacaggtacattatcaga

SEQ ID NO: 726578 - DNA, 19 bp, Mus musculus
  siRNA target sequence for 4930547C10Rik (NM_026652.1,1620-1638).
caggtacattatcagaaaa

SEQ ID NO: 726579 - DNA, 19 bp, Mus musculus
  siRNA target sequence for 4930547C10Rik (NM_026652.1,1674-1692).
ctaaaggctcttcaaagat

SEQ ID NO: 726580 - DNA, 19 bp, Mus musculus
  siRNA target sequence for 4930547C10Rik (NM_026652.1,1690-1708).
gattgcccaaagaaagaat

SEQ ID NO: 726581 - DNA, 19 bp, Mus musculus
  siRNA target sequence for 4930547C10Rik (NM_026652.1,1721-1739).
caaatccagagaaagtaat

SEQ ID NO: 726582 - DNA, 19 bp, Mus musculus
  siRNA target sequence for 4930547C10Rik (NM_026652.1,1768-1786).
gcacctctcctactagaaa

SEQ ID NO: 726583 - DNA, 19 bp, Mus musculus
  siRNA target sequence for 4930547C10Rik (NM_026652.1,1769-1787).
cacctctcctactagaaat

SEQ ID NO: 726584 - DNA, 19 bp, Mus musculus
  siRNA target sequence for 4930547C10Rik (NM_026652.1,1771-1789).
cctctcctactagaaatga

SEQ ID NO: 726585 - DNA, 19 bp, Mus musculus
  siRNA target sequence for 4930547C10Rik (NM_026652.1,1772-1790).
ctctcctactagaaatgat

SEQ ID NO: 726586 - DNA, 19 bp, Mus musculus
  siRNA target sequence for 4930547C10Rik (NM_026652.1,1774-1792).
ctcctactagaaatgataa

SEQ ID NO: 726587 - DNA, 19 bp, Mus musculus
  siRNA target sequence for 4930547C10Rik (NM_026652.1,1831-1849).
gccagtcctcccaatgtgt

SEQ ID NO: 726588 - DNA, 19 bp, Mus musculus
  siRNA target sequence for 4930547C10Rik (NM_026652.1,1832-1850).
ccagtcctcccaatgtgta

SEQ ID NO: 726589 - DNA, 19 bp, Mus musculus
  siRNA target sequence for 4930547C10Rik (NM_026652.1,1837-1855).
cctcccaatgtgtagaagt

SEQ ID NO: 726590 - DNA, 19 bp, Mus musculus
  siRNA target sequence for 4930547C10Rik (NM_026652.1,1838-1856).
ctcccaatgtgtagaagtt

SEQ ID NO: 726591 - DNA, 19 bp, Mus musculus
  siRNA target sequence for 4930547C10Rik (NM_026652.1,1857-1875).
ggttcacaccacagtagaa

SEQ ID NO: 726592 - DNA, 19 bp, Mus musculus
  siRNA target sequence for 4930547C10Rik (NM_026652.1,1919-1937).
ctggtgtgtcagaattaga

SEQ ID NO: 726593 - DNA, 19 bp, Mus musculus
  siRNA target sequence for 4930547C10Rik (NM_026652.1,2022-2040).
gctcatggctgtgaatcaa

SEQ ID NO: 726594 - DNA, 19 bp, Mus musculus
  siRNA target sequence for 4930547C10Rik (NM_026652.1,2041-2059).
cctacagggtggcatcttt

SEQ ID NO: 726595 - DNA, 19 bp, Mus musculus
  siRNA target sequence for 4930547C10Rik (NM_026652.1,2072-2090).
ccatgaccaggtttgttta

SEQ ID NO: 726596 - DNA, 19 bp, Mus musculus
  siRNA target sequence for 4930547C10Rik (NM_026652.1,2120-2138).
catgggtgaaggtgaatct

SEQ ID NO: 726597 - DNA, 19 bp, Mus musculus
  siRNA target sequence for 4930547C10Rik (NM_026652.1,2197-2215).
caagtaagcttggtatgaa

SEQ ID NO: 726598 - DNA, 19 bp, Mus musculus
  siRNA target sequence for 4930547C10Rik (NM_026652.1,2222-2240).
gcacctagttggtagagtt

SEQ ID NO: 726599 - DNA, 19 bp, Mus musculus
  siRNA target sequence for 4930547C10Rik (NM_026652.1,2223-2241).
cacctagttggtagagtta

SEQ ID NO: 726600 - DNA, 19 bp, Mus musculus
  siRNA target sequence for 4930547C10Rik (NM_026652.1,2251-2269).
gaacacataggcgcaaaaa

SEQ ID NO: 726601 - DNA, 19 bp, Mus musculus
  siRNA target sequence for 4930547C10Rik (NM_026652.1,2260-2278).
ggcgcaaaaaacccaaata

SEQ ID NO: 726602 - DNA, 19 bp, Mus musculus
  siRNA target sequence for 4930547C10Rik (NM_026652.1,2293-2311).
cacaaaccacagcagaatt

SEQ ID NO: 726603 - DNA, 19 bp, Mus musculus
  siRNA target sequence for 4930547C10Rik (NM_026652.1,2324-2342).
gggggatctcgaggataaa

SEQ ID NO: 726604 - DNA, 19 bp, Mus musculus
  siRNA target sequence for 4930547C10Rik (NM_026652.1,2344-2362).
gccaaaaaggctttttgaa

SEQ ID NO: 726605 - DNA, 19 bp, Mus musculus
  siRNA target sequence for 4930547C10Rik (NM_026652.1,2345-2363).
ccaaaaaggctttttgaat

SEQ ID NO: 726606 - DNA, 19 bp, Mus musculus
  siRNA target sequence for 0610011L14Rik (NM_026661.2,697-715).
ggaccttacccatatgcta

SEQ ID NO: 726607 - DNA, 19 bp, Mus musculus
  siRNA target sequence for 0610011L14Rik (NM_026661.2,707-725).
catatgctacactcaagaa

SEQ ID NO: 726608 - DNA, 19 bp, Mus musculus
  siRNA target sequence for 0610011L14Rik (NM_026661.2,1028-1046).
gctatgccctcgaaactgt

SEQ ID NO: 726609 - DNA, 19 bp, Mus musculus
  siRNA target sequence for 0610011L14Rik (NM_026661.2,1170-1188).
cctgtgtcggtctgaatct

SEQ ID NO: 726610 - DNA, 19 bp, Mus musculus
  siRNA target sequence for 0610011L14Rik (NM_026661.2,1254-1272).
gatccctgctgacttcttt

SEQ ID NO: 726611 - DNA, 19 bp, Mus musculus
  siRNA target sequence for 0610011L14Rik (NM_026661.2,1384-1402).
caagcccacctgactaaga

SEQ ID NO: 726612 - DNA, 19 bp, Mus musculus
  siRNA target sequence for 0610011L14Rik (NM_026661.2,1388-1406).
cccacctgactaagaagtt

SEQ ID NO: 726613 - DNA, 19 bp, Mus musculus
  siRNA target sequence for 3100002B05Rik (NM_026664.2,262-280).
gccgttgagtatatcaata

SEQ ID NO: 726614 - DNA, 19 bp, Mus musculus
  siRNA target sequence for 3100002B05Rik (NM_026664.2,264-282).
cgttgagtatatcaatact

SEQ ID NO: 726615 - DNA, 19 bp, Mus musculus
  siRNA target sequence for 3100002B05Rik (NM_026664.2,308-326).
caaacattgacgatgttgt

SEQ ID NO: 726616 - DNA, 19 bp, Mus musculus
  siRNA target sequence for 3100002B05Rik (NM_026664.2,350-368).
ggagactggatgacaatat

SEQ ID NO: 726617 - DNA, 19 bp, Mus musculus
  siRNA target sequence for 3100002B05Rik (NM_026664.2,378-396).
cgtaagaggtcagacaaat

SEQ ID NO: 726618 - DNA, 19 bp, Mus musculus
  siRNA target sequence for 3100002B05Rik (NM_026664.2,511-529).
gagatcacccgagatatta

SEQ ID NO: 726619 - DNA, 19 bp, Mus musculus
  siRNA target sequence for 3100002B05Rik (NM_026664.2,521-539).
gagatattaagcagttaga

SEQ ID NO: 726620 - DNA, 19 bp, Mus musculus
  siRNA target sequence for 3100002B05Rik (NM_026664.2,553-571).
cacctgaccacctcaatca

SEQ ID NO: 726621 - DNA, 19 bp, Mus musculus
  siRNA target sequence for 3100002B05Rik (NM_026664.2,642-660).
gtatggagaagttgctaat

SEQ ID NO: 726622 - DNA, 19 bp, Mus musculus
  siRNA target sequence for 3100002B05Rik (NM_026664.2,661-679).
ctccttcagggtgtaatga

SEQ ID NO: 726623 - DNA, 19 bp, Mus musculus
  siRNA target sequence for 3100002B05Rik (NM_026664.2,682-700).
gttctggagcactttcaca

SEQ ID NO: 726624 - DNA, 19 bp, Mus musculus
  siRNA target sequence for 3100002B05Rik (NM_026664.2,685-703).
ctggagcactttcacaaat

SEQ ID NO: 726625 - DNA, 19 bp, Mus musculus
  siRNA target sequence for 3100002B05Rik (NM_026664.2,921-939).
gcatctatcagagtatcta

SEQ ID NO: 726626 - DNA, 19 bp, Mus musculus
  siRNA target sequence for 3100002B05Rik (NM_026664.2,964-982).
gtcgcctggctggacaaaa

SEQ ID NO: 726627 - DNA, 19 bp, Mus musculus
  siRNA target sequence for 3100002B05Rik (NM_026664.2,1032-1050).
gaagtatggccggatgttt

SEQ ID NO: 726628 - DNA, 19 bp, Mus musculus
  siRNA target sequence for 3100002B05Rik (NM_026664.2,1098-1116).
cgtgacgagggcagaactt

SEQ ID NO: 726629 - DNA, 19 bp, Mus musculus
  siRNA target sequence for 3100002B05Rik (NM_026664.2,1099-1117).
gtgacgagggcagaacttt

SEQ ID NO: 726630 - DNA, 19 bp, Mus musculus
  siRNA target sequence for 3100002B05Rik (NM_026664.2,1103-1121).
cgagggcagaactttccaa

SEQ ID NO: 726631 - DNA, 19 bp, Mus musculus
  siRNA target sequence for 3100002B05Rik (NM_026664.2,1128-1146).
gcgtgccagagctaaggaa

SEQ ID NO: 726632 - DNA, 19 bp, Mus musculus
  siRNA target sequence for 3100002B05Rik (NM_026664.2,1129-1147).
cgtgccagagctaaggaaa

SEQ ID NO: 726633 - DNA, 19 bp, Mus musculus
  siRNA target sequence for 3100002B05Rik (NM_026664.2,1150-1168).
gaagtgaaattgcttcttt

SEQ ID NO: 726634 - DNA, 19 bp, Mus musculus
  siRNA target sequence for 3100002B05Rik (NM_026664.2,1235-1253).
cagatggaaccctgaaaaa

SEQ ID NO: 726635 - DNA, 19 bp, Mus musculus
  siRNA target sequence for 3100002B05Rik (NM_026664.2,1263-1281).
cccaccaccatctaccaat

SEQ ID NO: 726636 - DNA, 19 bp, Mus musculus
  siRNA target sequence for 3100002B05Rik (NM_026664.2,1267-1285).
ccaccatctaccaatcctt

SEQ ID NO: 726637 - DNA, 19 bp, Mus musculus
  siRNA target sequence for 3100002B05Rik (NM_026664.2,1378-1396).
ccgttccacggcatcgttt

SEQ ID NO: 726638 - DNA, 19 bp, Mus musculus
  siRNA target sequence for 3100002B05Rik (NM_026664.2,1388-1406).
gcatcgtttccaagtgttt

SEQ ID NO: 726639 - DNA, 19 bp, Mus musculus
  siRNA target sequence for 3100002B05Rik (NM_026664.2,1470-1488).
gtttgtggcagatttcaaa

SEQ ID NO: 726640 - DNA, 19 bp, Mus musculus
  siRNA target sequence for 3100002B05Rik (NM_026664.2,1648-1666).
cgagaatacgcctggaaaa

SEQ ID NO: 726641 - DNA, 19 bp, Mus musculus
  siRNA target sequence for 3100002B05Rik (NM_026664.2,1675-1693).
ggcaacctgcctaaaacca

SEQ ID NO: 726642 - DNA, 19 bp, Mus musculus
  siRNA target sequence for 3100002B05Rik (NM_026664.2,1800-1818).
gagcacagccgagtattgt

SEQ ID NO: 726643 - DNA, 19 bp, Mus musculus
  siRNA target sequence for 3100002B05Rik (NM_026664.2,1802-1820).
gcacagccgagtattgtct

SEQ ID NO: 726644 - DNA, 19 bp, Mus musculus
  siRNA target sequence for 3100002B05Rik (NM_026664.2,1869-1887).
gagcctgactgaacgaatt

SEQ ID NO: 726645 - DNA, 19 bp, Mus musculus
  siRNA target sequence for 3100002B05Rik (NM_026664.2,1872-1890).
cctgactgaacgaattaat

SEQ ID NO: 726646 - DNA, 19 bp, Mus musculus
  siRNA target sequence for 3100002B05Rik (NM_026664.2,2039-2057).
cttatgtcacttctgttat

SEQ ID NO: 726647 - DNA, 19 bp, Mus musculus
  siRNA target sequence for 3100002B05Rik (NM_026664.2,2101-2119).
gcttccacacggaaatact

SEQ ID NO: 726648 - DNA, 19 bp, Mus musculus
  siRNA target sequence for 3100002B05Rik (NM_026664.2,2102-2120).
cttccacacggaaatactt

SEQ ID NO: 726649 - DNA, 19 bp, Mus musculus
  siRNA target sequence for 3100002B05Rik (NM_026664.2,2123-2141).
cacagttctgcattaaatt

SEQ ID NO: 726650 - DNA, 19 bp, Mus musculus
  siRNA target sequence for 3100002B05Rik (NM_026664.2,2171-2189).
cccacctcttcaagtgtaa

SEQ ID NO: 726651 - DNA, 19 bp, Mus musculus
  siRNA target sequence for 3100002B05Rik (NM_026664.2,2292-2310).
ggcccctgccagttacact

SEQ ID NO: 726652 - DNA, 19 bp, Mus musculus
  siRNA target sequence for 3100002B05Rik (NM_026664.2,2293-2311).
gcccctgccagttacacta

SEQ ID NO: 726653 - DNA, 19 bp, Mus musculus
  siRNA target sequence for 3100002B05Rik (NM_026664.2,2294-2312).
cccctgccagttacactaa

SEQ ID NO: 726654 - DNA, 19 bp, Mus musculus
  siRNA target sequence for 3100002B05Rik (NM_026664.2,2296-2314).
cctgccagttacactaaga

SEQ ID NO: 726655 - DNA, 19 bp, Mus musculus
  siRNA target sequence for 3100002B05Rik (NM_026664.2,2358-2376).
ggtgatggcccctcatgaa

SEQ ID NO: 726656 - DNA, 19 bp, Mus musculus
  siRNA target sequence for 3110002L15Rik (NM_026665.2,214-232).
catcaaggtgtaatggaaa

SEQ ID NO: 726657 - DNA, 19 bp, Mus musculus
  siRNA target sequence for 3110002L15Rik (NM_026665.2,220-238).
ggtgtaatggaaatatggt

SEQ ID NO: 726658 - DNA, 19 bp, Mus musculus
  siRNA target sequence for 3110002L15Rik (NM_026665.2,247-265).
cttcgtctccatatgtatt

SEQ ID NO: 726659 - DNA, 19 bp, Mus musculus
  siRNA target sequence for 3110002L15Rik (NM_026665.2,273-291).
cctgataagcctttcctta

SEQ ID NO: 726660 - DNA, 19 bp, Mus musculus
  siRNA target sequence for 3110002L15Rik (NM_026665.2,300-318).
ctgagacgctccccaaata

SEQ ID NO: 726661 - DNA, 19 bp, Mus musculus
  siRNA target sequence for 3110002L15Rik (NM_026665.2,439-457).
ccttgtctagggaaaccat

SEQ ID NO: 726662 - DNA, 19 bp, Mus musculus
  siRNA target sequence for 3110002L15Rik (NM_026665.2,440-458).
cttgtctagggaaaccatt

SEQ ID NO: 726663 - DNA, 19 bp, Mus musculus
  siRNA target sequence for 3110002L15Rik (NM_026665.2,448-466).
gggaaaccattgagtacaa

SEQ ID NO: 726664 - DNA, 19 bp, Mus musculus
  siRNA target sequence for 3110002L15Rik (NM_026665.2,594-612).
gaatacatgcgaaatatga

SEQ ID NO: 726665 - DNA, 19 bp, Mus musculus
  siRNA target sequence for 3110002L15Rik (NM_026665.2,634-652).
ggacatctgtgttagaaaa

SEQ ID NO: 726666 - DNA, 19 bp, Mus musculus
  siRNA target sequence for 3110002L15Rik (NM_026665.2,653-671).
gcaggtttctctagaaaga

SEQ ID NO: 726667 - DNA, 19 bp, Mus musculus
  siRNA target sequence for 3110002L15Rik (NM_026665.2,670-688).
gagaacggcagcatgatca

SEQ ID NO: 726668 - DNA, 19 bp, Mus musculus
  siRNA target sequence for 3110002L15Rik (NM_026665.2,672-690).
gaacggcagcatgatcaaa

SEQ ID NO: 726669 - DNA, 19 bp, Mus musculus
  siRNA target sequence for 3110002L15Rik (NM_026665.2,723-741).
cttcttgaacaggaataca

SEQ ID NO: 726670 - DNA, 19 bp, Mus musculus
  siRNA target sequence for 3110002L15Rik (NM_026665.2,726-744).
cttgaacaggaatacaaca

SEQ ID NO: 726671 - DNA, 19 bp, Mus musculus
  siRNA target sequence for 3110002L15Rik (NM_026665.2,851-869).
gttacagagtggtctagaa

SEQ ID NO: 726672 - DNA, 19 bp, Mus musculus
  siRNA target sequence for 3110002L15Rik (NM_026665.2,867-885).
gaagcaaatagacttattt

SEQ ID NO: 726673 - DNA, 19 bp, Mus musculus
  siRNA target sequence for 3110002L15Rik (NM_026665.2,888-906).
gaagataagactacttcat

SEQ ID NO: 726674 - DNA, 19 bp, Mus musculus
  siRNA target sequence for 3110002L15Rik (NM_026665.2,909-927).
gtttcaaccagcactagaa

SEQ ID NO: 726675 - DNA, 19 bp, Mus musculus
  siRNA target sequence for 3110002L15Rik (NM_026665.2,984-1002).
ggtgcacagccacattaca

SEQ ID NO: 726676 - DNA, 19 bp, Mus musculus
  siRNA target sequence for 3110002L15Rik (NM_026665.2,990-1008).
cagccacattacagattgt

SEQ ID NO: 726677 - DNA, 19 bp, Mus musculus
  siRNA target sequence for 3110002L15Rik (NM_026665.2,1003-1021).
gattgtgcttaggtgatat

SEQ ID NO: 726678 - DNA, 19 bp, Mus musculus
  siRNA target sequence for 3110002L15Rik (NM_026665.2,1060-1078).
ccgtggtagccaatgttca

SEQ ID NO: 726679 - DNA, 19 bp, Mus musculus
  siRNA target sequence for 3110002L15Rik (NM_026665.2,1120-1138).
gcaatgatcgagttgttaa

SEQ ID NO: 726680 - DNA, 19 bp, Mus musculus
  siRNA target sequence for 3110002L15Rik (NM_026665.2,1161-1179).
gcttgctcacgagttagta

SEQ ID NO: 726681 - DNA, 19 bp, Mus musculus
  siRNA target sequence for 3110002L15Rik (NM_026665.2,1162-1180).
cttgctcacgagttagtaa

SEQ ID NO: 726682 - DNA, 19 bp, Mus musculus
  siRNA target sequence for 3110002L15Rik (NM_026665.2,1166-1184).
ctcacgagttagtaagagt

SEQ ID NO: 726683 - DNA, 19 bp, Mus musculus
  siRNA target sequence for 3110002L15Rik (NM_026665.2,1168-1186).
cacgagttagtaagagtaa

SEQ ID NO: 726684 - DNA, 19 bp, Mus musculus
  siRNA target sequence for 3110002L15Rik (NM_026665.2,1170-1188).
cgagttagtaagagtaaga

SEQ ID NO: 726685 - DNA, 19 bp, Mus musculus
  siRNA target sequence for 3110002L15Rik (NM_026665.2,1173-1191).
gttagtaagagtaagaagt

SEQ ID NO: 726686 - DNA, 19 bp, Mus musculus
  siRNA target sequence for 3110002L15Rik (NM_026665.2,1201-1219).
ctccttccagcagtgttaa

SEQ ID NO: 726687 - DNA, 19 bp, Mus musculus
  siRNA target sequence for 3110002L15Rik (NM_026665.2,1204-1222).
cttccagcagtgttaatga

SEQ ID NO: 726688 - DNA, 19 bp, Mus musculus
  siRNA target sequence for 3110002L15Rik (NM_026665.2,1232-1250).
ggatgtcttgcagacttta

SEQ ID NO: 726689 - DNA, 19 bp, Mus musculus
  siRNA target sequence for 3110002L15Rik (NM_026665.2,1254-1272).
gatgaatttgggcaaatga

SEQ ID NO: 726690 - DNA, 19 bp, Mus musculus
  siRNA target sequence for 3110002L15Rik (NM_026665.2,1264-1282).
ggcaaatgagctttgatca

SEQ ID NO: 726691 - DNA, 19 bp, Mus musculus
  siRNA target sequence for 3110002L15Rik (NM_026665.2,1265-1283).
gcaaatgagctttgatcat

SEQ ID NO: 726692 - DNA, 19 bp, Mus musculus
  siRNA target sequence for 3110002L15Rik (NM_026665.2,1286-1304).
gcagcttactaaactcata

SEQ ID NO: 726693 - DNA, 19 bp, Mus musculus
  siRNA target sequence for 3110002L15Rik (NM_026665.2,1312-1330).
caccaactgtggaactaaa

SEQ ID NO: 726694 - DNA, 19 bp, Mus musculus
  siRNA target sequence for 3110002L15Rik (NM_026665.2,1332-1350).
gacaacctggagtgtgaat

SEQ ID NO: 726695 - DNA, 19 bp, Mus musculus
  siRNA target sequence for 3110002L15Rik (NM_026665.2,1345-1363).
gtgaattggaggcattagt

SEQ ID NO: 726696 - DNA, 19 bp, Mus musculus
  siRNA target sequence for 3110002L15Rik (NM_026665.2,1374-1392).
gaagcgaaggccaatcaga

SEQ ID NO: 726697 - DNA, 19 bp, Mus musculus
  siRNA target sequence for 3110002L15Rik (NM_026665.2,1377-1395).
gcgaaggccaatcagataa

SEQ ID NO: 726698 - DNA, 19 bp, Mus musculus
  siRNA target sequence for 3110002L15Rik (NM_026665.2,1379-1397).
gaaggccaatcagataact

SEQ ID NO: 726699 - DNA, 19 bp, Mus musculus
  siRNA target sequence for 3110002L15Rik (NM_026665.2,1382-1400).
ggccaatcagataactaaa

SEQ ID NO: 726700 - DNA, 19 bp, Mus musculus
  siRNA target sequence for 3110002L15Rik (NM_026665.2,1385-1403).
caatcagataactaaagtt

SEQ ID NO: 726701 - DNA, 19 bp, Mus musculus
  siRNA target sequence for 3110002L15Rik (NM_026665.2,1391-1409).
gataactaaagttcgaaaa

SEQ ID NO: 726702 - DNA, 19 bp, Mus musculus
  siRNA target sequence for 3110002L15Rik (NM_026665.2,1496-1514).
cagcagcggtcgttcatct

SEQ ID NO: 726703 - DNA, 19 bp, Mus musculus
  siRNA target sequence for 3110002L15Rik (NM_026665.2,1601-1619).
catgcagaccatacagaat

SEQ ID NO: 726704 - DNA, 19 bp, Mus musculus
  siRNA target sequence for 3110002L15Rik (NM_026665.2,1604-1622).
gcagaccatacagaattca

SEQ ID NO: 726705 - DNA, 19 bp, Mus musculus
  siRNA target sequence for 9130005N14Rik (NM_026667.2,148-166).
gtccagctacaacttcaaa

SEQ ID NO: 726706 - DNA, 19 bp, Mus musculus
  siRNA target sequence for 9130005N14Rik (NM_026667.2,241-259).
ggattctagaccaatccaa

SEQ ID NO: 726707 - DNA, 19 bp, Mus musculus
  siRNA target sequence for 9130005N14Rik (NM_026667.2,284-302).
cctcaatggagaagtaact

SEQ ID NO: 726708 - DNA, 19 bp, Mus musculus
  siRNA target sequence for 9130005N14Rik (NM_026667.2,344-362).
gggagacaccggatctgaa

SEQ ID NO: 726709 - DNA, 19 bp, Mus musculus
  siRNA target sequence for 9130005N14Rik (NM_026667.2,350-368).
caccggatctgaaatacct

SEQ ID NO: 726710 - DNA, 19 bp, Mus musculus
  siRNA target sequence for 9130005N14Rik (NM_026667.2,469-487).
ccacagtaggtcatggatt

SEQ ID NO: 726711 - DNA, 19 bp, Mus musculus
  siRNA target sequence for 9130005N14Rik (NM_026667.2,470-488).
cacagtaggtcatggatta

SEQ ID NO: 726712 - DNA, 19 bp, Mus musculus
  siRNA target sequence for 9130005N14Rik (NM_026667.2,484-502).
gattaacagcagtcaaaga

SEQ ID NO: 726713 - DNA, 19 bp, Mus musculus
  siRNA target sequence for 9130005N14Rik (NM_026667.2,508-526).
caggggcaaccctacgaat

SEQ ID NO: 726714 - DNA, 19 bp, Mus musculus
  siRNA target sequence for 9130005N14Rik (NM_026667.2,718-736).
ccggaggtctggatgcttt

SEQ ID NO: 726715 - DNA, 19 bp, Mus musculus
  siRNA target sequence for 9130005N14Rik (NM_026667.2,719-737).
cggaggtctggatgcttta

SEQ ID NO: 726716 - DNA, 19 bp, Mus musculus
  siRNA target sequence for 9130005N14Rik (NM_026667.2,723-741).
ggtctggatgctttagaat

SEQ ID NO: 726717 - DNA, 19 bp, Mus musculus
  siRNA target sequence for 9130005N14Rik (NM_026667.2,912-930).
gggatgctgtttgatgaat

SEQ ID NO: 726718 - DNA, 19 bp, Mus musculus
  siRNA target sequence for 9130005N14Rik (NM_026667.2,913-931).
ggatgctgtttgatgaata

SEQ ID NO: 726719 - DNA, 19 bp, Mus musculus
  siRNA target sequence for 9130005N14Rik (NM_026667.2,914-932).
gatgctgtttgatgaatat

SEQ ID NO: 726720 - DNA, 19 bp, Mus musculus
  siRNA target sequence for 9130005N14Rik (NM_026667.2,990-1008).
gttcagtccttcttaacat

SEQ ID NO: 726721 - DNA, 19 bp, Mus musculus
  siRNA target sequence for 9130005N14Rik (NM_026667.2,1054-1072).
caatcaaggacatctttgt

SEQ ID NO: 726722 - DNA, 19 bp, Mus musculus
  siRNA target sequence for 9130005N14Rik (NM_026667.2,1182-1200).
gccacacctgacaaactca

SEQ ID NO: 726723 - DNA, 19 bp, Mus musculus
  siRNA target sequence for 9130005N14Rik (NM_026667.2,1184-1202).
cacacctgacaaactcaat

SEQ ID NO: 726724 - DNA, 19 bp, Mus musculus
  siRNA target sequence for 9130005N14Rik (NM_026667.2,1186-1204).
cacctgacaaactcaataa

SEQ ID NO: 726725 - DNA, 19 bp, Mus musculus
  siRNA target sequence for 9130005N14Rik (NM_026667.2,1246-1264).
gcgtggtgtcgatagatgt

SEQ ID NO: 726726 - DNA, 19 bp, Mus musculus
  siRNA target sequence for 9130005N14Rik (NM_026667.2,1408-1426).
ctgcacgctgcattgaaca

SEQ ID NO: 726727 - DNA, 19 bp, Mus musculus
  siRNA target sequence for 9130005N14Rik (NM_026667.2,1417-1435).
gcattgaacagctacataa

SEQ ID NO: 726728 - DNA, 19 bp, Mus musculus
  siRNA target sequence for 9130005N14Rik (NM_026667.2,1491-1509).
gcaagagttctgataaaat

SEQ ID NO: 726729 - DNA, 19 bp, Mus musculus
  siRNA target sequence for 9130005N14Rik (NM_026667.2,1530-1548).
gaagtaacctccttatcga

SEQ ID NO: 726730 - DNA, 19 bp, Mus musculus
  siRNA target sequence for 9130005N14Rik (NM_026667.2,1537-1555).
cctccttatcgaagaagtt

SEQ ID NO: 726731 - DNA, 19 bp, Mus musculus
  siRNA target sequence for 9130005N14Rik (NM_026667.2,1538-1556).
ctccttatcgaagaagttt

SEQ ID NO: 726732 - DNA, 19 bp, Mus musculus
  siRNA target sequence for 9130005N14Rik (NM_026667.2,1541-1559).
cttatcgaagaagtttaca

SEQ ID NO: 726733 - DNA, 19 bp, Mus musculus
  siRNA target sequence for 9130005N14Rik (NM_026667.2,1573-1591).
ctgttgggagcaacaagaa

SEQ ID NO: 726734 - DNA, 19 bp, Mus musculus
  siRNA target sequence for 9130005N14Rik (NM_026667.2,1599-1617).
gtccttaaccccatgatca

SEQ ID NO: 726735 - DNA, 19 bp, Mus musculus
  siRNA target sequence for 9130005N14Rik (NM_026667.2,1610-1628).
catgatcaatagtgtgttt

SEQ ID NO: 726736 - DNA, 19 bp, Mus musculus
  siRNA target sequence for 9130005N14Rik (NM_026667.2,1637-1655).
ctccaatagcaccacatat

SEQ ID NO: 726737 - DNA, 19 bp, Mus musculus
  siRNA target sequence for 9130005N14Rik (NM_026667.2,1639-1657).
ccaatagcaccacatatgt

SEQ ID NO: 726738 - DNA, 19 bp, Mus musculus
  siRNA target sequence for 9130005N14Rik (NM_026667.2,1706-1724).
ccgcaccagctgtttgaaa

SEQ ID NO: 726739 - DNA, 19 bp, Mus musculus
  siRNA target sequence for 4930558O21Rik (NM_026668.1,529-547).
cggctacacagatttgaca

SEQ ID NO: 726740 - DNA, 19 bp, Mus musculus
  siRNA target sequence for 4930558O21Rik (NM_026668.1,532-550).
ctacacagatttgacataa

SEQ ID NO: 726741 - DNA, 19 bp, Mus musculus
  siRNA target sequence for 4930558O21Rik (NM_026668.1,566-584).
ccctgaccaaggaactact

SEQ ID NO: 726742 - DNA, 19 bp, Mus musculus
  siRNA target sequence for 4930558O21Rik (NM_026668.1,625-643).
ccccaccagctcactgata

SEQ ID NO: 726743 - DNA, 19 bp, Mus musculus
  siRNA target sequence for 4930558O21Rik (NM_026668.1,681-699).
gaccatcccgtcagagatt

SEQ ID NO: 726744 - DNA, 19 bp, Mus musculus
  siRNA target sequence for 4930558O21Rik (NM_026668.1,683-701).
ccatcccgtcagagatttt

SEQ ID NO: 726745 - DNA, 19 bp, Mus musculus
  siRNA target sequence for 4930558O21Rik (NM_026668.1,1516-1534).
cactttcccgtgcagattt

SEQ ID NO: 726746 - DNA, 19 bp, Mus musculus
  siRNA target sequence for 4930558O21Rik (NM_026668.1,1558-1576).
ctggcgctagatgataaca

SEQ ID NO: 726747 - DNA, 19 bp, Mus musculus
  siRNA target sequence for 4930558O21Rik (NM_026668.1,1560-1578).
ggcgctagatgataacaaa

SEQ ID NO: 726748 - DNA, 19 bp, Mus musculus
  siRNA target sequence for 4930558O21Rik (NM_026668.1,1562-1580).
cgctagatgataacaaagt

SEQ ID NO: 726749 - DNA, 19 bp, Mus musculus
  siRNA target sequence for 4930558O21Rik (NM_026668.1,1594-1612).
ccgagcataagcttgcttt

SEQ ID NO: 726750 - DNA, 19 bp, Mus musculus
  siRNA target sequence for 4930558O21Rik (NM_026668.1,1685-1703).
ctctggagaaattatatat

SEQ ID NO: 726751 - DNA, 19 bp, Mus musculus
  siRNA target sequence for 4930558O21Rik (NM_026668.1,1716-1734).
ggggtccaagctttcatct

SEQ ID NO: 726752 - DNA, 19 bp, Mus musculus
  siRNA target sequence for 4930558O21Rik (NM_026668.1,1717-1735).
gggtccaagctttcatctt

SEQ ID NO: 726753 - DNA, 19 bp, Mus musculus
  siRNA target sequence for 4930558O21Rik (NM_026668.1,1718-1736).
ggtccaagctttcatcttt

SEQ ID NO: 726754 - DNA, 19 bp, Mus musculus
  siRNA target sequence for 4930558O21Rik (NM_026668.1,1754-1772).
gattgatgaatcttaagga

SEQ ID NO: 726755 - DNA, 19 bp, Mus musculus
  siRNA target sequence for 4930558O21Rik (NM_026668.1,1808-1826).
cagcatccttggggttaat

SEQ ID NO: 726756 - DNA, 19 bp, Mus musculus
  siRNA target sequence for 4930558O21Rik (NM_026668.1,1850-1868).
gtcggcataatcttcttaa

SEQ ID NO: 726757 - DNA, 19 bp, Mus musculus
  siRNA target sequence for 4930558O21Rik (NM_026668.1,1853-1871).
ggcataatcttcttaagca

SEQ ID NO: 726758 - DNA, 19 bp, Mus musculus
  siRNA target sequence for 4930558O21Rik (NM_026668.1,1854-1872).
gcataatcttcttaagcaa

SEQ ID NO: 726759 - DNA, 19 bp, Mus musculus
  siRNA target sequence for 4930558O21Rik (NM_026668.1,1884-1902).
catttgccgtactcgaaat

SEQ ID NO: 726760 - DNA, 19 bp, Mus musculus
  siRNA target sequence for 4930558O21Rik (NM_026668.1,1890-1908).
ccgtactcgaaatttgaga

SEQ ID NO: 726761 - DNA, 19 bp, Mus musculus
  siRNA target sequence for 4930558O21Rik (NM_026668.1,1914-1932).
gctgctggaagacaactta

SEQ ID NO: 726762 - DNA, 19 bp, Mus musculus
  siRNA target sequence for 4930558O21Rik (NM_026668.1,1953-1971).
ccttgatcacctggtaaat

SEQ ID NO: 726763 - DNA, 19 bp, Mus musculus
  siRNA target sequence for 4930558O21Rik (NM_026668.1,1957-1975).
gatcacctggtaaatctta

SEQ ID NO: 726764 - DNA, 19 bp, Mus musculus
  siRNA target sequence for 4930558O21Rik (NM_026668.1,1978-1996).
gtcctaacactgatgaaca

SEQ ID NO: 726765 - DNA, 19 bp, Mus musculus
  siRNA target sequence for 4930558O21Rik (NM_026668.1,2004-2022).
ggtcgaccctcccatatat

SEQ ID NO: 726766 - DNA, 19 bp, Mus musculus
  siRNA target sequence for 4930558O21Rik (NM_026668.1,2016-2034).
catatatgtgtgtaaccaa

SEQ ID NO: 726767 - DNA, 19 bp, Mus musculus
  siRNA target sequence for 4930558O21Rik (NM_026668.1,2121-2139).
catggtccggaaaggatat

SEQ ID NO: 726768 - DNA, 19 bp, Mus musculus
  siRNA target sequence for 4930558O21Rik (NM_026668.1,2125-2143).
gtccggaaaggatatggat

SEQ ID NO: 726769 - DNA, 19 bp, Mus musculus
  siRNA target sequence for 4930558O21Rik (NM_026668.1,2129-2147).
ggaaaggatatggatctta

SEQ ID NO: 726770 - DNA, 19 bp, Mus musculus
  siRNA target sequence for Tegt (NM_026669.2,316-334).
catgagaccgagcaaaaga

SEQ ID NO: 726771 - DNA, 19 bp, Mus musculus
  siRNA target sequence for Tegt (NM_026669.2,495-513).
ccggagctacctgttttta

SEQ ID NO: 726772 - DNA, 19 bp, Mus musculus
  siRNA target sequence for Tegt (NM_026669.2,498-516).
gagctacctgtttttagga

SEQ ID NO: 726773 - DNA, 19 bp, Mus musculus
  siRNA target sequence for Tegt (NM_026669.2,631-649).
ggctttgtcctctttgata

SEQ ID NO: 726774 - DNA, 19 bp, Mus musculus
  siRNA target sequence for Tegt (NM_026669.2,673-691).
gaacacggagataaggatt

SEQ ID NO: 726775 - DNA, 19 bp, Mus musculus
  siRNA target sequence for Tegt (NM_026669.2,676-694).
cacggagataaggattaca

SEQ ID NO: 726776 - DNA, 19 bp, Mus musculus
  siRNA target sequence for Tegt (NM_026669.2,712-730).
ctcttcctagatttcgtta

SEQ ID NO: 726777 - DNA, 19 bp, Mus musculus
  siRNA target sequence for 5830412B09Rik (NM_026670.2,450-468).
ccagcagtggtgttggtaa

SEQ ID NO: 726778 - DNA, 19 bp, Mus musculus
  siRNA target sequence for 5830412B09Rik (NM_026670.2,536-554).
gagggagtagagaacaaca

SEQ ID NO: 726779 - DNA, 19 bp, Mus musculus
  siRNA target sequence for 5830412B09Rik (NM_026670.2,559-577).
gaaatccatggaaggaaat

SEQ ID NO: 726780 - DNA, 19 bp, Mus musculus
  siRNA target sequence for 5830412B09Rik (NM_026670.2,603-621).
cattaacagaacagaacat

SEQ ID NO: 726781 - DNA, 19 bp, Mus musculus
  siRNA target sequence for 5830412B09Rik (NM_026670.2,675-693).
ccagccctgcagacaatat

SEQ ID NO: 726782 - DNA, 19 bp, Mus musculus
  siRNA target sequence for 5830412B09Rik (NM_026670.2,739-757).
ctgtcggagagaagctttt

SEQ ID NO: 726783 - DNA, 19 bp, Mus musculus
  siRNA target sequence for 5830412B09Rik (NM_026670.2,743-761).
cggagagaagcttttgcaa

SEQ ID NO: 726784 - DNA, 19 bp, Mus musculus
  siRNA target sequence for 5830412B09Rik (NM_026670.2,815-833).
gaaagtgacgtgcacttaa

SEQ ID NO: 726785 - DNA, 19 bp, Mus musculus
  siRNA target sequence for 5830412B09Rik (NM_026670.2,849-867).
ggaggcaataccagtttct

SEQ ID NO: 726786 - DNA, 19 bp, Mus musculus
  siRNA target sequence for 5830412B09Rik (NM_026670.2,859-877).
ccagtttctcgatgctatt

SEQ ID NO: 726787 - DNA, 19 bp, Mus musculus
  siRNA target sequence for 5830412B09Rik (NM_026670.2,872-890).
gctattccgtgtgacaatt

SEQ ID NO: 726788 - DNA, 19 bp, Mus musculus
  siRNA target sequence for 5830412B09Rik (NM_026670.2,928-946).
gtacctaaggctcatcatt

SEQ ID NO: 726789 - DNA, 19 bp, Mus musculus
  siRNA target sequence for 5830412B09Rik (NM_026670.2,1024-1042).
cagttttttggaattgcta

SEQ ID NO: 726790 - DNA, 19 bp, Mus musculus
  siRNA target sequence for 5830412B09Rik (NM_026670.2,1056-1074).
gagatagaggagaggtatt

SEQ ID NO: 726791 - DNA, 19 bp, Mus musculus
  siRNA target sequence for 5830412B09Rik (NM_026670.2,1070-1088).
gtatttcagctcatgagtt

SEQ ID NO: 726792 - DNA, 19 bp, Mus musculus
  siRNA target sequence for 5830412B09Rik (NM_026670.2,1086-1104).
gttcccacgtggacttcta

SEQ ID NO: 726793 - DNA, 19 bp, Mus musculus
  siRNA target sequence for 5830412B09Rik (NM_026670.2,1091-1109).
cacgtggacttctatagca

SEQ ID NO: 726794 - DNA, 19 bp, Mus musculus
  siRNA target sequence for 5830412B09Rik (NM_026670.2,1115-1133).
cttgtccaggaggagatta

SEQ ID NO: 726795 - DNA, 19 bp, Mus musculus
  siRNA target sequence for 5830412B09Rik (NM_026670.2,1126-1144).
ggagattattgaaatgata

SEQ ID NO: 726796 - DNA, 19 bp, Mus musculus
  siRNA target sequence for 5830412B09Rik (NM_026670.2,1127-1145).
gagattattgaaatgataa

SEQ ID NO: 726797 - DNA, 19 bp, Mus musculus
  siRNA target sequence for 5830412B09Rik (NM_026670.2,1254-1272).
gtgtgaggtacccacaaaa

SEQ ID NO: 726798 - DNA, 19 bp, Mus musculus
  siRNA target sequence for 5830412B09Rik (NM_026670.2,1256-1274).
gtgaggtacccacaaaaga

SEQ ID NO: 726799 - DNA, 19 bp, Mus musculus
  siRNA target sequence for 5830412B09Rik (NM_026670.2,1277-1295).
ccaagtgctgtcttggtta

SEQ ID NO: 726800 - DNA, 19 bp, Mus musculus
  siRNA target sequence for 5830412B09Rik (NM_026670.2,1345-1363).
cgtgcatgggcggatcaaa

SEQ ID NO: 726801 - DNA, 19 bp, Mus musculus
  siRNA target sequence for 5830412B09Rik (NM_026670.2,1376-1394).
caggttggagttgatttta

SEQ ID NO: 726802 - DNA, 19 bp, Mus musculus
  siRNA target sequence for 5830412B09Rik (NM_026670.2,1414-1432).
ctatgatagtgccacaaat

SEQ ID NO: 726803 - DNA, 19 bp, Mus musculus
  siRNA target sequence for 5830412B09Rik (NM_026670.2,1438-1456).
ggtaaaattgaatgaagtt

SEQ ID NO: 726804 - DNA, 19 bp, Mus musculus
  siRNA target sequence for 5830412B09Rik (NM_026670.2,1498-1516).
gcattgtcacgcccatttt

SEQ ID NO: 726805 - DNA, 19 bp, Mus musculus
  siRNA target sequence for 5830412B09Rik (NM_026670.2,1499-1517).
cattgtcacgcccattttt

SEQ ID NO: 726806 - DNA, 19 bp, Mus musculus
  siRNA target sequence for 5830412B09Rik (NM_026670.2,1503-1521).
gtcacgcccattttttgga

SEQ ID NO: 726807 - DNA, 19 bp, Mus musculus
  siRNA target sequence for 5830412B09Rik (NM_026670.2,1526-1544).
gcggtgattagcttctgta

SEQ ID NO: 726808 - DNA, 19 bp, Mus musculus
  siRNA target sequence for 5830412B09Rik (NM_026670.2,1527-1545).
cggtgattagcttctgtaa

SEQ ID NO: 726809 - DNA, 19 bp, Mus musculus
  siRNA target sequence for 5830412B09Rik (NM_026670.2,1633-1651).
gcaaaccatgtgtaagcta

SEQ ID NO: 726810 - DNA, 19 bp, Mus musculus
  siRNA target sequence for 5830412B09Rik (NM_026670.2,1638-1656).
ccatgtgtaagctaagtct

SEQ ID NO: 726811 - DNA, 19 bp, Mus musculus
  siRNA target sequence for 5830412B09Rik (NM_026670.2,1642-1660).
gtgtaagctaagtctaaat

SEQ ID NO: 726812 - DNA, 19 bp, Mus musculus
  siRNA target sequence for 5830412B09Rik (NM_026670.2,1644-1662).
gtaagctaagtctaaataa

SEQ ID NO: 726813 - DNA, 19 bp, Mus musculus
  siRNA target sequence for 5830412B09Rik (NM_026670.2,1698-1716).
cagcccacgaccatttgct

SEQ ID NO: 726814 - DNA, 19 bp, Mus musculus
  siRNA target sequence for 5830412B09Rik (NM_026670.2,1811-1829).
gacctgttggccatggtta

SEQ ID NO: 726815 - DNA, 19 bp, Mus musculus
  siRNA target sequence for 5830412B09Rik (NM_026670.2,1819-1837).
ggccatggttaccaagttt

SEQ ID NO: 726816 - DNA, 19 bp, Mus musculus
  siRNA target sequence for 5830412B09Rik (NM_026670.2,1821-1839).
ccatggttaccaagtttga

SEQ ID NO: 726817 - DNA, 19 bp, Mus musculus
  siRNA target sequence for 5830412B09Rik (NM_026670.2,1822-1840).
catggttaccaagtttgaa

SEQ ID NO: 726818 - DNA, 19 bp, Mus musculus
  siRNA target sequence for 5830412B09Rik (NM_026670.2,1825-1843).
ggttaccaagtttgaattt

SEQ ID NO: 726819 - DNA, 19 bp, Mus musculus
  siRNA target sequence for 5830412B09Rik (NM_026670.2,1882-1900).
cacagggattctttctaga

SEQ ID NO: 726820 - DNA, 19 bp, Mus musculus
  siRNA target sequence for 5830412B09Rik (NM_026670.2,1888-1906).
gattctttctagagagttt

SEQ ID NO: 726821 - DNA, 19 bp, Mus musculus
  siRNA target sequence for 5830412B09Rik (NM_026670.2,1913-1931).
gaaactgttgacatctttt

SEQ ID NO: 726822 - DNA, 19 bp, Mus musculus
  siRNA target sequence for 5830412B09Rik (NM_026670.2,1949-1967).
gaagcaattttggaatgtt

SEQ ID NO: 726823 - DNA, 19 bp, Mus musculus
  siRNA target sequence for 5830412B09Rik (NM_026670.2,1974-1992).
ctgaaaggaatgatacata

SEQ ID NO: 726824 - DNA, 19 bp, Mus musculus
  siRNA target sequence for 5830412B09Rik (NM_026670.2,2040-2058).
ccagtaagggttttgatgt

SEQ ID NO: 726825 - DNA, 19 bp, Mus musculus
  siRNA target sequence for 5830412B09Rik (NM_026670.2,2180-2198).
ggtctggacacggtattaa

SEQ ID NO: 726826 - DNA, 19 bp, Mus musculus
  siRNA target sequence for 5830412B09Rik (NM_026670.2,2181-2199).
gtctggacacggtattaaa

SEQ ID NO: 726827 - DNA, 19 bp, Mus musculus
  siRNA target sequence for 5830412B09Rik (NM_026670.2,2185-2203).
ggacacggtattaaaacat

SEQ ID NO: 726828 - DNA, 19 bp, Mus musculus
  siRNA target sequence for 5830412B09Rik (NM_026670.2,2186-2204).
gacacggtattaaaacatt

SEQ ID NO: 726829 - DNA, 19 bp, Mus musculus
  siRNA target sequence for 5830412B09Rik (NM_026670.2,2269-2287).
gtggaatgagccattaaat

SEQ ID NO: 726830 - DNA, 19 bp, Mus musculus
  siRNA target sequence for 5830412B09Rik (NM_026670.2,2271-2289).
ggaatgagccattaaatga

SEQ ID NO: 726831 - DNA, 19 bp, Mus musculus
  siRNA target sequence for 5830412B09Rik (NM_026670.2,2302-2320).
gcacatccaggaattctat

SEQ ID NO: 726832 - DNA, 19 bp, Mus musculus
  siRNA target sequence for 5830412B09Rik (NM_026670.2,2303-2321).
cacatccaggaattctata

SEQ ID NO: 726833 - DNA, 19 bp, Mus musculus
  siRNA target sequence for 5830412B09Rik (NM_026670.2,2414-2432).
gacctaggctctttgttta

SEQ ID NO: 726834 - DNA, 19 bp, Mus musculus
  siRNA target sequence for 5830412B09Rik (NM_026670.2,2444-2462).
ctccacaataatattcctt

SEQ ID NO: 726835 - DNA, 19 bp, Mus musculus
  siRNA target sequence for 5830412B09Rik (NM_026670.2,2473-2491).
gctgttgcatattgcttta

SEQ ID NO: 726836 - DNA, 19 bp, Mus musculus
  siRNA target sequence for 5830412B09Rik (NM_026670.2,2476-2494).
gttgcatattgctttatct

SEQ ID NO: 726837 - DNA, 19 bp, Mus musculus
  siRNA target sequence for 5830412B09Rik (NM_026670.2,2486-2504).
gctttatcttggccaatta

SEQ ID NO: 726838 - DNA, 19 bp, Mus musculus
  siRNA target sequence for 5830412B09Rik (NM_026670.2,2511-2529).
caaataatgagaagtcatt

SEQ ID NO: 726839 - DNA, 19 bp, Mus musculus
  siRNA target sequence for 5830412B09Rik (NM_026670.2,2532-2550).
ccacgctgtctcatcttaa

SEQ ID NO: 726840 - DNA, 19 bp, Mus musculus
  siRNA target sequence for 5830412B09Rik (NM_026670.2,2536-2554).
gctgtctcatcttaaaaca

SEQ ID NO: 726841 - DNA, 19 bp, Mus musculus
  siRNA target sequence for 5830412B09Rik (NM_026670.2,2572-2590).
gggacaagagaaacttagt

SEQ ID NO: 726842 - DNA, 19 bp, Mus musculus
  siRNA target sequence for 5830412B09Rik (NM_026670.2,2573-2591).
ggacaagagaaacttagta

SEQ ID NO: 726843 - DNA, 19 bp, Mus musculus
  siRNA target sequence for 5830412B09Rik (NM_026670.2,2654-2672).
gggggaattgtcgaaaagt

SEQ ID NO: 726844 - DNA, 19 bp, Mus musculus
  siRNA target sequence for 5830412B09Rik (NM_026670.2,2655-2673).
ggggaattgtcgaaaagtt

SEQ ID NO: 726845 - DNA, 19 bp, Mus musculus
  siRNA target sequence for 0610008C08Rik (NM_026673.1,340-358).
ggcgctgcagggtaattca

SEQ ID NO: 726846 - DNA, 19 bp, Mus musculus
  siRNA target sequence for 0610008A10Rik (NM_026674.2,267-285).
gttcctagtgagagtcatt

SEQ ID NO: 726847 - DNA, 19 bp, Mus musculus
  siRNA target sequence for 0610008A10Rik (NM_026674.2,271-289).
ctagtgagagtcattacta

SEQ ID NO: 726848 - DNA, 19 bp, Mus musculus
  siRNA target sequence for 0610008A10Rik (NM_026674.2,274-292).
gtgagagtcattactaaca

SEQ ID NO: 726849 - DNA, 19 bp, Mus musculus
  siRNA target sequence for 0610008A10Rik (NM_026674.2,296-314).
gagatgaatcagtacagaa

SEQ ID NO: 726850 - DNA, 19 bp, Mus musculus
  siRNA target sequence for 0610008A10Rik (NM_026674.2,361-379).
ctgttcaggctcgcatatt

SEQ ID NO: 726851 - DNA, 19 bp, Mus musculus
  siRNA target sequence for 0610008A10Rik (NM_026674.2,363-381).
gttcaggctcgcatattat

SEQ ID NO: 726852 - DNA, 19 bp, Mus musculus
  siRNA target sequence for 0610008A10Rik (NM_026674.2,368-386).
ggctcgcatattataagct

SEQ ID NO: 726853 - DNA, 19 bp, Mus musculus
  siRNA target sequence for 0610008A10Rik (NM_026674.2,374-392).
catattataagctgttaaa

SEQ ID NO: 726854 - DNA, 19 bp, Mus musculus
  siRNA target sequence for 0610008A10Rik (NM_026674.2,401-419).
gtgagggtttgaaaagcat

SEQ ID NO: 726855 - DNA, 19 bp, Mus musculus
  siRNA target sequence for 0610008A10Rik (NM_026674.2,403-421).
gagggtttgaaaagcataa

SEQ ID NO: 726856 - DNA, 19 bp, Mus musculus
  siRNA target sequence for 0610008A10Rik (NM_026674.2,450-468).
gcgactgttggcgtatgtt

SEQ ID NO: 726857 - DNA, 19 bp, Mus musculus
  siRNA target sequence for 0610008A10Rik (NM_026674.2,451-469).
cgactgttggcgtatgttt

SEQ ID NO: 726858 - DNA, 19 bp, Mus musculus
  siRNA target sequence for 0610008A10Rik (NM_026674.2,511-529).
gtgaacaccctgtctaact

SEQ ID NO: 726859 - DNA, 19 bp, Mus musculus
  siRNA target sequence for 0610008A10Rik (NM_026674.2,549-567).
gggcattcatggtgattct

SEQ ID NO: 726860 - DNA, 19 bp, Mus musculus
  siRNA target sequence for 0610008A10Rik (NM_026674.2,560-578).
gtgattctcctcagttctt

SEQ ID NO: 726861 - DNA, 19 bp, Mus musculus
  siRNA target sequence for 0610008A10Rik (NM_026674.2,599-617).
cactggtcgtcataatgct

SEQ ID NO: 726862 - DNA, 19 bp, Mus musculus
  siRNA target sequence for 0610006K04Rik (NM_026675.1,283-301).
ctgcacttgggtctaactt

SEQ ID NO: 726863 - DNA, 19 bp, Mus musculus
  siRNA target sequence for 0610006K04Rik (NM_026675.1,663-681).
gttgggaatcgcttgcaat

SEQ ID NO: 726864 - DNA, 19 bp, Mus musculus
  siRNA target sequence for 0610007P22Rik (NM_026676.1,77-95).
cgcggatccaggaaagaga

SEQ ID NO: 726865 - DNA, 19 bp, Mus musculus
  siRNA target sequence for 0610007P22Rik (NM_026676.1,316-334).
gcgcctgagccaaaggttt

SEQ ID NO: 726866 - DNA, 19 bp, Mus musculus
  siRNA target sequence for 0610007P22Rik (NM_026676.1,403-421).
gtcaggggtcgcagtcata

SEQ ID NO: 726867 - DNA, 19 bp, Mus musculus
  siRNA target sequence for 0610007P22Rik (NM_026676.1,405-423).
caggggtcgcagtcataga

SEQ ID NO: 726868 - DNA, 19 bp, Mus musculus
  siRNA target sequence for 0610007P22Rik (NM_026676.1,407-425).
ggggtcgcagtcatagact

SEQ ID NO: 726869 - DNA, 19 bp, Mus musculus
  siRNA target sequence for 0610007P22Rik (NM_026676.1,443-461).
gacgacacaccctttcaga

SEQ ID NO: 726870 - DNA, 19 bp, Mus musculus
  siRNA target sequence for 0610007P22Rik (NM_026676.1,503-521).
gctgccaaccctgtaaact

SEQ ID NO: 726871 - DNA, 19 bp, Mus musculus
  siRNA target sequence for 0610007P22Rik (NM_026676.1,571-589).
ctgcatcgtaggcttttca

SEQ ID NO: 726872 - DNA, 19 bp, Mus musculus
  siRNA target sequence for 0610007P22Rik (NM_026676.1,573-591).
gcatcgtaggcttttcaga

SEQ ID NO: 726873 - DNA, 19 bp, Mus musculus
  siRNA target sequence for 0610007P22Rik (NM_026676.1,601-619).
cattttgcttcggaagttt

SEQ ID NO: 726874 - DNA, 19 bp, Mus musculus
  siRNA target sequence for 0610010D24Rik (NM_026681.1,132-150).
gtgacctgggtgaaaactt

SEQ ID NO: 726875 - DNA, 19 bp, Mus musculus
  siRNA target sequence for 0610010D24Rik (NM_026681.1,134-152).
gacctgggtgaaaactttt

SEQ ID NO: 726876 - DNA, 19 bp, Mus musculus
  siRNA target sequence for 0610010D24Rik (NM_026681.1,204-222).
gtggacggcatctttttga

SEQ ID NO: 726877 - DNA, 19 bp, Mus musculus
  siRNA target sequence for 0610010D24Rik (NM_026681.1,206-224).
ggacggcatctttttgaat

SEQ ID NO: 726878 - DNA, 19 bp, Mus musculus
  siRNA target sequence for 0610010D24Rik (NM_026681.1,209-227).
cggcatctttttgaatcaa

SEQ ID NO: 726879 - DNA, 19 bp, Mus musculus
  siRNA target sequence for 0610010D24Rik (NM_026681.1,210-228).
ggcatctttttgaatcaaa

SEQ ID NO: 726880 - DNA, 19 bp, Mus musculus
  siRNA target sequence for 0610010D24Rik (NM_026681.1,256-274).
gcaatcagcgcatcaacaa

SEQ ID NO: 726881 - DNA, 19 bp, Mus musculus
  siRNA target sequence for 0610010D24Rik (NM_026681.1,265-283).
gcatcaacaagcatgtcaa

SEQ ID NO: 726882 - DNA, 19 bp, Mus musculus
  siRNA target sequence for 0610010D24Rik (NM_026681.1,269-287).
caacaagcatgtcaacaat

SEQ ID NO: 726883 - DNA, 19 bp, Mus musculus
  siRNA target sequence for 0610010D24Rik (NM_026681.1,272-290).
caagcatgtcaacaatgat

SEQ ID NO: 726884 - DNA, 19 bp, Mus musculus
  siRNA target sequence for 0610010D24Rik (NM_026681.1,291-309).
gtcaacctgcgcatccaaa

SEQ ID NO: 726885 - DNA, 19 bp, Mus musculus
  siRNA target sequence for 0610010D24Rik (NM_026681.1,301-319).
gcatccaaaacctgagtat

SEQ ID NO: 726886 - DNA, 19 bp, Mus musculus
  siRNA target sequence for 0610010D24Rik (NM_026681.1,360-378).
cagcagctgatcgtaatga

SEQ ID NO: 726887 - DNA, 19 bp, Mus musculus
  siRNA target sequence for 0610010D24Rik (NM_026681.1,383-401).
gcccaatgtcttgatgatt

SEQ ID NO: 726888 - DNA, 19 bp, Mus musculus
  siRNA target sequence for 0610010D24Rik (NM_026681.1,541-559).
gcattgtggctcatatcca

SEQ ID NO: 726889 - DNA, 19 bp, Mus musculus
  siRNA target sequence for 0610010D24Rik (NM_026681.1,550-568).
ctcatatccaggagttgat

SEQ ID NO: 726890 - DNA, 19 bp, Mus musculus
  siRNA target sequence for 0610009K11Rik (NM_026689.3,155-173).
gccgtactgtactccatat

SEQ ID NO: 726891 - DNA, 19 bp, Mus musculus
  siRNA target sequence for 0610009K11Rik (NM_026689.3,156-174).
ccgtactgtactccatata

SEQ ID NO: 726892 - DNA, 19 bp, Mus musculus
  siRNA target sequence for 0610009K11Rik (NM_026689.3,208-226).
gggagctaagaagattcat

SEQ ID NO: 726893 - DNA, 19 bp, Mus musculus
  siRNA target sequence for 0610009K11Rik (NM_026689.3,224-242).
catctgggtgaagatttaa

SEQ ID NO: 726894 - DNA, 19 bp, Mus musculus
  siRNA target sequence for 0610009K11Rik (NM_026689.3,304-322).
gcggtctgttaaagaaaca

SEQ ID NO: 726895 - DNA, 19 bp, Mus musculus
  siRNA target sequence for 0610009K11Rik (NM_026689.3,372-390).
cgcttcaggagcataagat

SEQ ID NO: 726896 - DNA, 19 bp, Mus musculus
  siRNA target sequence for 0610009K11Rik (NM_026689.3,408-426).
cccacctttggaatgacta

SEQ ID NO: 726897 - DNA, 19 bp, Mus musculus
  siRNA target sequence for 0610009K11Rik (NM_026689.3,409-427).
ccacctttggaatgactat

SEQ ID NO: 726898 - DNA, 19 bp, Mus musculus
  siRNA target sequence for 0610009K11Rik (NM_026689.3,410-428).
cacctttggaatgactatt

SEQ ID NO: 726899 - DNA, 19 bp, Mus musculus
  siRNA target sequence for 0610009K11Rik (NM_026689.3,593-611).
gccatcggccactacatca

SEQ ID NO: 726900 - DNA, 19 bp, Mus musculus
  siRNA target sequence for 0610009K11Rik (NM_026689.3,821-839).
ctggtgttcggctttgcta

SEQ ID NO: 726901 - DNA, 19 bp, Mus musculus
  siRNA target sequence for 0610009K11Rik (NM_026689.3,1122-1140).
gggtgatacccttgtataa

SEQ ID NO: 726902 - DNA, 19 bp, Mus musculus
  siRNA target sequence for 0610009K11Rik (NM_026689.3,1124-1142).
gtgatacccttgtataaca

SEQ ID NO: 726903 - DNA, 19 bp, Mus musculus
  siRNA target sequence for 0610012D14Rik (NM_026690.1,51-69).
cgctccctcaagttcctta

SEQ ID NO: 726904 - DNA, 19 bp, Mus musculus
  siRNA target sequence for 0610012D14Rik (NM_026690.1,143-161).
ctgggcctagaacttgttt

SEQ ID NO: 726905 - DNA, 19 bp, Mus musculus
  siRNA target sequence for 0610012D14Rik (NM_026690.1,252-270).
ctgaccttgtggtagaagt

SEQ ID NO: 726906 - DNA, 19 bp, Mus musculus
  siRNA target sequence for 0610012D14Rik (NM_026690.1,278-296).
cccaaaataatccatgaat

SEQ ID NO: 726907 - DNA, 19 bp, Mus musculus
  siRNA target sequence for Etfb (NM_026695.2,47-65).
cgacttcgctgtgaagatt

SEQ ID NO: 726908 - DNA, 19 bp, Mus musculus
  siRNA target sequence for Etfb (NM_026695.2,119-137).
gaaccccttctgtgagatt

SEQ ID NO: 726909 - DNA, 19 bp, Mus musculus
  siRNA target sequence for Etfb (NM_026695.2,382-400).
ctattgatgatgactgtaa

SEQ ID NO: 726910 - DNA, 19 bp, Mus musculus
  siRNA target sequence for Etfb (NM_026695.2,468-486).
ctggagggggacaaggtaa

SEQ ID NO: 726911 - DNA, 19 bp, Mus musculus
  siRNA target sequence for Etfb (NM_026695.2,470-488).
ggagggggacaaggtaaaa

SEQ ID NO: 726912 - DNA, 19 bp, Mus musculus
  siRNA target sequence for 0610030G03Rik (NM_026708.1,253-271).
cacccactccattgtatca

SEQ ID NO: 726913 - DNA, 19 bp, Mus musculus
  siRNA target sequence for 0610030G03Rik (NM_026708.1,339-357).
cagcttctggctatttgct

SEQ ID NO: 726914 - DNA, 19 bp, Mus musculus
  siRNA target sequence for 0610030G03Rik (NM_026708.1,469-487).
cttcttctctggtatcttt

SEQ ID NO: 726915 - DNA, 19 bp, Mus musculus
  siRNA target sequence for 0610030G03Rik (NM_026708.1,500-518).
gttggtggtggcgtcttaa

SEQ ID NO: 726916 - DNA, 19 bp, Mus musculus
  siRNA target sequence for 0610030G03Rik (NM_026708.1,605-623).
gtcaacaagtatatcaact

SEQ ID NO: 726917 - DNA, 19 bp, Mus musculus
  siRNA target sequence for 0610030G03Rik (NM_026708.1,659-677).
gcctacctcaccaagttct

SEQ ID NO: 726918 - DNA, 19 bp, Mus musculus
  siRNA target sequence for 0610030G03Rik (NM_026708.1,745-763).
gatgataatcatctacttt

SEQ ID NO: 726919 - DNA, 19 bp, Mus musculus
  siRNA target sequence for 0610030H11Rik (NM_026712.1,142-160).
cacgctgaccactgtagaa

SEQ ID NO: 726920 - DNA, 19 bp, Mus musculus
  siRNA target sequence for 0610030H11Rik (NM_026712.1,205-223).
ggcagctccagccactttt

SEQ ID NO: 726921 - DNA, 19 bp, Mus musculus
  siRNA target sequence for 0610030H11Rik (NM_026712.1,206-224).
gcagctccagccacttttt

SEQ ID NO: 726922 - DNA, 19 bp, Mus musculus
  siRNA target sequence for 0610030H11Rik (NM_026712.1,498-516).
cactggaaggcaaactctt

SEQ ID NO: 726923 - DNA, 19 bp, Mus musculus
  siRNA target sequence for 0610030H11Rik (NM_026712.1,573-591).
cccacggcaagctgcatta

SEQ ID NO: 726924 - DNA, 19 bp, Mus musculus
  siRNA target sequence for 0610030H11Rik (NM_026712.1,575-593).
cacggcaagctgcattaca

SEQ ID NO: 726925 - DNA, 19 bp, Mus musculus
  siRNA target sequence for 0610030H11Rik (NM_026712.1,781-799).
cctgccattcccactactt

SEQ ID NO: 726926 - DNA, 19 bp, Mus musculus
  siRNA target sequence for 0610030H11Rik (NM_026712.1,791-809).
ccactacttgagcctttta

SEQ ID NO: 726927 - DNA, 19 bp, Mus musculus
  siRNA target sequence for 0610030H11Rik (NM_026712.1,794-812).
ctacttgagccttttacct

SEQ ID NO: 726928 - DNA, 19 bp, Mus musculus
  siRNA target sequence for 0610037D15Rik (NM_026714.1,127-145).
ggttctcagttcaactgat

SEQ ID NO: 726929 - DNA, 19 bp, Mus musculus
  siRNA target sequence for 0610037D15Rik (NM_026714.1,333-351).
gggatgaagttactaaact

SEQ ID NO: 726930 - DNA, 19 bp, Mus musculus
  siRNA target sequence for 0610037D15Rik (NM_026714.1,388-406).
ggcgctgaagcattctgta

SEQ ID NO: 726931 - DNA, 19 bp, Mus musculus
  siRNA target sequence for 0610037D15Rik (NM_026714.1,422-440).
gatcgggagcaacatatgt

SEQ ID NO: 726932 - DNA, 19 bp, Mus musculus
  siRNA target sequence for 0610037D15Rik (NM_026714.1,425-443).
cgggagcaacatatgttca

SEQ ID NO: 726933 - DNA, 19 bp, Mus musculus
  siRNA target sequence for 0610037D15Rik (NM_026714.1,426-444).
gggagcaacatatgttcaa

SEQ ID NO: 726934 - DNA, 19 bp, Mus musculus
  siRNA target sequence for 0610037D15Rik (NM_026714.1,428-446).
gagcaacatatgttcaaga

SEQ ID NO: 726935 - DNA, 19 bp, Mus musculus
  siRNA target sequence for 0610037D15Rik (NM_026714.1,442-460).
caagatcagtgctctagaa

SEQ ID NO: 726936 - DNA, 19 bp, Mus musculus
  siRNA target sequence for 0610037D15Rik (NM_026714.1,452-470).
gctctagaagcatcactaa

SEQ ID NO: 726937 - DNA, 19 bp, Mus musculus
  siRNA target sequence for 0610037D15Rik (NM_026714.1,569-587).
ctagtccaaaaccaaatga

SEQ ID NO: 726938 - DNA, 19 bp, Mus musculus
  siRNA target sequence for Sycn (NM_026716.2,135-153).
cgtgcgccagactctatga

SEQ ID NO: 726939 - DNA, 19 bp, Mus musculus
  siRNA target sequence for Sycn (NM_026716.2,159-177).
gtgatccatactatgacaa

SEQ ID NO: 726940 - DNA, 19 bp, Mus musculus
  siRNA target sequence for Sycn (NM_026716.2,233-251).
ccctcgggctggtctaaca

SEQ ID NO: 726941 - DNA, 19 bp, Mus musculus
  siRNA target sequence for Sycn (NM_026716.2,298-316).
gtctctccccggtaagcat

SEQ ID NO: 726942 - DNA, 19 bp, Mus musculus
  siRNA target sequence for Sycn (NM_026716.2,364-382).
gtaccgcaaaggcatcttt

SEQ ID NO: 726943 - DNA, 19 bp, Mus musculus
  siRNA target sequence for 0910001K20Rik (NM_026719.1,713-731).
ggtttcttacatgaaaaat

SEQ ID NO: 726944 - DNA, 19 bp, Mus musculus
  siRNA target sequence for 0910001K20Rik (NM_026719.1,763-781).
ccaatgtcaccgtacagat

SEQ ID NO: 726945 - DNA, 19 bp, Mus musculus
  siRNA target sequence for 0910001K20Rik (NM_026719.1,764-782).
caatgtcaccgtacagatt

SEQ ID NO: 726946 - DNA, 19 bp, Mus musculus
  siRNA target sequence for 0910001K20Rik (NM_026719.1,768-786).
gtcaccgtacagattgaga

SEQ ID NO: 726947 - DNA, 19 bp, Mus musculus
  siRNA target sequence for 0910001K20Rik (NM_026719.1,770-788).
caccgtacagattgagaat

SEQ ID NO: 726948 - DNA, 19 bp, Mus musculus
  siRNA target sequence for 0910001K20Rik (NM_026719.1,801-819).
ggctactatactctgtatt

SEQ ID NO: 726949 - DNA, 19 bp, Mus musculus
  siRNA target sequence for 0910001K20Rik (NM_026719.1,852-870).
ccgtttgtgtacttctact

SEQ ID NO: 726950 - DNA, 19 bp, Mus musculus
  siRNA target sequence for 0910001K20Rik (NM_026719.1,853-871).
cgtttgtgtacttctacta

SEQ ID NO: 726951 - DNA, 19 bp, Mus musculus
  siRNA target sequence for 0910001K20Rik (NM_026719.1,885-903).
gaggacgacgccagcaaat

SEQ ID NO: 726952 - DNA, 19 bp, Mus musculus
  siRNA target sequence for 0910001K20Rik (NM_026719.1,919-937).
cggcgctcaagtacacttt

SEQ ID NO: 726953 - DNA, 19 bp, Mus musculus
  siRNA target sequence for 0910001K20Rik (NM_026719.1,929-947).
gtacactttgggatttgtt

SEQ ID NO: 726954 - DNA, 19 bp, Mus musculus
  siRNA target sequence for 0910001K20Rik (NM_026719.1,1074-1092).
gcagctctgtccttttcca

SEQ ID NO: 726955 - DNA, 19 bp, Mus musculus
  siRNA target sequence for 0910001K20Rik (NM_026719.1,1145-1163).
cggcatgtcggcattacct

SEQ ID NO: 726956 - DNA, 19 bp, Mus musculus
  siRNA target sequence for 0910001K20Rik (NM_026719.1,1146-1164).
ggcatgtcggcattacctt

SEQ ID NO: 726957 - DNA, 19 bp, Mus musculus
  siRNA target sequence for 0910001K20Rik (NM_026719.1,1147-1165).
gcatgtcggcattaccttt

SEQ ID NO: 726958 - DNA, 19 bp, Mus musculus
  siRNA target sequence for 0910001K20Rik (NM_026719.1,1148-1166).
catgtcggcattaccttta

SEQ ID NO: 726959 - DNA, 19 bp, Mus musculus
  siRNA target sequence for 0910001K20Rik (NM_026719.1,1153-1171).
cggcattacctttaaacct

SEQ ID NO: 726960 - DNA, 19 bp, Mus musculus
  siRNA target sequence for 0910001K20Rik (NM_026719.1,1242-1260).
cacattcagacgattcgat

SEQ ID NO: 726961 - DNA, 19 bp, Mus musculus
  siRNA target sequence for 0910001K20Rik (NM_026719.1,1294-1312).
gggatagacgtgccttaaa

SEQ ID NO: 726962 - DNA, 19 bp, Mus musculus
  siRNA target sequence for 0910001K20Rik (NM_026719.1,1327-1345).
gactaagaacgcttaggaa

SEQ ID NO: 726963 - DNA, 19 bp, Mus musculus
  siRNA target sequence for 0910001K20Rik (NM_026719.1,1348-1366).
gagagcggcacttggaatt

SEQ ID NO: 726964 - DNA, 19 bp, Mus musculus
  siRNA target sequence for 0910001K20Rik (NM_026719.1,1350-1368).
gagcggcacttggaattca

SEQ ID NO: 726965 - DNA, 19 bp, Mus musculus
  siRNA target sequence for 0910001K20Rik (NM_026719.1,1352-1370).
gcggcacttggaattcatt

SEQ ID NO: 726966 - DNA, 19 bp, Mus musculus
  siRNA target sequence for 0910001K20Rik (NM_026719.1,1418-1436).
gatcatttggggaatattt

SEQ ID NO: 726967 - DNA, 19 bp, Mus musculus
  siRNA target sequence for 0910001K20Rik (NM_026719.1,1468-1486).
ctctcttcctgtcaaattt

SEQ ID NO: 726968 - DNA, 19 bp, Mus musculus
  siRNA target sequence for 0910001K20Rik (NM_026719.1,1478-1496).
gtcaaatttggataaagct

SEQ ID NO: 726969 - DNA, 19 bp, Mus musculus
  siRNA target sequence for 0910001K20Rik (NM_026719.1,1510-1528).
gaatagattcgggtttcat

SEQ ID NO: 726970 - DNA, 19 bp, Mus musculus
  siRNA target sequence for 0910001K20Rik (NM_026719.1,1515-1533).
gattcgggtttcatcatct

SEQ ID NO: 726971 - DNA, 19 bp, Mus musculus
  siRNA target sequence for 0910001K20Rik (NM_026719.1,1565-1583).
gcttttgccgttgttacaa

SEQ ID NO: 726972 - DNA, 19 bp, Mus musculus
  siRNA target sequence for 0910001K20Rik (NM_026719.1,1566-1584).
cttttgccgttgttacaaa

SEQ ID NO: 726973 - DNA, 19 bp, Mus musculus
  siRNA target sequence for 0910001K20Rik (NM_026719.1,1587-1605).
gtgttccctcttgattaca

SEQ ID NO: 726974 - DNA, 19 bp, Mus musculus
  siRNA target sequence for 0910001K20Rik (NM_026719.1,1589-1607).
gttccctcttgattacatt

SEQ ID NO: 726975 - DNA, 19 bp, Mus musculus
  siRNA target sequence for 0910001K20Rik (NM_026719.1,1593-1611).
cctcttgattacattctta

SEQ ID NO: 726976 - DNA, 19 bp, Mus musculus
  siRNA target sequence for 0910001K20Rik (NM_026719.1,1596-1614).
cttgattacattcttataa

SEQ ID NO: 726977 - DNA, 19 bp, Mus musculus
  siRNA target sequence for 0910001K20Rik (NM_026719.1,1604-1622).
cattcttataacaattatt

SEQ ID NO: 726978 - DNA, 19 bp, Mus musculus
  siRNA target sequence for 0910001K20Rik (NM_026719.1,1645-1663).
cgatggcaggaattcgaaa

SEQ ID NO: 726979 - DNA, 19 bp, Mus musculus
  siRNA target sequence for 0910001K20Rik (NM_026719.1,1649-1667).
ggcaggaattcgaaacatt

SEQ ID NO: 726980 - DNA, 19 bp, Mus musculus
  siRNA target sequence for 0910001K20Rik (NM_026719.1,1679-1697).
cttttggattaggttatat

SEQ ID NO: 726981 - DNA, 19 bp, Mus musculus
  siRNA target sequence for 0910001K20Rik (NM_026719.1,1767-1785).
cttcataccagctacatga

SEQ ID NO: 726982 - DNA, 19 bp, Mus musculus
  siRNA target sequence for 0910001K20Rik (NM_026719.1,1770-1788).
cataccagctacatgatct

SEQ ID NO: 726983 - DNA, 19 bp, Mus musculus
  siRNA target sequence for 0910001K20Rik (NM_026719.1,1798-1816).
cgcctcagtacgtgatgta

SEQ ID NO: 726984 - DNA, 19 bp, Mus musculus
  siRNA target sequence for 0910001K20Rik (NM_026719.1,1817-1835).
cggaagccagaattactta

SEQ ID NO: 726985 - DNA, 19 bp, Mus musculus
  siRNA target sequence for 0910001K20Rik (NM_026719.1,1818-1836).
ggaagccagaattacttaa

SEQ ID NO: 726986 - DNA, 19 bp, Mus musculus
  siRNA target sequence for 0910001K20Rik (NM_026719.1,1841-1859).
gagcaatataacttctgat

SEQ ID NO: 726987 - DNA, 19 bp, Mus musculus
  siRNA target sequence for 0910001K20Rik (NM_026719.1,1860-1878).
gcccataaaggcaattcaa

SEQ ID NO: 726988 - DNA, 19 bp, Mus musculus
  siRNA target sequence for 0910001K20Rik (NM_026719.1,1883-1901).
cgctgtgccaaaaagatgt

SEQ ID NO: 726989 - DNA, 19 bp, Mus musculus
  siRNA target sequence for 0910001K20Rik (NM_026719.1,1904-1922).
cgcagatgcccctaaagat

SEQ ID NO: 726990 - DNA, 19 bp, Mus musculus
  siRNA target sequence for 0910001K20Rik (NM_026719.1,1927-1945).
gtactgttacccgaacata

SEQ ID NO: 726991 - DNA, 19 bp, Mus musculus
  siRNA target sequence for 0910001K20Rik (NM_026719.1,1930-1948).
ctgttacccgaacatacat

SEQ ID NO: 726992 - DNA, 19 bp, Mus musculus
  siRNA target sequence for 0910001K20Rik (NM_026719.1,1970-1988).
cttcagtgctgcatactat

SEQ ID NO: 726993 - DNA, 19 bp, Mus musculus
  siRNA target sequence for 0910001K20Rik (NM_026719.1,2015-2033).
gttcttgatcggattaatt

SEQ ID NO: 726994 - DNA, 19 bp, Mus musculus
  siRNA target sequence for 0910001K20Rik (NM_026719.1,2018-2036).
cttgatcggattaattgta

SEQ ID NO: 726995 - DNA, 19 bp, Mus musculus
  siRNA target sequence for 0910001K20Rik (NM_026719.1,2050-2068).
ggaagaagtcagtcataga

SEQ ID NO: 726996 - DNA, 19 bp, Mus musculus
  siRNA target sequence for 0910001K20Rik (NM_026719.1,2086-2104).
cggacttaagtgatgatga

SEQ ID NO: 726997 - DNA, 19 bp, Mus musculus
  siRNA target sequence for 0710001P18Rik (NM_026720.1,478-496).
cctcttgtgtccaagatgt

SEQ ID NO: 726998 - DNA, 19 bp, Mus musculus
  siRNA target sequence for 0710001P18Rik (NM_026720.1,589-607).
ggccgaaggagcttcatct

SEQ ID NO: 726999 - DNA, 19 bp, Mus musculus
  siRNA target sequence for 0710001P18Rik (NM_026720.1,592-610).
cgaaggagcttcatcttca

SEQ ID NO: 727000 - DNA, 19 bp, Mus musculus
  siRNA target sequence for 0710001P18Rik (NM_026720.1,754-772).
ctcacctctcctattgtct

SEQ ID NO: 727001 - DNA, 19 bp, Mus musculus
  siRNA target sequence for 0710001P18Rik (NM_026720.1,790-808).
cgcaatgtagcctttgaga

SEQ ID NO: 727002 - DNA, 19 bp, Mus musculus
  siRNA target sequence for 0710001P18Rik (NM_026720.1,843-861).
gaagatggagtctgttagt

SEQ ID NO: 727003 - DNA, 19 bp, Mus musculus
  siRNA target sequence for 0710001P18Rik (NM_026720.1,1160-1178).
caacactgtggctaagtga

SEQ ID NO: 727004 - DNA, 19 bp, Mus musculus
  siRNA target sequence for 0710001P18Rik (NM_026720.1,1203-1221).
ccaggtgacacccatcatt

SEQ ID NO: 727005 - DNA, 19 bp, Mus musculus
  siRNA target sequence for 0710001P18Rik (NM_026720.1,1232-1250).
ccatcagcaacgctcattt

SEQ ID NO: 727006 - DNA, 19 bp, Mus musculus
  siRNA target sequence for 0710001P18Rik (NM_026720.1,1296-1314).
ccctgtcaagattgagatt

SEQ ID NO: 727007 - DNA, 19 bp, Mus musculus
  siRNA target sequence for 0710001P18Rik (NM_026720.1,1444-1462).
gaggtggaccccactgtat

SEQ ID NO: 727008 - DNA, 19 bp, Mus musculus
  siRNA target sequence for 0710001P18Rik (NM_026720.1,1643-1661).
cccgagtcacagtgtttga

SEQ ID NO: 727009 - DNA, 19 bp, Mus musculus
  siRNA target sequence for 0710001P18Rik (NM_026720.1,1644-1662).
ccgagtcacagtgtttgaa

SEQ ID NO: 727010 - DNA, 19 bp, Mus musculus
  siRNA target sequence for Ppp1r14a (NM_026731.2,119-137).
cgcgagtcacggtcaagta

SEQ ID NO: 727011 - DNA, 19 bp, Mus musculus
  siRNA target sequence for Ppp1r14a (NM_026731.2,243-261).
catcgatgagctattggaa

SEQ ID NO: 727012 - DNA, 19 bp, Mus musculus
  siRNA target sequence for 1110007C09Rik (NM_026738.1,149-167).
gcctgagcgagcaacaagt

SEQ ID NO: 727013 - DNA, 19 bp, Mus musculus
  siRNA target sequence for 1110007C09Rik (NM_026738.1,308-326).
ggcactgtcaggaatttta

SEQ ID NO: 727014 - DNA, 19 bp, Mus musculus
  siRNA target sequence for 1110007C09Rik (NM_026738.1,374-392).
gccgctactctcctcaaaa

SEQ ID NO: 727015 - DNA, 19 bp, Mus musculus
  siRNA target sequence for 1110007C09Rik (NM_026738.1,376-394).
cgctactctcctcaaaact

SEQ ID NO: 727016 - DNA, 19 bp, Mus musculus
  siRNA target sequence for 1110007C09Rik (NM_026738.1,558-576).
cttctcacctgtcatcatt

SEQ ID NO: 727017 - DNA, 19 bp, Mus musculus
  siRNA target sequence for 1110007M04Rik (NM_026742.1,164-182).
ggagcaccggagtcagtat

SEQ ID NO: 727018 - DNA, 19 bp, Mus musculus
  siRNA target sequence for 1110007M04Rik (NM_026742.1,172-190).
ggagtcagtatccagaaat

SEQ ID NO: 727019 - DNA, 19 bp, Mus musculus
  siRNA target sequence for 1110007M04Rik (NM_026742.1,224-242).
gctgtcattgctaagagat

SEQ ID NO: 727020 - DNA, 19 bp, Mus musculus
  siRNA target sequence for 1110007M04Rik (NM_026742.1,269-287).
gcctgccttgccggtaaaa

SEQ ID NO: 727021 - DNA, 19 bp, Mus musculus
  siRNA target sequence for 1110007M04Rik (NM_026742.1,274-292).
ccttgccggtaaaagttga

SEQ ID NO: 727022 - DNA, 19 bp, Mus musculus
  siRNA target sequence for 1110007M04Rik (NM_026742.1,275-293).
cttgccggtaaaagttgaa

SEQ ID NO: 727023 - DNA, 19 bp, Mus musculus
  siRNA target sequence for 1110007M04Rik (NM_026742.1,297-315).
cgacaagaaccaaaggaat

SEQ ID NO: 727024 - DNA, 19 bp, Mus musculus
  siRNA target sequence for 1110007M04Rik (NM_026742.1,317-335).
cagactgccgataggaaat

SEQ ID NO: 727025 - DNA, 19 bp, Mus musculus
  siRNA target sequence for 1110007M04Rik (NM_026742.1,319-337).
gactgccgataggaaatca

SEQ ID NO: 727026 - DNA, 19 bp, Mus musculus
  siRNA target sequence for 1110007M04Rik (NM_026742.1,321-339).
ctgccgataggaaatcact

SEQ ID NO: 727027 - DNA, 19 bp, Mus musculus
  siRNA target sequence for 1110007M04Rik (NM_026742.1,325-343).
cgataggaaatcactttga

SEQ ID NO: 727028 - DNA, 19 bp, Mus musculus
  siRNA target sequence for 1110007M04Rik (NM_026742.1,330-348).
ggaaatcactttgataaga

SEQ ID NO: 727029 - DNA, 19 bp, Mus musculus
  siRNA target sequence for 1110007M04Rik (NM_026742.1,370-388).
gcaagattactgttgtaga

SEQ ID NO: 727030 - DNA, 19 bp, Mus musculus
  siRNA target sequence for 1110007M04Rik (NM_026742.1,389-407).
ggcattgacccttctcaat

SEQ ID NO: 727031 - DNA, 19 bp, Mus musculus
  siRNA target sequence for 1110007M04Rik (NM_026742.1,391-409).
cattgacccttctcaataa

SEQ ID NO: 727032 - DNA, 19 bp, Mus musculus
  siRNA target sequence for 1110007M04Rik (NM_026742.1,402-420).
ctcaataaccataaactct

SEQ ID NO: 727033 - DNA, 19 bp, Mus musculus
  siRNA target sequence for 1110007M04Rik (NM_026742.1,449-467).
cgctcaagagtactattta

SEQ ID NO: 727034 - DNA, 19 bp, Mus musculus
  siRNA target sequence for 1110007M04Rik (NM_026742.1,451-469).
ctcaagagtactatttaga

SEQ ID NO: 727035 - DNA, 19 bp, Mus musculus
  siRNA target sequence for 1110007M04Rik (NM_026742.1,504-522).
gttacttttgaagtcaaaa

SEQ ID NO: 727036 - DNA, 19 bp, Mus musculus
  siRNA target sequence for 1110007M04Rik (NM_026742.1,508-526).
cttttgaagtcaaaatctt

SEQ ID NO: 727037 - DNA, 19 bp, Mus musculus
  siRNA target sequence for 1110007M04Rik (NM_026742.1,537-555).
gacaggaaagcaatacaat

SEQ ID NO: 727038 - DNA, 19 bp, Mus musculus
  siRNA target sequence for 1110007M04Rik (NM_026742.1,539-557).
caggaaagcaatacaatca

SEQ ID NO: 727039 - DNA, 19 bp, Mus musculus
  siRNA target sequence for 1110014F12Rik (NM_026743.2,450-468).
cctacatcctcattttcgt

SEQ ID NO: 727040 - DNA, 19 bp, Mus musculus
  siRNA target sequence for 1110014F12Rik (NM_026743.2,451-469).
ctacatcctcattttcgtt

SEQ ID NO: 727041 - DNA, 19 bp, Mus musculus
  siRNA target sequence for 1110014F12Rik (NM_026743.2,470-488).
ggtggtcttgtcatgacaa

SEQ ID NO: 727042 - DNA, 19 bp, Mus musculus
  siRNA target sequence for 1110014F12Rik (NM_026743.2,531-549).
gctgcctctccacatattt

SEQ ID NO: 727043 - DNA, 19 bp, Mus musculus
  siRNA target sequence for 1110014F12Rik (NM_026743.2,591-609).
gggtcctggcacatgtgta

SEQ ID NO: 727044 - DNA, 19 bp, Mus musculus
  siRNA target sequence for 1110014F12Rik (NM_026743.2,761-779).
cagcacagcgcgtacatct

SEQ ID NO: 727045 - DNA, 19 bp, Mus musculus
  siRNA target sequence for 1110014F12Rik (NM_026743.2,764-782).
cacagcgcgtacatcttgt

SEQ ID NO: 727046 - DNA, 19 bp, Mus musculus
  siRNA target sequence for 1110014F12Rik (NM_026743.2,1008-1026).
ggctccagcaacaatttta

SEQ ID NO: 727047 - DNA, 19 bp, Mus musculus
  siRNA target sequence for 1110014D18Rik (NM_026746.1,128-146).
ccaggacggtccagtacaa

SEQ ID NO: 727048 - DNA, 19 bp, Mus musculus
  siRNA target sequence for 1110014D18Rik (NM_026746.1,150-168).
caggttctacccgttacat

SEQ ID NO: 727049 - DNA, 19 bp, Mus musculus
  siRNA target sequence for 1110014D18Rik (NM_026746.1,152-170).
ggttctacccgttacatat

SEQ ID NO: 727050 - DNA, 19 bp, Mus musculus
  siRNA target sequence for 1110014D18Rik (NM_026746.1,156-174).
ctacccgttacatatcctt

SEQ ID NO: 727051 - DNA, 19 bp, Mus musculus
  siRNA target sequence for 1110014D18Rik (NM_026746.1,238-256).
ggacacagtttctagtgtt

SEQ ID NO: 727052 - DNA, 19 bp, Mus musculus
  siRNA target sequence for 1110014D18Rik (NM_026746.1,265-283).
ccttgtggagactcaaact

SEQ ID NO: 727053 - DNA, 19 bp, Mus musculus
  siRNA target sequence for 1110014D18Rik (NM_026746.1,287-305).
gtgagtagtgagtacagta

SEQ ID NO: 727054 - DNA, 19 bp, Mus musculus
  siRNA target sequence for 1110014D18Rik (NM_026746.1,342-360).
gagaactaagccattatgt

SEQ ID NO: 727055 - DNA, 19 bp, Mus musculus
  siRNA target sequence for 1110014D18Rik (NM_026746.1,578-596).
gaaggagttgacgaagata

SEQ ID NO: 727056 - DNA, 19 bp, Mus musculus
  siRNA target sequence for 1110014D18Rik (NM_026746.1,581-599).
ggagttgacgaagatatga

SEQ ID NO: 727057 - DNA, 19 bp, Mus musculus
  siRNA target sequence for 1110014D18Rik (NM_026746.1,582-600).
gagttgacgaagatatgat

SEQ ID NO: 727058 - DNA, 19 bp, Mus musculus
  siRNA target sequence for 1110014D18Rik (NM_026746.1,587-605).
gacgaagatatgattgtga

SEQ ID NO: 727059 - DNA, 19 bp, Mus musculus
  siRNA target sequence for 1110014D18Rik (NM_026746.1,633-651).
ccataacacagctggaaat

SEQ ID NO: 727060 - DNA, 19 bp, Mus musculus
  siRNA target sequence for 1110014D18Rik (NM_026746.1,676-694).
gtgtggccatacatacgaa

SEQ ID NO: 727061 - DNA, 19 bp, Mus musculus
  siRNA target sequence for 1110014D18Rik (NM_026746.1,702-720).
ccattgttcgcatgattga

SEQ ID NO: 727062 - DNA, 19 bp, Mus musculus
  siRNA target sequence for 1110015K06Rik (NM_026748.1,363-381).
gggtcaggccagtgaatca

SEQ ID NO: 727063 - DNA, 19 bp, Mus musculus
  siRNA target sequence for 1110015K06Rik (NM_026748.1,364-382).
ggtcaggccagtgaatcaa

SEQ ID NO: 727064 - DNA, 19 bp, Mus musculus
  siRNA target sequence for 1110015K06Rik (NM_026748.1,473-491).
cgctgaccggcctcactaa

SEQ ID NO: 727065 - DNA, 19 bp, Mus musculus
  siRNA target sequence for 1110015K06Rik (NM_026748.1,568-586).
gccatttctccatcgatta

SEQ ID NO: 727066 - DNA, 19 bp, Mus musculus
  siRNA target sequence for 1110015K06Rik (NM_026748.1,569-587).
ccatttctccatcgattaa

SEQ ID NO: 727067 - DNA, 19 bp, Mus musculus
  siRNA target sequence for 1110015K06Rik (NM_026748.1,596-614).
ctgtggtgcccattgaagt

SEQ ID NO: 727068 - DNA, 19 bp, Mus musculus
  siRNA target sequence for 1110015K06Rik (NM_026748.1,771-789).
gatcaagcccaacatcttt

SEQ ID NO: 727069 - DNA, 19 bp, Mus musculus
  siRNA target sequence for 1110015K06Rik (NM_026748.1,939-957).
cttcgtgaaggtatacatt

SEQ ID NO: 727070 - DNA, 19 bp, Mus musculus
  siRNA target sequence for 1110015K06Rik (NM_026748.1,942-960).
cgtgaaggtatacattgaa

SEQ ID NO: 727071 - DNA, 19 bp, Mus musculus
  siRNA target sequence for 1110015K06Rik (NM_026748.1,1432-1450).
gcgcaggacctgttgatgt

SEQ ID NO: 727072 - DNA, 19 bp, Mus musculus
  siRNA target sequence for 1110015K06Rik (NM_026748.1,1534-1552).
gtgctcctcaaccactata

SEQ ID NO: 727073 - DNA, 19 bp, Mus musculus
  siRNA target sequence for 1110015K06Rik (NM_026748.1,1596-1614).
gggtaccactatcaagttt

SEQ ID NO: 727074 - DNA, 19 bp, Mus musculus
  siRNA target sequence for 1110015K06Rik (NM_026748.1,1598-1616).
gtaccactatcaagtttgt

SEQ ID NO: 727075 - DNA, 19 bp, Mus musculus
  siRNA target sequence for 1110015K06Rik (NM_026748.1,1604-1622).
ctatcaagtttgtgatctt

SEQ ID NO: 727076 - DNA, 19 bp, Mus musculus
  siRNA target sequence for 1110015K06Rik (NM_026748.1,1799-1817).
ccaagcacgagatcaactt

SEQ ID NO: 727077 - DNA, 19 bp, Mus musculus
  siRNA target sequence for 1110015K06Rik (NM_026748.1,1926-1944).
catgatgctgggcattaca

SEQ ID NO: 727078 - DNA, 19 bp, Mus musculus
  siRNA target sequence for 1110015K06Rik (NM_026748.1,2140-2158).
cagcccgagacctactaca

SEQ ID NO: 727079 - DNA, 19 bp, Mus musculus
  siRNA target sequence for 1110015K06Rik (NM_026748.1,2143-2161).
cccgagacctactacaagt

SEQ ID NO: 727080 - DNA, 19 bp, Mus musculus
  siRNA target sequence for 1110015K06Rik (NM_026748.1,2179-2197).
gagagcgaccgcaatttct

SEQ ID NO: 727081 - DNA, 19 bp, Mus musculus
  siRNA target sequence for 1110015K06Rik (NM_026748.1,2345-2363).
ctgatgatgtggaagttct

SEQ ID NO: 727082 - DNA, 19 bp, Mus musculus
  siRNA target sequence for 1110015K06Rik (NM_026748.1,2373-2391).
gcggatccagctgatagat

SEQ ID NO: 727083 - DNA, 19 bp, Mus musculus
  siRNA target sequence for 1110015K06Rik (NM_026748.1,2448-2466).
gtatcagcccccaaacctt

SEQ ID NO: 727084 - DNA, 19 bp, Mus musculus
  siRNA target sequence for 1110015K06Rik (NM_026748.1,2548-2566).
gcatgggaggagtatccaa

SEQ ID NO: 727085 - DNA, 19 bp, Mus musculus
  siRNA target sequence for 1110015K06Rik (NM_026748.1,2557-2575).
gagtatccaacgttgaaga

SEQ ID NO: 727086 - DNA, 19 bp, Mus musculus
  siRNA target sequence for 1110015K06Rik (NM_026748.1,3185-3203).
catgtgaggtgcttgacta

SEQ ID NO: 727087 - DNA, 19 bp, Mus musculus
  siRNA target sequence for 1110015K06Rik (NM_026748.1,4124-4142).
gcatcttcctacagatctt

SEQ ID NO: 727088 - DNA, 19 bp, Mus musculus
  siRNA target sequence for 1110015K06Rik (NM_026748.1,4339-4357).
catcacagccacttccttt

SEQ ID NO: 727089 - DNA, 19 bp, Mus musculus
  siRNA target sequence for 1110015K06Rik (NM_026748.1,4721-4739).
ccccgcacttggaagagtt

SEQ ID NO: 727090 - DNA, 19 bp, Mus musculus
  siRNA target sequence for 1110015K06Rik (NM_026748.1,4945-4963).
cccgaagtggtctgtagtt

SEQ ID NO: 727091 - DNA, 19 bp, Mus musculus
  siRNA target sequence for 1110015K06Rik (NM_026748.1,5375-5393).
gctgccgtagcaatgatga

SEQ ID NO: 727092 - DNA, 19 bp, Mus musculus
  siRNA target sequence for 1110015K06Rik (NM_026748.1,5868-5886).
ggactgcctgcgatccttt

SEQ ID NO: 727093 - DNA, 19 bp, Mus musculus
  siRNA target sequence for 1110015K06Rik (NM_026748.1,5869-5887).
gactgcctgcgatccttta

SEQ ID NO: 727094 - DNA, 19 bp, Mus musculus
  siRNA target sequence for 1110015K06Rik (NM_026748.1,5942-5960).
gcaagttcgttcagttcat

SEQ ID NO: 727095 - DNA, 19 bp, Mus musculus
  siRNA target sequence for 1110015K06Rik (NM_026748.1,6264-6282).
cgagaccctgagtgacata

SEQ ID NO: 727096 - DNA, 19 bp, Mus musculus
  siRNA target sequence for 1110015K06Rik (NM_026748.1,6392-6410).
cactgcgctccattcagaa

SEQ ID NO: 727097 - DNA, 19 bp, Mus musculus
  siRNA target sequence for 1110015K06Rik (NM_026748.1,6417-6435).
cagcatcgctgctgacttt

SEQ ID NO: 727098 - DNA, 19 bp, Mus musculus
  siRNA target sequence for 1110015K06Rik (NM_026748.1,6569-6587).
gcgtgtacggccagattga

SEQ ID NO: 727099 - DNA, 19 bp, Mus musculus
  siRNA target sequence for 1110015K06Rik (NM_026748.1,6571-6589).
gtgtacggccagattgaca

SEQ ID NO: 727100 - DNA, 19 bp, Mus musculus
  siRNA target sequence for 1110015K06Rik (NM_026748.1,6590-6608).
ccagcgcccagatatcaga

SEQ ID NO: 727101 - DNA, 19 bp, Mus musculus
  siRNA target sequence for 1110019N10Rik (NM_026753.1,171-189).
cgggagatcttcgatctta

SEQ ID NO: 727102 - DNA, 19 bp, Mus musculus
  siRNA target sequence for 1110019N10Rik (NM_026753.1,172-190).
gggagatcttcgatcttat

SEQ ID NO: 727103 - DNA, 19 bp, Mus musculus
  siRNA target sequence for 1110019N10Rik (NM_026753.1,320-338).
cagcatggccacgcttatt

SEQ ID NO: 727104 - DNA, 19 bp, Mus musculus
  siRNA target sequence for 1110019N10Rik (NM_026753.1,340-358).
gcctctccatcaaagtcaa

SEQ ID NO: 727105 - DNA, 19 bp, Mus musculus
  siRNA target sequence for 1110019N10Rik (NM_026753.1,372-390).
cttccccagcggttcaaga

SEQ ID NO: 727106 - DNA, 19 bp, Mus musculus
  siRNA target sequence for 1110019N10Rik (NM_026753.1,382-400).
ggttcaagatggatgtaca

SEQ ID NO: 727107 - DNA, 19 bp, Mus musculus
  siRNA target sequence for 1110019N10Rik (NM_026753.1,424-442).
ccgagcatgcagtgaacaa

SEQ ID NO: 727108 - DNA, 19 bp, Mus musculus
  siRNA target sequence for 1110019N10Rik (NM_026753.1,428-446).
gcatgcagtgaacaaacaa

SEQ ID NO: 727109 - DNA, 19 bp, Mus musculus
  siRNA target sequence for 1110017I16Rik (NM_026754.1,157-175).
gaatctgatgcctccaatt

SEQ ID NO: 727110 - DNA, 19 bp, Mus musculus
  siRNA target sequence for 1110017I16Rik (NM_026754.1,203-221).
ctaagtcccgagatgaagt

SEQ ID NO: 727111 - DNA, 19 bp, Mus musculus
  siRNA target sequence for 1110017I16Rik (NM_026754.1,207-225).
gtcccgagatgaagttaat

SEQ ID NO: 727112 - DNA, 19 bp, Mus musculus
  siRNA target sequence for 1110017I16Rik (NM_026754.1,256-274).
gagctgcggagggagtatt

SEQ ID NO: 727113 - DNA, 19 bp, Mus musculus
  siRNA target sequence for 1110017I16Rik (NM_026754.1,360-378).
gtggcgccagtggcattat

SEQ ID NO: 727114 - DNA, 19 bp, Mus musculus
  siRNA target sequence for 1110017I16Rik (NM_026754.1,362-380).
ggcgccagtggcattatga

SEQ ID NO: 727115 - DNA, 19 bp, Mus musculus
  siRNA target sequence for 1110017I16Rik (NM_026754.1,363-381).
gcgccagtggcattatgat

SEQ ID NO: 727116 - DNA, 19 bp, Mus musculus
  siRNA target sequence for 1110017I16Rik (NM_026754.1,400-418).
ctctacaaccgccaaaaca

SEQ ID NO: 727117 - DNA, 19 bp, Mus musculus
  siRNA target sequence for 1110019L22Rik (NM_026756.1,69-87).
gcctcacacatctatctga

SEQ ID NO: 727118 - DNA, 19 bp, Mus musculus
  siRNA target sequence for 1110019L22Rik (NM_026756.1,259-277).
ctggatactcccaaaatgt

SEQ ID NO: 727119 - DNA, 19 bp, Mus musculus
  siRNA target sequence for 1110019L22Rik (NM_026756.1,261-279).
ggatactcccaaaatgtca

SEQ ID NO: 727120 - DNA, 19 bp, Mus musculus
  siRNA target sequence for 1110019L22Rik (NM_026756.1,448-466).
ggagtgggagggactgttt

SEQ ID NO: 727121 - DNA, 19 bp, Mus musculus
  siRNA target sequence for 1110019L22Rik (NM_026756.1,449-467).
gagtgggagggactgtttt

SEQ ID NO: 727122 - DNA, 19 bp, Mus musculus
  siRNA target sequence for 1110019L22Rik (NM_026756.1,500-518).
gttttcctgcagagatctt

SEQ ID NO: 727123 - DNA, 19 bp, Mus musculus
  siRNA target sequence for 0610010K14Rik (NM_026757.1,241-259).
ccactgtgaagcgaaaagt

SEQ ID NO: 727124 - DNA, 19 bp, Mus musculus
  siRNA target sequence for 0610010K14Rik (NM_026757.1,244-262).
ctgtgaagcgaaaagtgta

SEQ ID NO: 727125 - DNA, 19 bp, Mus musculus
  siRNA target sequence for 0610010K14Rik (NM_026757.1,390-408).
cctcccataaagaaacaga

SEQ ID NO: 727126 - DNA, 19 bp, Mus musculus
  siRNA target sequence for 0610010K14Rik (NM_026757.1,391-409).
ctcccataaagaaacagaa

SEQ ID NO: 727127 - DNA, 19 bp, Mus musculus
  siRNA target sequence for 1110002H14Rik (NM_026760.1,376-394).
gcgcagaggcgggaacaaa

SEQ ID NO: 727128 - DNA, 19 bp, Mus musculus
  siRNA target sequence for 1110002H14Rik (NM_026760.1,378-396).
gcagaggcgggaacaaact

SEQ ID NO: 727129 - DNA, 19 bp, Mus musculus
  siRNA target sequence for 1110002H14Rik (NM_026760.1,379-397).
cagaggcgggaacaaacta

SEQ ID NO: 727130 - DNA, 19 bp, Mus musculus
  siRNA target sequence for 1110002H14Rik (NM_026760.1,399-417).
ccctcaagacgggaatagt

SEQ ID NO: 727131 - DNA, 19 bp, Mus musculus
  siRNA target sequence for 1110002H14Rik (NM_026760.1,400-418).
cctcaagacgggaatagta

SEQ ID NO: 727132 - DNA, 19 bp, Mus musculus
  siRNA target sequence for 1110002H14Rik (NM_026760.1,439-457).
ggatgaggtattaacaagt

SEQ ID NO: 727133 - DNA, 19 bp, Mus musculus
  siRNA target sequence for 1110002H14Rik (NM_026760.1,440-458).
gatgaggtattaacaagta

SEQ ID NO: 727134 - DNA, 19 bp, Mus musculus
  siRNA target sequence for 1110002H14Rik (NM_026760.1,464-482).
gacgcatgggccaagtaca

SEQ ID NO: 727135 - DNA, 19 bp, Mus musculus
  siRNA target sequence for 1110002H14Rik (NM_026760.1,512-530).
cagtgcggggatgatgata

SEQ ID NO: 727136 - DNA, 19 bp, Mus musculus
  siRNA target sequence for 1110002H14Rik (NM_026760.1,514-532).
gtgcggggatgatgataaa

SEQ ID NO: 727137 - DNA, 19 bp, Mus musculus
  siRNA target sequence for 1110004A22Rik (NM_026769.2,242-260).
cagaccaggtggtcatcaa

SEQ ID NO: 727138 - DNA, 19 bp, Mus musculus
  siRNA target sequence for 1110004A22Rik (NM_026769.2,377-395).
ggatgatcgcttttgctat

SEQ ID NO: 727139 - DNA, 19 bp, Mus musculus
  siRNA target sequence for 1110004A22Rik (NM_026769.2,469-487).
ctacttcggcacaagatct

SEQ ID NO: 727140 - DNA, 19 bp, Mus musculus
  siRNA target sequence for D11Wsu68e (NM_026776.3,178-196).
gagagcccgcttttcaaca

SEQ ID NO: 727141 - DNA, 19 bp, Mus musculus
  siRNA target sequence for D11Wsu68e (NM_026776.3,228-246).
gtcaattcagattgtatta

SEQ ID NO: 727142 - DNA, 19 bp, Mus musculus
  siRNA target sequence for D11Wsu68e (NM_026776.3,230-248).
caattcagattgtattaga

SEQ ID NO: 727143 - DNA, 19 bp, Mus musculus
  siRNA target sequence for D11Wsu68e (NM_026776.3,274-292).
gagtggttggataagaata

SEQ ID NO: 727144 - DNA, 19 bp, Mus musculus
  siRNA target sequence for D11Wsu68e (NM_026776.3,279-297).
gttggataagaataagtct

SEQ ID NO: 727145 - DNA, 19 bp, Mus musculus
  siRNA target sequence for D11Wsu68e (NM_026776.3,332-350).
gggggaaactcatttacca

SEQ ID NO: 727146 - DNA, 19 bp, Mus musculus
  siRNA target sequence for D11Wsu68e (NM_026776.3,333-351).
ggggaaactcatttaccaa

SEQ ID NO: 727147 - DNA, 19 bp, Mus musculus
  siRNA target sequence for D11Wsu68e (NM_026776.3,334-352).
gggaaactcatttaccaat

SEQ ID NO: 727148 - DNA, 19 bp, Mus musculus
  siRNA target sequence for D11Wsu68e (NM_026776.3,363-381).
gagtggccagaataactct

SEQ ID NO: 727149 - DNA, 19 bp, Mus musculus
  siRNA target sequence for D11Wsu68e (NM_026776.3,372-390).
gaataactctgtgtttact

SEQ ID NO: 727150 - DNA, 19 bp, Mus musculus
  siRNA target sequence for D11Wsu68e (NM_026776.3,523-541).
cgaggagtcaagttcttct

SEQ ID NO: 727151 - DNA, 19 bp, Mus musculus
  siRNA target sequence for 1110012L19Rik (NM_026787.1,290-308).
cagccctacgctggtttaa

SEQ ID NO: 727152 - DNA, 19 bp, Mus musculus
  siRNA target sequence for 1110012L19Rik (NM_026787.1,293-311).
ccctacgctggtttaatct

SEQ ID NO: 727153 - DNA, 19 bp, Mus musculus
  siRNA target sequence for 1110012L19Rik (NM_026787.1,294-312).
cctacgctggtttaatctt

SEQ ID NO: 727154 - DNA, 19 bp, Mus musculus
  siRNA target sequence for 1110012L19Rik (NM_026787.1,295-313).
ctacgctggtttaatctta

SEQ ID NO: 727155 - DNA, 19 bp, Mus musculus
  siRNA target sequence for 1110012L19Rik (NM_026787.1,476-494).
ctacaggcaggagaaaagt

SEQ ID NO: 727156 - DNA, 19 bp, Mus musculus
  siRNA target sequence for 1110012L19Rik (NM_026787.1,504-522).
gcgtgatagctggacttat

SEQ ID NO: 727157 - DNA, 19 bp, Mus musculus
  siRNA target sequence for 1110012L19Rik (NM_026787.1,505-523).
cgtgatagctggacttatt

SEQ ID NO: 727158 - DNA, 19 bp, Mus musculus
  siRNA target sequence for 1110012L19Rik (NM_026787.1,544-562).
gtgtccagagaccttaact

SEQ ID NO: 727159 - DNA, 19 bp, Mus musculus
  siRNA target sequence for 1110012L19Rik (NM_026787.1,675-693).
ggggaaaggatatattcca

SEQ ID NO: 727160 - DNA, 19 bp, Mus musculus
  siRNA target sequence for 1110020C03Rik (NM_026789.1,136-154).
ccgcagggagctgaagtta

SEQ ID NO: 727161 - DNA, 19 bp, Mus musculus
  siRNA target sequence for 1110020C03Rik (NM_026789.1,137-155).
cgcagggagctgaagttaa

SEQ ID NO: 727162 - DNA, 19 bp, Mus musculus
  siRNA target sequence for 1110020C03Rik (NM_026789.1,156-174).
cccgctcccaaatctatga

SEQ ID NO: 727163 - DNA, 19 bp, Mus musculus
  siRNA target sequence for 1110020C03Rik (NM_026789.1,164-182).
caaatctatgaccttgaat

SEQ ID NO: 727164 - DNA, 19 bp, Mus musculus
  siRNA target sequence for 1110020C03Rik (NM_026789.1,179-197).
gaatcggccctgaaagtat

SEQ ID NO: 727165 - DNA, 19 bp, Mus musculus
  siRNA target sequence for 1110020C03Rik (NM_026789.1,183-201).
cggccctgaaagtatccaa

SEQ ID NO: 727166 - DNA, 19 bp, Mus musculus
  siRNA target sequence for 1110020C03Rik (NM_026789.1,205-223).
gacgcgctcacaagaagtt

SEQ ID NO: 727167 - DNA, 19 bp, Mus musculus
  siRNA target sequence for 1110020C03Rik (NM_026789.1,254-272).
ggcagcacctctactatga

SEQ ID NO: 727168 - DNA, 19 bp, Mus musculus
  siRNA target sequence for D12Ertd647e (NM_026790.1,291-309).
ggggctcatcctgttaaca

SEQ ID NO: 727169 - DNA, 19 bp, Mus musculus
  siRNA target sequence for D12Ertd647e (NM_026790.1,293-311).
ggctcatcctgttaacaca

SEQ ID NO: 727170 - DNA, 19 bp, Mus musculus
  siRNA target sequence for D12Ertd647e (NM_026790.1,354-372).
ggttggcaccattttatct

SEQ ID NO: 727171 - DNA, 19 bp, Mus musculus
  siRNA target sequence for D12Ertd647e (NM_026790.1,621-639).
cttcaccgcctcaggaatt

SEQ ID NO: 727172 - DNA, 19 bp, Mus musculus
  siRNA target sequence for D12Ertd647e (NM_026790.1,624-642).
caccgcctcaggaattgca

SEQ ID NO: 727173 - DNA, 19 bp, Mus musculus
  siRNA target sequence for D12Ertd647e (NM_026790.1,650-668).
ctctagcagctaagatgat

SEQ ID NO: 727174 - DNA, 19 bp, Mus musculus
  siRNA target sequence for D12Ertd647e (NM_026790.1,671-689).
ccttgtcagctattgctaa

SEQ ID NO: 727175 - DNA, 19 bp, Mus musculus
  siRNA target sequence for D12Ertd647e (NM_026790.1,897-915).
ggtggcagacatttcaaca

SEQ ID NO: 727176 - DNA, 19 bp, Mus musculus
  siRNA target sequence for D12Ertd647e (NM_026790.1,925-943).
ctgcccaacttgtctaaca

SEQ ID NO: 727177 - DNA, 19 bp, Mus musculus
  siRNA target sequence for D12Ertd647e (NM_026790.1,927-945).
gcccaacttgtctaacaca

SEQ ID NO: 727178 - DNA, 19 bp, Mus musculus
  siRNA target sequence for 1110017H11Rik (NM_026791.1,1635-1653).
gcttgttcggtcctttgat

SEQ ID NO: 727179 - DNA, 19 bp, Mus musculus
  siRNA target sequence for 1110017H11Rik (NM_026791.1,1778-1796).
gccaccacaacgtgttaaa

SEQ ID NO: 727180 - DNA, 19 bp, Mus musculus
  siRNA target sequence for 1110017H11Rik (NM_026791.1,1779-1797).
ccaccacaacgtgttaaat

SEQ ID NO: 727181 - DNA, 19 bp, Mus musculus
  siRNA target sequence for Myct1 (NM_026793.1,107-125).
ccttggccagaaaactttt

SEQ ID NO: 727182 - DNA, 19 bp, Mus musculus
  siRNA target sequence for Myct1 (NM_026793.1,121-139).
cttttgggaggaccttata

SEQ ID NO: 727183 - DNA, 19 bp, Mus musculus
  siRNA target sequence for Myct1 (NM_026793.1,169-187).
gcttgcaatcggaggattt

SEQ ID NO: 727184 - DNA, 19 bp, Mus musculus
  siRNA target sequence for Myct1 (NM_026793.1,173-191).
gcaatcggaggatttctct

SEQ ID NO: 727185 - DNA, 19 bp, Mus musculus
  siRNA target sequence for Myct1 (NM_026793.1,190-208).
ctgggcgctgttcgttttt

SEQ ID NO: 727186 - DNA, 19 bp, Mus musculus
  siRNA target sequence for Myct1 (NM_026793.1,394-412).
ctccttcccaaggaaatca

SEQ ID NO: 727187 - DNA, 19 bp, Mus musculus
  siRNA target sequence for Myct1 (NM_026793.1,600-618).
cacctgcctatgaatccat

SEQ ID NO: 727188 - DNA, 19 bp, Mus musculus
  siRNA target sequence for Myct1 (NM_026793.1,605-623).
gcctatgaatccatcataa

SEQ ID NO: 727189 - DNA, 19 bp, Mus musculus
  siRNA target sequence for Myct1 (NM_026793.1,606-624).
cctatgaatccatcataaa

SEQ ID NO: 727190 - DNA, 19 bp, Mus musculus
  siRNA target sequence for Deb1 (NM_026794.2,112-130).
gctgtatcgtggagtatca

SEQ ID NO: 727191 - DNA, 19 bp, Mus musculus
  siRNA target sequence for Deb1 (NM_026794.2,115-133).
gtatcgtggagtatcagaa

SEQ ID NO: 727192 - DNA, 19 bp, Mus musculus
  siRNA target sequence for Deb1 (NM_026794.2,161-179).
gtatcagcatgtgttacat

SEQ ID NO: 727193 - DNA, 19 bp, Mus musculus
  siRNA target sequence for Smyd2 (NM_026796.1,183-201).
gaaagaaggattgtcaaaa

SEQ ID NO: 727194 - DNA, 19 bp, Mus musculus
  siRNA target sequence for Smyd2 (NM_026796.1,327-345).
gcggctcacagcaagaatt

SEQ ID NO: 727195 - DNA, 19 bp, Mus musculus
  siRNA target sequence for Smyd2 (NM_026796.1,470-488).
ccgctctccaccagttcta

SEQ ID NO: 727196 - DNA, 19 bp, Mus musculus
  siRNA target sequence for Smyd2 (NM_026796.1,472-490).
gctctccaccagttctact

SEQ ID NO: 727197 - DNA, 19 bp, Mus musculus
  siRNA target sequence for Smyd2 (NM_026796.1,537-555).
cgcccaggtgaactgtaat

SEQ ID NO: 727198 - DNA, 19 bp, Mus musculus
  siRNA target sequence for Smyd2 (NM_026796.1,549-567).
ctgtaatggcttcactatt

SEQ ID NO: 727199 - DNA, 19 bp, Mus musculus
  siRNA target sequence for Smyd2 (NM_026796.1,551-569).
gtaatggcttcactattga

SEQ ID NO: 727200 - DNA, 19 bp, Mus musculus
  siRNA target sequence for Smyd2 (NM_026796.1,597-615).
ggcgatattccctgatgtt

SEQ ID NO: 727201 - DNA, 19 bp, Mus musculus
  siRNA target sequence for Smyd2 (NM_026796.1,613-631).
gttgcattgatgaatcaca

SEQ ID NO: 727202 - DNA, 19 bp, Mus musculus
  siRNA target sequence for Smyd2 (NM_026796.1,725-743).
gctacatcgacctgctata

SEQ ID NO: 727203 - DNA, 19 bp, Mus musculus
  siRNA target sequence for Smyd2 (NM_026796.1,726-744).
ctacatcgacctgctatat

SEQ ID NO: 727204 - DNA, 19 bp, Mus musculus
  siRNA target sequence for Smyd2 (NM_026796.1,729-747).
catcgacctgctatatcca

SEQ ID NO: 727205 - DNA, 19 bp, Mus musculus
  siRNA target sequence for Smyd2 (NM_026796.1,735-753).
cctgctatatccaacagaa

SEQ ID NO: 727206 - DNA, 19 bp, Mus musculus
  siRNA target sequence for Smyd2 (NM_026796.1,758-776).
ggaacgaccggctaagaga

SEQ ID NO: 727207 - DNA, 19 bp, Mus musculus
  siRNA target sequence for Smyd2 (NM_026796.1,766-784).
cggctaagagactcctatt

SEQ ID NO: 727208 - DNA, 19 bp, Mus musculus
  siRNA target sequence for Smyd2 (NM_026796.1,796-814).
gagtgccgggagtgtacaa

SEQ ID NO: 727209 - DNA, 19 bp, Mus musculus
  siRNA target sequence for Smyd2 (NM_026796.1,896-914).
gatacgcacgcaatgtcat

SEQ ID NO: 727210 - DNA, 19 bp, Mus musculus
  siRNA target sequence for Smyd2 (NM_026796.1,926-944).
ggagggccaaacactacaa

SEQ ID NO: 727211 - DNA, 19 bp, Mus musculus
  siRNA target sequence for Smyd2 (NM_026796.1,927-945).
gagggccaaacactacaaa

SEQ ID NO: 727212 - DNA, 19 bp, Mus musculus
  siRNA target sequence for Smyd2 (NM_026796.1,976-994).
cttagccaggagaagatga

SEQ ID NO: 727213 - DNA, 19 bp, Mus musculus
  siRNA target sequence for Smyd2 (NM_026796.1,1271-1289).
cgtacatctctgaaatcaa

SEQ ID NO: 727214 - DNA, 19 bp, Mus musculus
  siRNA target sequence for D2Bwg0891e (NM_026797.1,523-541).
caaagaccccccataggta

SEQ ID NO: 727215 - DNA, 19 bp, Mus musculus
  siRNA target sequence for D2Bwg0891e (NM_026797.1,574-592).
ctggagcaagtggagttta

SEQ ID NO: 727216 - DNA, 19 bp, Mus musculus
  siRNA target sequence for D2Bwg0891e (NM_026797.1,759-777).
caacctgcgcagtccaaat

SEQ ID NO: 727217 - DNA, 19 bp, Mus musculus
  siRNA target sequence for D2Bwg0891e (NM_026797.1,768-786).
cagtccaaatccaagtgat

SEQ ID NO: 727218 - DNA, 19 bp, Mus musculus
  siRNA target sequence for 2810441K11Rik (NM_026798.1,294-312).
ggcattgaagtcatacgat

SEQ ID NO: 727219 - DNA, 19 bp, Mus musculus
  siRNA target sequence for 2810441K11Rik (NM_026798.1,295-313).
gcattgaagtcatacgatt

SEQ ID NO: 727220 - DNA, 19 bp, Mus musculus
  siRNA target sequence for 2810441K11Rik (NM_026798.1,300-318).
gaagtcatacgattgtttt

SEQ ID NO: 727221 - DNA, 19 bp, Mus musculus
  siRNA target sequence for 2810441K11Rik (NM_026798.1,310-328).
gattgtttttcggtacaaa

SEQ ID NO: 727222 - DNA, 19 bp, Mus musculus
  siRNA target sequence for 2810441K11Rik (NM_026798.1,350-368).
gatgccccttggcattagt

SEQ ID NO: 727223 - DNA, 19 bp, Mus musculus
  siRNA target sequence for 2810441K11Rik (NM_026798.1,389-407).
cgctatgatggcttcctat

SEQ ID NO: 727224 - DNA, 19 bp, Mus musculus
  siRNA target sequence for 2810441K11Rik (NM_026798.1,390-408).
gctatgatggcttcctatt

SEQ ID NO: 727225 - DNA, 19 bp, Mus musculus
  siRNA target sequence for 1110028A07Rik (NM_026808.1,216-234).
ctgcagtttcacgttaact

SEQ ID NO: 727226 - DNA, 19 bp, Mus musculus
  siRNA target sequence for 1110028A07Rik (NM_026808.1,218-236).
gcagtttcacgttaactct

SEQ ID NO: 727227 - DNA, 19 bp, Mus musculus
  siRNA target sequence for 1110028A07Rik (NM_026808.1,250-268).
ctagccacggcaacttctt

SEQ ID NO: 727228 - DNA, 19 bp, Mus musculus
  siRNA target sequence for 1110028A07Rik (NM_026808.1,257-275).
cggcaacttcttcaacata

SEQ ID NO: 727229 - DNA, 19 bp, Mus musculus
  siRNA target sequence for 1110028A07Rik (NM_026808.1,258-276).
ggcaacttcttcaacataa

SEQ ID NO: 727230 - DNA, 19 bp, Mus musculus
  siRNA target sequence for 1110028A07Rik (NM_026808.1,501-519).
ctgcccgaccgcaagagtt

SEQ ID NO: 727231 - DNA, 19 bp, Mus musculus
  siRNA target sequence for 1110028A07Rik (NM_026808.1,658-676).
cactgcgtcttgttttcct

SEQ ID NO: 727232 - DNA, 19 bp, Mus musculus
  siRNA target sequence for 1110028A07Rik (NM_026808.1,716-734).
gctctgcacggtcatctat

SEQ ID NO: 727233 - DNA, 19 bp, Mus musculus
  siRNA target sequence for 1110028A07Rik (NM_026808.1,863-881).
ccgctcaatgcgcaaacat

SEQ ID NO: 727234 - DNA, 19 bp, Mus musculus
  siRNA target sequence for 1110028A07Rik (NM_026808.1,864-882).
cgctcaatgcgcaaacata

SEQ ID NO: 727235 - DNA, 19 bp, Mus musculus
  siRNA target sequence for D4Bwg0951e (NM_026821.2,951-969).
gacaggagatggttaacct

SEQ ID NO: 727236 - DNA, 19 bp, Mus musculus
  siRNA target sequence for D4Bwg0951e (NM_026821.2,967-985).
cctcagagccactgatgta

SEQ ID NO: 727237 - DNA, 19 bp, Mus musculus
  siRNA target sequence for D4Bwg0951e (NM_026821.2,987-1005).
ggctcatgcgtcaattgct

SEQ ID NO: 727238 - DNA, 19 bp, Mus musculus
  siRNA target sequence for D4Bwg0951e (NM_026821.2,1036-1054).
gtggatgatcgaggaaaaa

SEQ ID NO: 727239 - DNA, 19 bp, Mus musculus
  siRNA target sequence for D4Bwg0951e (NM_026821.2,1198-1216).
ggacactttggcagatgat

SEQ ID NO: 727240 - DNA, 19 bp, Mus musculus
  siRNA target sequence for D4Bwg0951e (NM_026821.2,1255-1273).
cagtgacagctccatcata

SEQ ID NO: 727241 - DNA, 19 bp, Mus musculus
  siRNA target sequence for Ms4a6d (NM_026835.1,834-852).
cactttgtaaccctacata

SEQ ID NO: 727242 - DNA, 19 bp, Mus musculus
  siRNA target sequence for Ms4a6d (NM_026835.1,844-862).
ccctacatatgaaaacata

SEQ ID NO: 727243 - DNA, 19 bp, Mus musculus
  siRNA target sequence for 1110038M16Rik (NM_026837.1,91-109).
cctcggccgagctggatta

SEQ ID NO: 727244 - DNA, 19 bp, Mus musculus
  siRNA target sequence for 1110038M16Rik (NM_026837.1,211-229).
gaggctgcagggacaagaa

SEQ ID NO: 727245 - DNA, 19 bp, Mus musculus
  siRNA target sequence for 1110038M16Rik (NM_026837.1,227-245).
gaacctggccaagtatagt

SEQ ID NO: 727246 - DNA, 19 bp, Mus musculus
  siRNA target sequence for 1110038M16Rik (NM_026837.1,340-358).
gcgtgatagcccagaaact

SEQ ID NO: 727247 - DNA, 19 bp, Mus musculus
  siRNA target sequence for 1110038M16Rik (NM_026837.1,473-491).
gcgcttccgccatttgcat

SEQ ID NO: 727248 - DNA, 19 bp, Mus musculus
  siRNA target sequence for 1110038M16Rik (NM_026837.1,514-532).
gtggtcctggcgatagcaa

SEQ ID NO: 727249 - DNA, 19 bp, Mus musculus
  siRNA target sequence for 1110038M16Rik (NM_026837.1,706-724).
cctgctggcctgaactcta

SEQ ID NO: 727250 - DNA, 19 bp, Mus musculus
  siRNA target sequence for 1110038M16Rik (NM_026837.1,757-775).
ccagggatgtggaacgtat

SEQ ID NO: 727251 - DNA, 19 bp, Mus musculus
  siRNA target sequence for 1110038M16Rik (NM_026837.1,761-779).
ggatgtggaacgtatggta

SEQ ID NO: 727252 - DNA, 19 bp, Mus musculus
  siRNA target sequence for 1110038M16Rik (NM_026837.1,846-864).
cacctccgagactatccta

SEQ ID NO: 727253 - DNA, 19 bp, Mus musculus
  siRNA target sequence for 1110038M16Rik (NM_026837.1,852-870).
cgagactatcctacttact

SEQ ID NO: 727254 - DNA, 19 bp, Mus musculus
  siRNA target sequence for 1110038M16Rik (NM_026837.1,853-871).
gagactatcctacttacta

SEQ ID NO: 727255 - DNA, 19 bp, Mus musculus
  siRNA target sequence for 1110038M16Rik (NM_026837.1,857-875).
ctatcctacttactataca

SEQ ID NO: 727256 - DNA, 19 bp, Mus musculus
  siRNA target sequence for Pdgfrl (NM_026840.1,92-110).
gtcagcattctcctaagaa

SEQ ID NO: 727257 - DNA, 19 bp, Mus musculus
  siRNA target sequence for Pdgfrl (NM_026840.1,163-181).
gccaaacccaagattccta

SEQ ID NO: 727258 - DNA, 19 bp, Mus musculus
  siRNA target sequence for Pdgfrl (NM_026840.1,164-182).
ccaaacccaagattcctaa

SEQ ID NO: 727259 - DNA, 19 bp, Mus musculus
  siRNA target sequence for Pdgfrl (NM_026840.1,169-187).
cccaagattcctaaggtaa

SEQ ID NO: 727260 - DNA, 19 bp, Mus musculus
  siRNA target sequence for Pdgfrl (NM_026840.1,288-306).
cctggcagggcaaactcta

SEQ ID NO: 727261 - DNA, 19 bp, Mus musculus
  siRNA target sequence for Pdgfrl (NM_026840.1,302-320).
ctctagagctacgatgtaa

SEQ ID NO: 727262 - DNA, 19 bp, Mus musculus
  siRNA target sequence for Pdgfrl (NM_026840.1,469-487).
ctgtgcaatggctacatct

SEQ ID NO: 727263 - DNA, 19 bp, Mus musculus
  siRNA target sequence for Pdgfrl (NM_026840.1,555-573).
gccttctcccagttacttt

SEQ ID NO: 727264 - DNA, 19 bp, Mus musculus
  siRNA target sequence for Pdgfrl (NM_026840.1,628-646).
gccccgtcagccaaagtca

SEQ ID NO: 727265 - DNA, 19 bp, Mus musculus
  siRNA target sequence for Pdgfrl (NM_026840.1,657-675).
ggagtttcccgccaaagaa

SEQ ID NO: 727266 - DNA, 19 bp, Mus musculus
  siRNA target sequence for Pdgfrl (NM_026840.1,926-944).
ctgatgtggaggttgaatt

SEQ ID NO: 727267 - DNA, 19 bp, Mus musculus
  siRNA target sequence for Pdgfrl (NM_026840.1,928-946).
gatgtggaggttgaattca

SEQ ID NO: 727268 - DNA, 19 bp, Mus musculus
  siRNA target sequence for Pdgfrl (NM_026840.1,1081-1099).
gatgcgggctactacatat

SEQ ID NO: 727269 - DNA, 19 bp, Mus musculus
  siRNA target sequence for Pdgfrl (NM_026840.1,1135-1153).
gcgaccactgttgagtttt

SEQ ID NO: 727270 - DNA, 19 bp, Mus musculus
  siRNA target sequence for Ubqln1 (NM_026842.3,156-174).
gctgaataatcccctattt

SEQ ID NO: 727271 - DNA, 19 bp, Mus musculus
  siRNA target sequence for Ubqln1 (NM_026842.3,159-177).
gaataatcccctatttgct

SEQ ID NO: 727272 - DNA, 19 bp, Mus musculus
  siRNA target sequence for Ubqln1 (NM_026842.3,563-581).
gtgccatgggattcttgaa

SEQ ID NO: 727273 - DNA, 19 bp, Mus musculus
  siRNA target sequence for 1110046L09Rik (NM_026844.2,149-167).
gaatgcaacgtcctgatta

SEQ ID NO: 727274 - DNA, 19 bp, Mus musculus
  siRNA target sequence for 1110046L09Rik (NM_026844.2,163-181).
gattaacctgctaaaggaa

SEQ ID NO: 727275 - DNA, 19 bp, Mus musculus
  siRNA target sequence for 1110046L09Rik (NM_026844.2,227-245).
gacctcgaccgggaaatga

SEQ ID NO: 727276 - DNA, 19 bp, Mus musculus
  siRNA target sequence for Mrpl52 (NM_026851.1,186-204).
gccctgcacccccaatgaa

SEQ ID NO: 727277 - DNA, 19 bp, Mus musculus
  siRNA target sequence for Mrpl52 (NM_026851.1,335-353).
gaacatgatctcaaaccta

SEQ ID NO: 727278 - DNA, 19 bp, Mus musculus
  siRNA target sequence for Mrpl52 (NM_026851.1,346-364).
caaacctaaagggacttta

SEQ ID NO: 727279 - DNA, 19 bp, Mus musculus
  siRNA target sequence for 1110067L22Rik (NM_026855.1,95-113).
ggcgcagcggcgacttctt

SEQ ID NO: 727280 - DNA, 19 bp, Mus musculus
  siRNA target sequence for 1110067L22Rik (NM_026855.1,117-135).
cttgcctgtatcgttgtat

SEQ ID NO: 727281 - DNA, 19 bp, Mus musculus
  siRNA target sequence for 1110067L22Rik (NM_026855.1,177-195).
gccacggcgtgctcaagat

SEQ ID NO: 727282 - DNA, 19 bp, Mus musculus
  siRNA target sequence for 1110067L22Rik (NM_026855.1,178-196).
ccacggcgtgctcaagata

SEQ ID NO: 727283 - DNA, 19 bp, Mus musculus
  siRNA target sequence for 1110067L22Rik (NM_026855.1,179-197).
cacggcgtgctcaagataa

SEQ ID NO: 727284 - DNA, 19 bp, Mus musculus
  siRNA target sequence for 1110067L22Rik (NM_026855.1,224-242).
gtagacaaatacatcgaat

SEQ ID NO: 727285 - DNA, 19 bp, Mus musculus
  siRNA target sequence for 1110067L22Rik (NM_026855.1,238-256).
cgaatacgaccctgttatt

SEQ ID NO: 727286 - DNA, 19 bp, Mus musculus
  siRNA target sequence for 1110067L22Rik (NM_026855.1,239-257).
gaatacgaccctgttatta

SEQ ID NO: 727287 - DNA, 19 bp, Mus musculus
  siRNA target sequence for 1110067L22Rik (NM_026855.1,248-266).
cctgttattatcttgatta

SEQ ID NO: 727288 - DNA, 19 bp, Mus musculus
  siRNA target sequence for 1110067L22Rik (NM_026855.1,249-267).
ctgttattatcttgattaa

SEQ ID NO: 727289 - DNA, 19 bp, Mus musculus
  siRNA target sequence for 1110067L22Rik (NM_026855.1,259-277).
cttgattaatgccatttta

SEQ ID NO: 727290 - DNA, 19 bp, Mus musculus
  siRNA target sequence for 1110067L22Rik (NM_026855.1,289-307).
ggcctacaggcatattctt

SEQ ID NO: 727291 - DNA, 19 bp, Mus musculus
  siRNA target sequence for 1110067L22Rik (NM_026855.1,290-308).
gcctacaggcatattcttt

SEQ ID NO: 727292 - DNA, 19 bp, Mus musculus
  siRNA target sequence for 1110067L22Rik (NM_026855.1,291-309).
cctacaggcatattctttt

SEQ ID NO: 727293 - DNA, 19 bp, Mus musculus
  siRNA target sequence for 1110067L22Rik (NM_026855.1,299-317).
catattcttttcaacacta

SEQ ID NO: 727294 - DNA, 19 bp, Mus musculus
  siRNA target sequence for 1110067L22Rik (NM_026855.1,332-350).
gggaaactctgcatgtttt

SEQ ID NO: 727295 - DNA, 19 bp, Mus musculus
  siRNA target sequence for 1110067L22Rik (NM_026855.1,445-463).
ggacttctacaggatgttt

SEQ ID NO: 727296 - DNA, 19 bp, Mus musculus
  siRNA target sequence for 1110067L22Rik (NM_026855.1,526-544).
gcaacccatgacagcaaaa

SEQ ID NO: 727297 - DNA, 19 bp, Mus musculus
  siRNA target sequence for 1110067L22Rik (NM_026855.1,546-564).
gagcacccgactttgttct

SEQ ID NO: 727298 - DNA, 19 bp, Mus musculus
  siRNA target sequence for 1110067L22Rik (NM_026855.1,618-636).
ccgtcatctgggaacatga

SEQ ID NO: 727299 - DNA, 19 bp, Mus musculus
  siRNA target sequence for 1110067L22Rik (NM_026855.1,647-665).
ctgtgtctcaggctcatta

SEQ ID NO: 727300 - DNA, 19 bp, Mus musculus
  siRNA target sequence for 1110067L22Rik (NM_026855.1,670-688).
gtttgtcctgacctcaaat

SEQ ID NO: 727301 - DNA, 19 bp, Mus musculus
  siRNA target sequence for 1110067L22Rik (NM_026855.1,813-831).
gtgactgtgcgctctacaa

SEQ ID NO: 727302 - DNA, 19 bp, Mus musculus
  siRNA target sequence for 1110067L22Rik (NM_026855.1,815-833).
gactgtgcgctctacaagt

SEQ ID NO: 727303 - DNA, 19 bp, Mus musculus
  siRNA target sequence for 1110068E11Rik (NM_026859.2,512-530).
ggcgggagatgataaacat

SEQ ID NO: 727304 - DNA, 19 bp, Mus musculus
  siRNA target sequence for 1110068E11Rik (NM_026859.2,513-531).
gcgggagatgataaacata

SEQ ID NO: 727305 - DNA, 19 bp, Mus musculus
  siRNA target sequence for 1110068E11Rik (NM_026859.2,514-532).
cgggagatgataaacatat

SEQ ID NO: 727306 - DNA, 19 bp, Mus musculus
  siRNA target sequence for 1110068E11Rik (NM_026859.2,579-597).
ctgtccccaccccaaactt

SEQ ID NO: 727307 - DNA, 19 bp, Mus musculus
  siRNA target sequence for 1110068E11Rik (NM_026859.2,772-790).
gcctccgctgggtggtaaa

SEQ ID NO: 727308 - DNA, 19 bp, Mus musculus
  siRNA target sequence for 1110068E11Rik (NM_026859.2,776-794).
ccgctgggtggtaaatgca

SEQ ID NO: 727309 - DNA, 19 bp, Mus musculus
  siRNA target sequence for 1110068E11Rik (NM_026859.2,795-813).
gtcaactgcagcctgtttt

SEQ ID NO: 727310 - DNA, 19 bp, Mus musculus
  siRNA target sequence for 1110068E11Rik (NM_026859.2,814-832).
cagctgttcgtgaagactt

SEQ ID NO: 727311 - DNA, 19 bp, Mus musculus
  siRNA target sequence for 1110068E11Rik (NM_026859.2,817-835).
ctgttcgtgaagacttcaa

SEQ ID NO: 727312 - DNA, 19 bp, Mus musculus
  siRNA target sequence for 1110068E11Rik (NM_026859.2,892-910).
gtgacatctacagctataa

SEQ ID NO: 727313 - DNA, 19 bp, Mus musculus
  siRNA target sequence for 1110068E11Rik (NM_026859.2,950-968).
cctctggtcattcaactat

SEQ ID NO: 727314 - DNA, 19 bp, Mus musculus
  siRNA target sequence for 1110068E11Rik (NM_026859.2,989-1007).
gaagcgaattgtcttcttt

SEQ ID NO: 727315 - DNA, 19 bp, Mus musculus
  siRNA target sequence for 1110068E11Rik (NM_026859.2,993-1011).
cgaattgtcttctttagct

SEQ ID NO: 727316 - DNA, 19 bp, Mus musculus
  siRNA target sequence for 1190003K14Rik (NM_026862.3,845-863).
cggctcaccaggcatagaa

SEQ ID NO: 727317 - DNA, 19 bp, Mus musculus
  siRNA target sequence for 1190003K14Rik (NM_026862.3,847-865).
gctcaccaggcatagaaca

SEQ ID NO: 727318 - DNA, 19 bp, Mus musculus
  siRNA target sequence for 1190003K14Rik (NM_026862.3,1198-1216).
ggactgcggtcttcagtta

SEQ ID NO: 727319 - DNA, 19 bp, Mus musculus
  siRNA target sequence for 1190003K14Rik (NM_026862.3,1201-1219).
ctgcggtcttcagttagat

SEQ ID NO: 727320 - DNA, 19 bp, Mus musculus
  siRNA target sequence for 1190003K14Rik (NM_026862.3,1284-1302).
ggacggctggccagaaaat

SEQ ID NO: 727321 - DNA, 19 bp, Mus musculus
  siRNA target sequence for 1190003K14Rik (NM_026862.3,1461-1479).
cccgagtgtgccgtaaaaa

SEQ ID NO: 727322 - DNA, 19 bp, Mus musculus
  siRNA target sequence for 1190003K14Rik (NM_026862.3,1462-1480).
ccgagtgtgccgtaaaaaa

SEQ ID NO: 727323 - DNA, 19 bp, Mus musculus
  siRNA target sequence for 1190003K14Rik (NM_026862.3,1464-1482).
gagtgtgccgtaaaaaaga

SEQ ID NO: 727324 - DNA, 19 bp, Mus musculus
  siRNA target sequence for 1190003K14Rik (NM_026862.3,1466-1484).
gtgtgccgtaaaaaagact

SEQ ID NO: 727325 - DNA, 19 bp, Mus musculus
  siRNA target sequence for 1190003K14Rik (NM_026862.3,1797-1815).
gttacaggggtgtgatgtt

SEQ ID NO: 727326 - DNA, 19 bp, Mus musculus
  siRNA target sequence for 1190003K14Rik (NM_026862.3,1876-1894).
gtgtgcacctgatgagatt

SEQ ID NO: 727327 - DNA, 19 bp, Mus musculus
  siRNA target sequence for 1190003K14Rik (NM_026862.3,1915-1933).
catagacgtaggacaaaaa

SEQ ID NO: 727328 - DNA, 19 bp, Mus musculus
  siRNA target sequence for 1190003K14Rik (NM_026862.3,2079-2097).
gcagtgtccttctaagcat

SEQ ID NO: 727329 - DNA, 19 bp, Mus musculus
  siRNA target sequence for 1190003K14Rik (NM_026862.3,2141-2159).
cccatgtgtgtagagttat

SEQ ID NO: 727330 - DNA, 19 bp, Mus musculus
  siRNA target sequence for 1190003K14Rik (NM_026862.3,2200-2218).
gggtgccactcactgttat

SEQ ID NO: 727331 - DNA, 19 bp, Mus musculus
  siRNA target sequence for 1190003K14Rik (NM_026862.3,2201-2219).
ggtgccactcactgttata

SEQ ID NO: 727332 - DNA, 19 bp, Mus musculus
  siRNA target sequence for 1190003K14Rik (NM_026862.3,2206-2224).
cactcactgttataaaggt

SEQ ID NO: 727333 - DNA, 19 bp, Mus musculus
  siRNA target sequence for 1190003K14Rik (NM_026862.3,2277-2295).
gcatggccccacctatcaa

SEQ ID NO: 727334 - DNA, 19 bp, Mus musculus
  siRNA target sequence for 1190003K14Rik (NM_026862.3,2283-2301).
ccccacctatcaaaccttt

SEQ ID NO: 727335 - DNA, 19 bp, Mus musculus
  siRNA target sequence for 1190003K14Rik (NM_026862.3,2284-2302).
cccacctatcaaaccttta

SEQ ID NO: 727336 - DNA, 19 bp, Mus musculus
  siRNA target sequence for 1190003K14Rik (NM_026862.3,2286-2304).
cacctatcaaacctttact

SEQ ID NO: 727337 - DNA, 19 bp, Mus musculus
  siRNA target sequence for 1190003K14Rik (NM_026862.3,2313-2331).
ccaaaacaatcggtatctt

SEQ ID NO: 727338 - DNA, 19 bp, Mus musculus
  siRNA target sequence for 1190003K14Rik (NM_026862.3,2337-2355).
cagaggagagctctaacta

SEQ ID NO: 727339 - DNA, 19 bp, Mus musculus
  siRNA target sequence for 1190003K14Rik (NM_026862.3,2357-2375).
cgacatgaggatgatgtta

SEQ ID NO: 727340 - DNA, 19 bp, Mus musculus
  siRNA target sequence for 1190003K14Rik (NM_026862.3,2407-2425).
gctatcggcctggatgtta

SEQ ID NO: 727341 - DNA, 19 bp, Mus musculus
  siRNA target sequence for 1700113I22Rik (NM_026865.1,738-756).
ggtacgacagacccaaata

SEQ ID NO: 727342 - DNA, 19 bp, Mus musculus
  siRNA target sequence for 1700113I22Rik (NM_026865.1,742-760).
cgacagacccaaatatgtt

SEQ ID NO: 727343 - DNA, 19 bp, Mus musculus
  siRNA target sequence for 1700113I22Rik (NM_026865.1,849-867).
gagtggagctgtataacga

SEQ ID NO: 727344 - DNA, 19 bp, Mus musculus
  siRNA target sequence for 1700113I22Rik (NM_026865.1,894-912).
ccaaggactcccaggataa

SEQ ID NO: 727345 - DNA, 19 bp, Mus musculus
  siRNA target sequence for 1700113I22Rik (NM_026865.1,975-993).
ggctcacaaaggaggatat

SEQ ID NO: 727346 - DNA, 19 bp, Mus musculus
  siRNA target sequence for 1700113I22Rik (NM_026865.1,1007-1025).
ctctctgtggacttcgata

SEQ ID NO: 727347 - DNA, 19 bp, Mus musculus
  siRNA target sequence for 1700113I22Rik (NM_026865.1,1061-1079).
ctggctcaggtggaacatt

SEQ ID NO: 727348 - DNA, 19 bp, Mus musculus
  siRNA target sequence for 1700113I22Rik (NM_026865.1,1063-1081).
ggctcaggtggaacattat

SEQ ID NO: 727349 - DNA, 19 bp, Mus musculus
  siRNA target sequence for Ubap2 (NM_026872.1,164-182).
ccgaggtgctcgggaaaaa

SEQ ID NO: 727350 - DNA, 19 bp, Mus musculus
  siRNA target sequence for Ubap2 (NM_026872.1,266-284).
gatctttgataagaatgat

SEQ ID NO: 727351 - DNA, 19 bp, Mus musculus
  siRNA target sequence for Ubap2 (NM_026872.1,273-291).
gataagaatgattcagatt

SEQ ID NO: 727352 - DNA, 19 bp, Mus musculus
  siRNA target sequence for Ubap2 (NM_026872.1,353-371).
ggccctacatgactgtaat

SEQ ID NO: 727353 - DNA, 19 bp, Mus musculus
  siRNA target sequence for Ubap2 (NM_026872.1,356-374).
cctacatgactgtaatggt

SEQ ID NO: 727354 - DNA, 19 bp, Mus musculus
  siRNA target sequence for Ubap2 (NM_026872.1,372-390).
ggtgatgtgaacaaagcta

SEQ ID NO: 727355 - DNA, 19 bp, Mus musculus
  siRNA target sequence for Ubap2 (NM_026872.1,563-581).
ccgagtccgagagttcaaa

SEQ ID NO: 727356 - DNA, 19 bp, Mus musculus
  siRNA target sequence for Ubap2 (NM_026872.1,688-706).
ggttctccgctcaaagcat

SEQ ID NO: 727357 - DNA, 19 bp, Mus musculus
  siRNA target sequence for Ubap2 (NM_026872.1,716-734).
caatcctgcagactattca

SEQ ID NO: 727358 - DNA, 19 bp, Mus musculus
  siRNA target sequence for Ubap2 (NM_026872.1,841-859).
ctcaggaaccgccaagtaa

SEQ ID NO: 727359 - DNA, 19 bp, Mus musculus
  siRNA target sequence for Ubap2 (NM_026872.1,845-863).
ggaaccgccaagtaaaagt

SEQ ID NO: 727360 - DNA, 19 bp, Mus musculus
  siRNA target sequence for Ubap2 (NM_026872.1,846-864).
gaaccgccaagtaaaagtt

SEQ ID NO: 727361 - DNA, 19 bp, Mus musculus
  siRNA target sequence for Ubap2 (NM_026872.1,849-867).
ccgccaagtaaaagttctt

SEQ ID NO: 727362 - DNA, 19 bp, Mus musculus
  siRNA target sequence for Ubap2 (NM_026872.1,947-965).
ggtattcactgcttcatct

SEQ ID NO: 727363 - DNA, 19 bp, Mus musculus
  siRNA target sequence for Ubap2 (NM_026872.1,991-1009).
ctgggcacagcattgatct

SEQ ID NO: 727364 - DNA, 19 bp, Mus musculus
  siRNA target sequence for Ubap2 (NM_026872.1,1042-1060).
cccaagccaccgaagtcaa

SEQ ID NO: 727365 - DNA, 19 bp, Mus musculus
  siRNA target sequence for Ubap2 (NM_026872.1,1056-1074).
gtcaactcctttgaaacat

SEQ ID NO: 727366 - DNA, 19 bp, Mus musculus
  siRNA target sequence for Ubap2 (NM_026872.1,1111-1129).
caaattctcagcacaacaa

SEQ ID NO: 727367 - DNA, 19 bp, Mus musculus
  siRNA target sequence for Ubap2 (NM_026872.1,1117-1135).
ctcagcacaacaatcagat

SEQ ID NO: 727368 - DNA, 19 bp, Mus musculus
  siRNA target sequence for Ubap2 (NM_026872.1,1249-1267).
ccaactcccagattttgga

SEQ ID NO: 727369 - DNA, 19 bp, Mus musculus
  siRNA target sequence for Ubap2 (NM_026872.1,1397-1415).
cagtcgtttggacttcaaa

SEQ ID NO: 727370 - DNA, 19 bp, Mus musculus
  siRNA target sequence for Ubap2 (NM_026872.1,1500-1518).
ggtttggagtccttttctt

SEQ ID NO: 727371 - DNA, 19 bp, Mus musculus
  siRNA target sequence for Ubap2 (NM_026872.1,1551-1569).
gatggtccttctactgtta

SEQ ID NO: 727372 - DNA, 19 bp, Mus musculus
  siRNA target sequence for Ubap2 (NM_026872.1,1561-1579).
ctactgttagcagactttt

SEQ ID NO: 727373 - DNA, 19 bp, Mus musculus
  siRNA target sequence for Ubap2 (NM_026872.1,1564-1582).
ctgttagcagacttttgca

SEQ ID NO: 727374 - DNA, 19 bp, Mus musculus
  siRNA target sequence for Ubap2 (NM_026872.1,1623-1641).
caaccacagcccaaacata

SEQ ID NO: 727375 - DNA, 19 bp, Mus musculus
  siRNA target sequence for Ubap2 (NM_026872.1,1626-1644).
ccacagcccaaacatatta

SEQ ID NO: 727376 - DNA, 19 bp, Mus musculus
  siRNA target sequence for Ubap2 (NM_026872.1,1627-1645).
cacagcccaaacatattaa

SEQ ID NO: 727377 - DNA, 19 bp, Mus musculus
  siRNA target sequence for Ubap2 (NM_026872.1,1766-1784).
gccatcgctctctgagttt

SEQ ID NO: 727378 - DNA, 19 bp, Mus musculus
  siRNA target sequence for Ubap2 (NM_026872.1,1958-1976).
cactagcccagtaacaact

SEQ ID NO: 727379 - DNA, 19 bp, Mus musculus
  siRNA target sequence for Ubap2 (NM_026872.1,2001-2019).
gtgcataccaggattgcat

SEQ ID NO: 727380 - DNA, 19 bp, Mus musculus
  siRNA target sequence for Ubap2 (NM_026872.1,2094-2112).
cacacagtagacactactt

SEQ ID NO: 727381 - DNA, 19 bp, Mus musculus
  siRNA target sequence for Ubap2 (NM_026872.1,2579-2597).
gcctcccctgctacacaat

SEQ ID NO: 727382 - DNA, 19 bp, Mus musculus
  siRNA target sequence for Ubap2 (NM_026872.1,2583-2601).
cccctgctacacaatcagt

SEQ ID NO: 727383 - DNA, 19 bp, Mus musculus
  siRNA target sequence for Ubap2 (NM_026872.1,2584-2602).
ccctgctacacaatcagta

SEQ ID NO: 727384 - DNA, 19 bp, Mus musculus
  siRNA target sequence for Ubap2 (NM_026872.1,2636-2654).
cccgatttacggttatgat

SEQ ID NO: 727385 - DNA, 19 bp, Mus musculus
  siRNA target sequence for Ubap2 (NM_026872.1,2638-2656).
cgatttacggttatgatga

SEQ ID NO: 727386 - DNA, 19 bp, Mus musculus
  siRNA target sequence for Ubap2 (NM_026872.1,2674-2692).
cacggctgccaatggatta

SEQ ID NO: 727387 - DNA, 19 bp, Mus musculus
  siRNA target sequence for Ubap2 (NM_026872.1,2676-2694).
cggctgccaatggattact

SEQ ID NO: 727388 - DNA, 19 bp, Mus musculus
  siRNA target sequence for Ubap2 (NM_026872.1,2677-2695).
ggctgccaatggattacta

SEQ ID NO: 727389 - DNA, 19 bp, Mus musculus
  siRNA target sequence for Ubap2 (NM_026872.1,2683-2701).
caatggattactatggaat

SEQ ID NO: 727390 - DNA, 19 bp, Mus musculus
  siRNA target sequence for Ubap2 (NM_026872.1,2729-2747).
cagccgagatgggaatcta

SEQ ID NO: 727391 - DNA, 19 bp, Mus musculus
  siRNA target sequence for Ubap2 (NM_026872.1,2736-2754).
gatgggaatctagctaata

SEQ ID NO: 727392 - DNA, 19 bp, Mus musculus
  siRNA target sequence for Ubap2 (NM_026872.1,3059-3077).
cgcttacagcacaggttat

SEQ ID NO: 727393 - DNA, 19 bp, Mus musculus
  siRNA target sequence for Ubap2 (NM_026872.1,3067-3085).
gcacaggttatgacgattt

SEQ ID NO: 727394 - DNA, 19 bp, Mus musculus
  siRNA target sequence for Ubap2 (NM_026872.1,3199-3217).
gcactggcttacctgatat

SEQ ID NO: 727395 - DNA, 19 bp, Mus musculus
  siRNA target sequence for Ubap2 (NM_026872.1,3220-3238).
ctggttccgtctacaacaa

SEQ ID NO: 727396 - DNA, 19 bp, Mus musculus
  siRNA target sequence for Ubap2 (NM_026872.1,3358-3376).
ccccgttcctgcacatcat

SEQ ID NO: 727397 - DNA, 19 bp, Mus musculus
  siRNA target sequence for Ubap2 (NM_026872.1,3513-3531).
gctccatactggacaaact

SEQ ID NO: 727398 - DNA, 19 bp, Mus musculus
  siRNA target sequence for 1190006A08Rik (NM_026881.1,147-165).
cgctgctcatcgtctttat

SEQ ID NO: 727399 - DNA, 19 bp, Mus musculus
  siRNA target sequence for 1190006A08Rik (NM_026881.1,185-203).
ctcgccgagggcataacct

SEQ ID NO: 727400 - DNA, 19 bp, Mus musculus
  siRNA target sequence for 1190006A08Rik (NM_026881.1,211-229).
ggtttacaggacagacaaa

SEQ ID NO: 727401 - DNA, 19 bp, Mus musculus
  siRNA target sequence for 1190006A08Rik (NM_026881.1,212-230).
gtttacaggacagacaaat

SEQ ID NO: 727402 - DNA, 19 bp, Mus musculus
  siRNA target sequence for 1190006A08Rik (NM_026881.1,308-326).
ggtcgacaacagaagaaga

SEQ ID NO: 727403 - DNA, 19 bp, Mus musculus
  siRNA target sequence for 1190006A08Rik (NM_026881.1,373-391).
gtcaatggtacggatgaaa

SEQ ID NO: 727404 - DNA, 19 bp, Mus musculus
  siRNA target sequence for 1190006A08Rik (NM_026881.1,397-415).
gttcgcgattggcttttgt

SEQ ID NO: 727405 - DNA, 19 bp, Mus musculus
  siRNA target sequence for 1190006A08Rik (NM_026881.1,400-418).
cgcgattggcttttgtttt

SEQ ID NO: 727406 - DNA, 19 bp, Mus musculus
  siRNA target sequence for 1190006A08Rik (NM_026881.1,420-438).
ctgccttaatgggaatgtt

SEQ ID NO: 727407 - DNA, 19 bp, Mus musculus
  siRNA target sequence for 1190006A08Rik (NM_026881.1,540-558).
cggactgctccttcatctt

SEQ ID NO: 727408 - DNA, 19 bp, Mus musculus
  siRNA target sequence for 1190006A08Rik (NM_026881.1,571-589).
ctgtaccatgtcaattcga

SEQ ID NO: 727409 - DNA, 19 bp, Mus musculus
  siRNA target sequence for 1190006A08Rik (NM_026881.1,576-594).
ccatgtcaattcgacaaaa

SEQ ID NO: 727410 - DNA, 19 bp, Mus musculus
  siRNA target sequence for 1190006A08Rik (NM_026881.1,668-686).
cctccgtctgggaagtttt

SEQ ID NO: 727411 - DNA, 19 bp, Mus musculus
  siRNA target sequence for 1190006A08Rik (NM_026881.1,671-689).
ccgtctgggaagttttcct

SEQ ID NO: 727412 - DNA, 19 bp, Mus musculus
  siRNA target sequence for 1500011H22Rik (NM_026883.1,473-491).
gatcagctggacattctta

SEQ ID NO: 727413 - DNA, 19 bp, Mus musculus
  siRNA target sequence for 1500011H22Rik (NM_026883.1,599-617).
ctcaaatccaaacaattca

SEQ ID NO: 727414 - DNA, 19 bp, Mus musculus
  siRNA target sequence for 1500011H22Rik (NM_026883.1,616-634).
catatccctaaatcaatga

SEQ ID NO: 727415 - DNA, 19 bp, Mus musculus
  siRNA target sequence for 1500011H22Rik (NM_026883.1,635-653).
cagatgcatcttttctaaa

SEQ ID NO: 727416 - DNA, 19 bp, Mus musculus
  siRNA target sequence for 1500011H22Rik (NM_026883.1,695-713).
gcgttgctaagatctgtaa

SEQ ID NO: 727417 - DNA, 19 bp, Mus musculus
  siRNA target sequence for 1500011H22Rik (NM_026883.1,697-715).
gttgctaagatctgtaact

SEQ ID NO: 727418 - DNA, 19 bp, Mus musculus
  siRNA target sequence for 1500011H22Rik (NM_026883.1,743-761).
ggcagtacatgcacatatt

SEQ ID NO: 727419 - DNA, 19 bp, Mus musculus
  siRNA target sequence for 1500011H22Rik (NM_026883.1,744-762).
gcagtacatgcacatattt

SEQ ID NO: 727420 - DNA, 19 bp, Mus musculus
  siRNA target sequence for 1500011H22Rik (NM_026883.1,818-836).
ctcgctactcacagaaaca

SEQ ID NO: 727421 - DNA, 19 bp, Mus musculus
  siRNA target sequence for 1500011H22Rik (NM_026883.1,905-923).
cacctgaaatgatcataca

SEQ ID NO: 727422 - DNA, 19 bp, Mus musculus
  siRNA target sequence for 1500011H22Rik (NM_026883.1,933-951).
gcgacccctgagacacaaa

SEQ ID NO: 727423 - DNA, 19 bp, Mus musculus
  siRNA target sequence for 1500011H22Rik (NM_026883.1,935-953).
gacccctgagacacaaaga

SEQ ID NO: 727424 - DNA, 19 bp, Mus musculus
  siRNA target sequence for 1500011H22Rik (NM_026883.1,948-966).
caaagaagggttaaaaatt

SEQ ID NO: 727425 - DNA, 19 bp, Mus musculus
  siRNA target sequence for 1500011H22Rik (NM_026883.1,1013-1031).
gaccaggcagactgttctt

SEQ ID NO: 727426 - DNA, 19 bp, Mus musculus
  siRNA target sequence for 1500011H22Rik (NM_026883.1,1036-1054).
ccagttccttctaatgatt

SEQ ID NO: 727427 - DNA, 19 bp, Mus musculus
  siRNA target sequence for 1500011H22Rik (NM_026883.1,1059-1077).
gtcatgcccgagtgaagaa

SEQ ID NO: 727428 - DNA, 19 bp, Mus musculus
  siRNA target sequence for 1500011H22Rik (NM_026883.1,1087-1105).
gaggatctgctgaataagt

SEQ ID NO: 727429 - DNA, 19 bp, Mus musculus
  siRNA target sequence for 1500011H22Rik (NM_026883.1,1115-1133).
ccatgtccatccaagaaca

SEQ ID NO: 727430 - DNA, 19 bp, Mus musculus
  siRNA target sequence for 1500011H22Rik (NM_026883.1,1116-1134).
catgtccatccaagaacaa

SEQ ID NO: 727431 - DNA, 19 bp, Mus musculus
  siRNA target sequence for 1500001A10Rik (NM_026886.1,465-483).
gcccatcaccagtcaagaa

SEQ ID NO: 727432 - DNA, 19 bp, Mus musculus
  siRNA target sequence for 1500001A10Rik (NM_026886.1,467-485).
ccatcaccagtcaagaaga

SEQ ID NO: 727433 - DNA, 19 bp, Mus musculus
  siRNA target sequence for 1500001A10Rik (NM_026886.1,552-570).
cctgtagccctaaaagcaa

SEQ ID NO: 727434 - DNA, 19 bp, Mus musculus
  siRNA target sequence for 1500001A10Rik (NM_026886.1,553-571).
ctgtagccctaaaagcaaa

SEQ ID NO: 727435 - DNA, 19 bp, Mus musculus
  siRNA target sequence for 1500001A10Rik (NM_026886.1,616-634).
gtctcaccgacatagacat

SEQ ID NO: 727436 - DNA, 19 bp, Mus musculus
  siRNA target sequence for 1500001A10Rik (NM_026886.1,870-888).
cggctgacctctttagcaa

SEQ ID NO: 727437 - DNA, 19 bp, Mus musculus
  siRNA target sequence for 1500001A10Rik (NM_026886.1,871-889).
ggctgacctctttagcaaa

SEQ ID NO: 727438 - DNA, 19 bp, Mus musculus
  siRNA target sequence for 1500001A10Rik (NM_026886.1,1014-1032).
ccggtggggatctaagcaa

SEQ ID NO: 727439 - DNA, 19 bp, Mus musculus
  siRNA target sequence for 1500001A10Rik (NM_026886.1,1224-1242).
ggagctcccccatcaaaga

SEQ ID NO: 727440 - DNA, 19 bp, Mus musculus
  siRNA target sequence for 1500001A10Rik (NM_026886.1,1338-1356).
ggtccacctcctctgaaaa

SEQ ID NO: 727441 - DNA, 19 bp, Mus musculus
  siRNA target sequence for 1500001A10Rik (NM_026886.1,1470-1488).
gggaacgggacctaaagta

SEQ ID NO: 727442 - DNA, 19 bp, Mus musculus
  siRNA target sequence for 1500001A10Rik (NM_026886.1,1471-1489).
ggaacgggacctaaagtat

SEQ ID NO: 727443 - DNA, 19 bp, Mus musculus
  siRNA target sequence for 1500001A10Rik (NM_026886.1,1583-1601).
ctggaggctcggaggataa

SEQ ID NO: 727444 - DNA, 19 bp, Mus musculus
  siRNA target sequence for 1500010J02Rik (NM_026889.1,2063-2081).
gagtctacgtccagttcta

SEQ ID NO: 727445 - DNA, 19 bp, Mus musculus
  siRNA target sequence for 1500010J02Rik (NM_026889.1,2177-2195).
gacagagccggctgttctt

SEQ ID NO: 727446 - DNA, 19 bp, Mus musculus
  siRNA target sequence for 1500010J02Rik (NM_026889.1,2205-2223).
caaggaggccctcatgaaa

SEQ ID NO: 727447 - DNA, 19 bp, Mus musculus
  siRNA target sequence for 1500010J02Rik (NM_026889.1,2212-2230).
gccctcatgaaacgtaatt

SEQ ID NO: 727448 - DNA, 19 bp, Mus musculus
  siRNA target sequence for 1500010J02Rik (NM_026889.1,2213-2231).
ccctcatgaaacgtaattt

SEQ ID NO: 727449 - DNA, 19 bp, Mus musculus
  siRNA target sequence for 1500010J02Rik (NM_026889.1,2263-2281).
gcaaagcccaccttgagtt

SEQ ID NO: 727450 - DNA, 19 bp, Mus musculus
  siRNA target sequence for 1500010J02Rik (NM_026889.1,2421-2439).
gttcttgtacccaaaccaa

SEQ ID NO: 727451 - DNA, 19 bp, Mus musculus
  siRNA target sequence for 1500010J02Rik (NM_026889.1,2582-2600).
gctctcaggacatacctaa

SEQ ID NO: 727452 - DNA, 19 bp, Mus musculus
  siRNA target sequence for 1500010J02Rik (NM_026889.1,2583-2601).
ctctcaggacatacctaat

SEQ ID NO: 727453 - DNA, 19 bp, Mus musculus
  siRNA target sequence for 1500010J02Rik (NM_026889.1,2585-2603).
ctcaggacatacctaatgt

SEQ ID NO: 727454 - DNA, 19 bp, Mus musculus
  siRNA target sequence for 1500010J02Rik (NM_026889.1,2727-2745).
ggcccttcgccggatgaaa

SEQ ID NO: 727455 - DNA, 19 bp, Mus musculus
  siRNA target sequence for 1500010J02Rik (NM_026889.1,2749-2767).
gggaatgctggggctatta

SEQ ID NO: 727456 - DNA, 19 bp, Mus musculus
  siRNA target sequence for 1500010J02Rik (NM_026889.1,2750-2768).
ggaatgctggggctattaa

SEQ ID NO: 727457 - DNA, 19 bp, Mus musculus
  siRNA target sequence for 1500010J02Rik (NM_026889.1,2782-2800).
ctaacagtagctctagaaa

SEQ ID NO: 727458 - DNA, 19 bp, Mus musculus
  siRNA target sequence for 1500010J02Rik (NM_026889.1,2786-2804).
cagtagctctagaaatgga

SEQ ID NO: 727459 - DNA, 19 bp, Mus musculus
  siRNA target sequence for 1500010J02Rik (NM_026889.1,2818-2836).
ccccctcacctggacatat

SEQ ID NO: 727460 - DNA, 19 bp, Mus musculus
  siRNA target sequence for 1500010J02Rik (NM_026889.1,2819-2837).
cccctcacctggacatata

SEQ ID NO: 727461 - DNA, 19 bp, Mus musculus
  siRNA target sequence for 1500010J02Rik (NM_026889.1,2853-2871).
gttgcctccccaaatagga

SEQ ID NO: 727462 - DNA, 19 bp, Mus musculus
  siRNA target sequence for 1500010J02Rik (NM_026889.1,2921-2939).
ccagatccaacattgttta

SEQ ID NO: 727463 - DNA, 19 bp, Mus musculus
  siRNA target sequence for 1500010J02Rik (NM_026889.1,3068-3086).
ctacctcttgccatattgt

SEQ ID NO: 727464 - DNA, 19 bp, Mus musculus
  siRNA target sequence for 1500010J02Rik (NM_026889.1,3071-3089).
cctcttgccatattgtgta

SEQ ID NO: 727465 - DNA, 19 bp, Mus musculus
  siRNA target sequence for 1500010J02Rik (NM_026889.1,3074-3092).
cttgccatattgtgtatgt

SEQ ID NO: 727466 - DNA, 19 bp, Mus musculus
  siRNA target sequence for 1500010J02Rik (NM_026889.1,3238-3256).
gaagcgacggtgatctgta

SEQ ID NO: 727467 - DNA, 19 bp, Mus musculus
  siRNA target sequence for 1500010J02Rik (NM_026889.1,3444-3462).
cctccgacccgttaagctt

SEQ ID NO: 727468 - DNA, 19 bp, Mus musculus
  siRNA target sequence for 1500010J02Rik (NM_026889.1,3445-3463).
ctccgacccgttaagcttt

SEQ ID NO: 727469 - DNA, 19 bp, Mus musculus
  siRNA target sequence for 1500010J02Rik (NM_026889.1,3448-3466).
cgacccgttaagctttctt

SEQ ID NO: 727470 - DNA, 19 bp, Mus musculus
  siRNA target sequence for 1500010J02Rik (NM_026889.1,3449-3467).
gacccgttaagctttcttt

SEQ ID NO: 727471 - DNA, 19 bp, Mus musculus
  siRNA target sequence for 1500010J02Rik (NM_026889.1,3453-3471).
cgttaagctttcttttgca

SEQ ID NO: 727472 - DNA, 19 bp, Mus musculus
  siRNA target sequence for 1500001L20Rik (NM_026893.2,348-366).
cagtttggctgggatcatt

SEQ ID NO: 727473 - DNA, 19 bp, Mus musculus
  siRNA target sequence for 1500001L20Rik (NM_026893.2,360-378).
gatcattcgctgcacaaaa

SEQ ID NO: 727474 - DNA, 19 bp, Mus musculus
  siRNA target sequence for 1500001L20Rik (NM_026893.2,363-381).
cattcgctgcacaaaagga

SEQ ID NO: 727475 - DNA, 19 bp, Mus musculus
  siRNA target sequence for 1500001L20Rik (NM_026893.2,457-475).
gctactctcgcctgttaca

SEQ ID NO: 727476 - DNA, 19 bp, Mus musculus
  siRNA target sequence for 1500001L20Rik (NM_026893.2,463-481).
ctcgcctgttacatggtta

SEQ ID NO: 727477 - DNA, 19 bp, Mus musculus
  siRNA target sequence for 1500001L20Rik (NM_026893.2,467-485).
cctgttacatggttatgca

SEQ ID NO: 727478 - DNA, 19 bp, Mus musculus
  siRNA target sequence for 1500001L20Rik (NM_026893.2,506-524).
cctcaaggagagagaattt

SEQ ID NO: 727479 - DNA, 19 bp, Mus musculus
  siRNA target sequence for 1500001L20Rik (NM_026893.2,525-543).
cacctcgggacccttaata

SEQ ID NO: 727480 - DNA, 19 bp, Mus musculus
  siRNA target sequence for 1500001L20Rik (NM_026893.2,531-549).
gggacccttaataaagtgt

SEQ ID NO: 727481 - DNA, 19 bp, Mus musculus
  siRNA target sequence for 1500001L20Rik (NM_026893.2,532-550).
ggacccttaataaagtgtt

SEQ ID NO: 727482 - DNA, 19 bp, Mus musculus
  siRNA target sequence for 1500001L20Rik (NM_026893.2,553-571).
cttctcagtggttgaatca

SEQ ID NO: 727483 - DNA, 19 bp, Mus musculus
  siRNA target sequence for 1500001L20Rik (NM_026893.2,593-611).
gaaatgcaacacactcttt

SEQ ID NO: 727484 - DNA, 19 bp, Mus musculus
  siRNA target sequence for 1500001L20Rik (NM_026893.2,686-704).
gcagggctgtggtatccat

SEQ ID NO: 727485 - DNA, 19 bp, Mus musculus
  siRNA target sequence for 1500001L20Rik (NM_026893.2,697-715).
gtatccatgcaattgaact

SEQ ID NO: 727486 - DNA, 19 bp, Mus musculus
  siRNA target sequence for 1500001L20Rik (NM_026893.2,705-723).
gcaattgaactgaatcctt

SEQ ID NO: 727487 - DNA, 19 bp, Mus musculus
  siRNA target sequence for 1500001L20Rik (NM_026893.2,810-828).
gatgatggacacaaggatt

SEQ ID NO: 727488 - DNA, 19 bp, Mus musculus
  siRNA target sequence for 1500001L20Rik (NM_026893.2,821-839).
caaggattggatcttttct

SEQ ID NO: 727489 - DNA, 19 bp, Mus musculus
  siRNA target sequence for 1500001L20Rik (NM_026893.2,843-861).
gcgtggatcaacgatacta

SEQ ID NO: 727490 - DNA, 19 bp, Mus musculus
  siRNA target sequence for 1500001L20Rik (NM_026893.2,844-862).
cgtggatcaacgatactat

SEQ ID NO: 727491 - DNA, 19 bp, Mus musculus
  siRNA target sequence for 1500001L20Rik (NM_026893.2,931-949).
gtgatgcaagacataacgt

SEQ ID NO: 727492 - DNA, 19 bp, Mus musculus
  siRNA target sequence for 1500001L20Rik (NM_026893.2,979-997).
ctcacaaggccttaaagga

SEQ ID NO: 727493 - DNA, 19 bp, Mus musculus
  siRNA target sequence for 1500001L20Rik (NM_026893.2,1070-1088).
gttgggagcggtatcacta

SEQ ID NO: 727494 - DNA, 19 bp, Mus musculus
  siRNA target sequence for 1500001L20Rik (NM_026893.2,1073-1091).
gggagcggtatcactagat

SEQ ID NO: 727495 - DNA, 19 bp, Mus musculus
  siRNA target sequence for 1500001L20Rik (NM_026893.2,1170-1188).
gtgtgtctggcctatggta

SEQ ID NO: 727496 - DNA, 19 bp, Mus musculus
  siRNA target sequence for 1500001L20Rik (NM_026893.2,1287-1305).
cgaggcagtgggattcgat

SEQ ID NO: 727497 - DNA, 19 bp, Mus musculus
  siRNA target sequence for 1500001L20Rik (NM_026893.2,1306-1324).
cagtgagcttctatgaaca

SEQ ID NO: 727498 - DNA, 19 bp, Mus musculus
  siRNA target sequence for 1500001L20Rik (NM_026893.2,1316-1334).
ctatgaacacattatcact

SEQ ID NO: 727499 - DNA, 19 bp, Mus musculus
  siRNA target sequence for 1500001L20Rik (NM_026893.2,1349-1367).
gggctccctgctgttctat

SEQ ID NO: 727500 - DNA, 19 bp, Mus musculus
  siRNA target sequence for 1500001L20Rik (NM_026893.2,1397-1415).
gaggctctcagcttgttat

SEQ ID NO: 727501 - DNA, 19 bp, Mus musculus
  siRNA target sequence for 1500001L20Rik (NM_026893.2,1437-1455).
ggggagaatctgaaactaa

SEQ ID NO: 727502 - DNA, 19 bp, Mus musculus
  siRNA target sequence for 1500001L20Rik (NM_026893.2,1442-1460).
gaatctgaaactaactact

SEQ ID NO: 727503 - DNA, 19 bp, Mus musculus
  siRNA target sequence for 1500001L20Rik (NM_026893.2,1462-1480).
gcaggggctggctgaatca

SEQ ID NO: 727504 - DNA, 19 bp, Mus musculus
  siRNA target sequence for 1500001L20Rik (NM_026893.2,1466-1484).
gggctggctgaatcatgat

SEQ ID NO: 727505 - DNA, 19 bp, Mus musculus
  siRNA target sequence for 1500001L20Rik (NM_026893.2,1482-1500).
gatgaaacctggaggaatt

SEQ ID NO: 727506 - DNA, 19 bp, Mus musculus
  siRNA target sequence for 1500001L20Rik (NM_026893.2,1550-1568).
cgactcgtccggaacgaaa

SEQ ID NO: 727507 - DNA, 19 bp, Mus musculus
  siRNA target sequence for 1500001L20Rik (NM_026893.2,1555-1573).
cgtccggaacgaaactctt

SEQ ID NO: 727508 - DNA, 19 bp, Mus musculus
  siRNA target sequence for 1500001L20Rik (NM_026893.2,1556-1574).
gtccggaacgaaactcttt

SEQ ID NO: 727509 - DNA, 19 bp, Mus musculus
  siRNA target sequence for 1500001L20Rik (NM_026893.2,1558-1576).
ccggaacgaaactctttgt

SEQ ID NO: 727510 - DNA, 19 bp, Mus musculus
  siRNA target sequence for 1500001L20Rik (NM_026893.2,1597-1615).
ctgggctccacggaaacta

SEQ ID NO: 727511 - DNA, 19 bp, Mus musculus
  siRNA target sequence for 1500015J03Rik (NM_026896.1,199-217).
caaccgggacctcaatgaa

SEQ ID NO: 727512 - DNA, 19 bp, Mus musculus
  siRNA target sequence for 1500015J03Rik (NM_026896.1,259-277).
ccaccctcttcataacagt

SEQ ID NO: 727513 - DNA, 19 bp, Mus musculus
  siRNA target sequence for 1500015J03Rik (NM_026896.1,293-311).
gatcctgtgcaggacaaaa

SEQ ID NO: 727514 - DNA, 19 bp, Mus musculus
  siRNA target sequence for 1500015J03Rik (NM_026896.1,328-346).
gcttctgcaagcatacaaa

SEQ ID NO: 727515 - DNA, 19 bp, Mus musculus
  siRNA target sequence for 1500015J03Rik (NM_026896.1,329-347).
cttctgcaagcatacaaat

SEQ ID NO: 727516 - DNA, 19 bp, Mus musculus
  siRNA target sequence for 1500015J03Rik (NM_026896.1,406-424).
cttgaagcgctctgcaaat

SEQ ID NO: 727517 - DNA, 19 bp, Mus musculus
  siRNA target sequence for 1500015J03Rik (NM_026896.1,511-529).
ccgcattgacagaatgttt

SEQ ID NO: 727518 - DNA, 19 bp, Mus musculus
  siRNA target sequence for 1500015J03Rik (NM_026896.1,645-663).
cgattgtgaaggggtataa

SEQ ID NO: 727519 - DNA, 19 bp, Mus musculus
  siRNA target sequence for 1500015J03Rik (NM_026896.1,646-664).
gattgtgaaggggtataat

SEQ ID NO: 727520 - DNA, 19 bp, Mus musculus
  siRNA target sequence for 1500015J03Rik (NM_026896.1,650-668).
gtgaaggggtataatgaga

SEQ ID NO: 727521 - DNA, 19 bp, Mus musculus
  siRNA target sequence for 1500015J03Rik (NM_026896.1,686-704).
ggaaagctggacatatggt

SEQ ID NO: 727522 - DNA, 19 bp, Mus musculus
  siRNA target sequence for 1500015J03Rik (NM_026896.1,755-773).
gccctgcttcactatcagt

SEQ ID NO: 727523 - DNA, 19 bp, Mus musculus
  siRNA target sequence for 1500015J03Rik (NM_026896.1,756-774).
ccctgcttcactatcagtt

SEQ ID NO: 727524 - DNA, 19 bp, Mus musculus
  siRNA target sequence for 1500015J03Rik (NM_026896.1,757-775).
cctgcttcactatcagtta

SEQ ID NO: 727525 - DNA, 19 bp, Mus musculus
  siRNA target sequence for 1500015J03Rik (NM_026896.1,814-832).
ctggctgagaagctacatt

SEQ ID NO: 727526 - DNA, 19 bp, Mus musculus
  siRNA target sequence for 1500015J03Rik (NM_026896.1,816-834).
ggctgagaagctacattaa

SEQ ID NO: 727527 - DNA, 19 bp, Mus musculus
  siRNA target sequence for 1500015J03Rik (NM_026896.1,856-874).
gcgctgtgggaagtttcta

SEQ ID NO: 727528 - DNA, 19 bp, Mus musculus
  siRNA target sequence for 1500015J03Rik (NM_026896.1,859-877).
ctgtgggaagtttctacaa

SEQ ID NO: 727529 - DNA, 19 bp, Mus musculus
  siRNA target sequence for 2810014I23Rik (NM_026897.1,246-264).
cggtacttgaagacaacta

SEQ ID NO: 727530 - DNA, 19 bp, Mus musculus
  siRNA target sequence for 2810014I23Rik (NM_026897.1,291-309).
cgcgggaggccgtagctat

SEQ ID NO: 727531 - DNA, 19 bp, Mus musculus
  siRNA target sequence for 2810014I23Rik (NM_026897.1,294-312).
gggaggccgtagctataga

SEQ ID NO: 727532 - DNA, 19 bp, Mus musculus
  siRNA target sequence for 2810014I23Rik (NM_026897.1,397-415).
ggaccacacacgtggaaat

SEQ ID NO: 727533 - DNA, 19 bp, Mus musculus
  siRNA target sequence for 2810014I23Rik (NM_026897.1,748-766).
gcatacgctgagcaatctt

SEQ ID NO: 727534 - DNA, 19 bp, Mus musculus
  siRNA target sequence for 2810014I23Rik (NM_026897.1,835-853).
ggatgacgaggatattcct

SEQ ID NO: 727535 - DNA, 19 bp, Mus musculus
  siRNA target sequence for 2810014I23Rik (NM_026897.1,836-854).
gatgacgaggatattccta

SEQ ID NO: 727536 - DNA, 19 bp, Mus musculus
  siRNA target sequence for 2810014I23Rik (NM_026897.1,872-890).
ggcgaggagctcatgtaca

SEQ ID NO: 727537 - DNA, 19 bp, Mus musculus
  siRNA target sequence for 1500011L16Rik (NM_026899.1,336-354).
cagcaagcgaggtttcagt

SEQ ID NO: 727538 - DNA, 19 bp, Mus musculus
  siRNA target sequence for 1500011L16Rik (NM_026899.1,368-386).
gaacaggaactcatgtgaa

SEQ ID NO: 727539 - DNA, 19 bp, Mus musculus
  siRNA target sequence for 1500011L16Rik (NM_026899.1,403-421).
cctgacaagcccaatgttt

SEQ ID NO: 727540 - DNA, 19 bp, Mus musculus
  siRNA target sequence for 1500011L16Rik (NM_026899.1,474-492).
caaagaactctatacacaa

SEQ ID NO: 727541 - DNA, 19 bp, Mus musculus
  siRNA target sequence for 1500011L16Rik (NM_026899.1,560-578).
gcacggacctgtttgactt

SEQ ID NO: 727542 - DNA, 19 bp, Mus musculus
  siRNA target sequence for 1500011L16Rik (NM_026899.1,563-581).
cggacctgtttgacttgat

SEQ ID NO: 727543 - DNA, 19 bp, Mus musculus
  siRNA target sequence for 1500011L16Rik (NM_026899.1,576-594).
cttgatcctcacttgtgaa

SEQ ID NO: 727544 - DNA, 19 bp, Mus musculus
  siRNA target sequence for 1500011L16Rik (NM_026899.1,704-722).
ctctgggagcattccttat

SEQ ID NO: 727545 - DNA, 19 bp, Mus musculus
  siRNA target sequence for 1500011L16Rik (NM_026899.1,706-724).
ctgggagcattccttatct

SEQ ID NO: 727546 - DNA, 19 bp, Mus musculus
  siRNA target sequence for 1500011L16Rik (NM_026899.1,725-743).
gcgagctctgccagtgtat

SEQ ID NO: 727547 - DNA, 19 bp, Mus musculus
  siRNA target sequence for 1500011L16Rik (NM_026899.1,823-841).
catactgtctgcttctact

SEQ ID NO: 727548 - DNA, 19 bp, Mus musculus
  siRNA target sequence for 1500026N15Rik (NM_026904.1,201-219).
ggtttggagtggatcaatt

SEQ ID NO: 727549 - DNA, 19 bp, Mus musculus
  siRNA target sequence for 1500026N15Rik (NM_026904.1,202-220).
gtttggagtggatcaatta

SEQ ID NO: 727550 - DNA, 19 bp, Mus musculus
  siRNA target sequence for 1500026N15Rik (NM_026904.1,221-239).
cgggatgacaatctagaaa

SEQ ID NO: 727551 - DNA, 19 bp, Mus musculus
  siRNA target sequence for 1500026N15Rik (NM_026904.1,261-279).
ctcagcctcacttagtgaa

SEQ ID NO: 727552 - DNA, 19 bp, Mus musculus
  siRNA target sequence for 1500026N15Rik (NM_026904.1,269-287).
cacttagtgaacatccaat

SEQ ID NO: 727553 - DNA, 19 bp, Mus musculus
  siRNA target sequence for 1500026N15Rik (NM_026904.1,348-366).
gctacactccaagcaaaat

SEQ ID NO: 727554 - DNA, 19 bp, Mus musculus
  siRNA target sequence for 1500026N15Rik (NM_026904.1,352-370).
cactccaagcaaaatctca

SEQ ID NO: 727555 - DNA, 19 bp, Mus musculus
  siRNA target sequence for 1500026N15Rik (NM_026904.1,371-389).
gtcagagtaggaaataatt

SEQ ID NO: 727556 - DNA, 19 bp, Mus musculus
  siRNA target sequence for 1500026N15Rik (NM_026904.1,404-422).
gaaatccggcaacttgaat

SEQ ID NO: 727557 - DNA, 19 bp, Mus musculus
  siRNA target sequence for 1500026N15Rik (NM_026904.1,448-466).
cgttcctttaactgacaat

SEQ ID NO: 727558 - DNA, 19 bp, Mus musculus
  siRNA target sequence for 1500026N15Rik (NM_026904.1,452-470).
cctttaactgacaatcata

SEQ ID NO: 727559 - DNA, 19 bp, Mus musculus
  siRNA target sequence for 1500026N15Rik (NM_026904.1,476-494).
ccaactcgcacattcatga

SEQ ID NO: 727560 - DNA, 19 bp, Mus musculus
  siRNA target sequence for 1500026N15Rik (NM_026904.1,477-495).
caactcgcacattcatgat

SEQ ID NO: 727561 - DNA, 19 bp, Mus musculus
  siRNA target sequence for 1500026N15Rik (NM_026904.1,480-498).
ctcgcacattcatgataca

SEQ ID NO: 727562 - DNA, 19 bp, Mus musculus
  siRNA target sequence for 1500026N15Rik (NM_026904.1,512-530).
gccaatcatcagaatggaa

SEQ ID NO: 727563 - DNA, 19 bp, Mus musculus
  siRNA target sequence for 1500026N15Rik (NM_026904.1,533-551).
gatacccacatgagacaaa

SEQ ID NO: 727564 - DNA, 19 bp, Mus musculus
  siRNA target sequence for 1500026N15Rik (NM_026904.1,537-555).
cccacatgagacaaattaa

SEQ ID NO: 727565 - DNA, 19 bp, Mus musculus
  siRNA target sequence for 1500026N15Rik (NM_026904.1,619-637).
catgatgtatcgttcaata

SEQ ID NO: 727566 - DNA, 19 bp, Mus musculus
  siRNA target sequence for 1500031K13Rik (NM_026908.2,579-597).
cccagatattcaacaacat

SEQ ID NO: 727567 - DNA, 19 bp, Mus musculus
  siRNA target sequence for 1500031K13Rik (NM_026908.2,634-652).
cgagtacatcagttctcat

SEQ ID NO: 727568 - DNA, 19 bp, Mus musculus
  siRNA target sequence for 1500031K13Rik (NM_026908.2,707-725).
cgctgtgggattatgctaa

SEQ ID NO: 727569 - DNA, 19 bp, Mus musculus
  siRNA target sequence for 1500031K13Rik (NM_026908.2,721-739).
gctaagagagtgtattcga

SEQ ID NO: 727570 - DNA, 19 bp, Mus musculus
  siRNA target sequence for 1500031K13Rik (NM_026908.2,783-801).
gagatttcttcaagtatgt

SEQ ID NO: 727571 - DNA, 19 bp, Mus musculus
  siRNA target sequence for 1500031K13Rik (NM_026908.2,814-832).
ctttgatatcgcttcagat

SEQ ID NO: 727572 - DNA, 19 bp, Mus musculus
  siRNA target sequence for 1500031K13Rik (NM_026908.2,830-848).
gatgccttcgctactttta

SEQ ID NO: 727573 - DNA, 19 bp, Mus musculus
  siRNA target sequence for 1500031K13Rik (NM_026908.2,834-852).
ccttcgctacttttaagga

SEQ ID NO: 727574 - DNA, 19 bp, Mus musculus
  siRNA target sequence for 1500031K13Rik (NM_026908.2,851-869).
gatttgttaaccagacata

SEQ ID NO: 727575 - DNA, 19 bp, Mus musculus
  siRNA target sequence for 1500031K13Rik (NM_026908.2,856-874).
gttaaccagacataaagta

SEQ ID NO: 727576 - DNA, 19 bp, Mus musculus
  siRNA target sequence for 1500031K13Rik (NM_026908.2,861-879).
ccagacataaagtattggt

SEQ ID NO: 727577 - DNA, 19 bp, Mus musculus
  siRNA target sequence for 1500031K13Rik (NM_026908.2,877-895).
ggtagcagacttcttagaa

SEQ ID NO: 727578 - DNA, 19 bp, Mus musculus
  siRNA target sequence for 1500031K13Rik (NM_026908.2,907-925).
cactatttttgaagactat

SEQ ID NO: 727579 - DNA, 19 bp, Mus musculus
  siRNA target sequence for 1500031K13Rik (NM_026908.2,934-952).
gctgcaatctgagaactat

SEQ ID NO: 727580 - DNA, 19 bp, Mus musculus
  siRNA target sequence for 1500031K13Rik (NM_026908.2,942-960).
ctgagaactatgtgacaaa

SEQ ID NO: 727581 - DNA, 19 bp, Mus musculus
  siRNA target sequence for 1500031K13Rik (NM_026908.2,955-973).
gacaaagagacaatcttta

SEQ ID NO: 727582 - DNA, 19 bp, Mus musculus
  siRNA target sequence for 1500031K13Rik (NM_026908.2,995-1013).
ctggaccgccacaatttca

SEQ ID NO: 727583 - DNA, 19 bp, Mus musculus
  siRNA target sequence for 1500031K13Rik (NM_026908.2,1001-1019).
cgccacaatttcaccatta

SEQ ID NO: 727584 - DNA, 19 bp, Mus musculus
  siRNA target sequence for 1500031K13Rik (NM_026908.2,1002-1020).
gccacaatttcaccattat

SEQ ID NO: 727585 - DNA, 19 bp, Mus musculus
  siRNA target sequence for 1500031K13Rik (NM_026908.2,1066-1084).
cctgcttcgagacaaaagt

SEQ ID NO: 727586 - DNA, 19 bp, Mus musculus
  siRNA target sequence for 1500031K13Rik (NM_026908.2,1100-1118).
gaagccttccatgtcttta

SEQ ID NO: 727587 - DNA, 19 bp, Mus musculus
  siRNA target sequence for 1500031K13Rik (NM_026908.2,1104-1122).
ccttccatgtctttaaggt

SEQ ID NO: 727588 - DNA, 19 bp, Mus musculus
  siRNA target sequence for 1500031K13Rik (NM_026908.2,1151-1169).
cctatcgtggagattctgt

SEQ ID NO: 727589 - DNA, 19 bp, Mus musculus
  siRNA target sequence for 1500031K13Rik (NM_026908.2,1156-1174).
cgtggagattctgttaaaa

SEQ ID NO: 727590 - DNA, 19 bp, Mus musculus
  siRNA target sequence for 1500031K13Rik (NM_026908.2,1178-1196).
cagcccaaactcattgagt

SEQ ID NO: 727591 - DNA, 19 bp, Mus musculus
  siRNA target sequence for 1500031K13Rik (NM_026908.2,1180-1198).
gcccaaactcattgagttt

SEQ ID NO: 727592 - DNA, 19 bp, Mus musculus
  siRNA target sequence for 1500031K13Rik (NM_026908.2,1247-1265).
gagaagaactacctgatta

SEQ ID NO: 727593 - DNA, 19 bp, Mus musculus
  siRNA target sequence for 1500031K13Rik (NM_026908.2,1255-1273).
ctacctgattaaacagatt

SEQ ID NO: 727594 - DNA, 19 bp, Mus musculus
  siRNA target sequence for 1810010E01Rik (NM_026916.1,251-269).
gcaaggtggcgcagatact

SEQ ID NO: 727595 - DNA, 19 bp, Mus musculus
  siRNA target sequence for 1810010M01Rik (NM_026918.1,42-60).
cggcctctgctaattccat

SEQ ID NO: 727596 - DNA, 19 bp, Mus musculus
  siRNA target sequence for 1810010M01Rik (NM_026918.1,161-179).
cgtatccgggtcaacagat

SEQ ID NO: 727597 - DNA, 19 bp, Mus musculus
  siRNA target sequence for 1810010M01Rik (NM_026918.1,162-180).
gtatccgggtcaacagata

SEQ ID NO: 727598 - DNA, 19 bp, Mus musculus
  siRNA target sequence for 1810010M01Rik (NM_026918.1,211-229).
cacagtgtggagtgactat

SEQ ID NO: 727599 - DNA, 19 bp, Mus musculus
  siRNA target sequence for 1810010M01Rik (NM_026918.1,213-231).
cagtgtggagtgactatgt

SEQ ID NO: 727600 - DNA, 19 bp, Mus musculus
  siRNA target sequence for 1810010M01Rik (NM_026918.1,293-311).
gtgtctggcaagtacaaat

SEQ ID NO: 727601 - DNA, 19 bp, Mus musculus
  siRNA target sequence for 1810010M01Rik (NM_026918.1,295-313).
gtctggcaagtacaaatca

SEQ ID NO: 727602 - DNA, 19 bp, Mus musculus
  siRNA target sequence for 1810010M01Rik (NM_026918.1,297-315).
ctggcaagtacaaatcata

SEQ ID NO: 727603 - DNA, 19 bp, Mus musculus
  siRNA target sequence for 1810010M01Rik (NM_026918.1,349-367).
ccgctacctgccttttgga

SEQ ID NO: 727604 - DNA, 19 bp, Mus musculus
  siRNA target sequence for 1810010M01Rik (NM_026918.1,350-368).
cgctacctgccttttggaa

SEQ ID NO: 727605 - DNA, 19 bp, Mus musculus
  siRNA target sequence for 1810010M01Rik (NM_026918.1,352-370).
ctacctgccttttggaaaa

SEQ ID NO: 727606 - DNA, 19 bp, Mus musculus
  siRNA target sequence for 1810010M01Rik (NM_026918.1,444-462).
gctctgccatagattctat

SEQ ID NO: 727607 - DNA, 19 bp, Mus musculus
  siRNA target sequence for 1810010M01Rik (NM_026918.1,445-463).
ctctgccatagattctatt

SEQ ID NO: 727608 - DNA, 19 bp, Mus musculus
  siRNA target sequence for 1810010M01Rik (NM_026918.1,465-483).
gcctgcactgggataccta

SEQ ID NO: 727609 - DNA, 19 bp, Mus musculus
  siRNA target sequence for 1810007A24Rik (NM_026925.2,72-90).
cggctgcttcagtgatgat

SEQ ID NO: 727610 - DNA, 19 bp, Mus musculus
  siRNA target sequence for 1810007A24Rik (NM_026925.2,198-216).
ccagctaattacttcagat

SEQ ID NO: 727611 - DNA, 19 bp, Mus musculus
  siRNA target sequence for 1810007A24Rik (NM_026925.2,237-255).
caatttccgaacaaacaga

SEQ ID NO: 727612 - DNA, 19 bp, Mus musculus
  siRNA target sequence for 1810007A24Rik (NM_026925.2,252-270).
cagaaaaacccgtatcatt

SEQ ID NO: 727613 - DNA, 19 bp, Mus musculus
  siRNA target sequence for 1810007A24Rik (NM_026925.2,254-272).
gaaaaacccgtatcattat

SEQ ID NO: 727614 - DNA, 19 bp, Mus musculus
  siRNA target sequence for 1810007A24Rik (NM_026925.2,375-393).
cggttcccgaacgacatat

SEQ ID NO: 727615 - DNA, 19 bp, Mus musculus
  siRNA target sequence for 1810007A24Rik (NM_026925.2,376-394).
ggttcccgaacgacatata

SEQ ID NO: 727616 - DNA, 19 bp, Mus musculus
  siRNA target sequence for 1810007A24Rik (NM_026925.2,435-453).
ggcattgttggttaacgtt

SEQ ID NO: 727617 - DNA, 19 bp, Mus musculus
  siRNA target sequence for 1810007A24Rik (NM_026925.2,468-486).
gggatactcacttaacaat

SEQ ID NO: 727618 - DNA, 19 bp, Mus musculus
  siRNA target sequence for 1810007A24Rik (NM_026925.2,470-488).
gatactcacttaacaatgt

SEQ ID NO: 727619 - DNA, 19 bp, Mus musculus
  siRNA target sequence for 1810007A24Rik (NM_026925.2,627-645).
ccccaccgatgctcagttt

SEQ ID NO: 727620 - DNA, 19 bp, Mus musculus
  siRNA target sequence for 1810007A24Rik (NM_026925.2,681-699).
ccccaacttaggatttgga

SEQ ID NO: 727621 - DNA, 19 bp, Mus musculus
  siRNA target sequence for 1810007A24Rik (NM_026925.2,682-700).
cccaacttaggatttggaa

SEQ ID NO: 727622 - DNA, 19 bp, Mus musculus
  siRNA target sequence for 1810007A24Rik (NM_026925.2,683-701).
ccaacttaggatttggaat

SEQ ID NO: 727623 - DNA, 19 bp, Mus musculus
  siRNA target sequence for 1810007A24Rik (NM_026925.2,705-723).
ccagactgtgggtcactta

SEQ ID NO: 727624 - DNA, 19 bp, Mus musculus
  siRNA target sequence for 1810007A24Rik (NM_026925.2,714-732).
gggtcacttagatttcttt

SEQ ID NO: 727625 - DNA, 19 bp, Mus musculus
  siRNA target sequence for 1810007A24Rik (NM_026925.2,733-751).
ccaaacggaggaatcgaaa

SEQ ID NO: 727626 - DNA, 19 bp, Mus musculus
  siRNA target sequence for 1810007A24Rik (NM_026925.2,734-752).
caaacggaggaatcgaaat

SEQ ID NO: 727627 - DNA, 19 bp, Mus musculus
  siRNA target sequence for 1810007A24Rik (NM_026925.2,753-771).
gccaggatgccagaagaat

SEQ ID NO: 727628 - DNA, 19 bp, Mus musculus
  siRNA target sequence for 1810007A24Rik (NM_026925.2,829-847).
gcctgtaaccacttaagaa

SEQ ID NO: 727629 - DNA, 19 bp, Mus musculus
  siRNA target sequence for 1810007A24Rik (NM_026925.2,919-937).
cttttcacggcaaataagt

SEQ ID NO: 727630 - DNA, 19 bp, Mus musculus
  siRNA target sequence for 1810007A24Rik (NM_026925.2,1007-1025).
gcagactctaccagacatt

SEQ ID NO: 727631 - DNA, 19 bp, Mus musculus
  siRNA target sequence for 1810007A24Rik (NM_026925.2,1030-1048).
ctcaacaccggtgataaga

SEQ ID NO: 727632 - DNA, 19 bp, Mus musculus
  siRNA target sequence for 1810007A24Rik (NM_026925.2,1187-1205).
gtacttctcacgtcaatga

SEQ ID NO: 727633 - DNA, 19 bp, Mus musculus
  siRNA target sequence for 1810007A24Rik (NM_026925.2,1190-1208).
cttctcacgtcaatgaatt

SEQ ID NO: 727634 - DNA, 19 bp, Mus musculus
  siRNA target sequence for 1810007A24Rik (NM_026925.2,1193-1211).
ctcacgtcaatgaattcga

SEQ ID NO: 727635 - DNA, 19 bp, Mus musculus
  siRNA target sequence for 1810007A24Rik (NM_026925.2,1228-1246).
ggagatttgcagaaggtta

SEQ ID NO: 727636 - DNA, 19 bp, Mus musculus
  siRNA target sequence for 1810007A24Rik (NM_026925.2,1231-1249).
gatttgcagaaggttaaat

SEQ ID NO: 727637 - DNA, 19 bp, Mus musculus
  siRNA target sequence for 1810007A24Rik (NM_026925.2,1236-1254).
gcagaaggttaaatttatt

SEQ ID NO: 727638 - DNA, 19 bp, Mus musculus
  siRNA target sequence for 1810008K03Rik (NM_026929.2,282-300).
gccggactttgcctatagt

SEQ ID NO: 727639 - DNA, 19 bp, Mus musculus
  siRNA target sequence for 1810008K03Rik (NM_026929.2,346-364).
cagggagacaccttccata

SEQ ID NO: 727640 - DNA, 19 bp, Mus musculus
  siRNA target sequence for 1810008K03Rik (NM_026929.2,518-536).
ctaaggaagtcacctttta

SEQ ID NO: 727641 - DNA, 19 bp, Mus musculus
  siRNA target sequence for 1810008K03Rik (NM_026929.2,665-683).
ctggtcacaaccttgagta

SEQ ID NO: 727642 - DNA, 19 bp, Mus musculus
  siRNA target sequence for 1810008K03Rik (NM_026929.2,668-686).
gtcacaaccttgagtactt

SEQ ID NO: 727643 - DNA, 19 bp, Mus musculus
  siRNA target sequence for 1810008K03Rik (NM_026929.2,670-688).
cacaaccttgagtacttat

SEQ ID NO: 727644 - DNA, 19 bp, Mus musculus
  siRNA target sequence for 1810008K03Rik (NM_026929.2,774-792).
gctaccctgctcttaccta

SEQ ID NO: 727645 - DNA, 19 bp, Mus musculus
  siRNA target sequence for 1810011O10Rik (NM_026931.1,135-153).
cacagccgctcgcaagaaa

SEQ ID NO: 727646 - DNA, 19 bp, Mus musculus
  siRNA target sequence for 1810011O10Rik (NM_026931.1,314-332).
caaaagacaagcttcttca

SEQ ID NO: 727647 - DNA, 19 bp, Mus musculus
  siRNA target sequence for 1810011O10Rik (NM_026931.1,337-355).
ctcaaactgcggaaatatt

SEQ ID NO: 727648 - DNA, 19 bp, Mus musculus
  siRNA target sequence for 1810015M01Rik (NM_026933.1,132-150).
cgtgcaccgacctcttcaa

SEQ ID NO: 727649 - DNA, 19 bp, Mus musculus
  siRNA target sequence for 1810012H02Rik (NM_026934.2,416-434).
ctaaaggagataaatgtaa

SEQ ID NO: 727650 - DNA, 19 bp, Mus musculus
  siRNA target sequence for 1810012H02Rik (NM_026934.2,1057-1075).
ggtgtaaatgacatagata

SEQ ID NO: 727651 - DNA, 19 bp, Mus musculus
  siRNA target sequence for 1810012H02Rik (NM_026934.2,1060-1078).
gtaaatgacatagatataa

SEQ ID NO: 727652 - DNA, 19 bp, Mus musculus
  siRNA target sequence for 1810012H02Rik (NM_026934.2,1080-1098).
cctgtacgtcccaagagat

SEQ ID NO: 727653 - DNA, 19 bp, Mus musculus
  siRNA target sequence for 1810012H02Rik (NM_026934.2,1083-1101).
gtacgtcccaagagatgta

SEQ ID NO: 727654 - DNA, 19 bp, Mus musculus
  siRNA target sequence for 1810012H02Rik (NM_026934.2,1086-1104).
cgtcccaagagatgtagaa

SEQ ID NO: 727655 - DNA, 19 bp, Mus musculus
  siRNA target sequence for 1810012H02Rik (NM_026934.2,1123-1141).
gccagtgttgaaagattca

SEQ ID NO: 727656 - DNA, 19 bp, Mus musculus
  siRNA target sequence for 1810012H02Rik (NM_026934.2,1164-1182).
cgagaacaaattaagtgaa

SEQ ID NO: 727657 - DNA, 19 bp, Mus musculus
  siRNA target sequence for 1810012H02Rik (NM_026934.2,1191-1209).
gggtctggctgaaaatggt

SEQ ID NO: 727658 - DNA, 19 bp, Mus musculus
  siRNA target sequence for 1810012H02Rik (NM_026934.2,1332-1350).
gaacactcttgacttagaa

SEQ ID NO: 727659 - DNA, 19 bp, Mus musculus
  siRNA target sequence for Cnot8 (NM_026949.2,154-172).
cctgcggcacttgtagaaa

SEQ ID NO: 727660 - DNA, 19 bp, Mus musculus
  siRNA target sequence for Cnot8 (NM_026949.2,155-173).
ctgcggcacttgtagaaaa

SEQ ID NO: 727661 - DNA, 19 bp, Mus musculus
  siRNA target sequence for Cnot8 (NM_026949.2,192-210).
ggtgtgggccagcaatctt

SEQ ID NO: 727662 - DNA, 19 bp, Mus musculus
  siRNA target sequence for Cnot8 (NM_026949.2,222-240).
gcggaagatccgtgagatt

SEQ ID NO: 727663 - DNA, 19 bp, Mus musculus
  siRNA target sequence for Cnot8 (NM_026949.2,224-242).
ggaagatccgtgagattgt

SEQ ID NO: 727664 - DNA, 19 bp, Mus musculus
  siRNA target sequence for Cnot8 (NM_026949.2,276-294).
gttcccaggtgttgttgta

SEQ ID NO: 727665 - DNA, 19 bp, Mus musculus
  siRNA target sequence for Pex11c (NM_026951.1,82-100).
cggacactggggtattgct

SEQ ID NO: 727666 - DNA, 19 bp, Mus musculus
  siRNA target sequence for Pex11c (NM_026951.1,115-133).
ggggtcctagtggaacaat

SEQ ID NO: 727667 - DNA, 19 bp, Mus musculus
  siRNA target sequence for Pex11c (NM_026951.1,171-189).
ggtgtcagcccagttcaat

SEQ ID NO: 727668 - DNA, 19 bp, Mus musculus
  siRNA target sequence for Pex11c (NM_026951.1,200-218).
ctgtcttgagactctttga

SEQ ID NO: 727669 - DNA, 19 bp, Mus musculus
  siRNA target sequence for Pex11c (NM_026951.1,312-330).
gactgaccaactgtactat

SEQ ID NO: 727670 - DNA, 19 bp, Mus musculus
  siRNA target sequence for Pex11c (NM_026951.1,458-476).
caatgctgaagcttagaca

SEQ ID NO: 727671 - DNA, 19 bp, Mus musculus
  siRNA target sequence for Pex11c (NM_026951.1,534-552).
ggccatggaggcaaggata

SEQ ID NO: 727672 - DNA, 19 bp, Mus musculus
  siRNA target sequence for Pex11c (NM_026951.1,535-553).
gccatggaggcaaggatat

SEQ ID NO: 727673 - DNA, 19 bp, Mus musculus
  siRNA target sequence for Pex11c (NM_026951.1,549-567).
gatatgctcagaggtttta

SEQ ID NO: 727674 - DNA, 19 bp, Mus musculus
  siRNA target sequence for Stx18 (NM_026959.1,144-162).
cagtgaagacgcggaataa

SEQ ID NO: 727675 - DNA, 19 bp, Mus musculus
  siRNA target sequence for Stx18 (NM_026959.1,258-276).
cccgtgaagtgatttctca

SEQ ID NO: 727676 - DNA, 19 bp, Mus musculus
  siRNA target sequence for Stx18 (NM_026959.1,305-323).
gagcacaggaaggagtata

SEQ ID NO: 727677 - DNA, 19 bp, Mus musculus
  siRNA target sequence for Stx18 (NM_026959.1,307-325).
gcacaggaaggagtatatt

SEQ ID NO: 727678 - DNA, 19 bp, Mus musculus
  siRNA target sequence for Stx18 (NM_026959.1,310-328).
caggaaggagtatattaat

SEQ ID NO: 727679 - DNA, 19 bp, Mus musculus
  siRNA target sequence for Stx18 (NM_026959.1,492-510).
ggactgccgttttggattt

SEQ ID NO: 727680 - DNA, 19 bp, Mus musculus
  siRNA target sequence for Stx18 (NM_026959.1,495-513).
ctgccgttttggatttcgt

SEQ ID NO: 727681 - DNA, 19 bp, Mus musculus
  siRNA target sequence for Stx18 (NM_026959.1,506-524).
gatttcgttgacgattact

SEQ ID NO: 727682 - DNA, 19 bp, Mus musculus
  siRNA target sequence for Stx18 (NM_026959.1,511-529).
cgttgacgattacttaaaa

SEQ ID NO: 727683 - DNA, 19 bp, Mus musculus
  siRNA target sequence for Stx18 (NM_026959.1,512-530).
gttgacgattacttaaaaa

SEQ ID NO: 727684 - DNA, 19 bp, Mus musculus
  siRNA target sequence for Stx18 (NM_026959.1,541-559).
gctttactctgaacaaaga

SEQ ID NO: 727685 - DNA, 19 bp, Mus musculus
  siRNA target sequence for Stx18 (NM_026959.1,575-593).
cgcgtggtggacaagaaaa

SEQ ID NO: 727686 - DNA, 19 bp, Mus musculus
  siRNA target sequence for Stx18 (NM_026959.1,584-602).
gacaagaaaagactatcta

SEQ ID NO: 727687 - DNA, 19 bp, Mus musculus
  siRNA target sequence for Stx18 (NM_026959.1,780-798).
ctccagaagagatacagat

SEQ ID NO: 727688 - DNA, 19 bp, Mus musculus
  siRNA target sequence for Stx18 (NM_026959.1,790-808).
gatacagatgtttgaacaa

SEQ ID NO: 727689 - DNA, 19 bp, Mus musculus
  siRNA target sequence for Stx18 (NM_026959.1,850-868).
cgaagtgaggcaaatcgaa

SEQ ID NO: 727690 - DNA, 19 bp, Mus musculus
  siRNA target sequence for Stx18 (NM_026959.1,869-887).
gggaaagtcgttgaaattt

SEQ ID NO: 727691 - DNA, 19 bp, Mus musculus
  siRNA target sequence for Stx18 (NM_026959.1,901-919).
gatattcaccgaaaaggtt

SEQ ID NO: 727692 - DNA, 19 bp, Mus musculus
  siRNA target sequence for Stx18 (NM_026959.1,907-925).
caccgaaaaggttttgcaa

SEQ ID NO: 727693 - DNA, 19 bp, Mus musculus
  siRNA target sequence for Stx18 (NM_026959.1,959-977).
gtcgtgggggcaactgaaa

SEQ ID NO: 727694 - DNA, 19 bp, Mus musculus
  siRNA target sequence for Stx18 (NM_026959.1,961-979).
cgtgggggcaactgaaaat

SEQ ID NO: 727695 - DNA, 19 bp, Mus musculus
  siRNA target sequence for Stx18 (NM_026959.1,962-980).
gtgggggcaactgaaaata

SEQ ID NO: 727696 - DNA, 19 bp, Mus musculus
  siRNA target sequence for Stx18 (NM_026959.1,964-982).
gggggcaactgaaaatatt

SEQ ID NO: 727697 - DNA, 19 bp, Mus musculus
  siRNA target sequence for Stx18 (NM_026959.1,965-983).
ggggcaactgaaaatatta

SEQ ID NO: 727698 - DNA, 19 bp, Mus musculus
  siRNA target sequence for Stx18 (NM_026959.1,966-984).
gggcaactgaaaatattaa

SEQ ID NO: 727699 - DNA, 19 bp, Mus musculus
  siRNA target sequence for 1810036L03Rik (NM_026960.1,153-171).
catcggcctttgagaaagt

SEQ ID NO: 727700 - DNA, 19 bp, Mus musculus
  siRNA target sequence for 1810036L03Rik (NM_026960.1,298-316).
ctggaaaccccgttattca

SEQ ID NO: 727701 - DNA, 19 bp, Mus musculus
  siRNA target sequence for 1810036L03Rik (NM_026960.1,301-319).
gaaaccccgttattcatgt

SEQ ID NO: 727702 - DNA, 19 bp, Mus musculus
  siRNA target sequence for 1810036L03Rik (NM_026960.1,315-333).
catgtgtcaacctgtcaat

SEQ ID NO: 727703 - DNA, 19 bp, Mus musculus
  siRNA target sequence for 1810036L03Rik (NM_026960.1,318-336).
gtgtcaacctgtcaatcaa

SEQ ID NO: 727704 - DNA, 19 bp, Mus musculus
  siRNA target sequence for 1810036L03Rik (NM_026960.1,686-704).
gagggctcaggccagttta

SEQ ID NO: 727705 - DNA, 19 bp, Mus musculus
  siRNA target sequence for 1810036L03Rik (NM_026960.1,746-764).
caccaaagccggaagaaga

SEQ ID NO: 727706 - DNA, 19 bp, Mus musculus
  siRNA target sequence for 1810036L03Rik (NM_026960.1,822-840).
gctctaaatgggatatcct

SEQ ID NO: 727707 - DNA, 19 bp, Mus musculus
  siRNA target sequence for 1810036L03Rik (NM_026960.1,823-841).
ctctaaatgggatatcctt

SEQ ID NO: 727708 - DNA, 19 bp, Mus musculus
  siRNA target sequence for 1810036L03Rik (NM_026960.1,876-894).
cctcctcaggtgacagaaa

SEQ ID NO: 727709 - DNA, 19 bp, Mus musculus
  siRNA target sequence for 1810036L03Rik (NM_026960.1,909-927).
ggcaccatggcctcaatgt

SEQ ID NO: 727710 - DNA, 19 bp, Mus musculus
  siRNA target sequence for 1810036L03Rik (NM_026960.1,978-996).
ggattgatgaggaggaatt

SEQ ID NO: 727711 - DNA, 19 bp, Mus musculus
  siRNA target sequence for 1810036L03Rik (NM_026960.1,1093-1111).
ggtgaacatcggaaagatt

SEQ ID NO: 727712 - DNA, 19 bp, Mus musculus
  siRNA target sequence for 1810036L03Rik (NM_026960.1,1094-1112).
gtgaacatcggaaagattt

SEQ ID NO: 727713 - DNA, 19 bp, Mus musculus
  siRNA target sequence for 1810036L03Rik (NM_026960.1,1096-1114).
gaacatcggaaagatttta

SEQ ID NO: 727714 - DNA, 19 bp, Mus musculus
  siRNA target sequence for 1810036L03Rik (NM_026960.1,1470-1488).
cctgggtcttgctagaaga

SEQ ID NO: 727715 - DNA, 19 bp, Mus musculus
  siRNA target sequence for 1810036L03Rik (NM_026960.1,1471-1489).
ctgggtcttgctagaagaa

SEQ ID NO: 727716 - DNA, 19 bp, Mus musculus
  siRNA target sequence for 1810036L03Rik (NM_026960.1,1474-1492).
ggtcttgctagaagaatgt

SEQ ID NO: 727717 - DNA, 19 bp, Mus musculus
  siRNA target sequence for 1810036L03Rik (NM_026960.1,1496-1514).
ctaaggctgcaggtagaat

SEQ ID NO: 727718 - DNA, 19 bp, Mus musculus
  siRNA target sequence for 1810030J04Rik (NM_026963.2,781-799).
gagctcgatgcggatgaat

SEQ ID NO: 727719 - DNA, 19 bp, Mus musculus
  siRNA target sequence for 1810030J04Rik (NM_026963.2,783-801).
gctcgatgcggatgaatat

SEQ ID NO: 727720 - DNA, 19 bp, Mus musculus
  siRNA target sequence for 1810030J04Rik (NM_026963.2,832-850).
ctgagtgagttcaacgatt

SEQ ID NO: 727721 - DNA, 19 bp, Mus musculus
  siRNA target sequence for 1810030J04Rik (NM_026963.2,846-864).
cgattcgctgaagaagatt

SEQ ID NO: 727722 - DNA, 19 bp, Mus musculus
  siRNA target sequence for 1810030J04Rik (NM_026963.2,847-865).
gattcgctgaagaagatta

SEQ ID NO: 727723 - DNA, 19 bp, Mus musculus
  siRNA target sequence for 1810030J04Rik (NM_026963.2,962-980).
gattgtttgcgaagaaaca

SEQ ID NO: 727724 - DNA, 19 bp, Mus musculus
  siRNA target sequence for 1810030J04Rik (NM_026963.2,1153-1171).
gtgctcagccagtttgaaa

SEQ ID NO: 727725 - DNA, 19 bp, Mus musculus
  siRNA target sequence for 1810030J04Rik (NM_026963.2,1215-1233).
ggcagggttcgatgttgaa

SEQ ID NO: 727726 - DNA, 19 bp, Mus musculus
  siRNA target sequence for 1810030J04Rik (NM_026963.2,1216-1234).
gcagggttcgatgttgaaa

SEQ ID NO: 727727 - DNA, 19 bp, Mus musculus
  siRNA target sequence for D4Ertd786e (NM_026971.2,130-148).
gggtgtgtggaccaatact

SEQ ID NO: 727728 - DNA, 19 bp, Mus musculus
  siRNA target sequence for D4Ertd786e (NM_026971.2,136-154).
gtggaccaatactgtttct

SEQ ID NO: 727729 - DNA, 19 bp, Mus musculus
  siRNA target sequence for D4Ertd786e (NM_026971.2,191-209).
ggagagaatcccatttttt

SEQ ID NO: 727730 - DNA, 19 bp, Mus musculus
  siRNA target sequence for D4Ertd786e (NM_026971.2,234-252).
gtcggcactacaagacaaa

SEQ ID NO: 727731 - DNA, 19 bp, Mus musculus
  siRNA target sequence for D4Ertd786e (NM_026971.2,260-278).
cgtggcatcggaagataca

SEQ ID NO: 727732 - DNA, 19 bp, Mus musculus
  siRNA target sequence for D4Ertd786e (NM_026971.2,344-362).
gtggggacagattatgaat

SEQ ID NO: 727733 - DNA, 19 bp, Mus musculus
  siRNA target sequence for D4Ertd786e (NM_026971.2,346-364).
ggggacagattatgaatat

SEQ ID NO: 727734 - DNA, 19 bp, Mus musculus
  siRNA target sequence for D4Ertd786e (NM_026971.2,359-377).
gaatatggggttttaaaca

SEQ ID NO: 727735 - DNA, 19 bp, Mus musculus
  siRNA target sequence for D4Ertd786e (NM_026971.2,442-460).
caaccggctgtccatcaaa

SEQ ID NO: 727736 - DNA, 19 bp, Mus musculus
  siRNA target sequence for D4Ertd786e (NM_026971.2,457-475).
caaagtcgaggaaagctat

SEQ ID NO: 727737 - DNA, 19 bp, Mus musculus
  siRNA target sequence for D4Ertd786e (NM_026971.2,476-494).
gcgatgcctaccaaaacca

SEQ ID NO: 727738 - DNA, 19 bp, Mus musculus
  siRNA target sequence for D4Ertd786e (NM_026971.2,477-495).
cgatgcctaccaaaaccat

SEQ ID NO: 727739 - DNA, 19 bp, Mus musculus
  siRNA target sequence for 1810030I22Rik (NM_026972.1,33-51).
gcggcagcaggtattctat

SEQ ID NO: 727740 - DNA, 19 bp, Mus musculus
  siRNA target sequence for 1810030I22Rik (NM_026972.1,34-52).
cggcagcaggtattctatt

SEQ ID NO: 727741 - DNA, 19 bp, Mus musculus
  siRNA target sequence for 1810030I22Rik (NM_026972.1,35-53).
ggcagcaggtattctatta

SEQ ID NO: 727742 - DNA, 19 bp, Mus musculus
  siRNA target sequence for 1810030I22Rik (NM_026972.1,36-54).
gcagcaggtattctattaa

SEQ ID NO: 727743 - DNA, 19 bp, Mus musculus
  siRNA target sequence for 1810030I22Rik (NM_026972.1,37-55).
cagcaggtattctattaaa

SEQ ID NO: 727744 - DNA, 19 bp, Mus musculus
  siRNA target sequence for 1810030I22Rik (NM_026972.1,58-76).
ctccagactacgaccaaat

SEQ ID NO: 727745 - DNA, 19 bp, Mus musculus
  siRNA target sequence for 1810030I22Rik (NM_026972.1,61-79).
cagactacgaccaaattct

SEQ ID NO: 727746 - DNA, 19 bp, Mus musculus
  siRNA target sequence for 1810030I22Rik (NM_026972.1,164-182).
ctcctgctgatcattcttt

SEQ ID NO: 727747 - DNA, 19 bp, Mus musculus
  siRNA target sequence for 1810030I22Rik (NM_026972.1,169-187).
gctgatcattcttttccaa

SEQ ID NO: 727748 - DNA, 19 bp, Mus musculus
  siRNA target sequence for 1810030I22Rik (NM_026972.1,382-400).
gcagaatgagtccatacaa

SEQ ID NO: 727749 - DNA, 19 bp, Mus musculus
  siRNA target sequence for 1810030I22Rik (NM_026972.1,427-445).
gctgaaggctgaacttctt

SEQ ID NO: 727750 - DNA, 19 bp, Mus musculus
  siRNA target sequence for 1810030I22Rik (NM_026972.1,428-446).
ctgaaggctgaacttcttt

SEQ ID NO: 727751 - DNA, 19 bp, Mus musculus
  siRNA target sequence for 1810030I22Rik (NM_026972.1,456-474).
ccagcttcccggtaaagga

SEQ ID NO: 727752 - DNA, 19 bp, Mus musculus
  siRNA target sequence for 1810030I22Rik (NM_026972.1,457-475).
cagcttcccggtaaaggat

SEQ ID NO: 727753 - DNA, 19 bp, Mus musculus
  siRNA target sequence for 1810030I22Rik (NM_026972.1,463-481).
cccggtaaaggatgattct

SEQ ID NO: 727754 - DNA, 19 bp, Mus musculus
  siRNA target sequence for 1810030I22Rik (NM_026972.1,464-482).
ccggtaaaggatgattcta

SEQ ID NO: 727755 - DNA, 19 bp, Mus musculus
  siRNA target sequence for 1810030I22Rik (NM_026972.1,465-483).
cggtaaaggatgattctaa

SEQ ID NO: 727756 - DNA, 19 bp, Mus musculus
  siRNA target sequence for 1810030I22Rik (NM_026972.1,562-580).
gacattcctcctaggaaat

SEQ ID NO: 727757 - DNA, 19 bp, Mus musculus
  siRNA target sequence for 1810030I22Rik (NM_026972.1,619-637).
cgccgtcacagcttgcaaa

SEQ ID NO: 727758 - DNA, 19 bp, Mus musculus
  siRNA target sequence for 1810030I22Rik (NM_026972.1,838-856).
ggaagactgtgtcgaattt

SEQ ID NO: 727759 - DNA, 19 bp, Mus musculus
  siRNA target sequence for 1810030I22Rik (NM_026972.1,871-889).
gaatgactctaaatgtgaa

SEQ ID NO: 727760 - DNA, 19 bp, Mus musculus
  siRNA target sequence for 1810033A06Rik (NM_026981.1,95-113).
ggctctcagtccatctgta

SEQ ID NO: 727761 - DNA, 19 bp, Mus musculus
  siRNA target sequence for 1810033A06Rik (NM_026981.1,111-129).
gtagttcctcaagaaagta

SEQ ID NO: 727762 - DNA, 19 bp, Mus musculus
  siRNA target sequence for 1810033A06Rik (NM_026981.1,197-215).
ccttcaaaacttatgctta

SEQ ID NO: 727763 - DNA, 19 bp, Mus musculus
  siRNA target sequence for 1810033A06Rik (NM_026981.1,230-248).
gctgcgtaaggctcaacaa

SEQ ID NO: 727764 - DNA, 19 bp, Mus musculus
  siRNA target sequence for 1810033A06Rik (NM_026981.1,231-249).
ctgcgtaaggctcaacaaa

SEQ ID NO: 727765 - DNA, 19 bp, Mus musculus
  siRNA target sequence for 1810033A06Rik (NM_026981.1,233-251).
gcgtaaggctcaacaaagt

SEQ ID NO: 727766 - DNA, 19 bp, Mus musculus
  siRNA target sequence for 1810033A06Rik (NM_026981.1,279-297).
ggctcaaggatgttctact

SEQ ID NO: 727767 - DNA, 19 bp, Mus musculus
  siRNA target sequence for 1810033A06Rik (NM_026981.1,349-367).
gtgtgcagcttccattgaa

SEQ ID NO: 727768 - DNA, 19 bp, Mus musculus
  siRNA target sequence for 1810033A06Rik (NM_026981.1,356-374).
gcttccattgaagattgat

SEQ ID NO: 727769 - DNA, 19 bp, Mus musculus
  siRNA target sequence for 1810033A06Rik (NM_026981.1,357-375).
cttccattgaagattgata

SEQ ID NO: 727770 - DNA, 19 bp, Mus musculus
  siRNA target sequence for 1810033A06Rik (NM_026981.1,438-456).
cccgactctgtgaacattt

SEQ ID NO: 727771 - DNA, 19 bp, Mus musculus
  siRNA target sequence for 1810033A06Rik (NM_026981.1,439-457).
ccgactctgtgaacattta

SEQ ID NO: 727772 - DNA, 19 bp, Mus musculus
  siRNA target sequence for 1810033A06Rik (NM_026981.1,500-518).
ggttgtacttgtttttcct

SEQ ID NO: 727773 - DNA, 19 bp, Mus musculus
  siRNA target sequence for 1810033A06Rik (NM_026981.1,519-537).
gggcctcagtctatctcaa

SEQ ID NO: 727774 - DNA, 19 bp, Mus musculus
  siRNA target sequence for 1810033A06Rik (NM_026981.1,520-538).
ggcctcagtctatctcaat

SEQ ID NO: 727775 - DNA, 19 bp, Mus musculus
  siRNA target sequence for 1810033A06Rik (NM_026981.1,747-765).
gagcggcttcgggagttat

SEQ ID NO: 727776 - DNA, 19 bp, Mus musculus
  siRNA target sequence for 1810033A06Rik (NM_026981.1,752-770).
gcttcgggagttattacaa

SEQ ID NO: 727777 - DNA, 19 bp, Mus musculus
  siRNA target sequence for 1810033A06Rik (NM_026981.1,838-856).
ccacaattgaagccattta

SEQ ID NO: 727778 - DNA, 19 bp, Mus musculus
  siRNA target sequence for 1810033A06Rik (NM_026981.1,883-901).
ccgtgcagaaagagaagta

SEQ ID NO: 727779 - DNA, 19 bp, Mus musculus
  siRNA target sequence for 1810033A06Rik (NM_026981.1,885-903).
gtgcagaaagagaagtaca

SEQ ID NO: 727780 - DNA, 19 bp, Mus musculus
  siRNA target sequence for 1810033A06Rik (NM_026981.1,906-924).
ggacagtatgacaaccttt

SEQ ID NO: 727781 - DNA, 19 bp, Mus musculus
  siRNA target sequence for 1810033A06Rik (NM_026981.1,907-925).
gacagtatgacaacctttt

SEQ ID NO: 727782 - DNA, 19 bp, Mus musculus
  siRNA target sequence for 1810033A06Rik (NM_026981.1,944-962).
gtaccgcttgataaagaat

SEQ ID NO: 727783 - DNA, 19 bp, Mus musculus
  siRNA target sequence for 1810033M07Rik (NM_026983.1,73-91).
ggtctagatgcctaatcct

SEQ ID NO: 727784 - DNA, 19 bp, Mus musculus
  siRNA target sequence for 1810033M07Rik (NM_026983.1,248-266).
cttccaggatttagaaata

SEQ ID NO: 727785 - DNA, 19 bp, Mus musculus
  siRNA target sequence for 1810033M07Rik (NM_026983.1,295-313).
cacgacagttccaagatgt

SEQ ID NO: 727786 - DNA, 19 bp, Mus musculus
  siRNA target sequence for 1810033M07Rik (NM_026983.1,297-315).
cgacagttccaagatgtat

SEQ ID NO: 727787 - DNA, 19 bp, Mus musculus
  siRNA target sequence for 1810033M07Rik (NM_026983.1,306-324).
caagatgtatcgtttggaa

SEQ ID NO: 727788 - DNA, 19 bp, Mus musculus
  siRNA target sequence for 1810033M07Rik (NM_026983.1,339-357).
gaggtcctgacccattaca

SEQ ID NO: 727789 - DNA, 19 bp, Mus musculus
  siRNA target sequence for 1810033M07Rik (NM_026983.1,345-363).
ctgacccattacaatgtca

SEQ ID NO: 727790 - DNA, 19 bp, Mus musculus
  siRNA target sequence for 1810033M07Rik (NM_026983.1,383-401).
ctttcgactggttgatgat

SEQ ID NO: 727791 - DNA, 19 bp, Mus musculus
  siRNA target sequence for 1810033M07Rik (NM_026983.1,388-406).
gactggttgatgatcaaca

SEQ ID NO: 727792 - DNA, 19 bp, Mus musculus
  siRNA target sequence for 1810033M07Rik (NM_026983.1,392-410).
ggttgatgatcaacaacta

SEQ ID NO: 727793 - DNA, 19 bp, Mus musculus
  siRNA target sequence for 1810033M07Rik (NM_026983.1,396-414).
gatgatcaacaactacatt

SEQ ID NO: 727794 - DNA, 19 bp, Mus musculus
  siRNA target sequence for 1810033M07Rik (NM_026983.1,399-417).
gatcaacaactacatttga

SEQ ID NO: 727795 - DNA, 19 bp, Mus musculus
  siRNA target sequence for 1810033M07Rik (NM_026983.1,438-456).
ctcgatgctgccaaattga

SEQ ID NO: 727796 - DNA, 19 bp, Mus musculus
  siRNA target sequence for 1810033M07Rik (NM_026983.1,447-465).
gccaaattgagccgtttta

SEQ ID NO: 727797 - DNA, 19 bp, Mus musculus
  siRNA target sequence for 1810033M07Rik (NM_026983.1,460-478).
gttttattcacgtgaacaa

SEQ ID NO: 727798 - DNA, 19 bp, Mus musculus
  siRNA target sequence for 1810033M07Rik (NM_026983.1,493-511).
cagagtacagtcctatgat

SEQ ID NO: 727799 - DNA, 19 bp, Mus musculus
  siRNA target sequence for 1810033M07Rik (NM_026983.1,509-527).
gattgcagctggcttattt

SEQ ID NO: 727800 - DNA, 19 bp, Mus musculus
  siRNA target sequence for 1810033M07Rik (NM_026983.1,513-531).
gcagctggcttatttaaca

SEQ ID NO: 727801 - DNA, 19 bp, Mus musculus
  siRNA target sequence for 1810033M07Rik (NM_026983.1,566-584).
gaagacttccccagagtat

SEQ ID NO: 727802 - DNA, 19 bp, Mus musculus
  siRNA target sequence for 1810033M07Rik (NM_026983.1,569-587).
gacttccccagagtatgaa

SEQ ID NO: 727803 - DNA, 19 bp, Mus musculus
  siRNA target sequence for 1810033M07Rik (NM_026983.1,659-677).
cggcaaaagggaaaatgga

SEQ ID NO: 727804 - DNA, 19 bp, Mus musculus
  siRNA target sequence for 1810033M07Rik (NM_026983.1,686-704).
gtcctatttcaaactaaaa

SEQ ID NO: 727805 - DNA, 19 bp, Mus musculus
  siRNA target sequence for 1810033M07Rik (NM_026983.1,718-736).
cagctctggccatttatga

SEQ ID NO: 727806 - DNA, 19 bp, Mus musculus
  siRNA target sequence for 1810033M07Rik (NM_026983.1,720-738).
gctctggccatttatgagt

SEQ ID NO: 727807 - DNA, 19 bp, Mus musculus
  siRNA target sequence for 1700030A21Rik (NM_026992.1,513-531).
cactcaaaaaggattggta

SEQ ID NO: 727808 - DNA, 19 bp, Mus musculus
  siRNA target sequence for 1700030A21Rik (NM_026992.1,548-566).
gacccatctgcaaatatgt

SEQ ID NO: 727809 - DNA, 19 bp, Mus musculus
  siRNA target sequence for 1700030A21Rik (NM_026992.1,642-660).
gaaccatggaggagtgtat

SEQ ID NO: 727810 - DNA, 19 bp, Mus musculus
  siRNA target sequence for 1700030A21Rik (NM_026992.1,730-748).
cctgcagcggcatgaagat

SEQ ID NO: 727811 - DNA, 19 bp, Mus musculus
  siRNA target sequence for 1700030A21Rik (NM_026992.1,777-795).
cacaggtgcgccttgaaga

SEQ ID NO: 727812 - DNA, 19 bp, Mus musculus
  siRNA target sequence for 1700030A21Rik (NM_026992.1,809-827).
caaggtgatgaatctttct

SEQ ID NO: 727813 - DNA, 19 bp, Mus musculus
  siRNA target sequence for 2810407K09Rik (NM_026999.1,614-632).
ccgagaggagacattccaa

SEQ ID NO: 727814 - DNA, 19 bp, Mus musculus
  siRNA target sequence for 2810407K09Rik (NM_026999.1,615-633).
cgagaggagacattccaaa

SEQ ID NO: 727815 - DNA, 19 bp, Mus musculus
  siRNA target sequence for 2810407K09Rik (NM_026999.1,616-634).
gagaggagacattccaaat

SEQ ID NO: 727816 - DNA, 19 bp, Mus musculus
  siRNA target sequence for 2810407K09Rik (NM_026999.1,699-717).
ctaaagaggtggttgaaca

SEQ ID NO: 727817 - DNA, 19 bp, Mus musculus
  siRNA target sequence for 2810407K09Rik (NM_026999.1,704-722).
gaggtggttgaacataaga

SEQ ID NO: 727818 - DNA, 19 bp, Mus musculus
  siRNA target sequence for 2810407K09Rik (NM_026999.1,707-725).
gtggttgaacataagactt

SEQ ID NO: 727819 - DNA, 19 bp, Mus musculus
  siRNA target sequence for 2810407K09Rik (NM_026999.1,709-727).
ggttgaacataagacttat

SEQ ID NO: 727820 - DNA, 19 bp, Mus musculus
  siRNA target sequence for 2810407K09Rik (NM_026999.1,814-832).
ggtaccaaacaccgatatt

SEQ ID NO: 727821 - DNA, 19 bp, Mus musculus
  siRNA target sequence for 2810407K09Rik (NM_026999.1,867-885).
gtggacgccggtttaccta

SEQ ID NO: 727822 - DNA, 19 bp, Mus musculus
  siRNA target sequence for 2810407K09Rik (NM_026999.1,872-890).
cgccggtttacctatccat

SEQ ID NO: 727823 - DNA, 19 bp, Mus musculus
  siRNA target sequence for Zfp397 (NM_027007.1,345-363).
gtgaaaatagaagatagta

SEQ ID NO: 727824 - DNA, 19 bp, Mus musculus
  siRNA target sequence for Zfp397 (NM_027007.1,402-420).
gcccaatcttgccaagaat

SEQ ID NO: 727825 - DNA, 19 bp, Mus musculus
  siRNA target sequence for Zfp397 (NM_027007.1,428-446).
ccagcaattcaggaagttt

SEQ ID NO: 727826 - DNA, 19 bp, Mus musculus
  siRNA target sequence for Zfp397 (NM_027007.1,432-450).
caattcaggaagttttgct

SEQ ID NO: 727827 - DNA, 19 bp, Mus musculus
  siRNA target sequence for Zfp397 (NM_027007.1,439-457).
ggaagttttgctatcatga

SEQ ID NO: 727828 - DNA, 19 bp, Mus musculus
  siRNA target sequence for Zfp397 (NM_027007.1,440-458).
gaagttttgctatcatgaa

SEQ ID NO: 727829 - DNA, 19 bp, Mus musculus
  siRNA target sequence for Zfp397 (NM_027007.1,483-501).
gggcgactccaggaacttt

SEQ ID NO: 727830 - DNA, 19 bp, Mus musculus
  siRNA target sequence for Zfp397 (NM_027007.1,689-707).
gcaggtcccagataatcta

SEQ ID NO: 727831 - DNA, 19 bp, Mus musculus
  siRNA target sequence for Zfp397 (NM_027007.1,744-762).
ctcaaaacatcccaagatt

SEQ ID NO: 727832 - DNA, 19 bp, Mus musculus
  siRNA target sequence for Zfp397 (NM_027007.1,774-792).
caagtccggcctttgaaga

SEQ ID NO: 727833 - DNA, 19 bp, Mus musculus
  siRNA target sequence for Zfp397 (NM_027007.1,813-831).
ccttgcctttcctctaaaa

SEQ ID NO: 727834 - DNA, 19 bp, Mus musculus
  siRNA target sequence for Zfp397 (NM_027007.1,837-855).
gctaagaataatgaatcaa

SEQ ID NO: 727835 - DNA, 19 bp, Mus musculus
  siRNA target sequence for Zfp397 (NM_027007.1,896-914).
ctcttgggatccttcatgt

SEQ ID NO: 727836 - DNA, 19 bp, Mus musculus
  siRNA target sequence for Zfp397 (NM_027007.1,1018-1036).
caaagagagaccatcttga

SEQ ID NO: 727837 - DNA, 19 bp, Mus musculus
  siRNA target sequence for Zfp397 (NM_027007.1,1051-1069).
gcttgattataagtacaaa

SEQ ID NO: 727838 - DNA, 19 bp, Mus musculus
  siRNA target sequence for Zfp397 (NM_027007.1,1122-1140).
gtatgtgggcatagcttta

SEQ ID NO: 727839 - DNA, 19 bp, Mus musculus
  siRNA target sequence for Zfp397 (NM_027007.1,1126-1144).
gtgggcatagctttaaaca

SEQ ID NO: 727840 - DNA, 19 bp, Mus musculus
  siRNA target sequence for Zfp397 (NM_027007.1,1130-1148).
gcatagctttaaacaacat

SEQ ID NO: 727841 - DNA, 19 bp, Mus musculus
  siRNA target sequence for Zfp397 (NM_027007.1,1225-1243).
gtttgaggtcatatcttat

SEQ ID NO: 727842 - DNA, 19 bp, Mus musculus
  siRNA target sequence for Zfp397 (NM_027007.1,1229-1247).
gaggtcatatcttattatt

SEQ ID NO: 727843 - DNA, 19 bp, Mus musculus
  siRNA target sequence for Zfp397 (NM_027007.1,1325-1343).
cactagacatcggaaaatt

SEQ ID NO: 727844 - DNA, 19 bp, Mus musculus
  siRNA target sequence for Zfp397 (NM_027007.1,1391-1409).
cagtcaaagttcttactta

SEQ ID NO: 727845 - DNA, 19 bp, Mus musculus
  siRNA target sequence for Zfp397 (NM_027007.1,1393-1411).
gtcaaagttcttacttaat

SEQ ID NO: 727846 - DNA, 19 bp, Mus musculus
  siRNA target sequence for Zfp397 (NM_027007.1,1395-1413).
caaagttcttacttaatta

SEQ ID NO: 727847 - DNA, 19 bp, Mus musculus
  siRNA target sequence for Zfp397 (NM_027007.1,1402-1420).
cttacttaattatacatca

SEQ ID NO: 727848 - DNA, 19 bp, Mus musculus
  siRNA target sequence for Zfp397 (NM_027007.1,1484-1502).
ctcaaagcttattagacat

SEQ ID NO: 727849 - DNA, 19 bp, Mus musculus
  siRNA target sequence for Zfp397 (NM_027007.1,1647-1665).
ctgaattcaaacctcataa

SEQ ID NO: 727850 - DNA, 19 bp, Mus musculus
  siRNA target sequence for Zfp397 (NM_027007.1,1768-1786).
ctggggatgaagcgtatat

SEQ ID NO: 727851 - DNA, 19 bp, Mus musculus
  siRNA target sequence for Zfp397 (NM_027007.1,1770-1788).
ggggatgaagcgtatatat

SEQ ID NO: 727852 - DNA, 19 bp, Mus musculus
  siRNA target sequence for Zfp397 (NM_027007.1,1772-1790).
ggatgaagcgtatatatgt

SEQ ID NO: 727853 - DNA, 19 bp, Mus musculus
  siRNA target sequence for Zfp397 (NM_027007.1,1773-1791).
gatgaagcgtatatatgta

SEQ ID NO: 727854 - DNA, 19 bp, Mus musculus
  siRNA target sequence for Krt2-5 (NM_027011.1,257-275).
gccggagcctgtacaatgt

SEQ ID NO: 727855 - DNA, 19 bp, Mus musculus
  siRNA target sequence for Krt2-5 (NM_027011.1,318-336).
cttcaggaaccaatttggt

SEQ ID NO: 727856 - DNA, 19 bp, Mus musculus
  siRNA target sequence for Krt2-5 (NM_027011.1,705-723).
cctggatccgttgtttgaa

SEQ ID NO: 727857 - DNA, 19 bp, Mus musculus
  siRNA target sequence for Krt2-5 (NM_027011.1,713-731).
cgttgtttgaacagtacat

SEQ ID NO: 727858 - DNA, 19 bp, Mus musculus
  siRNA target sequence for 1700006D24Rik (NM_027026.2,273-291).
gagacgagcaggaagctaa

SEQ ID NO: 727859 - DNA, 19 bp, Mus musculus
  siRNA target sequence for 1700006D24Rik (NM_027026.2,430-448).
ggacggggaagggattact

SEQ ID NO: 727860 - DNA, 19 bp, Mus musculus
  siRNA target sequence for 1700006D24Rik (NM_027026.2,431-449).
gacggggaagggattactt

SEQ ID NO: 727861 - DNA, 19 bp, Mus musculus
  siRNA target sequence for 1700006D24Rik (NM_027026.2,433-451).
cggggaagggattacttgt

SEQ ID NO: 727862 - DNA, 19 bp, Mus musculus
  siRNA target sequence for 1700006D24Rik (NM_027026.2,447-465).
cttgtatcgggaatttaga

SEQ ID NO: 727863 - DNA, 19 bp, Mus musculus
  siRNA target sequence for 1700006D24Rik (NM_027026.2,450-468).
gtatcgggaatttagagaa

SEQ ID NO: 727864 - DNA, 19 bp, Mus musculus
  siRNA target sequence for 1700006D24Rik (NM_027026.2,488-506).
ctctacctgcaatcgaata

SEQ ID NO: 727865 - DNA, 19 bp, Mus musculus
  siRNA target sequence for 1700006D24Rik (NM_027026.2,543-561).
ccctgcgcttcctgtcttt

SEQ ID NO: 727866 - DNA, 19 bp, Mus musculus
  siRNA target sequence for 1700006D24Rik (NM_027026.2,556-574).
gtctttggcaagaaaccaa

SEQ ID NO: 727867 - DNA, 19 bp, Mus musculus
  siRNA target sequence for 1700006D24Rik (NM_027026.2,685-703).
cctcaacctgtgtggaaat

SEQ ID NO: 727868 - DNA, 19 bp, Mus musculus
  siRNA target sequence for 1700006D24Rik (NM_027026.2,811-829).
ggataaatcctcagatgat

SEQ ID NO: 727869 - DNA, 19 bp, Mus musculus
  siRNA target sequence for 1700006D24Rik (NM_027026.2,864-882).
gcgcagagcgaggattctt

SEQ ID NO: 727870 - DNA, 19 bp, Mus musculus
  siRNA target sequence for 1700006D24Rik (NM_027026.2,866-884).
gcagagcgaggattcttca

SEQ ID NO: 727871 - DNA, 19 bp, Mus musculus
  siRNA target sequence for 1700006D24Rik (NM_027026.2,1190-1208).
gcaacccccagcatgacaa

SEQ ID NO: 727872 - DNA, 19 bp, Mus musculus
  siRNA target sequence for 1700006D24Rik (NM_027026.2,1198-1216).
cagcatgacaaaaatgaca

SEQ ID NO: 727873 - DNA, 19 bp, Mus musculus
  siRNA target sequence for 1700029H01Rik (NM_027029.1,145-163).
ccgcaggaattccatttca

SEQ ID NO: 727874 - DNA, 19 bp, Mus musculus
  siRNA target sequence for 1700029H01Rik (NM_027029.1,368-386).
cccatggaacctaaaccaa

SEQ ID NO: 727875 - DNA, 19 bp, Mus musculus
  siRNA target sequence for 1700029H01Rik (NM_027029.1,492-510).
gccatagccgaatctttga

SEQ ID NO: 727876 - DNA, 19 bp, Mus musculus
  siRNA target sequence for 1700029H01Rik (NM_027029.1,493-511).
ccatagccgaatctttgat

SEQ ID NO: 727877 - DNA, 19 bp, Mus musculus
  siRNA target sequence for 1700029H01Rik (NM_027029.1,547-565).
gagaggagtcccaaacctt

SEQ ID NO: 727878 - DNA, 19 bp, Mus musculus
  siRNA target sequence for 1700001E16Rik (NM_027030.1,33-51).
gcgcctcaactcaagagaa

SEQ ID NO: 727879 - DNA, 19 bp, Mus musculus
  siRNA target sequence for 1700001E16Rik (NM_027030.1,145-163).
cgttctccggctttagagt

SEQ ID NO: 727880 - DNA, 19 bp, Mus musculus
  siRNA target sequence for 1700001E16Rik (NM_027030.1,146-164).
gttctccggctttagagta

SEQ ID NO: 727881 - DNA, 19 bp, Mus musculus
  siRNA target sequence for 1700001E16Rik (NM_027030.1,149-167).
ctccggctttagagtacaa

SEQ ID NO: 727882 - DNA, 19 bp, Mus musculus
  siRNA target sequence for 1700001E16Rik (NM_027030.1,152-170).
cggctttagagtacaaaaa

SEQ ID NO: 727883 - DNA, 19 bp, Mus musculus
  siRNA target sequence for 1700001E16Rik (NM_027030.1,154-172).
gctttagagtacaaaaagt

SEQ ID NO: 727884 - DNA, 19 bp, Mus musculus
  siRNA target sequence for 1700001E16Rik (NM_027030.1,247-265).
gagaagatgcggttgtgat

SEQ ID NO: 727885 - DNA, 19 bp, Mus musculus
  siRNA target sequence for 1700001E16Rik (NM_027030.1,348-366).
gatatctacagcacctata

SEQ ID NO: 727886 - DNA, 19 bp, Mus musculus
  siRNA target sequence for 1700001E16Rik (NM_027030.1,536-554).
ccagtgggtgtataacatt

SEQ ID NO: 727887 - DNA, 19 bp, Mus musculus
  siRNA target sequence for 1700001E16Rik (NM_027030.1,541-559).
gggtgtataacattcttga

SEQ ID NO: 727888 - DNA, 19 bp, Mus musculus
  siRNA target sequence for 1700001E16Rik (NM_027030.1,570-588).
gaagctgaccggattgttt

SEQ ID NO: 727889 - DNA, 19 bp, Mus musculus
  siRNA target sequence for 1700001E16Rik (NM_027030.1,574-592).
ctgaccggattgtttttga

SEQ ID NO: 727890 - DNA, 19 bp, Mus musculus
  siRNA target sequence for 1700001E16Rik (NM_027030.1,576-594).
gaccggattgtttttgaga

SEQ ID NO: 727891 - DNA, 19 bp, Mus musculus
  siRNA target sequence for 1700001E16Rik (NM_027030.1,593-611).
gaacccagacccttctgat

SEQ ID NO: 727892 - DNA, 19 bp, Mus musculus
  siRNA target sequence for 1700001E16Rik (NM_027030.1,651-669).
cagcttgatgacctgtatt

SEQ ID NO: 727893 - DNA, 19 bp, Mus musculus
  siRNA target sequence for 1700001E16Rik (NM_027030.1,731-749).
gccactactgaggaacatt

SEQ ID NO: 727894 - DNA, 19 bp, Mus musculus
  siRNA target sequence for 1700001E16Rik (NM_027030.1,733-751).
cactactgaggaacattct

SEQ ID NO: 727895 - DNA, 19 bp, Mus musculus
  siRNA target sequence for 1700001E16Rik (NM_027030.1,954-972).
caacagcgcactcttactt

SEQ ID NO: 727896 - DNA, 19 bp, Mus musculus
  siRNA target sequence for 1700011J18Rik (NM_027033.1,157-175).
cgactgacggtggatttaa

SEQ ID NO: 727897 - DNA, 19 bp, Mus musculus
  siRNA target sequence for 1700011J18Rik (NM_027033.1,158-176).
gactgacggtggatttaat

SEQ ID NO: 727898 - DNA, 19 bp, Mus musculus
  siRNA target sequence for 1700011J18Rik (NM_027033.1,297-315).
cagaaacctgagtgtttta

SEQ ID NO: 727899 - DNA, 19 bp, Mus musculus
  siRNA target sequence for 1700011J18Rik (NM_027033.1,332-350).
gcattagtcaagtcactaa

SEQ ID NO: 727900 - DNA, 19 bp, Mus musculus
  siRNA target sequence for 1700011J18Rik (NM_027033.1,343-361).
gtcactaacctgaattaca

SEQ ID NO: 727901 - DNA, 19 bp, Mus musculus
  siRNA target sequence for 1700011J18Rik (NM_027033.1,374-392).
cccacttgtacctacagaa

SEQ ID NO: 727902 - DNA, 19 bp, Mus musculus
  siRNA target sequence for 1700011J18Rik (NM_027033.1,412-430).
gaaaacctcagttcactaa

SEQ ID NO: 727903 - DNA, 19 bp, Mus musculus
  siRNA target sequence for 1700011J18Rik (NM_027033.1,417-435).
cctcagttcactaaagaaa

SEQ ID NO: 727904 - DNA, 19 bp, Mus musculus
  siRNA target sequence for 1700011J18Rik (NM_027033.1,482-500).
gcttggaaggattagaaga

SEQ ID NO: 727905 - DNA, 19 bp, Mus musculus
  siRNA target sequence for 1700011J18Rik (NM_027033.1,491-509).
gattagaagaactaagaga

SEQ ID NO: 727906 - DNA, 19 bp, Mus musculus
  siRNA target sequence for 1700011J18Rik (NM_027033.1,534-552).
ccctctaggcgaaaagctt

SEQ ID NO: 727907 - DNA, 19 bp, Mus musculus
  siRNA target sequence for 1700011J18Rik (NM_027033.1,584-602).
cgaaatccctctctacttt

SEQ ID NO: 727908 - DNA, 19 bp, Mus musculus
  siRNA target sequence for 1700011J18Rik (NM_027033.1,590-608).
ccctctctactttgaatat

SEQ ID NO: 727909 - DNA, 19 bp, Mus musculus
  siRNA target sequence for 1700011J18Rik (NM_027033.1,611-629).
gcaacaataacattgatga

SEQ ID NO: 727910 - DNA, 19 bp, Mus musculus
  siRNA target sequence for 1700011J18Rik (NM_027033.1,615-633).
caataacattgatgacata

SEQ ID NO: 727911 - DNA, 19 bp, Mus musculus
  siRNA target sequence for 1700011J18Rik (NM_027033.1,688-706).
ctgatgcacgtgaaggtaa

SEQ ID NO: 727912 - DNA, 19 bp, Mus musculus
  siRNA target sequence for 1700003M02Rik (NM_027041.1,63-81).
gatggcgtcgtcgtgaaaa

SEQ ID NO: 727913 - DNA, 19 bp, Mus musculus
  siRNA target sequence for 1700003M02Rik (NM_027041.1,171-189).
gcaaactttaacaaactgt

SEQ ID NO: 727914 - DNA, 19 bp, Mus musculus
  siRNA target sequence for 1700003M02Rik (NM_027041.1,204-222).
ggattttgtggctacacat

SEQ ID NO: 727915 - DNA, 19 bp, Mus musculus
  siRNA target sequence for 1700003M02Rik (NM_027041.1,205-223).
gattttgtggctacacatt

SEQ ID NO: 727916 - DNA, 19 bp, Mus musculus
  siRNA target sequence for 1700003M02Rik (NM_027041.1,310-328).
gagatgctgcatacacatt

SEQ ID NO: 727917 - DNA, 19 bp, Mus musculus
  siRNA target sequence for 1700003M02Rik (NM_027041.1,323-341).
cacattcgcagaaaatcca

SEQ ID NO: 727918 - DNA, 19 bp, Mus musculus
  siRNA target sequence for 1700003M02Rik (NM_027041.1,339-357).
ccagaccattacatccatt

SEQ ID NO: 727919 - DNA, 19 bp, Mus musculus
  siRNA target sequence for 1700003M02Rik (NM_027041.1,342-360).
gaccattacatccatttga

SEQ ID NO: 727920 - DNA, 19 bp, Mus musculus
  siRNA target sequence for 1700003M02Rik (NM_027041.1,377-395).
gaagaatgcagagttaatt

SEQ ID NO: 727921 - DNA, 19 bp, Mus musculus
  siRNA target sequence for 1700003M02Rik (NM_027041.1,389-407).
gttaattcagctactagaa

SEQ ID NO: 727922 - DNA, 19 bp, Mus musculus
  siRNA target sequence for 1700003M02Rik (NM_027041.1,451-469).
gagatgttgacaagcatta

SEQ ID NO: 727923 - DNA, 19 bp, Mus musculus
  siRNA target sequence for 1700003M02Rik (NM_027041.1,497-515).
cggcacacagacagataca

SEQ ID NO: 727924 - DNA, 19 bp, Mus musculus
  siRNA target sequence for 1700003M02Rik (NM_027041.1,528-546).
cccacgaccatgagaacat

SEQ ID NO: 727925 - DNA, 19 bp, Mus musculus
  siRNA target sequence for 1700003M02Rik (NM_027041.1,530-548).
cacgaccatgagaacatat

SEQ ID NO: 727926 - DNA, 19 bp, Mus musculus
  siRNA target sequence for 1700003M02Rik (NM_027041.1,532-550).
cgaccatgagaacatatga

SEQ ID NO: 727927 - DNA, 19 bp, Mus musculus
  siRNA target sequence for 1700003M02Rik (NM_027041.1,554-572).
gaacgaatgggaactaaga

SEQ ID NO: 727928 - DNA, 19 bp, Mus musculus
  siRNA target sequence for 1700003M02Rik (NM_027041.1,557-575).
cgaatgggaactaagaaga

SEQ ID NO: 727929 - DNA, 19 bp, Mus musculus
  siRNA target sequence for 1700003M02Rik (NM_027041.1,579-597).
gccataaaactggctaatt

SEQ ID NO: 727930 - DNA, 19 bp, Mus musculus
  siRNA target sequence for 1700003M02Rik (NM_027041.1,591-609).
gctaatttgcgccagaaaa

SEQ ID NO: 727931 - DNA, 19 bp, Mus musculus
  siRNA target sequence for 1700003M02Rik (NM_027041.1,630-648).
gaccttagccacatgagaa

SEQ ID NO: 727932 - DNA, 19 bp, Mus musculus
  siRNA target sequence for 1700003M02Rik (NM_027041.1,637-655).
gccacatgagaagagataa

SEQ ID NO: 727933 - DNA, 19 bp, Mus musculus
  siRNA target sequence for 1700003M02Rik (NM_027041.1,783-801).
gtgaaggtgaacttaacca

SEQ ID NO: 727934 - DNA, 19 bp, Mus musculus
  siRNA target sequence for 1700007N18Rik (NM_027046.2,308-326).
gcaaacctccacaagatca

SEQ ID NO: 727935 - DNA, 19 bp, Mus musculus
  siRNA target sequence for 1700007N18Rik (NM_027046.2,316-334).
ccacaagatcagaagatct

SEQ ID NO: 727936 - DNA, 19 bp, Mus musculus
  siRNA target sequence for 1700007N18Rik (NM_027046.2,322-340).
gatcagaagatctcttaaa

SEQ ID NO: 727937 - DNA, 19 bp, Mus musculus
  siRNA target sequence for 1700007N18Rik (NM_027046.2,357-375).
gtacgacccaccactcata

SEQ ID NO: 727938 - DNA, 19 bp, Mus musculus
  siRNA target sequence for 1700007N18Rik (NM_027046.2,406-424).
cggttgcgacggagatact

SEQ ID NO: 727939 - DNA, 19 bp, Mus musculus
  siRNA target sequence for 1700007N18Rik (NM_027046.2,408-426).
gttgcgacggagatactct

SEQ ID NO: 727940 - DNA, 19 bp, Mus musculus
  siRNA target sequence for 1700007N18Rik (NM_027046.2,416-434).
ggagatactctcagtttga

SEQ ID NO: 727941 - DNA, 19 bp, Mus musculus
  siRNA target sequence for 1700007N18Rik (NM_027046.2,488-506).
gaactcctcaaccaaatga

SEQ ID NO: 727942 - DNA, 19 bp, Mus musculus
  siRNA target sequence for 1700007N18Rik (NM_027046.2,496-514).
caaccaaatgacgaacatt

SEQ ID NO: 727943 - DNA, 19 bp, Mus musculus
  siRNA target sequence for 1700007N18Rik (NM_027046.2,500-518).
caaatgacgaacattgtca

SEQ ID NO: 727944 - DNA, 19 bp, Mus musculus
  siRNA target sequence for 1700007N18Rik (NM_027046.2,507-525).
cgaacattgtcagttcaat

SEQ ID NO: 727945 - DNA, 19 bp, Mus musculus
  siRNA target sequence for 1700007N18Rik (NM_027046.2,528-546).
caaatatccaggaaaagat

SEQ ID NO: 727946 - DNA, 19 bp, Mus musculus
  siRNA target sequence for 1700007N18Rik (NM_027046.2,544-562).
gatcaaccattatcagaat

SEQ ID NO: 727947 - DNA, 19 bp, Mus musculus
  siRNA target sequence for 1700007N18Rik (NM_027046.2,647-665).
gatatcaacactctaaaga

SEQ ID NO: 727948 - DNA, 19 bp, Mus musculus
  siRNA target sequence for 1700007N18Rik (NM_027046.2,700-718).
ctccagcattcattgtcta

SEQ ID NO: 727949 - DNA, 19 bp, Mus musculus
  siRNA target sequence for 1700007N18Rik (NM_027046.2,738-756).
ggggtaaagaatttgtaca

SEQ ID NO: 727950 - DNA, 19 bp, Mus musculus
  siRNA target sequence for 1700007N18Rik (NM_027046.2,761-779).
ctccataaactcctacaaa

SEQ ID NO: 727951 - DNA, 19 bp, Mus musculus
  siRNA target sequence for 1700007N18Rik (NM_027046.2,892-910).
gtcacctcagaatataact

SEQ ID NO: 727952 - DNA, 19 bp, Mus musculus
  siRNA target sequence for 1700007N18Rik (NM_027046.2,894-912).
cacctcagaatataactct

SEQ ID NO: 727953 - DNA, 19 bp, Mus musculus
  siRNA target sequence for 1700007N18Rik (NM_027046.2,942-960).
cagtgggttgcaaaaaggt

SEQ ID NO: 727954 - DNA, 19 bp, Mus musculus
  siRNA target sequence for 1700007N18Rik (NM_027046.2,944-962).
gtgggttgcaaaaaggtaa

SEQ ID NO: 727955 - DNA, 19 bp, Mus musculus
  siRNA target sequence for 1700007N18Rik (NM_027046.2,952-970).
caaaaaggtaaggtcaaat

SEQ ID NO: 727956 - DNA, 19 bp, Mus musculus
  siRNA target sequence for 1700007N18Rik (NM_027046.2,996-1014).
catggatcaagctcacttt

SEQ ID NO: 727957 - DNA, 19 bp, Mus musculus
  siRNA target sequence for 1700007N18Rik (NM_027046.2,1000-1018).
gatcaagctcacttttgtt

SEQ ID NO: 727958 - DNA, 19 bp, Mus musculus
  siRNA target sequence for 1700007N18Rik (NM_027046.2,1050-1068).
ccaccaagttagaggaatt

SEQ ID NO: 727959 - DNA, 19 bp, Mus musculus
  siRNA target sequence for 1700007N18Rik (NM_027046.2,1184-1202).
ctcttccactatgtttatt

SEQ ID NO: 727960 - DNA, 19 bp, Mus musculus
  siRNA target sequence for 1700008E09Rik (NM_027055.1,254-272).
cttctggtgttggttcttt

SEQ ID NO: 727961 - DNA, 19 bp, Mus musculus
  siRNA target sequence for 1700008E09Rik (NM_027055.1,357-375).
gggatgacgaagattgctt

SEQ ID NO: 727962 - DNA, 19 bp, Mus musculus
  siRNA target sequence for 1700008E09Rik (NM_027055.1,469-487).
catgggcctcacatacagt

SEQ ID NO: 727963 - DNA, 19 bp, Mus musculus
  siRNA target sequence for 1700008E09Rik (NM_027055.1,504-522).
gttctggccacctttgcaa

SEQ ID NO: 727964 - DNA, 19 bp, Mus musculus
  siRNA target sequence for Wdfy1 (NM_027057.1,177-195).
ccgagtatggctgaaaaga

SEQ ID NO: 727965 - DNA, 19 bp, Mus musculus
  siRNA target sequence for Wdfy1 (NM_027057.1,267-285).
cgacagcaggcggatattt

SEQ ID NO: 727966 - DNA, 19 bp, Mus musculus
  siRNA target sequence for Wdfy1 (NM_027057.1,319-337).
cacgtttctgaagatttta

SEQ ID NO: 727967 - DNA, 19 bp, Mus musculus
  siRNA target sequence for Wdfy1 (NM_027057.1,379-397).
cgcgtgtctgctatcatct

SEQ ID NO: 727968 - DNA, 19 bp, Mus musculus
  siRNA target sequence for Wdfy1 (NM_027057.1,380-398).
gcgtgtctgctatcatctt

SEQ ID NO: 727969 - DNA, 19 bp, Mus musculus
  siRNA target sequence for Wdfy1 (NM_027057.1,461-479).
cgcgcagcgggaatatgct

SEQ ID NO: 727970 - DNA, 19 bp, Mus musculus
  siRNA target sequence for Wdfy1 (NM_027057.1,462-480).
gcgcagcgggaatatgctt

SEQ ID NO: 727971 - DNA, 19 bp, Mus musculus
  siRNA target sequence for 1700017D11Rik (NM_027061.1,178-196).
cgcaacgttcttccttatt

SEQ ID NO: 727972 - DNA, 19 bp, Mus musculus
  siRNA target sequence for 1700017D11Rik (NM_027061.1,180-198).
caacgttcttccttattca

SEQ ID NO: 727973 - DNA, 19 bp, Mus musculus
  siRNA target sequence for 1700017D11Rik (NM_027061.1,183-201).
cgttcttccttattcaata

SEQ ID NO: 727974 - DNA, 19 bp, Mus musculus
  siRNA target sequence for 1700017D11Rik (NM_027061.1,184-202).
gttcttccttattcaatat

SEQ ID NO: 727975 - DNA, 19 bp, Mus musculus
  siRNA target sequence for 1700017D11Rik (NM_027061.1,223-241).
cggtagggcacccagtaaa

SEQ ID NO: 727976 - DNA, 19 bp, Mus musculus
  siRNA target sequence for 1700017D11Rik (NM_027061.1,224-242).
ggtagggcacccagtaaaa

SEQ ID NO: 727977 - DNA, 19 bp, Mus musculus
  siRNA target sequence for 1700017D11Rik (NM_027061.1,228-246).
gggcacccagtaaaaatat

SEQ ID NO: 727978 - DNA, 19 bp, Mus musculus
  siRNA target sequence for 1700017D11Rik (NM_027061.1,229-247).
ggcacccagtaaaaatata

SEQ ID NO: 727979 - DNA, 19 bp, Mus musculus
  siRNA target sequence for 1700017D11Rik (NM_027061.1,230-248).
gcacccagtaaaaatatat

SEQ ID NO: 727980 - DNA, 19 bp, Mus musculus
  siRNA target sequence for 1700017D11Rik (NM_027061.1,273-291).
gtccttatttgtatggata

SEQ ID NO: 727981 - DNA, 19 bp, Mus musculus
  siRNA target sequence for 1700017D11Rik (NM_027061.1,294-312).
gatcgtgccaataaagaaa

SEQ ID NO: 727982 - DNA, 19 bp, Mus musculus
  siRNA target sequence for 1700017D11Rik (NM_027061.1,315-333).
gtggaccccacctatttat

SEQ ID NO: 727983 - DNA, 19 bp, Mus musculus
  siRNA target sequence for 1700017D11Rik (NM_027061.1,363-381).
gggaatagccagataaata

SEQ ID NO: 727984 - DNA, 19 bp, Mus musculus
  siRNA target sequence for 1700017D11Rik (NM_027061.1,364-382).
ggaatagccagataaatat

SEQ ID NO: 727985 - DNA, 19 bp, Mus musculus
  siRNA target sequence for 1700017D11Rik (NM_027061.1,425-443).
gttatctggactttactca

SEQ ID NO: 727986 - DNA, 19 bp, Mus musculus
  siRNA target sequence for 1700017D11Rik (NM_027061.1,430-448).
ctggactttactcatgtat

SEQ ID NO: 727987 - DNA, 19 bp, Mus musculus
  siRNA target sequence for 1700017D11Rik (NM_027061.1,450-468).
ctttcctataagactatca

SEQ ID NO: 727988 - DNA, 19 bp, Mus musculus
  siRNA target sequence for 1700017D11Rik (NM_027061.1,552-570).
cacatggccgtgcgtttta

SEQ ID NO: 727989 - DNA, 19 bp, Mus musculus
  siRNA target sequence for 1700017D11Rik (NM_027061.1,594-612).
cacaatgacctgctcttta

SEQ ID NO: 727990 - DNA, 19 bp, Mus musculus
  siRNA target sequence for 1700017D11Rik (NM_027061.1,596-614).
caatgacctgctctttaga

SEQ ID NO: 727991 - DNA, 19 bp, Mus musculus
  siRNA target sequence for 1700017D11Rik (NM_027061.1,716-734).
cctgtatgagctgttcata

SEQ ID NO: 727992 - DNA, 19 bp, Mus musculus
  siRNA target sequence for 1700017D11Rik (NM_027061.1,731-749).
catagcctttcaagtgaat

SEQ ID NO: 727993 - DNA, 19 bp, Mus musculus
  siRNA target sequence for 1700017D11Rik (NM_027061.1,759-777).
ccgggctggagaagtttgt

SEQ ID NO: 727994 - DNA, 19 bp, Mus musculus
  siRNA target sequence for 1700017D11Rik (NM_027061.1,834-852).
gatcggatggaagaatttt

SEQ ID NO: 727995 - DNA, 19 bp, Mus musculus
  siRNA target sequence for 1700017D11Rik (NM_027061.1,917-935).
ggaccacagttttcaagta

SEQ ID NO: 727996 - DNA, 19 bp, Mus musculus
  siRNA target sequence for 1700017D11Rik (NM_027061.1,918-936).
gaccacagttttcaagtaa

SEQ ID NO: 727997 - DNA, 19 bp, Mus musculus
  siRNA target sequence for 1700017D11Rik (NM_027061.1,930-948).
caagtaacacggatagaca

SEQ ID NO: 727998 - DNA, 19 bp, Mus musculus
  siRNA target sequence for 1700017D11Rik (NM_027061.1,933-951).
gtaacacggatagacaatt

SEQ ID NO: 727999 - DNA, 19 bp, Mus musculus
  siRNA target sequence for 1700017D11Rik (NM_027061.1,975-993).
gaaggtctgcacagcaatt

SEQ ID NO: 728000 - DNA, 19 bp, Mus musculus
  siRNA target sequence for 1700017D11Rik (NM_027061.1,1054-1072).
gtcagatctgtgtttctgt

SEQ ID NO: 728001 - DNA, 19 bp, Mus musculus
  siRNA target sequence for 1700025F22Rik (NM_027074.1,181-199).
cagaatcgtttgtggataa

SEQ ID NO: 728002 - DNA, 19 bp, Mus musculus
  siRNA target sequence for 1700025F22Rik (NM_027074.1,228-246).
cctatcaggaagtttatca

SEQ ID NO: 728003 - DNA, 19 bp, Mus musculus
  siRNA target sequence for 1700025F22Rik (NM_027074.1,233-251).
caggaagtttatcaataat

SEQ ID NO: 728004 - DNA, 19 bp, Mus musculus
  siRNA target sequence for 1700025F22Rik (NM_027074.1,239-257).
gtttatcaataatactaca

SEQ ID NO: 728005 - DNA, 19 bp, Mus musculus
  siRNA target sequence for 1700025F22Rik (NM_027074.1,312-330).
catcttcgcaacactagtt

SEQ ID NO: 728006 - DNA, 19 bp, Mus musculus
  siRNA target sequence for 1700025F22Rik (NM_027074.1,344-362).
caacagtcgaaatgatagt

SEQ ID NO: 728007 - DNA, 19 bp, Mus musculus
  siRNA target sequence for 1700025F22Rik (NM_027074.1,361-379).
gtgacttcaagtgtatatt

SEQ ID NO: 728008 - DNA, 19 bp, Mus musculus
  siRNA target sequence for 1700025F22Rik (NM_027074.1,363-381).
gacttcaagtgtatattct

SEQ ID NO: 728009 - DNA, 19 bp, Mus musculus
  siRNA target sequence for 1700025F22Rik (NM_027074.1,405-423).
cagggtgcttacagaatat

SEQ ID NO: 728010 - DNA, 19 bp, Mus musculus
  siRNA target sequence for 1700025F22Rik (NM_027074.1,407-425).
gggtgcttacagaatatct

SEQ ID NO: 728011 - DNA, 19 bp, Mus musculus
  siRNA target sequence for 1700025F22Rik (NM_027074.1,409-427).
gtgcttacagaatatctgt

SEQ ID NO: 728012 - DNA, 19 bp, Mus musculus
  siRNA target sequence for 1700025F22Rik (NM_027074.1,450-468).
gttcatggcatccatagta

SEQ ID NO: 728013 - DNA, 19 bp, Mus musculus
  siRNA target sequence for 1700025F22Rik (NM_027074.1,466-484).
gtaactgagtggacctata

SEQ ID NO: 728014 - DNA, 19 bp, Mus musculus
  siRNA target sequence for 1700025F22Rik (NM_027074.1,480-498).
ctatagagcaagacaaata

SEQ ID NO: 728015 - DNA, 19 bp, Mus musculus
  siRNA target sequence for 1700019M22Rik (NM_027076.1,129-147).
cgtaaatcctgttccaaat

SEQ ID NO: 728016 - DNA, 19 bp, Mus musculus
  siRNA target sequence for 1700019M22Rik (NM_027076.1,163-181).
gaaggcccacggtgcaaaa

SEQ ID NO: 728017 - DNA, 19 bp, Mus musculus
  siRNA target sequence for 1700023M03Rik (NM_027078.1,340-358).
gcaagtaccaggaatgtga

SEQ ID NO: 728018 - DNA, 19 bp, Mus musculus
  siRNA target sequence for 1700023M03Rik (NM_027078.1,361-379).
ctctcgtggaacaactgaa

SEQ ID NO: 728019 - DNA, 19 bp, Mus musculus
  siRNA target sequence for 1700023M03Rik (NM_027078.1,386-404).
ccaaatagcggctcatcta

SEQ ID NO: 728020 - DNA, 19 bp, Mus musculus
  siRNA target sequence for 1700023M03Rik (NM_027078.1,387-405).
caaatagcggctcatctaa

SEQ ID NO: 728021 - DNA, 19 bp, Mus musculus
  siRNA target sequence for 1700023M03Rik (NM_027078.1,442-460).
ggtctaacaggataactga

SEQ ID NO: 728022 - DNA, 19 bp, Mus musculus
  siRNA target sequence for 1700023M03Rik (NM_027078.1,461-479).
gagacagggcacactgaat

SEQ ID NO: 728023 - DNA, 19 bp, Mus musculus
  siRNA target sequence for 1700023M03Rik (NM_027078.1,546-564).
gacatgggcctcaagatta

SEQ ID NO: 728024 - DNA, 19 bp, Mus musculus
  siRNA target sequence for 1700023M03Rik (NM_027078.1,548-566).
catgggcctcaagattaca

SEQ ID NO: 728025 - DNA, 19 bp, Mus musculus
  siRNA target sequence for 1700023M03Rik (NM_027078.1,586-604).
ggcggatttccggtttagt

SEQ ID NO: 728026 - DNA, 19 bp, Mus musculus
  siRNA target sequence for 1700023M03Rik (NM_027078.1,587-605).
gcggatttccggtttagta

SEQ ID NO: 728027 - DNA, 19 bp, Mus musculus
  siRNA target sequence for 1700023M03Rik (NM_027078.1,588-606).
cggatttccggtttagtaa

SEQ ID NO: 728028 - DNA, 19 bp, Mus musculus
  siRNA target sequence for 1700023M03Rik (NM_027078.1,590-608).
gatttccggtttagtaact

SEQ ID NO: 728029 - DNA, 19 bp, Mus musculus
  siRNA target sequence for 1700023M03Rik (NM_027078.1,668-686).
gacggctacggtggaaaat

SEQ ID NO: 728030 - DNA, 19 bp, Mus musculus
  siRNA target sequence for 1700023M03Rik (NM_027078.1,670-688).
cggctacggtggaaaatat

SEQ ID NO: 728031 - DNA, 19 bp, Mus musculus
  siRNA target sequence for 1700023M03Rik (NM_027078.1,671-689).
ggctacggtggaaaatata

SEQ ID NO: 728032 - DNA, 19 bp, Mus musculus
  siRNA target sequence for 1700023M03Rik (NM_027078.1,745-763).
gcgaaaatgcgaaaagaat

SEQ ID NO: 728033 - DNA, 19 bp, Mus musculus
  siRNA target sequence for 1700023M03Rik (NM_027078.1,810-828).
gagcacacagataggtttt

SEQ ID NO: 728034 - DNA, 19 bp, Mus musculus
  siRNA target sequence for 1700023M03Rik (NM_027078.1,841-859).
gtgacagggcgaaagttct

SEQ ID NO: 728035 - DNA, 19 bp, Mus musculus
  siRNA target sequence for 1700023M03Rik (NM_027078.1,914-932).
ggacttctcgcgtttggaa

SEQ ID NO: 728036 - DNA, 19 bp, Mus musculus
  siRNA target sequence for 1700023M03Rik (NM_027078.1,967-985).
gactaggttctgacttaat

SEQ ID NO: 728037 - DNA, 19 bp, Mus musculus
  siRNA target sequence for 1700023M03Rik (NM_027078.1,1022-1040).
gatatctaatttaacagta

SEQ ID NO: 728038 - DNA, 19 bp, Mus musculus
  siRNA target sequence for 1700023M03Rik (NM_027078.1,1047-1065).
gctgcgattaaggacatta

SEQ ID NO: 728039 - DNA, 19 bp, Mus musculus
  siRNA target sequence for 1700023M03Rik (NM_027078.1,1048-1066).
ctgcgattaaggacattaa

SEQ ID NO: 728040 - DNA, 19 bp, Mus musculus
  siRNA target sequence for 1700023M03Rik (NM_027078.1,1068-1086).
gatgaaataacgcatattt

SEQ ID NO: 728041 - DNA, 19 bp, Mus musculus
  siRNA target sequence for 1700027J05Rik (NM_027081.1,159-177).
gagttcaaggagcttacaa

SEQ ID NO: 728042 - DNA, 19 bp, Mus musculus
  siRNA target sequence for 1700027J05Rik (NM_027081.1,356-374).
cctctacacctcctatact

SEQ ID NO: 728043 - DNA, 19 bp, Mus musculus
  siRNA target sequence for 1700027J05Rik (NM_027081.1,389-407).
ggacaaagcgctgcttaaa

SEQ ID NO: 728044 - DNA, 19 bp, Mus musculus
  siRNA target sequence for 1700027J05Rik (NM_027081.1,392-410).
caaagcgctgcttaaacga

SEQ ID NO: 728045 - DNA, 19 bp, Mus musculus
  siRNA target sequence for 1700027J05Rik (NM_027081.1,480-498).
gagctcacacagagtttca

SEQ ID NO: 728046 - DNA, 19 bp, Mus musculus
  siRNA target sequence for 1700027J05Rik (NM_027081.1,526-544).
gcctcatgccgctacagaa

SEQ ID NO: 728047 - DNA, 19 bp, Mus musculus
  siRNA target sequence for 1700027J05Rik (NM_027081.1,583-601).
ccttccgccaggacgattt

SEQ ID NO: 728048 - DNA, 19 bp, Mus musculus
  siRNA target sequence for 1700027J05Rik (NM_027081.1,664-682).
gcctctacaggcggttttt

SEQ ID NO: 728049 - DNA, 19 bp, Mus musculus
  siRNA target sequence for 1700027J05Rik (NM_027081.1,683-701).
caagtccccccattttgat

SEQ ID NO: 728050 - DNA, 19 bp, Mus musculus
  siRNA target sequence for 1700027J05Rik (NM_027081.1,707-725).
gtatcggcaacgacacaaa

SEQ ID NO: 728051 - DNA, 19 bp, Mus musculus
  siRNA target sequence for 1700027J05Rik (NM_027081.1,748-766).
ctctgcacctggaagctat

SEQ ID NO: 728052 - DNA, 19 bp, Mus musculus
  siRNA target sequence for 1700027J05Rik (NM_027081.1,821-839).
cgacctggtcctgaaactt

SEQ ID NO: 728053 - DNA, 19 bp, Mus musculus
  siRNA target sequence for 1700027J05Rik (NM_027081.1,899-917).
gcgggctcagctgtacatt

SEQ ID NO: 728054 - DNA, 19 bp, Mus musculus
  siRNA target sequence for 1700027J05Rik (NM_027081.1,901-919).
gggctcagctgtacattga

SEQ ID NO: 728055 - DNA, 19 bp, Mus musculus
  siRNA target sequence for 1700027J05Rik (NM_027081.1,908-926).
gctgtacattgatacagtt

SEQ ID NO: 728056 - DNA, 19 bp, Mus musculus
  siRNA target sequence for 1700027J05Rik (NM_027081.1,909-927).
ctgtacattgatacagtta

SEQ ID NO: 728057 - DNA, 19 bp, Mus musculus
  siRNA target sequence for 4930579C15Rik (NM_027089.1,81-99).
cctcccagacattatcagt

SEQ ID NO: 728058 - DNA, 19 bp, Mus musculus
  siRNA target sequence for 4930579C15Rik (NM_027089.1,123-141).
gcctggtgtgacactttca

SEQ ID NO: 728059 - DNA, 19 bp, Mus musculus
  siRNA target sequence for 4930579C15Rik (NM_027089.1,288-306).
cacaccaaacataaaaggt

SEQ ID NO: 728060 - DNA, 19 bp, Mus musculus
  siRNA target sequence for 4930579C15Rik (NM_027089.1,317-335).
ctgtgactgccacaactaa

SEQ ID NO: 728061 - DNA, 19 bp, Mus musculus
  siRNA target sequence for 4930579C15Rik (NM_027089.1,394-412).
gaagaaaaacctagtgaat

SEQ ID NO: 728062 - DNA, 19 bp, Mus musculus
  siRNA target sequence for 4930579C15Rik (NM_027089.1,409-427).
gaatcctctcgtaaaacct

SEQ ID NO: 728063 - DNA, 19 bp, Mus musculus
  siRNA target sequence for 4930579C15Rik (NM_027089.1,432-450).
ccccaatatacctgcattt

SEQ ID NO: 728064 - DNA, 19 bp, Mus musculus
  siRNA target sequence for 4930579C15Rik (NM_027089.1,433-451).
cccaatatacctgcatttt

SEQ ID NO: 728065 - DNA, 19 bp, Mus musculus
  siRNA target sequence for 4930579C15Rik (NM_027089.1,443-461).
ctgcattttggacaatatt

SEQ ID NO: 728066 - DNA, 19 bp, Mus musculus
  siRNA target sequence for 4930579C15Rik (NM_027089.1,445-463).
gcattttggacaatattat

SEQ ID NO: 728067 - DNA, 19 bp, Mus musculus
  siRNA target sequence for 4930579C15Rik (NM_027089.1,453-471).
gacaatattatctaaagct

SEQ ID NO: 728068 - DNA, 19 bp, Mus musculus
  siRNA target sequence for 4930579C15Rik (NM_027089.1,496-514).
gatgataaagatcaatttt

SEQ ID NO: 728069 - DNA, 19 bp, Mus musculus
  siRNA target sequence for 4930579C15Rik (NM_027089.1,521-539).
caattccagcctcagattt

SEQ ID NO: 728070 - DNA, 19 bp, Mus musculus
  siRNA target sequence for 4930579C15Rik (NM_027089.1,627-645).
gctaatccccctcttgata

SEQ ID NO: 728071 - DNA, 19 bp, Mus musculus
  siRNA target sequence for 4930579C15Rik (NM_027089.1,628-646).
ctaatccccctcttgatat

SEQ ID NO: 728072 - DNA, 19 bp, Mus musculus
  siRNA target sequence for 4930579C15Rik (NM_027089.1,650-668).
gctttgccacactgtacaa

SEQ ID NO: 728073 - DNA, 19 bp, Mus musculus
  siRNA target sequence for 4930579C15Rik (NM_027089.1,676-694).
cacctaagtgacaaaagtt

SEQ ID NO: 728074 - DNA, 19 bp, Mus musculus
  siRNA target sequence for 4930579C15Rik (NM_027089.1,754-772).
gaaggtgtgtcagatacat

SEQ ID NO: 728075 - DNA, 19 bp, Mus musculus
  siRNA target sequence for 4930579C15Rik (NM_027089.1,764-782).
cagatacatctttttcgaa

SEQ ID NO: 728076 - DNA, 19 bp, Mus musculus
  siRNA target sequence for 4930579C15Rik (NM_027089.1,848-866).
ggtcaaaatctaaacctat

SEQ ID NO: 728077 - DNA, 19 bp, Mus musculus
  siRNA target sequence for 4930579C15Rik (NM_027089.1,878-896).
caggctccaatcaaacagt

SEQ ID NO: 728078 - DNA, 19 bp, Mus musculus
  siRNA target sequence for 4930579C15Rik (NM_027089.1,882-900).
ctccaatcaaacagtctta

SEQ ID NO: 728079 - DNA, 19 bp, Mus musculus
  siRNA target sequence for 4930579C15Rik (NM_027089.1,922-940).
cctcctgaggagacaagat

SEQ ID NO: 728080 - DNA, 19 bp, Mus musculus
  siRNA target sequence for 4930579C15Rik (NM_027089.1,923-941).
ctcctgaggagacaagatt

SEQ ID NO: 728081 - DNA, 19 bp, Mus musculus
  siRNA target sequence for 4930579C15Rik (NM_027089.1,1035-1053).
ggaaggatcaccgagtaat

SEQ ID NO: 728082 - DNA, 19 bp, Mus musculus
  siRNA target sequence for 4930579C15Rik (NM_027089.1,1036-1054).
gaaggatcaccgagtaatt

SEQ ID NO: 728083 - DNA, 19 bp, Mus musculus
  siRNA target sequence for 2310003L22Rik (NM_027093.1,702-720).
gaggcgacacactctatga

SEQ ID NO: 728084 - DNA, 19 bp, Mus musculus
  siRNA target sequence for 2310003L22Rik (NM_027093.1,705-723).
gcgacacactctatgaact

SEQ ID NO: 728085 - DNA, 19 bp, Mus musculus
  siRNA target sequence for 2310003L22Rik (NM_027093.1,762-780).
gaggcttttccccacatat

SEQ ID NO: 728086 - DNA, 19 bp, Mus musculus
  siRNA target sequence for 2310003L22Rik (NM_027093.1,764-782).
ggcttttccccacatattt

SEQ ID NO: 728087 - DNA, 19 bp, Mus musculus
  siRNA target sequence for 2310003L22Rik (NM_027093.1,850-868).
ggatactgatgaaattcaa

SEQ ID NO: 728088 - DNA, 19 bp, Mus musculus
  siRNA target sequence for 2310003L22Rik (NM_027093.1,981-999).
cagcggtttacagagaaat

SEQ ID NO: 728089 - DNA, 19 bp, Mus musculus
  siRNA target sequence for 2310003L22Rik (NM_027093.1,983-1001).
gcggtttacagagaaatgt

SEQ ID NO: 728090 - DNA, 19 bp, Mus musculus
  siRNA target sequence for 2310003L22Rik (NM_027093.1,1051-1069).
gataggatggaaataccat

SEQ ID NO: 728091 - DNA, 19 bp, Mus musculus
  siRNA target sequence for 2310003L22Rik (NM_027093.1,1128-1146).
caaaactaaatgatgtcat

SEQ ID NO: 728092 - DNA, 19 bp, Mus musculus
  siRNA target sequence for 2310003L22Rik (NM_027093.1,1142-1160).
gtcatgtcgcatgagaaaa

SEQ ID NO: 728093 - DNA, 19 bp, Mus musculus
  siRNA target sequence for 2310003L22Rik (NM_027093.1,1144-1162).
catgtcgcatgagaaaaaa

SEQ ID NO: 728094 - DNA, 19 bp, Mus musculus
  siRNA target sequence for 2310003M01Rik (NM_027104.1,209-227).
cactgcagcagtaatgtgt

SEQ ID NO: 728095 - DNA, 19 bp, Mus musculus
  siRNA target sequence for 2310003M01Rik (NM_027104.1,256-274).
ggtcatacctcgaaatgct

SEQ ID NO: 728096 - DNA, 19 bp, Mus musculus
  siRNA target sequence for 2310003M01Rik (NM_027104.1,272-290).
gctggtgcccccttgtcta

SEQ ID NO: 728097 - DNA, 19 bp, Mus musculus
  siRNA target sequence for 2310003M01Rik (NM_027104.1,273-291).
ctggtgcccccttgtctaa

SEQ ID NO: 728098 - DNA, 19 bp, Mus musculus
  siRNA target sequence for 2310003M01Rik (NM_027104.1,276-294).
gtgcccccttgtctaaagt

SEQ ID NO: 728099 - DNA, 19 bp, Mus musculus
  siRNA target sequence for 2310003M01Rik (NM_027104.1,391-409).
gttgatcctctctgaacta

SEQ ID NO: 728100 - DNA, 19 bp, Mus musculus
  siRNA target sequence for 2310002B14Rik (NM_027105.1,295-313).
cagcggctttgaaaactct

SEQ ID NO: 728101 - DNA, 19 bp, Mus musculus
  siRNA target sequence for 2310002B14Rik (NM_027105.1,415-433).
gcctgtgagctatgtatct

SEQ ID NO: 728102 - DNA, 19 bp, Mus musculus
  siRNA target sequence for 2310002B14Rik (NM_027105.1,416-434).
cctgtgagctatgtatcta

SEQ ID NO: 728103 - DNA, 19 bp, Mus musculus
  siRNA target sequence for 2310002B14Rik (NM_027105.1,444-462).
ggccagtgagtcctttcat

SEQ ID NO: 728104 - DNA, 19 bp, Mus musculus
  siRNA target sequence for 2310002B14Rik (NM_027105.1,473-491).
cgtcctgtaagctgtgtat

SEQ ID NO: 728105 - DNA, 19 bp, Mus musculus
  siRNA target sequence for 2310002B14Rik (NM_027105.1,512-530).
ccttgtggatccaatagct

SEQ ID NO: 728106 - DNA, 19 bp, Mus musculus
  siRNA target sequence for 2310002B14Rik (NM_027105.1,533-551).
cgacctctgggcattgtca

SEQ ID NO: 728107 - DNA, 19 bp, Mus musculus
  siRNA target sequence for 2310002B14Rik (NM_027105.1,537-555).
ctctgggcattgtcactta

SEQ ID NO: 728108 - DNA, 19 bp, Mus musculus
  siRNA target sequence for 2310002B14Rik (NM_027105.1,542-560).
ggcattgtcacttatggat

SEQ ID NO: 728109 - DNA, 19 bp, Mus musculus
  siRNA target sequence for 2310002B14Rik (NM_027105.1,587-605).
ggccctcagaccattcaca

SEQ ID NO: 728110 - DNA, 19 bp, Mus musculus
  siRNA target sequence for 2310002B14Rik (NM_027105.1,588-606).
gccctcagaccattcacat

SEQ ID NO: 728111 - DNA, 19 bp, Mus musculus
  siRNA target sequence for 2310002B14Rik (NM_027105.1,591-609).
ctcagaccattcacattgt

SEQ ID NO: 728112 - DNA, 19 bp, Mus musculus
  siRNA target sequence for 2310002B14Rik (NM_027105.1,597-615).
ccattcacattgtgtcaaa

SEQ ID NO: 728113 - DNA, 19 bp, Mus musculus
  siRNA target sequence for 2310008N12Rik (NM_027106.1,407-425).
gccggagcctggttctaca

SEQ ID NO: 728114 - DNA, 19 bp, Mus musculus
  siRNA target sequence for Klhdc2 (NM_027117.1,373-391).
cggctacaagagtaatcaa

SEQ ID NO: 728115 - DNA, 19 bp, Mus musculus
  siRNA target sequence for Klhdc2 (NM_027117.1,375-393).
gctacaagagtaatcaagt

SEQ ID NO: 728116 - DNA, 19 bp, Mus musculus
  siRNA target sequence for Klhdc2 (NM_027117.1,392-410).
gtgagaggattatatgact

SEQ ID NO: 728117 - DNA, 19 bp, Mus musculus
  siRNA target sequence for Klhdc2 (NM_027117.1,485-503).
gacgttcccccgtctatgt

SEQ ID NO: 728118 - DNA, 19 bp, Mus musculus
  siRNA target sequence for Klhdc2 (NM_027117.1,527-545).
gaccgggtgctgtacttgt

SEQ ID NO: 728119 - DNA, 19 bp, Mus musculus
  siRNA target sequence for Klhdc2 (NM_027117.1,529-547).
ccgggtgctgtacttgttt

SEQ ID NO: 728120 - DNA, 19 bp, Mus musculus
  siRNA target sequence for Klhdc2 (NM_027117.1,566-584).
ggcaatacaaacaagttct

SEQ ID NO: 728121 - DNA, 19 bp, Mus musculus
  siRNA target sequence for Klhdc2 (NM_027117.1,630-648).
ggatcgactgccaaggaat

SEQ ID NO: 728122 - DNA, 19 bp, Mus musculus
  siRNA target sequence for Klhdc2 (NM_027117.1,654-672).
catcatcaaaggacaaact

SEQ ID NO: 728123 - DNA, 19 bp, Mus musculus
  siRNA target sequence for Klhdc2 (NM_027117.1,674-692).
ggcgtctgggtgtataaaa

SEQ ID NO: 728124 - DNA, 19 bp, Mus musculus
  siRNA target sequence for Klhdc2 (NM_027117.1,675-693).
gcgtctgggtgtataaaaa

SEQ ID NO: 728125 - DNA, 19 bp, Mus musculus
  siRNA target sequence for Klhdc2 (NM_027117.1,681-699).
gggtgtataaaaacaagtt

SEQ ID NO: 728126 - DNA, 19 bp, Mus musculus
  siRNA target sequence for Klhdc2 (NM_027117.1,802-820).
gaatgatcatgtccatatt

SEQ ID NO: 728127 - DNA, 19 bp, Mus musculus
  siRNA target sequence for Klhdc2 (NM_027117.1,809-827).
catgtccatattttagaca

SEQ ID NO: 728128 - DNA, 19 bp, Mus musculus
  siRNA target sequence for Klhdc2 (NM_027117.1,936-954).
gataccgggatgctagaat

SEQ ID NO: 728129 - DNA, 19 bp, Mus musculus
  siRNA target sequence for Klhdc2 (NM_027117.1,991-1009).
gtggaatgaactaattcca

SEQ ID NO: 728130 - DNA, 19 bp, Mus musculus
  siRNA target sequence for Klhdc2 (NM_027117.1,1082-1100).
ggaggatttaccactgaaa

SEQ ID NO: 728131 - DNA, 19 bp, Mus musculus
  siRNA target sequence for Klhdc2 (NM_027117.1,1123-1141).
gacttactgcatcagtaaa

SEQ ID NO: 728132 - DNA, 19 bp, Mus musculus
  siRNA target sequence for Klhdc2 (NM_027117.1,1236-1254).
gtggttgtgctaacaatct

SEQ ID NO: 728133 - DNA, 19 bp, Mus musculus
  siRNA target sequence for Klhdc2 (NM_027117.1,1279-1297).
cagtaatgaagtacttata

SEQ ID NO: 728134 - DNA, 19 bp, Mus musculus
  siRNA target sequence for Klhdc2 (NM_027117.1,1337-1355).
gaagcagtcatctgcttta

SEQ ID NO: 728135 - DNA, 19 bp, Mus musculus
  siRNA target sequence for Klhdc2 (NM_027117.1,1400-1418).
cttcacagcgttaatcaga

SEQ ID NO: 728136 - DNA, 19 bp, Mus musculus
  siRNA target sequence for Klhdc2 (NM_027117.1,1415-1433).
cagaggtttggtagtaaca

SEQ ID NO: 728137 - DNA, 19 bp, Mus musculus
  siRNA target sequence for 2310010B21Rik (NM_027123.2,268-286).
gttcagggtcagattccat

SEQ ID NO: 728138 - DNA, 19 bp, Mus musculus
  siRNA target sequence for 2310010B21Rik (NM_027123.2,287-305).
cacgcatactgtaaaaact

SEQ ID NO: 728139 - DNA, 19 bp, Mus musculus
  siRNA target sequence for 2310010B21Rik (NM_027123.2,357-375).
cccaggcgcaggaatggaa

SEQ ID NO: 728140 - DNA, 19 bp, Mus musculus
  siRNA target sequence for 2310010B21Rik (NM_027123.2,752-770).
ctcgaagtccaccatcttt

SEQ ID NO: 728141 - DNA, 19 bp, Mus musculus
  siRNA target sequence for 2310010B21Rik (NM_027123.2,830-848).
gttgtccgtcaacttcaaa

SEQ ID NO: 728142 - DNA, 19 bp, Mus musculus
  siRNA target sequence for 2310010B21Rik (NM_027123.2,833-851).
gtccgtcaacttcaaagta

SEQ ID NO: 728143 - DNA, 19 bp, Mus musculus
  siRNA target sequence for 2310010B21Rik (NM_027123.2,836-854).
cgtcaacttcaaagtaaaa

SEQ ID NO: 728144 - DNA, 19 bp, Mus musculus
  siRNA target sequence for 2310010B21Rik (NM_027123.2,877-895).
ggagatcacgtccgtttat

SEQ ID NO: 728145 - DNA, 19 bp, Mus musculus
  siRNA target sequence for 2310010B21Rik (NM_027123.2,883-901).
cacgtccgtttataggatt

SEQ ID NO: 728146 - DNA, 19 bp, Mus musculus
  siRNA target sequence for 2310010B21Rik (NM_027123.2,907-925).
ggtgtgtcctgaagaagta

SEQ ID NO: 728147 - DNA, 19 bp, Mus musculus
  siRNA target sequence for 2310010B21Rik (NM_027123.2,958-976).
caacttctccatttcagta

SEQ ID NO: 728148 - DNA, 19 bp, Mus musculus
  siRNA target sequence for 2310010B21Rik (NM_027123.2,961-979).
cttctccatttcagtagtt

SEQ ID NO: 728149 - DNA, 19 bp, Mus musculus
  siRNA target sequence for 2310010B21Rik (NM_027123.2,985-1003).
cctgagccctaaatccatt

SEQ ID NO: 728150 - DNA, 19 bp, Mus musculus
  siRNA target sequence for 2310010B21Rik (NM_027123.2,986-1004).
ctgagccctaaatccatta

SEQ ID NO: 728151 - DNA, 19 bp, Mus musculus
  siRNA target sequence for 2310010B21Rik (NM_027123.2,1045-1063).
cgcactcccactgcttata

SEQ ID NO: 728152 - DNA, 19 bp, Mus musculus
  siRNA target sequence for 2310010B21Rik (NM_027123.2,1047-1065).
cactcccactgcttataaa

SEQ ID NO: 728153 - DNA, 19 bp, Mus musculus
  siRNA target sequence for 2310010B21Rik (NM_027123.2,1124-1142).
gtcttggaggcgtttgtct

SEQ ID NO: 728154 - DNA, 19 bp, Mus musculus
  siRNA target sequence for 2310010B21Rik (NM_027123.2,1151-1169).
cacagtgacaggttcttca

SEQ ID NO: 728155 - DNA, 19 bp, Mus musculus
  siRNA target sequence for 2310010B21Rik (NM_027123.2,1289-1307).
gtctcagagatcgttgttt

SEQ ID NO: 728156 - DNA, 19 bp, Mus musculus
  siRNA target sequence for 2310010B21Rik (NM_027123.2,1355-1373).
ccatttggaaagctcaatt

SEQ ID NO: 728157 - DNA, 19 bp, Mus musculus
  siRNA target sequence for 2310010B21Rik (NM_027123.2,1356-1374).
catttggaaagctcaatta

SEQ ID NO: 728158 - DNA, 19 bp, Mus musculus
  siRNA target sequence for 2310010B21Rik (NM_027123.2,1420-1438).
gctctgtgcccgtttacat

SEQ ID NO: 728159 - DNA, 19 bp, Mus musculus
  siRNA target sequence for 2310010B21Rik (NM_027123.2,1425-1443).
gtgcccgtttacatcactt

SEQ ID NO: 728160 - DNA, 19 bp, Mus musculus
  siRNA target sequence for 2310010B21Rik (NM_027123.2,1493-1511).
cgacatcccgtcaacttca

SEQ ID NO: 728161 - DNA, 19 bp, Mus musculus
  siRNA target sequence for 2310010B21Rik (NM_027123.2,1494-1512).
gacatcccgtcaacttcat

SEQ ID NO: 728162 - DNA, 19 bp, Mus musculus
  siRNA target sequence for 2310010B21Rik (NM_027123.2,1496-1514).
catcccgtcaacttcatgt

SEQ ID NO: 728163 - DNA, 19 bp, Mus musculus
  siRNA target sequence for 2310010B21Rik (NM_027123.2,1499-1517).
cccgtcaacttcatgtcaa

SEQ ID NO: 728164 - DNA, 19 bp, Mus musculus
  siRNA target sequence for 2310010B21Rik (NM_027123.2,1500-1518).
ccgtcaacttcatgtcaaa

SEQ ID NO: 728165 - DNA, 19 bp, Mus musculus
  siRNA target sequence for 2310010B21Rik (NM_027123.2,1549-1567).
gcaaggtaaagagtcatat

SEQ ID NO: 728166 - DNA, 19 bp, Mus musculus
  siRNA target sequence for 2310010B21Rik (NM_027123.2,1550-1568).
caaggtaaagagtcatatt

SEQ ID NO: 728167 - DNA, 19 bp, Mus musculus
  siRNA target sequence for 2310010B21Rik (NM_027123.2,1554-1572).
gtaaagagtcatatttgga

SEQ ID NO: 728168 - DNA, 19 bp, Mus musculus
  siRNA target sequence for 2310010B21Rik (NM_027123.2,1592-1610).
ctgacccaacttttcctaa

SEQ ID NO: 728169 - DNA, 19 bp, Mus musculus
  siRNA target sequence for 2310010B21Rik (NM_027123.2,1618-1636).
cctagagtgtccgttctat

SEQ ID NO: 728170 - DNA, 19 bp, Mus musculus
  siRNA target sequence for 2310010B21Rik (NM_027123.2,1619-1637).
ctagagtgtccgttctata

SEQ ID NO: 728171 - DNA, 19 bp, Mus musculus
  siRNA target sequence for 2310010B21Rik (NM_027123.2,1735-1753).
ggtgattggactgattgat

SEQ ID NO: 728172 - DNA, 19 bp, Mus musculus
  siRNA target sequence for 2310010B21Rik (NM_027123.2,1738-1756).
gattggactgattgatctt

SEQ ID NO: 728173 - DNA, 19 bp, Mus musculus
  siRNA target sequence for 2310010B21Rik (NM_027123.2,1787-1805).
gtgttgacgccctattact

SEQ ID NO: 728174 - DNA, 19 bp, Mus musculus
  siRNA target sequence for 2310010B21Rik (NM_027123.2,1794-1812).
cgccctattactacactat

SEQ ID NO: 728175 - DNA, 19 bp, Mus musculus
  siRNA target sequence for 2310010B21Rik (NM_027123.2,1795-1813).
gccctattactacactata

SEQ ID NO: 728176 - DNA, 19 bp, Mus musculus
  siRNA target sequence for 2310035L15Rik (NM_027126.2,924-942).
gcattgaccagaaagtcta

SEQ ID NO: 728177 - DNA, 19 bp, Mus musculus
  siRNA target sequence for 2310035L15Rik (NM_027126.2,1007-1025).
cctgggggctcgagtttgt

SEQ ID NO: 728178 - DNA, 19 bp, Mus musculus
  siRNA target sequence for 2310035L15Rik (NM_027126.2,1015-1033).
ctcgagtttgtccattcaa

SEQ ID NO: 728179 - DNA, 19 bp, Mus musculus
  siRNA target sequence for 2310035L15Rik (NM_027126.2,1060-1078).
gattcgagctgcctacatt

SEQ ID NO: 728180 - DNA, 19 bp, Mus musculus
  siRNA target sequence for 2310035L15Rik (NM_027126.2,1070-1088).
gcctacattggaacaacta

SEQ ID NO: 728181 - DNA, 19 bp, Mus musculus
  siRNA target sequence for 2310035L15Rik (NM_027126.2,1241-1259).
ggggctatagccatagata

SEQ ID NO: 728182 - DNA, 19 bp, Mus musculus
  siRNA target sequence for 2310035L15Rik (NM_027126.2,1243-1261).
ggctatagccatagatact

SEQ ID NO: 728183 - DNA, 19 bp, Mus musculus
  siRNA target sequence for 2310035L15Rik (NM_027126.2,1295-1313).
gaagatgcctacttccaat

SEQ ID NO: 728184 - DNA, 19 bp, Mus musculus
  siRNA target sequence for 2310035L15Rik (NM_027126.2,1309-1327).
ccaatcctgcgtctttgat

SEQ ID NO: 728185 - DNA, 19 bp, Mus musculus
  siRNA target sequence for 2310035L15Rik (NM_027126.2,1317-1335).
gcgtctttgatgtttcagt

SEQ ID NO: 728186 - DNA, 19 bp, Mus musculus
  siRNA target sequence for 2310035L15Rik (NM_027126.2,1339-1357).
cggtgaccccaactttact

SEQ ID NO: 728187 - DNA, 19 bp, Mus musculus
  siRNA target sequence for 2310035L15Rik (NM_027126.2,1399-1417).
gacggatttagagaactta

SEQ ID NO: 728188 - DNA, 19 bp, Mus musculus
  siRNA target sequence for 2310035L15Rik (NM_027126.2,1401-1419).
cggatttagagaacttaca

SEQ ID NO: 728189 - DNA, 19 bp, Mus musculus
  siRNA target sequence for 2310035L15Rik (NM_027126.2,1402-1420).
ggatttagagaacttacat

SEQ ID NO: 728190 - DNA, 19 bp, Mus musculus
  siRNA target sequence for 2310035K24Rik (NM_027129.2,313-331).
cccgaatttggaagataca

SEQ ID NO: 728191 - DNA, 19 bp, Mus musculus
  siRNA target sequence for 2310035K24Rik (NM_027129.2,421-439).
cttccgcaaggaacagatt

SEQ ID NO: 728192 - DNA, 19 bp, Mus musculus
  siRNA target sequence for 2310035K24Rik (NM_027129.2,614-632).
ctatggctgggtatactct

SEQ ID NO: 728193 - DNA, 19 bp, Mus musculus
  siRNA target sequence for 2310035K24Rik (NM_027129.2,730-748).
gctgctgacaccagtttgt

SEQ ID NO: 728194 - DNA, 19 bp, Mus musculus
  siRNA target sequence for 2310035K24Rik (NM_027129.2,966-984).
gccactggaattgtaaagt

SEQ ID NO: 728195 - DNA, 19 bp, Mus musculus
  siRNA target sequence for Lnp (NM_027133.1,132-150).
cgatggagggcaaaacctt

SEQ ID NO: 728196 - DNA, 19 bp, Mus musculus
  siRNA target sequence for Lnp (NM_027133.1,137-155).
gagggcaaaaccttcaaca

SEQ ID NO: 728197 - DNA, 19 bp, Mus musculus
  siRNA target sequence for Lnp (NM_027133.1,219-237).
cagagattgcaaaaattat

SEQ ID NO: 728198 - DNA, 19 bp, Mus musculus
  siRNA target sequence for Lnp (NM_027133.1,238-256).
gggttggaagattaattat

SEQ ID NO: 728199 - DNA, 19 bp, Mus musculus
  siRNA target sequence for Lnp (NM_027133.1,243-261).
ggaagattaattatctatt

SEQ ID NO: 728200 - DNA, 19 bp, Mus musculus
  siRNA target sequence for Lnp (NM_027133.1,432-450).
gaagcattggatgatttaa

SEQ ID NO: 728201 - DNA, 19 bp, Mus musculus
  siRNA target sequence for Lnp (NM_027133.1,496-514).
cttataagacagctaagtt

SEQ ID NO: 728202 - DNA, 19 bp, Mus musculus
  siRNA target sequence for Lnp (NM_027133.1,505-523).
cagctaagttaattcttga

SEQ ID NO: 728203 - DNA, 19 bp, Mus musculus
  siRNA target sequence for Lnp (NM_027133.1,726-744).
gggggaccgccagaaagaa

SEQ ID NO: 728204 - DNA, 19 bp, Mus musculus
  siRNA target sequence for Lnp (NM_027133.1,728-746).
gggaccgccagaaagaact

SEQ ID NO: 728205 - DNA, 19 bp, Mus musculus
  siRNA target sequence for Lnp (NM_027133.1,812-830).
ccctccaggtccaccttta

SEQ ID NO: 728206 - DNA, 19 bp, Mus musculus
  siRNA target sequence for Lnp (NM_027133.1,816-834).
ccaggtccacctttagcaa

SEQ ID NO: 728207 - DNA, 19 bp, Mus musculus
  siRNA target sequence for Lnp (NM_027133.1,855-873).
cgaggtgctctggatagaa

SEQ ID NO: 728208 - DNA, 19 bp, Mus musculus
  siRNA target sequence for Lnp (NM_027133.1,856-874).
gaggtgctctggatagaat

SEQ ID NO: 728209 - DNA, 19 bp, Mus musculus
  siRNA target sequence for Lnp (NM_027133.1,862-880).
ctctggatagaattgttga

SEQ ID NO: 728210 - DNA, 19 bp, Mus musculus
  siRNA target sequence for Lnp (NM_027133.1,864-882).
ctggatagaattgttgaat

SEQ ID NO: 728211 - DNA, 19 bp, Mus musculus
  siRNA target sequence for Lnp (NM_027133.1,908-926).
caggtacgccctcatatgt

SEQ ID NO: 728212 - DNA, 19 bp, Mus musculus
  siRNA target sequence for Lnp (NM_027133.1,910-928).
ggtacgccctcatatgtca

SEQ ID NO: 728213 - DNA, 19 bp, Mus musculus
  siRNA target sequence for Lnp (NM_027133.1,920-938).
catatgtcagcagtgtttt

SEQ ID NO: 728214 - DNA, 19 bp, Mus musculus
  siRNA target sequence for Lnp (NM_027133.1,987-1005).
cgatgtgcctactgttttt

SEQ ID NO: 728215 - DNA, 19 bp, Mus musculus
  siRNA target sequence for Lnp (NM_027133.1,1007-1025).
cttgaatcctgcaagaaaa

SEQ ID NO: 728216 - DNA, 19 bp, Mus musculus
  siRNA target sequence for Lnp (NM_027133.1,1044-1062).
cggcttccagagtttagtt

SEQ ID NO: 728217 - DNA, 19 bp, Mus musculus
  siRNA target sequence for Lnp (NM_027133.1,1099-1117).
ctggtcccacgctactaga

SEQ ID NO: 728218 - DNA, 19 bp, Mus musculus
  siRNA target sequence for Lnp (NM_027133.1,1101-1119).
ggtcccacgctactagaaa

SEQ ID NO: 728219 - DNA, 19 bp, Mus musculus
  siRNA target sequence for Lnp (NM_027133.1,1105-1123).
ccacgctactagaaagtgt

SEQ ID NO: 728220 - DNA, 19 bp, Mus musculus
  siRNA target sequence for Lnp (NM_027133.1,1145-1163).
cattgaagactctttagaa

SEQ ID NO: 728221 - DNA, 19 bp, Mus musculus
  siRNA target sequence for Lnp (NM_027133.1,1154-1172).
ctctttagaagaacaagat

SEQ ID NO: 728222 - DNA, 19 bp, Mus musculus
  siRNA target sequence for Lnp (NM_027133.1,1164-1182).
gaacaagatgttcttgata

SEQ ID NO: 728223 - DNA, 19 bp, Mus musculus
  siRNA target sequence for Lnp (NM_027133.1,1170-1188).
gatgttcttgataatagta

SEQ ID NO: 728224 - DNA, 19 bp, Mus musculus
  siRNA target sequence for Lnp (NM_027133.1,1193-1211).
gcagagagatgacaaaata

SEQ ID NO: 728225 - DNA, 19 bp, Mus musculus
  siRNA target sequence for Lnp (NM_027133.1,1223-1241).
gcagacaagccaagtgatt

SEQ ID NO: 728226 - DNA, 19 bp, Mus musculus
  siRNA target sequence for 2310020L09Rik (NM_027135.1,48-66).
gttccttgtcaactatgaa

SEQ ID NO: 728227 - DNA, 19 bp, Mus musculus
  siRNA target sequence for 2310020L09Rik (NM_027135.1,119-137).
ctgactctaatgaaaacga

SEQ ID NO: 728228 - DNA, 19 bp, Mus musculus
  siRNA target sequence for 2310020L09Rik (NM_027135.1,242-260).
caccggggaagctcaagaa

SEQ ID NO: 728229 - DNA, 19 bp, Mus musculus
  siRNA target sequence for 2310020L09Rik (NM_027135.1,244-262).
ccggggaagctcaagaaca

SEQ ID NO: 728230 - DNA, 19 bp, Mus musculus
  siRNA target sequence for 2310020L09Rik (NM_027135.1,316-334).
caaacagctgtctacgaat

SEQ ID NO: 728231 - DNA, 19 bp, Mus musculus
  siRNA target sequence for 2310020L09Rik (NM_027135.1,320-338).
cagctgtctacgaatctct

SEQ ID NO: 728232 - DNA, 19 bp, Mus musculus
  siRNA target sequence for 2310020L09Rik (NM_027135.1,432-450).
gctcacgggaggaactctt

SEQ ID NO: 728233 - DNA, 19 bp, Mus musculus
  siRNA target sequence for 2310020L09Rik (NM_027135.1,448-466).
ctttacaaatacaacgttt

SEQ ID NO: 728234 - DNA, 19 bp, Mus musculus
  siRNA target sequence for 2310020L09Rik (NM_027135.1,459-477).
caacgttttccagatacat

SEQ ID NO: 728235 - DNA, 19 bp, Mus musculus
  siRNA target sequence for 2310020L09Rik (NM_027135.1,462-480).
cgttttccagatacattca

SEQ ID NO: 728236 - DNA, 19 bp, Mus musculus
  siRNA target sequence for 2310020L09Rik (NM_027135.1,481-499).
gatagccaaaggtttctga

SEQ ID NO: 728237 - DNA, 19 bp, Mus musculus
  siRNA target sequence for 2310020L09Rik (NM_027135.1,500-518).
ccgacctccggaatgatat

SEQ ID NO: 728238 - DNA, 19 bp, Mus musculus
  siRNA target sequence for 2310020L09Rik (NM_027135.1,501-519).
cgacctccggaatgatatt

SEQ ID NO: 728239 - DNA, 19 bp, Mus musculus
  siRNA target sequence for 2310020L09Rik (NM_027135.1,568-586).
ggtttcagggccactgatt

SEQ ID NO: 728240 - DNA, 19 bp, Mus musculus
  siRNA target sequence for 2310020L09Rik (NM_027135.1,633-651).
ggccatcgactgcgataaa

SEQ ID NO: 728241 - DNA, 19 bp, Mus musculus
  siRNA target sequence for 2310020L09Rik (NM_027135.1,653-671).
ccgtgacagtggagttcaa

SEQ ID NO: 728242 - DNA, 19 bp, Mus musculus
  siRNA target sequence for 2310020L09Rik (NM_027135.1,748-766).
cgaagactccggattcaca

SEQ ID NO: 728243 - DNA, 19 bp, Mus musculus
  siRNA target sequence for 2310020L09Rik (NM_027135.1,749-767).
gaagactccggattcacaa

SEQ ID NO: 728244 - DNA, 19 bp, Mus musculus
  siRNA target sequence for 2310020L09Rik (NM_027135.1,752-770).
gactccggattcacaatct

SEQ ID NO: 728245 - DNA, 19 bp, Mus musculus
  siRNA target sequence for 2310020L09Rik (NM_027135.1,793-811).
ctagcggatctgtacaaga

SEQ ID NO: 728246 - DNA, 19 bp, Mus musculus
  siRNA target sequence for 2310020L09Rik (NM_027135.1,817-835).
gaaactgatgcccttatca

SEQ ID NO: 728247 - DNA, 19 bp, Mus musculus
  siRNA target sequence for 2310020L09Rik (NM_027135.1,821-839).
ctgatgcccttatcaactt

SEQ ID NO: 728248 - DNA, 19 bp, Mus musculus
  siRNA target sequence for 2310020L09Rik (NM_027135.1,882-900).
gaaggccatccgggaaatt

SEQ ID NO: 728249 - DNA, 19 bp, Mus musculus
  siRNA target sequence for 2310020L09Rik (NM_027135.1,895-913).
gaaattctagtcaatcaga

SEQ ID NO: 728250 - DNA, 19 bp, Mus musculus
  siRNA target sequence for 2310020L09Rik (NM_027135.1,962-980).
cagcaagccagcttatact

SEQ ID NO: 728251 - DNA, 19 bp, Mus musculus
  siRNA target sequence for 2310020L09Rik (NM_027135.1,1003-1021).
cctgtgtacatgaacagtt

SEQ ID NO: 728252 - DNA, 19 bp, Mus musculus
  siRNA target sequence for 2310020L09Rik (NM_027135.1,1004-1022).
ctgtgtacatgaacagttt

SEQ ID NO: 728253 - DNA, 19 bp, Mus musculus
  siRNA target sequence for 2310020L09Rik (NM_027135.1,1146-1164).
gccaatccacacgttagat

SEQ ID NO: 728254 - DNA, 19 bp, Mus musculus
  siRNA target sequence for 2310020L09Rik (NM_027135.1,1241-1259).
ctaacggtctgaacatgtt

SEQ ID NO: 728255 - DNA, 19 bp, Mus musculus
  siRNA target sequence for 2310020L09Rik (NM_027135.1,1245-1263).
cggtctgaacatgttctta

SEQ ID NO: 728256 - DNA, 19 bp, Mus musculus
  siRNA target sequence for 2310020L09Rik (NM_027135.1,1251-1269).
gaacatgttcttatggttt

SEQ ID NO: 728257 - DNA, 19 bp, Mus musculus
  siRNA target sequence for 2310020L09Rik (NM_027135.1,1288-1306).
gagctgattcagggaatat

SEQ ID NO: 728258 - DNA, 19 bp, Mus musculus
  siRNA target sequence for 2310020L09Rik (NM_027135.1,1315-1333).
ccatcgtttgcacatatca

SEQ ID NO: 728259 - DNA, 19 bp, Mus musculus
  siRNA target sequence for 2310020L09Rik (NM_027135.1,1316-1334).
catcgtttgcacatatcaa

SEQ ID NO: 728260 - DNA, 19 bp, Mus musculus
  siRNA target sequence for 2310020L09Rik (NM_027135.1,1367-1385).
gtccacactctcaacaact

SEQ ID NO: 728261 - DNA, 19 bp, Mus musculus
  siRNA target sequence for 2310020L09Rik (NM_027135.1,1378-1396).
caacaactcagaatgataa

SEQ ID NO: 728262 - DNA, 19 bp, Mus musculus
  siRNA target sequence for 2310020L09Rik (NM_027135.1,1381-1399).
caactcagaatgataatga

SEQ ID NO: 728263 - DNA, 19 bp, Mus musculus
  siRNA target sequence for 2310020L09Rik (NM_027135.1,1431-1449).
gaagctcatcgtggttaaa

SEQ ID NO: 728264 - DNA, 19 bp, Mus musculus
  siRNA target sequence for 2310020L09Rik (NM_027135.1,1514-1532).
gatcttcgtacgtggattt

SEQ ID NO: 728265 - DNA, 19 bp, Mus musculus
  siRNA target sequence for 2310020L09Rik (NM_027135.1,1517-1535).
cttcgtacgtggatttcct

SEQ ID NO: 728266 - DNA, 19 bp, Mus musculus
  siRNA target sequence for 9030414M07Rik (NM_027136.2,245-263).
gaggaagccgatgttttct

SEQ ID NO: 728267 - DNA, 19 bp, Mus musculus
  siRNA target sequence for 9030414M07Rik (NM_027136.2,247-265).
ggaagccgatgttttctct

SEQ ID NO: 728268 - DNA, 19 bp, Mus musculus
  siRNA target sequence for 9030414M07Rik (NM_027136.2,343-361).
gccgtttgatggacttctt

SEQ ID NO: 728269 - DNA, 19 bp, Mus musculus
  siRNA target sequence for 9030414M07Rik (NM_027136.2,376-394).
ggctgcactagcagcttat

SEQ ID NO: 728270 - DNA, 19 bp, Mus musculus
  siRNA target sequence for 9030414M07Rik (NM_027136.2,378-396).
ctgcactagcagcttatgt

SEQ ID NO: 728271 - DNA, 19 bp, Mus musculus
  siRNA target sequence for 9030414M07Rik (NM_027136.2,380-398).
gcactagcagcttatgtgt

SEQ ID NO: 728272 - DNA, 19 bp, Mus musculus
  siRNA target sequence for 9030414M07Rik (NM_027136.2,430-448).
ccccttgccaagatttatt

SEQ ID NO: 728273 - DNA, 19 bp, Mus musculus
  siRNA target sequence for 2310012P17Rik (NM_027142.1,52-70).
gagttgtcttcggattcat

SEQ ID NO: 728274 - DNA, 19 bp, Mus musculus
  siRNA target sequence for 2310012P17Rik (NM_027142.1,57-75).
gtcttcggattcataaaaa

SEQ ID NO: 728275 - DNA, 19 bp, Mus musculus
  siRNA target sequence for 2310012P17Rik (NM_027142.1,251-269).
cactggaaagactctctat

SEQ ID NO: 728276 - DNA, 19 bp, Mus musculus
  siRNA target sequence for 2310012P17Rik (NM_027142.1,361-379).
cccaatgtcgtaaagtgtt

SEQ ID NO: 728277 - DNA, 19 bp, Mus musculus
  siRNA target sequence for 2310012P17Rik (NM_027142.1,369-387).
cgtaaagtgttttcacata

SEQ ID NO: 728278 - DNA, 19 bp, Mus musculus
  siRNA target sequence for 2310012P17Rik (NM_027142.1,377-395).
gttttcacataacagtaat

SEQ ID NO: 728279 - DNA, 19 bp, Mus musculus
  siRNA target sequence for 9130227C08Rik (NM_027143.1,278-296).
ctcgcttggagcgtatctt

SEQ ID NO: 728280 - DNA, 19 bp, Mus musculus
  siRNA target sequence for 9130227C08Rik (NM_027143.1,280-298).
cgcttggagcgtatcttca

SEQ ID NO: 728281 - DNA, 19 bp, Mus musculus
  siRNA target sequence for 9130227C08Rik (NM_027143.1,450-468).
cagactgcactgcatcttt

SEQ ID NO: 728282 - DNA, 19 bp, Mus musculus
  siRNA target sequence for 9130227C08Rik (NM_027143.1,562-580).
ctaaccgaggcgtttgtga

SEQ ID NO: 728283 - DNA, 19 bp, Mus musculus
  siRNA target sequence for 9130227C08Rik (NM_027143.1,852-870).
cagggctcccttgaatgaa

SEQ ID NO: 728284 - DNA, 19 bp, Mus musculus
  siRNA target sequence for 9130227C08Rik (NM_027143.1,922-940).
gtaagaggacaaagtcata

SEQ ID NO: 728285 - DNA, 19 bp, Mus musculus
  siRNA target sequence for 9130227C08Rik (NM_027143.1,1473-1491).
gccagatctccgtcacatt

SEQ ID NO: 728286 - DNA, 19 bp, Mus musculus
  siRNA target sequence for 9130227C08Rik (NM_027143.1,1477-1495).
gatctccgtcacattgtca

SEQ ID NO: 728287 - DNA, 19 bp, Mus musculus
  siRNA target sequence for 9130227C08Rik (NM_027143.1,1522-1540).
cacggactccagcattact

SEQ ID NO: 728288 - DNA, 19 bp, Mus musculus
  siRNA target sequence for 9130227C08Rik (NM_027143.1,1524-1542).
cggactccagcattacttt

SEQ ID NO: 728289 - DNA, 19 bp, Mus musculus
  siRNA target sequence for 9130227C08Rik (NM_027143.1,1559-1577).
ctctcgctgtacagtactt

SEQ ID NO: 728290 - DNA, 19 bp, Mus musculus
  siRNA target sequence for 9130227C08Rik (NM_027143.1,1561-1579).
ctcgctgtacagtacttct

SEQ ID NO: 728291 - DNA, 19 bp, Mus musculus
  siRNA target sequence for 9130227C08Rik (NM_027143.1,1584-1602).
ccgtggccaccgtgacata

SEQ ID NO: 728292 - DNA, 19 bp, Mus musculus
  siRNA target sequence for 9130227C08Rik (NM_027143.1,1585-1603).
cgtggccaccgtgacataa

SEQ ID NO: 728293 - DNA, 19 bp, Mus musculus
  siRNA target sequence for 9130227C08Rik (NM_027143.1,1595-1613).
gtgacataaccgtctttgt

SEQ ID NO: 728294 - DNA, 19 bp, Mus musculus
  siRNA target sequence for 9130227C08Rik (NM_027143.1,1616-1634).
ctcagtggcgcttcagtaa

SEQ ID NO: 728295 - DNA, 19 bp, Mus musculus
  siRNA target sequence for 9130227C08Rik (NM_027143.1,1625-1643).
gcttcagtaaagattccaa

SEQ ID NO: 728296 - DNA, 19 bp, Mus musculus
  siRNA target sequence for 9130227C08Rik (NM_027143.1,1717-1735).
gatggcaagaggatttctt

SEQ ID NO: 728297 - DNA, 19 bp, Mus musculus
  siRNA target sequence for 9130227C08Rik (NM_027143.1,1725-1743).
gaggatttcttcttatgat

SEQ ID NO: 728298 - DNA, 19 bp, Mus musculus
  siRNA target sequence for 9130227C08Rik (NM_027143.1,1958-1976).
ggaagcagggttcttctaa

SEQ ID NO: 728299 - DNA, 19 bp, Mus musculus
  siRNA target sequence for 9130227C08Rik (NM_027143.1,1977-1995).
gactcagcagccctctaaa

SEQ ID NO: 728300 - DNA, 19 bp, Mus musculus
  siRNA target sequence for 9130227C08Rik (NM_027143.1,2092-2110).
cagctgctcgaagtgtttt

SEQ ID NO: 728301 - DNA, 19 bp, Mus musculus
  siRNA target sequence for 9130227C08Rik (NM_027143.1,2152-2170).
ccgtactgccgggatatta

SEQ ID NO: 728302 - DNA, 19 bp, Mus musculus
  siRNA target sequence for 9130227C08Rik (NM_027143.1,2153-2171).
cgtactgccgggatattaa

SEQ ID NO: 728303 - DNA, 19 bp, Mus musculus
  siRNA target sequence for 2310040A13Rik (NM_027149.1,537-555).
gaggaaggcttgttgtcat

SEQ ID NO: 728304 - DNA, 19 bp, Mus musculus
  siRNA target sequence for 2310061B02Rik (NM_027154.3,260-278).
catccaatgcccatgaact

SEQ ID NO: 728305 - DNA, 19 bp, Mus musculus
  siRNA target sequence for 2310061B02Rik (NM_027154.3,277-295).
ctacggccatgactataat

SEQ ID NO: 728306 - DNA, 19 bp, Mus musculus
  siRNA target sequence for 2310061B02Rik (NM_027154.3,280-298).
cggccatgactataatgaa

SEQ ID NO: 728307 - DNA, 19 bp, Mus musculus
  siRNA target sequence for 2310061B02Rik (NM_027154.3,348-366).
ggaaagttcgacattcctt

SEQ ID NO: 728308 - DNA, 19 bp, Mus musculus
  siRNA target sequence for 2310061B02Rik (NM_027154.3,356-374).
cgacattccttcatccaaa

SEQ ID NO: 728309 - DNA, 19 bp, Mus musculus
  siRNA target sequence for 2310061B02Rik (NM_027154.3,611-629).
ggcactatttccagtatgt

SEQ ID NO: 728310 - DNA, 19 bp, Mus musculus
  siRNA target sequence for 2310061B02Rik (NM_027154.3,612-630).
gcactatttccagtatgta

SEQ ID NO: 728311 - DNA, 19 bp, Mus musculus
  siRNA target sequence for 2310061B02Rik (NM_027154.3,956-974).
gatatagtctatatcttca

SEQ ID NO: 728312 - DNA, 19 bp, Mus musculus
  siRNA target sequence for 2310061B02Rik (NM_027154.3,985-1003).
ccagctcgtaggaagtaga

SEQ ID NO: 728313 - DNA, 19 bp, Mus musculus
  siRNA target sequence for 2310057N15Rik (NM_027170.1,613-631).
gatttcaaccttcttgtta

SEQ ID NO: 728314 - DNA, 19 bp, Mus musculus
  siRNA target sequence for 2310057N15Rik (NM_027170.1,618-636).
caaccttcttgttatagat

SEQ ID NO: 728315 - DNA, 19 bp, Mus musculus
  siRNA target sequence for 2410005L11Rik (NM_027178.1,57-75).
gaggtccgtagctgtcatt

SEQ ID NO: 728316 - DNA, 19 bp, Mus musculus
  siRNA target sequence for 2410005L11Rik (NM_027178.1,258-276).
gagcagctcttcaccaaat

SEQ ID NO: 728317 - DNA, 19 bp, Mus musculus
  siRNA target sequence for 2410005L11Rik (NM_027178.1,260-278).
gcagctcttcaccaaattt

SEQ ID NO: 728318 - DNA, 19 bp, Mus musculus
  siRNA target sequence for 2410005L11Rik (NM_027178.1,295-313).
ccactgtccggctaaagga

SEQ ID NO: 728319 - DNA, 19 bp, Mus musculus
  siRNA target sequence for Centd2 (NM_027180.2,355-373).
ccaccacaggggtcttata

SEQ ID NO: 728320 - DNA, 19 bp, Mus musculus
  siRNA target sequence for Centd2 (NM_027180.2,356-374).
caccacaggggtcttatat

SEQ ID NO: 728321 - DNA, 19 bp, Mus musculus
  siRNA target sequence for Centd2 (NM_027180.2,359-377).
cacaggggtcttatatcta

SEQ ID NO: 728322 - DNA, 19 bp, Mus musculus
  siRNA target sequence for Centd2 (NM_027180.2,364-382).
gggtcttatatctatcaga

SEQ ID NO: 728323 - DNA, 19 bp, Mus musculus
  siRNA target sequence for Centd2 (NM_027180.2,395-413).
gactggacgctgattacct

SEQ ID NO: 728324 - DNA, 19 bp, Mus musculus
  siRNA target sequence for Centd2 (NM_027180.2,404-422).
ctgattacctgcgatactt

SEQ ID NO: 728325 - DNA, 19 bp, Mus musculus
  siRNA target sequence for Centd2 (NM_027180.2,415-433).
cgatactttgacagtaaca

SEQ ID NO: 728326 - DNA, 19 bp, Mus musculus
  siRNA target sequence for Centd2 (NM_027180.2,474-492).
ctgccgagtagctcctatt

SEQ ID NO: 728327 - DNA, 19 bp, Mus musculus
  siRNA target sequence for Centd2 (NM_027180.2,504-522).
gtttgaagtgatcacaaat

SEQ ID NO: 728328 - DNA, 19 bp, Mus musculus
  siRNA target sequence for Centd2 (NM_027180.2,610-628).
gcccgttttcggctttcta

SEQ ID NO: 728329 - DNA, 19 bp, Mus musculus
  siRNA target sequence for Centd2 (NM_027180.2,612-630).
ccgttttcggctttctagt

SEQ ID NO: 728330 - DNA, 19 bp, Mus musculus
  siRNA target sequence for Centd2 (NM_027180.2,687-705).
gctacgaggcttcaagaat

SEQ ID NO: 728331 - DNA, 19 bp, Mus musculus
  siRNA target sequence for Centd2 (NM_027180.2,692-710).
gaggcttcaagaataagct

SEQ ID NO: 728332 - DNA, 19 bp, Mus musculus
  siRNA target sequence for Centd2 (NM_027180.2,773-791).
gcattggtatcacctttat

SEQ ID NO: 728333 - DNA, 19 bp, Mus musculus
  siRNA target sequence for Centd2 (NM_027180.2,870-888).
ctcggctgattcagagtta

SEQ ID NO: 728334 - DNA, 19 bp, Mus musculus
  siRNA target sequence for Centd2 (NM_027180.2,1146-1164).
catccagctcttcttacat

SEQ ID NO: 728335 - DNA, 19 bp, Mus musculus
  siRNA target sequence for Centd2 (NM_027180.2,1581-1599).
cagcggcttcctgtacaaa

SEQ ID NO: 728336 - DNA, 19 bp, Mus musculus
  siRNA target sequence for Centd2 (NM_027180.2,1680-1698).
ggtcctgagctactatgaa

SEQ ID NO: 728337 - DNA, 19 bp, Mus musculus
  siRNA target sequence for Centd2 (NM_027180.2,1681-1699).
gtcctgagctactatgaaa

SEQ ID NO: 728338 - DNA, 19 bp, Mus musculus
  siRNA target sequence for Centd2 (NM_027180.2,1732-1750).
cgggccagcgagatagtat

SEQ ID NO: 728339 - DNA, 19 bp, Mus musculus
  siRNA target sequence for Centd2 (NM_027180.2,2244-2262).
ctcggacatcccagtgatt

SEQ ID NO: 728340 - DNA, 19 bp, Mus musculus
  siRNA target sequence for Centd2 (NM_027180.2,2246-2264).
cggacatcccagtgattgt

SEQ ID NO: 728341 - DNA, 19 bp, Mus musculus
  siRNA target sequence for Centd2 (NM_027180.2,2269-2287).
cgctgtgtggactacatca

SEQ ID NO: 728342 - DNA, 19 bp, Mus musculus
  siRNA target sequence for Centd2 (NM_027180.2,2306-2324).
cagagggtatctatcgaaa

SEQ ID NO: 728343 - DNA, 19 bp, Mus musculus
  siRNA target sequence for Centd2 (NM_027180.2,2310-2328).
gggtatctatcgaaagtgt

SEQ ID NO: 728344 - DNA, 19 bp, Mus musculus
  siRNA target sequence for Centd2 (NM_027180.2,2378-2396).
cacgctctgtgcacctaaa

SEQ ID NO: 728345 - DNA, 19 bp, Mus musculus
  siRNA target sequence for Centd2 (NM_027180.2,2421-2439).
cgtctcctctgcactcaaa

SEQ ID NO: 728346 - DNA, 19 bp, Mus musculus
  siRNA target sequence for Centd2 (NM_027180.2,2594-2612).
cccttatcagccatctgta

SEQ ID NO: 728347 - DNA, 19 bp, Mus musculus
  siRNA target sequence for Centd2 (NM_027180.2,2693-2711).
cagacgggcaggactacaa

SEQ ID NO: 728348 - DNA, 19 bp, Mus musculus
  siRNA target sequence for Centd2 (NM_027180.2,3244-3262).
gatcgctacttcattctca

SEQ ID NO: 728349 - DNA, 19 bp, Mus musculus
  siRNA target sequence for Centd2 (NM_027180.2,3269-3287).
gctgcctacggctctacaa

SEQ ID NO: 728350 - DNA, 19 bp, Mus musculus
  siRNA target sequence for Centd2 (NM_027180.2,3325-3343).
gtcaagagcctcaaagtct

SEQ ID NO: 728351 - DNA, 19 bp, Mus musculus
  siRNA target sequence for Centd2 (NM_027180.2,3340-3358).
gtctacctgggtgtaaaga

SEQ ID NO: 728352 - DNA, 19 bp, Mus musculus
  siRNA target sequence for Centd2 (NM_027180.2,3394-3412).
gtggtgcacgagacagaaa

SEQ ID NO: 728353 - DNA, 19 bp, Mus musculus
  siRNA target sequence for Centd2 (NM_027180.2,3553-3571).
gtccggatgggcagtgtat

SEQ ID NO: 728354 - DNA, 19 bp, Mus musculus
  siRNA target sequence for Smyd3 (NM_027188.2,226-244).
gctgatgcgttgttctcaa

SEQ ID NO: 728355 - DNA, 19 bp, Mus musculus
  siRNA target sequence for Smyd3 (NM_027188.2,305-323).
cgggaatgcagttgtctta

SEQ ID NO: 728356 - DNA, 19 bp, Mus musculus
  siRNA target sequence for Smyd3 (NM_027188.2,380-398).
gtcaagctgatggatgaaa

SEQ ID NO: 728357 - DNA, 19 bp, Mus musculus
  siRNA target sequence for Smyd3 (NM_027188.2,434-452).
gatctggagtccaatatta

SEQ ID NO: 728358 - DNA, 19 bp, Mus musculus
  siRNA target sequence for Smyd3 (NM_027188.2,480-498).
gcctgaggcaacttgcaat

SEQ ID NO: 728359 - DNA, 19 bp, Mus musculus
  siRNA target sequence for Smyd3 (NM_027188.2,486-504).
ggcaacttgcaatgacttt

SEQ ID NO: 728360 - DNA, 19 bp, Mus musculus
  siRNA target sequence for Smyd3 (NM_027188.2,638-656).
ggcctgtaccccagtatgt

SEQ ID NO: 728361 - DNA, 19 bp, Mus musculus
  siRNA target sequence for Smyd3 (NM_027188.2,651-669).
gtatgtctttgctgaatca

SEQ ID NO: 728362 - DNA, 19 bp, Mus musculus
  siRNA target sequence for Smyd3 (NM_027188.2,721-739).
gcgtgcagtgcgggaaatt

SEQ ID NO: 728363 - DNA, 19 bp, Mus musculus
  siRNA target sequence for Smyd3 (NM_027188.2,723-741).
gtgcagtgcgggaaattga

SEQ ID NO: 728364 - DNA, 19 bp, Mus musculus
  siRNA target sequence for Smyd3 (NM_027188.2,884-902).
ggtgacgagcaaatatgga

SEQ ID NO: 728365 - DNA, 19 bp, Mus musculus
  siRNA target sequence for Smyd3 (NM_027188.2,885-903).
gtgacgagcaaatatggaa

SEQ ID NO: 728366 - DNA, 19 bp, Mus musculus
  siRNA target sequence for Smyd3 (NM_027188.2,983-1001).
gcgatcataaacagcaatt

SEQ ID NO: 728367 - DNA, 19 bp, Mus musculus
  siRNA target sequence for Smyd3 (NM_027188.2,1007-1025).
cggcttcccgacatcaaca

SEQ ID NO: 728368 - DNA, 19 bp, Mus musculus
  siRNA target sequence for Smyd3 (NM_027188.2,1008-1026).
ggcttcccgacatcaacat

SEQ ID NO: 728369 - DNA, 19 bp, Mus musculus
  siRNA target sequence for Smyd3 (NM_027188.2,1010-1028).
cttcccgacatcaacatct

SEQ ID NO: 728370 - DNA, 19 bp, Mus musculus
  siRNA target sequence for Smyd3 (NM_027188.2,1117-1135).
ggagccgtaccggattttt

SEQ ID NO: 728371 - DNA, 19 bp, Mus musculus
  siRNA target sequence for Smyd3 (NM_027188.2,1118-1136).
gagccgtaccggatttttt

SEQ ID NO: 728372 - DNA, 19 bp, Mus musculus
  siRNA target sequence for Smyd3 (NM_027188.2,1158-1176).
gaggtgtgcaagtgatgaa

SEQ ID NO: 728373 - DNA, 19 bp, Mus musculus
  siRNA target sequence for Smyd3 (NM_027188.2,1269-1287).
gagagcacagcctgattga

SEQ ID NO: 728374 - DNA, 19 bp, Mus musculus
  siRNA target sequence for Smyd3 (NM_027188.2,1273-1291).
gcacagcctgattgaagat

SEQ ID NO: 728375 - DNA, 19 bp, Mus musculus
  siRNA target sequence for Smyd3 (NM_027188.2,1278-1296).
gcctgattgaagatttgat

SEQ ID NO: 728376 - DNA, 19 bp, Mus musculus
  siRNA target sequence for Smyd3 (NM_027188.2,1279-1297).
cctgattgaagatttgatt

SEQ ID NO: 728377 - DNA, 19 bp, Mus musculus
  siRNA target sequence for Gemin7 (NM_027189.1,165-183).
cggagaaggtcatattcaa

SEQ ID NO: 728378 - DNA, 19 bp, Mus musculus
  siRNA target sequence for Gemin7 (NM_027189.1,167-185).
gagaaggtcatattcaaga

SEQ ID NO: 728379 - DNA, 19 bp, Mus musculus
  siRNA target sequence for Gemin7 (NM_027189.1,262-280).
gggcaccctgtgagtttca

SEQ ID NO: 728380 - DNA, 19 bp, Mus musculus
  siRNA target sequence for Gemin7 (NM_027189.1,334-352).
gtggccaacttctacgttt

SEQ ID NO: 728381 - DNA, 19 bp, Mus musculus
  siRNA target sequence for Gemin7 (NM_027189.1,387-405).
ggccttgcttcgatgtagt

SEQ ID NO: 728382 - DNA, 19 bp, Mus musculus
  siRNA target sequence for Gemin7 (NM_027189.1,393-411).
gcttcgatgtagtgacata

SEQ ID NO: 728383 - DNA, 19 bp, Mus musculus
  siRNA target sequence for Gemin7 (NM_027189.1,397-415).
cgatgtagtgacataattt

SEQ ID NO: 728384 - DNA, 19 bp, Mus musculus
  siRNA target sequence for 2410018G23Rik (NM_027194.1,110-128).
ctgtgagttacctattgct

SEQ ID NO: 728385 - DNA, 19 bp, Mus musculus
  siRNA target sequence for 2410018G23Rik (NM_027194.1,186-204).
gagccactcgtttaatgct

SEQ ID NO: 728386 - DNA, 19 bp, Mus musculus
  siRNA target sequence for 2410018G23Rik (NM_027194.1,372-390).
ctcccaggagcttggttat

SEQ ID NO: 728387 - DNA, 19 bp, Mus musculus
  siRNA target sequence for 2410018G23Rik (NM_027194.1,375-393).
ccaggagcttggttatggt

SEQ ID NO: 728388 - DNA, 19 bp, Mus musculus
  siRNA target sequence for 2410018G23Rik (NM_027194.1,376-394).
caggagcttggttatggtt

SEQ ID NO: 728389 - DNA, 19 bp, Mus musculus
  siRNA target sequence for 2410018G23Rik (NM_027194.1,485-503).
ggaccttcctacgagaaaa

SEQ ID NO: 728390 - DNA, 19 bp, Mus musculus
  siRNA target sequence for 2410018G23Rik (NM_027194.1,499-517).
gaaaataagccttgtataa

SEQ ID NO: 728391 - DNA, 19 bp, Mus musculus
  siRNA target sequence for 2410018G23Rik (NM_027194.1,526-544).
ggacactacttcataacca

SEQ ID NO: 728392 - DNA, 19 bp, Mus musculus
  siRNA target sequence for 2410018G23Rik (NM_027194.1,651-669).
ctggtggttcgttgatctt

SEQ ID NO: 728393 - DNA, 19 bp, Mus musculus
  siRNA target sequence for 2410018G23Rik (NM_027194.1,653-671).
ggtggttcgttgatcttat

SEQ ID NO: 728394 - DNA, 19 bp, Mus musculus
  siRNA target sequence for 2410018G23Rik (NM_027194.1,656-674).
ggttcgttgatcttattct

SEQ ID NO: 728395 - DNA, 19 bp, Mus musculus
  siRNA target sequence for 1500001K17Rik (NM_027203.2,534-552).
ggaattcctacggaagaaa

SEQ ID NO: 728396 - DNA, 19 bp, Mus musculus
  siRNA target sequence for 1500001K17Rik (NM_027203.2,722-740).
cactaggtatcctgactta

SEQ ID NO: 728397 - DNA, 19 bp, Mus musculus
  siRNA target sequence for 1500001K17Rik (NM_027203.2,724-742).
ctaggtatcctgacttact

SEQ ID NO: 728398 - DNA, 19 bp, Mus musculus
  siRNA target sequence for 1500001K17Rik (NM_027203.2,755-773).
cagcagaggcccaaactca

SEQ ID NO: 728399 - DNA, 19 bp, Mus musculus
  siRNA target sequence for 1500001K17Rik (NM_027203.2,830-848).
gcccagatgagaagatcaa

SEQ ID NO: 728400 - DNA, 19 bp, Mus musculus
  siRNA target sequence for 1500001K17Rik (NM_027203.2,958-976).
gagccaccttccctagaaa

SEQ ID NO: 728401 - DNA, 19 bp, Mus musculus
  siRNA target sequence for 1810019A08Rik (NM_027206.1,122-140).
cactacaagcggagaagaa

SEQ ID NO: 728402 - DNA, 19 bp, Mus musculus
  siRNA target sequence for 1810019A08Rik (NM_027206.1,164-182).
ggtccgtggcgcatctctt

SEQ ID NO: 728403 - DNA, 19 bp, Mus musculus
  siRNA target sequence for 1810019A08Rik (NM_027206.1,165-183).
gtccgtggcgcatctcttt

SEQ ID NO: 728404 - DNA, 19 bp, Mus musculus
  siRNA target sequence for 1810019A08Rik (NM_027206.1,167-185).
ccgtggcgcatctctttat

SEQ ID NO: 728405 - DNA, 19 bp, Mus musculus
  siRNA target sequence for 1810019A08Rik (NM_027206.1,223-241).
cgcgtgtccaaagaataca

SEQ ID NO: 728406 - DNA, 19 bp, Mus musculus
  siRNA target sequence for 1810019A08Rik (NM_027206.1,282-300).
catcaaggtagcggttaaa

SEQ ID NO: 728407 - DNA, 19 bp, Mus musculus
  siRNA target sequence for 1810019A08Rik (NM_027206.1,345-363).
ggctctggctacacgattt

SEQ ID NO: 728408 - DNA, 19 bp, Mus musculus
  siRNA target sequence for 1810019A08Rik (NM_027206.1,519-537).
catcaggcacgtgtttgat

SEQ ID NO: 728409 - DNA, 19 bp, Mus musculus
  siRNA target sequence for 1810019A08Rik (NM_027206.1,524-542).
ggcacgtgtttgatcacta

SEQ ID NO: 728410 - DNA, 19 bp, Mus musculus
  siRNA target sequence for 1810019A08Rik (NM_027206.1,589-607).
cagcaccttggcaagatct

SEQ ID NO: 728411 - DNA, 19 bp, Mus musculus
  siRNA target sequence for Ceacam13 (NM_027210.1,280-298).
ggagctgcaccgttcaagt

SEQ ID NO: 728412 - DNA, 19 bp, Mus musculus
  siRNA target sequence for Ceacam13 (NM_027210.1,289-307).
ccgttcaagtgttgtgaaa

SEQ ID NO: 728413 - DNA, 19 bp, Mus musculus
  siRNA target sequence for Ceacam13 (NM_027210.1,290-308).
cgttcaagtgttgtgaaat

SEQ ID NO: 728414 - DNA, 19 bp, Mus musculus
  siRNA target sequence for Ceacam13 (NM_027210.1,365-383).
gagagacagtactcaacaa

SEQ ID NO: 728415 - DNA, 19 bp, Mus musculus
  siRNA target sequence for Ceacam13 (NM_027210.1,436-454).
ctacgaacacttgattcaa

SEQ ID NO: 728416 - DNA, 19 bp, Mus musculus
  siRNA target sequence for Ceacam13 (NM_027210.1,698-716).
ccactctggggtatgcata

SEQ ID NO: 728417 - DNA, 19 bp, Mus musculus
  siRNA target sequence for Ceacam13 (NM_027210.1,699-717).
cactctggggtatgcatat

SEQ ID NO: 728418 - DNA, 19 bp, Mus musculus
  siRNA target sequence for Ceacam13 (NM_027210.1,701-719).
ctctggggtatgcatatta

SEQ ID NO: 728419 - DNA, 19 bp, Mus musculus
  siRNA target sequence for Thrap6 (NM_027212.1,307-325).
caccttcggcaactttcta

SEQ ID NO: 728420 - DNA, 19 bp, Mus musculus
  siRNA target sequence for Thrap6 (NM_027212.1,309-327).
ccttcggcaactttctatt

SEQ ID NO: 728421 - DNA, 19 bp, Mus musculus
  siRNA target sequence for Thrap6 (NM_027212.1,342-360).
gcgactggtctatgacaaa

SEQ ID NO: 728422 - DNA, 19 bp, Mus musculus
  siRNA target sequence for Thrap6 (NM_027212.1,343-361).
cgactggtctatgacaaat

SEQ ID NO: 728423 - DNA, 19 bp, Mus musculus
  siRNA target sequence for Thrap6 (NM_027212.1,348-366).
ggtctatgacaaatgtaat

SEQ ID NO: 728424 - DNA, 19 bp, Mus musculus
  siRNA target sequence for Thrap6 (NM_027212.1,397-415).
gttgagcaactgattccat

SEQ ID NO: 728425 - DNA, 19 bp, Mus musculus
  siRNA target sequence for Thrap6 (NM_027212.1,450-468).
ggctggtccacctcgtttt

SEQ ID NO: 728426 - DNA, 19 bp, Mus musculus
  siRNA target sequence for Thrap6 (NM_027212.1,454-472).
ggtccacctcgttttgcta

SEQ ID NO: 728427 - DNA, 19 bp, Mus musculus
  siRNA target sequence for Thrap6 (NM_027212.1,473-491).
gcgaagagagacgagaaat

SEQ ID NO: 728428 - DNA, 19 bp, Mus musculus
  siRNA target sequence for Med6 (NM_027213.2,162-180).
gacattagagcacttgaat

SEQ ID NO: 728429 - DNA, 19 bp, Mus musculus
  siRNA target sequence for Med6 (NM_027213.2,164-182).
cattagagcacttgaatca

SEQ ID NO: 728430 - DNA, 19 bp, Mus musculus
  siRNA target sequence for Med6 (NM_027213.2,181-199).
cagatggttggaatcgaat

SEQ ID NO: 728431 - DNA, 19 bp, Mus musculus
  siRNA target sequence for Med6 (NM_027213.2,191-209).
gaatcgaatacatcctttt

SEQ ID NO: 728432 - DNA, 19 bp, Mus musculus
  siRNA target sequence for Med6 (NM_027213.2,195-213).
cgaatacatccttttacat

SEQ ID NO: 728433 - DNA, 19 bp, Mus musculus
  siRNA target sequence for Med6 (NM_027213.2,256-274).
cagtcccctgctcaagtta

SEQ ID NO: 728434 - DNA, 19 bp, Mus musculus
  siRNA target sequence for Med6 (NM_027213.2,277-295).
ccactggctgattactata

SEQ ID NO: 728435 - DNA, 19 bp, Mus musculus
  siRNA target sequence for Med6 (NM_027213.2,278-296).
cactggctgattactatat

SEQ ID NO: 728436 - DNA, 19 bp, Mus musculus
  siRNA target sequence for Med6 (NM_027213.2,280-298).
ctggctgattactatatca

SEQ ID NO: 728437 - DNA, 19 bp, Mus musculus
  siRNA target sequence for Med6 (NM_027213.2,321-339).
gccagacttgggatcagtt

SEQ ID NO: 728438 - DNA, 19 bp, Mus musculus
  siRNA target sequence for Med6 (NM_027213.2,323-341).
cagacttgggatcagttat

SEQ ID NO: 728439 - DNA, 19 bp, Mus musculus
  siRNA target sequence for Med6 (NM_027213.2,325-343).
gacttgggatcagttataa

SEQ ID NO: 728440 - DNA, 19 bp, Mus musculus
  siRNA target sequence for Med6 (NM_027213.2,361-379).
gcagtgcatggaattcagt

SEQ ID NO: 728441 - DNA, 19 bp, Mus musculus
  siRNA target sequence for Med6 (NM_027213.2,388-406).
gatgaagctatgtcatact

SEQ ID NO: 728442 - DNA, 19 bp, Mus musculus
  siRNA target sequence for Med6 (NM_027213.2,399-417).
gtcatactgtcgataccat

SEQ ID NO: 728443 - DNA, 19 bp, Mus musculus
  siRNA target sequence for Med6 (NM_027213.2,427-445).
ggatattggtggcacttta

SEQ ID NO: 728444 - DNA, 19 bp, Mus musculus
  siRNA target sequence for Med6 (NM_027213.2,428-446).
gatattggtggcactttaa

SEQ ID NO: 728445 - DNA, 19 bp, Mus musculus
  siRNA target sequence for Med6 (NM_027213.2,434-452).
ggtggcactttaaagatca

SEQ ID NO: 728446 - DNA, 19 bp, Mus musculus
  siRNA target sequence for Med6 (NM_027213.2,493-511).
gaagaaccaagctctattt

SEQ ID NO: 728447 - DNA, 19 bp, Mus musculus
  siRNA target sequence for Med6 (NM_027213.2,518-536).
gacagcgtgtggatgcttt

SEQ ID NO: 728448 - DNA, 19 bp, Mus musculus
  siRNA target sequence for Med6 (NM_027213.2,523-541).
cgtgtggatgctttactca

SEQ ID NO: 728449 - DNA, 19 bp, Mus musculus
  siRNA target sequence for Med6 (NM_027213.2,555-573).
gaaatttccacccagattt

SEQ ID NO: 728450 - DNA, 19 bp, Mus musculus
  siRNA target sequence for Med6 (NM_027213.2,666-684).
ggagagcacaaagaacatt

SEQ ID NO: 728451 - DNA, 19 bp, Mus musculus
  siRNA target sequence for Med6 (NM_027213.2,706-724).
ggtccccctgagaaacgaa

SEQ ID NO: 728452 - DNA, 19 bp, Mus musculus
  siRNA target sequence for Med6 (NM_027213.2,707-725).
gtccccctgagaaacgaat

SEQ ID NO: 728453 - DNA, 19 bp, Mus musculus
  siRNA target sequence for 5033425B17Rik (NM_027215.1,95-113).
cttcgccctcgcctacttt

SEQ ID NO: 728454 - DNA, 19 bp, Mus musculus
  siRNA target sequence for 5033425B17Rik (NM_027215.1,116-134).
ctatttcatcacgtacaaa

SEQ ID NO: 728455 - DNA, 19 bp, Mus musculus
  siRNA target sequence for 5033425B17Rik (NM_027215.1,201-219).
gtgcagctatgcaagatgt

SEQ ID NO: 728456 - DNA, 19 bp, Mus musculus
  siRNA target sequence for 5033425B17Rik (NM_027215.1,204-222).
cagctatgcaagatgttgt

SEQ ID NO: 728457 - DNA, 19 bp, Mus musculus
  siRNA target sequence for 5033425B17Rik (NM_027215.1,245-263).
ctgggaaggtggcatctat

SEQ ID NO: 728458 - DNA, 19 bp, Mus musculus
  siRNA target sequence for 5033425B17Rik (NM_027215.1,308-326).
cctgataggcctaaacctt

SEQ ID NO: 728459 - DNA, 19 bp, Mus musculus
  siRNA target sequence for 5033425B17Rik (NM_027215.1,343-361).
caggcaagggggagtacaa

SEQ ID NO: 728460 - DNA, 19 bp, Mus musculus
  siRNA target sequence for 5033425B17Rik (NM_027215.1,352-370).
gggagtacaagattatggt

SEQ ID NO: 728461 - DNA, 19 bp, Mus musculus
  siRNA target sequence for 5033425B17Rik (NM_027215.1,386-404).
ggccactgctgaactcatt

SEQ ID NO: 728462 - DNA, 19 bp, Mus musculus
  siRNA target sequence for 5033425B17Rik (NM_027215.1,387-405).
gccactgctgaactcatta

SEQ ID NO: 728463 - DNA, 19 bp, Mus musculus
  siRNA target sequence for 5033425B17Rik (NM_027215.1,388-406).
ccactgctgaactcattat

SEQ ID NO: 728464 - DNA, 19 bp, Mus musculus
  siRNA target sequence for 5033425B17Rik (NM_027215.1,432-450).
ggagcccgaggcattgaat

SEQ ID NO: 728465 - DNA, 19 bp, Mus musculus
  siRNA target sequence for 5033425B17Rik (NM_027215.1,433-451).
gagcccgaggcattgaatt

SEQ ID NO: 728466 - DNA, 19 bp, Mus musculus
  siRNA target sequence for 5033425B17Rik (NM_027215.1,436-454).
cccgaggcattgaatttga

SEQ ID NO: 728467 - DNA, 19 bp, Mus musculus
  siRNA target sequence for 5033425B17Rik (NM_027215.1,438-456).
cgaggcattgaatttgact

SEQ ID NO: 728468 - DNA, 19 bp, Mus musculus
  siRNA target sequence for 5033425B17Rik (NM_027215.1,700-718).
gcaccttggccctgtatgt

SEQ ID NO: 728469 - DNA, 19 bp, Mus musculus
  siRNA target sequence for 2010001C09Rik (NM_027221.1,452-470).
cctttgatcccacaagaat

SEQ ID NO: 728470 - DNA, 19 bp, Mus musculus
  siRNA target sequence for 2010001C09Rik (NM_027221.1,462-480).
cacaagaatttatgataca

SEQ ID NO: 728471 - DNA, 19 bp, Mus musculus
  siRNA target sequence for 2010001C09Rik (NM_027221.1,631-649).
gaacttcccgagtgtaaaa

SEQ ID NO: 728472 - DNA, 19 bp, Mus musculus
  siRNA target sequence for 2010001M09Rik (NM_027222.1,329-347).
gcagtcctatggagttcat

SEQ ID NO: 728473 - DNA, 19 bp, Mus musculus
  siRNA target sequence for 2010001M09Rik (NM_027222.1,332-350).
gtcctatggagttcatgaa

SEQ ID NO: 728474 - DNA, 19 bp, Mus musculus
  siRNA target sequence for 3830421F13Rik (NM_027226.2,130-148).
gaacctggacaaaatcgat

SEQ ID NO: 728475 - DNA, 19 bp, Mus musculus
  siRNA target sequence for 3830421F13Rik (NM_027226.2,134-152).
ctggacaaaatcgatatgt

SEQ ID NO: 728476 - DNA, 19 bp, Mus musculus
  siRNA target sequence for 3830421F13Rik (NM_027226.2,153-171).
ccctggatgatattatcaa

SEQ ID NO: 728477 - DNA, 19 bp, Mus musculus
  siRNA target sequence for 3830421F13Rik (NM_027226.2,154-172).
cctggatgatattatcaaa

SEQ ID NO: 728478 - DNA, 19 bp, Mus musculus
  siRNA target sequence for 3830421F13Rik (NM_027226.2,196-214).
gcaaaactttccaagacta

SEQ ID NO: 728479 - DNA, 19 bp, Mus musculus
  siRNA target sequence for 3830421F13Rik (NM_027226.2,268-286).
gggaatccagcagaattct

SEQ ID NO: 728480 - DNA, 19 bp, Mus musculus
  siRNA target sequence for 3830421F13Rik (NM_027226.2,288-306).
gttttggtaaaactagttt

SEQ ID NO: 728481 - DNA, 19 bp, Mus musculus
  siRNA target sequence for 3830421F13Rik (NM_027226.2,309-327).
gccgtagaggaagagtatt

SEQ ID NO: 728482 - DNA, 19 bp, Mus musculus
  siRNA target sequence for 3830421F13Rik (NM_027226.2,341-359).
cgtccttatggagttatca

SEQ ID NO: 728483 - DNA, 19 bp, Mus musculus
  siRNA target sequence for 3830421F13Rik (NM_027226.2,384-402).
ctgggattcgaaaaggaat

SEQ ID NO: 728484 - DNA, 19 bp, Mus musculus
  siRNA target sequence for 3830421F13Rik (NM_027226.2,386-404).
gggattcgaaaaggaataa

SEQ ID NO: 728485 - DNA, 19 bp, Mus musculus
  siRNA target sequence for 3830421F13Rik (NM_027226.2,388-406).
gattcgaaaaggaataagt

SEQ ID NO: 728486 - DNA, 19 bp, Mus musculus
  siRNA target sequence for 3830421F13Rik (NM_027226.2,433-451).
caagaatatagaacgatat

SEQ ID NO: 728487 - DNA, 19 bp, Mus musculus
  siRNA target sequence for 3830421F13Rik (NM_027226.2,436-454).
gaatatagaacgatatttt

SEQ ID NO: 728488 - DNA, 19 bp, Mus musculus
  siRNA target sequence for 3830421F13Rik (NM_027226.2,477-495).
gccttctgagacagaatga

SEQ ID NO: 728489 - DNA, 19 bp, Mus musculus
  siRNA target sequence for 3830421F13Rik (NM_027226.2,509-527).
caagttgctgttctcaaaa

SEQ ID NO: 728490 - DNA, 19 bp, Mus musculus
  siRNA target sequence for 3830421F13Rik (NM_027226.2,521-539).
ctcaaaagacctaatcagt

SEQ ID NO: 728491 - DNA, 19 bp, Mus musculus
  siRNA target sequence for 3830421F13Rik (NM_027226.2,531-549).
ctaatcagttaaacagaaa

SEQ ID NO: 728492 - DNA, 19 bp, Mus musculus
  siRNA target sequence for 3830421F13Rik (NM_027226.2,573-591).
ccaggaatggaaataaatt

SEQ ID NO: 728493 - DNA, 19 bp, Mus musculus
  siRNA target sequence for 3830421F13Rik (NM_027226.2,655-673).
ccagttgaacacagaacaa

SEQ ID NO: 728494 - DNA, 19 bp, Mus musculus
  siRNA target sequence for 3830421F13Rik (NM_027226.2,712-730).
gcgtacttccaccacaaat

SEQ ID NO: 728495 - DNA, 19 bp, Mus musculus
  siRNA target sequence for 3830421F13Rik (NM_027226.2,731-749).
ggaggaattttgactgtat

SEQ ID NO: 728496 - DNA, 19 bp, Mus musculus
  siRNA target sequence for 3830421F13Rik (NM_027226.2,735-753).
gaattttgactgtatccat

SEQ ID NO: 728497 - DNA, 19 bp, Mus musculus
  siRNA target sequence for 3830421F13Rik (NM_027226.2,775-793).
gtgtccggtaactcagaaa

SEQ ID NO: 728498 - DNA, 19 bp, Mus musculus
  siRNA target sequence for 3830421F13Rik (NM_027226.2,815-833).
gtgccctcattcttgacaa

SEQ ID NO: 728499 - DNA, 19 bp, Mus musculus
  siRNA target sequence for 3830421F13Rik (NM_027226.2,817-835).
gccctcattcttgacaaaa

SEQ ID NO: 728500 - DNA, 19 bp, Mus musculus
  siRNA target sequence for 3830421F13Rik (NM_027226.2,818-836).
ccctcattcttgacaaaaa

SEQ ID NO: 728501 - DNA, 19 bp, Mus musculus
  siRNA target sequence for 3830421F13Rik (NM_027226.2,839-857).
gaacagtctgatgttaaga

SEQ ID NO: 728502 - DNA, 19 bp, Mus musculus
  siRNA target sequence for 3830421F13Rik (NM_027226.2,870-888).
gcgtccctctacagtttga

SEQ ID NO: 728503 - DNA, 19 bp, Mus musculus
  siRNA target sequence for 3830421F13Rik (NM_027226.2,872-890).
gtccctctacagtttgaca

SEQ ID NO: 728504 - DNA, 19 bp, Mus musculus
  siRNA target sequence for 3830421F13Rik (NM_027226.2,874-892).
ccctctacagtttgacata

SEQ ID NO: 728505 - DNA, 19 bp, Mus musculus
  siRNA target sequence for 3830421F13Rik (NM_027226.2,875-893).
cctctacagtttgacataa

SEQ ID NO: 728506 - DNA, 19 bp, Mus musculus
  siRNA target sequence for 3830421F13Rik (NM_027226.2,876-894).
ctctacagtttgacataaa

SEQ ID NO: 728507 - DNA, 19 bp, Mus musculus
  siRNA target sequence for 3830421F13Rik (NM_027226.2,929-947).
gaacgatttgggatactga

SEQ ID NO: 728508 - DNA, 19 bp, Mus musculus
  siRNA target sequence for 2010001H14Rik (NM_027227.1,55-73).
gtgtgatccaacatctgaa

SEQ ID NO: 728509 - DNA, 19 bp, Mus musculus
  siRNA target sequence for 2010001H14Rik (NM_027227.1,161-179).
gaagacaccaccatgtttt

SEQ ID NO: 728510 - DNA, 19 bp, Mus musculus
  siRNA target sequence for 2010001H14Rik (NM_027227.1,194-212).
ggcatggaggtcactactt

SEQ ID NO: 728511 - DNA, 19 bp, Mus musculus
  siRNA target sequence for 2010001H14Rik (NM_027227.1,195-213).
gcatggaggtcactacttt

SEQ ID NO: 728512 - DNA, 19 bp, Mus musculus
  siRNA target sequence for 2010001H14Rik (NM_027227.1,311-329).
ggctccctggatgtttgtt

SEQ ID NO: 728513 - DNA, 19 bp, Mus musculus
  siRNA target sequence for 2010001H14Rik (NM_027227.1,317-335).
ctggatgtttgtttgatca

SEQ ID NO: 728514 - DNA, 19 bp, Mus musculus
  siRNA target sequence for 2010001H14Rik (NM_027227.1,366-384).
gcctaaaggcttttgatgt

SEQ ID NO: 728515 - DNA, 19 bp, Mus musculus
  siRNA target sequence for 2010001H14Rik (NM_027227.1,392-410).
gaagagggcccagtattca

SEQ ID NO: 728516 - DNA, 19 bp, Mus musculus
  siRNA target sequence for 2010001H14Rik (NM_027227.1,419-437).
gcaaaggggcctattctat

SEQ ID NO: 728517 - DNA, 19 bp, Mus musculus
  siRNA target sequence for 2010001H14Rik (NM_027227.1,428-446).
cctattctatccatctact

SEQ ID NO: 728518 - DNA, 19 bp, Mus musculus
  siRNA target sequence for 2010001H14Rik (NM_027227.1,448-466).
ccgagatccggacagaaat

SEQ ID NO: 728519 - DNA, 19 bp, Mus musculus
  siRNA target sequence for 1810065E05Rik (NM_027239.1,183-201).
cggagtttgctgtgatctt

SEQ ID NO: 728520 - DNA, 19 bp, Mus musculus
  siRNA target sequence for 1810065E05Rik (NM_027239.1,205-223).
ggagagtctctcttgtgaa

SEQ ID NO: 728521 - DNA, 19 bp, Mus musculus
  siRNA target sequence for 1810065E05Rik (NM_027239.1,206-224).
gagagtctctcttgtgaaa

SEQ ID NO: 728522 - DNA, 19 bp, Mus musculus
  siRNA target sequence for 1810065E05Rik (NM_027239.1,254-272).
cccatgggtacatgcaata

SEQ ID NO: 728523 - DNA, 19 bp, Mus musculus
  siRNA target sequence for 1810065E05Rik (NM_027239.1,346-364).
gaaaggctgttctctagat

SEQ ID NO: 728524 - DNA, 19 bp, Mus musculus
  siRNA target sequence for 1810065E05Rik (NM_027239.1,350-368).
ggctgttctctagatgaat

SEQ ID NO: 728525 - DNA, 19 bp, Mus musculus
  siRNA target sequence for 1810065E05Rik (NM_027239.1,397-415).
gggggaccaacggacattt

SEQ ID NO: 728526 - DNA, 19 bp, Mus musculus
  siRNA target sequence for 1810065E05Rik (NM_027239.1,398-416).
ggggaccaacggacattta

SEQ ID NO: 728527 - DNA, 19 bp, Mus musculus
  siRNA target sequence for 1810065E05Rik (NM_027239.1,401-419).
gaccaacggacatttagat

SEQ ID NO: 728528 - DNA, 19 bp, Mus musculus
  siRNA target sequence for 1810065E05Rik (NM_027239.1,403-421).
ccaacggacatttagatat

SEQ ID NO: 728529 - DNA, 19 bp, Mus musculus
  siRNA target sequence for 1810065E05Rik (NM_027239.1,422-440).
gaccagcgatgctgtacta

SEQ ID NO: 728530 - DNA, 19 bp, Mus musculus
  siRNA target sequence for 1810065E05Rik (NM_027239.1,427-445).
gcgatgctgtactactgat

SEQ ID NO: 728531 - DNA, 19 bp, Mus musculus
  siRNA target sequence for 1810065E05Rik (NM_027239.1,441-459).
ctgataagtgcaatcaagt

SEQ ID NO: 728532 - DNA, 19 bp, Mus musculus
  siRNA target sequence for 1810065E05Rik (NM_027239.1,455-473).
caagtggacacgaaaccat

SEQ ID NO: 728533 - DNA, 19 bp, Mus musculus
  siRNA target sequence for 1810065E05Rik (NM_027239.1,618-636).
gtcccctttcggtagtgat

SEQ ID NO: 728534 - DNA, 19 bp, Mus musculus
  siRNA target sequence for 1810065E05Rik (NM_027239.1,682-700).
gaccgttttggactttgta

SEQ ID NO: 728535 - DNA, 19 bp, Mus musculus
  siRNA target sequence for 1810065E05Rik (NM_027239.1,721-739).
cagtgggttccctgtactt

SEQ ID NO: 728536 - DNA, 19 bp, Mus musculus
  siRNA target sequence for 1810065E05Rik (NM_027239.1,792-810).
caacagtgccagttctgat

SEQ ID NO: 728537 - DNA, 19 bp, Mus musculus
  siRNA target sequence for 1810065E05Rik (NM_027239.1,813-831).
gtctcctcttgctgaaagt

SEQ ID NO: 728538 - DNA, 19 bp, Mus musculus
  siRNA target sequence for 2010003I19Rik (NM_027241.1,143-161).
ggccagttgaccttcaaca

SEQ ID NO: 728539 - DNA, 19 bp, Mus musculus
  siRNA target sequence for 2010003I19Rik (NM_027241.1,144-162).
gccagttgaccttcaacat

SEQ ID NO: 728540 - DNA, 19 bp, Mus musculus
  siRNA target sequence for 2010003I19Rik (NM_027241.1,321-339).
ggcagctcccctacttcat

SEQ ID NO: 728541 - DNA, 19 bp, Mus musculus
  siRNA target sequence for 2010003I19Rik (NM_027241.1,541-559).
ggagacgatacagaaacta

SEQ ID NO: 728542 - DNA, 19 bp, Mus musculus
  siRNA target sequence for 2010003I19Rik (NM_027241.1,671-689).
gaggaggaaactgattaca

SEQ ID NO: 728543 - DNA, 19 bp, Mus musculus
  siRNA target sequence for 2010003I19Rik (NM_027241.1,677-695).
gaaactgattacatcatgt

SEQ ID NO: 728544 - DNA, 19 bp, Mus musculus
  siRNA target sequence for 2010007H12Rik (NM_027242.1,455-473).
cgccagcggccagtttgat

SEQ ID NO: 728545 - DNA, 19 bp, Mus musculus
  siRNA target sequence for Zfp219 (NM_027248.1,494-512).
gaaagcgcttccgattcaa

SEQ ID NO: 728546 - DNA, 19 bp, Mus musculus
  siRNA target sequence for Zfp219 (NM_027248.1,499-517).
cgcttccgattcaattcca

SEQ ID NO: 728547 - DNA, 19 bp, Mus musculus
  siRNA target sequence for Zfp219 (NM_027248.1,839-857).
gggaacgccacctgcatat

SEQ ID NO: 728548 - DNA, 19 bp, Mus musculus
  siRNA target sequence for Zfp219 (NM_027248.1,958-976).
cccctggcggctacatcta

SEQ ID NO: 728549 - DNA, 19 bp, Mus musculus
  siRNA target sequence for Zfp219 (NM_027248.1,1135-1153).
gtgtgcggccagagcttta

SEQ ID NO: 728550 - DNA, 19 bp, Mus musculus
  siRNA target sequence for Zfp219 (NM_027248.1,1137-1155).
gtgcggccagagctttaca

SEQ ID NO: 728551 - DNA, 19 bp, Mus musculus
  siRNA target sequence for Zfp219 (NM_027248.1,1804-1822).
cccttctgtggaaaatctt

SEQ ID NO: 728552 - DNA, 19 bp, Mus musculus
  siRNA target sequence for Zfp219 (NM_027248.1,1824-1842).
ccgctcggcgcatcactta

SEQ ID NO: 728553 - DNA, 19 bp, Mus musculus
  siRNA target sequence for Zfp219 (NM_027248.1,1825-1843).
cgctcggcgcatcacttaa

SEQ ID NO: 728554 - DNA, 19 bp, Mus musculus
  siRNA target sequence for Zfp219 (NM_027248.1,1914-1932).
gtcgggctcgctcaagtat

SEQ ID NO: 728555 - DNA, 19 bp, Mus musculus
  siRNA target sequence for Zfp219 (NM_027248.1,1916-1934).
cgggctcgctcaagtatca

SEQ ID NO: 728556 - DNA, 19 bp, Mus musculus
  siRNA target sequence for Zfp219 (NM_027248.1,2291-2309).
ccttgcatctgcaagtaca

SEQ ID NO: 728557 - DNA, 19 bp, Mus musculus
  siRNA target sequence for Zfp219 (NM_027248.1,2349-2367).
cgacacgtctccaacctat

SEQ ID NO: 728558 - DNA, 19 bp, Mus musculus
  siRNA target sequence for 2010305A19Rik (NM_027250.2,98-116).
gtggagtgtcactaccaat

SEQ ID NO: 728559 - DNA, 19 bp, Mus musculus
  siRNA target sequence for 2010305A19Rik (NM_027250.2,130-148).
ggacccggagggttgctat

SEQ ID NO: 728560 - DNA, 19 bp, Mus musculus
  siRNA target sequence for 2010305A19Rik (NM_027250.2,164-182).
ctggaaggaatccaaaaga

SEQ ID NO: 728561 - DNA, 19 bp, Mus musculus
  siRNA target sequence for 2010305A19Rik (NM_027250.2,233-251).
catggtgacagctgttaca

SEQ ID NO: 728562 - DNA, 19 bp, Mus musculus
  siRNA target sequence for 2010305A19Rik (NM_027250.2,285-303).
gcctgactcaggacctaaa

SEQ ID NO: 728563 - DNA, 19 bp, Mus musculus
  siRNA target sequence for 2010305A19Rik (NM_027250.2,490-508).
cctcagtgccatgtttcta

SEQ ID NO: 728564 - DNA, 19 bp, Mus musculus
  siRNA target sequence for 2010305A19Rik (NM_027250.2,513-531).
gtgcccctggctttcctaa

SEQ ID NO: 728565 - DNA, 19 bp, Mus musculus
  siRNA target sequence for 2010305A19Rik (NM_027250.2,542-560).
ctggcgtgtaaatattcaa

SEQ ID NO: 728566 - DNA, 19 bp, Mus musculus
  siRNA target sequence for 2010305A19Rik (NM_027250.2,545-563).
gcgtgtaaatattcaatga

SEQ ID NO: 728567 - DNA, 19 bp, Mus musculus
  siRNA target sequence for 2610025P08Rik (NM_027253.3,1417-1435).
gatgaggtcatcatgtgta

SEQ ID NO: 728568 - DNA, 19 bp, Mus musculus
  siRNA target sequence for 2610025P08Rik (NM_027253.3,1420-1438).
gaggtcatcatgtgtactt

SEQ ID NO: 728569 - DNA, 19 bp, Mus musculus
  siRNA target sequence for 2610025P08Rik (NM_027253.3,1459-1477).
ctcaccaagactctttatt

SEQ ID NO: 728570 - DNA, 19 bp, Mus musculus
  siRNA target sequence for 2610025P08Rik (NM_027253.3,1461-1479).
caccaagactctttattca

SEQ ID NO: 728571 - DNA, 19 bp, Mus musculus
  siRNA target sequence for 2610025P08Rik (NM_027253.3,1487-1505).
cagctctcctggacagtaa

SEQ ID NO: 728572 - DNA, 19 bp, Mus musculus
  siRNA target sequence for 2610025P08Rik (NM_027253.3,1638-1656).
cctcgtgtcccagactttt

SEQ ID NO: 728573 - DNA, 19 bp, Mus musculus
  siRNA target sequence for 2610025P08Rik (NM_027253.3,1676-1694).
ccaatgcatcccttctcaa

SEQ ID NO: 728574 - DNA, 19 bp, Mus musculus
  siRNA target sequence for 2610025P08Rik (NM_027253.3,1712-1730).
gtcaaggccgacctttcta

SEQ ID NO: 728575 - DNA, 19 bp, Mus musculus
  siRNA target sequence for 2610025P08Rik (NM_027253.3,1717-1735).
ggccgacctttctatcaat

SEQ ID NO: 728576 - DNA, 19 bp, Mus musculus
  siRNA target sequence for 2610025P08Rik (NM_027253.3,1736-1754).
ggtctcgagccgtccaaat

SEQ ID NO: 728577 - DNA, 19 bp, Mus musculus
  siRNA target sequence for 2610025P08Rik (NM_027253.3,1741-1759).
cgagccgtccaaatcagaa

SEQ ID NO: 728578 - DNA, 19 bp, Mus musculus
  siRNA target sequence for 2610025P08Rik (NM_027253.3,1757-1775).
gaaccaacttggatcttgt

SEQ ID NO: 728579 - DNA, 19 bp, Mus musculus
  siRNA target sequence for 2610025P08Rik (NM_027253.3,1760-1778).
ccaacttggatcttgtgtt

SEQ ID NO: 728580 - DNA, 19 bp, Mus musculus
  siRNA target sequence for 2610025P08Rik (NM_027253.3,1819-1837).
gagttcttccggaaacttt

SEQ ID NO: 728581 - DNA, 19 bp, Mus musculus
  siRNA target sequence for 2610034N24Rik (NM_027256.1,112-130).
gtgtatgaggagttcacta

SEQ ID NO: 728582 - DNA, 19 bp, Mus musculus
  siRNA target sequence for 2610034N24Rik (NM_027256.1,114-132).
gtatgaggagttcactaaa

SEQ ID NO: 728583 - DNA, 19 bp, Mus musculus
  siRNA target sequence for 2610034N24Rik (NM_027256.1,165-183).
caagaagctccgattaaca

SEQ ID NO: 728584 - DNA, 19 bp, Mus musculus
  siRNA target sequence for 2610034N24Rik (NM_027256.1,197-215).
ctgccgctctccacataga

SEQ ID NO: 728585 - DNA, 19 bp, Mus musculus
  siRNA target sequence for 2610034N24Rik (NM_027256.1,200-218).
ccgctctccacatagatct

SEQ ID NO: 728586 - DNA, 19 bp, Mus musculus
  siRNA target sequence for 2610034N24Rik (NM_027256.1,301-319).
ggggtagtcaggattctct

SEQ ID NO: 728587 - DNA, 19 bp, Mus musculus
  siRNA target sequence for 2610034N24Rik (NM_027256.1,312-330).
gattctcttggaacattat

SEQ ID NO: 728588 - DNA, 19 bp, Mus musculus
  siRNA target sequence for 2610034N24Rik (NM_027256.1,368-386).
catcactcttgggattatt

SEQ ID NO: 728589 - DNA, 19 bp, Mus musculus
  siRNA target sequence for 2610034N24Rik (NM_027256.1,373-391).
ctcttgggattattatcaa

SEQ ID NO: 728590 - DNA, 19 bp, Mus musculus
  siRNA target sequence for 2610034N24Rik (NM_027256.1,423-441).
ggacgacgccattaacata

SEQ ID NO: 728591 - DNA, 19 bp, Mus musculus
  siRNA target sequence for 2610034N24Rik (NM_027256.1,426-444).
cgacgccattaacatacta

SEQ ID NO: 728592 - DNA, 19 bp, Mus musculus
  siRNA target sequence for 2610034N24Rik (NM_027256.1,462-480).
ccaagtgctagctcaacta

SEQ ID NO: 728593 - DNA, 19 bp, Mus musculus
  siRNA target sequence for 2610034N24Rik (NM_027256.1,483-501).
ggacactttgcttgcaatt

SEQ ID NO: 728594 - DNA, 19 bp, Mus musculus
  siRNA target sequence for 2610034N24Rik (NM_027256.1,492-510).
gcttgcaattggcagtaaa

SEQ ID NO: 728595 - DNA, 19 bp, Mus musculus
  siRNA target sequence for 2610034N24Rik (NM_027256.1,558-576).
caagcacctgacagatact

SEQ ID NO: 728596 - DNA, 19 bp, Mus musculus
  siRNA target sequence for 2610034N24Rik (NM_027256.1,580-598).
catggtgtaagaaataagt

SEQ ID NO: 728597 - DNA, 19 bp, Mus musculus
  siRNA target sequence for 2610034N24Rik (NM_027256.1,603-621).
gcaattacttggcaatctt

SEQ ID NO: 728598 - DNA, 19 bp, Mus musculus
  siRNA target sequence for 2610034N24Rik (NM_027256.1,720-738).
ggtcagaacagcagctata

SEQ ID NO: 728599 - DNA, 19 bp, Mus musculus
  siRNA target sequence for 2610034N24Rik (NM_027256.1,721-739).
gtcagaacagcagctataa

SEQ ID NO: 728600 - DNA, 19 bp, Mus musculus
  siRNA target sequence for 2610034N24Rik (NM_027256.1,771-789).
gaagttacaccaaacgatt

SEQ ID NO: 728601 - DNA, 19 bp, Mus musculus
  siRNA target sequence for 2610034N24Rik (NM_027256.1,873-891).
gctctatcctgagagtata

SEQ ID NO: 728602 - DNA, 19 bp, Mus musculus
  siRNA target sequence for 2610034N24Rik (NM_027256.1,896-914).
caataccgtcttctaatga

SEQ ID NO: 728603 - DNA, 19 bp, Mus musculus
  siRNA target sequence for 2610034N24Rik (NM_027256.1,901-919).
ccgtcttctaatgaagaaa

SEQ ID NO: 728604 - DNA, 19 bp, Mus musculus
  siRNA target sequence for 2610034N24Rik (NM_027256.1,923-941).
gtctagttgatgatgcatt

SEQ ID NO: 728605 - DNA, 19 bp, Mus musculus
  siRNA target sequence for 2610034N24Rik (NM_027256.1,975-993).
ctgggtggttcgtgttcaa

SEQ ID NO: 728606 - DNA, 19 bp, Mus musculus
  siRNA target sequence for 2610034N24Rik (NM_027256.1,1009-1027).
ggctcgatggagcaagtta

SEQ ID NO: 728607 - DNA, 19 bp, Mus musculus
  siRNA target sequence for 2610034N24Rik (NM_027256.1,1018-1036).
gagcaagttagctctcatt

SEQ ID NO: 728608 - DNA, 19 bp, Mus musculus
  siRNA target sequence for 2610034N24Rik (NM_027256.1,1021-1039).
caagttagctctcatttct

SEQ ID NO: 728609 - DNA, 19 bp, Mus musculus
  siRNA target sequence for 2610034N24Rik (NM_027256.1,1099-1117).
gagcgtgccaaggaacttt

SEQ ID NO: 728610 - DNA, 19 bp, Mus musculus
  siRNA target sequence for 2610034N24Rik (NM_027256.1,1102-1120).
cgtgccaaggaactttaca

SEQ ID NO: 728611 - DNA, 19 bp, Mus musculus
  siRNA target sequence for 2610034N24Rik (NM_027256.1,1189-1207).
gccgtgaacctgatagagt

SEQ ID NO: 728612 - DNA, 19 bp, Mus musculus
  siRNA target sequence for 2610034N24Rik (NM_027256.1,1235-1253).
ggttggaagatgagatgta

SEQ ID NO: 728613 - DNA, 19 bp, Mus musculus
  siRNA target sequence for 2610034N24Rik (NM_027256.1,1296-1314).
ccagtcttcgccctctttt

SEQ ID NO: 728614 - DNA, 19 bp, Mus musculus
  siRNA target sequence for 2610034N24Rik (NM_027256.1,1299-1317).
gtcttcgccctcttttgct

SEQ ID NO: 728615 - DNA, 19 bp, Mus musculus
  siRNA target sequence for 2610034N24Rik (NM_027256.1,1466-1484).
catccagggatattagaga

SEQ ID NO: 728616 - DNA, 19 bp, Mus musculus
  siRNA target sequence for 2610034N24Rik (NM_027256.1,1486-1504).
gctcttcatgaactcttat

SEQ ID NO: 728617 - DNA, 19 bp, Mus musculus
  siRNA target sequence for 2610034N24Rik (NM_027256.1,1544-1562).
cactggtggagcttctaaa

SEQ ID NO: 728618 - DNA, 19 bp, Mus musculus
  siRNA target sequence for 2610034N24Rik (NM_027256.1,1546-1564).
ctggtggagcttctaaaaa

SEQ ID NO: 728619 - DNA, 19 bp, Mus musculus
  siRNA target sequence for 2610034N24Rik (NM_027256.1,1674-1692).
gcacccattttttgatact

SEQ ID NO: 728620 - DNA, 19 bp, Mus musculus
  siRNA target sequence for 2610034N24Rik (NM_027256.1,1726-1744).
gcagttttagttcttatct

SEQ ID NO: 728621 - DNA, 19 bp, Mus musculus
  siRNA target sequence for 2610034N24Rik (NM_027256.1,2010-2028).
cagagatctgcaaagactt

SEQ ID NO: 728622 - DNA, 19 bp, Mus musculus
  siRNA target sequence for 2610034N24Rik (NM_027256.1,2030-2048).
gagagcttcagtctgaatt

SEQ ID NO: 728623 - DNA, 19 bp, Mus musculus
  siRNA target sequence for 2610034N24Rik (NM_027256.1,2133-2151).
ggctgcccccttgtatcta

SEQ ID NO: 728624 - DNA, 19 bp, Mus musculus
  siRNA target sequence for 2610034N24Rik (NM_027256.1,2134-2152).
gctgcccccttgtatctaa

SEQ ID NO: 728625 - DNA, 19 bp, Mus musculus
  siRNA target sequence for 2610034N24Rik (NM_027256.1,2138-2156).
cccccttgtatctaaagca

SEQ ID NO: 728626 - DNA, 19 bp, Mus musculus
  siRNA target sequence for 2610034N24Rik (NM_027256.1,2238-2256).
caagcaggttgtgatcata

SEQ ID NO: 728627 - DNA, 19 bp, Mus musculus
  siRNA target sequence for 2610034N24Rik (NM_027256.1,2281-2299).
gctctgcaactcatagtaa

SEQ ID NO: 728628 - DNA, 19 bp, Mus musculus
  siRNA target sequence for 2610034N24Rik (NM_027256.1,2315-2333).
gaggagtagaccccttatt

SEQ ID NO: 728629 - DNA, 19 bp, Mus musculus
  siRNA target sequence for 2610034N24Rik (NM_027256.1,2325-2343).
ccccttatttggaatgtgt

SEQ ID NO: 728630 - DNA, 19 bp, Mus musculus
  siRNA target sequence for 2610034N24Rik (NM_027256.1,2399-2417).
cccaccttcaagatagctt

SEQ ID NO: 728631 - DNA, 19 bp, Mus musculus
  siRNA target sequence for 2610034N24Rik (NM_027256.1,2421-2439).
ggacaaactccttgatctt

SEQ ID NO: 728632 - DNA, 19 bp, Mus musculus
  siRNA target sequence for 2610034N24Rik (NM_027256.1,2459-2477).
ctaaacctgttgaagtgat

SEQ ID NO: 728633 - DNA, 19 bp, Mus musculus
  siRNA target sequence for 2610034N24Rik (NM_027256.1,2464-2482).
cctgttgaagtgatcaaaa

SEQ ID NO: 728634 - DNA, 19 bp, Mus musculus
  siRNA target sequence for 2610034N24Rik (NM_027256.1,2527-2545).
cttccagagcagatacaca

SEQ ID NO: 728635 - DNA, 19 bp, Mus musculus
  siRNA target sequence for 2610034N24Rik (NM_027256.1,2575-2593).
ggagagtcagacaatcctt

SEQ ID NO: 728636 - DNA, 19 bp, Mus musculus
  siRNA target sequence for 2610034N24Rik (NM_027256.1,2676-2694).
ggttcaggtcttatatcca

SEQ ID NO: 728637 - DNA, 19 bp, Mus musculus
  siRNA target sequence for 2610034N24Rik (NM_027256.1,2841-2859).
caactccggtgcacgaatt

SEQ ID NO: 728638 - DNA, 19 bp, Mus musculus
  siRNA target sequence for 2610034N24Rik (NM_027256.1,2846-2864).
ccggtgcacgaattccaaa

SEQ ID NO: 728639 - DNA, 19 bp, Mus musculus
  siRNA target sequence for 2610034N24Rik (NM_027256.1,2847-2865).
cggtgcacgaattccaaaa

SEQ ID NO: 728640 - DNA, 19 bp, Mus musculus
  siRNA target sequence for 2610034N24Rik (NM_027256.1,2848-2866).
ggtgcacgaattccaaaat

SEQ ID NO: 728641 - DNA, 19 bp, Mus musculus
  siRNA target sequence for 2610034N24Rik (NM_027256.1,2921-2939).
gcaccatccccttcagtaa

SEQ ID NO: 728642 - DNA, 19 bp, Mus musculus
  siRNA target sequence for 2610034N24Rik (NM_027256.1,2942-2960).
ctgtgaaagtctacataat

SEQ ID NO: 728643 - DNA, 19 bp, Mus musculus
  siRNA target sequence for 2610036N15Rik (NM_027257.1,98-116).
ccttcgtgaaggatatcaa

SEQ ID NO: 728644 - DNA, 19 bp, Mus musculus
  siRNA target sequence for 2610036N15Rik (NM_027257.1,192-210).
cgaggttcggacctgtaaa

SEQ ID NO: 728645 - DNA, 19 bp, Mus musculus
  siRNA target sequence for 2610036N15Rik (NM_027257.1,292-310).
ctcaccaaagggtatgctt

SEQ ID NO: 728646 - DNA, 19 bp, Mus musculus
  siRNA target sequence for 2610036N15Rik (NM_027257.1,302-320).
ggtatgcttcagtgttcaa

SEQ ID NO: 728647 - DNA, 19 bp, Mus musculus
  siRNA target sequence for 2610036N15Rik (NM_027257.1,393-411).
cgaagtccctaatttcagt

SEQ ID NO: 728648 - DNA, 19 bp, Mus musculus
  siRNA target sequence for 2610036N15Rik (NM_027257.1,412-430).
gagcccaatccagagtata

SEQ ID NO: 728649 - DNA, 19 bp, Mus musculus
  siRNA target sequence for 2610036N15Rik (NM_027257.1,415-433).
cccaatccagagtataaca

SEQ ID NO: 728650 - DNA, 19 bp, Mus musculus
  siRNA target sequence for 2610036N15Rik (NM_027257.1,618-636).
ccgaatcactcgaagtcaa

SEQ ID NO: 728651 - DNA, 19 bp, Mus musculus
  siRNA target sequence for 2810004A10Rik (NM_027265.1,473-491).
cccccgactggatagctaa

SEQ ID NO: 728652 - DNA, 19 bp, Mus musculus
  siRNA target sequence for 2810004A10Rik (NM_027265.1,474-492).
ccccgactggatagctaat

SEQ ID NO: 728653 - DNA, 19 bp, Mus musculus
  siRNA target sequence for 2810004A10Rik (NM_027265.1,475-493).
cccgactggatagctaata

SEQ ID NO: 728654 - DNA, 19 bp, Mus musculus
  siRNA target sequence for 2810004A10Rik (NM_027265.1,476-494).
ccgactggatagctaatat

SEQ ID NO: 728655 - DNA, 19 bp, Mus musculus
  siRNA target sequence for 2810004A10Rik (NM_027265.1,477-495).
cgactggatagctaatatt

SEQ ID NO: 728656 - DNA, 19 bp, Mus musculus
  siRNA target sequence for 2810004A10Rik (NM_027265.1,507-525).
gactctggccggaagagaa

SEQ ID NO: 728657 - DNA, 19 bp, Mus musculus
  siRNA target sequence for 2810004A10Rik (NM_027265.1,552-570).
ccactggattatattcaat

SEQ ID NO: 728658 - DNA, 19 bp, Mus musculus
  siRNA target sequence for 2810004A10Rik (NM_027265.1,656-674).
gcaaaaacttctgttcaaa

SEQ ID NO: 728659 - DNA, 19 bp, Mus musculus
  siRNA target sequence for 2810004A10Rik (NM_027265.1,745-763).
gaagcttccatgttatgga

SEQ ID NO: 728660 - DNA, 19 bp, Mus musculus
  siRNA target sequence for 2810004A10Rik (NM_027265.1,785-803).
ggactggtgcccttgttct

SEQ ID NO: 728661 - DNA, 19 bp, Mus musculus
  siRNA target sequence for 2810019K23Rik (NM_027268.1,155-173).
cgcctccaagttactcttt

SEQ ID NO: 728662 - DNA, 19 bp, Mus musculus
  siRNA target sequence for 2810019K23Rik (NM_027268.1,158-176).
ctccaagttactcttttgt

SEQ ID NO: 728663 - DNA, 19 bp, Mus musculus
  siRNA target sequence for 2810019K23Rik (NM_027268.1,198-216).
ggacggtctggtggtattt

SEQ ID NO: 728664 - DNA, 19 bp, Mus musculus
  siRNA target sequence for 2810019K23Rik (NM_027268.1,208-226).
gtggtatttgggaaaaatt

SEQ ID NO: 728665 - DNA, 19 bp, Mus musculus
  siRNA target sequence for 2810019K23Rik (NM_027268.1,298-316).
gttgagtgcacttacatct

SEQ ID NO: 728666 - DNA, 19 bp, Mus musculus
  siRNA target sequence for 2810019K23Rik (NM_027268.1,301-319).
gagtgcacttacatctcaa

SEQ ID NO: 728667 - DNA, 19 bp, Mus musculus
  siRNA target sequence for 2810019K23Rik (NM_027268.1,340-358).
cacgccatcgtgataagca

SEQ ID NO: 728668 - DNA, 19 bp, Mus musculus
  siRNA target sequence for 2810019K23Rik (NM_027268.1,512-530).
ctaaagaagccctagacat

SEQ ID NO: 728669 - DNA, 19 bp, Mus musculus
  siRNA target sequence for 2810019K23Rik (NM_027268.1,552-570).
gcacggacaaggtggaaat

SEQ ID NO: 728670 - DNA, 19 bp, Mus musculus
  siRNA target sequence for 2810019K23Rik (NM_027268.1,553-571).
cacggacaaggtggaaatt

SEQ ID NO: 728671 - DNA, 19 bp, Mus musculus
  siRNA target sequence for 2810019K23Rik (NM_027268.1,599-617).
gcttccaaagtgcatatct

SEQ ID NO: 728672 - DNA, 19 bp, Mus musculus
  siRNA target sequence for 2810019K23Rik (NM_027268.1,618-636).
gctggtggaccgagatgaa

SEQ ID NO: 728673 - DNA, 19 bp, Mus musculus
  siRNA target sequence for 2810019K23Rik (NM_027268.1,785-803).
ggacgggagacgacgaatt

SEQ ID NO: 728674 - DNA, 19 bp, Mus musculus
  siRNA target sequence for 2810019K23Rik (NM_027268.1,788-806).
cgggagacgacgaattcaa

SEQ ID NO: 728675 - DNA, 19 bp, Mus musculus
  siRNA target sequence for 2810019K23Rik (NM_027268.1,790-808).
ggagacgacgaattcaact

SEQ ID NO: 728676 - DNA, 19 bp, Mus musculus
  siRNA target sequence for 2810019K23Rik (NM_027268.1,791-809).
gagacgacgaattcaactt

SEQ ID NO: 728677 - DNA, 19 bp, Mus musculus
  siRNA target sequence for 2810019K23Rik (NM_027268.1,893-911).
ctgtgcagacgatgattaa

SEQ ID NO: 728678 - DNA, 19 bp, Mus musculus
  siRNA target sequence for 2810019K23Rik (NM_027268.1,895-913).
gtgcagacgatgattaaca

SEQ ID NO: 728679 - DNA, 19 bp, Mus musculus
  siRNA target sequence for 2810019K23Rik (NM_027268.1,898-916).
cagacgatgattaacatct

SEQ ID NO: 728680 - DNA, 19 bp, Mus musculus
  siRNA target sequence for 2810019K23Rik (NM_027268.1,900-918).
gacgatgattaacatctta

SEQ ID NO: 728681 - DNA, 19 bp, Mus musculus
  siRNA target sequence for 2810019K23Rik (NM_027268.1,935-953).
gtgtttgcatagattctga

SEQ ID NO: 728682 - DNA, 19 bp, Mus musculus
  siRNA target sequence for 2810019K23Rik (NM_027268.1,1007-1025).
caccgtgtatccactactt

SEQ ID NO: 728683 - DNA, 19 bp, Mus musculus
  siRNA target sequence for 2810019K23Rik (NM_027268.1,1009-1027).
ccgtgtatccactacttca

SEQ ID NO: 728684 - DNA, 19 bp, Mus musculus
  siRNA target sequence for 2810019K23Rik (NM_027268.1,1039-1057).
gatccttccaggtccatat

SEQ ID NO: 728685 - DNA, 19 bp, Mus musculus
  siRNA target sequence for 2810019K23Rik (NM_027268.1,1042-1060).
ccttccaggtccatattca

SEQ ID NO: 728686 - DNA, 19 bp, Mus musculus
  siRNA target sequence for 2810019K23Rik (NM_027268.1,1331-1349).
ccgaggtgggggacctatt

SEQ ID NO: 728687 - DNA, 19 bp, Mus musculus
  siRNA target sequence for 2810019K23Rik (NM_027268.1,1335-1353).
ggtgggggacctattctat

SEQ ID NO: 728688 - DNA, 19 bp, Mus musculus
  siRNA target sequence for 2810019K23Rik (NM_027268.1,1339-1357).
ggggacctattctatgact

SEQ ID NO: 728689 - DNA, 19 bp, Mus musculus
  siRNA target sequence for 2810019K23Rik (NM_027268.1,1365-1383).
caccgagatgaagttcttt

SEQ ID NO: 728690 - DNA, 19 bp, Mus musculus
  siRNA target sequence for 1110034A24Rik (NM_027269.2,286-304).
ccgtgtgccctcctttaca

SEQ ID NO: 728691 - DNA, 19 bp, Mus musculus
  siRNA target sequence for 1110034A24Rik (NM_027269.2,288-306).
gtgtgccctcctttacagt

SEQ ID NO: 728692 - DNA, 19 bp, Mus musculus
  siRNA target sequence for 1110034A24Rik (NM_027269.2,293-311).
ccctcctttacagtgtaat

SEQ ID NO: 728693 - DNA, 19 bp, Mus musculus
  siRNA target sequence for 1110034A24Rik (NM_027269.2,352-370).
ggattctgccacaaactct

SEQ ID NO: 728694 - DNA, 19 bp, Mus musculus
  siRNA target sequence for 1110034A24Rik (NM_027269.2,353-371).
gattctgccacaaactctt

SEQ ID NO: 728695 - DNA, 19 bp, Mus musculus
  siRNA target sequence for 1110034A24Rik (NM_027269.2,385-403).
gccccgtcggttacgaatt

SEQ ID NO: 728696 - DNA, 19 bp, Mus musculus
  siRNA target sequence for 1110034A24Rik (NM_027269.2,387-405).
cccgtcggttacgaattgt

SEQ ID NO: 728697 - DNA, 19 bp, Mus musculus
  siRNA target sequence for 1110034A24Rik (NM_027269.2,417-435).
caagactcgggttattcct

SEQ ID NO: 728698 - DNA, 19 bp, Mus musculus
  siRNA target sequence for 1110034A24Rik (NM_027269.2,480-498).
cccgagactagcgtttctt

SEQ ID NO: 728699 - DNA, 19 bp, Mus musculus
  siRNA target sequence for 1110034A24Rik (NM_027269.2,481-499).
ccgagactagcgtttcttt

SEQ ID NO: 728700 - DNA, 19 bp, Mus musculus
  siRNA target sequence for 1110034A24Rik (NM_027269.2,482-500).
cgagactagcgtttcttta

SEQ ID NO: 728701 - DNA, 19 bp, Mus musculus
  siRNA target sequence for 1110034A24Rik (NM_027269.2,483-501).
gagactagcgtttctttaa

SEQ ID NO: 728702 - DNA, 19 bp, Mus musculus
  siRNA target sequence for 1110034A24Rik (NM_027269.2,559-577).
ggtattgtggcttgaacaa

SEQ ID NO: 728703 - DNA, 19 bp, Mus musculus
  siRNA target sequence for 1110034A24Rik (NM_027269.2,568-586).
gcttgaacaaggagtcttt

SEQ ID NO: 728704 - DNA, 19 bp, Mus musculus
  siRNA target sequence for 1110034A24Rik (NM_027269.2,682-700).
cgctgattgaggttcttca

SEQ ID NO: 728705 - DNA, 19 bp, Mus musculus
  siRNA target sequence for 1110034A24Rik (NM_027269.2,729-747).
gcagagttgcaggaatgta

SEQ ID NO: 728706 - DNA, 19 bp, Mus musculus
  siRNA target sequence for 1110034A24Rik (NM_027269.2,864-882).
gcagtcgaagcactaaaaa

SEQ ID NO: 728707 - DNA, 19 bp, Mus musculus
  siRNA target sequence for 1110034A24Rik (NM_027269.2,865-883).
cagtcgaagcactaaaaat

SEQ ID NO: 728708 - DNA, 19 bp, Mus musculus
  siRNA target sequence for 1110034A24Rik (NM_027269.2,867-885).
gtcgaagcactaaaaataa

SEQ ID NO: 728709 - DNA, 19 bp, Mus musculus
  siRNA target sequence for 1110034A24Rik (NM_027269.2,977-995).
ggatcctgagtttataaga

SEQ ID NO: 728710 - DNA, 19 bp, Mus musculus
  siRNA target sequence for 1110034A24Rik (NM_027269.2,1009-1027).
cctactcgactgaggaaaa

SEQ ID NO: 728711 - DNA, 19 bp, Mus musculus
  siRNA target sequence for 1110034A24Rik (NM_027269.2,1039-1057).
gagagccagtaataagcaa

SEQ ID NO: 728712 - DNA, 19 bp, Mus musculus
  siRNA target sequence for 1110034A24Rik (NM_027269.2,1075-1093).
gagatcacccatcttcatt

SEQ ID NO: 728713 - DNA, 19 bp, Mus musculus
  siRNA target sequence for 1110034A24Rik (NM_027269.2,1135-1153).
ctataaaagagacgaatat

SEQ ID NO: 728714 - DNA, 19 bp, Mus musculus
  siRNA target sequence for 1110034A24Rik (NM_027269.2,1161-1179).
ggtagtgtgcagattatta

SEQ ID NO: 728715 - DNA, 19 bp, Mus musculus
  siRNA target sequence for 1110034A24Rik (NM_027269.2,1190-1208).
gactcattgtgcattcagt

SEQ ID NO: 728716 - DNA, 19 bp, Mus musculus
  siRNA target sequence for 1110034A24Rik (NM_027269.2,1214-1232).
gaatcccttgctatatgat

SEQ ID NO: 728717 - DNA, 19 bp, Mus musculus
  siRNA target sequence for D13Ertd275e (NM_027272.3,1197-1215).
ccattaaatcgcacaaact

SEQ ID NO: 728718 - DNA, 19 bp, Mus musculus
  siRNA target sequence for D13Ertd275e (NM_027272.3,1270-1288).
gtcccataagttattgact

SEQ ID NO: 728719 - DNA, 19 bp, Mus musculus
  siRNA target sequence for D13Ertd275e (NM_027272.3,1279-1297).
gttattgactcgatcttgt

SEQ ID NO: 728720 - DNA, 19 bp, Mus musculus
  siRNA target sequence for D13Ertd275e (NM_027272.3,1316-1334).
gagcacaacaccaacttga

SEQ ID NO: 728721 - DNA, 19 bp, Mus musculus
  siRNA target sequence for D13Ertd275e (NM_027272.3,1354-1372).
cagatcttactccagtaat

SEQ ID NO: 728722 - DNA, 19 bp, Mus musculus
  siRNA target sequence for D13Ertd275e (NM_027272.3,1356-1374).
gatcttactccagtaatct

SEQ ID NO: 728723 - DNA, 19 bp, Mus musculus
  siRNA target sequence for D13Ertd275e (NM_027272.3,1385-1403).
gagttatatggcctgaaaa

SEQ ID NO: 728724 - DNA, 19 bp, Mus musculus
  siRNA target sequence for D13Ertd275e (NM_027272.3,1436-1454).
gcccccaagacatcgaaaa

SEQ ID NO: 728725 - DNA, 19 bp, Mus musculus
  siRNA target sequence for D13Ertd275e (NM_027272.3,1506-1524).
cagggcttatcggtatttt

SEQ ID NO: 728726 - DNA, 19 bp, Mus musculus
  siRNA target sequence for D13Ertd275e (NM_027272.3,1508-1526).
gggcttatcggtattttaa

SEQ ID NO: 728727 - DNA, 19 bp, Mus musculus
  siRNA target sequence for D13Ertd275e (NM_027272.3,1510-1528).
gcttatcggtattttaaca

SEQ ID NO: 728728 - DNA, 19 bp, Mus musculus
  siRNA target sequence for D13Ertd275e (NM_027272.3,1546-1564).
ccagcctcctacaaatggt

SEQ ID NO: 728729 - DNA, 19 bp, Mus musculus
  siRNA target sequence for D13Ertd275e (NM_027272.3,1563-1581).
gtgcaaaaagcattccaat

SEQ ID NO: 728730 - DNA, 19 bp, Mus musculus
  siRNA target sequence for D13Ertd275e (NM_027272.3,1598-1616).
ctggtgcagaccattgagt

SEQ ID NO: 728731 - DNA, 19 bp, Mus musculus
  siRNA target sequence for D13Ertd275e (NM_027272.3,1627-1645).
gcggatccctgtactgaat

SEQ ID NO: 728732 - DNA, 19 bp, Mus musculus
  siRNA target sequence for D13Ertd275e (NM_027272.3,1629-1647).
ggatccctgtactgaatga

SEQ ID NO: 728733 - DNA, 19 bp, Mus musculus
  siRNA target sequence for D13Ertd275e (NM_027272.3,1630-1648).
gatccctgtactgaatgaa

SEQ ID NO: 728734 - DNA, 19 bp, Mus musculus
  siRNA target sequence for D13Ertd275e (NM_027272.3,1682-1700).
caaaatggccccatgctta

SEQ ID NO: 728735 - DNA, 19 bp, Mus musculus
  siRNA target sequence for D13Ertd275e (NM_027272.3,1696-1714).
gcttaggcccacagtatgt

SEQ ID NO: 728736 - DNA, 19 bp, Mus musculus
  siRNA target sequence for D13Ertd275e (NM_027272.3,1839-1857).
ctcctagaaaagttgtcat

SEQ ID NO: 728737 - DNA, 19 bp, Mus musculus
  siRNA target sequence for D13Ertd275e (NM_027272.3,1887-1905).
ctaatgaccctcagatgtt

SEQ ID NO: 728738 - DNA, 19 bp, Mus musculus
  siRNA target sequence for D13Ertd275e (NM_027272.3,1918-1936).
caggaagaagaactatgat

SEQ ID NO: 728739 - DNA, 19 bp, Mus musculus
  siRNA target sequence for D13Ertd275e (NM_027272.3,1949-1967).
gctctggacagcataactt

SEQ ID NO: 728740 - DNA, 19 bp, Mus musculus
  siRNA target sequence for D13Ertd275e (NM_027272.3,1988-2006).
gcaccctatctggaaatca

SEQ ID NO: 728741 - DNA, 19 bp, Mus musculus
  siRNA target sequence for D13Ertd275e (NM_027272.3,1989-2007).
caccctatctggaaatcaa

SEQ ID NO: 728742 - DNA, 19 bp, Mus musculus
  siRNA target sequence for D13Ertd275e (NM_027272.3,2057-2075).
gtcatctcaagtaataggt

SEQ ID NO: 728743 - DNA, 19 bp, Mus musculus
  siRNA target sequence for D13Ertd275e (NM_027272.3,2064-2082).
caagtaataggtcacatat

SEQ ID NO: 728744 - DNA, 19 bp, Mus musculus
  siRNA target sequence for D13Ertd275e (NM_027272.3,2067-2085).
gtaataggtcacatattgt

SEQ ID NO: 728745 - DNA, 19 bp, Mus musculus
  siRNA target sequence for D13Ertd275e (NM_027272.3,2200-2218).
gagcaccttcgcatttcat

SEQ ID NO: 728746 - DNA, 19 bp, Mus musculus
  siRNA target sequence for D13Ertd275e (NM_027272.3,2261-2279).
ctggtcgttgcctctaaca

SEQ ID NO: 728747 - DNA, 19 bp, Mus musculus
  siRNA target sequence for D13Ertd275e (NM_027272.3,2305-2323).
gtacggaagtgggatctat

SEQ ID NO: 728748 - DNA, 19 bp, Mus musculus
  siRNA target sequence for D13Ertd275e (NM_027272.3,2329-2347).
cccgatgtccagcatatca

SEQ ID NO: 728749 - DNA, 19 bp, Mus musculus
  siRNA target sequence for D13Ertd275e (NM_027272.3,2337-2355).
ccagcatatcatttggtta

SEQ ID NO: 728750 - DNA, 19 bp, Mus musculus
  siRNA target sequence for D13Ertd275e (NM_027272.3,2341-2359).
catatcatttggttactca

SEQ ID NO: 728751 - DNA, 19 bp, Mus musculus
  siRNA target sequence for D13Ertd275e (NM_027272.3,2351-2369).
ggttactcagggatgaaca

SEQ ID NO: 728752 - DNA, 19 bp, Mus musculus
  siRNA target sequence for D13Ertd275e (NM_027272.3,2352-2370).
gttactcagggatgaacaa

SEQ ID NO: 728753 - DNA, 19 bp, Mus musculus
  siRNA target sequence for D13Ertd275e (NM_027272.3,2396-2414).
gagccagcttccagtagta

SEQ ID NO: 728754 - DNA, 19 bp, Mus musculus
  siRNA target sequence for D13Ertd275e (NM_027272.3,2465-2483).
ctgcaaagccgtaacttga

SEQ ID NO: 728755 - DNA, 19 bp, Mus musculus
  siRNA target sequence for D13Ertd275e (NM_027272.3,2472-2490).
gccgtaacttgaaatgcat

SEQ ID NO: 728756 - DNA, 19 bp, Mus musculus
  siRNA target sequence for D13Ertd275e (NM_027272.3,2473-2491).
ccgtaacttgaaatgcata

SEQ ID NO: 728757 - DNA, 19 bp, Mus musculus
  siRNA target sequence for D13Ertd275e (NM_027272.3,2514-2532).
cacctgacctgcacaaaca

SEQ ID NO: 728758 - DNA, 19 bp, Mus musculus
  siRNA target sequence for D13Ertd275e (NM_027272.3,2561-2579).
gatcatgtctgtacaagat

SEQ ID NO: 728759 - DNA, 19 bp, Mus musculus
  siRNA target sequence for D13Ertd275e (NM_027272.3,2567-2585).
gtctgtacaagattctttt

SEQ ID NO: 728760 - DNA, 19 bp, Mus musculus
  siRNA target sequence for D13Ertd275e (NM_027272.3,2617-2635).
caatatcaacacacaagaa

SEQ ID NO: 728761 - DNA, 19 bp, Mus musculus
  siRNA target sequence for D13Ertd275e (NM_027272.3,2636-2654).
ggaggtattcacaaagaga

SEQ ID NO: 728762 - DNA, 19 bp, Mus musculus
  siRNA target sequence for D13Ertd275e (NM_027272.3,2637-2655).
gaggtattcacaaagagat

SEQ ID NO: 728763 - DNA, 19 bp, Mus musculus
  siRNA target sequence for D13Ertd275e (NM_027272.3,2640-2658).
gtattcacaaagagatact

SEQ ID NO: 728764 - DNA, 19 bp, Mus musculus
  siRNA target sequence for D13Ertd275e (NM_027272.3,2660-2678).
cgtgtgattggtaatcaga

SEQ ID NO: 728765 - DNA, 19 bp, Mus musculus
  siRNA target sequence for 2810025M15Rik (NM_027274.2,497-515).
gaaaggcgcttccctttta

SEQ ID NO: 728766 - DNA, 19 bp, Mus musculus
  siRNA target sequence for 2810025M15Rik (NM_027274.2,502-520).
gcgcttcccttttatctta

SEQ ID NO: 728767 - DNA, 19 bp, Mus musculus
  siRNA target sequence for 2810025M15Rik (NM_027274.2,554-572).
ctttctcggacgaagaaca

SEQ ID NO: 728768 - DNA, 19 bp, Mus musculus
  siRNA target sequence for 2810025M15Rik (NM_027274.2,560-578).
cggacgaagaacatgaaga

SEQ ID NO: 728769 - DNA, 19 bp, Mus musculus
  siRNA target sequence for 2810025M15Rik (NM_027274.2,579-597).
cgctgctttatctaacagt

SEQ ID NO: 728770 - DNA, 19 bp, Mus musculus
  siRNA target sequence for 2810025M15Rik (NM_027274.2,694-712).
ccgccctggagctggattt

SEQ ID NO: 728771 - DNA, 19 bp, Mus musculus
  siRNA target sequence for 2810025M15Rik (NM_027274.2,708-726).
gatttatcatcagtttaga

SEQ ID NO: 728772 - DNA, 19 bp, Mus musculus
  siRNA target sequence for 2810025M15Rik (NM_027274.2,715-733).
catcagtttagaatagcat

SEQ ID NO: 728773 - DNA, 19 bp, Mus musculus
  siRNA target sequence for 2810422B04Rik (NM_027275.2,365-383).
gagactgcagcaaagttta

SEQ ID NO: 728774 - DNA, 19 bp, Mus musculus
  siRNA target sequence for 2810422B04Rik (NM_027275.2,367-385).
gactgcagcaaagtttatt

SEQ ID NO: 728775 - DNA, 19 bp, Mus musculus
  siRNA target sequence for 2810422B04Rik (NM_027275.2,428-446).
cctcatataccgtgcttaa

SEQ ID NO: 728776 - DNA, 19 bp, Mus musculus
  siRNA target sequence for 2810422B04Rik (NM_027275.2,429-447).
ctcatataccgtgcttaat

SEQ ID NO: 728777 - DNA, 19 bp, Mus musculus
  siRNA target sequence for 2810422B04Rik (NM_027275.2,441-459).
gcttaatgcctgagtactt

SEQ ID NO: 728778 - DNA, 19 bp, Mus musculus
  siRNA target sequence for 2810422B04Rik (NM_027275.2,454-472).
gtactttgagcctcagatt

SEQ ID NO: 728779 - DNA, 19 bp, Mus musculus
  siRNA target sequence for 2810422B04Rik (NM_027275.2,464-482).
cctcagattgaagatgtaa

SEQ ID NO: 728780 - DNA, 19 bp, Mus musculus
  siRNA target sequence for 2810422B04Rik (NM_027275.2,525-543).
gagcttctgtggacatgtt

SEQ ID NO: 728781 - DNA, 19 bp, Mus musculus
  siRNA target sequence for 2810422B04Rik (NM_027275.2,585-603).
caactaatagtcttttgga

SEQ ID NO: 728782 - DNA, 19 bp, Mus musculus
  siRNA target sequence for 2810422B04Rik (NM_027275.2,633-651).
ccccagctgactatccttt

SEQ ID NO: 728783 - DNA, 19 bp, Mus musculus
  siRNA target sequence for 2810422B04Rik (NM_027275.2,634-652).
cccagctgactatcctttt

SEQ ID NO: 728784 - DNA, 19 bp, Mus musculus
  siRNA target sequence for 2810422B04Rik (NM_027275.2,636-654).
cagctgactatccttttca

SEQ ID NO: 728785 - DNA, 19 bp, Mus musculus
  siRNA target sequence for 2810422B04Rik (NM_027275.2,728-746).
ccttggaaagcacaaaaca

SEQ ID NO: 728786 - DNA, 19 bp, Mus musculus
  siRNA target sequence for 2810422B04Rik (NM_027275.2,1040-1058).
ggtctccggaagtgttact

SEQ ID NO: 728787 - DNA, 19 bp, Mus musculus
  siRNA target sequence for 2810422B04Rik (NM_027275.2,1088-1106).
ctacgtgaaatgaaacata

SEQ ID NO: 728788 - DNA, 19 bp, Mus musculus
  siRNA target sequence for 2810422B04Rik (NM_027275.2,1099-1117).
gaaacatattggaatagaa

SEQ ID NO: 728789 - DNA, 19 bp, Mus musculus
  siRNA target sequence for 2810422B04Rik (NM_027275.2,1120-1138).
ctcacttgcaacataccat

SEQ ID NO: 728790 - DNA, 19 bp, Mus musculus
  siRNA target sequence for 2810422B04Rik (NM_027275.2,1124-1142).
cttgcaacataccatcata

SEQ ID NO: 728791 - DNA, 19 bp, Mus musculus
  siRNA target sequence for 2810422B04Rik (NM_027275.2,1127-1145).
gcaacataccatcatatta

SEQ ID NO: 728792 - DNA, 19 bp, Mus musculus
  siRNA target sequence for 2810422B04Rik (NM_027275.2,1128-1146).
caacataccatcatattat

SEQ ID NO: 728793 - DNA, 19 bp, Mus musculus
  siRNA target sequence for 2810422B04Rik (NM_027275.2,1131-1149).
cataccatcatattattca

SEQ ID NO: 728794 - DNA, 19 bp, Mus musculus
  siRNA target sequence for 2810422B04Rik (NM_027275.2,1151-1169).
ctcttttatccaagagatt

SEQ ID NO: 728795 - DNA, 19 bp, Mus musculus
  siRNA target sequence for 2810422B04Rik (NM_027275.2,1164-1182).
gagatttaagcgctataaa

SEQ ID NO: 728796 - DNA, 19 bp, Mus musculus
  siRNA target sequence for 2810422B04Rik (NM_027275.2,1166-1184).
gatttaagcgctataaaaa

SEQ ID NO: 728797 - DNA, 19 bp, Mus musculus
  siRNA target sequence for 2810422B04Rik (NM_027275.2,1186-1204).
gccatccctcatcatctat

SEQ ID NO: 728798 - DNA, 19 bp, Mus musculus
  siRNA target sequence for 2810422B04Rik (NM_027275.2,1293-1311).
catctctcagagatttaga

SEQ ID NO: 728799 - DNA, 19 bp, Mus musculus
  siRNA target sequence for 2810422B04Rik (NM_027275.2,1368-1386).
gacatgatcctctacgtaa

SEQ ID NO: 728800 - DNA, 19 bp, Mus musculus
  siRNA target sequence for 2810422B04Rik (NM_027275.2,1373-1391).
gatcctctacgtaaggtat

SEQ ID NO: 728801 - DNA, 19 bp, Mus musculus
  siRNA target sequence for 2810422B04Rik (NM_027275.2,1377-1395).
ctctacgtaaggtatatta

SEQ ID NO: 728802 - DNA, 19 bp, Mus musculus
  siRNA target sequence for 2810422B04Rik (NM_027275.2,1379-1397).
ctacgtaaggtatattatt

SEQ ID NO: 728803 - DNA, 19 bp, Mus musculus
  siRNA target sequence for 2810422B04Rik (NM_027275.2,1382-1400).
cgtaaggtatattattcga

SEQ ID NO: 728804 - DNA, 19 bp, Mus musculus
  siRNA target sequence for 2810422B04Rik (NM_027275.2,1383-1401).
gtaaggtatattattcgaa

SEQ ID NO: 728805 - DNA, 19 bp, Mus musculus
  siRNA target sequence for 2810422B04Rik (NM_027275.2,1387-1405).
ggtatattattcgaagttt

SEQ ID NO: 728806 - DNA, 19 bp, Mus musculus
  siRNA target sequence for 2810422B04Rik (NM_027275.2,1419-1437).
gttcactggaacaaattga

SEQ ID NO: 728807 - DNA, 19 bp, Mus musculus
  siRNA target sequence for 2810422B04Rik (NM_027275.2,1439-1457).
gtcaccttgaagtggtata

SEQ ID NO: 728808 - DNA, 19 bp, Mus musculus
  siRNA target sequence for 2810422B04Rik (NM_027275.2,1450-1468).
gtggtataaggacctaata

SEQ ID NO: 728809 - DNA, 19 bp, Mus musculus
  siRNA target sequence for 2810422B04Rik (NM_027275.2,1453-1471).
gtataaggacctaatacct

SEQ ID NO: 728810 - DNA, 19 bp, Mus musculus
  siRNA target sequence for 2810422B04Rik (NM_027275.2,1486-1504).
ccactaccaaatattcata

SEQ ID NO: 728811 - DNA, 19 bp, Mus musculus
  siRNA target sequence for 2810422B04Rik (NM_027275.2,1522-1540).
ggatgtggccaatagacta

SEQ ID NO: 728812 - DNA, 19 bp, Mus musculus
  siRNA target sequence for 2810422B04Rik (NM_027275.2,1591-1609).
ccgagatgccctaagagaa

SEQ ID NO: 728813 - DNA, 19 bp, Mus musculus
  siRNA target sequence for 2810422B04Rik (NM_027275.2,1647-1665).
cagagcttcaggttgcatt

SEQ ID NO: 728814 - DNA, 19 bp, Mus musculus
  siRNA target sequence for 2810422B04Rik (NM_027275.2,1672-1690).
ctgtgctgctgatatcaaa

SEQ ID NO: 728815 - DNA, 19 bp, Mus musculus
  siRNA target sequence for 2810422B04Rik (NM_027275.2,1676-1694).
gctgctgatatcaaatcca

SEQ ID NO: 728816 - DNA, 19 bp, Mus musculus
  siRNA target sequence for 2810422B04Rik (NM_027275.2,1739-1757).
gccaaccctttacagtata

SEQ ID NO: 728817 - DNA, 19 bp, Mus musculus
  siRNA target sequence for 2810422B04Rik (NM_027275.2,1741-1759).
caaccctttacagtatata

SEQ ID NO: 728818 - DNA, 19 bp, Mus musculus
  siRNA target sequence for 2810422B04Rik (NM_027275.2,1744-1762).
ccctttacagtatatagct

SEQ ID NO: 728819 - DNA, 19 bp, Mus musculus
  siRNA target sequence for 2810422B04Rik (NM_027275.2,1753-1771).
gtatatagctgtccttttt

SEQ ID NO: 728820 - DNA, 19 bp, Mus musculus
  siRNA target sequence for 2810422B04Rik (NM_027275.2,1828-1846).
caagaagattcccagaaat

SEQ ID NO: 728821 - DNA, 19 bp, Mus musculus
  siRNA target sequence for 2810422B04Rik (NM_027275.2,1902-1920).
ccattgaggttgtaaagct

SEQ ID NO: 728822 - DNA, 19 bp, Mus musculus
  siRNA target sequence for 2810422B04Rik (NM_027275.2,1951-1969).
gagccttgcccaaagagta

SEQ ID NO: 728823 - DNA, 19 bp, Mus musculus
  siRNA target sequence for 2810432D09Rik (NM_027278.1,152-170).
ctcctgacactctggaaat

SEQ ID NO: 728824 - DNA, 19 bp, Mus musculus
  siRNA target sequence for 2810432D09Rik (NM_027278.1,175-193).
gtccgagatgggagcaaaa

SEQ ID NO: 728825 - DNA, 19 bp, Mus musculus
  siRNA target sequence for 2810432D09Rik (NM_027278.1,213-231).
ggcgctgggtcgtttggaa

SEQ ID NO: 728826 - DNA, 19 bp, Mus musculus
  siRNA target sequence for 2810422O20Rik (NM_027279.2,382-400).
cctcgatgatggaacttgt

SEQ ID NO: 728827 - DNA, 19 bp, Mus musculus
  siRNA target sequence for 2810422O20Rik (NM_027279.2,427-445).
ggacaaaaggcaatctaca

SEQ ID NO: 728828 - DNA, 19 bp, Mus musculus
  siRNA target sequence for 2810422O20Rik (NM_027279.2,464-482).
cgggatcactcttggaaat

SEQ ID NO: 728829 - DNA, 19 bp, Mus musculus
  siRNA target sequence for 2810422O20Rik (NM_027279.2,467-485).
gatcactcttggaaatgct

SEQ ID NO: 728830 - DNA, 19 bp, Mus musculus
  siRNA target sequence for 2810422O20Rik (NM_027279.2,586-604).
gaaacctgctaaagaacat

SEQ ID NO: 728831 - DNA, 19 bp, Mus musculus
  siRNA target sequence for 2810422O20Rik (NM_027279.2,620-638).
gtgaatcacgtcttagaaa

SEQ ID NO: 728832 - DNA, 19 bp, Mus musculus
  siRNA target sequence for 2810422O20Rik (NM_027279.2,622-640).
gaatcacgtcttagaaaat

SEQ ID NO: 728833 - DNA, 19 bp, Mus musculus
  siRNA target sequence for 2810422O20Rik (NM_027279.2,635-653).
gaaaatacggttttggaaa

SEQ ID NO: 728834 - DNA, 19 bp, Mus musculus
  siRNA target sequence for 2810422O20Rik (NM_027279.2,689-707).
gtgaaaaccgtctctttga

SEQ ID NO: 728835 - DNA, 19 bp, Mus musculus
  siRNA target sequence for 2810422O20Rik (NM_027279.2,719-737).
cctggagaaaacatcgttt

SEQ ID NO: 728836 - DNA, 19 bp, Mus musculus
  siRNA target sequence for 2810422O20Rik (NM_027279.2,733-751).
cgtttcaaagagcttttct

SEQ ID NO: 728837 - DNA, 19 bp, Mus musculus
  siRNA target sequence for 2810422O20Rik (NM_027279.2,782-800).
gaaggaggcttgaaaatct

SEQ ID NO: 728838 - DNA, 19 bp, Mus musculus
  siRNA target sequence for 2810422O20Rik (NM_027279.2,927-945).
gggaagttcattttcaaga

SEQ ID NO: 728839 - DNA, 19 bp, Mus musculus
  siRNA target sequence for 2810422O20Rik (NM_027279.2,928-946).
ggaagttcattttcaagat

SEQ ID NO: 728840 - DNA, 19 bp, Mus musculus
  siRNA target sequence for 2810422O20Rik (NM_027279.2,965-983).
gatgaggtgaccttaccta

SEQ ID NO: 728841 - DNA, 19 bp, Mus musculus
  siRNA target sequence for 2810422O20Rik (NM_027279.2,973-991).
gaccttacctaatgtagtt

SEQ ID NO: 728842 - DNA, 19 bp, Mus musculus
  siRNA target sequence for 2810422O20Rik (NM_027279.2,981-999).
ctaatgtagttgctaatgt

SEQ ID NO: 728843 - DNA, 19 bp, Mus musculus
  siRNA target sequence for 2810422O20Rik (NM_027279.2,1061-1079).
gaagtaggccgagaaatct

SEQ ID NO: 728844 - DNA, 19 bp, Mus musculus
  siRNA target sequence for 2810422O20Rik (NM_027279.2,1067-1085).
ggccgagaaatctgtaaat

SEQ ID NO: 728845 - DNA, 19 bp, Mus musculus
  siRNA target sequence for 2810422O20Rik (NM_027279.2,1069-1087).
ccgagaaatctgtaaatgt

SEQ ID NO: 728846 - DNA, 19 bp, Mus musculus
  siRNA target sequence for 2810422O20Rik (NM_027279.2,1127-1145).
gtattacgtgaaaaactgt

SEQ ID NO: 728847 - DNA, 19 bp, Mus musculus
  siRNA target sequence for 2810422O20Rik (NM_027279.2,1180-1198).
catttataatccggattat

SEQ ID NO: 728848 - DNA, 19 bp, Mus musculus
  siRNA target sequence for 2810422O20Rik (NM_027279.2,1203-1221).
gcactttgcatgaaacatt

SEQ ID NO: 728849 - DNA, 19 bp, Mus musculus
  siRNA target sequence for 2810422O20Rik (NM_027279.2,1259-1277).
gccagcaaagcacattatt

SEQ ID NO: 728850 - DNA, 19 bp, Mus musculus
  siRNA target sequence for 2810422O20Rik (NM_027279.2,1287-1305).
gtggtggcgttcatctctt

SEQ ID NO: 728851 - DNA, 19 bp, Mus musculus
  siRNA target sequence for 2810422O20Rik (NM_027279.2,1339-1357).
gactcgaacacttgaagta

SEQ ID NO: 728852 - DNA, 19 bp, Mus musculus
  siRNA target sequence for 2810422O20Rik (NM_027279.2,1341-1359).
ctcgaacacttgaagtaat

SEQ ID NO: 728853 - DNA, 19 bp, Mus musculus
  siRNA target sequence for 2410041F14Rik (NM_027290.1,218-236).
gacggggaccctgatgaat

SEQ ID NO: 728854 - DNA, 19 bp, Mus musculus
  siRNA target sequence for 2410041F14Rik (NM_027290.1,220-238).
cggggaccctgatgaattt

SEQ ID NO: 728855 - DNA, 19 bp, Mus musculus
  siRNA target sequence for 2410041F14Rik (NM_027290.1,315-333).
gaaaccaggaggaacgttt

SEQ ID NO: 728856 - DNA, 19 bp, Mus musculus
  siRNA target sequence for 2410041F14Rik (NM_027290.1,358-376).
ggacttaacggatgatgaa

SEQ ID NO: 728857 - DNA, 19 bp, Mus musculus
  siRNA target sequence for 2410041F14Rik (NM_027290.1,361-379).
cttaacggatgatgaagtt

SEQ ID NO: 728858 - DNA, 19 bp, Mus musculus
  siRNA target sequence for 2410041F14Rik (NM_027290.1,486-504).
ccttacaggagcagctaaa

SEQ ID NO: 728859 - DNA, 19 bp, Mus musculus
  siRNA target sequence for 2410041F14Rik (NM_027290.1,545-563).
caggaaccacctgattcat

SEQ ID NO: 728860 - DNA, 19 bp, Mus musculus
  siRNA target sequence for 2410041F14Rik (NM_027290.1,631-649).
gcttgatgtccccacttta

SEQ ID NO: 728861 - DNA, 19 bp, Mus musculus
  siRNA target sequence for 2410041F14Rik (NM_027290.1,935-953).
cgagtctcctccacagaaa

SEQ ID NO: 728862 - DNA, 19 bp, Mus musculus
  siRNA target sequence for 2410041F14Rik (NM_027290.1,964-982).
gatggcaggccggaaacta

SEQ ID NO: 728863 - DNA, 19 bp, Mus musculus
  siRNA target sequence for 2410041F14Rik (NM_027290.1,968-986).
gcaggccggaaactaatca

SEQ ID NO: 728864 - DNA, 19 bp, Mus musculus
  siRNA target sequence for 2410041F14Rik (NM_027290.1,1086-1104).
ctaccagtgggcaaacgtt

SEQ ID NO: 728865 - DNA, 19 bp, Mus musculus
  siRNA target sequence for 2410041F14Rik (NM_027290.1,1092-1110).
gtgggcaaacgtttagcat

SEQ ID NO: 728866 - DNA, 19 bp, Mus musculus
  siRNA target sequence for 2410041F14Rik (NM_027290.1,1255-1273).
gaaagaggtgtgcttatct

SEQ ID NO: 728867 - DNA, 19 bp, Mus musculus
  siRNA target sequence for 2410041F14Rik (NM_027290.1,1264-1282).
gtgcttatctattgatcat

SEQ ID NO: 728868 - DNA, 19 bp, Mus musculus
  siRNA target sequence for 2410041F14Rik (NM_027290.1,1280-1298).
catcctcaaaaagtcttaa

SEQ ID NO: 728869 - DNA, 19 bp, Mus musculus
  siRNA target sequence for 2410041F14Rik (NM_027290.1,1315-1333).
ggacctgggagcctgtaaa

SEQ ID NO: 728870 - DNA, 19 bp, Mus musculus
  siRNA target sequence for 2410041F14Rik (NM_027290.1,1345-1363).
gaatggagagccatgtaca

SEQ ID NO: 728871 - DNA, 19 bp, Mus musculus
  siRNA target sequence for 2410041F14Rik (NM_027290.1,1388-1406).
gaatactgccagtatcaca

SEQ ID NO: 728872 - DNA, 19 bp, Mus musculus
  siRNA target sequence for 2410041F14Rik (NM_027290.1,1469-1487).
ggacggattccgaagaagt

SEQ ID NO: 728873 - DNA, 19 bp, Mus musculus
  siRNA target sequence for 2410041F14Rik (NM_027290.1,1470-1488).
gacggattccgaagaagtt

SEQ ID NO: 728874 - DNA, 19 bp, Mus musculus
  siRNA target sequence for 2410041F14Rik (NM_027290.1,1515-1533).
ggctgtgccaagatggttt

SEQ ID NO: 728875 - DNA, 19 bp, Mus musculus
  siRNA target sequence for 2410041F14Rik (NM_027290.1,1521-1539).
gccaagatggtttctacta

SEQ ID NO: 728876 - DNA, 19 bp, Mus musculus
  siRNA target sequence for 2410041F14Rik (NM_027290.1,1647-1665).
cgatcatccaggaaacaaa

SEQ ID NO: 728877 - DNA, 19 bp, Mus musculus
  siRNA target sequence for 2410041F14Rik (NM_027290.1,1662-1680).
caaaacaaaagcttggtat

SEQ ID NO: 728878 - DNA, 19 bp, Mus musculus
  siRNA target sequence for 2410041F14Rik (NM_027290.1,1706-1724).
gaggagttcagggaattga

SEQ ID NO: 728879 - DNA, 19 bp, Mus musculus
  siRNA target sequence for 2410041F14Rik (NM_027290.1,1864-1882).
gcggaagaggagatcagaa

SEQ ID NO: 728880 - DNA, 19 bp, Mus musculus
  siRNA target sequence for 2410041F14Rik (NM_027290.1,1870-1888).
gaggagatcagaagacata

SEQ ID NO: 728881 - DNA, 19 bp, Mus musculus
  siRNA target sequence for 2410041F14Rik (NM_027290.1,2053-2071).
ggacgatgttctcttcttt

SEQ ID NO: 728882 - DNA, 19 bp, Mus musculus
  siRNA target sequence for 2410041F14Rik (NM_027290.1,2157-2175).
gccagattctcacaaaagt

SEQ ID NO: 728883 - DNA, 19 bp, Mus musculus
  siRNA target sequence for 2410041F14Rik (NM_027290.1,2161-2179).
gattctcacaaaagtagat

SEQ ID NO: 728884 - DNA, 19 bp, Mus musculus
  siRNA target sequence for 2410041F14Rik (NM_027290.1,2243-2261).
gagaatagcaacacagttt

SEQ ID NO: 728885 - DNA, 19 bp, Mus musculus
  siRNA target sequence for 2410041F14Rik (NM_027290.1,2245-2263).
gaatagcaacacagtttct

SEQ ID NO: 728886 - DNA, 19 bp, Mus musculus
  siRNA target sequence for 2410041F14Rik (NM_027290.1,2317-2335).
cttagagtccgaggaattt

SEQ ID NO: 728887 - DNA, 19 bp, Mus musculus
  siRNA target sequence for 2410041F14Rik (NM_027290.1,2326-2344).
cgaggaatttcagaagatt

SEQ ID NO: 728888 - DNA, 19 bp, Mus musculus
  siRNA target sequence for 2410041F14Rik (NM_027290.1,2395-2413).
gctacagaaatcctatttt

SEQ ID NO: 728889 - DNA, 19 bp, Mus musculus
  siRNA target sequence for 2410041F14Rik (NM_027290.1,2564-2582).
gacggcgtgaagaggtttt

SEQ ID NO: 728890 - DNA, 19 bp, Mus musculus
  siRNA target sequence for 2410041F14Rik (NM_027290.1,2567-2585).
ggcgtgaagaggtttttca

SEQ ID NO: 728891 - DNA, 19 bp, Mus musculus
  siRNA target sequence for 2410041F14Rik (NM_027290.1,2568-2586).
gcgtgaagaggtttttcaa

SEQ ID NO: 728892 - DNA, 19 bp, Mus musculus
  siRNA target sequence for 2410041F14Rik (NM_027290.1,2632-2650).
caagcactgccgtaactgt

SEQ ID NO: 728893 - DNA, 19 bp, Mus musculus
  siRNA target sequence for 2410041F14Rik (NM_027290.1,2738-2756).
gagcacgccaagtttctga

SEQ ID NO: 728894 - DNA, 19 bp, Mus musculus
  siRNA target sequence for 1700029H01Rik (NM_027300.1,592-610).
ctgcgctccccgtaactct

SEQ ID NO: 728895 - DNA, 19 bp, Mus musculus
  siRNA target sequence for 1700026P10Rik (NM_027304.1,398-416).
gggaagaccgtgctcaaat

SEQ ID NO: 728896 - DNA, 19 bp, Mus musculus
  siRNA target sequence for 1700026P10Rik (NM_027304.1,629-647).
cagtcaagtgccagatcaa

SEQ ID NO: 728897 - DNA, 19 bp, Mus musculus
  siRNA target sequence for 1700026P10Rik (NM_027304.1,1031-1049).
ccagcagaggagaagagtt

SEQ ID NO: 728898 - DNA, 19 bp, Mus musculus
  siRNA target sequence for 1700026P10Rik (NM_027304.1,1086-1104).
ccgagaggccagtaaaaca

SEQ ID NO: 728899 - DNA, 19 bp, Mus musculus
  siRNA target sequence for 1700026P10Rik (NM_027304.1,1129-1147).
caacgctcccagcatacaa

SEQ ID NO: 728900 - DNA, 19 bp, Mus musculus
  siRNA target sequence for Golph2 (NM_027307.1,59-77).
gggcgtcgcagcatgaagt

SEQ ID NO: 728901 - DNA, 19 bp, Mus musculus
  siRNA target sequence for Golph2 (NM_027307.1,119-137).
gtgctaggcttcaactact

SEQ ID NO: 728902 - DNA, 19 bp, Mus musculus
  siRNA target sequence for Golph2 (NM_027307.1,222-240).
gtgctgtagagctcaagaa

SEQ ID NO: 728903 - DNA, 19 bp, Mus musculus
  siRNA target sequence for Golph2 (NM_027307.1,340-358).
ggatgagaaggcggtttta

SEQ ID NO: 728904 - DNA, 19 bp, Mus musculus
  siRNA target sequence for Golph2 (NM_027307.1,344-362).
gagaaggcggttttagtga

SEQ ID NO: 728905 - DNA, 19 bp, Mus musculus
  siRNA target sequence for Golph2 (NM_027307.1,346-364).
gaaggcggttttagtgaat

SEQ ID NO: 728906 - DNA, 19 bp, Mus musculus
  siRNA target sequence for Golph2 (NM_027307.1,707-725).
gatgtgcccagaaacaagt

SEQ ID NO: 728907 - DNA, 19 bp, Mus musculus
  siRNA target sequence for Golph2 (NM_027307.1,775-793).
gcagaatgaggaaaccaat

SEQ ID NO: 728908 - DNA, 19 bp, Mus musculus
  siRNA target sequence for Golph2 (NM_027307.1,1031-1049).
gaatacgacatggatgaaa

SEQ ID NO: 728909 - DNA, 19 bp, Mus musculus
  siRNA target sequence for Golph2 (NM_027307.1,1082-1100).
gcccttgcagggaatgaca

SEQ ID NO: 728910 - DNA, 19 bp, Mus musculus
  siRNA target sequence for Golph2 (NM_027307.1,1128-1146).
ctcagaagagaggcataat

SEQ ID NO: 728911 - DNA, 19 bp, Mus musculus
  siRNA target sequence for Golph2 (NM_027307.1,1151-1169).
gtgcccgtcgggagtgaaa

SEQ ID NO: 728912 - DNA, 19 bp, Mus musculus
  siRNA target sequence for Golph2 (NM_027307.1,1176-1194).
gccacattctaaatcaagt

SEQ ID NO: 728913 - DNA, 19 bp, Mus musculus
  siRNA target sequence for Golph2 (NM_027307.1,1177-1195).
ccacattctaaatcaagta

SEQ ID NO: 728914 - DNA, 19 bp, Mus musculus
  siRNA target sequence for 2310005N01Rik (NM_027310.1,175-193).
ggaagacactcagatgtat

SEQ ID NO: 728915 - DNA, 19 bp, Mus musculus
  siRNA target sequence for 2310005N01Rik (NM_027310.1,183-201).
ctcagatgtatggcaatat

SEQ ID NO: 728916 - DNA, 19 bp, Mus musculus
  siRNA target sequence for 2310005N01Rik (NM_027310.1,185-203).
cagatgtatggcaatatta

SEQ ID NO: 728917 - DNA, 19 bp, Mus musculus
  siRNA target sequence for 2310005N01Rik (NM_027310.1,207-225).
gtggctgggatcggtattt

SEQ ID NO: 728918 - DNA, 19 bp, Mus musculus
  siRNA target sequence for 2310005N01Rik (NM_027310.1,260-278).
cggaggaaccggaagttca

SEQ ID NO: 728919 - DNA, 19 bp, Mus musculus
  siRNA target sequence for 2310005N01Rik (NM_027310.1,287-305).
gaacggctcttcagcaaat

SEQ ID NO: 728920 - DNA, 19 bp, Mus musculus
  siRNA target sequence for 2310005N01Rik (NM_027310.1,290-308).
cggctcttcagcaaatcct

SEQ ID NO: 728921 - DNA, 19 bp, Mus musculus
  siRNA target sequence for 2310005N01Rik (NM_027310.1,350-368).
caggaccagctcatcgaaa

SEQ ID NO: 728922 - DNA, 19 bp, Mus musculus
  siRNA target sequence for 2310005N01Rik (NM_027310.1,386-404).
gggacggaaagcgatactt

SEQ ID NO: 728923 - DNA, 19 bp, Mus musculus
  siRNA target sequence for 2310005N01Rik (NM_027310.1,388-406).
gacggaaagcgatacttct

SEQ ID NO: 728924 - DNA, 19 bp, Mus musculus
  siRNA target sequence for 2310005N01Rik (NM_027310.1,557-575).
cggcacagaatgaatgtct

SEQ ID NO: 728925 - DNA, 19 bp, Mus musculus
  siRNA target sequence for 1810015H18Rik (NM_027314.1,368-386).
caccgatgaagatgataga

SEQ ID NO: 728926 - DNA, 19 bp, Mus musculus
  siRNA target sequence for 2010008K16Rik (NM_027320.1,259-277).
ctgaagttcctctggtatt

SEQ ID NO: 728927 - DNA, 19 bp, Mus musculus
  siRNA target sequence for 2010008K16Rik (NM_027320.1,301-319).
ggcaagtgcccaagtttgt

SEQ ID NO: 728928 - DNA, 19 bp, Mus musculus
  siRNA target sequence for 2010008K16Rik (NM_027320.1,306-324).
gtgcccaagtttgtagttt

SEQ ID NO: 728929 - DNA, 19 bp, Mus musculus
  siRNA target sequence for 2010008K16Rik (NM_027320.1,396-414).
gatcggttgctacaacaaa

SEQ ID NO: 728930 - DNA, 19 bp, Mus musculus
  siRNA target sequence for 2010008K16Rik (NM_027320.1,400-418).
ggttgctacaacaaaagga

SEQ ID NO: 728931 - DNA, 19 bp, Mus musculus
  siRNA target sequence for 2010008K16Rik (NM_027320.1,524-542).
ggtgctcgttagtggtttt

SEQ ID NO: 728932 - DNA, 19 bp, Mus musculus
  siRNA target sequence for 2010008K16Rik (NM_027320.1,527-545).
gctcgttagtggttttcct

SEQ ID NO: 728933 - DNA, 19 bp, Mus musculus
  siRNA target sequence for 2010008K16Rik (NM_027320.1,596-614).
ctttggcaaggccaagaat

SEQ ID NO: 728934 - DNA, 19 bp, Mus musculus
  siRNA target sequence for 2010008K16Rik (NM_027320.1,662-680).
gctagggtttgctgatgaa

SEQ ID NO: 728935 - DNA, 19 bp, Mus musculus
  siRNA target sequence for 2010008K16Rik (NM_027320.1,829-847).
caaatattcctgatgtcat

SEQ ID NO: 728936 - DNA, 19 bp, Mus musculus
  siRNA target sequence for 9430028I06Rik (NM_027321.1,154-172).
ccgtcagtgctgtaaagga

SEQ ID NO: 728937 - DNA, 19 bp, Mus musculus
  siRNA target sequence for 9430028I06Rik (NM_027321.1,253-271).
gggaagaccgagtaagttt

SEQ ID NO: 728938 - DNA, 19 bp, Mus musculus
  siRNA target sequence for 9430028I06Rik (NM_027321.1,255-273).
gaagaccgagtaagtttaa

SEQ ID NO: 728939 - DNA, 19 bp, Mus musculus
  siRNA target sequence for 9430028I06Rik (NM_027321.1,258-276).
gaccgagtaagtttaacta

SEQ ID NO: 728940 - DNA, 19 bp, Mus musculus
  siRNA target sequence for 9430028I06Rik (NM_027321.1,396-414).
cacaggaccggattgttga

SEQ ID NO: 728941 - DNA, 19 bp, Mus musculus
  siRNA target sequence for 9430028I06Rik (NM_027321.1,400-418).
ggaccggattgttgaagat

SEQ ID NO: 728942 - DNA, 19 bp, Mus musculus
  siRNA target sequence for 9430028I06Rik (NM_027321.1,401-419).
gaccggattgttgaagatt

SEQ ID NO: 728943 - DNA, 19 bp, Mus musculus
  siRNA target sequence for 9430028I06Rik (NM_027321.1,436-454).
gattccagcatctcattgt

SEQ ID NO: 728944 - DNA, 19 bp, Mus musculus
  siRNA target sequence for 9430028I06Rik (NM_027321.1,447-465).
ctcattgtgctagatttat

SEQ ID NO: 728945 - DNA, 19 bp, Mus musculus
  siRNA target sequence for 9430028I06Rik (NM_027321.1,449-467).
cattgtgctagatttatct

SEQ ID NO: 728946 - DNA, 19 bp, Mus musculus
  siRNA target sequence for 9430028I06Rik (NM_027321.1,466-484).
ctcggaacacaatttcaga

SEQ ID NO: 728947 - DNA, 19 bp, Mus musculus
  siRNA target sequence for 1500019O16Rik (NM_027328.2,172-190).
cagcaattgaggatgtaca

SEQ ID NO: 728948 - DNA, 19 bp, Mus musculus
  siRNA target sequence for 1500019O16Rik (NM_027328.2,307-325).
ccaacgtgtcggaagtgat

SEQ ID NO: 728949 - DNA, 19 bp, Mus musculus
  siRNA target sequence for 1500019O16Rik (NM_027328.2,422-440).
catccgggataaatactca

SEQ ID NO: 728950 - DNA, 19 bp, Mus musculus
  siRNA target sequence for 1500019O16Rik (NM_027328.2,426-444).
cgggataaatactcaaaga

SEQ ID NO: 728951 - DNA, 19 bp, Mus musculus
  siRNA target sequence for 1500019O16Rik (NM_027328.2,428-446).
ggataaatactcaaagaga

SEQ ID NO: 728952 - DNA, 19 bp, Mus musculus
  siRNA target sequence for 1500019O16Rik (NM_027328.2,471-489).
cccaatgctctggattaca

SEQ ID NO: 728953 - DNA, 19 bp, Mus musculus
  siRNA target sequence for 1500019O16Rik (NM_027328.2,510-528).
ggcaacagcctggataagt

SEQ ID NO: 728954 - DNA, 19 bp, Mus musculus
  siRNA target sequence for 1500019O16Rik (NM_027328.2,521-539).
ggataagtgcaagaacaat

SEQ ID NO: 728955 - DNA, 19 bp, Mus musculus
  siRNA target sequence for 1500019O16Rik (NM_027328.2,558-576).
ctgaccaatgctactatca

SEQ ID NO: 728956 - DNA, 19 bp, Mus musculus
  siRNA target sequence for 1500019O16Rik (NM_027328.2,567-585).
gctactatcatggttgtta

SEQ ID NO: 728957 - DNA, 19 bp, Mus musculus
  siRNA target sequence for 1500019O16Rik (NM_027328.2,878-896).
ctcagtgttgcctcatact

SEQ ID NO: 728958 - DNA, 19 bp, Mus musculus
  siRNA target sequence for 1500019O16Rik (NM_027328.2,888-906).
cctcatactggttatatct

SEQ ID NO: 728959 - DNA, 19 bp, Mus musculus
  siRNA target sequence for 1500019O16Rik (NM_027328.2,889-907).
ctcatactggttatatcta

SEQ ID NO: 728960 - DNA, 19 bp, Mus musculus
  siRNA target sequence for 1500019O16Rik (NM_027328.2,963-981).
ctagtggctgccaagtgta

SEQ ID NO: 728961 - DNA, 19 bp, Mus musculus
  siRNA target sequence for 1500019O16Rik (NM_027328.2,1031-1049).
gggctacgaactaaaggat

SEQ ID NO: 728962 - DNA, 19 bp, Mus musculus
  siRNA target sequence for 1500019O16Rik (NM_027328.2,1052-1070).
gattgagcgcaaatttgat

SEQ ID NO: 728963 - DNA, 19 bp, Mus musculus
  siRNA target sequence for 1500019O16Rik (NM_027328.2,1056-1074).
gagcgcaaatttgataagt

SEQ ID NO: 728964 - DNA, 19 bp, Mus musculus
  siRNA target sequence for 1500019O16Rik (NM_027328.2,1152-1170).
cgaaggtaccgcaagatga

SEQ ID NO: 728965 - DNA, 19 bp, Mus musculus
  siRNA target sequence for 1500019O16Rik (NM_027328.2,1306-1324).
ggcagacccaggtgaatga

SEQ ID NO: 728966 - DNA, 19 bp, Mus musculus
  siRNA target sequence for 2310066N05Rik (NM_027332.1,174-192).
gtatctcggagattaagaa

SEQ ID NO: 728967 - DNA, 19 bp, Mus musculus
  siRNA target sequence for 2310066N05Rik (NM_027332.1,197-215).
cagcggcgacacttgatgt

SEQ ID NO: 728968 - DNA, 19 bp, Mus musculus
  siRNA target sequence for 2310066N05Rik (NM_027332.1,200-218).
cggcgacacttgatgttca

SEQ ID NO: 728969 - DNA, 19 bp, Mus musculus
  siRNA target sequence for 2310066N05Rik (NM_027332.1,317-335).
gttcccaagaccattgaca

SEQ ID NO: 728970 - DNA, 19 bp, Mus musculus
  siRNA target sequence for 2310066N05Rik (NM_027332.1,398-416).
gcgacggatgaatttgctt

SEQ ID NO: 728971 - DNA, 19 bp, Mus musculus
  siRNA target sequence for 2310066N05Rik (NM_027332.1,402-420).
cggatgaatttgcttctta

SEQ ID NO: 728972 - DNA, 19 bp, Mus musculus
  siRNA target sequence for 2310066N05Rik (NM_027332.1,407-425).
gaatttgcttcttacttca

SEQ ID NO: 728973 - DNA, 19 bp, Mus musculus
  siRNA target sequence for 2310066N05Rik (NM_027332.1,429-447).
gacagacgtctcctaagat

SEQ ID NO: 728974 - DNA, 19 bp, Mus musculus
  siRNA target sequence for 2310066N05Rik (NM_027332.1,435-453).
cgtctcctaagattcttat

SEQ ID NO: 728975 - DNA, 19 bp, Mus musculus
  siRNA target sequence for 2310066N05Rik (NM_027332.1,499-517).
gcagctctcaacagttata

SEQ ID NO: 728976 - DNA, 19 bp, Mus musculus
  siRNA target sequence for 2310066N05Rik (NM_027332.1,502-520).
gctctcaacagttatacca

SEQ ID NO: 728977 - DNA, 19 bp, Mus musculus
  siRNA target sequence for 2310066N05Rik (NM_027332.1,510-528).
cagttataccagattcaca

SEQ ID NO: 728978 - DNA, 19 bp, Mus musculus
  siRNA target sequence for 2310066N05Rik (NM_027332.1,521-539).
gattcacatgtttattaca

SEQ ID NO: 728979 - DNA, 19 bp, Mus musculus
  siRNA target sequence for 2310066N05Rik (NM_027332.1,545-563).
ggactggctctgaaaaaaa

SEQ ID NO: 728980 - DNA, 19 bp, Mus musculus
  siRNA target sequence for 2310066N05Rik (NM_027332.1,546-564).
gactggctctgaaaaaaat

SEQ ID NO: 728981 - DNA, 19 bp, Mus musculus
  siRNA target sequence for 2310066N05Rik (NM_027332.1,572-590).
cagtgcattgcaagagatt

SEQ ID NO: 728982 - DNA, 19 bp, Mus musculus
  siRNA target sequence for 2310066N05Rik (NM_027332.1,577-595).
cattgcaagagatttcaca

SEQ ID NO: 728983 - DNA, 19 bp, Mus musculus
  siRNA target sequence for 2310066N05Rik (NM_027332.1,592-610).
cacagacctgatcgttatt

SEQ ID NO: 728984 - DNA, 19 bp, Mus musculus
  siRNA target sequence for 2310066N05Rik (NM_027332.1,594-612).
cagacctgatcgttattaa

SEQ ID NO: 728985 - DNA, 19 bp, Mus musculus
  siRNA target sequence for 2310066N05Rik (NM_027332.1,598-616).
cctgatcgttattaatgaa

SEQ ID NO: 728986 - DNA, 19 bp, Mus musculus
  siRNA target sequence for 2310066N05Rik (NM_027332.1,601-619).
gatcgttattaatgaagat

SEQ ID NO: 728987 - DNA, 19 bp, Mus musculus
  siRNA target sequence for 2310066N05Rik (NM_027332.1,629-647).
ccgagtatcctttggattt

SEQ ID NO: 728988 - DNA, 19 bp, Mus musculus
  siRNA target sequence for 2310066N05Rik (NM_027332.1,631-649).
gagtatcctttggatttca

SEQ ID NO: 728989 - DNA, 19 bp, Mus musculus
  siRNA target sequence for 2210415M20Rik (NM_027338.1,92-110).
cgacggcgaggagaagata

SEQ ID NO: 728990 - DNA, 19 bp, Mus musculus
  siRNA target sequence for 2210415M20Rik (NM_027338.1,93-111).
gacggcgaggagaagataa

SEQ ID NO: 728991 - DNA, 19 bp, Mus musculus
  siRNA target sequence for 2210415M20Rik (NM_027338.1,95-113).
cggcgaggagaagataaaa

SEQ ID NO: 728992 - DNA, 19 bp, Mus musculus
  siRNA target sequence for 2210415M20Rik (NM_027338.1,122-140).
cgggactcttcttcttagt

SEQ ID NO: 728993 - DNA, 19 bp, Mus musculus
  siRNA target sequence for 2210415M20Rik (NM_027338.1,160-178).
gagaccagaagaataatga

SEQ ID NO: 728994 - DNA, 19 bp, Mus musculus
  siRNA target sequence for 2210415M20Rik (NM_027338.1,195-213).
cccctgtctcagattgtgt

SEQ ID NO: 728995 - DNA, 19 bp, Mus musculus
  siRNA target sequence for 2210415M20Rik (NM_027338.1,241-259).
ggaagagcgccaaaatcgt

SEQ ID NO: 728996 - DNA, 19 bp, Mus musculus
  siRNA target sequence for 2210415M20Rik (NM_027338.1,272-290).
cccagctccttctaacaaa

SEQ ID NO: 728997 - DNA, 19 bp, Mus musculus
  siRNA target sequence for 2210415M20Rik (NM_027338.1,300-318).
ccgttccagagcagtaaga

SEQ ID NO: 728998 - DNA, 19 bp, Mus musculus
  siRNA target sequence for 2210415M20Rik (NM_027338.1,301-319).
cgttccagagcagtaagaa

SEQ ID NO: 728999 - DNA, 19 bp, Mus musculus
  siRNA target sequence for 2210415M20Rik (NM_027338.1,348-366).
catggccagattgagtttt

SEQ ID NO: 729000 - DNA, 19 bp, Mus musculus
  siRNA target sequence for 2210415M20Rik (NM_027338.1,351-369).
ggccagattgagttttaca

SEQ ID NO: 729001 - DNA, 19 bp, Mus musculus
  siRNA target sequence for 2210415M20Rik (NM_027338.1,484-502).
gtattgaaaggaaacttga

SEQ ID NO: 729002 - DNA, 19 bp, Mus musculus
  siRNA target sequence for 2210415M20Rik (NM_027338.1,520-538).
ccgataaaaacatttctga

SEQ ID NO: 729003 - DNA, 19 bp, Mus musculus
  siRNA target sequence for 2210415M20Rik (NM_027338.1,563-581).
gatgattaaggctaaggaa

SEQ ID NO: 729004 - DNA, 19 bp, Mus musculus
  siRNA target sequence for 2210415M20Rik (NM_027338.1,584-602).
ggtggagttatccaaatca

SEQ ID NO: 729005 - DNA, 19 bp, Mus musculus
  siRNA target sequence for 2210415M20Rik (NM_027338.1,585-603).
gtggagttatccaaatcaa

SEQ ID NO: 729006 - DNA, 19 bp, Mus musculus
  siRNA target sequence for 2210415M20Rik (NM_027338.1,601-619).
caatcgctaataagattaa

SEQ ID NO: 729007 - DNA, 19 bp, Mus musculus
  siRNA target sequence for 2210415M20Rik (NM_027338.1,645-663).
gatgagaccatcaggttta

SEQ ID NO: 729008 - DNA, 19 bp, Mus musculus
  siRNA target sequence for 2210415M20Rik (NM_027338.1,648-666).
gagaccatcaggtttaagt

SEQ ID NO: 729009 - DNA, 19 bp, Mus musculus
  siRNA target sequence for 2210415M20Rik (NM_027338.1,786-804).
gagcgtgggggaataatgt

SEQ ID NO: 729010 - DNA, 19 bp, Mus musculus
  siRNA target sequence for 2210415M20Rik (NM_027338.1,851-869).
gttgctctcgccagaagat

SEQ ID NO: 729011 - DNA, 19 bp, Mus musculus
  siRNA target sequence for 2210415M20Rik (NM_027338.1,857-875).
ctcgccagaagatttggta

SEQ ID NO: 729012 - DNA, 19 bp, Mus musculus
  siRNA target sequence for 2210415M20Rik (NM_027338.1,887-905).
gatgctggaagcgctaaaa

SEQ ID NO: 729013 - DNA, 19 bp, Mus musculus
  siRNA target sequence for 2210415M20Rik (NM_027338.1,930-948).
gacagtggtgtcatggtaa

SEQ ID NO: 729014 - DNA, 19 bp, Mus musculus
  siRNA target sequence for 2210415M20Rik (NM_027338.1,932-950).
cagtggtgtcatggtaatt

SEQ ID NO: 729015 - DNA, 19 bp, Mus musculus
  siRNA target sequence for 2210415M20Rik (NM_027338.1,944-962).
ggtaattgagcttcaaact

SEQ ID NO: 729016 - DNA, 19 bp, Mus musculus
  siRNA target sequence for 2210415M20Rik (NM_027338.1,1008-1026).
gaaagggggtccttaacat

SEQ ID NO: 729017 - DNA, 19 bp, Mus musculus
  siRNA target sequence for 2210415M20Rik (NM_027338.1,1131-1149).
ggcttgcggttttatccaa

SEQ ID NO: 729018 - DNA, 19 bp, Mus musculus
  siRNA target sequence for 2210415M20Rik (NM_027338.1,1132-1150).
gcttgcggttttatccaaa

SEQ ID NO: 729019 - DNA, 19 bp, Mus musculus
  siRNA target sequence for 2210415M20Rik (NM_027338.1,1133-1151).
cttgcggttttatccaaat

SEQ ID NO: 729020 - DNA, 19 bp, Mus musculus
  siRNA target sequence for 2210415M20Rik (NM_027338.1,1137-1155).
cggttttatccaaatttat

SEQ ID NO: 729021 - DNA, 19 bp, Mus musculus
  siRNA target sequence for 2310056P07Rik (NM_027342.1,36-54).
cctggcggctggacattgt

SEQ ID NO: 729022 - DNA, 19 bp, Mus musculus
  siRNA target sequence for 2310056P07Rik (NM_027342.1,39-57).
ggcggctggacattgtctt

SEQ ID NO: 729023 - DNA, 19 bp, Mus musculus
  siRNA target sequence for 2310056P07Rik (NM_027342.1,40-58).
gcggctggacattgtctta

SEQ ID NO: 729024 - DNA, 19 bp, Mus musculus
  siRNA target sequence for 2310056P07Rik (NM_027342.1,44-62).
ctggacattgtcttaggtt

SEQ ID NO: 729025 - DNA, 19 bp, Mus musculus
  siRNA target sequence for 2310056P07Rik (NM_027342.1,46-64).
ggacattgtcttaggttat

SEQ ID NO: 729026 - DNA, 19 bp, Mus musculus
  siRNA target sequence for 2310056P07Rik (NM_027342.1,47-65).
gacattgtcttaggttata

SEQ ID NO: 729027 - DNA, 19 bp, Mus musculus
  siRNA target sequence for 2310056P07Rik (NM_027342.1,88-106).
ctaaggtttaccagaaaca

SEQ ID NO: 729028 - DNA, 19 bp, Mus musculus
  siRNA target sequence for 2310056P07Rik (NM_027342.1,193-211).
ctgcacaagcccacagatt

SEQ ID NO: 729029 - DNA, 19 bp, Mus musculus
  siRNA target sequence for 2310056P07Rik (NM_027342.1,316-334).
gtgaaggtcagctatctaa

SEQ ID NO: 729030 - DNA, 19 bp, Mus musculus
  siRNA target sequence for 2310056P07Rik (NM_027342.1,321-339).
ggtcagctatctaatgatt

SEQ ID NO: 729031 - DNA, 19 bp, Mus musculus
  siRNA target sequence for 2310056P07Rik (NM_027342.1,384-402).
gaaggctgcgaaaagacat

SEQ ID NO: 729032 - DNA, 19 bp, Mus musculus
  siRNA target sequence for 2310056P07Rik (NM_027342.1,392-410).
cgaaaagacatgagtcttt

SEQ ID NO: 729033 - DNA, 19 bp, Mus musculus
  siRNA target sequence for 2310056P07Rik (NM_027342.1,393-411).
gaaaagacatgagtcttta

SEQ ID NO: 729034 - DNA, 19 bp, Mus musculus
  siRNA target sequence for 2310066I18Rik (NM_027346.1,157-175).
gccgccagcctgagaatga

SEQ ID NO: 729035 - DNA, 19 bp, Mus musculus
  siRNA target sequence for 2310066I18Rik (NM_027346.1,323-341).
ctaaagtccggcacatcaa

SEQ ID NO: 729036 - DNA, 19 bp, Mus musculus
  siRNA target sequence for 2310066I18Rik (NM_027346.1,358-376).
gaaaggagtcgaatcttct

SEQ ID NO: 729037 - DNA, 19 bp, Mus musculus
  siRNA target sequence for 2310066I18Rik (NM_027346.1,362-380).
ggagtcgaatcttctctaa

SEQ ID NO: 729038 - DNA, 19 bp, Mus musculus
  siRNA target sequence for 2310066I18Rik (NM_027346.1,363-381).
gagtcgaatcttctctaaa

SEQ ID NO: 729039 - DNA, 19 bp, Mus musculus
  siRNA target sequence for 2310066I18Rik (NM_027346.1,365-383).
gtcgaatcttctctaaact

SEQ ID NO: 729040 - DNA, 19 bp, Mus musculus
  siRNA target sequence for 2310066I18Rik (NM_027346.1,367-385).
cgaatcttctctaaactca

SEQ ID NO: 729041 - DNA, 19 bp, Mus musculus
  siRNA target sequence for 2310066I18Rik (NM_027346.1,377-395).
ctaaactcactctcagtat

SEQ ID NO: 729042 - DNA, 19 bp, Mus musculus
  siRNA target sequence for 2310066I18Rik (NM_027346.1,419-437).
gccctaaccctgagaacaa

SEQ ID NO: 729043 - DNA, 19 bp, Mus musculus
  siRNA target sequence for 2310066I18Rik (NM_027346.1,421-439).
cctaaccctgagaacaaca

SEQ ID NO: 729044 - DNA, 19 bp, Mus musculus
  siRNA target sequence for 2310066I18Rik (NM_027346.1,462-480).
gttgtgtcgcagcaagaat

SEQ ID NO: 729045 - DNA, 19 bp, Mus musculus
  siRNA target sequence for 2310066I18Rik (NM_027346.1,519-537).
gaaaaacaagggcatttat

SEQ ID NO: 729046 - DNA, 19 bp, Mus musculus
  siRNA target sequence for 2310066I18Rik (NM_027346.1,576-594).
gctcattgaggcgttatca

SEQ ID NO: 729047 - DNA, 19 bp, Mus musculus
  siRNA target sequence for 2310066I18Rik (NM_027346.1,577-595).
ctcattgaggcgttatcaa

SEQ ID NO: 729048 - DNA, 19 bp, Mus musculus
  siRNA target sequence for 2310066I18Rik (NM_027346.1,609-627).
gtgccatctggacattaaa

SEQ ID NO: 729049 - DNA, 19 bp, Mus musculus
  siRNA target sequence for 2310066I18Rik (NM_027346.1,661-679).
gaaggagcacgccactttt

SEQ ID NO: 729050 - DNA, 19 bp, Mus musculus
  siRNA target sequence for 2310066I18Rik (NM_027346.1,665-683).
gagcacgccacttttttga

SEQ ID NO: 729051 - DNA, 19 bp, Mus musculus
  siRNA target sequence for 2310066I18Rik (NM_027346.1,667-685).
gcacgccacttttttgaca

SEQ ID NO: 729052 - DNA, 19 bp, Mus musculus
  siRNA target sequence for 2310066I18Rik (NM_027346.1,828-846).
catttgtgatgcttcttca

SEQ ID NO: 729053 - DNA, 19 bp, Mus musculus
  siRNA target sequence for 2310066I18Rik (NM_027346.1,896-914).
cctgttcaatggagttcat

SEQ ID NO: 729054 - DNA, 19 bp, Mus musculus
  siRNA target sequence for 2310066I18Rik (NM_027346.1,967-985).
ctcatccaggcgcttaaca

SEQ ID NO: 729055 - DNA, 19 bp, Mus musculus
  siRNA target sequence for 2310066I18Rik (NM_027346.1,972-990).
ccaggcgcttaacaactat

SEQ ID NO: 729056 - DNA, 19 bp, Mus musculus
  siRNA target sequence for 2310066I18Rik (NM_027346.1,984-1002).
caactatgaggatgtgatt

SEQ ID NO: 729057 - DNA, 19 bp, Mus musculus
  siRNA target sequence for 2310066I18Rik (NM_027346.1,993-1011).
ggatgtgattcacgtttat

SEQ ID NO: 729058 - DNA, 19 bp, Mus musculus
  siRNA target sequence for 2310066I18Rik (NM_027346.1,997-1015).
gtgattcacgtttatgaca

SEQ ID NO: 729059 - DNA, 19 bp, Mus musculus
  siRNA target sequence for 2310066I18Rik (NM_027346.1,999-1017).
gattcacgtttatgacaat

SEQ ID NO: 729060 - DNA, 19 bp, Mus musculus
  siRNA target sequence for 2310076N22Rik (NM_027351.1,229-247).
gatgtgggagatatcaaga

SEQ ID NO: 729061 - DNA, 19 bp, Mus musculus
  siRNA target sequence for 2310076N22Rik (NM_027351.1,262-280).
gagagaacacccaaaacat

SEQ ID NO: 729062 - DNA, 19 bp, Mus musculus
  siRNA target sequence for 2310076N22Rik (NM_027351.1,264-282).
gagaacacccaaaacatgt

SEQ ID NO: 729063 - DNA, 19 bp, Mus musculus
  siRNA target sequence for 2310076N22Rik (NM_027351.1,294-312).
ggctctttgtgccagtaat

SEQ ID NO: 729064 - DNA, 19 bp, Mus musculus
  siRNA target sequence for 2310076N22Rik (NM_027351.1,302-320).
gtgccagtaattactacaa

SEQ ID NO: 729065 - DNA, 19 bp, Mus musculus
  siRNA target sequence for 2310076N22Rik (NM_027351.1,315-333).
ctacaacggctgtgtgttt

SEQ ID NO: 729066 - DNA, 19 bp, Mus musculus
  siRNA target sequence for 2310076N22Rik (NM_027351.1,318-336).
caacggctgtgtgtttcat

SEQ ID NO: 729067 - DNA, 19 bp, Mus musculus
  siRNA target sequence for 2310076N22Rik (NM_027351.1,321-339).
cggctgtgtgtttcataga

SEQ ID NO: 729068 - DNA, 19 bp, Mus musculus
  siRNA target sequence for 2310076N22Rik (NM_027351.1,398-416).
gcagcatctgggccaaaaa

SEQ ID NO: 729069 - DNA, 19 bp, Mus musculus
  siRNA target sequence for 2310076N22Rik (NM_027351.1,401-419).
gcatctgggccaaaaagtt

SEQ ID NO: 729070 - DNA, 19 bp, Mus musculus
  siRNA target sequence for 2310076N22Rik (NM_027351.1,402-420).
catctgggccaaaaagttt

SEQ ID NO: 729071 - DNA, 19 bp, Mus musculus
  siRNA target sequence for 2310076N22Rik (NM_027351.1,417-435).
gtttgaggatgaatacagt

SEQ ID NO: 729072 - DNA, 19 bp, Mus musculus
  siRNA target sequence for 2310076N22Rik (NM_027351.1,450-468).
caatgttcgaggtgttgta

SEQ ID NO: 729073 - DNA, 19 bp, Mus musculus
  siRNA target sequence for 2310076N22Rik (NM_027351.1,475-493).
gctaataatggcccaaata

SEQ ID NO: 729074 - DNA, 19 bp, Mus musculus
  siRNA target sequence for 2310076N22Rik (NM_027351.1,484-502).
ggcccaaataccaatggat

SEQ ID NO: 729075 - DNA, 19 bp, Mus musculus
  siRNA target sequence for 2310076N22Rik (NM_027351.1,624-642).
gacatacagacctcttaat

SEQ ID NO: 729076 - DNA, 19 bp, Mus musculus
  siRNA target sequence for 2310076N22Rik (NM_027351.1,626-644).
catacagacctcttaatga

SEQ ID NO: 729077 - DNA, 19 bp, Mus musculus
  siRNA target sequence for 2310076N22Rik (NM_027351.1,635-653).
ctcttaatgatgtacacat

SEQ ID NO: 729078 - DNA, 19 bp, Mus musculus
  siRNA target sequence for 2310076N22Rik (NM_027351.1,646-664).
gtacacattaaggacataa

SEQ ID NO: 729079 - DNA, 19 bp, Mus musculus
  siRNA target sequence for 2310076N22Rik (NM_027351.1,651-669).
cattaaggacataactatt

SEQ ID NO: 729080 - DNA, 19 bp, Mus musculus
  siRNA target sequence for Cd2bp2 (NM_027353.2,262-280).
gaggaagggtccagcaaat

SEQ ID NO: 729081 - DNA, 19 bp, Mus musculus
  siRNA target sequence for Cd2bp2 (NM_027353.2,264-282).
ggaagggtccagcaaatat

SEQ ID NO: 729082 - DNA, 19 bp, Mus musculus
  siRNA target sequence for Cd2bp2 (NM_027353.2,268-286).
gggtccagcaaatatgata

SEQ ID NO: 729083 - DNA, 19 bp, Mus musculus
  siRNA target sequence for Cd2bp2 (NM_027353.2,269-287).
ggtccagcaaatatgatat

SEQ ID NO: 729084 - DNA, 19 bp, Mus musculus
  siRNA target sequence for Cd2bp2 (NM_027353.2,272-290).
ccagcaaatatgatatcct

SEQ ID NO: 729085 - DNA, 19 bp, Mus musculus
  siRNA target sequence for Cd2bp2 (NM_027353.2,707-725).
ctgggttagctgaccaaat

SEQ ID NO: 729086 - DNA, 19 bp, Mus musculus
  siRNA target sequence for Cd2bp2 (NM_027353.2,710-728).
ggttagctgaccaaatggt

SEQ ID NO: 729087 - DNA, 19 bp, Mus musculus
  siRNA target sequence for Cd2bp2 (NM_027353.2,745-763).
ggtgtgtaccaggaaacaa

SEQ ID NO: 729088 - DNA, 19 bp, Mus musculus
  siRNA target sequence for 3110001H15Rik (NM_027355.1,718-736).
gcaaccacacgctctgtaa

SEQ ID NO: 729089 - DNA, 19 bp, Mus musculus
  siRNA target sequence for 3110001H15Rik (NM_027355.1,814-832).
ggtaccatacccgaagaaa

SEQ ID NO: 729090 - DNA, 19 bp, Mus musculus
  siRNA target sequence for 3110001H15Rik (NM_027355.1,815-833).
gtaccatacccgaagaaat

SEQ ID NO: 729091 - DNA, 19 bp, Mus musculus
  siRNA target sequence for 3110001H15Rik (NM_027355.1,818-836).
ccatacccgaagaaattct

SEQ ID NO: 729092 - DNA, 19 bp, Mus musculus
  siRNA target sequence for 3110001H15Rik (NM_027355.1,847-865).
cagacctgtgggagattat

SEQ ID NO: 729093 - DNA, 19 bp, Mus musculus
  siRNA target sequence for 3110001H15Rik (NM_027355.1,851-869).
cctgtgggagattattcaa

SEQ ID NO: 729094 - DNA, 19 bp, Mus musculus
  siRNA target sequence for 3110001H15Rik (NM_027355.1,852-870).
ctgtgggagattattcaaa

SEQ ID NO: 729095 - DNA, 19 bp, Mus musculus
  siRNA target sequence for 3110001H15Rik (NM_027355.1,885-903).
gaatgcaagcttagaatct

SEQ ID NO: 729096 - DNA, 19 bp, Mus musculus
  siRNA target sequence for 3110001H15Rik (NM_027355.1,967-985).
gggagttgaggcgagaata

SEQ ID NO: 729097 - DNA, 19 bp, Mus musculus
  siRNA target sequence for 3110001H15Rik (NM_027355.1,968-986).
ggagttgaggcgagaatat

SEQ ID NO: 729098 - DNA, 19 bp, Mus musculus
  siRNA target sequence for 3110001H15Rik (NM_027355.1,1056-1074).
gagtacatccagagattgt

SEQ ID NO: 729099 - DNA, 19 bp, Mus musculus
  siRNA target sequence for 3110001H15Rik (NM_027355.1,1139-1157).
gctgagaggcgatgaagaa

SEQ ID NO: 729100 - DNA, 19 bp, Mus musculus
  siRNA target sequence for 3110001H15Rik (NM_027355.1,1170-1188).
ctgagcaccagtatcaaca

SEQ ID NO: 729101 - DNA, 19 bp, Mus musculus
  siRNA target sequence for 3110001H15Rik (NM_027355.1,1187-1205).
cagcaactatgagagaaat

SEQ ID NO: 729102 - DNA, 19 bp, Mus musculus
  siRNA target sequence for 3110001H15Rik (NM_027355.1,1333-1351).
ggaccgccttggcatgtaa

SEQ ID NO: 729103 - DNA, 19 bp, Mus musculus
  siRNA target sequence for 3110001H15Rik (NM_027355.1,1370-1388).
catctgcaagtctaaggaa

SEQ ID NO: 729104 - DNA, 19 bp, Mus musculus
  siRNA target sequence for 3110001H15Rik (NM_027355.1,1533-1551).
gtaggagacactaaagagt

SEQ ID NO: 729105 - DNA, 19 bp, Mus musculus
  siRNA target sequence for 3110001H15Rik (NM_027355.1,1552-1570).
cccttgagggaaaagttga

SEQ ID NO: 729106 - DNA, 19 bp, Mus musculus
  siRNA target sequence for 3110001H15Rik (NM_027355.1,1583-1601).
cagtcctgatgatttatgt

SEQ ID NO: 729107 - DNA, 19 bp, Mus musculus
  siRNA target sequence for 2700038N03Rik (NM_027356.1,220-238).
caggccactacctttacta

SEQ ID NO: 729108 - DNA, 19 bp, Mus musculus
  siRNA target sequence for 2700038N03Rik (NM_027356.1,223-241).
gccactacctttactatca

SEQ ID NO: 729109 - DNA, 19 bp, Mus musculus
  siRNA target sequence for 2700038N03Rik (NM_027356.1,225-243).
cactacctttactatcact

SEQ ID NO: 729110 - DNA, 19 bp, Mus musculus
  siRNA target sequence for 2700038N03Rik (NM_027356.1,227-245).
ctacctttactatcactat

SEQ ID NO: 729111 - DNA, 19 bp, Mus musculus
  siRNA target sequence for 2700038N03Rik (NM_027356.1,231-249).
ctttactatcactatggtt

SEQ ID NO: 729112 - DNA, 19 bp, Mus musculus
  siRNA target sequence for 2700038N03Rik (NM_027356.1,518-536).
gcggctttattcacacttt

SEQ ID NO: 729113 - DNA, 19 bp, Mus musculus
  siRNA target sequence for 2700038N03Rik (NM_027356.1,519-537).
cggctttattcacacttta

SEQ ID NO: 729114 - DNA, 19 bp, Mus musculus
  siRNA target sequence for 2700038N03Rik (NM_027356.1,701-719).
ggtgggctggcaaaaggta

SEQ ID NO: 729115 - DNA, 19 bp, Mus musculus
  siRNA target sequence for 2700038N03Rik (NM_027356.1,702-720).
gtgggctggcaaaaggtaa

SEQ ID NO: 729116 - DNA, 19 bp, Mus musculus
  siRNA target sequence for 2700038N03Rik (NM_027356.1,716-734).
ggtaaaaagcgtctttgat

SEQ ID NO: 729117 - DNA, 19 bp, Mus musculus
  siRNA target sequence for 2700038N03Rik (NM_027356.1,717-735).
gtaaaaagcgtctttgatt

SEQ ID NO: 729118 - DNA, 19 bp, Mus musculus
  siRNA target sequence for 2700038N03Rik (NM_027356.1,732-750).
gattccaattccttctaca

SEQ ID NO: 729119 - DNA, 19 bp, Mus musculus
  siRNA target sequence for 2310066N05Rik (NM_027371.1,635-653).
caccgaatggacttatttt

SEQ ID NO: 729120 - DNA, 19 bp, Mus musculus
  siRNA target sequence for 2310066N05Rik (NM_027371.1,637-655).
ccgaatggacttattttga

SEQ ID NO: 729121 - DNA, 19 bp, Mus musculus
  siRNA target sequence for 2310066N05Rik (NM_027371.1,639-657).
gaatggacttattttgagt

SEQ ID NO: 729122 - DNA, 19 bp, Mus musculus
  siRNA target sequence for 2310066N05Rik (NM_027371.1,669-687).
cggtccaaccgctcatttt

SEQ ID NO: 729123 - DNA, 19 bp, Mus musculus
  siRNA target sequence for 2310066N05Rik (NM_027371.1,670-688).
ggtccaaccgctcatttta

SEQ ID NO: 729124 - DNA, 19 bp, Mus musculus
  siRNA target sequence for 2310066N05Rik (NM_027371.1,671-689).
gtccaaccgctcattttaa

SEQ ID NO: 729125 - DNA, 19 bp, Mus musculus
  siRNA target sequence for 2310066N05Rik (NM_027371.1,674-692).
caaccgctcattttaaaat

SEQ ID NO: 729126 - DNA, 19 bp, Mus musculus
  siRNA target sequence for 2310066N05Rik (NM_027371.1,695-713).
gcagtgttcgtcttcgtaa

SEQ ID NO: 729127 - DNA, 19 bp, Mus musculus
  siRNA target sequence for 2310066N05Rik (NM_027371.1,696-714).
cagtgttcgtcttcgtaaa

SEQ ID NO: 729128 - DNA, 19 bp, Mus musculus
  siRNA target sequence for 2310066N05Rik (NM_027371.1,698-716).
gtgttcgtcttcgtaaaga

SEQ ID NO: 729129 - DNA, 19 bp, Mus musculus
  siRNA target sequence for 2310066N05Rik (NM_027371.1,704-722).
gtcttcgtaaagaaattaa

SEQ ID NO: 729130 - DNA, 19 bp, Mus musculus
  siRNA target sequence for 2310066N05Rik (NM_027371.1,745-763).
gaacatgtacctgagataa

SEQ ID NO: 729131 - DNA, 19 bp, Mus musculus
  siRNA target sequence for 2310066N05Rik (NM_027371.1,757-775).
gagataattctgaataatt

SEQ ID NO: 729132 - DNA, 19 bp, Mus musculus
  siRNA target sequence for 2310066N05Rik (NM_027371.1,782-800).
cacggctaggccattctat

SEQ ID NO: 729133 - DNA, 19 bp, Mus musculus
  siRNA target sequence for 2310066N05Rik (NM_027371.1,786-804).
gctaggccattctattgga

SEQ ID NO: 729134 - DNA, 19 bp, Mus musculus
  siRNA target sequence for 2310066N05Rik (NM_027371.1,827-845).
ctcataatcctcaatttat

SEQ ID NO: 729135 - DNA, 19 bp, Mus musculus
  siRNA target sequence for 2310066N05Rik (NM_027371.1,868-886).
cacaatcagcgagattaca

SEQ ID NO: 729136 - DNA, 19 bp, Mus musculus
  siRNA target sequence for 2310066N05Rik (NM_027371.1,896-914).
ggtttcacagatacatatt

SEQ ID NO: 729137 - DNA, 19 bp, Mus musculus
  siRNA target sequence for 2310066N05Rik (NM_027371.1,942-960).
ggaactcggaccacgtttt

SEQ ID NO: 729138 - DNA, 19 bp, Mus musculus
  siRNA target sequence for 2310066N05Rik (NM_027371.1,943-961).
gaactcggaccacgtttta

SEQ ID NO: 729139 - DNA, 19 bp, Mus musculus
  siRNA target sequence for 2310066N05Rik (NM_027371.1,948-966).
cggaccacgttttacctta

SEQ ID NO: 729140 - DNA, 19 bp, Mus musculus
  siRNA target sequence for 2310066N05Rik (NM_027371.1,949-967).
ggaccacgttttaccttaa

SEQ ID NO: 729141 - DNA, 19 bp, Mus musculus
  siRNA target sequence for 2310066N05Rik (NM_027371.1,950-968).
gaccacgttttaccttaaa

SEQ ID NO: 729142 - DNA, 19 bp, Mus musculus
  siRNA target sequence for 2310066N05Rik (NM_027371.1,982-1000).
cagaagggcacttttgatt

SEQ ID NO: 729143 - DNA, 19 bp, Mus musculus
  siRNA target sequence for 2310066N05Rik (NM_027371.1,1029-1047).
caagccacgggaaatggat

SEQ ID NO: 729144 - DNA, 19 bp, Mus musculus
  siRNA target sequence for 2310066N05Rik (NM_027371.1,1044-1062).
ggatacaagtcgaaggaaa

SEQ ID NO: 729145 - DNA, 19 bp, Mus musculus
  siRNA target sequence for 2600003E23Rik (NM_027373.1,227-245).
ggaagagttaatagttgaa

SEQ ID NO: 729146 - DNA, 19 bp, Mus musculus
  siRNA target sequence for 2600003E23Rik (NM_027373.1,273-291).
cacgagtacctcacatcaa

SEQ ID NO: 729147 - DNA, 19 bp, Mus musculus
  siRNA target sequence for 2600003E23Rik (NM_027373.1,275-293).
cgagtacctcacatcaact

SEQ ID NO: 729148 - DNA, 19 bp, Mus musculus
  siRNA target sequence for 2600003E23Rik (NM_027373.1,343-361).
catccaagggctttgaagt

SEQ ID NO: 729149 - DNA, 19 bp, Mus musculus
  siRNA target sequence for 2600003E23Rik (NM_027373.1,540-558).
gagtacatcacctcaaatt

SEQ ID NO: 729150 - DNA, 19 bp, Mus musculus
  siRNA target sequence for 2600003E23Rik (NM_027373.1,577-595).
gcagttcctatgagtcata

SEQ ID NO: 729151 - DNA, 19 bp, Mus musculus
  siRNA target sequence for 2600003E23Rik (NM_027373.1,578-596).
cagttcctatgagtcatat

SEQ ID NO: 729152 - DNA, 19 bp, Mus musculus
  siRNA target sequence for 2600003E23Rik (NM_027373.1,583-601).
cctatgagtcatatgatga

SEQ ID NO: 729153 - DNA, 19 bp, Mus musculus
  siRNA target sequence for 2600003E23Rik (NM_027373.1,584-602).
ctatgagtcatatgatgaa

SEQ ID NO: 729154 - DNA, 19 bp, Mus musculus
  siRNA target sequence for 2600003E23Rik (NM_027373.1,614-632).
cgggaaggggaagaaaact

SEQ ID NO: 729155 - DNA, 19 bp, Mus musculus
  siRNA target sequence for 2600003E23Rik (NM_027373.1,695-713).
cttcctgctgcgcaagaaa

SEQ ID NO: 729156 - DNA, 19 bp, Mus musculus
  siRNA target sequence for 2600003E23Rik (NM_027373.1,734-752).
gctgctctgcgtcatcaaa

SEQ ID NO: 729157 - DNA, 19 bp, Mus musculus
  siRNA target sequence for 2600003E23Rik (NM_027373.1,738-756).
ctctgcgtcatcaaagaca

SEQ ID NO: 729158 - DNA, 19 bp, Mus musculus
  siRNA target sequence for 2600003E23Rik (NM_027373.1,757-775).
ccaagctgctgtgctataa

SEQ ID NO: 729159 - DNA, 19 bp, Mus musculus
  siRNA target sequence for 2600003E23Rik (NM_027373.1,813-831).
ctgcagggctgcagtatca

SEQ ID NO: 729160 - DNA, 19 bp, Mus musculus
  siRNA target sequence for 2600003E23Rik (NM_027373.1,815-833).
gcagggctgcagtatcaca

SEQ ID NO: 729161 - DNA, 19 bp, Mus musculus
  siRNA target sequence for 2600003E23Rik (NM_027373.1,816-834).
cagggctgcagtatcacat

SEQ ID NO: 729162 - DNA, 19 bp, Mus musculus
  siRNA target sequence for 2600003E23Rik (NM_027373.1,819-837).
ggctgcagtatcacataca

SEQ ID NO: 729163 - DNA, 19 bp, Mus musculus
  siRNA target sequence for 2600003E23Rik (NM_027373.1,820-838).
gctgcagtatcacatacat

SEQ ID NO: 729164 - DNA, 19 bp, Mus musculus
  siRNA target sequence for 2600003E23Rik (NM_027373.1,938-956).
gtggttgaaggtaatcaaa

SEQ ID NO: 729165 - DNA, 19 bp, Mus musculus
  siRNA target sequence for 2600003E23Rik (NM_027373.1,981-999).
cccgtggatccggaatgtt

SEQ ID NO: 729166 - DNA, 19 bp, Mus musculus
  siRNA target sequence for 2600003E23Rik (NM_027373.1,983-1001).
cgtggatccggaatgttct

SEQ ID NO: 729167 - DNA, 19 bp, Mus musculus
  siRNA target sequence for 2600003E23Rik (NM_027373.1,1100-1118).
cggagtcaccacgtgtaat

SEQ ID NO: 729168 - DNA, 19 bp, Mus musculus
  siRNA target sequence for 2600003E23Rik (NM_027373.1,1106-1124).
caccacgtgtaatggaaaa

SEQ ID NO: 729169 - DNA, 19 bp, Mus musculus
  siRNA target sequence for 2600003E23Rik (NM_027373.1,1108-1126).
ccacgtgtaatggaaaaga

SEQ ID NO: 729170 - DNA, 19 bp, Mus musculus
  siRNA target sequence for 2600003E23Rik (NM_027373.1,1111-1129).
cgtgtaatggaaaagaaca

SEQ ID NO: 729171 - DNA, 19 bp, Mus musculus
  siRNA target sequence for 2600003E23Rik (NM_027373.1,1450-1468).
ccttccggctgcttcgaaa

SEQ ID NO: 729172 - DNA, 19 bp, Mus musculus
  siRNA target sequence for 2600003E23Rik (NM_027373.1,1495-1513).
catcatcgtctgaagacat

SEQ ID NO: 729173 - DNA, 19 bp, Mus musculus
  siRNA target sequence for 2600003E23Rik (NM_027373.1,1570-1588).
cgctgcactacgactacat

SEQ ID NO: 729174 - DNA, 19 bp, Mus musculus
  siRNA target sequence for 2600003E23Rik (NM_027373.1,1596-1614).
gagatgtcagcaaatgtca

SEQ ID NO: 729175 - DNA, 19 bp, Mus musculus
  siRNA target sequence for 2600003E23Rik (NM_027373.1,1717-1735).
cagcactacactatgatga

SEQ ID NO: 729176 - DNA, 19 bp, Mus musculus
  siRNA target sequence for 2600003E23Rik (NM_027373.1,1746-1764).
gtcaacggctcgttgaaga

SEQ ID NO: 729177 - DNA, 19 bp, Mus musculus
  siRNA target sequence for 2600003E23Rik (NM_027373.1,1786-1804).
ctaatggggttcctgtaaa

SEQ ID NO: 729178 - DNA, 19 bp, Mus musculus
  siRNA target sequence for 2600003E23Rik (NM_027373.1,1813-1831).
ctcccagcagtcagcaaaa

SEQ ID NO: 729179 - DNA, 19 bp, Mus musculus
  siRNA target sequence for 2600003E23Rik (NM_027373.1,1856-1874).
gaaacggacagcatcaaat

SEQ ID NO: 729180 - DNA, 19 bp, Mus musculus
  siRNA target sequence for 2600003E23Rik (NM_027373.1,2242-2260).
ggcatcggactctggaaaa

SEQ ID NO: 729181 - DNA, 19 bp, Mus musculus
  siRNA target sequence for 2600003E23Rik (NM_027373.1,2243-2261).
gcatcggactctggaaaat

SEQ ID NO: 729182 - DNA, 19 bp, Mus musculus
  siRNA target sequence for 2600003E23Rik (NM_027373.1,2244-2262).
catcggactctggaaaatt

SEQ ID NO: 729183 - DNA, 19 bp, Mus musculus
  siRNA target sequence for 2600003E23Rik (NM_027373.1,2265-2283).
cccatctccagctgtgata

SEQ ID NO: 729184 - DNA, 19 bp, Mus musculus
  siRNA target sequence for 3732409C05Rik (NM_027379.1,855-873).
ccaggatggattgataact

SEQ ID NO: 729185 - DNA, 19 bp, Mus musculus
  siRNA target sequence for 3732409C05Rik (NM_027379.1,856-874).
caggatggattgataactt

SEQ ID NO: 729186 - DNA, 19 bp, Mus musculus
  siRNA target sequence for 3732409C05Rik (NM_027379.1,858-876).
ggatggattgataacttta

SEQ ID NO: 729187 - DNA, 19 bp, Mus musculus
  siRNA target sequence for 3732409C05Rik (NM_027379.1,880-898).
gaccaagtggtctcttcat

SEQ ID NO: 729188 - DNA, 19 bp, Mus musculus
  siRNA target sequence for 3732409C05Rik (NM_027379.1,990-1008).
cttgctgcagcctggtatt

SEQ ID NO: 729189 - DNA, 19 bp, Mus musculus
  siRNA target sequence for 3732409C05Rik (NM_027379.1,1014-1032).
gttaatagaccaagaaaca

SEQ ID NO: 729190 - DNA, 19 bp, Mus musculus
  siRNA target sequence for 3732409C05Rik (NM_027379.1,1049-1067).
cacaacaggcagcactaat

SEQ ID NO: 729191 - DNA, 19 bp, Mus musculus
  siRNA target sequence for 3732409C05Rik (NM_027379.1,1079-1097).
gggggaagttgaataccat

SEQ ID NO: 729192 - DNA, 19 bp, Mus musculus
  siRNA target sequence for 3732409C05Rik (NM_027379.1,1086-1104).
gttgaataccatgtaattt

SEQ ID NO: 729193 - DNA, 19 bp, Mus musculus
  siRNA target sequence for 3732409C05Rik (NM_027379.1,1136-1154).
cttcagacggcccaatgta

SEQ ID NO: 729194 - DNA, 19 bp, Mus musculus
  siRNA target sequence for 3732409C05Rik (NM_027379.1,1139-1157).
cagacggcccaatgtaaat

SEQ ID NO: 729195 - DNA, 19 bp, Mus musculus
  siRNA target sequence for 3732409C05Rik (NM_027379.1,1262-1280).
gatgatgaaaacaatcact

SEQ ID NO: 729196 - DNA, 19 bp, Mus musculus
  siRNA target sequence for 3732409C05Rik (NM_027379.1,1321-1339).
gtaactcttgggtttggaa

SEQ ID NO: 729197 - DNA, 19 bp, Mus musculus
  siRNA target sequence for 3732409C05Rik (NM_027379.1,1325-1343).
ctcttgggtttggaatact

SEQ ID NO: 729198 - DNA, 19 bp, Mus musculus
  siRNA target sequence for 3732409C05Rik (NM_027379.1,1327-1345).
cttgggtttggaatactga

SEQ ID NO: 729199 - DNA, 19 bp, Mus musculus
  siRNA target sequence for 3732409C05Rik (NM_027379.1,1380-1398).
gaagataaaaagaccttta

SEQ ID NO: 729200 - DNA, 19 bp, Mus musculus
  siRNA target sequence for 3732409C05Rik (NM_027379.1,1404-1422).
gatgtacggcagttacatt

SEQ ID NO: 729201 - DNA, 19 bp, Mus musculus
  siRNA target sequence for 3732409C05Rik (NM_027379.1,1456-1474).
ctaagaagtacgtgttgaa

SEQ ID NO: 729202 - DNA, 19 bp, Mus musculus
  siRNA target sequence for 3732409C05Rik (NM_027379.1,1498-1516).
ctgctcggaagcatctcaa

SEQ ID NO: 729203 - DNA, 19 bp, Mus musculus
  siRNA target sequence for 3732409C05Rik (NM_027379.1,1504-1522).
ggaagcatctcaacaagtt

SEQ ID NO: 729204 - DNA, 19 bp, Mus musculus
  siRNA target sequence for 3732409C05Rik (NM_027379.1,1523-1541).
gcggaatatccgttatggt

SEQ ID NO: 729205 - DNA, 19 bp, Mus musculus
  siRNA target sequence for 3732409C05Rik (NM_027379.1,1524-1542).
cggaatatccgttatggtt

SEQ ID NO: 729206 - DNA, 19 bp, Mus musculus
  siRNA target sequence for 3732409C05Rik (NM_027379.1,1525-1543).
ggaatatccgttatggttt

SEQ ID NO: 729207 - DNA, 19 bp, Mus musculus
  siRNA target sequence for 3732409C05Rik (NM_027379.1,1532-1550).
ccgttatggtttcaataca

SEQ ID NO: 729208 - DNA, 19 bp, Mus musculus
  siRNA target sequence for 3732409C05Rik (NM_027379.1,1549-1567).
caatccttgtgatacttat

SEQ ID NO: 729209 - DNA, 19 bp, Mus musculus
  siRNA target sequence for 3732409C05Rik (NM_027379.1,1568-1586).
ctggcgcatttttattgca

SEQ ID NO: 729210 - DNA, 19 bp, Mus musculus
  siRNA target sequence for 3732409C05Rik (NM_027379.1,1593-1611).
caaatggcaagaaacatct

SEQ ID NO: 729211 - DNA, 19 bp, Mus musculus
  siRNA target sequence for 3732409C05Rik (NM_027379.1,1629-1647).
ctgtgttacaaatttctgt

SEQ ID NO: 729212 - DNA, 19 bp, Mus musculus
  siRNA target sequence for 3732409C05Rik (NM_027379.1,1656-1674).
cgagcatccagcactatga

SEQ ID NO: 729213 - DNA, 19 bp, Mus musculus
  siRNA target sequence for 2610044A17Rik (NM_027388.1,596-614).
gaggcctttggatcatctt

SEQ ID NO: 729214 - DNA, 19 bp, Mus musculus
  siRNA target sequence for 2610044A17Rik (NM_027388.1,619-637).
cagcacgtatgctctttct

SEQ ID NO: 729215 - DNA, 19 bp, Mus musculus
  siRNA target sequence for 2610044A17Rik (NM_027388.1,625-643).
gtatgctctttctcaaaca

SEQ ID NO: 729216 - DNA, 19 bp, Mus musculus
  siRNA target sequence for 2610044A17Rik (NM_027388.1,666-684).
ggactttgttgtcttgata

SEQ ID NO: 729217 - DNA, 19 bp, Mus musculus
  siRNA target sequence for 2610044A17Rik (NM_027388.1,760-778).
gcatggctgttgtatcaga

SEQ ID NO: 729218 - DNA, 19 bp, Mus musculus
  siRNA target sequence for 2610044A17Rik (NM_027388.1,764-782).
ggctgttgtatcagatata

SEQ ID NO: 729219 - DNA, 19 bp, Mus musculus
  siRNA target sequence for 2610044A17Rik (NM_027388.1,814-832).
gtccagaaagtctttgcaa

SEQ ID NO: 729220 - DNA, 19 bp, Mus musculus
  siRNA target sequence for 2610044A17Rik (NM_027388.1,825-843).
ctttgcaaacttcttgaaa

SEQ ID NO: 729221 - DNA, 19 bp, Mus musculus
  siRNA target sequence for 2610044A17Rik (NM_027388.1,849-867).
cctagaatctgagtacaat

SEQ ID NO: 729222 - DNA, 19 bp, Mus musculus
  siRNA target sequence for 2610044A17Rik (NM_027388.1,878-896).
cctgttaccgggtcattaa

SEQ ID NO: 729223 - DNA, 19 bp, Mus musculus
  siRNA target sequence for 2610044A17Rik (NM_027388.1,888-906).
ggtcattaacagcgtattt

SEQ ID NO: 729224 - DNA, 19 bp, Mus musculus
  siRNA target sequence for 2610044A17Rik (NM_027388.1,889-907).
gtcattaacagcgtattta

SEQ ID NO: 729225 - DNA, 19 bp, Mus musculus
  siRNA target sequence for 2610044A17Rik (NM_027388.1,917-935).
ccattttggccgtggattt

SEQ ID NO: 729226 - DNA, 19 bp, Mus musculus
  siRNA target sequence for 2610044A17Rik (NM_027388.1,936-954).
cccacttttccctagaaga

SEQ ID NO: 729227 - DNA, 19 bp, Mus musculus
  siRNA target sequence for 2610044A17Rik (NM_027388.1,1081-1099).
cttagaaaatcgctgtatt

SEQ ID NO: 729228 - DNA, 19 bp, Mus musculus
  siRNA target sequence for 2610044A17Rik (NM_027388.1,1128-1146).
gggacggttggtcattata

SEQ ID NO: 729229 - DNA, 19 bp, Mus musculus
  siRNA target sequence for 2610044A17Rik (NM_027388.1,1129-1147).
ggacggttggtcattataa

SEQ ID NO: 729230 - DNA, 19 bp, Mus musculus
  siRNA target sequence for 2610044A17Rik (NM_027388.1,1130-1148).
gacggttggtcattataaa

SEQ ID NO: 729231 - DNA, 19 bp, Mus musculus
  siRNA target sequence for 2610044A17Rik (NM_027388.1,1132-1150).
cggttggtcattataaagt

SEQ ID NO: 729232 - DNA, 19 bp, Mus musculus
  siRNA target sequence for 2610044A17Rik (NM_027388.1,1156-1174).
ggctaccaggaacattcta

SEQ ID NO: 729233 - DNA, 19 bp, Mus musculus
  siRNA target sequence for 2610044A17Rik (NM_027388.1,1189-1207).
cactggaactttttcttta

SEQ ID NO: 729234 - DNA, 19 bp, Mus musculus
  siRNA target sequence for 2610044A17Rik (NM_027388.1,1233-1251).
gtcactgcttttgattatt

SEQ ID NO: 729235 - DNA, 19 bp, Mus musculus
  siRNA target sequence for 2610044A17Rik (NM_027388.1,1365-1383).
cacaagggttggcttctta

SEQ ID NO: 729236 - DNA, 19 bp, Mus musculus
  siRNA target sequence for 2610044A17Rik (NM_027388.1,1367-1385).
caagggttggcttcttaaa

SEQ ID NO: 729237 - DNA, 19 bp, Mus musculus
  siRNA target sequence for 2610044A17Rik (NM_027388.1,1388-1406).
ctaaccgagagggaataat

SEQ ID NO: 729238 - DNA, 19 bp, Mus musculus
  siRNA target sequence for 2610044A17Rik (NM_027388.1,1417-1435).
gggtatgtgacaatacaca

SEQ ID NO: 729239 - DNA, 19 bp, Mus musculus
  siRNA target sequence for 2610044A17Rik (NM_027388.1,1442-1460).
gtgtacaaacgggattgta

SEQ ID NO: 729240 - DNA, 19 bp, Mus musculus
  siRNA target sequence for 2610044A17Rik (NM_027388.1,1451-1469).
cgggattgtatgtgcttaa

SEQ ID NO: 729241 - DNA, 19 bp, Mus musculus
  siRNA target sequence for 2610044A17Rik (NM_027388.1,1491-1509).
ctggataaaagctacttgt

SEQ ID NO: 729242 - DNA, 19 bp, Mus musculus
  siRNA target sequence for 2610044A17Rik (NM_027388.1,1546-1564).
cttcatatagtgcaagtaa

SEQ ID NO: 729243 - DNA, 19 bp, Mus musculus
  siRNA target sequence for 2610044A17Rik (NM_027388.1,1549-1567).
catatagtgcaagtaaaca

SEQ ID NO: 729244 - DNA, 19 bp, Mus musculus
  siRNA target sequence for 2610044A17Rik (NM_027388.1,1580-1598).
ctcgaagaatggccaattt

SEQ ID NO: 729245 - DNA, 19 bp, Mus musculus
  siRNA target sequence for 2610044A17Rik (NM_027388.1,1590-1608).
ggccaatttagccttttgt

SEQ ID NO: 729246 - DNA, 19 bp, Mus musculus
  siRNA target sequence for 2610044A17Rik (NM_027388.1,1648-1666).
ctgttactgagtggtataa

SEQ ID NO: 729247 - DNA, 19 bp, Mus musculus
  siRNA target sequence for 2610044A17Rik (NM_027388.1,1650-1668).
gttactgagtggtataatt

SEQ ID NO: 729248 - DNA, 19 bp, Mus musculus
  siRNA target sequence for 2610044A17Rik (NM_027388.1,1654-1672).
ctgagtggtataattttga

SEQ ID NO: 729249 - DNA, 19 bp, Mus musculus
  siRNA target sequence for 2610044A17Rik (NM_027388.1,1656-1674).
gagtggtataattttgagt

SEQ ID NO: 729250 - DNA, 19 bp, Mus musculus
  siRNA target sequence for 2610044A17Rik (NM_027388.1,1708-1726).
ccatgttcttggaaactta

SEQ ID NO: 729251 - DNA, 19 bp, Mus musculus
  siRNA target sequence for 2610044A17Rik (NM_027388.1,1712-1730).
gttcttggaaacttataca

SEQ ID NO: 729252 - DNA, 19 bp, Mus musculus
  siRNA target sequence for 2610044A17Rik (NM_027388.1,1731-1749).
gtctcctactacacataaa

SEQ ID NO: 729253 - DNA, 19 bp, Mus musculus
  siRNA target sequence for 2610044A17Rik (NM_027388.1,1733-1751).
ctcctactacacataaaaa

SEQ ID NO: 729254 - DNA, 19 bp, Mus musculus
  siRNA target sequence for 2610044A17Rik (NM_027388.1,1757-1775).
ctgaatctctaatcttaga

SEQ ID NO: 729255 - DNA, 19 bp, Mus musculus
  siRNA target sequence for Psg21 (NM_027403.2,419-437).
cacaattgctctgcatttt

SEQ ID NO: 729256 - DNA, 19 bp, Mus musculus
  siRNA target sequence for 1700020O03Rik (NM_027405.1,319-337).
gctccgctcaccaacttca

SEQ ID NO: 729257 - DNA, 19 bp, Mus musculus
  siRNA target sequence for 1700020O03Rik (NM_027405.1,387-405).
catcattaggggtaagcaa

SEQ ID NO: 729258 - DNA, 19 bp, Mus musculus
  siRNA target sequence for 1700020O03Rik (NM_027405.1,646-664).
gagaatcggactttcctaa

SEQ ID NO: 729259 - DNA, 19 bp, Mus musculus
  siRNA target sequence for 1700020O03Rik (NM_027405.1,777-795).
ggggctcttcaccaatgat

SEQ ID NO: 729260 - DNA, 19 bp, Mus musculus
  siRNA target sequence for 1700020O03Rik (NM_027405.1,854-872).
ccggattcactgtccataa

SEQ ID NO: 729261 - DNA, 19 bp, Mus musculus
  siRNA target sequence for 1700020O03Rik (NM_027405.1,898-916).
cactgcactgaagtagaaa

SEQ ID NO: 729262 - DNA, 19 bp, Mus musculus
  siRNA target sequence for 1700020O03Rik (NM_027405.1,944-962).
cagaccccacgttcctttt

SEQ ID NO: 729263 - DNA, 19 bp, Mus musculus
  siRNA target sequence for 1700020O03Rik (NM_027405.1,948-966).
ccccacgttccttttacct

SEQ ID NO: 729264 - DNA, 19 bp, Mus musculus
  siRNA target sequence for 1700020O03Rik (NM_027405.1,991-1009).
catggtcgtctgaataggt

SEQ ID NO: 729265 - DNA, 19 bp, Mus musculus
  siRNA target sequence for 1700020O03Rik (NM_027405.1,1160-1178).
gagaacggaatcagtttaa

SEQ ID NO: 729266 - DNA, 19 bp, Mus musculus
  siRNA target sequence for 1700030B17Rik (NM_027407.1,85-103).
gcaactcagagcagaagat

SEQ ID NO: 729267 - DNA, 19 bp, Mus musculus
  siRNA target sequence for 1700030B17Rik (NM_027407.1,141-159).
ggagaactaaacaagtctt

SEQ ID NO: 729268 - DNA, 19 bp, Mus musculus
  siRNA target sequence for 1700030B17Rik (NM_027407.1,142-160).
gagaactaaacaagtcttt

SEQ ID NO: 729269 - DNA, 19 bp, Mus musculus
  siRNA target sequence for 1700030B17Rik (NM_027407.1,210-228).
cagaactggacgctaagtt

SEQ ID NO: 729270 - DNA, 19 bp, Mus musculus
  siRNA target sequence for 1700030B17Rik (NM_027407.1,220-238).
cgctaagttggaggttttt

SEQ ID NO: 729271 - DNA, 19 bp, Mus musculus
  siRNA target sequence for 1700030B17Rik (NM_027407.1,247-265).
ccaggagacatgcaatgaa

SEQ ID NO: 729272 - DNA, 19 bp, Mus musculus
  siRNA target sequence for 1700030B17Rik (NM_027407.1,258-276).
gcaatgaacttgtgaagat

SEQ ID NO: 729273 - DNA, 19 bp, Mus musculus
  siRNA target sequence for 1700030B17Rik (NM_027407.1,290-308).
cagctaagactcaacgtta

SEQ ID NO: 729274 - DNA, 19 bp, Mus musculus
  siRNA target sequence for 1700030B17Rik (NM_027407.1,292-310).
gctaagactcaacgttata

SEQ ID NO: 729275 - DNA, 19 bp, Mus musculus
  siRNA target sequence for 1700030B17Rik (NM_027407.1,297-315).
gactcaacgttatatcaga

SEQ ID NO: 729276 - DNA, 19 bp, Mus musculus
  siRNA target sequence for 1700030B17Rik (NM_027407.1,326-344).
gaactaggactctttttaa

SEQ ID NO: 729277 - DNA, 19 bp, Mus musculus
  siRNA target sequence for 1700030B17Rik (NM_027407.1,369-387).
ctcaagctggcgaaatgat

SEQ ID NO: 729278 - DNA, 19 bp, Mus musculus
  siRNA target sequence for 1700030B17Rik (NM_027407.1,444-462).
ctcccctgtctcgtcttaa

SEQ ID NO: 729279 - DNA, 19 bp, Mus musculus
  siRNA target sequence for 1700030B17Rik (NM_027407.1,464-482).
caagaagtggcaacattca

SEQ ID NO: 729280 - DNA, 19 bp, Mus musculus
  siRNA target sequence for 1700030B17Rik (NM_027407.1,593-611).
ccagacaccttcaaacaaa

SEQ ID NO: 729281 - DNA, 19 bp, Mus musculus
  siRNA target sequence for 1700030B17Rik (NM_027407.1,656-674).
gattcttttgacaagttaa

SEQ ID NO: 729282 - DNA, 19 bp, Mus musculus
  siRNA target sequence for 1700030B17Rik (NM_027407.1,707-725).
ggagctagtcgctgcaata

SEQ ID NO: 729283 - DNA, 19 bp, Mus musculus
  siRNA target sequence for 1700030B17Rik (NM_027407.1,708-726).
gagctagtcgctgcaatat

SEQ ID NO: 729284 - DNA, 19 bp, Mus musculus
  siRNA target sequence for 1700030B17Rik (NM_027407.1,711-729).
ctagtcgctgcaatatgct

SEQ ID NO: 729285 - DNA, 19 bp, Mus musculus
  siRNA target sequence for 1700030B17Rik (NM_027407.1,811-829).
ggcctgcgctggctttcat

SEQ ID NO: 729286 - DNA, 19 bp, Mus musculus
  siRNA target sequence for 1700030B17Rik (NM_027407.1,844-862).
ggctctcaagcgactacaa

SEQ ID NO: 729287 - DNA, 19 bp, Mus musculus
  siRNA target sequence for 1700030B17Rik (NM_027407.1,846-864).
ctctcaagcgactacaaga

SEQ ID NO: 729288 - DNA, 19 bp, Mus musculus
  siRNA target sequence for 1700030B17Rik (NM_027407.1,1006-1024).
gcctagagactcactagaa

SEQ ID NO: 729289 - DNA, 19 bp, Mus musculus
  siRNA target sequence for 1700030B17Rik (NM_027407.1,1017-1035).
cactagaaggagatgattt

SEQ ID NO: 729290 - DNA, 19 bp, Mus musculus
  siRNA target sequence for 1700030B17Rik (NM_027407.1,1086-1104).
gtgctagtgagtttacaca

SEQ ID NO: 729291 - DNA, 19 bp, Mus musculus
  siRNA target sequence for 1700030B17Rik (NM_027407.1,1252-1270).
ccccaacaatggtaaccaa

SEQ ID NO: 729292 - DNA, 19 bp, Mus musculus
  siRNA target sequence for 1700030B17Rik (NM_027407.1,1276-1294).
gtcagcctggttcaatcta

SEQ ID NO: 729293 - DNA, 19 bp, Mus musculus
  siRNA target sequence for 1700030B17Rik (NM_027407.1,1278-1296).
cagcctggttcaatctatt

SEQ ID NO: 729294 - DNA, 19 bp, Mus musculus
  siRNA target sequence for 2600001J17Rik (NM_027411.1,173-191).
caaatcttcggaacaaact

SEQ ID NO: 729295 - DNA, 19 bp, Mus musculus
  siRNA target sequence for 2600001J17Rik (NM_027411.1,265-283).
cagagccaactggataaat

SEQ ID NO: 729296 - DNA, 19 bp, Mus musculus
  siRNA target sequence for 2600001J17Rik (NM_027411.1,267-285).
gagccaactggataaatgt

SEQ ID NO: 729297 - DNA, 19 bp, Mus musculus
  siRNA target sequence for 2600001J17Rik (NM_027411.1,270-288).
ccaactggataaatgtcat

SEQ ID NO: 729298 - DNA, 19 bp, Mus musculus
  siRNA target sequence for 2600001J17Rik (NM_027411.1,284-302).
gtcatgaagaaatgatgat

SEQ ID NO: 729299 - DNA, 19 bp, Mus musculus
  siRNA target sequence for 2600001J17Rik (NM_027411.1,354-372).
gctcaagagtcggatgtta

SEQ ID NO: 729300 - DNA, 19 bp, Mus musculus
  siRNA target sequence for 2600001J17Rik (NM_027411.1,732-750).
gcagctagaatgtctcaat

SEQ ID NO: 729301 - DNA, 19 bp, Mus musculus
  siRNA target sequence for 2600001J17Rik (NM_027411.1,735-753).
gctagaatgtctcaatact

SEQ ID NO: 729302 - DNA, 19 bp, Mus musculus
  siRNA target sequence for 2600001J17Rik (NM_027411.1,806-824).
gagaagcggtctcttacta

SEQ ID NO: 729303 - DNA, 19 bp, Mus musculus
  siRNA target sequence for 2600001J17Rik (NM_027411.1,808-826).
gaagcggtctcttactata

SEQ ID NO: 729304 - DNA, 19 bp, Mus musculus
  siRNA target sequence for 2600001J17Rik (NM_027411.1,961-979).
gaacgccagctcaacttga

SEQ ID NO: 729305 - DNA, 19 bp, Mus musculus
  siRNA target sequence for 2600001J17Rik (NM_027411.1,964-982).
cgccagctcaacttgatga

SEQ ID NO: 729306 - DNA, 19 bp, Mus musculus
  siRNA target sequence for 2600001J17Rik (NM_027411.1,965-983).
gccagctcaacttgatgaa

SEQ ID NO: 729307 - DNA, 19 bp, Mus musculus
  siRNA target sequence for 2600001J17Rik (NM_027411.1,1077-1095).
gggctcgcagactgagttt

SEQ ID NO: 729308 - DNA, 19 bp, Mus musculus
  siRNA target sequence for 2600001J17Rik (NM_027411.1,1079-1097).
gctcgcagactgagtttga

SEQ ID NO: 729309 - DNA, 19 bp, Mus musculus
  siRNA target sequence for 2600001J17Rik (NM_027411.1,1080-1098).
ctcgcagactgagtttgaa

SEQ ID NO: 729310 - DNA, 19 bp, Mus musculus
  siRNA target sequence for 2600001J17Rik (NM_027411.1,1082-1100).
cgcagactgagtttgaaca

SEQ ID NO: 729311 - DNA, 19 bp, Mus musculus
  siRNA target sequence for 2600001J17Rik (NM_027411.1,1109-1127).
ggttgtttgccatgataga

SEQ ID NO: 729312 - DNA, 19 bp, Mus musculus
  siRNA target sequence for 2600001J17Rik (NM_027411.1,1152-1170).
ccttttaggggaaattaat

SEQ ID NO: 729313 - DNA, 19 bp, Mus musculus
  siRNA target sequence for 2600001J17Rik (NM_027411.1,1153-1171).
cttttaggggaaattaata

SEQ ID NO: 729314 - DNA, 19 bp, Mus musculus
  siRNA target sequence for 2600001J17Rik (NM_027411.1,1191-1209).
cttatatgaaagtatggaa

SEQ ID NO: 729315 - DNA, 19 bp, Mus musculus
  siRNA target sequence for 2600001J17Rik (NM_027411.1,1254-1272).
cacctattactcagatcta

SEQ ID NO: 729316 - DNA, 19 bp, Mus musculus
  siRNA target sequence for 2600001J17Rik (NM_027411.1,1375-1393).
gatattgagcggaaactgt

SEQ ID NO: 729317 - DNA, 19 bp, Mus musculus
  siRNA target sequence for 2600001J17Rik (NM_027411.1,1445-1463).
gagcgaagctagatgaact

SEQ ID NO: 729318 - DNA, 19 bp, Mus musculus
  siRNA target sequence for 2600001J17Rik (NM_027411.1,1448-1466).
cgaagctagatgaactcaa

SEQ ID NO: 729319 - DNA, 19 bp, Mus musculus
  siRNA target sequence for 2600001J17Rik (NM_027411.1,1495-1513).
gaagtacctgtactcaaaa

SEQ ID NO: 729320 - DNA, 19 bp, Mus musculus
  siRNA target sequence for 2600001J17Rik (NM_027411.1,1498-1516).
gtacctgtactcaaaagga

SEQ ID NO: 729321 - DNA, 19 bp, Mus musculus
  siRNA target sequence for 2600001J17Rik (NM_027411.1,1522-1540).
gaggtgctgccattgaata

SEQ ID NO: 729322 - DNA, 19 bp, Mus musculus
  siRNA target sequence for 2600001J17Rik (NM_027411.1,1627-1645).
gaatcctgtcttaatagct

SEQ ID NO: 729323 - DNA, 19 bp, Mus musculus
  siRNA target sequence for 2600001J17Rik (NM_027411.1,1634-1652).
gtcttaatagcttaaaaga

SEQ ID NO: 729324 - DNA, 19 bp, Mus musculus
  siRNA target sequence for 2600001J17Rik (NM_027411.1,1773-1791).
ggatagtccggccaacatt

SEQ ID NO: 729325 - DNA, 19 bp, Mus musculus
  siRNA target sequence for 2600001J17Rik (NM_027411.1,1784-1802).
ccaacattgaggtcttaca

SEQ ID NO: 729326 - DNA, 19 bp, Mus musculus
  siRNA target sequence for 2600001J17Rik (NM_027411.1,1785-1803).
caacattgaggtcttacat

SEQ ID NO: 729327 - DNA, 19 bp, Mus musculus
  siRNA target sequence for 2600001J17Rik (NM_027411.1,1794-1812).
ggtcttacatgaacaaagt

SEQ ID NO: 729328 - DNA, 19 bp, Mus musculus
  siRNA target sequence for 2600001J17Rik (NM_027411.1,1822-1840).
cccaattctcccaggttaa

SEQ ID NO: 729329 - DNA, 19 bp, Mus musculus
  siRNA target sequence for 2600001J17Rik (NM_027411.1,1872-1890).
ggaaaggatagaaactaca

SEQ ID NO: 729330 - DNA, 19 bp, Mus musculus
  siRNA target sequence for 2600001J17Rik (NM_027411.1,1917-1935).
gaaatcacacaacatcata

SEQ ID NO: 729331 - DNA, 19 bp, Mus musculus
  siRNA target sequence for 1110020A09Rik (NM_027415.1,279-297).
gcgcagatacctgtttgtt

SEQ ID NO: 729332 - DNA, 19 bp, Mus musculus
  siRNA target sequence for 1110020A09Rik (NM_027415.1,288-306).
cctgtttgttgggaacaat

SEQ ID NO: 729333 - DNA, 19 bp, Mus musculus
  siRNA target sequence for 1110020A09Rik (NM_027415.1,342-360).
gaaaatggcaggctgattt

SEQ ID NO: 729334 - DNA, 19 bp, Mus musculus
  siRNA target sequence for 1110020A09Rik (NM_027415.1,374-392).
ggcccgaacgatatttggt

SEQ ID NO: 729335 - DNA, 19 bp, Mus musculus
  siRNA target sequence for 1110020A09Rik (NM_027415.1,404-422).
ctcttattctacaagtgtt

SEQ ID NO: 729336 - DNA, 19 bp, Mus musculus
  siRNA target sequence for 1110020A09Rik (NM_027415.1,441-459).
ccgtaccttctctcacaaa

SEQ ID NO: 729337 - DNA, 19 bp, Mus musculus
  siRNA target sequence for 1110020A09Rik (NM_027415.1,442-460).
cgtaccttctctcacaaaa

SEQ ID NO: 729338 - DNA, 19 bp, Mus musculus
  siRNA target sequence for 1110020A09Rik (NM_027415.1,443-461).
gtaccttctctcacaaaat

SEQ ID NO: 729339 - DNA, 19 bp, Mus musculus
  siRNA target sequence for 1110020A09Rik (NM_027415.1,563-581).
ctatgtcattcggttgtat

SEQ ID NO: 729340 - DNA, 19 bp, Mus musculus
  siRNA target sequence for 1110020A09Rik (NM_027415.1,569-587).
cattcggttgtatcatgaa

SEQ ID NO: 729341 - DNA, 19 bp, Mus musculus
  siRNA target sequence for 1110020A09Rik (NM_027415.1,607-625).
gagctgtcacttacaatgt

SEQ ID NO: 729342 - DNA, 19 bp, Mus musculus
  siRNA target sequence for 1110020A09Rik (NM_027415.1,656-674).
ccaagacgacgtgacaatt

SEQ ID NO: 729343 - DNA, 19 bp, Mus musculus
  siRNA target sequence for 1110020A09Rik (NM_027415.1,675-693).
ccagagagcgcacatatat

SEQ ID NO: 729344 - DNA, 19 bp, Mus musculus
  siRNA target sequence for 1110020A09Rik (NM_027415.1,676-694).
cagagagcgcacatatatt

SEQ ID NO: 729345 - DNA, 19 bp, Mus musculus
  siRNA target sequence for 1110020A09Rik (NM_027415.1,678-696).
gagagcgcacatatattca

SEQ ID NO: 729346 - DNA, 19 bp, Mus musculus
  siRNA target sequence for 1110020A09Rik (NM_027415.1,715-733).
caaaatcgctattagttaa

SEQ ID NO: 729347 - DNA, 19 bp, Mus musculus
  siRNA target sequence for 1110020A09Rik (NM_027415.1,756-774).
gaagactataaccatctaa

SEQ ID NO: 729348 - DNA, 19 bp, Mus musculus
  siRNA target sequence for 1110020A09Rik (NM_027415.1,789-807).
cgttcacttttgatatgga

SEQ ID NO: 729349 - DNA, 19 bp, Mus musculus
  siRNA target sequence for 1110020A09Rik (NM_027415.1,827-845).
ctgcatgagggtgaaaaat

SEQ ID NO: 729350 - DNA, 19 bp, Mus musculus
  siRNA target sequence for 1110020A09Rik (NM_027415.1,858-876).
catttgtgcttaaatgtca

SEQ ID NO: 729351 - DNA, 19 bp, Mus musculus
  siRNA target sequence for 1110020A09Rik (NM_027415.1,863-881).
gtgcttaaatgtcatgtat

SEQ ID NO: 729352 - DNA, 19 bp, Mus musculus
  siRNA target sequence for 1110020A09Rik (NM_027415.1,866-884).
cttaaatgtcatgtatttt

SEQ ID NO: 729353 - DNA, 19 bp, Mus musculus
  siRNA target sequence for 1110020A09Rik (NM_027415.1,878-896).
gtattttcagggtataata

SEQ ID NO: 729354 - DNA, 19 bp, Mus musculus
  siRNA target sequence for 2810408A11Rik (NM_027419.1,251-269).
gtctctcgcacctgttagt

SEQ ID NO: 729355 - DNA, 19 bp, Mus musculus
  siRNA target sequence for 2810408A11Rik (NM_027419.1,317-335).
cagtgccagaggtatgcaa

SEQ ID NO: 729356 - DNA, 19 bp, Mus musculus
  siRNA target sequence for 2810408A11Rik (NM_027419.1,413-431).
ccgcagtcctggtccaatt

SEQ ID NO: 729357 - DNA, 19 bp, Mus musculus
  siRNA target sequence for 2810408A11Rik (NM_027419.1,415-433).
gcagtcctggtccaattca

SEQ ID NO: 729358 - DNA, 19 bp, Mus musculus
  siRNA target sequence for 2810408A11Rik (NM_027419.1,444-462).
ggggcagtgaccctcaatt

SEQ ID NO: 729359 - DNA, 19 bp, Mus musculus
  siRNA target sequence for 2810408A11Rik (NM_027419.1,466-484).
gacccgctccgcaacttca

SEQ ID NO: 729360 - DNA, 19 bp, Mus musculus
  siRNA target sequence for 2810408A11Rik (NM_027419.1,523-541).
ctggaactggtgcaactaa

SEQ ID NO: 729361 - DNA, 19 bp, Mus musculus
  siRNA target sequence for 2810408A11Rik (NM_027419.1,558-576).
ccggaggaggctaaagtgt

SEQ ID NO: 729362 - DNA, 19 bp, Mus musculus
  siRNA target sequence for 2810408A11Rik (NM_027419.1,559-577).
cggaggaggctaaagtgta

SEQ ID NO: 729363 - DNA, 19 bp, Mus musculus
  siRNA target sequence for 2810408A11Rik (NM_027419.1,595-613).
cacactccgggacatcttt

SEQ ID NO: 729364 - DNA, 19 bp, Mus musculus
  siRNA target sequence for 2810408A11Rik (NM_027419.1,622-640).
ggcctcggagcatcctaaa

SEQ ID NO: 729365 - DNA, 19 bp, Mus musculus
  siRNA target sequence for 2810408A11Rik (NM_027419.1,623-641).
gcctcggagcatcctaaaa

SEQ ID NO: 729366 - DNA, 19 bp, Mus musculus
  siRNA target sequence for 2810408A11Rik (NM_027419.1,624-642).
cctcggagcatcctaaaaa

SEQ ID NO: 729367 - DNA, 19 bp, Mus musculus
  siRNA target sequence for 2810408A11Rik (NM_027419.1,625-643).
ctcggagcatcctaaaaaa

SEQ ID NO: 729368 - DNA, 19 bp, Mus musculus
  siRNA target sequence for 2810408A11Rik (NM_027419.1,627-645).
cggagcatcctaaaaaaca

SEQ ID NO: 729369 - DNA, 19 bp, Mus musculus
  siRNA target sequence for 2810408A11Rik (NM_027419.1,646-664).
gcagctccattttgataaa

SEQ ID NO: 729370 - DNA, 19 bp, Mus musculus
  siRNA target sequence for 2810408A11Rik (NM_027419.1,693-711).
cagcgctgggatgaaatga

SEQ ID NO: 729371 - DNA, 19 bp, Mus musculus
  siRNA target sequence for 2810408A11Rik (NM_027419.1,899-917).
ccagtacggagacaacaaa

SEQ ID NO: 729372 - DNA, 19 bp, Mus musculus
  siRNA target sequence for 2810408A11Rik (NM_027419.1,900-918).
cagtacggagacaacaaaa

SEQ ID NO: 729373 - DNA, 19 bp, Mus musculus
  siRNA target sequence for 2810408A11Rik (NM_027419.1,933-951).
gacaactttgccaagacat

SEQ ID NO: 729374 - DNA, 19 bp, Mus musculus
  siRNA target sequence for 2810408A11Rik (NM_027419.1,947-965).
gacatactccagtgatttt

SEQ ID NO: 729375 - DNA, 19 bp, Mus musculus
  siRNA target sequence for 2810408A11Rik (NM_027419.1,991-1009).
gtgaagggaagttcctaaa

SEQ ID NO: 729376 - DNA, 19 bp, Mus musculus
  siRNA target sequence for 2810408A11Rik (NM_027419.1,1061-1079).
catcagcagcagtaatcaa

SEQ ID NO: 729377 - DNA, 19 bp, Mus musculus
  siRNA target sequence for 2810408A11Rik (NM_027419.1,1138-1156).
ccacaggagtcaaaaatga

SEQ ID NO: 729378 - DNA, 19 bp, Mus musculus
  siRNA target sequence for 2810408A11Rik (NM_027419.1,1169-1187).
gactgatagccatgtctta

SEQ ID NO: 729379 - DNA, 19 bp, Mus musculus
  siRNA target sequence for 2810408A11Rik (NM_027419.1,1173-1191).
gatagccatgtcttaagca

SEQ ID NO: 729380 - DNA, 19 bp, Mus musculus
  siRNA target sequence for 2810408A11Rik (NM_027419.1,1193-1211).
caacgattctgctacctat

SEQ ID NO: 729381 - DNA, 19 bp, Mus musculus
  siRNA target sequence for 2810408A11Rik (NM_027419.1,1196-1214).
cgattctgctacctataga

SEQ ID NO: 729382 - DNA, 19 bp, Mus musculus
  siRNA target sequence for 2810408A11Rik (NM_027419.1,1197-1215).
gattctgctacctatagaa

SEQ ID NO: 729383 - DNA, 19 bp, Mus musculus
  siRNA target sequence for 2810408A11Rik (NM_027419.1,1263-1281).
ctacagcgcaaggaatact

SEQ ID NO: 729384 - DNA, 19 bp, Mus musculus
  siRNA target sequence for 2810408A11Rik (NM_027419.1,1266-1284).
cagcgcaaggaatactaca

SEQ ID NO: 729385 - DNA, 19 bp, Mus musculus
  siRNA target sequence for 2810408A11Rik (NM_027419.1,1317-1335).
cagagctcggagaggatat

SEQ ID NO: 729386 - DNA, 19 bp, Mus musculus
  siRNA target sequence for 2810417D08Rik (NM_027421.1,190-208).
cttttgcttttgaagctat

SEQ ID NO: 729387 - DNA, 19 bp, Mus musculus
  siRNA target sequence for 2810417D08Rik (NM_027421.1,225-243).
gtccgcctggcgtccttaa

SEQ ID NO: 729388 - DNA, 19 bp, Mus musculus
  siRNA target sequence for 2810417D08Rik (NM_027421.1,227-245).
ccgcctggcgtccttaagt

SEQ ID NO: 729389 - DNA, 19 bp, Mus musculus
  siRNA target sequence for 2810417D08Rik (NM_027421.1,244-262).
gtgatccggaattaagact

SEQ ID NO: 729390 - DNA, 19 bp, Mus musculus
  siRNA target sequence for 2810417D08Rik (NM_027421.1,322-340).
gggcacaggataagaaact

SEQ ID NO: 729391 - DNA, 19 bp, Mus musculus
  siRNA target sequence for 2810417D08Rik (NM_027421.1,323-341).
ggcacaggataagaaactt

SEQ ID NO: 729392 - DNA, 19 bp, Mus musculus
  siRNA target sequence for 2810417D08Rik (NM_027421.1,329-347).
ggataagaaacttatactt

SEQ ID NO: 729393 - DNA, 19 bp, Mus musculus
  siRNA target sequence for 2810417D08Rik (NM_027421.1,401-419).
ggacttccacgctctagaa

SEQ ID NO: 729394 - DNA, 19 bp, Mus musculus
  siRNA target sequence for 2810417D08Rik (NM_027421.1,440-458).
gcagcttaggcataaactt

SEQ ID NO: 729395 - DNA, 19 bp, Mus musculus
  siRNA target sequence for 2810417D08Rik (NM_027421.1,505-523).
ggctgacactagagtttga

SEQ ID NO: 729396 - DNA, 19 bp, Mus musculus
  siRNA target sequence for 2810417D08Rik (NM_027421.1,506-524).
gctgacactagagtttgaa

SEQ ID NO: 729397 - DNA, 19 bp, Mus musculus
  siRNA target sequence for 2810417D08Rik (NM_027421.1,596-614).
gtgcaatggagagttcttt

SEQ ID NO: 729398 - DNA, 19 bp, Mus musculus
  siRNA target sequence for 2810417D08Rik (NM_027421.1,789-807).
gatagttttaacgaagttt

SEQ ID NO: 729399 - DNA, 19 bp, Mus musculus
  siRNA target sequence for 2810417D08Rik (NM_027421.1,808-826).
gtaggggcctgatcaaaaa

SEQ ID NO: 729400 - DNA, 19 bp, Mus musculus
  siRNA target sequence for 2810417D08Rik (NM_027421.1,873-891).
gacgccctacgcttcctat

SEQ ID NO: 729401 - DNA, 19 bp, Mus musculus
  siRNA target sequence for 2810417D08Rik (NM_027421.1,882-900).
cgcttcctatgcagaatga

SEQ ID NO: 729402 - DNA, 19 bp, Mus musculus
  siRNA target sequence for 2810417D08Rik (NM_027421.1,884-902).
cttcctatgcagaatgaat

SEQ ID NO: 729403 - DNA, 19 bp, Mus musculus
  siRNA target sequence for 2810417D08Rik (NM_027421.1,969-987).
gctttgacattggatcata

SEQ ID NO: 729404 - DNA, 19 bp, Mus musculus
  siRNA target sequence for 2810417D08Rik (NM_027421.1,1011-1029).
ggagtgagcgacttggttt

SEQ ID NO: 729405 - DNA, 19 bp, Mus musculus
  siRNA target sequence for 2810417D08Rik (NM_027421.1,1016-1034).
gagcgacttggtttgcttt

SEQ ID NO: 729406 - DNA, 19 bp, Mus musculus
  siRNA target sequence for 2810417D08Rik (NM_027421.1,1019-1037).
cgacttggtttgctttgtt

SEQ ID NO: 729407 - DNA, 19 bp, Mus musculus
  siRNA target sequence for 2810417D08Rik (NM_027421.1,1319-1337).
gggaattgctggactcaaa

SEQ ID NO: 729408 - DNA, 19 bp, Mus musculus
  siRNA target sequence for 2810417D08Rik (NM_027421.1,1521-1539).
gcgtactttgagagtacat

SEQ ID NO: 729409 - DNA, 19 bp, Mus musculus
  siRNA target sequence for 2810417D08Rik (NM_027421.1,1572-1590).
ctattggtggccatgtatt

SEQ ID NO: 729410 - DNA, 19 bp, Mus musculus
  siRNA target sequence for 2810417D08Rik (NM_027421.1,1601-1619).
ccagcttagtgctatcatt

SEQ ID NO: 729411 - DNA, 19 bp, Mus musculus
  siRNA target sequence for 2810417D08Rik (NM_027421.1,1605-1623).
cttagtgctatcattgact

SEQ ID NO: 729412 - DNA, 19 bp, Mus musculus
  siRNA target sequence for 2810417D08Rik (NM_027421.1,1779-1797).
gggtttttgcccattcatt

SEQ ID NO: 729413 - DNA, 19 bp, Mus musculus
  siRNA target sequence for 2810417D08Rik (NM_027421.1,1781-1799).
gtttttgcccattcattgt

SEQ ID NO: 729414 - DNA, 19 bp, Mus musculus
  siRNA target sequence for 2810417D08Rik (NM_027421.1,1790-1808).
cattcattgtatttaccaa

SEQ ID NO: 729415 - DNA, 19 bp, Mus musculus
  siRNA target sequence for 2810417D08Rik (NM_027421.1,1812-1830).
ctcaggagtcgatcgttta

SEQ ID NO: 729416 - DNA, 19 bp, Mus musculus
  siRNA target sequence for 2810417D08Rik (NM_027421.1,1816-1834).
ggagtcgatcgtttaccaa

SEQ ID NO: 729417 - DNA, 19 bp, Mus musculus
  siRNA target sequence for 2810417D08Rik (NM_027421.1,1831-1849).
ccaagcacaaagtgtcaat

SEQ ID NO: 729418 - DNA, 19 bp, Mus musculus
  siRNA target sequence for 2810417D08Rik (NM_027421.1,1943-1961).
cactcctgcgtctaagtct

SEQ ID NO: 729419 - DNA, 19 bp, Mus musculus
  siRNA target sequence for 2810417D08Rik (NM_027421.1,2075-2093).
gcttctggtgctctactat

SEQ ID NO: 729420 - DNA, 19 bp, Mus musculus
  siRNA target sequence for 2810417D08Rik (NM_027421.1,2076-2094).
cttctggtgctctactata

SEQ ID NO: 729421 - DNA, 19 bp, Mus musculus
  siRNA target sequence for 2810417D08Rik (NM_027421.1,2150-2168).
gaggaaacccaaatcatat

SEQ ID NO: 729422 - DNA, 19 bp, Mus musculus
  siRNA target sequence for 2810417D08Rik (NM_027421.1,2153-2171).
gaaacccaaatcatattct

SEQ ID NO: 729423 - DNA, 19 bp, Mus musculus
  siRNA target sequence for 2810417D08Rik (NM_027421.1,2245-2263).
ggctgcattcagctttact

SEQ ID NO: 729424 - DNA, 19 bp, Mus musculus
  siRNA target sequence for 2810417D08Rik (NM_027421.1,2355-2373).
cgaatgctcctgacaagta

SEQ ID NO: 729425 - DNA, 19 bp, Mus musculus
  siRNA target sequence for 2810417D08Rik (NM_027421.1,2356-2374).
gaatgctcctgacaagtaa

SEQ ID NO: 729426 - DNA, 19 bp, Mus musculus
  siRNA target sequence for 2810417D08Rik (NM_027421.1,2399-2417).
gctgcaggaagcattttca

SEQ ID NO: 729427 - DNA, 19 bp, Mus musculus
  siRNA target sequence for 2810417D08Rik (NM_027421.1,2437-2455).
cacaagtgatgcagattat

SEQ ID NO: 729428 - DNA, 19 bp, Mus musculus
  siRNA target sequence for 2810417D08Rik (NM_027421.1,2456-2474).
ggaacacttgactctactt

SEQ ID NO: 729429 - DNA, 19 bp, Mus musculus
  siRNA target sequence for 2810417D08Rik (NM_027421.1,2457-2475).
gaacacttgactctacttt

SEQ ID NO: 729430 - DNA, 19 bp, Mus musculus
  siRNA target sequence for 2810417D08Rik (NM_027421.1,2478-2496).
gccagtgaacttattccat

SEQ ID NO: 729431 - DNA, 19 bp, Mus musculus
  siRNA target sequence for 2810417D08Rik (NM_027421.1,2502-2520).
gaagtactaacgtccaata

SEQ ID NO: 729432 - DNA, 19 bp, Mus musculus
  siRNA target sequence for 2810417D08Rik (NM_027421.1,2505-2523).
gtactaacgtccaatatga

SEQ ID NO: 729433 - DNA, 19 bp, Mus musculus
  siRNA target sequence for 2810417D08Rik (NM_027421.1,2547-2565).
ccacggagaattcttcaaa

SEQ ID NO: 729434 - DNA, 19 bp, Mus musculus
  siRNA target sequence for 2810417D08Rik (NM_027421.1,2551-2569).
ggagaattcttcaaactgt

SEQ ID NO: 729435 - DNA, 19 bp, Mus musculus
  siRNA target sequence for 2810417D08Rik (NM_027421.1,2581-2599).
ggatggttcttaatactgt

SEQ ID NO: 729436 - DNA, 19 bp, Mus musculus
  siRNA target sequence for 2810417D08Rik (NM_027421.1,2615-2633).
gtgggtaatgacggttaat

SEQ ID NO: 729437 - DNA, 19 bp, Mus musculus
  siRNA target sequence for 2810417D08Rik (NM_027421.1,2618-2636).
ggtaatgacggttaatgca

SEQ ID NO: 729438 - DNA, 19 bp, Mus musculus
  siRNA target sequence for 2810417D08Rik (NM_027421.1,2634-2652).
gcactccaaccttccataa

SEQ ID NO: 729439 - DNA, 19 bp, Mus musculus
  siRNA target sequence for 2810417D08Rik (NM_027421.1,2635-2653).
cactccaaccttccataaa

SEQ ID NO: 729440 - DNA, 19 bp, Mus musculus
  siRNA target sequence for 2810417D08Rik (NM_027421.1,2637-2655).
ctccaaccttccataaagt

SEQ ID NO: 729441 - DNA, 19 bp, Mus musculus
  siRNA target sequence for 2810417D08Rik (NM_027421.1,2640-2658).
caaccttccataaagttta

SEQ ID NO: 729442 - DNA, 19 bp, Mus musculus
  siRNA target sequence for 2810417D08Rik (NM_027421.1,2681-2699).
gaatgatttgatgatagat

SEQ ID NO: 729443 - DNA, 19 bp, Mus musculus
  siRNA target sequence for 2810417D08Rik (NM_027421.1,2690-2708).
gatgatagatcctctcatt

SEQ ID NO: 729444 - DNA, 19 bp, Mus musculus
  siRNA target sequence for 2810417D08Rik (NM_027421.1,2745-2763).
ccactaatggatgttactt

SEQ ID NO: 729445 - DNA, 19 bp, Mus musculus
  siRNA target sequence for 2810417D08Rik (NM_027421.1,2746-2764).
cactaatggatgttacttt

SEQ ID NO: 729446 - DNA, 19 bp, Mus musculus
  siRNA target sequence for 2810417D08Rik (NM_027421.1,2780-2798).
gtacctccttgcctctaaa

SEQ ID NO: 729447 - DNA, 19 bp, Mus musculus
  siRNA target sequence for 2810417D08Rik (NM_027421.1,2784-2802).
ctccttgcctctaaagctt

SEQ ID NO: 729448 - DNA, 19 bp, Mus musculus
  siRNA target sequence for 2810417D08Rik (NM_027421.1,2790-2808).
gcctctaaagcttacctta

SEQ ID NO: 729449 - DNA, 19 bp, Mus musculus
  siRNA target sequence for 2810417D08Rik (NM_027421.1,2823-2841).
gaaacggcagagcaagata

SEQ ID NO: 729450 - DNA, 19 bp, Mus musculus
  siRNA target sequence for 2810417D08Rik (NM_027421.1,2845-2863).
cttccccgaataatacagt

SEQ ID NO: 729451 - DNA, 19 bp, Mus musculus
  siRNA target sequence for 2810417D08Rik (NM_027421.1,2949-2967).
gtccagattctcttagaaa

SEQ ID NO: 729452 - DNA, 19 bp, Mus musculus
  siRNA target sequence for 2810417D08Rik (NM_027421.1,2993-3011).
ggcaaaaggtgccaattca

SEQ ID NO: 729453 - DNA, 19 bp, Mus musculus
  siRNA target sequence for 2810417D08Rik (NM_027421.1,3127-3145).
gttgcctgttacaccaaat

SEQ ID NO: 729454 - DNA, 19 bp, Mus musculus
  siRNA target sequence for 2810417D08Rik (NM_027421.1,3130-3148).
gcctgttacaccaaatgta

SEQ ID NO: 729455 - DNA, 19 bp, Mus musculus
  siRNA target sequence for 2810417D08Rik (NM_027421.1,3149-3167).
cattgcagatcccaacatt

SEQ ID NO: 729456 - DNA, 19 bp, Mus musculus
  siRNA target sequence for 2810417D08Rik (NM_027421.1,3154-3172).
cagatcccaacattgctaa

SEQ ID NO: 729457 - DNA, 19 bp, Mus musculus
  siRNA target sequence for 2810417D08Rik (NM_027421.1,3180-3198).
cactttcagggttatccat

SEQ ID NO: 729458 - DNA, 19 bp, Mus musculus
  siRNA target sequence for 2810417D08Rik (NM_027421.1,3188-3206).
gggttatccatgtgaactt

SEQ ID NO: 729459 - DNA, 19 bp, Mus musculus
  siRNA target sequence for 2810417D08Rik (NM_027421.1,3190-3208).
gttatccatgtgaacttct

SEQ ID NO: 729460 - DNA, 19 bp, Mus musculus
  siRNA target sequence for 2810417D08Rik (NM_027421.1,3273-3291).
gcccagccagaacttgaaa

SEQ ID NO: 729461 - DNA, 19 bp, Mus musculus
  siRNA target sequence for 2810417D08Rik (NM_027421.1,3312-3330).
ctgctttctcacttgtgta

SEQ ID NO: 729462 - DNA, 19 bp, Mus musculus
  siRNA target sequence for 2810417D08Rik (NM_027421.1,3335-3353).
gtatgcattaccaaagtca

SEQ ID NO: 729463 - DNA, 19 bp, Mus musculus
  siRNA target sequence for 2810417D08Rik (NM_027421.1,3364-3382).
ctcgcttagctgtcaatgt

SEQ ID NO: 729464 - DNA, 19 bp, Mus musculus
  siRNA target sequence for 2810417D08Rik (NM_027421.1,3366-3384).
cgcttagctgtcaatgtta

SEQ ID NO: 729465 - DNA, 19 bp, Mus musculus
  siRNA target sequence for 2810417D08Rik (NM_027421.1,3386-3404).
ggggactttgctaacagtt

SEQ ID NO: 729466 - DNA, 19 bp, Mus musculus
  siRNA target sequence for 2810417D08Rik (NM_027421.1,3414-3432).
gctaagcggtactcgtttt

SEQ ID NO: 729467 - DNA, 19 bp, Mus musculus
  siRNA target sequence for 2810417D08Rik (NM_027421.1,3415-3433).
ctaagcggtactcgttttt

SEQ ID NO: 729468 - DNA, 19 bp, Mus musculus
  siRNA target sequence for 2810417D08Rik (NM_027421.1,3458-3476).
ctccttttgtcgagcattt

SEQ ID NO: 729469 - DNA, 19 bp, Mus musculus
  siRNA target sequence for 2810417D08Rik (NM_027421.1,3480-3498).
ccactgtatgaggatatta

SEQ ID NO: 729470 - DNA, 19 bp, Mus musculus
  siRNA target sequence for 2810417D08Rik (NM_027421.1,3481-3499).
cactgtatgaggatattat

SEQ ID NO: 729471 - DNA, 19 bp, Mus musculus
  siRNA target sequence for 2810417D08Rik (NM_027421.1,3483-3501).
ctgtatgaggatattatgt

SEQ ID NO: 729472 - DNA, 19 bp, Mus musculus
  siRNA target sequence for 2810417D08Rik (NM_027421.1,3485-3503).
gtatgaggatattatgtct

SEQ ID NO: 729473 - DNA, 19 bp, Mus musculus
  siRNA target sequence for 2810417D08Rik (NM_027421.1,3500-3518).
gtctttgctaattcaaata

SEQ ID NO: 729474 - DNA, 19 bp, Mus musculus
  siRNA target sequence for 2810417D08Rik (NM_027421.1,3553-3571).
caagagacattgatccaat

SEQ ID NO: 729475 - DNA, 19 bp, Mus musculus
  siRNA target sequence for 2810417D08Rik (NM_027421.1,3558-3576).
gacattgatccaatcatta

SEQ ID NO: 729476 - DNA, 19 bp, Mus musculus
  siRNA target sequence for 2810417D08Rik (NM_027421.1,3560-3578).
cattgatccaatcattaca

SEQ ID NO: 729477 - DNA, 19 bp, Mus musculus
  siRNA target sequence for 2810417D08Rik (NM_027421.1,3625-3643).
gtaaggatccatcttacaa

SEQ ID NO: 729478 - DNA, 19 bp, Mus musculus
  siRNA target sequence for 2810417D08Rik (NM_027421.1,3681-3699).
gtccagctctgtcattgta

SEQ ID NO: 729479 - DNA, 19 bp, Mus musculus
  siRNA target sequence for 2810417D08Rik (NM_027421.1,3697-3715).
gtattgaaagcacaataat

SEQ ID NO: 729480 - DNA, 19 bp, Mus musculus
  siRNA target sequence for 2700087H15Rik (NM_027422.1,976-994).
caggaaaagccgcacttta

SEQ ID NO: 729481 - DNA, 19 bp, Mus musculus
  siRNA target sequence for 2700087H15Rik (NM_027422.1,978-996).
ggaaaagccgcactttata

SEQ ID NO: 729482 - DNA, 19 bp, Mus musculus
  siRNA target sequence for 2700087H15Rik (NM_027422.1,1207-1225).
ctcggcctccctcatttta

SEQ ID NO: 729483 - DNA, 19 bp, Mus musculus
  siRNA target sequence for 2700087H15Rik (NM_027422.1,1209-1227).
cggcctccctcattttatt

SEQ ID NO: 729484 - DNA, 19 bp, Mus musculus
  siRNA target sequence for 2610312E17Rik (NM_027432.3,160-178).
catgcatggaacgtcaatt

SEQ ID NO: 729485 - DNA, 19 bp, Mus musculus
  siRNA target sequence for 2610312E17Rik (NM_027432.3,163-181).
gcatggaacgtcaattgga

SEQ ID NO: 729486 - DNA, 19 bp, Mus musculus
  siRNA target sequence for 2610312E17Rik (NM_027432.3,349-367).
gggtgggggacaaaggtat

SEQ ID NO: 729487 - DNA, 19 bp, Mus musculus
  siRNA target sequence for 2610312E17Rik (NM_027432.3,368-386).
cctagtggcttctgattca

SEQ ID NO: 729488 - DNA, 19 bp, Mus musculus
  siRNA target sequence for 2610312E17Rik (NM_027432.3,552-570).
cagcaggtatcactgaatt

SEQ ID NO: 729489 - DNA, 19 bp, Mus musculus
  siRNA target sequence for 2610312E17Rik (NM_027432.3,554-572).
gcaggtatcactgaattca

SEQ ID NO: 729490 - DNA, 19 bp, Mus musculus
  siRNA target sequence for 2610312E17Rik (NM_027432.3,555-573).
caggtatcactgaattcat

SEQ ID NO: 729491 - DNA, 19 bp, Mus musculus
  siRNA target sequence for 2610312E17Rik (NM_027432.3,620-638).
caaagactctgtgtttctt

SEQ ID NO: 729492 - DNA, 19 bp, Mus musculus
  siRNA target sequence for 2610312E17Rik (NM_027432.3,755-773).
gcagagtgaagtctttgtt

SEQ ID NO: 729493 - DNA, 19 bp, Mus musculus
  siRNA target sequence for 2610312E17Rik (NM_027432.3,756-774).
cagagtgaagtctttgttt

SEQ ID NO: 729494 - DNA, 19 bp, Mus musculus
  siRNA target sequence for 2610312E17Rik (NM_027432.3,856-874).
gtgtcactagactggtatt

SEQ ID NO: 729495 - DNA, 19 bp, Mus musculus
  siRNA target sequence for 2610312E17Rik (NM_027432.3,969-987).
gcccacagagactttgtga

SEQ ID NO: 729496 - DNA, 19 bp, Mus musculus
  siRNA target sequence for 2610312E17Rik (NM_027432.3,997-1015).
cgtggtctccactcaatca

SEQ ID NO: 729497 - DNA, 19 bp, Mus musculus
  siRNA target sequence for 2610304G08Rik (NM_027434.1,242-260).
gctccgcaaagccaaatca

SEQ ID NO: 729498 - DNA, 19 bp, Mus musculus
  siRNA target sequence for 2610304G08Rik (NM_027434.1,243-261).
ctccgcaaagccaaatcaa

SEQ ID NO: 729499 - DNA, 19 bp, Mus musculus
  siRNA target sequence for 2610304G08Rik (NM_027434.1,246-264).
cgcaaagccaaatcaaata

SEQ ID NO: 729500 - DNA, 19 bp, Mus musculus
  siRNA target sequence for 2610304G08Rik (NM_027434.1,248-266).
caaagccaaatcaaataga

SEQ ID NO: 729501 - DNA, 19 bp, Mus musculus
  siRNA target sequence for 2610304G08Rik (NM_027434.1,325-343).
ctgagttcacaagagaatt

SEQ ID NO: 729502 - DNA, 19 bp, Mus musculus
  siRNA target sequence for 2610304G08Rik (NM_027434.1,414-432).
gaaagattgctgaacatct

SEQ ID NO: 729503 - DNA, 19 bp, Mus musculus
  siRNA target sequence for 2610304G08Rik (NM_027434.1,532-550).
ctctaaaacgaacttttca

SEQ ID NO: 729504 - DNA, 19 bp, Mus musculus
  siRNA target sequence for 2610304G08Rik (NM_027434.1,541-559).
gaacttttcagcagataca

SEQ ID NO: 729505 - DNA, 19 bp, Mus musculus
  siRNA target sequence for 2610304G08Rik (NM_027434.1,626-644).
gactgaggagttaatcaaa

SEQ ID NO: 729506 - DNA, 19 bp, Mus musculus
  siRNA target sequence for 2610304G08Rik (NM_027434.1,630-648).
gaggagttaatcaaagctt

SEQ ID NO: 729507 - DNA, 19 bp, Mus musculus
  siRNA target sequence for 2610304G08Rik (NM_027434.1,682-700).
ctactgtccgacagaagat

SEQ ID NO: 729508 - DNA, 19 bp, Mus musculus
  siRNA target sequence for 2610304G08Rik (NM_027434.1,728-746).
cgtgtcgctgctagagaaa

SEQ ID NO: 729509 - DNA, 19 bp, Mus musculus
  siRNA target sequence for 2610304G08Rik (NM_027434.1,729-747).
gtgtcgctgctagagaaaa

SEQ ID NO: 729510 - DNA, 19 bp, Mus musculus
  siRNA target sequence for 2610304G08Rik (NM_027434.1,731-749).
gtcgctgctagagaaaatt

SEQ ID NO: 729511 - DNA, 19 bp, Mus musculus
  siRNA target sequence for 2610304G08Rik (NM_027434.1,801-819).
ctgttactagcggaatata

SEQ ID NO: 729512 - DNA, 19 bp, Mus musculus
  siRNA target sequence for Atp6ap2 (NM_027439.2,79-97).
gggtgctttagggaatgaa

SEQ ID NO: 729513 - DNA, 19 bp, Mus musculus
  siRNA target sequence for Atp6ap2 (NM_027439.2,80-98).
ggtgctttagggaatgaat

SEQ ID NO: 729514 - DNA, 19 bp, Mus musculus
  siRNA target sequence for Atp6ap2 (NM_027439.2,114-132).
cgccagggtctgttgtttt

SEQ ID NO: 729515 - DNA, 19 bp, Mus musculus
  siRNA target sequence for Atp6ap2 (NM_027439.2,150-168).
ctataccaggagatcgaat

SEQ ID NO: 729516 - DNA, 19 bp, Mus musculus
  siRNA target sequence for Atp6ap2 (NM_027439.2,229-247).
gcttgccgtgggtaaccta

SEQ ID NO: 729517 - DNA, 19 bp, Mus musculus
  siRNA target sequence for Atp6ap2 (NM_027439.2,230-248).
cttgccgtgggtaacctat

SEQ ID NO: 729518 - DNA, 19 bp, Mus musculus
  siRNA target sequence for Atp6ap2 (NM_027439.2,234-252).
ccgtgggtaacctattcca

SEQ ID NO: 729519 - DNA, 19 bp, Mus musculus
  siRNA target sequence for Atp6ap2 (NM_027439.2,254-272).
cggccacgggctaccatta

SEQ ID NO: 729520 - DNA, 19 bp, Mus musculus
  siRNA target sequence for Atp6ap2 (NM_027439.2,258-276).
cacgggctaccattatggt

SEQ ID NO: 729521 - DNA, 19 bp, Mus musculus
  siRNA target sequence for Atp6ap2 (NM_027439.2,280-298).
ggtgaagggggtggataaa

SEQ ID NO: 729522 - DNA, 19 bp, Mus musculus
  siRNA target sequence for Atp6ap2 (NM_027439.2,337-355).
ggagaatgcagttcctttt

SEQ ID NO: 729523 - DNA, 19 bp, Mus musculus
  siRNA target sequence for Atp6ap2 (NM_027439.2,340-358).
gaatgcagttccttttagt

SEQ ID NO: 729524 - DNA, 19 bp, Mus musculus
  siRNA target sequence for Atp6ap2 (NM_027439.2,813-831).
ggaacgcagtggtagagtt

SEQ ID NO: 729525 - DNA, 19 bp, Mus musculus
  siRNA target sequence for Atp6ap2 (NM_027439.2,814-832).
gaacgcagtggtagagtta

SEQ ID NO: 729526 - DNA, 19 bp, Mus musculus
  siRNA target sequence for Atp6ap2 (NM_027439.2,827-845).
gagttagtgactgtcaaat

SEQ ID NO: 729527 - DNA, 19 bp, Mus musculus
  siRNA target sequence for Atp6ap2 (NM_027439.2,829-847).
gttagtgactgtcaaatca

SEQ ID NO: 729528 - DNA, 19 bp, Mus musculus
  siRNA target sequence for Atp6ap2 (NM_027439.2,927-945).
catataagtataatttgga

SEQ ID NO: 729529 - DNA, 19 bp, Mus musculus
  siRNA target sequence for Atp6ap2 (NM_027439.2,1001-1019).
gtgataatcacctcttaca

SEQ ID NO: 729530 - DNA, 19 bp, Mus musculus
  siRNA target sequence for Atp6ap2 (NM_027439.2,1011-1029).
cctcttacaacatttggaa

SEQ ID NO: 729531 - DNA, 19 bp, Mus musculus
  siRNA target sequence for Atp6ap2 (NM_027439.2,1046-1064).
gatagcatcatctatagga

SEQ ID NO: 729532 - DNA, 19 bp, Mus musculus
  siRNA target sequence for Atp6ap2 (NM_027439.2,1068-1086).
caaatcagaagattcgaat

SEQ ID NO: 729533 - DNA, 19 bp, Mus musculus
  siRNA target sequence for Atp6ap2 (NM_027439.2,1073-1091).
cagaagattcgaatagatt

SEQ ID NO: 729534 - DNA, 19 bp, Mus musculus
  siRNA target sequence for 5730437N04Rik (NM_027457.2,85-103).
cggacgatcggttgtttct

SEQ ID NO: 729535 - DNA, 19 bp, Mus musculus
  siRNA target sequence for 5730437N04Rik (NM_027457.2,143-161).
gggaatgctagctggattt

SEQ ID NO: 729536 - DNA, 19 bp, Mus musculus
  siRNA target sequence for 5730437N04Rik (NM_027457.2,145-163).
gaatgctagctggatttgt

SEQ ID NO: 729537 - DNA, 19 bp, Mus musculus
  siRNA target sequence for 5730437N04Rik (NM_027457.2,153-171).
gctggatttgttacaacat

SEQ ID NO: 729538 - DNA, 19 bp, Mus musculus
  siRNA target sequence for 5730437N04Rik (NM_027457.2,193-211).
gccctgagtggttcaataa

SEQ ID NO: 729539 - DNA, 19 bp, Mus musculus
  siRNA target sequence for 5730469M10Rik (NM_027464.1,527-545).
cgattgggggtgtggtata

SEQ ID NO: 729540 - DNA, 19 bp, Mus musculus
  siRNA target sequence for 5730469M10Rik (NM_027464.1,528-546).
gattgggggtgtggtataa

SEQ ID NO: 729541 - DNA, 19 bp, Mus musculus
  siRNA target sequence for 5730461K03Rik (NM_027475.1,397-415).
gattcttcagaagtacatt

SEQ ID NO: 729542 - DNA, 19 bp, Mus musculus
  siRNA target sequence for 5730461K03Rik (NM_027475.1,453-471).
cttatatctggcagaatca

SEQ ID NO: 729543 - DNA, 19 bp, Mus musculus
  siRNA target sequence for 5730461K03Rik (NM_027475.1,470-488).
cagcctttcaatctcaaat

SEQ ID NO: 729544 - DNA, 19 bp, Mus musculus
  siRNA target sequence for 5730461K03Rik (NM_027475.1,504-522).
gaggtgttcctgctcatat

SEQ ID NO: 729545 - DNA, 19 bp, Mus musculus
  siRNA target sequence for 5730461K03Rik (NM_027475.1,507-525).
gtgttcctgctcatatgta

SEQ ID NO: 729546 - DNA, 19 bp, Mus musculus
  siRNA target sequence for 5730461K03Rik (NM_027475.1,518-536).
catatgtacggcatgacaa

SEQ ID NO: 729547 - DNA, 19 bp, Mus musculus
  siRNA target sequence for 5730461K03Rik (NM_027475.1,523-541).
gtacggcatgacaaagttt

SEQ ID NO: 729548 - DNA, 19 bp, Mus musculus
  siRNA target sequence for 5730461K03Rik (NM_027475.1,550-568).
cattgaggatgaatggttt

SEQ ID NO: 729549 - DNA, 19 bp, Mus musculus
  siRNA target sequence for 5730461K03Rik (NM_027475.1,556-574).
ggatgaatggtttattgtt

SEQ ID NO: 729550 - DNA, 19 bp, Mus musculus
  siRNA target sequence for 5730461K03Rik (NM_027475.1,564-582).
ggtttattgtttatgtaat

SEQ ID NO: 729551 - DNA, 19 bp, Mus musculus
  siRNA target sequence for 5730461K03Rik (NM_027475.1,586-604).
gcagattacaaaggaattt

SEQ ID NO: 729552 - DNA, 19 bp, Mus musculus
  siRNA target sequence for 5730461K03Rik (NM_027475.1,589-607).
gattacaaaggaatttcca

SEQ ID NO: 729553 - DNA, 19 bp, Mus musculus
  siRNA target sequence for 5730461K03Rik (NM_027475.1,616-634).
ggccagggttgaagacaat

SEQ ID NO: 729554 - DNA, 19 bp, Mus musculus
  siRNA target sequence for 5730461K03Rik (NM_027475.1,635-653).
gatggtgagttcctgttaa

SEQ ID NO: 729555 - DNA, 19 bp, Mus musculus
  siRNA target sequence for 5730461K03Rik (NM_027475.1,682-700).
gttggaccctgataacagt

SEQ ID NO: 729556 - DNA, 19 bp, Mus musculus
  siRNA target sequence for 5730461K03Rik (NM_027475.1,699-717).
gtgccaacagggtgttttt

SEQ ID NO: 729557 - DNA, 19 bp, Mus musculus
  siRNA target sequence for 5730461K03Rik (NM_027475.1,702-720).
ccaacagggtgttttttca

SEQ ID NO: 729558 - DNA, 19 bp, Mus musculus
  siRNA target sequence for 5730461K03Rik (NM_027475.1,722-740).
catggggagctgtgcatta

SEQ ID NO: 729559 - DNA, 19 bp, Mus musculus
  siRNA target sequence for 5730461K03Rik (NM_027475.1,727-745).
ggagctgtgcattattcct

SEQ ID NO: 729560 - DNA, 19 bp, Mus musculus
  siRNA target sequence for 5730461K03Rik (NM_027475.1,746-764).
gtgccgaggaaatctgaaa

SEQ ID NO: 729561 - DNA, 19 bp, Mus musculus
  siRNA target sequence for 5730461K03Rik (NM_027475.1,750-768).
cgaggaaatctgaaaggat

SEQ ID NO: 729562 - DNA, 19 bp, Mus musculus
  siRNA target sequence for 5730461K03Rik (NM_027475.1,1029-1047).
gagcctgtcgtgtcttcaa

SEQ ID NO: 729563 - DNA, 19 bp, Mus musculus
  siRNA target sequence for 5730461K03Rik (NM_027475.1,1031-1049).
gcctgtcgtgtcttcaaga

SEQ ID NO: 729564 - DNA, 19 bp, Mus musculus
  siRNA target sequence for 5730461K03Rik (NM_027475.1,1037-1055).
cgtgtcttcaagacatttt

SEQ ID NO: 729565 - DNA, 19 bp, Mus musculus
  siRNA target sequence for 5730461K03Rik (NM_027475.1,1081-1099).
ggtcactttcacgaaatgt

SEQ ID NO: 729566 - DNA, 19 bp, Mus musculus
  siRNA target sequence for 5730461K03Rik (NM_027475.1,1176-1194).
cccagtaccgagcttatga

SEQ ID NO: 729567 - DNA, 19 bp, Mus musculus
  siRNA target sequence for 5730461K03Rik (NM_027475.1,1177-1195).
ccagtaccgagcttatgaa

SEQ ID NO: 729568 - DNA, 19 bp, Mus musculus
  siRNA target sequence for 5730461K03Rik (NM_027475.1,1204-1222).
gaagttggctcatggattt

SEQ ID NO: 729569 - DNA, 19 bp, Mus musculus
  siRNA target sequence for 5730461K03Rik (NM_027475.1,1211-1229).
gctcatggatttgagattt

SEQ ID NO: 729570 - DNA, 19 bp, Mus musculus
  siRNA target sequence for 5730461K03Rik (NM_027475.1,1236-1254).
ccaaatgtagcccacattt

SEQ ID NO: 729571 - DNA, 19 bp, Mus musculus
  siRNA target sequence for 5730461K03Rik (NM_027475.1,1237-1255).
caaatgtagcccacatttt

SEQ ID NO: 729572 - DNA, 19 bp, Mus musculus
  siRNA target sequence for 5730461K03Rik (NM_027475.1,1242-1260).
gtagcccacatttttctga

SEQ ID NO: 729573 - DNA, 19 bp, Mus musculus
  siRNA target sequence for 5730461K03Rik (NM_027475.1,1442-1460).
ccaggcgaagagatcctaa

SEQ ID NO: 729574 - DNA, 19 bp, Mus musculus
  siRNA target sequence for 5730461K03Rik (NM_027475.1,1630-1648).
gctgcagaactatgatgta

SEQ ID NO: 729575 - DNA, 19 bp, Mus musculus
  siRNA target sequence for 5730461K03Rik (NM_027475.1,1980-1998).
ccacgcgggagcgattgaa

SEQ ID NO: 729576 - DNA, 19 bp, Mus musculus
  siRNA target sequence for 5730461K03Rik (NM_027475.1,1981-1999).
cacgcgggagcgattgaat

SEQ ID NO: 729577 - DNA, 19 bp, Mus musculus
  siRNA target sequence for 5730461K03Rik (NM_027475.1,1983-2001).
cgcgggagcgattgaataa

SEQ ID NO: 729578 - DNA, 19 bp, Mus musculus
  siRNA target sequence for 5730461K03Rik (NM_027475.1,2017-2035).
cactgcaaatgacaattca

SEQ ID NO: 729579 - DNA, 19 bp, Mus musculus
  siRNA target sequence for 5730461K03Rik (NM_027475.1,2029-2047).
caattcagatgaagaagat

SEQ ID NO: 729580 - DNA, 19 bp, Mus musculus
  siRNA target sequence for 5730461K03Rik (NM_027475.1,2087-2105).
gacctgaacctgatttcaa

SEQ ID NO: 729581 - DNA, 19 bp, Mus musculus
  siRNA target sequence for 5730461K03Rik (NM_027475.1,2089-2107).
cctgaacctgatttcaaat

SEQ ID NO: 729582 - DNA, 19 bp, Mus musculus
  siRNA target sequence for 5730461K03Rik (NM_027475.1,2144-2162).
ggacctgcttccaatctgt

SEQ ID NO: 729583 - DNA, 19 bp, Mus musculus
  siRNA target sequence for 5730461K03Rik (NM_027475.1,2145-2163).
gacctgcttccaatctgtt

SEQ ID NO: 729584 - DNA, 19 bp, Mus musculus
  siRNA target sequence for 5730461K03Rik (NM_027475.1,2148-2166).
ctgcttccaatctgttaca

SEQ ID NO: 729585 - DNA, 19 bp, Mus musculus
  siRNA target sequence for 5730461K03Rik (NM_027475.1,2150-2168).
gcttccaatctgttacaca

SEQ ID NO: 729586 - DNA, 19 bp, Mus musculus
  siRNA target sequence for 5730461K03Rik (NM_027475.1,2187-2205).
ccgacaacgctgatcacaa

SEQ ID NO: 729587 - DNA, 19 bp, Mus musculus
  siRNA target sequence for 5730496N17Rik (NM_027476.1,432-450).
gctgtgtgggcttccataa

SEQ ID NO: 729588 - DNA, 19 bp, Mus musculus
  siRNA target sequence for 5730496N17Rik (NM_027476.1,433-451).
ctgtgtgggcttccataat

SEQ ID NO: 729589 - DNA, 19 bp, Mus musculus
  siRNA target sequence for 5730496N17Rik (NM_027476.1,435-453).
gtgtgggcttccataatta

SEQ ID NO: 729590 - DNA, 19 bp, Mus musculus
  siRNA target sequence for 5730496N17Rik (NM_027476.1,596-614).
ctactcacaggcaaagtgt

SEQ ID NO: 729591 - DNA, 19 bp, Mus musculus
  siRNA target sequence for 5730496N17Rik (NM_027476.1,845-863).
cctggagatgggatctctt

SEQ ID NO: 729592 - DNA, 19 bp, Mus musculus
  siRNA target sequence for D10Bur2e (NM_027480.1,304-322).
cgtccccctggtcttgtat

SEQ ID NO: 729593 - DNA, 19 bp, Mus musculus
  siRNA target sequence for D10Bur2e (NM_027480.1,307-325).
ccccctggtcttgtatgaa

SEQ ID NO: 729594 - DNA, 19 bp, Mus musculus
  siRNA target sequence for D10Bur2e (NM_027480.1,308-326).
cccctggtcttgtatgaat

SEQ ID NO: 729595 - DNA, 19 bp, Mus musculus
  siRNA target sequence for D10Bur2e (NM_027480.1,313-331).
ggtcttgtatgaatcctta

SEQ ID NO: 729596 - DNA, 19 bp, Mus musculus
  siRNA target sequence for D10Bur2e (NM_027480.1,349-367).
gcttcggaggcaatacaca

SEQ ID NO: 729597 - DNA, 19 bp, Mus musculus
  siRNA target sequence for D10Bur2e (NM_027480.1,451-469).
caaggataagggaatcact

SEQ ID NO: 729598 - DNA, 19 bp, Mus musculus
  siRNA target sequence for D10Bur2e (NM_027480.1,734-752).
ccagtggctgccgaagata

SEQ ID NO: 729599 - DNA, 19 bp, Mus musculus
  siRNA target sequence for D10Bur2e (NM_027480.1,783-801).
ctgatgaggtggatgtgtt

SEQ ID NO: 729600 - DNA, 19 bp, Mus musculus
  siRNA target sequence for D10Bur2e (NM_027480.1,814-832).
gctcacaggtacagtgatt

SEQ ID NO: 729601 - DNA, 19 bp, Mus musculus
  siRNA target sequence for D10Bur2e (NM_027480.1,815-833).
ctcacaggtacagtgatta

SEQ ID NO: 729602 - DNA, 19 bp, Mus musculus
  siRNA target sequence for D10Bur2e (NM_027480.1,817-835).
cacaggtacagtgattaga

SEQ ID NO: 729603 - DNA, 19 bp, Mus musculus
  siRNA target sequence for D10Bur2e (NM_027480.1,966-984).
ccacagcgatagaagctat

SEQ ID NO: 729604 - DNA, 19 bp, Mus musculus
  siRNA target sequence for D10Bur2e (NM_027480.1,967-985).
cacagcgatagaagctata

SEQ ID NO: 729605 - DNA, 19 bp, Mus musculus
  siRNA target sequence for D10Bur2e (NM_027480.1,1770-1788).
gcgctgtggtggctttata

SEQ ID NO: 729606 - DNA, 19 bp, Mus musculus
  siRNA target sequence for 5730508B09Rik (NM_027482.1,249-267).
cgagggcgagcaggatatt

SEQ ID NO: 729607 - DNA, 19 bp, Mus musculus
  siRNA target sequence for 5730508B09Rik (NM_027482.1,255-273).
cgagcaggatattgaagaa

SEQ ID NO: 729608 - DNA, 19 bp, Mus musculus
  siRNA target sequence for 5730508B09Rik (NM_027482.1,297-315).
cattggagatgactacaaa

SEQ ID NO: 729609 - DNA, 19 bp, Mus musculus
  siRNA target sequence for 5730508B09Rik (NM_027482.1,301-319).
ggagatgactacaaaaaga

SEQ ID NO: 729610 - DNA, 19 bp, Mus musculus
  siRNA target sequence for 5730508B09Rik (NM_027482.1,302-320).
gagatgactacaaaaagat

SEQ ID NO: 729611 - DNA, 19 bp, Mus musculus
  siRNA target sequence for 5730508B09Rik (NM_027482.1,318-336).
gatgggaacactttttggt

SEQ ID NO: 729612 - DNA, 19 bp, Mus musculus
  siRNA target sequence for 5730508B09Rik (NM_027482.1,326-344).
cactttttggtgaactgaa

SEQ ID NO: 729613 - DNA, 19 bp, Mus musculus
  siRNA target sequence for 5730508B09Rik (NM_027482.1,355-373).
ctcaacatgggcttcacaa

SEQ ID NO: 729614 - DNA, 19 bp, Mus musculus
  siRNA target sequence for 5730508B09Rik (NM_027482.1,363-381).
gggcttcacaaggatgtat

SEQ ID NO: 729615 - DNA, 19 bp, Mus musculus
  siRNA target sequence for 5730508B09Rik (NM_027482.1,364-382).
ggcttcacaaggatgtatt

SEQ ID NO: 729616 - DNA, 19 bp, Mus musculus
  siRNA target sequence for 5730508B09Rik (NM_027482.1,365-383).
gcttcacaaggatgtattt

SEQ ID NO: 729617 - DNA, 19 bp, Mus musculus
  siRNA target sequence for 5730508B09Rik (NM_027482.1,369-387).
cacaaggatgtattttgga

SEQ ID NO: 729618 - DNA, 19 bp, Mus musculus
  siRNA target sequence for 5730508B09Rik (NM_027482.1,378-396).
gtattttggagaacgaatt

SEQ ID NO: 729619 - DNA, 19 bp, Mus musculus
  siRNA target sequence for 5730508B09Rik (NM_027482.1,460-478).
ggactcgttgccgttcttt

SEQ ID NO: 729620 - DNA, 19 bp, Mus musculus
  siRNA target sequence for 5730508B09Rik (NM_027482.1,470-488).
ccgttctttgccttgtcat

SEQ ID NO: 729621 - DNA, 19 bp, Mus musculus
  siRNA target sequence for 5730508B09Rik (NM_027482.1,471-489).
cgttctttgccttgtcatt

SEQ ID NO: 729622 - DNA, 19 bp, Mus musculus
  siRNA target sequence for 5730508B09Rik (NM_027482.1,479-497).
gccttgtcattatttatgt

SEQ ID NO: 729623 - DNA, 19 bp, Mus musculus
  siRNA target sequence for 5730493B19Rik (NM_027488.1,384-402).
cttaggctttcttgttaca

SEQ ID NO: 729624 - DNA, 19 bp, Mus musculus
  siRNA target sequence for 5730493B19Rik (NM_027488.1,445-463).
ggacagtcgcactacttaa

SEQ ID NO: 729625 - DNA, 19 bp, Mus musculus
  siRNA target sequence for 5730493B19Rik (NM_027488.1,448-466).
cagtcgcactacttaagtt

SEQ ID NO: 729626 - DNA, 19 bp, Mus musculus
  siRNA target sequence for 5730493B19Rik (NM_027488.1,453-471).
gcactacttaagttacagt

SEQ ID NO: 729627 - DNA, 19 bp, Mus musculus
  siRNA target sequence for 5730493B19Rik (NM_027488.1,680-698).
ggtctggagctatatatga

SEQ ID NO: 729628 - DNA, 19 bp, Mus musculus
  siRNA target sequence for 5730493B19Rik (NM_027488.1,681-699).
gtctggagctatatatgaa

SEQ ID NO: 729629 - DNA, 19 bp, Mus musculus
  siRNA target sequence for 5730537D05Rik (NM_027495.2,399-417).
gtttggctccaactttgta

SEQ ID NO: 729630 - DNA, 19 bp, Mus musculus
  siRNA target sequence for 5730537D05Rik (NM_027495.2,418-436).
ccacttaaaaaatatgaca

SEQ ID NO: 729631 - DNA, 19 bp, Mus musculus
  siRNA target sequence for 5730537D05Rik (NM_027495.2,466-484).
ctctgtgctgccatttggt

SEQ ID NO: 729632 - DNA, 19 bp, Mus musculus
  siRNA target sequence for 5730537D05Rik (NM_027495.2,573-591).
cattgctgtcgttccaatt

SEQ ID NO: 729633 - DNA, 19 bp, Mus musculus
  siRNA target sequence for 5730537D05Rik (NM_027495.2,577-595).
gctgtcgttccaattatca

SEQ ID NO: 729634 - DNA, 19 bp, Mus musculus
  siRNA target sequence for 5730537D05Rik (NM_027495.2,578-596).
ctgtcgttccaattatcaa

SEQ ID NO: 729635 - DNA, 19 bp, Mus musculus
  siRNA target sequence for 5730537D05Rik (NM_027495.2,594-612).
caaaaccatcggtttagga

SEQ ID NO: 729636 - DNA, 19 bp, Mus musculus
  siRNA target sequence for 5730537D05Rik (NM_027495.2,704-722).
ccaagccaatgctgaatta

SEQ ID NO: 729637 - DNA, 19 bp, Mus musculus
  siRNA target sequence for 5730537D05Rik (NM_027495.2,745-763).
gtaagtgcgctcacgtttt

SEQ ID NO: 729638 - DNA, 19 bp, Mus musculus
  siRNA target sequence for 5730537D05Rik (NM_027495.2,751-769).
gcgctcacgtttttgttca

SEQ ID NO: 729639 - DNA, 19 bp, Mus musculus
  siRNA target sequence for 5730537D05Rik (NM_027495.2,754-772).
ctcacgtttttgttcatca

SEQ ID NO: 729640 - DNA, 19 bp, Mus musculus
  siRNA target sequence for 5730537D05Rik (NM_027495.2,756-774).
cacgtttttgttcatcaaa

SEQ ID NO: 729641 - DNA, 19 bp, Mus musculus
  siRNA target sequence for 5730537D05Rik (NM_027495.2,765-783).
gttcatcaaaagtgaaatt

SEQ ID NO: 729642 - DNA, 19 bp, Mus musculus
  siRNA target sequence for 5730537D05Rik (NM_027495.2,826-844).
gagcctgtgatcaacagaa

SEQ ID NO: 729643 - DNA, 19 bp, Mus musculus
  siRNA target sequence for 5730537D05Rik (NM_027495.2,867-885).
ctcctgggtggatagactt

SEQ ID NO: 729644 - DNA, 19 bp, Mus musculus
  siRNA target sequence for 5730537D05Rik (NM_027495.2,870-888).
ctgggtggatagactttct

SEQ ID NO: 729645 - DNA, 19 bp, Mus musculus
  siRNA target sequence for 5730537D05Rik (NM_027495.2,912-930).
ctgcagccttgcggtaata

SEQ ID NO: 729646 - DNA, 19 bp, Mus musculus
  siRNA target sequence for 5730537D05Rik (NM_027495.2,923-941).
cggtaatatctggaatact

SEQ ID NO: 729647 - DNA, 19 bp, Mus musculus
  siRNA target sequence for 5730537D05Rik (NM_027495.2,925-943).
gtaatatctggaatactct

SEQ ID NO: 729648 - DNA, 19 bp, Mus musculus
  siRNA target sequence for 5730537D05Rik (NM_027495.2,950-968).
cgacatttgtgccaatcat

SEQ ID NO: 729649 - DNA, 19 bp, Mus musculus
  siRNA target sequence for 5730537D05Rik (NM_027495.2,958-976).
gtgccaatcatttacatca

SEQ ID NO: 729650 - DNA, 19 bp, Mus musculus
  siRNA target sequence for 5730537D05Rik (NM_027495.2,1010-1028).
caggcgctagccagtatga

SEQ ID NO: 729651 - DNA, 19 bp, Mus musculus
  siRNA target sequence for 5730537D05Rik (NM_027495.2,1012-1030).
ggcgctagccagtatgatt

SEQ ID NO: 729652 - DNA, 19 bp, Mus musculus
  siRNA target sequence for 5730537D05Rik (NM_027495.2,1013-1031).
gcgctagccagtatgattt

SEQ ID NO: 729653 - DNA, 19 bp, Mus musculus
  siRNA target sequence for 5730537D05Rik (NM_027495.2,1014-1032).
cgctagccagtatgattta

SEQ ID NO: 729654 - DNA, 19 bp, Mus musculus
  siRNA target sequence for 5730537D05Rik (NM_027495.2,1016-1034).
ctagccagtatgatttaga

SEQ ID NO: 729655 - DNA, 19 bp, Mus musculus
  siRNA target sequence for 5730537D05Rik (NM_027495.2,1092-1110).
ctactgtgtagccatgaaa

SEQ ID NO: 729656 - DNA, 19 bp, Mus musculus
  siRNA target sequence for 5730537D05Rik (NM_027495.2,1095-1113).
ctgtgtagccatgaaaaat

SEQ ID NO: 729657 - DNA, 19 bp, Mus musculus
  siRNA target sequence for 5730537D05Rik (NM_027495.2,1125-1143).
gtatccagaggcagtctta

SEQ ID NO: 729658 - DNA, 19 bp, Mus musculus
  siRNA target sequence for 5730537D05Rik (NM_027495.2,1265-1283).
cactttgggggatactcat

SEQ ID NO: 729659 - DNA, 19 bp, Mus musculus
  siRNA target sequence for 5730537D05Rik (NM_027495.2,1267-1285).
ctttgggggatactcattt

SEQ ID NO: 729660 - DNA, 19 bp, Mus musculus
  siRNA target sequence for 5730537D05Rik (NM_027495.2,1297-1315).
cagggtctccgaaactact

SEQ ID NO: 729661 - DNA, 19 bp, Mus musculus
  siRNA target sequence for 5730537D05Rik (NM_027495.2,1299-1317).
gggtctccgaaactactta

SEQ ID NO: 729662 - DNA, 19 bp, Mus musculus
  siRNA target sequence for 5730537D05Rik (NM_027495.2,1301-1319).
gtctccgaaactacttact

SEQ ID NO: 729663 - DNA, 19 bp, Mus musculus
  siRNA target sequence for 5730537D05Rik (NM_027495.2,1303-1321).
ctccgaaactacttactga

SEQ ID NO: 729664 - DNA, 19 bp, Mus musculus
  siRNA target sequence for 5730537D05Rik (NM_027495.2,1329-1347).
cgctttctgcatcatctta

SEQ ID NO: 729665 - DNA, 19 bp, Mus musculus
  siRNA target sequence for 5730537D05Rik (NM_027495.2,1354-1372).
gccttgtgcaccgcttttt

SEQ ID NO: 729666 - DNA, 19 bp, Mus musculus
  siRNA target sequence for 5730537D05Rik (NM_027495.2,1356-1374).
cttgtgcaccgctttttct

SEQ ID NO: 729667 - DNA, 19 bp, Mus musculus
  siRNA target sequence for 5730537D05Rik (NM_027495.2,1359-1377).
gtgcaccgctttttctaaa

SEQ ID NO: 729668 - DNA, 19 bp, Mus musculus
  siRNA target sequence for 5730537D05Rik (NM_027495.2,1361-1379).
gcaccgctttttctaaagt

SEQ ID NO: 729669 - DNA, 19 bp, Mus musculus
  siRNA target sequence for 0610012A05Rik (NM_027496.1,493-511).
cgaggagactggccttatt

SEQ ID NO: 729670 - DNA, 19 bp, Mus musculus
  siRNA target sequence for 0610012A05Rik (NM_027496.1,702-720).
gattcacggccctcatgaa

SEQ ID NO: 729671 - DNA, 19 bp, Mus musculus
  siRNA target sequence for 0610012A05Rik (NM_027496.1,747-765).
gtgtgcgagcccttatgat

SEQ ID NO: 729672 - DNA, 19 bp, Mus musculus
  siRNA target sequence for 0610012A05Rik (NM_027496.1,848-866).
gctgttcgcgtcattcaga

SEQ ID NO: 729673 - DNA, 19 bp, Mus musculus
  siRNA target sequence for 0610012A05Rik (NM_027496.1,1152-1170).
gcttggcggtgcaggaaat

SEQ ID NO: 729674 - DNA, 19 bp, Mus musculus
  siRNA target sequence for 0610012A05Rik (NM_027496.1,1236-1254).
cacaatcccagattttgga

SEQ ID NO: 729675 - DNA, 19 bp, Mus musculus
  siRNA target sequence for Epc1 (NM_027497.1,327-345).
cacgaatacgcctcgataa

SEQ ID NO: 729676 - DNA, 19 bp, Mus musculus
  siRNA target sequence for 3110030A04Rik (NM_027506.1,415-433).
gccagaagattcctaaagt

SEQ ID NO: 729677 - DNA, 19 bp, Mus musculus
  siRNA target sequence for 3110030A04Rik (NM_027506.1,416-434).
ccagaagattcctaaagtt

SEQ ID NO: 729678 - DNA, 19 bp, Mus musculus
  siRNA target sequence for 3110030A04Rik (NM_027506.1,432-450).
gttgaattgcaaatatcaa

SEQ ID NO: 729679 - DNA, 19 bp, Mus musculus
  siRNA target sequence for 3110030A04Rik (NM_027506.1,440-458).
gcaaatatcaatttatgga

SEQ ID NO: 729680 - DNA, 19 bp, Mus musculus
  siRNA target sequence for 3110030A04Rik (NM_027506.1,481-499).
caaaggaggttcaacacaa

SEQ ID NO: 729681 - DNA, 19 bp, Mus musculus
  siRNA target sequence for 3110030A04Rik (NM_027506.1,495-513).
cacaactgccagcttcata

SEQ ID NO: 729682 - DNA, 19 bp, Mus musculus
  siRNA target sequence for 3110030A04Rik (NM_027506.1,500-518).
ctgccagcttcatagaata

SEQ ID NO: 729683 - DNA, 19 bp, Mus musculus
  siRNA target sequence for 3110030A04Rik (NM_027506.1,503-521).
ccagcttcatagaatatca

SEQ ID NO: 729684 - DNA, 19 bp, Mus musculus
  siRNA target sequence for 3110030A04Rik (NM_027506.1,506-524).
gcttcatagaatatcattt

SEQ ID NO: 729685 - DNA, 19 bp, Mus musculus
  siRNA target sequence for 3110030A04Rik (NM_027506.1,520-538).
cattttgcgcagatgataa

SEQ ID NO: 729686 - DNA, 19 bp, Mus musculus
  siRNA target sequence for 3110030A04Rik (NM_027506.1,543-561).
gacaagaggatattcactt

SEQ ID NO: 729687 - DNA, 19 bp, Mus musculus
  siRNA target sequence for 3110030A04Rik (NM_027506.1,569-587).
caaagattctgagtcaaat

SEQ ID NO: 729688 - DNA, 19 bp, Mus musculus
  siRNA target sequence for 3110030A04Rik (NM_027506.1,603-621).
gtatttgacagcgaaaagt

SEQ ID NO: 729689 - DNA, 19 bp, Mus musculus
  siRNA target sequence for 3110030A04Rik (NM_027506.1,734-752).
gaaaagaatccaagactta

SEQ ID NO: 729690 - DNA, 19 bp, Mus musculus
  siRNA target sequence for 3110030A04Rik (NM_027506.1,800-818).
ccggttgagaacaactcaa

SEQ ID NO: 729691 - DNA, 19 bp, Mus musculus
  siRNA target sequence for 3110030A04Rik (NM_027506.1,803-821).
gttgagaacaactcaagta

SEQ ID NO: 729692 - DNA, 19 bp, Mus musculus
  siRNA target sequence for 3110030A04Rik (NM_027506.1,856-874).
ctccttccactgatatctt

SEQ ID NO: 729693 - DNA, 19 bp, Mus musculus
  siRNA target sequence for 3110030A04Rik (NM_027506.1,971-989).
caaacgggacctttttgga

SEQ ID NO: 729694 - DNA, 19 bp, Mus musculus
  siRNA target sequence for 3110030A04Rik (NM_027506.1,996-1014).
ccttttgacccatttaact

SEQ ID NO: 729695 - DNA, 19 bp, Mus musculus
  siRNA target sequence for 3110030A04Rik (NM_027506.1,1056-1074).
gatgagatgcaggtaacta

SEQ ID NO: 729696 - DNA, 19 bp, Mus musculus
  siRNA target sequence for 4930438O05Rik (NM_027507.1,70-88).
ctcatgagtctgaattact

SEQ ID NO: 729697 - DNA, 19 bp, Mus musculus
  siRNA target sequence for 4930438O05Rik (NM_027507.1,81-99).
gaattacttggattagtga

SEQ ID NO: 729698 - DNA, 19 bp, Mus musculus
  siRNA target sequence for 4930438O05Rik (NM_027507.1,87-105).
cttggattagtgaaagagt

SEQ ID NO: 729699 - DNA, 19 bp, Mus musculus
  siRNA target sequence for 4930438O05Rik (NM_027507.1,90-108).
ggattagtgaaagagtatt

SEQ ID NO: 729700 - DNA, 19 bp, Mus musculus
  siRNA target sequence for 4930438O05Rik (NM_027507.1,91-109).
gattagtgaaagagtattt

SEQ ID NO: 729701 - DNA, 19 bp, Mus musculus
  siRNA target sequence for 4930438O05Rik (NM_027507.1,96-114).
gtgaaagagtatttagatt

SEQ ID NO: 729702 - DNA, 19 bp, Mus musculus
  siRNA target sequence for 4930438O05Rik (NM_027507.1,189-207).
gtcggtgggccattaaaga

SEQ ID NO: 729703 - DNA, 19 bp, Mus musculus
  siRNA target sequence for 4930438O05Rik (NM_027507.1,214-232).
ccaagtcgctcgtaatcca

SEQ ID NO: 729704 - DNA, 19 bp, Mus musculus
  siRNA target sequence for 4930438O05Rik (NM_027507.1,397-415).
gcaggccggacaaacaaga

SEQ ID NO: 729705 - DNA, 19 bp, Mus musculus
  siRNA target sequence for 4930438O05Rik (NM_027507.1,411-429).
caagagctagataaaagga

SEQ ID NO: 729706 - DNA, 19 bp, Mus musculus
  siRNA target sequence for 4930438O05Rik (NM_027507.1,414-432).
gagctagataaaaggattt

SEQ ID NO: 729707 - DNA, 19 bp, Mus musculus
  siRNA target sequence for 4930438O05Rik (NM_027507.1,417-435).
ctagataaaaggatttctt

SEQ ID NO: 729708 - DNA, 19 bp, Mus musculus
  siRNA target sequence for 4930438O05Rik (NM_027507.1,475-493).
gccagactacggagtttct

SEQ ID NO: 729709 - DNA, 19 bp, Mus musculus
  siRNA target sequence for 4930438O05Rik (NM_027507.1,530-548).
ggtccacccctcatttaaa

SEQ ID NO: 729710 - DNA, 19 bp, Mus musculus
  siRNA target sequence for 4930438O05Rik (NM_027507.1,549-567).
gaactcttccaggattctt

SEQ ID NO: 729711 - DNA, 19 bp, Mus musculus
  siRNA target sequence for 4930438O05Rik (NM_027507.1,568-586).
ggactccagaattaaagct

SEQ ID NO: 729712 - DNA, 19 bp, Mus musculus
  siRNA target sequence for 4930438O05Rik (NM_027507.1,587-605).
gaagctggaaaagttttta

SEQ ID NO: 729713 - DNA, 19 bp, Mus musculus
  siRNA target sequence for 4930438O05Rik (NM_027507.1,591-609).
ctggaaaagtttttagctt

SEQ ID NO: 729714 - DNA, 19 bp, Mus musculus
  siRNA target sequence for 4930438O05Rik (NM_027507.1,633-651).
ccaaagcttttaaccatat

SEQ ID NO: 729715 - DNA, 19 bp, Mus musculus
  siRNA target sequence for 4930438O05Rik (NM_027507.1,634-652).
caaagcttttaaccatata

SEQ ID NO: 729716 - DNA, 19 bp, Mus musculus
  siRNA target sequence for 4930438O05Rik (NM_027507.1,657-675).
gagaatggacctaatagca

SEQ ID NO: 729717 - DNA, 19 bp, Mus musculus
  siRNA target sequence for 4930438O05Rik (NM_027507.1,664-682).
gacctaatagcaaagaact

SEQ ID NO: 729718 - DNA, 19 bp, Mus musculus
  siRNA target sequence for 4930438O05Rik (NM_027507.1,734-752).
ctacctgaagcggtacaat

SEQ ID NO: 729719 - DNA, 19 bp, Mus musculus
  siRNA target sequence for 4930438O05Rik (NM_027507.1,738-756).
ctgaagcggtacaataaga

SEQ ID NO: 729720 - DNA, 19 bp, Mus musculus
  siRNA target sequence for 4930438O05Rik (NM_027507.1,820-838).
cagtcagcggcaagatgat

SEQ ID NO: 729721 - DNA, 19 bp, Mus musculus
  siRNA target sequence for 4930438O05Rik (NM_027507.1,822-840).
gtcagcggcaagatgatca

SEQ ID NO: 729722 - DNA, 19 bp, Mus musculus
  siRNA target sequence for 4930438O05Rik (NM_027507.1,1037-1055).
ggggagtgaccgcttgaaa

SEQ ID NO: 729723 - DNA, 19 bp, Mus musculus
  siRNA target sequence for 4930438O05Rik (NM_027507.1,1047-1065).
cgcttgaaagccttcttgt

SEQ ID NO: 729724 - DNA, 19 bp, Mus musculus
  siRNA target sequence for 4930438O05Rik (NM_027507.1,1048-1066).
gcttgaaagccttcttgtt

SEQ ID NO: 729725 - DNA, 19 bp, Mus musculus
  siRNA target sequence for 4930438O05Rik (NM_027507.1,1226-1244).
catggccaggctcatcaat

SEQ ID NO: 729726 - DNA, 19 bp, Mus musculus
  siRNA target sequence for 4930438O05Rik (NM_027507.1,1435-1453).
ggctgatcgacctactgaa

SEQ ID NO: 729727 - DNA, 19 bp, Mus musculus
  siRNA target sequence for 4930438O05Rik (NM_027507.1,1521-1539).
cgcagtgcaggaaagaaca

SEQ ID NO: 729728 - DNA, 19 bp, Mus musculus
  siRNA target sequence for 4930438O05Rik (NM_027507.1,1522-1540).
gcagtgcaggaaagaacat

SEQ ID NO: 729729 - DNA, 19 bp, Mus musculus
  siRNA target sequence for 4930438O05Rik (NM_027507.1,1591-1609).
gacacgaaaaccatgagat

SEQ ID NO: 729730 - DNA, 19 bp, Mus musculus
  siRNA target sequence for 4930438O05Rik (NM_027507.1,1678-1696).
ccatgggaatggaggatat

SEQ ID NO: 729731 - DNA, 19 bp, Mus musculus
  siRNA target sequence for 4930438O05Rik (NM_027507.1,1697-1715).
cctgcgatgcttcatcaaa

SEQ ID NO: 729732 - DNA, 19 bp, Mus musculus
  siRNA target sequence for 4930438O05Rik (NM_027507.1,1700-1718).
gcgatgcttcatcaaagaa

SEQ ID NO: 729733 - DNA, 19 bp, Mus musculus
  siRNA target sequence for 4930438O05Rik (NM_027507.1,1716-1734).
gaaggcaacgctgaaatga

SEQ ID NO: 729734 - DNA, 19 bp, Mus musculus
  siRNA target sequence for 4930438O05Rik (NM_027507.1,1733-1751).
gatccgccagatagagttt

SEQ ID NO: 729735 - DNA, 19 bp, Mus musculus
  siRNA target sequence for 4930438O05Rik (NM_027507.1,1737-1755).
cgccagatagagtttatca

SEQ ID NO: 729736 - DNA, 19 bp, Mus musculus
  siRNA target sequence for 4930438O05Rik (NM_027507.1,2051-2069).
gctaggagaccatctcatt

SEQ ID NO: 729737 - DNA, 19 bp, Mus musculus
  siRNA target sequence for 4930438O05Rik (NM_027507.1,2170-2188).
gtggcacgtcctcttcatt

SEQ ID NO: 729738 - DNA, 19 bp, Mus musculus
  siRNA target sequence for 4930438O05Rik (NM_027507.1,2172-2190).
ggcacgtcctcttcattta

SEQ ID NO: 729739 - DNA, 19 bp, Mus musculus
  siRNA target sequence for 4930438O05Rik (NM_027507.1,2173-2191).
gcacgtcctcttcatttat

SEQ ID NO: 729740 - DNA, 19 bp, Mus musculus
  siRNA target sequence for 4930438O05Rik (NM_027507.1,2176-2194).
cgtcctcttcatttatgga

SEQ ID NO: 729741 - DNA, 19 bp, Mus musculus
  siRNA target sequence for 4930438O05Rik (NM_027507.1,2303-2321).
catcaccagggaattcgta

SEQ ID NO: 729742 - DNA, 19 bp, Mus musculus
  siRNA target sequence for D7Ertd458e (NM_027514.1,169-187).
ctggtgccctacaattcga

SEQ ID NO: 729743 - DNA, 19 bp, Mus musculus
  siRNA target sequence for D7Ertd458e (NM_027514.1,221-239).
gtagtctgacttctaatga

SEQ ID NO: 729744 - DNA, 19 bp, Mus musculus
  siRNA target sequence for D7Ertd458e (NM_027514.1,496-514).
caagcccgacctaagaaca

SEQ ID NO: 729745 - DNA, 19 bp, Mus musculus
  siRNA target sequence for 6330406I15Rik (NM_027519.1,429-447).
cgcctcagcagctacatca

SEQ ID NO: 729746 - DNA, 19 bp, Mus musculus
  siRNA target sequence for 6330406I15Rik (NM_027519.1,430-448).
gcctcagcagctacatcaa

SEQ ID NO: 729747 - DNA, 19 bp, Mus musculus
  siRNA target sequence for 6330406I15Rik (NM_027519.1,432-450).
ctcagcagctacatcaaga

SEQ ID NO: 729748 - DNA, 19 bp, Mus musculus
  siRNA target sequence for 6330406I15Rik (NM_027519.1,439-457).
gctacatcaagagatatgt

SEQ ID NO: 729749 - DNA, 19 bp, Mus musculus
  siRNA target sequence for 6330406I15Rik (NM_027519.1,462-480).
ctgaccaactactgtgatt

SEQ ID NO: 729750 - DNA, 19 bp, Mus musculus
  siRNA target sequence for 6330406I15Rik (NM_027519.1,464-482).
gaccaactactgtgattat

SEQ ID NO: 729751 - DNA, 19 bp, Mus musculus
  siRNA target sequence for 6330406I15Rik (NM_027519.1,467-485).
caactactgtgattataaa

SEQ ID NO: 729752 - DNA, 19 bp, Mus musculus
  siRNA target sequence for 6330406I15Rik (NM_027519.1,504-522).
ctgagcaaacctatggtat

SEQ ID NO: 729753 - DNA, 19 bp, Mus musculus
  siRNA target sequence for 6330406I15Rik (NM_027519.1,541-559).
ccaagaaggacatttcaaa

SEQ ID NO: 729754 - DNA, 19 bp, Mus musculus
  siRNA target sequence for 6330406I15Rik (NM_027519.1,542-560).
caagaaggacatttcaaaa

SEQ ID NO: 729755 - DNA, 19 bp, Mus musculus
  siRNA target sequence for 6330406I15Rik (NM_027519.1,624-642).
gggatggacatggtcattt

SEQ ID NO: 729756 - DNA, 19 bp, Mus musculus
  siRNA target sequence for 6330406I15Rik (NM_027519.1,646-664).
cagtgattggagaaagcta

SEQ ID NO: 729757 - DNA, 19 bp, Mus musculus
  siRNA target sequence for 6330406I15Rik (NM_027519.1,650-668).
gattggagaaagctataga

SEQ ID NO: 729758 - DNA, 19 bp, Mus musculus
  siRNA target sequence for 6330406I15Rik (NM_027519.1,661-679).
gctatagacttcagtttga

SEQ ID NO: 729759 - DNA, 19 bp, Mus musculus
  siRNA target sequence for 6330406I15Rik (NM_027519.1,662-680).
ctatagacttcagtttgat

SEQ ID NO: 729760 - DNA, 19 bp, Mus musculus
  siRNA target sequence for 6330406I15Rik (NM_027519.1,687-705).
gaagtagtgaagaatttct

SEQ ID NO: 729761 - DNA, 19 bp, Mus musculus
  siRNA target sequence for 6330406I15Rik (NM_027519.1,745-763).
gcttcacctacgaattcaa

SEQ ID NO: 729762 - DNA, 19 bp, Mus musculus
  siRNA target sequence for 6330406I15Rik (NM_027519.1,764-782).
ggcagatgccctgtttgat

SEQ ID NO: 729763 - DNA, 19 bp, Mus musculus
  siRNA target sequence for 6330406I15Rik (NM_027519.1,803-821).
cagcaattccaccgtaaaa

SEQ ID NO: 729764 - DNA, 19 bp, Mus musculus
  siRNA target sequence for 6330406I15Rik (NM_027519.1,805-823).
gcaattccaccgtaaaagt

SEQ ID NO: 729765 - DNA, 19 bp, Mus musculus
  siRNA target sequence for 6330406I15Rik (NM_027519.1,847-865).
caagtacgaacccagaaaa

SEQ ID NO: 729766 - DNA, 19 bp, Mus musculus
  siRNA target sequence for 6330406I15Rik (NM_027519.1,850-868).
gtacgaacccagaaaagaa

SEQ ID NO: 729767 - DNA, 19 bp, Mus musculus
  siRNA target sequence for 6330406I15Rik (NM_027519.1,866-884).
gaaagaaacaatcaagtta

SEQ ID NO: 729768 - DNA, 19 bp, Mus musculus
  siRNA target sequence for 6330406I15Rik (NM_027519.1,899-917).
gagtgaacctctaatacga

SEQ ID NO: 729769 - DNA, 19 bp, Mus musculus
  siRNA target sequence for 6330406I15Rik (NM_027519.1,909-927).
ctaatacgaaggagtagtt

SEQ ID NO: 729770 - DNA, 19 bp, Mus musculus
  siRNA target sequence for 6330406I15Rik (NM_027519.1,925-943).
gtttctctgatcggaaatt

SEQ ID NO: 729771 - DNA, 19 bp, Mus musculus
  siRNA target sequence for 6330406I15Rik (NM_027519.1,950-968).
cacatctagaggttcaata

SEQ ID NO: 729772 - DNA, 19 bp, Mus musculus
  siRNA target sequence for 6330406I15Rik (NM_027519.1,952-970).
catctagaggttcaataga

SEQ ID NO: 729773 - DNA, 19 bp, Mus musculus
  siRNA target sequence for 6330406I15Rik (NM_027519.1,997-1015).
ccagatcatcggttacaga

SEQ ID NO: 729774 - DNA, 19 bp, Mus musculus
  siRNA target sequence for 6330406I15Rik (NM_027519.1,1062-1080).
gagacatccagccaactta

SEQ ID NO: 729775 - DNA, 19 bp, Mus musculus
  siRNA target sequence for D5Bwg0860e (NM_027530.2,576-594).
ctgacgcctccgactgata

SEQ ID NO: 729776 - DNA, 19 bp, Mus musculus
  siRNA target sequence for D5Bwg0860e (NM_027530.2,638-656).
gaccatctacctttgcaaa

SEQ ID NO: 729777 - DNA, 19 bp, Mus musculus
  siRNA target sequence for D5Bwg0860e (NM_027530.2,652-670).
gcaaattccgagtgtctat

SEQ ID NO: 729778 - DNA, 19 bp, Mus musculus
  siRNA target sequence for D5Bwg0860e (NM_027530.2,908-926).
cggcttgaaagccaagaaa

SEQ ID NO: 729779 - DNA, 19 bp, Mus musculus
  siRNA target sequence for D5Bwg0860e (NM_027530.2,999-1017).
gaaataacagcgagtgtaa

SEQ ID NO: 729780 - DNA, 19 bp, Mus musculus
  siRNA target sequence for D5Bwg0860e (NM_027530.2,1138-1156).
gtgagttctatgaagtcaa

SEQ ID NO: 729781 - DNA, 19 bp, Mus musculus
  siRNA target sequence for D5Bwg0860e (NM_027530.2,1215-1233).
gtcatcgatgccaatttct

SEQ ID NO: 729782 - DNA, 19 bp, Mus musculus
  siRNA target sequence for D5Bwg0860e (NM_027530.2,1262-1280).
ggttggagttatagatttt

SEQ ID NO: 729783 - DNA, 19 bp, Mus musculus
  siRNA target sequence for D5Bwg0860e (NM_027530.2,1263-1281).
gttggagttatagattttt

SEQ ID NO: 729784 - DNA, 19 bp, Mus musculus
  siRNA target sequence for D5Bwg0860e (NM_027530.2,1266-1284).
ggagttatagatttttcga

SEQ ID NO: 729785 - DNA, 19 bp, Mus musculus
  siRNA target sequence for D5Bwg0860e (NM_027530.2,1267-1285).
gagttatagatttttcgat

SEQ ID NO: 729786 - DNA, 19 bp, Mus musculus
  siRNA target sequence for D5Bwg0860e (NM_027530.2,1275-1293).
gatttttcgatgtatctca

SEQ ID NO: 729787 - DNA, 19 bp, Mus musculus
  siRNA target sequence for D5Bwg0860e (NM_027530.2,1299-1317).
ggaaacagtagtaaaggta

SEQ ID NO: 729788 - DNA, 19 bp, Mus musculus
  siRNA target sequence for D5Bwg0860e (NM_027530.2,1304-1322).
cagtagtaaaggtagtgaa

SEQ ID NO: 729789 - DNA, 19 bp, Mus musculus
  siRNA target sequence for D5Bwg0860e (NM_027530.2,1412-1430).
gacaaaagtagatctgtta

SEQ ID NO: 729790 - DNA, 19 bp, Mus musculus
  siRNA target sequence for D5Bwg0860e (NM_027530.2,1422-1440).
gatctgttagaaaaatcca

SEQ ID NO: 729791 - DNA, 19 bp, Mus musculus
  siRNA target sequence for D5Bwg0860e (NM_027530.2,1461-1479).
cttgccgttgccaacaaca

SEQ ID NO: 729792 - DNA, 19 bp, Mus musculus
  siRNA target sequence for D5Bwg0860e (NM_027530.2,1465-1483).
ccgttgccaacaacagaat

SEQ ID NO: 729793 - DNA, 19 bp, Mus musculus
  siRNA target sequence for D5Bwg0860e (NM_027530.2,1467-1485).
gttgccaacaacagaatta

SEQ ID NO: 729794 - DNA, 19 bp, Mus musculus
  siRNA target sequence for D5Bwg0860e (NM_027530.2,1478-1496).
cagaattattaccttacaa

SEQ ID NO: 729795 - DNA, 19 bp, Mus musculus
  siRNA target sequence for D5Bwg0860e (NM_027530.2,1480-1498).
gaattattaccttacaaga

SEQ ID NO: 729796 - DNA, 19 bp, Mus musculus
  siRNA target sequence for D5Bwg0860e (NM_027530.2,1505-1523).
ggaacgagttaaagaagaa

SEQ ID NO: 729797 - DNA, 19 bp, Mus musculus
  siRNA target sequence for D5Bwg0860e (NM_027530.2,1528-1546).
cctatctactggaatccaa

SEQ ID NO: 729798 - DNA, 19 bp, Mus musculus
  siRNA target sequence for D5Bwg0860e (NM_027530.2,1529-1547).
ctatctactggaatccaat

SEQ ID NO: 729799 - DNA, 19 bp, Mus musculus
  siRNA target sequence for D5Bwg0860e (NM_027530.2,1544-1562).
caatcggaagggtcctaaa

SEQ ID NO: 729800 - DNA, 19 bp, Mus musculus
  siRNA target sequence for D5Bwg0860e (NM_027530.2,1549-1567).
ggaagggtcctaaacaaga

SEQ ID NO: 729801 - DNA, 19 bp, Mus musculus
  siRNA target sequence for D5Bwg0860e (NM_027530.2,1596-1614).
gaagccagaaagcatctaa

SEQ ID NO: 729802 - DNA, 19 bp, Mus musculus
  siRNA target sequence for D5Bwg0860e (NM_027530.2,1781-1799).
gcatgagctcgcctttaaa

SEQ ID NO: 729803 - DNA, 19 bp, Mus musculus
  siRNA target sequence for D5Bwg0860e (NM_027530.2,1812-1830).
gacctaggagtgaaacaga

SEQ ID NO: 729804 - DNA, 19 bp, Mus musculus
  siRNA target sequence for D5Bwg0860e (NM_027530.2,1871-1889).
gatggctgccaccattaaa

SEQ ID NO: 729805 - DNA, 19 bp, Mus musculus
  siRNA target sequence for D5Bwg0860e (NM_027530.2,1892-1910).
gctggagcaaagtgaaaaa

SEQ ID NO: 729806 - DNA, 19 bp, Mus musculus
  siRNA target sequence for D5Bwg0860e (NM_027530.2,1923-1941).
caggcaaagaccttaaata

SEQ ID NO: 729807 - DNA, 19 bp, Mus musculus
  siRNA target sequence for D5Bwg0860e (NM_027530.2,1934-1952).
cttaaatagtgcagcaaat

SEQ ID NO: 729808 - DNA, 19 bp, Mus musculus
  siRNA target sequence for D5Bwg0860e (NM_027530.2,1942-1960).
gtgcagcaaataaactgat

SEQ ID NO: 729809 - DNA, 19 bp, Mus musculus
  siRNA target sequence for 6330404A07Rik (NM_027537.1,416-434).
ggacgagggtccagttgtt

SEQ ID NO: 729810 - DNA, 19 bp, Mus musculus
  siRNA target sequence for 6330404A07Rik (NM_027537.1,429-447).
gttgttaccgctcattact

SEQ ID NO: 729811 - DNA, 19 bp, Mus musculus
  siRNA target sequence for 6330404A07Rik (NM_027537.1,439-457).
ctcattactgcgatcagaa

SEQ ID NO: 729812 - DNA, 19 bp, Mus musculus
  siRNA target sequence for Prpf3 (NM_027541.2,626-644).
gctgatcacctgaaacctt

SEQ ID NO: 729813 - DNA, 19 bp, Mus musculus
  siRNA target sequence for Prpf3 (NM_027541.2,634-652).
cctgaaaccttttcttgat

SEQ ID NO: 729814 - DNA, 19 bp, Mus musculus
  siRNA target sequence for Prpf3 (NM_027541.2,660-678).
ctctccgatttgtggataa

SEQ ID NO: 729815 - DNA, 19 bp, Mus musculus
  siRNA target sequence for Prpf3 (NM_027541.2,744-762).
gaaagcgagagttaaagga

SEQ ID NO: 729816 - DNA, 19 bp, Mus musculus
  siRNA target sequence for Prpf3 (NM_027541.2,782-800).
gagatctcaaaggaatcat

SEQ ID NO: 729817 - DNA, 19 bp, Mus musculus
  siRNA target sequence for Prpf3 (NM_027541.2,794-812).
gaatcatcgggggtaaaga

SEQ ID NO: 729818 - DNA, 19 bp, Mus musculus
  siRNA target sequence for Prpf3 (NM_027541.2,863-881).
cctggacctccatcagaaa

SEQ ID NO: 729819 - DNA, 19 bp, Mus musculus
  siRNA target sequence for Prpf3 (NM_027541.2,927-945).
cagcaacacgacaaatcga

SEQ ID NO: 729820 - DNA, 19 bp, Mus musculus
  siRNA target sequence for Prpf3 (NM_027541.2,1025-1043).
cttcccatcggcaacacta

SEQ ID NO: 729821 - DNA, 19 bp, Mus musculus
  siRNA target sequence for Prpf3 (NM_027541.2,1029-1047).
ccatcggcaacactattca

SEQ ID NO: 729822 - DNA, 19 bp, Mus musculus
  siRNA target sequence for Prpf3 (NM_027541.2,1053-1071).
cccaggccgctacctttat

SEQ ID NO: 729823 - DNA, 19 bp, Mus musculus
  siRNA target sequence for Prpf3 (NM_027541.2,1055-1073).
caggccgctacctttatga

SEQ ID NO: 729824 - DNA, 19 bp, Mus musculus
  siRNA target sequence for Prpf3 (NM_027541.2,1168-1186).
catggtgggcctagctaat

SEQ ID NO: 729825 - DNA, 19 bp, Mus musculus
  siRNA target sequence for Prpf3 (NM_027541.2,1209-1227).
caccgaaagtagagttaaa

SEQ ID NO: 729826 - DNA, 19 bp, Mus musculus
  siRNA target sequence for Prpf3 (NM_027541.2,1399-1417).
ggagtctaatacctttttt

SEQ ID NO: 729827 - DNA, 19 bp, Mus musculus
  siRNA target sequence for Prpf3 (NM_027541.2,1447-1465).
gcgccaaagacgcactttt

SEQ ID NO: 729828 - DNA, 19 bp, Mus musculus
  siRNA target sequence for Prpf3 (NM_027541.2,1448-1466).
cgccaaagacgcactttta

SEQ ID NO: 729829 - DNA, 19 bp, Mus musculus
  siRNA target sequence for Prpf3 (NM_027541.2,1449-1467).
gccaaagacgcacttttaa

SEQ ID NO: 729830 - DNA, 19 bp, Mus musculus
  siRNA target sequence for Prpf3 (NM_027541.2,1450-1468).
ccaaagacgcacttttaaa

SEQ ID NO: 729831 - DNA, 19 bp, Mus musculus
  siRNA target sequence for Prpf3 (NM_027541.2,1451-1469).
caaagacgcacttttaaat

SEQ ID NO: 729832 - DNA, 19 bp, Mus musculus
  siRNA target sequence for Prpf3 (NM_027541.2,1492-1510).
gaaaattgctcaacgatta

SEQ ID NO: 729833 - DNA, 19 bp, Mus musculus
  siRNA target sequence for Prpf3 (NM_027541.2,1512-1530).
ggacaaaggctcaattgga

SEQ ID NO: 729834 - DNA, 19 bp, Mus musculus
  siRNA target sequence for Prpf3 (NM_027541.2,1629-1647).
gcgatatccctgagattga

SEQ ID NO: 729835 - DNA, 19 bp, Mus musculus
  siRNA target sequence for Prpf3 (NM_027541.2,1651-1669).
gtgggactcgtacatcata

SEQ ID NO: 729836 - DNA, 19 bp, Mus musculus
  siRNA target sequence for Prpf3 (NM_027541.2,1722-1740).
gaatcacaaatcttgttga

SEQ ID NO: 729837 - DNA, 19 bp, Mus musculus
  siRNA target sequence for Prpf3 (NM_027541.2,1726-1744).
cacaaatcttgttgaacat

SEQ ID NO: 729838 - DNA, 19 bp, Mus musculus
  siRNA target sequence for Prpf3 (NM_027541.2,1760-1778).
cctccagttgacaatgata

SEQ ID NO: 729839 - DNA, 19 bp, Mus musculus
  siRNA target sequence for Prpf3 (NM_027541.2,1901-1919).
gagcccaaagtgagaatct

SEQ ID NO: 729840 - DNA, 19 bp, Mus musculus
  siRNA target sequence for Prpf3 (NM_027541.2,1903-1921).
gcccaaagtgagaatctca

SEQ ID NO: 729841 - DNA, 19 bp, Mus musculus
  siRNA target sequence for Prpf3 (NM_027541.2,1920-1938).
caaatttaatgcgagtatt

SEQ ID NO: 729842 - DNA, 19 bp, Mus musculus
  siRNA target sequence for Prpf3 (NM_027541.2,1930-1948).
gcgagtattaggaacagaa

SEQ ID NO: 729843 - DNA, 19 bp, Mus musculus
  siRNA target sequence for Prpf3 (NM_027541.2,2058-2076).
gaaaggtcaagaaaattaa

SEQ ID NO: 729844 - DNA, 19 bp, Mus musculus
  siRNA target sequence for Prpf3 (NM_027541.2,2115-2133).
ctgtgtatagagttcgaaa

SEQ ID NO: 729845 - DNA, 19 bp, Mus musculus
  siRNA target sequence for Prpf3 (NM_027541.2,2117-2135).
gtgtatagagttcgaaatt

SEQ ID NO: 729846 - DNA, 19 bp, Mus musculus
  siRNA target sequence for Prpf3 (NM_027541.2,2364-2382).
ctaacaaatgtgtactagt

SEQ ID NO: 729847 - DNA, 19 bp, Mus musculus
  siRNA target sequence for Prpf3 (NM_027541.2,2410-2428).
ctttggagagatgaagttt

SEQ ID NO: 729848 - DNA, 19 bp, Mus musculus
  siRNA target sequence for Prpf3 (NM_027541.2,2417-2435).
gagatgaagtttaaacagt

SEQ ID NO: 729849 - DNA, 19 bp, Mus musculus
  siRNA target sequence for Prpf3 (NM_027541.2,2452-2470).
ggctcgtgagcatttcaaa

SEQ ID NO: 729850 - DNA, 19 bp, Mus musculus
  siRNA target sequence for Prpf3 (NM_027541.2,2497-2515).
ccttgcactgagtgaatct

SEQ ID NO: 729851 - DNA, 19 bp, Mus musculus
  siRNA target sequence for 3230401K02Rik (NM_027543.2,833-851).
ccaaaactggacattccat

SEQ ID NO: 729852 - DNA, 19 bp, Mus musculus
  siRNA target sequence for 3230401K02Rik (NM_027543.2,881-899).
caactggatcgctggtttt

SEQ ID NO: 729853 - DNA, 19 bp, Mus musculus
  siRNA target sequence for 3230401K02Rik (NM_027543.2,1043-1061).
cctctggtcaccatacatt

SEQ ID NO: 729854 - DNA, 19 bp, Mus musculus
  siRNA target sequence for 3230401K02Rik (NM_027543.2,1067-1085).
ctgctactggcgagtgttt

SEQ ID NO: 729855 - DNA, 19 bp, Mus musculus
  siRNA target sequence for 3230401K02Rik (NM_027543.2,1069-1087).
gctactggcgagtgtttgt

SEQ ID NO: 729856 - DNA, 19 bp, Mus musculus
  siRNA target sequence for 3230401L03Rik (NM_027545.1,17-35).
ggaggcgtttagtgtaaga

SEQ ID NO: 729857 - DNA, 19 bp, Mus musculus
  siRNA target sequence for 3230401L03Rik (NM_027545.1,18-36).
gaggcgtttagtgtaagat

SEQ ID NO: 729858 - DNA, 19 bp, Mus musculus
  siRNA target sequence for 3230401L03Rik (NM_027545.1,20-38).
ggcgtttagtgtaagattt

SEQ ID NO: 729859 - DNA, 19 bp, Mus musculus
  siRNA target sequence for 3230401L03Rik (NM_027545.1,22-40).
cgtttagtgtaagatttga

SEQ ID NO: 729860 - DNA, 19 bp, Mus musculus
  siRNA target sequence for 3230401L03Rik (NM_027545.1,52-70).
gtatcgaagagcgaaaaga

SEQ ID NO: 729861 - DNA, 19 bp, Mus musculus
  siRNA target sequence for 3230401L03Rik (NM_027545.1,98-116).
gttacgccaggccaaacat

SEQ ID NO: 729862 - DNA, 19 bp, Mus musculus
  siRNA target sequence for 3230401L03Rik (NM_027545.1,207-225).
cagttctcacaggaacatt

SEQ ID NO: 729863 - DNA, 19 bp, Mus musculus
  siRNA target sequence for 3230401L03Rik (NM_027545.1,456-474).
cgtgatgagtggatgacta

SEQ ID NO: 729864 - DNA, 19 bp, Mus musculus
  siRNA target sequence for 3230401L03Rik (NM_027545.1,457-475).
gtgatgagtggatgactat

SEQ ID NO: 729865 - DNA, 19 bp, Mus musculus
  siRNA target sequence for 3230401L03Rik (NM_027545.1,511-529).
cactcaaagctgaaaagga

SEQ ID NO: 729866 - DNA, 19 bp, Mus musculus
  siRNA target sequence for 3230401L03Rik (NM_027545.1,582-600).
ctgctcgaaagagaattga

SEQ ID NO: 729867 - DNA, 19 bp, Mus musculus
  siRNA target sequence for 3230401L03Rik (NM_027545.1,588-606).
gaaagagaattgaatccat

SEQ ID NO: 729868 - DNA, 19 bp, Mus musculus
  siRNA target sequence for 3230401L03Rik (NM_027545.1,632-650).
cccatcaaaaacctgtata

SEQ ID NO: 729869 - DNA, 19 bp, Mus musculus
  siRNA target sequence for 3230401L03Rik (NM_027545.1,634-652).
catcaaaaacctgtatact

SEQ ID NO: 729870 - DNA, 19 bp, Mus musculus
  siRNA target sequence for 3230401L03Rik (NM_027545.1,644-662).
ctgtatacttccagttact

SEQ ID NO: 729871 - DNA, 19 bp, Mus musculus
  siRNA target sequence for 3230401L03Rik (NM_027545.1,651-669).
cttccagttactaaagcta

SEQ ID NO: 729872 - DNA, 19 bp, Mus musculus
  siRNA target sequence for 3230401L03Rik (NM_027545.1,675-693).
gtggaggatggcggattaa

SEQ ID NO: 729873 - DNA, 19 bp, Mus musculus
  siRNA target sequence for 3230401L03Rik (NM_027545.1,698-716).
gctaagaaagtcttgtcaa

SEQ ID NO: 729874 - DNA, 19 bp, Mus musculus
  siRNA target sequence for 3230401L03Rik (NM_027545.1,699-717).
ctaagaaagtcttgtcaaa

SEQ ID NO: 729875 - DNA, 19 bp, Mus musculus
  siRNA target sequence for 3230401L03Rik (NM_027545.1,748-766).
gaaattttgaagatattgt

SEQ ID NO: 729876 - DNA, 19 bp, Mus musculus
  siRNA target sequence for 3230401L03Rik (NM_027545.1,779-797).
cgggtcaatggaaatattt

SEQ ID NO: 729877 - DNA, 19 bp, Mus musculus
  siRNA target sequence for 3230401L03Rik (NM_027545.1,859-877).
ggtggagaaagcctacata

SEQ ID NO: 729878 - DNA, 19 bp, Mus musculus
  siRNA target sequence for 3230401L03Rik (NM_027545.1,869-887).
gcctacatattcagataga

SEQ ID NO: 729879 - DNA, 19 bp, Mus musculus
  siRNA target sequence for 3230401L03Rik (NM_027545.1,907-925).
gtggcacatcagacttagt

SEQ ID NO: 729880 - DNA, 19 bp, Mus musculus
  siRNA target sequence for 3230401L03Rik (NM_027545.1,1068-1086).
caagattcttctggaaatt

SEQ ID NO: 729881 - DNA, 19 bp, Mus musculus
  siRNA target sequence for 3230401L03Rik (NM_027545.1,1078-1096).
ctggaaatttgagatctaa

SEQ ID NO: 729882 - DNA, 19 bp, Mus musculus
  siRNA target sequence for 3230401L03Rik (NM_027545.1,1100-1118).
cttaagaccctctgatgaa

SEQ ID NO: 729883 - DNA, 19 bp, Mus musculus
  siRNA target sequence for 3230401L03Rik (NM_027545.1,1119-1137).
gatgaattgtcatttcaca

SEQ ID NO: 729884 - DNA, 19 bp, Mus musculus
  siRNA target sequence for 3230401L03Rik (NM_027545.1,1152-1170).
gaatcatctagttcatatt

SEQ ID NO: 729885 - DNA, 19 bp, Mus musculus
  siRNA target sequence for 3230401L03Rik (NM_027545.1,1162-1180).
gttcatattctccattagt

SEQ ID NO: 729886 - DNA, 19 bp, Mus musculus
  siRNA target sequence for 3230401L03Rik (NM_027545.1,1258-1276).
ctgataggcgacaagaaaa

SEQ ID NO: 729887 - DNA, 19 bp, Mus musculus
  siRNA target sequence for 3230401L03Rik (NM_027545.1,1260-1278).
gataggcgacaagaaaaca

SEQ ID NO: 729888 - DNA, 19 bp, Mus musculus
  siRNA target sequence for 3230401L03Rik (NM_027545.1,1277-1295).
caggaagccttcagataaa

SEQ ID NO: 729889 - DNA, 19 bp, Mus musculus
  siRNA target sequence for 3230401L03Rik (NM_027545.1,1396-1414).
gaggacttcagcaagacat

SEQ ID NO: 729890 - DNA, 19 bp, Mus musculus
  siRNA target sequence for 3230401L03Rik (NM_027545.1,1404-1422).
cagcaagacatgacattga

SEQ ID NO: 729891 - DNA, 19 bp, Mus musculus
  siRNA target sequence for 3230401L03Rik (NM_027545.1,1407-1425).
caagacatgacattgacaa

SEQ ID NO: 729892 - DNA, 19 bp, Mus musculus
  siRNA target sequence for 3230401L03Rik (NM_027545.1,1437-1455).
gaggcagagtccacctata

SEQ ID NO: 729893 - DNA, 19 bp, Mus musculus
  siRNA target sequence for 3230401L03Rik (NM_027545.1,1445-1463).
gtccacctatatcttaaat

SEQ ID NO: 729894 - DNA, 19 bp, Mus musculus
  siRNA target sequence for 3230401L03Rik (NM_027545.1,1447-1465).
ccacctatatcttaaatgt

SEQ ID NO: 729895 - DNA, 19 bp, Mus musculus
  siRNA target sequence for 3230401L03Rik (NM_027545.1,1448-1466).
cacctatatcttaaatgtt

SEQ ID NO: 729896 - DNA, 19 bp, Mus musculus
  siRNA target sequence for 3230401L03Rik (NM_027545.1,1514-1532).
ggggaatatggaattagct

SEQ ID NO: 729897 - DNA, 19 bp, Mus musculus
  siRNA target sequence for 3230401L03Rik (NM_027545.1,1524-1542).
gaattagctgaacaactta

SEQ ID NO: 729898 - DNA, 19 bp, Mus musculus
  siRNA target sequence for 3230401L03Rik (NM_027545.1,1581-1599).
cagatgccggcaaaaagat

SEQ ID NO: 729899 - DNA, 19 bp, Mus musculus
  siRNA target sequence for 3230401L03Rik (NM_027545.1,1601-1619).
gggcgtagagcatgaagat

SEQ ID NO: 729900 - DNA, 19 bp, Mus musculus
  siRNA target sequence for 3230401L03Rik (NM_027545.1,1620-1638).
gaacaagaagtaatcctta

SEQ ID NO: 729901 - DNA, 19 bp, Mus musculus
  siRNA target sequence for 3230401L03Rik (NM_027545.1,1757-1775).
ccgatactttcctgatgat

SEQ ID NO: 729902 - DNA, 19 bp, Mus musculus
  siRNA target sequence for 3230401L03Rik (NM_027545.1,1767-1785).
cctgatgatgatcatttga

SEQ ID NO: 729903 - DNA, 19 bp, Mus musculus
  siRNA target sequence for 3230401L03Rik (NM_027545.1,1794-1812).
gatttagtcaagaatgaga

SEQ ID NO: 729904 - DNA, 19 bp, Mus musculus
  siRNA target sequence for 3230401L03Rik (NM_027545.1,1818-1836).
ggaacagatatcaaccaaa

SEQ ID NO: 729905 - DNA, 19 bp, Mus musculus
  siRNA target sequence for 3230401L03Rik (NM_027545.1,2010-2028).
gcaaagtgcctttactgtt

SEQ ID NO: 729906 - DNA, 19 bp, Mus musculus
  siRNA target sequence for 3230401L03Rik (NM_027545.1,2064-2082).
gcaatcggtgtgaaggttt

SEQ ID NO: 729907 - DNA, 19 bp, Mus musculus
  siRNA target sequence for 3230401L03Rik (NM_027545.1,2065-2083).
caatcggtgtgaaggttta

SEQ ID NO: 729908 - DNA, 19 bp, Mus musculus
  siRNA target sequence for 3230401L03Rik (NM_027545.1,2148-2166).
catcaagcagccactgtat

SEQ ID NO: 729909 - DNA, 19 bp, Mus musculus
  siRNA target sequence for 3230401L03Rik (NM_027545.1,2155-2173).
cagccactgtattagatga

SEQ ID NO: 729910 - DNA, 19 bp, Mus musculus
  siRNA target sequence for 3230401L03Rik (NM_027545.1,2158-2176).
ccactgtattagatgaaga

SEQ ID NO: 729911 - DNA, 19 bp, Mus musculus
  siRNA target sequence for 3230401L03Rik (NM_027545.1,2159-2177).
cactgtattagatgaagat

SEQ ID NO: 729912 - DNA, 19 bp, Mus musculus
  siRNA target sequence for 3230401L03Rik (NM_027545.1,2187-2205).
gagatccagatgtttcgaa

SEQ ID NO: 729913 - DNA, 19 bp, Mus musculus
  siRNA target sequence for 3230401L03Rik (NM_027545.1,2260-2278).
ctaatatgggtttgaagaa

SEQ ID NO: 729914 - DNA, 19 bp, Mus musculus
  siRNA target sequence for 3230401L03Rik (NM_027545.1,2276-2294).
gaaacactatcatatggtt

SEQ ID NO: 729915 - DNA, 19 bp, Mus musculus
  siRNA target sequence for 3230401L03Rik (NM_027545.1,2328-2346).
gatatggctcccatctatt

SEQ ID NO: 729916 - DNA, 19 bp, Mus musculus
  siRNA target sequence for 3230401L03Rik (NM_027545.1,2357-2375).
cataatggaatctgatgaa

SEQ ID NO: 729917 - DNA, 19 bp, Mus musculus
  siRNA target sequence for 3230401L03Rik (NM_027545.1,2373-2391).
gaagaatggtccatgaata

SEQ ID NO: 729918 - DNA, 19 bp, Mus musculus
  siRNA target sequence for 3230401L03Rik (NM_027545.1,2383-2401).
ccatgaataagaagttgat

SEQ ID NO: 729919 - DNA, 19 bp, Mus musculus
  siRNA target sequence for 3230401L03Rik (NM_027545.1,2545-2563).
gtggtatgctggatctaga

SEQ ID NO: 729920 - DNA, 19 bp, Mus musculus
  siRNA target sequence for 3230401L03Rik (NM_027545.1,2555-2573).
ggatctagaacctagacta

SEQ ID NO: 729921 - DNA, 19 bp, Mus musculus
  siRNA target sequence for 3230401L03Rik (NM_027545.1,2582-2600).
ggggatccgagaaagcttt

SEQ ID NO: 729922 - DNA, 19 bp, Mus musculus
  siRNA target sequence for 3230401L03Rik (NM_027545.1,2632-2650).
ctcagtggtggaaaccata

SEQ ID NO: 729923 - DNA, 19 bp, Mus musculus
  siRNA target sequence for 3230401L03Rik (NM_027545.1,2638-2656).
ggtggaaaccatatgatat

SEQ ID NO: 729924 - DNA, 19 bp, Mus musculus
  siRNA target sequence for 3230401L03Rik (NM_027545.1,2652-2670).
gatatcaccaaaagtaaaa

SEQ ID NO: 729925 - DNA, 19 bp, Mus musculus
  siRNA target sequence for Kynu (NM_027552.1,139-157).
catcgcggctgaactcaat

SEQ ID NO: 729926 - DNA, 19 bp, Mus musculus
  siRNA target sequence for Kynu (NM_027552.1,142-160).
cgcggctgaactcaattgt

SEQ ID NO: 729927 - DNA, 19 bp, Mus musculus
  siRNA target sequence for Kynu (NM_027552.1,144-162).
cggctgaactcaattgtga

SEQ ID NO: 729928 - DNA, 19 bp, Mus musculus
  siRNA target sequence for Kynu (NM_027552.1,154-172).
caattgtgacccaacagat

SEQ ID NO: 729929 - DNA, 19 bp, Mus musculus
  siRNA target sequence for Kynu (NM_027552.1,188-206).
cgcttggatgaggaagata

SEQ ID NO: 729930 - DNA, 19 bp, Mus musculus
  siRNA target sequence for Kynu (NM_027552.1,250-268).
ggacctgccttcaattgat

SEQ ID NO: 729931 - DNA, 19 bp, Mus musculus
  siRNA target sequence for Kynu (NM_027552.1,253-271).
cctgccttcaattgatcta

SEQ ID NO: 729932 - DNA, 19 bp, Mus musculus
  siRNA target sequence for Kynu (NM_027552.1,254-272).
ctgccttcaattgatctat

SEQ ID NO: 729933 - DNA, 19 bp, Mus musculus
  siRNA target sequence for Kynu (NM_027552.1,256-274).
gccttcaattgatctatct

SEQ ID NO: 729934 - DNA, 19 bp, Mus musculus
  siRNA target sequence for Kynu (NM_027552.1,324-342).
gccttcaaccgaaaatggt

SEQ ID NO: 729935 - DNA, 19 bp, Mus musculus
  siRNA target sequence for Kynu (NM_027552.1,387-405).
gagcctatggccatgatgt

SEQ ID NO: 729936 - DNA, 19 bp, Mus musculus
  siRNA target sequence for Kynu (NM_027552.1,438-456).
gtattgtaagccttatgaa

SEQ ID NO: 729937 - DNA, 19 bp, Mus musculus
  siRNA target sequence for Kynu (NM_027552.1,447-465).
gccttatgaaggacattgt

SEQ ID NO: 729938 - DNA, 19 bp, Mus musculus
  siRNA target sequence for Kynu (NM_027552.1,472-490).
ccatgagaaagaaatagct

SEQ ID NO: 729939 - DNA, 19 bp, Mus musculus
  siRNA target sequence for Kynu (NM_027552.1,491-509).
ctaatgaatgctttgacta

SEQ ID NO: 729940 - DNA, 19 bp, Mus musculus
  siRNA target sequence for Kynu (NM_027552.1,496-514).
gaatgctttgactattaat

SEQ ID NO: 729941 - DNA, 19 bp, Mus musculus
  siRNA target sequence for Kynu (NM_027552.1,524-542).
ctgctgttatcattcttta

SEQ ID NO: 729942 - DNA, 19 bp, Mus musculus
  siRNA target sequence for Kynu (NM_027552.1,552-570).
caaagcggcacaaaattct

SEQ ID NO: 729943 - DNA, 19 bp, Mus musculus
  siRNA target sequence for Kynu (NM_027552.1,590-608).
ccttctgatcattatgcta

SEQ ID NO: 729944 - DNA, 19 bp, Mus musculus
  siRNA target sequence for Kynu (NM_027552.1,606-624).
ctattgagtcacagattca

SEQ ID NO: 729945 - DNA, 19 bp, Mus musculus
  siRNA target sequence for Kynu (NM_027552.1,631-649).
cggacttgatgttgagaaa

SEQ ID NO: 729946 - DNA, 19 bp, Mus musculus
  siRNA target sequence for Kynu (NM_027552.1,678-696).
gggaagagaccttaaggat

SEQ ID NO: 729947 - DNA, 19 bp, Mus musculus
  siRNA target sequence for Kynu (NM_027552.1,903-921).
cctgctggtgttcctataa

SEQ ID NO: 729948 - DNA, 19 bp, Mus musculus
  siRNA target sequence for Kynu (NM_027552.1,906-924).
gctggtgttcctataagta

SEQ ID NO: 729949 - DNA, 19 bp, Mus musculus
  siRNA target sequence for Kynu (NM_027552.1,907-925).
ctggtgttcctataagtat

SEQ ID NO: 729950 - DNA, 19 bp, Mus musculus
  siRNA target sequence for Kynu (NM_027552.1,912-930).
gttcctataagtatttaaa

SEQ ID NO: 729951 - DNA, 19 bp, Mus musculus
  siRNA target sequence for Kynu (NM_027552.1,958-976).
ctttgtccacgagaaacat

SEQ ID NO: 729952 - DNA, 19 bp, Mus musculus
  siRNA target sequence for Kynu (NM_027552.1,967-985).
cgagaaacatgctcatact

SEQ ID NO: 729953 - DNA, 19 bp, Mus musculus
  siRNA target sequence for Kynu (NM_027552.1,1013-1031).
ggccatgacctcagtacaa

SEQ ID NO: 729954 - DNA, 19 bp, Mus musculus
  siRNA target sequence for Kynu (NM_027552.1,1019-1037).
gacctcagtacaaggttta

SEQ ID NO: 729955 - DNA, 19 bp, Mus musculus
  siRNA target sequence for Kynu (NM_027552.1,1022-1040).
ctcagtacaaggtttaaca

SEQ ID NO: 729956 - DNA, 19 bp, Mus musculus
  siRNA target sequence for Kynu (NM_027552.1,1029-1047).
caaggtttaacatggataa

SEQ ID NO: 729957 - DNA, 19 bp, Mus musculus
  siRNA target sequence for Kynu (NM_027552.1,1032-1050).
ggtttaacatggataacaa

SEQ ID NO: 729958 - DNA, 19 bp, Mus musculus
  siRNA target sequence for Kynu (NM_027552.1,1042-1060).
ggataacaaactacaatta

SEQ ID NO: 729959 - DNA, 19 bp, Mus musculus
  siRNA target sequence for Kynu (NM_027552.1,1070-1088).
gccaatggattccgaattt

SEQ ID NO: 729960 - DNA, 19 bp, Mus musculus
  siRNA target sequence for Kynu (NM_027552.1,1072-1090).
caatggattccgaatttca

SEQ ID NO: 729961 - DNA, 19 bp, Mus musculus
  siRNA target sequence for Kynu (NM_027552.1,1177-1195).
cattctgctgacaggttat

SEQ ID NO: 729962 - DNA, 19 bp, Mus musculus
  siRNA target sequence for Kynu (NM_027552.1,1198-1216).
ggaatacatgctcaaacat

SEQ ID NO: 729963 - DNA, 19 bp, Mus musculus
  siRNA target sequence for Kynu (NM_027552.1,1214-1232).
cattaccacagcaaagata

SEQ ID NO: 729964 - DNA, 19 bp, Mus musculus
  siRNA target sequence for Kynu (NM_027552.1,1286-1304).
gagcgtggctgccagttaa

SEQ ID NO: 729965 - DNA, 19 bp, Mus musculus
  siRNA target sequence for Kynu (NM_027552.1,1288-1306).
gcgtggctgccagttaaca

SEQ ID NO: 729966 - DNA, 19 bp, Mus musculus
  siRNA target sequence for Kynu (NM_027552.1,1312-1330).
cttttccattcccaagaaa

SEQ ID NO: 729967 - DNA, 19 bp, Mus musculus
  siRNA target sequence for Kynu (NM_027552.1,1332-1350).
gcgtttttaaggaactaga

SEQ ID NO: 729968 - DNA, 19 bp, Mus musculus
  siRNA target sequence for Kynu (NM_027552.1,1399-1417).
ggcccctgttcctctctat

SEQ ID NO: 729969 - DNA, 19 bp, Mus musculus
  siRNA target sequence for Kynu (NM_027552.1,1400-1418).
gcccctgttcctctctata

SEQ ID NO: 729970 - DNA, 19 bp, Mus musculus
  siRNA target sequence for Kynu (NM_027552.1,1401-1419).
cccctgttcctctctataa

SEQ ID NO: 729971 - DNA, 19 bp, Mus musculus
  siRNA target sequence for Kynu (NM_027552.1,1403-1421).
cctgttcctctctataatt

SEQ ID NO: 729972 - DNA, 19 bp, Mus musculus
  siRNA target sequence for Kynu (NM_027552.1,1427-1445).
catgatgtttataagttca

SEQ ID NO: 729973 - DNA, 19 bp, Mus musculus
  siRNA target sequence for Kynu (NM_027552.1,1447-1465).
cagactgctcacttccata

SEQ ID NO: 729974 - DNA, 19 bp, Mus musculus
  siRNA target sequence for Kynu (NM_027552.1,1462-1480).
catactcgactcttcagaa

SEQ ID NO: 729975 - DNA, 19 bp, Mus musculus
  siRNA target sequence for 4632415N18Rik (NM_027559.1,342-360).
ctttctctgaccgaagatt

SEQ ID NO: 729976 - DNA, 19 bp, Mus musculus
  siRNA target sequence for 4632415N18Rik (NM_027559.1,346-364).
ctctgaccgaagatttaaa

SEQ ID NO: 729977 - DNA, 19 bp, Mus musculus
  siRNA target sequence for 4632415N18Rik (NM_027559.1,388-406).
cccatcgctgaccagaaaa

SEQ ID NO: 729978 - DNA, 19 bp, Mus musculus
  siRNA target sequence for 4632415N18Rik (NM_027559.1,389-407).
ccatcgctgaccagaaaaa

SEQ ID NO: 729979 - DNA, 19 bp, Mus musculus
  siRNA target sequence for 4632415N18Rik (NM_027559.1,390-408).
catcgctgaccagaaaaaa

SEQ ID NO: 729980 - DNA, 19 bp, Mus musculus
  siRNA target sequence for 4632415N18Rik (NM_027559.1,395-413).
ctgaccagaaaaaacaagt

SEQ ID NO: 729981 - DNA, 19 bp, Mus musculus
  siRNA target sequence for 4632415N18Rik (NM_027559.1,397-415).
gaccagaaaaaacaagtta

SEQ ID NO: 729982 - DNA, 19 bp, Mus musculus
  siRNA target sequence for 4632415N18Rik (NM_027559.1,430-448).
cctggactacactctactt

SEQ ID NO: 729983 - DNA, 19 bp, Mus musculus
  siRNA target sequence for 4632415N18Rik (NM_027559.1,431-449).
ctggactacactctacttt

SEQ ID NO: 729984 - DNA, 19 bp, Mus musculus
  siRNA target sequence for 4632415N18Rik (NM_027559.1,441-459).
ctctactttgcttcagtta

SEQ ID NO: 729985 - DNA, 19 bp, Mus musculus
  siRNA target sequence for 4632415N18Rik (NM_027559.1,484-502).
ctcgtctctcccagagttt

SEQ ID NO: 729986 - DNA, 19 bp, Mus musculus
  siRNA target sequence for 4632415N18Rik (NM_027559.1,591-609).
ccatgaactggcaccaaat

SEQ ID NO: 729987 - DNA, 19 bp, Mus musculus
  siRNA target sequence for 4632415N18Rik (NM_027559.1,595-613).
gaactggcaccaaatgtgt

SEQ ID NO: 729988 - DNA, 19 bp, Mus musculus
  siRNA target sequence for 4632415N18Rik (NM_027559.1,602-620).
caccaaatgtgtttatcaa

SEQ ID NO: 729989 - DNA, 19 bp, Mus musculus
  siRNA target sequence for 4632415N18Rik (NM_027559.1,605-623).
caaatgtgtttatcaagtt

SEQ ID NO: 729990 - DNA, 19 bp, Mus musculus
  siRNA target sequence for 4632415N18Rik (NM_027559.1,657-675).
gtaaccaggagcaccattt

SEQ ID NO: 729991 - DNA, 19 bp, Mus musculus
  siRNA target sequence for 4632415N18Rik (NM_027559.1,665-683).
gagcaccatttcaggataa

SEQ ID NO: 729992 - DNA, 19 bp, Mus musculus
  siRNA target sequence for 4632415N18Rik (NM_027559.1,750-768).
ctctgccaaaggatctcat

SEQ ID NO: 729993 - DNA, 19 bp, Mus musculus
  siRNA target sequence for 4632415N18Rik (NM_027559.1,752-770).
ctgccaaaggatctcattt

SEQ ID NO: 729994 - DNA, 19 bp, Mus musculus
  siRNA target sequence for 4632415N18Rik (NM_027559.1,813-831).
gcgaagaggcagagacttt

SEQ ID NO: 729995 - DNA, 19 bp, Mus musculus
  siRNA target sequence for 4632415N18Rik (NM_027559.1,826-844).
gactttcaggccgaaagat

SEQ ID NO: 729996 - DNA, 19 bp, Mus musculus
  siRNA target sequence for 4632415N18Rik (NM_027559.1,828-846).
ctttcaggccgaaagatga

SEQ ID NO: 729997 - DNA, 19 bp, Mus musculus
  siRNA target sequence for 4632415N18Rik (NM_027559.1,834-852).
ggccgaaagatgacatata

SEQ ID NO: 729998 - DNA, 19 bp, Mus musculus
  siRNA target sequence for 4632415N18Rik (NM_027559.1,912-930).
gtgaagagggtcatcttct

SEQ ID NO: 729999 - DNA, 19 bp, Mus musculus
  siRNA target sequence for 4632415N18Rik (NM_027559.1,919-937).
gggtcatcttctgatgatt

SEQ ID NO: 730000 - DNA, 19 bp, Mus musculus
  siRNA target sequence for 4632415N18Rik (NM_027559.1,920-938).
ggtcatcttctgatgatta

SEQ ID NO: 730001 - DNA, 19 bp, Mus musculus
  siRNA target sequence for 4632415N18Rik (NM_027559.1,1023-1041).
cgctggtgtaccaaaagga

SEQ ID NO: 730002 - DNA, 19 bp, Mus musculus
  siRNA target sequence for 4632415N18Rik (NM_027559.1,1045-1063).
catactcgcttctggaatt

SEQ ID NO: 730003 - DNA, 19 bp, Mus musculus
  siRNA target sequence for 4632415N18Rik (NM_027559.1,1159-1177).
ccccagttacaaaatgtta

SEQ ID NO: 730004 - DNA, 19 bp, Mus musculus
  siRNA target sequence for 4632415N18Rik (NM_027559.1,1161-1179).
ccagttacaaaatgttact

SEQ ID NO: 730005 - DNA, 19 bp, Mus musculus
  siRNA target sequence for 4632415N18Rik (NM_027559.1,1188-1206).
cagacaaggggtctgttta

SEQ ID NO: 730006 - DNA, 19 bp, Mus musculus
  siRNA target sequence for 4632415N18Rik (NM_027559.1,1190-1208).
gacaaggggtctgtttata

SEQ ID NO: 730007 - DNA, 19 bp, Mus musculus
  siRNA target sequence for 4632415N18Rik (NM_027559.1,1223-1241).
gcagagatgcctcttgata

SEQ ID NO: 730008 - DNA, 19 bp, Mus musculus
  siRNA target sequence for 4632415N18Rik (NM_027559.1,1349-1367).
ctagaagactgcaattgta

SEQ ID NO: 730009 - DNA, 19 bp, Mus musculus
  siRNA target sequence for 4632415N18Rik (NM_027559.1,1352-1370).
gaagactgcaattgtacaa

SEQ ID NO: 730010 - DNA, 19 bp, Mus musculus
  siRNA target sequence for 4632415N18Rik (NM_027559.1,1443-1461).
cggtggatggctatgtcta

SEQ ID NO: 730011 - DNA, 19 bp, Mus musculus
  siRNA target sequence for 4632415N18Rik (NM_027559.1,1452-1470).
gctatgtctactttctgaa

SEQ ID NO: 730012 - DNA, 19 bp, Mus musculus
  siRNA target sequence for 4632415N18Rik (NM_027559.1,1552-1570).
gcgaggaatctttctgtta

SEQ ID NO: 730013 - DNA, 19 bp, Mus musculus
  siRNA target sequence for 4632415N18Rik (NM_027559.1,1604-1622).
gatgccagaccctcaaagt

SEQ ID NO: 730014 - DNA, 19 bp, Mus musculus
  siRNA target sequence for 4632415N18Rik (NM_027559.1,1611-1629).
gaccctcaaagtcatttca

SEQ ID NO: 730015 - DNA, 19 bp, Mus musculus
  siRNA target sequence for 4632415N18Rik (NM_027559.1,1658-1676).
gacatcctgcagatatcca

SEQ ID NO: 730016 - DNA, 19 bp, Mus musculus
  siRNA target sequence for 4632415N18Rik (NM_027559.1,1818-1836).
gaaggctgaaagacgattt

SEQ ID NO: 730017 - DNA, 19 bp, Mus musculus
  siRNA target sequence for 4633402D15Rik (NM_027567.1,226-244).
gtcgcagctggctatttca

SEQ ID NO: 730018 - DNA, 19 bp, Mus musculus
  siRNA target sequence for 4633402D15Rik (NM_027567.1,228-246).
cgcagctggctatttcaga

SEQ ID NO: 730019 - DNA, 19 bp, Mus musculus
  siRNA target sequence for 4633402D15Rik (NM_027567.1,289-307).
ggaatgacgtggtgtatca

SEQ ID NO: 730020 - DNA, 19 bp, Mus musculus
  siRNA target sequence for 4633402D15Rik (NM_027567.1,330-348).
cgtggatttgctctttcaa

SEQ ID NO: 730021 - DNA, 19 bp, Mus musculus
  siRNA target sequence for 4633402D15Rik (NM_027567.1,334-352).
gatttgctctttcaagaaa

SEQ ID NO: 730022 - DNA, 19 bp, Mus musculus
  siRNA target sequence for 4633402D15Rik (NM_027567.1,339-357).
gctctttcaagaaaactct

SEQ ID NO: 730023 - DNA, 19 bp, Mus musculus
  siRNA target sequence for 4633402D15Rik (NM_027567.1,379-397).
ctatcggaaaagattgtct

SEQ ID NO: 730024 - DNA, 19 bp, Mus musculus
  siRNA target sequence for 4633402D15Rik (NM_027567.1,444-462).
gatccagggcatggatttt

SEQ ID NO: 730025 - DNA, 19 bp, Mus musculus
  siRNA target sequence for 4633402D15Rik (NM_027567.1,492-510).
ggtgaaacgagctatcgaa

SEQ ID NO: 730026 - DNA, 19 bp, Mus musculus
  siRNA target sequence for 4633402D15Rik (NM_027567.1,493-511).
gtgaaacgagctatcgaaa

SEQ ID NO: 730027 - DNA, 19 bp, Mus musculus
  siRNA target sequence for Spag9 (NM_027569.1,519-537).
gcgagtggagtctctagaa

SEQ ID NO: 730028 - DNA, 19 bp, Mus musculus
  siRNA target sequence for Spag9 (NM_027569.1,520-538).
cgagtggagtctctagaat

SEQ ID NO: 730029 - DNA, 19 bp, Mus musculus
  siRNA target sequence for Spag9 (NM_027569.1,660-678).
gatccataattatatggaa

SEQ ID NO: 730030 - DNA, 19 bp, Mus musculus
  siRNA target sequence for Spag9 (NM_027569.1,705-723).
gctctcagggagtgatcaa

SEQ ID NO: 730031 - DNA, 19 bp, Mus musculus
  siRNA target sequence for Spag9 (NM_027569.1,708-726).
ctcagggagtgatcaacta

SEQ ID NO: 730032 - DNA, 19 bp, Mus musculus
  siRNA target sequence for Spag9 (NM_027569.1,710-728).
cagggagtgatcaactaga

SEQ ID NO: 730033 - DNA, 19 bp, Mus musculus
  siRNA target sequence for Spag9 (NM_027569.1,727-745).
gaggctacagctcatagta

SEQ ID NO: 730034 - DNA, 19 bp, Mus musculus
  siRNA target sequence for Spag9 (NM_027569.1,729-747).
ggctacagctcatagtaga

SEQ ID NO: 730035 - DNA, 19 bp, Mus musculus
  siRNA target sequence for Spag9 (NM_027569.1,730-748).
gctacagctcatagtagaa

SEQ ID NO: 730036 - DNA, 19 bp, Mus musculus
  siRNA target sequence for Spag9 (NM_027569.1,844-862).
ggatcagagcaatggaaat

SEQ ID NO: 730037 - DNA, 19 bp, Mus musculus
  siRNA target sequence for Spag9 (NM_027569.1,897-915).
cctgaaggatgaactttct

SEQ ID NO: 730038 - DNA, 19 bp, Mus musculus
  siRNA target sequence for Spag9 (NM_027569.1,904-922).
gatgaactttctgatatta

SEQ ID NO: 730039 - DNA, 19 bp, Mus musculus
  siRNA target sequence for Spag9 (NM_027569.1,925-943).
caaggtggatctaaagcta

SEQ ID NO: 730040 - DNA, 19 bp, Mus musculus
  siRNA target sequence for Spag9 (NM_027569.1,1024-1042).
gtaaaaggcacagatacat

SEQ ID NO: 730041 - DNA, 19 bp, Mus musculus
  siRNA target sequence for Spag9 (NM_027569.1,1056-1074).
gataagcaaacacatagaa

SEQ ID NO: 730042 - DNA, 19 bp, Mus musculus
  siRNA target sequence for Spag9 (NM_027569.1,1141-1159).
gttcaagcaatcattgaat

SEQ ID NO: 730043 - DNA, 19 bp, Mus musculus
  siRNA target sequence for Spag9 (NM_027569.1,1163-1181).
ctcctgaattggatatgga

SEQ ID NO: 730044 - DNA, 19 bp, Mus musculus
  siRNA target sequence for Spag9 (NM_027569.1,1182-1200).
caaagacctcagtggatat

SEQ ID NO: 730045 - DNA, 19 bp, Mus musculus
  siRNA target sequence for Spag9 (NM_027569.1,1241-1259).
cttttgatcgcaatacaga

SEQ ID NO: 730046 - DNA, 19 bp, Mus musculus
  siRNA target sequence for Spag9 (NM_027569.1,1256-1274).
cagaatctctctttgaaga

SEQ ID NO: 730047 - DNA, 19 bp, Mus musculus
  siRNA target sequence for Spag9 (NM_027569.1,1319-1337).
gagcggatttactaggaat

SEQ ID NO: 730048 - DNA, 19 bp, Mus musculus
  siRNA target sequence for Spag9 (NM_027569.1,1340-1358).
gtcgtgaggtggagaatct

SEQ ID NO: 730049 - DNA, 19 bp, Mus musculus
  siRNA target sequence for Spag9 (NM_027569.1,1342-1360).
cgtgaggtggagaatctca

SEQ ID NO: 730050 - DNA, 19 bp, Mus musculus
  siRNA target sequence for Spag9 (NM_027569.1,1612-1630).
gcccagaggaagaggttta

SEQ ID NO: 730051 - DNA, 19 bp, Mus musculus
  siRNA target sequence for Spag9 (NM_027569.1,1623-1641).
gaggtttaccagagtagaa

SEQ ID NO: 730052 - DNA, 19 bp, Mus musculus
  siRNA target sequence for Spag9 (NM_027569.1,1744-1762).
ccagctatgcaagaaaaga

SEQ ID NO: 730053 - DNA, 19 bp, Mus musculus
  siRNA target sequence for Spag9 (NM_027569.1,1745-1763).
cagctatgcaagaaaagaa

SEQ ID NO: 730054 - DNA, 19 bp, Mus musculus
  siRNA target sequence for Spag9 (NM_027569.1,1792-1810).
cgactttttagctcttcaa

SEQ ID NO: 730055 - DNA, 19 bp, Mus musculus
  siRNA target sequence for Spag9 (NM_027569.1,1805-1823).
cttcaagtaatgcaacaaa

SEQ ID NO: 730056 - DNA, 19 bp, Mus musculus
  siRNA target sequence for Spag9 (NM_027569.1,1829-1847).
ctgaaccccctgttaacct

SEQ ID NO: 730057 - DNA, 19 bp, Mus musculus
  siRNA target sequence for Spag9 (NM_027569.1,1835-1853).
cccctgttaacctgaagta

SEQ ID NO: 730058 - DNA, 19 bp, Mus musculus
  siRNA target sequence for Spag9 (NM_027569.1,1838-1856).
ctgttaacctgaagtacaa

SEQ ID NO: 730059 - DNA, 19 bp, Mus musculus
  siRNA target sequence for Spag9 (NM_027569.1,1875-1893).
gactccctccgtgaagaaa

SEQ ID NO: 730060 - DNA, 19 bp, Mus musculus
  siRNA target sequence for Spag9 (NM_027569.1,1926-1944).
caagtccaaggcatttgat

SEQ ID NO: 730061 - DNA, 19 bp, Mus musculus
  siRNA target sequence for Spag9 (NM_027569.1,1956-1974).
ggaaactgaggctagttta

SEQ ID NO: 730062 - DNA, 19 bp, Mus musculus
  siRNA target sequence for Spag9 (NM_027569.1,2105-2123).
gggaaactaagatgaaaaa

SEQ ID NO: 730063 - DNA, 19 bp, Mus musculus
  siRNA target sequence for Spag9 (NM_027569.1,2145-2163).
cagaccactagacgaaaaa

SEQ ID NO: 730064 - DNA, 19 bp, Mus musculus
  siRNA target sequence for Spag9 (NM_027569.1,2147-2165).
gaccactagacgaaaaaga

SEQ ID NO: 730065 - DNA, 19 bp, Mus musculus
  siRNA target sequence for Spag9 (NM_027569.1,2158-2176).
gaaaaagatgcgtctatga

SEQ ID NO: 730066 - DNA, 19 bp, Mus musculus
  siRNA target sequence for Spag9 (NM_027569.1,2184-2202).
gtgtgctgtaggagtcaat

SEQ ID NO: 730067 - DNA, 19 bp, Mus musculus
  siRNA target sequence for Spag9 (NM_027569.1,2186-2204).
gtgctgtaggagtcaattt

SEQ ID NO: 730068 - DNA, 19 bp, Mus musculus
  siRNA target sequence for Spag9 (NM_027569.1,2242-2260).
ggagcgagtgtattttaca

SEQ ID NO: 730069 - DNA, 19 bp, Mus musculus
  siRNA target sequence for Spag9 (NM_027569.1,2277-2295).
ggacactgaaggcagtaaa

SEQ ID NO: 730070 - DNA, 19 bp, Mus musculus
  siRNA target sequence for Spag9 (NM_027569.1,2303-2321).
gtgcgtctcagagtagttt

SEQ ID NO: 730071 - DNA, 19 bp, Mus musculus
  siRNA target sequence for Spag9 (NM_027569.1,2306-2324).
cgtctcagagtagtttaga

SEQ ID NO: 730072 - DNA, 19 bp, Mus musculus
  siRNA target sequence for Spag9 (NM_027569.1,2309-2327).
ctcagagtagtttagacaa

SEQ ID NO: 730073 - DNA, 19 bp, Mus musculus
  siRNA target sequence for Spag9 (NM_027569.1,2456-2474).
gcaacatcctagatagttt

SEQ ID NO: 730074 - DNA, 19 bp, Mus musculus
  siRNA target sequence for Spag9 (NM_027569.1,2475-2493).
cactgtttgcaattctcat

SEQ ID NO: 730075 - DNA, 19 bp, Mus musculus
  siRNA target sequence for Spag9 (NM_027569.1,2756-2774).
gcgaagttgatgaaaatat

SEQ ID NO: 730076 - DNA, 19 bp, Mus musculus
  siRNA target sequence for Spag9 (NM_027569.1,2757-2775).
cgaagttgatgaaaatatt

SEQ ID NO: 730077 - DNA, 19 bp, Mus musculus
  siRNA target sequence for Spag9 (NM_027569.1,2761-2779).
gttgatgaaaatattccaa

SEQ ID NO: 730078 - DNA, 19 bp, Mus musculus
  siRNA target sequence for Spag9 (NM_027569.1,2911-2929).
ctctccccagtgtttcagt

SEQ ID NO: 730079 - DNA, 19 bp, Mus musculus
  siRNA target sequence for Spag9 (NM_027569.1,2917-2935).
ccagtgtttcagtcaagta

SEQ ID NO: 730080 - DNA, 19 bp, Mus musculus
  siRNA target sequence for Spag9 (NM_027569.1,2918-2936).
cagtgtttcagtcaagtaa

SEQ ID NO: 730081 - DNA, 19 bp, Mus musculus
  siRNA target sequence for Spag9 (NM_027569.1,2933-2951).
gtaatgactcagatgtgta

SEQ ID NO: 730082 - DNA, 19 bp, Mus musculus
  siRNA target sequence for Spag9 (NM_027569.1,3063-3081).
gtatgtccactcatctgta

SEQ ID NO: 730083 - DNA, 19 bp, Mus musculus
  siRNA target sequence for Spag9 (NM_027569.1,3092-3110).
ggaaatgtctccattccat

SEQ ID NO: 730084 - DNA, 19 bp, Mus musculus
  siRNA target sequence for Spag9 (NM_027569.1,3098-3116).
gtctccattccattaagct

SEQ ID NO: 730085 - DNA, 19 bp, Mus musculus
  siRNA target sequence for Spag9 (NM_027569.1,3192-3210).
cttccacagaggagttgat

SEQ ID NO: 730086 - DNA, 19 bp, Mus musculus
  siRNA target sequence for Spag9 (NM_027569.1,3214-3232).
caatgggatctgtcaaact

SEQ ID NO: 730087 - DNA, 19 bp, Mus musculus
  siRNA target sequence for Spag9 (NM_027569.1,3251-3269).
gacgtcctcatcattccat

SEQ ID NO: 730088 - DNA, 19 bp, Mus musculus
  siRNA target sequence for Spag9 (NM_027569.1,3256-3274).
cctcatcattccatacgat

SEQ ID NO: 730089 - DNA, 19 bp, Mus musculus
  siRNA target sequence for Spag9 (NM_027569.1,3307-3325).
ggctataggaacaaaatct

SEQ ID NO: 730090 - DNA, 19 bp, Mus musculus
  siRNA target sequence for Spag9 (NM_027569.1,3338-3356).
caaaggctatgaagataga

SEQ ID NO: 730091 - DNA, 19 bp, Mus musculus
  siRNA target sequence for Spag9 (NM_027569.1,3342-3360).
ggctatgaagatagagaaa

SEQ ID NO: 730092 - DNA, 19 bp, Mus musculus
  siRNA target sequence for Spag9 (NM_027569.1,3343-3361).
gctatgaagatagagaaat

SEQ ID NO: 730093 - DNA, 19 bp, Mus musculus
  siRNA target sequence for Spag9 (NM_027569.1,3424-3442).
gtatgggtctccattcgtt

SEQ ID NO: 730094 - DNA, 19 bp, Mus musculus
  siRNA target sequence for Spag9 (NM_027569.1,3449-3467).
ccacgctccgcctctatca

SEQ ID NO: 730095 - DNA, 19 bp, Mus musculus
  siRNA target sequence for Spag9 (NM_027569.1,3498-3516).
ggatattgagccttatgta

SEQ ID NO: 730096 - DNA, 19 bp, Mus musculus
  siRNA target sequence for Spag9 (NM_027569.1,3505-3523).
gagccttatgtaagcaaaa

SEQ ID NO: 730097 - DNA, 19 bp, Mus musculus
  siRNA target sequence for Spag9 (NM_027569.1,3514-3532).
gtaagcaaaatgttaggta

SEQ ID NO: 730098 - DNA, 19 bp, Mus musculus
  siRNA target sequence for Spag9 (NM_027569.1,3680-3698).
gaagtgtaatccgtgtata

SEQ ID NO: 730099 - DNA, 19 bp, Mus musculus
  siRNA target sequence for Spag9 (NM_027569.1,3692-3710).
gtgtatatggtgatgagaa

SEQ ID NO: 730100 - DNA, 19 bp, Mus musculus
  siRNA target sequence for Spag9 (NM_027569.1,3757-3775).
gcacatgcacagctttgtt

SEQ ID NO: 730101 - DNA, 19 bp, Mus musculus
  siRNA target sequence for Spag9 (NM_027569.1,3758-3776).
cacatgcacagctttgttt

SEQ ID NO: 730102 - DNA, 19 bp, Mus musculus
  siRNA target sequence for Spag9 (NM_027569.1,3814-3832).
gtcccaggtcaggtcatta

SEQ ID NO: 730103 - DNA, 19 bp, Mus musculus
  siRNA target sequence for Spag9 (NM_027569.1,3944-3962).
gagagggctacattgactt

SEQ ID NO: 730104 - DNA, 19 bp, Mus musculus
  siRNA target sequence for Spag9 (NM_027569.1,3960-3978).
cttccggatgggtgatgaa

SEQ ID NO: 730105 - DNA, 19 bp, Mus musculus
  siRNA target sequence for 4921521F21Rik (NM_027582.1,331-349).
gcttccctgcacatgtcat

SEQ ID NO: 730106 - DNA, 19 bp, Mus musculus
  siRNA target sequence for 4921521F21Rik (NM_027582.1,442-460).
catgaagccaggcaatgat

SEQ ID NO: 730107 - DNA, 19 bp, Mus musculus
  siRNA target sequence for 4921521F21Rik (NM_027582.1,461-479).
cttattccaacagatgaaa

SEQ ID NO: 730108 - DNA, 19 bp, Mus musculus
  siRNA target sequence for 4921521F21Rik (NM_027582.1,653-671).
gagtgtcacccttatctga

SEQ ID NO: 730109 - DNA, 19 bp, Mus musculus
  siRNA target sequence for 4921521F21Rik (NM_027582.1,737-755).
ggcagccaacggtgtaaga

SEQ ID NO: 730110 - DNA, 19 bp, Mus musculus
  siRNA target sequence for 4921521F21Rik (NM_027582.1,860-878).
ctgcagcgtgggattgtca

SEQ ID NO: 730111 - DNA, 19 bp, Mus musculus
  siRNA target sequence for 4921521F21Rik (NM_027582.1,862-880).
gcagcgtgggattgtcatt

SEQ ID NO: 730112 - DNA, 19 bp, Mus musculus
  siRNA target sequence for 4921521F21Rik (NM_027582.1,866-884).
cgtgggattgtcattgtca

SEQ ID NO: 730113 - DNA, 19 bp, Mus musculus
  siRNA target sequence for 4921521F21Rik (NM_027582.1,952-970).
ggacatggcagttatagat

SEQ ID NO: 730114 - DNA, 19 bp, Mus musculus
  siRNA target sequence for 4921521F21Rik (NM_027582.1,953-971).
gacatggcagttatagata

SEQ ID NO: 730115 - DNA, 19 bp, Mus musculus
  siRNA target sequence for 4921521F21Rik (NM_027582.1,968-986).
gataggctgaacagaaact

SEQ ID NO: 730116 - DNA, 19 bp, Mus musculus
  siRNA target sequence for 4921521F21Rik (NM_027582.1,979-997).
cagaaactaccgatatgct

SEQ ID NO: 730117 - DNA, 19 bp, Mus musculus
  siRNA target sequence for 4921521F21Rik (NM_027582.1,995-1013).
gctactgctcgtattattt

SEQ ID NO: 730118 - DNA, 19 bp, Mus musculus
  siRNA target sequence for 4921521F21Rik (NM_027582.1,1016-1034).
gctcaccccaattatccat

SEQ ID NO: 730119 - DNA, 19 bp, Mus musculus
  siRNA target sequence for 4921521F21Rik (NM_027582.1,1017-1035).
ctcaccccaattatccatt

SEQ ID NO: 730120 - DNA, 19 bp, Mus musculus
  siRNA target sequence for 4921521F21Rik (NM_027582.1,1019-1037).
caccccaattatccatttt

SEQ ID NO: 730121 - DNA, 19 bp, Mus musculus
  siRNA target sequence for 4921521F21Rik (NM_027582.1,1023-1041).
ccaattatccatttttgga

SEQ ID NO: 730122 - DNA, 19 bp, Mus musculus
  siRNA target sequence for 4921511F01Rik (NM_027583.1,213-231).
gaagggacacctggaatta

SEQ ID NO: 730123 - DNA, 19 bp, Mus musculus
  siRNA target sequence for 4921511F01Rik (NM_027583.1,262-280).
cctcagctgagagagtaaa

SEQ ID NO: 730124 - DNA, 19 bp, Mus musculus
  siRNA target sequence for 4921511F01Rik (NM_027583.1,265-283).
cagctgagagagtaaaact

SEQ ID NO: 730125 - DNA, 19 bp, Mus musculus
  siRNA target sequence for 4921511F01Rik (NM_027583.1,306-324).
caaaataacgagttagaga

SEQ ID NO: 730126 - DNA, 19 bp, Mus musculus
  siRNA target sequence for 4921511F01Rik (NM_027583.1,382-400).
ccaagataatggaactaga

SEQ ID NO: 730127 - DNA, 19 bp, Mus musculus
  siRNA target sequence for 4921511F01Rik (NM_027583.1,434-452).
catccccttaaagaacata

SEQ ID NO: 730128 - DNA, 19 bp, Mus musculus
  siRNA target sequence for 4921511F01Rik (NM_027583.1,590-608).
caccaccctgccacagatt

SEQ ID NO: 730129 - DNA, 19 bp, Mus musculus
  siRNA target sequence for 4921511F01Rik (NM_027583.1,595-613).
ccctgccacagattgacaa

SEQ ID NO: 730130 - DNA, 19 bp, Mus musculus
  siRNA target sequence for 4921511F01Rik (NM_027583.1,596-614).
cctgccacagattgacaaa

SEQ ID NO: 730131 - DNA, 19 bp, Mus musculus
  siRNA target sequence for 4921511F01Rik (NM_027583.1,597-615).
ctgccacagattgacaaat

SEQ ID NO: 730132 - DNA, 19 bp, Mus musculus
  siRNA target sequence for 4921511F01Rik (NM_027583.1,616-634).
ggcttcaggtagccttaaa

SEQ ID NO: 730133 - DNA, 19 bp, Mus musculus
  siRNA target sequence for 4921511F01Rik (NM_027583.1,640-658).
ccagctcttgctatagaca

SEQ ID NO: 730134 - DNA, 19 bp, Mus musculus
  siRNA target sequence for 4921511F01Rik (NM_027583.1,649-667).
gctatagacagaagaaata

SEQ ID NO: 730135 - DNA, 19 bp, Mus musculus
  siRNA target sequence for 4921511F01Rik (NM_027583.1,747-765).
cacgctgaagacatagcaa

SEQ ID NO: 730136 - DNA, 19 bp, Mus musculus
  siRNA target sequence for 4921511F01Rik (NM_027583.1,766-784).
gcatcgcaagtttcattga

SEQ ID NO: 730137 - DNA, 19 bp, Mus musculus
  siRNA target sequence for 4921511F01Rik (NM_027583.1,839-857).
ccatgcgcacaggagtatt

SEQ ID NO: 730138 - DNA, 19 bp, Mus musculus
  siRNA target sequence for 4921511F01Rik (NM_027583.1,843-861).
gcgcacaggagtattgttt

SEQ ID NO: 730139 - DNA, 19 bp, Mus musculus
  siRNA target sequence for 4921511F01Rik (NM_027583.1,844-862).
cgcacaggagtattgtttt

SEQ ID NO: 730140 - DNA, 19 bp, Mus musculus
  siRNA target sequence for 4921511F01Rik (NM_027583.1,891-909).
cgtcaggcagccgtgttta

SEQ ID NO: 730141 - DNA, 19 bp, Mus musculus
  siRNA target sequence for 4921511F01Rik (NM_027583.1,894-912).
caggcagccgtgtttagat

SEQ ID NO: 730142 - DNA, 19 bp, Mus musculus
  siRNA target sequence for 4921511F01Rik (NM_027583.1,994-1012).
ctgtaagcaagctcatcaa

SEQ ID NO: 730143 - DNA, 19 bp, Mus musculus
  siRNA target sequence for 4921511F01Rik (NM_027583.1,1000-1018).
gcaagctcatcaaactgta

SEQ ID NO: 730144 - DNA, 19 bp, Mus musculus
  siRNA target sequence for 4921511F01Rik (NM_027583.1,1016-1034).
gtattggcaggccatgatt

SEQ ID NO: 730145 - DNA, 19 bp, Mus musculus
  siRNA target sequence for 4921511F01Rik (NM_027583.1,1059-1077).
gctttctcggttatgtaca

SEQ ID NO: 730146 - DNA, 19 bp, Mus musculus
  siRNA target sequence for 4921511F01Rik (NM_027583.1,1076-1094).
cacgccctttgcaacaaga

SEQ ID NO: 730147 - DNA, 19 bp, Mus musculus
  siRNA target sequence for 4921511F01Rik (NM_027583.1,1078-1096).
cgccctttgcaacaagaat

SEQ ID NO: 730148 - DNA, 19 bp, Mus musculus
  siRNA target sequence for 4921511F01Rik (NM_027583.1,1080-1098).
ccctttgcaacaagaatca

SEQ ID NO: 730149 - DNA, 19 bp, Mus musculus
  siRNA target sequence for 4921511F01Rik (NM_027583.1,1150-1168).
cctacgtggactgtatcta

SEQ ID NO: 730150 - DNA, 19 bp, Mus musculus
  siRNA target sequence for 4921511F01Rik (NM_027583.1,1246-1264).
cacttgggttcaaaaacaa

SEQ ID NO: 730151 - DNA, 19 bp, Mus musculus
  siRNA target sequence for 4921511F01Rik (NM_027583.1,1271-1289).
cgggaaattcttggaaaaa

SEQ ID NO: 730152 - DNA, 19 bp, Mus musculus
  siRNA target sequence for 4921511F01Rik (NM_027583.1,1273-1291).
ggaaattcttggaaaaagt

SEQ ID NO: 730153 - DNA, 19 bp, Mus musculus
  siRNA target sequence for 4921511F01Rik (NM_027583.1,1415-1433).
ccggagcacacaactgaat

SEQ ID NO: 730154 - DNA, 19 bp, Mus musculus
  siRNA target sequence for 4921511F01Rik (NM_027583.1,1517-1535).
ggcccaggtgatcaatcaa

SEQ ID NO: 730155 - DNA, 19 bp, Mus musculus
  siRNA target sequence for 4921511F01Rik (NM_027583.1,1655-1673).
ggagcgtgtgtggaataca

SEQ ID NO: 730156 - DNA, 19 bp, Mus musculus
  siRNA target sequence for 4921511F01Rik (NM_027583.1,1662-1680).
gtgtggaatacaatccaaa

SEQ ID NO: 730157 - DNA, 19 bp, Mus musculus
  siRNA target sequence for 4921521J11Rik (NM_027590.1,245-263).
gggaggttgctgtatgaca

SEQ ID NO: 730158 - DNA, 19 bp, Mus musculus
  siRNA target sequence for 4921521J11Rik (NM_027590.1,249-267).
ggttgctgtatgacatgtt

SEQ ID NO: 730159 - DNA, 19 bp, Mus musculus
  siRNA target sequence for 4921521J11Rik (NM_027590.1,250-268).
gttgctgtatgacatgttt

SEQ ID NO: 730160 - DNA, 19 bp, Mus musculus
  siRNA target sequence for 4921521J11Rik (NM_027590.1,287-305).
ccggtggtatggagagaaa

SEQ ID NO: 730161 - DNA, 19 bp, Mus musculus
  siRNA target sequence for 4921521J11Rik (NM_027590.1,288-306).
cggtggtatggagagaaat

SEQ ID NO: 730162 - DNA, 19 bp, Mus musculus
  siRNA target sequence for 4921521J11Rik (NM_027590.1,330-348).
ggaacgactcacaagataa

SEQ ID NO: 730163 - DNA, 19 bp, Mus musculus
  siRNA target sequence for 4921521J11Rik (NM_027590.1,356-374).
cagttcttacggagtttat

SEQ ID NO: 730164 - DNA, 19 bp, Mus musculus
  siRNA target sequence for 4921521J11Rik (NM_027590.1,358-376).
gttcttacggagtttattt

SEQ ID NO: 730165 - DNA, 19 bp, Mus musculus
  siRNA target sequence for 4921521J11Rik (NM_027590.1,361-379).
cttacggagtttatttgaa

SEQ ID NO: 730166 - DNA, 19 bp, Mus musculus
  siRNA target sequence for 4921521J11Rik (NM_027590.1,389-407).
ggtcgggtccagtgtgaaa

SEQ ID NO: 730167 - DNA, 19 bp, Mus musculus
  siRNA target sequence for 4921521J11Rik (NM_027590.1,439-457).
cacgctggaacgatcagaa

SEQ ID NO: 730168 - DNA, 19 bp, Mus musculus
  siRNA target sequence for 4921521J11Rik (NM_027590.1,441-459).
cgctggaacgatcagaaat

SEQ ID NO: 730169 - DNA, 19 bp, Mus musculus
  siRNA target sequence for 4921521J11Rik (NM_027590.1,554-572).
caagactctcctgttaact

SEQ ID NO: 730170 - DNA, 19 bp, Mus musculus
  siRNA target sequence for 4921521J11Rik (NM_027590.1,596-614).
gatgtccttcctctaataa

SEQ ID NO: 730171 - DNA, 19 bp, Mus musculus
  siRNA target sequence for 4921521J11Rik (NM_027590.1,602-620).
cttcctctaataatcaaca

SEQ ID NO: 730172 - DNA, 19 bp, Mus musculus
  siRNA target sequence for 4921521J11Rik (NM_027590.1,641-659).
gccaatctcttatataaat

SEQ ID NO: 730173 - DNA, 19 bp, Mus musculus
  siRNA target sequence for 4921521J11Rik (NM_027590.1,642-660).
ccaatctcttatataaata

SEQ ID NO: 730174 - DNA, 19 bp, Mus musculus
  siRNA target sequence for 4921521J11Rik (NM_027590.1,701-719).
cggtccacacagtcagaaa

SEQ ID NO: 730175 - DNA, 19 bp, Mus musculus
  siRNA target sequence for 4921521J11Rik (NM_027590.1,702-720).
ggtccacacagtcagaaaa

SEQ ID NO: 730176 - DNA, 19 bp, Mus musculus
  siRNA target sequence for 4921521J11Rik (NM_027590.1,737-755).
caggatacatctgatttaa

SEQ ID NO: 730177 - DNA, 19 bp, Mus musculus
  siRNA target sequence for 4921521J11Rik (NM_027590.1,740-758).
gatacatctgatttaatgt

SEQ ID NO: 730178 - DNA, 19 bp, Mus musculus
  siRNA target sequence for 4921521J11Rik (NM_027590.1,770-788).
cgtagctctcagaagtaca

SEQ ID NO: 730179 - DNA, 19 bp, Mus musculus
  siRNA target sequence for 4921521J11Rik (NM_027590.1,771-789).
gtagctctcagaagtacat

SEQ ID NO: 730180 - DNA, 19 bp, Mus musculus
  siRNA target sequence for 4921521J11Rik (NM_027590.1,774-792).
gctctcagaagtacataat

SEQ ID NO: 730181 - DNA, 19 bp, Mus musculus
  siRNA target sequence for 4921521J11Rik (NM_027590.1,797-815).
ggactgactgagaaatcat

SEQ ID NO: 730182 - DNA, 19 bp, Mus musculus
  siRNA target sequence for 4921521J11Rik (NM_027590.1,834-852).
gggagaggttgtttaagat

SEQ ID NO: 730183 - DNA, 19 bp, Mus musculus
  siRNA target sequence for 4921521J11Rik (NM_027590.1,835-853).
ggagaggttgtttaagatt

SEQ ID NO: 730184 - DNA, 19 bp, Mus musculus
  siRNA target sequence for 4921521J11Rik (NM_027590.1,840-858).
ggttgtttaagattctgaa

SEQ ID NO: 730185 - DNA, 19 bp, Mus musculus
  siRNA target sequence for 4921521J11Rik (NM_027590.1,841-859).
gttgtttaagattctgaat

SEQ ID NO: 730186 - DNA, 19 bp, Mus musculus
  siRNA target sequence for 4921521J11Rik (NM_027590.1,876-894).
gcgaatggcagatggataa

SEQ ID NO: 730187 - DNA, 19 bp, Mus musculus
  siRNA target sequence for 4921521J11Rik (NM_027590.1,877-895).
cgaatggcagatggataaa

SEQ ID NO: 730188 - DNA, 19 bp, Mus musculus
  siRNA target sequence for 4921521J11Rik (NM_027590.1,966-984).
gcgaagctcacaacaacta

SEQ ID NO: 730189 - DNA, 19 bp, Mus musculus
  siRNA target sequence for 4921521J11Rik (NM_027590.1,967-985).
cgaagctcacaacaactat

SEQ ID NO: 730190 - DNA, 19 bp, Mus musculus
  siRNA target sequence for 4921521J11Rik (NM_027590.1,968-986).
gaagctcacaacaactata

SEQ ID NO: 730191 - DNA, 19 bp, Mus musculus
  siRNA target sequence for 4921521J11Rik (NM_027590.1,972-990).
ctcacaacaactataaaaa

SEQ ID NO: 730192 - DNA, 19 bp, Mus musculus
  siRNA target sequence for 4921521J11Rik (NM_027590.1,1005-1023).
ccacgatgctggtgttctt

SEQ ID NO: 730193 - DNA, 19 bp, Mus musculus
  siRNA target sequence for 4921521J11Rik (NM_027590.1,1086-1104).
caagccaggttccactaat

SEQ ID NO: 730194 - DNA, 19 bp, Mus musculus
  siRNA target sequence for 4921521J11Rik (NM_027590.1,1123-1141).
caatgtgtatggtgatgta

SEQ ID NO: 730195 - DNA, 19 bp, Mus musculus
  siRNA target sequence for 4921521J11Rik (NM_027590.1,1203-1221).
ccatgagttcagatgatga

SEQ ID NO: 730196 - DNA, 19 bp, Mus musculus
  siRNA target sequence for 4921521J11Rik (NM_027590.1,1204-1222).
catgagttcagatgatgaa

SEQ ID NO: 730197 - DNA, 19 bp, Mus musculus
  siRNA target sequence for 4921521J11Rik (NM_027590.1,1239-1257).
gcagaaaccggcacattgt

SEQ ID NO: 730198 - DNA, 19 bp, Mus musculus
  siRNA target sequence for 4921521J11Rik (NM_027590.1,1278-1296).
gcaactccatcgaagtact

SEQ ID NO: 730199 - DNA, 19 bp, Mus musculus
  siRNA target sequence for 4921521J11Rik (NM_027590.1,1317-1335).
gggaaagctgggagttact

SEQ ID NO: 730200 - DNA, 19 bp, Mus musculus
  siRNA target sequence for 4921521J11Rik (NM_027590.1,1319-1337).
gaaagctgggagttactct

SEQ ID NO: 730201 - DNA, 19 bp, Mus musculus
  siRNA target sequence for 4921521J11Rik (NM_027590.1,1401-1419).
ggctgtggctaagaatctt

SEQ ID NO: 730202 - DNA, 19 bp, Mus musculus
  siRNA target sequence for 4921521J11Rik (NM_027590.1,1421-1439).
ctcacagatatgatcatct

SEQ ID NO: 730203 - DNA, 19 bp, Mus musculus
  siRNA target sequence for 4921521J11Rik (NM_027590.1,1435-1453).
catctaccagggtcaatat

SEQ ID NO: 730204 - DNA, 19 bp, Mus musculus
  siRNA target sequence for 4921521J11Rik (NM_027590.1,1521-1539).
caggacaggggactttaga

SEQ ID NO: 730205 - DNA, 19 bp, Mus musculus
  siRNA target sequence for 4921521J11Rik (NM_027590.1,1561-1579).
gctggcaacgtgtcacttt

SEQ ID NO: 730206 - DNA, 19 bp, Mus musculus
  siRNA target sequence for 4921521J11Rik (NM_027590.1,1583-1601).
ctgggggagtacagaatga

SEQ ID NO: 730207 - DNA, 19 bp, Mus musculus
  siRNA target sequence for 4921521J11Rik (NM_027590.1,1596-1614).
gaatgacgtgcgagaaagt

SEQ ID NO: 730208 - DNA, 19 bp, Mus musculus
  siRNA target sequence for 4921521J11Rik (NM_027590.1,1605-1623).
gcgagaaagtcctagatct

SEQ ID NO: 730209 - DNA, 19 bp, Mus musculus
  siRNA target sequence for 4921521J11Rik (NM_027590.1,1616-1634).
ctagatctgatgtgttaca

SEQ ID NO: 730210 - DNA, 19 bp, Mus musculus
  siRNA target sequence for 4921521J11Rik (NM_027590.1,1636-1654).
ggtgctccccatacaagat

SEQ ID NO: 730211 - DNA, 19 bp, Mus musculus
  siRNA target sequence for 4921521J11Rik (NM_027590.1,1669-1687).
ggaagagccgtccaaagta

SEQ ID NO: 730212 - DNA, 19 bp, Mus musculus
  siRNA target sequence for 4921521J11Rik (NM_027590.1,1670-1688).
gaagagccgtccaaagtaa

SEQ ID NO: 730213 - DNA, 19 bp, Mus musculus
  siRNA target sequence for 4921521J11Rik (NM_027590.1,1685-1703).
gtaaagcccaagtgtagaa

SEQ ID NO: 730214 - DNA, 19 bp, Mus musculus
  siRNA target sequence for 4921521J11Rik (NM_027590.1,1690-1708).
gcccaagtgtagaaaaggt

SEQ ID NO: 730215 - DNA, 19 bp, Mus musculus
  siRNA target sequence for 4921521J11Rik (NM_027590.1,1696-1714).
gtgtagaaaaggtttggat

SEQ ID NO: 730216 - DNA, 19 bp, Mus musculus
  siRNA target sequence for 4921521J11Rik (NM_027590.1,1731-1749).
gtaccagtaaggctatcat

SEQ ID NO: 730217 - DNA, 19 bp, Mus musculus
  siRNA target sequence for 4921521J11Rik (NM_027590.1,1859-1877).
ccacggggagagaaccttt

SEQ ID NO: 730218 - DNA, 19 bp, Mus musculus
  siRNA target sequence for 4921521J11Rik (NM_027590.1,1860-1878).
cacggggagagaacctttt

SEQ ID NO: 730219 - DNA, 19 bp, Mus musculus
  siRNA target sequence for 4921521J11Rik (NM_027590.1,1910-1928).
ggaaatttccagtatgaga

SEQ ID NO: 730220 - DNA, 19 bp, Mus musculus
  siRNA target sequence for 4921521J11Rik (NM_027590.1,1911-1929).
gaaatttccagtatgagaa

SEQ ID NO: 730221 - DNA, 19 bp, Mus musculus
  siRNA target sequence for 4921521J11Rik (NM_027590.1,1930-1948).
cttcttcagctatgttaca

SEQ ID NO: 730222 - DNA, 19 bp, Mus musculus
  siRNA target sequence for 4921521J11Rik (NM_027590.1,1936-1954).
cagctatgttacaaacatt

SEQ ID NO: 730223 - DNA, 19 bp, Mus musculus
  siRNA target sequence for 4921520P21Rik (NM_027591.1,77-95).
gaacctcgtaaggactttt

SEQ ID NO: 730224 - DNA, 19 bp, Mus musculus
  siRNA target sequence for 4921520P21Rik (NM_027591.1,119-137).
gaggaggctaccccattaa

SEQ ID NO: 730225 - DNA, 19 bp, Mus musculus
  siRNA target sequence for 4921520P21Rik (NM_027591.1,122-140).
gaggctaccccattaaaga

SEQ ID NO: 730226 - DNA, 19 bp, Mus musculus
  siRNA target sequence for 4921520P21Rik (NM_027591.1,124-142).
ggctaccccattaaagaga

SEQ ID NO: 730227 - DNA, 19 bp, Mus musculus
  siRNA target sequence for 4921520P21Rik (NM_027591.1,202-220).
caagaaattggctgtagaa

SEQ ID NO: 730228 - DNA, 19 bp, Mus musculus
  siRNA target sequence for 4921520P21Rik (NM_027591.1,360-378).
ctgtggggcaacaactgat

SEQ ID NO: 730229 - DNA, 19 bp, Mus musculus
  siRNA target sequence for 4921520P21Rik (NM_027591.1,429-447).
gtccaagcctgattcttca

SEQ ID NO: 730230 - DNA, 19 bp, Mus musculus
  siRNA target sequence for 4921520P21Rik (NM_027591.1,457-475).
caccactgaccctatgcta

SEQ ID NO: 730231 - DNA, 19 bp, Mus musculus
  siRNA target sequence for 4921520P21Rik (NM_027591.1,521-539).
gtttctgctaccttagagt

SEQ ID NO: 730232 - DNA, 19 bp, Mus musculus
  siRNA target sequence for 4921520P21Rik (NM_027591.1,572-590).
ctggctctgaaaaattcgt

SEQ ID NO: 730233 - DNA, 19 bp, Mus musculus
  siRNA target sequence for 4921516M08Rik (NM_027592.1,138-156).
gctcgagaagggcagttat

SEQ ID NO: 730234 - DNA, 19 bp, Mus musculus
  siRNA target sequence for 4921516M08Rik (NM_027592.1,139-157).
ctcgagaagggcagttata

SEQ ID NO: 730235 - DNA, 19 bp, Mus musculus
  siRNA target sequence for 4921516M08Rik (NM_027592.1,142-160).
gagaagggcagttatacga

SEQ ID NO: 730236 - DNA, 19 bp, Mus musculus
  siRNA target sequence for 4921516M08Rik (NM_027592.1,176-194).
gtatggctgtcccattcta

SEQ ID NO: 730237 - DNA, 19 bp, Mus musculus
  siRNA target sequence for 4921516M08Rik (NM_027592.1,181-199).
gctgtcccattctagatga

SEQ ID NO: 730238 - DNA, 19 bp, Mus musculus
  siRNA target sequence for 4921516M08Rik (NM_027592.1,205-223).
gggttgtcgatgagttaga

SEQ ID NO: 730239 - DNA, 19 bp, Mus musculus
  siRNA target sequence for 4921516M08Rik (NM_027592.1,233-251).
gcaggagggcggtgtgatt

SEQ ID NO: 730240 - DNA, 19 bp, Mus musculus
  siRNA target sequence for 4921516M08Rik (NM_027592.1,241-259).
gcggtgtgattgtggatta

SEQ ID NO: 730241 - DNA, 19 bp, Mus musculus
  siRNA target sequence for 4921516M08Rik (NM_027592.1,278-296).
ccccgaacgctggtttcat

SEQ ID NO: 730242 - DNA, 19 bp, Mus musculus
  siRNA target sequence for 4921516M08Rik (NM_027592.1,279-297).
cccgaacgctggtttcata

SEQ ID NO: 730243 - DNA, 19 bp, Mus musculus
  siRNA target sequence for 4921516M08Rik (NM_027592.1,280-298).
ccgaacgctggtttcatat

SEQ ID NO: 730244 - DNA, 19 bp, Mus musculus
  siRNA target sequence for 4921516M08Rik (NM_027592.1,281-299).
cgaacgctggtttcatata

SEQ ID NO: 730245 - DNA, 19 bp, Mus musculus
  siRNA target sequence for 4921516M08Rik (NM_027592.1,285-303).
cgctggtttcatatagtgt

SEQ ID NO: 730246 - DNA, 19 bp, Mus musculus
  siRNA target sequence for 4921516M08Rik (NM_027592.1,302-320).
gtttgtgttgagaacagat

SEQ ID NO: 730247 - DNA, 19 bp, Mus musculus
  siRNA target sequence for 4921516M08Rik (NM_027592.1,316-334).
cagataatggtgtattgta

SEQ ID NO: 730248 - DNA, 19 bp, Mus musculus
  siRNA target sequence for 4921509E07Rik (NM_027597.2,204-222).
gaaggcaatgaataagcaa

SEQ ID NO: 730249 - DNA, 19 bp, Mus musculus
  siRNA target sequence for 4921509E07Rik (NM_027597.2,251-269).
gactcgggcatcttaagaa

SEQ ID NO: 730250 - DNA, 19 bp, Mus musculus
  siRNA target sequence for 4921509E07Rik (NM_027597.2,253-271).
ctcgggcatcttaagaaca

SEQ ID NO: 730251 - DNA, 19 bp, Mus musculus
  siRNA target sequence for 4921509E07Rik (NM_027597.2,255-273).
cgggcatcttaagaacata

SEQ ID NO: 730252 - DNA, 19 bp, Mus musculus
  siRNA target sequence for 4921509E07Rik (NM_027597.2,256-274).
gggcatcttaagaacatat

SEQ ID NO: 730253 - DNA, 19 bp, Mus musculus
  siRNA target sequence for 4921509E07Rik (NM_027597.2,284-302).
gagagtatgccccttatgt

SEQ ID NO: 730254 - DNA, 19 bp, Mus musculus
  siRNA target sequence for 4921509E07Rik (NM_027597.2,286-304).
gagtatgccccttatgtat

SEQ ID NO: 730255 - DNA, 19 bp, Mus musculus
  siRNA target sequence for 4921509E07Rik (NM_027597.2,310-328).
cctatactggagagcaatt

SEQ ID NO: 730256 - DNA, 19 bp, Mus musculus
  siRNA target sequence for 4921509E07Rik (NM_027597.2,339-357).
caataggagaggtgaatct

SEQ ID NO: 730257 - DNA, 19 bp, Mus musculus
  siRNA target sequence for 4921509E07Rik (NM_027597.2,344-362).
ggagaggtgaatctattta

SEQ ID NO: 730258 - DNA, 19 bp, Mus musculus
  siRNA target sequence for 4921509E07Rik (NM_027597.2,453-471).
gacaccagaagctcgaaaa

SEQ ID NO: 730259 - DNA, 19 bp, Mus musculus
  siRNA target sequence for 4921509E07Rik (NM_027597.2,523-541).
ctggtgctcaccaggttta

SEQ ID NO: 730260 - DNA, 19 bp, Mus musculus
  siRNA target sequence for 4921509E07Rik (NM_027597.2,822-840).
gcccaggcacccgaaaaca

SEQ ID NO: 730261 - DNA, 19 bp, Mus musculus
  siRNA target sequence for 4921509E07Rik (NM_027597.2,824-842).
ccaggcacccgaaaacaca

SEQ ID NO: 730262 - DNA, 19 bp, Mus musculus
  siRNA target sequence for 4921509E07Rik (NM_027597.2,917-935).
ctgatgtcaccgatatgct

SEQ ID NO: 730263 - DNA, 19 bp, Mus musculus
  siRNA target sequence for 4921509E07Rik (NM_027597.2,942-960).
cgggatcacagatgttcaa

SEQ ID NO: 730264 - DNA, 19 bp, Mus musculus
  siRNA target sequence for 4921509E07Rik (NM_027597.2,1024-1042).
gaagtctcagacgtcaaaa

SEQ ID NO: 730265 - DNA, 19 bp, Mus musculus
  siRNA target sequence for 4921509E07Rik (NM_027597.2,1056-1074).
ctcaggggtcaaaatagta

SEQ ID NO: 730266 - DNA, 19 bp, Mus musculus
  siRNA target sequence for 4921509E07Rik (NM_027597.2,1058-1076).
caggggtcaaaatagtatt

SEQ ID NO: 730267 - DNA, 19 bp, Mus musculus
  siRNA target sequence for 4921509E07Rik (NM_027597.2,1078-1096).
gaaaacgatgatataataa

SEQ ID NO: 730268 - DNA, 19 bp, Mus musculus
  siRNA target sequence for 4921509E07Rik (NM_027597.2,1117-1135).
gaatataccctgaaacata

SEQ ID NO: 730269 - DNA, 19 bp, Mus musculus
  siRNA target sequence for 4921509E07Rik (NM_027597.2,1128-1146).
gaaacataggagtctacaa

SEQ ID NO: 730270 - DNA, 19 bp, Mus musculus
  siRNA target sequence for 4921509E07Rik (NM_027597.2,1132-1150).
cataggagtctacaagata

SEQ ID NO: 730271 - DNA, 19 bp, Mus musculus
  siRNA target sequence for 4921522E24Rik (NM_027600.2,99-117).
ccctcgagggggctattga

SEQ ID NO: 730272 - DNA, 19 bp, Mus musculus
  siRNA target sequence for 4921522E24Rik (NM_027600.2,107-125).
ggggctattgagcaattca

SEQ ID NO: 730273 - DNA, 19 bp, Mus musculus
  siRNA target sequence for 4921522E24Rik (NM_027600.2,108-126).
gggctattgagcaattcaa

SEQ ID NO: 730274 - DNA, 19 bp, Mus musculus
  siRNA target sequence for 4921522E24Rik (NM_027600.2,111-129).
ctattgagcaattcaaatt

SEQ ID NO: 730275 - DNA, 19 bp, Mus musculus
  siRNA target sequence for 4921522E24Rik (NM_027600.2,135-153).
ccaggcttgctatttcaga

SEQ ID NO: 730276 - DNA, 19 bp, Mus musculus
  siRNA target sequence for 4921522E24Rik (NM_027600.2,212-230).
gtttttccattgaaagatt

SEQ ID NO: 730277 - DNA, 19 bp, Mus musculus
  siRNA target sequence for 4921522E24Rik (NM_027600.2,234-252).
ctcaatccacggaaaagtt

SEQ ID NO: 730278 - DNA, 19 bp, Mus musculus
  siRNA target sequence for 4921522E24Rik (NM_027600.2,245-263).
gaaaagttaatgcgtatta

SEQ ID NO: 730279 - DNA, 19 bp, Mus musculus
  siRNA target sequence for 4921522E24Rik (NM_027600.2,250-268).
gttaatgcgtattattaca

SEQ ID NO: 730280 - DNA, 19 bp, Mus musculus
  siRNA target sequence for 4921522E24Rik (NM_027600.2,256-274).
gcgtattattacatcactt

SEQ ID NO: 730281 - DNA, 19 bp, Mus musculus
  siRNA target sequence for 4921522E24Rik (NM_027600.2,299-317).
gatttggttcaactgaaat

SEQ ID NO: 730282 - DNA, 19 bp, Mus musculus
  siRNA target sequence for 4921522E24Rik (NM_027600.2,337-355).
ggagtcttggaaaattgtt

SEQ ID NO: 730283 - DNA, 19 bp, Mus musculus
  siRNA target sequence for 4921522E24Rik (NM_027600.2,342-360).
cttggaaaattgttggtat

SEQ ID NO: 730284 - DNA, 19 bp, Mus musculus
  siRNA target sequence for 4921522E24Rik (NM_027600.2,356-374).
ggtatgctctgtgacaaaa

SEQ ID NO: 730285 - DNA, 19 bp, Mus musculus
  siRNA target sequence for 4921522E24Rik (NM_027600.2,357-375).
gtatgctctgtgacaaaat

SEQ ID NO: 730286 - DNA, 19 bp, Mus musculus
  siRNA target sequence for 4921522E24Rik (NM_027600.2,440-458).
ctatgtgatgccatagcta

SEQ ID NO: 730287 - DNA, 19 bp, Mus musculus
  siRNA target sequence for 4921522E24Rik (NM_027600.2,444-462).
gtgatgccatagctattat

SEQ ID NO: 730288 - DNA, 19 bp, Mus musculus
  siRNA target sequence for 4921522E24Rik (NM_027600.2,446-464).
gatgccatagctattatca

SEQ ID NO: 730289 - DNA, 19 bp, Mus musculus
  siRNA target sequence for 4921522E24Rik (NM_027600.2,467-485).
ggaatgtaccagaaatact

SEQ ID NO: 730290 - DNA, 19 bp, Mus musculus
  siRNA target sequence for 4921522E24Rik (NM_027600.2,658-676).
ctctccaaaaccaatctca

SEQ ID NO: 730291 - DNA, 19 bp, Mus musculus
  siRNA target sequence for 4921522E24Rik (NM_027600.2,750-768).
cacggacggccataaatga

SEQ ID NO: 730292 - DNA, 19 bp, Mus musculus
  siRNA target sequence for 4921522E24Rik (NM_027600.2,752-770).
cggacggccataaatgaaa

SEQ ID NO: 730293 - DNA, 19 bp, Mus musculus
  siRNA target sequence for 4921522E24Rik (NM_027600.2,753-771).
ggacggccataaatgaaaa

SEQ ID NO: 730294 - DNA, 19 bp, Mus musculus
  siRNA target sequence for 4921522E24Rik (NM_027600.2,774-792).
caatgctagaggatgaagt

SEQ ID NO: 730295 - DNA, 19 bp, Mus musculus
  siRNA target sequence for 4921522E24Rik (NM_027600.2,779-797).
ctagaggatgaagttatgt

SEQ ID NO: 730296 - DNA, 19 bp, Mus musculus
  siRNA target sequence for 4921522E24Rik (NM_027600.2,817-835).
ccaggatcagcgaactatt

SEQ ID NO: 730297 - DNA, 19 bp, Mus musculus
  siRNA target sequence for 4921522E24Rik (NM_027600.2,820-838).
ggatcagcgaactattcaa

SEQ ID NO: 730298 - DNA, 19 bp, Mus musculus
  siRNA target sequence for 4921522E24Rik (NM_027600.2,824-842).
cagcgaactattcaaaagt

SEQ ID NO: 730299 - DNA, 19 bp, Mus musculus
  siRNA target sequence for 4921522E24Rik (NM_027600.2,826-844).
gcgaactattcaaaagtta

SEQ ID NO: 730300 - DNA, 19 bp, Mus musculus
  siRNA target sequence for 4921522E24Rik (NM_027600.2,827-845).
cgaactattcaaaagttaa

SEQ ID NO: 730301 - DNA, 19 bp, Mus musculus
  siRNA target sequence for 4921522E24Rik (NM_027600.2,836-854).
caaaagttaatggatagta

SEQ ID NO: 730302 - DNA, 19 bp, Mus musculus
  siRNA target sequence for 4921522E24Rik (NM_027600.2,855-873).
gagagagactaagatatga

SEQ ID NO: 730303 - DNA, 19 bp, Mus musculus
  siRNA target sequence for 4921522E24Rik (NM_027600.2,904-922).
catgatcagcagacagaaa

SEQ ID NO: 730304 - DNA, 19 bp, Mus musculus
  siRNA target sequence for 4921522E24Rik (NM_027600.2,915-933).
gacagaaagacgacattga

SEQ ID NO: 730305 - DNA, 19 bp, Mus musculus
  siRNA target sequence for 4921522E24Rik (NM_027600.2,1033-1051).
cagagaggggacacacttt

SEQ ID NO: 730306 - DNA, 19 bp, Mus musculus
  siRNA target sequence for 4921522E24Rik (NM_027600.2,1102-1120).
gttctcatcgaagaaatat

SEQ ID NO: 730307 - DNA, 19 bp, Mus musculus
  siRNA target sequence for 4921522E24Rik (NM_027600.2,1105-1123).
ctcatcgaagaaatatatt

SEQ ID NO: 730308 - DNA, 19 bp, Mus musculus
  siRNA target sequence for 4921522E24Rik (NM_027600.2,1225-1243).
gcatgttacatttctacta

SEQ ID NO: 730309 - DNA, 19 bp, Mus musculus
  siRNA target sequence for 4921522E24Rik (NM_027600.2,1282-1300).
gttggttaaggaagaagaa

SEQ ID NO: 730310 - DNA, 19 bp, Mus musculus
  siRNA target sequence for 4921522E24Rik (NM_027600.2,1442-1460).
catgtcctaaagaatgaga

SEQ ID NO: 730311 - DNA, 19 bp, Mus musculus
  siRNA target sequence for 4921522E24Rik (NM_027600.2,1462-1480).
gttcactagacaaacactt

SEQ ID NO: 730312 - DNA, 19 bp, Mus musculus
  siRNA target sequence for 4921522E24Rik (NM_027600.2,1502-1520).
ggtgacacctccttcaatt

SEQ ID NO: 730313 - DNA, 19 bp, Mus musculus
  siRNA target sequence for 4921522E24Rik (NM_027600.2,1503-1521).
gtgacacctccttcaatta

SEQ ID NO: 730314 - DNA, 19 bp, Mus musculus
  siRNA target sequence for 4921522E24Rik (NM_027600.2,1507-1525).
cacctccttcaattatatt

SEQ ID NO: 730315 - DNA, 19 bp, Mus musculus
  siRNA target sequence for 4921522E24Rik (NM_027600.2,1509-1527).
cctccttcaattatattaa

SEQ ID NO: 730316 - DNA, 19 bp, Mus musculus
  siRNA target sequence for Speer4f (NM_027609.1,528-546).
ccagcattcaacagcattt

SEQ ID NO: 730317 - DNA, 19 bp, Mus musculus
  siRNA target sequence for Speer4f (NM_027609.1,531-549).
gcattcaacagcatttgga

SEQ ID NO: 730318 - DNA, 19 bp, Mus musculus
  siRNA target sequence for Wdr20 (NM_027614.1,668-686).
ctttaacgaggaaagacta

SEQ ID NO: 730319 - DNA, 19 bp, Mus musculus
  siRNA target sequence for Wdr20 (NM_027614.1,699-717).
cgcgtaacctgtgtcaaat

SEQ ID NO: 730320 - DNA, 19 bp, Mus musculus
  siRNA target sequence for Wdr20 (NM_027614.1,743-761).
cctagtagcccattcaagt

SEQ ID NO: 730321 - DNA, 19 bp, Mus musculus
  siRNA target sequence for Wdr20 (NM_027614.1,764-782).
gaacatgtactcgtacaat

SEQ ID NO: 730322 - DNA, 19 bp, Mus musculus
  siRNA target sequence for Wdr20 (NM_027614.1,906-924).
gccctcaacgagtttgctt

SEQ ID NO: 730323 - DNA, 19 bp, Mus musculus
  siRNA target sequence for Wdr20 (NM_027614.1,967-985).
ggtttctgcgcgtgttcaa

SEQ ID NO: 730324 - DNA, 19 bp, Mus musculus
  siRNA target sequence for Wdr20 (NM_027614.1,997-1015).
cggagctgcacggtacaat

SEQ ID NO: 730325 - DNA, 19 bp, Mus musculus
  siRNA target sequence for Wdr20 (NM_027614.1,999-1017).
gagctgcacggtacaatga

SEQ ID NO: 730326 - DNA, 19 bp, Mus musculus
  siRNA target sequence for Wdr20 (NM_027614.1,1001-1019).
gctgcacggtacaatgaaa

SEQ ID NO: 730327 - DNA, 19 bp, Mus musculus
  siRNA target sequence for Wdr20 (NM_027614.1,1002-1020).
ctgcacggtacaatgaaaa

SEQ ID NO: 730328 - DNA, 19 bp, Mus musculus
  siRNA target sequence for Wdr20 (NM_027614.1,1102-1120).
cagtctggtcctttctaga

SEQ ID NO: 730329 - DNA, 19 bp, Mus musculus
  siRNA target sequence for Wdr20 (NM_027614.1,1119-1137).
gactgccgagtaatagcta

SEQ ID NO: 730330 - DNA, 19 bp, Mus musculus
  siRNA target sequence for Wdr20 (NM_027614.1,1173-1191).
gcatttgatccctatacta

SEQ ID NO: 730331 - DNA, 19 bp, Mus musculus
  siRNA target sequence for Wdr20 (NM_027614.1,1184-1202).
ctatactactagtgtagaa

SEQ ID NO: 730332 - DNA, 19 bp, Mus musculus
  siRNA target sequence for Wdr20 (NM_027614.1,1241-1259).
cttccaggaccttcttcat

SEQ ID NO: 730333 - DNA, 19 bp, Mus musculus
  siRNA target sequence for Wdr20 (NM_027614.1,1244-1262).
ccaggaccttcttcatttt

SEQ ID NO: 730334 - DNA, 19 bp, Mus musculus
  siRNA target sequence for Wdr20 (NM_027614.1,1285-1303).
cacagtctagactatccaa

SEQ ID NO: 730335 - DNA, 19 bp, Mus musculus
  siRNA target sequence for Wdr20 (NM_027614.1,1324-1342).
gccctgtaagtgttacgta

SEQ ID NO: 730336 - DNA, 19 bp, Mus musculus
  siRNA target sequence for Wdr20 (NM_027614.1,1325-1343).
ccctgtaagtgttacgtat

SEQ ID NO: 730337 - DNA, 19 bp, Mus musculus
  siRNA target sequence for Wdr20 (NM_027614.1,1335-1353).
gttacgtatcggtttggtt

SEQ ID NO: 730338 - DNA, 19 bp, Mus musculus
  siRNA target sequence for Wdr20 (NM_027614.1,1378-1396).
gtttatgggaccttacaga

SEQ ID NO: 730339 - DNA, 19 bp, Mus musculus
  siRNA target sequence for Wdr20 (NM_027614.1,1429-1447).
gagcaagggcacatgcaaa

SEQ ID NO: 730340 - DNA, 19 bp, Mus musculus
  siRNA target sequence for Wdr20 (NM_027614.1,1435-1453).
gggcacatgcaaacgttat

SEQ ID NO: 730341 - DNA, 19 bp, Mus musculus
  siRNA target sequence for Wdr20 (NM_027614.1,1524-1542).
ccattgccacggtccaata

SEQ ID NO: 730342 - DNA, 19 bp, Mus musculus
  siRNA target sequence for Wdr20 (NM_027614.1,1538-1556).
caatagccttccacattca

SEQ ID NO: 730343 - DNA, 19 bp, Mus musculus
  siRNA target sequence for Wdr20 (NM_027614.1,1664-1682).
cgagaaagaccgtaaacga

SEQ ID NO: 730344 - DNA, 19 bp, Mus musculus
  siRNA target sequence for Wdr20 (NM_027614.1,1665-1683).
gagaaagaccgtaaacgaa

SEQ ID NO: 730345 - DNA, 19 bp, Mus musculus
  siRNA target sequence for Wdr20 (NM_027614.1,1671-1689).
gaccgtaaacgaaatcata

SEQ ID NO: 730346 - DNA, 19 bp, Mus musculus
  siRNA target sequence for Wdr20 (NM_027614.1,1673-1691).
ccgtaaacgaaatcatagt

SEQ ID NO: 730347 - DNA, 19 bp, Mus musculus
  siRNA target sequence for Wdr20 (NM_027614.1,1674-1692).
cgtaaacgaaatcatagta

SEQ ID NO: 730348 - DNA, 19 bp, Mus musculus
  siRNA target sequence for Wdr20 (NM_027614.1,1675-1693).
gtaaacgaaatcatagtat

SEQ ID NO: 730349 - DNA, 19 bp, Mus musculus
  siRNA target sequence for Wdr20 (NM_027614.1,1686-1704).
catagtatgggacacattt

SEQ ID NO: 730350 - DNA, 19 bp, Mus musculus
  siRNA target sequence for Wdr20 (NM_027614.1,1719-1737).
gacaaactgaacctagtta

SEQ ID NO: 730351 - DNA, 19 bp, Mus musculus
  siRNA target sequence for Wdr20 (NM_027614.1,1793-1811).
ggaagatgttcccttgtta

SEQ ID NO: 730352 - DNA, 19 bp, Mus musculus
  siRNA target sequence for Wdr20 (NM_027614.1,1812-1830).
gagccactgatctgtaaaa

SEQ ID NO: 730353 - DNA, 19 bp, Mus musculus
  siRNA target sequence for Wdr20 (NM_027614.1,1816-1834).
cactgatctgtaaaaagat

SEQ ID NO: 730354 - DNA, 19 bp, Mus musculus
  siRNA target sequence for Wdr20 (NM_027614.1,1846-1864).
gactgacggtattggtttt

SEQ ID NO: 730355 - DNA, 19 bp, Mus musculus
  siRNA target sequence for Wdr20 (NM_027614.1,1852-1870).
cggtattggtttttcttga

SEQ ID NO: 730356 - DNA, 19 bp, Mus musculus
  siRNA target sequence for Wdr20 (NM_027614.1,1888-1906).
cttgtcaggagggatttat

SEQ ID NO: 730357 - DNA, 19 bp, Mus musculus
  siRNA target sequence for Wdr20 (NM_027614.1,1921-1939).
ggcctggtaaagttagtaa

SEQ ID NO: 730358 - DNA, 19 bp, Mus musculus
  siRNA target sequence for Wdr20 (NM_027614.1,1923-1941).
cctggtaaagttagtaagt

SEQ ID NO: 730359 - DNA, 19 bp, Mus musculus
  siRNA target sequence for Wdr20 (NM_027614.1,1924-1942).
ctggtaaagttagtaagtt

SEQ ID NO: 730360 - DNA, 19 bp, Mus musculus
  siRNA target sequence for Wdr20 (NM_027614.1,1927-1945).
gtaaagttagtaagtttca

SEQ ID NO: 730361 - DNA, 19 bp, Mus musculus
  siRNA target sequence for 4921528I01Rik (NM_027616.1,372-390).
cccaagtcggcgacatagt

SEQ ID NO: 730362 - DNA, 19 bp, Mus musculus
  siRNA target sequence for 4921528I01Rik (NM_027616.1,373-391).
ccaagtcggcgacatagtt

SEQ ID NO: 730363 - DNA, 19 bp, Mus musculus
  siRNA target sequence for 4921528I01Rik (NM_027616.1,379-397).
cggcgacatagttgtactt

SEQ ID NO: 730364 - DNA, 19 bp, Mus musculus
  siRNA target sequence for 4921528I01Rik (NM_027616.1,380-398).
ggcgacatagttgtacttt

SEQ ID NO: 730365 - DNA, 19 bp, Mus musculus
  siRNA target sequence for 4921528I01Rik (NM_027616.1,409-427).
cctaaaccatgtgtaaaca

SEQ ID NO: 730366 - DNA, 19 bp, Mus musculus
  siRNA target sequence for 4921528I01Rik (NM_027616.1,432-450).
gatttcccacattgaagat

SEQ ID NO: 730367 - DNA, 19 bp, Mus musculus
  siRNA target sequence for 4921528I01Rik (NM_027616.1,466-484).
caggagcatttgacacaat

SEQ ID NO: 730368 - DNA, 19 bp, Mus musculus
  siRNA target sequence for 4921528I01Rik (NM_027616.1,479-497).
cacaatttgaagcttcttt

SEQ ID NO: 730369 - DNA, 19 bp, Mus musculus
  siRNA target sequence for 4921528I01Rik (NM_027616.1,506-524).
ggacttctgtcacaaaaga

SEQ ID NO: 730370 - DNA, 19 bp, Mus musculus
  siRNA target sequence for 4921528I01Rik (NM_027616.1,507-525).
gacttctgtcacaaaagat

SEQ ID NO: 730371 - DNA, 19 bp, Mus musculus
  siRNA target sequence for 4921528I01Rik (NM_027616.1,636-654).
ggccatccacctcattaaa

SEQ ID NO: 730372 - DNA, 19 bp, Mus musculus
  siRNA target sequence for 4921528I01Rik (NM_027616.1,676-694).
gaagcagaacaagctttaa

SEQ ID NO: 730373 - DNA, 19 bp, Mus musculus
  siRNA target sequence for 4921528I01Rik (NM_027616.1,770-788).
cattagctgtacagaaaga

SEQ ID NO: 730374 - DNA, 19 bp, Mus musculus
  siRNA target sequence for 4921528I01Rik (NM_027616.1,798-816).
cttctccaaaattaatgca

SEQ ID NO: 730375 - DNA, 19 bp, Mus musculus
  siRNA target sequence for 4921528I01Rik (NM_027616.1,819-837).
gctgcgtagctatcttgaa

SEQ ID NO: 730376 - DNA, 19 bp, Mus musculus
  siRNA target sequence for 4921528I01Rik (NM_027616.1,919-937).
gactacatggcttctcata

SEQ ID NO: 730377 - DNA, 19 bp, Mus musculus
  siRNA target sequence for 4921528I01Rik (NM_027616.1,921-939).
ctacatggcttctcatagt

SEQ ID NO: 730378 - DNA, 19 bp, Mus musculus
  siRNA target sequence for 4921528I01Rik (NM_027616.1,938-956).
gtgttctgctggagaaaaa

SEQ ID NO: 730379 - DNA, 19 bp, Mus musculus
  siRNA target sequence for 4921528I01Rik (NM_027616.1,979-997).
ctgaaagagcgttaccata

SEQ ID NO: 730380 - DNA, 19 bp, Mus musculus
  siRNA target sequence for 4921528I01Rik (NM_027616.1,1050-1068).
gtctgtggataaatgtgaa

SEQ ID NO: 730381 - DNA, 19 bp, Mus musculus
  siRNA target sequence for 4921528I01Rik (NM_027616.1,1072-1090).
gcaaaagcaaggcttaaga

SEQ ID NO: 730382 - DNA, 19 bp, Mus musculus
  siRNA target sequence for 4921528I01Rik (NM_027616.1,1079-1097).
caaggcttaagaatatgaa

SEQ ID NO: 730383 - DNA, 19 bp, Mus musculus
  siRNA target sequence for 4921528I01Rik (NM_027616.1,1082-1100).
ggcttaagaatatgaaagt

SEQ ID NO: 730384 - DNA, 19 bp, Mus musculus
  siRNA target sequence for 4921528I01Rik (NM_027616.1,1142-1160).
cgtcctatgagaaagaact

SEQ ID NO: 730385 - DNA, 19 bp, Mus musculus
  siRNA target sequence for 4921528I01Rik (NM_027616.1,1143-1161).
gtcctatgagaaagaacta

SEQ ID NO: 730386 - DNA, 19 bp, Mus musculus
  siRNA target sequence for 4921528I01Rik (NM_027616.1,1183-1201).
gcccactacacaacttcaa

SEQ ID NO: 730387 - DNA, 19 bp, Mus musculus
  siRNA target sequence for 4921528I01Rik (NM_027616.1,1184-1202).
cccactacacaacttcaat

SEQ ID NO: 730388 - DNA, 19 bp, Mus musculus
  siRNA target sequence for 4921528I01Rik (NM_027616.1,1185-1203).
ccactacacaacttcaatt

SEQ ID NO: 730389 - DNA, 19 bp, Mus musculus
  siRNA target sequence for 4921528I01Rik (NM_027616.1,1196-1214).
cttcaattgagactgttaa

SEQ ID NO: 730390 - DNA, 19 bp, Mus musculus
  siRNA target sequence for 4921528I01Rik (NM_027616.1,1199-1217).
caattgagactgttaactt

SEQ ID NO: 730391 - DNA, 19 bp, Mus musculus
  siRNA target sequence for 4921528I01Rik (NM_027616.1,1412-1430).
gggatattgagctttctaa

SEQ ID NO: 730392 - DNA, 19 bp, Mus musculus
  siRNA target sequence for 4921528I01Rik (NM_027616.1,1441-1459).
gacgccaaagatcttacaa

SEQ ID NO: 730393 - DNA, 19 bp, Mus musculus
  siRNA target sequence for 4921528I01Rik (NM_027616.1,1446-1464).
caaagatcttacaatcgta

SEQ ID NO: 730394 - DNA, 19 bp, Mus musculus
  siRNA target sequence for 4921528I01Rik (NM_027616.1,1599-1617).
gaataacaactacctaaaa

SEQ ID NO: 730395 - DNA, 19 bp, Mus musculus
  siRNA target sequence for 4921528I01Rik (NM_027616.1,1764-1782).
cgccacagggattgagatt

SEQ ID NO: 730396 - DNA, 19 bp, Mus musculus
  siRNA target sequence for 4921528I01Rik (NM_027616.1,1766-1784).
ccacagggattgagattca

SEQ ID NO: 730397 - DNA, 19 bp, Mus musculus
  siRNA target sequence for 4921528I01Rik (NM_027616.1,1769-1787).
cagggattgagattcagaa

SEQ ID NO: 730398 - DNA, 19 bp, Mus musculus
  siRNA target sequence for 4921528I01Rik (NM_027616.1,1824-1842).
gatgcaggagtttatacga

SEQ ID NO: 730399 - DNA, 19 bp, Mus musculus
  siRNA target sequence for 4921528I01Rik (NM_027616.1,1833-1851).
gtttatacgaagacaagta

SEQ ID NO: 730400 - DNA, 19 bp, Mus musculus
  siRNA target sequence for 4921528I01Rik (NM_027616.1,1844-1862).
gacaagtactctataatat

SEQ ID NO: 730401 - DNA, 19 bp, Mus musculus
  siRNA target sequence for 4921528I01Rik (NM_027616.1,1854-1872).
ctataatatggctttgtta

SEQ ID NO: 730402 - DNA, 19 bp, Mus musculus
  siRNA target sequence for 4921528I01Rik (NM_027616.1,1903-1921).
gccgaggctgtgagaatca

SEQ ID NO: 730403 - DNA, 19 bp, Mus musculus
  siRNA target sequence for 4921528I01Rik (NM_027616.1,2038-2056).
cgcatggaactcacaagaa

SEQ ID NO: 730404 - DNA, 19 bp, Mus musculus
  siRNA target sequence for 4921528I01Rik (NM_027616.1,2069-2087).
gatccataattcatgaaga

SEQ ID NO: 730405 - DNA, 19 bp, Mus musculus
  siRNA target sequence for 4921528I01Rik (NM_027616.1,2166-2184).
cctagaaaggacgaactat

SEQ ID NO: 730406 - DNA, 19 bp, Mus musculus
  siRNA target sequence for 4921528I01Rik (NM_027616.1,2252-2270).
gtgtgtacgaccatctcat

SEQ ID NO: 730407 - DNA, 19 bp, Mus musculus
  siRNA target sequence for 4921528I01Rik (NM_027616.1,2318-2336).
ggttccgaaggcttataga

SEQ ID NO: 730408 - DNA, 19 bp, Mus musculus
  siRNA target sequence for 4921528I01Rik (NM_027616.1,2397-2415).
cctgcgtttagccaaagaa

SEQ ID NO: 730409 - DNA, 19 bp, Mus musculus
  siRNA target sequence for 4921528I01Rik (NM_027616.1,2398-2416).
ctgcgtttagccaaagaat

SEQ ID NO: 730410 - DNA, 19 bp, Mus musculus
  siRNA target sequence for 4921528I01Rik (NM_027616.1,2400-2418).
gcgtttagccaaagaatat

SEQ ID NO: 730411 - DNA, 19 bp, Mus musculus
  siRNA target sequence for 4921528I01Rik (NM_027616.1,2402-2420).
gtttagccaaagaatatca

SEQ ID NO: 730412 - DNA, 19 bp, Mus musculus
  siRNA target sequence for 4921528I01Rik (NM_027616.1,2424-2442).
cgcacagcttattttctta

SEQ ID NO: 730413 - DNA, 19 bp, Mus musculus
  siRNA target sequence for 4921528I01Rik (NM_027616.1,2452-2470).
gaatcttacttcaatggat

SEQ ID NO: 730414 - DNA, 19 bp, Mus musculus
  siRNA target sequence for 4921528I01Rik (NM_027616.1,2456-2474).
cttacttcaatggatatga

SEQ ID NO: 730415 - DNA, 19 bp, Mus musculus
  siRNA target sequence for 4921528I01Rik (NM_027616.1,2475-2493).
cagactgctatcactcaat

SEQ ID NO: 730416 - DNA, 19 bp, Mus musculus
  siRNA target sequence for 4921528I01Rik (NM_027616.1,2477-2495).
gactgctatcactcaattt

SEQ ID NO: 730417 - DNA, 19 bp, Mus musculus
  siRNA target sequence for 4921528I01Rik (NM_027616.1,2569-2587).
ctgatgatcctttttaaca

SEQ ID NO: 730418 - DNA, 19 bp, Mus musculus
  siRNA target sequence for 4921528I01Rik (NM_027616.1,2663-2681).
caagcctaatgcaacacat

SEQ ID NO: 730419 - DNA, 19 bp, Mus musculus
  siRNA target sequence for 4921528I01Rik (NM_027616.1,2666-2684).
gcctaatgcaacacatctt

SEQ ID NO: 730420 - DNA, 19 bp, Mus musculus
  siRNA target sequence for 4921528I01Rik (NM_027616.1,2667-2685).
cctaatgcaacacatctta

SEQ ID NO: 730421 - DNA, 19 bp, Mus musculus
  siRNA target sequence for 4921536I21Rik (NM_027617.1,303-321).
gaaggatcgtggaactata

SEQ ID NO: 730422 - DNA, 19 bp, Mus musculus
  siRNA target sequence for 4921536I21Rik (NM_027617.1,306-324).
ggatcgtggaactataaat

SEQ ID NO: 730423 - DNA, 19 bp, Mus musculus
  siRNA target sequence for 4921536I21Rik (NM_027617.1,307-325).
gatcgtggaactataaatt

SEQ ID NO: 730424 - DNA, 19 bp, Mus musculus
  siRNA target sequence for 4921536I21Rik (NM_027617.1,310-328).
cgtggaactataaattaaa

SEQ ID NO: 730425 - DNA, 19 bp, Mus musculus
  siRNA target sequence for 4921536I21Rik (NM_027617.1,337-355).
caatagaagttattaacaa

SEQ ID NO: 730426 - DNA, 19 bp, Mus musculus
  siRNA target sequence for 4921536I21Rik (NM_027617.1,364-382).
ctgctggatttataagagt

SEQ ID NO: 730427 - DNA, 19 bp, Mus musculus
  siRNA target sequence for 4921536I21Rik (NM_027617.1,416-434).
gcgtcttggggagtttctt

SEQ ID NO: 730428 - DNA, 19 bp, Mus musculus
  siRNA target sequence for 4921536I21Rik (NM_027617.1,552-570).
gctcttcaaccagaattat

SEQ ID NO: 730429 - DNA, 19 bp, Mus musculus
  siRNA target sequence for 4921536I21Rik (NM_027617.1,553-571).
ctcttcaaccagaattata

SEQ ID NO: 730430 - DNA, 19 bp, Mus musculus
  siRNA target sequence for 4921536I21Rik (NM_027617.1,619-637).
cagttactttagatgaaca

SEQ ID NO: 730431 - DNA, 19 bp, Mus musculus
  siRNA target sequence for 4921536I21Rik (NM_027617.1,630-648).
gatgaacaggagagtatta

SEQ ID NO: 730432 - DNA, 19 bp, Mus musculus
  siRNA target sequence for 4921536I21Rik (NM_027617.1,636-654).
caggagagtattaatgata

SEQ ID NO: 730433 - DNA, 19 bp, Mus musculus
  siRNA target sequence for 4921536I21Rik (NM_027617.1,658-676).
cggagattaatggaacaat

SEQ ID NO: 730434 - DNA, 19 bp, Mus musculus
  siRNA target sequence for 4921536I21Rik (NM_027617.1,677-695).
ctacagaccagatagtgta

SEQ ID NO: 730435 - DNA, 19 bp, Mus musculus
  siRNA target sequence for 4921536I21Rik (NM_027617.1,682-700).
gaccagatagtgtatcttt

SEQ ID NO: 730436 - DNA, 19 bp, Mus musculus
  siRNA target sequence for 4921536I21Rik (NM_027617.1,684-702).
ccagatagtgtatctttgt

SEQ ID NO: 730437 - DNA, 19 bp, Mus musculus
  siRNA target sequence for 4921536I21Rik (NM_027617.1,707-725).
ggatgaacctggaaatcca

SEQ ID NO: 730438 - DNA, 19 bp, Mus musculus
  siRNA target sequence for 4921536I21Rik (NM_027617.1,708-726).
gatgaacctggaaatccaa

SEQ ID NO: 730439 - DNA, 19 bp, Mus musculus
  siRNA target sequence for 4921536I21Rik (NM_027617.1,777-795).
gaaagccaacctacacaaa

SEQ ID NO: 730440 - DNA, 19 bp, Mus musculus
  siRNA target sequence for 4921536I21Rik (NM_027617.1,781-799).
gccaacctacacaaaatca

SEQ ID NO: 730441 - DNA, 19 bp, Mus musculus
  siRNA target sequence for 4921536I21Rik (NM_027617.1,783-801).
caacctacacaaaatcact

SEQ ID NO: 730442 - DNA, 19 bp, Mus musculus
  siRNA target sequence for 4921536I21Rik (NM_027617.1,822-840).
ggatcattggaagaatcaa

SEQ ID NO: 730443 - DNA, 19 bp, Mus musculus
  siRNA target sequence for 4921536I21Rik (NM_027617.1,831-849).
gaagaatcaaacgattatt

SEQ ID NO: 730444 - DNA, 19 bp, Mus musculus
  siRNA target sequence for 4921536I21Rik (NM_027617.1,843-861).
gattattttgggaacctaa

SEQ ID NO: 730445 - DNA, 19 bp, Mus musculus
  siRNA target sequence for 4921536I21Rik (NM_027617.1,1002-1020).
ccttctcagcgggtttctt

SEQ ID NO: 730446 - DNA, 19 bp, Mus musculus
  siRNA target sequence for 4921536I21Rik (NM_027617.1,1008-1026).
cagcgggtttcttcaagat

SEQ ID NO: 730447 - DNA, 19 bp, Mus musculus
  siRNA target sequence for 4921536I21Rik (NM_027617.1,1010-1028).
gcgggtttcttcaagatta

SEQ ID NO: 730448 - DNA, 19 bp, Mus musculus
  siRNA target sequence for 4921536I21Rik (NM_027617.1,1011-1029).
cgggtttcttcaagattaa

SEQ ID NO: 730449 - DNA, 19 bp, Mus musculus
  siRNA target sequence for 4921536I21Rik (NM_027617.1,1013-1031).
ggtttcttcaagattaact

SEQ ID NO: 730450 - DNA, 19 bp, Mus musculus
  siRNA target sequence for 4921536I21Rik (NM_027617.1,1057-1075).
gagagaagattattgaaca

SEQ ID NO: 730451 - DNA, 19 bp, Mus musculus
  siRNA target sequence for 4921536I21Rik (NM_027617.1,1086-1104).
gtaaaggaagaacgaaaat

SEQ ID NO: 730452 - DNA, 19 bp, Mus musculus
  siRNA target sequence for 4921536I21Rik (NM_027617.1,1266-1284).
gatttggaactttactata

SEQ ID NO: 730453 - DNA, 19 bp, Mus musculus
  siRNA target sequence for 4921536I21Rik (NM_027617.1,1319-1337).
caagatgcgaccaaggaat

SEQ ID NO: 730454 - DNA, 19 bp, Mus musculus
  siRNA target sequence for 4921536I21Rik (NM_027617.1,1341-1359).
gcaaatatctcagattcta

SEQ ID NO: 730455 - DNA, 19 bp, Mus musculus
  siRNA target sequence for 4921536I21Rik (NM_027617.1,1349-1367).
ctcagattctaagaattat

SEQ ID NO: 730456 - DNA, 19 bp, Mus musculus
  siRNA target sequence for 4921536I21Rik (NM_027617.1,1351-1369).
cagattctaagaattatct

SEQ ID NO: 730457 - DNA, 19 bp, Mus musculus
  siRNA target sequence for 4921536I21Rik (NM_027617.1,1353-1371).
gattctaagaattatctta

SEQ ID NO: 730458 - DNA, 19 bp, Mus musculus
  siRNA target sequence for 4921536I21Rik (NM_027617.1,1395-1413).
cacgcaattgaccaactta

SEQ ID NO: 730459 - DNA, 19 bp, Mus musculus
  siRNA target sequence for 4921536I21Rik (NM_027617.1,1398-1416).
gcaattgaccaacttaaga

SEQ ID NO: 730460 - DNA, 19 bp, Mus musculus
  siRNA target sequence for 4921536I21Rik (NM_027617.1,1404-1422).
gaccaacttaagagaaaat

SEQ ID NO: 730461 - DNA, 19 bp, Mus musculus
  siRNA target sequence for 4921536I21Rik (NM_027617.1,1431-1449).
gataaaatgaaactcatat

SEQ ID NO: 730462 - DNA, 19 bp, Mus musculus
  siRNA target sequence for 4921536I21Rik (NM_027617.1,1439-1457).
gaaactcatattagaagtt

SEQ ID NO: 730463 - DNA, 19 bp, Mus musculus
  siRNA target sequence for 4921536I21Rik (NM_027617.1,1535-1553).
ccgacctccgatgttttct

SEQ ID NO: 730464 - DNA, 19 bp, Mus musculus
  siRNA target sequence for 4931403M11Rik (NM_027621.1,374-392).
cctcacccaggctatcaat

SEQ ID NO: 730465 - DNA, 19 bp, Mus musculus
  siRNA target sequence for 4931403M11Rik (NM_027621.1,411-429).
ctctgtgaatggttcttga

SEQ ID NO: 730466 - DNA, 19 bp, Mus musculus
  siRNA target sequence for 4931403M11Rik (NM_027621.1,489-507).
ctgatggtgtcttctctta

SEQ ID NO: 730467 - DNA, 19 bp, Mus musculus
  siRNA target sequence for 4931403M11Rik (NM_027621.1,509-527).
gagaccagagaccttacta

SEQ ID NO: 730468 - DNA, 19 bp, Mus musculus
  siRNA target sequence for 4931403M11Rik (NM_027621.1,511-529).
gaccagagaccttactaga

SEQ ID NO: 730469 - DNA, 19 bp, Mus musculus
  siRNA target sequence for 4921530G04Rik (NM_027622.1,781-799).
ctttcctcgtcgttaagaa

SEQ ID NO: 730470 - DNA, 19 bp, Mus musculus
  siRNA target sequence for 4921530G04Rik (NM_027622.1,1108-1126).
cctggtgggagattttcaa

SEQ ID NO: 730471 - DNA, 19 bp, Mus musculus
  siRNA target sequence for 4921530G04Rik (NM_027622.1,1109-1127).
ctggtgggagattttcaat

SEQ ID NO: 730472 - DNA, 19 bp, Mus musculus
  siRNA target sequence for 4921530G04Rik (NM_027622.1,1112-1130).
gtgggagattttcaatgta

SEQ ID NO: 730473 - DNA, 19 bp, Mus musculus
  siRNA target sequence for 4921530G04Rik (NM_027622.1,1207-1225).
ggttggtaggcctgaagtt

SEQ ID NO: 730474 - DNA, 19 bp, Mus musculus
  siRNA target sequence for 4921530G04Rik (NM_027622.1,1212-1230).
gtaggcctgaagttcgttt

SEQ ID NO: 730475 - DNA, 19 bp, Mus musculus
  siRNA target sequence for 4921530G04Rik (NM_027622.1,1216-1234).
gcctgaagttcgttttcct

SEQ ID NO: 730476 - DNA, 19 bp, Mus musculus
  siRNA target sequence for 4921530G04Rik (NM_027622.1,1242-1260).
ggctttgacgccatttgct

SEQ ID NO: 730477 - DNA, 19 bp, Mus musculus
  siRNA target sequence for 4921530G04Rik (NM_027622.1,1380-1398).
ctgcaccgctggaagctaa

SEQ ID NO: 730478 - DNA, 19 bp, Mus musculus
  siRNA target sequence for 4921530G04Rik (NM_027622.1,1441-1459).
ctgactgcagcctacaaaa

SEQ ID NO: 730479 - DNA, 19 bp, Mus musculus
  siRNA target sequence for 4921530G04Rik (NM_027622.1,1465-1483).
gcttcaaggtgcattcgta

SEQ ID NO: 730480 - DNA, 19 bp, Mus musculus
  siRNA target sequence for 4921530G04Rik (NM_027622.1,1466-1484).
cttcaaggtgcattcgtat

SEQ ID NO: 730481 - DNA, 19 bp, Mus musculus
  siRNA target sequence for 4921530G04Rik (NM_027622.1,1538-1556).
gctccttgtggtagaagtt

SEQ ID NO: 730482 - DNA, 19 bp, Mus musculus
  siRNA target sequence for 4921530G04Rik (NM_027622.1,1542-1560).
cttgtggtagaagttgtat

SEQ ID NO: 730483 - DNA, 19 bp, Mus musculus
  siRNA target sequence for 4921530G04Rik (NM_027622.1,1592-1610).
ctcccctgatccacacaat

SEQ ID NO: 730484 - DNA, 19 bp, Mus musculus
  siRNA target sequence for 4931406N15Rik (NM_027629.1,306-324).
ctgagaacgcagatgatga

SEQ ID NO: 730485 - DNA, 19 bp, Mus musculus
  siRNA target sequence for 4931406N15Rik (NM_027629.1,550-568).
caatgaccttacagtaata

SEQ ID NO: 730486 - DNA, 19 bp, Mus musculus
  siRNA target sequence for 4931406N15Rik (NM_027629.1,554-572).
gaccttacagtaatacagt

SEQ ID NO: 730487 - DNA, 19 bp, Mus musculus
  siRNA target sequence for 4931406N15Rik (NM_027629.1,678-696).
gcagccagaggcttgctaa

SEQ ID NO: 730488 - DNA, 19 bp, Mus musculus
  siRNA target sequence for 4931406N15Rik (NM_027629.1,725-743).
gatattcctgtttaccttt

SEQ ID NO: 730489 - DNA, 19 bp, Mus musculus
  siRNA target sequence for 4931406N15Rik (NM_027629.1,734-752).
gtttaccttttctcaagat

SEQ ID NO: 730490 - DNA, 19 bp, Mus musculus
  siRNA target sequence for 4931406N15Rik (NM_027629.1,739-757).
ccttttctcaagatacgtt

SEQ ID NO: 730491 - DNA, 19 bp, Mus musculus
  siRNA target sequence for 4931406N15Rik (NM_027629.1,754-772).
cgttcctacacctttcgta

SEQ ID NO: 730492 - DNA, 19 bp, Mus musculus
  siRNA target sequence for 4931406N15Rik (NM_027629.1,759-777).
ctacacctttcgtaccata

SEQ ID NO: 730493 - DNA, 19 bp, Mus musculus
  siRNA target sequence for 4931406N15Rik (NM_027629.1,811-829).
gatgattactgcatctcat

SEQ ID NO: 730494 - DNA, 19 bp, Mus musculus
  siRNA target sequence for 4931406N15Rik (NM_027629.1,844-862).
caacgggtacaaggtttat

SEQ ID NO: 730495 - DNA, 19 bp, Mus musculus
  siRNA target sequence for 4931406N15Rik (NM_027629.1,883-901).
cacatctccacatgataaa

SEQ ID NO: 730496 - DNA, 19 bp, Mus musculus
  siRNA target sequence for 4931406N15Rik (NM_027629.1,888-906).
ctccacatgataaagaaat

SEQ ID NO: 730497 - DNA, 19 bp, Mus musculus
  siRNA target sequence for 4931406N15Rik (NM_027629.1,944-962).
gattcttggaatgataatt

SEQ ID NO: 730498 - DNA, 19 bp, Mus musculus
  siRNA target sequence for 4931406N15Rik (NM_027629.1,948-966).
cttggaatgataatttagt

SEQ ID NO: 730499 - DNA, 19 bp, Mus musculus
  siRNA target sequence for 4931406N15Rik (NM_027629.1,1025-1043).
gatctgaagaagatctgtt

SEQ ID NO: 730500 - DNA, 19 bp, Mus musculus
  siRNA target sequence for 4931406N15Rik (NM_027629.1,1028-1046).
ctgaagaagatctgttttt

SEQ ID NO: 730501 - DNA, 19 bp, Mus musculus
  siRNA target sequence for 4931406N15Rik (NM_027629.1,1066-1084).
gaccaccttgaaatttgtt

SEQ ID NO: 730502 - DNA, 19 bp, Mus musculus
  siRNA target sequence for 4931406N15Rik (NM_027629.1,1068-1086).
ccaccttgaaatttgttca

SEQ ID NO: 730503 - DNA, 19 bp, Mus musculus
  siRNA target sequence for 4931406N15Rik (NM_027629.1,1069-1087).
caccttgaaatttgttcat

SEQ ID NO: 730504 - DNA, 19 bp, Mus musculus
  siRNA target sequence for 4931406N15Rik (NM_027629.1,1117-1135).
cgtgcagttggcttttcaa

SEQ ID NO: 730505 - DNA, 19 bp, Mus musculus
  siRNA target sequence for 4931406N15Rik (NM_027629.1,1190-1208).
gacttttctactgttaaat

SEQ ID NO: 730506 - DNA, 19 bp, Mus musculus
  siRNA target sequence for 4931406N15Rik (NM_027629.1,1340-1358).
ggccgttggaaagttttca

SEQ ID NO: 730507 - DNA, 19 bp, Mus musculus
  siRNA target sequence for 4931406N15Rik (NM_027629.1,1342-1360).
ccgttggaaagttttcaca

SEQ ID NO: 730508 - DNA, 19 bp, Mus musculus
  siRNA target sequence for 4931406N15Rik (NM_027629.1,1381-1399).
gtttgggtggtggatgttt

SEQ ID NO: 730509 - DNA, 19 bp, Mus musculus
  siRNA target sequence for 4931406N15Rik (NM_027629.1,1385-1403).
gggtggtggatgtttgatt

SEQ ID NO: 730510 - DNA, 19 bp, Mus musculus
  siRNA target sequence for 4931406N15Rik (NM_027629.1,1426-1444).
cgccgatgtgaagaatgtt

SEQ ID NO: 730511 - DNA, 19 bp, Mus musculus
  siRNA target sequence for 4931406N15Rik (NM_027629.1,1427-1445).
gccgatgtgaagaatgttt

SEQ ID NO: 730512 - DNA, 19 bp, Mus musculus
  siRNA target sequence for 4931406N15Rik (NM_027629.1,1456-1474).
caccactgtctcttctaaa

SEQ ID NO: 730513 - DNA, 19 bp, Mus musculus
  siRNA target sequence for 4931406N15Rik (NM_027629.1,1483-1501).
ggcaattgcacttaaagaa

SEQ ID NO: 730514 - DNA, 19 bp, Mus musculus
  siRNA target sequence for 4931406N15Rik (NM_027629.1,1539-1557).
ggattggaagtaggataaa

SEQ ID NO: 730515 - DNA, 19 bp, Mus musculus
  siRNA target sequence for 4931406N15Rik (NM_027629.1,1626-1644).
cctccgtgttggacaaaga

SEQ ID NO: 730516 - DNA, 19 bp, Mus musculus
  siRNA target sequence for 4931406N15Rik (NM_027629.1,1627-1645).
ctccgtgttggacaaagat

SEQ ID NO: 730517 - DNA, 19 bp, Mus musculus
  siRNA target sequence for 4931406N15Rik (NM_027629.1,1717-1735).
gcaactgacaaaagtgtat

SEQ ID NO: 730518 - DNA, 19 bp, Mus musculus
  siRNA target sequence for 4931406N15Rik (NM_027629.1,1736-1754).
gaaatatacggttaccata

SEQ ID NO: 730519 - DNA, 19 bp, Mus musculus
  siRNA target sequence for 4931406N15Rik (NM_027629.1,1745-1763).
ggttaccatatgtccaaaa

SEQ ID NO: 730520 - DNA, 19 bp, Mus musculus
  siRNA target sequence for 4931406N15Rik (NM_027629.1,1751-1769).
catatgtccaaaacttcat

SEQ ID NO: 730521 - DNA, 19 bp, Mus musculus
  siRNA target sequence for 4931406N15Rik (NM_027629.1,1784-1802).
gatccacctaccatcaaaa

SEQ ID NO: 730522 - DNA, 19 bp, Mus musculus
  siRNA target sequence for 4931406N15Rik (NM_027629.1,1877-1895).
catgtacgggacataacca

SEQ ID NO: 730523 - DNA, 19 bp, Mus musculus
  siRNA target sequence for 4931406N15Rik (NM_027629.1,1904-1922).
gatagcagccagccaaata

SEQ ID NO: 730524 - DNA, 19 bp, Mus musculus
  siRNA target sequence for 4931406N15Rik (NM_027629.1,1908-1926).
gcagccagccaaataagaa

SEQ ID NO: 730525 - DNA, 19 bp, Mus musculus
  siRNA target sequence for 4931406N15Rik (NM_027629.1,1915-1933).
gccaaataagaaatcagta

SEQ ID NO: 730526 - DNA, 19 bp, Mus musculus
  siRNA target sequence for 4931406N15Rik (NM_027629.1,1934-1952).
ctgcctgtgagtaaaaaca

SEQ ID NO: 730527 - DNA, 19 bp, Mus musculus
  siRNA target sequence for 4931406N15Rik (NM_027629.1,1990-2008).
cgctactctccgaacaagt

SEQ ID NO: 730528 - DNA, 19 bp, Mus musculus
  siRNA target sequence for 4931406N15Rik (NM_027629.1,2009-2027).
gggacagaaccgaagataa

SEQ ID NO: 730529 - DNA, 19 bp, Mus musculus
  siRNA target sequence for 4931406N15Rik (NM_027629.1,2010-2028).
ggacagaaccgaagataaa

SEQ ID NO: 730530 - DNA, 19 bp, Mus musculus
  siRNA target sequence for 4931406N15Rik (NM_027629.1,2105-2123).
gacgcgctgatagagaatt

SEQ ID NO: 730531 - DNA, 19 bp, Mus musculus
  siRNA target sequence for 4931406N15Rik (NM_027629.1,2107-2125).
cgcgctgatagagaatttt

SEQ ID NO: 730532 - DNA, 19 bp, Mus musculus
  siRNA target sequence for 4931428L18Rik (NM_027637.1,224-242).
gggcatcttccatcttcaa

SEQ ID NO: 730533 - DNA, 19 bp, Mus musculus
  siRNA target sequence for 4931428L18Rik (NM_027637.1,251-269).
cggaaggttctggttgata

SEQ ID NO: 730534 - DNA, 19 bp, Mus musculus
  siRNA target sequence for Spats1 (NM_027649.1,150-168).
cacggtgatgctctagaat

SEQ ID NO: 730535 - DNA, 19 bp, Mus musculus
  siRNA target sequence for Spats1 (NM_027649.1,152-170).
cggtgatgctctagaatct

SEQ ID NO: 730536 - DNA, 19 bp, Mus musculus
  siRNA target sequence for Spats1 (NM_027649.1,153-171).
ggtgatgctctagaatcta

SEQ ID NO: 730537 - DNA, 19 bp, Mus musculus
  siRNA target sequence for Spats1 (NM_027649.1,154-172).
gtgatgctctagaatctaa

SEQ ID NO: 730538 - DNA, 19 bp, Mus musculus
  siRNA target sequence for Spats1 (NM_027649.1,193-211).
cgtcctctcgtcagaacaa

SEQ ID NO: 730539 - DNA, 19 bp, Mus musculus
  siRNA target sequence for Spats1 (NM_027649.1,194-212).
gtcctctcgtcagaacaaa

SEQ ID NO: 730540 - DNA, 19 bp, Mus musculus
  siRNA target sequence for Spats1 (NM_027649.1,350-368).
ctctgctcagtctaatcgt

SEQ ID NO: 730541 - DNA, 19 bp, Mus musculus
  siRNA target sequence for Spats1 (NM_027649.1,359-377).
gtctaatcgttcctcaaaa

SEQ ID NO: 730542 - DNA, 19 bp, Mus musculus
  siRNA target sequence for Spats1 (NM_027649.1,361-379).
ctaatcgttcctcaaaagt

SEQ ID NO: 730543 - DNA, 19 bp, Mus musculus
  siRNA target sequence for Spats1 (NM_027649.1,417-435).
gaattcagcctgctcaatt

SEQ ID NO: 730544 - DNA, 19 bp, Mus musculus
  siRNA target sequence for Spats1 (NM_027649.1,455-473).
gcgtcctgagtggacattt

SEQ ID NO: 730545 - DNA, 19 bp, Mus musculus
  siRNA target sequence for Spats1 (NM_027649.1,462-480).
gagtggacattttatccaa

SEQ ID NO: 730546 - DNA, 19 bp, Mus musculus
  siRNA target sequence for Spats1 (NM_027649.1,498-516).
cacacctaccacattggaa

SEQ ID NO: 730547 - DNA, 19 bp, Mus musculus
  siRNA target sequence for Spats1 (NM_027649.1,605-623).
cgatattgatcccagaaat

SEQ ID NO: 730548 - DNA, 19 bp, Mus musculus
  siRNA target sequence for Spats1 (NM_027649.1,646-664).
gggataatccgtacatgtt

SEQ ID NO: 730549 - DNA, 19 bp, Mus musculus
  siRNA target sequence for Spats1 (NM_027649.1,674-692).
gagtaaagagttcttcaaa

SEQ ID NO: 730550 - DNA, 19 bp, Mus musculus
  siRNA target sequence for Spats1 (NM_027649.1,703-721).
ctttgcctccggtgaactt

SEQ ID NO: 730551 - DNA, 19 bp, Mus musculus
  siRNA target sequence for Spats1 (NM_027649.1,726-744).
ctgggaccttacgagaaaa

SEQ ID NO: 730552 - DNA, 19 bp, Mus musculus
  siRNA target sequence for Spats1 (NM_027649.1,728-746).
gggaccttacgagaaaaaa

SEQ ID NO: 730553 - DNA, 19 bp, Mus musculus
  siRNA target sequence for Spats1 (NM_027649.1,729-747).
ggaccttacgagaaaaaat

SEQ ID NO: 730554 - DNA, 19 bp, Mus musculus
  siRNA target sequence for Spats1 (NM_027649.1,730-748).
gaccttacgagaaaaaatt

SEQ ID NO: 730555 - DNA, 19 bp, Mus musculus
  siRNA target sequence for Spats1 (NM_027649.1,763-781).
cacttgagccacttccaaa

SEQ ID NO: 730556 - DNA, 19 bp, Mus musculus
  siRNA target sequence for Spats1 (NM_027649.1,795-813).
cctttctgggagaaggaaa

SEQ ID NO: 730557 - DNA, 19 bp, Mus musculus
  siRNA target sequence for Spats1 (NM_027649.1,810-828).
gaaaaagccaacaatttga

SEQ ID NO: 730558 - DNA, 19 bp, Mus musculus
  siRNA target sequence for Speer3 (NM_027650.1,157-175).
ggagggctcccagaaagat

SEQ ID NO: 730559 - DNA, 19 bp, Mus musculus
  siRNA target sequence for Speer3 (NM_027650.1,158-176).
gagggctcccagaaagata

SEQ ID NO: 730560 - DNA, 19 bp, Mus musculus
  siRNA target sequence for Speer3 (NM_027650.1,184-202).
ctgtacgtgacctaagtga

SEQ ID NO: 730561 - DNA, 19 bp, Mus musculus
  siRNA target sequence for D5Wsu178e (NM_027652.1,532-550).
ccgactggcgtcagtgttt

SEQ ID NO: 730562 - DNA, 19 bp, Mus musculus
  siRNA target sequence for D5Wsu178e (NM_027652.1,533-551).
cgactggcgtcagtgtttt

SEQ ID NO: 730563 - DNA, 19 bp, Mus musculus
  siRNA target sequence for D5Wsu178e (NM_027652.1,534-552).
gactggcgtcagtgttttt

SEQ ID NO: 730564 - DNA, 19 bp, Mus musculus
  siRNA target sequence for D5Wsu178e (NM_027652.1,539-557).
gcgtcagtgtttttgttct

SEQ ID NO: 730565 - DNA, 19 bp, Mus musculus
  siRNA target sequence for D5Wsu178e (NM_027652.1,540-558).
cgtcagtgtttttgttctt

SEQ ID NO: 730566 - DNA, 19 bp, Mus musculus
  siRNA target sequence for D5Wsu178e (NM_027652.1,562-580).
ctcctgctatgggtagttt

SEQ ID NO: 730567 - DNA, 19 bp, Mus musculus
  siRNA target sequence for D5Wsu178e (NM_027652.1,597-615).
gtctcactgggagaagtat

SEQ ID NO: 730568 - DNA, 19 bp, Mus musculus
  siRNA target sequence for D5Wsu178e (NM_027652.1,637-655).
ccatggggatatgacatta

SEQ ID NO: 730569 - DNA, 19 bp, Mus musculus
  siRNA target sequence for D5Wsu178e (NM_027652.1,651-669).
cattagccaagtgactatt

SEQ ID NO: 730570 - DNA, 19 bp, Mus musculus
  siRNA target sequence for D5Wsu178e (NM_027652.1,656-674).
gccaagtgactatttcttt

SEQ ID NO: 730571 - DNA, 19 bp, Mus musculus
  siRNA target sequence for D5Wsu178e (NM_027652.1,657-675).
ccaagtgactatttctttt

SEQ ID NO: 730572 - DNA, 19 bp, Mus musculus
  siRNA target sequence for D5Wsu178e (NM_027652.1,765-783).
gattattgggtgtgcatta

SEQ ID NO: 730573 - DNA, 19 bp, Mus musculus
  siRNA target sequence for D5Wsu178e (NM_027652.1,789-807).
gactcttccaatgagttta

SEQ ID NO: 730574 - DNA, 19 bp, Mus musculus
  siRNA target sequence for D5Wsu178e (NM_027652.1,846-864).
gcacaagtccgtctatgaa

SEQ ID NO: 730575 - DNA, 19 bp, Mus musculus
  siRNA target sequence for D5Wsu178e (NM_027652.1,922-940).
ctctggtcaccttcagata

SEQ ID NO: 730576 - DNA, 19 bp, Mus musculus
  siRNA target sequence for D5Wsu178e (NM_027652.1,929-947).
caccttcagatatcttaga

SEQ ID NO: 730577 - DNA, 19 bp, Mus musculus
  siRNA target sequence for D5Wsu178e (NM_027652.1,946-964).
gaaatacaccctagaatat

SEQ ID NO: 730578 - DNA, 19 bp, Mus musculus
  siRNA target sequence for D5Wsu178e (NM_027652.1,956-974).
ctagaatattctacttcat

SEQ ID NO: 730579 - DNA, 19 bp, Mus musculus
  siRNA target sequence for D5Wsu178e (NM_027652.1,999-1017).
cacatgtcagctaattgtt

SEQ ID NO: 730580 - DNA, 19 bp, Mus musculus
  siRNA target sequence for D5Wsu178e (NM_027652.1,1034-1052).
cgcggtgcccgactttgaa

SEQ ID NO: 730581 - DNA, 19 bp, Mus musculus
  siRNA target sequence for D5Wsu178e (NM_027652.1,1122-1140).
gagcgccctcctttacaca

SEQ ID NO: 730582 - DNA, 19 bp, Mus musculus
  siRNA target sequence for D5Wsu178e (NM_027652.1,1157-1175).
ctctggctcacatccatta

SEQ ID NO: 730583 - DNA, 19 bp, Mus musculus
  siRNA target sequence for D5Wsu178e (NM_027652.1,1194-1212).
gcagctgagccgacatttt

SEQ ID NO: 730584 - DNA, 19 bp, Mus musculus
  siRNA target sequence for D5Wsu178e (NM_027652.1,1200-1218).
gagccgacattttcagatt

SEQ ID NO: 730585 - DNA, 19 bp, Mus musculus
  siRNA target sequence for Rnf134 (NM_027654.1,392-410).
ggagcgcctgataaacctt

SEQ ID NO: 730586 - DNA, 19 bp, Mus musculus
  siRNA target sequence for Rnf134 (NM_027654.1,425-443).
ctacatcctgtgttcgatt

SEQ ID NO: 730587 - DNA, 19 bp, Mus musculus
  siRNA target sequence for Rnf134 (NM_027654.1,436-454).
gttcgatttgcaaaggtta

SEQ ID NO: 730588 - DNA, 19 bp, Mus musculus
  siRNA target sequence for Rnf134 (NM_027654.1,445-463).
gcaaaggttacctgataga

SEQ ID NO: 730589 - DNA, 19 bp, Mus musculus
  siRNA target sequence for Rnf134 (NM_027654.1,541-559).
gcccaaaatgcaacatagt

SEQ ID NO: 730590 - DNA, 19 bp, Mus musculus
  siRNA target sequence for Rnf134 (NM_027654.1,542-560).
cccaaaatgcaacatagtt

SEQ ID NO: 730591 - DNA, 19 bp, Mus musculus
  siRNA target sequence for Rnf134 (NM_027654.1,544-562).
caaaatgcaacatagttgt

SEQ ID NO: 730592 - DNA, 19 bp, Mus musculus
  siRNA target sequence for Rnf134 (NM_027654.1,569-587).
gactcagcctctttataat

SEQ ID NO: 730593 - DNA, 19 bp, Mus musculus
  siRNA target sequence for Rnf134 (NM_027654.1,577-595).
ctctttataatataaggtt

SEQ ID NO: 730594 - DNA, 19 bp, Mus musculus
  siRNA target sequence for Rnf134 (NM_027654.1,592-610).
ggttggaccggcagttaca

SEQ ID NO: 730595 - DNA, 19 bp, Mus musculus
  siRNA target sequence for Rnf134 (NM_027654.1,593-611).
gttggaccggcagttacaa

SEQ ID NO: 730596 - DNA, 19 bp, Mus musculus
  siRNA target sequence for Rnf134 (NM_027654.1,599-617).
ccggcagttacaagacata

SEQ ID NO: 730597 - DNA, 19 bp, Mus musculus
  siRNA target sequence for Rnf134 (NM_027654.1,601-619).
ggcagttacaagacatagt

SEQ ID NO: 730598 - DNA, 19 bp, Mus musculus
  siRNA target sequence for Rnf134 (NM_027654.1,602-620).
gcagttacaagacatagta

SEQ ID NO: 730599 - DNA, 19 bp, Mus musculus
  siRNA target sequence for Rnf134 (NM_027654.1,603-621).
cagttacaagacatagtat

SEQ ID NO: 730600 - DNA, 19 bp, Mus musculus
  siRNA target sequence for Rnf134 (NM_027654.1,623-641).
caaattagtgatcaatcta

SEQ ID NO: 730601 - DNA, 19 bp, Mus musculus
  siRNA target sequence for Rnf134 (NM_027654.1,723-741).
gtcccttcaagcaaaggaa

SEQ ID NO: 730602 - DNA, 19 bp, Mus musculus
  siRNA target sequence for Rnf134 (NM_027654.1,725-743).
cccttcaagcaaaggaaaa

SEQ ID NO: 730603 - DNA, 19 bp, Mus musculus
  siRNA target sequence for Rnf134 (NM_027654.1,761-779).
gtcagtgtttcgtattcca

SEQ ID NO: 730604 - DNA, 19 bp, Mus musculus
  siRNA target sequence for Rnf134 (NM_027654.1,772-790).
gtattccacctgaacttga

SEQ ID NO: 730605 - DNA, 19 bp, Mus musculus
  siRNA target sequence for Rnf134 (NM_027654.1,777-795).
ccacctgaacttgatatgt

SEQ ID NO: 730606 - DNA, 19 bp, Mus musculus
  siRNA target sequence for Rnf134 (NM_027654.1,783-801).
gaacttgatatgtctttat

SEQ ID NO: 730607 - DNA, 19 bp, Mus musculus
  siRNA target sequence for Rnf134 (NM_027654.1,796-814).
ctttattacttgagttcat

SEQ ID NO: 730608 - DNA, 19 bp, Mus musculus
  siRNA target sequence for Rnf134 (NM_027654.1,847-865).
cattggaaaagaagtttgt

SEQ ID NO: 730609 - DNA, 19 bp, Mus musculus
  siRNA target sequence for Rnf134 (NM_027654.1,857-875).
gaagtttgtgcgtgtttca

SEQ ID NO: 730610 - DNA, 19 bp, Mus musculus
  siRNA target sequence for Rnf134 (NM_027654.1,883-901).
caactatcgggcatgtaga

SEQ ID NO: 730611 - DNA, 19 bp, Mus musculus
  siRNA target sequence for Rnf134 (NM_027654.1,890-908).
cgggcatgtagaaaaattt

SEQ ID NO: 730612 - DNA, 19 bp, Mus musculus
  siRNA target sequence for Rnf134 (NM_027654.1,893-911).
gcatgtagaaaaatttctt

SEQ ID NO: 730613 - DNA, 19 bp, Mus musculus
  siRNA target sequence for Rnf134 (NM_027654.1,974-992).
ggagcggtaccaaactcta

SEQ ID NO: 730614 - DNA, 19 bp, Mus musculus
  siRNA target sequence for Rnf134 (NM_027654.1,995-1013).
ggaaatccgacgtgcaata

SEQ ID NO: 730615 - DNA, 19 bp, Mus musculus
  siRNA target sequence for Rnf134 (NM_027654.1,1031-1049).
ggacggtctgcttgttctt

SEQ ID NO: 730616 - DNA, 19 bp, Mus musculus
  siRNA target sequence for Rnf134 (NM_027654.1,1034-1052).
cggtctgcttgttcttcat

SEQ ID NO: 730617 - DNA, 19 bp, Mus musculus
  siRNA target sequence for Rnf134 (NM_027654.1,1035-1053).
ggtctgcttgttcttcatt

SEQ ID NO: 730618 - DNA, 19 bp, Mus musculus
  siRNA target sequence for 4933411G06Rik (NM_027670.1,122-140).
cttcaagtggtgtcttaga

SEQ ID NO: 730619 - DNA, 19 bp, Mus musculus
  siRNA target sequence for 4933411G06Rik (NM_027670.1,399-417).
cgacagcttaggaagatct

SEQ ID NO: 730620 - DNA, 19 bp, Mus musculus
  siRNA target sequence for 4933426L22Rik (NM_027672.1,240-258).
caagcaccgaattaaagaa

SEQ ID NO: 730621 - DNA, 19 bp, Mus musculus
  siRNA target sequence for 4933426L22Rik (NM_027672.1,351-369).
cgtagcaggagaaatagat

SEQ ID NO: 730622 - DNA, 19 bp, Mus musculus
  siRNA target sequence for 4933426L22Rik (NM_027672.1,352-370).
gtagcaggagaaatagatt

SEQ ID NO: 730623 - DNA, 19 bp, Mus musculus
  siRNA target sequence for 4933426L22Rik (NM_027672.1,459-477).
ggttgatcgtgtttttgat

SEQ ID NO: 730624 - DNA, 19 bp, Mus musculus
  siRNA target sequence for 4933426L22Rik (NM_027672.1,482-500).
gtctcaacttccgaaagat

SEQ ID NO: 730625 - DNA, 19 bp, Mus musculus
  siRNA target sequence for 4933426L22Rik (NM_027672.1,492-510).
ccgaaagatacctccatta

SEQ ID NO: 730626 - DNA, 19 bp, Mus musculus
  siRNA target sequence for 4933426L22Rik (NM_027672.1,494-512).
gaaagatacctccattagt

SEQ ID NO: 730627 - DNA, 19 bp, Mus musculus
  siRNA target sequence for 4933426L22Rik (NM_027672.1,503-521).
ctccattagttcattctaa

SEQ ID NO: 730628 - DNA, 19 bp, Mus musculus
  siRNA target sequence for 4933426L22Rik (NM_027672.1,572-590).
ccgagcatcctgatcactt

SEQ ID NO: 730629 - DNA, 19 bp, Mus musculus
  siRNA target sequence for 4933426L22Rik (NM_027672.1,573-591).
cgagcatcctgatcactta

SEQ ID NO: 730630 - DNA, 19 bp, Mus musculus
  siRNA target sequence for 4933426L22Rik (NM_027672.1,574-592).
gagcatcctgatcacttaa

SEQ ID NO: 730631 - DNA, 19 bp, Mus musculus
  siRNA target sequence for 4933426L22Rik (NM_027672.1,576-594).
gcatcctgatcacttaaca

SEQ ID NO: 730632 - DNA, 19 bp, Mus musculus
  siRNA target sequence for 4933426L22Rik (NM_027672.1,577-595).
catcctgatcacttaacaa

SEQ ID NO: 730633 - DNA, 19 bp, Mus musculus
  siRNA target sequence for 4933426L22Rik (NM_027672.1,634-652).
ggagataatctgctattgt

SEQ ID NO: 730634 - DNA, 19 bp, Mus musculus
  siRNA target sequence for 4933426L22Rik (NM_027672.1,645-663).
gctattgtcatcagtcttt

SEQ ID NO: 730635 - DNA, 19 bp, Mus musculus
  siRNA target sequence for 4933426L22Rik (NM_027672.1,664-682).
cagttctctaggaagatta

SEQ ID NO: 730636 - DNA, 19 bp, Mus musculus
  siRNA target sequence for 4933426L22Rik (NM_027672.1,666-684).
gttctctaggaagattaga

SEQ ID NO: 730637 - DNA, 19 bp, Mus musculus
  siRNA target sequence for 4933426L22Rik (NM_027672.1,669-687).
ctctaggaagattagacaa

SEQ ID NO: 730638 - DNA, 19 bp, Mus musculus
  siRNA target sequence for 4933426L22Rik (NM_027672.1,678-696).
gattagacaatccattgat

SEQ ID NO: 730639 - DNA, 19 bp, Mus musculus
  siRNA target sequence for 4933426L22Rik (NM_027672.1,703-721).
gctgggaaaatcagaatat

SEQ ID NO: 730640 - DNA, 19 bp, Mus musculus
  siRNA target sequence for 4933426L22Rik (NM_027672.1,706-724).
gggaaaatcagaatattgt

SEQ ID NO: 730641 - DNA, 19 bp, Mus musculus
  siRNA target sequence for 4933426L22Rik (NM_027672.1,707-725).
ggaaaatcagaatattgtt

SEQ ID NO: 730642 - DNA, 19 bp, Mus musculus
  siRNA target sequence for 4933426L22Rik (NM_027672.1,779-797).
gtgaagtccctatcgttaa

SEQ ID NO: 730643 - DNA, 19 bp, Mus musculus
  siRNA target sequence for 4933426L22Rik (NM_027672.1,781-799).
gaagtccctatcgttaaaa

SEQ ID NO: 730644 - DNA, 19 bp, Mus musculus
  siRNA target sequence for 4933426L22Rik (NM_027672.1,784-802).
gtccctatcgttaaaactt

SEQ ID NO: 730645 - DNA, 19 bp, Mus musculus
  siRNA target sequence for 4933426L22Rik (NM_027672.1,786-804).
ccctatcgttaaaacttca

SEQ ID NO: 730646 - DNA, 19 bp, Mus musculus
  siRNA target sequence for 4933426L22Rik (NM_027672.1,787-805).
cctatcgttaaaacttcaa

SEQ ID NO: 730647 - DNA, 19 bp, Mus musculus
  siRNA target sequence for 4933426L22Rik (NM_027672.1,821-839).
ctattttacaggagcttaa

SEQ ID NO: 730648 - DNA, 19 bp, Mus musculus
  siRNA target sequence for 4933426L22Rik (NM_027672.1,954-972).
gaagtccagccctgttaat

SEQ ID NO: 730649 - DNA, 19 bp, Mus musculus
  siRNA target sequence for 4933426L22Rik (NM_027672.1,959-977).
ccagccctgttaataacca

SEQ ID NO: 730650 - DNA, 19 bp, Mus musculus
  siRNA target sequence for 4933426L22Rik (NM_027672.1,1071-1089).
gtttgagaatgctgaatct

SEQ ID NO: 730651 - DNA, 19 bp, Mus musculus
  siRNA target sequence for 4933426L22Rik (NM_027672.1,1088-1106).
ctgaggctgatttcagtat

SEQ ID NO: 730652 - DNA, 19 bp, Mus musculus
  siRNA target sequence for 4933426L22Rik (NM_027672.1,1092-1110).
ggctgatttcagtatccat

SEQ ID NO: 730653 - DNA, 19 bp, Mus musculus
  siRNA target sequence for 4933426L22Rik (NM_027672.1,1096-1114).
gatttcagtatccatttca

SEQ ID NO: 730654 - DNA, 19 bp, Mus musculus
  siRNA target sequence for 4933426L22Rik (NM_027672.1,1103-1121).
gtatccatttcaataggtt

SEQ ID NO: 730655 - DNA, 19 bp, Mus musculus
  siRNA target sequence for 4933421E18Rik (NM_027699.1,185-203).
gattcaatcagtagcattt

SEQ ID NO: 730656 - DNA, 19 bp, Mus musculus
  siRNA target sequence for 4933421E18Rik (NM_027699.1,233-251).
caagttaccaataaagcaa

SEQ ID NO: 730657 - DNA, 19 bp, Mus musculus
  siRNA target sequence for 4933421E18Rik (NM_027699.1,248-266).
gcaaaagcgggtcaaaaaa

SEQ ID NO: 730658 - DNA, 19 bp, Mus musculus
  siRNA target sequence for 4933421E18Rik (NM_027699.1,383-401).
ctggaacaccgttctaaca

SEQ ID NO: 730659 - DNA, 19 bp, Mus musculus
  siRNA target sequence for 4933421E18Rik (NM_027699.1,392-410).
cgttctaacacgaagtgaa

SEQ ID NO: 730660 - DNA, 19 bp, Mus musculus
  siRNA target sequence for 4933421E18Rik (NM_027699.1,396-414).
ctaacacgaagtgaaaagt

SEQ ID NO: 730661 - DNA, 19 bp, Mus musculus
  siRNA target sequence for 4933421E18Rik (NM_027699.1,439-457).
ccgctgagatgctcatgat

SEQ ID NO: 730662 - DNA, 19 bp, Mus musculus
  siRNA target sequence for 4933421E18Rik (NM_027699.1,440-458).
cgctgagatgctcatgatt

SEQ ID NO: 730663 - DNA, 19 bp, Mus musculus
  siRNA target sequence for 4933421E18Rik (NM_027699.1,441-459).
gctgagatgctcatgattt

SEQ ID NO: 730664 - DNA, 19 bp, Mus musculus
  siRNA target sequence for 4933436E20Rik (NM_027719.1,776-794).
ctcccaccgatctaatctt

SEQ ID NO: 730665 - DNA, 19 bp, Mus musculus
  siRNA target sequence for 4933436E20Rik (NM_027719.1,778-796).
cccaccgatctaatcttta

SEQ ID NO: 730666 - DNA, 19 bp, Mus musculus
  siRNA target sequence for 4933436E20Rik (NM_027719.1,782-800).
ccgatctaatctttacttt

SEQ ID NO: 730667 - DNA, 19 bp, Mus musculus
  siRNA target sequence for 4933436E20Rik (NM_027719.1,797-815).
ctttagattgaaaagttgt

SEQ ID NO: 730668 - DNA, 19 bp, Mus musculus
  siRNA target sequence for 4933436E20Rik (NM_027719.1,970-988).
gatattgtccccctttgat

SEQ ID NO: 730669 - DNA, 19 bp, Mus musculus
  siRNA target sequence for 4933434M16Rik (NM_027720.1,1287-1305).
gccctgaaaccatcagtat

SEQ ID NO: 730670 - DNA, 19 bp, Mus musculus
  siRNA target sequence for 4933434M16Rik (NM_027720.1,1288-1306).
ccctgaaaccatcagtata

SEQ ID NO: 730671 - DNA, 19 bp, Mus musculus
  siRNA target sequence for 4933434M16Rik (NM_027720.1,1289-1307).
cctgaaaccatcagtatat

SEQ ID NO: 730672 - DNA, 19 bp, Mus musculus
  siRNA target sequence for 4933436C10Rik (NM_027722.2,572-590).
ctgctgtgagggaagtgta

SEQ ID NO: 730673 - DNA, 19 bp, Mus musculus
  siRNA target sequence for 4933436C10Rik (NM_027722.2,623-641).
gactgctcggaatatttga

SEQ ID NO: 730674 - DNA, 19 bp, Mus musculus
  siRNA target sequence for 4933436C10Rik (NM_027722.2,625-643).
ctgctcggaatatttgaga

SEQ ID NO: 730675 - DNA, 19 bp, Mus musculus
  siRNA target sequence for 4933436C10Rik (NM_027722.2,630-648).
cggaatatttgagaatcaa

SEQ ID NO: 730676 - DNA, 19 bp, Mus musculus
  siRNA target sequence for 4933436C10Rik (NM_027722.2,649-667).
gaccggaagcacagaacat

SEQ ID NO: 730677 - DNA, 19 bp, Mus musculus
  siRNA target sequence for 4933436C10Rik (NM_027722.2,707-725).
gggaagactccgtgaatat

SEQ ID NO: 730678 - DNA, 19 bp, Mus musculus
  siRNA target sequence for 4933436C10Rik (NM_027722.2,712-730).
gactccgtgaatataggaa

SEQ ID NO: 730679 - DNA, 19 bp, Mus musculus
  siRNA target sequence for 4933436C10Rik (NM_027722.2,786-804).
gcctgtccacgcagagtat

SEQ ID NO: 730680 - DNA, 19 bp, Mus musculus
  siRNA target sequence for 4933436C10Rik (NM_027722.2,827-845).
gttctccgaccaatggaaa

SEQ ID NO: 730681 - DNA, 19 bp, Mus musculus
  siRNA target sequence for 4933436C10Rik (NM_027722.2,832-850).
ccgaccaatggaaattcct

SEQ ID NO: 730682 - DNA, 19 bp, Mus musculus
  siRNA target sequence for 4933436C10Rik (NM_027722.2,857-875).
cttccctcccagataacaa

SEQ ID NO: 730683 - DNA, 19 bp, Mus musculus
  siRNA target sequence for 4933436C10Rik (NM_027722.2,909-927).
ggtgccatccagtataaga

SEQ ID NO: 730684 - DNA, 19 bp, Mus musculus
  siRNA target sequence for 4933436C10Rik (NM_027722.2,910-928).
gtgccatccagtataagat

SEQ ID NO: 730685 - DNA, 19 bp, Mus musculus
  siRNA target sequence for 4933429D11Rik (NM_027725.1,52-70).
gcctcttgcttcgctatta

SEQ ID NO: 730686 - DNA, 19 bp, Mus musculus
  siRNA target sequence for 4933429D11Rik (NM_027725.1,76-94).
caggaattatgctggaata

SEQ ID NO: 730687 - DNA, 19 bp, Mus musculus
  siRNA target sequence for 4933429D11Rik (NM_027725.1,86-104).
gctggaatatgaaaaaggt

SEQ ID NO: 730688 - DNA, 19 bp, Mus musculus
  siRNA target sequence for 4933429D11Rik (NM_027725.1,116-134).
gacgaaatccatagattta

SEQ ID NO: 730689 - DNA, 19 bp, Mus musculus
  siRNA target sequence for 4933429D11Rik (NM_027725.1,118-136).
cgaaatccatagatttact

SEQ ID NO: 730690 - DNA, 19 bp, Mus musculus
  siRNA target sequence for 4933429D11Rik (NM_027725.1,267-285).
catagcgaccacaacttct

SEQ ID NO: 730691 - DNA, 19 bp, Mus musculus
  siRNA target sequence for 4933429D11Rik (NM_027725.1,297-315).
gttctcagagcacacatat

SEQ ID NO: 730692 - DNA, 19 bp, Mus musculus
  siRNA target sequence for 4933429D11Rik (NM_027725.1,325-343).
ccaacgtggcactcaacaa

SEQ ID NO: 730693 - DNA, 19 bp, Mus musculus
  siRNA target sequence for 4933429D11Rik (NM_027725.1,356-374).
ctttatcaccggaagctat

SEQ ID NO: 730694 - DNA, 19 bp, Mus musculus
  siRNA target sequence for 4933429D11Rik (NM_027725.1,476-494).
cgggaaggtgcacacttta

SEQ ID NO: 730695 - DNA, 19 bp, Mus musculus
  siRNA target sequence for 4933429D11Rik (NM_027725.1,477-495).
gggaaggtgcacactttaa

SEQ ID NO: 730696 - DNA, 19 bp, Mus musculus
  siRNA target sequence for 4933429D11Rik (NM_027725.1,479-497).
gaaggtgcacactttaatt

SEQ ID NO: 730697 - DNA, 19 bp, Mus musculus
  siRNA target sequence for 4933429D11Rik (NM_027725.1,515-533).
cagcagcgccttgttcaat

SEQ ID NO: 730698 - DNA, 19 bp, Mus musculus
  siRNA target sequence for 4933429D11Rik (NM_027725.1,535-553).
gggattgctctctaatact

SEQ ID NO: 730699 - DNA, 19 bp, Mus musculus
  siRNA target sequence for 4933429D11Rik (NM_027725.1,536-554).
ggattgctctctaatacta

SEQ ID NO: 730700 - DNA, 19 bp, Mus musculus
  siRNA target sequence for 4933429D11Rik (NM_027725.1,537-555).
gattgctctctaatactaa

SEQ ID NO: 730701 - DNA, 19 bp, Mus musculus
  siRNA target sequence for 4933429D11Rik (NM_027725.1,581-599).
gttgtgggatgctacaagt

SEQ ID NO: 730702 - DNA, 19 bp, Mus musculus
  siRNA target sequence for 4933429D11Rik (NM_027725.1,602-620).
gaaatatgtagcaacctta

SEQ ID NO: 730703 - DNA, 19 bp, Mus musculus
  siRNA target sequence for 4933429D11Rik (NM_027725.1,641-659).
cctagacagctgctttgat

SEQ ID NO: 730704 - DNA, 19 bp, Mus musculus
  siRNA target sequence for 4933429D11Rik (NM_027725.1,692-710).
cgatggaacggcaagagtt

SEQ ID NO: 730705 - DNA, 19 bp, Mus musculus
  siRNA target sequence for 4933429D11Rik (NM_027725.1,696-714).
ggaacggcaagagtttaca

SEQ ID NO: 730706 - DNA, 19 bp, Mus musculus
  siRNA target sequence for 4933429D11Rik (NM_027725.1,697-715).
gaacggcaagagtttacaa

SEQ ID NO: 730707 - DNA, 19 bp, Mus musculus
  siRNA target sequence for 4933429D11Rik (NM_027725.1,702-720).
gcaagagtttacaatgcaa

SEQ ID NO: 730708 - DNA, 19 bp, Mus musculus
  siRNA target sequence for 4933429D11Rik (NM_027725.1,804-822).
ctgacgggcagctctgata

SEQ ID NO: 730709 - DNA, 19 bp, Mus musculus
  siRNA target sequence for 4933429D11Rik (NM_027725.1,873-891).
gaggggcacactgatgaaa

SEQ ID NO: 730710 - DNA, 19 bp, Mus musculus
  siRNA target sequence for 4933429D11Rik (NM_027725.1,876-894).
gggcacactgatgaaatat

SEQ ID NO: 730711 - DNA, 19 bp, Mus musculus
  siRNA target sequence for 4933429D11Rik (NM_027725.1,898-916).
catgtgctttcaactataa

SEQ ID NO: 730712 - DNA, 19 bp, Mus musculus
  siRNA target sequence for 4933429D11Rik (NM_027725.1,908-926).
caactataaagggaatata

SEQ ID NO: 730713 - DNA, 19 bp, Mus musculus
  siRNA target sequence for 4933427L07Rik (NM_027727.1,292-310).
gtgatcttccgaaaaacga

SEQ ID NO: 730714 - DNA, 19 bp, Mus musculus
  siRNA target sequence for 4933427L07Rik (NM_027727.1,300-318).
ccgaaaaacgagtacttaa

SEQ ID NO: 730715 - DNA, 19 bp, Mus musculus
  siRNA target sequence for 4933427L07Rik (NM_027727.1,301-319).
cgaaaaacgagtacttaaa

SEQ ID NO: 730716 - DNA, 19 bp, Mus musculus
  siRNA target sequence for 4933427L07Rik (NM_027727.1,333-351).
cccgagtctatatctgaaa

SEQ ID NO: 730717 - DNA, 19 bp, Mus musculus
  siRNA target sequence for 4933427L07Rik (NM_027727.1,334-352).
ccgagtctatatctgaaaa

SEQ ID NO: 730718 - DNA, 19 bp, Mus musculus
  siRNA target sequence for 4933427L07Rik (NM_027727.1,362-380).
ctggaatcagctcttttca

SEQ ID NO: 730719 - DNA, 19 bp, Mus musculus
  siRNA target sequence for 4933427L07Rik (NM_027727.1,644-662).
gcagcttcattttacatat

SEQ ID NO: 730720 - DNA, 19 bp, Mus musculus
  siRNA target sequence for 4933427L07Rik (NM_027727.1,788-806).
ggccatctcggcaatggtt

SEQ ID NO: 730721 - DNA, 19 bp, Mus musculus
  siRNA target sequence for 4933427L07Rik (NM_027727.1,892-910).
cctacaccagtaaacttgt

SEQ ID NO: 730722 - DNA, 19 bp, Mus musculus
  siRNA target sequence for 4933427L07Rik (NM_027727.1,896-914).
caccagtaaacttgtgaaa

SEQ ID NO: 730723 - DNA, 19 bp, Mus musculus
  siRNA target sequence for 4933427L07Rik (NM_027727.1,1080-1098).
gcgtccccagaacttacat

SEQ ID NO: 730724 - DNA, 19 bp, Mus musculus
  siRNA target sequence for 4933427L07Rik (NM_027727.1,1148-1166).
gacggatgccccagacata

SEQ ID NO: 730725 - DNA, 19 bp, Mus musculus
  siRNA target sequence for 4933427L07Rik (NM_027727.1,1181-1199).
gcaagctgtctcgtcattt

SEQ ID NO: 730726 - DNA, 19 bp, Mus musculus
  siRNA target sequence for 4933427L07Rik (NM_027727.1,1182-1200).
caagctgtctcgtcattta

SEQ ID NO: 730727 - DNA, 19 bp, Mus musculus
  siRNA target sequence for 4933427L07Rik (NM_027727.1,1185-1203).
gctgtctcgtcatttaaga

SEQ ID NO: 730728 - DNA, 19 bp, Mus musculus
  siRNA target sequence for 4933427L07Rik (NM_027727.1,1186-1204).
ctgtctcgtcatttaagaa

SEQ ID NO: 730729 - DNA, 19 bp, Mus musculus
  siRNA target sequence for 4933427L07Rik (NM_027727.1,1217-1235).
cagtccgttcccatcatca

SEQ ID NO: 730730 - DNA, 19 bp, Mus musculus
  siRNA target sequence for 4933427L07Rik (NM_027727.1,1219-1237).
gtccgttcccatcatcaat

SEQ ID NO: 730731 - DNA, 19 bp, Mus musculus
  siRNA target sequence for 4933427L07Rik (NM_027727.1,1239-1257).
cctcataccttccagatta

SEQ ID NO: 730732 - DNA, 19 bp, Mus musculus
  siRNA target sequence for 4933427L07Rik (NM_027727.1,1240-1258).
ctcataccttccagattaa

SEQ ID NO: 730733 - DNA, 19 bp, Mus musculus
  siRNA target sequence for 4933427L07Rik (NM_027727.1,1242-1260).
cataccttccagattaact

SEQ ID NO: 730734 - DNA, 19 bp, Mus musculus
  siRNA target sequence for 4933427L07Rik (NM_027727.1,1246-1264).
ccttccagattaactttaa

SEQ ID NO: 730735 - DNA, 19 bp, Mus musculus
  siRNA target sequence for 4933427L07Rik (NM_027727.1,1370-1388).
ccggacggatatggaaaat

SEQ ID NO: 730736 - DNA, 19 bp, Mus musculus
  siRNA target sequence for 4933427L07Rik (NM_027727.1,1373-1391).
gacggatatggaaaatctt

SEQ ID NO: 730737 - DNA, 19 bp, Mus musculus
  siRNA target sequence for 4933427L07Rik (NM_027727.1,1375-1393).
cggatatggaaaatcttgt

SEQ ID NO: 730738 - DNA, 19 bp, Mus musculus
  siRNA target sequence for 4933427L07Rik (NM_027727.1,1432-1450).
gaaactcacaccatgtcta

SEQ ID NO: 730739 - DNA, 19 bp, Mus musculus
  siRNA target sequence for 4933427L07Rik (NM_027727.1,1456-1474).
cccttataatcctgttgat

SEQ ID NO: 730740 - DNA, 19 bp, Mus musculus
  siRNA target sequence for 4933427L07Rik (NM_027727.1,1496-1514).
caatcggtccattcatgaa

SEQ ID NO: 730741 - DNA, 19 bp, Mus musculus
  siRNA target sequence for 4933427L07Rik (NM_027727.1,1501-1519).
ggtccattcatgaagtgat

SEQ ID NO: 730742 - DNA, 19 bp, Mus musculus
  siRNA target sequence for 4933427L07Rik (NM_027727.1,1529-1547).
cattacttggtattcagaa

SEQ ID NO: 730743 - DNA, 19 bp, Mus musculus
  siRNA target sequence for 4933427L07Rik (NM_027727.1,1567-1585).
ccctggggagcctcctaat

SEQ ID NO: 730744 - DNA, 19 bp, Mus musculus
  siRNA target sequence for 4933427L07Rik (NM_027727.1,1568-1586).
cctggggagcctcctaatt

SEQ ID NO: 730745 - DNA, 19 bp, Mus musculus
  siRNA target sequence for 4933427L07Rik (NM_027727.1,1580-1598).
cctaattctggtggtaata

SEQ ID NO: 730746 - DNA, 19 bp, Mus musculus
  siRNA target sequence for 4933427L07Rik (NM_027727.1,1581-1599).
ctaattctggtggtaataa

SEQ ID NO: 730747 - DNA, 19 bp, Mus musculus
  siRNA target sequence for 4933427L07Rik (NM_027727.1,1654-1672).
gcctggcggctttagcaaa

SEQ ID NO: 730748 - DNA, 19 bp, Mus musculus
  siRNA target sequence for 4933427L07Rik (NM_027727.1,1659-1677).
gcggctttagcaaacatgt

SEQ ID NO: 730749 - DNA, 19 bp, Mus musculus
  siRNA target sequence for 4933427L07Rik (NM_027727.1,1926-1944).
gtgtacgccttgctttaca

SEQ ID NO: 730750 - DNA, 19 bp, Mus musculus
  siRNA target sequence for 4933427L07Rik (NM_027727.1,1978-1996).
cctcattccaggacataat

SEQ ID NO: 730751 - DNA, 19 bp, Mus musculus
  siRNA target sequence for 4933427L07Rik (NM_027727.1,1986-2004).
caggacataatgcaaaaca

SEQ ID NO: 730752 - DNA, 19 bp, Mus musculus
  siRNA target sequence for 4933427L07Rik (NM_027727.1,2010-2028).
ctggtgatctccttcttta

SEQ ID NO: 730753 - DNA, 19 bp, Mus musculus
  siRNA target sequence for 4933427L07Rik (NM_027727.1,2013-2031).
gtgatctccttctttagct

SEQ ID NO: 730754 - DNA, 19 bp, Mus musculus
  siRNA target sequence for 4933427L07Rik (NM_027727.1,2021-2039).
cttctttagctcaagactt

SEQ ID NO: 730755 - DNA, 19 bp, Mus musculus
  siRNA target sequence for 4933427L07Rik (NM_027727.1,2106-2124).
ctgcccaaagacagactaa

SEQ ID NO: 730756 - DNA, 19 bp, Mus musculus
  siRNA target sequence for 5133400G04Rik (NM_027733.2,223-241).
ccatgaaatagagaagaaa

SEQ ID NO: 730757 - DNA, 19 bp, Mus musculus
  siRNA target sequence for Mro (NM_027741.1,499-517).
cgggatcctaatgctaaaa

SEQ ID NO: 730758 - DNA, 19 bp, Mus musculus
  siRNA target sequence for Mro (NM_027741.1,500-518).
gggatcctaatgctaaaaa

SEQ ID NO: 730759 - DNA, 19 bp, Mus musculus
  siRNA target sequence for Mro (NM_027741.1,519-537).
gcgccatctagcaatgaga

SEQ ID NO: 730760 - DNA, 19 bp, Mus musculus
  siRNA target sequence for Mro (NM_027741.1,612-630).
ggttcgtgggctgtatgat

SEQ ID NO: 730761 - DNA, 19 bp, Mus musculus
  siRNA target sequence for Mro (NM_027741.1,636-654).
gagttctgaagttatccat

SEQ ID NO: 730762 - DNA, 19 bp, Mus musculus
  siRNA target sequence for Mro (NM_027741.1,765-783).
cgacagcgtgcggtattca

SEQ ID NO: 730763 - DNA, 19 bp, Mus musculus
  siRNA target sequence for Mro (NM_027741.1,771-789).
cgtgcggtattcagctttt

SEQ ID NO: 730764 - DNA, 19 bp, Mus musculus
  siRNA target sequence for Mro (NM_027741.1,872-890).
cgctcttaggccatttgca

SEQ ID NO: 730765 - DNA, 19 bp, Mus musculus
  siRNA target sequence for Mro (NM_027741.1,880-898).
ggccatttgcaggatgaaa

SEQ ID NO: 730766 - DNA, 19 bp, Mus musculus
  siRNA target sequence for Mro (NM_027741.1,906-924).
ggttgccaaggcttgcaaa

SEQ ID NO: 730767 - DNA, 19 bp, Mus musculus
  siRNA target sequence for Mro (NM_027741.1,907-925).
gttgccaaggcttgcaaaa

SEQ ID NO: 730768 - DNA, 19 bp, Mus musculus
  siRNA target sequence for Mro (NM_027741.1,912-930).
caaggcttgcaaaatgact

SEQ ID NO: 730769 - DNA, 19 bp, Mus musculus
  siRNA target sequence for Mro (NM_027741.1,969-987).
gccgagtttccaaagtgaa

SEQ ID NO: 730770 - DNA, 19 bp, Mus musculus
  siRNA target sequence for 4933428A15Rik (NM_027756.1,336-354).
gaccaacagcactttaaat

SEQ ID NO: 730771 - DNA, 19 bp, Mus musculus
  siRNA target sequence for 4933428A15Rik (NM_027756.1,373-391).
ggctctgtgcccgtaatca

SEQ ID NO: 730772 - DNA, 19 bp, Mus musculus
  siRNA target sequence for 4933428A15Rik (NM_027756.1,374-392).
gctctgtgcccgtaatcat

SEQ ID NO: 730773 - DNA, 19 bp, Mus musculus
  siRNA target sequence for 4933428A15Rik (NM_027756.1,375-393).
ctctgtgcccgtaatcatt

SEQ ID NO: 730774 - DNA, 19 bp, Mus musculus
  siRNA target sequence for 4933428A15Rik (NM_027756.1,396-414).
cagaactgaccatatcata

SEQ ID NO: 730775 - DNA, 19 bp, Mus musculus
  siRNA target sequence for 4933428A15Rik (NM_027756.1,398-416).
gaactgaccatatcatagt

SEQ ID NO: 730776 - DNA, 19 bp, Mus musculus
  siRNA target sequence for 4933428A15Rik (NM_027756.1,401-419).
ctgaccatatcatagtcaa

SEQ ID NO: 730777 - DNA, 19 bp, Mus musculus
  siRNA target sequence for 4933428A15Rik (NM_027756.1,424-442).
gggagcagtgccttgatta

SEQ ID NO: 730778 - DNA, 19 bp, Mus musculus
  siRNA target sequence for 4933428A15Rik (NM_027756.1,425-443).
ggagcagtgccttgattaa

SEQ ID NO: 730779 - DNA, 19 bp, Mus musculus
  siRNA target sequence for 4933428A15Rik (NM_027756.1,426-444).
gagcagtgccttgattaat

SEQ ID NO: 730780 - DNA, 19 bp, Mus musculus
  siRNA target sequence for 4933428A15Rik (NM_027756.1,474-492).
gtttaagtggtataattct

SEQ ID NO: 730781 - DNA, 19 bp, Mus musculus
  siRNA target sequence for 4933428A15Rik (NM_027756.1,683-701).
gagacatgggcgtgtacta

SEQ ID NO: 730782 - DNA, 19 bp, Mus musculus
  siRNA target sequence for 4933428A15Rik (NM_027756.1,685-703).
gacatgggcgtgtactata

SEQ ID NO: 730783 - DNA, 19 bp, Mus musculus
  siRNA target sequence for 4933428A15Rik (NM_027756.1,718-736).
gtggccttcaccatagtca

SEQ ID NO: 730784 - DNA, 19 bp, Mus musculus
  siRNA target sequence for 4933428A15Rik (NM_027756.1,892-910).
ctagaacttgccaaagtga

SEQ ID NO: 730785 - DNA, 19 bp, Mus musculus
  siRNA target sequence for 4933428A15Rik (NM_027756.1,907-925).
gtgactcagttcaaaacca

SEQ ID NO: 730786 - DNA, 19 bp, Mus musculus
  siRNA target sequence for 4933428A15Rik (NM_027756.1,1085-1103).
cagatagggacgaggtata

SEQ ID NO: 730787 - DNA, 19 bp, Mus musculus
  siRNA target sequence for 4933428A15Rik (NM_027756.1,1152-1170).
ggatgcttcgtcattgcat

SEQ ID NO: 730788 - DNA, 19 bp, Mus musculus
  siRNA target sequence for 4933428A15Rik (NM_027756.1,1204-1222).
gttcacccccagtccaaaa

SEQ ID NO: 730789 - DNA, 19 bp, Mus musculus
  siRNA target sequence for 4933428A15Rik (NM_027756.1,1315-1333).
gagccttctacagacataa

SEQ ID NO: 730790 - DNA, 19 bp, Mus musculus
  siRNA target sequence for 4933428A15Rik (NM_027756.1,1318-1336).
ccttctacagacataacga

SEQ ID NO: 730791 - DNA, 19 bp, Mus musculus
  siRNA target sequence for 4933428A15Rik (NM_027756.1,1424-1442).
cagtgacatgtgacagaaa

SEQ ID NO: 730792 - DNA, 19 bp, Mus musculus
  siRNA target sequence for 4933428A15Rik (NM_027756.1,1439-1457).
gaaacacctgcattattta

SEQ ID NO: 730793 - DNA, 19 bp, Mus musculus
  siRNA target sequence for 4933428A15Rik (NM_027756.1,1443-1461).
cacctgcattatttatgaa

SEQ ID NO: 730794 - DNA, 19 bp, Mus musculus
  siRNA target sequence for 4933432K11Rik (NM_027759.1,179-197).
gggaacctagacggaattt

SEQ ID NO: 730795 - DNA, 19 bp, Mus musculus
  siRNA target sequence for 4933432K11Rik (NM_027759.1,181-199).
gaacctagacggaatttca

SEQ ID NO: 730796 - DNA, 19 bp, Mus musculus
  siRNA target sequence for 4933432K11Rik (NM_027759.1,184-202).
cctagacggaatttcaaaa

SEQ ID NO: 730797 - DNA, 19 bp, Mus musculus
  siRNA target sequence for 4933432K11Rik (NM_027759.1,232-250).
gagccgaagttcaaatggt

SEQ ID NO: 730798 - DNA, 19 bp, Mus musculus
  siRNA target sequence for 4933432K11Rik (NM_027759.1,278-296).
gggtctgtcaagattgaca

SEQ ID NO: 730799 - DNA, 19 bp, Mus musculus
  siRNA target sequence for 4933432K11Rik (NM_027759.1,293-311).
gacatggtaaacaagttga

SEQ ID NO: 730800 - DNA, 19 bp, Mus musculus
  siRNA target sequence for 4933432K11Rik (NM_027759.1,295-313).
catggtaaacaagttgaat

SEQ ID NO: 730801 - DNA, 19 bp, Mus musculus
  siRNA target sequence for 4933432K11Rik (NM_027759.1,298-316).
ggtaaacaagttgaattct

SEQ ID NO: 730802 - DNA, 19 bp, Mus musculus
  siRNA target sequence for 4933432K11Rik (NM_027759.1,383-401).
gcagacgactccaagacaa

SEQ ID NO: 730803 - DNA, 19 bp, Mus musculus
  siRNA target sequence for 4933432K11Rik (NM_027759.1,384-402).
cagacgactccaagacaaa

SEQ ID NO: 730804 - DNA, 19 bp, Mus musculus
  siRNA target sequence for 4933432K11Rik (NM_027759.1,490-508).
gacgaatgctgtacttcaa

SEQ ID NO: 730805 - DNA, 19 bp, Mus musculus
  siRNA target sequence for 4933432K11Rik (NM_027759.1,492-510).
cgaatgctgtacttcaaaa

SEQ ID NO: 730806 - DNA, 19 bp, Mus musculus
  siRNA target sequence for 4933432K11Rik (NM_027759.1,497-515).
gctgtacttcaaaatgcta

SEQ ID NO: 730807 - DNA, 19 bp, Mus musculus
  siRNA target sequence for 4933432K11Rik (NM_027759.1,527-545).
cacagactcgacaagctat

SEQ ID NO: 730808 - DNA, 19 bp, Mus musculus
  siRNA target sequence for 4933432K11Rik (NM_027759.1,583-601).
gcaaggtctagaaatgaga

SEQ ID NO: 730809 - DNA, 19 bp, Mus musculus
  siRNA target sequence for 4933432K11Rik (NM_027759.1,587-605).
ggtctagaaatgagagtta

SEQ ID NO: 730810 - DNA, 19 bp, Mus musculus
  siRNA target sequence for 4933432K11Rik (NM_027759.1,658-676).
cgaggagttgggaaacaca

SEQ ID NO: 730811 - DNA, 19 bp, Mus musculus
  siRNA target sequence for 4933432K11Rik (NM_027759.1,729-747).
cattgcattgtgagtttga

SEQ ID NO: 730812 - DNA, 19 bp, Mus musculus
  siRNA target sequence for 4933432K11Rik (NM_027759.1,751-769).
cgcccttttctcagtgttt

SEQ ID NO: 730813 - DNA, 19 bp, Mus musculus
  siRNA target sequence for 4933432K11Rik (NM_027759.1,783-801).
ctccagaaacttacgaaaa

SEQ ID NO: 730814 - DNA, 19 bp, Mus musculus
  siRNA target sequence for 4933432K11Rik (NM_027759.1,786-804).
cagaaacttacgaaaatct

SEQ ID NO: 730815 - DNA, 19 bp, Mus musculus
  siRNA target sequence for 4933432K11Rik (NM_027759.1,788-806).
gaaacttacgaaaatctca

SEQ ID NO: 730816 - DNA, 19 bp, Mus musculus
  siRNA target sequence for 4933432K11Rik (NM_027759.1,860-878).
gaaaagcaaccattttcaa

SEQ ID NO: 730817 - DNA, 19 bp, Mus musculus
  siRNA target sequence for 4933432K11Rik (NM_027759.1,1224-1242).
gccataagggtgatatgga

SEQ ID NO: 730818 - DNA, 19 bp, Mus musculus
  siRNA target sequence for 4933432K11Rik (NM_027759.1,1225-1243).
ccataagggtgatatggaa

SEQ ID NO: 730819 - DNA, 19 bp, Mus musculus
  siRNA target sequence for 4933432K11Rik (NM_027759.1,1226-1244).
cataagggtgatatggaat

SEQ ID NO: 730820 - DNA, 19 bp, Mus musculus
  siRNA target sequence for 4933432K11Rik (NM_027759.1,1240-1258).
ggaatgtgatgccaatgaa

SEQ ID NO: 730821 - DNA, 19 bp, Mus musculus
  siRNA target sequence for 4933432K11Rik (NM_027759.1,1409-1427).
cggaatgagcggattacgt

SEQ ID NO: 730822 - DNA, 19 bp, Mus musculus
  siRNA target sequence for 4933432K11Rik (NM_027759.1,1431-1449).
gatggctacttgctaaaat

SEQ ID NO: 730823 - DNA, 19 bp, Mus musculus
  siRNA target sequence for 4933432K11Rik (NM_027759.1,1434-1452).
ggctacttgctaaaatcct

SEQ ID NO: 730824 - DNA, 19 bp, Mus musculus
  siRNA target sequence for 4933432K11Rik (NM_027759.1,1435-1453).
gctacttgctaaaatcctt

SEQ ID NO: 730825 - DNA, 19 bp, Mus musculus
  siRNA target sequence for Cpne3 (NM_027769.1,126-144).
gtcacgaaggtggaactaa

SEQ ID NO: 730826 - DNA, 19 bp, Mus musculus
  siRNA target sequence for Cpne3 (NM_027769.1,128-146).
cacgaaggtggaactaaat

SEQ ID NO: 730827 - DNA, 19 bp, Mus musculus
  siRNA target sequence for Cpne3 (NM_027769.1,131-149).
gaaggtggaactaaatgtt

SEQ ID NO: 730828 - DNA, 19 bp, Mus musculus
  siRNA target sequence for Cpne3 (NM_027769.1,141-159).
ctaaatgtttcctgtaaca

SEQ ID NO: 730829 - DNA, 19 bp, Mus musculus
  siRNA target sequence for Cpne3 (NM_027769.1,151-169).
cctgtaacaaccttttgga

SEQ ID NO: 730830 - DNA, 19 bp, Mus musculus
  siRNA target sequence for Cpne3 (NM_027769.1,152-170).
ctgtaacaaccttttggat

SEQ ID NO: 730831 - DNA, 19 bp, Mus musculus
  siRNA target sequence for Cpne3 (NM_027769.1,171-189).
gcagatgtaacatcaaagt

SEQ ID NO: 730832 - DNA, 19 bp, Mus musculus
  siRNA target sequence for Cpne3 (NM_027769.1,240-258).
gaggttgaacggacagaaa

SEQ ID NO: 730833 - DNA, 19 bp, Mus musculus
  siRNA target sequence for Cpne3 (NM_027769.1,246-264).
gaacggacagaaaggatta

SEQ ID NO: 730834 - DNA, 19 bp, Mus musculus
  siRNA target sequence for Cpne3 (NM_027769.1,803-821).
caccatgacaaaactcaaa

SEQ ID NO: 730835 - DNA, 19 bp, Mus musculus
  siRNA target sequence for Cpne3 (NM_027769.1,917-935).
gaagcactgtgagattact

SEQ ID NO: 730836 - DNA, 19 bp, Mus musculus
  siRNA target sequence for Cpne3 (NM_027769.1,943-961).
gcacatttcttgactacat

SEQ ID NO: 730837 - DNA, 19 bp, Mus musculus
  siRNA target sequence for Cpne3 (NM_027769.1,966-984).
ggagggtgccagctcaatt

SEQ ID NO: 730838 - DNA, 19 bp, Mus musculus
  siRNA target sequence for Cpne3 (NM_027769.1,967-985).
gagggtgccagctcaattt

SEQ ID NO: 730839 - DNA, 19 bp, Mus musculus
  siRNA target sequence for Cpne3 (NM_027769.1,1033-1051).
cagactccctgcattacat

SEQ ID NO: 730840 - DNA, 19 bp, Mus musculus
  siRNA target sequence for Cpne3 (NM_027769.1,1054-1072).
gcccgaatggtgttaatga

SEQ ID NO: 730841 - DNA, 19 bp, Mus musculus
  siRNA target sequence for Cpne3 (NM_027769.1,1062-1080).
ggtgttaatgagtatctga

SEQ ID NO: 730842 - DNA, 19 bp, Mus musculus
  siRNA target sequence for Cpne3 (NM_027769.1,1084-1102).
ccatctggtctgtaggatt

SEQ ID NO: 730843 - DNA, 19 bp, Mus musculus
  siRNA target sequence for Cpne3 (NM_027769.1,1090-1108).
ggtctgtaggattggtaat

SEQ ID NO: 730844 - DNA, 19 bp, Mus musculus
  siRNA target sequence for Cpne3 (NM_027769.1,1093-1111).
ctgtaggattggtaattca

SEQ ID NO: 730845 - DNA, 19 bp, Mus musculus
  siRNA target sequence for Cpne3 (NM_027769.1,1172-1190).
gtggcaggtatctcatgaa

SEQ ID NO: 730846 - DNA, 19 bp, Mus musculus
  siRNA target sequence for Cpne3 (NM_027769.1,1174-1192).
ggcaggtatctcatgaatt

SEQ ID NO: 730847 - DNA, 19 bp, Mus musculus
  siRNA target sequence for Cpne3 (NM_027769.1,1185-1203).
catgaatttccgatgaact

SEQ ID NO: 730848 - DNA, 19 bp, Mus musculus
  siRNA target sequence for Cpne3 (NM_027769.1,1209-1227).
ccatcgaacccctattgca

SEQ ID NO: 730849 - DNA, 19 bp, Mus musculus
  siRNA target sequence for Cpne3 (NM_027769.1,1210-1228).
catcgaacccctattgcaa

SEQ ID NO: 730850 - DNA, 19 bp, Mus musculus
  siRNA target sequence for Cpne3 (NM_027769.1,1220-1238).
ctattgcaatggaatccaa

SEQ ID NO: 730851 - DNA, 19 bp, Mus musculus
  siRNA target sequence for Cpne3 (NM_027769.1,1279-1297).
gactctatggaccaactaa

SEQ ID NO: 730852 - DNA, 19 bp, Mus musculus
  siRNA target sequence for Cpne3 (NM_027769.1,1281-1299).
ctctatggaccaactaatt

SEQ ID NO: 730853 - DNA, 19 bp, Mus musculus
  siRNA target sequence for Cpne3 (NM_027769.1,1353-1371).
cagacagcttctcaatact

SEQ ID NO: 730854 - DNA, 19 bp, Mus musculus
  siRNA target sequence for Cpne3 (NM_027769.1,1355-1373).
gacagcttctcaatacttt

SEQ ID NO: 730855 - DNA, 19 bp, Mus musculus
  siRNA target sequence for Cpne3 (NM_027769.1,1548-1566).
gaggtggccataagagata

SEQ ID NO: 730856 - DNA, 19 bp, Mus musculus
  siRNA target sequence for Cpne3 (NM_027769.1,1592-1610).
gttccagaatgctccaaaa

SEQ ID NO: 730857 - DNA, 19 bp, Mus musculus
  siRNA target sequence for Cpne3 (NM_027769.1,1653-1671).
gtggtgggctacttcaaca

SEQ ID NO: 730858 - DNA, 19 bp, Mus musculus
  siRNA target sequence for Cpne3 (NM_027769.1,1656-1674).
gtgggctacttcaacacat

SEQ ID NO: 730859 - DNA, 19 bp, Mus musculus
  siRNA target sequence for Cpne3 (NM_027769.1,1660-1678).
gctacttcaacacatacaa

SEQ ID NO: 730860 - DNA, 19 bp, Mus musculus
  siRNA target sequence for 5430416O09Rik (NM_027789.2,752-770).
caattccctcgacatttat

SEQ ID NO: 730861 - DNA, 19 bp, Mus musculus
  siRNA target sequence for 5430416O09Rik (NM_027789.2,788-806).
cccatctgccccttcaata

SEQ ID NO: 730862 - DNA, 19 bp, Mus musculus
  siRNA target sequence for 5430416O09Rik (NM_027789.2,789-807).
ccatctgccccttcaataa

SEQ ID NO: 730863 - DNA, 19 bp, Mus musculus
  siRNA target sequence for 5430416O09Rik (NM_027789.2,835-853).
gctctccatccgtatcctt

SEQ ID NO: 730864 - DNA, 19 bp, Mus musculus
  siRNA target sequence for 5430416O09Rik (NM_027789.2,851-869).
cttctacgtttcacaaact

SEQ ID NO: 730865 - DNA, 19 bp, Mus musculus
  siRNA target sequence for 5430416O09Rik (NM_027789.2,854-872).
ctacgtttcacaaacttct

SEQ ID NO: 730866 - DNA, 19 bp, Mus musculus
  siRNA target sequence for 5630400M01Rik (NM_027796.1,563-581).
ctggcttatggcttaagca

SEQ ID NO: 730867 - DNA, 19 bp, Mus musculus
  siRNA target sequence for 5630400M01Rik (NM_027796.1,610-628).
gagtgaatccatttctgtt

SEQ ID NO: 730868 - DNA, 19 bp, Mus musculus
  siRNA target sequence for 5630400M01Rik (NM_027796.1,634-652).
cacatcactggattttatt

SEQ ID NO: 730869 - DNA, 19 bp, Mus musculus
  siRNA target sequence for 5630400M01Rik (NM_027796.1,682-700).
cagactgctggatttaggt

SEQ ID NO: 730870 - DNA, 19 bp, Mus musculus
  siRNA target sequence for 5630400M01Rik (NM_027796.1,735-753).
ctttgcagtttcctataca

SEQ ID NO: 730871 - DNA, 19 bp, Mus musculus
  siRNA target sequence for 5530601I19Rik (NM_027797.1,442-460).
cactcctgatgattgtata

SEQ ID NO: 730872 - DNA, 19 bp, Mus musculus
  siRNA target sequence for 5530601I19Rik (NM_027797.1,444-462).
ctcctgatgattgtataca

SEQ ID NO: 730873 - DNA, 19 bp, Mus musculus
  siRNA target sequence for 5530601I19Rik (NM_027797.1,449-467).
gatgattgtatacaaaagt

SEQ ID NO: 730874 - DNA, 19 bp, Mus musculus
  siRNA target sequence for 5530601I19Rik (NM_027797.1,548-566).
gctctacctaggcacaaaa

SEQ ID NO: 730875 - DNA, 19 bp, Mus musculus
  siRNA target sequence for 5530600A18Rik (NM_027799.1,207-225).
ggatgtgaactcgcaaaat

SEQ ID NO: 730876 - DNA, 19 bp, Mus musculus
  siRNA target sequence for 5530600A18Rik (NM_027799.1,231-249).
caacggctggacctgttta

SEQ ID NO: 730877 - DNA, 19 bp, Mus musculus
  siRNA target sequence for 5530600A18Rik (NM_027799.1,245-263).
gtttacactgggcatgtaa

SEQ ID NO: 730878 - DNA, 19 bp, Mus musculus
  siRNA target sequence for 5530600A18Rik (NM_027799.1,335-353).
gggaaatgccggtacaact

SEQ ID NO: 730879 - DNA, 19 bp, Mus musculus
  siRNA target sequence for 5530600A18Rik (NM_027799.1,336-354).
ggaaatgccggtacaacta

SEQ ID NO: 730880 - DNA, 19 bp, Mus musculus
  siRNA target sequence for 5530600A18Rik (NM_027799.1,337-355).
gaaatgccggtacaactaa

SEQ ID NO: 730881 - DNA, 19 bp, Mus musculus
  siRNA target sequence for 5530600A18Rik (NM_027799.1,343-361).
ccggtacaactaacatcaa

SEQ ID NO: 730882 - DNA, 19 bp, Mus musculus
  siRNA target sequence for 5530600A18Rik (NM_027799.1,444-462).
gccctttgtccccaactat

SEQ ID NO: 730883 - DNA, 19 bp, Mus musculus
  siRNA target sequence for 5530600A18Rik (NM_027799.1,645-663).
ggtccagaatggtgatatt

SEQ ID NO: 730884 - DNA, 19 bp, Mus musculus
  siRNA target sequence for 5530600A18Rik (NM_027799.1,667-685).
gccccctctgccatactta

SEQ ID NO: 730885 - DNA, 19 bp, Mus musculus
  siRNA target sequence for 5530600A18Rik (NM_027799.1,669-687).
cccctctgccatacttaga

SEQ ID NO: 730886 - DNA, 19 bp, Mus musculus
  siRNA target sequence for 5530600A18Rik (NM_027799.1,670-688).
ccctctgccatacttagaa

SEQ ID NO: 730887 - DNA, 19 bp, Mus musculus
  siRNA target sequence for 5530600A18Rik (NM_027799.1,672-690).
ctctgccatacttagaaca

SEQ ID NO: 730888 - DNA, 19 bp, Mus musculus
  siRNA target sequence for 5530600A18Rik (NM_027799.1,820-838).
gcattccagccatttttct

SEQ ID NO: 730889 - DNA, 19 bp, Mus musculus
  siRNA target sequence for 5530600A18Rik (NM_027799.1,864-882).
gcaagagctggtactcaaa

SEQ ID NO: 730890 - DNA, 19 bp, Mus musculus
  siRNA target sequence for 5530600A18Rik (NM_027799.1,883-901).
gtgaggattcagaatccat

SEQ ID NO: 730891 - DNA, 19 bp, Mus musculus
  siRNA target sequence for 5530600A18Rik (NM_027799.1,902-920).
ctcttcgtgaaaatgactt

SEQ ID NO: 730892 - DNA, 19 bp, Mus musculus
  siRNA target sequence for 5530600A18Rik (NM_027799.1,1001-1019).
cagaccaagtggaaaagat

SEQ ID NO: 730893 - DNA, 19 bp, Mus musculus
  siRNA target sequence for 5530600A18Rik (NM_027799.1,1026-1044).
gttacccaacactctgtta

SEQ ID NO: 730894 - DNA, 19 bp, Mus musculus
  siRNA target sequence for 5530600A18Rik (NM_027799.1,1030-1048).
cccaacactctgttaagaa

SEQ ID NO: 730895 - DNA, 19 bp, Mus musculus
  siRNA target sequence for 8430411H09Rik (NM_027805.1,631-649).
ccacgtcccacgttgacaa

SEQ ID NO: 730896 - DNA, 19 bp, Mus musculus
  siRNA target sequence for 8430411H09Rik (NM_027805.1,816-834).
gagaaggtccgattcaaat

SEQ ID NO: 730897 - DNA, 19 bp, Mus musculus
  siRNA target sequence for 8430411H09Rik (NM_027805.1,912-930).
ctgaaccttctctatgact

SEQ ID NO: 730898 - DNA, 19 bp, Mus musculus
  siRNA target sequence for 8430411H09Rik (NM_027805.1,980-998).
caagaccattggcaatctt

SEQ ID NO: 730899 - DNA, 19 bp, Mus musculus
  siRNA target sequence for 8430411H09Rik (NM_027805.1,1140-1158).
cggcaggaggtcctacatt

SEQ ID NO: 730900 - DNA, 19 bp, Mus musculus
  siRNA target sequence for 8430411H09Rik (NM_027805.1,1331-1349).
gaggaccattagatacttt

SEQ ID NO: 730901 - DNA, 19 bp, Mus musculus
  siRNA target sequence for Bbs7 (NM_027810.1,208-226).
ggttgttggagatcaagat

SEQ ID NO: 730902 - DNA, 19 bp, Mus musculus
  siRNA target sequence for Bbs7 (NM_027810.1,221-239).
caagatggggtagtgatat

SEQ ID NO: 730903 - DNA, 19 bp, Mus musculus
  siRNA target sequence for Bbs7 (NM_027810.1,266-284).
gtggtgatgttcaagactt

SEQ ID NO: 730904 - DNA, 19 bp, Mus musculus
  siRNA target sequence for Bbs7 (NM_027810.1,271-289).
gatgttcaagactttacca

SEQ ID NO: 730905 - DNA, 19 bp, Mus musculus
  siRNA target sequence for Bbs7 (NM_027810.1,333-351).
cgcctcaggagaaaatctt

SEQ ID NO: 730906 - DNA, 19 bp, Mus musculus
  siRNA target sequence for Bbs7 (NM_027810.1,356-374).
gctgcagggtccgagatta

SEQ ID NO: 730907 - DNA, 19 bp, Mus musculus
  siRNA target sequence for Bbs7 (NM_027810.1,367-385).
cgagattagaggctttaca

SEQ ID NO: 730908 - DNA, 19 bp, Mus musculus
  siRNA target sequence for Bbs7 (NM_027810.1,368-386).
gagattagaggctttacaa

SEQ ID NO: 730909 - DNA, 19 bp, Mus musculus
  siRNA target sequence for Bbs7 (NM_027810.1,417-435).
ctaacctcacggaaagcat

SEQ ID NO: 730910 - DNA, 19 bp, Mus musculus
  siRNA target sequence for Bbs7 (NM_027810.1,421-439).
cctcacggaaagcattaaa

SEQ ID NO: 730911 - DNA, 19 bp, Mus musculus
  siRNA target sequence for Bbs7 (NM_027810.1,424-442).
cacggaaagcattaaagct

SEQ ID NO: 730912 - DNA, 19 bp, Mus musculus
  siRNA target sequence for Bbs7 (NM_027810.1,426-444).
cggaaagcattaaagctat

SEQ ID NO: 730913 - DNA, 19 bp, Mus musculus
  siRNA target sequence for Bbs7 (NM_027810.1,474-492).
gtgcaagctacatctataa

SEQ ID NO: 730914 - DNA, 19 bp, Mus musculus
  siRNA target sequence for Bbs7 (NM_027810.1,512-530).
gaccaaaattattaccttt

SEQ ID NO: 730915 - DNA, 19 bp, Mus musculus
  siRNA target sequence for Bbs7 (NM_027810.1,612-630).
gggtgctccgagtcttaca

SEQ ID NO: 730916 - DNA, 19 bp, Mus musculus
  siRNA target sequence for Bbs7 (NM_027810.1,675-693).
ccgtcttagcactgcataa

SEQ ID NO: 730917 - DNA, 19 bp, Mus musculus
  siRNA target sequence for Bbs7 (NM_027810.1,676-694).
cgtcttagcactgcataat

SEQ ID NO: 730918 - DNA, 19 bp, Mus musculus
  siRNA target sequence for Bbs7 (NM_027810.1,679-697).
cttagcactgcataatgga

SEQ ID NO: 730919 - DNA, 19 bp, Mus musculus
  siRNA target sequence for Bbs7 (NM_027810.1,747-765).
gacttgggcttattcagat

SEQ ID NO: 730920 - DNA, 19 bp, Mus musculus
  siRNA target sequence for Bbs7 (NM_027810.1,787-805).
caaatgggaaattcgaaat

SEQ ID NO: 730921 - DNA, 19 bp, Mus musculus
  siRNA target sequence for Bbs7 (NM_027810.1,854-872).
ggtgatggggttaaagatt

SEQ ID NO: 730922 - DNA, 19 bp, Mus musculus
  siRNA target sequence for Bbs7 (NM_027810.1,862-880).
ggttaaagatttacttgtt

SEQ ID NO: 730923 - DNA, 19 bp, Mus musculus
  siRNA target sequence for Bbs7 (NM_027810.1,901-919).
ggaagtatatagttttgaa

SEQ ID NO: 730924 - DNA, 19 bp, Mus musculus
  siRNA target sequence for Bbs7 (NM_027810.1,902-920).
gaagtatatagttttgaaa

SEQ ID NO: 730925 - DNA, 19 bp, Mus musculus
  siRNA target sequence for Bbs7 (NM_027810.1,933-951).
ctgtgctacgatttgatca

SEQ ID NO: 730926 - DNA, 19 bp, Mus musculus
  siRNA target sequence for Bbs7 (NM_027810.1,1054-1072).
gactacagagccaactcat

SEQ ID NO: 730927 - DNA, 19 bp, Mus musculus
  siRNA target sequence for Bbs7 (NM_027810.1,1056-1074).
ctacagagccaactcataa

SEQ ID NO: 730928 - DNA, 19 bp, Mus musculus
  siRNA target sequence for Bbs7 (NM_027810.1,1063-1081).
gccaactcataaagaaagt

SEQ ID NO: 730929 - DNA, 19 bp, Mus musculus
  siRNA target sequence for Bbs7 (NM_027810.1,1117-1135).
gcagaataagatttcttct

SEQ ID NO: 730930 - DNA, 19 bp, Mus musculus
  siRNA target sequence for Bbs7 (NM_027810.1,1134-1152).
ctttaaggtctgaaataga

SEQ ID NO: 730931 - DNA, 19 bp, Mus musculus
  siRNA target sequence for Bbs7 (NM_027810.1,1236-1254).
cattcagtataaatgacaa

SEQ ID NO: 730932 - DNA, 19 bp, Mus musculus
  siRNA target sequence for Bbs7 (NM_027810.1,1250-1268).
gacaagttcacattgaata

SEQ ID NO: 730933 - DNA, 19 bp, Mus musculus
  siRNA target sequence for Bbs7 (NM_027810.1,1281-1299).
gctacagcctcgtcttaga

SEQ ID NO: 730934 - DNA, 19 bp, Mus musculus
  siRNA target sequence for Bbs7 (NM_027810.1,1301-1319).
gtgcggactgcaatagaca

SEQ ID NO: 730935 - DNA, 19 bp, Mus musculus
  siRNA target sequence for Bbs7 (NM_027810.1,1303-1321).
gcggactgcaatagacaat

SEQ ID NO: 730936 - DNA, 19 bp, Mus musculus
  siRNA target sequence for Bbs7 (NM_027810.1,1305-1323).
ggactgcaatagacaatgt

SEQ ID NO: 730937 - DNA, 19 bp, Mus musculus
  siRNA target sequence for Bbs7 (NM_027810.1,1324-1342).
cctaatacagagtgatgtt

SEQ ID NO: 730938 - DNA, 19 bp, Mus musculus
  siRNA target sequence for Bbs7 (NM_027810.1,1333-1351).
gagtgatgttccaatagat

SEQ ID NO: 730939 - DNA, 19 bp, Mus musculus
  siRNA target sequence for Bbs7 (NM_027810.1,1335-1353).
gtgatgttccaatagatct

SEQ ID NO: 730940 - DNA, 19 bp, Mus musculus
  siRNA target sequence for Bbs7 (NM_027810.1,1344-1362).
caatagatctacttgatgt

SEQ ID NO: 730941 - DNA, 19 bp, Mus musculus
  siRNA target sequence for Bbs7 (NM_027810.1,1404-1422).
cagagtcaaacgacaactt

SEQ ID NO: 730942 - DNA, 19 bp, Mus musculus
  siRNA target sequence for Bbs7 (NM_027810.1,1439-1457).
cggtgccaggcaaatacca

SEQ ID NO: 730943 - DNA, 19 bp, Mus musculus
  siRNA target sequence for Bbs7 (NM_027810.1,1463-1481).
ctggagctcaagattcgtt

SEQ ID NO: 730944 - DNA, 19 bp, Mus musculus
  siRNA target sequence for Bbs7 (NM_027810.1,1468-1486).
gctcaagattcgttcaatt

SEQ ID NO: 730945 - DNA, 19 bp, Mus musculus
  siRNA target sequence for Bbs7 (NM_027810.1,1471-1489).
caagattcgttcaattgaa

SEQ ID NO: 730946 - DNA, 19 bp, Mus musculus
  siRNA target sequence for Bbs7 (NM_027810.1,1500-1518).
gcacactccaggcatatgt

SEQ ID NO: 730947 - DNA, 19 bp, Mus musculus
  siRNA target sequence for Bbs7 (NM_027810.1,1521-1539).
ctccaagaatccaaccaaa

SEQ ID NO: 730948 - DNA, 19 bp, Mus musculus
  siRNA target sequence for Bbs7 (NM_027810.1,1545-1563).
gtcaggttcgccaatacca

SEQ ID NO: 730949 - DNA, 19 bp, Mus musculus
  siRNA target sequence for Bbs7 (NM_027810.1,1645-1663).
gttcagctttgctgaagtt

SEQ ID NO: 730950 - DNA, 19 bp, Mus musculus
  siRNA target sequence for Bbs7 (NM_027810.1,1713-1731).
caggggaatgtgcaacatt

SEQ ID NO: 730951 - DNA, 19 bp, Mus musculus
  siRNA target sequence for Bbs7 (NM_027810.1,1718-1736).
gaatgtgcaacattttact

SEQ ID NO: 730952 - DNA, 19 bp, Mus musculus
  siRNA target sequence for Bbs7 (NM_027810.1,1747-1765).
ctttctggatacacaactt

SEQ ID NO: 730953 - DNA, 19 bp, Mus musculus
  siRNA target sequence for Bbs7 (NM_027810.1,1803-1821).
ctgacaacatttctacaat

SEQ ID NO: 730954 - DNA, 19 bp, Mus musculus
  siRNA target sequence for Bbs7 (NM_027810.1,1805-1823).
gacaacatttctacaatat

SEQ ID NO: 730955 - DNA, 19 bp, Mus musculus
  siRNA target sequence for Bbs7 (NM_027810.1,1815-1833).
ctacaatatccatcctaaa

SEQ ID NO: 730956 - DNA, 19 bp, Mus musculus
  siRNA target sequence for Bbs7 (NM_027810.1,1818-1836).
caatatccatcctaaaaga

SEQ ID NO: 730957 - DNA, 19 bp, Mus musculus
  siRNA target sequence for Bbs7 (NM_027810.1,1829-1847).
ctaaaagatgtgctttcta

SEQ ID NO: 730958 - DNA, 19 bp, Mus musculus
  siRNA target sequence for Bbs7 (NM_027810.1,1864-1882).
gaaaattaatctcaacata

SEQ ID NO: 730959 - DNA, 19 bp, Mus musculus
  siRNA target sequence for Bbs7 (NM_027810.1,1903-1921).
gtctgtcaagcacacttta

SEQ ID NO: 730960 - DNA, 19 bp, Mus musculus
  siRNA target sequence for Bbs7 (NM_027810.1,1905-1923).
ctgtcaagcacactttaaa

SEQ ID NO: 730961 - DNA, 19 bp, Mus musculus
  siRNA target sequence for Bbs7 (NM_027810.1,1909-1927).
caagcacactttaaagcta

SEQ ID NO: 730962 - DNA, 19 bp, Mus musculus
  siRNA target sequence for Bbs7 (NM_027810.1,1912-1930).
gcacactttaaagctaatt

SEQ ID NO: 730963 - DNA, 19 bp, Mus musculus
  siRNA target sequence for Bbs7 (NM_027810.1,1961-1979).
gctaagaaagtgcagttaa

SEQ ID NO: 730964 - DNA, 19 bp, Mus musculus
  siRNA target sequence for Bbs7 (NM_027810.1,1966-1984).
gaaagtgcagttaatcgat

SEQ ID NO: 730965 - DNA, 19 bp, Mus musculus
  siRNA target sequence for Bbs7 (NM_027810.1,2000-2018).
caggttcatgagggaaata

SEQ ID NO: 730966 - DNA, 19 bp, Mus musculus
  siRNA target sequence for Bbs7 (NM_027810.1,2002-2020).
ggttcatgagggaaataca

SEQ ID NO: 730967 - DNA, 19 bp, Mus musculus
  siRNA target sequence for Bbs7 (NM_027810.1,2034-2052).
cagagtaccgatgtattct

SEQ ID NO: 730968 - DNA, 19 bp, Mus musculus
  siRNA target sequence for Bbs7 (NM_027810.1,2038-2056).
gtaccgatgtattctagaa

SEQ ID NO: 730969 - DNA, 19 bp, Mus musculus
  siRNA target sequence for Bbs7 (NM_027810.1,2066-2084).
catctacaagaggaataca

SEQ ID NO: 730970 - DNA, 19 bp, Mus musculus
  siRNA target sequence for Bbs7 (NM_027810.1,2092-2110).
gcctgcacatcttgaaaga

SEQ ID NO: 730971 - DNA, 19 bp, Mus musculus
  siRNA target sequence for Bbs7 (NM_027810.1,2094-2112).
ctgcacatcttgaaagact

SEQ ID NO: 730972 - DNA, 19 bp, Mus musculus
  siRNA target sequence for Bbs7 (NM_027810.1,2102-2120).
cttgaaagactctatggta

SEQ ID NO: 730973 - DNA, 19 bp, Mus musculus
  siRNA target sequence for Bbs7 (NM_027810.1,2117-2135).
ggtatgattactgatcttt

SEQ ID NO: 730974 - DNA, 19 bp, Mus musculus
  siRNA target sequence for Bbs7 (NM_027810.1,2122-2140).
gattactgatctttttata

SEQ ID NO: 730975 - DNA, 19 bp, Mus musculus
  siRNA target sequence for Bbs7 (NM_027810.1,2152-2170).
gttcaaaggcactaatgta

SEQ ID NO: 730976 - DNA, 19 bp, Mus musculus
  siRNA target sequence for Bbs7 (NM_027810.1,2159-2177).
ggcactaatgtaaaaacca

SEQ ID NO: 730977 - DNA, 19 bp, Mus musculus
  siRNA target sequence for Bbs7 (NM_027810.1,2160-2178).
gcactaatgtaaaaaccaa

SEQ ID NO: 730978 - DNA, 19 bp, Mus musculus
  siRNA target sequence for 9030624J02Rik (NM_027815.1,351-369).
ccttcgtgggacctgattt

SEQ ID NO: 730979 - DNA, 19 bp, Mus musculus
  siRNA target sequence for 9030624J02Rik (NM_027815.1,370-388).
cgagccctgggccaacaaa

SEQ ID NO: 730980 - DNA, 19 bp, Mus musculus
  siRNA target sequence for 9030624J02Rik (NM_027815.1,562-580).
cctgacccagcaggattat

SEQ ID NO: 730981 - DNA, 19 bp, Mus musculus
  siRNA target sequence for 9030624J02Rik (NM_027815.1,682-700).
gtcagacacgagtgttatt

SEQ ID NO: 730982 - DNA, 19 bp, Mus musculus
  siRNA target sequence for 9030624J02Rik (NM_027815.1,690-708).
cgagtgttattcagttcta

SEQ ID NO: 730983 - DNA, 19 bp, Mus musculus
  siRNA target sequence for 9030624J02Rik (NM_027815.1,703-721).
gttctacccaagcaagttt

SEQ ID NO: 730984 - DNA, 19 bp, Mus musculus
  siRNA target sequence for 9030624J02Rik (NM_027815.1,732-750).
ccgacatccttgatacgtt

SEQ ID NO: 730985 - DNA, 19 bp, Mus musculus
  siRNA target sequence for 9030624J02Rik (NM_027815.1,733-751).
cgacatccttgatacgttt

SEQ ID NO: 730986 - DNA, 19 bp, Mus musculus
  siRNA target sequence for 9030624J02Rik (NM_027815.1,799-817).
cagtgccttgccagatcat

SEQ ID NO: 730987 - DNA, 19 bp, Mus musculus
  siRNA target sequence for 9030624J02Rik (NM_027815.1,801-819).
gtgccttgccagatcattt

SEQ ID NO: 730988 - DNA, 19 bp, Mus musculus
  siRNA target sequence for 9030624J02Rik (NM_027815.1,891-909).
gggaactcattccaagatt

SEQ ID NO: 730989 - DNA, 19 bp, Mus musculus
  siRNA target sequence for 9030624J02Rik (NM_027815.1,892-910).
ggaactcattccaagattt

SEQ ID NO: 730990 - DNA, 19 bp, Mus musculus
  siRNA target sequence for 9030624J02Rik (NM_027815.1,920-938).
gcatccatcctgaagtgta

SEQ ID NO: 730991 - DNA, 19 bp, Mus musculus
  siRNA target sequence for 9030624J02Rik (NM_027815.1,921-939).
catccatcctgaagtgtaa

SEQ ID NO: 730992 - DNA, 19 bp, Mus musculus
  siRNA target sequence for 9030624J02Rik (NM_027815.1,949-967).
ctccaaaacggggatttca

SEQ ID NO: 730993 - DNA, 19 bp, Mus musculus
  siRNA target sequence for 9030624J02Rik (NM_027815.1,980-998).
cgactaacctgcatgatca

SEQ ID NO: 730994 - DNA, 19 bp, Mus musculus
  siRNA target sequence for 9030624J02Rik (NM_027815.1,1076-1094).
ctcaaggagagcctcaata

SEQ ID NO: 730995 - DNA, 19 bp, Mus musculus
  siRNA target sequence for 9030624J02Rik (NM_027815.1,1086-1104).
gcctcaataagaacttctt

SEQ ID NO: 730996 - DNA, 19 bp, Mus musculus
  siRNA target sequence for 9030624J02Rik (NM_027815.1,1087-1105).
cctcaataagaacttcttt

SEQ ID NO: 730997 - DNA, 19 bp, Mus musculus
  siRNA target sequence for 9030624J02Rik (NM_027815.1,1252-1270).
gtgtgcactctcctcatta

SEQ ID NO: 730998 - DNA, 19 bp, Mus musculus
  siRNA target sequence for 9030624J02Rik (NM_027815.1,1288-1306).
gctccgtggccttagtcat

SEQ ID NO: 730999 - DNA, 19 bp, Mus musculus
  siRNA target sequence for AU019489 (NM_027828.2,354-372).
ctctgagacctgattcgtt

SEQ ID NO: 731000 - DNA, 19 bp, Mus musculus
  siRNA target sequence for AU019489 (NM_027828.2,374-392).
gtcatctatcggcagaaat

SEQ ID NO: 731001 - DNA, 19 bp, Mus musculus
  siRNA target sequence for AU019489 (NM_027828.2,385-403).
gcagaaatgtgaattcgta

SEQ ID NO: 731002 - DNA, 19 bp, Mus musculus
  siRNA target sequence for AU019489 (NM_027828.2,431-449).
gtgggactgatgaagaagt

SEQ ID NO: 731003 - DNA, 19 bp, Mus musculus
  siRNA target sequence for AU019489 (NM_027828.2,433-451).
gggactgatgaagaagttt

SEQ ID NO: 731004 - DNA, 19 bp, Mus musculus
  siRNA target sequence for AU019489 (NM_027828.2,967-985).
gcgggtgtcgcgtagcaaa

SEQ ID NO: 731005 - DNA, 19 bp, Mus musculus
  siRNA target sequence for AU019489 (NM_027828.2,1044-1062).
ccgacaccttcttcaagta

SEQ ID NO: 731006 - DNA, 19 bp, Mus musculus
  siRNA target sequence for AU019489 (NM_027828.2,1045-1063).
cgacaccttcttcaagtat

SEQ ID NO: 731007 - DNA, 19 bp, Mus musculus
  siRNA target sequence for AU019489 (NM_027828.2,1048-1066).
caccttcttcaagtattgt

SEQ ID NO: 731008 - DNA, 19 bp, Mus musculus
  siRNA target sequence for AU019489 (NM_027828.2,1092-1110).
ctctcgggagggagaactt

SEQ ID NO: 731009 - DNA, 19 bp, Mus musculus
  siRNA target sequence for AU019489 (NM_027828.2,1119-1137).
gatccgactgtgttacact

SEQ ID NO: 731010 - DNA, 19 bp, Mus musculus
  siRNA target sequence for AU019489 (NM_027828.2,1156-1174).
catggctgcttctgatagt

SEQ ID NO: 731011 - DNA, 19 bp, Mus musculus
  siRNA target sequence for AU019489 (NM_027828.2,1236-1254).
gcaccacctcggtagtaga

SEQ ID NO: 731012 - DNA, 19 bp, Mus musculus
  siRNA target sequence for AU019489 (NM_027828.2,1237-1255).
caccacctcggtagtagaa

SEQ ID NO: 731013 - DNA, 19 bp, Mus musculus
  siRNA target sequence for AU019489 (NM_027828.2,1257-1275).
ggaacgcccgtatcataaa

SEQ ID NO: 731014 - DNA, 19 bp, Mus musculus
  siRNA target sequence for 9030607L17Rik (NM_027829.1,302-320).
ggggctgcttctcatatat

SEQ ID NO: 731015 - DNA, 19 bp, Mus musculus
  siRNA target sequence for 9030607L17Rik (NM_027829.1,306-324).
ctgcttctcatatattgca

SEQ ID NO: 731016 - DNA, 19 bp, Mus musculus
  siRNA target sequence for 9030607L17Rik (NM_027829.1,367-385).
gactcccacgtcatttgct

SEQ ID NO: 731017 - DNA, 19 bp, Mus musculus
  siRNA target sequence for 9030607L17Rik (NM_027829.1,369-387).
ctcccacgtcatttgcttt

SEQ ID NO: 731018 - DNA, 19 bp, Mus musculus
  siRNA target sequence for Sval1 (NM_027832.1,78-96).
cctgattctgtgcttaatt

SEQ ID NO: 731019 - DNA, 19 bp, Mus musculus
  siRNA target sequence for Sval1 (NM_027832.1,106-124).
gcctctggtcaggataata

SEQ ID NO: 731020 - DNA, 19 bp, Mus musculus
  siRNA target sequence for Sval1 (NM_027832.1,110-128).
ctggtcaggataataggaa

SEQ ID NO: 731021 - DNA, 19 bp, Mus musculus
  siRNA target sequence for Sval1 (NM_027832.1,129-147).
caatctgctttcactaaat

SEQ ID NO: 731022 - DNA, 19 bp, Mus musculus
  siRNA target sequence for Sval1 (NM_027832.1,168-186).
caaggcaaatgaatttgca

SEQ ID NO: 731023 - DNA, 19 bp, Mus musculus
  siRNA target sequence for Sval1 (NM_027832.1,184-202).
gcagtaacactcacagtta

SEQ ID NO: 731024 - DNA, 19 bp, Mus musculus
  siRNA target sequence for Sval1 (NM_027832.1,222-240).
catggtggtgaaaatcagt

SEQ ID NO: 731025 - DNA, 19 bp, Mus musculus
  siRNA target sequence for Sval1 (NM_027832.1,225-243).
ggtggtgaaaatcagtatt

SEQ ID NO: 731026 - DNA, 19 bp, Mus musculus
  siRNA target sequence for Sval1 (NM_027832.1,247-265).
gacaatccgaacatcaaat

SEQ ID NO: 731027 - DNA, 19 bp, Mus musculus
  siRNA target sequence for Sval1 (NM_027832.1,249-267).
caatccgaacatcaaatat

SEQ ID NO: 731028 - DNA, 19 bp, Mus musculus
  siRNA target sequence for Sval1 (NM_027832.1,253-271).
ccgaacatcaaatatcttt

SEQ ID NO: 731029 - DNA, 19 bp, Mus musculus
  siRNA target sequence for Sval1 (NM_027832.1,292-310).
gcttgcatttgtactgtaa

SEQ ID NO: 731030 - DNA, 19 bp, Mus musculus
  siRNA target sequence for Sval1 (NM_027832.1,296-314).
gcatttgtactgtaaacaa

SEQ ID NO: 731031 - DNA, 19 bp, Mus musculus
  siRNA target sequence for Sval1 (NM_027832.1,302-320).
gtactgtaaacaactactt

SEQ ID NO: 731032 - DNA, 19 bp, Mus musculus
  siRNA target sequence for Sval1 (NM_027832.1,360-378).
caaagcagaagttgtttca

SEQ ID NO: 731033 - DNA, 19 bp, Mus musculus
  siRNA target sequence for Sval1 (NM_027832.1,373-391).
gtttcagctaaggagatat

SEQ ID NO: 731034 - DNA, 19 bp, Mus musculus
  siRNA target sequence for Sval1 (NM_027832.1,437-455).
cggttacaggtgaaatcct

SEQ ID NO: 731035 - DNA, 19 bp, Mus musculus
  siRNA target sequence for Sval1 (NM_027832.1,438-456).
ggttacaggtgaaatcctt

SEQ ID NO: 731036 - DNA, 19 bp, Mus musculus
  siRNA target sequence for Sval1 (NM_027832.1,457-475).
gtaacaccaagaactagat

SEQ ID NO: 731037 - DNA, 19 bp, Mus musculus
  siRNA target sequence for A430103C15Rik (NM_027836.3,349-367).
ccccactggtaacaagaat

SEQ ID NO: 731038 - DNA, 19 bp, Mus musculus
  siRNA target sequence for A430103C15Rik (NM_027836.3,361-379).
caagaatccggggttcatt

SEQ ID NO: 731039 - DNA, 19 bp, Mus musculus
  siRNA target sequence for A430103C15Rik (NM_027836.3,446-464).
gacatcattatccacaaaa

SEQ ID NO: 731040 - DNA, 19 bp, Mus musculus
  siRNA target sequence for A430103C15Rik (NM_027836.3,469-487).
gaaaactggacatacatat

SEQ ID NO: 731041 - DNA, 19 bp, Mus musculus
  siRNA target sequence for A430103C15Rik (NM_027836.3,474-492).
ctggacatacatatgaaaa

SEQ ID NO: 731042 - DNA, 19 bp, Mus musculus
  siRNA target sequence for A430103C15Rik (NM_027836.3,508-526).
gattggagtgcctagtgaa

SEQ ID NO: 731043 - DNA, 19 bp, Mus musculus
  siRNA target sequence for A430103C15Rik (NM_027836.3,539-557).
ggaaccatccagctactat

SEQ ID NO: 731044 - DNA, 19 bp, Mus musculus
  siRNA target sequence for A430103C15Rik (NM_027836.3,593-611).
gtgtcagcttcctacttca

SEQ ID NO: 731045 - DNA, 19 bp, Mus musculus
  siRNA target sequence for A430103C15Rik (NM_027836.3,620-638).
gtttccaccactttgatat

SEQ ID NO: 731046 - DNA, 19 bp, Mus musculus
  siRNA target sequence for A430103C15Rik (NM_027836.3,641-659).
ggatacctgtttattggat

SEQ ID NO: 731047 - DNA, 19 bp, Mus musculus
  siRNA target sequence for A430103C15Rik (NM_027836.3,677-695).
gctggaattctctccatta

SEQ ID NO: 731048 - DNA, 19 bp, Mus musculus
  siRNA target sequence for A430103C15Rik (NM_027836.3,688-706).
ctccattatctctgaaaaa

SEQ ID NO: 731049 - DNA, 19 bp, Mus musculus
  siRNA target sequence for A430103C15Rik (NM_027836.3,690-708).
ccattatctctgaaaaaat

SEQ ID NO: 731050 - DNA, 19 bp, Mus musculus
  siRNA target sequence for A430103C15Rik (NM_027836.3,787-805).
cttcacctattgtctgata

SEQ ID NO: 731051 - DNA, 19 bp, Mus musculus
  siRNA target sequence for A430103C15Rik (NM_027836.3,816-834).
gtgctttcccacactgtaa

SEQ ID NO: 731052 - DNA, 19 bp, Mus musculus
  siRNA target sequence for A430103C15Rik (NM_027836.3,818-836).
gctttcccacactgtaact

SEQ ID NO: 731053 - DNA, 19 bp, Mus musculus
  siRNA target sequence for A430103C15Rik (NM_027836.3,855-873).
ccttattgtcttacttgaa

SEQ ID NO: 731054 - DNA, 19 bp, Mus musculus
  siRNA target sequence for A430103C15Rik (NM_027836.3,980-998).
gctggatacagttctatct

SEQ ID NO: 731055 - DNA, 19 bp, Mus musculus
  siRNA target sequence for A430103C15Rik (NM_027836.3,981-999).
ctggatacagttctatctt

SEQ ID NO: 731056 - DNA, 19 bp, Mus musculus
  siRNA target sequence for A430103C15Rik (NM_027836.3,1024-1042).
caaacctgggggtacattt

SEQ ID NO: 731057 - DNA, 19 bp, Mus musculus
  siRNA target sequence for A430103C15Rik (NM_027836.3,1028-1046).
cctgggggtacatttttct

SEQ ID NO: 731058 - DNA, 19 bp, Mus musculus
  siRNA target sequence for A430103C15Rik (NM_027836.3,1049-1067).
cctcaatcacaagatcata

SEQ ID NO: 731059 - DNA, 19 bp, Mus musculus
  siRNA target sequence for A430103C15Rik (NM_027836.3,1061-1079).
gatcatacccaacttgtta

SEQ ID NO: 731060 - DNA, 19 bp, Mus musculus
  siRNA target sequence for A430103C15Rik (NM_027836.3,1069-1087).
ccaacttgttaaaagcaat

SEQ ID NO: 731061 - DNA, 19 bp, Mus musculus
  siRNA target sequence for 4833414E09Rik (NM_027845.1,44-62).
ggttggtctacctgttcaa

SEQ ID NO: 731062 - DNA, 19 bp, Mus musculus
  siRNA target sequence for 4833414E09Rik (NM_027845.1,57-75).
gttcaacacacatatgaga

SEQ ID NO: 731063 - DNA, 19 bp, Mus musculus
  siRNA target sequence for 4833414E09Rik (NM_027845.1,72-90).
gagaactcttccaatcttt

SEQ ID NO: 731064 - DNA, 19 bp, Mus musculus
  siRNA target sequence for 4833414E09Rik (NM_027845.1,111-129).
gctgagtggatctctacat

SEQ ID NO: 731065 - DNA, 19 bp, Mus musculus
  siRNA target sequence for 4833414E09Rik (NM_027845.1,112-130).
ctgagtggatctctacatt

SEQ ID NO: 731066 - DNA, 19 bp, Mus musculus
  siRNA target sequence for 4833414E09Rik (NM_027845.1,311-329).
gtttgcgtgtccatgtctt

SEQ ID NO: 731067 - DNA, 19 bp, Mus musculus
  siRNA target sequence for 4833414E09Rik (NM_027845.1,321-339).
ccatgtcttctgtacacat

SEQ ID NO: 731068 - DNA, 19 bp, Mus musculus
  siRNA target sequence for 4833414E09Rik (NM_027845.1,322-340).
catgtcttctgtacacata

SEQ ID NO: 731069 - DNA, 19 bp, Mus musculus
  siRNA target sequence for 4833414E09Rik (NM_027845.1,355-373).
gggtcacttggtaactcta

SEQ ID NO: 731070 - DNA, 19 bp, Mus musculus
  siRNA target sequence for 4833414E09Rik (NM_027845.1,356-374).
ggtcacttggtaactctat

SEQ ID NO: 731071 - DNA, 19 bp, Mus musculus
  siRNA target sequence for 4833414E09Rik (NM_027845.1,365-383).
gtaactctatggctagatt

SEQ ID NO: 731072 - DNA, 19 bp, Mus musculus
  siRNA target sequence for 0610007L05Rik (NM_027852.1,359-377).
gccggagtgcacaatcaaa

SEQ ID NO: 731073 - DNA, 19 bp, Mus musculus
  siRNA target sequence for 0610007L05Rik (NM_027852.1,400-418).
gcctggcctgcattaaaat

SEQ ID NO: 731074 - DNA, 19 bp, Mus musculus
  siRNA target sequence for 0610007L05Rik (NM_027852.1,419-437).
ggaccccaagggtaaaatt

SEQ ID NO: 731075 - DNA, 19 bp, Mus musculus
  siRNA target sequence for 0610007L05Rik (NM_027852.1,450-468).
gtccactgcccaattctga

SEQ ID NO: 731076 - DNA, 19 bp, Mus musculus
  siRNA target sequence for 0610007L05Rik (NM_027852.1,492-510).
gagttgcaatgcattaaga

SEQ ID NO: 731077 - DNA, 19 bp, Mus musculus
  siRNA target sequence for 0610007L05Rik (NM_027852.1,494-512).
gttgcaatgcattaagata

SEQ ID NO: 731078 - DNA, 19 bp, Mus musculus
  siRNA target sequence for 0610006H10Rik (NM_027857.2,665-683).
gacccctatgaagtgaaaa

SEQ ID NO: 731079 - DNA, 19 bp, Mus musculus
  siRNA target sequence for 0610006H10Rik (NM_027857.2,667-685).
cccctatgaagtgaaaaga

SEQ ID NO: 731080 - DNA, 19 bp, Mus musculus
  siRNA target sequence for 0610006H10Rik (NM_027857.2,720-738).
gcacaggccaggcttttga

SEQ ID NO: 731081 - DNA, 19 bp, Mus musculus
  siRNA target sequence for 0610006H10Rik (NM_027857.2,779-797).
gtctgcctcatctctgaat

SEQ ID NO: 731082 - DNA, 19 bp, Mus musculus
  siRNA target sequence for 0610006H10Rik (NM_027857.2,859-877).
ctgccgcctctttctgtat

SEQ ID NO: 731083 - DNA, 19 bp, Mus musculus
  siRNA target sequence for 0610006H10Rik (NM_027857.2,861-879).
gccgcctctttctgtatga

SEQ ID NO: 731084 - DNA, 19 bp, Mus musculus
  siRNA target sequence for 0610006H10Rik (NM_027857.2,903-921).
gcgtggaatctatatccaa

SEQ ID NO: 731085 - DNA, 19 bp, Mus musculus
  siRNA target sequence for 0610009J22Rik (NM_027859.1,279-297).
cggcaggacgccttggttt

SEQ ID NO: 731086 - DNA, 19 bp, Mus musculus
  siRNA target sequence for 0610009J22Rik (NM_027859.1,280-298).
ggcaggacgccttggtttt

SEQ ID NO: 731087 - DNA, 19 bp, Mus musculus
  siRNA target sequence for 0610009J22Rik (NM_027859.1,406-424).
ggattgcagtggcatatgt

SEQ ID NO: 731088 - DNA, 19 bp, Mus musculus
  siRNA target sequence for 0610009J22Rik (NM_027859.1,446-464).
gttccaccaagagaatcaa

SEQ ID NO: 731089 - DNA, 19 bp, Mus musculus
  siRNA target sequence for 0610009J22Rik (NM_027859.1,609-627).
gtgattgttctccattact

SEQ ID NO: 731090 - DNA, 19 bp, Mus musculus
  siRNA target sequence for 0610009J22Rik (NM_027859.1,621-639).
cattactcctccaatgtca

SEQ ID NO: 731091 - DNA, 19 bp, Mus musculus
  siRNA target sequence for 0610009J22Rik (NM_027859.1,934-952).
gaggccaggaggatttgtt

SEQ ID NO: 731092 - DNA, 19 bp, Mus musculus
  siRNA target sequence for 0610009J22Rik (NM_027859.1,1056-1074).
gtgtgtctagattacttct

SEQ ID NO: 731093 - DNA, 19 bp, Mus musculus
  siRNA target sequence for 0610009J22Rik (NM_027859.1,1138-1156).
cctggctgatgctacaaca

SEQ ID NO: 731094 - DNA, 19 bp, Mus musculus
  siRNA target sequence for 0610037F22Rik (NM_027863.2,497-515).
cgctgtgtgccaccattat

SEQ ID NO: 731095 - DNA, 19 bp, Mus musculus
  siRNA target sequence for 0610037F22Rik (NM_027863.2,536-554).
gggcaccccaagactctta

SEQ ID NO: 731096 - DNA, 19 bp, Mus musculus
  siRNA target sequence for 0610037F22Rik (NM_027863.2,658-676).
cgcaaggaagagagaacat

SEQ ID NO: 731097 - DNA, 19 bp, Mus musculus
  siRNA target sequence for 0610039J01Rik (NM_027865.1,180-198).
gagcgcttagggagaatga

SEQ ID NO: 731098 - DNA, 19 bp, Mus musculus
  siRNA target sequence for 0610039J01Rik (NM_027865.1,459-477).
cccaggttggagccaaata

SEQ ID NO: 731099 - DNA, 19 bp, Mus musculus
  siRNA target sequence for 0610039J01Rik (NM_027865.1,739-757).
cctggccacacggatagaa

SEQ ID NO: 731100 - DNA, 19 bp, Mus musculus
  siRNA target sequence for 0610039J01Rik (NM_027865.1,878-896).
cgtccttctctgatatcta

SEQ ID NO: 731101 - DNA, 19 bp, Mus musculus
  siRNA target sequence for 0610039J01Rik (NM_027865.1,894-912).
ctagtgactccaataacct

SEQ ID NO: 731102 - DNA, 19 bp, Mus musculus
  siRNA target sequence for 0610039J01Rik (NM_027865.1,932-950).
ctgccacgggagaacatgt

SEQ ID NO: 731103 - DNA, 19 bp, Mus musculus
  siRNA target sequence for 0610039J01Rik (NM_027865.1,1100-1118).
ccgatgttgggctacatct

SEQ ID NO: 731104 - DNA, 19 bp, Mus musculus
  siRNA target sequence for 0610039J01Rik (NM_027865.1,1101-1119).
cgatgttgggctacatcta

SEQ ID NO: 731105 - DNA, 19 bp, Mus musculus
  siRNA target sequence for 0610039J01Rik (NM_027865.1,1133-1151).
gtaagcagtgatgagattt

SEQ ID NO: 731106 - DNA, 19 bp, Mus musculus
  siRNA target sequence for D12Ertd407e (NM_027867.2,134-152).
cgaatcatcacgatgagat

SEQ ID NO: 731107 - DNA, 19 bp, Mus musculus
  siRNA target sequence for D12Ertd407e (NM_027867.2,226-244).
gatggggacagttcagaaa

SEQ ID NO: 731108 - DNA, 19 bp, Mus musculus
  siRNA target sequence for D12Ertd407e (NM_027867.2,231-249).
ggacagttcagaaatggat

SEQ ID NO: 731109 - DNA, 19 bp, Mus musculus
  siRNA target sequence for D12Ertd407e (NM_027867.2,272-290).
ggatggagtgtttagatga

SEQ ID NO: 731110 - DNA, 19 bp, Mus musculus
  siRNA target sequence for D12Ertd407e (NM_027867.2,415-433).
ctggccaccttacaagaaa

SEQ ID NO: 731111 - DNA, 19 bp, Mus musculus
  siRNA target sequence for D12Ertd407e (NM_027867.2,453-471).
ggtagcaggaatctataga

SEQ ID NO: 731112 - DNA, 19 bp, Mus musculus
  siRNA target sequence for D12Ertd407e (NM_027867.2,558-576).
cttcagtcacggaaaaaga

SEQ ID NO: 731113 - DNA, 19 bp, Mus musculus
  siRNA target sequence for 1200004E24Rik (NM_027870.1,1523-1541).
ctgataaagttctaggaat

SEQ ID NO: 731114 - DNA, 19 bp, Mus musculus
  siRNA target sequence for 1200004E24Rik (NM_027870.1,1568-1586).
gagtcaaggttggaaagtt

SEQ ID NO: 731115 - DNA, 19 bp, Mus musculus
  siRNA target sequence for 1200004E24Rik (NM_027870.1,1592-1610).
ccaaactgactgaaaggat

SEQ ID NO: 731116 - DNA, 19 bp, Mus musculus
  siRNA target sequence for Arhgef3 (NM_027871.1,107-125).
cgtgcacagcggaaacgaa

SEQ ID NO: 731117 - DNA, 19 bp, Mus musculus
  siRNA target sequence for Arhgef3 (NM_027871.1,108-126).
gtgcacagcggaaacgaaa

SEQ ID NO: 731118 - DNA, 19 bp, Mus musculus
  siRNA target sequence for Arhgef3 (NM_027871.1,111-129).
cacagcggaaacgaaaaca

SEQ ID NO: 731119 - DNA, 19 bp, Mus musculus
  siRNA target sequence for Arhgef3 (NM_027871.1,113-131).
cagcggaaacgaaaacaga

SEQ ID NO: 731120 - DNA, 19 bp, Mus musculus
  siRNA target sequence for Arhgef3 (NM_027871.1,158-176).
ctgtgcagtcttgacataa

SEQ ID NO: 731121 - DNA, 19 bp, Mus musculus
  siRNA target sequence for Arhgef3 (NM_027871.1,162-180).
gcagtcttgacataagtga

SEQ ID NO: 731122 - DNA, 19 bp, Mus musculus
  siRNA target sequence for Arhgef3 (NM_027871.1,213-231).
gagtcacatcgctagcaaa

SEQ ID NO: 731123 - DNA, 19 bp, Mus musculus
  siRNA target sequence for Arhgef3 (NM_027871.1,245-263).
gtgaagaccacaccattaa

SEQ ID NO: 731124 - DNA, 19 bp, Mus musculus
  siRNA target sequence for Arhgef3 (NM_027871.1,403-421).
cttcgatgtgtgtgtcaat

SEQ ID NO: 731125 - DNA, 19 bp, Mus musculus
  siRNA target sequence for Arhgef3 (NM_027871.1,448-466).
gagacaggaggcgatcttt

SEQ ID NO: 731126 - DNA, 19 bp, Mus musculus
  siRNA target sequence for Arhgef3 (NM_027871.1,459-477).
cgatctttgaactttctca

SEQ ID NO: 731127 - DNA, 19 bp, Mus musculus
  siRNA target sequence for Arhgef3 (NM_027871.1,497-515).
gaggacttgaaattagcaa

SEQ ID NO: 731128 - DNA, 19 bp, Mus musculus
  siRNA target sequence for Arhgef3 (NM_027871.1,720-738).
gctactgcagcaatcaagt

SEQ ID NO: 731129 - DNA, 19 bp, Mus musculus
  siRNA target sequence for Arhgef3 (NM_027871.1,793-811).
cctccagcgctgtttagaa

SEQ ID NO: 731130 - DNA, 19 bp, Mus musculus
  siRNA target sequence for Arhgef3 (NM_027871.1,794-812).
ctccagcgctgtttagaat

SEQ ID NO: 731131 - DNA, 19 bp, Mus musculus
  siRNA target sequence for Arhgef3 (NM_027871.1,796-814).
ccagcgctgtttagaatca

SEQ ID NO: 731132 - DNA, 19 bp, Mus musculus
  siRNA target sequence for Arhgef3 (NM_027871.1,836-854).
ctctggaatttccttgata

SEQ ID NO: 731133 - DNA, 19 bp, Mus musculus
  siRNA target sequence for Arhgef3 (NM_027871.1,858-876).
cccggagccggctagtgaa

SEQ ID NO: 731134 - DNA, 19 bp, Mus musculus
  siRNA target sequence for Arhgef3 (NM_027871.1,861-879).
ggagccggctagtgaagta

SEQ ID NO: 731135 - DNA, 19 bp, Mus musculus
  siRNA target sequence for Arhgef3 (NM_027871.1,862-880).
gagccggctagtgaagtat

SEQ ID NO: 731136 - DNA, 19 bp, Mus musculus
  siRNA target sequence for Arhgef3 (NM_027871.1,901-919).
cctgaggcatacaccaaat

SEQ ID NO: 731137 - DNA, 19 bp, Mus musculus
  siRNA target sequence for Arhgef3 (NM_027871.1,941-959).
ctggaagaagctataaaca

SEQ ID NO: 731138 - DNA, 19 bp, Mus musculus
  siRNA target sequence for Arhgef3 (NM_027871.1,1005-1023).
cggaatgccgctattacaa

SEQ ID NO: 731139 - DNA, 19 bp, Mus musculus
  siRNA target sequence for Arhgef3 (NM_027871.1,1043-1061).
gaagaaggccagaaagatt

SEQ ID NO: 731140 - DNA, 19 bp, Mus musculus
  siRNA target sequence for Arhgef3 (NM_027871.1,1118-1136).
ggtgtgaaactccatgttt

SEQ ID NO: 731141 - DNA, 19 bp, Mus musculus
  siRNA target sequence for Arhgef3 (NM_027871.1,1296-1314).
gcaacaacgagagagttaa

SEQ ID NO: 731142 - DNA, 19 bp, Mus musculus
  siRNA target sequence for Arhgef3 (NM_027871.1,1373-1391).
gccaacgacaccttcaaca

SEQ ID NO: 731143 - DNA, 19 bp, Mus musculus
  siRNA target sequence for Arhgef3 (NM_027871.1,1410-1428).
gtatccgtcaggcaaaaga

SEQ ID NO: 731144 - DNA, 19 bp, Mus musculus
  siRNA target sequence for 1200006F02Rik (NM_027872.1,162-180).
ctcctgaacgcgtttgcta

SEQ ID NO: 731145 - DNA, 19 bp, Mus musculus
  siRNA target sequence for 1200006F02Rik (NM_027872.1,229-247).
gggaggaaaccggtaacta

SEQ ID NO: 731146 - DNA, 19 bp, Mus musculus
  siRNA target sequence for 1200006F02Rik (NM_027872.1,231-249).
gaggaaaccggtaactaca

SEQ ID NO: 731147 - DNA, 19 bp, Mus musculus
  siRNA target sequence for 1200006F02Rik (NM_027872.1,240-258).
ggtaactacacctttgctt

SEQ ID NO: 731148 - DNA, 19 bp, Mus musculus
  siRNA target sequence for 1200006F02Rik (NM_027872.1,245-263).
ctacacctttgcttccaat

SEQ ID NO: 731149 - DNA, 19 bp, Mus musculus
  siRNA target sequence for 1200006F02Rik (NM_027872.1,274-292).
ctgagtgtgaccaaaacaa

SEQ ID NO: 731150 - DNA, 19 bp, Mus musculus
  siRNA target sequence for 1200006F02Rik (NM_027872.1,310-328).
cattccgggaggaagttca

SEQ ID NO: 731151 - DNA, 19 bp, Mus musculus
  siRNA target sequence for 1200006F02Rik (NM_027872.1,419-437).
caaccacggacggaaactt

SEQ ID NO: 731152 - DNA, 19 bp, Mus musculus
  siRNA target sequence for 1200006F02Rik (NM_027872.1,485-503).
gtgcatgatgtcctacttt

SEQ ID NO: 731153 - DNA, 19 bp, Mus musculus
  siRNA target sequence for 1200006F02Rik (NM_027872.1,513-531).
ctccagcttctgatagcat

SEQ ID NO: 731154 - DNA, 19 bp, Mus musculus
  siRNA target sequence for 1200006F02Rik (NM_027872.1,546-564).
gccctctttgggaattaca

SEQ ID NO: 731155 - DNA, 19 bp, Mus musculus
  siRNA target sequence for 1200006F02Rik (NM_027872.1,634-652).
gcatagccatcctggattt

SEQ ID NO: 731156 - DNA, 19 bp, Mus musculus
  siRNA target sequence for 1200006F02Rik (NM_027872.1,682-700).
gcctgtcatctggctattt

SEQ ID NO: 731157 - DNA, 19 bp, Mus musculus
  siRNA target sequence for 1200006F02Rik (NM_027872.1,722-740).
gtggtcctatttcataact

SEQ ID NO: 731158 - DNA, 19 bp, Mus musculus
  siRNA target sequence for 1200006F02Rik (NM_027872.1,739-757).
ctgccatggttcttatagt

SEQ ID NO: 731159 - DNA, 19 bp, Mus musculus
  siRNA target sequence for 1200006F02Rik (NM_027872.1,741-759).
gccatggttcttatagtca

SEQ ID NO: 731160 - DNA, 19 bp, Mus musculus
  siRNA target sequence for 1200006F02Rik (NM_027872.1,742-760).
ccatggttcttatagtcaa

SEQ ID NO: 731161 - DNA, 19 bp, Mus musculus
  siRNA target sequence for 1200006F02Rik (NM_027872.1,800-818).
ggagtcttcatctcagatt

SEQ ID NO: 731162 - DNA, 19 bp, Mus musculus
  siRNA target sequence for 1200006F02Rik (NM_027872.1,821-839).
gactatgtcatgtatcgaa

SEQ ID NO: 731163 - DNA, 19 bp, Mus musculus
  siRNA target sequence for 1200006F02Rik (NM_027872.1,832-850).
gtatcgaaagccttaagga

SEQ ID NO: 731164 - DNA, 19 bp, Mus musculus
  siRNA target sequence for 1200006F02Rik (NM_027872.1,841-859).
gccttaaggacctatttta

SEQ ID NO: 731165 - DNA, 19 bp, Mus musculus
  siRNA target sequence for 1200006F02Rik (NM_027872.1,861-879).
cggacttacatgcttttta

SEQ ID NO: 731166 - DNA, 19 bp, Mus musculus
  siRNA target sequence for 1200006F02Rik (NM_027872.1,862-880).
ggacttacatgctttttaa

SEQ ID NO: 731167 - DNA, 19 bp, Mus musculus
  siRNA target sequence for 1200006F02Rik (NM_027872.1,908-926).
gctttgtctgctgattttt

SEQ ID NO: 731168 - DNA, 19 bp, Mus musculus
  siRNA target sequence for 1200006F02Rik (NM_027872.1,957-975).
ggaatctccccaattttta

SEQ ID NO: 731169 - DNA, 19 bp, Mus musculus
  siRNA target sequence for 1200006F02Rik (NM_027872.1,1003-1021).
gctggaatgaggtttacat

SEQ ID NO: 731170 - DNA, 19 bp, Mus musculus
  siRNA target sequence for 1200006F02Rik (NM_027872.1,1040-1058).
gggcagtgtctccttttta

SEQ ID NO: 731171 - DNA, 19 bp, Mus musculus
  siRNA target sequence for 1200006F02Rik (NM_027872.1,1041-1059).
ggcagtgtctcctttttaa

SEQ ID NO: 731172 - DNA, 19 bp, Mus musculus
  siRNA target sequence for 1200006F02Rik (NM_027872.1,1071-1089).
ggcatctggctattttctt

SEQ ID NO: 731173 - DNA, 19 bp, Mus musculus
  siRNA target sequence for 1200006F02Rik (NM_027872.1,1087-1105).
cttattgtttgaaggatat

SEQ ID NO: 731174 - DNA, 19 bp, Mus musculus
  siRNA target sequence for 1200006F02Rik (NM_027872.1,1168-1186).
ggaccactctaatgatgtt

SEQ ID NO: 731175 - DNA, 19 bp, Mus musculus
  siRNA target sequence for 1200006F02Rik (NM_027872.1,1191-1209).
gtcaggattccgttcattt

SEQ ID NO: 731176 - DNA, 19 bp, Mus musculus
  siRNA target sequence for 1200006F02Rik (NM_027872.1,1272-1290).
caaggtgcgttgtttgctt

SEQ ID NO: 731177 - DNA, 19 bp, Mus musculus
  siRNA target sequence for 1200006F02Rik (NM_027872.1,1280-1298).
gttgtttgcttgtatagct

SEQ ID NO: 731178 - DNA, 19 bp, Mus musculus
  siRNA target sequence for 1200006F02Rik (NM_027872.1,1333-1351).
ctgcgtacagtgggattta

SEQ ID NO: 731179 - DNA, 19 bp, Mus musculus
  siRNA target sequence for 1200008A18Rik (NM_027877.2,341-359).
cacgcgtttcgtgtttcaa

SEQ ID NO: 731180 - DNA, 19 bp, Mus musculus
  siRNA target sequence for 1200008A18Rik (NM_027877.2,343-361).
cgcgtttcgtgtttcaaaa

SEQ ID NO: 731181 - DNA, 19 bp, Mus musculus
  siRNA target sequence for 1200008A18Rik (NM_027877.2,448-466).
gccgcatgctggacgaaaa

SEQ ID NO: 731182 - DNA, 19 bp, Mus musculus
  siRNA target sequence for 1200008A18Rik (NM_027877.2,451-469).
gcatgctggacgaaaagct

SEQ ID NO: 731183 - DNA, 19 bp, Mus musculus
  siRNA target sequence for 1200008A18Rik (NM_027877.2,689-707).
ccacagcttcctaaccaaa

SEQ ID NO: 731184 - DNA, 19 bp, Mus musculus
  siRNA target sequence for 1200008A18Rik (NM_027877.2,784-802).
ggagcctcctccataggaa

SEQ ID NO: 731185 - DNA, 19 bp, Mus musculus
  siRNA target sequence for 1200008A18Rik (NM_027877.2,1308-1326).
ctggggcaccgggtatact

SEQ ID NO: 731186 - DNA, 19 bp, Mus musculus
  siRNA target sequence for 1200008A18Rik (NM_027877.2,1310-1328).
ggggcaccgggtatactta

SEQ ID NO: 731187 - DNA, 19 bp, Mus musculus
  siRNA target sequence for 1200008A18Rik (NM_027877.2,1341-1359).
gggtctgtccacaacctta

SEQ ID NO: 731188 - DNA, 19 bp, Mus musculus
  siRNA target sequence for 1200008A18Rik (NM_027877.2,1422-1440).
gtgaagcgaaccatggata

SEQ ID NO: 731189 - DNA, 19 bp, Mus musculus
  siRNA target sequence for 1200008A18Rik (NM_027877.2,1424-1442).
gaagcgaaccatggatatt

SEQ ID NO: 731190 - DNA, 19 bp, Mus musculus
  siRNA target sequence for 1200008A18Rik (NM_027877.2,1455-1473).
ggctacctggcgcttttga

SEQ ID NO: 731191 - DNA, 19 bp, Mus musculus
  siRNA target sequence for 1200008A18Rik (NM_027877.2,1457-1475).
ctacctggcgcttttgaca

SEQ ID NO: 731192 - DNA, 19 bp, Mus musculus
  siRNA target sequence for 1200002N14Rik (NM_027878.1,265-283).
ccctttctcccctatatca

SEQ ID NO: 731193 - DNA, 19 bp, Mus musculus
  siRNA target sequence for 1200002N14Rik (NM_027878.1,311-329).
gtggtatttttggattcat

SEQ ID NO: 731194 - DNA, 19 bp, Mus musculus
  siRNA target sequence for 1200002N14Rik (NM_027878.1,313-331).
ggtatttttggattcatga

SEQ ID NO: 731195 - DNA, 19 bp, Mus musculus
  siRNA target sequence for 1200002N14Rik (NM_027878.1,322-340).
ggattcatgataaacttct

SEQ ID NO: 731196 - DNA, 19 bp, Mus musculus
  siRNA target sequence for 1200002N14Rik (NM_027878.1,352-370).
ggcgcagctacgatgtaca

SEQ ID NO: 731197 - DNA, 19 bp, Mus musculus
  siRNA target sequence for 1200002N14Rik (NM_027878.1,355-373).
gcagctacgatgtacacaa

SEQ ID NO: 731198 - DNA, 19 bp, Mus musculus
  siRNA target sequence for 1200002N14Rik (NM_027878.1,359-377).
ctacgatgtacacaagata

SEQ ID NO: 731199 - DNA, 19 bp, Mus musculus
  siRNA target sequence for 1200002N14Rik (NM_027878.1,362-380).
cgatgtacacaagatacaa

SEQ ID NO: 731200 - DNA, 19 bp, Mus musculus
  siRNA target sequence for 1200002N14Rik (NM_027878.1,416-434).
gcactcccgtttttaactt

SEQ ID NO: 731201 - DNA, 19 bp, Mus musculus
  siRNA target sequence for 1200002N14Rik (NM_027878.1,565-583).
ctcctgcaatcgatcatct

SEQ ID NO: 731202 - DNA, 19 bp, Mus musculus
  siRNA target sequence for 1200002N14Rik (NM_027878.1,681-699).
ctgtgcttcactcatttct

SEQ ID NO: 731203 - DNA, 19 bp, Mus musculus
  siRNA target sequence for 1200002N14Rik (NM_027878.1,683-701).
gtgcttcactcatttctat

SEQ ID NO: 731204 - DNA, 19 bp, Mus musculus
  siRNA target sequence for 1200002N14Rik (NM_027878.1,768-786).
gtggaccgtggcttttggt

SEQ ID NO: 731205 - DNA, 19 bp, Mus musculus
  siRNA target sequence for 1200002N14Rik (NM_027878.1,802-820).
ctaacattcatccaagatt

SEQ ID NO: 731206 - DNA, 19 bp, Mus musculus
  siRNA target sequence for 1200002N14Rik (NM_027878.1,839-857).
ggatatccacagaaatcaa

SEQ ID NO: 731207 - DNA, 19 bp, Mus musculus
  siRNA target sequence for 1200002N14Rik (NM_027878.1,840-858).
gatatccacagaaatcaat

SEQ ID NO: 731208 - DNA, 19 bp, Mus musculus
  siRNA target sequence for 1200003M09Rik (NM_027880.1,419-437).
ggatgctggccatatcctt

SEQ ID NO: 731209 - DNA, 19 bp, Mus musculus
  siRNA target sequence for 1200003M09Rik (NM_027880.1,742-760).
gcagagtggctgctctaat

SEQ ID NO: 731210 - DNA, 19 bp, Mus musculus
  siRNA target sequence for 1200003M09Rik (NM_027880.1,986-1004).
cttcgtatctcgagttctt

SEQ ID NO: 731211 - DNA, 19 bp, Mus musculus
  siRNA target sequence for 1200003M09Rik (NM_027880.1,1410-1428).
ctggagcagcagtgttaca

SEQ ID NO: 731212 - DNA, 19 bp, Mus musculus
  siRNA target sequence for 1200003M09Rik (NM_027880.1,1612-1630).
ggcctctcctgaaattcca

SEQ ID NO: 731213 - DNA, 19 bp, Mus musculus
  siRNA target sequence for 1200003M09Rik (NM_027880.1,1619-1637).
cctgaaattccaatatgaa

SEQ ID NO: 731214 - DNA, 19 bp, Mus musculus
  siRNA target sequence for 1200003M09Rik (NM_027880.1,1833-1851).
gagttcatcccctatgaca

SEQ ID NO: 731215 - DNA, 19 bp, Mus musculus
  siRNA target sequence for 1200003M09Rik (NM_027880.1,1910-1928).
ggaagctttgactacatct

SEQ ID NO: 731216 - DNA, 19 bp, Mus musculus
  siRNA target sequence for 1200003M09Rik (NM_027880.1,1963-1981).
ggcttgagggcctggtata

SEQ ID NO: 731217 - DNA, 19 bp, Mus musculus
  siRNA target sequence for 1200003M09Rik (NM_027880.1,1968-1986).
gagggcctggtatatagga

SEQ ID NO: 731218 - DNA, 19 bp, Mus musculus
  siRNA target sequence for 1200003M09Rik (NM_027880.1,2053-2071).
cctgtgtagcagagtttga

SEQ ID NO: 731219 - DNA, 19 bp, Mus musculus
  siRNA target sequence for 1200003M09Rik (NM_027880.1,2087-2105).
cgctctggtagctgttaca

SEQ ID NO: 731220 - DNA, 19 bp, Mus musculus
  siRNA target sequence for 1200003M09Rik (NM_027880.1,2121-2139).
caggtagccaagtatctga

SEQ ID NO: 731221 - DNA, 19 bp, Mus musculus
  siRNA target sequence for 1200003M09Rik (NM_027880.1,2290-2308).
cagcactagccgtttctca

SEQ ID NO: 731222 - DNA, 19 bp, Mus musculus
  siRNA target sequence for 1200003M09Rik (NM_027880.1,2408-2426).
gtcaggcgtccccaatgaa

SEQ ID NO: 731223 - DNA, 19 bp, Mus musculus
  siRNA target sequence for 1200003M09Rik (NM_027880.1,2410-2428).
caggcgtccccaatgaatt

SEQ ID NO: 731224 - DNA, 19 bp, Mus musculus
  siRNA target sequence for 1200003M09Rik (NM_027880.1,2412-2430).
ggcgtccccaatgaattca

SEQ ID NO: 731225 - DNA, 19 bp, Mus musculus
  siRNA target sequence for 1200003M09Rik (NM_027880.1,2486-2504).
ggtgaccttcgacctttta

SEQ ID NO: 731226 - DNA, 19 bp, Mus musculus
  siRNA target sequence for 1200003M09Rik (NM_027880.1,2489-2507).
gaccttcgaccttttagga

SEQ ID NO: 731227 - DNA, 19 bp, Mus musculus
  siRNA target sequence for 1200003M09Rik (NM_027880.1,2495-2513).
cgaccttttaggagatgat

SEQ ID NO: 731228 - DNA, 19 bp, Mus musculus
  siRNA target sequence for 1200003M09Rik (NM_027880.1,2542-2560).
ccttagcgtccctgatgta

SEQ ID NO: 731229 - DNA, 19 bp, Mus musculus
  siRNA target sequence for Smug1 (NM_027885.2,562-580).
cccgtgggtgtcatctaca

SEQ ID NO: 731230 - DNA, 19 bp, Mus musculus
  siRNA target sequence for Smug1 (NM_027885.2,579-597).
caacccggtggattatgct

SEQ ID NO: 731231 - DNA, 19 bp, Mus musculus
  siRNA target sequence for Smug1 (NM_027885.2,600-618).
ggagccacaccgtaactat

SEQ ID NO: 731232 - DNA, 19 bp, Mus musculus
  siRNA target sequence for Smug1 (NM_027885.2,830-848).
cccgattctggggcttttt

SEQ ID NO: 731233 - DNA, 19 bp, Mus musculus
  siRNA target sequence for Smug1 (NM_027885.2,860-878).
gcggacagcctcaagtctt

SEQ ID NO: 731234 - DNA, 19 bp, Mus musculus
  siRNA target sequence for Smug1 (NM_027885.2,928-946).
cccagtggacgaaacctta

SEQ ID NO: 731235 - DNA, 19 bp, Mus musculus
  siRNA target sequence for 1200014D22Rik (NM_027886.2,154-172).
ggaagctggcgggactttt

SEQ ID NO: 731236 - DNA, 19 bp, Mus musculus
  siRNA target sequence for 1200014D22Rik (NM_027886.2,242-260).
gctgaacagagtgtttgaa

SEQ ID NO: 731237 - DNA, 19 bp, Mus musculus
  siRNA target sequence for 1200014D22Rik (NM_027886.2,382-400).
cactcaagctggtccatat

SEQ ID NO: 731238 - DNA, 19 bp, Mus musculus
  siRNA target sequence for 1200014D22Rik (NM_027886.2,414-432).
cttccagggcctatcaaga

SEQ ID NO: 731239 - DNA, 19 bp, Mus musculus
  siRNA target sequence for 1200014D22Rik (NM_027886.2,417-435).
ccagggcctatcaagattt

SEQ ID NO: 731240 - DNA, 19 bp, Mus musculus
  siRNA target sequence for 1200014D22Rik (NM_027886.2,418-436).
cagggcctatcaagatttt

SEQ ID NO: 731241 - DNA, 19 bp, Mus musculus
  siRNA target sequence for 1200014D22Rik (NM_027886.2,642-660).
gcgctcaggagcttagaca

SEQ ID NO: 731242 - DNA, 19 bp, Mus musculus
  siRNA target sequence for 1200014D22Rik (NM_027886.2,822-840).
ctggggactttgatactga

SEQ ID NO: 731243 - DNA, 19 bp, Mus musculus
  siRNA target sequence for 1200014D22Rik (NM_027886.2,899-917).
cgatgtggcctataacctt

SEQ ID NO: 731244 - DNA, 19 bp, Mus musculus
  siRNA target sequence for 1200014D22Rik (NM_027886.2,905-923).
ggcctataaccttctagaa

SEQ ID NO: 731245 - DNA, 19 bp, Mus musculus
  siRNA target sequence for 1200014D22Rik (NM_027886.2,1018-1036).
cagccaccgcccagtactt

SEQ ID NO: 731246 - DNA, 19 bp, Mus musculus
  siRNA target sequence for 1200014D22Rik (NM_027886.2,1020-1038).
gccaccgcccagtacttgt

SEQ ID NO: 731247 - DNA, 19 bp, Mus musculus
  siRNA target sequence for 1200014D22Rik (NM_027886.2,1071-1089).
ctgcttgatggcaaggttt

SEQ ID NO: 731248 - DNA, 19 bp, Mus musculus
  siRNA target sequence for 1200014D22Rik (NM_027886.2,1191-1209).
ggccctgagttgagtgata

SEQ ID NO: 731249 - DNA, 19 bp, Mus musculus
  siRNA target sequence for 1200014D22Rik (NM_027886.2,1242-1260).
ccgcttcgtaaggttaaga

SEQ ID NO: 731250 - DNA, 19 bp, Mus musculus
  siRNA target sequence for 1200014D22Rik (NM_027886.2,1506-1524).
cagaacctggagactgtat

SEQ ID NO: 731251 - DNA, 19 bp, Mus musculus
  siRNA target sequence for 1200014D22Rik (NM_027886.2,1964-1982).
ccggcagctacgtcgatat

SEQ ID NO: 731252 - DNA, 19 bp, Mus musculus
  siRNA target sequence for 1200014D22Rik (NM_027886.2,1967-1985).
gcagctacgtcgatatgct

SEQ ID NO: 731253 - DNA, 19 bp, Mus musculus
  siRNA target sequence for 1200014D22Rik (NM_027886.2,2257-2275).
gggaagtcccgaatagaga

SEQ ID NO: 731254 - DNA, 19 bp, Mus musculus
  siRNA target sequence for 1200014D22Rik (NM_027886.2,2493-2511).
gagttccagtgctgtatca

SEQ ID NO: 731255 - DNA, 19 bp, Mus musculus
  siRNA target sequence for 1200014D22Rik (NM_027886.2,2981-2999).
gtccaccctgtacctatta

SEQ ID NO: 731256 - DNA, 19 bp, Mus musculus
  siRNA target sequence for 1200014D22Rik (NM_027886.2,2983-3001).
ccaccctgtacctattaga

SEQ ID NO: 731257 - DNA, 19 bp, Mus musculus
  siRNA target sequence for 1200014D22Rik (NM_027886.2,2984-3002).
caccctgtacctattagat

SEQ ID NO: 731258 - DNA, 19 bp, Mus musculus
  siRNA target sequence for 1200014D22Rik (NM_027886.2,2986-3004).
ccctgtacctattagatga

SEQ ID NO: 731259 - DNA, 19 bp, Mus musculus
  siRNA target sequence for 1200014D22Rik (NM_027886.2,2987-3005).
cctgtacctattagatgaa

SEQ ID NO: 731260 - DNA, 19 bp, Mus musculus
  siRNA target sequence for 1200014D22Rik (NM_027886.2,3167-3185).
cctgcggctgatcttctat

SEQ ID NO: 731261 - DNA, 19 bp, Mus musculus
  siRNA target sequence for 1200014D22Rik (NM_027886.2,3170-3188).
gcggctgatcttctatgat

SEQ ID NO: 731262 - DNA, 19 bp, Mus musculus
  siRNA target sequence for 1200011O22Rik (NM_027891.1,1740-1758).
gttaaagtctccttccttt

SEQ ID NO: 731263 - DNA, 19 bp, Mus musculus
  siRNA target sequence for 1200011O22Rik (NM_027891.1,2049-2067).
gctgtttgcgtgatagact

SEQ ID NO: 731264 - DNA, 19 bp, Mus musculus
  siRNA target sequence for 1200011O22Rik (NM_027891.1,2074-2092).
caggcctcgtactccataa

SEQ ID NO: 731265 - DNA, 19 bp, Mus musculus
  siRNA target sequence for 1200011O22Rik (NM_027891.1,2076-2094).
ggcctcgtactccataagt

SEQ ID NO: 731266 - DNA, 19 bp, Mus musculus
  siRNA target sequence for 1200011O22Rik (NM_027891.1,2077-2095).
gcctcgtactccataagta

SEQ ID NO: 731267 - DNA, 19 bp, Mus musculus
  siRNA target sequence for 1200011O22Rik (NM_027891.1,2079-2097).
ctcgtactccataagtaca

SEQ ID NO: 731268 - DNA, 19 bp, Mus musculus
  siRNA target sequence for 1200011O22Rik (NM_027891.1,2152-2170).
cccaggcaggccacaagaa

SEQ ID NO: 731269 - DNA, 19 bp, Mus musculus
  siRNA target sequence for 1200011O22Rik (NM_027891.1,2359-2377).
gggtgcccaaccaggatta

SEQ ID NO: 731270 - DNA, 19 bp, Mus musculus
  siRNA target sequence for 1200011O22Rik (NM_027891.1,2361-2379).
gtgcccaaccaggattaca

SEQ ID NO: 731271 - DNA, 19 bp, Mus musculus
  siRNA target sequence for 1200011O22Rik (NM_027891.1,2364-2382).
cccaaccaggattacaagt

SEQ ID NO: 731272 - DNA, 19 bp, Mus musculus
  siRNA target sequence for 1200011O22Rik (NM_027891.1,2596-2614).
ggctggcatttgtgaatga

SEQ ID NO: 731273 - DNA, 19 bp, Mus musculus
  siRNA target sequence for 1200011O22Rik (NM_027891.1,2773-2791).
cctgtcccggcaaaaacct

SEQ ID NO: 731274 - DNA, 19 bp, Mus musculus
  siRNA target sequence for 1200011O22Rik (NM_027891.1,2815-2833).
gcagtgtgtggatctatga

SEQ ID NO: 731275 - DNA, 19 bp, Mus musculus
  siRNA target sequence for 1300003G02Rik (NM_027896.1,279-297).
catttgaggttctggattt

SEQ ID NO: 731276 - DNA, 19 bp, Mus musculus
  siRNA target sequence for 1300003G02Rik (NM_027896.1,334-352).
gcacctggacgtcagaatt

SEQ ID NO: 731277 - DNA, 19 bp, Mus musculus
  siRNA target sequence for 1300003G02Rik (NM_027896.1,348-366).
gaattctactgaccaatat

SEQ ID NO: 731278 - DNA, 19 bp, Mus musculus
  siRNA target sequence for 1300003G02Rik (NM_027896.1,469-487).
gtacaaccctgttaaacaa

SEQ ID NO: 731279 - DNA, 19 bp, Mus musculus
  siRNA target sequence for 1300003G02Rik (NM_027896.1,498-516).
gttatgccaccagttgtta

SEQ ID NO: 731280 - DNA, 19 bp, Mus musculus
  siRNA target sequence for 1300003G02Rik (NM_027896.1,544-562).
gttgctgtatccggattat

SEQ ID NO: 731281 - DNA, 19 bp, Mus musculus
  siRNA target sequence for 1300003G02Rik (NM_027896.1,596-614).
gccctcttaccctctacta

SEQ ID NO: 731282 - DNA, 19 bp, Mus musculus
  siRNA target sequence for 1300003G02Rik (NM_027896.1,597-615).
ccctcttaccctctactat

SEQ ID NO: 731283 - DNA, 19 bp, Mus musculus
  siRNA target sequence for 1300003G02Rik (NM_027896.1,678-696).
ccgtgggtggcacttttga

SEQ ID NO: 731284 - DNA, 19 bp, Mus musculus
  siRNA target sequence for 1300003G02Rik (NM_027896.1,774-792).
ctgacaaagatctgttgaa

SEQ ID NO: 731285 - DNA, 19 bp, Mus musculus
  siRNA target sequence for 1300003G02Rik (NM_027896.1,991-1009).
ccgcttccgccttgagaat

SEQ ID NO: 731286 - DNA, 19 bp, Mus musculus
  siRNA target sequence for 1300003G02Rik (NM_027896.1,1054-1072).
ccagagtcacaatgaaaat

SEQ ID NO: 731287 - DNA, 19 bp, Mus musculus
  siRNA target sequence for 1300003G02Rik (NM_027896.1,1153-1171).
gctcccgtcaggtctctat

SEQ ID NO: 731288 - DNA, 19 bp, Mus musculus
  siRNA target sequence for 1300003G02Rik (NM_027896.1,1218-1236).
ctcagcggctgaagaactt

SEQ ID NO: 731289 - DNA, 19 bp, Mus musculus
  siRNA target sequence for 1300003G02Rik (NM_027896.1,1316-1334).
gaggcctttggaacagata

SEQ ID NO: 731290 - DNA, 19 bp, Mus musculus
  siRNA target sequence for 1300003G02Rik (NM_027896.1,1329-1347).
cagatattctccataaaga

SEQ ID NO: 731291 - DNA, 19 bp, Mus musculus
  siRNA target sequence for 1300003G02Rik (NM_027896.1,1346-1364).
gatggcaccatcaatagga

SEQ ID NO: 731292 - DNA, 19 bp, Mus musculus
  siRNA target sequence for 1300003G02Rik (NM_027896.1,1405-1423).
gaagatcctcacagatatt

SEQ ID NO: 731293 - DNA, 19 bp, Mus musculus
  siRNA target sequence for 1300003G02Rik (NM_027896.1,1579-1597).
ggctgttcgacgcattgtt

SEQ ID NO: 731294 - DNA, 19 bp, Mus musculus
  siRNA target sequence for 1300003G02Rik (NM_027896.1,1581-1599).
ctgttcgacgcattgttga

SEQ ID NO: 731295 - DNA, 19 bp, Mus musculus
  siRNA target sequence for D7Bwg0611e (NM_027898.2,326-344).
ccgctgggagaccacaatt

SEQ ID NO: 731296 - DNA, 19 bp, Mus musculus
  siRNA target sequence for D7Bwg0611e (NM_027898.2,327-345).
cgctgggagaccacaattt

SEQ ID NO: 731297 - DNA, 19 bp, Mus musculus
  siRNA target sequence for D7Bwg0611e (NM_027898.2,331-349).
gggagaccacaatttccat

SEQ ID NO: 731298 - DNA, 19 bp, Mus musculus
  siRNA target sequence for D7Bwg0611e (NM_027898.2,340-358).
caatttccatccagttgaa

SEQ ID NO: 731299 - DNA, 19 bp, Mus musculus
  siRNA target sequence for D7Bwg0611e (NM_027898.2,424-442).
ctgagagtgagaagcattt

SEQ ID NO: 731300 - DNA, 19 bp, Mus musculus
  siRNA target sequence for D7Bwg0611e (NM_027898.2,586-604).
gtgaagacgaagactatgt

SEQ ID NO: 731301 - DNA, 19 bp, Mus musculus
  siRNA target sequence for D7Bwg0611e (NM_027898.2,1337-1355).
cactgcccaccgatactgt

SEQ ID NO: 731302 - DNA, 19 bp, Mus musculus
  siRNA target sequence for D7Bwg0611e (NM_027898.2,1339-1357).
ctgcccaccgatactgtat

SEQ ID NO: 731303 - DNA, 19 bp, Mus musculus
  siRNA target sequence for D7Bwg0611e (NM_027898.2,1403-1421).
gatccgctaccgaaagcaa

SEQ ID NO: 731304 - DNA, 19 bp, Mus musculus
  siRNA target sequence for D7Bwg0611e (NM_027898.2,1422-1440).
ccgtggagcctcgtaaagt

SEQ ID NO: 731305 - DNA, 19 bp, Mus musculus
  siRNA target sequence for D7Bwg0611e (NM_027898.2,1434-1452).
gtaaagtcgctcattgaga

SEQ ID NO: 731306 - DNA, 19 bp, Mus musculus
  siRNA target sequence for D7Bwg0611e (NM_027898.2,1462-1480).
ggagcggcatcgaagatta

SEQ ID NO: 731307 - DNA, 19 bp, Mus musculus
  siRNA target sequence for D7Bwg0611e (NM_027898.2,1463-1481).
gagcggcatcgaagattat

SEQ ID NO: 731308 - DNA, 19 bp, Mus musculus
  siRNA target sequence for D7Bwg0611e (NM_027898.2,1465-1483).
gcggcatcgaagattattt

SEQ ID NO: 731309 - DNA, 19 bp, Mus musculus
  siRNA target sequence for D7Bwg0611e (NM_027898.2,1468-1486).
gcatcgaagattatttcca

SEQ ID NO: 731310 - DNA, 19 bp, Mus musculus
  siRNA target sequence for D7Bwg0611e (NM_027898.2,1885-1903).
cggagtgggcggagatctt

SEQ ID NO: 731311 - DNA, 19 bp, Mus musculus
  siRNA target sequence for 1300004C11Rik (NM_027901.1,71-89).
ctgcggggtcggctatgtt

SEQ ID NO: 731312 - DNA, 19 bp, Mus musculus
  siRNA target sequence for 1300004C11Rik (NM_027901.1,320-338).
gtcaaaggtctcaaacact

SEQ ID NO: 731313 - DNA, 19 bp, Mus musculus
  siRNA target sequence for 1300004C11Rik (NM_027901.1,395-413).
gcctcagcaacgtaaacct

SEQ ID NO: 731314 - DNA, 19 bp, Mus musculus
  siRNA target sequence for 1300004C11Rik (NM_027901.1,468-486).
cccatgcctaagaaacgaa

SEQ ID NO: 731315 - DNA, 19 bp, Mus musculus
  siRNA target sequence for 1300004C11Rik (NM_027901.1,473-491).
gcctaagaaacgaagtcaa

SEQ ID NO: 731316 - DNA, 19 bp, Mus musculus
  siRNA target sequence for 1300004C11Rik (NM_027901.1,501-519).
ggagacctgctactattga

SEQ ID NO: 731317 - DNA, 19 bp, Mus musculus
  siRNA target sequence for 1300004C11Rik (NM_027901.1,502-520).
gagacctgctactattgaa

SEQ ID NO: 731318 - DNA, 19 bp, Mus musculus
  siRNA target sequence for 1300004C11Rik (NM_027901.1,618-636).
gcccaagtggcacttctat

SEQ ID NO: 731319 - DNA, 19 bp, Mus musculus
  siRNA target sequence for 1300004C11Rik (NM_027901.1,776-794).
cgctcgggatgaagacttt

SEQ ID NO: 731320 - DNA, 19 bp, Mus musculus
  siRNA target sequence for 1300004C11Rik (NM_027901.1,800-818).
ccaggtcgagggtgaagat

SEQ ID NO: 731321 - DNA, 19 bp, Mus musculus
  siRNA target sequence for 1300004C11Rik (NM_027901.1,937-955).
ccaatggcttacccaatta

SEQ ID NO: 731322 - DNA, 19 bp, Mus musculus
  siRNA target sequence for 1300004C11Rik (NM_027901.1,942-960).
ggcttacccaattacatca

SEQ ID NO: 731323 - DNA, 19 bp, Mus musculus
  siRNA target sequence for 1300004C11Rik (NM_027901.1,943-961).
gcttacccaattacatcat

SEQ ID NO: 731324 - DNA, 19 bp, Mus musculus
  siRNA target sequence for 1300004C11Rik (NM_027901.1,1052-1070).
ctggaagtggcagttgtta

SEQ ID NO: 731325 - DNA, 19 bp, Mus musculus
  siRNA target sequence for 1300004C11Rik (NM_027901.1,1146-1164).
cctgaggatggcacaatct

SEQ ID NO: 731326 - DNA, 19 bp, Mus musculus
  siRNA target sequence for 1300004C11Rik (NM_027901.1,1155-1173).
ggcacaatctaccgaataa

SEQ ID NO: 731327 - DNA, 19 bp, Mus musculus
  siRNA target sequence for 1300004C11Rik (NM_027901.1,1156-1174).
gcacaatctaccgaataaa

SEQ ID NO: 731328 - DNA, 19 bp, Mus musculus
  siRNA target sequence for 1300004C11Rik (NM_027901.1,1304-1322).
ctccagccctgacatgaat

SEQ ID NO: 731329 - DNA, 19 bp, Mus musculus
  siRNA target sequence for 1300004C11Rik (NM_027901.1,1411-1429).
gcaatagggcccactttgt

SEQ ID NO: 731330 - DNA, 19 bp, Mus musculus
  siRNA target sequence for 1300004C11Rik (NM_027901.1,1655-1673).
ccagtgtttggcaactctt

SEQ ID NO: 731331 - DNA, 19 bp, Mus musculus
  siRNA target sequence for 1300004C11Rik (NM_027901.1,1799-1817).
gaatcttcccactaactca

SEQ ID NO: 731332 - DNA, 19 bp, Mus musculus
  siRNA target sequence for 1300004C11Rik (NM_027901.1,1889-1907).
ccaggctgtccgtacaatt

SEQ ID NO: 731333 - DNA, 19 bp, Mus musculus
  siRNA target sequence for 1300004C11Rik (NM_027901.1,1893-1911).
gctgtccgtacaattcagt

SEQ ID NO: 731334 - DNA, 19 bp, Mus musculus
  siRNA target sequence for 1300004C11Rik (NM_027901.1,1910-1928).
gtggtgcaaagctaacagt

SEQ ID NO: 731335 - DNA, 19 bp, Mus musculus
  siRNA target sequence for 1300004C11Rik (NM_027901.1,1945-1963).
cggggagtgaccggaaaat

SEQ ID NO: 731336 - DNA, 19 bp, Mus musculus
  siRNA target sequence for 1300004C11Rik (NM_027901.1,1948-1966).
ggagtgaccggaaaatcaa

SEQ ID NO: 731337 - DNA, 19 bp, Mus musculus
  siRNA target sequence for 1300004C11Rik (NM_027901.1,1949-1967).
gagtgaccggaaaatcaaa

SEQ ID NO: 731338 - DNA, 19 bp, Mus musculus
  siRNA target sequence for 1300004C11Rik (NM_027901.1,1973-1991).
ggatcttcgacgaccttat

SEQ ID NO: 731339 - DNA, 19 bp, Mus musculus
  siRNA target sequence for 1300004C11Rik (NM_027901.1,1983-2001).
cgaccttatgaaccaataa

SEQ ID NO: 731340 - DNA, 19 bp, Mus musculus
  siRNA target sequence for 1300004C11Rik (NM_027901.1,1984-2002).
gaccttatgaaccaataaa

SEQ ID NO: 731341 - DNA, 19 bp, Mus musculus
  siRNA target sequence for 1300004C11Rik (NM_027901.1,1986-2004).
ccttatgaaccaataaact

SEQ ID NO: 731342 - DNA, 19 bp, Mus musculus
  siRNA target sequence for 1300004C11Rik (NM_027901.1,2039-2057).
gctgctcccctataatggt

SEQ ID NO: 731343 - DNA, 19 bp, Mus musculus
  siRNA target sequence for 1300004C11Rik (NM_027901.1,2099-2117).
ctgtggaattcattacatt

SEQ ID NO: 731344 - DNA, 19 bp, Mus musculus
  siRNA target sequence for 1300004C11Rik (NM_027901.1,2101-2119).
gtggaattcattacattga

SEQ ID NO: 731345 - DNA, 19 bp, Mus musculus
  siRNA target sequence for 1300004C11Rik (NM_027901.1,2121-2139).
gccggttacctcggtttta

SEQ ID NO: 731346 - DNA, 19 bp, Mus musculus
  siRNA target sequence for 1300004C11Rik (NM_027901.1,2122-2140).
ccggttacctcggttttaa

SEQ ID NO: 731347 - DNA, 19 bp, Mus musculus
  siRNA target sequence for 1300004C11Rik (NM_027901.1,2231-2249).
ggagctcattgcagctatt

SEQ ID NO: 731348 - DNA, 19 bp, Mus musculus
  siRNA target sequence for 1300004C11Rik (NM_027901.1,2232-2250).
gagctcattgcagctattt

SEQ ID NO: 731349 - DNA, 19 bp, Mus musculus
  siRNA target sequence for 1300004C11Rik (NM_027901.1,2234-2252).
gctcattgcagctatttta

SEQ ID NO: 731350 - DNA, 19 bp, Mus musculus
  siRNA target sequence for 1300004C11Rik (NM_027901.1,2256-2274).
gatatggcatcaaatccaa

SEQ ID NO: 731351 - DNA, 19 bp, Mus musculus
  siRNA target sequence for 1300004C11Rik (NM_027901.1,2292-2310).
gcagaaagacgatttccta

SEQ ID NO: 731352 - DNA, 19 bp, Mus musculus
  siRNA target sequence for 1300004C11Rik (NM_027901.1,2293-2311).
cagaaagacgatttcctat

SEQ ID NO: 731353 - DNA, 19 bp, Mus musculus
  siRNA target sequence for 1300004C11Rik (NM_027901.1,2295-2313).
gaaagacgatttcctatat

SEQ ID NO: 731354 - DNA, 19 bp, Mus musculus
  siRNA target sequence for 1300004C11Rik (NM_027901.1,2344-2362).
gccccgaagaccaagacta

SEQ ID NO: 731355 - DNA, 19 bp, Mus musculus
  siRNA target sequence for 1300004C11Rik (NM_027901.1,2404-2422).
gaacctacactgaaaccat

SEQ ID NO: 731356 - DNA, 19 bp, Mus musculus
  siRNA target sequence for 1300004C11Rik (NM_027901.1,2508-2526).
gctccccctccacaacaat

SEQ ID NO: 731357 - DNA, 19 bp, Mus musculus
  siRNA target sequence for 1300004C11Rik (NM_027901.1,2513-2531).
ccctccacaacaattccta

SEQ ID NO: 731358 - DNA, 19 bp, Mus musculus
  siRNA target sequence for 1300004C11Rik (NM_027901.1,2571-2589).
cctaggcttgggagtcaaa

SEQ ID NO: 731359 - DNA, 19 bp, Mus musculus
  siRNA target sequence for 1300004C11Rik (NM_027901.1,2576-2594).
gcttgggagtcaaattgct

SEQ ID NO: 731360 - DNA, 19 bp, Mus musculus
  siRNA target sequence for 1300004C11Rik (NM_027901.1,2581-2599).
ggagtcaaattgctcatat

SEQ ID NO: 731361 - DNA, 19 bp, Mus musculus
  siRNA target sequence for 1300004C11Rik (NM_027901.1,2584-2602).
gtcaaattgctcatattga

SEQ ID NO: 731362 - DNA, 19 bp, Mus musculus
  siRNA target sequence for 1300004C11Rik (NM_027901.1,2593-2611).
ctcatattgagcatattgt

SEQ ID NO: 731363 - DNA, 19 bp, Mus musculus
  siRNA target sequence for 1300004C11Rik (NM_027901.1,2610-2628).
gtgaaggaggtaaagctaa

SEQ ID NO: 731364 - DNA, 19 bp, Mus musculus
  siRNA target sequence for 1300004C11Rik (NM_027901.1,2615-2633).
ggaggtaaagctaagtaaa

SEQ ID NO: 731365 - DNA, 19 bp, Mus musculus
  siRNA target sequence for 1300018J18Rik (NM_027905.1,141-159).
gcagggctgcgctttgaca

SEQ ID NO: 731366 - DNA, 19 bp, Mus musculus
  siRNA target sequence for 1300018J18Rik (NM_027905.1,358-376).
ccgaagctgcgctcttctt

SEQ ID NO: 731367 - DNA, 19 bp, Mus musculus
  siRNA target sequence for 1300018J18Rik (NM_027905.1,683-701).
gatgcgagacgtgttctat

SEQ ID NO: 731368 - DNA, 19 bp, Mus musculus
  siRNA target sequence for 1300018J18Rik (NM_027905.1,692-710).
cgtgttctatgatggtaat

SEQ ID NO: 731369 - DNA, 19 bp, Mus musculus
  siRNA target sequence for 1300018J18Rik (NM_027905.1,695-713).
gttctatgatggtaatcca

SEQ ID NO: 731370 - DNA, 19 bp, Mus musculus
  siRNA target sequence for 1300018J18Rik (NM_027905.1,698-716).
ctatgatggtaatccaaaa

SEQ ID NO: 731371 - DNA, 19 bp, Mus musculus
  siRNA target sequence for 1300018J18Rik (NM_027905.1,731-749).
ggttgtgttgcgtatagct

SEQ ID NO: 731372 - DNA, 19 bp, Mus musculus
  siRNA target sequence for 1300018J18Rik (NM_027905.1,741-759).
cgtatagctcccactttca

SEQ ID NO: 731373 - DNA, 19 bp, Mus musculus
  siRNA target sequence for 1300018J18Rik (NM_027905.1,747-765).
gctcccactttcataagat

SEQ ID NO: 731374 - DNA, 19 bp, Mus musculus
  siRNA target sequence for 1300018J18Rik (NM_027905.1,768-786).
ggctcctttgaaattttta

SEQ ID NO: 731375 - DNA, 19 bp, Mus musculus
  siRNA target sequence for 1300018J18Rik (NM_027905.1,823-841).
gcgtgggacgagatgatat

SEQ ID NO: 731376 - DNA, 19 bp, Mus musculus
  siRNA target sequence for 1300018J18Rik (NM_027905.1,844-862).
gagtccaattgcttgacta

SEQ ID NO: 731377 - DNA, 19 bp, Mus musculus
  siRNA target sequence for 1300018J18Rik (NM_027905.1,904-922).
cctgtgacacggacaacat

SEQ ID NO: 731378 - DNA, 19 bp, Mus musculus
  siRNA target sequence for 1300018J18Rik (NM_027905.1,905-923).
ctgtgacacggacaacata

SEQ ID NO: 731379 - DNA, 19 bp, Mus musculus
  siRNA target sequence for 1300018J18Rik (NM_027905.1,1082-1100).
gtacgaccctgaccatata

SEQ ID NO: 731380 - DNA, 19 bp, Mus musculus
  siRNA target sequence for 1300018J18Rik (NM_027905.1,1085-1103).
cgaccctgaccatatatgt

SEQ ID NO: 731381 - DNA, 19 bp, Mus musculus
  siRNA target sequence for 1300018J18Rik (NM_027905.1,1119-1137).
gctgggcgctacacataca

SEQ ID NO: 731382 - DNA, 19 bp, Mus musculus
  siRNA target sequence for 1300018J18Rik (NM_027905.1,1122-1140).
gggcgctacacatacagta

SEQ ID NO: 731383 - DNA, 19 bp, Mus musculus
  siRNA target sequence for 1300018J18Rik (NM_027905.1,1123-1141).
ggcgctacacatacagtaa

SEQ ID NO: 731384 - DNA, 19 bp, Mus musculus
  siRNA target sequence for 1300018J18Rik (NM_027905.1,1214-1232).
ggctgaggccattctaaaa

SEQ ID NO: 731385 - DNA, 19 bp, Mus musculus
  siRNA target sequence for 1300018J18Rik (NM_027905.1,1216-1234).
ctgaggccattctaaaaga

SEQ ID NO: 731386 - DNA, 19 bp, Mus musculus
  siRNA target sequence for 1300018J18Rik (NM_027905.1,1266-1284).
ctacagaagatgcgtaaaa

SEQ ID NO: 731387 - DNA, 19 bp, Mus musculus
  siRNA target sequence for 1300018J18Rik (NM_027905.1,1551-1569).
ctctttgcactcattggta

SEQ ID NO: 731388 - DNA, 19 bp, Mus musculus
  siRNA target sequence for 1300018J18Rik (NM_027905.1,1566-1584).
ggtactcaagccaatgtca

SEQ ID NO: 731389 - DNA, 19 bp, Mus musculus
  siRNA target sequence for 1300018J18Rik (NM_027905.1,1570-1588).
ctcaagccaatgtcacaaa

SEQ ID NO: 731390 - DNA, 19 bp, Mus musculus
  siRNA target sequence for 1300018J18Rik (NM_027905.1,1784-1802).
gtacgtcctgaggaactat

SEQ ID NO: 731391 - DNA, 19 bp, Mus musculus
  siRNA target sequence for 1300018J18Rik (NM_027905.1,1827-1845).
gctgaaaatggagactttt

SEQ ID NO: 731392 - DNA, 19 bp, Mus musculus
  siRNA target sequence for 1300018J18Rik (NM_027905.1,1938-1956).
gagcaatcttcctacagta

SEQ ID NO: 731393 - DNA, 19 bp, Mus musculus
  siRNA target sequence for Ap2b1 (NM_027915.1,124-142).
gggagaaatttttgaatta

SEQ ID NO: 731394 - DNA, 19 bp, Mus musculus
  siRNA target sequence for Ap2b1 (NM_027915.1,290-308).
ctcgtgtacctctatctga

SEQ ID NO: 731395 - DNA, 19 bp, Mus musculus
  siRNA target sequence for Ap2b1 (NM_027915.1,372-390).
gtgaagatcccaatccttt

SEQ ID NO: 731396 - DNA, 19 bp, Mus musculus
  siRNA target sequence for Ap2b1 (NM_027915.1,395-413).
cgagccttggcagttagaa

SEQ ID NO: 731397 - DNA, 19 bp, Mus musculus
  siRNA target sequence for Ap2b1 (NM_027915.1,513-531).
cagtatgcgtggcaaaact

SEQ ID NO: 731398 - DNA, 19 bp, Mus musculus
  siRNA target sequence for Ap2b1 (NM_027915.1,521-539).
gtggcaaaactccatgata

SEQ ID NO: 731399 - DNA, 19 bp, Mus musculus
  siRNA target sequence for Ap2b1 (NM_027915.1,525-543).
caaaactccatgatatcaa

SEQ ID NO: 731400 - DNA, 19 bp, Mus musculus
  siRNA target sequence for Ap2b1 (NM_027915.1,663-681).
caaacagcaacttacttga

SEQ ID NO: 731401 - DNA, 19 bp, Mus musculus
  siRNA target sequence for Ap2b1 (NM_027915.1,669-687).
gcaacttacttgatctgaa

SEQ ID NO: 731402 - DNA, 19 bp, Mus musculus
  siRNA target sequence for Ap2b1 (NM_027915.1,680-698).
gatctgaaccctcagaata

SEQ ID NO: 731403 - DNA, 19 bp, Mus musculus
  siRNA target sequence for Ap2b1 (NM_027915.1,690-708).
ctcagaatatcaataagct

SEQ ID NO: 731404 - DNA, 19 bp, Mus musculus
  siRNA target sequence for Ap2b1 (NM_027915.1,755-773).
ctggactgcctgtctaatt

SEQ ID NO: 731405 - DNA, 19 bp, Mus musculus
  siRNA target sequence for Ap2b1 (NM_027915.1,861-879).
cagccgtaaaagtcctaat

SEQ ID NO: 731406 - DNA, 19 bp, Mus musculus
  siRNA target sequence for Ap2b1 (NM_027915.1,863-881).
gccgtaaaagtcctaatga

SEQ ID NO: 731407 - DNA, 19 bp, Mus musculus
  siRNA target sequence for Ap2b1 (NM_027915.1,864-882).
ccgtaaaagtcctaatgaa

SEQ ID NO: 731408 - DNA, 19 bp, Mus musculus
  siRNA target sequence for Ap2b1 (NM_027915.1,866-884).
gtaaaagtcctaatgaagt

SEQ ID NO: 731409 - DNA, 19 bp, Mus musculus
  siRNA target sequence for Ap2b1 (NM_027915.1,900-918).
ccaaggactctgactacta

SEQ ID NO: 731410 - DNA, 19 bp, Mus musculus
  siRNA target sequence for Ap2b1 (NM_027915.1,904-922).
ggactctgactactacaat

SEQ ID NO: 731411 - DNA, 19 bp, Mus musculus
  siRNA target sequence for Ap2b1 (NM_027915.1,905-923).
gactctgactactacaata

SEQ ID NO: 731412 - DNA, 19 bp, Mus musculus
  siRNA target sequence for Ap2b1 (NM_027915.1,909-927).
ctgactactacaatatgct

SEQ ID NO: 731413 - DNA, 19 bp, Mus musculus
  siRNA target sequence for Ap2b1 (NM_027915.1,964-982).
gtctggggagccagaagta

SEQ ID NO: 731414 - DNA, 19 bp, Mus musculus
  siRNA target sequence for Ap2b1 (NM_027915.1,969-987).
gggagccagaagtacagta

SEQ ID NO: 731415 - DNA, 19 bp, Mus musculus
  siRNA target sequence for Ap2b1 (NM_027915.1,995-1013).
ctgaggaacatcaacctaa

SEQ ID NO: 731416 - DNA, 19 bp, Mus musculus
  siRNA target sequence for Ap2b1 (NM_027915.1,997-1015).
gaggaacatcaacctaatt

SEQ ID NO: 731417 - DNA, 19 bp, Mus musculus
  siRNA target sequence for Ap2b1 (NM_027915.1,1045-1063).
ggaaatcaaggtcttcttt

SEQ ID NO: 731418 - DNA, 19 bp, Mus musculus
  siRNA target sequence for Ap2b1 (NM_027915.1,1069-1087).
gtacaatgatcctatctat

SEQ ID NO: 731419 - DNA, 19 bp, Mus musculus
  siRNA target sequence for Ap2b1 (NM_027915.1,1072-1090).
caatgatcctatctatgtt

SEQ ID NO: 731420 - DNA, 19 bp, Mus musculus
  siRNA target sequence for Ap2b1 (NM_027915.1,1153-1171).
ggcggagctgaaggaatat

SEQ ID NO: 731421 - DNA, 19 bp, Mus musculus
  siRNA target sequence for Ap2b1 (NM_027915.1,1354-1372).
caacaagtatgaaagtatt

SEQ ID NO: 731422 - DNA, 19 bp, Mus musculus
  siRNA target sequence for Ap2b1 (NM_027915.1,1377-1395).
ccaccctctgtgaaaactt

SEQ ID NO: 731423 - DNA, 19 bp, Mus musculus
  siRNA target sequence for Ap2b1 (NM_027915.1,1438-1456).
gattgtaggagaatatgct

SEQ ID NO: 731424 - DNA, 19 bp, Mus musculus
  siRNA target sequence for Ap2b1 (NM_027915.1,1465-1483).
cgataacgcagatgaatta

SEQ ID NO: 731425 - DNA, 19 bp, Mus musculus
  siRNA target sequence for Ap2b1 (NM_027915.1,1643-1661).
cttcgagatcggggttata

SEQ ID NO: 731426 - DNA, 19 bp, Mus musculus
  siRNA target sequence for Ap2b1 (NM_027915.1,1646-1664).
cgagatcggggttatatat

SEQ ID NO: 731427 - DNA, 19 bp, Mus musculus
  siRNA target sequence for Ap2b1 (NM_027915.1,1647-1665).
gagatcggggttatatata

SEQ ID NO: 731428 - DNA, 19 bp, Mus musculus
  siRNA target sequence for Ap2b1 (NM_027915.1,1649-1667).
gatcggggttatatatatt

SEQ ID NO: 731429 - DNA, 19 bp, Mus musculus
  siRNA target sequence for Ap2b1 (NM_027915.1,1775-1793).
ctcatctgccacattggtt

SEQ ID NO: 731430 - DNA, 19 bp, Mus musculus
  siRNA target sequence for Ap2b1 (NM_027915.1,1807-1825).
gtaccacaaacctccaaat

SEQ ID NO: 731431 - DNA, 19 bp, Mus musculus
  siRNA target sequence for Ap2b1 (NM_027915.1,1847-1865).
gggattcatcgcaaacact

SEQ ID NO: 731432 - DNA, 19 bp, Mus musculus
  siRNA target sequence for Ap2b1 (NM_027915.1,1848-1866).
ggattcatcgcaaacactt

SEQ ID NO: 731433 - DNA, 19 bp, Mus musculus
  siRNA target sequence for Ap2b1 (NM_027915.1,1857-1875).
gcaaacacttgccaattca

SEQ ID NO: 731434 - DNA, 19 bp, Mus musculus
  siRNA target sequence for Ap2b1 (NM_027915.1,1858-1876).
caaacacttgccaattcat

SEQ ID NO: 731435 - DNA, 19 bp, Mus musculus
  siRNA target sequence for Ap2b1 (NM_027915.1,1907-1925).
gttggcaccaccactacaa

SEQ ID NO: 731436 - DNA, 19 bp, Mus musculus
  siRNA target sequence for Ap2b1 (NM_027915.1,1972-1990).
gggggatcttttgaatctt

SEQ ID NO: 731437 - DNA, 19 bp, Mus musculus
  siRNA target sequence for Ap2b1 (NM_027915.1,1974-1992).
gggatcttttgaatcttga

SEQ ID NO: 731438 - DNA, 19 bp, Mus musculus
  siRNA target sequence for Ap2b1 (NM_027915.1,2038-2056).
gggagcggtggatctttta

SEQ ID NO: 731439 - DNA, 19 bp, Mus musculus
  siRNA target sequence for Ap2b1 (NM_027915.1,2143-2161).
ggtcagcagtggtctgaat

SEQ ID NO: 731440 - DNA, 19 bp, Mus musculus
  siRNA target sequence for Ap2b1 (NM_027915.1,2246-2264).
gctaaaggcttggagattt

SEQ ID NO: 731441 - DNA, 19 bp, Mus musculus
  siRNA target sequence for Ap2b1 (NM_027915.1,2258-2276).
gagatttcggggacgttta

SEQ ID NO: 731442 - DNA, 19 bp, Mus musculus
  siRNA target sequence for Ap2b1 (NM_027915.1,2279-2297).
caccgccaagggcatatct

SEQ ID NO: 731443 - DNA, 19 bp, Mus musculus
  siRNA target sequence for Ap2b1 (NM_027915.1,2281-2299).
ccgccaagggcatatctat

SEQ ID NO: 731444 - DNA, 19 bp, Mus musculus
  siRNA target sequence for Ap2b1 (NM_027915.1,2289-2307).
ggcatatctatatggaaat

SEQ ID NO: 731445 - DNA, 19 bp, Mus musculus
  siRNA target sequence for Ap2b1 (NM_027915.1,2494-2512).
cctgcaggtggctgttaaa

SEQ ID NO: 731446 - DNA, 19 bp, Mus musculus
  siRNA target sequence for Ap2b1 (NM_027915.1,2495-2513).
ctgcaggtggctgttaaaa

SEQ ID NO: 731447 - DNA, 19 bp, Mus musculus
  siRNA target sequence for Ap2b1 (NM_027915.1,2600-2618).
cttgcaacgtggaaggata

SEQ ID NO: 731448 - DNA, 19 bp, Mus musculus
  siRNA target sequence for Ap2b1 (NM_027915.1,2638-2656).
ccagtttcagattaaggaa

SEQ ID NO: 731449 - DNA, 19 bp, Mus musculus
  siRNA target sequence for Ap2b1 (NM_027915.1,2698-2716).
caacaatgtttacactatt

SEQ ID NO: 731450 - DNA, 19 bp, Mus musculus
  siRNA target sequence for Ap2b1 (NM_027915.1,2765-2783).
ctcactaatggcatttgga

SEQ ID NO: 731451 - DNA, 19 bp, Mus musculus
  siRNA target sequence for Ap2b1 (NM_027915.1,2806-2824).
gccaggaaaccccaattat

SEQ ID NO: 731452 - DNA, 19 bp, Mus musculus
  siRNA target sequence for Ap2b1 (NM_027915.1,2852-2870).
gaagtctctcagtacatct

SEQ ID NO: 731453 - DNA, 19 bp, Mus musculus
  siRNA target sequence for Ap2b1 (NM_027915.1,2876-2894).
gtctacgacagcattttga

SEQ ID NO: 731454 - DNA, 19 bp, Mus musculus
  siRNA target sequence for Ap2b1 (NM_027915.1,2878-2896).
ctacgacagcattttgaaa

SEQ ID NO: 731455 - DNA, 19 bp, Mus musculus
  siRNA target sequence for 1300007L22Rik (NM_027917.1,300-318).
cgagcgcctcccttaccta

SEQ ID NO: 731456 - DNA, 19 bp, Mus musculus
  siRNA target sequence for 1300007L22Rik (NM_027917.1,813-831).
ctctgagccaggcaaatta

SEQ ID NO: 731457 - DNA, 19 bp, Mus musculus
  siRNA target sequence for 1300007L22Rik (NM_027917.1,868-886).
gacttgagaaaagattatt

SEQ ID NO: 731458 - DNA, 19 bp, Mus musculus
  siRNA target sequence for 1300007L22Rik (NM_027917.1,1045-1063).
ccctgcaagggttcagaaa

SEQ ID NO: 731459 - DNA, 19 bp, Mus musculus
  siRNA target sequence for 1300007L22Rik (NM_027917.1,1143-1161).
ctcctaccggcagtatgaa

SEQ ID NO: 731460 - DNA, 19 bp, Mus musculus
  siRNA target sequence for 1300007L22Rik (NM_027917.1,1145-1163).
cctaccggcagtatgaaaa

SEQ ID NO: 731461 - DNA, 19 bp, Mus musculus
  siRNA target sequence for 1300007L22Rik (NM_027917.1,1164-1182).
cgacttaagcaaaaaagct

SEQ ID NO: 731462 - DNA, 19 bp, Mus musculus
  siRNA target sequence for 1300007L22Rik (NM_027917.1,1323-1341).
cccaacctttgacactaat

SEQ ID NO: 731463 - DNA, 19 bp, Mus musculus
  siRNA target sequence for 1300007L22Rik (NM_027917.1,1388-1406).
ctcccccagtcgatgtctt

SEQ ID NO: 731464 - DNA, 19 bp, Mus musculus
  siRNA target sequence for 1300007L22Rik (NM_027917.1,1455-1473).
gacttggggccagtttgat

SEQ ID NO: 731465 - DNA, 19 bp, Mus musculus
  siRNA target sequence for 1300007L22Rik (NM_027917.1,1487-1505).
ggcctagtcggcattttga

SEQ ID NO: 731466 - DNA, 19 bp, Mus musculus
  siRNA target sequence for 1300007L22Rik (NM_027917.1,1539-1557).
ctctttgagccgtactctt

SEQ ID NO: 731467 - DNA, 19 bp, Mus musculus
  siRNA target sequence for 1300007L22Rik (NM_027917.1,1593-1611).
gctggatgggctttttcct

SEQ ID NO: 731468 - DNA, 19 bp, Mus musculus
  siRNA target sequence for 1300007L22Rik (NM_027917.1,1759-1777).
cccgaccctgaccaatcaa

SEQ ID NO: 731469 - DNA, 19 bp, Mus musculus
  siRNA target sequence for 1300007L22Rik (NM_027917.1,1761-1779).
cgaccctgaccaatcaagt

SEQ ID NO: 731470 - DNA, 19 bp, Mus musculus
  siRNA target sequence for 1300007L22Rik (NM_027917.1,2030-2048).
gtcgcctggtccgtgtaaa

SEQ ID NO: 731471 - DNA, 19 bp, Mus musculus
  siRNA target sequence for 1300007L22Rik (NM_027917.1,2033-2051).
gcctggtccgtgtaaacct

SEQ ID NO: 731472 - DNA, 19 bp, Mus musculus
  siRNA target sequence for 1300007L22Rik (NM_027917.1,2129-2147).
gacagcaagaagaagctaa

SEQ ID NO: 731473 - DNA, 19 bp, Mus musculus
  siRNA target sequence for 1300007L22Rik (NM_027917.1,2218-2236).
gagcatctgcgctcctatt

SEQ ID NO: 731474 - DNA, 19 bp, Mus musculus
  siRNA target sequence for 1300007L22Rik (NM_027917.1,2220-2238).
gcatctgcgctcctattgt

SEQ ID NO: 731475 - DNA, 19 bp, Mus musculus
  siRNA target sequence for 1300007L22Rik (NM_027917.1,2290-2308).
gatcgaatccggttcctta

SEQ ID NO: 731476 - DNA, 19 bp, Mus musculus
  siRNA target sequence for 1300007L22Rik (NM_027917.1,2294-2312).
gaatccggttccttaagga

SEQ ID NO: 731477 - DNA, 19 bp, Mus musculus
  siRNA target sequence for 1300007L22Rik (NM_027917.1,2311-2329).
gaccaactggacactatct

SEQ ID NO: 731478 - DNA, 19 bp, Mus musculus
  siRNA target sequence for 1300007L22Rik (NM_027917.1,2380-2398).
gcaatccgtcctctaaaca

SEQ ID NO: 731479 - DNA, 19 bp, Mus musculus
  siRNA target sequence for 1300007L22Rik (NM_027917.1,2381-2399).
caatccgtcctctaaacaa

SEQ ID NO: 731480 - DNA, 19 bp, Mus musculus
  siRNA target sequence for 1300017K07Rik (NM_027919.1,1608-1626).
gatggagctcggttgatga

SEQ ID NO: 731481 - DNA, 19 bp, Mus musculus
  siRNA target sequence for 1300017K07Rik (NM_027919.1,1731-1749).
gttggcggatccaaagact

SEQ ID NO: 731482 - DNA, 19 bp, Mus musculus
  siRNA target sequence for 1300017K07Rik (NM_027919.1,1735-1753).
gcggatccaaagacttcat

SEQ ID NO: 731483 - DNA, 19 bp, Mus musculus
  siRNA target sequence for 1300017E09Rik (NM_027920.3,566-584).
gagtcatccaagcaacatt

SEQ ID NO: 731484 - DNA, 19 bp, Mus musculus
  siRNA target sequence for 1300017E09Rik (NM_027920.3,831-849).
gagaccaagctgaaacctt

SEQ ID NO: 731485 - DNA, 19 bp, Mus musculus
  siRNA target sequence for 1300017E09Rik (NM_027920.3,913-931).
ccttccatgtcattgctat

SEQ ID NO: 731486 - DNA, 19 bp, Mus musculus
  siRNA target sequence for 1300017E09Rik (NM_027920.3,1060-1078).
ctggaggacttctctttat

SEQ ID NO: 731487 - DNA, 19 bp, Mus musculus
  siRNA target sequence for 1300017E09Rik (NM_027920.3,1090-1108).
gcaaggtgtacctacagtt

SEQ ID NO: 731488 - DNA, 19 bp, Mus musculus
  siRNA target sequence for 1300017E09Rik (NM_027920.3,1091-1109).
caaggtgtacctacagtta

SEQ ID NO: 731489 - DNA, 19 bp, Mus musculus
  siRNA target sequence for 1300017E09Rik (NM_027920.3,1095-1113).
gtgtacctacagttatgga

SEQ ID NO: 731490 - DNA, 19 bp, Mus musculus
  siRNA target sequence for 1300017E09Rik (NM_027920.3,1126-1144).
cttacaatagagtgatcta

SEQ ID NO: 731491 - DNA, 19 bp, Mus musculus
  siRNA target sequence for 1300017E09Rik (NM_027920.3,1227-1245).
ggacatggaatgtgtcatt

SEQ ID NO: 731492 - DNA, 19 bp, Mus musculus
  siRNA target sequence for 1300017E09Rik (NM_027920.3,1282-1300).
ctggagcagaaattattaa

SEQ ID NO: 731493 - DNA, 19 bp, Mus musculus
  siRNA target sequence for 1300017E09Rik (NM_027920.3,1285-1303).
gagcagaaattattaacgt

SEQ ID NO: 731494 - DNA, 19 bp, Mus musculus
  siRNA target sequence for 1110007C02Rik (NM_027923.1,112-130).
catctgctaaggaggatta

SEQ ID NO: 731495 - DNA, 19 bp, Mus musculus
  siRNA target sequence for 1110007C02Rik (NM_027923.1,153-171).
caagattgtggctatatct

SEQ ID NO: 731496 - DNA, 19 bp, Mus musculus
  siRNA target sequence for 1110007C02Rik (NM_027923.1,200-218).
ctcaagcagtggcaagaaa

SEQ ID NO: 731497 - DNA, 19 bp, Mus musculus
  siRNA target sequence for 1110007C02Rik (NM_027923.1,366-384).
ggagaatgaggatacacta

SEQ ID NO: 731498 - DNA, 19 bp, Mus musculus
  siRNA target sequence for 1110007C02Rik (NM_027923.1,373-391).
gaggatacactatttgact

SEQ ID NO: 731499 - DNA, 19 bp, Mus musculus
  siRNA target sequence for 1110007C02Rik (NM_027923.1,405-423).
cagaccctcatacatctta

SEQ ID NO: 731500 - DNA, 19 bp, Mus musculus
  siRNA target sequence for 2610016C23Rik (NM_027930.1,104-122).
ccaacgaacagcgttttct

SEQ ID NO: 731501 - DNA, 19 bp, Mus musculus
  siRNA target sequence for 2610016C23Rik (NM_027930.1,105-123).
caacgaacagcgttttctt

SEQ ID NO: 731502 - DNA, 19 bp, Mus musculus
  siRNA target sequence for 2610016C23Rik (NM_027930.1,108-126).
cgaacagcgttttcttgaa

SEQ ID NO: 731503 - DNA, 19 bp, Mus musculus
  siRNA target sequence for 2610016C23Rik (NM_027930.1,141-159).
gtctttcattctaaatata

SEQ ID NO: 731504 - DNA, 19 bp, Mus musculus
  siRNA target sequence for 2610016C23Rik (NM_027930.1,147-165).
cattctaaatatattaaga

SEQ ID NO: 731505 - DNA, 19 bp, Mus musculus
  siRNA target sequence for 2610016C23Rik (NM_027930.1,164-182).
gaaacgtgctggaatattt

SEQ ID NO: 731506 - DNA, 19 bp, Mus musculus
  siRNA target sequence for 2610016C23Rik (NM_027930.1,191-209).
ccgtagaccaggatttgct

SEQ ID NO: 731507 - DNA, 19 bp, Mus musculus
  siRNA target sequence for 2610016C23Rik (NM_027930.1,198-216).
ccaggatttgctgatttgt

SEQ ID NO: 731508 - DNA, 19 bp, Mus musculus
  siRNA target sequence for 2610016C23Rik (NM_027930.1,233-251).
ggtcagctcggagtattgt

SEQ ID NO: 731509 - DNA, 19 bp, Mus musculus
  siRNA target sequence for 2610016C23Rik (NM_027930.1,234-252).
gtcagctcggagtattgtt

SEQ ID NO: 731510 - DNA, 19 bp, Mus musculus
  siRNA target sequence for 2610016C23Rik (NM_027930.1,239-257).
ctcggagtattgttcgtat

SEQ ID NO: 731511 - DNA, 19 bp, Mus musculus
  siRNA target sequence for 2610016C23Rik (NM_027930.1,241-259).
cggagtattgttcgtatta

SEQ ID NO: 731512 - DNA, 19 bp, Mus musculus
  siRNA target sequence for 2610016C23Rik (NM_027930.1,243-261).
gagtattgttcgtattatt

SEQ ID NO: 731513 - DNA, 19 bp, Mus musculus
  siRNA target sequence for 2610016C23Rik (NM_027930.1,262-280).
gggagaaggcttcctttaa

SEQ ID NO: 731514 - DNA, 19 bp, Mus musculus
  siRNA target sequence for 2610016C23Rik (NM_027930.1,324-342).
ctctacggagtctgatgat

SEQ ID NO: 731515 - DNA, 19 bp, Mus musculus
  siRNA target sequence for 2610016C23Rik (NM_027930.1,326-344).
ctacggagtctgatgatta

SEQ ID NO: 731516 - DNA, 19 bp, Mus musculus
  siRNA target sequence for 2610016C23Rik (NM_027930.1,333-351).
gtctgatgattatgaactt

SEQ ID NO: 731517 - DNA, 19 bp, Mus musculus
  siRNA target sequence for 2610016C23Rik (NM_027930.1,359-377).
catcttttgctgacgtttt

SEQ ID NO: 731518 - DNA, 19 bp, Mus musculus
  siRNA target sequence for 2610016C23Rik (NM_027930.1,402-420).
cagttgtctcagatttcga

SEQ ID NO: 731519 - DNA, 19 bp, Mus musculus
  siRNA target sequence for 2610016C23Rik (NM_027930.1,500-518).
ctggtctaagacagaacaa

SEQ ID NO: 731520 - DNA, 19 bp, Mus musculus
  siRNA target sequence for 2610016C23Rik (NM_027930.1,527-545).
cagacgatctgcctgtaaa

SEQ ID NO: 731521 - DNA, 19 bp, Mus musculus
  siRNA target sequence for 2610016C23Rik (NM_027930.1,564-582).
gatagctgcccttgaagat

SEQ ID NO: 731522 - DNA, 19 bp, Mus musculus
  siRNA target sequence for 2610016C23Rik (NM_027930.1,816-834).
gcctggatctgccaataca

SEQ ID NO: 731523 - DNA, 19 bp, Mus musculus
  siRNA target sequence for 2610016C23Rik (NM_027930.1,818-836).
ctggatctgccaatacaca

SEQ ID NO: 731524 - DNA, 19 bp, Mus musculus
  siRNA target sequence for 2610016C23Rik (NM_027930.1,833-851).
cacatgacatagatagtct

SEQ ID NO: 731525 - DNA, 19 bp, Mus musculus
  siRNA target sequence for 2610016C23Rik (NM_027930.1,871-889).
cagctctcaggtgttaaga

SEQ ID NO: 731526 - DNA, 19 bp, Mus musculus
  siRNA target sequence for 2610016C23Rik (NM_027930.1,874-892).
ctctcaggtgttaagaaga

SEQ ID NO: 731527 - DNA, 19 bp, Mus musculus
  siRNA target sequence for 2610016C23Rik (NM_027930.1,1004-1022).
gtggcagacccgttcagaa

SEQ ID NO: 731528 - DNA, 19 bp, Mus musculus
  siRNA target sequence for 2610016C23Rik (NM_027930.1,1026-1044).
gaagagacggagttcagaa

SEQ ID NO: 731529 - DNA, 19 bp, Mus musculus
  siRNA target sequence for 2610016C23Rik (NM_027930.1,1051-1069).
ccagtgtctttaatatcta

SEQ ID NO: 731530 - DNA, 19 bp, Mus musculus
  siRNA target sequence for 2610016C23Rik (NM_027930.1,1091-1109).
catttcaagatgattcctt

SEQ ID NO: 731531 - DNA, 19 bp, Mus musculus
  siRNA target sequence for 2610016C23Rik (NM_027930.1,1096-1114).
caagatgattcctttgaca

SEQ ID NO: 731532 - DNA, 19 bp, Mus musculus
  siRNA target sequence for 2610016C23Rik (NM_027930.1,1134-1152).
gtgttctccgttttctagt

SEQ ID NO: 731533 - DNA, 19 bp, Mus musculus
  siRNA target sequence for Phf7 (NM_027949.1,614-632).
ccaagattgagaaaaacta

SEQ ID NO: 731534 - DNA, 19 bp, Mus musculus
  siRNA target sequence for Phf7 (NM_027949.1,752-770).
gtccattatttctgtctta

SEQ ID NO: 731535 - DNA, 19 bp, Mus musculus
  siRNA target sequence for Phf7 (NM_027949.1,808-826).
cagaggtctccatggattt

SEQ ID NO: 731536 - DNA, 19 bp, Mus musculus
  siRNA target sequence for Phf7 (NM_027949.1,810-828).
gaggtctccatggatttat

SEQ ID NO: 731537 - DNA, 19 bp, Mus musculus
  siRNA target sequence for Phf7 (NM_027949.1,851-869).
gcagtacgggcttctaaga

SEQ ID NO: 731538 - DNA, 19 bp, Mus musculus
  siRNA target sequence for Phf7 (NM_027949.1,852-870).
cagtacgggcttctaagaa

SEQ ID NO: 731539 - DNA, 19 bp, Mus musculus
  siRNA target sequence for Phf7 (NM_027949.1,854-872).
gtacgggcttctaagaaga

SEQ ID NO: 731540 - DNA, 19 bp, Mus musculus
  siRNA target sequence for Phf7 (NM_027949.1,857-875).
cgggcttctaagaagatct

SEQ ID NO: 731541 - DNA, 19 bp, Mus musculus
  siRNA target sequence for Phf7 (NM_027949.1,903-921).
ctatcagatgccagaatga

SEQ ID NO: 731542 - DNA, 19 bp, Mus musculus
  siRNA target sequence for Phf7 (NM_027949.1,979-997).
gttttttggagagtacaaa

SEQ ID NO: 731543 - DNA, 19 bp, Mus musculus
  siRNA target sequence for Phf7 (NM_027949.1,1066-1084).
cttgtgttgcgaaaattta

SEQ ID NO: 731544 - DNA, 19 bp, Mus musculus
  siRNA target sequence for Phf7 (NM_027949.1,1086-1104).
cccgaacaagtgttgagaa

SEQ ID NO: 731545 - DNA, 19 bp, Mus musculus
  siRNA target sequence for Phf7 (NM_027949.1,1089-1107).
gaacaagtgttgagaacat

SEQ ID NO: 731546 - DNA, 19 bp, Mus musculus
  siRNA target sequence for Phf7 (NM_027949.1,1111-1129).
gagcccatgctgtagtcaa

SEQ ID NO: 731547 - DNA, 19 bp, Mus musculus
  siRNA target sequence for Phf7 (NM_027949.1,1119-1137).
gctgtagtcaagctatcta

SEQ ID NO: 731548 - DNA, 19 bp, Mus musculus
  siRNA target sequence for Phf7 (NM_027949.1,1120-1138).
ctgtagtcaagctatctat

SEQ ID NO: 731549 - DNA, 19 bp, Mus musculus
  siRNA target sequence for Phf7 (NM_027949.1,1122-1140).
gtagtcaagctatctatca

SEQ ID NO: 731550 - DNA, 19 bp, Mus musculus
  siRNA target sequence for Phf7 (NM_027949.1,1142-1160).
cgcaagtgtatccagaaat

SEQ ID NO: 731551 - DNA, 19 bp, Mus musculus
  siRNA target sequence for Phf7 (NM_027949.1,1293-1311).
ctttctccgagttgtatca

SEQ ID NO: 731552 - DNA, 19 bp, Mus musculus
  siRNA target sequence for Phf7 (NM_027949.1,1312-1330).
gcgctatcggcattgtgat

SEQ ID NO: 731553 - DNA, 19 bp, Mus musculus
  siRNA target sequence for Phf7 (NM_027949.1,1379-1397).
ggacggtggcgcctcattt

SEQ ID NO: 731554 - DNA, 19 bp, Mus musculus
  siRNA target sequence for Phf7 (NM_027949.1,1382-1400).
cggtggcgcctcattttgt

SEQ ID NO: 731555 - DNA, 19 bp, Mus musculus
  siRNA target sequence for Phf7 (NM_027949.1,1384-1402).
gtggcgcctcattttgtgt

SEQ ID NO: 731556 - DNA, 19 bp, Mus musculus
  siRNA target sequence for Phf7 (NM_027949.1,1432-1450).
ggactgctcctctcttaga

SEQ ID NO: 731557 - DNA, 19 bp, Mus musculus
  siRNA target sequence for 1700013H19Rik (NM_027954.1,152-170).
cgcctcccgtggagttaaa

SEQ ID NO: 731558 - DNA, 19 bp, Mus musculus
  siRNA target sequence for 1700013H19Rik (NM_027954.1,288-306).
ctctctggactctagcatt

SEQ ID NO: 731559 - DNA, 19 bp, Mus musculus
  siRNA target sequence for 1700013H19Rik (NM_027954.1,292-310).
ctggactctagcattgaaa

SEQ ID NO: 731560 - DNA, 19 bp, Mus musculus
  siRNA target sequence for 1700013H19Rik (NM_027954.1,373-391).
gcacttatgaccaacttca

SEQ ID NO: 731561 - DNA, 19 bp, Mus musculus
  siRNA target sequence for 1700013H19Rik (NM_027954.1,416-434).
cagatctgacagaaaagtt

SEQ ID NO: 731562 - DNA, 19 bp, Mus musculus
  siRNA target sequence for 1700013H19Rik (NM_027954.1,477-495).
cattcaggaaagactacaa

SEQ ID NO: 731563 - DNA, 19 bp, Mus musculus
  siRNA target sequence for 1700013H19Rik (NM_027954.1,560-578).
ctgtggaaacggtgtacaa

SEQ ID NO: 731564 - DNA, 19 bp, Mus musculus
  siRNA target sequence for 1700013H19Rik (NM_027954.1,605-623).
ccacttgcgaagaacagaa

SEQ ID NO: 731565 - DNA, 19 bp, Mus musculus
  siRNA target sequence for 1700013H19Rik (NM_027954.1,606-624).
cacttgcgaagaacagaat

SEQ ID NO: 731566 - DNA, 19 bp, Mus musculus
  siRNA target sequence for 1700013H19Rik (NM_027954.1,608-626).
cttgcgaagaacagaatta

SEQ ID NO: 731567 - DNA, 19 bp, Mus musculus
  siRNA target sequence for 1700019F09Rik (NM_027963.1,102-120).
ggctgtgatcggcttcaat

SEQ ID NO: 731568 - DNA, 19 bp, Mus musculus
  siRNA target sequence for 1700019F09Rik (NM_027963.1,111-129).
cggcttcaatggacatgtt

SEQ ID NO: 731569 - DNA, 19 bp, Mus musculus
  siRNA target sequence for 1700019F09Rik (NM_027963.1,154-172).
gaccaggagcacctgattt

SEQ ID NO: 731570 - DNA, 19 bp, Mus musculus
  siRNA target sequence for 1700019F09Rik (NM_027963.1,156-174).
ccaggagcacctgatttat

SEQ ID NO: 731571 - DNA, 19 bp, Mus musculus
  siRNA target sequence for 1700019F09Rik (NM_027963.1,190-208).
gtcctcatccaggcaataa

SEQ ID NO: 731572 - DNA, 19 bp, Mus musculus
  siRNA target sequence for 1700019F09Rik (NM_027963.1,365-383).
ctcggctgtcacttcacaa

SEQ ID NO: 731573 - DNA, 19 bp, Mus musculus
  siRNA target sequence for 1700019F09Rik (NM_027963.1,374-392).
cacttcacaagggcaaaat

SEQ ID NO: 731574 - DNA, 19 bp, Mus musculus
  siRNA target sequence for 1700019F09Rik (NM_027963.1,403-421).
gccttttcgcccaatgatt

SEQ ID NO: 731575 - DNA, 19 bp, Mus musculus
  siRNA target sequence for 1700019F09Rik (NM_027963.1,404-422).
ccttttcgcccaatgattt

SEQ ID NO: 731576 - DNA, 19 bp, Mus musculus
  siRNA target sequence for 1700019F09Rik (NM_027963.1,410-428).
cgcccaatgatttgtactt

SEQ ID NO: 731577 - DNA, 19 bp, Mus musculus
  siRNA target sequence for 1700019F09Rik (NM_027963.1,551-569).
ctaggtgccgagatgagat

SEQ ID NO: 731578 - DNA, 19 bp, Mus musculus
  siRNA target sequence for 1700019F09Rik (NM_027963.1,554-572).
ggtgccgagatgagatgtt

SEQ ID NO: 731579 - DNA, 19 bp, Mus musculus
  siRNA target sequence for 1700019F09Rik (NM_027963.1,557-575).
gccgagatgagatgtttgt

SEQ ID NO: 731580 - DNA, 19 bp, Mus musculus
  siRNA target sequence for 1700019F09Rik (NM_027963.1,559-577).
cgagatgagatgtttgtca

SEQ ID NO: 731581 - DNA, 19 bp, Mus musculus
  siRNA target sequence for 1700019F09Rik (NM_027963.1,607-625).
gaactggatcttccaaata

SEQ ID NO: 731582 - DNA, 19 bp, Mus musculus
  siRNA target sequence for 1700019F09Rik (NM_027963.1,610-628).
ctggatcttccaaatagaa

SEQ ID NO: 731583 - DNA, 19 bp, Mus musculus
  siRNA target sequence for 1700019F09Rik (NM_027963.1,613-631).
gatcttccaaatagaaaaa

SEQ ID NO: 731584 - DNA, 19 bp, Mus musculus
  siRNA target sequence for 1700019F09Rik (NM_027963.1,720-738).
caccacaaccggggatatt

SEQ ID NO: 731585 - DNA, 19 bp, Mus musculus
  siRNA target sequence for 1700019F09Rik (NM_027963.1,722-740).
ccacaaccggggatattct

SEQ ID NO: 731586 - DNA, 19 bp, Mus musculus
  siRNA target sequence for 1700019F09Rik (NM_027963.1,725-743).
caaccggggatattctcaa

SEQ ID NO: 731587 - DNA, 19 bp, Mus musculus
  siRNA target sequence for 1700019F09Rik (NM_027963.1,728-746).
ccggggatattctcaaaat

SEQ ID NO: 731588 - DNA, 19 bp, Mus musculus
  siRNA target sequence for 1700019F09Rik (NM_027963.1,730-748).
ggggatattctcaaaatga

SEQ ID NO: 731589 - DNA, 19 bp, Mus musculus
  siRNA target sequence for 1700019F09Rik (NM_027963.1,731-749).
gggatattctcaaaatgaa

SEQ ID NO: 731590 - DNA, 19 bp, Mus musculus
  siRNA target sequence for 1700019F09Rik (NM_027963.1,857-875).
gagctggcttgctgatctt

SEQ ID NO: 731591 - DNA, 19 bp, Mus musculus
  siRNA target sequence for 1700019F09Rik (NM_027963.1,862-880).
ggcttgctgatcttctgta

SEQ ID NO: 731592 - DNA, 19 bp, Mus musculus
  siRNA target sequence for 1700019F09Rik (NM_027963.1,864-882).
cttgctgatcttctgtaaa

SEQ ID NO: 731593 - DNA, 19 bp, Mus musculus
  siRNA target sequence for 1700019F09Rik (NM_027963.1,890-908).
gctacaagcctatcaagaa

SEQ ID NO: 731594 - DNA, 19 bp, Mus musculus
  siRNA target sequence for 1700019F09Rik (NM_027963.1,988-1006).
cacatctaccgcgttaact

SEQ ID NO: 731595 - DNA, 19 bp, Mus musculus
  siRNA target sequence for 1700019F09Rik (NM_027963.1,1178-1196).
cctgccatggcattgactt

SEQ ID NO: 731596 - DNA, 19 bp, Mus musculus
  siRNA target sequence for 1700019F09Rik (NM_027963.1,1181-1199).
gccatggcattgacttcat

SEQ ID NO: 731597 - DNA, 19 bp, Mus musculus
  siRNA target sequence for 1700019F09Rik (NM_027963.1,1270-1288).
cggctgatgtacaccatta

SEQ ID NO: 731598 - DNA, 19 bp, Mus musculus
  siRNA target sequence for 1700019F09Rik (NM_027963.1,1273-1291).
ctgatgtacaccattaaca

SEQ ID NO: 731599 - DNA, 19 bp, Mus musculus
  siRNA target sequence for 1700019F09Rik (NM_027963.1,1306-1324).
ggagtgacggccattgcta

SEQ ID NO: 731600 - DNA, 19 bp, Mus musculus
  siRNA target sequence for 1700019F09Rik (NM_027963.1,1328-1346).
ccagtgactgtaaaaggat

SEQ ID NO: 731601 - DNA, 19 bp, Mus musculus
  siRNA target sequence for 1700019F09Rik (NM_027963.1,1494-1512).
cgatgggacatgcatcatt

SEQ ID NO: 731602 - DNA, 19 bp, Mus musculus
  siRNA target sequence for 1700019F09Rik (NM_027963.1,1495-1513).
gatgggacatgcatcattt

SEQ ID NO: 731603 - DNA, 19 bp, Mus musculus
  siRNA target sequence for 1700019F09Rik (NM_027963.1,1515-1533).
ggacctcgtgcgacttaga

SEQ ID NO: 731604 - DNA, 19 bp, Mus musculus
  siRNA target sequence for 1700019F09Rik (NM_027963.1,1516-1534).
gacctcgtgcgacttagaa

SEQ ID NO: 731605 - DNA, 19 bp, Mus musculus
  siRNA target sequence for 1700019F09Rik (NM_027963.1,1521-1539).
cgtgcgacttagaaggaat

SEQ ID NO: 731606 - DNA, 19 bp, Mus musculus
  siRNA target sequence for 1700019F09Rik (NM_027963.1,1526-1544).
gacttagaaggaatcagat

SEQ ID NO: 731607 - DNA, 19 bp, Mus musculus
  siRNA target sequence for 1700019F09Rik (NM_027963.1,1561-1579).
ctattccagtgtgtttgtt

SEQ ID NO: 731608 - DNA, 19 bp, Mus musculus
  siRNA target sequence for 1700019F09Rik (NM_027963.1,1577-1595).
gttaccacccggaagaatt

SEQ ID NO: 731609 - DNA, 19 bp, Mus musculus
  siRNA target sequence for 1700019F09Rik (NM_027963.1,1586-1604).
cggaagaattccagatcat

SEQ ID NO: 731610 - DNA, 19 bp, Mus musculus
  siRNA target sequence for 1700019F09Rik (NM_027963.1,1695-1713).
caatggtatggatatcact

SEQ ID NO: 731611 - DNA, 19 bp, Mus musculus
  siRNA target sequence for 1700019F09Rik (NM_027963.1,1747-1765).
gaccatctggtcaaagtct

SEQ ID NO: 731612 - DNA, 19 bp, Mus musculus
  siRNA target sequence for 1700019F09Rik (NM_027963.1,1821-1839).
catggccatgcggataagt

SEQ ID NO: 731613 - DNA, 19 bp, Mus musculus
  siRNA target sequence for 1700019F09Rik (NM_027963.1,1838-1856).
gtccaggaaaccagtatat

SEQ ID NO: 731614 - DNA, 19 bp, Mus musculus
  siRNA target sequence for 1700019F09Rik (NM_027963.1,1841-1859).
caggaaaccagtatatcgt

SEQ ID NO: 731615 - DNA, 19 bp, Mus musculus
  siRNA target sequence for 1700019F09Rik (NM_027963.1,1890-1908).
gtggaaatacccatttgct

SEQ ID NO: 731616 - DNA, 19 bp, Mus musculus
  siRNA target sequence for 1700025P14Rik (NM_027964.1,52-70).
gcttcgcggaggctgtaaa

SEQ ID NO: 731617 - DNA, 19 bp, Mus musculus
  siRNA target sequence for 1700025P14Rik (NM_027964.1,62-80).
ggctgtaaagcctcagaaa

SEQ ID NO: 731618 - DNA, 19 bp, Mus musculus
  siRNA target sequence for 1700025P14Rik (NM_027964.1,63-81).
gctgtaaagcctcagaaaa

SEQ ID NO: 731619 - DNA, 19 bp, Mus musculus
  siRNA target sequence for 1700025P14Rik (NM_027964.1,77-95).
gaaaagcgaagacacttaa

SEQ ID NO: 731620 - DNA, 19 bp, Mus musculus
  siRNA target sequence for 1700025P14Rik (NM_027964.1,127-145).
gctgagtagcagcatctat

SEQ ID NO: 731621 - DNA, 19 bp, Mus musculus
  siRNA target sequence for 1700025P14Rik (NM_027964.1,243-261).
gctgccccacgtttctgaa

SEQ ID NO: 731622 - DNA, 19 bp, Mus musculus
  siRNA target sequence for 1700025P14Rik (NM_027964.1,269-287).
gaactgtgcaagcacatat

SEQ ID NO: 731623 - DNA, 19 bp, Mus musculus
  siRNA target sequence for 1700025P14Rik (NM_027964.1,272-290).
ctgtgcaagcacatatgct

SEQ ID NO: 731624 - DNA, 19 bp, Mus musculus
  siRNA target sequence for 1700025P14Rik (NM_027964.1,281-299).
cacatatgctgggtgttat

SEQ ID NO: 731625 - DNA, 19 bp, Mus musculus
  siRNA target sequence for 1700025P14Rik (NM_027964.1,288-306).
gctgggtgttattgaaaaa

SEQ ID NO: 731626 - DNA, 19 bp, Mus musculus
  siRNA target sequence for 1700025P14Rik (NM_027964.1,310-328).
caagcttccaaggaatcat

SEQ ID NO: 731627 - DNA, 19 bp, Mus musculus
  siRNA target sequence for 1700025P14Rik (NM_027964.1,348-366).
gtcttaccgaaggagaaat

SEQ ID NO: 731628 - DNA, 19 bp, Mus musculus
  siRNA target sequence for 1700025P14Rik (NM_027964.1,472-490).
caatgcaggggatatctgt

SEQ ID NO: 731629 - DNA, 19 bp, Mus musculus
  siRNA target sequence for 1700025P14Rik (NM_027964.1,479-497).
ggggatatctgtcctattt

SEQ ID NO: 731630 - DNA, 19 bp, Mus musculus
  siRNA target sequence for 1700025P14Rik (NM_027964.1,543-561).
gatttggttgtggcaataa

SEQ ID NO: 731631 - DNA, 19 bp, Mus musculus
  siRNA target sequence for 1700025P14Rik (NM_027964.1,552-570).
gtggcaataatgttcacat

SEQ ID NO: 731632 - DNA, 19 bp, Mus musculus
  siRNA target sequence for 1700025P14Rik (NM_027964.1,636-654).
cgctgtgcagagaagagtt

SEQ ID NO: 731633 - DNA, 19 bp, Mus musculus
  siRNA target sequence for 1700025P14Rik (NM_027964.1,656-674).
gcaccactaaaagttatct

SEQ ID NO: 731634 - DNA, 19 bp, Mus musculus
  siRNA target sequence for 1700025P14Rik (NM_027964.1,657-675).
caccactaaaagttatctt

SEQ ID NO: 731635 - DNA, 19 bp, Mus musculus
  siRNA target sequence for 1700025P14Rik (NM_027964.1,680-698).
gagttcaaaaactctaaca

SEQ ID NO: 731636 - DNA, 19 bp, Mus musculus
  siRNA target sequence for 1700025P14Rik (NM_027964.1,682-700).
gttcaaaaactctaacaaa

SEQ ID NO: 731637 - DNA, 19 bp, Mus musculus
  siRNA target sequence for 1700025P14Rik (NM_027964.1,743-761).
ggaattccctgtaataact

SEQ ID NO: 731638 - DNA, 19 bp, Mus musculus
  siRNA target sequence for 1700025P14Rik (NM_027964.1,751-769).
ctgtaataactgtaaccaa

SEQ ID NO: 731639 - DNA, 19 bp, Mus musculus
  siRNA target sequence for 1700025P14Rik (NM_027964.1,869-887).
gcgtcccgtgagaaaagaa

SEQ ID NO: 731640 - DNA, 19 bp, Mus musculus
  siRNA target sequence for 1700025P14Rik (NM_027964.1,915-933).
gatcagaagtcatgaaata

SEQ ID NO: 731641 - DNA, 19 bp, Mus musculus
  siRNA target sequence for 1700025P14Rik (NM_027964.1,920-938).
gaagtcatgaaatatttaa

SEQ ID NO: 731642 - DNA, 19 bp, Mus musculus
  siRNA target sequence for 1700025P14Rik (NM_027964.1,960-978).
caaagccgggatgttttca

SEQ ID NO: 731643 - DNA, 19 bp, Mus musculus
  siRNA target sequence for 1700025P14Rik (NM_027964.1,964-982).
gccgggatgttttcaagaa

SEQ ID NO: 731644 - DNA, 19 bp, Mus musculus
  siRNA target sequence for 1700025P14Rik (NM_027964.1,985-1003).
gcagggtcagttttacaca

SEQ ID NO: 731645 - DNA, 19 bp, Mus musculus
  siRNA target sequence for 1700025P14Rik (NM_027964.1,1002-1020).
caccgaagcatgttgtaaa

SEQ ID NO: 731646 - DNA, 19 bp, Mus musculus
  siRNA target sequence for 1700025P14Rik (NM_027964.1,1004-1022).
ccgaagcatgttgtaaagt

SEQ ID NO: 731647 - DNA, 19 bp, Mus musculus
  siRNA target sequence for 1700025P14Rik (NM_027964.1,1006-1024).
gaagcatgttgtaaagtct

SEQ ID NO: 731648 - DNA, 19 bp, Mus musculus
  siRNA target sequence for 1700025P14Rik (NM_027964.1,1023-1041).
ctctgcctctcctgatgat

SEQ ID NO: 731649 - DNA, 19 bp, Mus musculus
  siRNA target sequence for 1700025P14Rik (NM_027964.1,1025-1043).
ctgcctctcctgatgatta

SEQ ID NO: 731650 - DNA, 19 bp, Mus musculus
  siRNA target sequence for 1700025P14Rik (NM_027964.1,1027-1045).
gcctctcctgatgattaca

SEQ ID NO: 731651 - DNA, 19 bp, Mus musculus
  siRNA target sequence for 1700025P14Rik (NM_027964.1,1028-1046).
cctctcctgatgattacaa

SEQ ID NO: 731652 - DNA, 19 bp, Mus musculus
  siRNA target sequence for 1700025P14Rik (NM_027964.1,1029-1047).
ctctcctgatgattacaaa

SEQ ID NO: 731653 - DNA, 19 bp, Mus musculus
  siRNA target sequence for 1700025P14Rik (NM_027964.1,1031-1049).
ctcctgatgattacaaaga

SEQ ID NO: 731654 - DNA, 19 bp, Mus musculus
  siRNA target sequence for 1700025P14Rik (NM_027964.1,1082-1100).
cgactttgcttgaaatcat

SEQ ID NO: 731655 - DNA, 19 bp, Mus musculus
  siRNA target sequence for 1700025P14Rik (NM_027964.1,1083-1101).
gactttgcttgaaatcatt

SEQ ID NO: 731656 - DNA, 19 bp, Mus musculus
  siRNA target sequence for 1700025P14Rik (NM_027964.1,1175-1193).
ctccacaagtgcaattcat

SEQ ID NO: 731657 - DNA, 19 bp, Mus musculus
  siRNA target sequence for 1700025P14Rik (NM_027964.1,1267-1285).
gttggcttcaagcaaagat

SEQ ID NO: 731658 - DNA, 19 bp, Mus musculus
  siRNA target sequence for 1700025P14Rik (NM_027964.1,1303-1321).
gcagcaagagccaaaactt

SEQ ID NO: 731659 - DNA, 19 bp, Mus musculus
  siRNA target sequence for 1700025P14Rik (NM_027964.1,1312-1330).
gccaaaactttttattcct

SEQ ID NO: 731660 - DNA, 19 bp, Mus musculus
  siRNA target sequence for 1700025P14Rik (NM_027964.1,1329-1347).
ctggtactggattagtttt

SEQ ID NO: 731661 - DNA, 19 bp, Mus musculus
  siRNA target sequence for 1700025P14Rik (NM_027964.1,1331-1349).
ggtactggattagttttaa

SEQ ID NO: 731662 - DNA, 19 bp, Mus musculus
  siRNA target sequence for 1700025P14Rik (NM_027964.1,1383-1401).
cccagtataattctaaagt

SEQ ID NO: 731663 - DNA, 19 bp, Mus musculus
  siRNA target sequence for 1700025P14Rik (NM_027964.1,1400-1418).
gtattgactacacttcaaa

SEQ ID NO: 731664 - DNA, 19 bp, Mus musculus
  siRNA target sequence for 1700025P14Rik (NM_027964.1,1454-1472).
gacctatgctcagtcaaat

SEQ ID NO: 731665 - DNA, 19 bp, Mus musculus
  siRNA target sequence for 1700025P14Rik (NM_027964.1,1461-1479).
gctcagtcaaattagataa

SEQ ID NO: 731666 - DNA, 19 bp, Mus musculus
  siRNA target sequence for 1700025P14Rik (NM_027964.1,1462-1480).
ctcagtcaaattagataat

SEQ ID NO: 731667 - DNA, 19 bp, Mus musculus
  siRNA target sequence for 1700025P14Rik (NM_027964.1,1489-1507).
cagaaaattagtttttgga

SEQ ID NO: 731668 - DNA, 19 bp, Mus musculus
  siRNA target sequence for 1700025P14Rik (NM_027964.1,1528-1546).
ccccacatatctgaaaaat

SEQ ID NO: 731669 - DNA, 19 bp, Mus musculus
  siRNA target sequence for 1700025P14Rik (NM_027964.1,1592-1610).
cctcataagaacattattt

SEQ ID NO: 731670 - DNA, 19 bp, Mus musculus
  siRNA target sequence for 1700025P14Rik (NM_027964.1,1629-1647).
gcccacatatctatgaaaa

SEQ ID NO: 731671 - DNA, 19 bp, Mus musculus
  siRNA target sequence for 1700025P14Rik (NM_027964.1,1652-1670).
catattggtcagagtcaaa

SEQ ID NO: 731672 - DNA, 19 bp, Mus musculus
  siRNA target sequence for 1700025P14Rik (NM_027964.1,1658-1676).
ggtcagagtcaaaagacaa

SEQ ID NO: 731673 - DNA, 19 bp, Mus musculus
  siRNA target sequence for 1700025P14Rik (NM_027964.1,1672-1690).
gacaagcagaggttacgaa

SEQ ID NO: 731674 - DNA, 19 bp, Mus musculus
  siRNA target sequence for 1700025P14Rik (NM_027964.1,1677-1695).
gcagaggttacgaacatat

SEQ ID NO: 731675 - DNA, 19 bp, Mus musculus
  siRNA target sequence for 1700025P14Rik (NM_027964.1,1680-1698).
gaggttacgaacatataaa

SEQ ID NO: 731676 - DNA, 19 bp, Mus musculus
  siRNA target sequence for 1700025P14Rik (NM_027964.1,1682-1700).
ggttacgaacatataaact

SEQ ID NO: 731677 - DNA, 19 bp, Mus musculus
  siRNA target sequence for 1700025P14Rik (NM_027964.1,1683-1701).
gttacgaacatataaacta

SEQ ID NO: 731678 - DNA, 19 bp, Mus musculus
  siRNA target sequence for 1700025P14Rik (NM_027964.1,1725-1743).
ctagattaagacaacacaa

SEQ ID NO: 731679 - DNA, 19 bp, Mus musculus
  siRNA target sequence for 1700025P14Rik (NM_027964.1,1769-1787).
gatttaaatcttactatca

SEQ ID NO: 731680 - DNA, 19 bp, Mus musculus
  siRNA target sequence for 1700025P14Rik (NM_027964.1,1792-1810).
gggtacaaccaaacttagt

SEQ ID NO: 731681 - DNA, 19 bp, Mus musculus
  siRNA target sequence for 1700025P14Rik (NM_027964.1,1793-1811).
ggtacaaccaaacttagtt

SEQ ID NO: 731682 - DNA, 19 bp, Mus musculus
  siRNA target sequence for 1700025P14Rik (NM_027964.1,1794-1812).
gtacaaccaaacttagttt

SEQ ID NO: 731683 - DNA, 19 bp, Mus musculus
  siRNA target sequence for 1700025P14Rik (NM_027964.1,1833-1851).
ccatggggaaagttagaca

SEQ ID NO: 731684 - DNA, 19 bp, Mus musculus
  siRNA target sequence for 1700025P14Rik (NM_027964.1,1880-1898).
gcgtatccccctttacaaa

SEQ ID NO: 731685 - DNA, 19 bp, Mus musculus
  siRNA target sequence for 1700025P14Rik (NM_027964.1,1882-1900).
gtatccccctttacaaaca

SEQ ID NO: 731686 - DNA, 19 bp, Mus musculus
  siRNA target sequence for 1700025P14Rik (NM_027964.1,1888-1906).
ccctttacaaacacaaaat

SEQ ID NO: 731687 - DNA, 19 bp, Mus musculus
  siRNA target sequence for 2310022G12Rik (NM_027984.1,393-411).
gccaggtgaagaacattgt

SEQ ID NO: 731688 - DNA, 19 bp, Mus musculus
  siRNA target sequence for 2310022G12Rik (NM_027984.1,394-412).
ccaggtgaagaacattgtt

SEQ ID NO: 731689 - DNA, 19 bp, Mus musculus
  siRNA target sequence for 2310022G12Rik (NM_027984.1,659-677).
cgcgagaacctctacacta

SEQ ID NO: 731690 - DNA, 19 bp, Mus musculus
  siRNA target sequence for 2310022G12Rik (NM_027984.1,888-906).
ggggctccccctcttctta

SEQ ID NO: 731691 - DNA, 19 bp, Mus musculus
  siRNA target sequence for 2310022G12Rik (NM_027984.1,1092-1110).
gccggcaagagcatgagaa

SEQ ID NO: 731692 - DNA, 19 bp, Mus musculus
  siRNA target sequence for 2310022G12Rik (NM_027984.1,1425-1443).
gccagccttgggatttgct

SEQ ID NO: 731693 - DNA, 19 bp, Mus musculus
  siRNA target sequence for 2310022G12Rik (NM_027984.1,1436-1454).
gatttgcttcctactcttt

SEQ ID NO: 731694 - DNA, 19 bp, Mus musculus
  siRNA target sequence for 2310022G12Rik (NM_027984.1,1717-1735).
ggagctagacccatttgga

SEQ ID NO: 731695 - DNA, 19 bp, Mus musculus
  siRNA target sequence for 2310022G12Rik (NM_027984.1,2001-2019).
gcaggccgaccctaaacca

SEQ ID NO: 731696 - DNA, 19 bp, Mus musculus
  siRNA target sequence for 2310033C13Rik (NM_027985.1,320-338).
cgcgccaagacctcaactt

SEQ ID NO: 731697 - DNA, 19 bp, Mus musculus
  siRNA target sequence for 2310033C13Rik (NM_027985.1,321-339).
gcgccaagacctcaacttt

SEQ ID NO: 731698 - DNA, 19 bp, Mus musculus
  siRNA target sequence for 2310033C13Rik (NM_027985.1,382-400).
gccgtgcacctgattctct

SEQ ID NO: 731699 - DNA, 19 bp, Mus musculus
  siRNA target sequence for 2310033C13Rik (NM_027985.1,383-401).
ccgtgcacctgattctcta

SEQ ID NO: 731700 - DNA, 19 bp, Mus musculus
  siRNA target sequence for 2310033C13Rik (NM_027985.1,384-402).
cgtgcacctgattctctat

SEQ ID NO: 731701 - DNA, 19 bp, Mus musculus
  siRNA target sequence for 2310033C13Rik (NM_027985.1,584-602).
gcccagtggagaagtttgt

SEQ ID NO: 731702 - DNA, 19 bp, Mus musculus
  siRNA target sequence for 2310033C13Rik (NM_027985.1,622-640).
cccttgctgtccatcaatt

SEQ ID NO: 731703 - DNA, 19 bp, Mus musculus
  siRNA target sequence for 2310033C13Rik (NM_027985.1,624-642).
cttgctgtccatcaattca

SEQ ID NO: 731704 - DNA, 19 bp, Mus musculus
  siRNA target sequence for 2310033C13Rik (NM_027985.1,673-691).
cttcgagccttcatcctta

SEQ ID NO: 731705 - DNA, 19 bp, Mus musculus
  siRNA target sequence for 2310033C13Rik (NM_027985.1,776-794).
ctcgaaacatggagaagat

SEQ ID NO: 731706 - DNA, 19 bp, Mus musculus
  siRNA target sequence for 2310033C13Rik (NM_027985.1,858-876).
ccgcttgatacccctaaaa

SEQ ID NO: 731707 - DNA, 19 bp, Mus musculus
  siRNA target sequence for 2310033C13Rik (NM_027985.1,919-937).
gagcgagcgcataagaaca

SEQ ID NO: 731708 - DNA, 19 bp, Mus musculus
  siRNA target sequence for 2310010M24Rik (NM_027990.1,497-515).
caatcagggtggacagaat

SEQ ID NO: 731709 - DNA, 19 bp, Mus musculus
  siRNA target sequence for 2310010M24Rik (NM_027990.1,519-537).
gctcctctgccacattcta

SEQ ID NO: 731710 - DNA, 19 bp, Mus musculus
  siRNA target sequence for 2310010M24Rik (NM_027990.1,578-596).
gggtgtttgcaaagaacat

SEQ ID NO: 731711 - DNA, 19 bp, Mus musculus
  siRNA target sequence for 2310010M24Rik (NM_027990.1,640-658).
ccaaacagtttcaagtgtt

SEQ ID NO: 731712 - DNA, 19 bp, Mus musculus
  siRNA target sequence for 2310010M24Rik (NM_027990.1,641-659).
caaacagtttcaagtgttt

SEQ ID NO: 731713 - DNA, 19 bp, Mus musculus
  siRNA target sequence for 2310010M24Rik (NM_027990.1,666-684).
cgaaaatgcaggggataat

SEQ ID NO: 731714 - DNA, 19 bp, Mus musculus
  siRNA target sequence for 2310010M24Rik (NM_027990.1,667-685).
gaaaatgcaggggataatt

SEQ ID NO: 731715 - DNA, 19 bp, Mus musculus
  siRNA target sequence for 2310010M24Rik (NM_027990.1,735-753).
gtattgtttgacagttcat

SEQ ID NO: 731716 - DNA, 19 bp, Mus musculus
  siRNA target sequence for 2310010M24Rik (NM_027990.1,740-758).
gtttgacagttcatcactt

SEQ ID NO: 731717 - DNA, 19 bp, Mus musculus
  siRNA target sequence for 2310010M24Rik (NM_027990.1,759-777).
caccagccacggaagaagt

SEQ ID NO: 731718 - DNA, 19 bp, Mus musculus
  siRNA target sequence for 2310010M24Rik (NM_027990.1,792-810).
gaagtgtgcctctaaaaat

SEQ ID NO: 731719 - DNA, 19 bp, Mus musculus
  siRNA target sequence for 2310010M24Rik (NM_027990.1,869-887).
cttgctgtgaaggaatgat

SEQ ID NO: 731720 - DNA, 19 bp, Mus musculus
  siRNA target sequence for 2310010M24Rik (NM_027990.1,923-941).
cagtcttcgctgtaatgca

SEQ ID NO: 731721 - DNA, 19 bp, Mus musculus
  siRNA target sequence for 2310036D22Rik (NM_027992.1,263-281).
ggctatgatggcgttacat

SEQ ID NO: 731722 - DNA, 19 bp, Mus musculus
  siRNA target sequence for 2310036D22Rik (NM_027992.1,274-292).
cgttacatcgacagacaat

SEQ ID NO: 731723 - DNA, 19 bp, Mus musculus
  siRNA target sequence for 2310036D22Rik (NM_027992.1,275-293).
gttacatcgacagacaata

SEQ ID NO: 731724 - DNA, 19 bp, Mus musculus
  siRNA target sequence for 2310036D22Rik (NM_027992.1,282-300).
cgacagacaatatgagaaa

SEQ ID NO: 731725 - DNA, 19 bp, Mus musculus
  siRNA target sequence for 2310036D22Rik (NM_027992.1,287-305).
gacaatatgagaaatggat

SEQ ID NO: 731726 - DNA, 19 bp, Mus musculus
  siRNA target sequence for 2310036D22Rik (NM_027992.1,370-388).
ggaatttactggaagagat

SEQ ID NO: 731727 - DNA, 19 bp, Mus musculus
  siRNA target sequence for 2310036D22Rik (NM_027992.1,371-389).
gaatttactggaagagata

SEQ ID NO: 731728 - DNA, 19 bp, Mus musculus
  siRNA target sequence for 2310036D22Rik (NM_027992.1,445-463).
ccaactggtggcattgatt

SEQ ID NO: 731729 - DNA, 19 bp, Mus musculus
  siRNA target sequence for 2310036D22Rik (NM_027992.1,452-470).
gtggcattgattccatata

SEQ ID NO: 731730 - DNA, 19 bp, Mus musculus
  siRNA target sequence for 2310036D22Rik (NM_027992.1,454-472).
ggcattgattccatatagt

SEQ ID NO: 731731 - DNA, 19 bp, Mus musculus
  siRNA target sequence for 2310036D22Rik (NM_027992.1,573-591).
gatctattgaggtgaagta

SEQ ID NO: 731732 - DNA, 19 bp, Mus musculus
  siRNA target sequence for 2310036D22Rik (NM_027992.1,576-594).
ctattgaggtgaagtacat

SEQ ID NO: 731733 - DNA, 19 bp, Mus musculus
  siRNA target sequence for 2310036D22Rik (NM_027992.1,599-617).
gtaaaatcagcctatgtca

SEQ ID NO: 731734 - DNA, 19 bp, Mus musculus
  siRNA target sequence for 2310036D22Rik (NM_027992.1,625-643).
cgctgaaaagcgaaccata

SEQ ID NO: 731735 - DNA, 19 bp, Mus musculus
  siRNA target sequence for 2310036D22Rik (NM_027992.1,626-644).
gctgaaaagcgaaccatat

SEQ ID NO: 731736 - DNA, 19 bp, Mus musculus
  siRNA target sequence for 2310036D22Rik (NM_027992.1,627-645).
ctgaaaagcgaaccatata

SEQ ID NO: 731737 - DNA, 19 bp, Mus musculus
  siRNA target sequence for 2310036D22Rik (NM_027992.1,629-647).
gaaaagcgaaccatatatt

SEQ ID NO: 731738 - DNA, 19 bp, Mus musculus
  siRNA target sequence for 2310036D22Rik (NM_027992.1,716-734).
gctcaagtccagttttcaa

SEQ ID NO: 731739 - DNA, 19 bp, Mus musculus
  siRNA target sequence for 2310036D22Rik (NM_027992.1,742-760).
gattggaaaggctcgttta

SEQ ID NO: 731740 - DNA, 19 bp, Mus musculus
  siRNA target sequence for 2310036D22Rik (NM_027992.1,746-764).
ggaaaggctcgtttaaaca

SEQ ID NO: 731741 - DNA, 19 bp, Mus musculus
  siRNA target sequence for 2310036D22Rik (NM_027992.1,747-765).
gaaaggctcgtttaaacaa

SEQ ID NO: 731742 - DNA, 19 bp, Mus musculus
  siRNA target sequence for 2310036D22Rik (NM_027992.1,751-769).
ggctcgtttaaacaacata

SEQ ID NO: 731743 - DNA, 19 bp, Mus musculus
  siRNA target sequence for 2310036D22Rik (NM_027992.1,752-770).
gctcgtttaaacaacataa

SEQ ID NO: 731744 - DNA, 19 bp, Mus musculus
  siRNA target sequence for 2310036D22Rik (NM_027992.1,755-773).
cgtttaaacaacataacta

SEQ ID NO: 731745 - DNA, 19 bp, Mus musculus
  siRNA target sequence for 2310036D22Rik (NM_027992.1,756-774).
gtttaaacaacataactaa

SEQ ID NO: 731746 - DNA, 19 bp, Mus musculus
  siRNA target sequence for 2310036D22Rik (NM_027992.1,828-846).
cagaggaaatgagttacat

SEQ ID NO: 731747 - DNA, 19 bp, Mus musculus
  siRNA target sequence for 2310036D22Rik (NM_027992.1,890-908).
gtactcatgatgcaagtta

SEQ ID NO: 731748 - DNA, 19 bp, Mus musculus
  siRNA target sequence for 2310036D22Rik (NM_027992.1,898-916).
gatgcaagttactgtaaca

SEQ ID NO: 731749 - DNA, 19 bp, Mus musculus
  siRNA target sequence for 2310036D22Rik (NM_027992.1,909-927).
ctgtaacaacagcatactt

SEQ ID NO: 731750 - DNA, 19 bp, Mus musculus
  siRNA target sequence for 2310036D22Rik (NM_027992.1,997-1015).
gttggcccagtctgagtat

SEQ ID NO: 731751 - DNA, 19 bp, Mus musculus
  siRNA target sequence for 2310036D22Rik (NM_027992.1,1001-1019).
gcccagtctgagtatctaa

SEQ ID NO: 731752 - DNA, 19 bp, Mus musculus
  siRNA target sequence for 2310036D22Rik (NM_027992.1,1002-1020).
cccagtctgagtatctaaa

SEQ ID NO: 731753 - DNA, 19 bp, Mus musculus
  siRNA target sequence for 2310036D22Rik (NM_027992.1,1003-1021).
ccagtctgagtatctaaat

SEQ ID NO: 731754 - DNA, 19 bp, Mus musculus
  siRNA target sequence for 2310021M12Rik (NM_027995.1,165-183).
caaccagaacctgtgttta

SEQ ID NO: 731755 - DNA, 19 bp, Mus musculus
  siRNA target sequence for 2310021M12Rik (NM_027995.1,169-187).
cagaacctgtgtttacagt

SEQ ID NO: 731756 - DNA, 19 bp, Mus musculus
  siRNA target sequence for 2310021M12Rik (NM_027995.1,196-214).
cccaggtgccgccactttt

SEQ ID NO: 731757 - DNA, 19 bp, Mus musculus
  siRNA target sequence for 2310021M12Rik (NM_027995.1,198-216).
caggtgccgccacttttct

SEQ ID NO: 731758 - DNA, 19 bp, Mus musculus
  siRNA target sequence for 2310021M12Rik (NM_027995.1,252-270).
catcagaactggtgtttct

SEQ ID NO: 731759 - DNA, 19 bp, Mus musculus
  siRNA target sequence for 2310021M12Rik (NM_027995.1,269-287).
ctacttccgcacactgttt

SEQ ID NO: 731760 - DNA, 19 bp, Mus musculus
  siRNA target sequence for 2310021M12Rik (NM_027995.1,749-767).
cgtgttgcaccgcatcata

SEQ ID NO: 731761 - DNA, 19 bp, Mus musculus
  siRNA target sequence for 2310021M12Rik (NM_027995.1,791-809).
ggatcccgctcttctctat

SEQ ID NO: 731762 - DNA, 19 bp, Mus musculus
  siRNA target sequence for 2310021M12Rik (NM_027995.1,796-814).
ccgctcttctctatcacaa

SEQ ID NO: 731763 - DNA, 19 bp, Mus musculus
  siRNA target sequence for 2310021M12Rik (NM_027995.1,797-815).
cgctcttctctatcacaaa

SEQ ID NO: 731764 - DNA, 19 bp, Mus musculus
  siRNA target sequence for 2310021M12Rik (NM_027995.1,908-926).
gggacaccaagttttccat

SEQ ID NO: 731765 - DNA, 19 bp, Mus musculus
  siRNA target sequence for 2310032K21Rik (NM_028001.1,629-647).
gatctgacgctcaacaagt

SEQ ID NO: 731766 - DNA, 19 bp, Mus musculus
  siRNA target sequence for 2310032K21Rik (NM_028001.1,789-807).
ctaagcctccggttttggt

SEQ ID NO: 731767 - DNA, 19 bp, Mus musculus
  siRNA target sequence for 2310032K21Rik (NM_028001.1,1049-1067).
ccgaggagagaggataagt

SEQ ID NO: 731768 - DNA, 19 bp, Mus musculus
  siRNA target sequence for Xrcc4 (NM_028012.1,74-92).
ctgaacccaacgtacctta

SEQ ID NO: 731769 - DNA, 19 bp, Mus musculus
  siRNA target sequence for Xrcc4 (NM_028012.1,76-94).
gaacccaacgtaccttatt

SEQ ID NO: 731770 - DNA, 19 bp, Mus musculus
  siRNA target sequence for Xrcc4 (NM_028012.1,105-123).
gtcttgggagagaacaata

SEQ ID NO: 731771 - DNA, 19 bp, Mus musculus
  siRNA target sequence for Xrcc4 (NM_028012.1,128-146).
ccggctttgttattacact

SEQ ID NO: 731772 - DNA, 19 bp, Mus musculus
  siRNA target sequence for Xrcc4 (NM_028012.1,167-185).
ggactgcaacagtttctga

SEQ ID NO: 731773 - DNA, 19 bp, Mus musculus
  siRNA target sequence for Xrcc4 (NM_028012.1,365-383).
gttccttcaacctagacaa

SEQ ID NO: 731774 - DNA, 19 bp, Mus musculus
  siRNA target sequence for Xrcc4 (NM_028012.1,368-386).
ccttcaacctagacaaagt

SEQ ID NO: 731775 - DNA, 19 bp, Mus musculus
  siRNA target sequence for Xrcc4 (NM_028012.1,369-387).
cttcaacctagacaaagtt

SEQ ID NO: 731776 - DNA, 19 bp, Mus musculus
  siRNA target sequence for Xrcc4 (NM_028012.1,426-444).
ctgcctggacaccattaca

SEQ ID NO: 731777 - DNA, 19 bp, Mus musculus
  siRNA target sequence for Xrcc4 (NM_028012.1,497-515).
gagactggaatgatgttca

SEQ ID NO: 731778 - DNA, 19 bp, Mus musculus
  siRNA target sequence for Xrcc4 (NM_028012.1,514-532).
caaggccgatttgagaaat

SEQ ID NO: 731779 - DNA, 19 bp, Mus musculus
  siRNA target sequence for Xrcc4 (NM_028012.1,555-573).
ggaggctgatttgtatcaa

SEQ ID NO: 731780 - DNA, 19 bp, Mus musculus
  siRNA target sequence for Xrcc4 (NM_028012.1,556-574).
gaggctgatttgtatcaaa

SEQ ID NO: 731781 - DNA, 19 bp, Mus musculus
  siRNA target sequence for Xrcc4 (NM_028012.1,615-633).
gagcttgcataaattgcta

SEQ ID NO: 731782 - DNA, 19 bp, Mus musculus
  siRNA target sequence for Xrcc4 (NM_028012.1,621-639).
gcataaattgctaaatgaa

SEQ ID NO: 731783 - DNA, 19 bp, Mus musculus
  siRNA target sequence for Xrcc4 (NM_028012.1,724-742).
ggaagcaccgatgaagaaa

SEQ ID NO: 731784 - DNA, 19 bp, Mus musculus
  siRNA target sequence for Xrcc4 (NM_028012.1,775-793).
cataaggatgattccatat

SEQ ID NO: 731785 - DNA, 19 bp, Mus musculus
  siRNA target sequence for 2310067B10Rik (NM_028014.2,256-274).
caaagaacggaagaaaagt

SEQ ID NO: 731786 - DNA, 19 bp, Mus musculus
  siRNA target sequence for 2310067B10Rik (NM_028014.2,263-281).
cggaagaaaagtcttacat

SEQ ID NO: 731787 - DNA, 19 bp, Mus musculus
  siRNA target sequence for 2310067B10Rik (NM_028014.2,531-549).
ggatcatcgaccaaatcca

SEQ ID NO: 731788 - DNA, 19 bp, Mus musculus
  siRNA target sequence for 2310067B10Rik (NM_028014.2,580-598).
gtggccgaactccatgtat

SEQ ID NO: 731789 - DNA, 19 bp, Mus musculus
  siRNA target sequence for 2310067B10Rik (NM_028014.2,885-903).
cgcctgtgattgacaacat

SEQ ID NO: 731790 - DNA, 19 bp, Mus musculus
  siRNA target sequence for 2310067B10Rik (NM_028014.2,945-963).
ctctggacaatgaaaggtt

SEQ ID NO: 731791 - DNA, 19 bp, Mus musculus
  siRNA target sequence for 2310067B10Rik (NM_028014.2,973-991).
gtcggtgatgcttcactat

SEQ ID NO: 731792 - DNA, 19 bp, Mus musculus
  siRNA target sequence for 2310067B10Rik (NM_028014.2,1271-1289).
gagatgctgcgctgcattt

SEQ ID NO: 731793 - DNA, 19 bp, Mus musculus
  siRNA target sequence for 2310067B10Rik (NM_028014.2,1646-1664).
gagccctaccctcatcata

SEQ ID NO: 731794 - DNA, 19 bp, Mus musculus
  siRNA target sequence for 2310067B10Rik (NM_028014.2,1648-1666).
gccctaccctcatcataaa

SEQ ID NO: 731795 - DNA, 19 bp, Mus musculus
  siRNA target sequence for 2310067B10Rik (NM_028014.2,1692-1710).
ctggctccaacgtgagttt

SEQ ID NO: 731796 - DNA, 19 bp, Mus musculus
  siRNA target sequence for 2310067B10Rik (NM_028014.2,2195-2213).
ccgctcagccacatgatca

SEQ ID NO: 731797 - DNA, 19 bp, Mus musculus
  siRNA target sequence for 2310067B10Rik (NM_028014.2,2209-2227).
gatcagcctcttcatcaaa

SEQ ID NO: 731798 - DNA, 19 bp, Mus musculus
  siRNA target sequence for 2310067B10Rik (NM_028014.2,2304-2322).
gggatggcgctgacatcta

SEQ ID NO: 731799 - DNA, 19 bp, Mus musculus
  siRNA target sequence for 2310067B10Rik (NM_028014.2,2604-2622).
ccctgagcggtcagatctt

SEQ ID NO: 731800 - DNA, 19 bp, Mus musculus
  siRNA target sequence for 2310067B10Rik (NM_028014.2,2606-2624).
ctgagcggtcagatcttca

SEQ ID NO: 731801 - DNA, 19 bp, Mus musculus
  siRNA target sequence for 2310067B10Rik (NM_028014.2,2697-2715).
gcatccgctttgtgtactt

SEQ ID NO: 731802 - DNA, 19 bp, Mus musculus
  siRNA target sequence for 2310067B10Rik (NM_028014.2,3105-3123).
gtgagatgataaagatcat

SEQ ID NO: 731803 - DNA, 19 bp, Mus musculus
  siRNA target sequence for 2310067B10Rik (NM_028014.2,3375-3393).
gcatcatccggctcattga

SEQ ID NO: 731804 - DNA, 19 bp, Mus musculus
  siRNA target sequence for 2310067B10Rik (NM_028014.2,3584-3602).
ccacatagctccatcatgt

SEQ ID NO: 731805 - DNA, 19 bp, Mus musculus
  siRNA target sequence for 2310067B10Rik (NM_028014.2,3587-3605).
catagctccatcatgtcta

SEQ ID NO: 731806 - DNA, 19 bp, Mus musculus
  siRNA target sequence for 2310067B10Rik (NM_028014.2,3603-3621).
ctatggcaacgggcaaaaa

SEQ ID NO: 731807 - DNA, 19 bp, Mus musculus
  siRNA target sequence for 2310067B10Rik (NM_028014.2,3781-3799).
catgctttgcagcaatgat

SEQ ID NO: 731808 - DNA, 19 bp, Mus musculus
  siRNA target sequence for 2310067B10Rik (NM_028014.2,4118-4136).
gtcaccaacgagattgtaa

SEQ ID NO: 731809 - DNA, 19 bp, Mus musculus
  siRNA target sequence for 2410006N06Rik (NM_028019.1,96-114).
gacgacctgagctgcatta

SEQ ID NO: 731810 - DNA, 19 bp, Mus musculus
  siRNA target sequence for 2410006N06Rik (NM_028019.1,246-264).
cggaagggtcccttgacaa

SEQ ID NO: 731811 - DNA, 19 bp, Mus musculus
  siRNA target sequence for 2410006N06Rik (NM_028019.1,247-265).
ggaagggtcccttgacaaa

SEQ ID NO: 731812 - DNA, 19 bp, Mus musculus
  siRNA target sequence for 2410006N06Rik (NM_028019.1,403-421).
gtaccacaaacgttatcca

SEQ ID NO: 731813 - DNA, 19 bp, Mus musculus
  siRNA target sequence for 2410006N06Rik (NM_028019.1,572-590).
gctggtgaccttcagtata

SEQ ID NO: 731814 - DNA, 19 bp, Mus musculus
  siRNA target sequence for 2410006N06Rik (NM_028019.1,573-591).
ctggtgaccttcagtatat

SEQ ID NO: 731815 - DNA, 19 bp, Mus musculus
  siRNA target sequence for 2410006N06Rik (NM_028019.1,683-701).
gcgagttcaggaaatgaca

SEQ ID NO: 731816 - DNA, 19 bp, Mus musculus
  siRNA target sequence for 2410006N06Rik (NM_028019.1,684-702).
cgagttcaggaaatgacat

SEQ ID NO: 731817 - DNA, 19 bp, Mus musculus
  siRNA target sequence for 2410006N06Rik (NM_028019.1,796-814).
ggaccctctcctataacct

SEQ ID NO: 731818 - DNA, 19 bp, Mus musculus
  siRNA target sequence for 2410006N06Rik (NM_028019.1,813-831).
ctggaggtttccaacaata

SEQ ID NO: 731819 - DNA, 19 bp, Mus musculus
  siRNA target sequence for 2410006N06Rik (NM_028019.1,880-898).
gtccccagagattttcaat

SEQ ID NO: 731820 - DNA, 19 bp, Mus musculus
  siRNA target sequence for 2410006N06Rik (NM_028019.1,1244-1262).
ctggctgtatggcttaagt

SEQ ID NO: 731821 - DNA, 19 bp, Mus musculus
  siRNA target sequence for 2410006F12Rik (NM_028020.2,193-211).
ctccatttcggggaagaat

SEQ ID NO: 731822 - DNA, 19 bp, Mus musculus
  siRNA target sequence for 2410006F12Rik (NM_028020.2,201-219).
cggggaagaatgtcatgtt

SEQ ID NO: 731823 - DNA, 19 bp, Mus musculus
  siRNA target sequence for 2410006F12Rik (NM_028020.2,229-247).
gatgcacatgggctacaat

SEQ ID NO: 731824 - DNA, 19 bp, Mus musculus
  siRNA target sequence for 2410006F12Rik (NM_028020.2,232-250).
gcacatgggctacaatgat

SEQ ID NO: 731825 - DNA, 19 bp, Mus musculus
  siRNA target sequence for 2410006F12Rik (NM_028020.2,253-271).
caggcgctttcctgacttt

SEQ ID NO: 731826 - DNA, 19 bp, Mus musculus
  siRNA target sequence for 2410006F12Rik (NM_028020.2,350-368).
ggggcactcccctacttca

SEQ ID NO: 731827 - DNA, 19 bp, Mus musculus
  siRNA target sequence for 2410006F12Rik (NM_028020.2,356-374).
ctcccctacttcagtgaaa

SEQ ID NO: 731828 - DNA, 19 bp, Mus musculus
  siRNA target sequence for 2410006F12Rik (NM_028020.2,386-404).
gatggacccatctatatga

SEQ ID NO: 731829 - DNA, 19 bp, Mus musculus
  siRNA target sequence for 2410006F12Rik (NM_028020.2,571-589).
ggaaatcaaggcatactat

SEQ ID NO: 731830 - DNA, 19 bp, Mus musculus
  siRNA target sequence for 2410006F12Rik (NM_028020.2,608-626).
gcagccatgttccagatta

SEQ ID NO: 731831 - DNA, 19 bp, Mus musculus
  siRNA target sequence for 2410006F12Rik (NM_028020.2,609-627).
cagccatgttccagattaa

SEQ ID NO: 731832 - DNA, 19 bp, Mus musculus
  siRNA target sequence for 2410006F12Rik (NM_028020.2,647-665).
gtctacacgggtgactata

SEQ ID NO: 731833 - DNA, 19 bp, Mus musculus
  siRNA target sequence for 2410006F12Rik (NM_028020.2,689-707).
ggggctgcgtggattgaca

SEQ ID NO: 731834 - DNA, 19 bp, Mus musculus
  siRNA target sequence for 2410006F12Rik (NM_028020.2,690-708).
gggctgcgtggattgacaa

SEQ ID NO: 731835 - DNA, 19 bp, Mus musculus
  siRNA target sequence for 2410006F12Rik (NM_028020.2,750-768).
caaccatccgagattccaa

SEQ ID NO: 731836 - DNA, 19 bp, Mus musculus
  siRNA target sequence for 2410006F12Rik (NM_028020.2,777-795).
gagagcgagatttcctaaa

SEQ ID NO: 731837 - DNA, 19 bp, Mus musculus
  siRNA target sequence for 2410006F12Rik (NM_028020.2,779-797).
gagcgagatttcctaaaga

SEQ ID NO: 731838 - DNA, 19 bp, Mus musculus
  siRNA target sequence for 2410006F12Rik (NM_028020.2,908-926).
ctgaaggtgcccatatact

SEQ ID NO: 731839 - DNA, 19 bp, Mus musculus
  siRNA target sequence for 2410006F12Rik (NM_028020.2,914-932).
gtgcccatatacttctcta

SEQ ID NO: 731840 - DNA, 19 bp, Mus musculus
  siRNA target sequence for 2410006F12Rik (NM_028020.2,1017-1035).
ggaacatgtttgagtttaa

SEQ ID NO: 731841 - DNA, 19 bp, Mus musculus
  siRNA target sequence for 2410006F12Rik (NM_028020.2,1048-1066).
ctttgaccggacatttgct

SEQ ID NO: 731842 - DNA, 19 bp, Mus musculus
  siRNA target sequence for 2410006F12Rik (NM_028020.2,1116-1134).
ctggccaatccctgcaaat

SEQ ID NO: 731843 - DNA, 19 bp, Mus musculus
  siRNA target sequence for 2410006F12Rik (NM_028020.2,1118-1136).
ggccaatccctgcaaatct

SEQ ID NO: 731844 - DNA, 19 bp, Mus musculus
  siRNA target sequence for 2410006F12Rik (NM_028020.2,1119-1137).
gccaatccctgcaaatctt

SEQ ID NO: 731845 - DNA, 19 bp, Mus musculus
  siRNA target sequence for 2410006F12Rik (NM_028020.2,1168-1186).
ggtcatcatgcctggttat

SEQ ID NO: 731846 - DNA, 19 bp, Mus musculus
  siRNA target sequence for 2410006F12Rik (NM_028020.2,1197-1215).
gcaccgtgggccacaagat

SEQ ID NO: 731847 - DNA, 19 bp, Mus musculus
  siRNA target sequence for 2410006F12Rik (NM_028020.2,1202-1220).
gtgggccacaagatcctta

SEQ ID NO: 731848 - DNA, 19 bp, Mus musculus
  siRNA target sequence for 2410006F12Rik (NM_028020.2,1216-1234).
ccttagtgggcaacgtaaa

SEQ ID NO: 731849 - DNA, 19 bp, Mus musculus
  siRNA target sequence for 2410006F12Rik (NM_028020.2,1347-1365).
ccgagagtgtgctattggt

SEQ ID NO: 731850 - DNA, 19 bp, Mus musculus
  siRNA target sequence for 2410006F12Rik (NM_028020.2,1537-1555).
gcctgaagccaaaaaacct

SEQ ID NO: 731851 - DNA, 19 bp, Mus musculus
  siRNA target sequence for 2410006F12Rik (NM_028020.2,1546-1564).
caaaaaacctaggctttta

SEQ ID NO: 731852 - DNA, 19 bp, Mus musculus
  siRNA target sequence for 2410006F12Rik (NM_028020.2,1830-1848).
gtaccaaggtgctattggt

SEQ ID NO: 731853 - DNA, 19 bp, Mus musculus
  siRNA target sequence for 2410006F12Rik (NM_028020.2,1888-1906).
cacaacattgctcaaaaat

SEQ ID NO: 731854 - DNA, 19 bp, Mus musculus
  siRNA target sequence for Cdca4 (NM_028023.3,686-704).
ctagtggagcccaatctct

SEQ ID NO: 731855 - DNA, 19 bp, Mus musculus
  siRNA target sequence for Cdca4 (NM_028023.3,781-799).
ggcaccccagaatgtagat

SEQ ID NO: 731856 - DNA, 19 bp, Mus musculus
  siRNA target sequence for Cdca4 (NM_028023.3,887-905).
gaagatgctcccttgcaaa

SEQ ID NO: 731857 - DNA, 19 bp, Mus musculus
  siRNA target sequence for Cdca4 (NM_028023.3,890-908).
gatgctcccttgcaaaact

SEQ ID NO: 731858 - DNA, 19 bp, Mus musculus
  siRNA target sequence for Cdca4 (NM_028023.3,1019-1037).
ctggaccagatatttgaga

SEQ ID NO: 731859 - DNA, 19 bp, Mus musculus
  siRNA target sequence for Cdca4 (NM_028023.3,1113-1131).
cagtgctaacaggaatgat

SEQ ID NO: 731860 - DNA, 19 bp, Mus musculus
  siRNA target sequence for D10Ertd610e (NM_028027.1,258-276).
ctccgcagcccgaatccta

SEQ ID NO: 731861 - DNA, 19 bp, Mus musculus
  siRNA target sequence for D10Ertd610e (NM_028027.1,260-278).
ccgcagcccgaatcctatt

SEQ ID NO: 731862 - DNA, 19 bp, Mus musculus
  siRNA target sequence for D10Ertd610e (NM_028027.1,465-483).
gtcagaccggacaatgtga

SEQ ID NO: 731863 - DNA, 19 bp, Mus musculus
  siRNA target sequence for D10Ertd610e (NM_028027.1,527-545).
cccgaactgaccttactga

SEQ ID NO: 731864 - DNA, 19 bp, Mus musculus
  siRNA target sequence for D10Ertd610e (NM_028027.1,603-621).
cccaagctcccaagaatga

SEQ ID NO: 731865 - DNA, 19 bp, Mus musculus
  siRNA target sequence for D10Ertd610e (NM_028027.1,773-791).
ggtcgtgacaggattgtgt

SEQ ID NO: 731866 - DNA, 19 bp, Mus musculus
  siRNA target sequence for D10Ertd610e (NM_028027.1,774-792).
gtcgtgacaggattgtgtt

SEQ ID NO: 731867 - DNA, 19 bp, Mus musculus
  siRNA target sequence for D10Ertd610e (NM_028027.1,899-917).
gagcgccgactgcatatgt

SEQ ID NO: 731868 - DNA, 19 bp, Mus musculus
  siRNA target sequence for D10Ertd610e (NM_028027.1,901-919).
gcgccgactgcatatgtat

SEQ ID NO: 731869 - DNA, 19 bp, Mus musculus
  siRNA target sequence for D10Ertd610e (NM_028027.1,920-938).
gtggtgtactgccagaata

SEQ ID NO: 731870 - DNA, 19 bp, Mus musculus
  siRNA target sequence for D10Ertd610e (NM_028027.1,922-940).
ggtgtactgccagaataaa

SEQ ID NO: 731871 - DNA, 19 bp, Mus musculus
  siRNA target sequence for D10Ertd610e (NM_028027.1,967-985).
gtttggggacagctacttt

SEQ ID NO: 731872 - DNA, 19 bp, Mus musculus
  siRNA target sequence for D10Ertd610e (NM_028027.1,1076-1094).
ctgaaggattttctaaagt

SEQ ID NO: 731873 - DNA, 19 bp, Mus musculus
  siRNA target sequence for D10Ertd610e (NM_028027.1,1082-1100).
gattttctaaagtattaca

SEQ ID NO: 731874 - DNA, 19 bp, Mus musculus
  siRNA target sequence for D10Ertd610e (NM_028027.1,1141-1159).
ggaggtcatgtgtttcgta

SEQ ID NO: 731875 - DNA, 19 bp, Mus musculus
  siRNA target sequence for D10Ertd610e (NM_028027.1,1156-1174).
cgtacctaagcgatgcaat

SEQ ID NO: 731876 - DNA, 19 bp, Mus musculus
  siRNA target sequence for D10Ertd610e (NM_028027.1,1161-1179).
ctaagcgatgcaatgatat

SEQ ID NO: 731877 - DNA, 19 bp, Mus musculus
  siRNA target sequence for D10Ertd610e (NM_028027.1,1166-1184).
cgatgcaatgatatgatgt

SEQ ID NO: 731878 - DNA, 19 bp, Mus musculus
  siRNA target sequence for D10Ertd610e (NM_028027.1,1191-1209).
ggagacttcggggatttga

SEQ ID NO: 731879 - DNA, 19 bp, Mus musculus
  siRNA target sequence for D10Ertd610e (NM_028027.1,1200-1218).
ggggatttgagggaaaact

SEQ ID NO: 731880 - DNA, 19 bp, Mus musculus
  siRNA target sequence for D10Ertd610e (NM_028027.1,1325-1343).
gagcaaatcatcatcttca

SEQ ID NO: 731881 - DNA, 19 bp, Mus musculus
  siRNA target sequence for D10Ertd610e (NM_028027.1,1385-1403).
ggctacgtgtacaagaaca

SEQ ID NO: 731882 - DNA, 19 bp, Mus musculus
  siRNA target sequence for D10Ertd610e (NM_028027.1,1529-1547).
gtcagtcaagcctggataa

SEQ ID NO: 731883 - DNA, 19 bp, Mus musculus
  siRNA target sequence for D10Ertd610e (NM_028027.1,1622-1640).
cgtgagagccagaccaata

SEQ ID NO: 731884 - DNA, 19 bp, Mus musculus
  siRNA target sequence for 2410003L07Rik (NM_028029.1,87-105).
cttcgtgggggacgttatt

SEQ ID NO: 731885 - DNA, 19 bp, Mus musculus
  siRNA target sequence for 2410003L07Rik (NM_028029.1,114-132).
ggccgtggtggatgaattt

SEQ ID NO: 731886 - DNA, 19 bp, Mus musculus
  siRNA target sequence for 2410003L07Rik (NM_028029.1,115-133).
gccgtggtggatgaatttt

SEQ ID NO: 731887 - DNA, 19 bp, Mus musculus
  siRNA target sequence for 2410003L07Rik (NM_028029.1,217-235).
ggcgagaggctgtttgtct

SEQ ID NO: 731888 - DNA, 19 bp, Mus musculus
  siRNA target sequence for 2410003L07Rik (NM_028029.1,234-252).
ctgcatctgcgaattcgta

SEQ ID NO: 731889 - DNA, 19 bp, Mus musculus
  siRNA target sequence for 2410003L07Rik (NM_028029.1,643-661).
gtggatgagtccgtaaact

SEQ ID NO: 731890 - DNA, 19 bp, Mus musculus
  siRNA target sequence for 2410003L07Rik (NM_028029.1,748-766).
cagtcggggacctatggaa

SEQ ID NO: 731891 - DNA, 19 bp, Mus musculus
  siRNA target sequence for 2410003L07Rik (NM_028029.1,763-781).
ggaatcgccctctacagat

SEQ ID NO: 731892 - DNA, 19 bp, Mus musculus
  siRNA target sequence for 2410003L07Rik (NM_028029.1,764-782).
gaatcgccctctacagatt

SEQ ID NO: 731893 - DNA, 19 bp, Mus musculus
  siRNA target sequence for 2410003L07Rik (NM_028029.1,787-805).
gccctggagacgaatgagt

SEQ ID NO: 731894 - DNA, 19 bp, Mus musculus
  siRNA target sequence for 2410003L07Rik (NM_028029.1,797-815).
cgaatgagttggactttga

SEQ ID NO: 731895 - DNA, 19 bp, Mus musculus
  siRNA target sequence for 2410003L07Rik (NM_028029.1,901-919).
catcgctttgtgaagttat

SEQ ID NO: 731896 - DNA, 19 bp, Mus musculus
  siRNA target sequence for 2410003L07Rik (NM_028029.1,1133-1151).
cgatctcaggtcaggataa

SEQ ID NO: 731897 - DNA, 19 bp, Mus musculus
  siRNA target sequence for 2410003L07Rik (NM_028029.1,1231-1249).
gaagtcaacggtgtttctt

SEQ ID NO: 731898 - DNA, 19 bp, Mus musculus
  siRNA target sequence for 2410003L07Rik (NM_028029.1,1254-1272).
gcctcaggtacctattcat

SEQ ID NO: 731899 - DNA, 19 bp, Mus musculus
  siRNA target sequence for 2410003L07Rik (NM_028029.1,1281-1299).
gcagaagagccaacactat

SEQ ID NO: 731900 - DNA, 19 bp, Mus musculus
  siRNA target sequence for 2410003L07Rik (NM_028029.1,1287-1305).
gagccaacactatctaaca

SEQ ID NO: 731901 - DNA, 19 bp, Mus musculus
  siRNA target sequence for 2410003L07Rik (NM_028029.1,1527-1545).
gcaccaaacatctacagaa

SEQ ID NO: 731902 - DNA, 19 bp, Mus musculus
  siRNA target sequence for 2410003L07Rik (NM_028029.1,1584-1602).
gagaaggcctggcttacaa

SEQ ID NO: 731903 - DNA, 19 bp, Mus musculus
  siRNA target sequence for 2410003L07Rik (NM_028029.1,1645-1663).
gacagcctggacctagatt

SEQ ID NO: 731904 - DNA, 19 bp, Mus musculus
  siRNA target sequence for 2410003L07Rik (NM_028029.1,1674-1692).
ccaacagctgatagagttt

SEQ ID NO: 731905 - DNA, 19 bp, Mus musculus
  siRNA target sequence for 2410003L07Rik (NM_028029.1,1731-1749).
gattgtacgccgcttttca

SEQ ID NO: 731906 - DNA, 19 bp, Mus musculus
  siRNA target sequence for 2410003L07Rik (NM_028029.1,1735-1753).
gtacgccgcttttcaatca

SEQ ID NO: 731907 - DNA, 19 bp, Mus musculus
  siRNA target sequence for 2410003L07Rik (NM_028029.1,1880-1898).
cctcccacttgctagttga

SEQ ID NO: 731908 - DNA, 19 bp, Mus musculus
  siRNA target sequence for 2410003L07Rik (NM_028029.1,2463-2481).
ggcacaggtaccaaacgtt

SEQ ID NO: 731909 - DNA, 19 bp, Mus musculus
  siRNA target sequence for 2410003L07Rik (NM_028029.1,2467-2485).
caggtaccaaacgttgatt

SEQ ID NO: 731910 - DNA, 19 bp, Mus musculus
  siRNA target sequence for 2410003L07Rik (NM_028029.1,2469-2487).
ggtaccaaacgttgatttt

SEQ ID NO: 731911 - DNA, 19 bp, Mus musculus
  siRNA target sequence for 2410003L07Rik (NM_028029.1,2492-2510).
gactttttggaaatatgca

SEQ ID NO: 731912 - DNA, 19 bp, Mus musculus
  siRNA target sequence for 2410003L07Rik (NM_028029.1,2513-2531).
cagtgattaaagtctcaaa

SEQ ID NO: 731913 - DNA, 19 bp, Mus musculus
  siRNA target sequence for 2410003L07Rik (NM_028029.1,2597-2615).
caggacccgtgtttcttga

SEQ ID NO: 731914 - DNA, 19 bp, Mus musculus
  siRNA target sequence for 2410003L07Rik (NM_028029.1,2743-2761).
ctcaagggatgcaccaatt

SEQ ID NO: 731915 - DNA, 19 bp, Mus musculus
  siRNA target sequence for 2410003L07Rik (NM_028029.1,2749-2767).
ggatgcaccaattacatca

SEQ ID NO: 731916 - DNA, 19 bp, Mus musculus
  siRNA target sequence for 2410003L07Rik (NM_028029.1,2824-2842).
ctgatggagttgctgaatt

SEQ ID NO: 731917 - DNA, 19 bp, Mus musculus
  siRNA target sequence for 2410003L07Rik (NM_028029.1,2860-2878).
ccggataaagtgcctttaa

SEQ ID NO: 731918 - DNA, 19 bp, Mus musculus
  siRNA target sequence for 2410003L07Rik (NM_028029.1,2892-2910).
cgccgtcaaggagatcaat

SEQ ID NO: 731919 - DNA, 19 bp, Mus musculus
  siRNA target sequence for 2410003L07Rik (NM_028029.1,2895-2913).
cgtcaaggagatcaatgtt

SEQ ID NO: 731920 - DNA, 19 bp, Mus musculus
  siRNA target sequence for 2410003L07Rik (NM_028029.1,3066-3084).
cttcgctccgcagctaaaa

SEQ ID NO: 731921 - DNA, 19 bp, Mus musculus
  siRNA target sequence for 2410003L07Rik (NM_028029.1,3069-3087).
cgctccgcagctaaaagat

SEQ ID NO: 731922 - DNA, 19 bp, Mus musculus
  siRNA target sequence for 2410003L07Rik (NM_028029.1,3074-3092).
cgcagctaaaagatgaagt

SEQ ID NO: 731923 - DNA, 19 bp, Mus musculus
  siRNA target sequence for 2410003L07Rik (NM_028029.1,3078-3096).
gctaaaagatgaagtattt

SEQ ID NO: 731924 - DNA, 19 bp, Mus musculus
  siRNA target sequence for 2410003L07Rik (NM_028029.1,3118-3136).
cggatgcaggagagattga

SEQ ID NO: 731925 - DNA, 19 bp, Mus musculus
  siRNA target sequence for 2410003L07Rik (NM_028029.1,3123-3141).
gcaggagagattgattaaa

SEQ ID NO: 731926 - DNA, 19 bp, Mus musculus
  siRNA target sequence for 2410003L07Rik (NM_028029.1,3124-3142).
caggagagattgattaaat

SEQ ID NO: 731927 - DNA, 19 bp, Mus musculus
  siRNA target sequence for 2410003L07Rik (NM_028029.1,3126-3144).
ggagagattgattaaatct

SEQ ID NO: 731928 - DNA, 19 bp, Mus musculus
  siRNA target sequence for 2410003L07Rik (NM_028029.1,3127-3145).
gagagattgattaaatctt

SEQ ID NO: 731929 - DNA, 19 bp, Mus musculus
  siRNA target sequence for 2410003L07Rik (NM_028029.1,3234-3252).
catggagaggggacatcat

SEQ ID NO: 731930 - DNA, 19 bp, Mus musculus
  siRNA target sequence for 2410003L07Rik (NM_028029.1,3297-3315).
gctcttcacacggtttaaa

SEQ ID NO: 731931 - DNA, 19 bp, Mus musculus
  siRNA target sequence for 2410003L07Rik (NM_028029.1,3323-3341).
ccgagcggctcgtcatcaa

SEQ ID NO: 731932 - DNA, 19 bp, Mus musculus
  siRNA target sequence for 2410003L07Rik (NM_028029.1,3324-3342).
cgagcggctcgtcatcaat

SEQ ID NO: 731933 - DNA, 19 bp, Mus musculus
  siRNA target sequence for 2410003L07Rik (NM_028029.1,3634-3652).
ccgctgctgtcgttactga

SEQ ID NO: 731934 - DNA, 19 bp, Mus musculus
  siRNA target sequence for 2410003L07Rik (NM_028029.1,3898-3916).
cacgtccagcggaacttca

SEQ ID NO: 731935 - DNA, 19 bp, Mus musculus
  siRNA target sequence for 2410003L07Rik (NM_028029.1,3958-3976).
ctggtgggcgtgatcaaaa

SEQ ID NO: 731936 - DNA, 19 bp, Mus musculus
  siRNA target sequence for 2410003L07Rik (NM_028029.1,4427-4445).
gaggctccccgcattcaga

SEQ ID NO: 731937 - DNA, 19 bp, Mus musculus
  siRNA target sequence for 2410003L07Rik (NM_028029.1,4458-4476).
ctctgtgccagggcaaaat

SEQ ID NO: 731938 - DNA, 19 bp, Mus musculus
  siRNA target sequence for 2410003L07Rik (NM_028029.1,4460-4478).
ctgtgccagggcaaaatga

SEQ ID NO: 731939 - DNA, 19 bp, Mus musculus
  siRNA target sequence for 2410003L07Rik (NM_028029.1,4647-4665).
caggatccatgagtttaaa

SEQ ID NO: 731940 - DNA, 19 bp, Mus musculus
  siRNA target sequence for 2410003L07Rik (NM_028029.1,4649-4667).
ggatccatgagtttaaaga

SEQ ID NO: 731941 - DNA, 19 bp, Mus musculus
  siRNA target sequence for 2410003L07Rik (NM_028029.1,4688-4706).
ggtggttggctgaagttaa

SEQ ID NO: 731942 - DNA, 19 bp, Mus musculus
  siRNA target sequence for 2410004E01Rik (NM_028031.1,254-272).
gtaactgtgacattgtcaa

SEQ ID NO: 731943 - DNA, 19 bp, Mus musculus
  siRNA target sequence for 2410004E01Rik (NM_028031.1,309-327).
gctggtagaagcaggatat

SEQ ID NO: 731944 - DNA, 19 bp, Mus musculus
  siRNA target sequence for 2410004E01Rik (NM_028031.1,312-330).
ggtagaagcaggatatgat

SEQ ID NO: 731945 - DNA, 19 bp, Mus musculus
  siRNA target sequence for 2410004E01Rik (NM_028031.1,340-358).
ccagacagagaaaatgtgt

SEQ ID NO: 731946 - DNA, 19 bp, Mus musculus
  siRNA target sequence for 2410004E01Rik (NM_028031.1,384-402).
caacaggctggaacttgta

SEQ ID NO: 731947 - DNA, 19 bp, Mus musculus
  siRNA target sequence for 2410004E01Rik (NM_028031.1,416-434).
ccaaaggtgctgtgataga

SEQ ID NO: 731948 - DNA, 19 bp, Mus musculus
  siRNA target sequence for 2410004E01Rik (NM_028031.1,417-435).
caaaggtgctgtgatagat

SEQ ID NO: 731949 - DNA, 19 bp, Mus musculus
  siRNA target sequence for 2410004E01Rik (NM_028031.1,422-440).
gtgctgtgatagatcagtt

SEQ ID NO: 731950 - DNA, 19 bp, Mus musculus
  siRNA target sequence for 2410004E01Rik (NM_028031.1,595-613).
cccatcatagcgtatctca

SEQ ID NO: 731951 - DNA, 19 bp, Mus musculus
  siRNA target sequence for 2410004E01Rik (NM_028031.1,596-614).
ccatcatagcgtatctcat

SEQ ID NO: 731952 - DNA, 19 bp, Mus musculus
  siRNA target sequence for 2410004E01Rik (NM_028031.1,655-673).
cagacgccgctcatgctat

SEQ ID NO: 731953 - DNA, 19 bp, Mus musculus
  siRNA target sequence for 2410004E01Rik (NM_028031.1,666-684).
catgctatcggcttacaaa

SEQ ID NO: 731954 - DNA, 19 bp, Mus musculus
  siRNA target sequence for 2410004E01Rik (NM_028031.1,669-687).
gctatcggcttacaaagta

SEQ ID NO: 731955 - DNA, 19 bp, Mus musculus
  siRNA target sequence for 2410004E01Rik (NM_028031.1,670-688).
ctatcggcttacaaagtaa

SEQ ID NO: 731956 - DNA, 19 bp, Mus musculus
  siRNA target sequence for 2410004E01Rik (NM_028031.1,693-711).
gccagaaccaactggattt

SEQ ID NO: 731957 - DNA, 19 bp, Mus musculus
  siRNA target sequence for 2410004E01Rik (NM_028031.1,728-746).
cctctctcagtgttgttga

SEQ ID NO: 731958 - DNA, 19 bp, Mus musculus
  siRNA target sequence for 2410004E01Rik (NM_028031.1,735-753).
cagtgttgttgataaaaca

SEQ ID NO: 731959 - DNA, 19 bp, Mus musculus
  siRNA target sequence for 2410004E01Rik (NM_028031.1,777-795).
ggcagttgcagcaggaaat

SEQ ID NO: 731960 - DNA, 19 bp, Mus musculus
  siRNA target sequence for 2410004E01Rik (NM_028031.1,798-816).
cagtgcagttgataagctt

SEQ ID NO: 731961 - DNA, 19 bp, Mus musculus
  siRNA target sequence for 2410004E01Rik (NM_028031.1,800-818).
gtgcagttgataagctttt

SEQ ID NO: 731962 - DNA, 19 bp, Mus musculus
  siRNA target sequence for 2410004E01Rik (NM_028031.1,835-853).
ctggacatccgaaatgcta

SEQ ID NO: 731963 - DNA, 19 bp, Mus musculus
  siRNA target sequence for 2410004E01Rik (NM_028031.1,868-886).
cttgatatggctctacaaa

SEQ ID NO: 731964 - DNA, 19 bp, Mus musculus
  siRNA target sequence for 2410004E01Rik (NM_028031.1,871-889).
gatatggctctacaaagta

SEQ ID NO: 731965 - DNA, 19 bp, Mus musculus
  siRNA target sequence for 2410004E01Rik (NM_028031.1,933-951).
gagagccaacaaacagttt

SEQ ID NO: 731966 - DNA, 19 bp, Mus musculus
  siRNA target sequence for 2410004E01Rik (NM_028031.1,1070-1088).
gatgtcttctagtagcatt

SEQ ID NO: 731967 - DNA, 19 bp, Mus musculus
  siRNA target sequence for 2410004E01Rik (NM_028031.1,1073-1091).
gtcttctagtagcattgtt

SEQ ID NO: 731968 - DNA, 19 bp, Mus musculus
  siRNA target sequence for 2410004E01Rik (NM_028031.1,1081-1099).
gtagcattgttttttctga

SEQ ID NO: 731969 - DNA, 19 bp, Mus musculus
  siRNA target sequence for 2410004E01Rik (NM_028031.1,1115-1133).
ggtttttggttggctataa

SEQ ID NO: 731970 - DNA, 19 bp, Mus musculus
  siRNA target sequence for 2410004E01Rik (NM_028031.1,1143-1161).
gtacttaccgacagtcttt

SEQ ID NO: 731971 - DNA, 19 bp, Mus musculus
  siRNA target sequence for 2410004E01Rik (NM_028031.1,1158-1176).
ctttctgctaagttccatt

SEQ ID NO: 731972 - DNA, 19 bp, Mus musculus
  siRNA target sequence for 2410004E01Rik (NM_028031.1,1220-1238).
cagcaggtagccctttgta

SEQ ID NO: 731973 - DNA, 19 bp, Mus musculus
  siRNA target sequence for 2410004E01Rik (NM_028031.1,1284-1302).
caagacttgggcaactgat

SEQ ID NO: 731974 - DNA, 19 bp, Mus musculus
  siRNA target sequence for 2410004E01Rik (NM_028031.1,1298-1316).
ctgatccaggcttcactaa

SEQ ID NO: 731975 - DNA, 19 bp, Mus musculus
  siRNA target sequence for 2410004E01Rik (NM_028031.1,1394-1412).
catcatgtcttataaggaa

SEQ ID NO: 731976 - DNA, 19 bp, Mus musculus
  siRNA target sequence for 2410004E01Rik (NM_028031.1,1402-1420).
cttataaggaagcctttaa

SEQ ID NO: 731977 - DNA, 19 bp, Mus musculus
  siRNA target sequence for 2410004E01Rik (NM_028031.1,1484-1502).
ctggacgctgcataggttt

SEQ ID NO: 731978 - DNA, 19 bp, Mus musculus
  siRNA target sequence for 2410004E01Rik (NM_028031.1,1499-1517).
gttttggcaaccatcatca

SEQ ID NO: 731979 - DNA, 19 bp, Mus musculus
  siRNA target sequence for 2410004E01Rik (NM_028031.1,1504-1522).
ggcaaccatcatcattaca

SEQ ID NO: 731980 - DNA, 19 bp, Mus musculus
  siRNA target sequence for 2410004E01Rik (NM_028031.1,1505-1523).
gcaaccatcatcattacat

SEQ ID NO: 731981 - DNA, 19 bp, Mus musculus
  siRNA target sequence for 2410004E01Rik (NM_028031.1,1510-1528).
catcatcattacatcttct

SEQ ID NO: 731982 - DNA, 19 bp, Mus musculus
  siRNA target sequence for 2410004E01Rik (NM_028031.1,1538-1556).
ccctttccatggtatgtga

SEQ ID NO: 731983 - DNA, 19 bp, Mus musculus
  siRNA target sequence for 2410004E01Rik (NM_028031.1,1548-1566).
ggtatgtgactggatcata

SEQ ID NO: 731984 - DNA, 19 bp, Mus musculus
  siRNA target sequence for 2410004E01Rik (NM_028031.1,1549-1567).
gtatgtgactggatcatat

SEQ ID NO: 731985 - DNA, 19 bp, Mus musculus
  siRNA target sequence for 2410004E01Rik (NM_028031.1,1555-1573).
gactggatcatatatggat

SEQ ID NO: 731986 - DNA, 19 bp, Mus musculus
  siRNA target sequence for 2410004E01Rik (NM_028031.1,1578-1596).
cgtctactggtcaaatcat

SEQ ID NO: 731987 - DNA, 19 bp, Mus musculus
  siRNA target sequence for 2410004E01Rik (NM_028031.1,1579-1597).
gtctactggtcaaatcatt

SEQ ID NO: 731988 - DNA, 19 bp, Mus musculus
  siRNA target sequence for 2410004E01Rik (NM_028031.1,1581-1599).
ctactggtcaaatcattgt

SEQ ID NO: 731989 - DNA, 19 bp, Mus musculus
  siRNA target sequence for 2410004E01Rik (NM_028031.1,1594-1612).
cattgtgccacaacattca

SEQ ID NO: 731990 - DNA, 19 bp, Mus musculus
  siRNA target sequence for 2410004E01Rik (NM_028031.1,1628-1646).
ggacctacctcaatcagat

SEQ ID NO: 731991 - DNA, 19 bp, Mus musculus
  siRNA target sequence for 2410004E01Rik (NM_028031.1,1629-1647).
gacctacctcaatcagata

SEQ ID NO: 731992 - DNA, 19 bp, Mus musculus
  siRNA target sequence for 2410004E01Rik (NM_028031.1,1631-1649).
cctacctcaatcagatagt

SEQ ID NO: 731993 - DNA, 19 bp, Mus musculus
  siRNA target sequence for 2410004E01Rik (NM_028031.1,1658-1676).
ctccctgggttctgtatat

SEQ ID NO: 731994 - DNA, 19 bp, Mus musculus
  siRNA target sequence for 2410004E01Rik (NM_028031.1,1788-1806).
gcaaagcaggcacatgaaa

SEQ ID NO: 731995 - DNA, 19 bp, Mus musculus
  siRNA target sequence for 2410004E01Rik (NM_028031.1,1879-1897).
ggctgctttggcttagtga

SEQ ID NO: 731996 - DNA, 19 bp, Mus musculus
  siRNA target sequence for 2410004F06Rik (NM_028034.1,183-201).
ggttgcttctgggtaatta

SEQ ID NO: 731997 - DNA, 19 bp, Mus musculus
  siRNA target sequence for 2410004F06Rik (NM_028034.1,228-246).
caagaagttgactaccaaa

SEQ ID NO: 731998 - DNA, 19 bp, Mus musculus
  siRNA target sequence for 2410004F06Rik (NM_028034.1,286-304).
gtcaggacgtagaaatgaa

SEQ ID NO: 731999 - DNA, 19 bp, Mus musculus
  siRNA target sequence for 2410004F06Rik (NM_028034.1,291-309).
gacgtagaaatgaaaccat

SEQ ID NO: 732000 - DNA, 19 bp, Mus musculus
  siRNA target sequence for 2410004F06Rik (NM_028034.1,293-311).
cgtagaaatgaaaccatta

SEQ ID NO: 732001 - DNA, 19 bp, Mus musculus
  siRNA target sequence for 2410004F06Rik (NM_028034.1,294-312).
gtagaaatgaaaccattaa

SEQ ID NO: 732002 - DNA, 19 bp, Mus musculus
  siRNA target sequence for 2410004F06Rik (NM_028034.1,362-380).
ctggtgcagggctctgatt

SEQ ID NO: 732003 - DNA, 19 bp, Mus musculus
  siRNA target sequence for 2410004F06Rik (NM_028034.1,364-382).
ggtgcagggctctgattaa

SEQ ID NO: 732004 - DNA, 19 bp, Mus musculus
  siRNA target sequence for 2410004F06Rik (NM_028034.1,428-446).
ggtcgattttgccaagtat

SEQ ID NO: 732005 - DNA, 19 bp, Mus musculus
  siRNA target sequence for 2410004F06Rik (NM_028034.1,443-461).
gtatattccagtaaaatct

SEQ ID NO: 732006 - DNA, 19 bp, Mus musculus
  siRNA target sequence for 2410004F06Rik (NM_028034.1,450-468).
ccagtaaaatctaaaaaca

SEQ ID NO: 732007 - DNA, 19 bp, Mus musculus
  siRNA target sequence for 2410004F06Rik (NM_028034.1,474-492).
gttgcagtagagtctttta

SEQ ID NO: 732008 - DNA, 19 bp, Mus musculus
  siRNA target sequence for 2410004F06Rik (NM_028034.1,487-505).
cttttatgcagcttcctta

SEQ ID NO: 732009 - DNA, 19 bp, Mus musculus
  siRNA target sequence for 2410004F06Rik (NM_028034.1,501-519).
ccttacagagcaaaaaaat

SEQ ID NO: 732010 - DNA, 19 bp, Mus musculus
  siRNA target sequence for 2410004F06Rik (NM_028034.1,502-520).
cttacagagcaaaaaaatt

SEQ ID NO: 732011 - DNA, 19 bp, Mus musculus
  siRNA target sequence for 2410004F06Rik (NM_028034.1,541-559).
ctgtgacattgcacattga

SEQ ID NO: 732012 - DNA, 19 bp, Mus musculus
  siRNA target sequence for 2410004F06Rik (NM_028034.1,610-628).
cagccatccagtactttca

SEQ ID NO: 732013 - DNA, 19 bp, Mus musculus
  siRNA target sequence for 2410004F06Rik (NM_028034.1,744-762).
gacctagttgcaaagaatt

SEQ ID NO: 732014 - DNA, 19 bp, Mus musculus
  siRNA target sequence for 2410004F06Rik (NM_028034.1,778-796).
caccaatggggaataaaaa

SEQ ID NO: 732015 - DNA, 19 bp, Mus musculus
  siRNA target sequence for 2410004F06Rik (NM_028034.1,854-872).
gctcagcccatcacttact

SEQ ID NO: 732016 - DNA, 19 bp, Mus musculus
  siRNA target sequence for 2410004F06Rik (NM_028034.1,924-942).
gctctaaactataaggatt

SEQ ID NO: 732017 - DNA, 19 bp, Mus musculus
  siRNA target sequence for 2410004F06Rik (NM_028034.1,958-976).
ctaaaatgatgcttgagaa

SEQ ID NO: 732018 - DNA, 19 bp, Mus musculus
  siRNA target sequence for 2410004F06Rik (NM_028034.1,1004-1022).
cacggagaagtgtactgaa

SEQ ID NO: 732019 - DNA, 19 bp, Mus musculus
  siRNA target sequence for 2410004F06Rik (NM_028034.1,1029-1047).
gtgtactggccaaccaaaa

SEQ ID NO: 732020 - DNA, 19 bp, Mus musculus
  siRNA target sequence for 2410004F06Rik (NM_028034.1,1031-1049).
gtactggccaaccaaaaga

SEQ ID NO: 732021 - DNA, 19 bp, Mus musculus
  siRNA target sequence for 2410004F06Rik (NM_028034.1,1071-1089).
ccagatgttccatcagtaa

SEQ ID NO: 732022 - DNA, 19 bp, Mus musculus
  siRNA target sequence for 2410004F06Rik (NM_028034.1,1122-1140).
ctgcggttgactgaaaaga

SEQ ID NO: 732023 - DNA, 19 bp, Mus musculus
  siRNA target sequence for 2410004F06Rik (NM_028034.1,1124-1142).
gcggttgactgaaaagaaa

SEQ ID NO: 732024 - DNA, 19 bp, Mus musculus
  siRNA target sequence for 2410004F06Rik (NM_028034.1,1157-1175).
gaacggctgtgtaaaatta

SEQ ID NO: 732025 - DNA, 19 bp, Mus musculus
  siRNA target sequence for 2410004F06Rik (NM_028034.1,1298-1316).
cctaaccctggagaaatca

SEQ ID NO: 732026 - DNA, 19 bp, Mus musculus
  siRNA target sequence for 2410015B03Rik (NM_028036.2,867-885).
gttgccatggagtttgctt

SEQ ID NO: 732027 - DNA, 19 bp, Mus musculus
  siRNA target sequence for 2410015B03Rik (NM_028036.2,882-900).
gcttggtgccttcactata

SEQ ID NO: 732028 - DNA, 19 bp, Mus musculus
  siRNA target sequence for 2410015B03Rik (NM_028036.2,883-901).
cttggtgccttcactatat

SEQ ID NO: 732029 - DNA, 19 bp, Mus musculus
  siRNA target sequence for 2410015B03Rik (NM_028036.2,886-904).
ggtgccttcactatatcat

SEQ ID NO: 732030 - DNA, 19 bp, Mus musculus
  siRNA target sequence for 2410015B03Rik (NM_028036.2,982-1000).
ctgggactgtgcagagaat

SEQ ID NO: 732031 - DNA, 19 bp, Mus musculus
  siRNA target sequence for 2410015B03Rik (NM_028036.2,1032-1050).
cccgtgcttcggtgtctaa

SEQ ID NO: 732032 - DNA, 19 bp, Mus musculus
  siRNA target sequence for 2410015B03Rik (NM_028036.2,1114-1132).
gacttgtggcagccttatt

SEQ ID NO: 732033 - DNA, 19 bp, Mus musculus
  siRNA target sequence for 2410015B03Rik (NM_028036.2,1406-1424).
ctctgacaccgaagtagta

SEQ ID NO: 732034 - DNA, 19 bp, Mus musculus
  siRNA target sequence for 2410015B03Rik (NM_028036.2,1500-1518).
gggctgcaggccctagaaa

SEQ ID NO: 732035 - DNA, 19 bp, Mus musculus
  siRNA target sequence for 2410004I17Rik (NM_028039.1,104-122).
caacttgtactccaagaaa

SEQ ID NO: 732036 - DNA, 19 bp, Mus musculus
  siRNA target sequence for 2410004I17Rik (NM_028039.1,126-144).
gaagcgatatacactgaat

SEQ ID NO: 732037 - DNA, 19 bp, Mus musculus
  siRNA target sequence for 2410004I17Rik (NM_028039.1,163-181).
ctattaacagatatttcat

SEQ ID NO: 732038 - DNA, 19 bp, Mus musculus
  siRNA target sequence for 2410004I17Rik (NM_028039.1,172-190).
gatatttcatcaagcaaat

SEQ ID NO: 732039 - DNA, 19 bp, Mus musculus
  siRNA target sequence for 2410004I17Rik (NM_028039.1,208-226).
ctatttccatcacctaata

SEQ ID NO: 732040 - DNA, 19 bp, Mus musculus
  siRNA target sequence for 2410004I17Rik (NM_028039.1,218-236).
cacctaataagaaacataa

SEQ ID NO: 732041 - DNA, 19 bp, Mus musculus
  siRNA target sequence for 2410004I17Rik (NM_028039.1,220-238).
cctaataagaaacataatt

SEQ ID NO: 732042 - DNA, 19 bp, Mus musculus
  siRNA target sequence for 2410004I17Rik (NM_028039.1,291-309).
cccttcaagtccactcaaa

SEQ ID NO: 732043 - DNA, 19 bp, Mus musculus
  siRNA target sequence for 2410004I17Rik (NM_028039.1,338-356).
caaaccacagctcattatt

SEQ ID NO: 732044 - DNA, 19 bp, Mus musculus
  siRNA target sequence for 2410004I17Rik (NM_028039.1,485-503).
ccagtgtgacagaaaatat

SEQ ID NO: 732045 - DNA, 19 bp, Mus musculus
  siRNA target sequence for 2410004I17Rik (NM_028039.1,488-506).
gtgtgacagaaaatattca

SEQ ID NO: 732046 - DNA, 19 bp, Mus musculus
  siRNA target sequence for 2410004I17Rik (NM_028039.1,514-532).
ccagtctgtaccaagaaga

SEQ ID NO: 732047 - DNA, 19 bp, Mus musculus
  siRNA target sequence for 2410004I17Rik (NM_028039.1,517-535).
gtctgtaccaagaagaata

SEQ ID NO: 732048 - DNA, 19 bp, Mus musculus
  siRNA target sequence for 2410004I17Rik (NM_028039.1,549-567).
gagtttaactgccaaatat

SEQ ID NO: 732049 - DNA, 19 bp, Mus musculus
  siRNA target sequence for 2410004I17Rik (NM_028039.1,551-569).
gtttaactgccaaatatca

SEQ ID NO: 732050 - DNA, 19 bp, Mus musculus
  siRNA target sequence for 2410004I17Rik (NM_028039.1,560-578).
ccaaatatcaaccaaatta

SEQ ID NO: 732051 - DNA, 19 bp, Mus musculus
  siRNA target sequence for 2410004I17Rik (NM_028039.1,572-590).
caaattataagcacatcaa

SEQ ID NO: 732052 - DNA, 19 bp, Mus musculus
  siRNA target sequence for 2410004I17Rik (NM_028039.1,623-641).
caaatcaagtgacctataa

SEQ ID NO: 732053 - DNA, 19 bp, Mus musculus
  siRNA target sequence for 2410004I17Rik (NM_028039.1,741-759).
ccaaggcggagcagcattt

SEQ ID NO: 732054 - DNA, 19 bp, Mus musculus
  siRNA target sequence for 2410004I17Rik (NM_028039.1,742-760).
caaggcggagcagcatttt

SEQ ID NO: 732055 - DNA, 19 bp, Mus musculus
  siRNA target sequence for 2410004I17Rik (NM_028039.1,746-764).
gcggagcagcatttttcgt

SEQ ID NO: 732056 - DNA, 19 bp, Mus musculus
  siRNA target sequence for 2410004I17Rik (NM_028039.1,748-766).
ggagcagcatttttcgtta

SEQ ID NO: 732057 - DNA, 19 bp, Mus musculus
  siRNA target sequence for 2410004I17Rik (NM_028039.1,955-973).
ccctcaggtgcagtagttt

SEQ ID NO: 732058 - DNA, 19 bp, Mus musculus
  siRNA target sequence for 2410004I17Rik (NM_028039.1,961-979).
ggtgcagtagtttcttcaa

SEQ ID NO: 732059 - DNA, 19 bp, Mus musculus
  siRNA target sequence for 2410004I17Rik (NM_028039.1,967-985).
gtagtttcttcaaaggaat

SEQ ID NO: 732060 - DNA, 19 bp, Mus musculus
  siRNA target sequence for 2410004I17Rik (NM_028039.1,986-1004).
gtaaccttgataaacatga

SEQ ID NO: 732061 - DNA, 19 bp, Mus musculus
  siRNA target sequence for 2410004I17Rik (NM_028039.1,1120-1138).
ggatccactgcatgtacta

SEQ ID NO: 732062 - DNA, 19 bp, Mus musculus
  siRNA target sequence for 2410004I17Rik (NM_028039.1,1121-1139).
gatccactgcatgtactaa

SEQ ID NO: 732063 - DNA, 19 bp, Mus musculus
  siRNA target sequence for 2410004I17Rik (NM_028039.1,1124-1142).
ccactgcatgtactaactt

SEQ ID NO: 732064 - DNA, 19 bp, Mus musculus
  siRNA target sequence for 2410004I17Rik (NM_028039.1,1127-1145).
ctgcatgtactaacttctt

SEQ ID NO: 732065 - DNA, 19 bp, Mus musculus
  siRNA target sequence for 2410004I17Rik (NM_028039.1,1129-1147).
gcatgtactaacttcttga

SEQ ID NO: 732066 - DNA, 19 bp, Mus musculus
  siRNA target sequence for 2410004I17Rik (NM_028039.1,1133-1151).
gtactaacttcttgaaaca

SEQ ID NO: 732067 - DNA, 19 bp, Mus musculus
  siRNA target sequence for 2410004I17Rik (NM_028039.1,1152-1170).
gacaaatgtaccgaaaaat

SEQ ID NO: 732068 - DNA, 19 bp, Mus musculus
  siRNA target sequence for 2410004I17Rik (NM_028039.1,1154-1172).
caaatgtaccgaaaaatat

SEQ ID NO: 732069 - DNA, 19 bp, Mus musculus
  siRNA target sequence for 2410004I17Rik (NM_028039.1,1162-1180).
ccgaaaaatattaattcca

SEQ ID NO: 732070 - DNA, 19 bp, Mus musculus
  siRNA target sequence for 2410004I17Rik (NM_028039.1,1215-1233).
cattgacgcaggtcagaaa

SEQ ID NO: 732071 - DNA, 19 bp, Mus musculus
  siRNA target sequence for 2410004I17Rik (NM_028039.1,1219-1237).
gacgcaggtcagaaacatt

SEQ ID NO: 732072 - DNA, 19 bp, Mus musculus
  siRNA target sequence for 2410004I17Rik (NM_028039.1,1221-1239).
cgcaggtcagaaacatttt

SEQ ID NO: 732073 - DNA, 19 bp, Mus musculus
  siRNA target sequence for 2410004I17Rik (NM_028039.1,1240-1258).
gggacgactgtgtgtaagt

SEQ ID NO: 732074 - DNA, 19 bp, Mus musculus
  siRNA target sequence for 2410004I17Rik (NM_028039.1,1242-1260).
gacgactgtgtgtaagtct

SEQ ID NO: 732075 - DNA, 19 bp, Mus musculus
  siRNA target sequence for 2410004I17Rik (NM_028039.1,1287-1305).
ccctgaagacgaaatacaa

SEQ ID NO: 732076 - DNA, 19 bp, Mus musculus
  siRNA target sequence for 2410004I17Rik (NM_028039.1,1323-1341).
ccgatttctggaaggaatt

SEQ ID NO: 732077 - DNA, 19 bp, Mus musculus
  siRNA target sequence for 2410004I17Rik (NM_028039.1,1324-1342).
cgatttctggaaggaatta

SEQ ID NO: 732078 - DNA, 19 bp, Mus musculus
  siRNA target sequence for 2410004I17Rik (NM_028039.1,1366-1384).
cgggtagtagcagagtttt

SEQ ID NO: 732079 - DNA, 19 bp, Mus musculus
  siRNA target sequence for 2410004I17Rik (NM_028039.1,1420-1438).
ccaagttatgccatcaaaa

SEQ ID NO: 732080 - DNA, 19 bp, Mus musculus
  siRNA target sequence for 2410004I17Rik (NM_028039.1,1421-1439).
caagttatgccatcaaaaa

SEQ ID NO: 732081 - DNA, 19 bp, Mus musculus
  siRNA target sequence for 2410004I17Rik (NM_028039.1,1648-1666).
gtaccagaacctgcaattt

SEQ ID NO: 732082 - DNA, 19 bp, Mus musculus
  siRNA target sequence for 2410004I17Rik (NM_028039.1,1683-1701).
ctgggtcttcagactaaaa

SEQ ID NO: 732083 - DNA, 19 bp, Mus musculus
  siRNA target sequence for 2410004I17Rik (NM_028039.1,1686-1704).
ggtcttcagactaaaaaga

SEQ ID NO: 732084 - DNA, 19 bp, Mus musculus
  siRNA target sequence for 2410004I17Rik (NM_028039.1,1841-1859).
ccccaaatttccttgtata

SEQ ID NO: 732085 - DNA, 19 bp, Mus musculus
  siRNA target sequence for Ckn1 (NM_028042.1,182-200).
catggcagtggggttaaca

SEQ ID NO: 732086 - DNA, 19 bp, Mus musculus
  siRNA target sequence for Ckn1 (NM_028042.1,215-233).
cccgttgaaggaagataca

SEQ ID NO: 732087 - DNA, 19 bp, Mus musculus
  siRNA target sequence for Ckn1 (NM_028042.1,249-267).
ccgatggcgtggttgtact

SEQ ID NO: 732088 - DNA, 19 bp, Mus musculus
  siRNA target sequence for Ckn1 (NM_028042.1,293-311).
cagccccattacacatgta

SEQ ID NO: 732089 - DNA, 19 bp, Mus musculus
  siRNA target sequence for Ckn1 (NM_028042.1,295-313).
gccccattacacatgtaaa

SEQ ID NO: 732090 - DNA, 19 bp, Mus musculus
  siRNA target sequence for Ckn1 (NM_028042.1,298-316).
ccattacacatgtaaagca

SEQ ID NO: 732091 - DNA, 19 bp, Mus musculus
  siRNA target sequence for Ckn1 (NM_028042.1,336-354).
gccatcccgatgttcacaa

SEQ ID NO: 732092 - DNA, 19 bp, Mus musculus
  siRNA target sequence for Ckn1 (NM_028042.1,337-355).
ccatcccgatgttcacaaa

SEQ ID NO: 732093 - DNA, 19 bp, Mus musculus
  siRNA target sequence for Ckn1 (NM_028042.1,338-356).
catcccgatgttcacaaat

SEQ ID NO: 732094 - DNA, 19 bp, Mus musculus
  siRNA target sequence for Ckn1 (NM_028042.1,341-359).
cccgatgttcacaaataca

SEQ ID NO: 732095 - DNA, 19 bp, Mus musculus
  siRNA target sequence for Ckn1 (NM_028042.1,400-418).
gttcacatccagctcattt

SEQ ID NO: 732096 - DNA, 19 bp, Mus musculus
  siRNA target sequence for Ckn1 (NM_028042.1,403-421).
cacatccagctcatttgat

SEQ ID NO: 732097 - DNA, 19 bp, Mus musculus
  siRNA target sequence for Ckn1 (NM_028042.1,549-567).
gaggacccaaggtacaact

SEQ ID NO: 732098 - DNA, 19 bp, Mus musculus
  siRNA target sequence for Ckn1 (NM_028042.1,551-569).
ggacccaaggtacaacttt

SEQ ID NO: 732099 - DNA, 19 bp, Mus musculus
  siRNA target sequence for Ckn1 (NM_028042.1,559-577).
ggtacaactttgtgactta

SEQ ID NO: 732100 - DNA, 19 bp, Mus musculus
  siRNA target sequence for Ckn1 (NM_028042.1,588-606).
cctgttctcacattctaca

SEQ ID NO: 732101 - DNA, 19 bp, Mus musculus
  siRNA target sequence for Ckn1 (NM_028042.1,639-657).
ggtcaccacgccatgacta

SEQ ID NO: 732102 - DNA, 19 bp, Mus musculus
  siRNA target sequence for Ckn1 (NM_028042.1,640-658).
gtcaccacgccatgactat

SEQ ID NO: 732103 - DNA, 19 bp, Mus musculus
  siRNA target sequence for Ckn1 (NM_028042.1,644-662).
ccacgccatgactatatct

SEQ ID NO: 732104 - DNA, 19 bp, Mus musculus
  siRNA target sequence for Ckn1 (NM_028042.1,645-663).
cacgccatgactatatctt

SEQ ID NO: 732105 - DNA, 19 bp, Mus musculus
  siRNA target sequence for Ckn1 (NM_028042.1,675-693).
gtgctgacagtagagtaaa

SEQ ID NO: 732106 - DNA, 19 bp, Mus musculus
  siRNA target sequence for Ckn1 (NM_028042.1,677-695).
gctgacagtagagtaaaat

SEQ ID NO: 732107 - DNA, 19 bp, Mus musculus
  siRNA target sequence for Ckn1 (NM_028042.1,786-804).
ctcacaatgggaaagttaa

SEQ ID NO: 732108 - DNA, 19 bp, Mus musculus
  siRNA target sequence for Ckn1 (NM_028042.1,796-814).
gaaagttaacggcttatgt

SEQ ID NO: 732109 - DNA, 19 bp, Mus musculus
  siRNA target sequence for Ckn1 (NM_028042.1,800-818).
gttaacggcttatgtttta

SEQ ID NO: 732110 - DNA, 19 bp, Mus musculus
  siRNA target sequence for Ckn1 (NM_028042.1,860-878).
cgaatgcgcctctggaata

SEQ ID NO: 732111 - DNA, 19 bp, Mus musculus
  siRNA target sequence for Ckn1 (NM_028042.1,911-929).
gggaaggtgtgtaatgaca

SEQ ID NO: 732112 - DNA, 19 bp, Mus musculus
  siRNA target sequence for Ckn1 (NM_028042.1,1077-1095).
gtgtgttccagcctaattt

SEQ ID NO: 732113 - DNA, 19 bp, Mus musculus
  siRNA target sequence for Ckn1 (NM_028042.1,1113-1131).
gaagcagggactgcaatat

SEQ ID NO: 732114 - DNA, 19 bp, Mus musculus
  siRNA target sequence for Ckn1 (NM_028042.1,1116-1134).
gcagggactgcaatattct

SEQ ID NO: 732115 - DNA, 19 bp, Mus musculus
  siRNA target sequence for Ckn1 (NM_028042.1,1117-1135).
cagggactgcaatattctt

SEQ ID NO: 732116 - DNA, 19 bp, Mus musculus
  siRNA target sequence for D1Bwg0212e (NM_028043.2,594-612).
cacccccaagggaactgtt

SEQ ID NO: 732117 - DNA, 19 bp, Mus musculus
  siRNA target sequence for D1Bwg0212e (NM_028043.2,597-615).
ccccaagggaactgttcaa

SEQ ID NO: 732118 - DNA, 19 bp, Mus musculus
  siRNA target sequence for D1Bwg0212e (NM_028043.2,636-654).
ccttgatggacgttggaaa

SEQ ID NO: 732119 - DNA, 19 bp, Mus musculus
  siRNA target sequence for D1Bwg0212e (NM_028043.2,659-677).
ggacagtctgtggacatta

SEQ ID NO: 732120 - DNA, 19 bp, Mus musculus
  siRNA target sequence for D1Bwg0212e (NM_028043.2,772-790).
ctcgtccaactctggattt

SEQ ID NO: 732121 - DNA, 19 bp, Mus musculus
  siRNA target sequence for D1Bwg0212e (NM_028043.2,807-825).
ctcggatcacagagtcttt

SEQ ID NO: 732122 - DNA, 19 bp, Mus musculus
  siRNA target sequence for D1Bwg0212e (NM_028043.2,810-828).
ggatcacagagtctttagt

SEQ ID NO: 732123 - DNA, 19 bp, Mus musculus
  siRNA target sequence for D1Bwg0212e (NM_028043.2,834-852).
gcccaaagccacctattga

SEQ ID NO: 732124 - DNA, 19 bp, Mus musculus
  siRNA target sequence for D1Bwg0212e (NM_028043.2,836-854).
ccaaagccacctattgaaa

SEQ ID NO: 732125 - DNA, 19 bp, Mus musculus
  siRNA target sequence for D1Bwg0212e (NM_028043.2,984-1002).
gcactggtgtggagatcaa

SEQ ID NO: 732126 - DNA, 19 bp, Mus musculus
  siRNA target sequence for D1Bwg0212e (NM_028043.2,1058-1076).
ctcctcggtgagttggaaa

SEQ ID NO: 732127 - DNA, 19 bp, Mus musculus
  siRNA target sequence for D1Bwg0212e (NM_028043.2,1082-1100).
cccaaacttgtttatcaca

SEQ ID NO: 732128 - DNA, 19 bp, Mus musculus
  siRNA target sequence for D1Bwg0212e (NM_028043.2,1105-1123).
ccttactccagcgaaactt

SEQ ID NO: 732129 - DNA, 19 bp, Mus musculus
  siRNA target sequence for D1Bwg0212e (NM_028043.2,1116-1134).
cgaaacttccagatctagt

SEQ ID NO: 732130 - DNA, 19 bp, Mus musculus
  siRNA target sequence for D1Bwg0212e (NM_028043.2,1146-1164).
ctttagtcgctatagaaat

SEQ ID NO: 732131 - DNA, 19 bp, Mus musculus
  siRNA target sequence for D1Bwg0212e (NM_028043.2,1188-1206).
gccagatcacggagtattt

SEQ ID NO: 732132 - DNA, 19 bp, Mus musculus
  siRNA target sequence for D1Bwg0212e (NM_028043.2,1190-1208).
cagatcacggagtatttct

SEQ ID NO: 732133 - DNA, 19 bp, Mus musculus
  siRNA target sequence for D1Bwg0212e (NM_028043.2,1226-1244).
gacatgtccttacattcaa

SEQ ID NO: 732134 - DNA, 19 bp, Mus musculus
  siRNA target sequence for D1Bwg0212e (NM_028043.2,1250-1268).
gttgtaaatcgactaacta

SEQ ID NO: 732135 - DNA, 19 bp, Mus musculus
  siRNA target sequence for D1Bwg0212e (NM_028043.2,1277-1295).
gacctacctcctgaattta

SEQ ID NO: 732136 - DNA, 19 bp, Mus musculus
  siRNA target sequence for D1Bwg0212e (NM_028043.2,1287-1305).
ctgaatttattcacctata

SEQ ID NO: 732137 - DNA, 19 bp, Mus musculus
  siRNA target sequence for D1Bwg0212e (NM_028043.2,1289-1307).
gaatttattcacctataca

SEQ ID NO: 732138 - DNA, 19 bp, Mus musculus
  siRNA target sequence for D1Bwg0212e (NM_028043.2,1298-1316).
cacctatacatatccaatt

SEQ ID NO: 732139 - DNA, 19 bp, Mus musculus
  siRNA target sequence for D1Bwg0212e (NM_028043.2,1306-1324).
catatccaattgcatttct

SEQ ID NO: 732140 - DNA, 19 bp, Mus musculus
  siRNA target sequence for D1Bwg0212e (NM_028043.2,1382-1400).
gtgtttctccagtctttga

SEQ ID NO: 732141 - DNA, 19 bp, Mus musculus
  siRNA target sequence for D1Bwg0212e (NM_028043.2,1393-1411).
gtctttgatccgtaacaaa

SEQ ID NO: 732142 - DNA, 19 bp, Mus musculus
  siRNA target sequence for D1Bwg0212e (NM_028043.2,1395-1413).
ctttgatccgtaacaaaat

SEQ ID NO: 732143 - DNA, 19 bp, Mus musculus
  siRNA target sequence for D1Bwg0212e (NM_028043.2,1399-1417).
gatccgtaacaaaattatt

SEQ ID NO: 732144 - DNA, 19 bp, Mus musculus
  siRNA target sequence for D1Bwg0212e (NM_028043.2,1404-1422).
gtaacaaaattattaacgt

SEQ ID NO: 732145 - DNA, 19 bp, Mus musculus
  siRNA target sequence for D1Bwg0212e (NM_028043.2,1420-1438).
cgtgcaggacttgtttata

SEQ ID NO: 732146 - DNA, 19 bp, Mus musculus
  siRNA target sequence for D1Bwg0212e (NM_028043.2,1445-1463).
caggccttctgcattgaat

SEQ ID NO: 732147 - DNA, 19 bp, Mus musculus
  siRNA target sequence for D1Bwg0212e (NM_028043.2,1447-1465).
ggccttctgcattgaattt

SEQ ID NO: 732148 - DNA, 19 bp, Mus musculus
  siRNA target sequence for Cnn3 (NM_028044.1,271-289).
ccgccgaagttaagaacaa

SEQ ID NO: 732149 - DNA, 19 bp, Mus musculus
  siRNA target sequence for Cnn3 (NM_028044.1,273-291).
gccgaagttaagaacaaga

SEQ ID NO: 732150 - DNA, 19 bp, Mus musculus
  siRNA target sequence for Cnn3 (NM_028044.1,274-292).
ccgaagttaagaacaagat

SEQ ID NO: 732151 - DNA, 19 bp, Mus musculus
  siRNA target sequence for Cnn3 (NM_028044.1,875-893).
cagccaggctgggatgtta

SEQ ID NO: 732152 - DNA, 19 bp, Mus musculus
  siRNA target sequence for Cnn3 (NM_028044.1,947-965).
ggacaactcgaccatttct

SEQ ID NO: 732153 - DNA, 19 bp, Mus musculus
  siRNA target sequence for Cnn3 (NM_028044.1,950-968).
caactcgaccatttctcta

SEQ ID NO: 732154 - DNA, 19 bp, Mus musculus
  siRNA target sequence for Cnn3 (NM_028044.1,1107-1125).
gggtcggaaatcagtgata

SEQ ID NO: 732155 - DNA, 19 bp, Mus musculus
  siRNA target sequence for 1600014E20Rik (NM_028045.1,648-666).
gtctggctatatttcctta

SEQ ID NO: 732156 - DNA, 19 bp, Mus musculus
  siRNA target sequence for 1600014E20Rik (NM_028045.1,668-686).
gttctttcctcgaatctaa

SEQ ID NO: 732157 - DNA, 19 bp, Mus musculus
  siRNA target sequence for 1600014E20Rik (NM_028045.1,671-689).
ctttcctcgaatctaattt

SEQ ID NO: 732158 - DNA, 19 bp, Mus musculus
  siRNA target sequence for 1600014E20Rik (NM_028045.1,702-720).
gttctcagggtcctaaaca

SEQ ID NO: 732159 - DNA, 19 bp, Mus musculus
  siRNA target sequence for 1600014E20Rik (NM_028045.1,741-759).
catggaagttccaggtaat

SEQ ID NO: 732160 - DNA, 19 bp, Mus musculus
  siRNA target sequence for 1600014E20Rik (NM_028045.1,808-826).
gacaggatgtgctagtact

SEQ ID NO: 732161 - DNA, 19 bp, Mus musculus
  siRNA target sequence for 1600014E20Rik (NM_028045.1,810-828).
caggatgtgctagtactat

SEQ ID NO: 732162 - DNA, 19 bp, Mus musculus
  siRNA target sequence for 1600014E20Rik (NM_028045.1,812-830).
ggatgtgctagtactataa

SEQ ID NO: 732163 - DNA, 19 bp, Mus musculus
  siRNA target sequence for 1600014E20Rik (NM_028045.1,859-877).
ccaagggaaatgtatacat

SEQ ID NO: 732164 - DNA, 19 bp, Mus musculus
  siRNA target sequence for 1600014E20Rik (NM_028045.1,875-893).
catgaaccctacaatgcta

SEQ ID NO: 732165 - DNA, 19 bp, Mus musculus
  siRNA target sequence for 1600014E20Rik (NM_028045.1,890-908).
gctatgacctctcctatat

SEQ ID NO: 732166 - DNA, 19 bp, Mus musculus
  siRNA target sequence for 1600014E20Rik (NM_028045.1,891-909).
ctatgacctctcctatata

SEQ ID NO: 732167 - DNA, 19 bp, Mus musculus
  siRNA target sequence for 1600014E20Rik (NM_028045.1,895-913).
gacctctcctatatatatt

SEQ ID NO: 732168 - DNA, 19 bp, Mus musculus
  siRNA target sequence for 1600014E20Rik (NM_028045.1,971-989).
ccacactggggctgcaaat

SEQ ID NO: 732169 - DNA, 19 bp, Mus musculus
  siRNA target sequence for 1600014E20Rik (NM_028045.1,976-994).
ctggggctgcaaatatcat

SEQ ID NO: 732170 - DNA, 19 bp, Mus musculus
  siRNA target sequence for 1600014E20Rik (NM_028045.1,979-997).
gggctgcaaatatcatagt

SEQ ID NO: 732171 - DNA, 19 bp, Mus musculus
  siRNA target sequence for 1600014E20Rik (NM_028045.1,980-998).
ggctgcaaatatcatagta

SEQ ID NO: 732172 - DNA, 19 bp, Mus musculus
  siRNA target sequence for 1600014E20Rik (NM_028045.1,1041-1059).
cggttgattggcatactaa

SEQ ID NO: 732173 - DNA, 19 bp, Mus musculus
  siRNA target sequence for 1600014E20Rik (NM_028045.1,1050-1068).
ggcatactaaggtcatgta

SEQ ID NO: 732174 - DNA, 19 bp, Mus musculus
  siRNA target sequence for 1600014E20Rik (NM_028045.1,1051-1069).
gcatactaaggtcatgtat

SEQ ID NO: 732175 - DNA, 19 bp, Mus musculus
  siRNA target sequence for 1600014E20Rik (NM_028045.1,1056-1074).
ctaaggtcatgtattcgat

SEQ ID NO: 732176 - DNA, 19 bp, Mus musculus
  siRNA target sequence for 1600014E20Rik (NM_028045.1,1106-1124).
ggggttgagggtcatatct

SEQ ID NO: 732177 - DNA, 19 bp, Mus musculus
  siRNA target sequence for 1600014E20Rik (NM_028045.1,1109-1127).
gttgagggtcatatctaca

SEQ ID NO: 732178 - DNA, 19 bp, Mus musculus
  siRNA target sequence for 1600014E20Rik (NM_028045.1,1116-1134).
gtcatatctacagacataa

SEQ ID NO: 732179 - DNA, 19 bp, Mus musculus
  siRNA target sequence for 1600014E20Rik (NM_028045.1,1148-1166).
ggctatgacaagaagacta

SEQ ID NO: 732180 - DNA, 19 bp, Mus musculus
  siRNA target sequence for 1600014E20Rik (NM_028045.1,1149-1167).
gctatgacaagaagactaa

SEQ ID NO: 732181 - DNA, 19 bp, Mus musculus
  siRNA target sequence for 1600014E20Rik (NM_028045.1,1184-1202).
ggtttagacagatttccat

SEQ ID NO: 732182 - DNA, 19 bp, Mus musculus
  siRNA target sequence for 1500002O20Rik (NM_028047.1,702-720).
gcctgtgtaccagattcaa

SEQ ID NO: 732183 - DNA, 19 bp, Mus musculus
  siRNA target sequence for 1500002O20Rik (NM_028047.1,882-900).
gttagtggtcggtgtctta

SEQ ID NO: 732184 - DNA, 19 bp, Mus musculus
  siRNA target sequence for 1500002O20Rik (NM_028047.1,964-982).
gaccagagagcgtatgtct

SEQ ID NO: 732185 - DNA, 19 bp, Mus musculus
  siRNA target sequence for 1500002O20Rik (NM_028047.1,1052-1070).
cccaagagcggattgtctt

SEQ ID NO: 732186 - DNA, 19 bp, Mus musculus
  siRNA target sequence for 1500002O20Rik (NM_028047.1,1104-1122).
cttggaccacctcatcaat

SEQ ID NO: 732187 - DNA, 19 bp, Mus musculus
  siRNA target sequence for 1500002O20Rik (NM_028047.1,1738-1756).
ctcactgagaagaattggt

SEQ ID NO: 732188 - DNA, 19 bp, Mus musculus
  siRNA target sequence for 0610033L19Rik (NM_028049.1,400-418).
gagtgtcgtggccataaaa

SEQ ID NO: 732189 - DNA, 19 bp, Mus musculus
  siRNA target sequence for 0610033L19Rik (NM_028049.1,402-420).
gtgtcgtggccataaaaga

SEQ ID NO: 732190 - DNA, 19 bp, Mus musculus
  siRNA target sequence for 0610033L19Rik (NM_028049.1,484-502).
caagtccttgggattgtga

SEQ ID NO: 732191 - DNA, 19 bp, Mus musculus
  siRNA target sequence for 0610033L19Rik (NM_028049.1,539-557).
gcaatcgacctcaggaaat

SEQ ID NO: 732192 - DNA, 19 bp, Mus musculus
  siRNA target sequence for 0610033L19Rik (NM_028049.1,540-558).
caatcgacctcaggaaata

SEQ ID NO: 732193 - DNA, 19 bp, Mus musculus
  siRNA target sequence for 0610033L19Rik (NM_028049.1,544-562).
cgacctcaggaaatagaaa

SEQ ID NO: 732194 - DNA, 19 bp, Mus musculus
  siRNA target sequence for 0610033L19Rik (NM_028049.1,591-609).
ccctcaaattgaaggaata

SEQ ID NO: 732195 - DNA, 19 bp, Mus musculus
  siRNA target sequence for 0610033L19Rik (NM_028049.1,592-610).
cctcaaattgaaggaataa

SEQ ID NO: 732196 - DNA, 19 bp, Mus musculus
  siRNA target sequence for 0610033L19Rik (NM_028049.1,766-784).
cgggtagtcagcactttca

SEQ ID NO: 732197 - DNA, 19 bp, Mus musculus
  siRNA target sequence for 0610033L19Rik (NM_028049.1,776-794).
gcactttcagcgatatgaa

SEQ ID NO: 732198 - DNA, 19 bp, Mus musculus
  siRNA target sequence for 0610033L19Rik (NM_028049.1,777-795).
cactttcagcgatatgaat

SEQ ID NO: 732199 - DNA, 19 bp, Mus musculus
  siRNA target sequence for 0610033L19Rik (NM_028049.1,779-797).
ctttcagcgatatgaatat

SEQ ID NO: 732200 - DNA, 19 bp, Mus musculus
  siRNA target sequence for 0610033L19Rik (NM_028049.1,785-803).
gcgatatgaatatcatctt

SEQ ID NO: 732201 - DNA, 19 bp, Mus musculus
  siRNA target sequence for 0610033L19Rik (NM_028049.1,813-831).
ccaggtggacaatttgtct

SEQ ID NO: 732202 - DNA, 19 bp, Mus musculus
  siRNA target sequence for 0610033L19Rik (NM_028049.1,849-867).
gaaccctctggatattgat

SEQ ID NO: 732203 - DNA, 19 bp, Mus musculus
  siRNA target sequence for 0610033L19Rik (NM_028049.1,879-897).
ggttggactgtcatttagt

SEQ ID NO: 732204 - DNA, 19 bp, Mus musculus
  siRNA target sequence for 0610033L19Rik (NM_028049.1,927-945).
cctcactgaggatgtaaat

SEQ ID NO: 732205 - DNA, 19 bp, Mus musculus
  siRNA target sequence for 0610033L19Rik (NM_028049.1,1033-1051).
gttggccgaggctttcagt

SEQ ID NO: 732206 - DNA, 19 bp, Mus musculus
  siRNA target sequence for 0610033L19Rik (NM_028049.1,1037-1055).
gccgaggctttcagtacta

SEQ ID NO: 732207 - DNA, 19 bp, Mus musculus
  siRNA target sequence for 0610033L19Rik (NM_028049.1,1039-1057).
cgaggctttcagtactaca

SEQ ID NO: 732208 - DNA, 19 bp, Mus musculus
  siRNA target sequence for 0610033L19Rik (NM_028049.1,1078-1096).
gctgatgcatttagaaagt

SEQ ID NO: 732209 - DNA, 19 bp, Mus musculus
  siRNA target sequence for 0610033L19Rik (NM_028049.1,1110-1128).
ccccttatttggcttcttt

SEQ ID NO: 732210 - DNA, 19 bp, Mus musculus
  siRNA target sequence for 0610033L19Rik (NM_028049.1,1144-1162).
ggctgcgaccggatagtca

SEQ ID NO: 732211 - DNA, 19 bp, Mus musculus
  siRNA target sequence for 0610033L19Rik (NM_028049.1,1201-1219).
gaagaggacctgttccata

SEQ ID NO: 732212 - DNA, 19 bp, Mus musculus
  siRNA target sequence for 0610033L19Rik (NM_028049.1,1246-1264).
cacctgggaacctctaaat

SEQ ID NO: 732213 - DNA, 19 bp, Mus musculus
  siRNA target sequence for 1500005J14Rik (NM_028058.1,137-155).
cctccccaagactatgaaa

SEQ ID NO: 732214 - DNA, 19 bp, Mus musculus
  siRNA target sequence for 1500005J14Rik (NM_028058.1,152-170).
gaaagcgatgacgaatcat

SEQ ID NO: 732215 - DNA, 19 bp, Mus musculus
  siRNA target sequence for 1500005J14Rik (NM_028058.1,157-175).
cgatgacgaatcatacgaa

SEQ ID NO: 732216 - DNA, 19 bp, Mus musculus
  siRNA target sequence for 1500005J14Rik (NM_028058.1,168-186).
catacgaagtgttggattt

SEQ ID NO: 732217 - DNA, 19 bp, Mus musculus
  siRNA target sequence for 1500005J14Rik (NM_028058.1,172-190).
cgaagtgttggatttaact

SEQ ID NO: 732218 - DNA, 19 bp, Mus musculus
  siRNA target sequence for 1500005J14Rik (NM_028058.1,176-194).
gtgttggatttaactgaat

SEQ ID NO: 732219 - DNA, 19 bp, Mus musculus
  siRNA target sequence for 1500005J14Rik (NM_028058.1,181-199).
ggatttaactgaatatgca

SEQ ID NO: 732220 - DNA, 19 bp, Mus musculus
  siRNA target sequence for 1500005J14Rik (NM_028058.1,235-253).
cagttccggacctatggta

SEQ ID NO: 732221 - DNA, 19 bp, Mus musculus
  siRNA target sequence for 1500005J14Rik (NM_028058.1,240-258).
ccggacctatggtagaaaa

SEQ ID NO: 732222 - DNA, 19 bp, Mus musculus
  siRNA target sequence for 1500005J14Rik (NM_028058.1,241-259).
cggacctatggtagaaaaa

SEQ ID NO: 732223 - DNA, 19 bp, Mus musculus
  siRNA target sequence for 1500005J14Rik (NM_028058.1,242-260).
ggacctatggtagaaaaat

SEQ ID NO: 732224 - DNA, 19 bp, Mus musculus
  siRNA target sequence for 1500005J14Rik (NM_028058.1,243-261).
gacctatggtagaaaaata

SEQ ID NO: 732225 - DNA, 19 bp, Mus musculus
  siRNA target sequence for 1500005J14Rik (NM_028058.1,245-263).
cctatggtagaaaaatact

SEQ ID NO: 732226 - DNA, 19 bp, Mus musculus
  siRNA target sequence for 1500005J14Rik (NM_028058.1,262-280).
ctcagtagctactcagatt

SEQ ID NO: 732227 - DNA, 19 bp, Mus musculus
  siRNA target sequence for 1500005J14Rik (NM_028058.1,264-282).
cagtagctactcagattgt

SEQ ID NO: 732228 - DNA, 19 bp, Mus musculus
  siRNA target sequence for 1500005J14Rik (NM_028058.1,299-317).
ggctggtgtgcaggatttt

SEQ ID NO: 732229 - DNA, 19 bp, Mus musculus
  siRNA target sequence for 1500005J14Rik (NM_028058.1,387-405).
gtcacagtggctatgtaca

SEQ ID NO: 732230 - DNA, 19 bp, Mus musculus
  siRNA target sequence for 1500005J14Rik (NM_028058.1,415-433).
gaagagagttgaaaaagat

SEQ ID NO: 732231 - DNA, 19 bp, Mus musculus
  siRNA target sequence for 1500005J14Rik (NM_028058.1,460-478).
gaagcgagcaaataaagca

SEQ ID NO: 732232 - DNA, 19 bp, Mus musculus
  siRNA target sequence for 1500005J14Rik (NM_028058.1,480-498).
cacctgaaatcaacaatat

SEQ ID NO: 732233 - DNA, 19 bp, Mus musculus
  siRNA target sequence for 1500005J14Rik (NM_028058.1,523-541).
caagcagaacattgtgata

SEQ ID NO: 732234 - DNA, 19 bp, Mus musculus
  siRNA target sequence for 1500005J14Rik (NM_028058.1,527-545).
cagaacattgtgatatcca

SEQ ID NO: 732235 - DNA, 19 bp, Mus musculus
  siRNA target sequence for 1500005J14Rik (NM_028058.1,553-571).
cgtgggaggctttttgcta

SEQ ID NO: 732236 - DNA, 19 bp, Mus musculus
  siRNA target sequence for 1600021C16Rik (NM_028059.1,207-225).
cccaggctcatcagaaaaa

SEQ ID NO: 732237 - DNA, 19 bp, Mus musculus
  siRNA target sequence for 1600021C16Rik (NM_028059.1,220-238).
gaaaaaaggcagttttgca

SEQ ID NO: 732238 - DNA, 19 bp, Mus musculus
  siRNA target sequence for 1600021C16Rik (NM_028059.1,272-290).
ggacttatgcagaagcatt

SEQ ID NO: 732239 - DNA, 19 bp, Mus musculus
  siRNA target sequence for 1600021C16Rik (NM_028059.1,273-291).
gacttatgcagaagcattt

SEQ ID NO: 732240 - DNA, 19 bp, Mus musculus
  siRNA target sequence for 1600021C16Rik (NM_028059.1,347-365).
gatccagaagtcatcactt

SEQ ID NO: 732241 - DNA, 19 bp, Mus musculus
  siRNA target sequence for 1600021C16Rik (NM_028059.1,380-398).
ggttccaaatctttaattt

SEQ ID NO: 732242 - DNA, 19 bp, Mus musculus
  siRNA target sequence for 1600021C16Rik (NM_028059.1,400-418).
ctttgaaaatgggaattca

SEQ ID NO: 732243 - DNA, 19 bp, Mus musculus
  siRNA target sequence for 1600021C16Rik (NM_028059.1,488-506).
cacatggctgagttcatta

SEQ ID NO: 732244 - DNA, 19 bp, Mus musculus
  siRNA target sequence for 1600021C16Rik (NM_028059.1,519-537).
ctataccagagaatgctat

SEQ ID NO: 732245 - DNA, 19 bp, Mus musculus
  siRNA target sequence for 1600021C16Rik (NM_028059.1,563-581).
ccagatgcttctttcaata

SEQ ID NO: 732246 - DNA, 19 bp, Mus musculus
  siRNA target sequence for 1600021C16Rik (NM_028059.1,566-584).
gatgcttctttcaataata

SEQ ID NO: 732247 - DNA, 19 bp, Mus musculus
  siRNA target sequence for 1600021C16Rik (NM_028059.1,600-618).
ctcagtgtgatgatgacta

SEQ ID NO: 732248 - DNA, 19 bp, Mus musculus
  siRNA target sequence for 1600021C16Rik (NM_028059.1,699-717).
gaactgtgtgccatccaaa

SEQ ID NO: 732249 - DNA, 19 bp, Mus musculus
  siRNA target sequence for 1600021C16Rik (NM_028059.1,706-724).
gtgccatccaaaagatgta

SEQ ID NO: 732250 - DNA, 19 bp, Mus musculus
  siRNA target sequence for 1600021C16Rik (NM_028059.1,762-780).
ctcttggctgtgtaaggat

SEQ ID NO: 732251 - DNA, 19 bp, Mus musculus
  siRNA target sequence for 1600021C16Rik (NM_028059.1,764-782).
cttggctgtgtaaggatat

SEQ ID NO: 732252 - DNA, 19 bp, Mus musculus
  siRNA target sequence for 1600021C16Rik (NM_028059.1,767-785).
ggctgtgtaaggatattta

SEQ ID NO: 732253 - DNA, 19 bp, Mus musculus
  siRNA target sequence for 1600021C16Rik (NM_028059.1,768-786).
gctgtgtaaggatatttaa

SEQ ID NO: 732254 - DNA, 19 bp, Mus musculus
  siRNA target sequence for 1600021C16Rik (NM_028059.1,769-787).
ctgtgtaaggatatttaaa

SEQ ID NO: 732255 - DNA, 19 bp, Mus musculus
  siRNA target sequence for 1600021C16Rik (NM_028059.1,789-807).
gaattgggttcctaaatat

SEQ ID NO: 732256 - DNA, 19 bp, Mus musculus
  siRNA target sequence for 1600021C16Rik (NM_028059.1,821-839).
gtgcatccaactgatttaa

SEQ ID NO: 732257 - DNA, 19 bp, Mus musculus
  siRNA target sequence for 1600021C16Rik (NM_028059.1,823-841).
gcatccaactgatttaaat

SEQ ID NO: 732258 - DNA, 19 bp, Mus musculus
  siRNA target sequence for 1600021C16Rik (NM_028059.1,845-863).
cggcaaactgtaatgaagt

SEQ ID NO: 732259 - DNA, 19 bp, Mus musculus
  siRNA target sequence for 1600021C16Rik (NM_028059.1,867-885).
gtaaaggaaagtgcaaatt

SEQ ID NO: 732260 - DNA, 19 bp, Mus musculus
  siRNA target sequence for 1600021C16Rik (NM_028059.1,894-912).
ggcagtttgaggattctca

SEQ ID NO: 732261 - DNA, 19 bp, Mus musculus
  siRNA target sequence for 1600021C16Rik (NM_028059.1,895-913).
gcagtttgaggattctcaa

SEQ ID NO: 732262 - DNA, 19 bp, Mus musculus
  siRNA target sequence for 1600021C16Rik (NM_028059.1,898-916).
gtttgaggattctcaacat

SEQ ID NO: 732263 - DNA, 19 bp, Mus musculus
  siRNA target sequence for 1600021C16Rik (NM_028059.1,936-954).
gacacagctatccaaatgt

SEQ ID NO: 732264 - DNA, 19 bp, Mus musculus
  siRNA target sequence for 1600021C16Rik (NM_028059.1,942-960).
gctatccaaatgtgtactt

SEQ ID NO: 732265 - DNA, 19 bp, Mus musculus
  siRNA target sequence for 1600021C16Rik (NM_028059.1,953-971).
gtgtacttctgtttgcatt

SEQ ID NO: 732266 - DNA, 19 bp, Mus musculus
  siRNA target sequence for 1600021C16Rik (NM_028059.1,1059-1077).
cagaatgccatgagctttt

SEQ ID NO: 732267 - DNA, 19 bp, Mus musculus
  siRNA target sequence for 1600021C16Rik (NM_028059.1,1066-1084).
ccatgagctttttgaagat

SEQ ID NO: 732268 - DNA, 19 bp, Mus musculus
  siRNA target sequence for 1600021C16Rik (NM_028059.1,1103-1121).
catgaagcccagcattact

SEQ ID NO: 732269 - DNA, 19 bp, Mus musculus
  siRNA target sequence for 1600021C16Rik (NM_028059.1,1106-1124).
gaagcccagcattacttga

SEQ ID NO: 732270 - DNA, 19 bp, Mus musculus
  siRNA target sequence for 1600021C16Rik (NM_028059.1,1112-1130).
cagcattacttgagcaaaa

SEQ ID NO: 732271 - DNA, 19 bp, Mus musculus
  siRNA target sequence for 1600021C16Rik (NM_028059.1,1162-1180).
ggttcctaaccatcaagaa

SEQ ID NO: 732272 - DNA, 19 bp, Mus musculus
  siRNA target sequence for 1600021C16Rik (NM_028059.1,1167-1185).
ctaaccatcaagaaataga

SEQ ID NO: 732273 - DNA, 19 bp, Mus musculus
  siRNA target sequence for 1600021C16Rik (NM_028059.1,1184-1202).
gacccatttagtaatgaga

SEQ ID NO: 732274 - DNA, 19 bp, Mus musculus
  siRNA target sequence for 1600021C16Rik (NM_028059.1,1194-1212).
gtaatgagaaccaaactat

SEQ ID NO: 732275 - DNA, 19 bp, Mus musculus
  siRNA target sequence for 1600021C16Rik (NM_028059.1,1214-1232).
catcatccagtttctacta

SEQ ID NO: 732276 - DNA, 19 bp, Mus musculus
  siRNA target sequence for 1600021C16Rik (NM_028059.1,1217-1235).
catccagtttctactagta

SEQ ID NO: 732277 - DNA, 19 bp, Mus musculus
  siRNA target sequence for 1600021C16Rik (NM_028059.1,1220-1238).
ccagtttctactagtaagt

SEQ ID NO: 732278 - DNA, 19 bp, Mus musculus
  siRNA target sequence for 1600021C16Rik (NM_028059.1,1223-1241).
gtttctactagtaagtcaa

SEQ ID NO: 732279 - DNA, 19 bp, Mus musculus
  siRNA target sequence for 1600021C16Rik (NM_028059.1,1237-1255).
gtcaaggaaatattctaca

SEQ ID NO: 732280 - DNA, 19 bp, Mus musculus
  siRNA target sequence for 1600021C16Rik (NM_028059.1,1251-1269).
ctacagaaccaaagacata

SEQ ID NO: 732281 - DNA, 19 bp, Mus musculus
  siRNA target sequence for 1600021C16Rik (NM_028059.1,1326-1344).
ctgatgatactgtttcaaa

SEQ ID NO: 732282 - DNA, 19 bp, Mus musculus
  siRNA target sequence for 1600021C16Rik (NM_028059.1,1335-1353).
ctgtttcaaatataagctt

SEQ ID NO: 732283 - DNA, 19 bp, Mus musculus
  siRNA target sequence for 1600021C16Rik (NM_028059.1,1350-1368).
gcttgatagaccaaaagat

SEQ ID NO: 732284 - DNA, 19 bp, Mus musculus
  siRNA target sequence for 1600021C16Rik (NM_028059.1,1404-1422).
gtaccactgacttagtcaa

SEQ ID NO: 732285 - DNA, 19 bp, Mus musculus
  siRNA target sequence for 1600021C16Rik (NM_028059.1,1439-1457).
gagcaaacaccattagtta

SEQ ID NO: 732286 - DNA, 19 bp, Mus musculus
  siRNA target sequence for 1600021C16Rik (NM_028059.1,1472-1490).
ctgaaaatagatataaaca

SEQ ID NO: 732287 - DNA, 19 bp, Mus musculus
  siRNA target sequence for 1600021C16Rik (NM_028059.1,1522-1540).
cagtgttgaatcacaagaa

SEQ ID NO: 732288 - DNA, 19 bp, Mus musculus
  siRNA target sequence for 1600021C16Rik (NM_028059.1,1524-1542).
gtgttgaatcacaagaaca

SEQ ID NO: 732289 - DNA, 19 bp, Mus musculus
  siRNA target sequence for 1600021C16Rik (NM_028059.1,1541-1559).
cacagtgccctgtcagtat

SEQ ID NO: 732290 - DNA, 19 bp, Mus musculus
  siRNA target sequence for 1600021C16Rik (NM_028059.1,1543-1561).
cagtgccctgtcagtatct

SEQ ID NO: 732291 - DNA, 19 bp, Mus musculus
  siRNA target sequence for 1600021C16Rik (NM_028059.1,1545-1563).
gtgccctgtcagtatctca

SEQ ID NO: 732292 - DNA, 19 bp, Mus musculus
  siRNA target sequence for 1600021C16Rik (NM_028059.1,1597-1615).
gacttcatatggcttaatt

SEQ ID NO: 732293 - DNA, 19 bp, Mus musculus
  siRNA target sequence for 1600021C16Rik (NM_028059.1,1645-1663).
ccccagttaccttgatgaa

SEQ ID NO: 732294 - DNA, 19 bp, Mus musculus
  siRNA target sequence for 1600021C16Rik (NM_028059.1,1650-1668).
gttaccttgatgaacgata

SEQ ID NO: 732295 - DNA, 19 bp, Mus musculus
  siRNA target sequence for 1600021C16Rik (NM_028059.1,1654-1672).
ccttgatgaacgatacctt

SEQ ID NO: 732296 - DNA, 19 bp, Mus musculus
  siRNA target sequence for 1600021C16Rik (NM_028059.1,1655-1673).
cttgatgaacgatacctta

SEQ ID NO: 732297 - DNA, 19 bp, Mus musculus
  siRNA target sequence for 1600021C16Rik (NM_028059.1,1658-1676).
gatgaacgataccttagta

SEQ ID NO: 732298 - DNA, 19 bp, Mus musculus
  siRNA target sequence for 1600021C16Rik (NM_028059.1,1678-1696).
gccaaaacgcagaaaattt

SEQ ID NO: 732299 - DNA, 19 bp, Mus musculus
  siRNA target sequence for 1600021C16Rik (NM_028059.1,1715-1733).
gcctgttctgatcaagata

SEQ ID NO: 732300 - DNA, 19 bp, Mus musculus
  siRNA target sequence for 1600021C16Rik (NM_028059.1,1716-1734).
cctgttctgatcaagataa

SEQ ID NO: 732301 - DNA, 19 bp, Mus musculus
  siRNA target sequence for 1600021C16Rik (NM_028059.1,1719-1737).
gttctgatcaagataacat

SEQ ID NO: 732302 - DNA, 19 bp, Mus musculus
  siRNA target sequence for 1600021C16Rik (NM_028059.1,1722-1740).
ctgatcaagataacatgta

SEQ ID NO: 732303 - DNA, 19 bp, Mus musculus
  siRNA target sequence for 1600021C16Rik (NM_028059.1,1724-1742).
gatcaagataacatgtata

SEQ ID NO: 732304 - DNA, 19 bp, Mus musculus
  siRNA target sequence for 1600021C16Rik (NM_028059.1,1748-1766).
ccagtgaaaagattacgat

SEQ ID NO: 732305 - DNA, 19 bp, Mus musculus
  siRNA target sequence for 1600021C16Rik (NM_028059.1,1776-1794).
gcctgaccacctactgtaa

SEQ ID NO: 732306 - DNA, 19 bp, Mus musculus
  siRNA target sequence for 1600021C16Rik (NM_028059.1,1777-1795).
cctgaccacctactgtaat

SEQ ID NO: 732307 - DNA, 19 bp, Mus musculus
  siRNA target sequence for 1600021C16Rik (NM_028059.1,1780-1798).
gaccacctactgtaatgca

SEQ ID NO: 732308 - DNA, 19 bp, Mus musculus
  siRNA target sequence for 1500009K05Rik (NM_028060.2,1302-1320).
gcatcgggatcgacaattt

SEQ ID NO: 732309 - DNA, 19 bp, Mus musculus
  siRNA target sequence for 1600025H15Rik (NM_028064.2,215-233).
gaactggacggcctgttaa

SEQ ID NO: 732310 - DNA, 19 bp, Mus musculus
  siRNA target sequence for 1600025H15Rik (NM_028064.2,218-236).
ctggacggcctgttaaata

SEQ ID NO: 732311 - DNA, 19 bp, Mus musculus
  siRNA target sequence for 1600025H15Rik (NM_028064.2,350-368).
ctggagtccagacacatta

SEQ ID NO: 732312 - DNA, 19 bp, Mus musculus
  siRNA target sequence for 1600025H15Rik (NM_028064.2,352-370).
ggagtccagacacattatt

SEQ ID NO: 732313 - DNA, 19 bp, Mus musculus
  siRNA target sequence for 1600025H15Rik (NM_028064.2,353-371).
gagtccagacacattattt

SEQ ID NO: 732314 - DNA, 19 bp, Mus musculus
  siRNA target sequence for 1600025H15Rik (NM_028064.2,358-376).
cagacacattatttacctt

SEQ ID NO: 732315 - DNA, 19 bp, Mus musculus
  siRNA target sequence for 1600025H15Rik (NM_028064.2,386-404).
gctgccctctaccttaaca

SEQ ID NO: 732316 - DNA, 19 bp, Mus musculus
  siRNA target sequence for 1600025H15Rik (NM_028064.2,387-405).
ctgccctctaccttaacaa

SEQ ID NO: 732317 - DNA, 19 bp, Mus musculus
  siRNA target sequence for 1600025H15Rik (NM_028064.2,397-415).
ccttaacaacccagagaaa

SEQ ID NO: 732318 - DNA, 19 bp, Mus musculus
  siRNA target sequence for 1600025H15Rik (NM_028064.2,447-465).
cctcccatgtggacgatta

SEQ ID NO: 732319 - DNA, 19 bp, Mus musculus
  siRNA target sequence for 1600025H15Rik (NM_028064.2,450-468).
cccatgtggacgattacct

SEQ ID NO: 732320 - DNA, 19 bp, Mus musculus
  siRNA target sequence for 1600025H15Rik (NM_028064.2,604-622).
ggcagcaggggtttccaaa

SEQ ID NO: 732321 - DNA, 19 bp, Mus musculus
  siRNA target sequence for 1600025H15Rik (NM_028064.2,732-750).
gtagtgaccctcccaatat

SEQ ID NO: 732322 - DNA, 19 bp, Mus musculus
  siRNA target sequence for 1600025H15Rik (NM_028064.2,893-911).
ccccacaacagcaactcta

SEQ ID NO: 732323 - DNA, 19 bp, Mus musculus
  siRNA target sequence for 1600025H15Rik (NM_028064.2,898-916).
caacagcaactctagtgta

SEQ ID NO: 732324 - DNA, 19 bp, Mus musculus
  siRNA target sequence for 1600025H15Rik (NM_028064.2,928-946).
gtgcctgagtgccaaagat

SEQ ID NO: 732325 - DNA, 19 bp, Mus musculus
  siRNA target sequence for 1600025H15Rik (NM_028064.2,1073-1091).
caggaccagctcagtcaaa

SEQ ID NO: 732326 - DNA, 19 bp, Mus musculus
  siRNA target sequence for 1600025H15Rik (NM_028064.2,1361-1379).
gtacttggaggcttctaca

SEQ ID NO: 732327 - DNA, 19 bp, Mus musculus
  siRNA target sequence for 1600025H15Rik (NM_028064.2,1388-1406).
ctgtttgagagcttcttca

SEQ ID NO: 732328 - DNA, 19 bp, Mus musculus
  siRNA target sequence for 1600025H15Rik (NM_028064.2,1398-1416).
gcttcttcaacctcttgtt

SEQ ID NO: 732329 - DNA, 19 bp, Mus musculus
  siRNA target sequence for 1600025H15Rik (NM_028064.2,1611-1629).
gactgttgccctatctgat

SEQ ID NO: 732330 - DNA, 19 bp, Mus musculus
  siRNA target sequence for 1600025H15Rik (NM_028064.2,1800-1818).
gtgcgcttttgctgaatct

SEQ ID NO: 732331 - DNA, 19 bp, Mus musculus
  siRNA target sequence for 1600025H15Rik (NM_028064.2,1879-1897).
ggagggcgaggcttggatt

SEQ ID NO: 732332 - DNA, 19 bp, Mus musculus
  siRNA target sequence for 1600025H15Rik (NM_028064.2,1908-1926).
caaccggcctcttccttta

SEQ ID NO: 732333 - DNA, 19 bp, Mus musculus
  siRNA target sequence for 1600025H15Rik (NM_028064.2,1911-1929).
ccggcctcttcctttacgt

SEQ ID NO: 732334 - DNA, 19 bp, Mus musculus
  siRNA target sequence for 1600025D17Rik (NM_028065.2,115-133).
ccgctgcctcttatttcct

SEQ ID NO: 732335 - DNA, 19 bp, Mus musculus
  siRNA target sequence for 1600025D17Rik (NM_028065.2,215-233).
gtgcgattgcccagcaaat

SEQ ID NO: 732336 - DNA, 19 bp, Mus musculus
  siRNA target sequence for 1600025D17Rik (NM_028065.2,361-379).
gtcggacttacggttaatt

SEQ ID NO: 732337 - DNA, 19 bp, Mus musculus
  siRNA target sequence for 1600025D17Rik (NM_028065.2,364-382).
ggacttacggttaattgaa

SEQ ID NO: 732338 - DNA, 19 bp, Mus musculus
  siRNA target sequence for 1600025D17Rik (NM_028065.2,383-401).
gtcactgagaccatttgca

SEQ ID NO: 732339 - DNA, 19 bp, Mus musculus
  siRNA target sequence for 1810055G02Rik (NM_028077.1,462-480).
cctagaagccatatgatgt

SEQ ID NO: 732340 - DNA, 19 bp, Mus musculus
  siRNA target sequence for 1810055G02Rik (NM_028077.1,484-502).
cagagccacgaaacatagt

SEQ ID NO: 732341 - DNA, 19 bp, Mus musculus
  siRNA target sequence for 1810055G02Rik (NM_028077.1,490-508).
cacgaaacatagtcactaa

SEQ ID NO: 732342 - DNA, 19 bp, Mus musculus
  siRNA target sequence for 1810055G02Rik (NM_028077.1,492-510).
cgaaacatagtcactaaca

SEQ ID NO: 732343 - DNA, 19 bp, Mus musculus
  siRNA target sequence for 1810055G02Rik (NM_028077.1,514-532).
ggcctaaagcagtaaatca

SEQ ID NO: 732344 - DNA, 19 bp, Mus musculus
  siRNA target sequence for 1810055G02Rik (NM_028077.1,515-533).
gcctaaagcagtaaatcaa

SEQ ID NO: 732345 - DNA, 19 bp, Mus musculus
  siRNA target sequence for 1810055G02Rik (NM_028077.1,550-568).
cagttccaaggactgataa

SEQ ID NO: 732346 - DNA, 19 bp, Mus musculus
  siRNA target sequence for 1810055G02Rik (NM_028077.1,552-570).
gttccaaggactgataata

SEQ ID NO: 732347 - DNA, 19 bp, Mus musculus
  siRNA target sequence for 1810055G02Rik (NM_028077.1,598-616).
cacctgctcctgtcacatt

SEQ ID NO: 732348 - DNA, 19 bp, Mus musculus
  siRNA target sequence for 1810055G02Rik (NM_028077.1,603-621).
gctcctgtcacattgacaa

SEQ ID NO: 732349 - DNA, 19 bp, Mus musculus
  siRNA target sequence for 1810055G02Rik (NM_028077.1,633-651).
gcagccaccctgaactcta

SEQ ID NO: 732350 - DNA, 19 bp, Mus musculus
  siRNA target sequence for 1810055G02Rik (NM_028077.1,918-936).
gcaggcaccgtaaacacaa

SEQ ID NO: 732351 - DNA, 19 bp, Mus musculus
  siRNA target sequence for 1810055G02Rik (NM_028077.1,923-941).
caccgtaaacacaagtgat

SEQ ID NO: 732352 - DNA, 19 bp, Mus musculus
  siRNA target sequence for 1810055G02Rik (NM_028077.1,1126-1144).
ccacccaggtacaaaccaa

SEQ ID NO: 732353 - DNA, 19 bp, Mus musculus
  siRNA target sequence for 1810055G02Rik (NM_028077.1,1191-1209).
cctgatgtagacgtcatat

SEQ ID NO: 732354 - DNA, 19 bp, Mus musculus
  siRNA target sequence for 1810055G02Rik (NM_028077.1,1223-1241).
gccaagccctacattacct

SEQ ID NO: 732355 - DNA, 19 bp, Mus musculus
  siRNA target sequence for 1810055G02Rik (NM_028077.1,1224-1242).
ccaagccctacattaccta

SEQ ID NO: 732356 - DNA, 19 bp, Mus musculus
  siRNA target sequence for 1810055G02Rik (NM_028077.1,1425-1443).
ccatccttggtgaacaaga

SEQ ID NO: 732357 - DNA, 19 bp, Mus musculus
  siRNA target sequence for 1810055G02Rik (NM_028077.1,1426-1444).
catccttggtgaacaagat

SEQ ID NO: 732358 - DNA, 19 bp, Mus musculus
  siRNA target sequence for 1810055G02Rik (NM_028077.1,1487-1505).
cgcagtcctggtgatgttt

SEQ ID NO: 732359 - DNA, 19 bp, Mus musculus
  siRNA target sequence for 1810055G02Rik (NM_028077.1,1516-1534).
cctatgagagctacaagaa

SEQ ID NO: 732360 - DNA, 19 bp, Mus musculus
  siRNA target sequence for 1810055G02Rik (NM_028077.1,1550-1568).
ggtggactacctgatcaat

SEQ ID NO: 732361 - DNA, 19 bp, Mus musculus
  siRNA target sequence for Jam4 (NM_028078.1,131-149).
cttccggatccagttatca

SEQ ID NO: 732362 - DNA, 19 bp, Mus musculus
  siRNA target sequence for Jam4 (NM_028078.1,134-152).
ccggatccagttatcagat

SEQ ID NO: 732363 - DNA, 19 bp, Mus musculus
  siRNA target sequence for Jam4 (NM_028078.1,137-155).
gatccagttatcagatcat

SEQ ID NO: 732364 - DNA, 19 bp, Mus musculus
  siRNA target sequence for Jam4 (NM_028078.1,153-171).
catagaaggtcctcagaat

SEQ ID NO: 732365 - DNA, 19 bp, Mus musculus
  siRNA target sequence for Jam4 (NM_028078.1,161-179).
gtcctcagaatgtaacagt

SEQ ID NO: 732366 - DNA, 19 bp, Mus musculus
  siRNA target sequence for Jam4 (NM_028078.1,237-255).
catgtggactcttaaccaa

SEQ ID NO: 732367 - DNA, 19 bp, Mus musculus
  siRNA target sequence for Jam4 (NM_028078.1,242-260).
ggactcttaaccaaatggt

SEQ ID NO: 732368 - DNA, 19 bp, Mus musculus
  siRNA target sequence for Jam4 (NM_028078.1,338-356).
gcttcatctcggagttgat

SEQ ID NO: 732369 - DNA, 19 bp, Mus musculus
  siRNA target sequence for Jam4 (NM_028078.1,643-661).
gcagatccggagacaaagt

SEQ ID NO: 732370 - DNA, 19 bp, Mus musculus
  siRNA target sequence for Jam4 (NM_028078.1,644-662).
cagatccggagacaaagtt

SEQ ID NO: 732371 - DNA, 19 bp, Mus musculus
  siRNA target sequence for Jam4 (NM_028078.1,646-664).
gatccggagacaaagttaa

SEQ ID NO: 732372 - DNA, 19 bp, Mus musculus
  siRNA target sequence for Jam4 (NM_028078.1,649-667).
ccggagacaaagttaaaaa

SEQ ID NO: 732373 - DNA, 19 bp, Mus musculus
  siRNA target sequence for Jam4 (NM_028078.1,676-694).
gaaaactacgggtacagtt

SEQ ID NO: 732374 - DNA, 19 bp, Mus musculus
  siRNA target sequence for Jam4 (NM_028078.1,767-785).
gcagcagtagccttcctta

SEQ ID NO: 732375 - DNA, 19 bp, Mus musculus
  siRNA target sequence for Jam4 (NM_028078.1,768-786).
cagcagtagccttccttat

SEQ ID NO: 732376 - DNA, 19 bp, Mus musculus
  siRNA target sequence for Jam4 (NM_028078.1,807-825).
gcccggtccagcaactcat

SEQ ID NO: 732377 - DNA, 19 bp, Mus musculus
  siRNA target sequence for Jam4 (NM_028078.1,826-844).
ccacgggtttcctttgaca

SEQ ID NO: 732378 - DNA, 19 bp, Mus musculus
  siRNA target sequence for Jam4 (NM_028078.1,827-845).
cacgggtttcctttgacat

SEQ ID NO: 732379 - DNA, 19 bp, Mus musculus
  siRNA target sequence for Cnot2 (NM_028082.1,212-230).
gagggggatgagcaacaat

SEQ ID NO: 732380 - DNA, 19 bp, Mus musculus
  siRNA target sequence for Cnot2 (NM_028082.1,227-245).
caatacccctcagttaaat

SEQ ID NO: 732381 - DNA, 19 bp, Mus musculus
  siRNA target sequence for Cnot2 (NM_028082.1,239-257).
gttaaatcgcagcttatca

SEQ ID NO: 732382 - DNA, 19 bp, Mus musculus
  siRNA target sequence for Cnot2 (NM_028082.1,278-296).
ccacgtcacgccaacaaca

SEQ ID NO: 732383 - DNA, 19 bp, Mus musculus
  siRNA target sequence for Cnot2 (NM_028082.1,331-349).
ctccaagcaggggtatttt

SEQ ID NO: 732384 - DNA, 19 bp, Mus musculus
  siRNA target sequence for Cnot2 (NM_028082.1,341-359).
gggtattttgcctatgaat

SEQ ID NO: 732385 - DNA, 19 bp, Mus musculus
  siRNA target sequence for Cnot2 (NM_028082.1,350-368).
gcctatgaatcctaggaat

SEQ ID NO: 732386 - DNA, 19 bp, Mus musculus
  siRNA target sequence for Cnot2 (NM_028082.1,387-405).
gttggtcagggcattggaa

SEQ ID NO: 732387 - DNA, 19 bp, Mus musculus
  siRNA target sequence for Cnot2 (NM_028082.1,408-426).
cctagcaggacaaatagca

SEQ ID NO: 732388 - DNA, 19 bp, Mus musculus
  siRNA target sequence for Cnot2 (NM_028082.1,409-427).
ctagcaggacaaatagcat

SEQ ID NO: 732389 - DNA, 19 bp, Mus musculus
  siRNA target sequence for Cnot2 (NM_028082.1,455-473).
cagaagctcgccaagcata

SEQ ID NO: 732390 - DNA, 19 bp, Mus musculus
  siRNA target sequence for Cnot2 (NM_028082.1,461-479).
ctcgccaagcataatatgt

SEQ ID NO: 732391 - DNA, 19 bp, Mus musculus
  siRNA target sequence for Cnot2 (NM_028082.1,463-481).
cgccaagcataatatgtat

SEQ ID NO: 732392 - DNA, 19 bp, Mus musculus
  siRNA target sequence for Cnot2 (NM_028082.1,495-513).
ccttctcgacagcctttta

SEQ ID NO: 732393 - DNA, 19 bp, Mus musculus
  siRNA target sequence for Cnot2 (NM_028082.1,499-517).
ctcgacagccttttactgt

SEQ ID NO: 732394 - DNA, 19 bp, Mus musculus
  siRNA target sequence for Cnot2 (NM_028082.1,547-565).
ggaatcaggcatttggaat

SEQ ID NO: 732395 - DNA, 19 bp, Mus musculus
  siRNA target sequence for Cnot2 (NM_028082.1,566-584).
gaataactccttatcaagt

SEQ ID NO: 732396 - DNA, 19 bp, Mus musculus
  siRNA target sequence for Cnot2 (NM_028082.1,572-590).
ctccttatcaagtaacatt

SEQ ID NO: 732397 - DNA, 19 bp, Mus musculus
  siRNA target sequence for Cnot2 (NM_028082.1,574-592).
ccttatcaagtaacatttt

SEQ ID NO: 732398 - DNA, 19 bp, Mus musculus
  siRNA target sequence for Cnot2 (NM_028082.1,650-668).
gttagctgaccggaataga

SEQ ID NO: 732399 - DNA, 19 bp, Mus musculus
  siRNA target sequence for Cnot2 (NM_028082.1,680-698).
cggcaacccaactccatta

SEQ ID NO: 732400 - DNA, 19 bp, Mus musculus
  siRNA target sequence for Cnot2 (NM_028082.1,681-699).
ggcaacccaactccattaa

SEQ ID NO: 732401 - DNA, 19 bp, Mus musculus
  siRNA target sequence for Cnot2 (NM_028082.1,718-736).
gagctccttacgttggaat

SEQ ID NO: 732402 - DNA, 19 bp, Mus musculus
  siRNA target sequence for Cnot2 (NM_028082.1,723-741).
ccttacgttggaatggtaa

SEQ ID NO: 732403 - DNA, 19 bp, Mus musculus
  siRNA target sequence for Cnot2 (NM_028082.1,728-746).
cgttggaatggtaacaaaa

SEQ ID NO: 732404 - DNA, 19 bp, Mus musculus
  siRNA target sequence for Cnot2 (NM_028082.1,763-781).
cccaagacttctcaataca

SEQ ID NO: 732405 - DNA, 19 bp, Mus musculus
  siRNA target sequence for Cnot2 (NM_028082.1,785-803).
cgaagattttccagcatta

SEQ ID NO: 732406 - DNA, 19 bp, Mus musculus
  siRNA target sequence for Cnot2 (NM_028082.1,805-823).
ctggttccagctataaaga

SEQ ID NO: 732407 - DNA, 19 bp, Mus musculus
  siRNA target sequence for Cnot2 (NM_028082.1,840-858).
gacgacagcaaatctaatt

SEQ ID NO: 732408 - DNA, 19 bp, Mus musculus
  siRNA target sequence for Cnot2 (NM_028082.1,843-861).
gacagcaaatctaatttga

SEQ ID NO: 732409 - DNA, 19 bp, Mus musculus
  siRNA target sequence for Cnot2 (NM_028082.1,845-863).
cagcaaatctaatttgagt

SEQ ID NO: 732410 - DNA, 19 bp, Mus musculus
  siRNA target sequence for Cnot2 (NM_028082.1,869-887).
ggggaagacgacttcaagt

SEQ ID NO: 732411 - DNA, 19 bp, Mus musculus
  siRNA target sequence for Cnot2 (NM_028082.1,870-888).
gggaagacgacttcaagta

SEQ ID NO: 732412 - DNA, 19 bp, Mus musculus
  siRNA target sequence for Cnot2 (NM_028082.1,872-890).
gaagacgacttcaagtaca

SEQ ID NO: 732413 - DNA, 19 bp, Mus musculus
  siRNA target sequence for Cnot2 (NM_028082.1,875-893).
gacgacttcaagtacagat

SEQ ID NO: 732414 - DNA, 19 bp, Mus musculus
  siRNA target sequence for Cnot2 (NM_028082.1,898-916).
ccaaattccctggagataa

SEQ ID NO: 732415 - DNA, 19 bp, Mus musculus
  siRNA target sequence for Cnot2 (NM_028082.1,906-924).
cctggagataaaagttcaa

SEQ ID NO: 732416 - DNA, 19 bp, Mus musculus
  siRNA target sequence for Cnot2 (NM_028082.1,969-987).
cctgatggtcgagttacta

SEQ ID NO: 732417 - DNA, 19 bp, Mus musculus
  siRNA target sequence for Cnot2 (NM_028082.1,970-988).
ctgatggtcgagttactaa

SEQ ID NO: 732418 - DNA, 19 bp, Mus musculus
  siRNA target sequence for Cnot2 (NM_028082.1,1000-1018).
ggatggtgacggaccaatt

SEQ ID NO: 732419 - DNA, 19 bp, Mus musculus
  siRNA target sequence for Cnot2 (NM_028082.1,1001-1019).
gatggtgacggaccaattt

SEQ ID NO: 732420 - DNA, 19 bp, Mus musculus
  siRNA target sequence for Cnot2 (NM_028082.1,1004-1022).
ggtgacggaccaatttgga

SEQ ID NO: 732421 - DNA, 19 bp, Mus musculus
  siRNA target sequence for Cnot2 (NM_028082.1,1009-1027).
cggaccaatttggaatgat

SEQ ID NO: 732422 - DNA, 19 bp, Mus musculus
  siRNA target sequence for Cnot2 (NM_028082.1,1010-1028).
ggaccaatttggaatgatt

SEQ ID NO: 732423 - DNA, 19 bp, Mus musculus
  siRNA target sequence for Cnot2 (NM_028082.1,1029-1047).
ggcctgttaacatttatca

SEQ ID NO: 732424 - DNA, 19 bp, Mus musculus
  siRNA target sequence for Cnot2 (NM_028082.1,1090-1108).
gaagtgacttaacaacatt

SEQ ID NO: 732425 - DNA, 19 bp, Mus musculus
  siRNA target sequence for Cnot2 (NM_028082.1,1174-1192).
cttgtcggcctcaagacat

SEQ ID NO: 732426 - DNA, 19 bp, Mus musculus
  siRNA target sequence for Cnot2 (NM_028082.1,1177-1195).
gtcggcctcaagacataga

SEQ ID NO: 732427 - DNA, 19 bp, Mus musculus
  siRNA target sequence for Cnot2 (NM_028082.1,1179-1197).
cggcctcaagacatagact

SEQ ID NO: 732428 - DNA, 19 bp, Mus musculus
  siRNA target sequence for Cnot2 (NM_028082.1,1180-1198).
ggcctcaagacatagactt

SEQ ID NO: 732429 - DNA, 19 bp, Mus musculus
  siRNA target sequence for Cnot2 (NM_028082.1,1199-1217).
ccatgttccatcagaatat

SEQ ID NO: 732430 - DNA, 19 bp, Mus musculus
  siRNA target sequence for Cnot2 (NM_028082.1,1200-1218).
catgttccatcagaatatt

SEQ ID NO: 732431 - DNA, 19 bp, Mus musculus
  siRNA target sequence for Cnot2 (NM_028082.1,1206-1224).
ccatcagaatatttaacaa

SEQ ID NO: 732432 - DNA, 19 bp, Mus musculus
  siRNA target sequence for Cnot2 (NM_028082.1,1207-1225).
catcagaatatttaacaaa

SEQ ID NO: 732433 - DNA, 19 bp, Mus musculus
  siRNA target sequence for Cnot2 (NM_028082.1,1256-1274).
caaacttggccgatatgga

SEQ ID NO: 732434 - DNA, 19 bp, Mus musculus
  siRNA target sequence for Cnot2 (NM_028082.1,1273-1291).
gagaagacctcctcttcta

SEQ ID NO: 732435 - DNA, 19 bp, Mus musculus
  siRNA target sequence for Cnot2 (NM_028082.1,1312-1330).
gggatgtattacaactctt

SEQ ID NO: 732436 - DNA, 19 bp, Mus musculus
  siRNA target sequence for Cnot2 (NM_028082.1,1313-1331).
ggatgtattacaactctta

SEQ ID NO: 732437 - DNA, 19 bp, Mus musculus
  siRNA target sequence for Cnot2 (NM_028082.1,1328-1346).
cttagctgcggtagaactt

SEQ ID NO: 732438 - DNA, 19 bp, Mus musculus
  siRNA target sequence for Cnot2 (NM_028082.1,1332-1350).
gctgcggtagaacttttta

SEQ ID NO: 732439 - DNA, 19 bp, Mus musculus
  siRNA target sequence for Cnot2 (NM_028082.1,1333-1351).
ctgcggtagaactttttaa

SEQ ID NO: 732440 - DNA, 19 bp, Mus musculus
  siRNA target sequence for Cnot2 (NM_028082.1,1373-1391).
ggaggagcgggtatggatt

SEQ ID NO: 732441 - DNA, 19 bp, Mus musculus
  siRNA target sequence for Cnot2 (NM_028082.1,1374-1392).
gaggagcgggtatggatta

SEQ ID NO: 732442 - DNA, 19 bp, Mus musculus
  siRNA target sequence for Cnot2 (NM_028082.1,1377-1395).
gagcgggtatggattacca

SEQ ID NO: 732443 - DNA, 19 bp, Mus musculus
  siRNA target sequence for Cnot2 (NM_028082.1,1444-1462).
ggacctactatttctttga

SEQ ID NO: 732444 - DNA, 19 bp, Mus musculus
  siRNA target sequence for Cnot2 (NM_028082.1,1490-1508).
ggagttccatctggaatat

SEQ ID NO: 732445 - DNA, 19 bp, Mus musculus
  siRNA target sequence for 2010013B10Rik (NM_028084.1,160-178).
ggttactactaggcatata

SEQ ID NO: 732446 - DNA, 19 bp, Mus musculus
  siRNA target sequence for 2010013E14Rik (NM_028085.1,105-123).
ccaagcgtgatctgaatct

SEQ ID NO: 732447 - DNA, 19 bp, Mus musculus
  siRNA target sequence for 2010013E14Rik (NM_028085.1,237-255).
ggaacactcctctacatta

SEQ ID NO: 732448 - DNA, 19 bp, Mus musculus
  siRNA target sequence for 2010013E14Rik (NM_028085.1,238-256).
gaacactcctctacattat

SEQ ID NO: 732449 - DNA, 19 bp, Mus musculus
  siRNA target sequence for 2010013E14Rik (NM_028085.1,321-339).
ccctggataatgacttgaa

SEQ ID NO: 732450 - DNA, 19 bp, Mus musculus
  siRNA target sequence for 2010013E14Rik (NM_028085.1,547-565).
ggactcagggacgatttct

SEQ ID NO: 732451 - DNA, 19 bp, Mus musculus
  siRNA target sequence for 2010013E14Rik (NM_028085.1,580-598).
cttgtctaggtcgtttctt

SEQ ID NO: 732452 - DNA, 19 bp, Mus musculus
  siRNA target sequence for 2010013E14Rik (NM_028085.1,589-607).
gtcgtttctttcaactact

SEQ ID NO: 732453 - DNA, 19 bp, Mus musculus
  siRNA target sequence for 2010013E14Rik (NM_028085.1,603-621).
ctacttcagctggtagatt

SEQ ID NO: 732454 - DNA, 19 bp, Mus musculus
  siRNA target sequence for 2010013E14Rik (NM_028085.1,631-649).
gtccaaaggcattaaagat

SEQ ID NO: 732455 - DNA, 19 bp, Mus musculus
  siRNA target sequence for 2010013E14Rik (NM_028085.1,748-766).
ggaggaagaagactcattt

SEQ ID NO: 732456 - DNA, 19 bp, Mus musculus
  siRNA target sequence for 2010013E14Rik (NM_028085.1,787-805).
gctccatttctcagtagaa

SEQ ID NO: 732457 - DNA, 19 bp, Mus musculus
  siRNA target sequence for 2010013E14Rik (NM_028085.1,821-839).
caacatgagtctattctca

SEQ ID NO: 732458 - DNA, 19 bp, Mus musculus
  siRNA target sequence for 2010013E14Rik (NM_028085.1,843-861).
gtccgggtctaggaagtat

SEQ ID NO: 732459 - DNA, 19 bp, Mus musculus
  siRNA target sequence for 2010013E14Rik (NM_028085.1,846-864).
cgggtctaggaagtattgt

SEQ ID NO: 732460 - DNA, 19 bp, Mus musculus
  siRNA target sequence for 2010013E14Rik (NM_028085.1,848-866).
ggtctaggaagtattgttt

SEQ ID NO: 732461 - DNA, 19 bp, Mus musculus
  siRNA target sequence for 2010013E14Rik (NM_028085.1,849-867).
gtctaggaagtattgtttt

SEQ ID NO: 732462 - DNA, 19 bp, Mus musculus
  siRNA target sequence for 2010013E14Rik (NM_028085.1,934-952).
gcccagtgagctattccaa

SEQ ID NO: 732463 - DNA, 19 bp, Mus musculus
  siRNA target sequence for 2010013E14Rik (NM_028085.1,935-953).
cccagtgagctattccaaa

SEQ ID NO: 732464 - DNA, 19 bp, Mus musculus
  siRNA target sequence for 2010013E14Rik (NM_028085.1,939-957).
gtgagctattccaaagaca

SEQ ID NO: 732465 - DNA, 19 bp, Mus musculus
  siRNA target sequence for 2010013E14Rik (NM_028085.1,1122-1140).
ctcagcacctggaggaatt

SEQ ID NO: 732466 - DNA, 19 bp, Mus musculus
  siRNA target sequence for 2010013E14Rik (NM_028085.1,1156-1174).
gagagaacagattgatcta

SEQ ID NO: 732467 - DNA, 19 bp, Mus musculus
  siRNA target sequence for 2010013E14Rik (NM_028085.1,1251-1269).
gtgccatagacaaaaggaa

SEQ ID NO: 732468 - DNA, 19 bp, Mus musculus
  siRNA target sequence for Osgepl1 (NM_028091.2,254-272).
cccaagcccccaaagagta

SEQ ID NO: 732469 - DNA, 19 bp, Mus musculus
  siRNA target sequence for Osgepl1 (NM_028091.2,255-273).
ccaagcccccaaagagtaa

SEQ ID NO: 732470 - DNA, 19 bp, Mus musculus
  siRNA target sequence for Osgepl1 (NM_028091.2,312-330).
gaactctctcttgtcataa

SEQ ID NO: 732471 - DNA, 19 bp, Mus musculus
  siRNA target sequence for Osgepl1 (NM_028091.2,411-429).
cactgcactcccaaactca

SEQ ID NO: 732472 - DNA, 19 bp, Mus musculus
  siRNA target sequence for Osgepl1 (NM_028091.2,462-480).
cagtagctcaacaacttca

SEQ ID NO: 732473 - DNA, 19 bp, Mus musculus
  siRNA target sequence for Osgepl1 (NM_028091.2,494-512).
caacgaatagtagaagaaa

SEQ ID NO: 732474 - DNA, 19 bp, Mus musculus
  siRNA target sequence for Osgepl1 (NM_028091.2,541-559).
cgatctctcagcaattgca

SEQ ID NO: 732475 - DNA, 19 bp, Mus musculus
  siRNA target sequence for Osgepl1 (NM_028091.2,542-560).
gatctctcagcaattgcaa

SEQ ID NO: 732476 - DNA, 19 bp, Mus musculus
  siRNA target sequence for Osgepl1 (NM_028091.2,573-591).
cgggactggccctaagctt

SEQ ID NO: 732477 - DNA, 19 bp, Mus musculus
  siRNA target sequence for Osgepl1 (NM_028091.2,667-685).
ggctcacgcactgactatt

SEQ ID NO: 732478 - DNA, 19 bp, Mus musculus
  siRNA target sequence for Osgepl1 (NM_028091.2,668-686).
gctcacgcactgactatta

SEQ ID NO: 732479 - DNA, 19 bp, Mus musculus
  siRNA target sequence for Osgepl1 (NM_028091.2,681-699).
ctattaggctcaccaataa

SEQ ID NO: 732480 - DNA, 19 bp, Mus musculus
  siRNA target sequence for Osgepl1 (NM_028091.2,687-705).
ggctcaccaataaagtaga

SEQ ID NO: 732481 - DNA, 19 bp, Mus musculus
  siRNA target sequence for Osgepl1 (NM_028091.2,810-828).
caggcgacatgcttgacaa

SEQ ID NO: 732482 - DNA, 19 bp, Mus musculus
  siRNA target sequence for Osgepl1 (NM_028091.2,829-847).
ggtggcaagaagactttct

SEQ ID NO: 732483 - DNA, 19 bp, Mus musculus
  siRNA target sequence for Osgepl1 (NM_028091.2,853-871).
caaacatccagaatgttct

SEQ ID NO: 732484 - DNA, 19 bp, Mus musculus
  siRNA target sequence for Osgepl1 (NM_028091.2,879-897).
gtggtggaaaagctataga

SEQ ID NO: 732485 - DNA, 19 bp, Mus musculus
  siRNA target sequence for Osgepl1 (NM_028091.2,882-900).
gtggaaaagctatagaaca

SEQ ID NO: 732486 - DNA, 19 bp, Mus musculus
  siRNA target sequence for Osgepl1 (NM_028091.2,885-903).
gaaaagctatagaacagtt

SEQ ID NO: 732487 - DNA, 19 bp, Mus musculus
  siRNA target sequence for Osgepl1 (NM_028091.2,906-924).
ccaaagacggaaatagatt

SEQ ID NO: 732488 - DNA, 19 bp, Mus musculus
  siRNA target sequence for Osgepl1 (NM_028091.2,921-939).
gattccattttactatcaa

SEQ ID NO: 732489 - DNA, 19 bp, Mus musculus
  siRNA target sequence for Osgepl1 (NM_028091.2,942-960).
cacctatgcagaatgctaa

SEQ ID NO: 732490 - DNA, 19 bp, Mus musculus
  siRNA target sequence for Osgepl1 (NM_028091.2,975-993).
ctttcacgggacttcaaca

SEQ ID NO: 732491 - DNA, 19 bp, Mus musculus
  siRNA target sequence for Osgepl1 (NM_028091.2,979-997).
cacgggacttcaacatatt

SEQ ID NO: 732492 - DNA, 19 bp, Mus musculus
  siRNA target sequence for Osgepl1 (NM_028091.2,984-1002).
gacttcaacatattactga

SEQ ID NO: 732493 - DNA, 19 bp, Mus musculus
  siRNA target sequence for Osgepl1 (NM_028091.2,986-1004).
cttcaacatattactgata

SEQ ID NO: 732494 - DNA, 19 bp, Mus musculus
  siRNA target sequence for Osgepl1 (NM_028091.2,992-1010).
catattactgataagctaa

SEQ ID NO: 732495 - DNA, 19 bp, Mus musculus
  siRNA target sequence for Osgepl1 (NM_028091.2,999-1017).
ctgataagctaataacaca

SEQ ID NO: 732496 - DNA, 19 bp, Mus musculus
  siRNA target sequence for Osgepl1 (NM_028091.2,1102-1120).
gtgccaccttgcgaaaaga

SEQ ID NO: 732497 - DNA, 19 bp, Mus musculus
  siRNA target sequence for Osgepl1 (NM_028091.2,1105-1123).
ccaccttgcgaaaagaaca

SEQ ID NO: 732498 - DNA, 19 bp, Mus musculus
  siRNA target sequence for Osgepl1 (NM_028091.2,1119-1137).
gaacacatcgcgctattct

SEQ ID NO: 732499 - DNA, 19 bp, Mus musculus
  siRNA target sequence for Osgepl1 (NM_028091.2,1122-1140).
cacatcgcgctattctgtt

SEQ ID NO: 732500 - DNA, 19 bp, Mus musculus
  siRNA target sequence for Osgepl1 (NM_028091.2,1124-1142).
catcgcgctattctgtttt

SEQ ID NO: 732501 - DNA, 19 bp, Mus musculus
  siRNA target sequence for Osgepl1 (NM_028091.2,1127-1145).
cgcgctattctgttttgca

SEQ ID NO: 732502 - DNA, 19 bp, Mus musculus
  siRNA target sequence for Osgepl1 (NM_028091.2,1128-1146).
gcgctattctgttttgcaa

SEQ ID NO: 732503 - DNA, 19 bp, Mus musculus
  siRNA target sequence for Osgepl1 (NM_028091.2,1174-1192).
cgcagtattagttgtatct

SEQ ID NO: 732504 - DNA, 19 bp, Mus musculus
  siRNA target sequence for Osgepl1 (NM_028091.2,1210-1228).
cttgtacatccgaaaagca

SEQ ID NO: 732505 - DNA, 19 bp, Mus musculus
  siRNA target sequence for Osgepl1 (NM_028091.2,1216-1234).
catccgaaaagcattggaa

SEQ ID NO: 732506 - DNA, 19 bp, Mus musculus
  siRNA target sequence for Osgepl1 (NM_028091.2,1306-1324).
gattgcatggaatggaatt

SEQ ID NO: 732507 - DNA, 19 bp, Mus musculus
  siRNA target sequence for Osgepl1 (NM_028091.2,1314-1332).
ggaatggaattgaaagatt

SEQ ID NO: 732508 - DNA, 19 bp, Mus musculus
  siRNA target sequence for Osgepl1 (NM_028091.2,1342-1360).
cttgggcgttttacatgat

SEQ ID NO: 732509 - DNA, 19 bp, Mus musculus
  siRNA target sequence for Osgepl1 (NM_028091.2,1345-1363).
gggcgttttacatgatgta

SEQ ID NO: 732510 - DNA, 19 bp, Mus musculus
  siRNA target sequence for Osgepl1 (NM_028091.2,1347-1365).
gcgttttacatgatgtaga

SEQ ID NO: 732511 - DNA, 19 bp, Mus musculus
  siRNA target sequence for Osgepl1 (NM_028091.2,1348-1366).
cgttttacatgatgtagaa

SEQ ID NO: 732512 - DNA, 19 bp, Mus musculus
  siRNA target sequence for Osgepl1 (NM_028091.2,1369-1387).
catccgatatgaaccaaaa

SEQ ID NO: 732513 - DNA, 19 bp, Mus musculus
  siRNA target sequence for Osgepl1 (NM_028091.2,1372-1390).
ccgatatgaaccaaaatgt

SEQ ID NO: 732514 - DNA, 19 bp, Mus musculus
  siRNA target sequence for Osgepl1 (NM_028091.2,1389-1407).
gtcctcttggagtagacat

SEQ ID NO: 732515 - DNA, 19 bp, Mus musculus
  siRNA target sequence for Osgepl1 (NM_028091.2,1391-1409).
cctcttggagtagacatat

SEQ ID NO: 732516 - DNA, 19 bp, Mus musculus
  siRNA target sequence for 2610003J06Rik (NM_028101.1,53-71).
gcttttgctctttgtacta

SEQ ID NO: 732517 - DNA, 19 bp, Mus musculus
  siRNA target sequence for 2610003J06Rik (NM_028101.1,54-72).
cttttgctctttgtactat

SEQ ID NO: 732518 - DNA, 19 bp, Mus musculus
  siRNA target sequence for 2610003J06Rik (NM_028101.1,125-143).
gaatgggctgggaattgca

SEQ ID NO: 732519 - DNA, 19 bp, Mus musculus
  siRNA target sequence for 2610003J06Rik (NM_028101.1,136-154).
gaattgcagcagcagtaat

SEQ ID NO: 732520 - DNA, 19 bp, Mus musculus
  siRNA target sequence for 2610003J06Rik (NM_028101.1,304-322).
cctcgttcggggacaacat

SEQ ID NO: 732521 - DNA, 19 bp, Mus musculus
  siRNA target sequence for 2610003J06Rik (NM_028101.1,305-323).
ctcgttcggggacaacatt

SEQ ID NO: 732522 - DNA, 19 bp, Mus musculus
  siRNA target sequence for 2610003J06Rik (NM_028101.1,307-325).
cgttcggggacaacattgt

SEQ ID NO: 732523 - DNA, 19 bp, Mus musculus
  siRNA target sequence for 2610003J06Rik (NM_028101.1,308-326).
gttcggggacaacattgtt

SEQ ID NO: 732524 - DNA, 19 bp, Mus musculus
  siRNA target sequence for 2610003J06Rik (NM_028101.1,417-435).
gcatccctaggcaatgaca

SEQ ID NO: 732525 - DNA, 19 bp, Mus musculus
  siRNA target sequence for 2610003J06Rik (NM_028101.1,427-445).
gcaatgacaccctgtactt

SEQ ID NO: 732526 - DNA, 19 bp, Mus musculus
  siRNA target sequence for 2610003J06Rik (NM_028101.1,528-546).
cctgcttacagctttggaa

SEQ ID NO: 732527 - DNA, 19 bp, Mus musculus
  siRNA target sequence for 2610003J06Rik (NM_028101.1,529-547).
ctgcttacagctttggaat

SEQ ID NO: 732528 - DNA, 19 bp, Mus musculus
  siRNA target sequence for 2610003J06Rik (NM_028101.1,591-609).
ggtttctcagaggttatct

SEQ ID NO: 732529 - DNA, 19 bp, Mus musculus
  siRNA target sequence for 2610003J06Rik (NM_028101.1,654-672).
gagttccaccctaacaaga

SEQ ID NO: 732530 - DNA, 19 bp, Mus musculus
  siRNA target sequence for 2610003J06Rik (NM_028101.1,716-734).
gtcagcacggcctctagaa

SEQ ID NO: 732531 - DNA, 19 bp, Mus musculus
  siRNA target sequence for 2610003J06Rik (NM_028101.1,720-738).
gcacggcctctagaatgta

SEQ ID NO: 732532 - DNA, 19 bp, Mus musculus
  siRNA target sequence for 2610003J06Rik (NM_028101.1,746-764).
ggctggtgaagtactgtat

SEQ ID NO: 732533 - DNA, 19 bp, Mus musculus
  siRNA target sequence for 2610003J06Rik (NM_028101.1,747-765).
gctggtgaagtactgtatt

SEQ ID NO: 732534 - DNA, 19 bp, Mus musculus
  siRNA target sequence for 2610003J06Rik (NM_028101.1,748-766).
ctggtgaagtactgtattt

SEQ ID NO: 732535 - DNA, 19 bp, Mus musculus
  siRNA target sequence for 2610003J06Rik (NM_028101.1,779-797).
gtggcatgccacactcaat

SEQ ID NO: 732536 - DNA, 19 bp, Mus musculus
  siRNA target sequence for 2610003J06Rik (NM_028101.1,781-799).
ggcatgccacactcaatct

SEQ ID NO: 732537 - DNA, 19 bp, Mus musculus
  siRNA target sequence for 2010107K19Rik (NM_028104.2,232-250).
gccggctgacggtgaagta

SEQ ID NO: 732538 - DNA, 19 bp, Mus musculus
  siRNA target sequence for 2010107K19Rik (NM_028104.2,363-381).
gctctcatggacttgtcaa

SEQ ID NO: 732539 - DNA, 19 bp, Mus musculus
  siRNA target sequence for 2010107K19Rik (NM_028104.2,371-389).
ggacttgtcaacagaagat

SEQ ID NO: 732540 - DNA, 19 bp, Mus musculus
  siRNA target sequence for 2010107K19Rik (NM_028104.2,374-392).
cttgtcaacagaagatcaa

SEQ ID NO: 732541 - DNA, 19 bp, Mus musculus
  siRNA target sequence for 2610005B21Rik (NM_028109.1,250-268).
gtcacaagtccctactact

SEQ ID NO: 732542 - DNA, 19 bp, Mus musculus
  siRNA target sequence for 2610005B21Rik (NM_028109.1,254-272).
caagtccctactacttact

SEQ ID NO: 732543 - DNA, 19 bp, Mus musculus
  siRNA target sequence for 2610005B21Rik (NM_028109.1,278-296).
gatgcccccaccgacttta

SEQ ID NO: 732544 - DNA, 19 bp, Mus musculus
  siRNA target sequence for 2610005B21Rik (NM_028109.1,283-301).
ccccaccgactttatcaat

SEQ ID NO: 732545 - DNA, 19 bp, Mus musculus
  siRNA target sequence for 2610005B21Rik (NM_028109.1,284-302).
cccaccgactttatcaatt

SEQ ID NO: 732546 - DNA, 19 bp, Mus musculus
  siRNA target sequence for 2610005B21Rik (NM_028109.1,285-303).
ccaccgactttatcaattt

SEQ ID NO: 732547 - DNA, 19 bp, Mus musculus
  siRNA target sequence for 2610005B21Rik (NM_028109.1,362-380).
gccaacttggagaacaagt

SEQ ID NO: 732548 - DNA, 19 bp, Mus musculus
  siRNA target sequence for 2610005B21Rik (NM_028109.1,396-414).
gaataggcgagccttttca

SEQ ID NO: 732549 - DNA, 19 bp, Mus musculus
  siRNA target sequence for 2610005B21Rik (NM_028109.1,465-483).
cgttgaaggcagttgacaa

SEQ ID NO: 732550 - DNA, 19 bp, Mus musculus
  siRNA target sequence for 2610005B21Rik (NM_028109.1,526-544).
gtctatcccatcaaatgat

SEQ ID NO: 732551 - DNA, 19 bp, Mus musculus
  siRNA target sequence for 2610005B21Rik (NM_028109.1,595-613).
gcctcagagaagatctatt

SEQ ID NO: 732552 - DNA, 19 bp, Mus musculus
  siRNA target sequence for 2610005B21Rik (NM_028109.1,596-614).
cctcagagaagatctatta

SEQ ID NO: 732553 - DNA, 19 bp, Mus musculus
  siRNA target sequence for 2610005B21Rik (NM_028109.1,692-710).
gttgctccggccactgatt

SEQ ID NO: 732554 - DNA, 19 bp, Mus musculus
  siRNA target sequence for 2610005B21Rik (NM_028109.1,776-794).
gctccagctacttcaagaa

SEQ ID NO: 732555 - DNA, 19 bp, Mus musculus
  siRNA target sequence for 2610005B21Rik (NM_028109.1,857-875).
gcaagggagaaggttctaa

SEQ ID NO: 732556 - DNA, 19 bp, Mus musculus
  siRNA target sequence for 2610005B21Rik (NM_028109.1,858-876).
caagggagaaggttctaaa

SEQ ID NO: 732557 - DNA, 19 bp, Mus musculus
  siRNA target sequence for 2610005B21Rik (NM_028109.1,934-952).
gctgcgcaggaaaaacgaa

SEQ ID NO: 732558 - DNA, 19 bp, Mus musculus
  siRNA target sequence for 2610005B21Rik (NM_028109.1,983-1001).
gggcaacctgtgaagaagt

SEQ ID NO: 732559 - DNA, 19 bp, Mus musculus
  siRNA target sequence for 2610005B21Rik (NM_028109.1,1002-1020).
ccacgagccaggttaccaa

SEQ ID NO: 732560 - DNA, 19 bp, Mus musculus
  siRNA target sequence for 2610005B21Rik (NM_028109.1,1096-1114).
gaacttcatgtctgaactt

SEQ ID NO: 732561 - DNA, 19 bp, Mus musculus
  siRNA target sequence for 2610005B21Rik (NM_028109.1,1147-1165).
cagaggatgcactatcatt

SEQ ID NO: 732562 - DNA, 19 bp, Mus musculus
  siRNA target sequence for 2610005B21Rik (NM_028109.1,1149-1167).
gaggatgcactatcattaa

SEQ ID NO: 732563 - DNA, 19 bp, Mus musculus
  siRNA target sequence for 2610005B21Rik (NM_028109.1,1247-1265).
gaagccttccacaaacgaa

SEQ ID NO: 732564 - DNA, 19 bp, Mus musculus
  siRNA target sequence for 2610005B21Rik (NM_028109.1,1258-1276).
caaacgaacccccaataga

SEQ ID NO: 732565 - DNA, 19 bp, Mus musculus
  siRNA target sequence for 2610005B21Rik (NM_028109.1,1306-1324).
cttgttaccctccaaatct

SEQ ID NO: 732566 - DNA, 19 bp, Mus musculus
  siRNA target sequence for 2610005B21Rik (NM_028109.1,1361-1379).
ctgcagaccaaatatcgta

SEQ ID NO: 732567 - DNA, 19 bp, Mus musculus
  siRNA target sequence for 2610005B21Rik (NM_028109.1,1384-1402).
ggctgtgacttgcaaaagt

SEQ ID NO: 732568 - DNA, 19 bp, Mus musculus
  siRNA target sequence for 2610005B21Rik (NM_028109.1,1427-1445).
cttgagaaactgcaacaat

SEQ ID NO: 732569 - DNA, 19 bp, Mus musculus
  siRNA target sequence for 2610005B21Rik (NM_028109.1,1503-1521).
ccaagagagcacctgttaa

SEQ ID NO: 732570 - DNA, 19 bp, Mus musculus
  siRNA target sequence for 2610005B21Rik (NM_028109.1,1504-1522).
caagagagcacctgttaaa

SEQ ID NO: 732571 - DNA, 19 bp, Mus musculus
  siRNA target sequence for 2610005B21Rik (NM_028109.1,1507-1525).
gagagcacctgttaaacct

SEQ ID NO: 732572 - DNA, 19 bp, Mus musculus
  siRNA target sequence for 2610005B21Rik (NM_028109.1,1571-1589).
catgagcgagagtcaaaga

SEQ ID NO: 732573 - DNA, 19 bp, Mus musculus
  siRNA target sequence for 2610005B21Rik (NM_028109.1,1623-1641).
ctagaccttgtcctactaa

SEQ ID NO: 732574 - DNA, 19 bp, Mus musculus
  siRNA target sequence for 2610005B21Rik (NM_028109.1,1696-1714).
cccgaagtcgccagttttt

SEQ ID NO: 732575 - DNA, 19 bp, Mus musculus
  siRNA target sequence for 2610005B21Rik (NM_028109.1,1704-1722).
cgccagtttttgcattgaa

SEQ ID NO: 732576 - DNA, 19 bp, Mus musculus
  siRNA target sequence for 2610005B21Rik (NM_028109.1,1706-1724).
ccagtttttgcattgaaga

SEQ ID NO: 732577 - DNA, 19 bp, Mus musculus
  siRNA target sequence for 2610005B21Rik (NM_028109.1,1729-1747).
gatccgagtgcccatcaaa

SEQ ID NO: 732578 - DNA, 19 bp, Mus musculus
  siRNA target sequence for 2610005B21Rik (NM_028109.1,1760-1778).
gagaaaccagtagtgataa

SEQ ID NO: 732579 - DNA, 19 bp, Mus musculus
  siRNA target sequence for 2610005B21Rik (NM_028109.1,1762-1780).
gaaaccagtagtgataaaa

SEQ ID NO: 732580 - DNA, 19 bp, Mus musculus
  siRNA target sequence for 2610005B21Rik (NM_028109.1,1796-1814).
cattatggggtgccttata

SEQ ID NO: 732581 - DNA, 19 bp, Mus musculus
  siRNA target sequence for 2610005B21Rik (NM_028109.1,2127-2145).
gtccaaacaccgtcatctt

SEQ ID NO: 732582 - DNA, 19 bp, Mus musculus
  siRNA target sequence for 2610005B21Rik (NM_028109.1,2380-2398).
gcacaaggcaaatccaata

SEQ ID NO: 732583 - DNA, 19 bp, Mus musculus
  siRNA target sequence for 2010109K11Rik (NM_028111.1,95-113).
cccctttggtgcactttat

SEQ ID NO: 732584 - DNA, 19 bp, Mus musculus
  siRNA target sequence for 2010109K11Rik (NM_028111.1,311-329).
gaagacctccgaagactta

SEQ ID NO: 732585 - DNA, 19 bp, Mus musculus
  siRNA target sequence for 2010109K11Rik (NM_028111.1,314-332).
gacctccgaagacttacaa

SEQ ID NO: 732586 - DNA, 19 bp, Mus musculus
  siRNA target sequence for 2010109K11Rik (NM_028111.1,368-386).
gtgtaatacagccagaatt

SEQ ID NO: 732587 - DNA, 19 bp, Mus musculus
  siRNA target sequence for 2010109K11Rik (NM_028111.1,443-461).
gacagaagatcgactatgt

SEQ ID NO: 732588 - DNA, 19 bp, Mus musculus
  siRNA target sequence for 2010109K11Rik (NM_028111.1,445-463).
cagaagatcgactatgttt

SEQ ID NO: 732589 - DNA, 19 bp, Mus musculus
  siRNA target sequence for 2610007A16Rik (NM_028112.1,187-205).
gctagctggaagacacata

SEQ ID NO: 732590 - DNA, 19 bp, Mus musculus
  siRNA target sequence for 2610007A16Rik (NM_028112.1,198-216).
gacacatagtggatctgta

SEQ ID NO: 732591 - DNA, 19 bp, Mus musculus
  siRNA target sequence for 2610007A16Rik (NM_028112.1,227-245).
cgtgggctcatcctgaatt

SEQ ID NO: 732592 - DNA, 19 bp, Mus musculus
  siRNA target sequence for 2610007A16Rik (NM_028112.1,228-246).
gtgggctcatcctgaattt

SEQ ID NO: 732593 - DNA, 19 bp, Mus musculus
  siRNA target sequence for 2610007A16Rik (NM_028112.1,231-249).
ggctcatcctgaatttgga

SEQ ID NO: 732594 - DNA, 19 bp, Mus musculus
  siRNA target sequence for 2610007A16Rik (NM_028112.1,304-322).
gtgggagaatcaaacgata

SEQ ID NO: 732595 - DNA, 19 bp, Mus musculus
  siRNA target sequence for 2610007A16Rik (NM_028112.1,306-324).
gggagaatcaaacgataaa

SEQ ID NO: 732596 - DNA, 19 bp, Mus musculus
  siRNA target sequence for 2610007A16Rik (NM_028112.1,434-452).
gttcagcagatggtatagt

SEQ ID NO: 732597 - DNA, 19 bp, Mus musculus
  siRNA target sequence for 2610007A16Rik (NM_028112.1,582-600).
cgctgtgggaagtgatgat

SEQ ID NO: 732598 - DNA, 19 bp, Mus musculus
  siRNA target sequence for 2610007A16Rik (NM_028112.1,595-613).
gatgatagcagtccaaatt

SEQ ID NO: 732599 - DNA, 19 bp, Mus musculus
  siRNA target sequence for 2610007A16Rik (NM_028112.1,614-632).
caatggccaaggttcagat

SEQ ID NO: 732600 - DNA, 19 bp, Mus musculus
  siRNA target sequence for 2610007A16Rik (NM_028112.1,665-683).
cgaaagctgagactcttat

SEQ ID NO: 732601 - DNA, 19 bp, Mus musculus
  siRNA target sequence for 2610007A16Rik (NM_028112.1,692-710).
cagaccccgtccatgatat

SEQ ID NO: 732602 - DNA, 19 bp, Mus musculus
  siRNA target sequence for 2610007A16Rik (NM_028112.1,750-768).
ggcagtagcaaccaaagat

SEQ ID NO: 732603 - DNA, 19 bp, Mus musculus
  siRNA target sequence for 2610007A16Rik (NM_028112.1,752-770).
cagtagcaaccaaagatgt

SEQ ID NO: 732604 - DNA, 19 bp, Mus musculus
  siRNA target sequence for 2610007A16Rik (NM_028112.1,754-772).
gtagcaaccaaagatgtaa

SEQ ID NO: 732605 - DNA, 19 bp, Mus musculus
  siRNA target sequence for 2610007A16Rik (NM_028112.1,766-784).
gatgtaagaattttcacat

SEQ ID NO: 732606 - DNA, 19 bp, Mus musculus
  siRNA target sequence for 2610007A16Rik (NM_028112.1,812-830).
cctctggtggtccaacaaa

SEQ ID NO: 732607 - DNA, 19 bp, Mus musculus
  siRNA target sequence for 2610007A16Rik (NM_028112.1,813-831).
ctctggtggtccaacaaaa

SEQ ID NO: 732608 - DNA, 19 bp, Mus musculus
  siRNA target sequence for 2610007A16Rik (NM_028112.1,840-858).
ccatattgtggctcagttt

SEQ ID NO: 732609 - DNA, 19 bp, Mus musculus
  siRNA target sequence for 2610007A16Rik (NM_028112.1,849-867).
ggctcagtttgataatcat

SEQ ID NO: 732610 - DNA, 19 bp, Mus musculus
  siRNA target sequence for 2610007A16Rik (NM_028112.1,855-873).
gtttgataatcataattct

SEQ ID NO: 732611 - DNA, 19 bp, Mus musculus
  siRNA target sequence for 2610007A16Rik (NM_028112.1,882-900).
gagggtgagttggaacata

SEQ ID NO: 732612 - DNA, 19 bp, Mus musculus
  siRNA target sequence for 2610007A16Rik (NM_028112.1,885-903).
ggtgagttggaacataaca

SEQ ID NO: 732613 - DNA, 19 bp, Mus musculus
  siRNA target sequence for 2610007A16Rik (NM_028112.1,925-943).
ggagatgacggctgtgtta

SEQ ID NO: 732614 - DNA, 19 bp, Mus musculus
  siRNA target sequence for 2610007A16Rik (NM_028112.1,944-962).
ggttgtggaaagctaatta

SEQ ID NO: 732615 - DNA, 19 bp, Mus musculus
  siRNA target sequence for 2610007A16Rik (NM_028112.1,974-992).
ggaagtgtactggtatttt

SEQ ID NO: 732616 - DNA, 19 bp, Mus musculus
  siRNA target sequence for 2610007A16Rik (NM_028112.1,998-1016).
gtaacgggagcccagtaaa

SEQ ID NO: 732617 - DNA, 19 bp, Mus musculus
  siRNA target sequence for 2610007A16Rik (NM_028112.1,1045-1063).
ccttcactgagctcaaata

SEQ ID NO: 732618 - DNA, 19 bp, Mus musculus
  siRNA target sequence for 2610007A16Rik (NM_028112.1,1055-1073).
gctcaaatattccaaatct

SEQ ID NO: 732619 - DNA, 19 bp, Mus musculus
  siRNA target sequence for 2610007A16Rik (NM_028112.1,1056-1074).
ctcaaatattccaaatctt

SEQ ID NO: 732620 - DNA, 19 bp, Mus musculus
  siRNA target sequence for 2600016L03Rik (NM_028117.2,316-334).
gcatcctatcggagatgaa

SEQ ID NO: 732621 - DNA, 19 bp, Mus musculus
  siRNA target sequence for 2600016L03Rik (NM_028117.2,317-335).
catcctatcggagatgaaa

SEQ ID NO: 732622 - DNA, 19 bp, Mus musculus
  siRNA target sequence for 2600016L03Rik (NM_028117.2,544-562).
gccacattctcgtaagtga

SEQ ID NO: 732623 - DNA, 19 bp, Mus musculus
  siRNA target sequence for 2600016L03Rik (NM_028117.2,1007-1025).
cgacttcgtgggttcctat

SEQ ID NO: 732624 - DNA, 19 bp, Mus musculus
  siRNA target sequence for 2600016L03Rik (NM_028117.2,1123-1141).
gcccagaaagtctgcatta

SEQ ID NO: 732625 - DNA, 19 bp, Mus musculus
  siRNA target sequence for 2600016L03Rik (NM_028117.2,1126-1144).
cagaaagtctgcattacca

SEQ ID NO: 732626 - DNA, 19 bp, Mus musculus
  siRNA target sequence for 2610507L03Rik (NM_028120.1,400-418).
gccgagaaggacgtcatta

SEQ ID NO: 732627 - DNA, 19 bp, Mus musculus
  siRNA target sequence for 2610507L03Rik (NM_028120.1,570-588).
cccaaaagctggtgagaaa

SEQ ID NO: 732628 - DNA, 19 bp, Mus musculus
  siRNA target sequence for 2610507L03Rik (NM_028120.1,749-767).
gctggtagaatacatcaaa

SEQ ID NO: 732629 - DNA, 19 bp, Mus musculus
  siRNA target sequence for 2610507L03Rik (NM_028120.1,788-806).
gaaaagtttgcggagttaa

SEQ ID NO: 732630 - DNA, 19 bp, Mus musculus
  siRNA target sequence for 2610507L03Rik (NM_028120.1,793-811).
gtttgcggagttaaaagaa

SEQ ID NO: 732631 - DNA, 19 bp, Mus musculus
  siRNA target sequence for 2610507L03Rik (NM_028120.1,1058-1076).
gaactcagtcgctaccaaa

SEQ ID NO: 732632 - DNA, 19 bp, Mus musculus
  siRNA target sequence for 2610507L03Rik (NM_028120.1,1061-1079).
ctcagtcgctaccaaacaa

SEQ ID NO: 732633 - DNA, 19 bp, Mus musculus
  siRNA target sequence for 2610507L03Rik (NM_028120.1,1063-1081).
cagtcgctaccaaacaaaa

SEQ ID NO: 732634 - DNA, 19 bp, Mus musculus
  siRNA target sequence for 2610507L03Rik (NM_028120.1,1065-1083).
gtcgctaccaaacaaaatt

SEQ ID NO: 732635 - DNA, 19 bp, Mus musculus
  siRNA target sequence for 2610507L03Rik (NM_028120.1,1067-1085).
cgctaccaaacaaaattca

SEQ ID NO: 732636 - DNA, 19 bp, Mus musculus
  siRNA target sequence for 2610507L03Rik (NM_028120.1,1295-1313).
gccttgcaccaagagttaa

SEQ ID NO: 732637 - DNA, 19 bp, Mus musculus
  siRNA target sequence for 2610507L03Rik (NM_028120.1,1448-1466).
cacctccaggacgtttcta

SEQ ID NO: 732638 - DNA, 19 bp, Mus musculus
  siRNA target sequence for 2610507L03Rik (NM_028120.1,1464-1482).
ctaagctgactaaacaact

SEQ ID NO: 732639 - DNA, 19 bp, Mus musculus
  siRNA target sequence for 2610507L03Rik (NM_028120.1,1604-1622).
gtggacgtccatacatcaa

SEQ ID NO: 732640 - DNA, 19 bp, Mus musculus
  siRNA target sequence for 2610507L03Rik (NM_028120.1,1606-1624).
ggacgtccatacatcaatt

SEQ ID NO: 732641 - DNA, 19 bp, Mus musculus
  siRNA target sequence for 2610507L03Rik (NM_028120.1,1709-1727).
ctacaggtgcagaagaaga

SEQ ID NO: 732642 - DNA, 19 bp, Mus musculus
  siRNA target sequence for 2610507L03Rik (NM_028120.1,1801-1819).
ggccaacaggcgataccaa

SEQ ID NO: 732643 - DNA, 19 bp, Mus musculus
  siRNA target sequence for 2610507L03Rik (NM_028120.1,1802-1820).
gccaacaggcgataccaaa

SEQ ID NO: 732644 - DNA, 19 bp, Mus musculus
  siRNA target sequence for 2610507L03Rik (NM_028120.1,1809-1827).
ggcgataccaaaagagaat

SEQ ID NO: 732645 - DNA, 19 bp, Mus musculus
  siRNA target sequence for 2610507L03Rik (NM_028120.1,1810-1828).
gcgataccaaaagagaatt

SEQ ID NO: 732646 - DNA, 19 bp, Mus musculus
  siRNA target sequence for 2610507L03Rik (NM_028120.1,1812-1830).
gataccaaaagagaattga

SEQ ID NO: 732647 - DNA, 19 bp, Mus musculus
  siRNA target sequence for 2610507L03Rik (NM_028120.1,1824-1842).
gaattgatgtcctcagaaa

SEQ ID NO: 732648 - DNA, 19 bp, Mus musculus
  siRNA target sequence for 2610507L03Rik (NM_028120.1,1834-1852).
cctcagaaagcaagtagaa

SEQ ID NO: 732649 - DNA, 19 bp, Mus musculus
  siRNA target sequence for 2610507L03Rik (NM_028120.1,1928-1946).
gaacgagacagtcttaagt

SEQ ID NO: 732650 - DNA, 19 bp, Mus musculus
  siRNA target sequence for 2610507L03Rik (NM_028120.1,1931-1949).
cgagacagtcttaagtatt

SEQ ID NO: 732651 - DNA, 19 bp, Mus musculus
  siRNA target sequence for 2610507L03Rik (NM_028120.1,2369-2387).
ctgattggccatgatttca

SEQ ID NO: 732652 - DNA, 19 bp, Mus musculus
  siRNA target sequence for 2610017G09Rik (NM_028121.1,335-353).
gaaaagatcatgctattct

SEQ ID NO: 732653 - DNA, 19 bp, Mus musculus
  siRNA target sequence for 2610017G09Rik (NM_028121.1,415-433).
gagcgcttcttcagtgata

SEQ ID NO: 732654 - DNA, 19 bp, Mus musculus
  siRNA target sequence for 2610017G09Rik (NM_028121.1,417-435).
gcgcttcttcagtgataaa

SEQ ID NO: 732655 - DNA, 19 bp, Mus musculus
  siRNA target sequence for 2610017G09Rik (NM_028121.1,497-515).
gaggaaatgctgctttaat

SEQ ID NO: 732656 - DNA, 19 bp, Mus musculus
  siRNA target sequence for 2610017G09Rik (NM_028121.1,530-548).
ctgccaacacagacttaaa

SEQ ID NO: 732657 - DNA, 19 bp, Mus musculus
  siRNA target sequence for 2610017G09Rik (NM_028121.1,563-581).
gtccaattggcccaaaact

SEQ ID NO: 732658 - DNA, 19 bp, Mus musculus
  siRNA target sequence for 2610017G09Rik (NM_028121.1,986-1004).
cttctcttgggctgaatga

SEQ ID NO: 732659 - DNA, 19 bp, Mus musculus
  siRNA target sequence for 2610017G09Rik (NM_028121.1,1175-1193).
cgctggtctaccacattct

SEQ ID NO: 732660 - DNA, 19 bp, Mus musculus
  siRNA target sequence for 2610017G09Rik (NM_028121.1,1293-1311).
caaccgagtgtctctaaga

SEQ ID NO: 732661 - DNA, 19 bp, Mus musculus
  siRNA target sequence for 2610017G09Rik (NM_028121.1,1346-1364).
ccggttccaggattgtatt

SEQ ID NO: 732662 - DNA, 19 bp, Mus musculus
  siRNA target sequence for 2610017G09Rik (NM_028121.1,1392-1410).
gcacagggagggaataact

SEQ ID NO: 732663 - DNA, 19 bp, Mus musculus
  siRNA target sequence for 2610017G09Rik (NM_028121.1,1393-1411).
cacagggagggaataactt

SEQ ID NO: 732664 - DNA, 19 bp, Mus musculus
  siRNA target sequence for 2610017G09Rik (NM_028121.1,1421-1439).
cacctgtgttggtgtgtaa

SEQ ID NO: 732665 - DNA, 19 bp, Mus musculus
  siRNA target sequence for 2610019F01Rik (NM_028125.1,356-374).
gggagcagccgctacttta

SEQ ID NO: 732666 - DNA, 19 bp, Mus musculus
  siRNA target sequence for 2610019F01Rik (NM_028125.1,357-375).
ggagcagccgctactttaa

SEQ ID NO: 732667 - DNA, 19 bp, Mus musculus
  siRNA target sequence for 2610019F01Rik (NM_028125.1,421-439).
cactcacttggacattgtt

SEQ ID NO: 732668 - DNA, 19 bp, Mus musculus
  siRNA target sequence for 2610019F01Rik (NM_028125.1,448-466).
gggcttcaaggccattatt

SEQ ID NO: 732669 - DNA, 19 bp, Mus musculus
  siRNA target sequence for 2610019F01Rik (NM_028125.1,490-508).
ggctctcactagtaggaat

SEQ ID NO: 732670 - DNA, 19 bp, Mus musculus
  siRNA target sequence for 2610019F01Rik (NM_028125.1,538-556).
cctacagatgactgacatt

SEQ ID NO: 732671 - DNA, 19 bp, Mus musculus
  siRNA target sequence for 2610019F01Rik (NM_028125.1,557-575).
gtgcaggcctgccatgatt

SEQ ID NO: 732672 - DNA, 19 bp, Mus musculus
  siRNA target sequence for 2610019F01Rik (NM_028125.1,564-582).
cctgccatgatttcatcaa

SEQ ID NO: 732673 - DNA, 19 bp, Mus musculus
  siRNA target sequence for 2610019F01Rik (NM_028125.1,587-605).
gcactggacatcagcataa

SEQ ID NO: 732674 - DNA, 19 bp, Mus musculus
  siRNA target sequence for 2610019F01Rik (NM_028125.1,592-610).
ggacatcagcataaagtca

SEQ ID NO: 732675 - DNA, 19 bp, Mus musculus
  siRNA target sequence for 2610019F01Rik (NM_028125.1,609-627).
cagatgcctccgatgaact

SEQ ID NO: 732676 - DNA, 19 bp, Mus musculus
  siRNA target sequence for 2610019F01Rik (NM_028125.1,618-636).
ccgatgaactctcagaatt

SEQ ID NO: 732677 - DNA, 19 bp, Mus musculus
  siRNA target sequence for 2610019F01Rik (NM_028125.1,619-637).
cgatgaactctcagaattt

SEQ ID NO: 732678 - DNA, 19 bp, Mus musculus
  siRNA target sequence for 2610019F01Rik (NM_028125.1,824-842).
ggccctgatgacgtttctt

SEQ ID NO: 732679 - DNA, 19 bp, Mus musculus
  siRNA target sequence for 2610019F01Rik (NM_028125.1,826-844).
ccctgatgacgtttcttca

SEQ ID NO: 732680 - DNA, 19 bp, Mus musculus
  siRNA target sequence for 2610019F01Rik (NM_028125.1,949-967).
cactgcaatacagaattct

SEQ ID NO: 732681 - DNA, 19 bp, Mus musculus
  siRNA target sequence for 2610019F01Rik (NM_028125.1,951-969).
ctgcaatacagaattcttt

SEQ ID NO: 732682 - DNA, 19 bp, Mus musculus
  siRNA target sequence for 2610019F01Rik (NM_028125.1,1126-1144).
cagcagccgagactcaaat

SEQ ID NO: 732683 - DNA, 19 bp, Mus musculus
  siRNA target sequence for 2610019F01Rik (NM_028125.1,1316-1334).
cgtgctgcactcatgagta

SEQ ID NO: 732684 - DNA, 19 bp, Mus musculus
  siRNA target sequence for 2610510J17Rik (NM_028131.1,245-263).
gaagcctgggactttttgt

SEQ ID NO: 732685 - DNA, 19 bp, Mus musculus
  siRNA target sequence for 2610510J17Rik (NM_028131.1,269-287).
gaccaactacaaaccataa

SEQ ID NO: 732686 - DNA, 19 bp, Mus musculus
  siRNA target sequence for 2610510J17Rik (NM_028131.1,340-358).
ggacaagcgtgcaagtctt

SEQ ID NO: 732687 - DNA, 19 bp, Mus musculus
  siRNA target sequence for 2610510J17Rik (NM_028131.1,343-361).
caagcgtgcaagtcttgat

SEQ ID NO: 732688 - DNA, 19 bp, Mus musculus
  siRNA target sequence for 2610510J17Rik (NM_028131.1,362-380).
gacgtggtccttttagaca

SEQ ID NO: 732689 - DNA, 19 bp, Mus musculus
  siRNA target sequence for 2610510J17Rik (NM_028131.1,398-416).
catcggcaccagaagcttt

SEQ ID NO: 732690 - DNA, 19 bp, Mus musculus
  siRNA target sequence for 2610510J17Rik (NM_028131.1,452-470).
gatgtcgacctttttgata

SEQ ID NO: 732691 - DNA, 19 bp, Mus musculus
  siRNA target sequence for 2610510J17Rik (NM_028131.1,467-485).
gatatggaacagttccaaa

SEQ ID NO: 732692 - DNA, 19 bp, Mus musculus
  siRNA target sequence for 2610510J17Rik (NM_028131.1,476-494).
cagttccaaagttccttta

SEQ ID NO: 732693 - DNA, 19 bp, Mus musculus
  siRNA target sequence for 2610510J17Rik (NM_028131.1,614-632).
cccacgttcgtggtgtatt

SEQ ID NO: 732694 - DNA, 19 bp, Mus musculus
  siRNA target sequence for 2610510J17Rik (NM_028131.1,615-633).
ccacgttcgtggtgtatta

SEQ ID NO: 732695 - DNA, 19 bp, Mus musculus
  siRNA target sequence for 2610510J17Rik (NM_028131.1,616-634).
cacgttcgtggtgtattat

SEQ ID NO: 732696 - DNA, 19 bp, Mus musculus
  siRNA target sequence for 2610510J17Rik (NM_028131.1,640-658).
gactccgtatgccttcatt

SEQ ID NO: 732697 - DNA, 19 bp, Mus musculus
  siRNA target sequence for 2610510J17Rik (NM_028131.1,644-662).
ccgtatgccttcatttctt

SEQ ID NO: 732698 - DNA, 19 bp, Mus musculus
  siRNA target sequence for 2610510J17Rik (NM_028131.1,717-735).
gcaaacaccatcagattgt

SEQ ID NO: 732699 - DNA, 19 bp, Mus musculus
  siRNA target sequence for 2610510J17Rik (NM_028131.1,766-784).
ctcactcaaggcaattgtt

SEQ ID NO: 732700 - DNA, 19 bp, Mus musculus
  siRNA target sequence for 2610510J17Rik (NM_028131.1,768-786).
cactcaaggcaattgtttt

SEQ ID NO: 732701 - DNA, 19 bp, Mus musculus
  siRNA target sequence for 2610510J17Rik (NM_028131.1,800-818).
cagacctgtgaaaattaca

SEQ ID NO: 732702 - DNA, 19 bp, Mus musculus
  siRNA target sequence for 2610510J17Rik (NM_028131.1,953-971).
ctagagttcgcacagtata

SEQ ID NO: 732703 - DNA, 19 bp, Mus musculus
  siRNA target sequence for 2610510J17Rik (NM_028131.1,981-999).
ccaagttcaagagtaacat

SEQ ID NO: 732704 - DNA, 19 bp, Mus musculus
  siRNA target sequence for 2610510J17Rik (NM_028131.1,982-1000).
caagttcaagagtaacata

SEQ ID NO: 732705 - DNA, 19 bp, Mus musculus
  siRNA target sequence for 2610510J17Rik (NM_028131.1,1031-1049).
cccttccggtgccttgtaa

SEQ ID NO: 732706 - DNA, 19 bp, Mus musculus
  siRNA target sequence for 2610510J17Rik (NM_028131.1,1032-1050).
ccttccggtgccttgtaaa

SEQ ID NO: 732707 - DNA, 19 bp, Mus musculus
  siRNA target sequence for 2610510J17Rik (NM_028131.1,1037-1055).
cggtgccttgtaaagttct

SEQ ID NO: 732708 - DNA, 19 bp, Mus musculus
  siRNA target sequence for 2610510J17Rik (NM_028131.1,1051-1069).
gttctccagtccacatctt

SEQ ID NO: 732709 - DNA, 19 bp, Mus musculus
  siRNA target sequence for 2610510J17Rik (NM_028131.1,1135-1153).
ctgcataccgagcaagaaa

SEQ ID NO: 732710 - DNA, 19 bp, Mus musculus
  siRNA target sequence for 2610510J17Rik (NM_028131.1,1137-1155).
gcataccgagcaagaaaat

SEQ ID NO: 732711 - DNA, 19 bp, Mus musculus
  siRNA target sequence for 5730528L13Rik (NM_028137.1,107-125).
gcaaaacaacgaaatcatt

SEQ ID NO: 732712 - DNA, 19 bp, Mus musculus
  siRNA target sequence for 5730528L13Rik (NM_028137.1,113-131).
caacgaaatcattaaacct

SEQ ID NO: 732713 - DNA, 19 bp, Mus musculus
  siRNA target sequence for 5730528L13Rik (NM_028137.1,256-274).
ccttggcccacgagtacaa

SEQ ID NO: 732714 - DNA, 19 bp, Mus musculus
  siRNA target sequence for 5730528L13Rik (NM_028137.1,290-308).
gtcgctgcgggacttcaaa

SEQ ID NO: 732715 - DNA, 19 bp, Mus musculus
  siRNA target sequence for 5730528L13Rik (NM_028137.1,292-310).
cgctgcgggacttcaaaca

SEQ ID NO: 732716 - DNA, 19 bp, Mus musculus
  siRNA target sequence for 5730528L13Rik (NM_028137.1,335-353).
caaggctcggaccaaaaaa

SEQ ID NO: 732717 - DNA, 19 bp, Mus musculus
  siRNA target sequence for 5730528L13Rik (NM_028137.1,338-356).
ggctcggaccaaaaaaatt

SEQ ID NO: 732718 - DNA, 19 bp, Mus musculus
  siRNA target sequence for 5730528L13Rik (NM_028137.1,339-357).
gctcggaccaaaaaaatta

SEQ ID NO: 732719 - DNA, 19 bp, Mus musculus
  siRNA target sequence for 5730528L13Rik (NM_028137.1,340-358).
ctcggaccaaaaaaattat

SEQ ID NO: 732720 - DNA, 19 bp, Mus musculus
  siRNA target sequence for 5730528L13Rik (NM_028137.1,629-647).
caggataaccgccaataaa

SEQ ID NO: 732721 - DNA, 19 bp, Mus musculus
  siRNA target sequence for 5730528L13Rik (NM_028137.1,631-649).
ggataaccgccaataaaaa

SEQ ID NO: 732722 - DNA, 19 bp, Mus musculus
  siRNA target sequence for 5730528L13Rik (NM_028137.1,669-687).
caggaaggtgctttaaaga

SEQ ID NO: 732723 - DNA, 19 bp, Mus musculus
  siRNA target sequence for 5730528L13Rik (NM_028137.1,889-907).
ggcccgtctcctcgtttaa

SEQ ID NO: 732724 - DNA, 19 bp, Mus musculus
  siRNA target sequence for 2810423G08Rik (NM_028139.1,132-150).
ccgacaatgtagatttaga

SEQ ID NO: 732725 - DNA, 19 bp, Mus musculus
  siRNA target sequence for 2810423G08Rik (NM_028139.1,181-199).
ggaggttatgaggcttaat

SEQ ID NO: 732726 - DNA, 19 bp, Mus musculus
  siRNA target sequence for 2810423G08Rik (NM_028139.1,184-202).
ggttatgaggcttaataaa

SEQ ID NO: 732727 - DNA, 19 bp, Mus musculus
  siRNA target sequence for 2810423G08Rik (NM_028139.1,211-229).
gcacctatttggccattat

SEQ ID NO: 732728 - DNA, 19 bp, Mus musculus
  siRNA target sequence for 2810423G08Rik (NM_028139.1,214-232).
cctatttggccattatcca

SEQ ID NO: 732729 - DNA, 19 bp, Mus musculus
  siRNA target sequence for 2810423G08Rik (NM_028139.1,366-384).
gccgccaagccctagaaca

SEQ ID NO: 732730 - DNA, 19 bp, Mus musculus
  siRNA target sequence for 2810405F18Rik (NM_028142.1,168-186).
cggagatatcgatataaga

SEQ ID NO: 732731 - DNA, 19 bp, Mus musculus
  siRNA target sequence for 2810405F18Rik (NM_028142.1,169-187).
ggagatatcgatataagaa

SEQ ID NO: 732732 - DNA, 19 bp, Mus musculus
  siRNA target sequence for 2810405F18Rik (NM_028142.1,261-279).
gtacagtttggggatcttt

SEQ ID NO: 732733 - DNA, 19 bp, Mus musculus
  siRNA target sequence for 2810405F18Rik (NM_028142.1,271-289).
gggatctttggccatcaat

SEQ ID NO: 732734 - DNA, 19 bp, Mus musculus
  siRNA target sequence for 2810405F18Rik (NM_028142.1,281-299).
gccatcaatccgtgttagt

SEQ ID NO: 732735 - DNA, 19 bp, Mus musculus
  siRNA target sequence for 2810405F18Rik (NM_028142.1,283-301).
catcaatccgtgttagtct

SEQ ID NO: 732736 - DNA, 19 bp, Mus musculus
  siRNA target sequence for 2810405F18Rik (NM_028142.1,321-339).
ggtgcattggtcaataatt

SEQ ID NO: 732737 - DNA, 19 bp, Mus musculus
  siRNA target sequence for 2810405F18Rik (NM_028142.1,322-340).
gtgcattggtcaataattt

SEQ ID NO: 732738 - DNA, 19 bp, Mus musculus
  siRNA target sequence for 2810405F18Rik (NM_028142.1,480-498).
cgatgcttcactttttcca

SEQ ID NO: 732739 - DNA, 19 bp, Mus musculus
  siRNA target sequence for 2810405F18Rik (NM_028142.1,650-668).
caaaacgctggcattactt

SEQ ID NO: 732740 - DNA, 19 bp, Mus musculus
  siRNA target sequence for 2810405F18Rik (NM_028142.1,673-691).
cgggttgttgccgtaatct

SEQ ID NO: 732741 - DNA, 19 bp, Mus musculus
  siRNA target sequence for 2810405F18Rik (NM_028142.1,674-692).
gggttgttgccgtaatcta

SEQ ID NO: 732742 - DNA, 19 bp, Mus musculus
  siRNA target sequence for 2810405F18Rik (NM_028142.1,825-843).
gagggggacacctatgata

SEQ ID NO: 732743 - DNA, 19 bp, Mus musculus
  siRNA target sequence for 2810405F18Rik (NM_028142.1,835-853).
cctatgatagggtgttagt

SEQ ID NO: 732744 - DNA, 19 bp, Mus musculus
  siRNA target sequence for 2810405F18Rik (NM_028142.1,836-854).
ctatgatagggtgttagta

SEQ ID NO: 732745 - DNA, 19 bp, Mus musculus
  siRNA target sequence for 2810405F18Rik (NM_028142.1,994-1012).
caggaggtcacgttgtcta

SEQ ID NO: 732746 - DNA, 19 bp, Mus musculus
  siRNA target sequence for 2810405F18Rik (NM_028142.1,996-1014).
ggaggtcacgttgtctatt

SEQ ID NO: 732747 - DNA, 19 bp, Mus musculus
  siRNA target sequence for 2810405F18Rik (NM_028142.1,999-1017).
ggtcacgttgtctattcaa

SEQ ID NO: 732748 - DNA, 19 bp, Mus musculus
  siRNA target sequence for 2810405F18Rik (NM_028142.1,1024-1042).
cactgtctcacttacagaa

SEQ ID NO: 732749 - DNA, 19 bp, Mus musculus
  siRNA target sequence for 2810405F18Rik (NM_028142.1,1030-1048).
ctcacttacagaatgagta

SEQ ID NO: 732750 - DNA, 19 bp, Mus musculus
  siRNA target sequence for 2810405F18Rik (NM_028142.1,1074-1092).
ctggccaatcaatacaaca

SEQ ID NO: 732751 - DNA, 19 bp, Mus musculus
  siRNA target sequence for 2810405F18Rik (NM_028142.1,1077-1095).
gccaatcaatacaacatca

SEQ ID NO: 732752 - DNA, 19 bp, Mus musculus
  siRNA target sequence for 2810405F18Rik (NM_028142.1,1115-1133).
gtctcacttccgaaagctt

SEQ ID NO: 732753 - DNA, 19 bp, Mus musculus
  siRNA target sequence for 2810405F18Rik (NM_028142.1,1169-1187).
ggttggggagctggtaata

SEQ ID NO: 732754 - DNA, 19 bp, Mus musculus
  siRNA target sequence for 2810405F18Rik (NM_028142.1,1173-1191).
ggggagctggtaataccaa

SEQ ID NO: 732755 - DNA, 19 bp, Mus musculus
  siRNA target sequence for 2810405F18Rik (NM_028142.1,1174-1192).
gggagctggtaataccaaa

SEQ ID NO: 732756 - DNA, 19 bp, Mus musculus
  siRNA target sequence for 2810405F18Rik (NM_028142.1,1193-1211).
cctcatggtcaattttgga

SEQ ID NO: 732757 - DNA, 19 bp, Mus musculus
  siRNA target sequence for 2810427I04Rik (NM_028146.1,114-132).
gtccgggagagatcgttaa

SEQ ID NO: 732758 - DNA, 19 bp, Mus musculus
  siRNA target sequence for 2810427I04Rik (NM_028146.1,117-135).
cgggagagatcgttaagga

SEQ ID NO: 732759 - DNA, 19 bp, Mus musculus
  siRNA target sequence for 2810427I04Rik (NM_028146.1,147-165).
cacaggctgccctgaatgt

SEQ ID NO: 732760 - DNA, 19 bp, Mus musculus
  siRNA target sequence for 2810427I04Rik (NM_028146.1,223-241).
ggttggcatcccaatacca

SEQ ID NO: 732761 - DNA, 19 bp, Mus musculus
  siRNA target sequence for 2810427I04Rik (NM_028146.1,379-397).
ctccgatgacgaaaacctt

SEQ ID NO: 732762 - DNA, 19 bp, Mus musculus
  siRNA target sequence for 2810427I04Rik (NM_028146.1,525-543).
ggacaattgtggacacatt

SEQ ID NO: 732763 - DNA, 19 bp, Mus musculus
  siRNA target sequence for 1700013B16Rik (NM_028157.1,375-393).
ccccgttgtcgcgtatgta

SEQ ID NO: 732764 - DNA, 19 bp, Mus musculus
  siRNA target sequence for 1700013B16Rik (NM_028157.1,376-394).
cccgttgtcgcgtatgtaa

SEQ ID NO: 732765 - DNA, 19 bp, Mus musculus
  siRNA target sequence for 1700013B16Rik (NM_028157.1,378-396).
cgttgtcgcgtatgtaaca

SEQ ID NO: 732766 - DNA, 19 bp, Mus musculus
  siRNA target sequence for 1700013B16Rik (NM_028157.1,379-397).
gttgtcgcgtatgtaacaa

SEQ ID NO: 732767 - DNA, 19 bp, Mus musculus
  siRNA target sequence for 1700013B16Rik (NM_028157.1,384-402).
cgcgtatgtaacaaagcaa

SEQ ID NO: 732768 - DNA, 19 bp, Mus musculus
  siRNA target sequence for 1700013B16Rik (NM_028157.1,476-494).
ctaccgctcccctgataga

SEQ ID NO: 732769 - DNA, 19 bp, Mus musculus
  siRNA target sequence for 1700013B16Rik (NM_028157.1,585-603).
cttgcagaaccaaatcact

SEQ ID NO: 732770 - DNA, 19 bp, Mus musculus
  siRNA target sequence for 1700013B16Rik (NM_028157.1,672-690).
cttaaaccctgcagtgtta

SEQ ID NO: 732771 - DNA, 19 bp, Mus musculus
  siRNA target sequence for 1700013B16Rik (NM_028157.1,826-844).
gtctcaactgccaaaagca

SEQ ID NO: 732772 - DNA, 19 bp, Mus musculus
  siRNA target sequence for 1700013B16Rik (NM_028157.1,889-907).
gaccagtccctgacaaatt

SEQ ID NO: 732773 - DNA, 19 bp, Mus musculus
  siRNA target sequence for 1700013B16Rik (NM_028157.1,892-910).
cagtccctgacaaattcga

SEQ ID NO: 732774 - DNA, 19 bp, Mus musculus
  siRNA target sequence for 1700013B16Rik (NM_028157.1,900-918).
gacaaattcgacacatgtt

SEQ ID NO: 732775 - DNA, 19 bp, Mus musculus
  siRNA target sequence for 1700013B16Rik (NM_028157.1,908-926).
cgacacatgttattaacca

SEQ ID NO: 732776 - DNA, 19 bp, Mus musculus
  siRNA target sequence for 1700013B16Rik (NM_028157.1,997-1015).
gagcctggggatcatttgt

SEQ ID NO: 732777 - DNA, 19 bp, Mus musculus
  siRNA target sequence for 1700013B16Rik (NM_028157.1,1072-1090).
ggcactgtgtataaactta

SEQ ID NO: 732778 - DNA, 19 bp, Mus musculus
  siRNA target sequence for 1700013B16Rik (NM_028157.1,1177-1195).
gtctcccacctcttaggta

SEQ ID NO: 732779 - DNA, 19 bp, Mus musculus
  siRNA target sequence for 1700013B16Rik (NM_028157.1,1179-1197).
ctcccacctcttaggtaat

SEQ ID NO: 732780 - DNA, 19 bp, Mus musculus
  siRNA target sequence for 1700013B16Rik (NM_028157.1,1181-1199).
cccacctcttaggtaatga

SEQ ID NO: 732781 - DNA, 19 bp, Mus musculus
  siRNA target sequence for 1700013B16Rik (NM_028157.1,1182-1200).
ccacctcttaggtaatgaa

SEQ ID NO: 732782 - DNA, 19 bp, Mus musculus
  siRNA target sequence for 1700013B16Rik (NM_028157.1,1183-1201).
cacctcttaggtaatgaaa

SEQ ID NO: 732783 - DNA, 19 bp, Mus musculus
  siRNA target sequence for 1700013B16Rik (NM_028157.1,1339-1357).
gccaacacaggtaacagtt

SEQ ID NO: 732784 - DNA, 19 bp, Mus musculus
  siRNA target sequence for 1700013B16Rik (NM_028157.1,1340-1358).
ccaacacaggtaacagtta

SEQ ID NO: 732785 - DNA, 19 bp, Mus musculus
  siRNA target sequence for 1700013B16Rik (NM_028157.1,1360-1378).
ccaggaagggactatttca

SEQ ID NO: 732786 - DNA, 19 bp, Mus musculus
  siRNA target sequence for 1700013B16Rik (NM_028157.1,1361-1379).
caggaagggactatttcaa

SEQ ID NO: 732787 - DNA, 19 bp, Mus musculus
  siRNA target sequence for 1700013B16Rik (NM_028157.1,1363-1381).
ggaagggactatttcaaca

SEQ ID NO: 732788 - DNA, 19 bp, Mus musculus
  siRNA target sequence for 1700013B16Rik (NM_028157.1,1364-1382).
gaagggactatttcaacaa

SEQ ID NO: 732789 - DNA, 19 bp, Mus musculus
  siRNA target sequence for 1700013B16Rik (NM_028157.1,1367-1385).
gggactatttcaacaaagt

SEQ ID NO: 732790 - DNA, 19 bp, Mus musculus
  siRNA target sequence for 1700013B16Rik (NM_028157.1,1404-1422).
cagtcattcttccaatctt

SEQ ID NO: 732791 - DNA, 19 bp, Mus musculus
  siRNA target sequence for 1700013B16Rik (NM_028157.1,1408-1426).
cattcttccaatcttactt

SEQ ID NO: 732792 - DNA, 19 bp, Mus musculus
  siRNA target sequence for 1700013B16Rik (NM_028157.1,1458-1476).
ccaacaagggcagattgta

SEQ ID NO: 732793 - DNA, 19 bp, Mus musculus
  siRNA target sequence for 1700013B16Rik (NM_028157.1,1498-1516).
gactcccttgccaactcta

SEQ ID NO: 732794 - DNA, 19 bp, Mus musculus
  siRNA target sequence for 1700013B16Rik (NM_028157.1,1589-1607).
gttttcatagcctgaagaa

SEQ ID NO: 732795 - DNA, 19 bp, Mus musculus
  siRNA target sequence for 1700013B16Rik (NM_028157.1,1618-1636).
cctctcaccccatgtgaaa

SEQ ID NO: 732796 - DNA, 19 bp, Mus musculus
  siRNA target sequence for 1700013B16Rik (NM_028157.1,1625-1643).
ccccatgtgaaattcaaca

SEQ ID NO: 732797 - DNA, 19 bp, Mus musculus
  siRNA target sequence for 1700013B16Rik (NM_028157.1,1642-1660).
cagctggaatacaacctat

SEQ ID NO: 732798 - DNA, 19 bp, Mus musculus
  siRNA target sequence for 1700013B16Rik (NM_028157.1,1663-1681).
caaaaagcgctgcaaagtt

SEQ ID NO: 732799 - DNA, 19 bp, Mus musculus
  siRNA target sequence for 1700013B16Rik (NM_028157.1,1686-1704).
gggtttacccactctaact

SEQ ID NO: 732800 - DNA, 19 bp, Mus musculus
  siRNA target sequence for 1700013B16Rik (NM_028157.1,1688-1706).
gtttacccactctaactga

SEQ ID NO: 732801 - DNA, 19 bp, Mus musculus
  siRNA target sequence for 1700013B16Rik (NM_028157.1,1693-1711).
cccactctaactgaaacat

SEQ ID NO: 732802 - DNA, 19 bp, Mus musculus
  siRNA target sequence for 1700013B16Rik (NM_028157.1,1694-1712).
ccactctaactgaaacatt

SEQ ID NO: 732803 - DNA, 19 bp, Mus musculus
  siRNA target sequence for 1700013B16Rik (NM_028157.1,1727-1745).
gtcccccacctcctaaaat

SEQ ID NO: 732804 - DNA, 19 bp, Mus musculus
  siRNA target sequence for 1700013B16Rik (NM_028157.1,1771-1789).
gtccatgctcccaagacaa

SEQ ID NO: 732805 - DNA, 19 bp, Mus musculus
  siRNA target sequence for 1700013B16Rik (NM_028157.1,1882-1900).
ccccacaggatccttgaat

SEQ ID NO: 732806 - DNA, 19 bp, Mus musculus
  siRNA target sequence for 1700013B16Rik (NM_028157.1,1911-1929).
cttgagtcctcattcagaa

SEQ ID NO: 732807 - DNA, 19 bp, Mus musculus
  siRNA target sequence for 1700013B16Rik (NM_028157.1,1914-1932).
gagtcctcattcagaaatt

SEQ ID NO: 732808 - DNA, 19 bp, Mus musculus
  siRNA target sequence for 1700013B16Rik (NM_028157.1,1968-1986).
ctcacgggtctctctctat

SEQ ID NO: 732809 - DNA, 19 bp, Mus musculus
  siRNA target sequence for 1700013B16Rik (NM_028157.1,1972-1990).
cgggtctctctctataagt

SEQ ID NO: 732810 - DNA, 19 bp, Mus musculus
  siRNA target sequence for 1700013B16Rik (NM_028157.1,1973-1991).
gggtctctctctataagtt

SEQ ID NO: 732811 - DNA, 19 bp, Mus musculus
  siRNA target sequence for 1700013B16Rik (NM_028157.1,1974-1992).
ggtctctctctataagttt

SEQ ID NO: 732812 - DNA, 19 bp, Mus musculus
  siRNA target sequence for 1700013B16Rik (NM_028157.1,1975-1993).
gtctctctctataagttta

SEQ ID NO: 732813 - DNA, 19 bp, Mus musculus
  siRNA target sequence for 1700013B16Rik (NM_028157.1,2023-2041).
gtaagccaatcggaaagat

SEQ ID NO: 732814 - DNA, 19 bp, Mus musculus
  siRNA target sequence for 1700013B16Rik (NM_028157.1,2099-2117).
gacaccgtccagggataaa

SEQ ID NO: 732815 - DNA, 19 bp, Mus musculus
  siRNA target sequence for 1700013B16Rik (NM_028157.1,2103-2121).
ccgtccagggataaaccaa

SEQ ID NO: 732816 - DNA, 19 bp, Mus musculus
  siRNA target sequence for 1700013B16Rik (NM_028157.1,2104-2122).
cgtccagggataaaccaaa

SEQ ID NO: 732817 - DNA, 19 bp, Mus musculus
  siRNA target sequence for 1700013B16Rik (NM_028157.1,2118-2136).
ccaaagagatcccatacaa

SEQ ID NO: 732818 - DNA, 19 bp, Mus musculus
  siRNA target sequence for 1700013B16Rik (NM_028157.1,2119-2137).
caaagagatcccatacaat

SEQ ID NO: 732819 - DNA, 19 bp, Mus musculus
  siRNA target sequence for 1700013B16Rik (NM_028157.1,2125-2143).
gatcccatacaatgtaagt

SEQ ID NO: 732820 - DNA, 19 bp, Mus musculus
  siRNA target sequence for 1700013B16Rik (NM_028157.1,2160-2178).
gagcactgtacattctaat

SEQ ID NO: 732821 - DNA, 19 bp, Mus musculus
  siRNA target sequence for 1700013B16Rik (NM_028157.1,2197-2215).
cttcagctagggaatatgt

SEQ ID NO: 732822 - DNA, 19 bp, Mus musculus
  siRNA target sequence for 1700013B16Rik (NM_028157.1,2208-2226).
gaatatgtctggaaacatt

SEQ ID NO: 732823 - DNA, 19 bp, Mus musculus
  siRNA target sequence for 1700013B16Rik (NM_028157.1,2649-2667).
gtcccttcggagaaacact

SEQ ID NO: 732824 - DNA, 19 bp, Mus musculus
  siRNA target sequence for Tbc1d5 (NM_028162.2,399-417).
ccccttgttcagttattca

SEQ ID NO: 732825 - DNA, 19 bp, Mus musculus
  siRNA target sequence for Tbc1d5 (NM_028162.2,401-419).
ccttgttcagttattcaaa

SEQ ID NO: 732826 - DNA, 19 bp, Mus musculus
  siRNA target sequence for Tbc1d5 (NM_028162.2,402-420).
cttgttcagttattcaaat

SEQ ID NO: 732827 - DNA, 19 bp, Mus musculus
  siRNA target sequence for Tbc1d5 (NM_028162.2,474-492).
cactgaagggacgttcaat

SEQ ID NO: 732828 - DNA, 19 bp, Mus musculus
  siRNA target sequence for Tbc1d5 (NM_028162.2,478-496).
gaagggacgttcaattcat

SEQ ID NO: 732829 - DNA, 19 bp, Mus musculus
  siRNA target sequence for Tbc1d5 (NM_028162.2,481-499).
gggacgttcaattcatata

SEQ ID NO: 732830 - DNA, 19 bp, Mus musculus
  siRNA target sequence for Tbc1d5 (NM_028162.2,482-500).
ggacgttcaattcatatat

SEQ ID NO: 732831 - DNA, 19 bp, Mus musculus
  siRNA target sequence for Tbc1d5 (NM_028162.2,509-527).
gggaagaactatttgtaaa

SEQ ID NO: 732832 - DNA, 19 bp, Mus musculus
  siRNA target sequence for Tbc1d5 (NM_028162.2,641-659).
gtcagtggataagtaaaat

SEQ ID NO: 732833 - DNA, 19 bp, Mus musculus
  siRNA target sequence for Tbc1d5 (NM_028162.2,673-691).
gcctggtatagcagtatta

SEQ ID NO: 732834 - DNA, 19 bp, Mus musculus
  siRNA target sequence for Tbc1d5 (NM_028162.2,674-692).
cctggtatagcagtattaa

SEQ ID NO: 732835 - DNA, 19 bp, Mus musculus
  siRNA target sequence for Tbc1d5 (NM_028162.2,675-693).
ctggtatagcagtattaaa

SEQ ID NO: 732836 - DNA, 19 bp, Mus musculus
  siRNA target sequence for Tbc1d5 (NM_028162.2,677-695).
ggtatagcagtattaaaga

SEQ ID NO: 732837 - DNA, 19 bp, Mus musculus
  siRNA target sequence for Tbc1d5 (NM_028162.2,678-696).
gtatagcagtattaaagaa

SEQ ID NO: 732838 - DNA, 19 bp, Mus musculus
  siRNA target sequence for Tbc1d5 (NM_028162.2,839-857).
gaacgtttcctgaaatgca

SEQ ID NO: 732839 - DNA, 19 bp, Mus musculus
  siRNA target sequence for Tbc1d5 (NM_028162.2,898-916).
gttctgttctgctatgcaa

SEQ ID NO: 732840 - DNA, 19 bp, Mus musculus
  siRNA target sequence for Tbc1d5 (NM_028162.2,958-976).
ctactagcgcctatcatct

SEQ ID NO: 732841 - DNA, 19 bp, Mus musculus
  siRNA target sequence for Tbc1d5 (NM_028162.2,987-1005).
ctgtgaccaccaagctttt

SEQ ID NO: 732842 - DNA, 19 bp, Mus musculus
  siRNA target sequence for Tbc1d5 (NM_028162.2,1072-1090).
gagcatgatgcctatgcaa

SEQ ID NO: 732843 - DNA, 19 bp, Mus musculus
  siRNA target sequence for Tbc1d5 (NM_028162.2,1078-1096).
gatgcctatgcaatgttct

SEQ ID NO: 732844 - DNA, 19 bp, Mus musculus
  siRNA target sequence for Tbc1d5 (NM_028162.2,1092-1110).
gttctcacagcttatggaa

SEQ ID NO: 732845 - DNA, 19 bp, Mus musculus
  siRNA target sequence for Tbc1d5 (NM_028162.2,1200-1218).
ggatttagggccaacagtt

SEQ ID NO: 732846 - DNA, 19 bp, Mus musculus
  siRNA target sequence for Tbc1d5 (NM_028162.2,1209-1227).
gccaacagttgccattgtt

SEQ ID NO: 732847 - DNA, 19 bp, Mus musculus
  siRNA target sequence for Tbc1d5 (NM_028162.2,1220-1238).
ccattgttacaaaagtcaa

SEQ ID NO: 732848 - DNA, 19 bp, Mus musculus
  siRNA target sequence for Tbc1d5 (NM_028162.2,1290-1308).
cctgaacagactagaaatt

SEQ ID NO: 732849 - DNA, 19 bp, Mus musculus
  siRNA target sequence for Tbc1d5 (NM_028162.2,1315-1333).
caaatatatgggttacgat

SEQ ID NO: 732850 - DNA, 19 bp, Mus musculus
  siRNA target sequence for Tbc1d5 (NM_028162.2,1440-1458).
cacagccatgctactctat

SEQ ID NO: 732851 - DNA, 19 bp, Mus musculus
  siRNA target sequence for Tbc1d5 (NM_028162.2,1442-1460).
cagccatgctactctatat

SEQ ID NO: 732852 - DNA, 19 bp, Mus musculus
  siRNA target sequence for Tbc1d5 (NM_028162.2,1462-1480).
cgagatgctttgatttcta

SEQ ID NO: 732853 - DNA, 19 bp, Mus musculus
  siRNA target sequence for Tbc1d5 (NM_028162.2,1469-1487).
ctttgatttctagtaacta

SEQ ID NO: 732854 - DNA, 19 bp, Mus musculus
  siRNA target sequence for Tbc1d5 (NM_028162.2,1503-1521).
ccttctgatgcattatcca

SEQ ID NO: 732855 - DNA, 19 bp, Mus musculus
  siRNA target sequence for Tbc1d5 (NM_028162.2,1520-1538).
caatcatcggggacataca

SEQ ID NO: 732856 - DNA, 19 bp, Mus musculus
  siRNA target sequence for Tbc1d5 (NM_028162.2,1530-1548).
ggacatacactcactgata

SEQ ID NO: 732857 - DNA, 19 bp, Mus musculus
  siRNA target sequence for Tbc1d5 (NM_028162.2,1563-1581).
ccttagagacccaaagaga

SEQ ID NO: 732858 - DNA, 19 bp, Mus musculus
  siRNA target sequence for Tbc1d5 (NM_028162.2,1570-1588).
gacccaaagagaaatccaa

SEQ ID NO: 732859 - DNA, 19 bp, Mus musculus
  siRNA target sequence for Tbc1d5 (NM_028162.2,1612-1630).
cccaacttagactactaca

SEQ ID NO: 732860 - DNA, 19 bp, Mus musculus
  siRNA target sequence for Tbc1d5 (NM_028162.2,1613-1631).
ccaacttagactactacaa

SEQ ID NO: 732861 - DNA, 19 bp, Mus musculus
  siRNA target sequence for Tbc1d5 (NM_028162.2,1636-1654).
cggggagccgaccttatga

SEQ ID NO: 732862 - DNA, 19 bp, Mus musculus
  siRNA target sequence for Tbc1d5 (NM_028162.2,1640-1658).
gagccgaccttatgaacaa

SEQ ID NO: 732863 - DNA, 19 bp, Mus musculus
  siRNA target sequence for Tbc1d5 (NM_028162.2,1642-1660).
gccgaccttatgaacaaaa

SEQ ID NO: 732864 - DNA, 19 bp, Mus musculus
  siRNA target sequence for Tbc1d5 (NM_028162.2,1701-1719).
ggtctccaacagcttgatt

SEQ ID NO: 732865 - DNA, 19 bp, Mus musculus
  siRNA target sequence for Tbc1d5 (NM_028162.2,1772-1790).
gccctgtacccggaaacaa

SEQ ID NO: 732866 - DNA, 19 bp, Mus musculus
  siRNA target sequence for Tbc1d5 (NM_028162.2,1774-1792).
cctgtacccggaaacaaca

SEQ ID NO: 732867 - DNA, 19 bp, Mus musculus
  siRNA target sequence for Tbc1d5 (NM_028162.2,1837-1855).
gaagccccaaggcatcatt

SEQ ID NO: 732868 - DNA, 19 bp, Mus musculus
  siRNA target sequence for Tbc1d5 (NM_028162.2,1841-1859).
ccccaaggcatcatttgct

SEQ ID NO: 732869 - DNA, 19 bp, Mus musculus
  siRNA target sequence for Tbc1d5 (NM_028162.2,1970-1988).
gcatgccggtacagttgaa

SEQ ID NO: 732870 - DNA, 19 bp, Mus musculus
  siRNA target sequence for Tbc1d5 (NM_028162.2,1993-2011).
gggcaaagttcgaaaacca

SEQ ID NO: 732871 - DNA, 19 bp, Mus musculus
  siRNA target sequence for Tbc1d5 (NM_028162.2,1994-2012).
ggcaaagttcgaaaaccat

SEQ ID NO: 732872 - DNA, 19 bp, Mus musculus
  siRNA target sequence for Tbc1d5 (NM_028162.2,2021-2039).
ctccaagtatcgagagttt

SEQ ID NO: 732873 - DNA, 19 bp, Mus musculus
  siRNA target sequence for Tbc1d5 (NM_028162.2,2069-2087).
cacctccatccgctactaa

SEQ ID NO: 732874 - DNA, 19 bp, Mus musculus
  siRNA target sequence for Tbc1d5 (NM_028162.2,2071-2089).
cctccatccgctactaaaa

SEQ ID NO: 732875 - DNA, 19 bp, Mus musculus
  siRNA target sequence for Tbc1d5 (NM_028162.2,2072-2090).
ctccatccgctactaaaaa

SEQ ID NO: 732876 - DNA, 19 bp, Mus musculus
  siRNA target sequence for Tbc1d5 (NM_028162.2,2075-2093).
catccgctactaaaaagga

SEQ ID NO: 732877 - DNA, 19 bp, Mus musculus
  siRNA target sequence for Tbc1d5 (NM_028162.2,2262-2280).
cattcaagatgtggtatta

SEQ ID NO: 732878 - DNA, 19 bp, Mus musculus
  siRNA target sequence for Tbc1d5 (NM_028162.2,2272-2290).
gtggtattacaagagaatt

SEQ ID NO: 732879 - DNA, 19 bp, Mus musculus
  siRNA target sequence for Tbc1d5 (NM_028162.2,2392-2410).
ggcgagaatgagcagatta

SEQ ID NO: 732880 - DNA, 19 bp, Mus musculus
  siRNA target sequence for Tbc1d5 (NM_028162.2,2513-2531).
gaacgaccccagatgactt

SEQ ID NO: 732881 - DNA, 19 bp, Mus musculus
  siRNA target sequence for Tbc1d5 (NM_028162.2,2516-2534).
cgaccccagatgacttcat

SEQ ID NO: 732882 - DNA, 19 bp, Mus musculus
  siRNA target sequence for Tbc1d5 (NM_028162.2,2517-2535).
gaccccagatgacttcatt

SEQ ID NO: 732883 - DNA, 19 bp, Mus musculus
  siRNA target sequence for 1700030K09Rik (NM_028170.1,92-110).
ccctccacgtagtggtttt

SEQ ID NO: 732884 - DNA, 19 bp, Mus musculus
  siRNA target sequence for 1700030K09Rik (NM_028170.1,96-114).
ccacgtagtggttttgact

SEQ ID NO: 732885 - DNA, 19 bp, Mus musculus
  siRNA target sequence for 1700030K09Rik (NM_028170.1,97-115).
cacgtagtggttttgactt

SEQ ID NO: 732886 - DNA, 19 bp, Mus musculus
  siRNA target sequence for 1700030K09Rik (NM_028170.1,99-117).
cgtagtggttttgacttaa

SEQ ID NO: 732887 - DNA, 19 bp, Mus musculus
  siRNA target sequence for 1700030K09Rik (NM_028170.1,111-129).
gacttaagggatatgttct

SEQ ID NO: 732888 - DNA, 19 bp, Mus musculus
  siRNA target sequence for 1700030K09Rik (NM_028170.1,113-131).
cttaagggatatgttctta

SEQ ID NO: 732889 - DNA, 19 bp, Mus musculus
  siRNA target sequence for 1700030K09Rik (NM_028170.1,136-154).
gctcgaggatggaagagat

SEQ ID NO: 732890 - DNA, 19 bp, Mus musculus
  siRNA target sequence for 1700030K09Rik (NM_028170.1,161-179).
cttacaagcccgaagtctt

SEQ ID NO: 732891 - DNA, 19 bp, Mus musculus
  siRNA target sequence for 1700030K09Rik (NM_028170.1,226-244).
cgatggacgagaaatattt

SEQ ID NO: 732892 - DNA, 19 bp, Mus musculus
  siRNA target sequence for 1700030K09Rik (NM_028170.1,326-344).
cagtgaggcccttaggaaa

SEQ ID NO: 732893 - DNA, 19 bp, Mus musculus
  siRNA target sequence for 1700030K09Rik (NM_028170.1,474-492).
cagtacccacacagaactt

SEQ ID NO: 732894 - DNA, 19 bp, Mus musculus
  siRNA target sequence for 1700030K09Rik (NM_028170.1,828-846).
gttgaccagtccagcttaa

SEQ ID NO: 732895 - DNA, 19 bp, Mus musculus
  siRNA target sequence for 1700030K09Rik (NM_028170.1,831-849).
gaccagtccagcttaaagt

SEQ ID NO: 732896 - DNA, 19 bp, Mus musculus
  siRNA target sequence for 1700030K09Rik (NM_028170.1,940-958).
cacctcccatccttgatga

SEQ ID NO: 732897 - DNA, 19 bp, Mus musculus
  siRNA target sequence for 1700030K09Rik (NM_028170.1,964-982).
ccaaatcagcatcttcaaa

SEQ ID NO: 732898 - DNA, 19 bp, Mus musculus
  siRNA target sequence for 1700030K09Rik (NM_028170.1,1067-1085).
cagcctccatgattttaga

SEQ ID NO: 732899 - DNA, 19 bp, Mus musculus
  siRNA target sequence for 1700030K09Rik (NM_028170.1,1069-1087).
gcctccatgattttagaat

SEQ ID NO: 732900 - DNA, 19 bp, Mus musculus
  siRNA target sequence for 1700030K09Rik (NM_028170.1,1070-1088).
cctccatgattttagaatt

SEQ ID NO: 732901 - DNA, 19 bp, Mus musculus
  siRNA target sequence for 1700030K09Rik (NM_028170.1,1116-1134).
ctggctgacggagacaaat

SEQ ID NO: 732902 - DNA, 19 bp, Mus musculus
  siRNA target sequence for 1700030K09Rik (NM_028170.1,1118-1136).
ggctgacggagacaaatca

SEQ ID NO: 732903 - DNA, 19 bp, Mus musculus
  siRNA target sequence for 1700030K09Rik (NM_028170.1,1120-1138).
ctgacggagacaaatcaga

SEQ ID NO: 732904 - DNA, 19 bp, Mus musculus
  siRNA target sequence for 1700030K09Rik (NM_028170.1,1339-1357).
ctgtccagtctcacagtat

SEQ ID NO: 732905 - DNA, 19 bp, Mus musculus
  siRNA target sequence for 1700030K09Rik (NM_028170.1,1384-1402).
cttactcagaggattttga

SEQ ID NO: 732906 - DNA, 19 bp, Mus musculus
  siRNA target sequence for 1700030K09Rik (NM_028170.1,1477-1495).
gtggtcagacagatatcgt

SEQ ID NO: 732907 - DNA, 19 bp, Mus musculus
  siRNA target sequence for 1700030K09Rik (NM_028170.1,1497-1515).
gccagacaacctctatcaa

SEQ ID NO: 732908 - DNA, 19 bp, Mus musculus
  siRNA target sequence for 1700030K09Rik (NM_028170.1,1506-1524).
cctctatcaaggacagaat

SEQ ID NO: 732909 - DNA, 19 bp, Mus musculus
  siRNA target sequence for 1700030K09Rik (NM_028170.1,1723-1741).
cagttctggcgttgaatga

SEQ ID NO: 732910 - DNA, 19 bp, Mus musculus
  siRNA target sequence for 1700030K09Rik (NM_028170.1,1725-1743).
gttctggcgttgaatgaca

SEQ ID NO: 732911 - DNA, 19 bp, Mus musculus
  siRNA target sequence for 1700030K09Rik (NM_028170.1,1731-1749).
gcgttgaatgacatgctaa

SEQ ID NO: 732912 - DNA, 19 bp, Mus musculus
  siRNA target sequence for 1700030K09Rik (NM_028170.1,1762-1780).
gcctgacgcagcagttcat

SEQ ID NO: 732913 - DNA, 19 bp, Mus musculus
  siRNA target sequence for 1700030K09Rik (NM_028170.1,1819-1837).
ccctggatggggactcatt

SEQ ID NO: 732914 - DNA, 19 bp, Mus musculus
  siRNA target sequence for 1700030K09Rik (NM_028170.1,1820-1838).
cctggatggggactcattt

SEQ ID NO: 732915 - DNA, 19 bp, Mus musculus
  siRNA target sequence for 1700030K09Rik (NM_028170.1,1834-1852).
catttcactaccatacctt

SEQ ID NO: 732916 - DNA, 19 bp, Mus musculus
  siRNA target sequence for 1700030K09Rik (NM_028170.1,1970-1988).
ctgtccacctcggaatcaa

SEQ ID NO: 732917 - DNA, 19 bp, Mus musculus
  siRNA target sequence for Ceacam13 (NM_028171.1,854-872).
ctccaagtaaatagtaagt

SEQ ID NO: 732918 - DNA, 19 bp, Mus musculus
  siRNA target sequence for Tram1 (NM_028173.1,229-247).
gcctggcgatgcttttcct

SEQ ID NO: 732919 - DNA, 19 bp, Mus musculus
  siRNA target sequence for Tram1 (NM_028173.1,355-373).
ccctatatcactatggtat

SEQ ID NO: 732920 - DNA, 19 bp, Mus musculus
  siRNA target sequence for Tram1 (NM_028173.1,363-381).
cactatggtatcaaagact

SEQ ID NO: 732921 - DNA, 19 bp, Mus musculus
  siRNA target sequence for Tram1 (NM_028173.1,384-402).
gctacagttttgttctaca

SEQ ID NO: 732922 - DNA, 19 bp, Mus musculus
  siRNA target sequence for Tram1 (NM_028173.1,401-419).
catgctagtggcgataatt

SEQ ID NO: 732923 - DNA, 19 bp, Mus musculus
  siRNA target sequence for Tram1 (NM_028173.1,404-422).
gctagtggcgataattatt

SEQ ID NO: 732924 - DNA, 19 bp, Mus musculus
  siRNA target sequence for Tram1 (NM_028173.1,435-453).
caggagtatgtgttggata

SEQ ID NO: 732925 - DNA, 19 bp, Mus musculus
  siRNA target sequence for Tram1 (NM_028173.1,465-483).
cggatgcacttctccaaaa

SEQ ID NO: 732926 - DNA, 19 bp, Mus musculus
  siRNA target sequence for Tram1 (NM_028173.1,484-502).
cgaagcacagcaagtttaa

SEQ ID NO: 732927 - DNA, 19 bp, Mus musculus
  siRNA target sequence for Tram1 (NM_028173.1,511-529).
gtcagctcagtgcattcta

SEQ ID NO: 732928 - DNA, 19 bp, Mus musculus
  siRNA target sequence for Tram1 (NM_028173.1,518-536).
cagtgcattctaccttttt

SEQ ID NO: 732929 - DNA, 19 bp, Mus musculus
  siRNA target sequence for Tram1 (NM_028173.1,547-565).
ggggcacgttcattctcat

SEQ ID NO: 732930 - DNA, 19 bp, Mus musculus
  siRNA target sequence for Tram1 (NM_028173.1,566-584).
ctccgaaaactatatctca

SEQ ID NO: 732931 - DNA, 19 bp, Mus musculus
  siRNA target sequence for Tram1 (NM_028173.1,604-622).
gagcctatccccataacct

SEQ ID NO: 732932 - DNA, 19 bp, Mus musculus
  siRNA target sequence for Tram1 (NM_028173.1,724-742).
ctcgtcagctcgtctacat

SEQ ID NO: 732933 - DNA, 19 bp, Mus musculus
  siRNA target sequence for Tram1 (NM_028173.1,812-830).
ggtgctgcactatttcgtt

SEQ ID NO: 732934 - DNA, 19 bp, Mus musculus
  siRNA target sequence for Tram1 (NM_028173.1,816-834).
ctgcactatttcgttgaat

SEQ ID NO: 732935 - DNA, 19 bp, Mus musculus
  siRNA target sequence for Tram1 (NM_028173.1,818-836).
gcactatttcgttgaattt

SEQ ID NO: 732936 - DNA, 19 bp, Mus musculus
  siRNA target sequence for Tram1 (NM_028173.1,842-860).
ccacatttctcgtctattt

SEQ ID NO: 732937 - DNA, 19 bp, Mus musculus
  siRNA target sequence for Tram1 (NM_028173.1,843-861).
cacatttctcgtctatttt

SEQ ID NO: 732938 - DNA, 19 bp, Mus musculus
  siRNA target sequence for Tram1 (NM_028173.1,868-886).
gtgacgagaagtatcagaa

SEQ ID NO: 732939 - DNA, 19 bp, Mus musculus
  siRNA target sequence for Tram1 (NM_028173.1,922-940).
gaagacttctgactctaat

SEQ ID NO: 732940 - DNA, 19 bp, Mus musculus
  siRNA target sequence for Tram1 (NM_028173.1,972-990).
gcaagagcggagaatcaga

SEQ ID NO: 732941 - DNA, 19 bp, Mus musculus
  siRNA target sequence for Tram1 (NM_028173.1,973-991).
caagagcggagaatcagaa

SEQ ID NO: 732942 - DNA, 19 bp, Mus musculus
  siRNA target sequence for Tram1 (NM_028173.1,989-1007).
gaagctggactttagtact

SEQ ID NO: 732943 - DNA, 19 bp, Mus musculus
  siRNA target sequence for Tram1 (NM_028173.1,1041-1059).
gttctcgcgtccatttgca

SEQ ID NO: 732944 - DNA, 19 bp, Mus musculus
  siRNA target sequence for 1810073J13Rik (NM_028181.1,124-142).
cgacagcgactcatcttgt

SEQ ID NO: 732945 - DNA, 19 bp, Mus musculus
  siRNA target sequence for 1810073J13Rik (NM_028181.1,147-165).
ggactgtcatcaatcatga

SEQ ID NO: 732946 - DNA, 19 bp, Mus musculus
  siRNA target sequence for 1810073J13Rik (NM_028181.1,157-175).
caatcatgagggttctgat

SEQ ID NO: 732947 - DNA, 19 bp, Mus musculus
  siRNA target sequence for 1810073J13Rik (NM_028181.1,173-191).
gatatagagatcgtgaatt

SEQ ID NO: 732948 - DNA, 19 bp, Mus musculus
  siRNA target sequence for 1810073J13Rik (NM_028181.1,250-268).
ggagctgcccgttctttat

SEQ ID NO: 732949 - DNA, 19 bp, Mus musculus
  siRNA target sequence for 1810073J13Rik (NM_028181.1,253-271).
gctgcccgttctttatgta

SEQ ID NO: 732950 - DNA, 19 bp, Mus musculus
  siRNA target sequence for 1810073J13Rik (NM_028181.1,309-327).
cgtcagtgggagaaaccat

SEQ ID NO: 732951 - DNA, 19 bp, Mus musculus
  siRNA target sequence for 1810073J13Rik (NM_028181.1,314-332).
gtgggagaaaccatgttgt

SEQ ID NO: 732952 - DNA, 19 bp, Mus musculus
  siRNA target sequence for 1810073J13Rik (NM_028181.1,320-338).
gaaaccatgttgtcatcaa

SEQ ID NO: 732953 - DNA, 19 bp, Mus musculus
  siRNA target sequence for 1810073J13Rik (NM_028181.1,378-396).
cttcccctgaagacaatgt

SEQ ID NO: 732954 - DNA, 19 bp, Mus musculus
  siRNA target sequence for 1810073J13Rik (NM_028181.1,395-413).
gtctatttcggaactacta

SEQ ID NO: 732955 - DNA, 19 bp, Mus musculus
  siRNA target sequence for 1810073J13Rik (NM_028181.1,397-415).
ctatttcggaactactagt

SEQ ID NO: 732956 - DNA, 19 bp, Mus musculus
  siRNA target sequence for 1810073J13Rik (NM_028181.1,414-432).
gtgacgattcggatattgt

SEQ ID NO: 732957 - DNA, 19 bp, Mus musculus
  siRNA target sequence for 1810073J13Rik (NM_028181.1,416-434).
gacgattcggatattgtta

SEQ ID NO: 732958 - DNA, 19 bp, Mus musculus
  siRNA target sequence for 1810073J13Rik (NM_028181.1,424-442).
ggatattgttacacttgaa

SEQ ID NO: 732959 - DNA, 19 bp, Mus musculus
  siRNA target sequence for 1810073J13Rik (NM_028181.1,464-482).
gggaaccaggaagttacaa

SEQ ID NO: 732960 - DNA, 19 bp, Mus musculus
  siRNA target sequence for 1810073J13Rik (NM_028181.1,495-513).
ccagctcagatgaccttaa

SEQ ID NO: 732961 - DNA, 19 bp, Mus musculus
  siRNA target sequence for 1810073J13Rik (NM_028181.1,498-516).
gctcagatgaccttaacat

SEQ ID NO: 732962 - DNA, 19 bp, Mus musculus
  siRNA target sequence for 1810073J13Rik (NM_028181.1,553-571).
gccagaacccgtcttttca

SEQ ID NO: 732963 - DNA, 19 bp, Mus musculus
  siRNA target sequence for 1810073J13Rik (NM_028181.1,655-673).
gaagaccgtttctatctca

SEQ ID NO: 732964 - DNA, 19 bp, Mus musculus
  siRNA target sequence for 1810073J13Rik (NM_028181.1,725-743).
ccaagtaaacgccacttta

SEQ ID NO: 732965 - DNA, 19 bp, Mus musculus
  siRNA target sequence for 1810073J13Rik (NM_028181.1,749-767).
ggtctcaacaagtgtgtta

SEQ ID NO: 732966 - DNA, 19 bp, Mus musculus
  siRNA target sequence for 1810073J13Rik (NM_028181.1,750-768).
gtctcaacaagtgtgttat

SEQ ID NO: 732967 - DNA, 19 bp, Mus musculus
  siRNA target sequence for 1810073J13Rik (NM_028181.1,846-864).
gaaagacccacgaagatga

SEQ ID NO: 732968 - DNA, 19 bp, Mus musculus
  siRNA target sequence for 1810073J13Rik (NM_028181.1,904-922).
ggaacaagagtcttttcta

SEQ ID NO: 732969 - DNA, 19 bp, Mus musculus
  siRNA target sequence for 1810073J13Rik (NM_028181.1,960-978).
ggaccgttactgaatcaga

SEQ ID NO: 732970 - DNA, 19 bp, Mus musculus
  siRNA target sequence for 1810073J13Rik (NM_028181.1,971-989).
gaatcagagaagattacct

SEQ ID NO: 732971 - DNA, 19 bp, Mus musculus
  siRNA target sequence for 1810073J13Rik (NM_028181.1,1019-1037).
gaaaaccagtatttacgaa

SEQ ID NO: 732972 - DNA, 19 bp, Mus musculus
  siRNA target sequence for 1810073J13Rik (NM_028181.1,1024-1042).
ccagtatttacgaatatct

SEQ ID NO: 732973 - DNA, 19 bp, Mus musculus
  siRNA target sequence for 1810073J13Rik (NM_028181.1,1091-1109).
caactaagggagcagatta

SEQ ID NO: 732974 - DNA, 19 bp, Mus musculus
  siRNA target sequence for 1810073J13Rik (NM_028181.1,1128-1146).
gcacaagcacgcagttagt

SEQ ID NO: 732975 - DNA, 19 bp, Mus musculus
  siRNA target sequence for 1810073J13Rik (NM_028181.1,1129-1147).
cacaagcacgcagttagtt

SEQ ID NO: 732976 - DNA, 19 bp, Mus musculus
  siRNA target sequence for 1810073J13Rik (NM_028181.1,1285-1303).
ggctctgcgggcagaactt

SEQ ID NO: 732977 - DNA, 19 bp, Mus musculus
  siRNA target sequence for 1810073J13Rik (NM_028181.1,1427-1445).
cagcagcgctcggatttgt

SEQ ID NO: 732978 - DNA, 19 bp, Mus musculus
  siRNA target sequence for 1810073J13Rik (NM_028181.1,1456-1474).
gtacgttgaggcaaaggat

SEQ ID NO: 732979 - DNA, 19 bp, Mus musculus
  siRNA target sequence for 1810073J13Rik (NM_028181.1,1539-1557).
gcaagtcgaaggagacatt

SEQ ID NO: 732980 - DNA, 19 bp, Mus musculus
  siRNA target sequence for 1810073J13Rik (NM_028181.1,1540-1558).
caagtcgaaggagacattt

SEQ ID NO: 732981 - DNA, 19 bp, Mus musculus
  siRNA target sequence for 1810073J13Rik (NM_028181.1,1563-1581).
ggacagttaaggaaacatt

SEQ ID NO: 732982 - DNA, 19 bp, Mus musculus
  siRNA target sequence for 1810073J13Rik (NM_028181.1,1578-1596).
catttgatgctatgaagaa

SEQ ID NO: 732983 - DNA, 19 bp, Mus musculus
  siRNA target sequence for 1810073J13Rik (NM_028181.1,1606-1624).
ggagtttgtgagacatcat

SEQ ID NO: 732984 - DNA, 19 bp, Mus musculus
  siRNA target sequence for 1810073J13Rik (NM_028181.1,1696-1714).
cacttttcgccatttcaaa

SEQ ID NO: 732985 - DNA, 19 bp, Mus musculus
  siRNA target sequence for 1810073J13Rik (NM_028181.1,1703-1721).
cgccatttcaaagatacta

SEQ ID NO: 732986 - DNA, 19 bp, Mus musculus
  siRNA target sequence for 1810073J13Rik (NM_028181.1,1711-1729).
caaagatactaccaagaat

SEQ ID NO: 732987 - DNA, 19 bp, Mus musculus
  siRNA target sequence for 1810073J13Rik (NM_028181.1,1715-1733).
gatactaccaagaatatct

SEQ ID NO: 732988 - DNA, 19 bp, Mus musculus
  siRNA target sequence for 1810073J13Rik (NM_028181.1,1755-1773).
gattcagggctccaaaaga

SEQ ID NO: 732989 - DNA, 19 bp, Mus musculus
  siRNA target sequence for 1810073J13Rik (NM_028181.1,1789-1807).
gacaagaacagcttatagt

SEQ ID NO: 732990 - DNA, 19 bp, Mus musculus
  siRNA target sequence for 1810073J13Rik (NM_028181.1,1791-1809).
caagaacagcttatagtta

SEQ ID NO: 732991 - DNA, 19 bp, Mus musculus
  siRNA target sequence for Oraov1 (NM_028184.2,215-233).
ggtacatggagccaagatt

SEQ ID NO: 732992 - DNA, 19 bp, Mus musculus
  siRNA target sequence for Oraov1 (NM_028184.2,353-371).
gcaggactttccttacgat

SEQ ID NO: 732993 - DNA, 19 bp, Mus musculus
  siRNA target sequence for Rusc1 (NM_028188.1,1978-1996).
gcgcttcagtggacaaaat

SEQ ID NO: 732994 - DNA, 19 bp, Mus musculus
  siRNA target sequence for Rusc1 (NM_028188.1,1991-2009).
caaaatcatctcgcatttt

SEQ ID NO: 732995 - DNA, 19 bp, Mus musculus
  siRNA target sequence for Rusc1 (NM_028188.1,2017-2035).
ctaggaacttggttcagaa

SEQ ID NO: 732996 - DNA, 19 bp, Mus musculus
  siRNA target sequence for Rusc1 (NM_028188.1,2325-2343).
cagttggaactgtggtttt

SEQ ID NO: 732997 - DNA, 19 bp, Mus musculus
  siRNA target sequence for Rusc1 (NM_028188.1,2365-2383).
gcctactgtccctcttgta

SEQ ID NO: 732998 - DNA, 19 bp, Mus musculus
  siRNA target sequence for Rusc1 (NM_028188.1,2768-2786).
caggcgtcatggaactaca

SEQ ID NO: 732999 - DNA, 19 bp, Mus musculus
  siRNA target sequence for Rusc1 (NM_028188.1,2808-2826).
cctccgcccacggaacaaa

SEQ ID NO: 733000 - DNA, 19 bp, Mus musculus
  siRNA target sequence for Rusc1 (NM_028188.1,2892-2910).
gagagtggcgccttcaagt

SEQ ID NO: 733001 - DNA, 19 bp, Mus musculus
  siRNA target sequence for Rusc1 (NM_028188.1,3069-3087).
gcaggacctgaccaattga

SEQ ID NO: 733002 - DNA, 19 bp, Mus musculus
  siRNA target sequence for Rusc1 (NM_028188.1,3092-3110).
ccagcgtggggaattgctt

SEQ ID NO: 733003 - DNA, 19 bp, Mus musculus
  siRNA target sequence for Rusc1 (NM_028188.1,3101-3119).
ggaattgcttcgagtcatt

SEQ ID NO: 733004 - DNA, 19 bp, Mus musculus
  siRNA target sequence for Rusc1 (NM_028188.1,3174-3192).
gtgcccgtgggatacactt

SEQ ID NO: 733005 - DNA, 19 bp, Mus musculus
  siRNA target sequence for Brf1 (NM_028193.1,135-153).
gtgctgcgggaccttaaca

SEQ ID NO: 733006 - DNA, 19 bp, Mus musculus
  siRNA target sequence for Brf1 (NM_028193.1,327-345).
gtgggagaggccttactct

SEQ ID NO: 733007 - DNA, 19 bp, Mus musculus
  siRNA target sequence for Brf1 (NM_028193.1,333-351).
gaggccttactcttaagtt

SEQ ID NO: 733008 - DNA, 19 bp, Mus musculus
  siRNA target sequence for Brf1 (NM_028193.1,491-509).
gatgatgggtggcaatgat

SEQ ID NO: 733009 - DNA, 19 bp, Mus musculus
  siRNA target sequence for Brf1 (NM_028193.1,512-530).
cggctgtgatggtgatgaa

SEQ ID NO: 733010 - DNA, 19 bp, Mus musculus
  siRNA target sequence for 2510002A14Rik (NM_028194.1,323-341).
gggcttagctccagttcta

SEQ ID NO: 733011 - DNA, 19 bp, Mus musculus
  siRNA target sequence for 2510002A14Rik (NM_028194.1,348-366).
ctagtatcagcttaggaaa

SEQ ID NO: 733012 - DNA, 19 bp, Mus musculus
  siRNA target sequence for 2510002A14Rik (NM_028194.1,452-470).
ctcatggagttcattacct

SEQ ID NO: 733013 - DNA, 19 bp, Mus musculus
  siRNA target sequence for 2510002A14Rik (NM_028194.1,463-481).
cattacctcaagaaaacga

SEQ ID NO: 733014 - DNA, 19 bp, Mus musculus
  siRNA target sequence for 2510002A14Rik (NM_028194.1,574-592).
cgtcttcaagcagtcaaat

SEQ ID NO: 733015 - DNA, 19 bp, Mus musculus
  siRNA target sequence for 2510002A14Rik (NM_028194.1,652-670).
gtgttcttcccgacactat

SEQ ID NO: 733016 - DNA, 19 bp, Mus musculus
  siRNA target sequence for 2510002A14Rik (NM_028194.1,674-692).
gggcgatccttccagattt

SEQ ID NO: 733017 - DNA, 19 bp, Mus musculus
  siRNA target sequence for 2510002A14Rik (NM_028194.1,675-693).
ggcgatccttccagatttt

SEQ ID NO: 733018 - DNA, 19 bp, Mus musculus
  siRNA target sequence for 2510002A14Rik (NM_028194.1,811-829).
caccttggaatctgcaatt

SEQ ID NO: 733019 - DNA, 19 bp, Mus musculus
  siRNA target sequence for 2510002A14Rik (NM_028194.1,813-831).
ccttggaatctgcaattga

SEQ ID NO: 733020 - DNA, 19 bp, Mus musculus
  siRNA target sequence for 2510002A14Rik (NM_028194.1,814-832).
cttggaatctgcaattgat

SEQ ID NO: 733021 - DNA, 19 bp, Mus musculus
  siRNA target sequence for 2510002A14Rik (NM_028194.1,866-884).
ctgtctgccctctctcaat

SEQ ID NO: 733022 - DNA, 19 bp, Mus musculus
  siRNA target sequence for 2510002A14Rik (NM_028194.1,899-917).
cctgtcatgggaaacaagt

SEQ ID NO: 733023 - DNA, 19 bp, Mus musculus
  siRNA target sequence for 2510002A14Rik (NM_028194.1,900-918).
ctgtcatgggaaacaagta

SEQ ID NO: 733024 - DNA, 19 bp, Mus musculus
  siRNA target sequence for 2510002A14Rik (NM_028194.1,920-938).
gcagctaacaggaaaagca

SEQ ID NO: 733025 - DNA, 19 bp, Mus musculus
  siRNA target sequence for 2510002A14Rik (NM_028194.1,937-955).
cactggccagctcaatcta

SEQ ID NO: 733026 - DNA, 19 bp, Mus musculus
  siRNA target sequence for 2510002A14Rik (NM_028194.1,998-1016).
ggggacacaagaagtaact

SEQ ID NO: 733027 - DNA, 19 bp, Mus musculus
  siRNA target sequence for 2510002A14Rik (NM_028194.1,1000-1018).
ggacacaagaagtaactct

SEQ ID NO: 733028 - DNA, 19 bp, Mus musculus
  siRNA target sequence for 2510002A14Rik (NM_028194.1,1083-1101).
cggatggacggataaacca

SEQ ID NO: 733029 - DNA, 19 bp, Mus musculus
  siRNA target sequence for 2510002A14Rik (NM_028194.1,1195-1213).
ggccaccatcttttggata

SEQ ID NO: 733030 - DNA, 19 bp, Mus musculus
  siRNA target sequence for 2510002A14Rik (NM_028194.1,1210-1228).
gatagcaacatctctgtta

SEQ ID NO: 733031 - DNA, 19 bp, Mus musculus
  siRNA target sequence for 2510002A14Rik (NM_028194.1,1214-1232).
gcaacatctctgttagaat

SEQ ID NO: 733032 - DNA, 19 bp, Mus musculus
  siRNA target sequence for 2510002A14Rik (NM_028194.1,1225-1243).
gttagaatccgactatgaa

SEQ ID NO: 733033 - DNA, 19 bp, Mus musculus
  siRNA target sequence for 2510002A14Rik (NM_028194.1,1233-1251).
ccgactatgaatatgaata

SEQ ID NO: 733034 - DNA, 19 bp, Mus musculus
  siRNA target sequence for 2510002A14Rik (NM_028194.1,1287-1305).
cccacttgcctctggataa

SEQ ID NO: 733035 - DNA, 19 bp, Mus musculus
  siRNA target sequence for 2510002A14Rik (NM_028194.1,1334-1352).
gtacagagcaagttgaaat

SEQ ID NO: 733036 - DNA, 19 bp, Mus musculus
  siRNA target sequence for 2510002A14Rik (NM_028194.1,1401-1419).
cagtgtctacccaagagat

SEQ ID NO: 733037 - DNA, 19 bp, Mus musculus
  siRNA target sequence for 2510002A14Rik (NM_028194.1,1430-1448).
ctcctcagtcagctcattt

SEQ ID NO: 733038 - DNA, 19 bp, Mus musculus
  siRNA target sequence for 2510002A14Rik (NM_028194.1,1512-1530).
gcttactgcctcacctaat

SEQ ID NO: 733039 - DNA, 19 bp, Mus musculus
  siRNA target sequence for 2510002A14Rik (NM_028194.1,1545-1563).
gcccaactcagttttgcaa

SEQ ID NO: 733040 - DNA, 19 bp, Mus musculus
  siRNA target sequence for 2510002A14Rik (NM_028194.1,1569-1587).
cagctagccggatagcaaa

SEQ ID NO: 733041 - DNA, 19 bp, Mus musculus
  siRNA target sequence for 2510002A14Rik (NM_028194.1,1631-1649).
cacatgatgagtttgtaca

SEQ ID NO: 733042 - DNA, 19 bp, Mus musculus
  siRNA target sequence for 2510002A14Rik (NM_028194.1,1701-1719).
ggtacctgcacgactcttt

SEQ ID NO: 733043 - DNA, 19 bp, Mus musculus
  siRNA target sequence for 2510002A14Rik (NM_028194.1,1731-1749).
ccttcagtcttgtgactta

SEQ ID NO: 733044 - DNA, 19 bp, Mus musculus
  siRNA target sequence for 2510002A14Rik (NM_028194.1,1848-1866).
cggtcaagcagtttaatct

SEQ ID NO: 733045 - DNA, 19 bp, Mus musculus
  siRNA target sequence for 2510002A14Rik (NM_028194.1,1879-1897).
gatcattggcaaatacgta

SEQ ID NO: 733046 - DNA, 19 bp, Mus musculus
  siRNA target sequence for 2510002A14Rik (NM_028194.1,1945-1963).
gtctcgctctgcaagtctt

SEQ ID NO: 733047 - DNA, 19 bp, Mus musculus
  siRNA target sequence for 2510002A14Rik (NM_028194.1,1961-1979).
cttgtcgtccccaatgaca

SEQ ID NO: 733048 - DNA, 19 bp, Mus musculus
  siRNA target sequence for 2510002A14Rik (NM_028194.1,2003-2021).
gtaggctctcccgaaatct

SEQ ID NO: 733049 - DNA, 19 bp, Mus musculus
  siRNA target sequence for 2510002A14Rik (NM_028194.1,2022-2040).
ccttcgctaaaattttcaa

SEQ ID NO: 733050 - DNA, 19 bp, Mus musculus
  siRNA target sequence for 2510002A14Rik (NM_028194.1,2023-2041).
cttcgctaaaattttcaat

SEQ ID NO: 733051 - DNA, 19 bp, Mus musculus
  siRNA target sequence for 2510002A14Rik (NM_028194.1,2064-2082).
gcaagaccttagattttca

SEQ ID NO: 733052 - DNA, 19 bp, Mus musculus
  siRNA target sequence for 2510002A14Rik (NM_028194.1,2068-2086).
gaccttagattttcacttt

SEQ ID NO: 733053 - DNA, 19 bp, Mus musculus
  siRNA target sequence for 2510002A14Rik (NM_028194.1,2092-2110).
ctctgagacacctatcatt

SEQ ID NO: 733054 - DNA, 19 bp, Mus musculus
  siRNA target sequence for 2510002A14Rik (NM_028194.1,2326-2344).
gaatccctccgttgtgttt

SEQ ID NO: 733055 - DNA, 19 bp, Mus musculus
  siRNA target sequence for 2510002A14Rik (NM_028194.1,2330-2348).
ccctccgttgtgttttctt

SEQ ID NO: 733056 - DNA, 19 bp, Mus musculus
  siRNA target sequence for 2510002A14Rik (NM_028194.1,2332-2350).
ctccgttgtgttttcttca

SEQ ID NO: 733057 - DNA, 19 bp, Mus musculus
  siRNA target sequence for 2510002A14Rik (NM_028194.1,2395-2413).
caccaccgaggacataatt

SEQ ID NO: 733058 - DNA, 19 bp, Mus musculus
  siRNA target sequence for 2510002A14Rik (NM_028194.1,2397-2415).
ccaccgaggacataattca

SEQ ID NO: 733059 - DNA, 19 bp, Mus musculus
  siRNA target sequence for 2510002A14Rik (NM_028194.1,2401-2419).
cgaggacataattcaagaa

SEQ ID NO: 733060 - DNA, 19 bp, Mus musculus
  siRNA target sequence for 2510002A14Rik (NM_028194.1,2556-2574).
cgctggacagcattgacaa

SEQ ID NO: 733061 - DNA, 19 bp, Mus musculus
  siRNA target sequence for 2510002A14Rik (NM_028194.1,2730-2748).
gtgtgacggaggacatgat

SEQ ID NO: 733062 - DNA, 19 bp, Mus musculus
  siRNA target sequence for 2510002A14Rik (NM_028194.1,2846-2864).
gcctgtctagataatgcta

SEQ ID NO: 733063 - DNA, 19 bp, Mus musculus
  siRNA target sequence for 2510002A14Rik (NM_028194.1,2873-2891).
ctgcctgagggtacaagtt

SEQ ID NO: 733064 - DNA, 19 bp, Mus musculus
  siRNA target sequence for 2510002A14Rik (NM_028194.1,2886-2904).
caagttcagtattaaagga

SEQ ID NO: 733065 - DNA, 19 bp, Mus musculus
  siRNA target sequence for 2510002A14Rik (NM_028194.1,2927-2945).
gacgaagggtcatacgtta

SEQ ID NO: 733066 - DNA, 19 bp, Mus musculus
  siRNA target sequence for 2510002A14Rik (NM_028194.1,2929-2947).
cgaagggtcatacgttatt

SEQ ID NO: 733067 - DNA, 19 bp, Mus musculus
  siRNA target sequence for 2510002A14Rik (NM_028194.1,2954-2972).
caacaggacccgctagtat

SEQ ID NO: 733068 - DNA, 19 bp, Mus musculus
  siRNA target sequence for 2510002A14Rik (NM_028194.1,3290-3308).
gggtcctgtgcggtgttta

SEQ ID NO: 733069 - DNA, 19 bp, Mus musculus
  siRNA target sequence for 2510002A14Rik (NM_028194.1,3403-3421).
gcgcattggtaccaagttt

SEQ ID NO: 733070 - DNA, 19 bp, Mus musculus
  siRNA target sequence for 2510002A14Rik (NM_028194.1,3404-3422).
cgcattggtaccaagttta

SEQ ID NO: 733071 - DNA, 19 bp, Mus musculus
  siRNA target sequence for 2510002A14Rik (NM_028194.1,3406-3424).
cattggtaccaagtttaaa

SEQ ID NO: 733072 - DNA, 19 bp, Mus musculus
  siRNA target sequence for 2510002A14Rik (NM_028194.1,3542-3560).
gaacatctggatacttaca

SEQ ID NO: 733073 - DNA, 19 bp, Mus musculus
  siRNA target sequence for 2510002A14Rik (NM_028194.1,3613-3631).
cggtgccaacgaagacata

SEQ ID NO: 733074 - DNA, 19 bp, Mus musculus
  siRNA target sequence for 2510002A14Rik (NM_028194.1,3614-3632).
ggtgccaacgaagacatat

SEQ ID NO: 733075 - DNA, 19 bp, Mus musculus
  siRNA target sequence for 2510002A14Rik (NM_028194.1,3615-3633).
gtgccaacgaagacatata

SEQ ID NO: 733076 - DNA, 19 bp, Mus musculus
  siRNA target sequence for 2510002A14Rik (NM_028194.1,3617-3635).
gccaacgaagacatataca

SEQ ID NO: 733077 - DNA, 19 bp, Mus musculus
  siRNA target sequence for 2510002A14Rik (NM_028194.1,3713-3731).
caggcctactgcaaactca

SEQ ID NO: 733078 - DNA, 19 bp, Mus musculus
  siRNA target sequence for 2510002A14Rik (NM_028194.1,3761-3779).
gcagaggtcatcaacatgt

SEQ ID NO: 733079 - DNA, 19 bp, Mus musculus
  siRNA target sequence for 2510002A14Rik (NM_028194.1,3823-3841).
ggccgcttcggaaaatgaa

SEQ ID NO: 733080 - DNA, 19 bp, Mus musculus
  siRNA target sequence for 2510002A14Rik (NM_028194.1,3825-3843).
ccgcttcggaaaatgaaga

SEQ ID NO: 733081 - DNA, 19 bp, Mus musculus
  siRNA target sequence for 2510002A14Rik (NM_028194.1,3826-3844).
cgcttcggaaaatgaagaa

SEQ ID NO: 733082 - DNA, 19 bp, Mus musculus
  siRNA target sequence for 2510002A14Rik (NM_028194.1,3863-3881).
gcccagaccacgatagaaa

SEQ ID NO: 733083 - DNA, 19 bp, Mus musculus
  siRNA target sequence for 2510002A14Rik (NM_028194.1,3865-3883).
ccagaccacgatagaaact

SEQ ID NO: 733084 - DNA, 19 bp, Mus musculus
  siRNA target sequence for 2510002A14Rik (NM_028194.1,3896-3914).
ctgatcgaaaccttgaaga

SEQ ID NO: 733085 - DNA, 19 bp, Mus musculus
  siRNA target sequence for Pscd4 (NM_028195.2,137-155).
gagctacagcagatcaaat

SEQ ID NO: 733086 - DNA, 19 bp, Mus musculus
  siRNA target sequence for Pscd4 (NM_028195.2,220-238).
ccaaatcgactgctttgaa

SEQ ID NO: 733087 - DNA, 19 bp, Mus musculus
  siRNA target sequence for Pscd4 (NM_028195.2,221-239).
caaatcgactgctttgaaa

SEQ ID NO: 733088 - DNA, 19 bp, Mus musculus
  siRNA target sequence for Pscd4 (NM_028195.2,252-270).
gccggatggcgcagaaaga

SEQ ID NO: 733089 - DNA, 19 bp, Mus musculus
  siRNA target sequence for Pscd4 (NM_028195.2,280-298).
gtgcatcgggagaaagaaa

SEQ ID NO: 733090 - DNA, 19 bp, Mus musculus
  siRNA target sequence for Pscd4 (NM_028195.2,392-410).
ggtgacggtctcaacaaga

SEQ ID NO: 733091 - DNA, 19 bp, Mus musculus
  siRNA target sequence for Pscd4 (NM_028195.2,591-609).
ctcgctactgcctctgtaa

SEQ ID NO: 733092 - DNA, 19 bp, Mus musculus
  siRNA target sequence for Pscd4 (NM_028195.2,710-728).
cccttcgagcgctttgtga

SEQ ID NO: 733093 - DNA, 19 bp, Mus musculus
  siRNA target sequence for Pscd4 (NM_028195.2,841-859).
cctcactcacaccttcttt

SEQ ID NO: 733094 - DNA, 19 bp, Mus musculus
  siRNA target sequence for Pscd4 (NM_028195.2,1239-1257).
ctcggaaaaagaagattgt

SEQ ID NO: 733095 - DNA, 19 bp, Mus musculus
  siRNA target sequence for 2510003E04Rik (NM_028197.1,54-72).
cagagatccgcgagaagtt

SEQ ID NO: 733096 - DNA, 19 bp, Mus musculus
  siRNA target sequence for 2510003E04Rik (NM_028197.1,468-486).
ggtctgaaagggaagagat

SEQ ID NO: 733097 - DNA, 19 bp, Mus musculus
  siRNA target sequence for 2510003E04Rik (NM_028197.1,524-542).
ctgtacagtcagtacatga

SEQ ID NO: 733098 - DNA, 19 bp, Mus musculus
  siRNA target sequence for 2510003E04Rik (NM_028197.1,694-712).
cgagaaggccgctcattat

SEQ ID NO: 733099 - DNA, 19 bp, Mus musculus
  siRNA target sequence for 2510003E04Rik (NM_028197.1,775-793).
caacgccgctactctatca

SEQ ID NO: 733100 - DNA, 19 bp, Mus musculus
  siRNA target sequence for 2510003E04Rik (NM_028197.1,783-801).
ctactctatcacagttcta

SEQ ID NO: 733101 - DNA, 19 bp, Mus musculus
  siRNA target sequence for 2510003E04Rik (NM_028197.1,839-857).
ctgtcagctgctaatgtta

SEQ ID NO: 733102 - DNA, 19 bp, Mus musculus
  siRNA target sequence for 2510003E04Rik (NM_028197.1,912-930).
gagacgtgccagagcttta

SEQ ID NO: 733103 - DNA, 19 bp, Mus musculus
  siRNA target sequence for 2510003E04Rik (NM_028197.1,916-934).
cgtgccagagctttaccat

SEQ ID NO: 733104 - DNA, 19 bp, Mus musculus
  siRNA target sequence for 2510003E04Rik (NM_028197.1,1157-1175).
gagaaagtgagatacttga

SEQ ID NO: 733105 - DNA, 19 bp, Mus musculus
  siRNA target sequence for 2510003E04Rik (NM_028197.1,1174-1192).
gaggcccttagattttgaa

SEQ ID NO: 733106 - DNA, 19 bp, Mus musculus
  siRNA target sequence for 2510003E04Rik (NM_028197.1,1177-1195).
gcccttagattttgaagaa

SEQ ID NO: 733107 - DNA, 19 bp, Mus musculus
  siRNA target sequence for 2510003E04Rik (NM_028197.1,1253-1271).
cagatcgatgggtatgtca

SEQ ID NO: 733108 - DNA, 19 bp, Mus musculus
  siRNA target sequence for 2510003E04Rik (NM_028197.1,1272-1290).
ctgaccacattgaagttgt

SEQ ID NO: 733109 - DNA, 19 bp, Mus musculus
  siRNA target sequence for 2510003E04Rik (NM_028197.1,1312-1330).
caaggtgctctcgttcttt

SEQ ID NO: 733110 - DNA, 19 bp, Mus musculus
  siRNA target sequence for 2510003E04Rik (NM_028197.1,1431-1449).
gcaggcagattcagtttga

SEQ ID NO: 733111 - DNA, 19 bp, Mus musculus
  siRNA target sequence for 2510003E04Rik (NM_028197.1,1454-1472).
gcacacgcgtactatgaca

SEQ ID NO: 733112 - DNA, 19 bp, Mus musculus
  siRNA target sequence for 2510003E04Rik (NM_028197.1,1455-1473).
cacacgcgtactatgacat

SEQ ID NO: 733113 - DNA, 19 bp, Mus musculus
  siRNA target sequence for 2510003E04Rik (NM_028197.1,1596-1614).
gagacccaaacaaagtctt

SEQ ID NO: 733114 - DNA, 19 bp, Mus musculus
  siRNA target sequence for 2510003E04Rik (NM_028197.1,1666-1684).
ccgggtagctcgtctgtat

SEQ ID NO: 733115 - DNA, 19 bp, Mus musculus
  siRNA target sequence for 2510003E04Rik (NM_028197.1,1674-1692).
ctcgtctgtatggcaaaat

SEQ ID NO: 733116 - DNA, 19 bp, Mus musculus
  siRNA target sequence for 2510003E04Rik (NM_028197.1,1676-1694).
cgtctgtatggcaaaatca

SEQ ID NO: 733117 - DNA, 19 bp, Mus musculus
  siRNA target sequence for 2510003E04Rik (NM_028197.1,1677-1695).
gtctgtatggcaaaatcat

SEQ ID NO: 733118 - DNA, 19 bp, Mus musculus
  siRNA target sequence for 2510003E04Rik (NM_028197.1,1679-1697).
ctgtatggcaaaatcatca

SEQ ID NO: 733119 - DNA, 19 bp, Mus musculus
  siRNA target sequence for 2510003E04Rik (NM_028197.1,1804-1822).
ggttgagttagaacttagt

SEQ ID NO: 733120 - DNA, 19 bp, Mus musculus
  siRNA target sequence for 2510003E04Rik (NM_028197.1,1805-1823).
gttgagttagaacttagta

SEQ ID NO: 733121 - DNA, 19 bp, Mus musculus
  siRNA target sequence for Xpo5 (NM_028198.1,93-111).
gtgcgaggagctagtgaaa

SEQ ID NO: 733122 - DNA, 19 bp, Mus musculus
  siRNA target sequence for Xpo5 (NM_028198.1,155-173).
ggctggaagccctcaagtt

SEQ ID NO: 733123 - DNA, 19 bp, Mus musculus
  siRNA target sequence for Xpo5 (NM_028198.1,157-175).
ctggaagccctcaagtttt

SEQ ID NO: 733124 - DNA, 19 bp, Mus musculus
  siRNA target sequence for Xpo5 (NM_028198.1,159-177).
ggaagccctcaagttttgt

SEQ ID NO: 733125 - DNA, 19 bp, Mus musculus
  siRNA target sequence for Xpo5 (NM_028198.1,218-236).
gcttgaagttggctgaaaa

SEQ ID NO: 733126 - DNA, 19 bp, Mus musculus
  siRNA target sequence for Xpo5 (NM_028198.1,257-275).
gacattttggccttcagat

SEQ ID NO: 733127 - DNA, 19 bp, Mus musculus
  siRNA target sequence for Xpo5 (NM_028198.1,279-297).
ggagcatgttgtcaagttt

SEQ ID NO: 733128 - DNA, 19 bp, Mus musculus
  siRNA target sequence for Xpo5 (NM_028198.1,283-301).
catgttgtcaagtttcgat

SEQ ID NO: 733129 - DNA, 19 bp, Mus musculus
  siRNA target sequence for Xpo5 (NM_028198.1,317-335).
gattggagaaggtctatct

SEQ ID NO: 733130 - DNA, 19 bp, Mus musculus
  siRNA target sequence for Xpo5 (NM_028198.1,568-586).
cagacgctccccactcaaa

SEQ ID NO: 733131 - DNA, 19 bp, Mus musculus
  siRNA target sequence for Xpo5 (NM_028198.1,570-588).
gacgctccccactcaaaga

SEQ ID NO: 733132 - DNA, 19 bp, Mus musculus
  siRNA target sequence for Xpo5 (NM_028198.1,573-591).
gctccccactcaaagaaga

SEQ ID NO: 733133 - DNA, 19 bp, Mus musculus
  siRNA target sequence for Xpo5 (NM_028198.1,593-611).
gggatattcagcaaacatt

SEQ ID NO: 733134 - DNA, 19 bp, Mus musculus
  siRNA target sequence for Xpo5 (NM_028198.1,595-613).
gatattcagcaaacattga

SEQ ID NO: 733135 - DNA, 19 bp, Mus musculus
  siRNA target sequence for Xpo5 (NM_028198.1,648-666).
caatacgcttcaggaaaat

SEQ ID NO: 733136 - DNA, 19 bp, Mus musculus
  siRNA target sequence for Xpo5 (NM_028198.1,667-685).
gtaaacaagtaccaacaaa

SEQ ID NO: 733137 - DNA, 19 bp, Mus musculus
  siRNA target sequence for Xpo5 (NM_028198.1,753-771).
cactctagccggctacatt

SEQ ID NO: 733138 - DNA, 19 bp, Mus musculus
  siRNA target sequence for Xpo5 (NM_028198.1,755-773).
ctctagccggctacattga

SEQ ID NO: 733139 - DNA, 19 bp, Mus musculus
  siRNA target sequence for Xpo5 (NM_028198.1,776-794).
gggtatctttgaaccatat

SEQ ID NO: 733140 - DNA, 19 bp, Mus musculus
  siRNA target sequence for Xpo5 (NM_028198.1,778-796).
gtatctttgaaccatatca

SEQ ID NO: 733141 - DNA, 19 bp, Mus musculus
  siRNA target sequence for Xpo5 (NM_028198.1,913-931).
gaccggaagcgcttgatga

SEQ ID NO: 733142 - DNA, 19 bp, Mus musculus
  siRNA target sequence for Xpo5 (NM_028198.1,940-958).
ggagatgtcgccatgcatt

SEQ ID NO: 733143 - DNA, 19 bp, Mus musculus
  siRNA target sequence for Xpo5 (NM_028198.1,941-959).
gagatgtcgccatgcatta

SEQ ID NO: 733144 - DNA, 19 bp, Mus musculus
  siRNA target sequence for Xpo5 (NM_028198.1,943-961).
gatgtcgccatgcattata

SEQ ID NO: 733145 - DNA, 19 bp, Mus musculus
  siRNA target sequence for Xpo5 (NM_028198.1,989-1007).
gaggaggcttggtcgaaaa

SEQ ID NO: 733146 - DNA, 19 bp, Mus musculus
  siRNA target sequence for Xpo5 (NM_028198.1,992-1010).
gaggcttggtcgaaaaaca

SEQ ID NO: 733147 - DNA, 19 bp, Mus musculus
  siRNA target sequence for Xpo5 (NM_028198.1,994-1012).
ggcttggtcgaaaaacact

SEQ ID NO: 733148 - DNA, 19 bp, Mus musculus
  siRNA target sequence for Xpo5 (NM_028198.1,1077-1095).
ggccttagatgctaacata

SEQ ID NO: 733149 - DNA, 19 bp, Mus musculus
  siRNA target sequence for Xpo5 (NM_028198.1,1079-1097).
ccttagatgctaacataca

SEQ ID NO: 733150 - DNA, 19 bp, Mus musculus
  siRNA target sequence for Xpo5 (NM_028198.1,1080-1098).
cttagatgctaacatacaa

SEQ ID NO: 733151 - DNA, 19 bp, Mus musculus
  siRNA target sequence for Xpo5 (NM_028198.1,1103-1121).
ctataaactttggaatgta

SEQ ID NO: 733152 - DNA, 19 bp, Mus musculus
  siRNA target sequence for Xpo5 (NM_028198.1,1159-1177).
cagtttttacgctcttcaa

SEQ ID NO: 733153 - DNA, 19 bp, Mus musculus
  siRNA target sequence for Xpo5 (NM_028198.1,1168-1186).
cgctcttcaacccatatga

SEQ ID NO: 733154 - DNA, 19 bp, Mus musculus
  siRNA target sequence for Xpo5 (NM_028198.1,1221-1239).
ccgtgatccggcactgtta

SEQ ID NO: 733155 - DNA, 19 bp, Mus musculus
  siRNA target sequence for Xpo5 (NM_028198.1,1229-1247).
cggcactgttagcagtaat

SEQ ID NO: 733156 - DNA, 19 bp, Mus musculus
  siRNA target sequence for Xpo5 (NM_028198.1,1230-1248).
ggcactgttagcagtaata

SEQ ID NO: 733157 - DNA, 19 bp, Mus musculus
  siRNA target sequence for Xpo5 (NM_028198.1,1234-1252).
ctgttagcagtaataccaa

SEQ ID NO: 733158 - DNA, 19 bp, Mus musculus
  siRNA target sequence for Xpo5 (NM_028198.1,1236-1254).
gttagcagtaataccaaaa

SEQ ID NO: 733159 - DNA, 19 bp, Mus musculus
  siRNA target sequence for Xpo5 (NM_028198.1,1282-1300).
gtcaagatgggctttcctt

SEQ ID NO: 733160 - DNA, 19 bp, Mus musculus
  siRNA target sequence for Xpo5 (NM_028198.1,1322-1340).
gtgaatattcccgatttga

SEQ ID NO: 733161 - DNA, 19 bp, Mus musculus
  siRNA target sequence for Xpo5 (NM_028198.1,1324-1342).
gaatattcccgatttgatt

SEQ ID NO: 733162 - DNA, 19 bp, Mus musculus
  siRNA target sequence for Xpo5 (NM_028198.1,1420-1438).
cgactggatcctaagacta

SEQ ID NO: 733163 - DNA, 19 bp, Mus musculus
  siRNA target sequence for Xpo5 (NM_028198.1,1451-1469).
cggcagaatggctcaagta

SEQ ID NO: 733164 - DNA, 19 bp, Mus musculus
  siRNA target sequence for Xpo5 (NM_028198.1,1572-1590).
gtgggaagctatgactttt

SEQ ID NO: 733165 - DNA, 19 bp, Mus musculus
  siRNA target sequence for Xpo5 (NM_028198.1,1617-1635).
gtttcgaacactagacaaa

SEQ ID NO: 733166 - DNA, 19 bp, Mus musculus
  siRNA target sequence for Xpo5 (NM_028198.1,1713-1731).
gtcctgcgtcctcactaat

SEQ ID NO: 733167 - DNA, 19 bp, Mus musculus
  siRNA target sequence for Xpo5 (NM_028198.1,1738-1756).
gcgctcttcccatttgtca

SEQ ID NO: 733168 - DNA, 19 bp, Mus musculus
  siRNA target sequence for Xpo5 (NM_028198.1,1788-1806).
ctctaagctcttttcattt

SEQ ID NO: 733169 - DNA, 19 bp, Mus musculus
  siRNA target sequence for Xpo5 (NM_028198.1,1794-1812).
gctcttttcatttgttact

SEQ ID NO: 733170 - DNA, 19 bp, Mus musculus
  siRNA target sequence for Xpo5 (NM_028198.1,1921-1939).
gttctgcccaattttgaca

SEQ ID NO: 733171 - DNA, 19 bp, Mus musculus
  siRNA target sequence for Xpo5 (NM_028198.1,2023-2041).
gttctcgttagcaaccaat

SEQ ID NO: 733172 - DNA, 19 bp, Mus musculus
  siRNA target sequence for Xpo5 (NM_028198.1,2026-2044).
ctcgttagcaaccaattca

SEQ ID NO: 733173 - DNA, 19 bp, Mus musculus
  siRNA target sequence for Xpo5 (NM_028198.1,2033-2051).
gcaaccaattcaaggatta

SEQ ID NO: 733174 - DNA, 19 bp, Mus musculus
  siRNA target sequence for Xpo5 (NM_028198.1,2123-2141).
gcagagcgctgtcagatat

SEQ ID NO: 733175 - DNA, 19 bp, Mus musculus
  siRNA target sequence for Xpo5 (NM_028198.1,2124-2142).
cagagcgctgtcagatatt

SEQ ID NO: 733176 - DNA, 19 bp, Mus musculus
  siRNA target sequence for Xpo5 (NM_028198.1,2128-2146).
gcgctgtcagatattgact

SEQ ID NO: 733177 - DNA, 19 bp, Mus musculus
  siRNA target sequence for Xpo5 (NM_028198.1,2161-2179).
gtgggtgctgatctgaaaa

SEQ ID NO: 733178 - DNA, 19 bp, Mus musculus
  siRNA target sequence for Xpo5 (NM_028198.1,2276-2294).
ggccttccgacctagaaga

SEQ ID NO: 733179 - DNA, 19 bp, Mus musculus
  siRNA target sequence for Xpo5 (NM_028198.1,2277-2295).
gccttccgacctagaagaa

SEQ ID NO: 733180 - DNA, 19 bp, Mus musculus
  siRNA target sequence for Xpo5 (NM_028198.1,2374-2392).
ctcagacttctcgacaatt

SEQ ID NO: 733181 - DNA, 19 bp, Mus musculus
  siRNA target sequence for Xpo5 (NM_028198.1,2394-2412).
gcttgcccttgtaagaact

SEQ ID NO: 733182 - DNA, 19 bp, Mus musculus
  siRNA target sequence for Xpo5 (NM_028198.1,2400-2418).
ccttgtaagaactcacaat

SEQ ID NO: 733183 - DNA, 19 bp, Mus musculus
  siRNA target sequence for Xpo5 (NM_028198.1,2408-2426).
gaactcacaatactttata

SEQ ID NO: 733184 - DNA, 19 bp, Mus musculus
  siRNA target sequence for Xpo5 (NM_028198.1,2429-2447).
caccggaaatgctaacgaa

SEQ ID NO: 733185 - DNA, 19 bp, Mus musculus
  siRNA target sequence for Xpo5 (NM_028198.1,2432-2450).
cggaaatgctaacgaaaat

SEQ ID NO: 733186 - DNA, 19 bp, Mus musculus
  siRNA target sequence for Xpo5 (NM_028198.1,2444-2462).
cgaaaatggcagaaccttt

SEQ ID NO: 733187 - DNA, 19 bp, Mus musculus
  siRNA target sequence for Xpo5 (NM_028198.1,2463-2481).
caccaaggctctggatata

SEQ ID NO: 733188 - DNA, 19 bp, Mus musculus
  siRNA target sequence for Xpo5 (NM_028198.1,2489-2507).
ctgaaaaaacggcaatatt

SEQ ID NO: 733189 - DNA, 19 bp, Mus musculus
  siRNA target sequence for Xpo5 (NM_028198.1,2535-2553).
caacgaccaccctgtctat

SEQ ID NO: 733190 - DNA, 19 bp, Mus musculus
  siRNA target sequence for Xpo5 (NM_028198.1,2538-2556).
cgaccaccctgtctataga

SEQ ID NO: 733191 - DNA, 19 bp, Mus musculus
  siRNA target sequence for Xpo5 (NM_028198.1,2539-2557).
gaccaccctgtctatagaa

SEQ ID NO: 733192 - DNA, 19 bp, Mus musculus
  siRNA target sequence for Xpo5 (NM_028198.1,2568-2586).
gaggatgcagcggttcttt

SEQ ID NO: 733193 - DNA, 19 bp, Mus musculus
  siRNA target sequence for Xpo5 (NM_028198.1,2578-2596).
cggttctttggcattctct

SEQ ID NO: 733194 - DNA, 19 bp, Mus musculus
  siRNA target sequence for Xpo5 (NM_028198.1,2595-2613).
ctatgaaaactgttaccat

SEQ ID NO: 733195 - DNA, 19 bp, Mus musculus
  siRNA target sequence for Xpo5 (NM_028198.1,2632-2650).
ccttccatgcagcaagatt

SEQ ID NO: 733196 - DNA, 19 bp, Mus musculus
  siRNA target sequence for Xpo5 (NM_028198.1,2690-2708).
cagctttcgtcaacttgaa

SEQ ID NO: 733197 - DNA, 19 bp, Mus musculus
  siRNA target sequence for Xpo5 (NM_028198.1,2692-2710).
gctttcgtcaacttgaaca

SEQ ID NO: 733198 - DNA, 19 bp, Mus musculus
  siRNA target sequence for Xpo5 (NM_028198.1,2693-2711).
ctttcgtcaacttgaacaa

SEQ ID NO: 733199 - DNA, 19 bp, Mus musculus
  siRNA target sequence for Xpo5 (NM_028198.1,2697-2715).
cgtcaacttgaacaatatt

SEQ ID NO: 733200 - DNA, 19 bp, Mus musculus
  siRNA target sequence for Xpo5 (NM_028198.1,2716-2734).
cctgacttccggcttagat

SEQ ID NO: 733201 - DNA, 19 bp, Mus musculus
  siRNA target sequence for Xpo5 (NM_028198.1,2719-2737).
gacttccggcttagatcta

SEQ ID NO: 733202 - DNA, 19 bp, Mus musculus
  siRNA target sequence for Xpo5 (NM_028198.1,2785-2803).
cactatgaaaccctgatat

SEQ ID NO: 733203 - DNA, 19 bp, Mus musculus
  siRNA target sequence for Xpo5 (NM_028198.1,2787-2805).
ctatgaaaccctgatatct

SEQ ID NO: 733204 - DNA, 19 bp, Mus musculus
  siRNA target sequence for Xpo5 (NM_028198.1,2880-2898).
catcctgtgtggagaagat

SEQ ID NO: 733205 - DNA, 19 bp, Mus musculus
  siRNA target sequence for Xpo5 (NM_028198.1,2966-2984).
gagaagccatggacctaat

SEQ ID NO: 733206 - DNA, 19 bp, Mus musculus
  siRNA target sequence for Xpo5 (NM_028198.1,3141-3159).
cacagcactgctaatcaca

SEQ ID NO: 733207 - DNA, 19 bp, Mus musculus
  siRNA target sequence for Xpo5 (NM_028198.1,3349-3367).
cacttggccttccagatat

SEQ ID NO: 733208 - DNA, 19 bp, Mus musculus
  siRNA target sequence for Xpo5 (NM_028198.1,3412-3430).
gagcagatccctgaaataa

SEQ ID NO: 733209 - DNA, 19 bp, Mus musculus
  siRNA target sequence for Xpo5 (NM_028198.1,3565-3583).
cgaaaagaagttcacatta

SEQ ID NO: 733210 - DNA, 19 bp, Mus musculus
  siRNA target sequence for Ttc4 (NM_028209.1,73-91).
gacgcgttcctggaaaagt

SEQ ID NO: 733211 - DNA, 19 bp, Mus musculus
  siRNA target sequence for Ttc4 (NM_028209.1,75-93).
cgcgttcctggaaaagttt

SEQ ID NO: 733212 - DNA, 19 bp, Mus musculus
  siRNA target sequence for Ttc4 (NM_028209.1,77-95).
cgttcctggaaaagtttca

SEQ ID NO: 733213 - DNA, 19 bp, Mus musculus
  siRNA target sequence for Ttc4 (NM_028209.1,153-171).
gattcccctatttatgaaa

SEQ ID NO: 733214 - DNA, 19 bp, Mus musculus
  siRNA target sequence for Ttc4 (NM_028209.1,216-234).
ctgcctccagtcgatgatt

SEQ ID NO: 733215 - DNA, 19 bp, Mus musculus
  siRNA target sequence for Ttc4 (NM_028209.1,218-236).
gcctccagtcgatgatttt

SEQ ID NO: 733216 - DNA, 19 bp, Mus musculus
  siRNA target sequence for Ttc4 (NM_028209.1,219-237).
cctccagtcgatgattttt

SEQ ID NO: 733217 - DNA, 19 bp, Mus musculus
  siRNA target sequence for Ttc4 (NM_028209.1,222-240).
ccagtcgatgatttttgat

SEQ ID NO: 733218 - DNA, 19 bp, Mus musculus
  siRNA target sequence for Ttc4 (NM_028209.1,225-243).
gtcgatgatttttgatgat

SEQ ID NO: 733219 - DNA, 19 bp, Mus musculus
  siRNA target sequence for Ttc4 (NM_028209.1,227-245).
cgatgatttttgatgatga

SEQ ID NO: 733220 - DNA, 19 bp, Mus musculus
  siRNA target sequence for Ttc4 (NM_028209.1,283-301).
gagggcaatgactacttta

SEQ ID NO: 733221 - DNA, 19 bp, Mus musculus
  siRNA target sequence for Ttc4 (NM_028209.1,359-377).
gtgcagaccctgatttgaa

SEQ ID NO: 733222 - DNA, 19 bp, Mus musculus
  siRNA target sequence for Ttc4 (NM_028209.1,398-416).
gggcagcagcacagtacta

SEQ ID NO: 733223 - DNA, 19 bp, Mus musculus
  siRNA target sequence for Ttc4 (NM_028209.1,399-417).
ggcagcagcacagtactat

SEQ ID NO: 733224 - DNA, 19 bp, Mus musculus
  siRNA target sequence for Ttc4 (NM_028209.1,401-419).
cagcagcacagtactatct

SEQ ID NO: 733225 - DNA, 19 bp, Mus musculus
  siRNA target sequence for Ttc4 (NM_028209.1,411-429).
gtactatctcggcaatgtt

SEQ ID NO: 733226 - DNA, 19 bp, Mus musculus
  siRNA target sequence for Ttc4 (NM_028209.1,431-449).
gttcttccctcaatgatgt

SEQ ID NO: 733227 - DNA, 19 bp, Mus musculus
  siRNA target sequence for Ttc4 (NM_028209.1,549-567).
gtgtgatgagggactacaa

SEQ ID NO: 733228 - DNA, 19 bp, Mus musculus
  siRNA target sequence for Ttc4 (NM_028209.1,744-762).
cggtgaggatgaagattca

SEQ ID NO: 733229 - DNA, 19 bp, Mus musculus
  siRNA target sequence for Ttc4 (NM_028209.1,824-842).
ccaggctaagtatagatga

SEQ ID NO: 733230 - DNA, 19 bp, Mus musculus
  siRNA target sequence for Ttc4 (NM_028209.1,881-899).
cggagtacgcgcaatcaga

SEQ ID NO: 733231 - DNA, 19 bp, Mus musculus
  siRNA target sequence for Ttc4 (NM_028209.1,889-907).
gcgcaatcagacttcatct

SEQ ID NO: 733232 - DNA, 19 bp, Mus musculus
  siRNA target sequence for Ttc4 (NM_028209.1,916-934).
catgaggacaccaggttta

SEQ ID NO: 733233 - DNA, 19 bp, Mus musculus
  siRNA target sequence for Ttc4 (NM_028209.1,939-957).
ccatctaatggcgatgttt

SEQ ID NO: 733234 - DNA, 19 bp, Mus musculus
  siRNA target sequence for Ttc4 (NM_028209.1,940-958).
catctaatggcgatgttta

SEQ ID NO: 733235 - DNA, 19 bp, Mus musculus
  siRNA target sequence for Ttc4 (NM_028209.1,1027-1045).
gaggacagggcggaactat

SEQ ID NO: 733236 - DNA, 19 bp, Mus musculus
  siRNA target sequence for Ttc4 (NM_028209.1,1138-1156).
ggatcctcgcctttctgta

SEQ ID NO: 733237 - DNA, 19 bp, Mus musculus
  siRNA target sequence for Ttc4 (NM_028209.1,1143-1161).
ctcgcctttctgtaggaat

SEQ ID NO: 733238 - DNA, 19 bp, Mus musculus
  siRNA target sequence for Ttc4 (NM_028209.1,1145-1163).
cgcctttctgtaggaatta

SEQ ID NO: 733239 - DNA, 19 bp, Mus musculus
  siRNA target sequence for 2210016L21Rik (NM_028211.1,260-278).
cccacgtggccaagaaact

SEQ ID NO: 733240 - DNA, 19 bp, Mus musculus
  siRNA target sequence for 2210016L21Rik (NM_028211.1,305-323).
ccatcgcagaagtttggaa

SEQ ID NO: 733241 - DNA, 19 bp, Mus musculus
  siRNA target sequence for 2210016L21Rik (NM_028211.1,526-544).
caggagtcagccatacact

SEQ ID NO: 733242 - DNA, 19 bp, Mus musculus
  siRNA target sequence for 2210016L21Rik (NM_028211.1,626-644).
caggtctggaacaggtaaa

SEQ ID NO: 733243 - DNA, 19 bp, Mus musculus
  siRNA target sequence for 2210016L21Rik (NM_028211.1,673-691).
gtgtcgcttgggatccaaa

SEQ ID NO: 733244 - DNA, 19 bp, Mus musculus
  siRNA target sequence for 2210016L21Rik (NM_028211.1,677-695).
cgcttgggatccaaaagaa

SEQ ID NO: 733245 - DNA, 19 bp, Mus musculus
  siRNA target sequence for 2210408O09Rik (NM_028212.1,480-498).
cggtttgatagaccttttt

SEQ ID NO: 733246 - DNA, 19 bp, Mus musculus
  siRNA target sequence for Psca (NM_028216.1,112-130).
cagagactgtctgaatgta

SEQ ID NO: 733247 - DNA, 19 bp, Mus musculus
  siRNA target sequence for Psca (NM_028216.1,148-166).
ccagcacagttgctttaca

SEQ ID NO: 733248 - DNA, 19 bp, Mus musculus
  siRNA target sequence for Psca (NM_028216.1,185-203).
ggactcgtgacagttatca

SEQ ID NO: 733249 - DNA, 19 bp, Mus musculus
  siRNA target sequence for Psca (NM_028216.1,188-206).
ctcgtgacagttatcagta

SEQ ID NO: 733250 - DNA, 19 bp, Mus musculus
  siRNA target sequence for Psca (NM_028216.1,230-248).
gatgactcggagaactact

SEQ ID NO: 733251 - DNA, 19 bp, Mus musculus
  siRNA target sequence for Psca (NM_028216.1,233-251).
gactcggagaactactatt

SEQ ID NO: 733252 - DNA, 19 bp, Mus musculus
  siRNA target sequence for Psca (NM_028216.1,282-300).
ctgacctgtgcaatgtcaa

SEQ ID NO: 733253 - DNA, 19 bp, Mus musculus
  siRNA target sequence for 2210407G14Rik (NM_028217.1,405-423).
ccgacgggaacatcaaaaa

SEQ ID NO: 733254 - DNA, 19 bp, Mus musculus
  siRNA target sequence for 2210407G14Rik (NM_028217.1,575-593).
cctccgcccatgaagatct

SEQ ID NO: 733255 - DNA, 19 bp, Mus musculus
  siRNA target sequence for 2210407G14Rik (NM_028217.1,663-681).
ctacaggctgcctgaatga

SEQ ID NO: 733256 - DNA, 19 bp, Mus musculus
  siRNA target sequence for 2210407G14Rik (NM_028217.1,860-878).
gacatgcgagggaaggaaa

SEQ ID NO: 733257 - DNA, 19 bp, Mus musculus
  siRNA target sequence for 2210407G14Rik (NM_028217.1,904-922).
gatttacgactggcataaa

SEQ ID NO: 733258 - DNA, 19 bp, Mus musculus
  siRNA target sequence for 2210407G14Rik (NM_028217.1,915-933).
ggcataaagattttttcct

SEQ ID NO: 733259 - DNA, 19 bp, Mus musculus
  siRNA target sequence for 2210407G14Rik (NM_028217.1,934-952).
ggctgaactggaaaaatgt

SEQ ID NO: 733260 - DNA, 19 bp, Mus musculus
  siRNA target sequence for 2210407G14Rik (NM_028217.1,935-953).
gctgaactggaaaaatgta

SEQ ID NO: 733261 - DNA, 19 bp, Mus musculus
  siRNA target sequence for 2210407G14Rik (NM_028217.1,1071-1089).
cctattttgaggaggttaa

SEQ ID NO: 733262 - DNA, 19 bp, Mus musculus
  siRNA target sequence for 2210407G14Rik (NM_028217.1,1072-1090).
ctattttgaggaggttaaa

SEQ ID NO: 733263 - DNA, 19 bp, Mus musculus
  siRNA target sequence for 2210407G14Rik (NM_028217.1,1208-1226).
gagtgttccgatattgaga

SEQ ID NO: 733264 - DNA, 19 bp, Mus musculus
  siRNA target sequence for 2210407G14Rik (NM_028217.1,1210-1228).
gtgttccgatattgagaaa

SEQ ID NO: 733265 - DNA, 19 bp, Mus musculus
  siRNA target sequence for 2210407G14Rik (NM_028217.1,1331-1349).
ctgcagcaggacacattct

SEQ ID NO: 733266 - DNA, 19 bp, Mus musculus
  siRNA target sequence for 2210407G14Rik (NM_028217.1,1333-1351).
gcagcaggacacattctat

SEQ ID NO: 733267 - DNA, 19 bp, Mus musculus
  siRNA target sequence for 2210407G14Rik (NM_028217.1,1337-1355).
caggacacattctatgtga

SEQ ID NO: 733268 - DNA, 19 bp, Mus musculus
  siRNA target sequence for 2210407G14Rik (NM_028217.1,1387-1405).
caaggagaggcgtgtgttt

SEQ ID NO: 733269 - DNA, 19 bp, Mus musculus
  siRNA target sequence for 2210407G14Rik (NM_028217.1,1391-1409).
gagaggcgtgtgtttctct

SEQ ID NO: 733270 - DNA, 19 bp, Mus musculus
  siRNA target sequence for 2210407G14Rik (NM_028217.1,1463-1481).
ggctacatgttcaaaagaa

SEQ ID NO: 733271 - DNA, 19 bp, Mus musculus
  siRNA target sequence for 2210407G14Rik (NM_028217.1,1498-1516).
cttggtcctggaagacaat

SEQ ID NO: 733272 - DNA, 19 bp, Mus musculus
  siRNA target sequence for 2210407G14Rik (NM_028217.1,1520-1538).
gatggtgacccctgcaaat

SEQ ID NO: 733273 - DNA, 19 bp, Mus musculus
  siRNA target sequence for 2210407G14Rik (NM_028217.1,1563-1581).
cagaaagggtcattctaca

SEQ ID NO: 733274 - DNA, 19 bp, Mus musculus
  siRNA target sequence for 2210407G14Rik (NM_028217.1,1624-1642).
caaccaagtcctagaaaca

SEQ ID NO: 733275 - DNA, 19 bp, Mus musculus
  siRNA target sequence for 2210407G14Rik (NM_028217.1,1929-1947).
caaccatgactgtaatcaa

SEQ ID NO: 733276 - DNA, 19 bp, Mus musculus
  siRNA target sequence for 2210407G14Rik (NM_028217.1,1932-1950).
ccatgactgtaatcaaaga

SEQ ID NO: 733277 - DNA, 19 bp, Mus musculus
  siRNA target sequence for 2210407G14Rik (NM_028217.1,1938-1956).
ctgtaatcaaagattacta

SEQ ID NO: 733278 - DNA, 19 bp, Mus musculus
  siRNA target sequence for 2210407G14Rik (NM_028217.1,2013-2031).
ccgtcaaccagcagaacat

SEQ ID NO: 733279 - DNA, 19 bp, Mus musculus
  siRNA target sequence for 2310065K24Rik (NM_028221.2,295-313).
gatggagaggacgatagta

SEQ ID NO: 733280 - DNA, 19 bp, Mus musculus
  siRNA target sequence for 2310065K24Rik (NM_028221.2,311-329).
gtaaccttgtcatcaaaaa

SEQ ID NO: 733281 - DNA, 19 bp, Mus musculus
  siRNA target sequence for 2310065K24Rik (NM_028221.2,493-511).
gagtatgaggagcaattca

SEQ ID NO: 733282 - DNA, 19 bp, Mus musculus
  siRNA target sequence for 2310065K24Rik (NM_028221.2,495-513).
gtatgaggagcaattcaaa

SEQ ID NO: 733283 - DNA, 19 bp, Mus musculus
  siRNA target sequence for 2310065K24Rik (NM_028221.2,600-618).
gcggcgagaagaagaacta

SEQ ID NO: 733284 - DNA, 19 bp, Mus musculus
  siRNA target sequence for 2310065K24Rik (NM_028221.2,631-649).
gagtacagaagtaatctca

SEQ ID NO: 733285 - DNA, 19 bp, Mus musculus
  siRNA target sequence for 3010001K23Rik (NM_028223.2,299-317).
gcagtttgacaaaagtata

SEQ ID NO: 733286 - DNA, 19 bp, Mus musculus
  siRNA target sequence for 3010001K23Rik (NM_028223.2,353-371).
catgacatttctaatcgta

SEQ ID NO: 733287 - DNA, 19 bp, Mus musculus
  siRNA target sequence for 3010001K23Rik (NM_028223.2,407-425).
ggttgttggaaaaatagat

SEQ ID NO: 733288 - DNA, 19 bp, Mus musculus
  siRNA target sequence for 3010001K23Rik (NM_028223.2,450-468).
gcctgtatgatgactatca

SEQ ID NO: 733289 - DNA, 19 bp, Mus musculus
  siRNA target sequence for 3010001K23Rik (NM_028223.2,471-489).
ctcctgccctacacatttt

SEQ ID NO: 733290 - DNA, 19 bp, Mus musculus
  siRNA target sequence for 3010001K23Rik (NM_028223.2,473-491).
cctgccctacacattttca

SEQ ID NO: 733291 - DNA, 19 bp, Mus musculus
  siRNA target sequence for 3010001K23Rik (NM_028223.2,476-494).
gccctacacattttcacta

SEQ ID NO: 733292 - DNA, 19 bp, Mus musculus
  siRNA target sequence for 3010001K23Rik (NM_028223.2,478-496).
cctacacattttcactaat

SEQ ID NO: 733293 - DNA, 19 bp, Mus musculus
  siRNA target sequence for 3010001K23Rik (NM_028223.2,482-500).
cacattttcactaatggta

SEQ ID NO: 733294 - DNA, 19 bp, Mus musculus
  siRNA target sequence for 3010001K23Rik (NM_028223.2,562-580).
ctgtgcaggcaatgattgt

SEQ ID NO: 733295 - DNA, 19 bp, Mus musculus
  siRNA target sequence for 3010001K23Rik (NM_028223.2,787-805).
ccacctggtgcaaagacaa

SEQ ID NO: 733296 - DNA, 19 bp, Mus musculus
  siRNA target sequence for 3010001K23Rik (NM_028223.2,839-857).
catggagcccttcagtatt

SEQ ID NO: 733297 - DNA, 19 bp, Mus musculus
  siRNA target sequence for 3010001K23Rik (NM_028223.2,1018-1036).
gtgcatatgggccacaatt

SEQ ID NO: 733298 - DNA, 19 bp, Mus musculus
  siRNA target sequence for 3010001K23Rik (NM_028223.2,1020-1038).
gcatatgggccacaattct

SEQ ID NO: 733299 - DNA, 19 bp, Mus musculus
  siRNA target sequence for 3010001K23Rik (NM_028223.2,1021-1039).
catatgggccacaattctt

SEQ ID NO: 733300 - DNA, 19 bp, Mus musculus
  siRNA target sequence for 3010001K23Rik (NM_028223.2,1126-1144).
ccatggggttactcaacat

SEQ ID NO: 733301 - DNA, 19 bp, Mus musculus
  siRNA target sequence for 3010001K23Rik (NM_028223.2,1130-1148).
ggggttactcaacatacta

SEQ ID NO: 733302 - DNA, 19 bp, Mus musculus
  siRNA target sequence for 3010001K23Rik (NM_028223.2,1131-1149).
gggttactcaacatactat

SEQ ID NO: 733303 - DNA, 19 bp, Mus musculus
  siRNA target sequence for 3010001K23Rik (NM_028223.2,1207-1225).
ggcaaccccatgatgaact

SEQ ID NO: 733304 - DNA, 19 bp, Mus musculus
  siRNA target sequence for 3010001K23Rik (NM_028223.2,1208-1226).
gcaaccccatgatgaactt

SEQ ID NO: 733305 - DNA, 19 bp, Mus musculus
  siRNA target sequence for 3010001K23Rik (NM_028223.2,1299-1317).
ctgctgcatcagacagaaa

SEQ ID NO: 733306 - DNA, 19 bp, Mus musculus
  siRNA target sequence for 3010001K23Rik (NM_028223.2,1301-1319).
gctgcatcagacagaaaca

SEQ ID NO: 733307 - DNA, 19 bp, Mus musculus
  siRNA target sequence for 3010001K23Rik (NM_028223.2,1322-1340).
gcagccagctgtgcaattt

SEQ ID NO: 733308 - DNA, 19 bp, Mus musculus
  siRNA target sequence for 3010001K23Rik (NM_028223.2,1325-1343).
gccagctgtgcaatttggt

SEQ ID NO: 733309 - DNA, 19 bp, Mus musculus
  siRNA target sequence for 3010001K23Rik (NM_028223.2,1347-1365).
caggagcatgctttcatgt

SEQ ID NO: 733310 - DNA, 19 bp, Mus musculus
  siRNA target sequence for Faim2 (NM_028224.2,383-401).
cgtcggctcttcatcagaa

SEQ ID NO: 733311 - DNA, 19 bp, Mus musculus
  siRNA target sequence for Faim2 (NM_028224.2,384-402).
gtcggctcttcatcagaaa

SEQ ID NO: 733312 - DNA, 19 bp, Mus musculus
  siRNA target sequence for Faim2 (NM_028224.2,462-480).
ccttctgtgatgtcgttaa

SEQ ID NO: 733313 - DNA, 19 bp, Mus musculus
  siRNA target sequence for Faim2 (NM_028224.2,516-534).
cgtcctatgccgtgttctt

SEQ ID NO: 733314 - DNA, 19 bp, Mus musculus
  siRNA target sequence for Faim2 (NM_028224.2,517-535).
gtcctatgccgtgttcttt

SEQ ID NO: 733315 - DNA, 19 bp, Mus musculus
  siRNA target sequence for Faim2 (NM_028224.2,525-543).
ccgtgttctttgcaactta

SEQ ID NO: 733316 - DNA, 19 bp, Mus musculus
  siRNA target sequence for Faim2 (NM_028224.2,644-662).
ctgtccagttactacaaca

SEQ ID NO: 733317 - DNA, 19 bp, Mus musculus
  siRNA target sequence for Faim2 (NM_028224.2,940-958).
gagccccgaggagtatatt

SEQ ID NO: 733318 - DNA, 19 bp, Mus musculus
  siRNA target sequence for Faim2 (NM_028224.2,942-960).
gccccgaggagtatatttt

SEQ ID NO: 733319 - DNA, 19 bp, Mus musculus
  siRNA target sequence for Faim2 (NM_028224.2,946-964).
cgaggagtatatttttgga

SEQ ID NO: 733320 - DNA, 19 bp, Mus musculus
  siRNA target sequence for Faim2 (NM_028224.2,968-986).
ctcaacatctacttagaca

SEQ ID NO: 733321 - DNA, 19 bp, Mus musculus
  siRNA target sequence for Faim2 (NM_028224.2,970-988).
caacatctacttagacatt

SEQ ID NO: 733322 - DNA, 19 bp, Mus musculus
  siRNA target sequence for Brap (NM_028227.1,141-159).
gatgacctccctaaaagaa

SEQ ID NO: 733323 - DNA, 19 bp, Mus musculus
  siRNA target sequence for Brap (NM_028227.1,212-230).
ccagtcatgaccttatgaa

SEQ ID NO: 733324 - DNA, 19 bp, Mus musculus
  siRNA target sequence for Brap (NM_028227.1,215-233).
gtcatgaccttatgaagtt

SEQ ID NO: 733325 - DNA, 19 bp, Mus musculus
  siRNA target sequence for Brap (NM_028227.1,231-249).
gtttgttgccccattcaat

SEQ ID NO: 733326 - DNA, 19 bp, Mus musculus
  siRNA target sequence for Brap (NM_028227.1,238-256).
gccccattcaatgatgtaa

SEQ ID NO: 733327 - DNA, 19 bp, Mus musculus
  siRNA target sequence for Brap (NM_028227.1,239-257).
ccccattcaatgatgtaat

SEQ ID NO: 733328 - DNA, 19 bp, Mus musculus
  siRNA target sequence for Brap (NM_028227.1,246-264).
caatgatgtaattgaacaa

SEQ ID NO: 733329 - DNA, 19 bp, Mus musculus
  siRNA target sequence for Brap (NM_028227.1,280-298).
gactctactccgaatcagt

SEQ ID NO: 733330 - DNA, 19 bp, Mus musculus
  siRNA target sequence for Brap (NM_028227.1,284-302).
ctactccgaatcagtacat

SEQ ID NO: 733331 - DNA, 19 bp, Mus musculus
  siRNA target sequence for Brap (NM_028227.1,366-384).
ccagttcaactcaatcgaa

SEQ ID NO: 733332 - DNA, 19 bp, Mus musculus
  siRNA target sequence for Brap (NM_028227.1,419-437).
ctgaagtgctgaaatctga

SEQ ID NO: 733333 - DNA, 19 bp, Mus musculus
  siRNA target sequence for Brap (NM_028227.1,598-616).
gtgtgccgatactgtcaaa

SEQ ID NO: 733334 - DNA, 19 bp, Mus musculus
  siRNA target sequence for Brap (NM_028227.1,792-810).
ggactatgctggagataat

SEQ ID NO: 733335 - DNA, 19 bp, Mus musculus
  siRNA target sequence for Brap (NM_028227.1,830-848).
caagcaagacggatggaaa

SEQ ID NO: 733336 - DNA, 19 bp, Mus musculus
  siRNA target sequence for Brap (NM_028227.1,943-961).
gaatcgcagcggatatact

SEQ ID NO: 733337 - DNA, 19 bp, Mus musculus
  siRNA target sequence for Brap (NM_028227.1,1291-1309).
ctgcgcgatgtcatgttct

SEQ ID NO: 733338 - DNA, 19 bp, Mus musculus
  siRNA target sequence for 2700049B16Rik (NM_028231.2,409-427).
ggccggacctcttcatctt

SEQ ID NO: 733339 - DNA, 19 bp, Mus musculus
  siRNA target sequence for 2700049B16Rik (NM_028231.2,410-428).
gccggacctcttcatctta

SEQ ID NO: 733340 - DNA, 19 bp, Mus musculus
  siRNA target sequence for 2700049B16Rik (NM_028231.2,412-430).
cggacctcttcatcttaca

SEQ ID NO: 733341 - DNA, 19 bp, Mus musculus
  siRNA target sequence for 2700049B16Rik (NM_028231.2,644-662).
ccctgctgaatgtgtcaat

SEQ ID NO: 733342 - DNA, 19 bp, Mus musculus
  siRNA target sequence for 2700049B16Rik (NM_028231.2,648-666).
gctgaatgtgtcaatcaca

SEQ ID NO: 733343 - DNA, 19 bp, Mus musculus
  siRNA target sequence for 2700049B16Rik (NM_028231.2,657-675).
gtcaatcacagaaacgttt

SEQ ID NO: 733344 - DNA, 19 bp, Mus musculus
  siRNA target sequence for 2700049B16Rik (NM_028231.2,816-834).
ctcctatattcctaagtgt

SEQ ID NO: 733345 - DNA, 19 bp, Mus musculus
  siRNA target sequence for 2700049B16Rik (NM_028231.2,827-845).
ctaagtgtggaaacaactt

SEQ ID NO: 733346 - DNA, 19 bp, Mus musculus
  siRNA target sequence for 2700049B16Rik (NM_028231.2,865-883).
gtgagtgtcgtcatggaaa

SEQ ID NO: 733347 - DNA, 19 bp, Mus musculus
  siRNA target sequence for 2700049B16Rik (NM_028231.2,871-889).
gtcgtcatggaaaacttca

SEQ ID NO: 733348 - DNA, 19 bp, Mus musculus
  siRNA target sequence for 2700049B16Rik (NM_028231.2,1019-1037).
gtgtggcaatcgttgctat

SEQ ID NO: 733349 - DNA, 19 bp, Mus musculus
  siRNA target sequence for 2700049B16Rik (NM_028231.2,1029-1047).
cgttgctatggtgaaacta

SEQ ID NO: 733350 - DNA, 19 bp, Mus musculus
  siRNA target sequence for 2700049B16Rik (NM_028231.2,1034-1052).
ctatggtgaaactaactca

SEQ ID NO: 733351 - DNA, 19 bp, Mus musculus
  siRNA target sequence for 3300001M08Rik (NM_028232.1,257-275).
gaaaaggtcctttcaagat

SEQ ID NO: 733352 - DNA, 19 bp, Mus musculus
  siRNA target sequence for 3300001M08Rik (NM_028232.1,282-300).
gaagacattaagaatcgaa

SEQ ID NO: 733353 - DNA, 19 bp, Mus musculus
  siRNA target sequence for 3300001M08Rik (NM_028232.1,336-354).
gggaaacgcaagtccttta

SEQ ID NO: 733354 - DNA, 19 bp, Mus musculus
  siRNA target sequence for 3300001M08Rik (NM_028232.1,337-355).
ggaaacgcaagtcctttat

SEQ ID NO: 733355 - DNA, 19 bp, Mus musculus
  siRNA target sequence for 3300001M08Rik (NM_028232.1,338-356).
gaaacgcaagtcctttatt

SEQ ID NO: 733356 - DNA, 19 bp, Mus musculus
  siRNA target sequence for 3300001M08Rik (NM_028232.1,377-395).
cactaacactgctacacta

SEQ ID NO: 733357 - DNA, 19 bp, Mus musculus
  siRNA target sequence for 3300001M08Rik (NM_028232.1,388-406).
ctacactactgagatatta

SEQ ID NO: 733358 - DNA, 19 bp, Mus musculus
  siRNA target sequence for 3300001M08Rik (NM_028232.1,498-516).
gaatgctactaccttactt

SEQ ID NO: 733359 - DNA, 19 bp, Mus musculus
  siRNA target sequence for 3300001M08Rik (NM_028232.1,517-535).
gtcagctgtatgcattgaa

SEQ ID NO: 733360 - DNA, 19 bp, Mus musculus
  siRNA target sequence for 3300001M08Rik (NM_028232.1,542-560).
gctaacttcccgacaaagt

SEQ ID NO: 733361 - DNA, 19 bp, Mus musculus
  siRNA target sequence for 3300001M08Rik (NM_028232.1,552-570).
cgacaaagtgaagaaacta

SEQ ID NO: 733362 - DNA, 19 bp, Mus musculus
  siRNA target sequence for 3300001M08Rik (NM_028232.1,602-620).
ggtctccagcattgacaat

SEQ ID NO: 733363 - DNA, 19 bp, Mus musculus
  siRNA target sequence for 3300001M08Rik (NM_028232.1,660-678).
gctgttgaagaaactgatt

SEQ ID NO: 733364 - DNA, 19 bp, Mus musculus
  siRNA target sequence for 3300001M08Rik (NM_028232.1,722-740).
gacacagggttgcgatttt

SEQ ID NO: 733365 - DNA, 19 bp, Mus musculus
  siRNA target sequence for 3300001M08Rik (NM_028232.1,724-742).
cacagggttgcgattttga

SEQ ID NO: 733366 - DNA, 19 bp, Mus musculus
  siRNA target sequence for 3300001M08Rik (NM_028232.1,728-746).
gggttgcgattttgattca

SEQ ID NO: 733367 - DNA, 19 bp, Mus musculus
  siRNA target sequence for 3300001M08Rik (NM_028232.1,794-812).
ccgtcgccatttaaggaaa

SEQ ID NO: 733368 - DNA, 19 bp, Mus musculus
  siRNA target sequence for 3300001M08Rik (NM_028232.1,838-856).
cgactttggaggattgtaa

SEQ ID NO: 733369 - DNA, 19 bp, Mus musculus
  siRNA target sequence for 3300001M08Rik (NM_028232.1,960-978).
gaccaaattagcttatgtt

SEQ ID NO: 733370 - DNA, 19 bp, Mus musculus
  siRNA target sequence for 3300001M08Rik (NM_028232.1,962-980).
ccaaattagcttatgttct

SEQ ID NO: 733371 - DNA, 19 bp, Mus musculus
  siRNA target sequence for 3300001M08Rik (NM_028232.1,1027-1045).
catctaaacctgaacaaat

SEQ ID NO: 733372 - DNA, 19 bp, Mus musculus
  siRNA target sequence for 3300001M08Rik (NM_028232.1,1055-1073).
gcataaacgtgcacgaaaa

SEQ ID NO: 733373 - DNA, 19 bp, Mus musculus
  siRNA target sequence for 3300001M08Rik (NM_028232.1,1097-1115).
caagcagagatgcaaatca

SEQ ID NO: 733374 - DNA, 19 bp, Mus musculus
  siRNA target sequence for 3300001M08Rik (NM_028232.1,1100-1118).
gcagagatgcaaatcaaaa

SEQ ID NO: 733375 - DNA, 19 bp, Mus musculus
  siRNA target sequence for 3300001M08Rik (NM_028232.1,1207-1225).
cttacgattttaatctaaa

SEQ ID NO: 733376 - DNA, 19 bp, Mus musculus
  siRNA target sequence for 3300001M08Rik (NM_028232.1,1246-1264).
ctttccgacaaaaaatgaa

SEQ ID NO: 733377 - DNA, 19 bp, Mus musculus
  siRNA target sequence for 3300001M08Rik (NM_028232.1,1409-1427).
caggcctcggtctaaaaga

SEQ ID NO: 733378 - DNA, 19 bp, Mus musculus
  siRNA target sequence for 3300001M08Rik (NM_028232.1,1527-1545).
ctaaaggatgtcaccaata

SEQ ID NO: 733379 - DNA, 19 bp, Mus musculus
  siRNA target sequence for 3300001M08Rik (NM_028232.1,1634-1652).
caggtgtagcaccatcaaa

SEQ ID NO: 733380 - DNA, 19 bp, Mus musculus
  siRNA target sequence for 3300001M08Rik (NM_028232.1,1642-1660).
gcaccatcaaaagctataa

SEQ ID NO: 733381 - DNA, 19 bp, Mus musculus
  siRNA target sequence for 3300001M08Rik (NM_028232.1,1698-1716).
cctttcacggacttgtgtt

SEQ ID NO: 733382 - DNA, 19 bp, Mus musculus
  siRNA target sequence for 3300001M08Rik (NM_028232.1,1705-1723).
cggacttgtgtttcttgaa

SEQ ID NO: 733383 - DNA, 19 bp, Mus musculus
  siRNA target sequence for Lrpprc (NM_028233.1,496-514).
gaacaggccgcatcacaaa

SEQ ID NO: 733384 - DNA, 19 bp, Mus musculus
  siRNA target sequence for Lrpprc (NM_028233.1,626-644).
cgccgagaggacagagttt

SEQ ID NO: 733385 - DNA, 19 bp, Mus musculus
  siRNA target sequence for Lrpprc (NM_028233.1,671-689).
gcagttaggtgtcgtatat

SEQ ID NO: 733386 - DNA, 19 bp, Mus musculus
  siRNA target sequence for Lrpprc (NM_028233.1,693-711).
gtcagtcattacaatgctt

SEQ ID NO: 733387 - DNA, 19 bp, Mus musculus
  siRNA target sequence for Lrpprc (NM_028233.1,697-715).
gtcattacaatgctttact

SEQ ID NO: 733388 - DNA, 19 bp, Mus musculus
  siRNA target sequence for Lrpprc (NM_028233.1,699-717).
cattacaatgctttactta

SEQ ID NO: 733389 - DNA, 19 bp, Mus musculus
  siRNA target sequence for Lrpprc (NM_028233.1,704-722).
caatgctttacttaaagta

SEQ ID NO: 733390 - DNA, 19 bp, Mus musculus
  siRNA target sequence for Lrpprc (NM_028233.1,789-807).
caaccaaatcgagtaacat

SEQ ID NO: 733391 - DNA, 19 bp, Mus musculus
  siRNA target sequence for Lrpprc (NM_028233.1,816-834).
ctgatagctgcctactgta

SEQ ID NO: 733392 - DNA, 19 bp, Mus musculus
  siRNA target sequence for Lrpprc (NM_028233.1,818-836).
gatagctgcctactgtaat

SEQ ID NO: 733393 - DNA, 19 bp, Mus musculus
  siRNA target sequence for Lrpprc (NM_028233.1,832-850).
gtaatgttggggacattga

SEQ ID NO: 733394 - DNA, 19 bp, Mus musculus
  siRNA target sequence for Lrpprc (NM_028233.1,863-881).
gatccttggatttatgaaa

SEQ ID NO: 733395 - DNA, 19 bp, Mus musculus
  siRNA target sequence for Lrpprc (NM_028233.1,867-885).
cttggatttatgaaaacga

SEQ ID NO: 733396 - DNA, 19 bp, Mus musculus
  siRNA target sequence for Lrpprc (NM_028233.1,1015-1033).
cgtatctggccttgttgaa

SEQ ID NO: 733397 - DNA, 19 bp, Mus musculus
  siRNA target sequence for Lrpprc (NM_028233.1,1016-1034).
gtatctggccttgttgaat

SEQ ID NO: 733398 - DNA, 19 bp, Mus musculus
  siRNA target sequence for Lrpprc (NM_028233.1,1117-1135).
gcgacttcttgcaggttat

SEQ ID NO: 733399 - DNA, 19 bp, Mus musculus
  siRNA target sequence for Lrpprc (NM_028233.1,1118-1136).
cgacttcttgcaggttatt

SEQ ID NO: 733400 - DNA, 19 bp, Mus musculus
  siRNA target sequence for Lrpprc (NM_028233.1,1131-1149).
gttatttttagcttcagta

SEQ ID NO: 733401 - DNA, 19 bp, Mus musculus
  siRNA target sequence for Lrpprc (NM_028233.1,1151-1169).
ggctggctaccctcagtat

SEQ ID NO: 733402 - DNA, 19 bp, Mus musculus
  siRNA target sequence for Lrpprc (NM_028233.1,1153-1171).
ctggctaccctcagtatgt

SEQ ID NO: 733403 - DNA, 19 bp, Mus musculus
  siRNA target sequence for Lrpprc (NM_028233.1,1155-1173).
ggctaccctcagtatgtct

SEQ ID NO: 733404 - DNA, 19 bp, Mus musculus
  siRNA target sequence for Lrpprc (NM_028233.1,1196-1214).
ctatgagagacggtctatt

SEQ ID NO: 733405 - DNA, 19 bp, Mus musculus
  siRNA target sequence for Lrpprc (NM_028233.1,1207-1225).
ggtctattccagatgcaat

SEQ ID NO: 733406 - DNA, 19 bp, Mus musculus
  siRNA target sequence for Lrpprc (NM_028233.1,1210-1228).
ctattccagatgcaatgaa

SEQ ID NO: 733407 - DNA, 19 bp, Mus musculus
  siRNA target sequence for Lrpprc (NM_028233.1,1218-1236).
gatgcaatgaacctcattt

SEQ ID NO: 733408 - DNA, 19 bp, Mus musculus
  siRNA target sequence for Lrpprc (NM_028233.1,1222-1240).
caatgaacctcattttgtt

SEQ ID NO: 733409 - DNA, 19 bp, Mus musculus
  siRNA target sequence for Lrpprc (NM_028233.1,1369-1387).
ctgagaagctgatagacta

SEQ ID NO: 733410 - DNA, 19 bp, Mus musculus
  siRNA target sequence for Lrpprc (NM_028233.1,1515-1533).
cctatccgaccgcactatt

SEQ ID NO: 733411 - DNA, 19 bp, Mus musculus
  siRNA target sequence for Lrpprc (NM_028233.1,1516-1534).
ctatccgaccgcactattt

SEQ ID NO: 733412 - DNA, 19 bp, Mus musculus
  siRNA target sequence for Lrpprc (NM_028233.1,1623-1641).
cctgatcaggaaacatata

SEQ ID NO: 733413 - DNA, 19 bp, Mus musculus
  siRNA target sequence for Lrpprc (NM_028233.1,1684-1702).
gagctgctttgcaggaaaa

SEQ ID NO: 733414 - DNA, 19 bp, Mus musculus
  siRNA target sequence for Lrpprc (NM_028233.1,1712-1730).
cctcgcaagtagtaccttt

SEQ ID NO: 733415 - DNA, 19 bp, Mus musculus
  siRNA target sequence for Lrpprc (NM_028233.1,1756-1774).
caataaatgggaacttaca

SEQ ID NO: 733416 - DNA, 19 bp, Mus musculus
  siRNA target sequence for Lrpprc (NM_028233.1,1853-1871).
caggaggtcgatgaacata

SEQ ID NO: 733417 - DNA, 19 bp, Mus musculus
  siRNA target sequence for Lrpprc (NM_028233.1,1855-1873).
ggaggtcgatgaacataga

SEQ ID NO: 733418 - DNA, 19 bp, Mus musculus
  siRNA target sequence for Lrpprc (NM_028233.1,1858-1876).
ggtcgatgaacatagatct

SEQ ID NO: 733419 - DNA, 19 bp, Mus musculus
  siRNA target sequence for Lrpprc (NM_028233.1,1859-1877).
gtcgatgaacatagatctt

SEQ ID NO: 733420 - DNA, 19 bp, Mus musculus
  siRNA target sequence for Lrpprc (NM_028233.1,1879-1897).
ggagcaagataacagaatt

SEQ ID NO: 733421 - DNA, 19 bp, Mus musculus
  siRNA target sequence for Lrpprc (NM_028233.1,2013-2031).
gagcgtttgagacaatact

SEQ ID NO: 733422 - DNA, 19 bp, Mus musculus
  siRNA target sequence for Lrpprc (NM_028233.1,2055-2073).
gttaaagttcctgaaaaca

SEQ ID NO: 733423 - DNA, 19 bp, Mus musculus
  siRNA target sequence for Lrpprc (NM_028233.1,2061-2079).
gttcctgaaaacatctaca

SEQ ID NO: 733424 - DNA, 19 bp, Mus musculus
  siRNA target sequence for Lrpprc (NM_028233.1,2089-2107).
gtaatttgctgaataccta

SEQ ID NO: 733425 - DNA, 19 bp, Mus musculus
  siRNA target sequence for Lrpprc (NM_028233.1,2104-2122).
cctaccatgttcctgaatt

SEQ ID NO: 733426 - DNA, 19 bp, Mus musculus
  siRNA target sequence for Lrpprc (NM_028233.1,2159-2177).
ggtagattctcaaaaaact

SEQ ID NO: 733427 - DNA, 19 bp, Mus musculus
  siRNA target sequence for Lrpprc (NM_028233.1,2201-2219).
ggaatcaacacttgagaaa

SEQ ID NO: 733428 - DNA, 19 bp, Mus musculus
  siRNA target sequence for Lrpprc (NM_028233.1,2274-2292).
ctctgctcagaggagaata

SEQ ID NO: 733429 - DNA, 19 bp, Mus musculus
  siRNA target sequence for Lrpprc (NM_028233.1,2302-2320).
cccttgaggtgaaagcaaa

SEQ ID NO: 733430 - DNA, 19 bp, Mus musculus
  siRNA target sequence for Lrpprc (NM_028233.1,2303-2321).
ccttgaggtgaaagcaaaa

SEQ ID NO: 733431 - DNA, 19 bp, Mus musculus
  siRNA target sequence for Lrpprc (NM_028233.1,2327-2345).
gtcagacatggttattggt

SEQ ID NO: 733432 - DNA, 19 bp, Mus musculus
  siRNA target sequence for Lrpprc (NM_028233.1,2344-2362).
gtggctatgcagcattaat

SEQ ID NO: 733433 - DNA, 19 bp, Mus musculus
  siRNA target sequence for Lrpprc (NM_028233.1,2346-2364).
ggctatgcagcattaataa

SEQ ID NO: 733434 - DNA, 19 bp, Mus musculus
  siRNA target sequence for Lrpprc (NM_028233.1,2352-2370).
gcagcattaataaatttgt

SEQ ID NO: 733435 - DNA, 19 bp, Mus musculus
  siRNA target sequence for Lrpprc (NM_028233.1,2369-2387).
gtgctgtcgacatgataat

SEQ ID NO: 733436 - DNA, 19 bp, Mus musculus
  siRNA target sequence for Lrpprc (NM_028233.1,2372-2390).
ctgtcgacatgataatgca

SEQ ID NO: 733437 - DNA, 19 bp, Mus musculus
  siRNA target sequence for Lrpprc (NM_028233.1,2398-2416).
cgtggaacttgaaacaaga

SEQ ID NO: 733438 - DNA, 19 bp, Mus musculus
  siRNA target sequence for Lrpprc (NM_028233.1,2459-2477).
gtacgtagcccttgtaaaa

SEQ ID NO: 733439 - DNA, 19 bp, Mus musculus
  siRNA target sequence for Lrpprc (NM_028233.1,2462-2480).
cgtagcccttgtaaaagta

SEQ ID NO: 733440 - DNA, 19 bp, Mus musculus
  siRNA target sequence for Lrpprc (NM_028233.1,2494-2512).
gcagactccaagatgctat

SEQ ID NO: 733441 - DNA, 19 bp, Mus musculus
  siRNA target sequence for Lrpprc (NM_028233.1,2535-2553).
gagaaggatgttgttatca

SEQ ID NO: 733442 - DNA, 19 bp, Mus musculus
  siRNA target sequence for Lrpprc (NM_028233.1,2537-2555).
gaaggatgttgttatcaaa

SEQ ID NO: 733443 - DNA, 19 bp, Mus musculus
  siRNA target sequence for Lrpprc (NM_028233.1,2559-2577).
gcaacagtcttgtcctttt

SEQ ID NO: 733444 - DNA, 19 bp, Mus musculus
  siRNA target sequence for Lrpprc (NM_028233.1,2605-2623).
gaggtgaaattgaaacagt

SEQ ID NO: 733445 - DNA, 19 bp, Mus musculus
  siRNA target sequence for Lrpprc (NM_028233.1,2667-2685).
ccgtccagcaacataagct

SEQ ID NO: 733446 - DNA, 19 bp, Mus musculus
  siRNA target sequence for Lrpprc (NM_028233.1,2668-2686).
cgtccagcaacataagctt

SEQ ID NO: 733447 - DNA, 19 bp, Mus musculus
  siRNA target sequence for Lrpprc (NM_028233.1,2741-2759).
cagcattgcctgccataaa

SEQ ID NO: 733448 - DNA, 19 bp, Mus musculus
  siRNA target sequence for Lrpprc (NM_028233.1,2752-2770).
gccataaaaaatataaagt

SEQ ID NO: 733449 - DNA, 19 bp, Mus musculus
  siRNA target sequence for Lrpprc (NM_028233.1,2771-2789).
gttacccaggattcatgat

SEQ ID NO: 733450 - DNA, 19 bp, Mus musculus
  siRNA target sequence for Lrpprc (NM_028233.1,2777-2795).
caggattcatgatgtctta

SEQ ID NO: 733451 - DNA, 19 bp, Mus musculus
  siRNA target sequence for Lrpprc (NM_028233.1,2780-2798).
gattcatgatgtcttatgt

SEQ ID NO: 733452 - DNA, 19 bp, Mus musculus
  siRNA target sequence for Lrpprc (NM_028233.1,2846-2864).
ctttgtgagccaagaacaa

SEQ ID NO: 733453 - DNA, 19 bp, Mus musculus
  siRNA target sequence for Lrpprc (NM_028233.1,2879-2897).
gctctacgacctcttcttt

SEQ ID NO: 733454 - DNA, 19 bp, Mus musculus
  siRNA target sequence for Lrpprc (NM_028233.1,2904-2922).
ctgcagacggggaattaca

SEQ ID NO: 733455 - DNA, 19 bp, Mus musculus
  siRNA target sequence for Lrpprc (NM_028233.1,2906-2924).
gcagacggggaattacaaa

SEQ ID NO: 733456 - DNA, 19 bp, Mus musculus
  siRNA target sequence for Lrpprc (NM_028233.1,2984-3002).
gttttgtgatcgatgcatt

SEQ ID NO: 733457 - DNA, 19 bp, Mus musculus
  siRNA target sequence for Lrpprc (NM_028233.1,2995-3013).
gatgcattgccagtaatca

SEQ ID NO: 733458 - DNA, 19 bp, Mus musculus
  siRNA target sequence for Lrpprc (NM_028233.1,3072-3090).
gaccagatgtactacaact

SEQ ID NO: 733459 - DNA, 19 bp, Mus musculus
  siRNA target sequence for Lrpprc (NM_028233.1,3074-3092).
ccagatgtactacaactta

SEQ ID NO: 733460 - DNA, 19 bp, Mus musculus
  siRNA target sequence for Lrpprc (NM_028233.1,3136-3154).
ctgcgtggaccaaaatgca

SEQ ID NO: 733461 - DNA, 19 bp, Mus musculus
  siRNA target sequence for Lrpprc (NM_028233.1,3217-3235).
gcaaccaggaagttccttt

SEQ ID NO: 733462 - DNA, 19 bp, Mus musculus
  siRNA target sequence for Lrpprc (NM_028233.1,3315-3333).
gagaagacgttgttgtcta

SEQ ID NO: 733463 - DNA, 19 bp, Mus musculus
  siRNA target sequence for Lrpprc (NM_028233.1,3337-3355).
gcaaactaaagaagagtaa

SEQ ID NO: 733464 - DNA, 19 bp, Mus musculus
  siRNA target sequence for Lrpprc (NM_028233.1,3350-3368).
gagtaaagatgcatataat

SEQ ID NO: 733465 - DNA, 19 bp, Mus musculus
  siRNA target sequence for Lrpprc (NM_028233.1,3361-3379).
catataatatcttccttaa

SEQ ID NO: 733466 - DNA, 19 bp, Mus musculus
  siRNA target sequence for Lrpprc (NM_028233.1,3374-3392).
ccttaaagccgaaaagcaa

SEQ ID NO: 733467 - DNA, 19 bp, Mus musculus
  siRNA target sequence for Lrpprc (NM_028233.1,3399-3417).
gtatttagcagtgaaactt

SEQ ID NO: 733468 - DNA, 19 bp, Mus musculus
  siRNA target sequence for Lrpprc (NM_028233.1,3465-3483).
gcaatgcacgtgaaggatt

SEQ ID NO: 733469 - DNA, 19 bp, Mus musculus
  siRNA target sequence for Lrpprc (NM_028233.1,3548-3566).
gcaagttaggcgggattat

SEQ ID NO: 733470 - DNA, 19 bp, Mus musculus
  siRNA target sequence for Lrpprc (NM_028233.1,3549-3567).
caagttaggcgggattatt

SEQ ID NO: 733471 - DNA, 19 bp, Mus musculus
  siRNA target sequence for Lrpprc (NM_028233.1,3552-3570).
gttaggcgggattatttga

SEQ ID NO: 733472 - DNA, 19 bp, Mus musculus
  siRNA target sequence for Lrpprc (NM_028233.1,3588-3606).
ctgagagcagccttggatt

SEQ ID NO: 733473 - DNA, 19 bp, Mus musculus
  siRNA target sequence for Lrpprc (NM_028233.1,3592-3610).
gagcagccttggatttgaa

SEQ ID NO: 733474 - DNA, 19 bp, Mus musculus
  siRNA target sequence for Lrpprc (NM_028233.1,3716-3734).
cacgattggactctcaaaa

SEQ ID NO: 733475 - DNA, 19 bp, Mus musculus
  siRNA target sequence for Lrpprc (NM_028233.1,3718-3736).
cgattggactctcaaaaat

SEQ ID NO: 733476 - DNA, 19 bp, Mus musculus
  siRNA target sequence for Lrpprc (NM_028233.1,3724-3742).
gactctcaaaaatggtttt

SEQ ID NO: 733477 - DNA, 19 bp, Mus musculus
  siRNA target sequence for Lrpprc (NM_028233.1,3824-3842).
cgagaaccaagccatagaa

SEQ ID NO: 733478 - DNA, 19 bp, Mus musculus
  siRNA target sequence for Lrpprc (NM_028233.1,3855-3873).
ggcttgtcgtatctattca

SEQ ID NO: 733479 - DNA, 19 bp, Mus musculus
  siRNA target sequence for Lrpprc (NM_028233.1,3857-3875).
cttgtcgtatctattcaga

SEQ ID NO: 733480 - DNA, 19 bp, Mus musculus
  siRNA target sequence for Lrpprc (NM_028233.1,3860-3878).
gtcgtatctattcagaaaa

SEQ ID NO: 733481 - DNA, 19 bp, Mus musculus
  siRNA target sequence for Lrpprc (NM_028233.1,3862-3880).
cgtatctattcagaaaagt

SEQ ID NO: 733482 - DNA, 19 bp, Mus musculus
  siRNA target sequence for Lrpprc (NM_028233.1,3900-3918).
ccagcgctagagaagttaa

SEQ ID NO: 733483 - DNA, 19 bp, Mus musculus
  siRNA target sequence for Lrpprc (NM_028233.1,3903-3921).
gcgctagagaagttaagca

SEQ ID NO: 733484 - DNA, 19 bp, Mus musculus
  siRNA target sequence for Lrpprc (NM_028233.1,3904-3922).
cgctagagaagttaagcat

SEQ ID NO: 733485 - DNA, 19 bp, Mus musculus
  siRNA target sequence for Lrpprc (NM_028233.1,3930-3948).
gagagaatggcgaatcagt

SEQ ID NO: 733486 - DNA, 19 bp, Mus musculus
  siRNA target sequence for Lrpprc (NM_028233.1,3932-3950).
gagaatggcgaatcagttt

SEQ ID NO: 733487 - DNA, 19 bp, Mus musculus
  siRNA target sequence for Lrpprc (NM_028233.1,3940-3958).
cgaatcagtttgcacttta

SEQ ID NO: 733488 - DNA, 19 bp, Mus musculus
  siRNA target sequence for Lrpprc (NM_028233.1,3964-3982).
ccgtcactgatctattcct

SEQ ID NO: 733489 - DNA, 19 bp, Mus musculus
  siRNA target sequence for Lrpprc (NM_028233.1,4121-4139).
gactttgttagaactgatt

SEQ ID NO: 733490 - DNA, 19 bp, Mus musculus
  siRNA target sequence for Lrpprc (NM_028233.1,4141-4159).
ctgagttacgtgataacga

SEQ ID NO: 733491 - DNA, 19 bp, Mus musculus
  siRNA target sequence for Lrpprc (NM_028233.1,4145-4163).
gttacgtgataacgataaa

SEQ ID NO: 733492 - DNA, 19 bp, Mus musculus
  siRNA target sequence for Lrpprc (NM_028233.1,4149-4167).
cgtgataacgataaagtat

SEQ ID NO: 733493 - DNA, 19 bp, Mus musculus
  siRNA target sequence for Lrpprc (NM_028233.1,4150-4168).
gtgataacgataaagtata

SEQ ID NO: 733494 - DNA, 19 bp, Mus musculus
  siRNA target sequence for Lrpprc (NM_028233.1,4186-4204).
gctatgccttagacaaaga

SEQ ID NO: 733495 - DNA, 19 bp, Mus musculus
  siRNA target sequence for Lrpprc (NM_028233.1,4187-4205).
ctatgccttagacaaagat

SEQ ID NO: 733496 - DNA, 19 bp, Mus musculus
  siRNA target sequence for Lrpprc (NM_028233.1,4211-4229).
ctcggctaaagcactgtat

SEQ ID NO: 733497 - DNA, 19 bp, Mus musculus
  siRNA target sequence for Lrpprc (NM_028233.1,4213-4231).
cggctaaagcactgtatga

SEQ ID NO: 733498 - DNA, 19 bp, Mus musculus
  siRNA target sequence for 2600005C20Rik (NM_028244.1,399-417).
ggaagctgcggcagtatct

SEQ ID NO: 733499 - DNA, 19 bp, Mus musculus
  siRNA target sequence for 2600005C20Rik (NM_028244.1,451-469).
cagtcaagaagaactctta

SEQ ID NO: 733500 - DNA, 19 bp, Mus musculus
  siRNA target sequence for 2600005C20Rik (NM_028244.1,453-471).
gtcaagaagaactcttaaa

SEQ ID NO: 733501 - DNA, 19 bp, Mus musculus
  siRNA target sequence for 2600005C20Rik (NM_028244.1,529-547).
ggagctagcgaacattatt

SEQ ID NO: 733502 - DNA, 19 bp, Mus musculus
  siRNA target sequence for 2600005C20Rik (NM_028244.1,530-548).
gagctagcgaacattattt

SEQ ID NO: 733503 - DNA, 19 bp, Mus musculus
  siRNA target sequence for 2600005C20Rik (NM_028244.1,626-644).
gagtggcaagggatagaca

SEQ ID NO: 733504 - DNA, 19 bp, Mus musculus
  siRNA target sequence for 2600005C20Rik (NM_028244.1,805-823).
gagaacccacttgattgat

SEQ ID NO: 733505 - DNA, 19 bp, Mus musculus
  siRNA target sequence for 2600005C20Rik (NM_028244.1,807-825).
gaacccacttgattgatgt

SEQ ID NO: 733506 - DNA, 19 bp, Mus musculus
  siRNA target sequence for 2600005C20Rik (NM_028244.1,872-890).
gaccagaacctcaagttaa

SEQ ID NO: 733507 - DNA, 19 bp, Mus musculus
  siRNA target sequence for 2600005C20Rik (NM_028244.1,877-895).
gaacctcaagttaatcgat

SEQ ID NO: 733508 - DNA, 19 bp, Mus musculus
  siRNA target sequence for 2600005C20Rik (NM_028244.1,892-910).
cgatccattctgcagaatt

SEQ ID NO: 733509 - DNA, 19 bp, Mus musculus
  siRNA target sequence for 2600005C20Rik (NM_028244.1,945-963).
ctgtagcgaggggtgtttt

SEQ ID NO: 733510 - DNA, 19 bp, Mus musculus
  siRNA target sequence for 2600005C20Rik (NM_028244.1,951-969).
cgaggggtgtttttgaagt

SEQ ID NO: 733511 - DNA, 19 bp, Mus musculus
  siRNA target sequence for 2600005C20Rik (NM_028244.1,1108-1126).
cctcagagacggagtcatt

SEQ ID NO: 733512 - DNA, 19 bp, Mus musculus
  siRNA target sequence for 2600005C20Rik (NM_028244.1,1175-1193).
cctctccagtttgactata

SEQ ID NO: 733513 - DNA, 19 bp, Mus musculus
  siRNA target sequence for 2600005C20Rik (NM_028244.1,1176-1194).
ctctccagtttgactataa

SEQ ID NO: 733514 - DNA, 19 bp, Mus musculus
  siRNA target sequence for 2600005C20Rik (NM_028244.1,1203-1221).
ctgatcgactcctggaaat

SEQ ID NO: 733515 - DNA, 19 bp, Mus musculus
  siRNA target sequence for 2600005C20Rik (NM_028244.1,1422-1440).
gcggaggccacattcacaa

SEQ ID NO: 733516 - DNA, 19 bp, Mus musculus
  siRNA target sequence for 2600005C20Rik (NM_028244.1,1640-1658).
cccgtcatgcccatacaca

SEQ ID NO: 733517 - DNA, 19 bp, Mus musculus
  siRNA target sequence for 2600005C20Rik (NM_028244.1,1641-1659).
ccgtcatgcccatacacaa

SEQ ID NO: 733518 - DNA, 19 bp, Mus musculus
  siRNA target sequence for 2600005C20Rik (NM_028244.1,1642-1660).
cgtcatgcccatacacaat

SEQ ID NO: 733519 - DNA, 19 bp, Mus musculus
  siRNA target sequence for 2600005C20Rik (NM_028244.1,1643-1661).
gtcatgcccatacacaata

SEQ ID NO: 733520 - DNA, 19 bp, Mus musculus
  siRNA target sequence for 2600005C20Rik (NM_028244.1,1708-1726).
ctgcaaatccaccacttta

SEQ ID NO: 733521 - DNA, 19 bp, Mus musculus
  siRNA target sequence for 2600005C20Rik (NM_028244.1,1711-1729).
caaatccaccactttacct

SEQ ID NO: 733522 - DNA, 19 bp, Mus musculus
  siRNA target sequence for 2600005C20Rik (NM_028244.1,1728-1746).
ctcaggaggacatgtcaaa

SEQ ID NO: 733523 - DNA, 19 bp, Mus musculus
  siRNA target sequence for 2600005C20Rik (NM_028244.1,1730-1748).
caggaggacatgtcaaaga

SEQ ID NO: 733524 - DNA, 19 bp, Mus musculus
  siRNA target sequence for 2600005C20Rik (NM_028244.1,1860-1878).
gtgacctacctgtacagaa

SEQ ID NO: 733525 - DNA, 19 bp, Mus musculus
  siRNA target sequence for 2600005C20Rik (NM_028244.1,1934-1952).
cggtgtaagaggtcacaaa

SEQ ID NO: 733526 - DNA, 19 bp, Mus musculus
  siRNA target sequence for 2600005C20Rik (NM_028244.1,1935-1953).
ggtgtaagaggtcacaaaa

SEQ ID NO: 733527 - DNA, 19 bp, Mus musculus
  siRNA target sequence for 2600005C20Rik (NM_028244.1,1938-1956).
gtaagaggtcacaaaagaa

SEQ ID NO: 733528 - DNA, 19 bp, Mus musculus
  siRNA target sequence for 2600005C20Rik (NM_028244.1,1983-2001).
gtgatccgtccagtcaaaa

SEQ ID NO: 733529 - DNA, 19 bp, Mus musculus
  siRNA target sequence for 2600005C20Rik (NM_028244.1,2143-2161).
gtttgacactcggttctta

SEQ ID NO: 733530 - DNA, 19 bp, Mus musculus
  siRNA target sequence for 2600005C20Rik (NM_028244.1,2147-2165).
gacactcggttcttaccaa

SEQ ID NO: 733531 - DNA, 19 bp, Mus musculus
  siRNA target sequence for 2600005C20Rik (NM_028244.1,2162-2180).
ccaaagcccctgttcttca

SEQ ID NO: 733532 - DNA, 19 bp, Mus musculus
  siRNA target sequence for 2600005C20Rik (NM_028244.1,2244-2262).
cctccagttccaagaaagt

SEQ ID NO: 733533 - DNA, 19 bp, Mus musculus
  siRNA target sequence for 2600005C20Rik (NM_028244.1,2466-2484).
caagggctgcggacttctt

SEQ ID NO: 733534 - DNA, 19 bp, Mus musculus
  siRNA target sequence for 2610103N14Rik (NM_028247.1,570-588).
ctgtccatgggcatgatct

SEQ ID NO: 733535 - DNA, 19 bp, Mus musculus
  siRNA target sequence for 2610103N14Rik (NM_028247.1,656-674).
ggcagctgtgggattcatt

SEQ ID NO: 733536 - DNA, 19 bp, Mus musculus
  siRNA target sequence for 2610103N14Rik (NM_028247.1,676-694).
gactcatgtccagttcttt

SEQ ID NO: 733537 - DNA, 19 bp, Mus musculus
  siRNA target sequence for 2610103N14Rik (NM_028247.1,714-732).
ctgtacctcacctatggaa

SEQ ID NO: 733538 - DNA, 19 bp, Mus musculus
  siRNA target sequence for 2610103N14Rik (NM_028247.1,720-738).
ctcacctatggaatcatat

SEQ ID NO: 733539 - DNA, 19 bp, Mus musculus
  siRNA target sequence for 2610103N14Rik (NM_028247.1,722-740).
cacctatggaatcatattt

SEQ ID NO: 733540 - DNA, 19 bp, Mus musculus
  siRNA target sequence for 2610103N14Rik (NM_028247.1,915-933).
cggatcctctgcatcttca

SEQ ID NO: 733541 - DNA, 19 bp, Mus musculus
  siRNA target sequence for 2610103N14Rik (NM_028247.1,1005-1023).
ggcagcagaagctcattct

SEQ ID NO: 733542 - DNA, 19 bp, Mus musculus
  siRNA target sequence for 2610103N14Rik (NM_028247.1,1042-1060).
gtcctccaaaaaaagtctt

SEQ ID NO: 733543 - DNA, 19 bp, Mus musculus
  siRNA target sequence for 2610103N14Rik (NM_028247.1,1130-1148).
ctactttgtgccttacgtt

SEQ ID NO: 733544 - DNA, 19 bp, Mus musculus
  siRNA target sequence for 2610103N14Rik (NM_028247.1,1140-1158).
ccttacgttcacttggtaa

SEQ ID NO: 733545 - DNA, 19 bp, Mus musculus
  siRNA target sequence for 2610524A10Rik (NM_028258.1,364-382).
cgcttcccgccttcaagtt

SEQ ID NO: 733546 - DNA, 19 bp, Mus musculus
  siRNA target sequence for 2610524A10Rik (NM_028258.1,386-404).
gcctcgccgtgaaagcata

SEQ ID NO: 733547 - DNA, 19 bp, Mus musculus
  siRNA target sequence for 2610524A10Rik (NM_028258.1,390-408).
cgccgtgaaagcatagact

SEQ ID NO: 733548 - DNA, 19 bp, Mus musculus
  siRNA target sequence for 2610524A10Rik (NM_028258.1,483-501).
gctggcgtcaccttctgta

SEQ ID NO: 733549 - DNA, 19 bp, Mus musculus
  siRNA target sequence for 2610524A10Rik (NM_028258.1,484-502).
ctggcgtcaccttctgtaa

SEQ ID NO: 733550 - DNA, 19 bp, Mus musculus
  siRNA target sequence for 2610524A10Rik (NM_028258.1,736-754).
ggcgtaggcgaaagatgat

SEQ ID NO: 733551 - DNA, 19 bp, Mus musculus
  siRNA target sequence for 2610524A10Rik (NM_028258.1,1024-1042).
ctcgtcagcgggaaatgga

SEQ ID NO: 733552 - DNA, 19 bp, Mus musculus
  siRNA target sequence for 2610524A10Rik (NM_028258.1,1116-1134).
cagctgttttgggatgaat

SEQ ID NO: 733553 - DNA, 19 bp, Mus musculus
  siRNA target sequence for 2610524A10Rik (NM_028258.1,1126-1144).
gggatgaattcaaaactgt

SEQ ID NO: 733554 - DNA, 19 bp, Mus musculus
  siRNA target sequence for 2610524A10Rik (NM_028258.1,1151-1169).
ccagaactccacgttagaa

SEQ ID NO: 733555 - DNA, 19 bp, Mus musculus
  siRNA target sequence for 2610524A10Rik (NM_028258.1,1157-1175).
ctccacgttagaagagaaa

SEQ ID NO: 733556 - DNA, 19 bp, Mus musculus
  siRNA target sequence for 2610524A10Rik (NM_028258.1,1159-1177).
ccacgttagaagagaaact

SEQ ID NO: 733557 - DNA, 19 bp, Mus musculus
  siRNA target sequence for 2610524A10Rik (NM_028258.1,1162-1180).
cgttagaagagaaactgaa

SEQ ID NO: 733558 - DNA, 19 bp, Mus musculus
  siRNA target sequence for 2610524A10Rik (NM_028258.1,1430-1448).
gtctcagcgccatatcaat

SEQ ID NO: 733559 - DNA, 19 bp, Mus musculus
  siRNA target sequence for 2610524A10Rik (NM_028258.1,1808-1826).
ccgaagcttccgagagttt

SEQ ID NO: 733560 - DNA, 19 bp, Mus musculus
  siRNA target sequence for 2610524A10Rik (NM_028258.1,1828-1846).
ccagtctgagggaaaagct

SEQ ID NO: 733561 - DNA, 19 bp, Mus musculus
  siRNA target sequence for 2610524A10Rik (NM_028258.1,2195-2213).
ccttcagcctcctaaagtt

SEQ ID NO: 733562 - DNA, 19 bp, Mus musculus
  siRNA target sequence for 2610524A10Rik (NM_028258.1,2326-2344).
gaacactggtgcagtcaat

SEQ ID NO: 733563 - DNA, 19 bp, Mus musculus
  siRNA target sequence for 2610524A10Rik (NM_028258.1,2331-2349).
ctggtgcagtcaattgtca

SEQ ID NO: 733564 - DNA, 19 bp, Mus musculus
  siRNA target sequence for 2610524A10Rik (NM_028258.1,2388-2406).
ccttccggaggggtcaata

SEQ ID NO: 733565 - DNA, 19 bp, Mus musculus
  siRNA target sequence for 2610524A10Rik (NM_028258.1,2389-2407).
cttccggaggggtcaatat

SEQ ID NO: 733566 - DNA, 19 bp, Mus musculus
  siRNA target sequence for 2610524A10Rik (NM_028258.1,2392-2410).
ccggaggggtcaatatgtt

SEQ ID NO: 733567 - DNA, 19 bp, Mus musculus
  siRNA target sequence for 2610524A10Rik (NM_028258.1,2394-2412).
ggaggggtcaatatgttct

SEQ ID NO: 733568 - DNA, 19 bp, Mus musculus
  siRNA target sequence for 2610524A10Rik (NM_028258.1,2397-2415).
ggggtcaatatgttcttaa

SEQ ID NO: 733569 - DNA, 19 bp, Mus musculus
  siRNA target sequence for 2610524A10Rik (NM_028258.1,2489-2507).
ggagatctcgtctttggaa

SEQ ID NO: 733570 - DNA, 19 bp, Mus musculus
  siRNA target sequence for D12Ertd771e (NM_028262.1,763-781).
gccagtacgcctatttcta

SEQ ID NO: 733571 - DNA, 19 bp, Mus musculus
  siRNA target sequence for D12Ertd771e (NM_028262.1,764-782).
ccagtacgcctatttctat

SEQ ID NO: 733572 - DNA, 19 bp, Mus musculus
  siRNA target sequence for D12Ertd771e (NM_028262.1,765-783).
cagtacgcctatttctata

SEQ ID NO: 733573 - DNA, 19 bp, Mus musculus
  siRNA target sequence for D12Ertd771e (NM_028262.1,767-785).
gtacgcctatttctataaa

SEQ ID NO: 733574 - DNA, 19 bp, Mus musculus
  siRNA target sequence for D12Ertd771e (NM_028262.1,771-789).
gcctatttctataaagtca

SEQ ID NO: 733575 - DNA, 19 bp, Mus musculus
  siRNA target sequence for D12Ertd771e (NM_028262.1,772-790).
cctatttctataaagtcat

SEQ ID NO: 733576 - DNA, 19 bp, Mus musculus
  siRNA target sequence for D12Ertd771e (NM_028262.1,797-815).
ccatcctcatgccaacaaa

SEQ ID NO: 733577 - DNA, 19 bp, Mus musculus
  siRNA target sequence for D12Ertd771e (NM_028262.1,856-874).
gggccgtctcatcagttat

SEQ ID NO: 733578 - DNA, 19 bp, Mus musculus
  siRNA target sequence for D12Ertd771e (NM_028262.1,858-876).
gccgtctcatcagttatga

SEQ ID NO: 733579 - DNA, 19 bp, Mus musculus
  siRNA target sequence for D12Ertd771e (NM_028262.1,860-878).
cgtctcatcagttatgaca

SEQ ID NO: 733580 - DNA, 19 bp, Mus musculus
  siRNA target sequence for D12Ertd771e (NM_028262.1,1118-1136).
ccacgacagagtgaaaatt

SEQ ID NO: 733581 - DNA, 19 bp, Mus musculus
  siRNA target sequence for D12Ertd771e (NM_028262.1,1119-1137).
cacgacagagtgaaaatta

SEQ ID NO: 733582 - DNA, 19 bp, Mus musculus
  siRNA target sequence for D12Ertd771e (NM_028262.1,1499-1517).
ggccacaatggccatcaaa

SEQ ID NO: 733583 - DNA, 19 bp, Mus musculus
  siRNA target sequence for D12Ertd771e (NM_028262.1,1776-1794).
gtcaatggggaaaacttga

SEQ ID NO: 733584 - DNA, 19 bp, Mus musculus
  siRNA target sequence for 2610306H15Rik (NM_028263.1,807-825).
ctttgcaacttctttgtca

SEQ ID NO: 733585 - DNA, 19 bp, Mus musculus
  siRNA target sequence for 2610319K07Rik (NM_028264.2,158-176).
catcccattcgggaaatgt

SEQ ID NO: 733586 - DNA, 19 bp, Mus musculus
  siRNA target sequence for 2610319K07Rik (NM_028264.2,266-284).
gtggtattcccgtgatcaa

SEQ ID NO: 733587 - DNA, 19 bp, Mus musculus
  siRNA target sequence for 2610319K07Rik (NM_028264.2,268-286).
ggtattcccgtgatcaact

SEQ ID NO: 733588 - DNA, 19 bp, Mus musculus
  siRNA target sequence for 2610319K07Rik (NM_028264.2,287-305).
gtcgtgtgtgccaatctct

SEQ ID NO: 733589 - DNA, 19 bp, Mus musculus
  siRNA target sequence for 2610319K07Rik (NM_028264.2,289-307).
cgtgtgtgccaatctctaa

SEQ ID NO: 733590 - DNA, 19 bp, Mus musculus
  siRNA target sequence for 2610319K07Rik (NM_028264.2,328-346).
caccagcatgtggttaagt

SEQ ID NO: 733591 - DNA, 19 bp, Mus musculus
  siRNA target sequence for 2610319K07Rik (NM_028264.2,345-363).
gtgcacagtttgcaatgaa

SEQ ID NO: 733592 - DNA, 19 bp, Mus musculus
  siRNA target sequence for 2610319K07Rik (NM_028264.2,361-379).
gaagctacgccaatcaaaa

SEQ ID NO: 733593 - DNA, 19 bp, Mus musculus
  siRNA target sequence for 2610319K07Rik (NM_028264.2,470-488).
ccaactgtcgacgcataat

SEQ ID NO: 733594 - DNA, 19 bp, Mus musculus
  siRNA target sequence for 2610319K07Rik (NM_028264.2,471-489).
caactgtcgacgcataatt

SEQ ID NO: 733595 - DNA, 19 bp, Mus musculus
  siRNA target sequence for 2610319K07Rik (NM_028264.2,476-494).
gtcgacgcataattaacct

SEQ ID NO: 733596 - DNA, 19 bp, Mus musculus
  siRNA target sequence for 2610319K07Rik (NM_028264.2,500-518).
ccgtaatgctcatttctga

SEQ ID NO: 733597 - DNA, 19 bp, Mus musculus
  siRNA target sequence for 2610319K07Rik (NM_028264.2,501-519).
cgtaatgctcatttctgaa

SEQ ID NO: 733598 - DNA, 19 bp, Mus musculus
  siRNA target sequence for 2610319K07Rik (NM_028264.2,577-595).
gggcactgcgggaacacat

SEQ ID NO: 733599 - DNA, 19 bp, Mus musculus
  siRNA target sequence for 2610319K07Rik (NM_028264.2,637-655).
ccacactgcaaaaaaatct

SEQ ID NO: 733600 - DNA, 19 bp, Mus musculus
  siRNA target sequence for 2610319K07Rik (NM_028264.2,700-718).
gtcaccatcggaatgatat

SEQ ID NO: 733601 - DNA, 19 bp, Mus musculus
  siRNA target sequence for 2610319K07Rik (NM_028264.2,702-720).
caccatcggaatgatatgt

SEQ ID NO: 733602 - DNA, 19 bp, Mus musculus
  siRNA target sequence for 2610319K07Rik (NM_028264.2,704-722).
ccatcggaatgatatgtat

SEQ ID NO: 733603 - DNA, 19 bp, Mus musculus
  siRNA target sequence for 2610319K07Rik (NM_028264.2,705-723).
catcggaatgatatgtatt

SEQ ID NO: 733604 - DNA, 19 bp, Mus musculus
  siRNA target sequence for 2610319K07Rik (NM_028264.2,748-766).
ggcacacaagatttttcaa

SEQ ID NO: 733605 - DNA, 19 bp, Mus musculus
  siRNA target sequence for 2610319K07Rik (NM_028264.2,768-786).
gcgatttcatgcaacctat

SEQ ID NO: 733606 - DNA, 19 bp, Mus musculus
  siRNA target sequence for 2610319K07Rik (NM_028264.2,787-805).
gtgtcttgggcaattgctt

SEQ ID NO: 733607 - DNA, 19 bp, Mus musculus
  siRNA target sequence for 2610319K07Rik (NM_028264.2,826-844).
cttatccgagcttgttact

SEQ ID NO: 733608 - DNA, 19 bp, Mus musculus
  siRNA target sequence for 2610319K07Rik (NM_028264.2,848-866).
gcgcaatcagagtcagtta

SEQ ID NO: 733609 - DNA, 19 bp, Mus musculus
  siRNA target sequence for 2610319K07Rik (NM_028264.2,849-867).
cgcaatcagagtcagttat

SEQ ID NO: 733610 - DNA, 19 bp, Mus musculus
  siRNA target sequence for Uaca (NM_028283.1,146-164).
caatcagcggagtggaata

SEQ ID NO: 733611 - DNA, 19 bp, Mus musculus
  siRNA target sequence for Uaca (NM_028283.1,150-168).
cagcggagtggaataagta

SEQ ID NO: 733612 - DNA, 19 bp, Mus musculus
  siRNA target sequence for Uaca (NM_028283.1,283-301).
ccacgtcgtggcatccaaa

SEQ ID NO: 733613 - DNA, 19 bp, Mus musculus
  siRNA target sequence for Uaca (NM_028283.1,412-430).
gtgcctgcagaaacttcta

SEQ ID NO: 733614 - DNA, 19 bp, Mus musculus
  siRNA target sequence for Uaca (NM_028283.1,541-559).
ctccgtgaatgccaaagat

SEQ ID NO: 733615 - DNA, 19 bp, Mus musculus
  siRNA target sequence for Uaca (NM_028283.1,543-561).
ccgtgaatgccaaagatat

SEQ ID NO: 733616 - DNA, 19 bp, Mus musculus
  siRNA target sequence for Uaca (NM_028283.1,595-613).
gatgtgcaggccgacaatt

SEQ ID NO: 733617 - DNA, 19 bp, Mus musculus
  siRNA target sequence for Uaca (NM_028283.1,764-782).
ggccacgacagttcttact

SEQ ID NO: 733618 - DNA, 19 bp, Mus musculus
  siRNA target sequence for Uaca (NM_028283.1,765-783).
gccacgacagttcttacta

SEQ ID NO: 733619 - DNA, 19 bp, Mus musculus
  siRNA target sequence for Uaca (NM_028283.1,774-792).
gttcttactacgctagaat

SEQ ID NO: 733620 - DNA, 19 bp, Mus musculus
  siRNA target sequence for Uaca (NM_028283.1,821-839).
ctgaagacggcgtcagaaa

SEQ ID NO: 733621 - DNA, 19 bp, Mus musculus
  siRNA target sequence for Uaca (NM_028283.1,920-938).
gaaggaagcgtgaagtcaa

SEQ ID NO: 733622 - DNA, 19 bp, Mus musculus
  siRNA target sequence for Uaca (NM_028283.1,1014-1032).
ggaagattcagcaagaaca

SEQ ID NO: 733623 - DNA, 19 bp, Mus musculus
  siRNA target sequence for Uaca (NM_028283.1,1131-1149).
cccttttggcggctaaaga

SEQ ID NO: 733624 - DNA, 19 bp, Mus musculus
  siRNA target sequence for Uaca (NM_028283.1,1176-1194).
ccatcgaggccctgaaaaa

SEQ ID NO: 733625 - DNA, 19 bp, Mus musculus
  siRNA target sequence for Uaca (NM_028283.1,1240-1258).
cccgagtaaccgaaaagaa

SEQ ID NO: 733626 - DNA, 19 bp, Mus musculus
  siRNA target sequence for Uaca (NM_028283.1,1242-1260).
cgagtaaccgaaaagaaga

SEQ ID NO: 733627 - DNA, 19 bp, Mus musculus
  siRNA target sequence for Uaca (NM_028283.1,1245-1263).
gtaaccgaaaagaagacat

SEQ ID NO: 733628 - DNA, 19 bp, Mus musculus
  siRNA target sequence for Uaca (NM_028283.1,1333-1351).
gcatagcaggtctatgcta

SEQ ID NO: 733629 - DNA, 19 bp, Mus musculus
  siRNA target sequence for Uaca (NM_028283.1,1334-1352).
catagcaggtctatgctaa

SEQ ID NO: 733630 - DNA, 19 bp, Mus musculus
  siRNA target sequence for Uaca (NM_028283.1,1379-1397).
cagacctcatactctgaaa

SEQ ID NO: 733631 - DNA, 19 bp, Mus musculus
  siRNA target sequence for Uaca (NM_028283.1,1383-1401).
cctcatactctgaaaatga

SEQ ID NO: 733632 - DNA, 19 bp, Mus musculus
  siRNA target sequence for Uaca (NM_028283.1,1421-1439).
gaaaccttgcgaacttact

SEQ ID NO: 733633 - DNA, 19 bp, Mus musculus
  siRNA target sequence for Uaca (NM_028283.1,1425-1443).
ccttgcgaacttactatga

SEQ ID NO: 733634 - DNA, 19 bp, Mus musculus
  siRNA target sequence for Uaca (NM_028283.1,1457-1475).
gaccgactgaagttccaaa

SEQ ID NO: 733635 - DNA, 19 bp, Mus musculus
  siRNA target sequence for Uaca (NM_028283.1,1461-1479).
gactgaagttccaaaacga

SEQ ID NO: 733636 - DNA, 19 bp, Mus musculus
  siRNA target sequence for Uaca (NM_028283.1,1726-1744).
cctgaaaggcaaatatgaa

SEQ ID NO: 733637 - DNA, 19 bp, Mus musculus
  siRNA target sequence for Uaca (NM_028283.1,1772-1790).
cggagccagatcaaacaga

SEQ ID NO: 733638 - DNA, 19 bp, Mus musculus
  siRNA target sequence for Uaca (NM_028283.1,1861-1879).
ggaatgcggcacatgtgaa

SEQ ID NO: 733639 - DNA, 19 bp, Mus musculus
  siRNA target sequence for Uaca (NM_028283.1,1959-1977).
ctgtccccacagagaaatt

SEQ ID NO: 733640 - DNA, 19 bp, Mus musculus
  siRNA target sequence for Uaca (NM_028283.1,1987-2005).
gaagagctcattatccaat

SEQ ID NO: 733641 - DNA, 19 bp, Mus musculus
  siRNA target sequence for Uaca (NM_028283.1,2059-2077).
cgctcagggggaaattcga

SEQ ID NO: 733642 - DNA, 19 bp, Mus musculus
  siRNA target sequence for Uaca (NM_028283.1,2239-2257).
ccacgccgacaacaaactt

SEQ ID NO: 733643 - DNA, 19 bp, Mus musculus
  siRNA target sequence for Uaca (NM_028283.1,2277-2295).
gcctcacggtggagatgaa

SEQ ID NO: 733644 - DNA, 19 bp, Mus musculus
  siRNA target sequence for Uaca (NM_028283.1,2278-2296).
cctcacggtggagatgaaa

SEQ ID NO: 733645 - DNA, 19 bp, Mus musculus
  siRNA target sequence for Uaca (NM_028283.1,2348-2366).
gtaaacgtggaggatttga

SEQ ID NO: 733646 - DNA, 19 bp, Mus musculus
  siRNA target sequence for Uaca (NM_028283.1,2360-2378).
gatttgaataagaagcttt

SEQ ID NO: 733647 - DNA, 19 bp, Mus musculus
  siRNA target sequence for Uaca (NM_028283.1,2426-2444).
ctgctggcggagaacgata

SEQ ID NO: 733648 - DNA, 19 bp, Mus musculus
  siRNA target sequence for Uaca (NM_028283.1,2429-2447).
ctggcggagaacgataagt

SEQ ID NO: 733649 - DNA, 19 bp, Mus musculus
  siRNA target sequence for Uaca (NM_028283.1,2435-2453).
gagaacgataagttgacta

SEQ ID NO: 733650 - DNA, 19 bp, Mus musculus
  siRNA target sequence for Uaca (NM_028283.1,2440-2458).
cgataagttgactaagaat

SEQ ID NO: 733651 - DNA, 19 bp, Mus musculus
  siRNA target sequence for Uaca (NM_028283.1,2464-2482).
ccgcctggaagctgtgttt

SEQ ID NO: 733652 - DNA, 19 bp, Mus musculus
  siRNA target sequence for Uaca (NM_028283.1,2486-2504).
gctcccgagaaacatgaaa

SEQ ID NO: 733653 - DNA, 19 bp, Mus musculus
  siRNA target sequence for Uaca (NM_028283.1,2487-2505).
ctcccgagaaacatgaaaa

SEQ ID NO: 733654 - DNA, 19 bp, Mus musculus
  siRNA target sequence for Uaca (NM_028283.1,2506-2524).
ggagctaatgggtctgaaa

SEQ ID NO: 733655 - DNA, 19 bp, Mus musculus
  siRNA target sequence for Uaca (NM_028283.1,2507-2525).
gagctaatgggtctgaaat

SEQ ID NO: 733656 - DNA, 19 bp, Mus musculus
  siRNA target sequence for Uaca (NM_028283.1,2533-2551).
cgcagaactgaaaaagcaa

SEQ ID NO: 733657 - DNA, 19 bp, Mus musculus
  siRNA target sequence for Uaca (NM_028283.1,2548-2566).
gcaactgtctgagcttaat

SEQ ID NO: 733658 - DNA, 19 bp, Mus musculus
  siRNA target sequence for Uaca (NM_028283.1,2549-2567).
caactgtctgagcttaata

SEQ ID NO: 733659 - DNA, 19 bp, Mus musculus
  siRNA target sequence for Uaca (NM_028283.1,2751-2769).
cgagccaggaggtttcaaa

SEQ ID NO: 733660 - DNA, 19 bp, Mus musculus
  siRNA target sequence for Uaca (NM_028283.1,2752-2770).
gagccaggaggtttcaaaa

SEQ ID NO: 733661 - DNA, 19 bp, Mus musculus
  siRNA target sequence for Uaca (NM_028283.1,2755-2773).
ccaggaggtttcaaaacta

SEQ ID NO: 733662 - DNA, 19 bp, Mus musculus
  siRNA target sequence for Uaca (NM_028283.1,2775-2793).
gagatgagaacgaagtatt

SEQ ID NO: 733663 - DNA, 19 bp, Mus musculus
  siRNA target sequence for Uaca (NM_028283.1,2958-2976).
cgctccacgctgaaatcaa

SEQ ID NO: 733664 - DNA, 19 bp, Mus musculus
  siRNA target sequence for Uaca (NM_028283.1,3083-3101).
ggactgaaggagcagttat

SEQ ID NO: 733665 - DNA, 19 bp, Mus musculus
  siRNA target sequence for Uaca (NM_028283.1,3370-3388).
gatcctggcagcccaaaat

SEQ ID NO: 733666 - DNA, 19 bp, Mus musculus
  siRNA target sequence for Uaca (NM_028283.1,3572-3590).
gcggagcacctgaagctaa

SEQ ID NO: 733667 - DNA, 19 bp, Mus musculus
  siRNA target sequence for Uaca (NM_028283.1,3709-3727).
gcaggcgctgaagaactta

SEQ ID NO: 733668 - DNA, 19 bp, Mus musculus
  siRNA target sequence for Uaca (NM_028283.1,3743-3761).
gtcgacatgtcgaagtaca

SEQ ID NO: 733669 - DNA, 19 bp, Mus musculus
  siRNA target sequence for Uaca (NM_028283.1,3784-3802).
gacccagatttccaactta

SEQ ID NO: 733670 - DNA, 19 bp, Mus musculus
  siRNA target sequence for Uaca (NM_028283.1,3998-4016).
gccaaggacaataagataa

SEQ ID NO: 733671 - DNA, 19 bp, Mus musculus
  siRNA target sequence for Uaca (NM_028283.1,4053-4071).
cgctcaacggcctttctca

SEQ ID NO: 733672 - DNA, 19 bp, Mus musculus
  siRNA target sequence for Uaca (NM_028283.1,4110-4128).
gccagctggtggatactct

SEQ ID NO: 733673 - DNA, 19 bp, Mus musculus
  siRNA target sequence for Uaca (NM_028283.1,4176-4194).
gacagcaccaagaagttat

SEQ ID NO: 733674 - DNA, 19 bp, Mus musculus
  siRNA target sequence for 2700023J09Rik (NM_028284.1,80-98).
gtcctcgcaacagatgaaa

SEQ ID NO: 733675 - DNA, 19 bp, Mus musculus
  siRNA target sequence for 2700023J09Rik (NM_028284.1,83-101).
ctcgcaacagatgaaaaca

SEQ ID NO: 733676 - DNA, 19 bp, Mus musculus
  siRNA target sequence for 2700023J09Rik (NM_028284.1,125-143).
ctgtttagattccattgaa

SEQ ID NO: 733677 - DNA, 19 bp, Mus musculus
  siRNA target sequence for 2700023J09Rik (NM_028284.1,127-145).
gtttagattccattgaaga

SEQ ID NO: 733678 - DNA, 19 bp, Mus musculus
  siRNA target sequence for 2700023J09Rik (NM_028284.1,175-193).
gactcttagtcacaaactt

SEQ ID NO: 733679 - DNA, 19 bp, Mus musculus
  siRNA target sequence for 2700023J09Rik (NM_028284.1,177-195).
ctcttagtcacaaacttaa

SEQ ID NO: 733680 - DNA, 19 bp, Mus musculus
  siRNA target sequence for 2700023J09Rik (NM_028284.1,215-233).
ggcattgcccagagtcaat

SEQ ID NO: 733681 - DNA, 19 bp, Mus musculus
  siRNA target sequence for 2700023J09Rik (NM_028284.1,223-241).
ccagagtcaatctttctat

SEQ ID NO: 733682 - DNA, 19 bp, Mus musculus
  siRNA target sequence for 2700023J09Rik (NM_028284.1,224-242).
cagagtcaatctttctatt

SEQ ID NO: 733683 - DNA, 19 bp, Mus musculus
  siRNA target sequence for 2700023J09Rik (NM_028284.1,244-262).
gttacaactgcatattgaa

SEQ ID NO: 733684 - DNA, 19 bp, Mus musculus
  siRNA target sequence for 2700023J09Rik (NM_028284.1,251-269).
ctgcatattgaatatcaca

SEQ ID NO: 733685 - DNA, 19 bp, Mus musculus
  siRNA target sequence for 2700023J09Rik (NM_028284.1,271-289).
caagaactgctaactctaa

SEQ ID NO: 733686 - DNA, 19 bp, Mus musculus
  siRNA target sequence for 2700023J09Rik (NM_028284.1,274-292).
gaactgctaactctaaact

SEQ ID NO: 733687 - DNA, 19 bp, Mus musculus
  siRNA target sequence for 2700023J09Rik (NM_028284.1,335-353).
cactacccggtttgagttt

SEQ ID NO: 733688 - DNA, 19 bp, Mus musculus
  siRNA target sequence for 2700023J09Rik (NM_028284.1,337-355).
ctacccggtttgagtttat

SEQ ID NO: 733689 - DNA, 19 bp, Mus musculus
  siRNA target sequence for 2700023J09Rik (NM_028284.1,340-358).
cccggtttgagtttatatt

SEQ ID NO: 733690 - DNA, 19 bp, Mus musculus
  siRNA target sequence for 2700023J09Rik (NM_028284.1,374-392).
cgggagccccagacttttt

SEQ ID NO: 733691 - DNA, 19 bp, Mus musculus
  siRNA target sequence for 2700023J09Rik (NM_028284.1,498-516).
caggagcatgtgtatgata

SEQ ID NO: 733692 - DNA, 19 bp, Mus musculus
  siRNA target sequence for 2700023J09Rik (NM_028284.1,541-559).
ccagcgaccaggggaattt

SEQ ID NO: 733693 - DNA, 19 bp, Mus musculus
  siRNA target sequence for 2700023J09Rik (NM_028284.1,542-560).
cagcgaccaggggaattta

SEQ ID NO: 733694 - DNA, 19 bp, Mus musculus
  siRNA target sequence for 2700023J09Rik (NM_028284.1,545-563).
cgaccaggggaatttagga

SEQ ID NO: 733695 - DNA, 19 bp, Mus musculus
  siRNA target sequence for 2700023J09Rik (NM_028284.1,546-564).
gaccaggggaatttaggaa

SEQ ID NO: 733696 - DNA, 19 bp, Mus musculus
  siRNA target sequence for 2700023J09Rik (NM_028284.1,551-569).
ggggaatttaggaactttt

SEQ ID NO: 733697 - DNA, 19 bp, Mus musculus
  siRNA target sequence for 2700023J09Rik (NM_028284.1,591-609).
gtgtggcatgccaatatga

SEQ ID NO: 733698 - DNA, 19 bp, Mus musculus
  siRNA target sequence for 2700023J09Rik (NM_028284.1,593-611).
gtggcatgccaatatgaat

SEQ ID NO: 733699 - DNA, 19 bp, Mus musculus
  siRNA target sequence for 2700023J09Rik (NM_028284.1,595-613).
ggcatgccaatatgaatga

SEQ ID NO: 733700 - DNA, 19 bp, Mus musculus
  siRNA target sequence for 2700023J09Rik (NM_028284.1,628-646).
gcataccatatctgcaaat

SEQ ID NO: 733701 - DNA, 19 bp, Mus musculus
  siRNA target sequence for 2700023J09Rik (NM_028284.1,629-647).
cataccatatctgcaaatt

SEQ ID NO: 733702 - DNA, 19 bp, Mus musculus
  siRNA target sequence for 2700023J09Rik (NM_028284.1,633-651).
ccatatctgcaaattcgtt

SEQ ID NO: 733703 - DNA, 19 bp, Mus musculus
  siRNA target sequence for 2700023J09Rik (NM_028284.1,659-677).
gatcagagattcaaaattt

SEQ ID NO: 733704 - DNA, 19 bp, Mus musculus
  siRNA target sequence for 2700023J09Rik (NM_028284.1,662-680).
cagagattcaaaatttggt

SEQ ID NO: 733705 - DNA, 19 bp, Mus musculus
  siRNA target sequence for 2700023J09Rik (NM_028284.1,664-682).
gagattcaaaatttggttt

SEQ ID NO: 733706 - DNA, 19 bp, Mus musculus
  siRNA target sequence for 2700023J09Rik (NM_028284.1,718-736).
gatacgtccttggctttaa

SEQ ID NO: 733707 - DNA, 19 bp, Mus musculus
  siRNA target sequence for 2700023J09Rik (NM_028284.1,797-815).
ctattctgccagtccaata

SEQ ID NO: 733708 - DNA, 19 bp, Mus musculus
  siRNA target sequence for 2700023J09Rik (NM_028284.1,820-838).
gagtgaattatgaaatgga

SEQ ID NO: 733709 - DNA, 19 bp, Mus musculus
  siRNA target sequence for 2700023J09Rik (NM_028284.1,885-903).
gatgatgtggaaatagact

SEQ ID NO: 733710 - DNA, 19 bp, Mus musculus
  siRNA target sequence for 2700023J09Rik (NM_028284.1,960-978).
gatcgtgaacctgtatttt

SEQ ID NO: 733711 - DNA, 19 bp, Mus musculus
  siRNA target sequence for 2700019D07Rik (NM_028287.1,219-237).
gctttcctgcaacatatgt

SEQ ID NO: 733712 - DNA, 19 bp, Mus musculus
  siRNA target sequence for 2700019D07Rik (NM_028287.1,231-249).
catatgtggtgaaactgta

SEQ ID NO: 733713 - DNA, 19 bp, Mus musculus
  siRNA target sequence for 2700019D07Rik (NM_028287.1,272-290).
ctcacctaattgttcacat

SEQ ID NO: 733714 - DNA, 19 bp, Mus musculus
  siRNA target sequence for 2700019D07Rik (NM_028287.1,328-346).
ggtataaattacaacgaaa

SEQ ID NO: 733715 - DNA, 19 bp, Mus musculus
  siRNA target sequence for 2700019D07Rik (NM_028287.1,329-347).
gtataaattacaacgaaat

SEQ ID NO: 733716 - DNA, 19 bp, Mus musculus
  siRNA target sequence for 2700019D07Rik (NM_028287.1,339-357).
caacgaaatatgttttcat

SEQ ID NO: 733717 - DNA, 19 bp, Mus musculus
  siRNA target sequence for 2700019D07Rik (NM_028287.1,350-368).
gttttcatatcgaaactgt

SEQ ID NO: 733718 - DNA, 19 bp, Mus musculus
  siRNA target sequence for 2700019D07Rik (NM_028287.1,355-373).
catatcgaaactgttcatt

SEQ ID NO: 733719 - DNA, 19 bp, Mus musculus
  siRNA target sequence for 2700019D07Rik (NM_028287.1,360-378).
cgaaactgttcattttgaa

SEQ ID NO: 733720 - DNA, 19 bp, Mus musculus
  siRNA target sequence for 2700019D07Rik (NM_028287.1,408-426).
gctagctgcagtgcaatat

SEQ ID NO: 733721 - DNA, 19 bp, Mus musculus
  siRNA target sequence for 2700019D07Rik (NM_028287.1,472-490).
gttacttcaggcattcatt

SEQ ID NO: 733722 - DNA, 19 bp, Mus musculus
  siRNA target sequence for 2700019D07Rik (NM_028287.1,521-539).
catctgaaagccttcctaa

SEQ ID NO: 733723 - DNA, 19 bp, Mus musculus
  siRNA target sequence for 2700019D07Rik (NM_028287.1,526-544).
gaaagccttcctaaagata

SEQ ID NO: 733724 - DNA, 19 bp, Mus musculus
  siRNA target sequence for 2700019D07Rik (NM_028287.1,535-553).
cctaaagataggactgtaa

SEQ ID NO: 733725 - DNA, 19 bp, Mus musculus
  siRNA target sequence for 2700019D07Rik (NM_028287.1,536-554).
ctaaagataggactgtaaa

SEQ ID NO: 733726 - DNA, 19 bp, Mus musculus
  siRNA target sequence for 2700019D07Rik (NM_028287.1,563-581).
ctttttatacagagaacat

SEQ ID NO: 733727 - DNA, 19 bp, Mus musculus
  siRNA target sequence for 2700019D07Rik (NM_028287.1,638-656).
cccaaggatcaatttatga

SEQ ID NO: 733728 - DNA, 19 bp, Mus musculus
  siRNA target sequence for 2700019D07Rik (NM_028287.1,639-657).
ccaaggatcaatttatgaa

SEQ ID NO: 733729 - DNA, 19 bp, Mus musculus
  siRNA target sequence for 2700019D07Rik (NM_028287.1,643-661).
ggatcaatttatgaaacaa

SEQ ID NO: 733730 - DNA, 19 bp, Mus musculus
  siRNA target sequence for 2700019D07Rik (NM_028287.1,700-718).
gaggggtgtagtcaagata

SEQ ID NO: 733731 - DNA, 19 bp, Mus musculus
  siRNA target sequence for 2700019D07Rik (NM_028287.1,707-725).
gtagtcaagatatggaaat

SEQ ID NO: 733732 - DNA, 19 bp, Mus musculus
  siRNA target sequence for 2700019D07Rik (NM_028287.1,776-794).
gtcatcaaccactctatga

SEQ ID NO: 733733 - DNA, 19 bp, Mus musculus
  siRNA target sequence for 2700019D07Rik (NM_028287.1,778-796).
catcaaccactctatgact

SEQ ID NO: 733734 - DNA, 19 bp, Mus musculus
  siRNA target sequence for 2700019D07Rik (NM_028287.1,808-826).
gggcttgtctgtacaaatt

SEQ ID NO: 733735 - DNA, 19 bp, Mus musculus
  siRNA target sequence for 2700019D07Rik (NM_028287.1,818-836).
gtacaaattaccatattct

SEQ ID NO: 733736 - DNA, 19 bp, Mus musculus
  siRNA target sequence for 2700019D07Rik (NM_028287.1,889-907).
gacagagtccagtgttcta

SEQ ID NO: 733737 - DNA, 19 bp, Mus musculus
  siRNA target sequence for 2700019D07Rik (NM_028287.1,895-913).
gtccagtgttctagtgata

SEQ ID NO: 733738 - DNA, 19 bp, Mus musculus
  siRNA target sequence for 2700019D07Rik (NM_028287.1,897-915).
ccagtgttctagtgataga

SEQ ID NO: 733739 - DNA, 19 bp, Mus musculus
  siRNA target sequence for 2700019D07Rik (NM_028287.1,900-918).
gtgttctagtgatagagaa

SEQ ID NO: 733740 - DNA, 19 bp, Mus musculus
  siRNA target sequence for 2700019D07Rik (NM_028287.1,902-920).
gttctagtgatagagaatt

SEQ ID NO: 733741 - DNA, 19 bp, Mus musculus
  siRNA target sequence for 2700019D07Rik (NM_028287.1,996-1014).
gaagttgcagcggcaatat

SEQ ID NO: 733742 - DNA, 19 bp, Mus musculus
  siRNA target sequence for 2700019D07Rik (NM_028287.1,999-1017).
gttgcagcggcaatatggt

SEQ ID NO: 733743 - DNA, 19 bp, Mus musculus
  siRNA target sequence for 2700019D07Rik (NM_028287.1,1002-1020).
gcagcggcaatatggttta

SEQ ID NO: 733744 - DNA, 19 bp, Mus musculus
  siRNA target sequence for 2700019D07Rik (NM_028287.1,1005-1023).
gcggcaatatggtttagat

SEQ ID NO: 733745 - DNA, 19 bp, Mus musculus
  siRNA target sequence for 2700019D07Rik (NM_028287.1,1006-1024).
cggcaatatggtttagata

SEQ ID NO: 733746 - DNA, 19 bp, Mus musculus
  siRNA target sequence for 2700019D07Rik (NM_028287.1,1028-1046).
ctggaggatacaaacaaca

SEQ ID NO: 733747 - DNA, 19 bp, Mus musculus
  siRNA target sequence for 2700019D07Rik (NM_028287.1,1055-1073).
gacatatggagctagaagt

SEQ ID NO: 733748 - DNA, 19 bp, Mus musculus
  siRNA target sequence for 2700019D07Rik (NM_028287.1,1057-1075).
catatggagctagaagtaa

SEQ ID NO: 733749 - DNA, 19 bp, Mus musculus
  siRNA target sequence for 2700019D07Rik (NM_028287.1,1085-1103).
gaatgcatccatctgaatt

SEQ ID NO: 733750 - DNA, 19 bp, Mus musculus
  siRNA target sequence for 2700019D07Rik (NM_028287.1,1089-1107).
gcatccatctgaatttcat

SEQ ID NO: 733751 - DNA, 19 bp, Mus musculus
  siRNA target sequence for 2700019D07Rik (NM_028287.1,1090-1108).
catccatctgaatttcata

SEQ ID NO: 733752 - DNA, 19 bp, Mus musculus
  siRNA target sequence for 2700019D07Rik (NM_028287.1,1109-1127).
gcagaaaagctgacatgtt

SEQ ID NO: 733753 - DNA, 19 bp, Mus musculus
  siRNA target sequence for 2700019D07Rik (NM_028287.1,1128-1146).
ggaatcaatagctattggt

SEQ ID NO: 733754 - DNA, 19 bp, Mus musculus
  siRNA target sequence for 2700019D07Rik (NM_028287.1,1129-1147).
gaatcaatagctattggta

SEQ ID NO: 733755 - DNA, 19 bp, Mus musculus
  siRNA target sequence for 2700019D07Rik (NM_028287.1,1187-1205).
ccctccataggtattatca

SEQ ID NO: 733756 - DNA, 19 bp, Mus musculus
  siRNA target sequence for 2700019D07Rik (NM_028287.1,1189-1207).
ctccataggtattatcaga

SEQ ID NO: 733757 - DNA, 19 bp, Mus musculus
  siRNA target sequence for 2700019D07Rik (NM_028287.1,1246-1264).
gtggtggatcactttcact

SEQ ID NO: 733758 - DNA, 19 bp, Mus musculus
  siRNA target sequence for 2700019D07Rik (NM_028287.1,1282-1300).
ggttggggttgcggttata

SEQ ID NO: 733759 - DNA, 19 bp, Mus musculus
  siRNA target sequence for 2700019D07Rik (NM_028287.1,1286-1304).
ggggttgcggttatagaaa

SEQ ID NO: 733760 - DNA, 19 bp, Mus musculus
  siRNA target sequence for 2700019D07Rik (NM_028287.1,1288-1306).
ggttgcggttatagaaact

SEQ ID NO: 733761 - DNA, 19 bp, Mus musculus
  siRNA target sequence for 2700019D07Rik (NM_028287.1,1289-1307).
gttgcggttatagaaactt

SEQ ID NO: 733762 - DNA, 19 bp, Mus musculus
  siRNA target sequence for 2700019D07Rik (NM_028287.1,1305-1323).
cttccagatgctactttca

SEQ ID NO: 733763 - DNA, 19 bp, Mus musculus
  siRNA target sequence for 2700019D07Rik (NM_028287.1,1308-1326).
ccagatgctactttcatca

SEQ ID NO: 733764 - DNA, 19 bp, Mus musculus
  siRNA target sequence for 2700019D07Rik (NM_028287.1,1309-1327).
cagatgctactttcatcat

SEQ ID NO: 733765 - DNA, 19 bp, Mus musculus
  siRNA target sequence for 2700019D07Rik (NM_028287.1,1311-1329).
gatgctactttcatcatta

SEQ ID NO: 733766 - DNA, 19 bp, Mus musculus
  siRNA target sequence for 2700019D07Rik (NM_028287.1,1332-1350).
gcaaagtgatgtatatggt

SEQ ID NO: 733767 - DNA, 19 bp, Mus musculus
  siRNA target sequence for 2700019D07Rik (NM_028287.1,1349-1367).
gtgactgcttgaaaggtat

SEQ ID NO: 733768 - DNA, 19 bp, Mus musculus
  siRNA target sequence for 2700019D07Rik (NM_028287.1,1364-1382).
gtatggcagttccttgtat

SEQ ID NO: 733769 - DNA, 19 bp, Mus musculus
  siRNA target sequence for 2700019D07Rik (NM_028287.1,1368-1386).
ggcagttccttgtattcca

SEQ ID NO: 733770 - DNA, 19 bp, Mus musculus
  siRNA target sequence for 2700019D07Rik (NM_028287.1,1369-1387).
gcagttccttgtattccaa

SEQ ID NO: 733771 - DNA, 19 bp, Mus musculus
  siRNA target sequence for 2700019D07Rik (NM_028287.1,1376-1394).
cttgtattccaaaaattca

SEQ ID NO: 733772 - DNA, 19 bp, Mus musculus
  siRNA target sequence for 2700019D07Rik (NM_028287.1,1438-1456).
ggagcctctcaacttaata

SEQ ID NO: 733773 - DNA, 19 bp, Mus musculus
  siRNA target sequence for 2700019D07Rik (NM_028287.1,1439-1457).
gagcctctcaacttaataa

SEQ ID NO: 733774 - DNA, 19 bp, Mus musculus
  siRNA target sequence for 2700019D07Rik (NM_028287.1,1441-1459).
gcctctcaacttaataaca

SEQ ID NO: 733775 - DNA, 19 bp, Mus musculus
  siRNA target sequence for 2700019D07Rik (NM_028287.1,1442-1460).
cctctcaacttaataacaa

SEQ ID NO: 733776 - DNA, 19 bp, Mus musculus
  siRNA target sequence for 2700019D07Rik (NM_028287.1,1443-1461).
ctctcaacttaataacaaa

SEQ ID NO: 733777 - DNA, 19 bp, Mus musculus
  siRNA target sequence for 2700019D07Rik (NM_028287.1,1482-1500).
gattggagcgtgtgagatt

SEQ ID NO: 733778 - DNA, 19 bp, Mus musculus
  siRNA target sequence for 2700019D07Rik (NM_028287.1,1486-1504).
ggagcgtgtgagatttata

SEQ ID NO: 733779 - DNA, 19 bp, Mus musculus
  siRNA target sequence for 2700019D07Rik (NM_028287.1,1490-1508).
cgtgtgagatttatacact

SEQ ID NO: 733780 - DNA, 19 bp, Mus musculus
  siRNA target sequence for 2700019D07Rik (NM_028287.1,1491-1509).
gtgtgagatttatacactt

SEQ ID NO: 733781 - DNA, 19 bp, Mus musculus
  siRNA target sequence for 2700019D07Rik (NM_028287.1,1510-1528).
ctgacctcactgagagtaa

SEQ ID NO: 733782 - DNA, 19 bp, Mus musculus
  siRNA target sequence for 2700019D07Rik (NM_028287.1,1523-1541).
gagtaaagtgccgcattat

SEQ ID NO: 733783 - DNA, 19 bp, Mus musculus
  siRNA target sequence for 2700019D07Rik (NM_028287.1,1532-1550).
gccgcattattgattttca

SEQ ID NO: 733784 - DNA, 19 bp, Mus musculus
  siRNA target sequence for 2700019D07Rik (NM_028287.1,1534-1552).
cgcattattgattttcaca

SEQ ID NO: 733785 - DNA, 19 bp, Mus musculus
  siRNA target sequence for 2700019D07Rik (NM_028287.1,1535-1553).
gcattattgattttcacaa

SEQ ID NO: 733786 - DNA, 19 bp, Mus musculus
  siRNA target sequence for 2700019D07Rik (NM_028287.1,1571-1589).
gtacacaccctcgcttatt

SEQ ID NO: 733787 - DNA, 19 bp, Mus musculus
  siRNA target sequence for 2700019D07Rik (NM_028287.1,1580-1598).
ctcgcttatttgaatggat

SEQ ID NO: 733788 - DNA, 19 bp, Mus musculus
  siRNA target sequence for 2700019D07Rik (NM_028287.1,1591-1609).
gaatggatattgaactatt

SEQ ID NO: 733789 - DNA, 19 bp, Mus musculus
  siRNA target sequence for 2700019D07Rik (NM_028287.1,1622-1640).
cggaaggaactccaaagat

SEQ ID NO: 733790 - DNA, 19 bp, Mus musculus
  siRNA target sequence for 2700019D07Rik (NM_028287.1,1638-1656).
gatcgtgtgtacatctaaa

SEQ ID NO: 733791 - DNA, 19 bp, Mus musculus
  siRNA target sequence for 2700019D07Rik (NM_028287.1,1649-1667).
catctaaacctcctatcta

SEQ ID NO: 733792 - DNA, 19 bp, Mus musculus
  siRNA target sequence for 2700019D07Rik (NM_028287.1,1680-1698).
gggtcacagtcgaacagtt

SEQ ID NO: 733793 - DNA, 19 bp, Mus musculus
  siRNA target sequence for 2700019D07Rik (NM_028287.1,1688-1706).
gtcgaacagttgttggaat

SEQ ID NO: 733794 - DNA, 19 bp, Mus musculus
  siRNA target sequence for 2700019D07Rik (NM_028287.1,1727-1745).
cattatgcttgctagtatt

SEQ ID NO: 733795 - DNA, 19 bp, Mus musculus
  siRNA target sequence for 2700019D07Rik (NM_028287.1,1797-1815).
ggaggctagtagtcttaga

SEQ ID NO: 733796 - DNA, 19 bp, Mus musculus
  siRNA target sequence for 2700019D07Rik (NM_028287.1,1800-1818).
ggctagtagtcttagacaa

SEQ ID NO: 733797 - DNA, 19 bp, Mus musculus
  siRNA target sequence for 2700019D07Rik (NM_028287.1,1831-1849).
gtgggaaatctaaaacata

SEQ ID NO: 733798 - DNA, 19 bp, Mus musculus
  siRNA target sequence for 2700019D07Rik (NM_028287.1,1867-1885).
gcagtagagggtgttcttt

SEQ ID NO: 733799 - DNA, 19 bp, Mus musculus
  siRNA target sequence for 2700050F09Rik (NM_028291.2,357-375).
cccaacgaagattctgata

SEQ ID NO: 733800 - DNA, 19 bp, Mus musculus
  siRNA target sequence for 2700050F09Rik (NM_028291.2,358-376).
ccaacgaagattctgataa

SEQ ID NO: 733801 - DNA, 19 bp, Mus musculus
  siRNA target sequence for 2700050F09Rik (NM_028291.2,389-407).
ggttacgagtaaattgtgt

SEQ ID NO: 733802 - DNA, 19 bp, Mus musculus
  siRNA target sequence for 2700050F09Rik (NM_028291.2,390-408).
gttacgagtaaattgtgta

SEQ ID NO: 733803 - DNA, 19 bp, Mus musculus
  siRNA target sequence for 2700050F09Rik (NM_028291.2,404-422).
gtgtaggagtctttgatgt

SEQ ID NO: 733804 - DNA, 19 bp, Mus musculus
  siRNA target sequence for 2700050F09Rik (NM_028291.2,428-446).
catttgataacagtcaaaa

SEQ ID NO: 733805 - DNA, 19 bp, Mus musculus
  siRNA target sequence for 2700050F09Rik (NM_028291.2,438-456).
cagtcaaaataataatcct

SEQ ID NO: 733806 - DNA, 19 bp, Mus musculus
  siRNA target sequence for 2700050F09Rik (NM_028291.2,477-495).
ccagcaagcagatctgata

SEQ ID NO: 733807 - DNA, 19 bp, Mus musculus
  siRNA target sequence for 2700050F09Rik (NM_028291.2,478-496).
cagcaagcagatctgatat

SEQ ID NO: 733808 - DNA, 19 bp, Mus musculus
  siRNA target sequence for 2700050F09Rik (NM_028291.2,528-546).
caactctttggcaggaatt

SEQ ID NO: 733809 - DNA, 19 bp, Mus musculus
  siRNA target sequence for 2700050F09Rik (NM_028291.2,539-557).
caggaattcagcgagaaaa

SEQ ID NO: 733810 - DNA, 19 bp, Mus musculus
  siRNA target sequence for 2700050F09Rik (NM_028291.2,541-559).
ggaattcagcgagaaaatt

SEQ ID NO: 733811 - DNA, 19 bp, Mus musculus
  siRNA target sequence for 2700050F09Rik (NM_028291.2,542-560).
gaattcagcgagaaaattt

SEQ ID NO: 733812 - DNA, 19 bp, Mus musculus
  siRNA target sequence for 2700050F09Rik (NM_028291.2,569-587).
ccatggaattggtgacaat

SEQ ID NO: 733813 - DNA, 19 bp, Mus musculus
  siRNA target sequence for 2700050F09Rik (NM_028291.2,613-631).
ctcatcttgtacttgttga

SEQ ID NO: 733814 - DNA, 19 bp, Mus musculus
  siRNA target sequence for 2700050F09Rik (NM_028291.2,644-662).
ggatgcggagtgtgaatga

SEQ ID NO: 733815 - DNA, 19 bp, Mus musculus
  siRNA target sequence for 2700050F09Rik (NM_028291.2,683-701).
ctcggttttacactcaatt

SEQ ID NO: 733816 - DNA, 19 bp, Mus musculus
  siRNA target sequence for 2700050F09Rik (NM_028291.2,686-704).
ggttttacactcaattgga

SEQ ID NO: 733817 - DNA, 19 bp, Mus musculus
  siRNA target sequence for 2700050F09Rik (NM_028291.2,702-720).
ggatgctgctcaaatgaga

SEQ ID NO: 733818 - DNA, 19 bp, Mus musculus
  siRNA target sequence for 2700050F09Rik (NM_028291.2,712-730).
caaatgagaaatgatgtta

SEQ ID NO: 733819 - DNA, 19 bp, Mus musculus
  siRNA target sequence for 2700050F09Rik (NM_028291.2,742-760).
cttgctaaggaggttcaaa

SEQ ID NO: 733820 - DNA, 19 bp, Mus musculus
  siRNA target sequence for 2700050F09Rik (NM_028291.2,771-789).
gtttaggcttctagcaaaa

SEQ ID NO: 733821 - DNA, 19 bp, Mus musculus
  siRNA target sequence for 2700050F09Rik (NM_028291.2,784-802).
gcaaaattgggaacaatca

SEQ ID NO: 733822 - DNA, 19 bp, Mus musculus
  siRNA target sequence for 2700050F09Rik (NM_028291.2,805-823).
gagaggccggagtttcaga

SEQ ID NO: 733823 - DNA, 19 bp, Mus musculus
  siRNA target sequence for 2700050F09Rik (NM_028291.2,864-882).
gaaactctttagagatcat

SEQ ID NO: 733824 - DNA, 19 bp, Mus musculus
  siRNA target sequence for 2700050F09Rik (NM_028291.2,1009-1027).
gtgctggtggtgacataca

SEQ ID NO: 733825 - DNA, 19 bp, Mus musculus
  siRNA target sequence for 2700050F09Rik (NM_028291.2,1020-1038).
gacatacagtgacctaaaa

SEQ ID NO: 733826 - DNA, 19 bp, Mus musculus
  siRNA target sequence for 2700050F09Rik (NM_028291.2,1032-1050).
cctaaaacgctgctttgaa

SEQ ID NO: 733827 - DNA, 19 bp, Mus musculus
  siRNA target sequence for 2700050F09Rik (NM_028291.2,1039-1057).
cgctgctttgaaaatacct

SEQ ID NO: 733828 - DNA, 19 bp, Mus musculus
  siRNA target sequence for 2700050F09Rik (NM_028291.2,1068-1086).
gattgcggctgcaaatggt

SEQ ID NO: 733829 - DNA, 19 bp, Mus musculus
  siRNA target sequence for 2700050F09Rik (NM_028291.2,1074-1092).
ggctgcaaatggtaacgat

SEQ ID NO: 733830 - DNA, 19 bp, Mus musculus
  siRNA target sequence for 2700050F09Rik (NM_028291.2,1084-1102).
ggtaacgatcggaacagta

SEQ ID NO: 733831 - DNA, 19 bp, Mus musculus
  siRNA target sequence for 2700050F09Rik (NM_028291.2,1085-1103).
gtaacgatcggaacagtaa

SEQ ID NO: 733832 - DNA, 19 bp, Mus musculus
  siRNA target sequence for 2700038I16Rik (NM_028298.2,228-246).
cagtgggggatttccaatt

SEQ ID NO: 733833 - DNA, 19 bp, Mus musculus
  siRNA target sequence for 2700038I16Rik (NM_028298.2,232-250).
gggggatttccaatttcga

SEQ ID NO: 733834 - DNA, 19 bp, Mus musculus
  siRNA target sequence for 2700038I16Rik (NM_028298.2,272-290).
gggagcaagatctacaagt

SEQ ID NO: 733835 - DNA, 19 bp, Mus musculus
  siRNA target sequence for 2700038I16Rik (NM_028298.2,276-294).
gcaagatctacaagtcttt

SEQ ID NO: 733836 - DNA, 19 bp, Mus musculus
  siRNA target sequence for 2700038I16Rik (NM_028298.2,411-429).
caaagtgagagtaggaaaa

SEQ ID NO: 733837 - DNA, 19 bp, Mus musculus
  siRNA target sequence for 2700038I16Rik (NM_028298.2,417-435).
gagagtaggaaaattcaaa

SEQ ID NO: 733838 - DNA, 19 bp, Mus musculus
  siRNA target sequence for 2700038I16Rik (NM_028298.2,531-549).
ggagagagagtttagacaa

SEQ ID NO: 733839 - DNA, 19 bp, Mus musculus
  siRNA target sequence for 2700038I16Rik (NM_028298.2,613-631).
ctagactccacacttgata

SEQ ID NO: 733840 - DNA, 19 bp, Mus musculus
  siRNA target sequence for 2700038I16Rik (NM_028298.2,634-652).
gatcagagagttcttagaa

SEQ ID NO: 733841 - DNA, 19 bp, Mus musculus
  siRNA target sequence for 2700038I16Rik (NM_028298.2,657-675).
gaccactgatgacagtaaa

SEQ ID NO: 733842 - DNA, 19 bp, Mus musculus
  siRNA target sequence for 2700038I16Rik (NM_028298.2,659-677).
ccactgatgacagtaaata

SEQ ID NO: 733843 - DNA, 19 bp, Mus musculus
  siRNA target sequence for 2700038I16Rik (NM_028298.2,660-678).
cactgatgacagtaaatat

SEQ ID NO: 733844 - DNA, 19 bp, Mus musculus
  siRNA target sequence for 2700038I16Rik (NM_028298.2,664-682).
gatgacagtaaatatgaca

SEQ ID NO: 733845 - DNA, 19 bp, Mus musculus
  siRNA target sequence for 2700038I16Rik (NM_028298.2,671-689).
gtaaatatgacatgaactt

SEQ ID NO: 733846 - DNA, 19 bp, Mus musculus
  siRNA target sequence for 2700038I16Rik (NM_028298.2,730-748).
ctaacagagaattttcaga

SEQ ID NO: 733847 - DNA, 19 bp, Mus musculus
  siRNA target sequence for 2700038I16Rik (NM_028298.2,747-765).
gagtactgactataaggaa

SEQ ID NO: 733848 - DNA, 19 bp, Mus musculus
  siRNA target sequence for 2700038I16Rik (NM_028298.2,774-792).
ggatctgtcccaccttaat

SEQ ID NO: 733849 - DNA, 19 bp, Mus musculus
  siRNA target sequence for 2700038I16Rik (NM_028298.2,775-793).
gatctgtcccaccttaata

SEQ ID NO: 733850 - DNA, 19 bp, Mus musculus
  siRNA target sequence for 2700038I16Rik (NM_028298.2,812-830).
ccaccgacagatcctataa

SEQ ID NO: 733851 - DNA, 19 bp, Mus musculus
  siRNA target sequence for 2700038I16Rik (NM_028298.2,813-831).
caccgacagatcctataaa

SEQ ID NO: 733852 - DNA, 19 bp, Mus musculus
  siRNA target sequence for 2700038I16Rik (NM_028298.2,955-973).
cttagtcgacacaaaagaa

SEQ ID NO: 733853 - DNA, 19 bp, Mus musculus
  siRNA target sequence for 2700038I16Rik (NM_028298.2,1106-1124).
gtggaacctgtgaaagagt

SEQ ID NO: 733854 - DNA, 19 bp, Mus musculus
  siRNA target sequence for 2700038I16Rik (NM_028298.2,1131-1149).
ccgaagtgtgcatcttact

SEQ ID NO: 733855 - DNA, 19 bp, Mus musculus
  siRNA target sequence for 2700038I16Rik (NM_028298.2,1209-1227).
ctgccacacctcatactta

SEQ ID NO: 733856 - DNA, 19 bp, Mus musculus
  siRNA target sequence for 2700038I16Rik (NM_028298.2,1211-1229).
gccacacctcatacttagt

SEQ ID NO: 733857 - DNA, 19 bp, Mus musculus
  siRNA target sequence for 2700038I16Rik (NM_028298.2,1212-1230).
ccacacctcatacttagtt

SEQ ID NO: 733858 - DNA, 19 bp, Mus musculus
  siRNA target sequence for 2700038I16Rik (NM_028298.2,1215-1233).
cacctcatacttagttgaa

SEQ ID NO: 733859 - DNA, 19 bp, Mus musculus
  siRNA target sequence for 2700038I16Rik (NM_028298.2,1217-1235).
cctcatacttagttgaaca

SEQ ID NO: 733860 - DNA, 19 bp, Mus musculus
  siRNA target sequence for 2700038I16Rik (NM_028298.2,1218-1236).
ctcatacttagttgaacat

SEQ ID NO: 733861 - DNA, 19 bp, Mus musculus
  siRNA target sequence for 2700038I16Rik (NM_028298.2,1220-1238).
catacttagttgaacatca

SEQ ID NO: 733862 - DNA, 19 bp, Mus musculus
  siRNA target sequence for 2700038I16Rik (NM_028298.2,1241-1259).
gactacatcatcaagagaa

SEQ ID NO: 733863 - DNA, 19 bp, Mus musculus
  siRNA target sequence for 2700038I16Rik (NM_028298.2,1280-1298).
gtgggctggcctatgttaa

SEQ ID NO: 733864 - DNA, 19 bp, Mus musculus
  siRNA target sequence for 2700038I16Rik (NM_028298.2,1283-1301).
ggctggcctatgttaaaca

SEQ ID NO: 733865 - DNA, 19 bp, Mus musculus
  siRNA target sequence for 2700038I16Rik (NM_028298.2,1287-1305).
ggcctatgttaaacaacaa

SEQ ID NO: 733866 - DNA, 19 bp, Mus musculus
  siRNA target sequence for 2700038I16Rik (NM_028298.2,1306-1324).
ggaattcgtttccaagaaa

SEQ ID NO: 733867 - DNA, 19 bp, Mus musculus
  siRNA target sequence for 2700038I16Rik (NM_028298.2,1318-1336).
caagaaaagccctactcat

SEQ ID NO: 733868 - DNA, 19 bp, Mus musculus
  siRNA target sequence for 2700038I16Rik (NM_028298.2,1348-1366).
gggaaagactttagattga

SEQ ID NO: 733869 - DNA, 19 bp, Mus musculus
  siRNA target sequence for 2700038I16Rik (NM_028298.2,1349-1367).
ggaaagactttagattgaa

SEQ ID NO: 733870 - DNA, 19 bp, Mus musculus
  siRNA target sequence for 2700038I16Rik (NM_028298.2,1350-1368).
gaaagactttagattgaat

SEQ ID NO: 733871 - DNA, 19 bp, Mus musculus
  siRNA target sequence for 2700038I16Rik (NM_028298.2,1361-1379).
gattgaattcccatcttat

SEQ ID NO: 733872 - DNA, 19 bp, Mus musculus
  siRNA target sequence for 2700038I16Rik (NM_028298.2,1485-1503).
gaaagagaaatcatacgaa

SEQ ID NO: 733873 - DNA, 19 bp, Mus musculus
  siRNA target sequence for 2700038I16Rik (NM_028298.2,1496-1514).
catacgaatacaacaatta

SEQ ID NO: 733874 - DNA, 19 bp, Mus musculus
  siRNA target sequence for 2700038I16Rik (NM_028298.2,1678-1696).
gaacttggggagacattta

SEQ ID NO: 733875 - DNA, 19 bp, Mus musculus
  siRNA target sequence for 2700038I16Rik (NM_028298.2,1686-1704).
ggagacatttagtcaagtt

SEQ ID NO: 733876 - DNA, 19 bp, Mus musculus
  siRNA target sequence for 2700038I16Rik (NM_028298.2,1699-1717).
caagttcaggcctcattca

SEQ ID NO: 733877 - DNA, 19 bp, Mus musculus
  siRNA target sequence for 2700038I16Rik (NM_028298.2,1702-1720).
gttcaggcctcattcaata

SEQ ID NO: 733878 - DNA, 19 bp, Mus musculus
  siRNA target sequence for 2700038I16Rik (NM_028298.2,1705-1723).
caggcctcattcaatatgt

SEQ ID NO: 733879 - DNA, 19 bp, Mus musculus
  siRNA target sequence for 2700059L22Rik (NM_028300.1,314-332).
ggtcttcttacccacattt

SEQ ID NO: 733880 - DNA, 19 bp, Mus musculus
  siRNA target sequence for 2700059L22Rik (NM_028300.1,342-360).
ggaatatgctcgatgattt

SEQ ID NO: 733881 - DNA, 19 bp, Mus musculus
  siRNA target sequence for 2700059L22Rik (NM_028300.1,379-397).
gcgctaccggaacttcatt

SEQ ID NO: 733882 - DNA, 19 bp, Mus musculus
  siRNA target sequence for 2700059L22Rik (NM_028300.1,460-478).
gaccaagatcctaaaacca

SEQ ID NO: 733883 - DNA, 19 bp, Mus musculus
  siRNA target sequence for 2700059L22Rik (NM_028300.1,482-500).
gaaaaagtactttttatca

SEQ ID NO: 733884 - DNA, 19 bp, Mus musculus
  siRNA target sequence for 2700059L22Rik (NM_028300.1,546-564).
gtcctgtgcctgtaagtgt

SEQ ID NO: 733885 - DNA, 19 bp, Mus musculus
  siRNA target sequence for 2700059L22Rik (NM_028300.1,585-603).
ctgaggcatcagatgctta

SEQ ID NO: 733886 - DNA, 19 bp, Mus musculus
  siRNA target sequence for 2700059L22Rik (NM_028300.1,591-609).
catcagatgcttataccat

SEQ ID NO: 733887 - DNA, 19 bp, Mus musculus
  siRNA target sequence for 2700059L22Rik (NM_028300.1,662-680).
gggatcaaagatcagttaa

SEQ ID NO: 733888 - DNA, 19 bp, Mus musculus
  siRNA target sequence for 2700059L22Rik (NM_028300.1,663-681).
ggatcaaagatcagttaat

SEQ ID NO: 733889 - DNA, 19 bp, Mus musculus
  siRNA target sequence for 2700059L22Rik (NM_028300.1,725-743).
cttgcacattcctaccatt

SEQ ID NO: 733890 - DNA, 19 bp, Mus musculus
  siRNA target sequence for 2700059L22Rik (NM_028300.1,735-753).
cctaccatttaactagttt

SEQ ID NO: 733891 - DNA, 19 bp, Mus musculus
  siRNA target sequence for 2700059L22Rik (NM_028300.1,736-754).
ctaccatttaactagtttt

SEQ ID NO: 733892 - DNA, 19 bp, Mus musculus
  siRNA target sequence for 2700059L22Rik (NM_028300.1,807-825).
ctgacttcccagacctaaa

SEQ ID NO: 733893 - DNA, 19 bp, Mus musculus
  siRNA target sequence for 2700059L22Rik (NM_028300.1,828-846).
cgatgacgagaacagaaaa

SEQ ID NO: 733894 - DNA, 19 bp, Mus musculus
  siRNA target sequence for 2700059L22Rik (NM_028300.1,832-850).
gacgagaacagaaaatact

SEQ ID NO: 733895 - DNA, 19 bp, Mus musculus
  siRNA target sequence for 2700059L22Rik (NM_028300.1,870-888).
gcactgtgagtgaacctaa

SEQ ID NO: 733896 - DNA, 19 bp, Mus musculus
  siRNA target sequence for 2700059L22Rik (NM_028300.1,873-891).
ctgtgagtgaacctaatca

SEQ ID NO: 733897 - DNA, 19 bp, Mus musculus
  siRNA target sequence for 2700059L22Rik (NM_028300.1,896-914).
cctgaggtgctattgacaa

SEQ ID NO: 733898 - DNA, 19 bp, Mus musculus
  siRNA target sequence for 2700059L22Rik (NM_028300.1,897-915).
ctgaggtgctattgacaaa

SEQ ID NO: 733899 - DNA, 19 bp, Mus musculus
  siRNA target sequence for 2700059L22Rik (NM_028300.1,993-1011).
ctgcgtacgaattaaaggt

SEQ ID NO: 733900 - DNA, 19 bp, Mus musculus
  siRNA target sequence for 2700059L22Rik (NM_028300.1,1027-1045).
cgagaaacctctgaaaatt

SEQ ID NO: 733901 - DNA, 19 bp, Mus musculus
  siRNA target sequence for 2700059L22Rik (NM_028300.1,1058-1076).
gagttacccgggattaagt

SEQ ID NO: 733902 - DNA, 19 bp, Mus musculus
  siRNA target sequence for 2700059L22Rik (NM_028300.1,1060-1078).
gttacccgggattaagtca

SEQ ID NO: 733903 - DNA, 19 bp, Mus musculus
  siRNA target sequence for 2700059L22Rik (NM_028300.1,1089-1107).
gtgaacttagtgtttctga

SEQ ID NO: 733904 - DNA, 19 bp, Mus musculus
  siRNA target sequence for 2700059L22Rik (NM_028300.1,1098-1116).
gtgtttctgaggttgatat

SEQ ID NO: 733905 - DNA, 19 bp, Mus musculus
  siRNA target sequence for 2700059L22Rik (NM_028300.1,1100-1118).
gtttctgaggttgatatat

SEQ ID NO: 733906 - DNA, 19 bp, Mus musculus
  siRNA target sequence for 2700059L22Rik (NM_028300.1,1104-1122).
ctgaggttgatatattgat

SEQ ID NO: 733907 - DNA, 19 bp, Mus musculus
  siRNA target sequence for 2700059L22Rik (NM_028300.1,1141-1159).
ccgattatgcctgaatctt

SEQ ID NO: 733908 - DNA, 19 bp, Mus musculus
  siRNA target sequence for 2700059L22Rik (NM_028300.1,1157-1175).
cttccagaatcgattaata

SEQ ID NO: 733909 - DNA, 19 bp, Mus musculus
  siRNA target sequence for 2700059L22Rik (NM_028300.1,1161-1179).
cagaatcgattaatacaga

SEQ ID NO: 733910 - DNA, 19 bp, Mus musculus
  siRNA target sequence for 2700059L22Rik (NM_028300.1,1163-1181).
gaatcgattaatacagaaa

SEQ ID NO: 733911 - DNA, 19 bp, Mus musculus
  siRNA target sequence for 2700059L22Rik (NM_028300.1,1178-1196).
gaaatgactacagcaaaat

SEQ ID NO: 733912 - DNA, 19 bp, Mus musculus
  siRNA target sequence for 2700059L22Rik (NM_028300.1,1190-1208).
gcaaaatttgtcaaaaata

SEQ ID NO: 733913 - DNA, 19 bp, Mus musculus
  siRNA target sequence for 2700059L22Rik (NM_028300.1,1212-1230).
ctgcattaatcattacaat

SEQ ID NO: 733914 - DNA, 19 bp, Mus musculus
  siRNA target sequence for 2700067D09Rik (NM_028301.1,238-256).
cggggagagttagatttga

SEQ ID NO: 733915 - DNA, 19 bp, Mus musculus
  siRNA target sequence for 2700067D09Rik (NM_028301.1,240-258).
gggagagttagatttgaat

SEQ ID NO: 733916 - DNA, 19 bp, Mus musculus
  siRNA target sequence for 2700067D09Rik (NM_028301.1,241-259).
ggagagttagatttgaata

SEQ ID NO: 733917 - DNA, 19 bp, Mus musculus
  siRNA target sequence for 2700067D09Rik (NM_028301.1,242-260).
gagagttagatttgaataa

SEQ ID NO: 733918 - DNA, 19 bp, Mus musculus
  siRNA target sequence for 2700067D09Rik (NM_028301.1,288-306).
gatgtatgcctcctacatt

SEQ ID NO: 733919 - DNA, 19 bp, Mus musculus
  siRNA target sequence for 2700067D09Rik (NM_028301.1,303-321).
cattggacacgataccatt

SEQ ID NO: 733920 - DNA, 19 bp, Mus musculus
  siRNA target sequence for 2700067D09Rik (NM_028301.1,308-326).
gacacgataccattgttca

SEQ ID NO: 733921 - DNA, 19 bp, Mus musculus
  siRNA target sequence for 2700067D09Rik (NM_028301.1,341-359).
caggcgtgagtgtgaatgt

SEQ ID NO: 733922 - DNA, 19 bp, Mus musculus
  siRNA target sequence for 2700067D09Rik (NM_028301.1,402-420).
ctgtggcaacgaaagcatt

SEQ ID NO: 733923 - DNA, 19 bp, Mus musculus
  siRNA target sequence for 2700067D09Rik (NM_028301.1,411-429).
cgaaagcattgcctacttt

SEQ ID NO: 733924 - DNA, 19 bp, Mus musculus
  siRNA target sequence for 2700067D09Rik (NM_028301.1,448-466).
gagcttgagatgaaagaca

SEQ ID NO: 733925 - DNA, 19 bp, Mus musculus
  siRNA target sequence for 2700067D09Rik (NM_028301.1,508-526).
caccaacagatggtcaaat

SEQ ID NO: 733926 - DNA, 19 bp, Mus musculus
  siRNA target sequence for 2700067D09Rik (NM_028301.1,555-573).
cgtgagggagcctgtatat

SEQ ID NO: 733927 - DNA, 19 bp, Mus musculus
  siRNA target sequence for 2700067D09Rik (NM_028301.1,558-576).
gagggagcctgtatatgga

SEQ ID NO: 733928 - DNA, 19 bp, Mus musculus
  siRNA target sequence for 2700067D09Rik (NM_028301.1,560-578).
gggagcctgtatatggata

SEQ ID NO: 733929 - DNA, 19 bp, Mus musculus
  siRNA target sequence for 2700067D09Rik (NM_028301.1,564-582).
gcctgtatatggatacact

SEQ ID NO: 733930 - DNA, 19 bp, Mus musculus
  siRNA target sequence for 2700067D09Rik (NM_028301.1,601-619).
gcctctggccatgagataa

SEQ ID NO: 733931 - DNA, 19 bp, Mus musculus
  siRNA target sequence for 2700067D09Rik (NM_028301.1,613-631).
gagataattgtgcagtatt

SEQ ID NO: 733932 - DNA, 19 bp, Mus musculus
  siRNA target sequence for 2700067D09Rik (NM_028301.1,702-720).
gtttggtcacatgaagatt

SEQ ID NO: 733933 - DNA, 19 bp, Mus musculus
  siRNA target sequence for 2700067D09Rik (NM_028301.1,768-786).
ccgtagcccagaaaaatat

SEQ ID NO: 733934 - DNA, 19 bp, Mus musculus
  siRNA target sequence for 2700067D09Rik (NM_028301.1,832-850).
cagaggccctgccgaaaaa

SEQ ID NO: 733935 - DNA, 19 bp, Mus musculus
  siRNA target sequence for 2700067D09Rik (NM_028301.1,845-863).
gaaaaaagggcctcagtat

SEQ ID NO: 733936 - DNA, 19 bp, Mus musculus
  siRNA target sequence for 2700067D09Rik (NM_028301.1,885-903).
ggccaagatcacagctatt

SEQ ID NO: 733937 - DNA, 19 bp, Mus musculus
  siRNA target sequence for 2700067D09Rik (NM_028301.1,888-906).
caagatcacagctattgga

SEQ ID NO: 733938 - DNA, 19 bp, Mus musculus
  siRNA target sequence for 2700067D09Rik (NM_028301.1,976-994).
gatgagaataccatggaaa

SEQ ID NO: 733939 - DNA, 19 bp, Mus musculus
  siRNA target sequence for 2700067D09Rik (NM_028301.1,1017-1035).
cgtcacttcccccatcaat

SEQ ID NO: 733940 - DNA, 19 bp, Mus musculus
  siRNA target sequence for 2700067D09Rik (NM_028301.1,1020-1038).
cacttcccccatcaatgaa

SEQ ID NO: 733941 - DNA, 19 bp, Mus musculus
  siRNA target sequence for 2700067D09Rik (NM_028301.1,1069-1087).
cgggaggaacccactttct

SEQ ID NO: 733942 - DNA, 19 bp, Mus musculus
  siRNA target sequence for 2700067D09Rik (NM_028301.1,1071-1089).
ggaggaacccactttctgt

SEQ ID NO: 733943 - DNA, 19 bp, Mus musculus
  siRNA target sequence for 2700067D09Rik (NM_028301.1,1176-1194).
caatgaggattctgatcat

SEQ ID NO: 733944 - DNA, 19 bp, Mus musculus
  siRNA target sequence for 2700067D09Rik (NM_028301.1,1189-1207).
gatcatgcccggaaaagct

SEQ ID NO: 733945 - DNA, 19 bp, Mus musculus
  siRNA target sequence for 2700067D09Rik (NM_028301.1,1226-1244).
ggagttatttgaagaataa

SEQ ID NO: 733946 - DNA, 19 bp, Mus musculus
  siRNA target sequence for 2700067D09Rik (NM_028301.1,1284-1302).
cacagggcctgcttccatt

SEQ ID NO: 733947 - DNA, 19 bp, Mus musculus
  siRNA target sequence for 2700067D09Rik (NM_028301.1,1307-1325).
ggtctgaaccccaaactga

SEQ ID NO: 733948 - DNA, 19 bp, Mus musculus
  siRNA target sequence for 2700067D09Rik (NM_028301.1,1416-1434).
catagacctgcgtatcttt

SEQ ID NO: 733949 - DNA, 19 bp, Mus musculus
  siRNA target sequence for 2700067D09Rik (NM_028301.1,1420-1438).
gacctgcgtatctttctga

SEQ ID NO: 733950 - DNA, 19 bp, Mus musculus
  siRNA target sequence for 2700067D09Rik (NM_028301.1,1441-1459).
ctcactgaaagcgatttga

SEQ ID NO: 733951 - DNA, 19 bp, Mus musculus
  siRNA target sequence for 2700067D09Rik (NM_028301.1,1591-1609).
caggagcttgccattcagt

SEQ ID NO: 733952 - DNA, 19 bp, Mus musculus
  siRNA target sequence for 2700067D09Rik (NM_028301.1,1600-1618).
gccattcagttgcataaat

SEQ ID NO: 733953 - DNA, 19 bp, Mus musculus
  siRNA target sequence for 2700067D09Rik (NM_028301.1,1665-1683).
ggaattgcgggctgtagta

SEQ ID NO: 733954 - DNA, 19 bp, Mus musculus
  siRNA target sequence for 2700067D09Rik (NM_028301.1,1963-1981).
caggcgttatgctctgtaa

SEQ ID NO: 733955 - DNA, 19 bp, Mus musculus
  siRNA target sequence for 2700067D09Rik (NM_028301.1,1965-1983).
ggcgttatgctctgtaaca

SEQ ID NO: 733956 - DNA, 19 bp, Mus musculus
  siRNA target sequence for AI256456 (NM_028308.1,41-59).
ggctcatggggaagtctaa

SEQ ID NO: 733957 - DNA, 19 bp, Mus musculus
  siRNA target sequence for AI256456 (NM_028308.1,112-130).
gagccggagcacaccaaat

SEQ ID NO: 733958 - DNA, 19 bp, Mus musculus
  siRNA target sequence for AI256456 (NM_028308.1,115-133).
ccggagcacaccaaatcca

SEQ ID NO: 733959 - DNA, 19 bp, Mus musculus
  siRNA target sequence for AI256456 (NM_028308.1,134-152).
ggatcactgactttgaatt

SEQ ID NO: 733960 - DNA, 19 bp, Mus musculus
  siRNA target sequence for AI256456 (NM_028308.1,229-247).
cacatcaacctgcagtata

SEQ ID NO: 733961 - DNA, 19 bp, Mus musculus
  siRNA target sequence for AI256456 (NM_028308.1,238-256).
ctgcagtatagcacaatct

SEQ ID NO: 733962 - DNA, 19 bp, Mus musculus
  siRNA target sequence for AI256456 (NM_028308.1,240-258).
gcagtatagcacaatctca

SEQ ID NO: 733963 - DNA, 19 bp, Mus musculus
  siRNA target sequence for AI256456 (NM_028308.1,292-310).
gctgtgtgcaacacacaat

SEQ ID NO: 733964 - DNA, 19 bp, Mus musculus
  siRNA target sequence for AI256456 (NM_028308.1,295-313).
gtgtgcaacacacaatact

SEQ ID NO: 733965 - DNA, 19 bp, Mus musculus
  siRNA target sequence for AI256456 (NM_028308.1,358-376).
cagtatgttgactttgtca

SEQ ID NO: 733966 - DNA, 19 bp, Mus musculus
  siRNA target sequence for AI256456 (NM_028308.1,387-405).
gcagaagctggtaactgat

SEQ ID NO: 733967 - DNA, 19 bp, Mus musculus
  siRNA target sequence for AI256456 (NM_028308.1,409-427).
gatgtgttccccacaaaat

SEQ ID NO: 733968 - DNA, 19 bp, Mus musculus
  siRNA target sequence for AI256456 (NM_028308.1,471-489).
gatctgcaagtatctgttt

SEQ ID NO: 733969 - DNA, 19 bp, Mus musculus
  siRNA target sequence for AI256456 (NM_028308.1,563-581).
cactgtacgtgcatttcat

SEQ ID NO: 733970 - DNA, 19 bp, Mus musculus
  siRNA target sequence for 2810006K23Rik (NM_028310.1,342-360).
gtgagctcgaagaacagtt

SEQ ID NO: 733971 - DNA, 19 bp, Mus musculus
  siRNA target sequence for 2810006K23Rik (NM_028310.1,397-415).
caagaccagcaattgtgta

SEQ ID NO: 733972 - DNA, 19 bp, Mus musculus
  siRNA target sequence for 2700097O09Rik (NM_028314.1,120-138).
gaggactacccgggatttt

SEQ ID NO: 733973 - DNA, 19 bp, Mus musculus
  siRNA target sequence for 2700097O09Rik (NM_028314.1,122-140).
ggactacccgggattttga

SEQ ID NO: 733974 - DNA, 19 bp, Mus musculus
  siRNA target sequence for 2700097O09Rik (NM_028314.1,123-141).
gactacccgggattttgat

SEQ ID NO: 733975 - DNA, 19 bp, Mus musculus
  siRNA target sequence for 2700097O09Rik (NM_028314.1,142-160).
gaatttactcacgataata

SEQ ID NO: 733976 - DNA, 19 bp, Mus musculus
  siRNA target sequence for 2700097O09Rik (NM_028314.1,149-167).
ctcacgataataatgacat

SEQ ID NO: 733977 - DNA, 19 bp, Mus musculus
  siRNA target sequence for 2700097O09Rik (NM_028314.1,307-325).
gactttattgatacattat

SEQ ID NO: 733978 - DNA, 19 bp, Mus musculus
  siRNA target sequence for 2700097O09Rik (NM_028314.1,380-398).
cagcgcctttgggatttat

SEQ ID NO: 733979 - DNA, 19 bp, Mus musculus
  siRNA target sequence for 2700097O09Rik (NM_028314.1,382-400).
gcgcctttgggatttattt

SEQ ID NO: 733980 - DNA, 19 bp, Mus musculus
  siRNA target sequence for 2700097O09Rik (NM_028314.1,413-431).
ccctcacggagttgaagtt

SEQ ID NO: 733981 - DNA, 19 bp, Mus musculus
  siRNA target sequence for 2700097O09Rik (NM_028314.1,419-437).
cggagttgaagttcattta

SEQ ID NO: 733982 - DNA, 19 bp, Mus musculus
  siRNA target sequence for 2700097O09Rik (NM_028314.1,491-509).
gacttggcacagtccttta

SEQ ID NO: 733983 - DNA, 19 bp, Mus musculus
  siRNA target sequence for 2700097O09Rik (NM_028314.1,553-571).
gagctgaatggacaatttt

SEQ ID NO: 733984 - DNA, 19 bp, Mus musculus
  siRNA target sequence for 2700097O09Rik (NM_028314.1,574-592).
cagttgcaggaaatgatca

SEQ ID NO: 733985 - DNA, 19 bp, Mus musculus
  siRNA target sequence for 2700097O09Rik (NM_028314.1,576-594).
gttgcaggaaatgatcata

SEQ ID NO: 733986 - DNA, 19 bp, Mus musculus
  siRNA target sequence for 2700097O09Rik (NM_028314.1,603-621).
ccagttcggtgacagaata

SEQ ID NO: 733987 - DNA, 19 bp, Mus musculus
  siRNA target sequence for 2700097O09Rik (NM_028314.1,668-686).
ctgctgatgtcattgtaat

SEQ ID NO: 733988 - DNA, 19 bp, Mus musculus
  siRNA target sequence for 2700097O09Rik (NM_028314.1,670-688).
gctgatgtcattgtaatga

SEQ ID NO: 733989 - DNA, 19 bp, Mus musculus
  siRNA target sequence for 2700097O09Rik (NM_028314.1,694-712).
gtcttcgaatattttctta

SEQ ID NO: 733990 - DNA, 19 bp, Mus musculus
  siRNA target sequence for 2700097O09Rik (NM_028314.1,741-759).
ctacatcatccataatgta

SEQ ID NO: 733991 - DNA, 19 bp, Mus musculus
  siRNA target sequence for 2700097O09Rik (NM_028314.1,744-762).
catcatccataatgtaaga

SEQ ID NO: 733992 - DNA, 19 bp, Mus musculus
  siRNA target sequence for 2700097O09Rik (NM_028314.1,766-784).
caaggatcactattagtga

SEQ ID NO: 733993 - DNA, 19 bp, Mus musculus
  siRNA target sequence for 2700097O09Rik (NM_028314.1,806-824).
ctctcatggggctacagat

SEQ ID NO: 733994 - DNA, 19 bp, Mus musculus
  siRNA target sequence for 2700097O09Rik (NM_028314.1,808-826).
ctcatggggctacagatta

SEQ ID NO: 733995 - DNA, 19 bp, Mus musculus
  siRNA target sequence for 2700097O09Rik (NM_028314.1,810-828).
catggggctacagattaat

SEQ ID NO: 733996 - DNA, 19 bp, Mus musculus
  siRNA target sequence for 2700097O09Rik (NM_028314.1,840-858).
ctcctgggtggaagagatt

SEQ ID NO: 733997 - DNA, 19 bp, Mus musculus
  siRNA target sequence for 2810028N01Rik (NM_028315.1,396-414).
gggatgtgaccaataacca

SEQ ID NO: 733998 - DNA, 19 bp, Mus musculus
  siRNA target sequence for 2810028N01Rik (NM_028315.1,416-434).
gaaaagcatttctatacct

SEQ ID NO: 733999 - DNA, 19 bp, Mus musculus
  siRNA target sequence for 2810028N01Rik (NM_028315.1,438-456).
ctaatgagcaccataaaga

SEQ ID NO: 734000 - DNA, 19 bp, Mus musculus
  siRNA target sequence for 2810028N01Rik (NM_028315.1,563-581).
gacagtcagctgcaagtta

SEQ ID NO: 734001 - DNA, 19 bp, Mus musculus
  siRNA target sequence for 2810028N01Rik (NM_028315.1,567-585).
gtcagctgcaagttatcct

SEQ ID NO: 734002 - DNA, 19 bp, Mus musculus
  siRNA target sequence for 2810028N01Rik (NM_028315.1,575-593).
caagttatcctgataacca

SEQ ID NO: 734003 - DNA, 19 bp, Mus musculus
  siRNA target sequence for 2810028N01Rik (NM_028315.1,639-657).
ccttcacgtgtgaagaata

SEQ ID NO: 734004 - DNA, 19 bp, Mus musculus
  siRNA target sequence for 2810028N01Rik (NM_028315.1,643-661).
cacgtgtgaagaatacgta

SEQ ID NO: 734005 - DNA, 19 bp, Mus musculus
  siRNA target sequence for 2810028N01Rik (NM_028315.1,670-688).
gactgctaaccctgaactt

SEQ ID NO: 734006 - DNA, 19 bp, Mus musculus
  siRNA target sequence for 2810028N01Rik (NM_028315.1,672-690).
ctgctaaccctgaacttat

SEQ ID NO: 734007 - DNA, 19 bp, Mus musculus
  siRNA target sequence for 2810028N01Rik (NM_028315.1,701-719).
gcttacttgtccgatgaaa

SEQ ID NO: 734008 - DNA, 19 bp, Mus musculus
  siRNA target sequence for 2810028N01Rik (NM_028315.1,702-720).
cttacttgtccgatgaaat

SEQ ID NO: 734009 - DNA, 19 bp, Mus musculus
  siRNA target sequence for 2810028N01Rik (NM_028315.1,706-724).
cttgtccgatgaaatgaat

SEQ ID NO: 734010 - DNA, 19 bp, Mus musculus
  siRNA target sequence for 2810028N01Rik (NM_028315.1,709-727).
gtccgatgaaatgaatgaa

SEQ ID NO: 734011 - DNA, 19 bp, Mus musculus
  siRNA target sequence for 2810028N01Rik (NM_028315.1,711-729).
ccgatgaaatgaatgaaat

SEQ ID NO: 734012 - DNA, 19 bp, Mus musculus
  siRNA target sequence for 2810028N01Rik (NM_028315.1,731-749).
gaaagtgggaaaataatat

SEQ ID NO: 734013 - DNA, 19 bp, Mus musculus
  siRNA target sequence for 2810028N01Rik (NM_028315.1,755-773).
gagcatcttcccttaagca

SEQ ID NO: 734014 - DNA, 19 bp, Mus musculus
  siRNA target sequence for 2810028N01Rik (NM_028315.1,824-842).
gctagcagggaaaattatt

SEQ ID NO: 734015 - DNA, 19 bp, Mus musculus
  siRNA target sequence for 2810028N01Rik (NM_028315.1,847-865).
ggctacagtatggattcat

SEQ ID NO: 734016 - DNA, 19 bp, Mus musculus
  siRNA target sequence for 2810028N01Rik (NM_028315.1,978-996).
caccgtcttccgtggtttt

SEQ ID NO: 734017 - DNA, 19 bp, Mus musculus
  siRNA target sequence for 2810028N01Rik (NM_028315.1,981-999).
cgtcttccgtggttttaga

SEQ ID NO: 734018 - DNA, 19 bp, Mus musculus
  siRNA target sequence for 2810028N01Rik (NM_028315.1,1064-1082).
gctgtaagtgaaaaaatgt

SEQ ID NO: 734019 - DNA, 19 bp, Mus musculus
  siRNA target sequence for 2810028N01Rik (NM_028315.1,1095-1113).
gtcgagttgtggggataat

SEQ ID NO: 734020 - DNA, 19 bp, Mus musculus
  siRNA target sequence for 2810028N01Rik (NM_028315.1,1097-1115).
cgagttgtggggataataa

SEQ ID NO: 734021 - DNA, 19 bp, Mus musculus
  siRNA target sequence for 2810028N01Rik (NM_028315.1,1188-1206).
cacccgctgataagagaat

SEQ ID NO: 734022 - DNA, 19 bp, Mus musculus
  siRNA target sequence for 2810028N01Rik (NM_028315.1,1192-1210).
cgctgataagagaattcca

SEQ ID NO: 734023 - DNA, 19 bp, Mus musculus
  siRNA target sequence for 2810028N01Rik (NM_028315.1,1208-1226).
ccacgaattcggatagaaa

SEQ ID NO: 734024 - DNA, 19 bp, Mus musculus
  siRNA target sequence for 2810028N01Rik (NM_028315.1,1243-1261).
gttagaaggacggagaatt

SEQ ID NO: 734025 - DNA, 19 bp, Mus musculus
  siRNA target sequence for 2810028N01Rik (NM_028315.1,1257-1275).
gaattattgtcgctattga

SEQ ID NO: 734026 - DNA, 19 bp, Mus musculus
  siRNA target sequence for 2810028N01Rik (NM_028315.1,1281-1299).
ggcctagaaattctagata

SEQ ID NO: 734027 - DNA, 19 bp, Mus musculus
  siRNA target sequence for 2810028N01Rik (NM_028315.1,1526-1544).
gatgacgctctgcattgta

SEQ ID NO: 734028 - DNA, 19 bp, Mus musculus
  siRNA target sequence for 2810028N01Rik (NM_028315.1,1577-1595).
gttcatattgcggatgtta

SEQ ID NO: 734029 - DNA, 19 bp, Mus musculus
  siRNA target sequence for 2810028N01Rik (NM_028315.1,1586-1604).
gcggatgttagccatttta

SEQ ID NO: 734030 - DNA, 19 bp, Mus musculus
  siRNA target sequence for 2810028N01Rik (NM_028315.1,1587-1605).
cggatgttagccattttat

SEQ ID NO: 734031 - DNA, 19 bp, Mus musculus
  siRNA target sequence for 2810028N01Rik (NM_028315.1,1589-1607).
gatgttagccattttatca

SEQ ID NO: 734032 - DNA, 19 bp, Mus musculus
  siRNA target sequence for 2810028N01Rik (NM_028315.1,1614-1632).
gaaatgcgttggatcaaga

SEQ ID NO: 734033 - DNA, 19 bp, Mus musculus
  siRNA target sequence for 2810028N01Rik (NM_028315.1,1644-1662).
gaggaacaactgtttatct

SEQ ID NO: 734034 - DNA, 19 bp, Mus musculus
  siRNA target sequence for 2810028N01Rik (NM_028315.1,1665-1683).
gtgaaaagaggattgacat

SEQ ID NO: 734035 - DNA, 19 bp, Mus musculus
  siRNA target sequence for 2810028N01Rik (NM_028315.1,1729-1747).
cgttgacaggcttctctta

SEQ ID NO: 734036 - DNA, 19 bp, Mus musculus
  siRNA target sequence for 2810028N01Rik (NM_028315.1,1733-1751).
gacaggcttctcttacgta

SEQ ID NO: 734037 - DNA, 19 bp, Mus musculus
  siRNA target sequence for 2810032G03Rik (NM_028318.2,802-820).
caccatgagagcagtgtat

SEQ ID NO: 734038 - DNA, 19 bp, Mus musculus
  siRNA target sequence for 2810032G03Rik (NM_028318.2,972-990).
gaaaccgtgcaaactcata

SEQ ID NO: 734039 - DNA, 19 bp, Mus musculus
  siRNA target sequence for 2810032G03Rik (NM_028318.2,977-995).
cgtgcaaactcataaatga

SEQ ID NO: 734040 - DNA, 19 bp, Mus musculus
  siRNA target sequence for 2810032G03Rik (NM_028318.2,978-996).
gtgcaaactcataaatgaa

SEQ ID NO: 734041 - DNA, 19 bp, Mus musculus
  siRNA target sequence for 2810032G03Rik (NM_028318.2,1025-1043).
gacctggggattatctgat

SEQ ID NO: 734042 - DNA, 19 bp, Mus musculus
  siRNA target sequence for 2810032G03Rik (NM_028318.2,1028-1046).
ctggggattatctgataga

SEQ ID NO: 734043 - DNA, 19 bp, Mus musculus
  siRNA target sequence for 2810032G03Rik (NM_028318.2,1030-1048).
ggggattatctgatagaca

SEQ ID NO: 734044 - DNA, 19 bp, Mus musculus
  siRNA target sequence for 2810032G03Rik (NM_028318.2,1031-1049).
gggattatctgatagacaa

SEQ ID NO: 734045 - DNA, 19 bp, Mus musculus
  siRNA target sequence for 2810032G03Rik (NM_028318.2,1041-1059).
gatagacaagattatcata

SEQ ID NO: 734046 - DNA, 19 bp, Mus musculus
  siRNA target sequence for 2810032G03Rik (NM_028318.2,1056-1074).
catagaaaagataactgat

SEQ ID NO: 734047 - DNA, 19 bp, Mus musculus
  siRNA target sequence for 2810032G03Rik (NM_028318.2,1070-1088).
ctgatgggtatgctataat

SEQ ID NO: 734048 - DNA, 19 bp, Mus musculus
  siRNA target sequence for 2810032G03Rik (NM_028318.2,1075-1093).
gggtatgctataatatctt

SEQ ID NO: 734049 - DNA, 19 bp, Mus musculus
  siRNA target sequence for 2810032G03Rik (NM_028318.2,1081-1099).
gctataatatcttttgcat

SEQ ID NO: 734050 - DNA, 19 bp, Mus musculus
  siRNA target sequence for 4930535B03Rik (NM_028328.1,100-118).
gtcttcgttggatcgaaaa

SEQ ID NO: 734051 - DNA, 19 bp, Mus musculus
  siRNA target sequence for 4930535B03Rik (NM_028328.1,102-120).
cttcgttggatcgaaaatt

SEQ ID NO: 734052 - DNA, 19 bp, Mus musculus
  siRNA target sequence for 4930535B03Rik (NM_028328.1,105-123).
cgttggatcgaaaattcca

SEQ ID NO: 734053 - DNA, 19 bp, Mus musculus
  siRNA target sequence for 4930535B03Rik (NM_028328.1,132-150).
ccaacaccatggaatccat

SEQ ID NO: 734054 - DNA, 19 bp, Mus musculus
  siRNA target sequence for 4930535B03Rik (NM_028328.1,133-151).
caacaccatggaatccatt

SEQ ID NO: 734055 - DNA, 19 bp, Mus musculus
  siRNA target sequence for 4930535B03Rik (NM_028328.1,136-154).
caccatggaatccattcaa

SEQ ID NO: 734056 - DNA, 19 bp, Mus musculus
  siRNA target sequence for 4930535B03Rik (NM_028328.1,157-175).
cttgtcgtcctggtgtata

SEQ ID NO: 734057 - DNA, 19 bp, Mus musculus
  siRNA target sequence for 4930535B03Rik (NM_028328.1,160-178).
gtcgtcctggtgtatagaa

SEQ ID NO: 734058 - DNA, 19 bp, Mus musculus
  siRNA target sequence for 4930535B03Rik (NM_028328.1,162-180).
cgtcctggtgtatagaaaa

SEQ ID NO: 734059 - DNA, 19 bp, Mus musculus
  siRNA target sequence for 4930535B03Rik (NM_028328.1,198-216).
caatcgtctaccattggat

SEQ ID NO: 734060 - DNA, 19 bp, Mus musculus
  siRNA target sequence for 4930535B03Rik (NM_028328.1,222-240).
ggctccggagatctacata

SEQ ID NO: 734061 - DNA, 19 bp, Mus musculus
  siRNA target sequence for 4930535B03Rik (NM_028328.1,223-241).
gctccggagatctacatat

SEQ ID NO: 734062 - DNA, 19 bp, Mus musculus
  siRNA target sequence for 4930535B03Rik (NM_028328.1,234-252).
ctacatatccccatcgttt

SEQ ID NO: 734063 - DNA, 19 bp, Mus musculus
  siRNA target sequence for 4930535B03Rik (NM_028328.1,237-255).
catatccccatcgtttgaa

SEQ ID NO: 734064 - DNA, 19 bp, Mus musculus
  siRNA target sequence for 4930535B03Rik (NM_028328.1,242-260).
ccccatcgtttgaatctct

SEQ ID NO: 734065 - DNA, 19 bp, Mus musculus
  siRNA target sequence for 4930535B03Rik (NM_028328.1,243-261).
cccatcgtttgaatctctt

SEQ ID NO: 734066 - DNA, 19 bp, Mus musculus
  siRNA target sequence for 4930535B03Rik (NM_028328.1,244-262).
ccatcgtttgaatctcttt

SEQ ID NO: 734067 - DNA, 19 bp, Mus musculus
  siRNA target sequence for 4930535B03Rik (NM_028328.1,249-267).
gtttgaatctcttttatct

SEQ ID NO: 734068 - DNA, 19 bp, Mus musculus
  siRNA target sequence for 4930535B03Rik (NM_028328.1,275-293).
gatgtcatacagaattgta

SEQ ID NO: 734069 - DNA, 19 bp, Mus musculus
  siRNA target sequence for 4930535B03Rik (NM_028328.1,291-309).
gtaaacggaaaaatgcaat

SEQ ID NO: 734070 - DNA, 19 bp, Mus musculus
  siRNA target sequence for 4930535B03Rik (NM_028328.1,296-314).
cggaaaaatgcaatcatat

SEQ ID NO: 734071 - DNA, 19 bp, Mus musculus
  siRNA target sequence for 4930535B03Rik (NM_028328.1,298-316).
gaaaaatgcaatcatattt

SEQ ID NO: 734072 - DNA, 19 bp, Mus musculus
  siRNA target sequence for 4930535B03Rik (NM_028328.1,310-328).
catatttcgtgaatcattt

SEQ ID NO: 734073 - DNA, 19 bp, Mus musculus
  siRNA target sequence for 4930535B03Rik (NM_028328.1,365-383).
gatccatccgtctctaagt

SEQ ID NO: 734074 - DNA, 19 bp, Mus musculus
  siRNA target sequence for 4930535B03Rik (NM_028328.1,369-387).
catccgtctctaagtctat

SEQ ID NO: 734075 - DNA, 19 bp, Mus musculus
  siRNA target sequence for 4930535B03Rik (NM_028328.1,372-390).
ccgtctctaagtctataga

SEQ ID NO: 734076 - DNA, 19 bp, Mus musculus
  siRNA target sequence for 4930535B03Rik (NM_028328.1,373-391).
cgtctctaagtctatagaa

SEQ ID NO: 734077 - DNA, 19 bp, Mus musculus
  siRNA target sequence for 4930535B03Rik (NM_028328.1,378-396).
ctaagtctatagaacgaat

SEQ ID NO: 734078 - DNA, 19 bp, Mus musculus
  siRNA target sequence for 4930535B03Rik (NM_028328.1,436-454).
catgattgtggcattgaga

SEQ ID NO: 734079 - DNA, 19 bp, Mus musculus
  siRNA target sequence for 4930535B03Rik (NM_028328.1,445-463).
ggcattgagagaagcttta

SEQ ID NO: 734080 - DNA, 19 bp, Mus musculus
  siRNA target sequence for 4930535B03Rik (NM_028328.1,446-464).
gcattgagagaagctttaa

SEQ ID NO: 734081 - DNA, 19 bp, Mus musculus
  siRNA target sequence for 4930535B03Rik (NM_028328.1,465-483).
gtaccactttcaaaactca

SEQ ID NO: 734082 - DNA, 19 bp, Mus musculus
  siRNA target sequence for 4930535B03Rik (NM_028328.1,539-557).
caaacatccacgaatccaa

SEQ ID NO: 734083 - DNA, 19 bp, Mus musculus
  siRNA target sequence for 4930535B03Rik (NM_028328.1,594-612).
gatctcaggccctcattga

SEQ ID NO: 734084 - DNA, 19 bp, Mus musculus
  siRNA target sequence for 4930535B03Rik (NM_028328.1,597-615).
ctcaggccctcattgaaga

SEQ ID NO: 734085 - DNA, 19 bp, Mus musculus
  siRNA target sequence for 4930535B03Rik (NM_028328.1,611-629).
gaagagttgctgatgtaca

SEQ ID NO: 734086 - DNA, 19 bp, Mus musculus
  siRNA target sequence for 4930535B03Rik (NM_028328.1,622-640).
gatgtacaaacgatcagaa

SEQ ID NO: 734087 - DNA, 19 bp, Mus musculus
  siRNA target sequence for 4930535B03Rik (NM_028328.1,625-643).
gtacaaacgatcagaagat

SEQ ID NO: 734088 - DNA, 19 bp, Mus musculus
  siRNA target sequence for 2810036M19Rik (NM_028331.2,120-138).
cacagaggagactaccttt

SEQ ID NO: 734089 - DNA, 19 bp, Mus musculus
  siRNA target sequence for 2810036M19Rik (NM_028331.2,131-149).
ctacctttggagaatctgt

SEQ ID NO: 734090 - DNA, 19 bp, Mus musculus
  siRNA target sequence for 2810036M19Rik (NM_028331.2,256-274).
gtcaggccgtacatcaaca

SEQ ID NO: 734091 - DNA, 19 bp, Mus musculus
  siRNA target sequence for 2810036M19Rik (NM_028331.2,258-276).
caggccgtacatcaacatt

SEQ ID NO: 734092 - DNA, 19 bp, Mus musculus
  siRNA target sequence for 2810036M19Rik (NM_028331.2,261-279).
gccgtacatcaacattact

SEQ ID NO: 734093 - DNA, 19 bp, Mus musculus
  siRNA target sequence for 2810036M19Rik (NM_028331.2,262-280).
ccgtacatcaacattacta

SEQ ID NO: 734094 - DNA, 19 bp, Mus musculus
  siRNA target sequence for 2810036M19Rik (NM_028331.2,263-281).
cgtacatcaacattactat

SEQ ID NO: 734095 - DNA, 19 bp, Mus musculus
  siRNA target sequence for 2810036M19Rik (NM_028331.2,267-285).
catcaacattactatccta

SEQ ID NO: 734096 - DNA, 19 bp, Mus musculus
  siRNA target sequence for 2810036M19Rik (NM_028331.2,410-428).
gctcgtgccagacacatta

SEQ ID NO: 734097 - DNA, 19 bp, Mus musculus
  siRNA target sequence for 2810036M19Rik (NM_028331.2,757-775).
cgggaaaacggcatctaca

SEQ ID NO: 734098 - DNA, 19 bp, Mus musculus
  siRNA target sequence for Angptl1 (NM_028333.1,599-617).
gcagaagcgggagatagat

SEQ ID NO: 734099 - DNA, 19 bp, Mus musculus
  siRNA target sequence for Angptl1 (NM_028333.1,639-657).
gtggacgggaacattgtaa

SEQ ID NO: 734100 - DNA, 19 bp, Mus musculus
  siRNA target sequence for Angptl1 (NM_028333.1,716-734).
ctacatgcagctactacat

SEQ ID NO: 734101 - DNA, 19 bp, Mus musculus
  siRNA target sequence for Angptl1 (NM_028333.1,732-750).
catgagatcatccgtaaaa

SEQ ID NO: 734102 - DNA, 19 bp, Mus musculus
  siRNA target sequence for Angptl1 (NM_028333.1,740-758).
catccgtaaaagagacaat

SEQ ID NO: 734103 - DNA, 19 bp, Mus musculus
  siRNA target sequence for Angptl1 (NM_028333.1,743-761).
ccgtaaaagagacaattca

SEQ ID NO: 734104 - DNA, 19 bp, Mus musculus
  siRNA target sequence for Angptl1 (NM_028333.1,753-771).
gacaattcactcgaacttt

SEQ ID NO: 734105 - DNA, 19 bp, Mus musculus
  siRNA target sequence for Angptl1 (NM_028333.1,835-853).
gggagctagaggtgaagta

SEQ ID NO: 734106 - DNA, 19 bp, Mus musculus
  siRNA target sequence for Angptl1 (NM_028333.1,856-874).
cgtccttgacggatcttgt

SEQ ID NO: 734107 - DNA, 19 bp, Mus musculus
  siRNA target sequence for Angptl1 (NM_028333.1,859-877).
ccttgacggatcttgtcaa

SEQ ID NO: 734108 - DNA, 19 bp, Mus musculus
  siRNA target sequence for Angptl1 (NM_028333.1,860-878).
cttgacggatcttgtcaat

SEQ ID NO: 734109 - DNA, 19 bp, Mus musculus
  siRNA target sequence for Angptl1 (NM_028333.1,865-883).
cggatcttgtcaataacca

SEQ ID NO: 734110 - DNA, 19 bp, Mus musculus
  siRNA target sequence for Angptl1 (NM_028333.1,890-908).
gacgatcactgtattggaa

SEQ ID NO: 734111 - DNA, 19 bp, Mus musculus
  siRNA target sequence for Angptl1 (NM_028333.1,911-929).
gcagtgcctgaggatgttt

SEQ ID NO: 734112 - DNA, 19 bp, Mus musculus
  siRNA target sequence for Angptl1 (NM_028333.1,912-930).
cagtgcctgaggatgtttt

SEQ ID NO: 734113 - DNA, 19 bp, Mus musculus
  siRNA target sequence for Angptl1 (NM_028333.1,1048-1066).
gttaccccagagacgtaat

SEQ ID NO: 734114 - DNA, 19 bp, Mus musculus
  siRNA target sequence for Angptl1 (NM_028333.1,1093-1111).
ccacgaaaagccctttcaa

SEQ ID NO: 734115 - DNA, 19 bp, Mus musculus
  siRNA target sequence for Angptl1 (NM_028333.1,1096-1114).
cgaaaagccctttcaagat

SEQ ID NO: 734116 - DNA, 19 bp, Mus musculus
  siRNA target sequence for Angptl1 (NM_028333.1,1116-1134).
ccagcagtgactttcatca

SEQ ID NO: 734117 - DNA, 19 bp, Mus musculus
  siRNA target sequence for Angptl1 (NM_028333.1,1130-1148).
catcaatgaaggtgagtta

SEQ ID NO: 734118 - DNA, 19 bp, Mus musculus
  siRNA target sequence for Angptl1 (NM_028333.1,1193-1211).
gtatgattcacgcaacaat

SEQ ID NO: 734119 - DNA, 19 bp, Mus musculus
  siRNA target sequence for Angptl1 (NM_028333.1,1201-1219).
cacgcaacaatactcttat

SEQ ID NO: 734120 - DNA, 19 bp, Mus musculus
  siRNA target sequence for Angptl1 (NM_028333.1,1203-1221).
cgcaacaatactcttatct

SEQ ID NO: 734121 - DNA, 19 bp, Mus musculus
  siRNA target sequence for Angptl1 (NM_028333.1,1220-1238).
cttagtaagtcctacttct

SEQ ID NO: 734122 - DNA, 19 bp, Mus musculus
  siRNA target sequence for Angptl1 (NM_028333.1,1259-1277).
catgtccaatcaaaatttt

SEQ ID NO: 734123 - DNA, 19 bp, Mus musculus
  siRNA target sequence for 2810439F02Rik (NM_028341.1,176-194).
gccttggctggcatcaata

SEQ ID NO: 734124 - DNA, 19 bp, Mus musculus
  siRNA target sequence for 2810439F02Rik (NM_028341.1,220-238).
gtcggatcagcttttcaaa

SEQ ID NO: 734125 - DNA, 19 bp, Mus musculus
  siRNA target sequence for 2810439F02Rik (NM_028341.1,230-248).
cttttcaaacaatacagaa

SEQ ID NO: 734126 - DNA, 19 bp, Mus musculus
  siRNA target sequence for 2810439F02Rik (NM_028341.1,246-264).
gaaatcatagtccactaat

SEQ ID NO: 734127 - DNA, 19 bp, Mus musculus
  siRNA target sequence for 2810439F02Rik (NM_028341.1,275-293).
gccagcttcgtcagctttt

SEQ ID NO: 734128 - DNA, 19 bp, Mus musculus
  siRNA target sequence for 2810439F02Rik (NM_028341.1,331-349).
gttggcgtgcgatgactta

SEQ ID NO: 734129 - DNA, 19 bp, Mus musculus
  siRNA target sequence for 2810439F02Rik (NM_028341.1,335-353).
gcgtgcgatgacttaaaga

SEQ ID NO: 734130 - DNA, 19 bp, Mus musculus
  siRNA target sequence for 2810439F02Rik (NM_028341.1,337-355).
gtgcgatgacttaaagact

SEQ ID NO: 734131 - DNA, 19 bp, Mus musculus
  siRNA target sequence for 2810439F02Rik (NM_028341.1,380-398).
gaggctggtgtaatcgaaa

SEQ ID NO: 734132 - DNA, 19 bp, Mus musculus
  siRNA target sequence for 2810439F02Rik (NM_028341.1,383-401).
gctggtgtaatcgaaacaa

SEQ ID NO: 734133 - DNA, 19 bp, Mus musculus
  siRNA target sequence for 2810439F02Rik (NM_028341.1,384-402).
ctggtgtaatcgaaacaat

SEQ ID NO: 734134 - DNA, 19 bp, Mus musculus
  siRNA target sequence for 2810439F02Rik (NM_028341.1,387-405).
gtgtaatcgaaacaattaa

SEQ ID NO: 734135 - DNA, 19 bp, Mus musculus
  siRNA target sequence for 2810439F02Rik (NM_028341.1,462-480).
gacttcagaggcagatcat

SEQ ID NO: 734136 - DNA, 19 bp, Mus musculus
  siRNA target sequence for 2810439F02Rik (NM_028341.1,530-548).
gagttgtcggcctacataa

SEQ ID NO: 734137 - DNA, 19 bp, Mus musculus
  siRNA target sequence for 2810439F02Rik (NM_028341.1,532-550).
gttgtcggcctacataaaa

SEQ ID NO: 734138 - DNA, 19 bp, Mus musculus
  siRNA target sequence for 2810439F02Rik (NM_028341.1,535-553).
gtcggcctacataaaaggt

SEQ ID NO: 734139 - DNA, 19 bp, Mus musculus
  siRNA target sequence for 2810439F02Rik (NM_028341.1,612-630).
cccttcaggaactgtatca

SEQ ID NO: 734140 - DNA, 19 bp, Mus musculus
  siRNA target sequence for 2810439F02Rik (NM_028341.1,709-727).
gtccttaagcagactgaaa

SEQ ID NO: 734141 - DNA, 19 bp, Mus musculus
  siRNA target sequence for 2810439F02Rik (NM_028341.1,751-769).
ccttttccacctttgcata

SEQ ID NO: 734142 - DNA, 19 bp, Mus musculus
  siRNA target sequence for 2810439F02Rik (NM_028341.1,752-770).
cttttccacctttgcatat

SEQ ID NO: 734143 - DNA, 19 bp, Mus musculus
  siRNA target sequence for 2810439F02Rik (NM_028341.1,779-797).
cccccaaacctgctcaaaa

SEQ ID NO: 734144 - DNA, 19 bp, Mus musculus
  siRNA target sequence for 2810439F02Rik (NM_028341.1,852-870).
cgtatgcgagcgaaagtaa

SEQ ID NO: 734145 - DNA, 19 bp, Mus musculus
  siRNA target sequence for 2810439F02Rik (NM_028341.1,880-898).
ggcccctttagctacatta

SEQ ID NO: 734146 - DNA, 19 bp, Mus musculus
  siRNA target sequence for 2810439F02Rik (NM_028341.1,918-936).
ctgtggtccgcccattttt

SEQ ID NO: 734147 - DNA, 19 bp, Mus musculus
  siRNA target sequence for 2810439F02Rik (NM_028341.1,922-940).
ggtccgcccattttttgct

SEQ ID NO: 734148 - DNA, 19 bp, Mus musculus
  siRNA target sequence for 2810439F02Rik (NM_028341.1,923-941).
gtccgcccattttttgctt

SEQ ID NO: 734149 - DNA, 19 bp, Mus musculus
  siRNA target sequence for 2810439F02Rik (NM_028341.1,963-981).
ggggcttggatgaagctaa

SEQ ID NO: 734150 - DNA, 19 bp, Mus musculus
  siRNA target sequence for 2810439F02Rik (NM_028341.1,1046-1064).
cggatccagcggttagagt

SEQ ID NO: 734151 - DNA, 19 bp, Mus musculus
  siRNA target sequence for 2810439F02Rik (NM_028341.1,1052-1070).
cagcggttagagtgtcaaa

SEQ ID NO: 734152 - DNA, 19 bp, Mus musculus
  siRNA target sequence for 2810439F02Rik (NM_028341.1,1055-1073).
cggttagagtgtcaaatca

SEQ ID NO: 734153 - DNA, 19 bp, Mus musculus
  siRNA target sequence for 2810439F02Rik (NM_028341.1,1158-1176).
gctggtgcagcatgattga

SEQ ID NO: 734154 - DNA, 19 bp, Mus musculus
  siRNA target sequence for 2810439F02Rik (NM_028341.1,1159-1177).
ctggtgcagcatgattgaa

SEQ ID NO: 734155 - DNA, 19 bp, Mus musculus
  siRNA target sequence for 2810439F02Rik (NM_028341.1,1161-1179).
ggtgcagcatgattgaact

SEQ ID NO: 734156 - DNA, 19 bp, Mus musculus
  siRNA target sequence for 2810439F02Rik (NM_028341.1,1291-1309).
ggatggggcacaacttgtt

SEQ ID NO: 734157 - DNA, 19 bp, Mus musculus
  siRNA target sequence for 2810439F02Rik (NM_028341.1,1296-1314).
gggcacaacttgttcttaa

SEQ ID NO: 734158 - DNA, 19 bp, Mus musculus
  siRNA target sequence for 2810439F02Rik (NM_028341.1,1299-1317).
cacaacttgttcttaaaga

SEQ ID NO: 734159 - DNA, 19 bp, Mus musculus
  siRNA target sequence for 2810439F02Rik (NM_028341.1,1319-1337).
gtccagaagctgttcaaaa

SEQ ID NO: 734160 - DNA, 19 bp, Mus musculus
  siRNA target sequence for 2810439F02Rik (NM_028341.1,1348-1366).
ccagattgaacagttttct

SEQ ID NO: 734161 - DNA, 19 bp, Mus musculus
  siRNA target sequence for 2810439F02Rik (NM_028341.1,1379-1397).
gagcgatttcggaagcaaa

SEQ ID NO: 734162 - DNA, 19 bp, Mus musculus
  siRNA target sequence for 2810439F02Rik (NM_028341.1,1505-1523).
catgaagtggacgattcat

SEQ ID NO: 734163 - DNA, 19 bp, Mus musculus
  siRNA target sequence for 2810439F02Rik (NM_028341.1,1524-1542).
ctgtcgttggattaaagca

SEQ ID NO: 734164 - DNA, 19 bp, Mus musculus
  siRNA target sequence for 2810439F02Rik (NM_028341.1,1547-1565).
ctccttggtgccatacaca

SEQ ID NO: 734165 - DNA, 19 bp, Mus musculus
  siRNA target sequence for 2810439F02Rik (NM_028341.1,1550-1568).
cttggtgccatacacaaat

SEQ ID NO: 734166 - DNA, 19 bp, Mus musculus
  siRNA target sequence for 2810439F02Rik (NM_028341.1,1713-1731).
gaggcagaactctacttct

SEQ ID NO: 734167 - DNA, 19 bp, Mus musculus
  siRNA target sequence for 2810439F02Rik (NM_028341.1,1716-1734).
gcagaactctacttcttca

SEQ ID NO: 734168 - DNA, 19 bp, Mus musculus
  siRNA target sequence for 2810439F02Rik (NM_028341.1,1752-1770).
ctggctacgactttgaaaa

SEQ ID NO: 734169 - DNA, 19 bp, Mus musculus
  siRNA target sequence for 2810439F02Rik (NM_028341.1,1803-1821).
cctccctaagggaacttgt

SEQ ID NO: 734170 - DNA, 19 bp, Mus musculus
  siRNA target sequence for 2810439F02Rik (NM_028341.1,1804-1822).
ctccctaagggaacttgtt

SEQ ID NO: 734171 - DNA, 19 bp, Mus musculus
  siRNA target sequence for 2810449C13Rik (NM_028344.1,979-997).
ctattctgctgggttctaa

SEQ ID NO: 734172 - DNA, 19 bp, Mus musculus
  siRNA target sequence for 2810449C13Rik (NM_028344.1,990-1008).
ggttctaaagctacattca

SEQ ID NO: 734173 - DNA, 19 bp, Mus musculus
  siRNA target sequence for 2810449C13Rik (NM_028344.1,1003-1021).
cattcaggaaccacattaa

SEQ ID NO: 734174 - DNA, 19 bp, Mus musculus
  siRNA target sequence for Thsd2 (NM_028351.1,489-507).
gcacttgcgactgatttct

SEQ ID NO: 734175 - DNA, 19 bp, Mus musculus
  siRNA target sequence for Thsd2 (NM_028351.1,492-510).
cttgcgactgatttcttgt

SEQ ID NO: 734176 - DNA, 19 bp, Mus musculus
  siRNA target sequence for Thsd2 (NM_028351.1,576-594).
gcgaagaatgcatcctaat

SEQ ID NO: 734177 - DNA, 19 bp, Mus musculus
  siRNA target sequence for Thsd2 (NM_028351.1,620-638).
gtgcaacgtgttcagatta

SEQ ID NO: 734178 - DNA, 19 bp, Mus musculus
  siRNA target sequence for Thsd2 (NM_028351.1,623-641).
caacgtgttcagattacaa

SEQ ID NO: 734179 - DNA, 19 bp, Mus musculus
  siRNA target sequence for Thsd2 (NM_028351.1,634-652).
gattacaatggctgtttgt

SEQ ID NO: 734180 - DNA, 19 bp, Mus musculus
  siRNA target sequence for Thsd2 (NM_028351.1,660-678).
gcccagactgttttttgtt

SEQ ID NO: 734181 - DNA, 19 bp, Mus musculus
  siRNA target sequence for Thsd2 (NM_028351.1,743-761).
gaactcgatatccagatat

SEQ ID NO: 734182 - DNA, 19 bp, Mus musculus
  siRNA target sequence for Thsd2 (NM_028351.1,746-764).
ctcgatatccagatataaa

SEQ ID NO: 734183 - DNA, 19 bp, Mus musculus
  siRNA target sequence for Thsd2 (NM_028351.1,748-766).
cgatatccagatataaata

SEQ ID NO: 734184 - DNA, 19 bp, Mus musculus
  siRNA target sequence for Thsd2 (NM_028351.1,881-899).
ggttagaagccaacaatca

SEQ ID NO: 734185 - DNA, 19 bp, Mus musculus
  siRNA target sequence for Thsd2 (NM_028351.1,882-900).
gttagaagccaacaatcat

SEQ ID NO: 734186 - DNA, 19 bp, Mus musculus
  siRNA target sequence for Thsd2 (NM_028351.1,886-904).
gaagccaacaatcatacta

SEQ ID NO: 734187 - DNA, 19 bp, Mus musculus
  siRNA target sequence for Thsd2 (NM_028351.1,906-924).
ggaatgtgtcagtattgta

SEQ ID NO: 734188 - DNA, 19 bp, Mus musculus
  siRNA target sequence for Thsd2 (NM_028351.1,990-1008).
caaaagggggactgaaaca

SEQ ID NO: 734189 - DNA, 19 bp, Mus musculus
  siRNA target sequence for Thsd2 (NM_028351.1,1007-1025).
cacgggtccgagatatact

SEQ ID NO: 734190 - DNA, 19 bp, Mus musculus
  siRNA target sequence for Thsd2 (NM_028351.1,1010-1028).
gggtccgagatatactaca

SEQ ID NO: 734191 - DNA, 19 bp, Mus musculus
  siRNA target sequence for Thsd2 (NM_028351.1,1066-1084).
cagcgagacaagaacttgt

SEQ ID NO: 734192 - DNA, 19 bp, Mus musculus
  siRNA target sequence for Thsd2 (NM_028351.1,1068-1086).
gcgagacaagaacttgtat

SEQ ID NO: 734193 - DNA, 19 bp, Mus musculus
  siRNA target sequence for Thsd2 (NM_028351.1,1069-1087).
cgagacaagaacttgtata

SEQ ID NO: 734194 - DNA, 19 bp, Mus musculus
  siRNA target sequence for Thsd2 (NM_028351.1,1072-1090).
gacaagaacttgtatagta

SEQ ID NO: 734195 - DNA, 19 bp, Mus musculus
  siRNA target sequence for 2810481F14Rik (NM_028354.1,528-546).
ggaaccccttccagtttta

SEQ ID NO: 734196 - DNA, 19 bp, Mus musculus
  siRNA target sequence for 2810481F14Rik (NM_028354.1,529-547).
gaaccccttccagttttat

SEQ ID NO: 734197 - DNA, 19 bp, Mus musculus
  siRNA target sequence for 2810481F14Rik (NM_028354.1,552-570).
ctagagtgtcggggattaa

SEQ ID NO: 734198 - DNA, 19 bp, Mus musculus
  siRNA target sequence for 2810481F14Rik (NM_028354.1,561-579).
cggggattaaggcaaagta

SEQ ID NO: 734199 - DNA, 19 bp, Mus musculus
  siRNA target sequence for 2810481F14Rik (NM_028354.1,591-609).
ccctccacatcaaggatat

SEQ ID NO: 734200 - DNA, 19 bp, Mus musculus
  siRNA target sequence for 2810481F14Rik (NM_028354.1,665-683).
gacgtggactggctcataa

SEQ ID NO: 734201 - DNA, 19 bp, Mus musculus
  siRNA target sequence for 2810481F14Rik (NM_028354.1,670-688).
ggactggctcataaagcaa

SEQ ID NO: 734202 - DNA, 19 bp, Mus musculus
  siRNA target sequence for 2810481F14Rik (NM_028354.1,671-689).
gactggctcataaagcaat

SEQ ID NO: 734203 - DNA, 19 bp, Mus musculus
  siRNA target sequence for 2810481F14Rik (NM_028354.1,673-691).
ctggctcataaagcaatat

SEQ ID NO: 734204 - DNA, 19 bp, Mus musculus
  siRNA target sequence for 2810481F14Rik (NM_028354.1,686-704).
caatatccaccggaattca

SEQ ID NO: 734205 - DNA, 19 bp, Mus musculus
  siRNA target sequence for 2810481F14Rik (NM_028354.1,722-740).
cttgtgcacggtgataaga

SEQ ID NO: 734206 - DNA, 19 bp, Mus musculus
  siRNA target sequence for 2810481F14Rik (NM_028354.1,792-810).
ccctctgccaggcaaagtt

SEQ ID NO: 734207 - DNA, 19 bp, Mus musculus
  siRNA target sequence for 2810481F14Rik (NM_028354.1,798-816).
gccaggcaaagttggatat

SEQ ID NO: 734208 - DNA, 19 bp, Mus musculus
  siRNA target sequence for 2810481F14Rik (NM_028354.1,799-817).
ccaggcaaagttggatatt

SEQ ID NO: 734209 - DNA, 19 bp, Mus musculus
  siRNA target sequence for 2810481F14Rik (NM_028354.1,808-826).
gttggatattgcatttgga

SEQ ID NO: 734210 - DNA, 19 bp, Mus musculus
  siRNA target sequence for 2810481F14Rik (NM_028354.1,824-842).
ggaacacaccacacgaaaa

SEQ ID NO: 734211 - DNA, 19 bp, Mus musculus
  siRNA target sequence for 2810481F14Rik (NM_028354.1,825-843).
gaacacaccacacgaaaat

SEQ ID NO: 734212 - DNA, 19 bp, Mus musculus
  siRNA target sequence for 2810481F14Rik (NM_028354.1,828-846).
cacaccacacgaaaatgat

SEQ ID NO: 734213 - DNA, 19 bp, Mus musculus
  siRNA target sequence for 2810481F14Rik (NM_028354.1,844-862).
gatgctcttgctctatgaa

SEQ ID NO: 734214 - DNA, 19 bp, Mus musculus
  siRNA target sequence for 2810481F14Rik (NM_028354.1,942-960).
gccctttgtacccaagaat

SEQ ID NO: 734215 - DNA, 19 bp, Mus musculus
  siRNA target sequence for 2810481F14Rik (NM_028354.1,943-961).
ccctttgtacccaagaatt

SEQ ID NO: 734216 - DNA, 19 bp, Mus musculus
  siRNA target sequence for 2810481F14Rik (NM_028354.1,945-963).
ctttgtacccaagaattga

SEQ ID NO: 734217 - DNA, 19 bp, Mus musculus
  siRNA target sequence for 2810481F14Rik (NM_028354.1,988-1006).
gtcaagcacccgtttcaaa

SEQ ID NO: 734218 - DNA, 19 bp, Mus musculus
  siRNA target sequence for 2810481F14Rik (NM_028354.1,1010-1028).
gacctcaccagttatctaa

SEQ ID NO: 734219 - DNA, 19 bp, Mus musculus
  siRNA target sequence for 2810481F14Rik (NM_028354.1,1020-1038).
gttatctaacggcgtataa

SEQ ID NO: 734220 - DNA, 19 bp, Mus musculus
  siRNA target sequence for 2810481F14Rik (NM_028354.1,1148-1166).
gataactggggacatttta

SEQ ID NO: 734221 - DNA, 19 bp, Mus musculus
  siRNA target sequence for 2810481F14Rik (NM_028354.1,1157-1175).
ggacattttaggcttagaa

SEQ ID NO: 734222 - DNA, 19 bp, Mus musculus
  siRNA target sequence for 2810481F14Rik (NM_028354.1,1418-1436).
ggctctcttccctatagca

SEQ ID NO: 734223 - DNA, 19 bp, Mus musculus
  siRNA target sequence for 2810481F14Rik (NM_028354.1,1523-1541).
cacattaagacgtacatga

SEQ ID NO: 734224 - DNA, 19 bp, Mus musculus
  siRNA target sequence for 2810481F14Rik (NM_028354.1,1548-1566).
cgccagacttcagtaaact

SEQ ID NO: 734225 - DNA, 19 bp, Mus musculus
  siRNA target sequence for 2810481F14Rik (NM_028354.1,1630-1648).
cggcacccagctgatgata

SEQ ID NO: 734226 - DNA, 19 bp, Mus musculus
  siRNA target sequence for 2810481F14Rik (NM_028354.1,1676-1694).
ctcccgtctgcgtttgtga

SEQ ID NO: 734227 - DNA, 19 bp, Mus musculus
  siRNA target sequence for 2810481F14Rik (NM_028354.1,1680-1698).
cgtctgcgtttgtgagtaa

SEQ ID NO: 734228 - DNA, 19 bp, Mus musculus
  siRNA target sequence for 2810481F14Rik (NM_028354.1,1683-1701).
ctgcgtttgtgagtaacat

SEQ ID NO: 734229 - DNA, 19 bp, Mus musculus
  siRNA target sequence for 2810481F14Rik (NM_028354.1,1686-1704).
cgtttgtgagtaacattgt

SEQ ID NO: 734230 - DNA, 19 bp, Mus musculus
  siRNA target sequence for 2810475A17Rik (NM_028355.1,177-195).
ctgcatcacagcctttata

SEQ ID NO: 734231 - DNA, 19 bp, Mus musculus
  siRNA target sequence for 2810475A17Rik (NM_028355.1,183-201).
cacagcctttatagtctta

SEQ ID NO: 734232 - DNA, 19 bp, Mus musculus
  siRNA target sequence for 2810475A17Rik (NM_028355.1,187-205).
gcctttatagtcttaagca

SEQ ID NO: 734233 - DNA, 19 bp, Mus musculus
  siRNA target sequence for 2810475A17Rik (NM_028355.1,196-214).
gtcttaagcagcatcaatt

SEQ ID NO: 734234 - DNA, 19 bp, Mus musculus
  siRNA target sequence for 2810475A17Rik (NM_028355.1,229-247).
cagtggctgtcagattctt

SEQ ID NO: 734235 - DNA, 19 bp, Mus musculus
  siRNA target sequence for 2810475A17Rik (NM_028355.1,234-252).
gctgtcagattcttgcaat

SEQ ID NO: 734236 - DNA, 19 bp, Mus musculus
  siRNA target sequence for 2810475A17Rik (NM_028355.1,291-309).
gctggccgtggtcattata

SEQ ID NO: 734237 - DNA, 19 bp, Mus musculus
  siRNA target sequence for 2810475A17Rik (NM_028355.1,292-310).
ctggccgtggtcattataa

SEQ ID NO: 734238 - DNA, 19 bp, Mus musculus
  siRNA target sequence for 2810475A17Rik (NM_028355.1,294-312).
ggccgtggtcattataata

SEQ ID NO: 734239 - DNA, 19 bp, Mus musculus
  siRNA target sequence for 2810475A17Rik (NM_028355.1,295-313).
gccgtggtcattataataa

SEQ ID NO: 734240 - DNA, 19 bp, Mus musculus
  siRNA target sequence for 2810475A17Rik (NM_028355.1,297-315).
cgtggtcattataataata

SEQ ID NO: 734241 - DNA, 19 bp, Mus musculus
  siRNA target sequence for 2810475A17Rik (NM_028355.1,300-318).
ggtcattataataataagt

SEQ ID NO: 734242 - DNA, 19 bp, Mus musculus
  siRNA target sequence for 2810475A17Rik (NM_028355.1,301-319).
gtcattataataataagta

SEQ ID NO: 734243 - DNA, 19 bp, Mus musculus
  siRNA target sequence for 2810475A17Rik (NM_028355.1,324-342).
caatgtggaattctataca

SEQ ID NO: 734244 - DNA, 19 bp, Mus musculus
  siRNA target sequence for 2810475A17Rik (NM_028355.1,508-526).
ggaactgagagcttagata

SEQ ID NO: 734245 - DNA, 19 bp, Mus musculus
  siRNA target sequence for 2810475A17Rik (NM_028355.1,540-558).
gacctgcttgaatgaatat

SEQ ID NO: 734246 - DNA, 19 bp, Mus musculus
  siRNA target sequence for 2810475A17Rik (NM_028355.1,545-563).
gcttgaatgaatatcatct

SEQ ID NO: 734247 - DNA, 19 bp, Mus musculus
  siRNA target sequence for 2810475A17Rik (NM_028355.1,583-601).
gcattcatgggctatagct

SEQ ID NO: 734248 - DNA, 19 bp, Mus musculus
  siRNA target sequence for 2810475A17Rik (NM_028355.1,584-602).
cattcatgggctatagcta

SEQ ID NO: 734249 - DNA, 19 bp, Mus musculus
  siRNA target sequence for 2810475A17Rik (NM_028355.1,588-606).
catgggctatagctatagt

SEQ ID NO: 734250 - DNA, 19 bp, Mus musculus
  siRNA target sequence for 2810475A17Rik (NM_028355.1,591-609).
gggctatagctatagtctt

SEQ ID NO: 734251 - DNA, 19 bp, Mus musculus
  siRNA target sequence for 2810475A17Rik (NM_028355.1,599-617).
gctatagtcttctgtattt

SEQ ID NO: 734252 - DNA, 19 bp, Mus musculus
  siRNA target sequence for 2810475A17Rik (NM_028355.1,647-665).
ctattatacagcagtacaa

SEQ ID NO: 734253 - DNA, 19 bp, Mus musculus
  siRNA target sequence for 2810475A17Rik (NM_028355.1,683-701).
gatctctcctcttactagt

SEQ ID NO: 734254 - DNA, 19 bp, Mus musculus
  siRNA target sequence for 2810475A17Rik (NM_028355.1,686-704).
ctctcctcttactagttaa

SEQ ID NO: 734255 - DNA, 19 bp, Mus musculus
  siRNA target sequence for 2810475A17Rik (NM_028355.1,724-742).
ctgttcatggtcagaaatt

SEQ ID NO: 734256 - DNA, 19 bp, Mus musculus
  siRNA target sequence for 2810475A17Rik (NM_028355.1,737-755).
gaaatttctgcattgtgta

SEQ ID NO: 734257 - DNA, 19 bp, Mus musculus
  siRNA target sequence for 2810475A17Rik (NM_028355.1,775-793).
cccaaagcatggattagca

SEQ ID NO: 734258 - DNA, 19 bp, Mus musculus
  siRNA target sequence for 2810475A17Rik (NM_028355.1,851-869).
gtctcctgaacgtctcatt

SEQ ID NO: 734259 - DNA, 19 bp, Mus musculus
  siRNA target sequence for 2810475A17Rik (NM_028355.1,856-874).
ctgaacgtctcattactct

SEQ ID NO: 734260 - DNA, 19 bp, Mus musculus
  siRNA target sequence for 2810475A17Rik (NM_028355.1,923-941).
catggatactcttcaaaat

SEQ ID NO: 734261 - DNA, 19 bp, Mus musculus
  siRNA target sequence for 2810475A17Rik (NM_028355.1,927-945).
gatactcttcaaaatctat

SEQ ID NO: 734262 - DNA, 19 bp, Mus musculus
  siRNA target sequence for 2810475A17Rik (NM_028355.1,1000-1018).
gaatgccttcctaaagtct

SEQ ID NO: 734263 - DNA, 19 bp, Mus musculus
  siRNA target sequence for 2810475A17Rik (NM_028355.1,1004-1022).
gccttcctaaagtcttaaa

SEQ ID NO: 734264 - DNA, 19 bp, Mus musculus
  siRNA target sequence for 2810475A17Rik (NM_028355.1,1030-1048).
cccccacgcatcgtaaagt

SEQ ID NO: 734265 - DNA, 19 bp, Mus musculus
  siRNA target sequence for 2810475A17Rik (NM_028355.1,1031-1049).
ccccacgcatcgtaaagta

SEQ ID NO: 734266 - DNA, 19 bp, Mus musculus
  siRNA target sequence for 2810475A17Rik (NM_028355.1,1032-1050).
cccacgcatcgtaaagtat

SEQ ID NO: 734267 - DNA, 19 bp, Mus musculus
  siRNA target sequence for 2810475A17Rik (NM_028355.1,1033-1051).
ccacgcatcgtaaagtatt

SEQ ID NO: 734268 - DNA, 19 bp, Mus musculus
  siRNA target sequence for 2810475A17Rik (NM_028355.1,1034-1052).
cacgcatcgtaaagtattt

SEQ ID NO: 734269 - DNA, 19 bp, Mus musculus
  siRNA target sequence for 2810475A17Rik (NM_028355.1,1068-1086).
gatgctgctttctcaatat

SEQ ID NO: 734270 - DNA, 19 bp, Mus musculus
  siRNA target sequence for 2810475A17Rik (NM_028355.1,1094-1112).
ctcggaggcaagaagtttt

SEQ ID NO: 734271 - DNA, 19 bp, Mus musculus
  siRNA target sequence for 2810475A17Rik (NM_028355.1,1129-1147).
ggtggacatccccacaatt

SEQ ID NO: 734272 - DNA, 19 bp, Mus musculus
  siRNA target sequence for 2810475A17Rik (NM_028355.1,1132-1150).
ggacatccccacaattgga

SEQ ID NO: 734273 - DNA, 19 bp, Mus musculus
  siRNA target sequence for 2810475A17Rik (NM_028355.1,1140-1158).
ccacaattggactgctatt

SEQ ID NO: 734274 - DNA, 19 bp, Mus musculus
  siRNA target sequence for 2810475A17Rik (NM_028355.1,1141-1159).
cacaattggactgctattt

SEQ ID NO: 734275 - DNA, 19 bp, Mus musculus
  siRNA target sequence for 2810475A17Rik (NM_028355.1,1154-1172).
ctatttcgagggagtgttt

SEQ ID NO: 734276 - DNA, 19 bp, Mus musculus
  siRNA target sequence for 2810475A17Rik (NM_028355.1,1335-1353).
gccgttagttaaaacttca

SEQ ID NO: 734277 - DNA, 19 bp, Mus musculus
  siRNA target sequence for 2810475A17Rik (NM_028355.1,1342-1360).
gttaaaacttcactgtttt

SEQ ID NO: 734278 - DNA, 19 bp, Mus musculus
  siRNA target sequence for 2810475A17Rik (NM_028355.1,1425-1443).
gaaccgaatggctggaatt

SEQ ID NO: 734279 - DNA, 19 bp, Mus musculus
  siRNA target sequence for 2810475A17Rik (NM_028355.1,1428-1446).
ccgaatggctggaattctt

SEQ ID NO: 734280 - DNA, 19 bp, Mus musculus
  siRNA target sequence for 2810475A17Rik (NM_028355.1,1531-1549).
caagtgtctgcaatttcta

SEQ ID NO: 734281 - DNA, 19 bp, Mus musculus
  siRNA target sequence for 2810475A17Rik (NM_028355.1,1595-1613).
gacagcccagtgtgatcta

SEQ ID NO: 734282 - DNA, 19 bp, Mus musculus
  siRNA target sequence for 2810475A17Rik (NM_028355.1,1611-1629).
ctactcgtggattcagaat

SEQ ID NO: 734283 - DNA, 19 bp, Mus musculus
  siRNA target sequence for 2810475A17Rik (NM_028355.1,1614-1632).
ctcgtggattcagaataaa

SEQ ID NO: 734284 - DNA, 19 bp, Mus musculus
  siRNA target sequence for 2810475A17Rik (NM_028355.1,1633-1651).
cgagaacagattaagaatt

SEQ ID NO: 734285 - DNA, 19 bp, Mus musculus
  siRNA target sequence for 2810475A17Rik (NM_028355.1,1658-1676).
caaaacgggtgctgataat

SEQ ID NO: 734286 - DNA, 19 bp, Mus musculus
  siRNA target sequence for 2810475A17Rik (NM_028355.1,1663-1681).
cgggtgctgataatgtact

SEQ ID NO: 734287 - DNA, 19 bp, Mus musculus
  siRNA target sequence for 2810475A17Rik (NM_028355.1,1664-1682).
gggtgctgataatgtactt

SEQ ID NO: 734288 - DNA, 19 bp, Mus musculus
  siRNA target sequence for 2810475A17Rik (NM_028355.1,1665-1683).
ggtgctgataatgtacttt

SEQ ID NO: 734289 - DNA, 19 bp, Mus musculus
  siRNA target sequence for 2810475A17Rik (NM_028355.1,1703-1721).
cctccattcaggctgtttt

SEQ ID NO: 734290 - DNA, 19 bp, Mus musculus
  siRNA target sequence for 2810475A17Rik (NM_028355.1,1707-1725).
cattcaggctgttttttca

SEQ ID NO: 734291 - DNA, 19 bp, Mus musculus
  siRNA target sequence for 2810475A17Rik (NM_028355.1,1726-1744).
gatgcccaaatgcatattt

SEQ ID NO: 734292 - DNA, 19 bp, Mus musculus
  siRNA target sequence for 2810475A17Rik (NM_028355.1,1737-1755).
gcatatttgggctttagaa

SEQ ID NO: 734293 - DNA, 19 bp, Mus musculus
  siRNA target sequence for 2810475A17Rik (NM_028355.1,1878-1896).
gctgcctcatgcttctagt

SEQ ID NO: 734294 - DNA, 19 bp, Mus musculus
  siRNA target sequence for 2810475A17Rik (NM_028355.1,1879-1897).
ctgcctcatgcttctagta

SEQ ID NO: 734295 - DNA, 19 bp, Mus musculus
  siRNA target sequence for 2810475A17Rik (NM_028355.1,1881-1899).
gcctcatgcttctagtaaa

SEQ ID NO: 734296 - DNA, 19 bp, Mus musculus
  siRNA target sequence for 2810475A17Rik (NM_028355.1,1924-1942).
gtggacacgtcctacaaaa

SEQ ID NO: 734297 - DNA, 19 bp, Mus musculus
  siRNA target sequence for 2810475A17Rik (NM_028355.1,1927-1945).
gacacgtcctacaaaacat

SEQ ID NO: 734298 - DNA, 19 bp, Mus musculus
  siRNA target sequence for 2810475A17Rik (NM_028355.1,1932-1950).
gtcctacaaaacattgaga

SEQ ID NO: 734299 - DNA, 19 bp, Mus musculus
  siRNA target sequence for 2810475A17Rik (NM_028355.1,1967-1985).
ccctgaaaaccgctatcta

SEQ ID NO: 734300 - DNA, 19 bp, Mus musculus
  siRNA target sequence for 2810475A17Rik (NM_028355.1,1978-1996).
gctatctaccgtataacca

SEQ ID NO: 734301 - DNA, 19 bp, Mus musculus
  siRNA target sequence for 2810475A17Rik (NM_028355.1,2025-2043).
gcaggcatctgcagaacat

SEQ ID NO: 734302 - DNA, 19 bp, Mus musculus
  siRNA target sequence for 2810475A17Rik (NM_028355.1,2058-2076).
gcaattcttggagttcaaa

SEQ ID NO: 734303 - DNA, 19 bp, Mus musculus
  siRNA target sequence for 2810471M23Rik (NM_028357.1,228-246).
ggccattactgcctataca

SEQ ID NO: 734304 - DNA, 19 bp, Mus musculus
  siRNA target sequence for 2810471M23Rik (NM_028357.1,286-304).
cgtggatccaggtcatgtt

SEQ ID NO: 734305 - DNA, 19 bp, Mus musculus
  siRNA target sequence for 2810471M23Rik (NM_028357.1,287-305).
gtggatccaggtcatgttt

SEQ ID NO: 734306 - DNA, 19 bp, Mus musculus
  siRNA target sequence for 2810471M23Rik (NM_028357.1,289-307).
ggatccaggtcatgtttct

SEQ ID NO: 734307 - DNA, 19 bp, Mus musculus
  siRNA target sequence for 2810471M23Rik (NM_028357.1,330-348).
gagcccctgtccattcaga

SEQ ID NO: 734308 - DNA, 19 bp, Mus musculus
  siRNA target sequence for 2810471M23Rik (NM_028357.1,400-418).
gagcgcacagctttgaagt

SEQ ID NO: 734309 - DNA, 19 bp, Mus musculus
  siRNA target sequence for 2810471M23Rik (NM_028357.1,501-519).
gtgtttggcttcagtgaaa

SEQ ID NO: 734310 - DNA, 19 bp, Mus musculus
  siRNA target sequence for 2810471M23Rik (NM_028357.1,565-583).
caactgttgtaaatcaaga

SEQ ID NO: 734311 - DNA, 19 bp, Mus musculus
  siRNA target sequence for 2810471M23Rik (NM_028357.1,590-608).
gcctctcatcgaaggaaaa

SEQ ID NO: 734312 - DNA, 19 bp, Mus musculus
  siRNA target sequence for 2810471M23Rik (NM_028357.1,592-610).
ctctcatcgaaggaaaact

SEQ ID NO: 734313 - DNA, 19 bp, Mus musculus
  siRNA target sequence for 2810471M23Rik (NM_028357.1,621-639).
caagtgaggtggaagttca

SEQ ID NO: 734314 - DNA, 19 bp, Mus musculus
  siRNA target sequence for 2810471M23Rik (NM_028357.1,644-662).
gaggtggaaaacgcattat

SEQ ID NO: 734315 - DNA, 19 bp, Mus musculus
  siRNA target sequence for 2810471M23Rik (NM_028357.1,792-810).
ctgcctcgggcgtttgaaa

SEQ ID NO: 734316 - DNA, 19 bp, Mus musculus
  siRNA target sequence for 2810471M23Rik (NM_028357.1,795-813).
cctcgggcgtttgaaatct

SEQ ID NO: 734317 - DNA, 19 bp, Mus musculus
  siRNA target sequence for 2810471M23Rik (NM_028357.1,796-814).
ctcgggcgtttgaaatctt

SEQ ID NO: 734318 - DNA, 19 bp, Mus musculus
  siRNA target sequence for 2810471M23Rik (NM_028357.1,798-816).
cgggcgtttgaaatcttca

SEQ ID NO: 734319 - DNA, 19 bp, Mus musculus
  siRNA target sequence for 2810471M23Rik (NM_028357.1,807-825).
gaaatcttcacagatagta

SEQ ID NO: 734320 - DNA, 19 bp, Mus musculus
  siRNA target sequence for 2810471M23Rik (NM_028357.1,922-940).
gagaagtaaccacatatct

SEQ ID NO: 734321 - DNA, 19 bp, Mus musculus
  siRNA target sequence for 2810460C24Rik (NM_028360.1,313-331).
ccaagttgagcatcatgaa

SEQ ID NO: 734322 - DNA, 19 bp, Mus musculus
  siRNA target sequence for 2810460C24Rik (NM_028360.1,372-390).
cttcgccttgcgtatgaga

SEQ ID NO: 734323 - DNA, 19 bp, Mus musculus
  siRNA target sequence for 2810460C24Rik (NM_028360.1,404-422).
ggccatcacgtacacttat

SEQ ID NO: 734324 - DNA, 19 bp, Mus musculus
  siRNA target sequence for 2810460C24Rik (NM_028360.1,406-424).
ccatcacgtacacttatga

SEQ ID NO: 734325 - DNA, 19 bp, Mus musculus
  siRNA target sequence for 2810460C24Rik (NM_028360.1,426-444).
ctggcagaacagcttttta

SEQ ID NO: 734326 - DNA, 19 bp, Mus musculus
  siRNA target sequence for 2810460C24Rik (NM_028360.1,485-503).
ggaagacaatgcaataatt

SEQ ID NO: 734327 - DNA, 19 bp, Mus musculus
  siRNA target sequence for 2810460C24Rik (NM_028360.1,515-533).
gaaactggccaacatctat

SEQ ID NO: 734328 - DNA, 19 bp, Mus musculus
  siRNA target sequence for 2810460C24Rik (NM_028360.1,530-548).
ctatgctgctcagaataaa

SEQ ID NO: 734329 - DNA, 19 bp, Mus musculus
  siRNA target sequence for 2810460C24Rik (NM_028360.1,669-687).
cttggtatgtgcttagact

SEQ ID NO: 734330 - DNA, 19 bp, Mus musculus
  siRNA target sequence for 2810460C24Rik (NM_028360.1,691-709).
gtgcacgctatctgctatt

SEQ ID NO: 734331 - DNA, 19 bp, Mus musculus
  siRNA target sequence for 2810460C24Rik (NM_028360.1,693-711).
gcacgctatctgctattct

SEQ ID NO: 734332 - DNA, 19 bp, Mus musculus
  siRNA target sequence for 2810460C24Rik (NM_028360.1,729-747).
gcacaaaggatgtatgaaa

SEQ ID NO: 734333 - DNA, 19 bp, Mus musculus
  siRNA target sequence for 2810460C24Rik (NM_028360.1,809-827).
gagtgacttggctactact

SEQ ID NO: 734334 - DNA, 19 bp, Mus musculus
  siRNA target sequence for 2810460C24Rik (NM_028360.1,882-900).
gatctggcaagagagataa

SEQ ID NO: 734335 - DNA, 19 bp, Mus musculus
  siRNA target sequence for 2810460C24Rik (NM_028360.1,967-985).
cacaagcaaaggagatcta

SEQ ID NO: 734336 - DNA, 19 bp, Mus musculus
  siRNA target sequence for 2810460C24Rik (NM_028360.1,1001-1019).
gcgagcagagctgaaaaga

SEQ ID NO: 734337 - DNA, 19 bp, Mus musculus
  siRNA target sequence for 2810460C24Rik (NM_028360.1,1056-1074).
gctgaactgtcaagaaaaa

SEQ ID NO: 734338 - DNA, 19 bp, Mus musculus
  siRNA target sequence for 2900045N06Rik (NM_028385.1,277-295).
ggctagtccagcagttaat

SEQ ID NO: 734339 - DNA, 19 bp, Mus musculus
  siRNA target sequence for 2900045N06Rik (NM_028385.1,279-297).
ctagtccagcagttaatga

SEQ ID NO: 734340 - DNA, 19 bp, Mus musculus
  siRNA target sequence for 2900045N06Rik (NM_028385.1,282-300).
gtccagcagttaatgagaa

SEQ ID NO: 734341 - DNA, 19 bp, Mus musculus
  siRNA target sequence for 2900045N06Rik (NM_028385.1,303-321).
gcgtgtattccactcataa

SEQ ID NO: 734342 - DNA, 19 bp, Mus musculus
  siRNA target sequence for 2900045N06Rik (NM_028385.1,304-322).
cgtgtattccactcataat

SEQ ID NO: 734343 - DNA, 19 bp, Mus musculus
  siRNA target sequence for 2900045N06Rik (NM_028385.1,305-323).
gtgtattccactcataatt

SEQ ID NO: 734344 - DNA, 19 bp, Mus musculus
  siRNA target sequence for 2900045N06Rik (NM_028385.1,307-325).
gtattccactcataattat

SEQ ID NO: 734345 - DNA, 19 bp, Mus musculus
  siRNA target sequence for 2900045N06Rik (NM_028385.1,350-368).
cgaggactgccttatgcta

SEQ ID NO: 734346 - DNA, 19 bp, Mus musculus
  siRNA target sequence for 2900045N06Rik (NM_028385.1,529-547).
cagggggaaggttattaga

SEQ ID NO: 734347 - DNA, 19 bp, Mus musculus
  siRNA target sequence for 2900045N06Rik (NM_028385.1,531-549).
gggggaaggttattagact

SEQ ID NO: 734348 - DNA, 19 bp, Mus musculus
  siRNA target sequence for 2900045N06Rik (NM_028385.1,535-553).
gaaggttattagacttcat

SEQ ID NO: 734349 - DNA, 19 bp, Mus musculus
  siRNA target sequence for 2900045N06Rik (NM_028385.1,557-575).
cggaagcaggacaacatat

SEQ ID NO: 734350 - DNA, 19 bp, Mus musculus
  siRNA target sequence for 2900045N06Rik (NM_028385.1,559-577).
gaagcaggacaacatatca

SEQ ID NO: 734351 - DNA, 19 bp, Mus musculus
  siRNA target sequence for 2900045N06Rik (NM_028385.1,583-601).
ggatagcagtgcaacagaa

SEQ ID NO: 734352 - DNA, 19 bp, Mus musculus
  siRNA target sequence for 2900045N06Rik (NM_028385.1,659-677).
cctacaagcatcaccttaa

SEQ ID NO: 734353 - DNA, 19 bp, Mus musculus
  siRNA target sequence for 2900045N06Rik (NM_028385.1,663-681).
caagcatcaccttaactgt

SEQ ID NO: 734354 - DNA, 19 bp, Mus musculus
  siRNA target sequence for 2900045N06Rik (NM_028385.1,768-786).
cggaagcacagaatttaga

SEQ ID NO: 734355 - DNA, 19 bp, Mus musculus
  siRNA target sequence for 2900045N06Rik (NM_028385.1,805-823).
ctgggaaaatcggataaga

SEQ ID NO: 734356 - DNA, 19 bp, Mus musculus
  siRNA target sequence for 2900045N06Rik (NM_028385.1,807-825).
gggaaaatcggataagact

SEQ ID NO: 734357 - DNA, 19 bp, Mus musculus
  siRNA target sequence for 2900045N06Rik (NM_028385.1,808-826).
ggaaaatcggataagacta

SEQ ID NO: 734358 - DNA, 19 bp, Mus musculus
  siRNA target sequence for 2900045N06Rik (NM_028385.1,809-827).
gaaaatcggataagactat

SEQ ID NO: 734359 - DNA, 19 bp, Mus musculus
  siRNA target sequence for 2900045N06Rik (NM_028385.1,822-840).
gactatggactgatcaata

SEQ ID NO: 734360 - DNA, 19 bp, Mus musculus
  siRNA target sequence for 2900045N06Rik (NM_028385.1,845-863).
gaagctttcactaatcagt

SEQ ID NO: 734361 - DNA, 19 bp, Mus musculus
  siRNA target sequence for 2900045N06Rik (NM_028385.1,865-883).
cagtgcagatgtacagaat

SEQ ID NO: 734362 - DNA, 19 bp, Mus musculus
  siRNA target sequence for 2900045N06Rik (NM_028385.1,893-911).
caacatctccattctaaca

SEQ ID NO: 734363 - DNA, 19 bp, Mus musculus
  siRNA target sequence for 2900045N06Rik (NM_028385.1,901-919).
ccattctaacaaggaattt

SEQ ID NO: 734364 - DNA, 19 bp, Mus musculus
  siRNA target sequence for 2900045N06Rik (NM_028385.1,920-938).
gtgggcaaacctgcaattt

SEQ ID NO: 734365 - DNA, 19 bp, Mus musculus
  siRNA target sequence for 2900045N06Rik (NM_028385.1,922-940).
gggcaaacctgcaatttta

SEQ ID NO: 734366 - DNA, 19 bp, Mus musculus
  siRNA target sequence for 2900045N06Rik (NM_028385.1,924-942).
gcaaacctgcaattttaga

SEQ ID NO: 734367 - DNA, 19 bp, Mus musculus
  siRNA target sequence for 2900045N06Rik (NM_028385.1,930-948).
ctgcaattttagacactat

SEQ ID NO: 734368 - DNA, 19 bp, Mus musculus
  siRNA target sequence for 2900045N06Rik (NM_028385.1,932-950).
gcaattttagacactatta

SEQ ID NO: 734369 - DNA, 19 bp, Mus musculus
  siRNA target sequence for 2900045N06Rik (NM_028385.1,933-951).
caattttagacactattaa

SEQ ID NO: 734370 - DNA, 19 bp, Mus musculus
  siRNA target sequence for 2900045N06Rik (NM_028385.1,959-977).
gaactggcctgtaataata

SEQ ID NO: 734371 - DNA, 19 bp, Mus musculus
  siRNA target sequence for 2900045N06Rik (NM_028385.1,964-982).
ggcctgtaataatacagta

SEQ ID NO: 734372 - DNA, 19 bp, Mus musculus
  siRNA target sequence for 2900045N06Rik (NM_028385.1,965-983).
gcctgtaataatacagtaa

SEQ ID NO: 734373 - DNA, 19 bp, Mus musculus
  siRNA target sequence for 2900045N06Rik (NM_028385.1,1067-1085).
gctttggacactcttataa

SEQ ID NO: 734374 - DNA, 19 bp, Mus musculus
  siRNA target sequence for 2900045N06Rik (NM_028385.1,1075-1093).
cactcttataatagaatat

SEQ ID NO: 734375 - DNA, 19 bp, Mus musculus
  siRNA target sequence for 2900045N06Rik (NM_028385.1,1088-1106).
gaatatcgtgggaaagtca

SEQ ID NO: 734376 - DNA, 19 bp, Mus musculus
  siRNA target sequence for 2900045N06Rik (NM_028385.1,1103-1121).
gtcatgttacgacaacaat

SEQ ID NO: 734377 - DNA, 19 bp, Mus musculus
  siRNA target sequence for 2900045N06Rik (NM_028385.1,1105-1123).
catgttacgacaacaattt

SEQ ID NO: 734378 - DNA, 19 bp, Mus musculus
  siRNA target sequence for 2900045N06Rik (NM_028385.1,1157-1175).
ccctttgtgctcttctact

SEQ ID NO: 734379 - DNA, 19 bp, Mus musculus
  siRNA target sequence for 2900045N06Rik (NM_028385.1,1166-1184).
ctcttctactcaaaattca

SEQ ID NO: 734380 - DNA, 19 bp, Mus musculus
  siRNA target sequence for 2900045N06Rik (NM_028385.1,1168-1186).
cttctactcaaaattcaat

SEQ ID NO: 734381 - DNA, 19 bp, Mus musculus
  siRNA target sequence for 2900045N06Rik (NM_028385.1,1200-1218).
gtgtcgatgctcgtacttt

SEQ ID NO: 734382 - DNA, 19 bp, Mus musculus
  siRNA target sequence for 2900045N06Rik (NM_028385.1,1209-1227).
ctcgtactttcggtaatga

SEQ ID NO: 734383 - DNA, 19 bp, Mus musculus
  siRNA target sequence for 2900045N06Rik (NM_028385.1,1226-1244).
gatgctcggttcatcagaa

SEQ ID NO: 734384 - DNA, 19 bp, Mus musculus
  siRNA target sequence for 2900045N06Rik (NM_028385.1,1229-1247).
gctcggttcatcagaagat

SEQ ID NO: 734385 - DNA, 19 bp, Mus musculus
  siRNA target sequence for 2900045N06Rik (NM_028385.1,1279-1297).
gattgcagatgggatgatt

SEQ ID NO: 734386 - DNA, 19 bp, Mus musculus
  siRNA target sequence for 2900045N06Rik (NM_028385.1,1284-1302).
cagatgggatgattcactt

SEQ ID NO: 734387 - DNA, 19 bp, Mus musculus
  siRNA target sequence for 2900045N06Rik (NM_028385.1,1289-1307).
gggatgattcacttgtgta

SEQ ID NO: 734388 - DNA, 19 bp, Mus musculus
  siRNA target sequence for 2900045N06Rik (NM_028385.1,1337-1355).
gcagaagtcaccattgcat

SEQ ID NO: 734389 - DNA, 19 bp, Mus musculus
  siRNA target sequence for 2900045N06Rik (NM_028385.1,1343-1361).
gtcaccattgcatttgatt

SEQ ID NO: 734390 - DNA, 19 bp, Mus musculus
  siRNA target sequence for 2900045N06Rik (NM_028385.1,1352-1370).
gcatttgattatgaatata

SEQ ID NO: 734391 - DNA, 19 bp, Mus musculus
  siRNA target sequence for 2900045N06Rik (NM_028385.1,1415-1433).
cggaattgccctatacaga

SEQ ID NO: 734392 - DNA, 19 bp, Mus musculus
  siRNA target sequence for 2900045N06Rik (NM_028385.1,1416-1434).
ggaattgccctatacagaa

SEQ ID NO: 734393 - DNA, 19 bp, Mus musculus
  siRNA target sequence for 2900045N06Rik (NM_028385.1,1417-1435).
gaattgccctatacagaaa

SEQ ID NO: 734394 - DNA, 19 bp, Mus musculus
  siRNA target sequence for 2900045N06Rik (NM_028385.1,1422-1440).
gccctatacagaaaagaaa

SEQ ID NO: 734395 - DNA, 19 bp, Mus musculus
  siRNA target sequence for 2900045N06Rik (NM_028385.1,1501-1519).
gaccagacgtagaaaagca

SEQ ID NO: 734396 - DNA, 19 bp, Mus musculus
  siRNA target sequence for 2900045N06Rik (NM_028385.1,1576-1594).
cccgcaaccacaagaagtt

SEQ ID NO: 734397 - DNA, 19 bp, Mus musculus
  siRNA target sequence for 2900045N06Rik (NM_028385.1,1595-1613).
ccagaaaaagtaactgtat

SEQ ID NO: 734398 - DNA, 19 bp, Mus musculus
  siRNA target sequence for 2900045N06Rik (NM_028385.1,1785-1803).
gggatcagcctgtagaaca

SEQ ID NO: 734399 - DNA, 19 bp, Mus musculus
  siRNA target sequence for 2900045N06Rik (NM_028385.1,1810-1828).
ctcggacatagagattact

SEQ ID NO: 734400 - DNA, 19 bp, Mus musculus
  siRNA target sequence for 2900045N06Rik (NM_028385.1,1813-1831).
ggacatagagattactact

SEQ ID NO: 734401 - DNA, 19 bp, Mus musculus
  siRNA target sequence for 2900045N06Rik (NM_028385.1,1830-1848).
ctagcagttcagagatagt

SEQ ID NO: 734402 - DNA, 19 bp, Mus musculus
  siRNA target sequence for 2900045N06Rik (NM_028385.1,1833-1851).
gcagttcagagatagtagt

SEQ ID NO: 734403 - DNA, 19 bp, Mus musculus
  siRNA target sequence for 2900045N06Rik (NM_028385.1,1931-1949).
cagagcactggtgtgaata

SEQ ID NO: 734404 - DNA, 19 bp, Mus musculus
  siRNA target sequence for 2900045N06Rik (NM_028385.1,1971-1989).
gggatgtagctgcagaaaa

SEQ ID NO: 734405 - DNA, 19 bp, Mus musculus
  siRNA target sequence for 2900045N06Rik (NM_028385.1,2027-2045).
ccccgaccgaaaagtagaa

SEQ ID NO: 734406 - DNA, 19 bp, Mus musculus
  siRNA target sequence for 2900045N06Rik (NM_028385.1,2028-2046).
cccgaccgaaaagtagaat

SEQ ID NO: 734407 - DNA, 19 bp, Mus musculus
  siRNA target sequence for 2900045N06Rik (NM_028385.1,2029-2047).
ccgaccgaaaagtagaatt

SEQ ID NO: 734408 - DNA, 19 bp, Mus musculus
  siRNA target sequence for 2900045N06Rik (NM_028385.1,2030-2048).
cgaccgaaaagtagaattt

SEQ ID NO: 734409 - DNA, 19 bp, Mus musculus
  siRNA target sequence for 2900045N06Rik (NM_028385.1,2138-2156).
gaaggaggaagtaacaact

SEQ ID NO: 734410 - DNA, 19 bp, Mus musculus
  siRNA target sequence for 2900045N06Rik (NM_028385.1,2287-2305).
caaaaagtatctagttaca

SEQ ID NO: 734411 - DNA, 19 bp, Mus musculus
  siRNA target sequence for 2900045N06Rik (NM_028385.1,2297-2315).
ctagttacagaatggttaa

SEQ ID NO: 734412 - DNA, 19 bp, Mus musculus
  siRNA target sequence for 2900045N06Rik (NM_028385.1,2304-2322).
cagaatggttaaatgacaa

SEQ ID NO: 734413 - DNA, 19 bp, Mus musculus
  siRNA target sequence for 2900045N06Rik (NM_028385.1,2401-2419).
catgctaccaggtcttatt

SEQ ID NO: 734414 - DNA, 19 bp, Mus musculus
  siRNA target sequence for 2900045N06Rik (NM_028385.1,2404-2422).
gctaccaggtcttattcat

SEQ ID NO: 734415 - DNA, 19 bp, Mus musculus
  siRNA target sequence for 2900045N06Rik (NM_028385.1,2414-2432).
cttattcattccccattaa

SEQ ID NO: 734416 - DNA, 19 bp, Mus musculus
  siRNA target sequence for 2900045N06Rik (NM_028385.1,2420-2438).
cattccccattaatttgta

SEQ ID NO: 734417 - DNA, 19 bp, Mus musculus
  siRNA target sequence for 2900045N06Rik (NM_028385.1,2436-2454).
gtaccacccccaaacacta

SEQ ID NO: 734418 - DNA, 19 bp, Mus musculus
  siRNA target sequence for 2900045N06Rik (NM_028385.1,2460-2478).
gctttggctcaccctttat

SEQ ID NO: 734419 - DNA, 19 bp, Mus musculus
  siRNA target sequence for 2900045N06Rik (NM_028385.1,2529-2547).
gtaagaagcgctggataaa

SEQ ID NO: 734420 - DNA, 19 bp, Mus musculus
  siRNA target sequence for 2900045N06Rik (NM_028385.1,2564-2582).
gggatgactcagacttcat

SEQ ID NO: 734421 - DNA, 19 bp, Mus musculus
  siRNA target sequence for 2900045N06Rik (NM_028385.1,2606-2624).
cagcacctataccaaagta

SEQ ID NO: 734422 - DNA, 19 bp, Mus musculus
  siRNA target sequence for 2900045N06Rik (NM_028385.1,2612-2630).
ctataccaaagtaatgaga

SEQ ID NO: 734423 - DNA, 19 bp, Mus musculus
  siRNA target sequence for 2900045N06Rik (NM_028385.1,2618-2636).
caaagtaatgagactagta

SEQ ID NO: 734424 - DNA, 19 bp, Mus musculus
  siRNA target sequence for 2900045N06Rik (NM_028385.1,2627-2645).
gagactagtaattcttcta

SEQ ID NO: 734425 - DNA, 19 bp, Mus musculus
  siRNA target sequence for 2900045N06Rik (NM_028385.1,2629-2647).
gactagtaattcttctagt

SEQ ID NO: 734426 - DNA, 19 bp, Mus musculus
  siRNA target sequence for 2900045N06Rik (NM_028385.1,2631-2649).
ctagtaattcttctagtat

SEQ ID NO: 734427 - DNA, 19 bp, Mus musculus
  siRNA target sequence for 2900045N06Rik (NM_028385.1,2643-2661).
ctagtatctgtaaagacaa

SEQ ID NO: 734428 - DNA, 19 bp, Mus musculus
  siRNA target sequence for 2900045N06Rik (NM_028385.1,2657-2675).
gacaatgcagacttactga

SEQ ID NO: 734429 - DNA, 19 bp, Mus musculus
  siRNA target sequence for 2900045N06Rik (NM_028385.1,2666-2684).
gacttactgagcccattaa

SEQ ID NO: 734430 - DNA, 19 bp, Mus musculus
  siRNA target sequence for 2900045N06Rik (NM_028385.1,2672-2690).
ctgagcccattaaagaaat

SEQ ID NO: 734431 - DNA, 19 bp, Mus musculus
  siRNA target sequence for 2900045N06Rik (NM_028385.1,2705-2723).
ctgatggagcagaatatca

SEQ ID NO: 734432 - DNA, 19 bp, Mus musculus
  siRNA target sequence for 2900045N06Rik (NM_028385.1,2825-2843).
gaggagtgtcgaaatggat

SEQ ID NO: 734433 - DNA, 19 bp, Mus musculus
  siRNA target sequence for 2900045N06Rik (NM_028385.1,2921-2939).
caccgaaaagacctagatt

SEQ ID NO: 734434 - DNA, 19 bp, Mus musculus
  siRNA target sequence for 2900045N06Rik (NM_028385.1,3089-3107).
cagaccttgctgagaaact

SEQ ID NO: 734435 - DNA, 19 bp, Mus musculus
  siRNA target sequence for 2900045N06Rik (NM_028385.1,3126-3144).
cagagttcaatttgatgta

SEQ ID NO: 734436 - DNA, 19 bp, Mus musculus
  siRNA target sequence for 2900045N06Rik (NM_028385.1,3145-3163).
cgcctactcccctttgaat

SEQ ID NO: 734437 - DNA, 19 bp, Mus musculus
  siRNA target sequence for 2900045N06Rik (NM_028385.1,3217-3235).
gaagcctttacatttagat

SEQ ID NO: 734438 - DNA, 19 bp, Mus musculus
  siRNA target sequence for 2900045N06Rik (NM_028385.1,3261-3279).
gcttttccagcagatatga

SEQ ID NO: 734439 - DNA, 19 bp, Mus musculus
  siRNA target sequence for 2900045N06Rik (NM_028385.1,3262-3280).
cttttccagcagatatgaa

SEQ ID NO: 734440 - DNA, 19 bp, Mus musculus
  siRNA target sequence for 2900045N06Rik (NM_028385.1,3273-3291).
gatatgaacatggctttat

SEQ ID NO: 734441 - DNA, 19 bp, Mus musculus
  siRNA target sequence for 2900045N06Rik (NM_028385.1,3369-3387).
caccgcaaaggaaaaaggt

SEQ ID NO: 734442 - DNA, 19 bp, Mus musculus
  siRNA target sequence for 2900045N06Rik (NM_028385.1,3394-3412).
gctagagtaccgcaaaaga

SEQ ID NO: 734443 - DNA, 19 bp, Mus musculus
  siRNA target sequence for 2900045N06Rik (NM_028385.1,3395-3413).
ctagagtaccgcaaaagaa

SEQ ID NO: 734444 - DNA, 19 bp, Mus musculus
  siRNA target sequence for 2900045N06Rik (NM_028385.1,3487-3505).
gcaaggcagcagtaactct

SEQ ID NO: 734445 - DNA, 19 bp, Mus musculus
  siRNA target sequence for 2900045N06Rik (NM_028385.1,3554-3572).
ccgtcatcccctcacaaaa

SEQ ID NO: 734446 - DNA, 19 bp, Mus musculus
  siRNA target sequence for 2900045N06Rik (NM_028385.1,3555-3573).
cgtcatcccctcacaaaaa

SEQ ID NO: 734447 - DNA, 19 bp, Mus musculus
  siRNA target sequence for 2900045N06Rik (NM_028385.1,3556-3574).
gtcatcccctcacaaaaaa

SEQ ID NO: 734448 - DNA, 19 bp, Mus musculus
  siRNA target sequence for 2900045N06Rik (NM_028385.1,3611-3629).
gcggtaagcccgtcagatt

SEQ ID NO: 734449 - DNA, 19 bp, Mus musculus
  siRNA target sequence for 2900045N06Rik (NM_028385.1,3685-3703).
gatggttcctacatcagtt

SEQ ID NO: 734450 - DNA, 19 bp, Mus musculus
  siRNA target sequence for 2900045N06Rik (NM_028385.1,3780-3798).
ctccaacatgggagagtaa

SEQ ID NO: 734451 - DNA, 19 bp, Mus musculus
  siRNA target sequence for 2900045N06Rik (NM_028385.1,3783-3801).
caacatgggagagtaacat

SEQ ID NO: 734452 - DNA, 19 bp, Mus musculus
  siRNA target sequence for 2900045N06Rik (NM_028385.1,3795-3813).
gtaacatcacagagaaaga

SEQ ID NO: 734453 - DNA, 19 bp, Mus musculus
  siRNA target sequence for 2900045N06Rik (NM_028385.1,3850-3868).
gagctcagcactctctaaa

SEQ ID NO: 734454 - DNA, 19 bp, Mus musculus
  siRNA target sequence for 2900045N06Rik (NM_028385.1,3853-3871).
ctcagcactctctaaagga

SEQ ID NO: 734455 - DNA, 19 bp, Mus musculus
  siRNA target sequence for 2900045N06Rik (NM_028385.1,3885-3903).
gcccttccagatatagcta

SEQ ID NO: 734456 - DNA, 19 bp, Mus musculus
  siRNA target sequence for 2900045N06Rik (NM_028385.1,3920-3938).
gacagtccacggacagaat

SEQ ID NO: 734457 - DNA, 19 bp, Mus musculus
  siRNA target sequence for 2900045N06Rik (NM_028385.1,3995-4013).
ccaggatacagttatcgaa

SEQ ID NO: 734458 - DNA, 19 bp, Mus musculus
  siRNA target sequence for 2900045N06Rik (NM_028385.1,4112-4130).
gactcgttggccccattta

SEQ ID NO: 734459 - DNA, 19 bp, Mus musculus
  siRNA target sequence for 2900045N06Rik (NM_028385.1,4131-4149).
cggggactccagggtatta

SEQ ID NO: 734460 - DNA, 19 bp, Mus musculus
  siRNA target sequence for 2900045N06Rik (NM_028385.1,4133-4151).
gggactccagggtattaca

SEQ ID NO: 734461 - DNA, 19 bp, Mus musculus
  siRNA target sequence for 2900045N06Rik (NM_028385.1,4174-4192).
cagcactggcagcaatctt

SEQ ID NO: 734462 - DNA, 19 bp, Mus musculus
  siRNA target sequence for 2900045N06Rik (NM_028385.1,4257-4275).
cctcagactcggtttctca

SEQ ID NO: 734463 - DNA, 19 bp, Mus musculus
  siRNA target sequence for 2900045N06Rik (NM_028385.1,4399-4417).
ggtatctgcggtttccaat

SEQ ID NO: 734464 - DNA, 19 bp, Mus musculus
  siRNA target sequence for 2900045N06Rik (NM_028385.1,4400-4418).
gtatctgcggtttccaatt

SEQ ID NO: 734465 - DNA, 19 bp, Mus musculus
  siRNA target sequence for 2900037I21Rik (NM_028390.1,275-293).
gtgccagacgagagaatct

SEQ ID NO: 734466 - DNA, 19 bp, Mus musculus
  siRNA target sequence for 2900037I21Rik (NM_028390.1,365-383).
cactttcagaagcaagtaa

SEQ ID NO: 734467 - DNA, 19 bp, Mus musculus
  siRNA target sequence for 2900037I21Rik (NM_028390.1,406-424).
ggcgaagaaaaatcttgta

SEQ ID NO: 734468 - DNA, 19 bp, Mus musculus
  siRNA target sequence for 2900037I21Rik (NM_028390.1,408-426).
cgaagaaaaatcttgtaca

SEQ ID NO: 734469 - DNA, 19 bp, Mus musculus
  siRNA target sequence for 2900037I21Rik (NM_028390.1,449-467).
gttgttctgacaaaattga

SEQ ID NO: 734470 - DNA, 19 bp, Mus musculus
  siRNA target sequence for 2900037I21Rik (NM_028390.1,471-489).
gggagctccggacttagaa

SEQ ID NO: 734471 - DNA, 19 bp, Mus musculus
  siRNA target sequence for 2900037I21Rik (NM_028390.1,472-490).
ggagctccggacttagaaa

SEQ ID NO: 734472 - DNA, 19 bp, Mus musculus
  siRNA target sequence for 2900037I21Rik (NM_028390.1,473-491).
gagctccggacttagaaaa

SEQ ID NO: 734473 - DNA, 19 bp, Mus musculus
  siRNA target sequence for 2900037I21Rik (NM_028390.1,475-493).
gctccggacttagaaaata

SEQ ID NO: 734474 - DNA, 19 bp, Mus musculus
  siRNA target sequence for 2900037I21Rik (NM_028390.1,479-497).
cggacttagaaaatacaga

SEQ ID NO: 734475 - DNA, 19 bp, Mus musculus
  siRNA target sequence for 2900037I21Rik (NM_028390.1,644-662).
ctgcaacctcctcagttaa

SEQ ID NO: 734476 - DNA, 19 bp, Mus musculus
  siRNA target sequence for 2900037I21Rik (NM_028390.1,658-676).
gttaaaactcgaatgcaaa

SEQ ID NO: 734477 - DNA, 19 bp, Mus musculus
  siRNA target sequence for 2900037I21Rik (NM_028390.1,718-736).
gatgatgtatcagaaagtt

SEQ ID NO: 734478 - DNA, 19 bp, Mus musculus
  siRNA target sequence for 2900037I21Rik (NM_028390.1,840-858).
caaccttgctgcaacgatt

SEQ ID NO: 734479 - DNA, 19 bp, Mus musculus
  siRNA target sequence for 2900037I21Rik (NM_028390.1,844-862).
cttgctgcaacgatttgct

SEQ ID NO: 734480 - DNA, 19 bp, Mus musculus
  siRNA target sequence for 2900037I21Rik (NM_028390.1,861-879).
ctcctgggaagatgatgta

SEQ ID NO: 734481 - DNA, 19 bp, Mus musculus
  siRNA target sequence for 2900037I21Rik (NM_028390.1,918-936).
gcctggtaccgcttgttta

SEQ ID NO: 734482 - DNA, 19 bp, Mus musculus
  siRNA target sequence for 2900037I21Rik (NM_028390.1,919-937).
cctggtaccgcttgtttat

SEQ ID NO: 734483 - DNA, 19 bp, Mus musculus
  siRNA target sequence for 2900037I21Rik (NM_028390.1,922-940).
ggtaccgcttgtttatcca

SEQ ID NO: 734484 - DNA, 19 bp, Mus musculus
  siRNA target sequence for 2900037I21Rik (NM_028390.1,927-945).
cgcttgtttatccaaatct

SEQ ID NO: 734485 - DNA, 19 bp, Mus musculus
  siRNA target sequence for 2900037I21Rik (NM_028390.1,928-946).
gcttgtttatccaaatctt

SEQ ID NO: 734486 - DNA, 19 bp, Mus musculus
  siRNA target sequence for 2900037I21Rik (NM_028390.1,1040-1058).
ggaaagacccatcttcaaa

SEQ ID NO: 734487 - DNA, 19 bp, Mus musculus
  siRNA target sequence for 2900037I21Rik (NM_028390.1,1041-1059).
gaaagacccatcttcaaat

SEQ ID NO: 734488 - DNA, 19 bp, Mus musculus
  siRNA target sequence for 2900037I21Rik (NM_028390.1,1149-1167).
ccgtgaggcacaaaatcct

SEQ ID NO: 734489 - DNA, 19 bp, Mus musculus
  siRNA target sequence for 2900037I21Rik (NM_028390.1,1280-1298).
gtctacagtcacaatccaa

SEQ ID NO: 734490 - DNA, 19 bp, Mus musculus
  siRNA target sequence for 2900037I21Rik (NM_028390.1,1289-1307).
cacaatccaaggacaaact

SEQ ID NO: 734491 - DNA, 19 bp, Mus musculus
  siRNA target sequence for 2900037I21Rik (NM_028390.1,1350-1368).
ctttggagagcgttgtcaa

SEQ ID NO: 734492 - DNA, 19 bp, Mus musculus
  siRNA target sequence for 2900037I21Rik (NM_028390.1,1389-1407).
gtcttatagagcatctcat

SEQ ID NO: 734493 - DNA, 19 bp, Mus musculus
  siRNA target sequence for 2900037I21Rik (NM_028390.1,1413-1431).
cccaaatatcactccaaat

SEQ ID NO: 734494 - DNA, 19 bp, Mus musculus
  siRNA target sequence for 2900037I21Rik (NM_028390.1,1446-1464).
ggaaagattattcaaacaa

SEQ ID NO: 734495 - DNA, 19 bp, Mus musculus
  siRNA target sequence for 2900037I21Rik (NM_028390.1,1473-1491).
ctcgtctactacccattta

SEQ ID NO: 734496 - DNA, 19 bp, Mus musculus
  siRNA target sequence for 2900037I21Rik (NM_028390.1,1476-1494).
gtctactacccatttagca

SEQ ID NO: 734497 - DNA, 19 bp, Mus musculus
  siRNA target sequence for 2900037I21Rik (NM_028390.1,1544-1562).
gacttgacaagggcaattt

SEQ ID NO: 734498 - DNA, 19 bp, Mus musculus
  siRNA target sequence for 2900037I21Rik (NM_028390.1,1549-1567).
gacaagggcaatttatgga

SEQ ID NO: 734499 - DNA, 19 bp, Mus musculus
  siRNA target sequence for 2900037I21Rik (NM_028390.1,1632-1650).
gaacactccactcaagaaa

SEQ ID NO: 734500 - DNA, 19 bp, Mus musculus
  siRNA target sequence for 2900037I21Rik (NM_028390.1,1662-1680).
cgcaagcaccccattgact

SEQ ID NO: 734501 - DNA, 19 bp, Mus musculus
  siRNA target sequence for 2900037I21Rik (NM_028390.1,1663-1681).
gcaagcaccccattgactt

SEQ ID NO: 734502 - DNA, 19 bp, Mus musculus
  siRNA target sequence for 2900037I21Rik (NM_028390.1,1679-1697).
cttctgtaacagataaggt

SEQ ID NO: 734503 - DNA, 19 bp, Mus musculus
  siRNA target sequence for 2900037I21Rik (NM_028390.1,1711-1729).
ccagcagtgaagctttcta

SEQ ID NO: 734504 - DNA, 19 bp, Mus musculus
  siRNA target sequence for 2900037I21Rik (NM_028390.1,1904-1922).
gctccagagtcattaacga

SEQ ID NO: 734505 - DNA, 19 bp, Mus musculus
  siRNA target sequence for 2900037I21Rik (NM_028390.1,2020-2038).
gatgcgctcaatatctctt

SEQ ID NO: 734506 - DNA, 19 bp, Mus musculus
  siRNA target sequence for 2900037I21Rik (NM_028390.1,2023-2041).
gcgctcaatatctcttcaa

SEQ ID NO: 734507 - DNA, 19 bp, Mus musculus
  siRNA target sequence for 2900037I21Rik (NM_028390.1,2024-2042).
cgctcaatatctcttcaat

SEQ ID NO: 734508 - DNA, 19 bp, Mus musculus
  siRNA target sequence for 2900037I21Rik (NM_028390.1,2075-2093).
gtgtggtgagcctagagaa

SEQ ID NO: 734509 - DNA, 19 bp, Mus musculus
  siRNA target sequence for 2900037I21Rik (NM_028390.1,2085-2103).
cctagagaatgtaatttct

SEQ ID NO: 734510 - DNA, 19 bp, Mus musculus
  siRNA target sequence for 2900037I21Rik (NM_028390.1,2217-2235).
ggaccgggaccttctctat

SEQ ID NO: 734511 - DNA, 19 bp, Mus musculus
  siRNA target sequence for 2900037I21Rik (NM_028390.1,2218-2236).
gaccgggaccttctctata

SEQ ID NO: 734512 - DNA, 19 bp, Mus musculus
  siRNA target sequence for 2900037I21Rik (NM_028390.1,2221-2239).
cgggaccttctctatagca

SEQ ID NO: 734513 - DNA, 19 bp, Mus musculus
  siRNA target sequence for 2900037I21Rik (NM_028390.1,2226-2244).
ccttctctatagcattgat

SEQ ID NO: 734514 - DNA, 19 bp, Mus musculus
  siRNA target sequence for 2900037I21Rik (NM_028390.1,2242-2260).
gatgcatataggtctcaaa

SEQ ID NO: 734515 - DNA, 19 bp, Mus musculus
  siRNA target sequence for 2900037I21Rik (NM_028390.1,2246-2264).
catataggtctcaaagatt

SEQ ID NO: 734516 - DNA, 19 bp, Mus musculus
  siRNA target sequence for 2900037I21Rik (NM_028390.1,2282-2300).
cttccataaagcaagtgat

SEQ ID NO: 734517 - DNA, 19 bp, Mus musculus
  siRNA target sequence for 2900037I21Rik (NM_028390.1,2302-2320).
gttcgaaaggaagatgtta

SEQ ID NO: 734518 - DNA, 19 bp, Mus musculus
  siRNA target sequence for 2900037I21Rik (NM_028390.1,2305-2323).
cgaaaggaagatgttactt

SEQ ID NO: 734519 - DNA, 19 bp, Mus musculus
  siRNA target sequence for 2900037I21Rik (NM_028390.1,2331-2349).
gggtgaaaagaaaaacgta

SEQ ID NO: 734520 - DNA, 19 bp, Mus musculus
  siRNA target sequence for 2900037I21Rik (NM_028390.1,2332-2350).
ggtgaaaagaaaaacgtat

SEQ ID NO: 734521 - DNA, 19 bp, Mus musculus
  siRNA target sequence for 2900037I21Rik (NM_028390.1,2354-2372).
ctggtcaagttaatatcaa

SEQ ID NO: 734522 - DNA, 19 bp, Mus musculus
  siRNA target sequence for 2900037I21Rik (NM_028390.1,2385-2403).
ggagctcaataatgacata

SEQ ID NO: 734523 - DNA, 19 bp, Mus musculus
  siRNA target sequence for 2900037I21Rik (NM_028390.1,2388-2406).
gctcaataatgacataaat

SEQ ID NO: 734524 - DNA, 19 bp, Mus musculus
  siRNA target sequence for 2900037I21Rik (NM_028390.1,2531-2549).
gagcacttctgattgatga

SEQ ID NO: 734525 - DNA, 19 bp, Mus musculus
  siRNA target sequence for 2900037I21Rik (NM_028390.1,2599-2617).
gtcatatcccagagtgaat

SEQ ID NO: 734526 - DNA, 19 bp, Mus musculus
  siRNA target sequence for 2900037I21Rik (NM_028390.1,2612-2630).
gtgaatttgctccatctaa

SEQ ID NO: 734527 - DNA, 19 bp, Mus musculus
  siRNA target sequence for 2900037I21Rik (NM_028390.1,2665-2683).
ctgaaggcagattttgtct

SEQ ID NO: 734528 - DNA, 19 bp, Mus musculus
  siRNA target sequence for 2900037I21Rik (NM_028390.1,2682-2700).
ctgcagcactgcgcaaaaa

SEQ ID NO: 734529 - DNA, 19 bp, Mus musculus
  siRNA target sequence for 2900037I21Rik (NM_028390.1,2687-2705).
gcactgcgcaaaaaacaga

SEQ ID NO: 734530 - DNA, 19 bp, Mus musculus
  siRNA target sequence for 2900037I21Rik (NM_028390.1,2688-2706).
cactgcgcaaaaaacagat

SEQ ID NO: 734531 - DNA, 19 bp, Mus musculus
  siRNA target sequence for 2900037I21Rik (NM_028390.1,2702-2720).
cagatgcatcaaattatta

SEQ ID NO: 734532 - DNA, 19 bp, Mus musculus
  siRNA target sequence for 2900037I21Rik (NM_028390.1,2704-2722).
gatgcatcaaattattact

SEQ ID NO: 734533 - DNA, 19 bp, Mus musculus
  siRNA target sequence for 2900037I21Rik (NM_028390.1,2721-2739).
ctacttaattatgctaaaa

SEQ ID NO: 734534 - DNA, 19 bp, Mus musculus
  siRNA target sequence for 2900037I21Rik (NM_028390.1,2724-2742).
cttaattatgctaaaagct

SEQ ID NO: 734535 - DNA, 19 bp, Mus musculus
  siRNA target sequence for 2900037I21Rik (NM_028390.1,2757-2775).
ggtcgccactccattagca

SEQ ID NO: 734536 - DNA, 19 bp, Mus musculus
  siRNA target sequence for 2900037I21Rik (NM_028390.1,2795-2813).
gtggtgacgctctgacatt

SEQ ID NO: 734537 - DNA, 19 bp, Mus musculus
  siRNA target sequence for 2900037I21Rik (NM_028390.1,2833-2851).
catgatgtttccaatgact

SEQ ID NO: 734538 - DNA, 19 bp, Mus musculus
  siRNA target sequence for 2900037I21Rik (NM_028390.1,2869-2887).
gtttacagcctggtacaaa

SEQ ID NO: 734539 - DNA, 19 bp, Mus musculus
  siRNA target sequence for 2900037I21Rik (NM_028390.1,2928-2946).
caagtccaaggctattact

SEQ ID NO: 734540 - DNA, 19 bp, Mus musculus
  siRNA target sequence for 2900037I21Rik (NM_028390.1,2937-2955).
ggctattactccaaagaga

SEQ ID NO: 734541 - DNA, 19 bp, Mus musculus
  siRNA target sequence for 2900037I21Rik (NM_028390.1,2958-2976).
cctcacatctataacttca

SEQ ID NO: 734542 - DNA, 19 bp, Mus musculus
  siRNA target sequence for 2900037I21Rik (NM_028390.1,2959-2977).
ctcacatctataacttcaa

SEQ ID NO: 734543 - DNA, 19 bp, Mus musculus
  siRNA target sequence for 2900037I21Rik (NM_028390.1,2982-3000).
cagccttcattcttcagtt

SEQ ID NO: 734544 - DNA, 19 bp, Mus musculus
  siRNA target sequence for 2900037I21Rik (NM_028390.1,3028-3046).
gtgcgtaccagcaacttta

SEQ ID NO: 734545 - DNA, 19 bp, Mus musculus
  siRNA target sequence for 2900037I21Rik (NM_028390.1,3077-3095).
cttctgttggagacactaa

SEQ ID NO: 734546 - DNA, 19 bp, Mus musculus
  siRNA target sequence for 2900037I21Rik (NM_028390.1,3085-3103).
ggagacactaagtttgctt

SEQ ID NO: 734547 - DNA, 19 bp, Mus musculus
  siRNA target sequence for 2900037I21Rik (NM_028390.1,3108-3126).
caaggtaccttttttgtct

SEQ ID NO: 734548 - DNA, 19 bp, Mus musculus
  siRNA target sequence for 2900037I21Rik (NM_028390.1,3191-3209).
gtttccttaccatatttga

SEQ ID NO: 734549 - DNA, 19 bp, Mus musculus
  siRNA target sequence for 2900037I21Rik (NM_028390.1,3250-3268).
gttctctctggcaactgta

SEQ ID NO: 734550 - DNA, 19 bp, Mus musculus
  siRNA target sequence for 2900037I21Rik (NM_028390.1,3255-3273).
ctctggcaactgtatctct

SEQ ID NO: 734551 - DNA, 19 bp, Mus musculus
  siRNA target sequence for 2900037I21Rik (NM_028390.1,3257-3275).
ctggcaactgtatctctta

SEQ ID NO: 734552 - DNA, 19 bp, Mus musculus
  siRNA target sequence for 2900037I21Rik (NM_028390.1,3276-3294).
ctggacttacccagatgat

SEQ ID NO: 734553 - DNA, 19 bp, Mus musculus
  siRNA target sequence for 2900037I21Rik (NM_028390.1,3278-3296).
ggacttacccagatgatga

SEQ ID NO: 734554 - DNA, 19 bp, Mus musculus
  siRNA target sequence for 2900037I21Rik (NM_028390.1,3301-3319).
cgaaagaatcccataggaa

SEQ ID NO: 734555 - DNA, 19 bp, Mus musculus
  siRNA target sequence for 2900037I21Rik (NM_028390.1,3306-3324).
gaatcccataggaaggata

SEQ ID NO: 734556 - DNA, 19 bp, Mus musculus
  siRNA target sequence for 2900037I21Rik (NM_028390.1,3311-3329).
ccataggaaggataaatct

SEQ ID NO: 734557 - DNA, 19 bp, Mus musculus
  siRNA target sequence for 2900037I21Rik (NM_028390.1,3321-3339).
gataaatctggccaattgt

SEQ ID NO: 734558 - DNA, 19 bp, Mus musculus
  siRNA target sequence for 2900037I21Rik (NM_028390.1,3338-3356).
gtatcagtcatcagataga

SEQ ID NO: 734559 - DNA, 19 bp, Mus musculus
  siRNA target sequence for 2900037I21Rik (NM_028390.1,3385-3403).
cgcaacactctggaattga

SEQ ID NO: 734560 - DNA, 19 bp, Mus musculus
  siRNA target sequence for 2900037I21Rik (NM_028390.1,3392-3410).
ctctggaattgattactgt

SEQ ID NO: 734561 - DNA, 19 bp, Mus musculus
  siRNA target sequence for 2900037I21Rik (NM_028390.1,3407-3425).
ctgtccgaccacaaagaga

SEQ ID NO: 734562 - DNA, 19 bp, Mus musculus
  siRNA target sequence for 2900037I21Rik (NM_028390.1,3485-3503).
ggctctctgcagatactaa

SEQ ID NO: 734563 - DNA, 19 bp, Mus musculus
  siRNA target sequence for 2900037I21Rik (NM_028390.1,3486-3504).
gctctctgcagatactaaa

SEQ ID NO: 734564 - DNA, 19 bp, Mus musculus
  siRNA target sequence for 2900037I21Rik (NM_028390.1,3517-3535).
ctctggatgcagaaactca

SEQ ID NO: 734565 - DNA, 19 bp, Mus musculus
  siRNA target sequence for 2900054P12Rik (NM_028407.2,114-132).
ggaggacgcacctcttgaa

SEQ ID NO: 734566 - DNA, 19 bp, Mus musculus
  siRNA target sequence for 2900054P12Rik (NM_028407.2,115-133).
gaggacgcacctcttgaaa

SEQ ID NO: 734567 - DNA, 19 bp, Mus musculus
  siRNA target sequence for 2900054P12Rik (NM_028407.2,117-135).
ggacgcacctcttgaaaat

SEQ ID NO: 734568 - DNA, 19 bp, Mus musculus
  siRNA target sequence for 2900054P12Rik (NM_028407.2,297-315).
cagaggctctccttataga

SEQ ID NO: 734569 - DNA, 19 bp, Mus musculus
  siRNA target sequence for 2900054P12Rik (NM_028407.2,301-319).
ggctctccttatagagaat

SEQ ID NO: 734570 - DNA, 19 bp, Mus musculus
  siRNA target sequence for 2900054P12Rik (NM_028407.2,347-365).
gagggaccccctttttcca

SEQ ID NO: 734571 - DNA, 19 bp, Mus musculus
  siRNA target sequence for 2900054P12Rik (NM_028407.2,452-470).
ctgtgaaaacgcagttact

SEQ ID NO: 734572 - DNA, 19 bp, Mus musculus
  siRNA target sequence for 2900054P12Rik (NM_028407.2,454-472).
gtgaaaacgcagttactga

SEQ ID NO: 734573 - DNA, 19 bp, Mus musculus
  siRNA target sequence for 2900054P12Rik (NM_028407.2,471-489).
gaaactcaagcgtctgtta

SEQ ID NO: 734574 - DNA, 19 bp, Mus musculus
  siRNA target sequence for 2900054P12Rik (NM_028407.2,501-519).
cggaagtggatcattgcat

SEQ ID NO: 734575 - DNA, 19 bp, Mus musculus
  siRNA target sequence for 2900054P12Rik (NM_028407.2,509-527).
gatcattgcatgatgttca

SEQ ID NO: 734576 - DNA, 19 bp, Mus musculus
  siRNA target sequence for 2900054P12Rik (NM_028407.2,559-577).
gacggtgatcagatatata

SEQ ID NO: 734577 - DNA, 19 bp, Mus musculus
  siRNA target sequence for 2900054P12Rik (NM_028407.2,664-682).
cttgcaactcgatgtaact

SEQ ID NO: 734578 - DNA, 19 bp, Mus musculus
  siRNA target sequence for 2900054P12Rik (NM_028407.2,702-720).
ggaaaagtgtacatatgct

SEQ ID NO: 734579 - DNA, 19 bp, Mus musculus
  siRNA target sequence for 2900054P12Rik (NM_028407.2,750-768).
gattcctcctcaagtacta

SEQ ID NO: 734580 - DNA, 19 bp, Mus musculus
  siRNA target sequence for 2900054P12Rik (NM_028407.2,804-822).
cgcccagggaaaactaata

SEQ ID NO: 734581 - DNA, 19 bp, Mus musculus
  siRNA target sequence for 2900054P12Rik (NM_028407.2,924-942).
caacagccgtggtttgcaa

SEQ ID NO: 734582 - DNA, 19 bp, Mus musculus
  siRNA target sequence for 2900054P12Rik (NM_028407.2,1042-1060).
catcatttggcagagaaaa

SEQ ID NO: 734583 - DNA, 19 bp, Mus musculus
  siRNA target sequence for 2900054P12Rik (NM_028407.2,1115-1133).
gtacagtggaccagactaa

SEQ ID NO: 734584 - DNA, 19 bp, Mus musculus
  siRNA target sequence for 2900054P12Rik (NM_028407.2,1163-1181).
ccaagtccttgcagctttt

SEQ ID NO: 734585 - DNA, 19 bp, Mus musculus
  siRNA target sequence for 2900054P12Rik (NM_028407.2,1164-1182).
caagtccttgcagctttta

SEQ ID NO: 734586 - DNA, 19 bp, Mus musculus
  siRNA target sequence for 2900054P12Rik (NM_028407.2,1186-1204).
ccatccaacttgagttctt

SEQ ID NO: 734587 - DNA, 19 bp, Mus musculus
  siRNA target sequence for 2900054P12Rik (NM_028407.2,1187-1205).
catccaacttgagttcttt

SEQ ID NO: 734588 - DNA, 19 bp, Mus musculus
  siRNA target sequence for 2900054P12Rik (NM_028407.2,1227-1245).
ctcctcaccaagtagaact

SEQ ID NO: 734589 - DNA, 19 bp, Mus musculus
  siRNA target sequence for 2900054P12Rik (NM_028407.2,1238-1256).
gtagaacttccacatgtaa

SEQ ID NO: 734590 - DNA, 19 bp, Mus musculus
  siRNA target sequence for 2900054P12Rik (NM_028407.2,1272-1290).
cacaccatgccattcaaaa

SEQ ID NO: 734591 - DNA, 19 bp, Mus musculus
  siRNA target sequence for 2900054P12Rik (NM_028407.2,1277-1295).
catgccattcaaaacatca

SEQ ID NO: 734592 - DNA, 19 bp, Mus musculus
  siRNA target sequence for 2900054P12Rik (NM_028407.2,1294-1312).
cagccaacatcgaatcaaa

SEQ ID NO: 734593 - DNA, 19 bp, Mus musculus
  siRNA target sequence for 2900054P12Rik (NM_028407.2,1332-1350).
gaatctgaaaacgtctaaa

SEQ ID NO: 734594 - DNA, 19 bp, Mus musculus
  siRNA target sequence for 2900054P12Rik (NM_028407.2,1434-1452).
catcccaaggccattagca

SEQ ID NO: 734595 - DNA, 19 bp, Mus musculus
  siRNA target sequence for 2900054P12Rik (NM_028407.2,1445-1463).
cattagcacggccaaaaga

SEQ ID NO: 734596 - DNA, 19 bp, Mus musculus
  siRNA target sequence for 2900054P12Rik (NM_028407.2,1474-1492).
ccacacagcggtttgcatt

SEQ ID NO: 734597 - DNA, 19 bp, Mus musculus
  siRNA target sequence for 2900054P12Rik (NM_028407.2,1497-1515).
ggattgtgtggcctctaat

SEQ ID NO: 734598 - DNA, 19 bp, Mus musculus
  siRNA target sequence for 2900054P12Rik (NM_028407.2,1502-1520).
gtgtggcctctaatcgata

SEQ ID NO: 734599 - DNA, 19 bp, Mus musculus
  siRNA target sequence for 2900054P12Rik (NM_028407.2,1504-1522).
gtggcctctaatcgatatt

SEQ ID NO: 734600 - DNA, 19 bp, Mus musculus
  siRNA target sequence for 2900054P12Rik (NM_028407.2,1506-1524).
ggcctctaatcgatattct

SEQ ID NO: 734601 - DNA, 19 bp, Mus musculus
  siRNA target sequence for 2900054P12Rik (NM_028407.2,1517-1535).
gatattctcgtcttcctaa

SEQ ID NO: 734602 - DNA, 19 bp, Mus musculus
  siRNA target sequence for 2900054P12Rik (NM_028407.2,1523-1541).
ctcgtcttcctaaaccaaa

SEQ ID NO: 734603 - DNA, 19 bp, Mus musculus
  siRNA target sequence for 2900092C05Rik (NM_028434.1,48-66).
cacaaggtttggagttctt

SEQ ID NO: 734604 - DNA, 19 bp, Mus musculus
  siRNA target sequence for 2900092C05Rik (NM_028434.1,118-136).
cttatgcagatgagcttta

SEQ ID NO: 734605 - DNA, 19 bp, Mus musculus
  siRNA target sequence for 2900092C05Rik (NM_028434.1,163-181).
cagggagtagacagttaga

SEQ ID NO: 734606 - DNA, 19 bp, Mus musculus
  siRNA target sequence for 2900092C05Rik (NM_028434.1,208-226).
ccagaggcttacttgcaat

SEQ ID NO: 734607 - DNA, 19 bp, Mus musculus
  siRNA target sequence for 2900092C05Rik (NM_028434.1,209-227).
cagaggcttacttgcaata

SEQ ID NO: 734608 - DNA, 19 bp, Mus musculus
  siRNA target sequence for 2900092C05Rik (NM_028434.1,211-229).
gaggcttacttgcaatact

SEQ ID NO: 734609 - DNA, 19 bp, Mus musculus
  siRNA target sequence for 2900092C05Rik (NM_028434.1,231-249).
cgaccaacagaagtaataa

SEQ ID NO: 734610 - DNA, 19 bp, Mus musculus
  siRNA target sequence for 2900092C05Rik (NM_028434.1,276-294).
ccatcagaattcgatacaa

SEQ ID NO: 734611 - DNA, 19 bp, Mus musculus
  siRNA target sequence for 2900092C05Rik (NM_028434.1,277-295).
catcagaattcgatacaaa

SEQ ID NO: 734612 - DNA, 19 bp, Mus musculus
  siRNA target sequence for 2900092C05Rik (NM_028434.1,343-361).
caagtatagcctttgtcat

SEQ ID NO: 734613 - DNA, 19 bp, Mus musculus
  siRNA target sequence for 2900092C05Rik (NM_028434.1,383-401).
gctctcctacgtgatatat

SEQ ID NO: 734614 - DNA, 19 bp, Mus musculus
  siRNA target sequence for 2900092C05Rik (NM_028434.1,395-413).
gatatatcgactggtaaaa

SEQ ID NO: 734615 - DNA, 19 bp, Mus musculus
  siRNA target sequence for 2900092C05Rik (NM_028434.1,455-473).
cgagattccacttgtagat

SEQ ID NO: 734616 - DNA, 19 bp, Mus musculus
  siRNA target sequence for 2900092C05Rik (NM_028434.1,534-552).
gagctgggaaaattcatta

SEQ ID NO: 734617 - DNA, 19 bp, Mus musculus
  siRNA target sequence for 3110009E18Rik (NM_028439.1,79-97).
catttgagcatcggaattt

SEQ ID NO: 734618 - DNA, 19 bp, Mus musculus
  siRNA target sequence for 3110009E18Rik (NM_028439.1,98-116).
caaacctgtagtgtatcat

SEQ ID NO: 734619 - DNA, 19 bp, Mus musculus
  siRNA target sequence for 3110009E18Rik (NM_028439.1,128-146).
gcatcaaactgtaaaggaa

SEQ ID NO: 734620 - DNA, 19 bp, Mus musculus
  siRNA target sequence for 3110009E18Rik (NM_028439.1,132-150).
caaactgtaaaggaattta

SEQ ID NO: 734621 - DNA, 19 bp, Mus musculus
  siRNA target sequence for 3110009E18Rik (NM_028439.1,198-216).
cccctcagaaattacaaat

SEQ ID NO: 734622 - DNA, 19 bp, Mus musculus
  siRNA target sequence for 3110009E18Rik (NM_028439.1,203-221).
cagaaattacaaatacgat

SEQ ID NO: 734623 - DNA, 19 bp, Mus musculus
  siRNA target sequence for 3110009E18Rik (NM_028439.1,218-236).
cgatacactaaagattctt

SEQ ID NO: 734624 - DNA, 19 bp, Mus musculus
  siRNA target sequence for 3110009E18Rik (NM_028439.1,237-255).
catcaagctcacaaagcaa

SEQ ID NO: 734625 - DNA, 19 bp, Mus musculus
  siRNA target sequence for 6330514M23Rik (NM_028444.1,575-593).
ccgcactggtttacagaaa

SEQ ID NO: 734626 - DNA, 19 bp, Mus musculus
  siRNA target sequence for 6330514M23Rik (NM_028444.1,578-596).
cactggtttacagaaagtt

SEQ ID NO: 734627 - DNA, 19 bp, Mus musculus
  siRNA target sequence for 6330514M23Rik (NM_028444.1,611-629).
ggctctttccagtcgtaaa

SEQ ID NO: 734628 - DNA, 19 bp, Mus musculus
  siRNA target sequence for 6330514M23Rik (NM_028444.1,709-727).
cagctcagcctgaaatgga

SEQ ID NO: 734629 - DNA, 19 bp, Mus musculus
  siRNA target sequence for 3110038B19Rik (NM_028447.1,240-258).
ctgcccccacacgtgtatt

SEQ ID NO: 734630 - DNA, 19 bp, Mus musculus
  siRNA target sequence for 3110038B19Rik (NM_028447.1,571-589).
ctccggttacaggtatctt

SEQ ID NO: 734631 - DNA, 19 bp, Mus musculus
  siRNA target sequence for 3110038B19Rik (NM_028447.1,720-738).
ggcgggatctggggtttta

SEQ ID NO: 734632 - DNA, 19 bp, Mus musculus
  siRNA target sequence for 3110038B19Rik (NM_028447.1,721-739).
gcgggatctggggttttat

SEQ ID NO: 734633 - DNA, 19 bp, Mus musculus
  siRNA target sequence for 3110038B19Rik (NM_028447.1,722-740).
cgggatctggggttttatt

SEQ ID NO: 734634 - DNA, 19 bp, Mus musculus
  siRNA target sequence for 3110038B19Rik (NM_028447.1,755-773).
gaaccctatggtgaaatct

SEQ ID NO: 734635 - DNA, 19 bp, Mus musculus
  siRNA target sequence for 3110038B19Rik (NM_028447.1,777-795).
ctggataagaccaagcatt

SEQ ID NO: 734636 - DNA, 19 bp, Mus musculus
  siRNA target sequence for 3110038B19Rik (NM_028447.1,825-843).
cctggcatggctccatata

SEQ ID NO: 734637 - DNA, 19 bp, Mus musculus
  siRNA target sequence for 3110038B19Rik (NM_028447.1,826-844).
ctggcatggctccatatat

SEQ ID NO: 734638 - DNA, 19 bp, Mus musculus
  siRNA target sequence for 3110038B19Rik (NM_028447.1,828-846).
ggcatggctccatatatca

SEQ ID NO: 734639 - DNA, 19 bp, Mus musculus
  siRNA target sequence for 3110038B19Rik (NM_028447.1,829-847).
gcatggctccatatatcaa

SEQ ID NO: 734640 - DNA, 19 bp, Mus musculus
  siRNA target sequence for 3110038B19Rik (NM_028447.1,830-848).
catggctccatatatcaaa

SEQ ID NO: 734641 - DNA, 19 bp, Mus musculus
  siRNA target sequence for 3110038B19Rik (NM_028447.1,833-851).
ggctccatatatcaaatct

SEQ ID NO: 734642 - DNA, 19 bp, Mus musculus
  siRNA target sequence for 3110038B19Rik (NM_028447.1,850-868).
ctggaggtgaactggatat

SEQ ID NO: 734643 - DNA, 19 bp, Mus musculus
  siRNA target sequence for 3110038B19Rik (NM_028447.1,872-890).
cgtaacctcaaataaagaa

SEQ ID NO: 734644 - DNA, 19 bp, Mus musculus
  siRNA target sequence for 3110038B19Rik (NM_028447.1,877-895).
cctcaaataaagaagtgaa

SEQ ID NO: 734645 - DNA, 19 bp, Mus musculus
  siRNA target sequence for 3110038B19Rik (NM_028447.1,954-972).
gaagctggacagtccaata

SEQ ID NO: 734646 - DNA, 19 bp, Mus musculus
  siRNA target sequence for 3110038B19Rik (NM_028447.1,1048-1066).
gagcgatccacgagaaaca

SEQ ID NO: 734647 - DNA, 19 bp, Mus musculus
  siRNA target sequence for 3110038B19Rik (NM_028447.1,1050-1068).
gcgatccacgagaaacaga

SEQ ID NO: 734648 - DNA, 19 bp, Mus musculus
  siRNA target sequence for 3110038B19Rik (NM_028447.1,1069-1087).
cggcggtgtcggtagaaaa

SEQ ID NO: 734649 - DNA, 19 bp, Mus musculus
  siRNA target sequence for 3110038B19Rik (NM_028447.1,1071-1089).
gcggtgtcggtagaaaact

SEQ ID NO: 734650 - DNA, 19 bp, Mus musculus
  siRNA target sequence for 3110038B19Rik (NM_028447.1,1072-1090).
cggtgtcggtagaaaactt

SEQ ID NO: 734651 - DNA, 19 bp, Mus musculus
  siRNA target sequence for 3110038B19Rik (NM_028447.1,1074-1092).
gtgtcggtagaaaacttca

SEQ ID NO: 734652 - DNA, 19 bp, Mus musculus
  siRNA target sequence for 3110038B19Rik (NM_028447.1,1076-1094).
gtcggtagaaaacttcatt

SEQ ID NO: 734653 - DNA, 19 bp, Mus musculus
  siRNA target sequence for 3110038B19Rik (NM_028447.1,1108-1126).
ctgacaagtggtttgacat

SEQ ID NO: 734654 - DNA, 19 bp, Mus musculus
  siRNA target sequence for 3110038B19Rik (NM_028447.1,1348-1366).
ctcgccgacagatgatcta

SEQ ID NO: 734655 - DNA, 19 bp, Mus musculus
  siRNA target sequence for 3110038B19Rik (NM_028447.1,1350-1368).
cgccgacagatgatctaca

SEQ ID NO: 734656 - DNA, 19 bp, Mus musculus
  siRNA target sequence for Rwdd3 (NM_028456.1,157-175).
gaggatgtgcccttagagt

SEQ ID NO: 734657 - DNA, 19 bp, Mus musculus
  siRNA target sequence for Rwdd3 (NM_028456.1,174-192).
gttggcgttccatttacca

SEQ ID NO: 734658 - DNA, 19 bp, Mus musculus
  siRNA target sequence for Rwdd3 (NM_028456.1,224-242).
cggttacctcggaacatct

SEQ ID NO: 734659 - DNA, 19 bp, Mus musculus
  siRNA target sequence for Rwdd3 (NM_028456.1,264-282).
cgcgaaggagaagttactt

SEQ ID NO: 734660 - DNA, 19 bp, Mus musculus
  siRNA target sequence for Rwdd3 (NM_028456.1,430-448).
ggaccgtggatgactcttt

SEQ ID NO: 734661 - DNA, 19 bp, Mus musculus
  siRNA target sequence for Rwdd3 (NM_028456.1,441-459).
gactcttttgcgtttagat

SEQ ID NO: 734662 - DNA, 19 bp, Mus musculus
  siRNA target sequence for Rwdd3 (NM_028456.1,443-461).
ctcttttgcgtttagatca

SEQ ID NO: 734663 - DNA, 19 bp, Mus musculus
  siRNA target sequence for Rwdd3 (NM_028456.1,462-480).
catgagagcgaggactaaa

SEQ ID NO: 734664 - DNA, 19 bp, Mus musculus
  siRNA target sequence for Rwdd3 (NM_028456.1,465-483).
gagagcgaggactaaatat

SEQ ID NO: 734665 - DNA, 19 bp, Mus musculus
  siRNA target sequence for Rwdd3 (NM_028456.1,467-485).
gagcgaggactaaatatgt

SEQ ID NO: 734666 - DNA, 19 bp, Mus musculus
  siRNA target sequence for Rwdd3 (NM_028456.1,469-487).
gcgaggactaaatatgtca

SEQ ID NO: 734667 - DNA, 19 bp, Mus musculus
  siRNA target sequence for 3110037I16Rik (NM_028457.1,583-601).
gagtgactcagagttagtt

SEQ ID NO: 734668 - DNA, 19 bp, Mus musculus
  siRNA target sequence for 3110037I16Rik (NM_028457.1,585-603).
gtgactcagagttagttga

SEQ ID NO: 734669 - DNA, 19 bp, Mus musculus
  siRNA target sequence for 3110037I16Rik (NM_028457.1,587-605).
gactcagagttagttgaat

SEQ ID NO: 734670 - DNA, 19 bp, Mus musculus
  siRNA target sequence for 3110037I16Rik (NM_028457.1,629-647).
gaatcggctgtttcactta

SEQ ID NO: 734671 - DNA, 19 bp, Mus musculus
  siRNA target sequence for 3110037I16Rik (NM_028457.1,633-651).
cggctgtttcacttagcaa

SEQ ID NO: 734672 - DNA, 19 bp, Mus musculus
  siRNA target sequence for 3110037I16Rik (NM_028457.1,745-763).
gagattccacctgaaatat

SEQ ID NO: 734673 - DNA, 19 bp, Mus musculus
  siRNA target sequence for 3110037I16Rik (NM_028457.1,747-765).
gattccacctgaaatattt

SEQ ID NO: 734674 - DNA, 19 bp, Mus musculus
  siRNA target sequence for 3110037I16Rik (NM_028457.1,879-897).
gcatccacctagcaaaaga

SEQ ID NO: 734675 - DNA, 19 bp, Mus musculus
  siRNA target sequence for 3110037I16Rik (NM_028457.1,880-898).
catccacctagcaaaagaa

SEQ ID NO: 734676 - DNA, 19 bp, Mus musculus
  siRNA target sequence for 3110037I16Rik (NM_028457.1,883-901).
ccacctagcaaaagaacta

SEQ ID NO: 734677 - DNA, 19 bp, Mus musculus
  siRNA target sequence for 3110037I16Rik (NM_028457.1,967-985).
gaacatactagcaatgatt

SEQ ID NO: 734678 - DNA, 19 bp, Mus musculus
  siRNA target sequence for 3110037I16Rik (NM_028457.1,1039-1057).
ggagggaatatttcttgtt

SEQ ID NO: 734679 - DNA, 19 bp, Mus musculus
  siRNA target sequence for 3110037I16Rik (NM_028457.1,1067-1085).
gatgagttgcactacacat

SEQ ID NO: 734680 - DNA, 19 bp, Mus musculus
  siRNA target sequence for 3110037I16Rik (NM_028457.1,1083-1101).
catccaagggggaactaga

SEQ ID NO: 734681 - DNA, 19 bp, Mus musculus
  siRNA target sequence for 3110037I16Rik (NM_028457.1,1159-1177).
gaaagactattttcaagtt

SEQ ID NO: 734682 - DNA, 19 bp, Mus musculus
  siRNA target sequence for 3110037I16Rik (NM_028457.1,1172-1190).
caagttagcctatacaaat

SEQ ID NO: 734683 - DNA, 19 bp, Mus musculus
  siRNA target sequence for 3110037I16Rik (NM_028457.1,1224-1242).
ctcctgctagcctaatcca

SEQ ID NO: 734684 - DNA, 19 bp, Mus musculus
  siRNA target sequence for 3110037I16Rik (NM_028457.1,1233-1251).
gcctaatccaccacactaa

SEQ ID NO: 734685 - DNA, 19 bp, Mus musculus
  siRNA target sequence for 3110037I16Rik (NM_028457.1,1234-1252).
cctaatccaccacactaaa

SEQ ID NO: 734686 - DNA, 19 bp, Mus musculus
  siRNA target sequence for 3110037I16Rik (NM_028457.1,1235-1253).
ctaatccaccacactaaat

SEQ ID NO: 734687 - DNA, 19 bp, Mus musculus
  siRNA target sequence for 3110037I16Rik (NM_028457.1,1240-1258).
ccaccacactaaattgtgt

SEQ ID NO: 734688 - DNA, 19 bp, Mus musculus
  siRNA target sequence for 3110037I16Rik (NM_028457.1,1248-1266).
ctaaattgtgtctagacaa

SEQ ID NO: 734689 - DNA, 19 bp, Mus musculus
  siRNA target sequence for 3110037I16Rik (NM_028457.1,1304-1322).
ggaggcgtgtctgtaaaat

SEQ ID NO: 734690 - DNA, 19 bp, Mus musculus
  siRNA target sequence for 3110037I16Rik (NM_028457.1,1308-1326).
gcgtgtctgtaaaatcttt

SEQ ID NO: 734691 - DNA, 19 bp, Mus musculus
  siRNA target sequence for 3110037I16Rik (NM_028457.1,1323-1341).
ctttgggtgaccttatgga

SEQ ID NO: 734692 - DNA, 19 bp, Mus musculus
  siRNA target sequence for 3110037I16Rik (NM_028457.1,1366-1384).
gtctgatctcccagctatt

SEQ ID NO: 734693 - DNA, 19 bp, Mus musculus
  siRNA target sequence for 3110037I16Rik (NM_028457.1,1368-1386).
ctgatctcccagctattga

SEQ ID NO: 734694 - DNA, 19 bp, Mus musculus
  siRNA target sequence for 3110037I16Rik (NM_028457.1,1370-1388).
gatctcccagctattgata

SEQ ID NO: 734695 - DNA, 19 bp, Mus musculus
  siRNA target sequence for 3110037I16Rik (NM_028457.1,1473-1491).
gcaaggtgcagcattacgt

SEQ ID NO: 734696 - DNA, 19 bp, Mus musculus
  siRNA target sequence for 3110037I16Rik (NM_028457.1,1549-1567).
gtgccggacctgtgactat

SEQ ID NO: 734697 - DNA, 19 bp, Mus musculus
  siRNA target sequence for 3110056H04Rik (NM_028472.1,614-632).
cgctcgcctgggattacct

SEQ ID NO: 734698 - DNA, 19 bp, Mus musculus
  siRNA target sequence for 3110056H04Rik (NM_028472.1,699-717).
ggtctgttgcaaaatgtga

SEQ ID NO: 734699 - DNA, 19 bp, Mus musculus
  siRNA target sequence for 3110056H04Rik (NM_028472.1,734-752).
ctccaaattccatttatca

SEQ ID NO: 734700 - DNA, 19 bp, Mus musculus
  siRNA target sequence for 3110056H04Rik (NM_028472.1,753-771).
cagacaacccttgcataat

SEQ ID NO: 734701 - DNA, 19 bp, Mus musculus
  siRNA target sequence for 3110056H04Rik (NM_028472.1,755-773).
gacaacccttgcataatgt

SEQ ID NO: 734702 - DNA, 19 bp, Mus musculus
  siRNA target sequence for 3110056H04Rik (NM_028472.1,865-883).
ctgctgtgaacgatgcaaa

SEQ ID NO: 734703 - DNA, 19 bp, Mus musculus
  siRNA target sequence for 3110056H04Rik (NM_028472.1,991-1009).
ggtgcgctgtgttgttcat

SEQ ID NO: 734704 - DNA, 19 bp, Mus musculus
  siRNA target sequence for 3110056H04Rik (NM_028472.1,1112-1130).
ggaaacaaatgtattacat

SEQ ID NO: 734705 - DNA, 19 bp, Mus musculus
  siRNA target sequence for 3110056H04Rik (NM_028472.1,1188-1206).
gtccccagcaccttagtca

SEQ ID NO: 734706 - DNA, 19 bp, Mus musculus
  siRNA target sequence for 3110056H04Rik (NM_028472.1,1279-1297).
cctgtttcgcagtgatgtt

SEQ ID NO: 734707 - DNA, 19 bp, Mus musculus
  siRNA target sequence for 3110056H04Rik (NM_028472.1,1282-1300).
gtttcgcagtgatgtttat

SEQ ID NO: 734708 - DNA, 19 bp, Mus musculus
  siRNA target sequence for 3110056H04Rik (NM_028472.1,1310-1328).
gcctcatttgtctatgata

SEQ ID NO: 734709 - DNA, 19 bp, Mus musculus
  siRNA target sequence for 3110056H04Rik (NM_028472.1,1311-1329).
cctcatttgtctatgataa

SEQ ID NO: 734710 - DNA, 19 bp, Mus musculus
  siRNA target sequence for 3110056H04Rik (NM_028472.1,1344-1362).
cttgcaaggactcaacaat

SEQ ID NO: 734711 - DNA, 19 bp, Mus musculus
  siRNA target sequence for 3110056H04Rik (NM_028472.1,1348-1366).
caaggactcaacaatggtt

SEQ ID NO: 734712 - DNA, 19 bp, Mus musculus
  siRNA target sequence for 3110056H04Rik (NM_028472.1,1356-1374).
caacaatggtttgtaagaa

SEQ ID NO: 734713 - DNA, 19 bp, Mus musculus
  siRNA target sequence for 3110056H04Rik (NM_028472.1,1359-1377).
caatggtttgtaagaagaa

SEQ ID NO: 734714 - DNA, 19 bp, Mus musculus
  siRNA target sequence for 3110056H04Rik (NM_028472.1,1385-1403).
caccctggtgtctgtaaca

SEQ ID NO: 734715 - DNA, 19 bp, Mus musculus
  siRNA target sequence for 3110056H04Rik (NM_028472.1,1387-1405).
ccctggtgtctgtaacagt

SEQ ID NO: 734716 - DNA, 19 bp, Mus musculus
  siRNA target sequence for 3110056H04Rik (NM_028472.1,1593-1611).
cacagggtaaaattctcaa

SEQ ID NO: 734717 - DNA, 19 bp, Mus musculus
  siRNA target sequence for 3110056H04Rik (NM_028472.1,1670-1688).
gatccccactacaacactt

SEQ ID NO: 734718 - DNA, 19 bp, Mus musculus
  siRNA target sequence for 3110056H04Rik (NM_028472.1,1691-1709).
gatgggcggacatttaact

SEQ ID NO: 734719 - DNA, 19 bp, Mus musculus
  siRNA target sequence for 3110056H04Rik (NM_028472.1,1695-1713).
ggcggacatttaactttca

SEQ ID NO: 734720 - DNA, 19 bp, Mus musculus
  siRNA target sequence for 3110056H04Rik (NM_028472.1,1714-1732).
ggggacgtgtcagtatgtt

SEQ ID NO: 734721 - DNA, 19 bp, Mus musculus
  siRNA target sequence for 3110056H04Rik (NM_028472.1,1715-1733).
gggacgtgtcagtatgttt

SEQ ID NO: 734722 - DNA, 19 bp, Mus musculus
  siRNA target sequence for 3110056H04Rik (NM_028472.1,1716-1734).
ggacgtgtcagtatgtttt

SEQ ID NO: 734723 - DNA, 19 bp, Mus musculus
  siRNA target sequence for 3110056H04Rik (NM_028472.1,1720-1738).
gtgtcagtatgttttgaca

SEQ ID NO: 734724 - DNA, 19 bp, Mus musculus
  siRNA target sequence for 3110056H04Rik (NM_028472.1,1934-1952).
gacctggacggctaccttt

SEQ ID NO: 734725 - DNA, 19 bp, Mus musculus
  siRNA target sequence for 3110056H04Rik (NM_028472.1,1937-1955).
ctggacggctaccttttga

SEQ ID NO: 734726 - DNA, 19 bp, Mus musculus
  siRNA target sequence for 3110056H04Rik (NM_028472.1,1943-1961).
ggctaccttttgaaagtga

SEQ ID NO: 734727 - DNA, 19 bp, Mus musculus
  siRNA target sequence for 3110056H04Rik (NM_028472.1,1970-1988).
gcaggtttggagatatcgt

SEQ ID NO: 734728 - DNA, 19 bp, Mus musculus
  siRNA target sequence for 3110056H04Rik (NM_028472.1,2048-2066).
ggtctttgtggcaactaca

SEQ ID NO: 734729 - DNA, 19 bp, Mus musculus
  siRNA target sequence for 3110056H04Rik (NM_028472.1,2049-2067).
gtctttgtggcaactacaa

SEQ ID NO: 734730 - DNA, 19 bp, Mus musculus
  siRNA target sequence for 3110056H04Rik (NM_028472.1,2058-2076).
gcaactacaatggtcataa

SEQ ID NO: 734731 - DNA, 19 bp, Mus musculus
  siRNA target sequence for 3110056H04Rik (NM_028472.1,2059-2077).
caactacaatggtcataaa

SEQ ID NO: 734732 - DNA, 19 bp, Mus musculus
  siRNA target sequence for 3110056H04Rik (NM_028472.1,2062-2080).
ctacaatggtcataaacgt

SEQ ID NO: 734733 - DNA, 19 bp, Mus musculus
  siRNA target sequence for 3110056H04Rik (NM_028472.1,2070-2088).
gtcataaacgtgatgactt

SEQ ID NO: 734734 - DNA, 19 bp, Mus musculus
  siRNA target sequence for 3110056H04Rik (NM_028472.1,2093-2111).
ggtggagatgggaacttca

SEQ ID NO: 734735 - DNA, 19 bp, Mus musculus
  siRNA target sequence for 3110056H04Rik (NM_028472.1,2113-2131).
gtttgacgtggatgacttt

SEQ ID NO: 734736 - DNA, 19 bp, Mus musculus
  siRNA target sequence for 3110056H04Rik (NM_028472.1,2167-2185).
caaccgaccacagagaaaa

SEQ ID NO: 734737 - DNA, 19 bp, Mus musculus
  siRNA target sequence for 3110056H04Rik (NM_028472.1,2305-2323).
ctaccggtcctgtgtaaca

SEQ ID NO: 734738 - DNA, 19 bp, Mus musculus
  siRNA target sequence for 3110056H04Rik (NM_028472.1,2318-2336).
gtaacagacatgtgtgaat

SEQ ID NO: 734739 - DNA, 19 bp, Mus musculus
  siRNA target sequence for 3110056H04Rik (NM_028472.1,2331-2349).
gtgaatgtccagtccataa

SEQ ID NO: 734740 - DNA, 19 bp, Mus musculus
  siRNA target sequence for 3110056H04Rik (NM_028472.1,2340-2358).
cagtccataaaaactgtta

SEQ ID NO: 734741 - DNA, 19 bp, Mus musculus
  siRNA target sequence for 3110056H04Rik (NM_028472.1,2342-2360).
gtccataaaaactgttact

SEQ ID NO: 734742 - DNA, 19 bp, Mus musculus
  siRNA target sequence for 3110056H04Rik (NM_028472.1,2452-2470).
caaacatggtgctgtgtat

SEQ ID NO: 734743 - DNA, 19 bp, Mus musculus
  siRNA target sequence for 3110056H04Rik (NM_028472.1,2564-2582).
gcaaatctggtccttcata

SEQ ID NO: 734744 - DNA, 19 bp, Mus musculus
  siRNA target sequence for 4932431F02Rik (NM_028475.1,157-175).
gggaacaacctcaaaacca

SEQ ID NO: 734745 - DNA, 19 bp, Mus musculus
  siRNA target sequence for 4932431F02Rik (NM_028475.1,206-224).
ggccactgcagagcaaatt

SEQ ID NO: 734746 - DNA, 19 bp, Mus musculus
  siRNA target sequence for 4932431F02Rik (NM_028475.1,236-254).
gatgatttcggaccataat

SEQ ID NO: 734747 - DNA, 19 bp, Mus musculus
  siRNA target sequence for 4932431F02Rik (NM_028475.1,239-257).
gatttcggaccataatgat

SEQ ID NO: 734748 - DNA, 19 bp, Mus musculus
  siRNA target sequence for 4932431F02Rik (NM_028475.1,275-293).
ggtgaaacaattgattgat

SEQ ID NO: 734749 - DNA, 19 bp, Mus musculus
  siRNA target sequence for 4932431F02Rik (NM_028475.1,276-294).
gtgaaacaattgattgata

SEQ ID NO: 734750 - DNA, 19 bp, Mus musculus
  siRNA target sequence for 4932431F02Rik (NM_028475.1,308-326).
ccaggatgaatgtgtgatt

SEQ ID NO: 734751 - DNA, 19 bp, Mus musculus
  siRNA target sequence for 4932431F02Rik (NM_028475.1,451-469).
gacaaactgaatctaatga

SEQ ID NO: 734752 - DNA, 19 bp, Mus musculus
  siRNA target sequence for 4932431F02Rik (NM_028475.1,548-566).
cagccgtggacgagagttt

SEQ ID NO: 734753 - DNA, 19 bp, Mus musculus
  siRNA target sequence for 4932431F02Rik (NM_028475.1,736-754).
cagccaacactgatgataa

SEQ ID NO: 734754 - DNA, 19 bp, Mus musculus
  siRNA target sequence for 4932431F02Rik (NM_028475.1,739-757).
ccaacactgatgataacta

SEQ ID NO: 734755 - DNA, 19 bp, Mus musculus
  siRNA target sequence for 4932431F02Rik (NM_028475.1,740-758).
caacactgatgataactat

SEQ ID NO: 734756 - DNA, 19 bp, Mus musculus
  siRNA target sequence for 4932431F02Rik (NM_028475.1,750-768).
gataactatggcaatagca

SEQ ID NO: 734757 - DNA, 19 bp, Mus musculus
  siRNA target sequence for 4932431F02Rik (NM_028475.1,761-779).
caatagcagtggcaataca

SEQ ID NO: 734758 - DNA, 19 bp, Mus musculus
  siRNA target sequence for 4932431F02Rik (NM_028475.1,771-789).
ggcaatacatggaacaaca

SEQ ID NO: 734759 - DNA, 19 bp, Mus musculus
  siRNA target sequence for 4932431F02Rik (NM_028475.1,813-831).
ggaacaagacttgatttca

SEQ ID NO: 734760 - DNA, 19 bp, Mus musculus
  siRNA target sequence for 4932431F02Rik (NM_028475.1,834-852).
ggggttgaggggtcaaatt

SEQ ID NO: 734761 - DNA, 19 bp, Mus musculus
  siRNA target sequence for 4932431F02Rik (NM_028475.1,835-853).
gggttgaggggtcaaatta

SEQ ID NO: 734762 - DNA, 19 bp, Mus musculus
  siRNA target sequence for 4932431F02Rik (NM_028475.1,836-854).
ggttgaggggtcaaattat

SEQ ID NO: 734763 - DNA, 19 bp, Mus musculus
  siRNA target sequence for 4932431F02Rik (NM_028475.1,947-965).
gatctttaccgcctctaat

SEQ ID NO: 734764 - DNA, 19 bp, Mus musculus
  siRNA target sequence for 4932431F02Rik (NM_028475.1,1004-1022).
cactgctggtcagagaatt

SEQ ID NO: 734765 - DNA, 19 bp, Mus musculus
  siRNA target sequence for 4932431F02Rik (NM_028475.1,1061-1079).
ggagaatgattcatctaat

SEQ ID NO: 734766 - DNA, 19 bp, Mus musculus
  siRNA target sequence for 4932431F02Rik (NM_028475.1,1116-1134).
ctggtgtttagtaattcga

SEQ ID NO: 734767 - DNA, 19 bp, Mus musculus
  siRNA target sequence for 4932431F02Rik (NM_028475.1,1156-1174).
ctgcttcagggagtacatt

SEQ ID NO: 734768 - DNA, 19 bp, Mus musculus
  siRNA target sequence for 4932431F02Rik (NM_028475.1,1158-1176).
gcttcagggagtacatttt

SEQ ID NO: 734769 - DNA, 19 bp, Mus musculus
  siRNA target sequence for 4932431F02Rik (NM_028475.1,1230-1248).
gctaaaggtggcagtacaa

SEQ ID NO: 734770 - DNA, 19 bp, Mus musculus
  siRNA target sequence for 4932431F02Rik (NM_028475.1,1246-1264).
caacaggctcccagttctt

SEQ ID NO: 734771 - DNA, 19 bp, Mus musculus
  siRNA target sequence for 4932431F02Rik (NM_028475.1,1302-1320).
gcagctcaacattctcaat

SEQ ID NO: 734772 - DNA, 19 bp, Mus musculus
  siRNA target sequence for 4932431F02Rik (NM_028475.1,1372-1390).
catcactggtgcagtatga

SEQ ID NO: 734773 - DNA, 19 bp, Mus musculus
  siRNA target sequence for 4932431F02Rik (NM_028475.1,1375-1393).
cactggtgcagtatgatct

SEQ ID NO: 734774 - DNA, 19 bp, Mus musculus
  siRNA target sequence for 4932431F02Rik (NM_028475.1,1397-1415).
gagtgcaaatgattcaaca

SEQ ID NO: 734775 - DNA, 19 bp, Mus musculus
  siRNA target sequence for 4932431F02Rik (NM_028475.1,1459-1477).
caaccatgatggaggtatt

SEQ ID NO: 734776 - DNA, 19 bp, Mus musculus
  siRNA target sequence for 4932431F02Rik (NM_028475.1,1462-1480).
ccatgatggaggtattcct

SEQ ID NO: 734777 - DNA, 19 bp, Mus musculus
  siRNA target sequence for 4932431F02Rik (NM_028475.1,1651-1669).
cctccttgacgtctaagat

SEQ ID NO: 734778 - DNA, 19 bp, Mus musculus
  siRNA target sequence for 4932431F02Rik (NM_028475.1,1758-1776).
gtcctttctgattatgagt

SEQ ID NO: 734779 - DNA, 19 bp, Mus musculus
  siRNA target sequence for 4932431F02Rik (NM_028475.1,1890-1908).
cagagtggcccgattcagt

SEQ ID NO: 734780 - DNA, 19 bp, Mus musculus
  siRNA target sequence for 4932431F02Rik (NM_028475.1,1899-1917).
ccgattcagtcgacaactt

SEQ ID NO: 734781 - DNA, 19 bp, Mus musculus
  siRNA target sequence for 4932431F02Rik (NM_028475.1,1900-1918).
cgattcagtcgacaactta

SEQ ID NO: 734782 - DNA, 19 bp, Mus musculus
  siRNA target sequence for 4932431F02Rik (NM_028475.1,1905-1923).
cagtcgacaacttatacct

SEQ ID NO: 734783 - DNA, 19 bp, Mus musculus
  siRNA target sequence for 4932431F02Rik (NM_028475.1,1915-1933).
cttatacctcccaaaataa

SEQ ID NO: 734784 - DNA, 19 bp, Mus musculus
  siRNA target sequence for 4932431F02Rik (NM_028475.1,1936-1954).
ctcagggccctctatatga

SEQ ID NO: 734785 - DNA, 19 bp, Mus musculus
  siRNA target sequence for 4932431F02Rik (NM_028475.1,2020-2038).
ctcaggctaagaatggttt

SEQ ID NO: 734786 - DNA, 19 bp, Mus musculus
  siRNA target sequence for 4932431F02Rik (NM_028475.1,2022-2040).
caggctaagaatggtttta

SEQ ID NO: 734787 - DNA, 19 bp, Mus musculus
  siRNA target sequence for 4932431F02Rik (NM_028475.1,2066-2084).
gaccacgcaatctgttgaa

SEQ ID NO: 734788 - DNA, 19 bp, Mus musculus
  siRNA target sequence for 4932431F02Rik (NM_028475.1,2112-2130).
gaatcaccttccacttcta

SEQ ID NO: 734789 - DNA, 19 bp, Mus musculus
  siRNA target sequence for 4932431F02Rik (NM_028475.1,2116-2134).
caccttccacttctagtat

SEQ ID NO: 734790 - DNA, 19 bp, Mus musculus
  siRNA target sequence for 4932431F02Rik (NM_028475.1,2187-2205).
cagcattcatcctccttaa

SEQ ID NO: 734791 - DNA, 19 bp, Mus musculus
  siRNA target sequence for 4932431F02Rik (NM_028475.1,2217-2235).
catacggaggagattccaa

SEQ ID NO: 734792 - DNA, 19 bp, Mus musculus
  siRNA target sequence for 4932431F02Rik (NM_028475.1,2250-2268).
caacatagcagtgcattat

SEQ ID NO: 734793 - DNA, 19 bp, Mus musculus
  siRNA target sequence for 4932431F02Rik (NM_028475.1,2253-2271).
catagcagtgcattatcta

SEQ ID NO: 734794 - DNA, 19 bp, Mus musculus
  siRNA target sequence for 4932431F02Rik (NM_028475.1,2274-2292).
cagcagaataccctttctt

SEQ ID NO: 734795 - DNA, 19 bp, Mus musculus
  siRNA target sequence for 4932431F02Rik (NM_028475.1,2348-2366).
gagtgaggcaaatctacat

SEQ ID NO: 734796 - DNA, 19 bp, Mus musculus
  siRNA target sequence for 4932431F02Rik (NM_028475.1,2430-2448).
gtctcctccagtctgaata

SEQ ID NO: 734797 - DNA, 19 bp, Mus musculus
  siRNA target sequence for 4932431F02Rik (NM_028475.1,2432-2450).
ctcctccagtctgaatagt

SEQ ID NO: 734798 - DNA, 19 bp, Mus musculus
  siRNA target sequence for 4932431F02Rik (NM_028475.1,2554-2572).
ctggagtcccgccattgtt

SEQ ID NO: 734799 - DNA, 19 bp, Mus musculus
  siRNA target sequence for 4932431F02Rik (NM_028475.1,2564-2582).
gccattgttgcctaatcca

SEQ ID NO: 734800 - DNA, 19 bp, Mus musculus
  siRNA target sequence for 4932431F02Rik (NM_028475.1,2565-2583).
ccattgttgcctaatccat

SEQ ID NO: 734801 - DNA, 19 bp, Mus musculus
  siRNA target sequence for 4932431F02Rik (NM_028475.1,2566-2584).
cattgttgcctaatccata

SEQ ID NO: 734802 - DNA, 19 bp, Mus musculus
  siRNA target sequence for 4932431F02Rik (NM_028475.1,2570-2588).
gttgcctaatccatatatt

SEQ ID NO: 734803 - DNA, 19 bp, Mus musculus
  siRNA target sequence for 4932431F02Rik (NM_028475.1,2610-2628).
gcctatccgccacaagtat

SEQ ID NO: 734804 - DNA, 19 bp, Mus musculus
  siRNA target sequence for 4932431F02Rik (NM_028475.1,2611-2629).
cctatccgccacaagtata

SEQ ID NO: 734805 - DNA, 19 bp, Mus musculus
  siRNA target sequence for 4932431F02Rik (NM_028475.1,2616-2634).
ccgccacaagtatatggtt

SEQ ID NO: 734806 - DNA, 19 bp, Mus musculus
  siRNA target sequence for 4932431F02Rik (NM_028475.1,2617-2635).
cgccacaagtatatggtta

SEQ ID NO: 734807 - DNA, 19 bp, Mus musculus
  siRNA target sequence for 4932431F02Rik (NM_028475.1,2618-2636).
gccacaagtatatggttat

SEQ ID NO: 734808 - DNA, 19 bp, Mus musculus
  siRNA target sequence for 4932431F02Rik (NM_028475.1,2620-2638).
cacaagtatatggttatga

SEQ ID NO: 734809 - DNA, 19 bp, Mus musculus
  siRNA target sequence for 4932431F02Rik (NM_028475.1,2648-2666).
gatgctccagacaagattt

SEQ ID NO: 734810 - DNA, 19 bp, Mus musculus
  siRNA target sequence for 4932431F02Rik (NM_028475.1,2651-2669).
gctccagacaagatttcca

SEQ ID NO: 734811 - DNA, 19 bp, Mus musculus
  siRNA target sequence for 4932431F02Rik (NM_028475.1,2668-2686).
cattggattactacagtat

SEQ ID NO: 734812 - DNA, 19 bp, Mus musculus
  siRNA target sequence for 4932431F02Rik (NM_028475.1,2752-2770).
ctggcgacctcaccaaatt

SEQ ID NO: 734813 - DNA, 19 bp, Mus musculus
  siRNA target sequence for 4932431F02Rik (NM_028475.1,2990-3008).
caagcagcatggtgtgaat

SEQ ID NO: 734814 - DNA, 19 bp, Mus musculus
  siRNA target sequence for 4932431F02Rik (NM_028475.1,3023-3041).
ctcggctacccctttccaa

SEQ ID NO: 734815 - DNA, 19 bp, Mus musculus
  siRNA target sequence for 4932431F02Rik (NM_028475.1,3038-3056).
ccaacagccaagtggatat

SEQ ID NO: 734816 - DNA, 19 bp, Mus musculus
  siRNA target sequence for 4932431F02Rik (NM_028475.1,3052-3070).
gatatgggtctcatggata

SEQ ID NO: 734817 - DNA, 19 bp, Mus musculus
  siRNA target sequence for 4932431F02Rik (NM_028475.1,3057-3075).
gggtctcatggatacaaca

SEQ ID NO: 734818 - DNA, 19 bp, Mus musculus
  siRNA target sequence for 4932431F02Rik (NM_028475.1,3101-3119).
cacgggcgtgccagatata

SEQ ID NO: 734819 - DNA, 19 bp, Mus musculus
  siRNA target sequence for 4932431F02Rik (NM_028475.1,3123-3141).
ggttctgtgtactccaaaa

SEQ ID NO: 734820 - DNA, 19 bp, Mus musculus
  siRNA target sequence for 4932431F02Rik (NM_028475.1,3261-3279).
cctgccccctttatgcata

SEQ ID NO: 734821 - DNA, 19 bp, Mus musculus
  siRNA target sequence for 4932431F02Rik (NM_028475.1,3262-3280).
ctgccccctttatgcatat

SEQ ID NO: 734822 - DNA, 19 bp, Mus musculus
  siRNA target sequence for 4932431F02Rik (NM_028475.1,3265-3283).
ccccctttatgcatattct

SEQ ID NO: 734823 - DNA, 19 bp, Mus musculus
  siRNA target sequence for 4932431F02Rik (NM_028475.1,3335-3353).
ggatggccagctaccatat

SEQ ID NO: 734824 - DNA, 19 bp, Mus musculus
  siRNA target sequence for 2610110G12Rik (NM_028476.2,134-152).
gcaaatcatgactattgta

SEQ ID NO: 734825 - DNA, 19 bp, Mus musculus
  siRNA target sequence for 2610110G12Rik (NM_028476.2,226-244).
gcaaccggcacgttattta

SEQ ID NO: 734826 - DNA, 19 bp, Mus musculus
  siRNA target sequence for 2610110G12Rik (NM_028476.2,230-248).
ccggcacgttatttacata

SEQ ID NO: 734827 - DNA, 19 bp, Mus musculus
  siRNA target sequence for 2610110G12Rik (NM_028476.2,232-250).
ggcacgttatttacatact

SEQ ID NO: 734828 - DNA, 19 bp, Mus musculus
  siRNA target sequence for 2610110G12Rik (NM_028476.2,278-296).
gaaaggagccattattggt

SEQ ID NO: 734829 - DNA, 19 bp, Mus musculus
  siRNA target sequence for 2610110G12Rik (NM_028476.2,356-374).
ggtagaacccctttgcatt

SEQ ID NO: 734830 - DNA, 19 bp, Mus musculus
  siRNA target sequence for 2610110G12Rik (NM_028476.2,411-429).
ggccacgggcgagaacttt

SEQ ID NO: 734831 - DNA, 19 bp, Mus musculus
  siRNA target sequence for 2610110G12Rik (NM_028476.2,412-430).
gccacgggcgagaactttt

SEQ ID NO: 734832 - DNA, 19 bp, Mus musculus
  siRNA target sequence for 2610110G12Rik (NM_028476.2,490-508).
cgccgaagctgctcaagtt

SEQ ID NO: 734833 - DNA, 19 bp, Mus musculus
  siRNA target sequence for 2610110G12Rik (NM_028476.2,538-556).
cagtcccacaggtgaacaa

SEQ ID NO: 734834 - DNA, 19 bp, Mus musculus
  siRNA target sequence for 2610110G12Rik (NM_028476.2,540-558).
gtcccacaggtgaacaact

SEQ ID NO: 734835 - DNA, 19 bp, Mus musculus
  siRNA target sequence for 2610110G12Rik (NM_028476.2,546-564).
caggtgaacaactttgtca

SEQ ID NO: 734836 - DNA, 19 bp, Mus musculus
  siRNA target sequence for 1700034P14Rik (NM_028487.2,1146-1164).
gctccagcctggcttaatt

SEQ ID NO: 734837 - DNA, 19 bp, Mus musculus
  siRNA target sequence for 1700034P14Rik (NM_028487.2,1152-1170).
gcctggcttaattttccta

SEQ ID NO: 734838 - DNA, 19 bp, Mus musculus
  siRNA target sequence for 1700034P14Rik (NM_028487.2,1167-1185).
cctactcctccatcatcaa

SEQ ID NO: 734839 - DNA, 19 bp, Mus musculus
  siRNA target sequence for 1700034P14Rik (NM_028487.2,1231-1249).
ggacagaaaatcgttatga

SEQ ID NO: 734840 - DNA, 19 bp, Mus musculus
  siRNA target sequence for 1700034P14Rik (NM_028487.2,1234-1252).
cagaaaatcgttatgatgt

SEQ ID NO: 734841 - DNA, 19 bp, Mus musculus
  siRNA target sequence for 1700034P14Rik (NM_028487.2,1253-1271).
gagtcgtcgacgacacaat

SEQ ID NO: 734842 - DNA, 19 bp, Mus musculus
  siRNA target sequence for 1700034P14Rik (NM_028487.2,1257-1275).
cgtcgacgacacaattctt

SEQ ID NO: 734843 - DNA, 19 bp, Mus musculus
  siRNA target sequence for 1700034P14Rik (NM_028487.2,1302-1320).
cgtcctaatggaggtaatt

SEQ ID NO: 734844 - DNA, 19 bp, Mus musculus
  siRNA target sequence for 1700034P14Rik (NM_028487.2,1360-1378).
gaaatggtacagaaaacat

SEQ ID NO: 734845 - DNA, 19 bp, Mus musculus
  siRNA target sequence for 1700034P14Rik (NM_028487.2,1391-1409).
gggataccatggtggaaat

SEQ ID NO: 734846 - DNA, 19 bp, Mus musculus
  siRNA target sequence for 1700034P14Rik (NM_028487.2,1392-1410).
ggataccatggtggaaatt

SEQ ID NO: 734847 - DNA, 19 bp, Mus musculus
  siRNA target sequence for 1700034P14Rik (NM_028487.2,1412-1430).
ccgttctcgtagcagtatt

SEQ ID NO: 734848 - DNA, 19 bp, Mus musculus
  siRNA target sequence for 1700034P14Rik (NM_028487.2,1413-1431).
cgttctcgtagcagtattt

SEQ ID NO: 734849 - DNA, 19 bp, Mus musculus
  siRNA target sequence for 1700034P14Rik (NM_028487.2,1414-1432).
gttctcgtagcagtatttt

SEQ ID NO: 734850 - DNA, 19 bp, Mus musculus
  siRNA target sequence for 1700034P14Rik (NM_028487.2,1419-1437).
cgtagcagtattttccatt

SEQ ID NO: 734851 - DNA, 19 bp, Mus musculus
  siRNA target sequence for 1700034P14Rik (NM_028487.2,1528-1546).
ctgaggattttccatcttt

SEQ ID NO: 734852 - DNA, 19 bp, Mus musculus
  siRNA target sequence for 1700034P14Rik (NM_028487.2,1532-1550).
ggattttccatctttaaat

SEQ ID NO: 734853 - DNA, 19 bp, Mus musculus
  siRNA target sequence for 1700034P14Rik (NM_028487.2,1543-1561).
ctttaaatcctgaatatga

SEQ ID NO: 734854 - DNA, 19 bp, Mus musculus
  siRNA target sequence for 1700034P14Rik (NM_028487.2,1564-1582).
gagaaccaaatcagaataa

SEQ ID NO: 734855 - DNA, 19 bp, Mus musculus
  siRNA target sequence for 1700034P14Rik (NM_028487.2,1627-1645).
catacccaaccaaaaaaat

SEQ ID NO: 734856 - DNA, 19 bp, Mus musculus
  siRNA target sequence for 1700034P14Rik (NM_028487.2,1665-1683).
gactatcccccgaatccta

SEQ ID NO: 734857 - DNA, 19 bp, Mus musculus
  siRNA target sequence for 1700034P14Rik (NM_028487.2,1673-1691).
cccgaatcctaaatctaga

SEQ ID NO: 734858 - DNA, 19 bp, Mus musculus
  siRNA target sequence for 1700034P14Rik (NM_028487.2,1674-1692).
ccgaatcctaaatctagaa

SEQ ID NO: 734859 - DNA, 19 bp, Mus musculus
  siRNA target sequence for 1700034P14Rik (NM_028487.2,1676-1694).
gaatcctaaatctagaact

SEQ ID NO: 734860 - DNA, 19 bp, Mus musculus
  siRNA target sequence for 1700034P14Rik (NM_028487.2,1695-1713).
ccaagaatgctggtcatta

SEQ ID NO: 734861 - DNA, 19 bp, Mus musculus
  siRNA target sequence for 1700034P14Rik (NM_028487.2,1696-1714).
caagaatgctggtcattaa

SEQ ID NO: 734862 - DNA, 19 bp, Mus musculus
  siRNA target sequence for 1700034P14Rik (NM_028487.2,1699-1717).
gaatgctggtcattaagaa

SEQ ID NO: 734863 - DNA, 19 bp, Mus musculus
  siRNA target sequence for 1700034P14Rik (NM_028487.2,1704-1722).
ctggtcattaagaaaggta

SEQ ID NO: 734864 - DNA, 19 bp, Mus musculus
  siRNA target sequence for 1700034P14Rik (NM_028487.2,1776-1794).
cagccagttaagaatggaa

SEQ ID NO: 734865 - DNA, 19 bp, Mus musculus
  siRNA target sequence for 1700034P14Rik (NM_028487.2,1831-1849).
ctgctgttccacctacaaa

SEQ ID NO: 734866 - DNA, 19 bp, Mus musculus
  siRNA target sequence for 1700034P14Rik (NM_028487.2,1842-1860).
cctacaaaacctacacaat

SEQ ID NO: 734867 - DNA, 19 bp, Mus musculus
  siRNA target sequence for 1700034P14Rik (NM_028487.2,1857-1875).
caatggaaaagccaaacta

SEQ ID NO: 734868 - DNA, 19 bp, Mus musculus
  siRNA target sequence for 1700034P14Rik (NM_028487.2,1883-1901).
caaagtcgggacttctttt

SEQ ID NO: 734869 - DNA, 19 bp, Mus musculus
  siRNA target sequence for 1700034P14Rik (NM_028487.2,1889-1907).
cgggacttctttttctcat

SEQ ID NO: 734870 - DNA, 19 bp, Mus musculus
  siRNA target sequence for 1700034P14Rik (NM_028487.2,1983-2001).
gtgaaagagtgtaatcgtt

SEQ ID NO: 734871 - DNA, 19 bp, Mus musculus
  siRNA target sequence for 1700034P14Rik (NM_028487.2,1989-2007).
gagtgtaatcgttcaaatt

SEQ ID NO: 734872 - DNA, 19 bp, Mus musculus
  siRNA target sequence for 1700034P14Rik (NM_028487.2,1991-2009).
gtgtaatcgttcaaattct

SEQ ID NO: 734873 - DNA, 19 bp, Mus musculus
  siRNA target sequence for 1700034P14Rik (NM_028487.2,2008-2026).
cttcttcgcctgttgacaa

SEQ ID NO: 734874 - DNA, 19 bp, Mus musculus
  siRNA target sequence for 1700034P14Rik (NM_028487.2,2011-2029).
cttcgcctgttgacaaact

SEQ ID NO: 734875 - DNA, 19 bp, Mus musculus
  siRNA target sequence for 1700034P14Rik (NM_028487.2,2014-2032).
cgcctgttgacaaacttaa

SEQ ID NO: 734876 - DNA, 19 bp, Mus musculus
  siRNA target sequence for 1700034P14Rik (NM_028487.2,2015-2033).
gcctgttgacaaacttaat

SEQ ID NO: 734877 - DNA, 19 bp, Mus musculus
  siRNA target sequence for 1700034P14Rik (NM_028487.2,2017-2035).
ctgttgacaaacttaatca

SEQ ID NO: 734878 - DNA, 19 bp, Mus musculus
  siRNA target sequence for 1700034P14Rik (NM_028487.2,2034-2052).
cagcagcctcgtttaacta

SEQ ID NO: 734879 - DNA, 19 bp, Mus musculus
  siRNA target sequence for 1700034P14Rik (NM_028487.2,2036-2054).
gcagcctcgtttaactaaa

SEQ ID NO: 734880 - DNA, 19 bp, Mus musculus
  siRNA target sequence for 1700034P14Rik (NM_028487.2,2040-2058).
cctcgtttaactaaactga

SEQ ID NO: 734881 - DNA, 19 bp, Mus musculus
  siRNA target sequence for 1700034P14Rik (NM_028487.2,2061-2079).
cgaatgcgcagcgataaaa

SEQ ID NO: 734882 - DNA, 19 bp, Mus musculus
  siRNA target sequence for 1700034P14Rik (NM_028487.2,2066-2084).
gcgcagcgataaaaagagt

SEQ ID NO: 734883 - DNA, 19 bp, Mus musculus
  siRNA target sequence for 1700034P14Rik (NM_028487.2,2071-2089).
gcgataaaaagagtgaatt

SEQ ID NO: 734884 - DNA, 19 bp, Mus musculus
  siRNA target sequence for 1700034P14Rik (NM_028487.2,2072-2090).
cgataaaaagagtgaattt

SEQ ID NO: 734885 - DNA, 19 bp, Mus musculus
  siRNA target sequence for 1700034P14Rik (NM_028487.2,2159-2177).
ggacgacgactcatttaat

SEQ ID NO: 734886 - DNA, 19 bp, Mus musculus
  siRNA target sequence for 1700034P14Rik (NM_028487.2,2160-2178).
gacgacgactcatttaatt

SEQ ID NO: 734887 - DNA, 19 bp, Mus musculus
  siRNA target sequence for 1700034P14Rik (NM_028487.2,2180-2198).
gcataacagcaatactact

SEQ ID NO: 734888 - DNA, 19 bp, Mus musculus
  siRNA target sequence for 1700034P14Rik (NM_028487.2,2194-2212).
ctactcaccaagaaagaga

SEQ ID NO: 734889 - DNA, 19 bp, Mus musculus
  siRNA target sequence for 1700034P14Rik (NM_028487.2,2368-2386).
ggcaggaagacagtgaaaa

SEQ ID NO: 734890 - DNA, 19 bp, Mus musculus
  siRNA target sequence for 1700034P14Rik (NM_028487.2,2369-2387).
gcaggaagacagtgaaaat

SEQ ID NO: 734891 - DNA, 19 bp, Mus musculus
  siRNA target sequence for 1700034P14Rik (NM_028487.2,2395-2413).
catgtgctcccttaactga

SEQ ID NO: 734892 - DNA, 19 bp, Mus musculus
  siRNA target sequence for 1700034P14Rik (NM_028487.2,2404-2422).
ccttaactgaggatgaaat

SEQ ID NO: 734893 - DNA, 19 bp, Mus musculus
  siRNA target sequence for 1700034P14Rik (NM_028487.2,2463-2481).
ggtctgagaaaaaatggta

SEQ ID NO: 734894 - DNA, 19 bp, Mus musculus
  siRNA target sequence for 1700034P14Rik (NM_028487.2,2534-2552).
cactttcaaacccacaatt

SEQ ID NO: 734895 - DNA, 19 bp, Mus musculus
  siRNA target sequence for 1700034P14Rik (NM_028487.2,2536-2554).
ctttcaaacccacaattga

SEQ ID NO: 734896 - DNA, 19 bp, Mus musculus
  siRNA target sequence for 1700034P14Rik (NM_028487.2,2581-2599).
gcgacacgtcggatgatga

SEQ ID NO: 734897 - DNA, 19 bp, Mus musculus
  siRNA target sequence for 1700040L02Rik (NM_028491.1,24-42).
ggctgcttcctctaaagaa

SEQ ID NO: 734898 - DNA, 19 bp, Mus musculus
  siRNA target sequence for 1700040L02Rik (NM_028491.1,25-43).
gctgcttcctctaaagaaa

SEQ ID NO: 734899 - DNA, 19 bp, Mus musculus
  siRNA target sequence for 1700040L02Rik (NM_028491.1,29-47).
cttcctctaaagaaaacgt

SEQ ID NO: 734900 - DNA, 19 bp, Mus musculus
  siRNA target sequence for 1700040L02Rik (NM_028491.1,223-241).
ctgggagtgtttctgaatt

SEQ ID NO: 734901 - DNA, 19 bp, Mus musculus
  siRNA target sequence for 1700040L02Rik (NM_028491.1,272-290).
ccatcctcttggactacta

SEQ ID NO: 734902 - DNA, 19 bp, Mus musculus
  siRNA target sequence for 1700040L02Rik (NM_028491.1,273-291).
catcctcttggactactat

SEQ ID NO: 734903 - DNA, 19 bp, Mus musculus
  siRNA target sequence for 1700040L02Rik (NM_028491.1,337-355).
cagtattccaagtttatga

SEQ ID NO: 734904 - DNA, 19 bp, Mus musculus
  siRNA target sequence for 1700040L02Rik (NM_028491.1,360-378).
gctggacatgctacttcat

SEQ ID NO: 734905 - DNA, 19 bp, Mus musculus
  siRNA target sequence for 1700040L02Rik (NM_028491.1,361-379).
ctggacatgctacttcata

SEQ ID NO: 734906 - DNA, 19 bp, Mus musculus
  siRNA target sequence for 1700040L02Rik (NM_028491.1,363-381).
ggacatgctacttcataat

SEQ ID NO: 734907 - DNA, 19 bp, Mus musculus
  siRNA target sequence for 1700040L02Rik (NM_028491.1,366-384).
catgctacttcataatctt

SEQ ID NO: 734908 - DNA, 19 bp, Mus musculus
  siRNA target sequence for 1700040L02Rik (NM_028491.1,461-479).
cgcagaagagtgaagattt

SEQ ID NO: 734909 - DNA, 19 bp, Mus musculus
  siRNA target sequence for 1700040L02Rik (NM_028491.1,502-520).
gccaacgccatcatcgatt

SEQ ID NO: 734910 - DNA, 19 bp, Mus musculus
  siRNA target sequence for 1700040L02Rik (NM_028491.1,503-521).
ccaacgccatcatcgatta

SEQ ID NO: 734911 - DNA, 19 bp, Mus musculus
  siRNA target sequence for 1700040L02Rik (NM_028491.1,507-525).
cgccatcatcgattactta

SEQ ID NO: 734912 - DNA, 19 bp, Mus musculus
  siRNA target sequence for 1700040L02Rik (NM_028491.1,508-526).
gccatcatcgattacttaa

SEQ ID NO: 734913 - DNA, 19 bp, Mus musculus
  siRNA target sequence for 1700040L02Rik (NM_028491.1,509-527).
ccatcatcgattacttaaa

SEQ ID NO: 734914 - DNA, 19 bp, Mus musculus
  siRNA target sequence for 1700040L02Rik (NM_028491.1,551-569).
ggctctacgagtttctgtt

SEQ ID NO: 734915 - DNA, 19 bp, Mus musculus
  siRNA target sequence for 1700040L02Rik (NM_028491.1,575-593).
ccaccagggaagaaattgt

SEQ ID NO: 734916 - DNA, 19 bp, Mus musculus
  siRNA target sequence for 1700040L02Rik (NM_028491.1,669-687).
ctcattggacacgtattca

SEQ ID NO: 734917 - DNA, 19 bp, Mus musculus
  siRNA target sequence for 1700040L02Rik (NM_028491.1,678-696).
cacgtattcaaccttcata

SEQ ID NO: 734918 - DNA, 19 bp, Mus musculus
  siRNA target sequence for 1700040L02Rik (NM_028491.1,680-698).
cgtattcaaccttcataga

SEQ ID NO: 734919 - DNA, 19 bp, Mus musculus
  siRNA target sequence for 1700040L02Rik (NM_028491.1,800-818).
gtggcttcaccattgatga

SEQ ID NO: 734920 - DNA, 19 bp, Mus musculus
  siRNA target sequence for 1700040L02Rik (NM_028491.1,807-825).
caccattgatgacgtaaaa

SEQ ID NO: 734921 - DNA, 19 bp, Mus musculus
  siRNA target sequence for 1700040L02Rik (NM_028491.1,810-828).
cattgatgacgtaaaatca

SEQ ID NO: 734922 - DNA, 19 bp, Mus musculus
  siRNA target sequence for 1700040L02Rik (NM_028491.1,839-857).
gagtgacggatgaggtttt

SEQ ID NO: 734923 - DNA, 19 bp, Mus musculus
  siRNA target sequence for 1700040L02Rik (NM_028491.1,908-926).
cctttaacgcacgaataga

SEQ ID NO: 734924 - DNA, 19 bp, Mus musculus
  siRNA target sequence for 1700040L02Rik (NM_028491.1,917-935).
cacgaatagagaaactgaa

SEQ ID NO: 734925 - DNA, 19 bp, Mus musculus
  siRNA target sequence for 1700013N18Rik (NM_028502.2,302-320).
ggtcctgtcggggaagata

SEQ ID NO: 734926 - DNA, 19 bp, Mus musculus
  siRNA target sequence for 1700013N18Rik (NM_028502.2,303-321).
gtcctgtcggggaagatat

SEQ ID NO: 734927 - DNA, 19 bp, Mus musculus
  siRNA target sequence for 1700013N18Rik (NM_028502.2,305-323).
cctgtcggggaagatatgt

SEQ ID NO: 734928 - DNA, 19 bp, Mus musculus
  siRNA target sequence for 1700013N18Rik (NM_028502.2,306-324).
ctgtcggggaagatatgtt

SEQ ID NO: 734929 - DNA, 19 bp, Mus musculus
  siRNA target sequence for 1700013N18Rik (NM_028502.2,343-361).
catggggccaaatgatagt

SEQ ID NO: 734930 - DNA, 19 bp, Mus musculus
  siRNA target sequence for 1700052K15Rik (NM_028513.2,65-83).
cccactggtactagattct

SEQ ID NO: 734931 - DNA, 19 bp, Mus musculus
  siRNA target sequence for 1700052K15Rik (NM_028513.2,202-220).
cgggagctagtcagaagaa

SEQ ID NO: 734932 - DNA, 19 bp, Mus musculus
  siRNA target sequence for 1700052K15Rik (NM_028513.2,204-222).
ggagctagtcagaagaagt

SEQ ID NO: 734933 - DNA, 19 bp, Mus musculus
  siRNA target sequence for 1700052K15Rik (NM_028513.2,211-229).
gtcagaagaagtactttgt

SEQ ID NO: 734934 - DNA, 19 bp, Mus musculus
  siRNA target sequence for 1700052K15Rik (NM_028513.2,422-440).
gacggcagagatgatgttt

SEQ ID NO: 734935 - DNA, 19 bp, Mus musculus
  siRNA target sequence for 1700052K15Rik (NM_028513.2,585-603).
cacgcagtcagcaagcttt

SEQ ID NO: 734936 - DNA, 19 bp, Mus musculus
  siRNA target sequence for 1700052K15Rik (NM_028513.2,688-706).
ccctggcggatgacatcaa

SEQ ID NO: 734937 - DNA, 19 bp, Mus musculus
  siRNA target sequence for 1700052K15Rik (NM_028513.2,788-806).
gcccgacgggaatgtcatt

SEQ ID NO: 734938 - DNA, 19 bp, Mus musculus
  siRNA target sequence for 1700052K15Rik (NM_028513.2,790-808).
ccgacgggaatgtcattta

SEQ ID NO: 734939 - DNA, 19 bp, Mus musculus
  siRNA target sequence for 1700052K15Rik (NM_028513.2,792-810).
gacgggaatgtcatttaca

SEQ ID NO: 734940 - DNA, 19 bp, Mus musculus
  siRNA target sequence for 1700052K15Rik (NM_028513.2,894-912).
gcatctaacagcataacca

SEQ ID NO: 734941 - DNA, 19 bp, Mus musculus
  siRNA target sequence for 1700052K15Rik (NM_028513.2,964-982).
ggggaagcacgctgtttca

SEQ ID NO: 734942 - DNA, 19 bp, Mus musculus
  siRNA target sequence for 1700052K15Rik (NM_028513.2,1028-1046).
caagggggtccccatcaaa

SEQ ID NO: 734943 - DNA, 19 bp, Mus musculus
  siRNA target sequence for 1700052K15Rik (NM_028513.2,1032-1050).
ggggtccccatcaaaatca

SEQ ID NO: 734944 - DNA, 19 bp, Mus musculus
  siRNA target sequence for 1700052K15Rik (NM_028513.2,1034-1052).
ggtccccatcaaaatcaca

SEQ ID NO: 734945 - DNA, 19 bp, Mus musculus
  siRNA target sequence for 1700052K15Rik (NM_028513.2,1102-1120).
cgtctctgagcagctttaa

SEQ ID NO: 734946 - DNA, 19 bp, Mus musculus
  siRNA target sequence for 1700061J02Rik (NM_028514.1,126-144).
gataatccagctgtgattt

SEQ ID NO: 734947 - DNA, 19 bp, Mus musculus
  siRNA target sequence for 1700061J02Rik (NM_028514.1,160-178).
gactctgtaaagttggaat

SEQ ID NO: 734948 - DNA, 19 bp, Mus musculus
  siRNA target sequence for 1700061J02Rik (NM_028514.1,216-234).
gtcgttgggcacccaaaat

SEQ ID NO: 734949 - DNA, 19 bp, Mus musculus
  siRNA target sequence for 1700061J02Rik (NM_028514.1,219-237).
gttgggcacccaaaattca

SEQ ID NO: 734950 - DNA, 19 bp, Mus musculus
  siRNA target sequence for 1700061J02Rik (NM_028514.1,239-257).
cataccatctgcaagatct

SEQ ID NO: 734951 - DNA, 19 bp, Mus musculus
  siRNA target sequence for 1700061J02Rik (NM_028514.1,253-271).
gatctaatcggaaaaggta

SEQ ID NO: 734952 - DNA, 19 bp, Mus musculus
  siRNA target sequence for 1700061J02Rik (NM_028514.1,295-313).
gcatgtatgatggcttata

SEQ ID NO: 734953 - DNA, 19 bp, Mus musculus
  siRNA target sequence for 1700061J02Rik (NM_028514.1,299-317).
gtatgatggcttatatcta

SEQ ID NO: 734954 - DNA, 19 bp, Mus musculus
  siRNA target sequence for 1700061J02Rik (NM_028514.1,330-348).
gagcgtggactggtaacta

SEQ ID NO: 734955 - DNA, 19 bp, Mus musculus
  siRNA target sequence for 1700061J02Rik (NM_028514.1,332-350).
gcgtggactggtaactaga

SEQ ID NO: 734956 - DNA, 19 bp, Mus musculus
  siRNA target sequence for 1700061J02Rik (NM_028514.1,349-367).
gatgggatgacatggaaaa

SEQ ID NO: 734957 - DNA, 19 bp, Mus musculus
  siRNA target sequence for 1700061J02Rik (NM_028514.1,409-427).
ccaatgaacaaccagtttt

SEQ ID NO: 734958 - DNA, 19 bp, Mus musculus
  siRNA target sequence for 1700061J02Rik (NM_028514.1,505-523).
ctgccttgtatctttgcaa

SEQ ID NO: 734959 - DNA, 19 bp, Mus musculus
  siRNA target sequence for 1700061J02Rik (NM_028514.1,735-753).
gcagtggtggatgatatta

SEQ ID NO: 734960 - DNA, 19 bp, Mus musculus
  siRNA target sequence for 1700061J02Rik (NM_028514.1,736-754).
cagtggtggatgatattaa

SEQ ID NO: 734961 - DNA, 19 bp, Mus musculus
  siRNA target sequence for 1700061J02Rik (NM_028514.1,812-830).
gttcctaagaaaatacaca

SEQ ID NO: 734962 - DNA, 19 bp, Mus musculus
  siRNA target sequence for 1700061J02Rik (NM_028514.1,831-849).
ctgccagatgggaatacta

SEQ ID NO: 734963 - DNA, 19 bp, Mus musculus
  siRNA target sequence for 1700061J02Rik (NM_028514.1,878-896).
gcctgaggttctttttaca

SEQ ID NO: 734964 - DNA, 19 bp, Mus musculus
  siRNA target sequence for 1700061J02Rik (NM_028514.1,895-913).
cacctgaccatctaggtat

SEQ ID NO: 734965 - DNA, 19 bp, Mus musculus
  siRNA target sequence for 1700061J02Rik (NM_028514.1,909-927).
ggtattcatgatttaggaa

SEQ ID NO: 734966 - DNA, 19 bp, Mus musculus
  siRNA target sequence for 1700061J02Rik (NM_028514.1,915-933).
catgatttaggaatctcaa

SEQ ID NO: 734967 - DNA, 19 bp, Mus musculus
  siRNA target sequence for 1700061J02Rik (NM_028514.1,1074-1092).
gagggaacccctatcaaga

SEQ ID NO: 734968 - DNA, 19 bp, Mus musculus
  siRNA target sequence for 1700061J02Rik (NM_028514.1,1077-1095).
ggaacccctatcaagatca

SEQ ID NO: 734969 - DNA, 19 bp, Mus musculus
  siRNA target sequence for 1700061J02Rik (NM_028514.1,1099-1117).
cttcctcagacagatgtta

SEQ ID NO: 734970 - DNA, 19 bp, Mus musculus
  siRNA target sequence for 1700061J02Rik (NM_028514.1,1140-1158).
gtcatgacatccatgacaa

SEQ ID NO: 734971 - DNA, 19 bp, Mus musculus
  siRNA target sequence for 1700061J02Rik (NM_028514.1,1147-1165).
catccatgacaacattcaa

SEQ ID NO: 734972 - DNA, 19 bp, Mus musculus
  siRNA target sequence for 1700048E23Rik (NM_028521.1,489-507).
cagtgacacctggattgta

SEQ ID NO: 734973 - DNA, 19 bp, Mus musculus
  siRNA target sequence for 1700048E23Rik (NM_028521.1,491-509).
gtgacacctggattgtaca

SEQ ID NO: 734974 - DNA, 19 bp, Mus musculus
  siRNA target sequence for 1700048E23Rik (NM_028521.1,508-526).
cagtgtgctccagacaaaa

SEQ ID NO: 734975 - DNA, 19 bp, Mus musculus
  siRNA target sequence for 1700048E23Rik (NM_028521.1,534-552).
cattgagctacaagattct

SEQ ID NO: 734976 - DNA, 19 bp, Mus musculus
  siRNA target sequence for 1700048E23Rik (NM_028521.1,710-728).
gatttgactgcatcatcat

SEQ ID NO: 734977 - DNA, 19 bp, Mus musculus
  siRNA target sequence for 1700048E23Rik (NM_028521.1,723-741).
catcatttcggattcaaat

SEQ ID NO: 734978 - DNA, 19 bp, Mus musculus
  siRNA target sequence for 1700048E23Rik (NM_028521.1,773-791).
ctgcctttcacgatgtctt

SEQ ID NO: 734979 - DNA, 19 bp, Mus musculus
  siRNA target sequence for 1700048E23Rik (NM_028521.1,776-794).
cctttcacgatgtctttga

SEQ ID NO: 734980 - DNA, 19 bp, Mus musculus
  siRNA target sequence for 1700048E23Rik (NM_028521.1,832-850).
ggtcgtctcacagtgaaaa

SEQ ID NO: 734981 - DNA, 19 bp, Mus musculus
  siRNA target sequence for 1700048E23Rik (NM_028521.1,833-851).
gtcgtctcacagtgaaaaa

SEQ ID NO: 734982 - DNA, 19 bp, Mus musculus
  siRNA target sequence for 1700048E23Rik (NM_028521.1,835-853).
cgtctcacagtgaaaaatt

SEQ ID NO: 734983 - DNA, 19 bp, Mus musculus
  siRNA target sequence for 1700048E23Rik (NM_028521.1,869-887).
gcactaggtgcccaaagaa

SEQ ID NO: 734984 - DNA, 19 bp, Mus musculus
  siRNA target sequence for 1700048E23Rik (NM_028521.1,879-897).
cccaaagaatctttgcaaa
